United States Patent Application Publication US 2014/0057251 A1 - sequence listing, part 188

SEQ ID NO: 383881 - DNA, 1550 bp, Cannabis indica
cttgcctttacctttattcttgcaaggattcaaggtttcaacttctgtttgtttgtcaacacgttcttcggccattacttccaccgaaggttcattgtcagactctggaaggtcatcaaacttgttttgaaggcatttcatcatttttttttcatttttgcgtgagcttcctctgttctgctaactctgtctgagtagcctctacctccttggtcacttgcagcaagtttggattgtggtcatagtaataaccatccttgtagtacccatcttttatgttgtcattgccatcatcttcttgtccccaccttcaaggttcatgtcatcattgaggccgttaaatacgttctcagcgtcctccccctagttcttggcgtggatcatgccctcttctttaacactgcctgtctgggggccagaggcgagagagtatgcttcctccgtaatagtttccaatggagtttttttgcttgtattcttttgggtacaaaccatggtcgaagtgatgcagcaacgagtagactttcctcagctctcaatgaaagcaccaaaatatttatcgagatttccaaaaatcgattaattaaagcttaaggaaaatataaaacaataaataatagacaaatagtttttatgtggttcagacgttaataatttctagtccacgagtccgttgtattagccttgccggcgagcattttagtattatatgtgcttataatattaactctgtatctttttatttctcttgaagaagagaaatcttaggaattttggcagaggttttgtaagtaaaattgttcatcctttgcaaattaaaaaaataggaaattttttaggcacatgcatgggtgaggaaatacccttcacccacctaaggtttcgtgttcatcatatttcattagctggcgtttacaacatggcgaactgttggtagatagggaacctcctcatcgtatggtgcacaactgctgtattccaactcataggactaacgacacatgtcgtccaaaggtttcaccttgtaaagttagtgtatatacaagctgttggataaaaaaggagctacagagcatgtatgcgcactaccaaggtctgacacaggggataagatctaatttggtatcaggagatatgcaactgtcgggtttagcacagaatacgtctggctaaggcttttccgaaccaaagtaattcgctaccatcctgagcacatgtgatttctgttcccttccgatagcagtattattaatgagaatcctgaagtcatttctgcctctgctagtagggagagcctctgggtactacaacgccttccgtaaccccaagaaaaggaaggtgtacaataacaatgcgtaatctgacgtggtatcctttcatgattgccacgtacacttcatacgggaacacgaataacactttacatataaaaataaaatatacacttgatctattaaattttaaaatatatttgtatcatctgtattagatttaaaaaatacttttttttttacattaaaatagtaattgtatatatttttaatatatat

SEQ ID NO: 383882 - DNA, 2918 bp, Cannabis indica
agagagagagagacaatgttgagcttgggactattgatgtcgagagaagagctccatcagccggtgacgaggaaagagctccattggccaacgacggagaaaggctgcagcttgcctgagaagaaggagaaaggaagagagagtgtgtgtgaagaagaaagggcgtgggagaagagttgtgttgggaagatagaaagatattagggttttggtacttaattcttaggttaagcaagtttgagttctaagaactcaaacttggctcaacaatggcatactgaggttttgtgctttttggctactgtttttgctggattctattattggatgttgctataggtgttctggaaagtttggcttggtttggacacattttgagcaagatttgagtttgggggaaaccttgtgcaaattggttaaccggtttgacaggtcttgtaaaatcggttaaccggatcaggggcaggtttcccgaattatttgattcgtcgatttgtgttatttttagagtcttggttggttaattccttgatacttagggtattgttatattagttaccaatagcagaacccttagttggaagtttgagtttcctggattaggattttggtgtgttgtttattcatttatgtaatgtgactggggcatccatccagcatgaatttttccgttcaggtctgccgactcttttgacttcaaaaaacgaggtaagaaaatcatcgaacatgttatatatgcgattatgtgtatgtgtgatatatatggatgcttattgtgattcgtacactaccaacactagtacggtagcggtactgaatgcattggtatagtgtacgatgtgtaaagagtatagtacggggttaccacactagtacaggtaggtacagagtgtatatggtataacactcagtggtactcgaggtacaggacaaaccctaccaacactcgtacggtagcggtacgtagtgcatgtggtatagtggtcgtaccttagtaaagaacattcttacttatctgataagccttgtgggtaggtgtatgggtgcctagatacaagtcgataatatattatttgttatatgttttcttactgagtttcttgactcacagttgctactttcatgtgtaggtaaaggtaaggtgaaggctgaacaggagtgagctctgagcttagttggtgattgtacatgtcaggacagggcgacttggagtgttcggtctcgagacatcttggatagtattttgtagtcgctatacgacatgtttgtaaaaatattttggctgtgtttgtaaaagtttaaacttaagattccggttatgtaaatatatatatgtttataatgtttaataattccaatcaaaattttaatttggcataatttttgaagaaagatccttgattagcacggtattatattaattagaaaatcactgtagcatgcctaagtatcatggtatcacacttttgcaagtgcaagttgtttttcttgatgaggaatttgatttctcatttcagattattgcactcgttagtatcatgaccgtaatctgcatggaaacgacagtatttggtggtatctctcttgctcatatctttcttcatgggagaaggtcttttgtacgacaccatagactggtttccattatttgaccttttaccactttgacccaaactgttattattttgagaattatgattctgttggatggatgtattgacgacagtggtgtgtggatggctctttttctgacctactgtgtctacacaccgaaccgcttcttaaagctttataaatctgtatgcttggtctaagaactctcccatttatcctatagtaagccttttaatgtcttttcataattctcccaaaggttcaattcctcctatgatggtggctagcctcacttcttttgttagccctttcacctttgtggccttagtcataaatatgttaatatagtccctcgaaggttatgttggtatttgttttacttcgaccaggtcttctaagtgagaagggagttgcgtagaagaggagaaatgtgcgtgtaactatgccatgaaagaattccatgaattcaactttccaagagctaacttgaaataccactgttgggcagcctccgccaaggtagcaagaaaggttctacgccgtacatcacccttcactgcctgcaagtccatttccatttcaaagtacttgatgtgggaaagagaatcttccttgcccgtgtacattttccatgttggcattttgaactttggcgtcagattgagggaattaatttttggtgaaaaaggtgatcccctagtttggtcatattcttagtctatgagttttgggtagttaggctttgtaaaaggctcttaatctatttgggcttgcaccactcgatcaacttgacttacctgttgaccgacttgtgtcacttatggatcccctagagcattaccaagcacataattttccacattgattgtctgaacattgggagagatgtattgtctatcgtttccccttctgtaattcaaattattactcaaatcatgcatggggcccaatgtgctagagactaattcacctagaggtctccttgctcggtagttatcagcagttgactggtttggtatatccgtctgaggacagatgttatactgactattcccccgagataatgagcttgtaatatttgctcatctaccgtgtggcccacaatttgactctgtgaccttggattggacagccgatttccttggatttgttgagtgttactagccagatgttcttctggcccgtactgtggttcgttagggatattgtgttggaattattttacagagaaggtagagagagagagagtggcggcttgaagagtttttgtgtgagagaaaattctgtcaaaaagtgttacaaaa

SEQ ID NO: 383883 - DNA, 771 bp, Cannabis indica
tgtattattattaattaatttaaaatatggtacaaatattaaatacttggaaaacgtgtactcatagtgtaaattgacttaactcaatcatagtaataattagtattaaaacaaattaattaattaaaaaaaattttaaaaaaataaataaaaaagagtaataataatgctttgggcaaaactatttaagcaaattagcatttttgaaagcttcaactaccacgtgaacatgaattatgtggggtcaaaggtacaatttaattgtggctttgggttaagacatattagacttagggtatgtttggttgagagaaaaatgattgaaaataaggttagttctgaattgaaatgagtcttagaaaaaaaaattagacttttattataagaataaatgatatttttttttttatttggactctcaaaatgaatgagttttaagtcagggcctaaactgtcttagcttagagtcgtcgttaagaggatgaaaagtgtaatgaaatgatgaggataataactttcttctatgttgtttggtattgagaggaaagaagtctagagataaatataaaatataaatataaaattactatattattagttataaaatatatattaattgaagggtaattatgtaaattcatttatatattagtttattgttaatcctctcacttttatgacatgtttactaataagtaatgggaatcaatagtaaggtaatcattaccttacatttgttttcttacattattaaaattaggaaagggagaa

SEQ ID NO: 383884 - DNA, 2541 bp, Cannabis indica
agagagagagagagagagtcaatattttgaatttaagatgctcgaaaaaaaaagtaaaagttacagacttcactttttctttttgctatgaagtattactacttaactagttttcttaaaatttagacttatatgcttctgggttttggcagtaaacacccaattgtcaaattttgaatttgaattttatttgaaaaattgtacagagcttgaaatgatgaaggaaaggtttgcaaaattgttgcttggagaagatatgtcaggttctggaaagggagtttgcacatctttggccatttcaaatgccattacaaatctatgtggtaatttctctctctggttttatggaattttaatctggaatagggagctgtatatggttgagtttttaagttttcctgtttcttaaactgatatcttatctttaaaaatgcaaagctactgtttttgggcaactgtggagattggaacctttagcctctgagaagaaagtaatgtggcgaagagagatggaatggcttctttgcgttagtgatcaaattgttgaattaattcccacttggcaaacatttcctgacggaagtaaacttgaggtgattttcttatgatcaacatatattttgcttataaggaaatacaatatttcagtttcgggcttaatagtatcgaaaattcaaatttgcctttcttaagagcaaagttgccactttttattttgttggtaattatgaccttgttgaaatttgaattcttggacaatgatttcaaaaataacttctctttttacattttgtaggtgatgacttgcaggcctagatcagatatgtttatgaatctgcctgctttacgcaaattagataacatgctccttgtaagttctaaaatctagccttagaaggattttgttgttttaaattggaaaaaagattctgaaccagtgaggccttaatacaggaaatactagacagtttcatcgatacagagttttggtatgttgatcaaggagtaacagccccagatgctgatggatctgcctctttccacaaaacacttcagcggcaagaagagaagtggtggctccctgttcctcgggtccccgctggtggcctgagtgaaaattccagaaaacagttgaatcacactcgggaatgcaccaatcaaatattgaaagcagccatggcgatcaacagcattactttaaccgaaatggaagttccagagtcatacttggaagctctaccaaaggtgagaaagttagctggaattagctcttcatttcagggtctttcaatttgtttcttctgagaaatgaagagcttaaattctgttgttatgtttacagaatggtagagcttgccttggggacatcatctataggtatattacatcagatcaattctcttcagaatgcttgcttgattgccttgatctgtcctctgaacatgttgctctggaggttgccaaccgtgttgaggcatcaatatatgtttggcgtcgaagagctcattcgaaacctccaattcatccgagccgctccactacaaagtcatcttggggtatgatgaaggaccttatgattgatggagacaagagggaattgctggcagaaagagctgaaagccttctgctttgtttgaagcaacggttcccttctctcacccaaactaccttagacactagcaaaatccagtacaacaaggttattatcttttcctgaaaatccacctttgaaaaacatattctggattttgtttcatgtacttatttatgatcacttgtataacaggatgtgggaaagtcaatacttgaaagctactcaagagttttggagagcctagccttcaatattgtggctcgtatcgatgatctgctctatgtggatgacttgaataaacagtctgataaagttccatcagcttctaaagtcagtgtgataactcacaagaaggtgtcaatctcttatccagtgcctgcctcaagcactccatataaatcagcttctaccactccaaacttttcaccagcgccgcttattagccctgccaggggagaaagaactccttttctccacagcaacagtactaacaacaacaacaacagtaacaagcctggtcgtcgtggtttcggagtaagaagagttttgacaaattatcttggtgttgagacgaaaccgaggatttgtggcaattcaactgaaggaacagctccagttccaagcagttgtggcaaagaaaatattaatcgtcggacagactcatcggctcagcaaaatggaactaaattacttaaaaatagtcgttaaattcttgtttgtttatgatttgggagtgtgatagctatactgatagaaaaacctctgtaatttaatggatttgttgagtttctaattcatatattgtacgcatctgaatgtagctaaaagtagagtgcagacatttgattgcttgttacaaattctttgcaaatatcatcttataacttattttgtcatcttcagcctgttcctttaccgtattcattagaataaaagaaaaaggaaaa

SEQ ID NO: 383885 - DNA, 1227 bp, Cannabis indica
gataacttttgcaaaatacatagggtcgaaaagtatatttacccatatttaaatttgtctcatgcactatattacttacatagagagagatctagataaagacttgtgctcttacttattaaggccacaatcaactcaaaggacaggtctctcttctccgacgtaatatgcaatagtatacatactaaagatacttctacacgggcataaatcaaatttgagaactatttcttatttaaaagaattatttattttttgttaattatttattttgtattactgcaagaatttataattttatggtacataatatacttttgcctataaccgatttgggcgacttactatctcatctatttttatgaatctcttttctaacgaccgtgaggtctaattttcattttgaatgaatgttttattcaagaaaaaagaaaagaaaatagatacttctataatgtaatctctaaaaaaggttaattgatgtacttttatctattttggcatgtgagaggattttttaattcaattttttcacgattgtctatattgtaattatttaaagcattcggttaaattttagaaaattcaaaaaaatttaacacgctgaaaatatggttcaaataacctgttatacgcgagattcttttattttataaacttgtaaaataaactgtttaaactctttattcggtgtattaaagttttctaatttactcaatattttacagaatgttctaaataatttcaacgaagacgattatgaaaaatattagactgaaaaattgttctaaatatcgaaacaaatacatcagtggacccttttagattgttgaattattcattactatattacatcagtttttttaaaacactaattattagatttaaataaatataatggctattgctatattattttattttcttttttgaaagagtttctctgtctgttaatcactatcattatactatagaacacaaagtgtaactggttggctacgtatcagcaatagtaggcaaccaaaccaaaccaattgaaaaaattatctatgtgctggaaatcttaaacaattgctggtacgtagtggaatacagcttgtacctaatagtacaatatgttgtattttattctattattaaaataatactagtgaaaataacatgtgctacccacgtggaacaaaatatttatgaaaaaaatacaattggtattcaatactactacaa

SEQ ID NO: 383886 - DNA, 3287 bp, Cannabis indica
ttttaaaaaaaatctatcaaattcatattaagcgaattttgtttgacctattataattttttgcgactcatttttcaattcccgtctaatttttacaatcctaaccaataaaattcgtataaagttgacatgttatatccaccagcaatcatttctcaagggaatataacaaattaaaaaatatggtgaaaatttcatataaaatttgcagcattagtactaattaaattattacttatgtagtttctttttttttttttgagtaaatattacttatgtagtttaattagttacactttaatacttatgtaataccgaccattatttatttggtgcaaacgtgaccaatgacctatgtggcggacagttataaggcttggctcaaattagagagacattgaccaaagtctagatgtcgtgatcaagacctttgccatgactggagtacaaattagaatgaaaagaaataaaaatataacaaagtagaatgaaaagaaagaaagaagaaagaaagaaataaaagtccaacatagaatcatcccagatcgatttattttgttaagaatttcattatcttatattagtttcattagggaaaagaattaattaatactagaatccatccatttaacactctagttttctaatgcctaaaacattgcccttcattaatagcatctcaccttgcccacacttaataataagccatcttcgaaaggattgaactgcaaaaaaaaaggtgaaatataaccaaaagccaattacaggttaacaagtgagcataacacaataatttcaatggttcaatgttcttccttcccaaacattttaccacatccttttttttattactttttttttcccttttttccttcatggtgacaaaagactaatacaagtccctggctagccggtaacatttccatctacatcagcagcacaaatgaggtcaataaaaataaggggaagcggggaagaagaccaacaaatttccggagggaatgaaatcctctcaaatttacaggcctctttccttttgcctgatattctaaaaaaccaggaaacgaagcaaagaggccaatccaattgtatattcaatgagaaatgagatcaaagtcaccgagcaaagcactggattctctaacgaacagttgggtaggatcatgaatgaatgattagcagaaaccaagtttgcagcccaaaaccacagcaacagcgtcaaccccttttatgatttcccgccattgttttgacctaagcaagcaagaacctgaaaatatcactcagtgaaacaatgccttcaactcgcttgcttccagcctccacaataacaagtcgtctaacacctgaacacatgcaagagaaaggttaccataatattggataagtaaaatcaatacttagtgtcaacatttttaaatggattgtaacacgtctttcaacatcataacctttaatgactagatatttcgtccataacacgaaaaactgcacaaaatttagcttatgaatattgcccagggtatcaaacgtaaagccaacgcagagaaaaccagaaggctccacaaagtttggtaacccatgctctagattttctttttttggttagcacagtatattatgtacatttctttaagtaataaatggacatcccagattcgactataagttcaaggcaggagaaaaaaccctgtcccaggtaaaggagatagcaaaatttccattaatgtacacagactactgacaataatgcttccagtgtccagtccagtcgacgaatttacggaaatatgcaaacaaaatgatgactaattctcctccattggcagtaaagctaccatgatcaaatttctgcccagatgacatatttaagaaagcacaaaaggaaaaaggataactaatttacctggatttgccaaccgctccatcactttatgcagtgaatcagaacgtaagcacatctgacatctctgacttctaggttcataaggagcgtatgcatcttgtcccaactgcagtgcctacagagtgccacaaatgtaaatttctttcttttgcagttgaactgtattgttattatttctaagtcaccccagaaagaaaacatgcctttgcagtcaatatttatccttcacaccacagttcatgccttttcttgtcttaaaatttgacattaagtctcaataaaattccataaaattgactttaacaactagttctactaatcgataaaacaaattttatgggtaaatcagaataaattaatggagaaatgtaacagaataaatggaaaaaaatcagaatcttttgaaagatgttgtttactaaaattatatagaagcggaatcataatgattttaccttgcttactttattgaaaaccaaaactggaataattaaattgaccaaattgccctttttgattaagatataacataacgtagttattttgtaagataaagttcaaataacaaaattgtcatttaatatattaaaaaaaataataaatagaaggcgttactcttagtgacattccttaaaaaattgtacagaaaagtatcccctttcttttactccttaaccaagttttcccattctttattttagtaaacaatagaataggaattattaccatacttatgatcccctttccaagtaagtaaacatgccattaaatatgaaaagttaaaactattataagttacaaaacttacctgatgaattgtcatttcattgagattaatatgcgtgtaagccctatctttagccaaagctgtaatatcactgtaagtaacaattgaaacataaaaaacacagtaaattaatacagtacaaagaaaaactaaatatcataatcaaagtatcacaacacaaattatcaaaagaaaaaaaggtatcacaacacaaactttttttttaggactaccgacatagtttgtaatcaaagaagcaatatttaggtattgaactttaataactgacctccgacaatatatatccagcaaggagtcgttatcatcaactataggtattgaacttacttgagctgccaaaaaagaaaaaaaaaagagtagggtaagagtgttagcaaaatgaaaacatagtggcataattacttcaacattggacaagtatacattttcccaccaatatcatctgcttgttacctttcaattaataaattataattattaagtatgtgtaagcaaaatctatcataaggcattattgtcatacacatgaacttaaatggatcacagcttcgcactttattattattattatta

SEQ ID NO: 383887 - DNA, 714 bp, Cannabis indica
acacaataatatcaatatttaattttctttaaataaacaaattaaattaaataatattttaacaattaatttgctaaaaaatgactttaactaaacttgagacaactatatgattgttaggatggttttttgttagtttgagacagcaaacacagcttgctaagcttatatatgtcatttttttttggctaaatcaatgtagaaactaatctttctcttccaaattcttttcttttcctttttcaaagttttttcttatttcttacaaatctttcatacatcttcaaattgttagtccttaaagtattaaataataaaggtaaatggatctgtggtattgaggtagtatataaaacaatgtacggaaagggttgacgaggaaatcatttggttaagtgagctttaggtttagttcttgggagagaactgagcctcttaaataccaaataaatttgttcttttatcattctaatatcaatatagttggtttagctttattttgctactattactagtactattcaccaaaatgataagaaattcttattagactttcaacagtactcatatatataaatatatgagaaattcacgtgtgagtttttatttagggtaaatactattttggaccctctgttttgcaaaaattaccaatcggactctgtattttgttaaatgacaaaattgaccctgtattttctaaaatagtacaaa

SEQ ID NO: 383888 - DNA, 872 bp, Cannabis indica
taaaaaaaaaagtaaaaataagtaacgtaactaaactaatacgcaccagaccagacaaataatattttattgtacaactattttgataattgggacagccaaacacaaagattctcattgcttttgttttaccaattattgaaaccttgctattgattctgacacttttagcaaataaatcattccgcaaattgactgacaatcctggtactctgaatgtgataaagagaggcaactgtttccaaatgataagcctcctatttagttcacataggaagctctagactattatcatgttacttatattttctttgtatttcttatggcaaggattagtttgaggtttttgctttctattatcaacaaggcagtgggattggagagactgttgatctattagtgcagtgtgtgtgagctaaggaaattattctggaatattgtaattgagaactgctcttggatagttttctagcctcttgaatggtatatttgttttgtccagattcaatacaaagtaatcagaggttaattcatttactgttgtgtatatcatctaacagattaaggggaagaagaaaacataactcacccgaagagcttgagatgcagtatcgactattttaacagaatcatccagcagatacttctttaaaagttttagaagtgtaaccatgagaccttcagacatgccagtatccataggaaaacctacttctggcgaaaagttatgattagtagtagttctgcaggaatggagctccccatagcttgcaggtagatggaagacaacagaatatgggtcaccaataccagcctgaactcgagttgaagaacaagagagcatgtcttaaaaaatatggaagtacaataat

SEQ ID NO: 383889 - DNA, 1432 bp, Cannabis indica
gccttagcattacggcgttacatacataacgtttgtctgagcatattgtttttgttgagaaagattttactacaataaaaatatagataattctccattttatttttagaagggaatatacttaaagtcaataaaacacaaggaattcaatataaaagttatactaaaatttacggatgcattaataaatggaatacaactaaaaaaataattaagaaaaggaattaattaataccataaacaaaattaaaaaatgaataggagaagaaagaagaaagaaaagcttattgagatcgtcattagagagaacaccacaaagggggtacaaactcctacatgagatatgtgcttgtatatttttattcatggcttctcataatcaaaaagttatagtattatatgtattcttttctaattacttttttggtattattctattcattatcatttttatttatatttattacttatttaaattaattataattattattaattacatgttgttataaattgttgaccgaggtttttggcaaccagttaaataatatataagaaaatctgtaggaagttcaatgcatgagatttttacgtggttgggacattaatgagccttagtccacgagtctgtgttattaatgagagtatttattacagagaatgttcttggtgaatttctctcctattttctctctttgattcttttgaacccagaatcctcgacccttttttcagtatgtttgtggggtatttatagtgtttttttggggtgatccctaggaatggatcacttgtctttctatgttagcttcatacgggcacttattcccagcagatacaaaataggaaatacatgacctataccgtaggtatcttaagagttaggtggatataatgttttatctcctcttgattgatgtgattcctcataaagtagtcgtcactagccttatcgatcatagtttaatagctaaaatagggggtgttacgccatctgtcatgtcgtttatggagactccaatacgtcttcccccatgcggcattaaatgtgaggtgattgttcaagagattccagtacctcccggaactgccttagcacatctttggcctccgggaccataaagatactctttgtgtctcctccgggagacacctttcctgagtcactcttccctcgtataagacttagctaatttccacaaaagctagtcttttcgattccacgtgtcatctttatccaagtccacgtattttgggcaaaatcaaggacaacatttaccccccaagccttgtttagtggagaatgaacgaggcttgcttgttgcctccgggtagctcatcgatttaatggcacatgcttcaagcacgtgggctgcatttatgatggccatcattattatttatttctttttgcaggcaacgattcacttcc

SEQ ID NO: 383890 - DNA, 2740 bp, Cannabis indica
agagtaagtcctaagctagaaagctcaagcatataacaaagagaataaagcgaactagattgggagtactaaacaatgaaaatgtgaaaagctagagcaggaacattaaaataaacttcaatatggattaaaagaatatcaaaggtaacaacaatacttcccactatagctttcagttttctaaagagtaaacccaaccatagttttttgttccttcctatctctattcttgggttctcacgtattaattaagcatttagattttttatattgagaaacgtataaataataaagtataactcaaacttgaactgaatattgcaacctaaacctaatagaaaagcttaccagagcattaccagagtcccaacaaggatgaacctcccattgggtgagaacatgacaaatgaaacaaggggggttttcatcatcgattagagtcttcatgcaatgcccagtcgaagcatcccaaatcatacaaagcccatcgtagctgctgtaaacaatgagggacccatcacgcctgaaatcaacggcggtagcggggtcagagtgggcaggcaagaccatcaagcacttcccggtcttgcatcccatagaacatcttttcacccttcttgggcatcaatcaaaacagcatatgcttagaacatcttttctttttctaattatgggttgagaaatgcacatgaacctgttaagataagatggtgtggctcactcactcatgtctacttcaaccaccgactccatccacaacttttcctaatgtcgtttttctgcatcaattttctaacctctgctacttctgcccataaaccagctcttgcatataaatgagccaatgtgacaataggtgcagcattaaatggttccatctcaatgagcactttggcagcctctctccctaattctacttcgacatataccttacaaaaacccaagaaggaactccacattacataatttggactataaggcatttcctccattaactcctttgccttcctcagatgcccatttcttgcatacaggtcaaccaagcaagcatattgatcaagttcagggacgagcccataatccttgatcatcatgttgaagtaatctactcccctttcaagaaaacctacatgattgcaggcagtcaaaatagctgtaaaacatatatggtctggcttgatcccttcttcagccaccaaatgatcaaagagttcaagtgcttctgacccctgaccgctatgagcatatcccatgatcaatgaagtccataatactgtatttttttcaagtgtttgatcaaatacgcaacgagcttcatcaatgttgccacactttgaatacatatctatcaaagcactggctacaaaaacattgctttttgagcccattttagtgaccaaagagtgcacttgttttccttcttggagtactgcgagactcccacaagcattaagaacactcgttaaagtatgatcatttggactcaaactcatgttcctcatttccatgaacacctttagagcctcttcaccatataaattttgtgcataactagaaatcatggaactgagtagaacactatctttctctgttatctcatcaaatacagactttgcttgatccatttctccccattttgaataacaatcaatcaacgagctggccacacaattattatcactaaaacaaagtttgataacatgtgagtggagcaaagagccttgttgaagcccctcctttaactttgtacatgcacttataacaccaacataggtaaaactattgggtttgatttgtgaactaagcatctctttaaacctccacatggcttctctttcatggccgttctttgataacccagaaattattgatgtccatgacacttgatcatgttgcttcatactgcaaaagacccttcttgcgtcgaaaatggcatcacattttgcatacaaatcgataagagcagtgttgagaaagacattatgttcatatcccatttgaataataagggcatgaatttggagacccaagcgctggttgagagtcttggaacaagtattcagtgctgaacatagtgagtacttcgtgggcatcgttcttaggcagttcttcttgccattaacatatgttttcagaagcagaagcagaagattgagcctaatctggtttggaaaattcgtcgaacagttgatatgcagctaataaaacagcctcatcctgatgatgaattggggaaaggtaaccttttttttattgataatcaagtacttgctaccccatccaatgtgctgtggtcaatagttctaatgcaattattgatcgacgatcagccaacttagaaccatccatttcgtcttttgattatagtcagtctcataaggtaataaattaatataattatttcttattatatgatgattacttgattagggttggtgtccagtgtcctagatatattgttcacgttttgtttaacctttggaaattaatgacctaaaattaaatattattgtttttcttaaactaaattaagttttacaaaagtattattttattcgggcttttttaattttacacttcaaaatagttttttttttttttgacaatttttgcatttttgcgaaattctacatagaaatccctattgcaactagcactgcaatctaaattgcaacaaaaaatcgtatagaaactcctagtgcaactaacactgcaaccactttagaaactcaaaccgtaa

SEQ ID NO: 383891 - DNA, 492 bp, Cannabis indica
tcaaagggacttttttgagatatattatccatcatatatattatatgcaaaacttttgggtcctctctttttatctaatttgctagtaatgaggtcacatgtgatgttgttttttttcttacaataaggtagatgttaataataaaaagaaaccctctcatttgcaacttgcataattctcatctctaatcccatttatatatttatatttgtatatatttaaagttaactttattattattgtgggaggaaaataaacaacatcaaaaattgcaaataataaatgtactcacaacatcaaatttgtgggttcaagtataaggtgtgggagagaaagactttctctacacatatttttgatgtcacactataatgctcatttctctctattttcatgctttctttttatttatatcttacgcgtaggggtgttcattggatcacatccaatttttttaggcccatccagatccgatccaattatatattgga

SEQ ID NO: 383892 - DNA, 2687 bp, Cannabis indica
agatatttcatcaaggtagttgaaagattctctcatttagttaatgatatttatttaaataataaatttgaataaaatatctataacaaaatcctttatgatatttatttaaataatattaatataattaattattattttataaattaaatatctaatactatttaaaccaaaattatttattaattgggtaaaaaatttatgcatttatttttacggctattgttcctgttggataaacctccacttaatactgatatttttttcattaagtcgttacaaggaaatacttatacaaaattactacagtggctttaggccttattacaagctcaatccctaacaaaaattagtaagaatggatcgtgacaggtcatcgatcctacacctaactaatttatgtaactaactaagaaaagaaagaacctaatactatatatacttgcacttcagtctccttcagcttggattgagtagaatcttcaagatccaggagcaaagatcttaggagaaggaggagagagactcgtatatgcacaagaaaataagattgagttagtaaacggagagaaagagagagattaaacacaatacttgtaataaatcaagagattaccagtcaaaatcatagctgtgacttggaatctcatcattgtaactctgattagttgattgacagtggaatcgagctaccaaatctgaggaccagcttaacagggacgtagcccatttttgggtgaacctcaggagaaatctcaaatcttttctttacctttctcattctatttttctttttgatattttgtgggagagatcagatcaatctagatctgattttgtgcatgtgtgtgatttgtgtttctagcaagactaggggtcgagcattgagtttcttcgaagaagaaactctctgctagggtttctttgtgaagctagaacctaagtcaaattgatcaagaaggttattgttttttagggttttgttttaaggcaaaacgaggtcgtattgactttgttgactggttaaaagtcaaaggaggtaaaggaatttataatttttttgatttacaaagagatagtaaggaatcttgataggtttcaagatgtgttcttctacatatcttatacattttataatttattgtctacattttatgttgagaccttgcttcagtatcaattcttttaaaattaatcttctactgctactctaatttactcctaaaatatcaacaaatagaggatcgccttaccataagcttcaactccggattataatccctttgacactaccattgaggagaatcaagaattggacagattgaacacatcacgagattttttccacccatatttcactgtaacccatcttcagtaattcacattctataagattccactcaatcacgtgatgtttttaccatgtttagctttagggccatttttttttgaaccactttcaattttttttttctttcacactgcaacccctcatagttaataatagtattacattataaaaaaagttaacttagtgacaattttttaatcataacataaatatttgtaactaaatgttacttttagtacaataaaaaattatttgtaactaaaagataacttttagatataagttatcactaatttaattttagtcacaataagtattgcgactaaaaatatatttagtgacagtaaattataatttttgtgactaatacttttagctataaattttttagtcacaacataaaaatgataatttatgattagtcataatcttttttacttttaatcatgaattttgttgtgactaaaaatatattttttttgtagtattatcataaattagatggaaacaaaggcaaattaagattgagaaattttatcacccacagaaagtcgatcttattcaagtatttgaaaactattttatagttcacattataagctgatgggttagaaattctcaaatcttataaggggttttgaatttaaattcatgtatctactttcatacttgtaaatacaaatgctttgcgtatatttaaaaaagttgtctcacattcataaatctgttgttaatcaaataaaataaaattagaacaagttgcaagagaacaataataattaatgtaatcctcaaaaaagaaaataaattttaaagaaatgcacgtgcgatcctaaatcccaataatacccaattgaattgaccactgtgcattaattaaaagctttatgttttaaaatcttaaacattaagaatataaaatcctatcctcattatgccttttgtctattattgattgttgacttagtgatgatgaaaatgtcaaataagttcttcaacattaaagagaaagtcaaaggcgaatcttcaaaatttattttagctttagcggagtggccattatataaaccaaattggaaatattgttgttttattactttaaagaatattgatttttagagttttttttttttttttaattcgttaaatcctcttaattattactttataacttacatttaatcctttaagtttaaattttaacagtaaaattctccaaactacttaactgtttgtaaatttaagttgtcattcactttctacagttaactagcaatataaaccgtttatgtgtatacttttatacacatgacacatttatattaatacacataat

SEQ ID NO: 383893 - DNA, 1098 bp, Cannabis indica
attcaataaaaaaaattaatagtcataaataatattcaagagttataatttactacatatcaaaatatagaacaaaaattttaattcacctttatttttcaatatcacctttgtatagagatagtaataatataatagacgaccattaaaagttggtgttggatctcctatatatatatatactgtgctgtatactttgagaatcgtcttccttcattctttttatgatttacttttctcaattcctttttttaacaagcagaatcatgtgcaatgatacagctcattgtgtttttcaatctattttacctgttaaaccctagtaattaatgtataccaataaaagaaatttcaccaactgtggtaaatttttatcatcttaaaaaagtaacatttgttacctttctaaaaaaacaaaaatggtaatatttcttttatctattacatcatatatctatgttgagaaggtgggagggcagagctattgatcttttttgtagtgttagattcacatactatacttgtatacttatgctaccatcttaaaaagttaaaatcttggtcattttacatttactcatttgagaaatgagtagatttttataaagaaatgctaaaagtggtacattctccatgttatactgttattgagttattgatatatttaagtattgagtattatataatttaagaaaattatttttagagaatatcgttaaccaattgtaagacattaattataaaaggtgttagacactattaatgcttaataacaatactcatttatatatagaagagattttaattaaccataatagttacatttacttttgattttttgctatttgatgaatgagttgtaattaatattataatatttttatttatgaaataaaataaaggaattaatattgagataaatgaatattttatattcattaaatttggacaatattaattgggtgatattctatgtatagttagatttcgatattcattacttcatttgattttctaaattaattgtcaaattatcctgataattaatgtgacgcacatattgatagagtatctcacctataaatatagggtctcggt

SEQ ID NO: 383894 - DNA, 2060 bp, Cannabis indica
tcagtctacttttttcatattgctcctcattttctctgcatcgacttttcatttctggttcaaatgagataaaattattcaacaccatgtaattcttttataaattctatgtatttagcaaaaatgtttgtaagtgtgcaatcaaataagaatcacattgtatgaatcgtgcaacttttgaaaatgaggacaaccataatattggtggtactggccataaggtaacagtttttatgtattatgtatgtataactttttttaaaaaaatttaatgactgcattacctggaacaatatactattcattttgtataattatgtgatcaaaaaacaaaactgtaaaaaccaaacaaagtgctgtgaaaatatatgcatgtgtttgtatattagataatctctaatattcaagtattcgctatctcacatataacaatttacaagaatggaaaaagtaattatttggcaattgtttgtttacgtcacacacctcttcttgaagctggattatgagccttttggcctcacttaattaagacatttaatgctgttggttgttcttgaggtcattgtacttattttaagcaaattttcatgtgattatgagcctgttggttggttgtttctaaatacaatataaaaagctaagttttgaattgaattattattaagagaggaaaggtaaataagtaaattctggctgtttagtttagtctattagcgttgatattcatgatcaaatattctgccttaaaagtcaaaaatgaactggttgtgaatcactgttcgatctaatttatcttcagagtgcttatcatttattattataatatcaggaaaaatggttagaggttttgggatgtggggttacagagaaagaaatattgcaaagaagtgggaaaacagataacgttgcctgggcttttgggcttggattagagcggctagcaatggttttatttgatataccagatatacgcctgttttggtcagttgatgaaaggtttacttctcaggtaatcatgaatgttttatttatatttattgttaatatatatatgatatatcatatcttaatgcagttacattgtggaaaagaataagatcattgttgtgtgaactactaatgttaatgatattctaatatagtaattttggcatacagttttcgtctggccagctgggtgttaaattcaagccattttccaaggtattatctgaagcattcacccatcttttgaaatgttattttacaattttgaatggcataaatctgcttgcaaaatattaatttaccattcttttcattttgcagtatcctccatgttacaaagatattagtttttggattgatgaatcgttcacggagaacaatttatgtgaagttgttagagaaattgctggagatcttgttgaggaggtaattctggttgtgttaaagtttttaaagttgtccccctcctctcttgtcttgttgtttctttcttctcagtatgaactactgaagcagaagtgcattttttgttccaaaataatcctatctccttggagtacacatgcacaacattggtctggagcataagacattcgacctttgtctctttttcaaaagtaacaataatattatataactataacactaaggatcatcttgataaataatgcaaaggaaactttgctttttaagtttttactattgttttgtaaaaatgagttctcttctttctaaaacaaaaacctactgggagtccaaataatgctttctatccttcgaggaataagagccaaatgagaagtagtcaagtgaaattatgaggaatgtacagaggtaaaacagtttagctcaccgaagaaagacaagcaacacatgactcaagactaaaaaaactctcttggtatctagggaaaagaatttggcattgttcctacaagactaatttccatatccacaatccatatgtacgcacacataatacctaaaatcttctctactttggatttatttgatctttccataacccccccaagagccaattgcatgaaaattcataaattcttgaaaaa

SEQ ID NO: 383895 - DNA, 1719 bp, Cannabis indica
aaaaaaaaataacaaaaatacaatgtgatacagtttatacagtttacactattatcattattagacattattataaaaattccaaaatctataaactatttagatctgttaaggaggtagctcacaccttagctaaataccctattttgttgtattgctatggtggtttgattaccttttatgtattagagatttgattttggctgagttcttaataaataaatttcagtccccaatcccattagagcttatagtgttctagaataggtggtgtattttgggggtttttattaaaaaaaaaaaaactatataaatcattaataatatgaacagagatagaatagtctcataggtgaatgcaatgtataattaacaataataataataataaaaagtaaaccatatatatattgcttccactcgtaactaataactgtaattttggtactatgattaatatatatcattataactctaagttatatatggaagaatattctatatatgtgcaagttggttactaagtcattaagatcataccagctatactacttaaaaataagataaaaatattcactgttaaaggaaaagattccatgagtgccctttttttctgtctaaataacatatatagcagaaacaagatgcctttgtctataaggaacaacaattttgtccactgcacttgcctttggaaaatagtaaacaatgccaataatggccctacttttatatcaaacatatatttaaatatttttatgtatataatcaaatgagatcataccctattgaatcaaataatgtttgggtatagtaattggcccactttgttaattggactgatcatttggtaaaatatcaaatgatggtttttgtttggcggattgttaaacggtcttttggagtcttaaaaggatataattagttaacatatatatgagcatgatgggactcaatgggacaatactcacatcttatcagattaatgaaaaaattacttataaggcaacaaattattaatcaaatataaatttatattattaaatgaggagtatgtctcaagtatctcacacatgataatatgatatgccaacacatacccaaagcttattaaataccaatctttcttatcatatgagattttggtgattttaagctgtaatggatttagggttttcataaggacatgctaaaagattttttaaagctccagctttatgttgttctagtactactgtggtttaactatatatggtaataaattaaaaacgttgaaaaagctataataaataaggtcttaactctacaagctaatagtagtagtgtagtactgtcatatatatcactataatgtgattaaacatgtaaagagaaaagtatacgtacgtactaaattatatagtggtatataggcaatggccactgtctatgtgatttggagattggggagtgggatcttcataaattatataggttatgatcatgacacacagtaggaattaggactcaacattttggtcgggtttcacctaactcgcagaacccgactatgttggaaaactcgtttcttgtgggcgggtcgagtccaacccgaacactttcatcaggcgggttcgagtttagtttttgcacatgtttgggtttggatcaaacctggactcgctcaccaacacacatttttttttttgtcattttacaattttgtatacattattttaa

SEQ ID NO: 383896 - DNA, 1161 bp, Cannabis indica
tatgacactaaaaaaaatactaaaaattaattatatatttcaacaattatctttatattcacataaagcaaccaaaaaaaaaaaaactcatagaagattaaaaatgagtagatattatatttataggactctatattttattataaaagacaagatagtattagggtaaatcattaaatagaaattaaaagtgggactcactaataactaataatgtctcatataaatatcttgtagagagtttggaccacatctactctaatactccaaacaattaattaagaaaaccacatcctcaccactgccgttttgttttagaatttttatcttattagtcccaggattactgctaataataaaattgggaaagcaaaaattgtcacgaaaagtggataggaatgagccaaaaagacttgaatataattaagggattatttcacaaaaacataaaaaataataaaaaaaaattacaaaaatacagtttcatggaatatttaatatttttacgattttttttatttacaaaaaatacggtccttttatgttgtaatcttattaatttgttattaattttttattatatgtatgttattttttgttgttatttttatgttacttttatgtaattttttttgttgattttatatttttttcgtgttatcttttggaaaaccataaaaatattaaaaaaattcttttaatataaaaatataattaatttacaaaaagtggtgcgttatttaatttttcctacaattaaagtatgccaaattacattttctatgggtttttcttttatgatttattattctctaatatttatttttgacacctaacctagaagtgatagaagaaataaatttctggttggtatatggcagggccggctcaccaagcccagaggcccaaaagataatattattatatttttcaggtttttttcaaactactatttctttgagcaaaaactcattttttagggcccaaatgagttatctataatttgatttgaagcagtctaattgtgatatcgaaggtaaattaccacttaagggttctttcaaaaaaaaaaaaaaaacaaaaaaaccagaagaagaagaagaaaaatttctggcatttggtgggccttagaataaaaaatattggggtaagttgaaaaat

SEQ ID NO: 383897 - DNA, 907 bp, Cannabis indica
tgggattgcacaggttacctggtatttttctttacggatcacaggactactgacggtcacaaaagttttaatgaataaaatagaattagcaatttctatgtttgattgttcactttagttatggtttaggaatatttcgttacctactctcaacatataattagctaattaatactatctatcaaatatacatgcactcagttgggtgagaatatttgcttatgttgtgtatatactcaatcaataatgtatttgattagaaaatgtatttttctaatttaaatttttcacttatatgataataatatattttttcaatgaagttatcattgattaagaaaaattaaaaactaattaagcatatacaaaatatgggattaattaggtatggtcgttggggagtttgctacacatatggtacttggtttggggtagaagcattgagagcttgtggtaagaattacagcaattgccctagcttcaaaaaggcatgtcaatttttactctccaaccaactttctgatggcggttggggagaaagttacctttcgagcgtaaatgaggtgatattcttaattaactccattatcgtatatatatttttagagaaatgctaaatagtacggtgtcactattagacattgtctagtatcacctcgttatatccctattgatgttgtttagtataatatgtttcaatttagtaattatcataaaatgtcgttaattatttgacaaaaaattttacttttagtaacaacaaaatttgtgactaaaaataaaaagaatatgactaattataaattaacattcctatcatgttgtgaataaaaggtctgtgactgaaagtattagtcacaacttgtatttaaatataatgttttaatcacatgtaattttttattgt

SEQ ID NO: 383898 - DNA, 1785 bp, Cannabis indica
tagtttatggaataactttcttagaatatgttattcttactttgtacaactttattaatagttattatattaagactcaagcatcttccacgttttactttcatttaaccaaatcacacattcaacttcttatcaaaaaaataaaaaataaaattaaaaaatcacacattaagcattgcccttagtcctctctaggttggttctctctaagaacaagctggataggttgagtcccttcggtgggaggggttatttctctttcattatcttctttcttcttattgcgcttgagtccattatggattacgagcttgtgtctcgcctcacagaggttttgcaccttgatgagcacgatggtccagttctgtagctcaacagagccggtattgaagaaggtcaaaaatctatggagttgagtcttgtggggaaagttctaggtgctcgtccaacgaataaagaaagcgttgagaatattatgaagggtgtttggaagatcaatcatagttttcacgtggaagagttgagtttttccgatcccatttggggagtaaagaagacagacaacgaatctatggtggtgacccttagaccttcgacaaacaactgatatgttttgtgaaacttgtgggcttaggtgagatttccaaaatgaagtttgatcacacctcattttggttctctatcaataacgcgcccgtagcttgtatggctgagatttttgttagggaatggggagtcttgattgggaaggttgaggatgtaagaattgccaattgtgttatgaaggttcgcgtacgcatgaatatcacccttcctcttaaaaaaagtctgcgtgtagccattaatgaccatggaactgaggtttcattgctattgcagtatgaacgatcacccaaattttgttgtccactgaaggactttgttgatgatgatgcactaccgctccctctaggacattttggttcgtggatgtgtgcgcctagctcccctcggagggactgtcgtcctgtccgtaaggtagctaccaaccgagattgtgacgatgctctgatcatgaatatgagggagattggcaagatcttagatgcagttgaacagtctaggacgcgttttatgaggttgccttgtacacctttttttcatgtatccaccaagctagtgtactcggtgtactttggcttataatcctttctttgctttttcgaagtttcacttcaactttggttctttccatttctcttactctaggaatgactcacattatattctggaacttgcgcttgtggcttcgactatctgggagtgatactacatctagtttgtgccactttatactcaaggaaatgggtttgagtatttgcctggacggatgcagagggtccatagaaaagtggattgtactgaattttgagcatagggactttcaaagcatatcctggagtagatgcagaaggggccagtgcctaagagacttaaaagcttgttggtaagcatcttctaaattgatgaaaccttgtgttcttgacataaactcaaacaaagtctcacccatttcctctgcatcgctccctataacagaaagccaattgtaagtcgagattgtggggctacaagtttcatgtcgtcactcacctttgtcctggctactgcctccatcattcgttgaatgaaattctttaggctctctcctgcctattttttgacgttggtaatcgaccccacttccatatcatagtccgggcggctatgaattactttcgaaaggcaaactgcagctccttccag

SEQ ID NO: 383899 - DNA, 1985 bp, Cannabis indica
aaaagatcagcaacaaataaccaatccacagtgttgtaagctttgcttatatcaatcttcataatgcatcttgaagataaattcttaagtgtaccctttcagcaagtcctgcaagattagaatgttatgagctaactgctatgtttaacaaaagctttttggttctcatgtatgagcttaggaagcacttcagaaagtcaagaacaaatcatcttagagatgcatttgtatataatgttgcagcaggcaataggtctgtagtcactagcattttggggattctcagtttgggggtaagagagatggttgtagtctcaattaattgatttatttaatcaattaggattctaaataaagagtgtgtcttatttataaattttaccaaggaatgacacaattgagaaaaaaaaataattcaagatttatttattaactaaaagaccttggaaaatctaattaataaatatatttaaatggtaattttatttgataattaattataataattaaatagatagaattagtgtttaacttttaaacggcatgggaaaatggtttatacccatattagaaatataagagtagtatgataaaatgaaaaacaaaatggaaactcaaatggtaaattcacattaaagtatttggatcacacatgcacaagctaattttgtgtgtacaaaaacacttgtaccaaagcccaagtggccaactaaactaactaactagacacaacataagaagaatcatttgttcacaagattatatgaacatacgaaacaacaacaattctctttcacaaattgaaaagagacaaatctaagaaattttagtgagagtaagaggagtcttgcaagttaaaaagtcagaaaccaaatcagggtccctaaacccaacaagaaattgggccaggccttcaagaaacagggcagcctggtaaacacttgtggccccaataatctcagccaaaacactccgacgaagcctattagcatctacaaacaccgccgccagctcctccatctcactccccaaagccttctcaaccacctcactcgccacctctcttttcccggcccaatctccagccacagtttcaacaaacccaccttgggccttcctagcacgcaggcccaaagccgggaccatgagcctaagcccacattcaatctgctcaatccggcccattaacacatcagaaggattcttccacgccataactatatgccaggggcgattgaaaagctctccggcctcgctgaacaatacgccgccggcgagtttctcgaaaacggtgtcgtttgcatcggattcttcgtcttcgttgtcttcgtcgtcgtcgaagaaggagcggaggaggttggtgaagaggtaagggtggagatcgccgagccatagaaagggtttttctagtgggttgcgccagtcagggtagaggagctgcgagatgtcgccgtcggtggcggcgagatcgagagcgtcgtagtaagagtggaaatggtggcggacgatgtcgacttgggtggagagttgggctatggaggaatcgtggattgagcggcggagatttgggaggtggttgttcttgagttggttgaaccactgtaagtagtagtctttgaatgaagggtttgttttcttcttcccgaagaagccattaatggctttcagcatcttgggatttctttggaaagagaagaagaagaagaagaagagagttatcttctttcttggttggagggaaagtttgaagtttggaatatggtttggttacgttagagttgattcattcagttcaattcaaagtttcgtaaaacgacaattttaagtattcctaatgtgacggttttaatgtcgtttttgatttttaatgtgggccggattatattccagtgtacttttcttggagggaaatttacaaaaatactcgaattttggttaatttttacaaaaatactgtcacatggaaatattttcaaaaatactgt

SEQ ID NO: 383900 - DNA, 1460 bp, Cannabis indica
ttatatattacattgcataatctagggctcgaacccaaacctcttatacacacgcaccctcttatagccacttgaattagcctcaagtgtttaaaaaaaaaaaattaaaaaaatattacaatatatttttaaagaccaaaattataataaaaataataaatatttattttttaaaagtgaaaaacctaaattattgcttaacaaaatagaaatgtaagtatgtaaaaaaaaacaataaaattaactatacaagagagtttcaagactttatagtcatctcatcattgtagtccaccaccgacaattgatttactatttatttatttcttgaaagttataaactaccgacacaagccaagtgacaggtagaaaaaaaatatttatacttatttattttattttattttttgtttctttgcataagaaataataaagggaaaactgggtaactttattatgtcatcatttcgttttttttttttttgataaaaatttatatcatcatttctgacccatactgtgagagtatcacagagagacttttgcgctgcgttaataatagttaataatgttattcaaaccatccaattagttgtcttgtgctttagcagagtcctacaaaaagaagtcacccattttccacatctgcaatattagatttctaattattaaacaaaatagaaattttgattactccaaataacccaagtaataccaaagaacaatggaagatcttgtttcttaattttttcaaatcctcttaataaaaaatctttaatatcacattatttattcatattgtaaattgataaaatttagtatccctccatataaattaagctctagaatattgtaagctgattcactttactagaacacaaagaacaaaagggactaaaaaaacatttttcctataaaaattcaaaagaatatggttaaaaactttcaaaataaattgctttattttagaaggtattttaagtttccacactgatttatttgactttttatttgggataatattaacttttattagttttattaaaatttgagtcgattgaatagttctttgccgtgttagctcatatttttagtgatcattagtagttaatggacttagcatctgtatgtgtaaaatctagttaaagcagaagcgtgggtttttatagttaactaaagtctttgatgagcaggtctactccaactagggttatgtgttgtatgatttgtcccaaataagctattgccacatcaccatattattttatccatgtcattggttagttaagttagttatctaacttgacacctaagcaataccaacctacttgattcaaccaatgcctataaaaagaaagcaccaaggcttcattctgtgagtctaatccgagcctctccaacctagaattctctctctttctctctaatttctgtaccaatcttgtgagtgtttaggaggg

SEQ ID NO: 383901 - DNA, 551 bp, Cannabis indica
tttttttttctttacatttttcatttttgttttttggttcttttagaaattagtattggtaactggttactatcaacaatttttaaataattagtcacctatgatgaattagttcttctaaaatatgatgaggtggtaaccaatttccatcatatcactaactaaataaaaagaagaaattgatactagttacgagttactactatatggctaaaagaaatccatgaaaaagttaaaagtaaaaagaataatatttttgtggcatttctatccatataaaacctcaattttttcaattgaaataaatggtaaatttgaaaatattaggggcctgtgatatttttgtaataggcggcaaaaatatcctataataaagatccctcaagacataatagttgagaatcccacaaagtacaagcccaactctaaaatcatgaatatgtgttttgactcagtttccaaccaaagttgagactgaaatattagaggaaaagagaaaattacactctatattttttttatattgtcctcttttatttttactctctttt

SEQ ID NO: 383902 - DNA, 1551 bp, Cannabis indica
ttattcttttttactgattttctgagtttctattttcaaggttactaatcaatatatttgcaggactggatgtattatttattgtgcgaggaggaatgatgatgatgattatgattgagtctttcagatttgaaaagaataatgggataattccaactctcaacattgactgctacatataagtgagccttcttactttattgaatttctctctttgttgctattattgttgttatgactaatgattgagattatggccttgtttggtgatttgcttattcttttaactactcagaaaaaactactttagagccaaccagcaacaatgatgcagctaaattaattttgtcttttgattggcctaccatgtttttgactactgaagtctcttattggttataagaatctatacatgtaatttttttttcttaggctaaggctaattttgacaattttcaacagcaactatccgaaattttcaatatttttgcttgtgaagggttttgtaatcaaatataatatggtatccattttaatttgttactttaatttcaaccagttatggcgaataataatcctggacaaggcaatgagctcacactttcagttatgaccgttaaagatcaagactacatcttattgattgaaaccagtagctgaatggagagaatttcgggttttgtatcgagagtgttggagggttgtacagagaattaggtgtttcttatcctagtctctgatcatgtgaggtttatgtaatctaatctgttttgaattaatttcagtttagaattgtaactctcttgatcatcaataaagctcattgcctttggtttgtttatttctacaaggaatatgtctttatagttaatgggaattgtatatggttacaaggaagctacaaggaactaaagttactcaaaaagagagtaattgtgtactctgatagtcaatattcaattggtttatgtagaaactgttgtgtatcatgaaaagcgtaaccctattaacataagactattttggaatattcgagattcgattgagcaaggtgtcataaacttgggcactaaagtttttactttcatctcgagttcattcaacttcgacttccctccactgtctaacatttgcaaagattcaacaacaacttccctcctcgagaaattccttagtcacaacatcaaccacattgtatcaaaacatgggattttgattttatataaacttaatttgttgttcattagagcatcctcaaggagatctcattcgatgtggagaagtggtggattcatttccagaggaatggctgctcccaccatctttaggaactcttaagatcttcgattgtaataacctcaaagctctaaacatcaaaggctttcaacacctcacctcccttgttcgattaagtcttctttatttggaaaagctagagtgcttaccaacaacaaaactgcctcagagtgttaattatttgtcaatagaaggatgtagtctgttaattccgaggtgcaaggaaggaacaggggaagattggcccaaaattca

SEQ ID NO: 383903 - DNA, 1926 bp, Cannabis indica
tttttgggcaatctctataaaacctggtgcaatctctcttattttcttgcttttactaatttcttataactgtgtgtatagatctagggttctgttttgtgatttgggaagggattaagcttggttttgggttgatagcagtcttcgagtttcttctcaagaaacttgaagctcaactagggtttcgactgatttgtgagtgaaagtgtgaatgacctaggtttagagagggatatgagggtaattagggttaatcaaaatgacattgcgttttgggagagtcatctgtcgtatgactcattgaacaaaactttgtatttgactcagggtaaaaggtcagttttgaccttgggtattacttgatttattttttattgtgtgtggattaaattggtaaaaattcatatatttatgttagtatgtattttaggtatactaataaaaattttcctttatttatttaggtggttccttttttaaaaaaaaaaagtaaaataagtccatatatttggtataattcattaaaagaaattcatcaagtaatgatgatgaagatcatttatatatgaaaaagtagtagcaacactaaatcatggtttgatctacataatcaaacactgtttgcatatgtattataaattcaagcacgacacataatgtacttaagataatatttcttgtaattgacttttggatggtggagccatatttgaaatcaattatagggttctgttacaaaaaaggaaaaaaaaagaaacctatagggtttgtttgttcaaattatgttttgcctttttttgacgacttctctattactaataaatgacttgttcttacctactttcttaatacattagtctcttcaactcaaagaaaccaaacaaggtgttgtacattgactacctctactacctcatacattattattagctaggactaattaaaacccagctttatttactctaatcgtatcacatatatatttgtatactaggttagcttaatttattattaataatattcaagctcttaagtcagaatccatcaatccaattcacctaatattggtctcaatgaaagattgaagaagaagaatttgcagtccatacataaaagtgaaaaagattagattaatatttaaacaacgatagccatgccatttggaatattaaagttagggtaggattaaatcaaagcaacgtgaaactacgacttggtagatatttatgtcattcttcataacttgttcttccaccaactatataataaattgaatcataaaatattcaatcacttgctataaaatattgatatccaacttttataattaagtcacgtaatgtcattttggatagataatgctcacggatcaaatatcaattatcatgttggaaatgaagaacacttcatcgactaatccaactaaagtaatattaatttggtgattaataaaatttatcgaaataaaaattaattaaggtaatattatgttataatttatcaatttgagtaaacatttgatttaatttgattttttttcttttttatctttggaacactccatttattctcaaagagttaatggctaaaacaattcttaagattcatggcctaagtatattcatattcatgaaagctaccttgtttatttctttgtcattaagaaacaagcaaaaaggaaaaaagaaaaagttacacctttacttaattctttttatacttaaataataaaagatagtactgactataactttctgtttcaacatacatgttaaagtatttttgcaatctatttttttaaatgaggatgttcattgttaaaaaatcgtttttaaatattagaaaatttactatcagtaaactattcagataatttaagaaaattaaatttacaaaacatattctaactacaaaaaaaaaaaaaaa

SEQ ID NO: 383904 - DNA, 3196 bp, Cannabis indica
aatttacctgtctgtttcaatagtcctctttgcaagcatgagtgtcaggaaaacaggaaccatcgcagcacataaatgcttaagtgtatgcccactaacaatgtgatatgtccaatcataaatgaccttatcacaagcttcttccacctttgccaaaagataaaatcctgcaatcacgggaaaaagaatgtgaccaacaaagttgtaaaagagttcagaatgaaacaaaggagctatacatatatggtaaacatgtacctgctgcccaaagccagtacgttgagtgtgtgtacattggtggcaacaaaatagccatcaaaggaatggcaatacaaggaacaaactggactagagcatacggtcgaaggtcatcaaaaaaccttcaaacaatacacaaaacaatcatttcagactagaacatggaattggtaagtttctaaattctatgtatatagtttagatttgcactagctgtttcatggacagaagtgaggagaaaaacatgctggcattgcaagttagcaagttgcgatacaaccacaattctagctttaagtatgtctgctgaaaataaatatgattccatactcaaaccatcattcacatagctcttcatactgtaaattttacctaactaaacagttctcccggtacttcactgacaaattaattttccaataaagtatattagaccataagttcaaataattcacactagaaaagtgaagtgcttgcctccagtacaatatactaaatagaccagccaaaagtagtggtatgatggatactgttccttttcgctcatcaatcctttcaatgataaagattgatatgatcgaagtgaatgcgacagtcatctatgctttccaagaagaactttatgtcaaaaacaacatcaactaagaagtgtcaattataataaagtgtctttaagagagaggaaattcaccggcaggcgatcccacacaagacgagcatcattcggttctagatggtagtatgaagatccaaaagcaacagcagcaacacctgcataaaaaaatgtccagcccaaaagctcgccttccaagctagttattggcattgaaccattatcatttgtcaaacaacaaaatctaaaagtaaaagggatgatagatatctttcagttaaacaaagtaaaaaatgcactacctaagcttaaaataattccggtaatagcaaagcaccagcccgatgagaccaataacaaggaacgggaaatttgaaatcacattaagtgcatttggaactcctgcaaatgaaataaagtactcaatcaaactacaggaaaagagagggagagaggagaagggagtgtagataaggaaaactatgaatgataataaagcctaagaaatagcacgacaaagacataagtaaaatttgaaacaaccacgatagtgttgaaggtgaaaactcagcaaccaagttaggtcagaaaatttaaatgtaagtaagaaattgacgaactgtaaagaacttgaaagaaaaatcttcacaacaacatgcttgtcttatgaagaaccaagccaagtgaattttgggtgtaatatgcatgttacatatatatatatatcaagaggatgatatagcaaagagtctacaataacacttgaaagtccgcttatagattcaggggcaagagtgaacacatgaaatattacaactgaaaatcccaagaagctcaccatgcaagagccactctctagtctatcccacccctgtctggtcctcccgcagcctaccctttatgaaaataacccacccaaattatctaccacaagggatctacaccaaaaacccaaaaaaattcactgtggagaaatagatagggatagttaaatatagtcaacatgttcctacacattttgtgttgagaaagagagaaggatatataatttacccctttaaaacacatccgtaggaaggtcagcactgaaaataagaattaaatcatagaatcccactaagatgccaattcaacaccttacttacacctacattaaaaattaaatcactgacgtagatcccttctaactaaactcaagggaaaatcctaaagcttctaataattacagagaaactaaagatcaaaactgcttaagaacacacatgtagccagttcacttcaattttcatgcactaccaacaatttccacacaacaaacactcgatttcccataattgtgtatttcttttctctaacattcaataaaaataaaaatgaatgttgatcatctacatccaaaacgaaaagaaactcattcatacccaattgaaattgaagttaaaccaaactgccacttctcaaaaacaataattaaatacaaattaaataaggataaacaatcgaagcaacaaaatgcagacttaaaccaatcaacccaaatatttgtgataataagaacaaaaacaaaagacatatttattaaaatagacatgcttggcagatacatacacatacacatataaaaatataaaggaaagggggaaaaaagagagaggaaaataaccaaagaatcggcgttgatcggcaaaatcatggtattcttgagactgaggtatggcaggagtgacgatcattaggactacgaagcagacgatggcaactacccatgcccatatgcttcttctcctcatctctctctctctctctctctctctctctctttgatttacttcgaaaataagaccgcggagtctcccccactgcatttgcagcgaccagtcggccaacacgtgccactcacgtgtgtctttttttttttgaaaagaaagtgtgtcttatttattctggctagtttgaagctacccgttacacaaattacaaaatcacttattactaactctaaccaattatattttagctgattaggactgtgacatgtactaaatcatgctcctgaacttttaaagtcattaaaaatatccttaaactattgaaattgttaaatttaaagacttttgtccaatttttataaaataattctaacatagatgaaaattcaggggcatgatttagtacatatcaaagttcgaggagcataatttggtagatatcaaagtctggggagcataatttagtacataaataatcactgaaatagcaaaaaggctaattaggatttttttctcctcgaactttgacatgtacaaatcatgccccctgaacttt

SEQ ID NO: 383905 - DNA, 2457 bp, Cannabis indica
gcatcaattctgttataacagaattgtaacagaaaacagaaagaaacagtgcaaccaatttaaacaataaaaacggtcaaacagtttgttggttatcaggctccctctccgtaagtataaatatatatatatatatataaattatttacatacaaatgattttttttttacttttctgttttagatctgaaataatttcactttagctccaatcttttcttccatttgtctccactgtatttctctttgtgtatgtattttttatcatatattttctattttttagttttttttatcttatttctttcggtggcagctcacctagacccaccatggcgcacaatagcttacggagaccaaccgacataggtttgtttttcatttttttttttacttttcattgtctgggattcaaaaaataaaaaagaatcctcaatttttgtaaatatatatgtttgttattctttctttacttacaaatttacttattgaatagtgttgtggtttgagttagtttatgagcaatattttcatttgtgaattgggtttcttggcctagatgttctaacattttgatttttgttcgtataaaaaaattttggctttaggttttgaattagatttttattttttagattgaattagtatggtgcttgagttaatataaaccaagcgagatatggcagagtataaactcttattggtgggtttatttatgatttgtgtgctcaatgtcatataggatactctacttcaatatagtttattatcaatgcattaagtgtttttcatatttgaacaactttcaaaaagagggttcaacaaatcaaatttgaagttggtaatgcgatgagagtagcgatgacattatcttgcaaagatgagagcaaaattaccatggacaatagcgagtacaggtacaaaaatattgtaaagtaatgtgtatagttactatttttcagggatgatgttactccatttcactgtacataaacatgtcatattcttgttatgacaaactatattaatggtattctagcttctctactaattgagttttaattttctatggtagataatattcttattcttatgatagggatctttaataatttgtatgctattgttgttgtactacagaaaaaaataataattagagtattttatttttctacaccaatgcaattcatctttctattttcaatttattcaatcggttggatttgtaaaagaaaatatacatctttgatctaaaaattgtatttatttgtatgttcttgtcaaactttaaaagaggctttatgatctctcatggctaactaatttatgagttgatcaaagtagctaattccctttataattatatctaactaagttgaattttatttgttgttggttttttttttttgagtctttaagaagttgttcatggaaatacttttcaactaaataaggtaattttatatttaaagtttaaattgtgtattcacttacataaatattttttcttgattgttgcagaaaattactcaatccttcattataaagtttatggcgctacttagaggtacaattttaaatcgaagattcgataagcaagaaggtacttcggatgatatcaaagttataaaagttagagtaggaaaaccgttcctaataacacttatggaggatagtgtattgtaagtacataattttacaaaattatgaaggttgggcttgtaattgaatgtgttgctaaaaatatttcttatatacactgtatgtaatattattcatgtatttgtcttaatttgaattatcttgtattaatcctaattttatattattaatatttaatagtgaagttcaattaataatgtatatatttttatatggatatataatattaatttatctatggacaaaataatattagctcatttgtaattttttttttaatatgtagaaaggttttaccgacaacaatgttcttggtataagttttaccgacaactttttatatgtcctcgttaaaaagttctttctaccgacgaagctctaacgaggacattctaacgacaacatgttatcgttagagggttctaccgaggacatttggggctataccgaggacatttgtacttagtgtcattattgagaattgagatacttacactgtaaatgtataatatatatactattaaaagagagttatcttatgaatttagagaaggagctacaaaatttcaaagggttatagagttagagttatggggttactaatttatagttcaattttaattattattacttttgccaaatgtaaaaatattagtggttgagacacataatggagaaatattagagggtgagatgagcagggccggcccaagcattttgggggccttgtgcgaaattttaaaattgggcccttaaaaaaaaaaaaaactatgtacattaaaattacaattctat

SEQ ID NO: 383906 - DNA, 2104 bp, Cannabis indica
agtaataatacattttaaaatttctcaataataaatcaaccgtgttgttttacctttcaaaaaaaaaaaatcaacacaaaaacttttctttataagtggattattcaaatatacattatttaattcattagtttggtcaagccgtatgttattatgtgttataccttccaaccaataatattaattaaattaactattgaagaaaaaaatttctacacagttgggtgaaccaacttggttttttaagttttggtttggggacatgtgatgatgatagaccaaatatagattggcaattaattaataatttgagaaagagactttggatgatatattagttataattaataatataacatcatccaattcacatgattccatccatataattattattatttctttttagtttttttatttaagttgtttaaaagacagatagagggaaatctcgttatcatactaggtgttatttaattctcaattaaaaattattcatggttataggatatctttatttagttatatatattttttttaaaaaaaataagttatattttattattggtttgcttggttaacaaatataggttatcgtaagattcgttacatcagaaggttttcagattcggtattttgtatttgtatatgtggttatctgacattttgtaaaaaaaaaaaggattaaaatcaattataattattcatatgattgatttttgttattccaaattaatcataaataaaaataaaagtaaacaaatccaacgctttcaaatttaaacttatcatttatagcctttactattacaattttcagttaatctttatttcacaaaaaaaattgttgtggataaaaatcctatctaatctttaaaaacaaaatctaatttagttcgatttcattttcttttttaatccatttttacacaataaaaaaaatccaaaaataaaaataaacgaatattcctctaattcccgtccaagttcaatttcattccttatccaaattcaatttttttgaagtaaagcttactctgcaagaaaattctggagggtattaccgtcattgcacactcctaccataacctttattatattcatttcaagtcctttttcccggtgccttcctattctctctctctctctctctctctttcgatctcatccctcgtcttcttcttcatcctcaataaaaatccaaacccaaaaataatttcctggaaactcacgaatcgtcgtaccgttacgttttttttttttgatatattggactctgtaaattataaccttttggttttttgaatttgaattcttcagaaacggtgggtgttttgagtttcaatagttcttagggattgaagaatttgatcgagtggaggagaagcaacggttgtggtgatcagagagggttgaggcgaggggaaagagaattaaaagaagacgggggtagagaggtggttggtggggttgtgaaatttgattattatggattgcagggttttgataccgagtggggacccgtgggttcggggtcagatcggaggagcatttagccatgaaagcgaacacgacctggctttaatggttaccgatttttgggagaacgggagttgtggtaccgagtcttggtgtagtagcgatagcgaatccggtctctctgatctcgcccatctcgctgagaaaattcctgtgagtattcatcgacccctttgtttttttttcttaattgttgcctgaattggagttaaaattctttcgaaattggaaatgggcaggcggaaattttgtttaacgagactaaaattgattgtaaatttggtttatgtattcgtttgtggtacagcggtgtaagcatccattggcgcagtttgaaattgaaacgctttcagtggttcattcgcttatattatcaatcaataagacggagcttcacgcggtcaagtcaggaccatgtaacgctagctgcataagattcactcttgtaaaacttttgaggctttctgggtatgatgcagcggtttgccaatcgaaatggcaaggcaccggaaaggttccaggaggtaattatatttatattattgcttgtatacttgaagctttt

SEQ ID NO: 383907 - DNA, 1810 bp, Cannabis indica
aaataaatgtcaagttcaaattccatccatgactatgtcaaaggggaaaaatatgcttaaacaaaccatcaatatcaattatatataaatatatattaagccaaatttaaacgagtgatctgaaaataatcaactaccaatacaacaaattcctttgatcattattgaatataactacaaaatttccaaaaagccttcctatatattgtgaatggttgggaaagagcctttcatcaataataataataattaatcaaccaattaattaattagttatatatgttttatcaagttttattattactttgctaaattaagaattggaataacacgtactatagctacattgttaaattaagagttacgtacgtaagattgatgtgtataaattatatatcatatatttagttttttattgaaaaaaaaaatattctaaggtatatatagaaattctcaaagaagttttattttatttatgtaattaattagtctatcttctatatgtatatataattcttcaacctctagttctttggacgaatgggacatatggtatctatatatatgcaatgcatgggaccatatattctgttttgctttgtcatatattatataaaaatgtatttgtctatatataatttatatatatatatacacgtatgagtctacgtaattaagagtatgtacatatcaatcacagctctaaaaatgccttagaagatagagaatataacaactttatttttgtatttatttcttttataccaacctttgctaattaatatttatgaaagaggccaaagagaagagagagtaagtaaaagagtaaatcttacaatatatatataagaaaaggtttaagttggtattggtaataatctattccccaaaaccaagaaggattttttaactttaattaatggaaggtgatgataaagaagaagaagaaataaagaaagggagaaaaagaggttagctagctttgagagaagagatgagatgggtaatgtgaaagagagttcttgaaatggcatcacgcaattttgtctattataaggtcccaccaaaatggtcggctaatatataagccttctttatttattttttctcttcatcaaagtttaaacttctatatcttttattatagtctataatatgctatttttctttgatctgatcccctaataatattaatcataatcaatcaatggatcgtgttgtgttcgaattcgtattgtgttgttaagacccggctgttttttatttgtgcttaaattcgtgctatattttttcatattttatatttatataaataaaataattaacaaactgtatgtatttttttaatttttatagtgataattattttcaaataattttttaataatagtttgcagaaataatcatataatattattaaaatttgtatatttgttaataaatactcaaattattattattattaagctaattaagaatttttttgctcaatttttatatatactaaatcatgttctcgaactttttaaacctttaaaaattcttcccgcgaactattgaaaatttaagattgttagatttagagacttctgtccaatttcgttaaattttactaatacaacgattgtccatttactaatcacgtgtccctcgaactttgatatctattaaattttgtccctcaatttttaacatgtaccaaatcatgtcctttgaattttatttacgtcaaaatttcattagaaaattaagacaaaaatcttaaaatccaaatcttaatagtctaagagaatttttaacggtctaaaaa

SEQ ID NO: 383908 - DNA, 1091 bp, Cannabis indica
tttcatcttaaagctttttcctttttcttaacggtaaagcttatcagctagtagtgtagaagtattgctttttttggtgttggcttaacgtaactctcttcccaaacaaacatatcattcttactcttacacattaaaaacatataattatataaatatatatgtatatttccctttagatttccaatttacctctaataagttggtcaaagaccatatatggagtctctttgaatatgttattttgcttgaaagatttacatgtgaaccatttttgaagctcttacctaatcaaaattcaagaccctttaaccaattaatatacaacattattatatatatgtataaatacttgaccttctcattattatgatcatctcaatataccatatatcatataacttaagcaagagtttggagtcataaaagagagtaaaatggctccaacacaaaaattttttttcaacccttttactattcttttcttgggttttctcatcagctttattatgatatcttttcctgcagaagctgccattaaaaaatacaactttgatgtgagtttgtacttttaatgatatattatatgtaccctttaaatttaattaatatttgatctcaatttgatgagttttttgttctgttttttcagattcaaatgaagaatgtgagtaggttatgtcatgcaaagcctattgtgactgtaaatggaaggtttccagggccaactatatatgtcagagaaggagacagacttcaaattaatgtgacaaatcatgttaaatataacatgtccattcattggtaaaaagaaaaaaacaaactctaaatcttattacacaaataaatcattctatttgttagctcgagtcatgtgatactatgtgagcactagaagctattataaaagtaaatcattctatttgttgcacttatggttaggcccgaccttggactaaggtaggttagacccgtgtttaaggtttaggtctacctaaattcagagcctaaaaattttatatagtatattttagggtaaatactattttggaccctctgttttaaaaagttaccaattggaccctgtattt

SEQ ID NO: 383909 - DNA, 1805 bp, Cannabis indica
atatatatgtatacacatttatagatttaagcaattgaatggtgtaactacatagtttaactatcaaccaaagaaagacaccttctcttttttgaacaagtattgtgggtagtgttctagtcataaagcatttccttaaaagtttggttgaattaatttatataaaaaattaagttcttccttcttaaatttatagctacatgaaattattcttttctctttagtcagattcatcaaccttcctttagcatgtccagcttggtcgaagttgtattttgccactataaaaattttatttttagtcataacaaaatatgtaactaaagataaaaaaagttggggctaattataaattatcattattgtgtgtgactaaaaagtacatgacttactctaattcaattctaaaaaagaatcatttgtctgattttcttttgacatgagtatgctgttgtgaaagtttgagtgtaagctttatctgattttcttttgtgagtatcatttgtccgtaagtggaatggcctccagtagccaaccaaatgctgttttggaagatctttatgacaatatacaactcgaagaagagaatgaagaggaactgctatgtgatattacagaagatgtcggtcagcctgttgacgatcgttggtgtcttgttggaaagttcttaactaccagattagtggattttgattccatgcaaaatattttggcttccctatggcaaccaggtaaaggaatgttcgtaaaggaattggaacctaacctttttctcttccaattttaccatgaaattgatatacagagagtcattgatgggagtccatggactttcaatagattccaattaatttttgaaaggctgaaacgaggagaaaatcccaggagtgttcgtctacatcacctggatatgtgggttcaacttcacaatctgagaacaagtttcatgacagaatccaatgctagaaatgttggtaattatattggatcatttataaaatcagaccccaagaattttatggggatttggagagattacttgcggataagagttactgtcaatgtcgacttgcctttgaagagaagaatcaagctgaagagaactaatggagaatggttgtggtgcaattttaaatacgagtttgtaccaacgttttgcttcatttgcggcataatcggacactcagaaaaattctgccaaaagcttttcgacacccccattgatcagatagaaaagccttatggcttgtggatgaaggcagaaccaaaacgaaagaaacataggatcggagctcactggttacgcactggcaccgaggctgacaacaaattttcagatgaattcgacacctccagcaaggatgaagaagccattaatgctggcaatcaaagatcccgtaactatagggatgaggctgatatgaatccgggttggaaaaatggcaatatacgtatcataaatgagggaggaaatcatggtgttataaatggcaattccgatcatcacgatcaatctgccagtggaggggaacaagtgccaactatgactataattgctacggatactaagagaagaaggacagatatggataatagtgaagttaatgctgaagaagagacagatatgagccttgacccaattgggctgtcaaaaaatgggtctttggtgggtcctggttcccaggcccacctagggtcatgagtatccttagttggaattgtcgtgggcttgggaacccacgggccttacaattccttaaggatcttgtgatccaaaagagacccaagtttgtgtttttgtgtga

SEQ ID NO: 383910 - DNA, 3753 bp, Cannabis indica
aaaacaaaataataataacaatagaaatgggcacacctctcgagccttagttgtctcataatcatcatagagtgcctcatcaatgcgctcccgatcaacaagtccaatcatagagttaaacttgctttttccaatctcttcactacaataggtgaacataaagatcaaacccatagcaaatatatccaaattcaaacagaaataaactagaattcaagacatgtatattcactacaattcatagtgatcttgtcaagtgaaaatcggtcataatttggtctcagaaaacccacatacatggttatttcgacaacaggaagctccgaaatggactcagcagaatcaagtgagttttcaacaagctccctcacagtagtgtaaagagatttcccaggctgagagttcaacaacaaaaaagatcaagctcctaaaattacacagctaacatagggtaatcaacagttgttcatttctaaaaatttgacagaaaaaatacaccaaatttaatcaaattcaatagatttccaatgctgaaagttcaacaaaaggaacaaactccaaattgaaaatcagcactttttcaattccaaaaatttgactcaaaatacatcaaactttatcaaattcaaccaattattgaagaaaaaaggaaaagaaaattacattatcaaatccagcaatattcttgttctccgcgaaaaactcagcgggagattctgcgagatcacaatgaatcaatcaacaattacaattcacaaattcacaatcatatacatacacataaatatatattatagatgagaaagagaaacttactctgcttgagagtgctggagtttccttagactttctcggagccgccttggatttggatttcttaagctccggagagcttcgctgctctccatttccgaatctcaacacagaaaaaatgcgaagaagaaagaagaaagaaaggtaacagagcaaagctcaagctcaagctctgctagggctaagttacagttagtttttttttttttttttgttaaagttgaaattagagaagttgttttttttttaatctaacgatggagagaaaaggatatggaatccaacggctgagatttaatgctttattattttctccaaattttgcttttgccgccaaaatatggatcaaatctcaacccttgaataatagagtgtgtggaaaaccgttggatctgaacatcatcacgatcataaattaagcctaattaagaacaattttgttttcaatattgctaaaaatatattttagtgttctttcaaaaaaaaaaaaaatacatttaaggacccttttaaaaaaaaaaaatcatttaggactatgatggtatttatttagagataattacattagatgctattttttacggattttttatgtttgaagaattttttttatatttttacaattttttatagaaacaacaagaaaactatataaagataacatttaaataacatcaaaacaacaataaaagataatatacagataacgaaaaattaataacaaattaacagaaatataacataaaaaagaccgtattttctgtaaataaaataaaaaaaataagtaaaaataatttaaaatttacgtaaaatcgtatttttgtaattttttattatttttgtgtatttataaataatctcattttaaaagtatagtaaaggttataattacaattcaagctgaactattttatatatttagattttaaaacatatcaattaaattgctcacactacattaattttttattaatataatttttgtctgttttaaaattttcatagtacaactaaaatataaattttttaaaaatataagcatggtctacaatattaatttatactaataacactttggaatattgctcttcactaatactttttattatttttattttatttgttttggacatgagtgagacccaattaaagagagaaagatcatgggcttaaaaaaacttttgctcttgtgggcttgggctttgtatcttatatttcggttttaaatttgattttgttatttattccatcttttaattttatcattttgtattatgaatttgtaatttaatacaaaattataaccaattatattttttaaaattaaataaattttaaatttatacaatatagtttaattctaattatttattcaaacctatttaaaactaacccaaacacattaattttcgaataccgtatatggtatgtattgcttaatattttacactattttttatgtacaattgaagtgtgtaagaaatcattactattttgacaatattaatggtaccttatcacttgtcatatatacgcccatgagtccatgacattatcattatcattatcattatcccttttttaaaagagggtcattaattatgtgtcacccacatttatttacaattatcattttctctcaataatggaaggagtagtatttattatcttttaaagatagcattatataaataaacaaccatattttataataattataaaatttaatacttaattacaataataataatatgatacttctaagtggtgttaaatattactgtaccttttagtatttttcatataaagagtgtctcgatacaaatcgttctttttctttatttgtatcaacacacattcttagcttttttttttttgaaatgaaatataaacttcattaaaatatagcattcagaatacaaaaggtcctaaagatcaggtggtaagttctgaacatgaatgctacaactagaaaaaaatcgagagtgcctagccacatagtgggcaactcgattagctgatcgtttaataaaattaacgaaaacatgtggaagataagaaagtaaatgtttataatcattgacaaccaacccaaaaacagaggacacacattcttagctaatatgcgcttattgtggaacatttaatctcaattttttaggatgttatttattatagtaataatgaatttcctatcaagggagaaaacaaaaaaataagtatgcaaaatgtcgcctctgagtctccttccctctaaccaaggcttgtcagtcgttcttggcatgggcgtggctctagttgggcagtgatgatggtcacgctttcttagggctccgggggtgaaggttctatatctattcctttgaggttttctctctttctttgacatttttctatgtggtcacgggtttaatggggtcgattaggtggccaaggggttggcttgcattttataagataaattatagagaaaattacattgtatatccactttactttatacgttttaatttttacctttattttcatattttttgaaatatacccatttttataaaggatatccctattataccattaagttaatgaaaattatgtgctagatttaagtggaggataagggtatattgagcaacccactcacaaaagtgggtatattttaatgaaatataatatgagggtatttttaattaatggatacaaaagagaagtattcctcaacttatccctaaattatatattagtagcgttgaggtgatatgctttgtaattaataatactgaatcaacgaatgttaaattataacaaaaaatatttgcgataataatactcaaatgctttattattttacaatgtatgataataaccatataaaaatataggctaattaggattttttttcggcatgaattttttttgccgttaaaaatttcccctgaa

SEQ ID NO: 383911 - DNA, 3255 bp, Cannabis indica
gtgtaaatattatttagagtttgtattatgtaaaaattattgggtgaattttttattttattaaatgagaaattaaattttgtattttttaaaatagtacaaaataatactatagttaattttttttatcaaaataaaacataataataatctaatttaaaaatattataacaaaactgtgtatattttcttctgcatctgtttattcaaataattatcttaaagtaagttatattaaaataaattatcaaaaattttgctcagtgtattattttgtactatttttgaaaaatatagggtctaatttatcatttaataaaaaaaaaatatgttcggtaatttttataaaattcaaagtccaaaaataagattaaccaatatttcaattctctactttcctattatcttccaaaaaaaggaaaaaaaaaaattgttgaagatgttataacaaattagtggcacctctagttaattgaacattatatatgtagcgacattatattattaaagaacaagctaattaataaattgaaatacgtgagattgatagtaaactacaataataataatatgattattttttgaaataatgttggatacaatttatgtttttaatatttatcttatcttccatagtaattattttacagctttaattgacttcacattccaaataaaattggtaactcattgtgattttgagatgctcctttagatctgattgatgcacacttttatcaacttactcataaatatttctgaaaaaaaagagaaaaacttactcataaataataatatatatatatatatatttatatatatatatttgcaatgataaataataatattgttcaaaatataattatatctttctttcgaaaaggtattataaagtaatagaaataatgtacatttatagatgtgcaatgcaagacacccaccaaaaatatcttctcttcttttgaaaattacaattttagacacaaaaaaaaaaaaaatcttatatatctaacataaaatagaaatatcaaaaaatttacattctaaatatcttgtgtagacacaactctatagcccaccgtagtacatggttcaacataacaacaagataataataagaacaagaagaaggaaacacttacataatcttaacaagtgtagagtattgaggattacaattataagaaaattgttcaaaaatttactttctcccttttctctatgcactaaagaactctaaaataaaaatagctttatcaaagaatcaaatctttcatgtttttctaacttggtgctctctagacagaaaaagtttagggtccacatatgtgcaccaaattatttatttttagtattttgatatcaccatttaatattcaagttttacatatttcatagttttcagagatccttaatttattgttaaagctctcaagaagcttgaaacgcaatgcttaaaaagtaaaaaattaatatagaggatatacatggtcggttatgaaatttagtaagtcataagaaaataaatatttttgagtttttatttagaaaaaaaaatgtggcattttttaaaattaataaaaatatatgtatctttaaaaagaaaaaaatatactcctaagttaggtagaccctaagtacaaccttagctcgcttatacctatagccgtgcctgacgatatatcgtctgattcctctagagcctcgttatattcaattttcaaactcttcccaaacatttctaacgtctttagcattaaaattttcaaattaagttgtgtaataagtttttttttttttatatacataattaatgttagattattttaggagttacaaatagttacaaatcattaattacattgtttacaacccaaaattatgctacaaaattgaaattttgattttaacacacttatttattatatttatatttaatatacattatattattcataaataacaaatgtaccgtcattagaaaccttaaaaagatttgtcaaaaaaaaaaaaacttagaaagactactatttacgttgaagaatttttgaattattttctttagttaaaaaagtgatatatgtctaattaattatacaatttaatgtttcacttcaccaataaattacatcaatcaaaggccatttaagctgggcaatttcatttcaggcccgctagctagacctaatttgggcctattggaccgtattacacgtctatgtcgggcttttgattgggcttttcatcattcaccattttatattattattttgatcaaaatttgaaaactaacataaaattaaattaaatatttccatacaacataaatttatgaaaatgaataatttaattataattattcacccaaaaacacttaataaaatataactttacacactaatcacctaaacacgttaattatatattgtatatatattaatagtttttgagaacctattgtaacatattataagtgataaacagtatacaatttgatttatttcaaactctattgaacagatcctgaaatgtataataaaaactaaaaaggatatttgcagggcaaagactttatgctttttgtttcatatacttatatactacattgttttttttaaataaattaaataccatacctaagataaatccttgttgagggggataacagattttacatcgttatgtcacggttatttcaattagttctattaggtgctcctgctatgtatatctcttctctttgagctgagttgttagttagttagcaagttagtccgtttagtaggttagttggtcgttaggccggcctgaaacaaagtggggcacaagaaaaaaaaatttatttttgagctcttatgttagaaaaaaatgtggtattttttaaaaacagtaaaaaacaatataattttaaaaagaaaaaaaaaatttggaccctcagatgggccctatgcacaaggaccgggcctttagttagttcctttaccttcctagttatattatatatactctctaattggttctttattctattcattttcaatcaataaataattctttttcattctgcaattaatttcgtaccagtttttagaaattaatacatatattttacaaaacataatattacgcatttttgtatattacaatataaaaaagaaaaaactagagaaagatccaaaattaaatcacaatactgactgaacatatatatttgaaatgagtgagtcaccttcatcattctattctcataaccac

SEQ ID NO: 383912 - DNA, 1048 bp, Cannabis indica
ttaaaaacaacataatatatatatatatatataataaatatagagacaagaatggattcttatctagaagtagtaggtatagctagggtttcagatgtataaccaaatcaggttaaacatgatatatcaaacagtctgaatttgaacaaaactaatcaataaccaaactcatctctgaatttctaaatacaaaaacaagtgggtgccatagtgtgtcttcagttatagctatacatattaaatatttgactatatatatagagctagggctaaggagggttgcaatttcattggccttcttatcaacaatttgtctcttccatagactgatcatacatattttaaatgatatatattagctagggctagctagctctcaatttggtccagtcaattcatcaaatgactttcacttttaagcacctgacggcttaatctgatcaattctaagcacatcacaacatttggccaaaaatcggcttcctttaatgtattgaagccttttggcctagtattatagcctctgcaccactaaacattttcaactaataattactataattatatcttaatagatattctagttcttcttcttttctagtagttagtttgtatttattatgaatattagtaaaatatatataatatattgtctcacggtcatttgaatccaataatttctaaggatattgaattgatagtgttgacttcttcgaaaagtgatcaacccataaaataaatgagaaaaatttttatatagaggttcggttctcttaattagcagttaatgacctactcttattttaattgtattgatatctagaatgatactattcaaatcactataggtggaatctgatatagctctatataaggatacaaaacatggatcaagttggcagatctctgatgagagagaagaatatagacactacaaaatattttacttttagtcacaacaaaatatcttactataggtggaatctgatatagctctatatgaggatacaaaacatggatcaagttggcagatctctgatgagagaga

SEQ ID NO: 383913 - DNA, 1402 bp, Cannabis indica
aaattaattatacacgtgacattaatgtgatactgatgtgccacgtgataaaacttgacataaaaattaatttataacaccataaatagtttgggaactatttaataagttgaaaaattcaggaggcacaataaaatataagtcataatttaagaagtaaaaatcataaataattattctattaattagtataaactgttgttagctaagttgaggaatgtatttgttaattttgtaaaacggtctacgatgaatcattattttggtaaggaccttttattttaaggttgattgtatgatgttaatttttttgtccttattgttaatggaccattcattaatgaaagttactactttttcaaaagaaaaaacaaaatggtagttgacttggacaaaaaaccaaaaacgctattcacacacaaaatttatattggtaaagaagaaagacatatcatactatcatattattatgtcgtttgaaatgggcaaagaagttgaaattcaaagaccatcttcaagccgcgtacaactggagaaagtagttgtaaacttgtaatatttattggaaaaacatacatgtaaatgtagatcatttggaatggaacgagtcctcctcagtgcattctattgtttcatttatctcttataaattacgttaccttctactaagtttgtttatttatttttcaaacataacttgttacaataaaagataatacagtatatagatatataactcattaatggagatattttgagcgaatgacaagctatatatataaatttgattttactcagtatagatatagacaacatcttctgatacattcatgtgtcaaaagtgtaataatttttagaagggtatgagcaatcttaatatacagaatgataagttttaataaagataaatgaggattgagatcgtgtatgttttgattttacatgttttaatttaccaagagttaggagtgactaaaacttattaacactttttatttgaatttacattaatttttattgttttattaaaacttgagattgattagatagttctttattgtgttaactcatattattagtgatcaatagtttaacagtaaacattcctgaagtgtgtaatttccaaattaaataatcatatttttacccatcccccaataggaacttggagagtttgagatctatcatcattattgtaacacctcgatattttaccttattttacaaaatactaactttgatgcataaattgaaaagattcaaaactgtttaaaaatagacagcgggttttactataaatatgtaaaagacgaataatcattcatattaaaataaaataagtagttgaatgcacttttaaaataaattcacaacatcccgctgagctcagaataatttacta

SEQ ID NO: 383914 - DNA, 1749 bp, Cannabis indica
ttttaccccttacctcttcttgttcaaccttaataattaagtgagcaaacatcttcttcttgaatgacatcttctgcttaaattcattcaaatcagaacacccttccgaacttaacccagttatccaaacgaactcgtccaatccaaaatgtacagctcaatcacgaatgaaaaaccacttctcaatagcctctctctcttgatgcacctccatcactaaagcaagtcgaggcaatacaatcatccatttaatactatccatcttcaaaaagtgagaaaaatgtgttgtcatgaataaggccttctgagaatcaataagatttgcattcaactcgtcaattaccaagggtaattccaaatttgtagcttacttgcaaaactatgttcaggttttattttcaagaaacctaccttaaaaaaaaccagttataaaaaattagacaaaatgacaaaaaataaaaaaaaataataattaacaaaaaataattcaaaatatctggttccataaaaaaaataatacacataaaaagaaaacaaaatatatatctaaaaaaaactttaaacacataccacatttaaaaaacttgtggtcttcttggcataatcatcagaaagagaagagctagtacccttcaaagccataaatttaacaccagaacatattacacgacaagctggttggtttggaacatcgatatcacttaacccaacctgcaaaaaacaacaaaaataaaatatatacagaaaagaacaaacatatacagtaaaaattaacacaaatttataaacatctaataacctttttcttttggcttcgagtttttgtaacagtggacttttttttctctgtgactagaacatcagaactggttctagtttcaacgcaatcaataaaatcatcaccattaacatcagcagtatcctttaaacacaaaaaaaggaaccgattataaaaaacttataaaaaataaacatttcaaaaattatttttaataaaaacaaaaaaatagttctaatactaaatcataatatacaaaataaccagaaaaaaaattaagactcatatataaaggataaaaaatatctactcaccttctttttcttggttcgaaattttttaggctctttatactcttcgactggaaccttagaactggttccagactcacaagaacaggaagagcattgacagaaacatctacaacaaacttttaacaataacaagatgaaaccggttataaaaaggttataaaaaagaaaagattaaaaacaaaaatatttcaaaacaaagaagaggaataaaacaaactatcaacataatataaacacgaaaccagttatataccttaccattgaaattatcagatccaatgtccgtttgttgaacaaattgaggttgaaaatcaggatcaactacaggaactagatcctgaaacattgataagcaaatagagaaaactaaaacataaacaacaacaaagatagacagaacaagaaacataatgaacattaaaaattaaataaaaaccttggtctcaggataaaataatttctttttaagagaaacaatattttcatcacccctctttcttttcttaacataaacaagatgatcactataacgctctaaataattaggcatgctacccaagatacttatgaaaccttaatcccctaaacgggattactaatcaaaagggcacataatttaaacttttataacaatagaaatgaaaataaacttgtaat

SEQ ID NO: 383915 - DNA, 5053 bp, Cannabis indica
tagacaaaaaggtatattcaaaggtgaggtgcatgcactaccatgatctaacattggggacaagatctgatcctgtgtcaaaaaatgtataaccgtcgctcgagctatctagctctcgcctcgcaagtggcttttgggatcagcctgtatttataagttggtcctcctcttgtccagttggtagtgatcccaataggtctattccccacaccgcagatggccatggactctgcatgagaataatctcaataggtgatgcacgcggaaccttcgcgtatctctgacactgttcacaatccagccatacttggagctttcagatggcctacaaacactactctatattgtacgatctccaagtgtgttgcaagtttagccaacatgtccgcgaatgaattttggtcccttggaacttggtggatgttgtagcttttgaatccatgtagcaattcccgggaccgtgttacataggcaaccatcttctcactcttggtttgatattccccgaatatttgattcaccaccagctgggaatcgttgtacacttcaataacgtaggctcctactttagccaattgcaagccaactagcatagcctcatattctgattcgttgttggaggctgaaaattcaaagcgaatggcgccttcgagctgatgtccttgaggaaagattagtacaattcctgcttcgacttcctttttatttgacgctccgtcaacgtagaccttctagactggcagttccgtgactgactcatcaggatcttcatcaattgaatccgaaaaaaggccccactctatttccagacaagtttggttaaggcaacaatctgctcctccaacctctttgtgtcactatttggaaggtcgcactcgcgagccttatcgttcacctgaggtcatttccacgtggcgtcgccttttctcctttagctttttcatacttagcatcgagacgccttcgaaggtccacggtggaccaactatcatcagagtactgtcctttcgcaccaggccttttttgcgcaacacgacctttcagagcagaaggacgtccaagcccagaggcatcggtggccttcagcacctgcaaaggtttattggttggattcacgctttttctaggaggttcgggagctgtcaagttttgagggtcacccaccttcaccttccccttgtcctttgcaggagctgaggtttcagcgttagtagggttttccctgttgtttccattgaagagttccaccgaggcatcttcttcagagtcctcttccaaatcttcgagcttttcttggaggcgtgtcatcatactctccatcttttgagaaaacttctcttgacgggctaacttttcctgggtctcatgcagctctttggacactcgaactacttttaggtcttgttcataataatacccatatttatagtactcgtccttgacgtatccatcatcatcttcctcctcgtcttcagtttcacagtcttcttcaccctgtttgcgatgcttgtctaagttaccctctcggttgtcagcttctgatgcatccccttccctcgcattgctcggttgggtgtgctctggagagagagggtttacatcttctattacgacgtcaaggctgccttgaggagtcttctttgtgattatttttcgtgtagccaccatagtttcaacaatactgtggcttagatttttcctcagcattcaatgaaagcaccaaaatattttagagattttcagaaacaaattaaaatagagcttaagaaatattaaatccagtaaatagaatagacaaagagttttacgtagttcaggcattaatgagtcctaatccacgagtcagtatattggccttaaatggctagtataatattttagagtggtgtttacaataaaattctaactctgctctctaagtttctcttgaaaaagaaaaaagcttagaaaattttagcaaagcttcggctatcttttctttgatccccttctatgtggaaatgaatgggtattgataggctaaagtacgggtatgggtgacccaggacccatttagggtttctgcaaaatagcccactattggagtaaaatacacataaaatactgactattgggcatccaagaaagttctttctcatgcattgagacaattgtacaatggggaccattgtcggtataggacacgcgtcgccaaaaggttgcaccttgaaaataagacgcctagacaagcagtcaaacaaaaaagtgcattcagatgtgaggtgcgcgcacatggaacaagatctgatcttgtgtcagaaaaggtataactgtcgctcgggctatccggctctcgcctcgcaagtggtttctaggatcgccttgcatttataggtaagttggtcctcctcttgtctcggagcaataataagactttcgggtcctcgttggtagcttgttggggaacaactcttggaaccctagtccggatcagaactttcctagatgggtgtattcttttcatacccatcaggaattgatgaggttgtgctaatttggagggttgctatatgacttgtccttaatcagggaacaagaataacagaagacttgacaacaaattcatcttgcttcatcacattcaccacttcttatcgccaactggattccatcaaccttcctctaaaatctccattgaatcctttctatacagcttacttcctacgatttcgtatgacatactatacttctcattttccttttaattcgcccgtctggcccacaaaactagcaatgttaagcccattactactagacacaaaatgcttctttgaccccaaactcatttttgtttctcaaatttttaaatgaaccaacgcaatctctgaaatggtctgttcattacccaaaccaagaaactcctccctcactctctctctctctcttttggtatatgtcttgttgtttaattcacttcatatgtaattaccactgtgttcatcgaacaggagaaactacttattttaactcgtttatttatataaacaaaagagaaacaaaaactcagcaaagagaagaagccagaaaggataacagttaataacactcaataaacgaagtgggttgctcaaaataagaaactattgcaattttcaagcatcaagagagattaaggtaccccgtacctgagattcccaggcagtgatatcagtgcggcagagagaagtggcgacaactttgaccctgatttccataggttgaggagggctgacttcaacttcttccatcaccaatggttgaccagatccccaggccaccgcagcttctcaagacaaatgtaatgtaaccatttattctactagtaagatcataatcatcctacctaatctatgtatgctacagttttttttttttcatatttcgtatgtaatgcgcacgtacctttgcaggtgatgacctgagattgcttgagggaagacgatgacattttacaagccgagacaactgagtgacccagcggagaagaataaggaacttggttgttggcgggagttgtgcttggttggtgagcattttgtttcttatttttagaggggtagttggtaggggtagttggtaggctggttccggggttcaattgagtgcttttatatgcaccacattgttttgtagaaacttattcttaaaaaaaaacaattaaaaaacctaaaataaatttcctccaactaagtacaatctacttcaagtttttatcctcacgagatgatcactacagcaagtgtttaagaatctgaagcttcgaattctagaaaaaaaaaactctgactttatgggtagtttctgaatatcaaaaataacctaagggagctctccttttataggtgaaggaggcccacaaaaatacgagataaattacaaataaagtgttttccaccgctgatgatgatctcacagtgaaaaataacttatggtaaagatagttaatttttggtgtctgacaggtccctttgcgaaatattgaaaacttattttcgtaactcttttgggggttaattttgaggatgataacttcataatttttcctggtgtgtgagacatgacttgatagagggcttaaatagcttcaaaactcaagttgaatctcatcaatcgaaataaaattgagtgagttatggttgttttactaaaggcagttcaggttccagcgcccaagttgacatccagcgccaaggttgacattccagcgccctagttgacacctgacgtcaaactggaggtggtataactgtgaaaacgtccaaggggagtcctttgagatgcctaagtgatggtttgacaccccttagtccttttatatgttatggtaaagctagtcactcattctcggagatgttgttgttttgcgaaaacggagactcgaaacttccggcttctggatgtgccaaaatataagttgttaactcggttgatctaacttcatggatcattgcacttgtgaaaaaccaaatgaattcaaacaagcagaatctagtgaaccaggatttatgttgacctaggcgttgaggccttctaacctgagcttcgggatcctaattttgatactttcaaggcttccaaggcttctaaacttgagaacatggtctctccccccatttttgaccatgccagagtcaatggttgcatcgaatttggcattctagcacttaaagggagcatcccaggttaattgccaatctgggcgttgggcccagtcctaagtgtcaaccttggtgttgggccctgttttacagggactcgagtttgtggctttatccccgagtttacttgaatctttgttatttctaatgacggtgaagacgtccagagcactttttgctaaactgatttggaaatagcccaagttgacaatggcgcaaggcctagtcccaagtgtcaacttgcgcgctgggtccctcttctgcccctttagaagttccttttggtccccagaactagctgattctcaatattttctgaagacggagatgatgctcaaaagaattctaagaaaactccatttttgtggcccaggttg

SEQ ID NO: 383916 - DNA, 3683 bp, Cannabis indica
caatgacctctcacaaacactttgcaaaacattttagagttagaatcaacaatttcattattggcatagaactctttaacaatcctatccacataaccagaaaaattagccaaagaacctacccattttctctcttgaagaatgttaagaacaccatatagacgttgatcattcaaaatataatttctttcaacaagaaattttctttgtgcataaataaccatgtctcgggcattatcattatagcaaaataacagagaatgagttttaaagtgtgcacctttcatctttggagaagatataggtccagtgactggtttcttgcctttaccctttaaagacaatggtgaagtgactggtgcaggggcaaccattgcttctggaacaggggcagcaacatcttcagactctgtttcatcagattctgattcaggatcagcaggagcaggaaaagattcattagactcatcaattttacaaaattattaaagctcacaattattttcttacttgttacattggtacaaaattactttattatcaactcaattaatgataaattgacaatatcccatccttttacagcaaaaaatgaaataaaaaacagtaagaaatgacgaactagaaataaaattagaccaaaattatgttatattatttatatattaaataaataatataatattgtaattaaaaattgttataagatatatttattaaatgaataatatatacattgtgtacataattttgtaacataagagattttacatatcatatagtataataaatatatagttgtaatattaaaggaattacattgtgaaatagaatcgtaataaataaatcaaactttaataatatgtaaatagtataattacatttggaggcatacaaaggaagtttctagccattagaaatggtcaaaataactattcatttcacatgtgaatgttagattggggaacatctcagagaggagatttaaagttccaaattggagctgaaaatacgaaccaggcgacatgtcgtctcttatttcatggagacaatttcatcatgtttcaacgtattttgagagttcgtatattttgttttaggtgacatgttgtctggtacaaggcgacatgtcgcctggagctctttctgagaaaaatgatgtgaaactgaaagcagccaatcgaagaggctgcaacctgatttgctttgggaatgggctcttcagtatgtgcgaggactaaagggtgagtctgagcctggttctcaggagtctcgaggtcaatagtctgtgaggctcactttcttattggcagttgttttcctgggccttttgaggggctccacgttgacatctgaggaagtttctgaggtagtcaaccttttctttcccttcttgctcgaagaatgaaggaggtcctcgagatccatttctgcgagacagaacaatgtgttaacatttgtttaaaagcaagtaaaaggggaaattgggaaattatttcccacctaagggatttaccataatcataagaagacgaagagagaggactataatattaactaaaatttctacatcctgtgatcctaaatatgtcgtatgaattaattggttctaaatcccagcttaaatatatatgacctgacctatccagcatggtcacatatttctcggctatcccatagtaggagttagtacaactaatttgaacgtgaaattctgggtactaactatcaaacctatgtgcaatgcgatctatgaggaagggattctaggtgtataaattatactggctatctcaaaaagaaactaatatggtaagctcggccctaagcactgtgggtgaccatccacattgattacctcgggatgctccttcttcggcttcccaagggactgggttctgaaggtagtgcgcccaagctgcataatcctgagtttcctcatctgctgggaccagaacctgctgccacgatgcatacttgggatctttgtaatcactagtatactcgttctcagcgaggaggcccacggacctcaagttgacctcgttcaaaaggaactctactaattagagaccgtagggaagacccagcaagtgcctgcgtcgcttggccatctcgaggataggagttggtcttttcgagaccactgtcgaaataataagattacaagtcagtggagctaaaattgaaaacatggaataatttaaaactaagtttaaggcaaatagtcacttacatattatgcggaaggtggttgtattgattggggagaggtcagtcatccaaaagaggtcctctttgaaatgggttttgtttggcaaccccacaatgatcttacgatcgcctatgtgagtctcaagataataaaaacctcctgcagcattcttcctcgcaggaacagccttaacagagtggagatacactatttccagaggagtggggcactcccatcctaaaattttgtacaaaacctttaaacttgcaaggattctatatgaaataggaatcaactgcaatggggtaattctaagatggtataggaagtccttatagtaatctcatagggggataattgctctagccctgatgtgttcgaggctccaatatccatgttgtgccactcgcactcgcctcgccactggtcccctcaggtgctttgcgagtgagttgttctggtgggtagcaactaaactcgccaggggctacaaatctaacccgacattttcgcttttggtcaatgcaacaagtccataagatgccacctacataatctccgatggctcataccctcgactcgataagttcagccttgaaggtaacattagggtcctggagagtcttttatttacgaggcttggaagtcaagatttcaaaatcctgggcacctggtgaaaaagcaatcgtgactctgggtaaaaataaaggcctaaccaatggaatagatggtaaactatgggattcaggccaagcagcatctcgcaagaaacgacgtttgccttctgttatttcttgcaagaagcacttgtggcgactagtaatatcatcttggtgggtttttactaggtggtccctaatttttgcatcatttatctctaatttagactggggttttgaaattctgggtttaaacgggatggcaagttcactggggcactctctttctaaaatttctagacgataaacttttgaaccagattgggacattgttacaaaaagaaagaaatctcgattcctagatgaaatttatcaaaccaaaagcttgtaaatttgagaaacccaaaagtctacgctctgcctaaaccctaaaatttacccaaaaaaagctcaacctaaaatcgctaaaatcaaataagatgacaaaggtgcaaaagaagaggaatttaaccctaattaaacaactgttattcattgaataagcccaatactaattggacctaaataaaatctatcaaatgtgataattttattttagcaacctagtccattttaatcatcaaattaaatgggttccctatattcatctaggcccaaagcaacatataggcacagacacacattgatttggatggatcctatcatgttaccaggtttatacacagatgaaagaagattacaaaatttacctgttacaaattatttatttgacctattgacaattagactatggttaaaatcagatcatt

SEQ ID NO: 383917 - DNA, 1282 bp, Cannabis indica
tgatctattttaaagaataaaatagaaaaatttttggagttcgtgagactgttaattagattaaagataaatattgacaatgggtatctctggcgattgattgtctttgtgttgggtaagccttgcaaagttctttttctatgctatcttatttgggcaacagagaaatgtttaaattgtcttgttacaatcaatcagttaatatagtgactcataatattgctagagattctactttatattttcagttttggaatcagttctatgctatctagtttggtggccaaagttaatagttaataaaattcaaaattttcttttaaaaaaaaattagaaaagctgataaagagtgatcgaagtacatgaaaaagttgttgagaaatgtgttggttaaaatgaagttaagatagatagatgtccacgtgtatgaagtttgaagtagtgtgtacagttattgttggtgaccacacgtgcattgattgacacgtacatacgtacacaaccactatattagattccatattcgaaattagaagattaacaaaagatgtcattttgtatcgtacacttgattgttttggcaggtggattcatcagcaaatgtccaaccagaaaatgtggaagacatttggaacttgagaggaatactcaacacttcatggcatcgggttcaagttcgtgttggccactctaacatgtagatatagatatatgaatgaatgaaccaataataaaaacaactgtaacaagtaactgaggtttgtacttgttgtaatgaatgagtgagtgagtgagtagtactgtcttcttcaactttggatatcatcatatcacatcacatcatgtattggaaccaactgtttaatttaattttaagttcatgcatttcacatgttgaataaattatattcttcttctgatgacagctgtggaacgtttcccattccatttcccacttaattattcaaattttattagtaactattataaaaaaaattgtaaattaatagttagatataattggtgcttaataataataatctttacaactaaatacagagttttgaatcatattattttagtagcaatttgcggcgaaaattttctttatgttttaatttttatacacttaatctttttatttttttttgtggcaaaacaaaatctccttatattttaatttttatacttaatctctttatttattttttttgcggcgaaatttctttatgtttatttttctttacaaatttgaacacgccagttaaatattaccgttaaa

SEQ ID NO: 383918 - DNA, 2117 bp, Cannabis indica
gctacattgctttagatatttgagtattaaagctataaaatgaagagtaattttacggcgaaaccctcttatgttttaatttgtatacatttaatctccttatttttttttgtggcaaaatcctcttatatttatttttctttacaaatttgacacgccagttaaatattaccgttaaatatcaactggatgaccactatatacacatgtgtatatggaacagtaaaatctctaagtcgatacaataataatccagttggtatataacagtaatatctaactgaaaccttaaatttgcaaagaaaaataaacttaaggaagttttggccgcaaatttctctaaaatgaactaatatgagaatcttgtcagatatcttattcatttgaaaaactcttgtttggtttttttctctctgcagagtcatggtagcaacactgatcgatttctactgtcttgttcttgctctatcggtatgtctccaccgttctcagtctttcacatagaattttcctatattgtactcttgaaagatgatctcagattcttcaatagtaaattaataataatcatgatgatgataagagaagtaatatacatgcatatagtttcaaatgtgttgtgattttggatatgaactgtctttttatttgatatgaaatcaggtttggattgcttacaaagaatcatgcttgatttgtgcagtcatttggatagttttattgatatgttttggaaggtaatcaaagattaagtgatgaagttttagttgcattgcaacatgagtaacctaacaagtgttgttgataacacttgacatgttttgttattgattctatttttgatttcttttctctctatatttcagcattgcaacatgtgcttatgttgtactacaactgtttcagttaacatctcaagatccactctaccttgttcttataaaacatgttgacaggcaagtacacaagtgagtgtagttttcaccaaccttagtttaaagttgtttataattattttgggtaaacaaattctgtataatcacatgtacatagttttctttattttttttggaccatctcgaatagaaatttaaaatttgtgttaaattttgtacaaaaataagtttgtgctatattatttaaattaataatattgacgggttttaatattttattgagaatatacaaaaattattattttttattattttattatttaaataatggtaatatgataaataaagaatgtaaaatttggtaaaattcgattaatcataataattagtggcattataataaataaaaaaataatatttattgtagactaaatttaacacaatgttatattttgtgtcaaatttgcatgatctgttttgaaagttatatgaagagtttctttttcttcataaaatagaaattagaaagacacccctttgctagatatgagtacttgatatttacattattaatgttagttttaattttcaatggatatgattaattattatagaaccatatataatgatcatatatatttttctacaaacttatatttttctttcataatgttgagaagtataaaatcagattgtctataactgtctttattttttcattaaagggaagaaagaaagtatggaatacctttgaccatctaacagtgcaacagaagatatatatagtaaggtccatacattattattaactgttgttgttgtttatttattttaatttaagtccttcttgttgttgttgttgttctcaattttattttctaaatgtgaccattttcaataataataataatacaaaaacattactacaaagtttcagtaactacagagatcttcagttatagtttatcatgtttttcccttcttatatttgatatttggtaattacaactacaaaaattggagctaaattatgtggacaatagttagagaggatcatttgatgaatttttacacataacgaacatcatttattaaattttggttgggataatgaataatattctaaaaggtaaatagcggcatacgtacctaaagttttaagcggtataaactcaatgttatttttagcgctataagtactaatatttgtaaaactgtaat

SEQ ID NO: 383919 - DNA, 2012 bp, Cannabis indica
ttttacaaaaatactctctttttgtaaaataacctaaaacaacgaaacaaaacaatataaaataacagtttaacaactaaaaaataacagtgaaaacttaacacagtatacagtatgaaacttacacaatatttataaaaaaaattccgccccacattaaaaaaataaaaaatgttaaaaatttaatatgtggtgtaaaaactcctgaattatttcagtgatgaaatttttttccaaatttttggtgtattttgtaaatttttcactaaaagataattaattaattaccctttgaaaaaacgataattaagtttctctttgctatattaatattctatatgtgtgtgtgtcatttcagctactccaacttgtgcatttattatggataataattaagagatatataatagtgaagggtatagtaatagtaatagtatagtattatgatgtagacttagccatagatgtctatatatagatagtttaagcccataatgatataatgttaataaaagtcatttaatttgtttttaatgtgctagcatatatatacatatataagtgatatgtcacttttcctttggctttgaatatatataaacatatatataatctacacaatttggcttatagcatatagcatgcaatggttggccataggtttttttttagtgtttgaatcttatccatataaattgtctaaaatatcagcaataattgatgatagttttttaatgcaatgtagatatttaccatcttttaataattatgatcatcattcatgcaccacatggtaaaagtcaaaagatcaattgtgaaatgacaaattttactcattcgagcaaaaaagggaaaaataagacattcatcaaaatatatgtcaaattttaactacttcaatcattgaaaaactatctatttattatatagatataataaagcaaaataaatttatatatagaatgatttacttttcctaattattgttatgttatgtacatctaataataatgataataaataggatttttgagtagtgttttaaggtcttacctattaatttgagtgctcagtttaaaattgtaagtgaaattgatgaatatacacaataatcatagttaattaaataattaaatagatatatataccatatttatatgtttcggaccactaataataatattaaatgaagaaattaatgagaaacatgtacattatttagaatgaaaacttaaccacaactccgttcactactgtaaaaataatatttaacaacacttaataaaaaaagtgttgctaaattatttgtttttgtaattagtcacacttaaatttaaagtgttgctaaagaactaatattcttaaatatctttaattttaaataaataataatgactgaagtactttcaaaaaagtgtattcattgatgatgaaaaaaaatttaagacaacactttctacataaatgttaccacataatctagatttaaactgatatttaattagtggagtgtaacttcctttatagatgagctatcaagaatgaaaaaactatcattttctcagtctaaaccaccattaatattaagaatttttccaagaaaattctacagtctcttaacttaatacaacatattgggtattaattaatttacaaatcttagttttttaaatatttacattccattacaaaagctttaagtacattaattattatatttcaatgattttttttccagacatgcttcagcatcgaaattcttataggattatactttcagctctaatatttggtaattttttaattttctttgtgtcatgaaactagctacttggaattcccataagaatttttttttttaattgtatttgattttattttatttcatcaattatctttctctaattaatatgtgtagtatattctttatttttcaatctgtgtgtttgtattggaacacacaatcaataaaatgattatacagtagaacctctatttaagaatactctatt

SEQ ID NO: 383920 - DNA, 1365 bp, Cannabis indica
caattaatttttgtgctatatagtgattggactttcattttccattattaactaacttaaaaaaaaattaaatgtattattattgtcattatataggactgggatcatgaggtaaagaatgggtataagcaatcaaatttggcccatcaatgcactaataggtaaatatttatattatttcaaatcaaccatgtagctcatttttcatcaatgtggtgtaattatctggcaaattaatagatattttattagtggcccaataatcacttttaaatgtagattcttgtatacattattattgttttttaataacaaattattgtatcttaaatcagcaggtttaaaatttatatcgaaggagctgcttggtctgttagtcataagtatattctttcatgtgattcaatgactttgctagtaaagccacgatactatgatttctttgctcgaggtttgataccaaggcatcattattggcccataagaaatgatgataagtgtcgatccataaaatctgctgttgattgggggaactctcacgagaaagaggtataaaaccttcttttacaatctcaaattcattgttttatccttactctagtttgtttattggtgtttgatgtgtgtaggcacaagaaattggaaaaagagggagtaaattcattcaagaggagttgaaaatggagtatgtgtatgatttcatgcttcacattctaaatgagtatgccaagctcttacaatataagcccactatacctccaaaagctactgaactatgtttagaggctatgagttgcccagcaaatgggttagcaaagaaatttatgttgcaatcaatggtggtgagtcctgcaaccactagcccatgtaccatatctcctccttatagtccttcgtctttatattcactctttcaaagaaaggctaacataactaatgaagtagagttactagagaagatgtactggcagagtcaagataaacaaaagccataatatgttaataatattattgtaactagattgggctatttagggtattaatatttagttgatgttataaattttatttatttggaatcgagatgttggatgaaagggagttcacatgctccaaatcggaaaatgcaaaagaaatatttatcttaattactattcctgtttttccatttcatttgaaatacatggaaaatctaaatagaggttcttgtagtagtaagcgaaaacaatacaattaaaagatgctagctcacttgaataacgaaaactgcttatataagataataaattagagtaaaactaaggtggcgtttggtacactttttttaattagttttctgtttttaaaagtagaaaagtgaaaata

SEQ ID NO: 383921 - DNA, 2513 bp, Cannabis indica
atcatgtcttctgaactttcctggccgttaaaaattcctcctgaactattgagattgttagatttaaggatttttgtttaatttcattcaaaccagactttgatatctaccaaatcatgtccctcgaactttgacatagactaaatcatgtcccttgaactttcatccatgctagattttttttactaaaattagataaaagtccttaaattctacaatctcaataattcagggggtatttttaacgactttaaaattttagagagcataatttggtacatatcaaaattccggggataaaaatcttagttagccttcattttaaaaatcgttagaacaacatggaatttctcttcttaattaactttttactacaacaacagggagtttgtcaatagcgtctggtgcattaagatactttcaccgcaagaagtgcaacagatgggcaaacgaggcttggaacttctccactcagtctcgatgcagaggctttccaacaacagttgcgacgattacccgagctgtcaagattcaagaaacttgagctcagggataacgtcggtggggtcactcgaatactgaacattttaaccggttaaaaaaataccctttctctttctgtaatataagcatctatttccaaaccccttccaagggtgggaagtcatagatagcctaatcctctctctaagtagcttactttacaagttaaaaatactgtaagtaaaggatatatacaacattatattttttgttatctttgctattggattcatgtcatatatatttttatataaatatatatatatgtattgtaatatgttaaaagatcagtgcttctgaagaaagctgatcttttcttttttttctttttttctttcattatctcatcaatttattcatgatgaaagaaaagcctttattatatattaaaaaagataccaagtaagatgtacttttgatttagtttggtttctttatatattttttagtatttagttacttttgaactcatcaactgttttgtttggtggtttaaatgtttttgaaaacaacccataaaattaaatttataaaaggattccacatttgtattgactttcattgcattcactactttgttgtgtaaaagtctcctttcattctcacacgcaatgtgtaataaattttattgacattgatggtttcatattaccatgtgaagttttctaactcttatctttaaatttcacaaatacaaattgtagtgaccaatatttttttaattattattgttatattttatatacaattattcaattttgtgatgcccttacattggattggatcggatgaataccaatgaatttgaatcaacacgcgtatgggcactatgcccattatttgtaggcttgacactttgtatttggcctttaaagaatgggaccaagggatgtcggtaggcacatgggatttgaattttcttggaatttttcattattatttataaatttctatgaaagaaggaatgaaagaaggaagagaggcaatggtttttggttttgtgatgtcttttcttttttttattgaattattataatgtatgtgtggggttagtatggtttgggtggccaatgtaaaaaggtgaagttaaaaaggccttaagaccctttggttttgtggctatgtgactatgtatgtgagtgggggctatgctattttgagtacatgaattatgcaatttctttctttgctttattattttttttttgtttatttatttatttatttttttcacttttttgagggatggaatggtggtgaggatgacaccttttcgtcactaccaaacaaacaaaatctagtaccattcaaaggtaggtttggccaatcctaccttcccaaacaaacctacatttaagaaaaataggaaaattaaagtgggatggtatgggggaattgggactcttctcctccattactttccattctatttcaacatttttttcctttttctttttgatgtatgcttttctagctcatagcatatgaccaaatttcaaaccatatctatatttatttcatcttcgtgtaaaattcactgtcttcctgtttacatgtatttatttttagacaaattagaatttttttccctcgaactttgacatctaccaaatcatgccccctgaatttttaagatcgttaaaaatgccccgtgaactattgagattgttaaatttaaggatttttgtccaattttagtaaaaaaaattctaacatagatgaaagtttaagggacgtgatttagtacatatcaaattttgaggggcatgatttggtagatatcaaagtctagggagcatagtttagcacataaataatcactgaaacggtaaaactgaatgaaattaggcaaaagtccttaaatctaacaatctcaatagtttacggggaatttttaacagccaaaaaagttcaagaggcatgatttggtacatgtcaaagtttggtggaaaaaaatcctaattaacctt

SEQ ID NO: 383922 - DNA, 1593 bp, Cannabis indica
tgcttcttgcacctttataataaaataaagatattaaatattattattggtgcaatttattatcgagttatacgctatattgacctaatagcaataacaataatcctaactcatatttgattaatatatgctgttcaaattcattgacacaaaagttaagttgcaacaaaaatataagaaaacaagtttactaaccttagtctcatattcaacactagctttgctaaggaactcagccttgagcttctcagtcattgtcaaagcattcattttctccaccatttgttgtagctcagcctcccttagtgccaccgccttggccgcctcgacctccgccacttgtgcatccttagtcaaacccgcctttttcatagccagctcagcattagcctcagccacctcagcctctctcgcattctcaaacaccttcacttcactcctaaccctaatctcctccttcataccctcaccgtgcctttgcgtcgacaaaatcttcgtctcggcatcaattttcgcggcattctgaacagtctgaccttctctgagtttagaaccaatctcacctttcatcttagcctcagacacatcaatcttagcctggttcgccgcttccatctgagtcttttgccctaaataagagaaatactcgtgtccgggcacatcaacgagttgtttcacattagcattgtaaatcacaagcccgaattgattaagttcgagttgaactttatcgaaaacctctcttttaaactctttagtacctctaaagatctgttccatagtcatcgaggcagcgagaacacgagtctcgccctcgatgactccctggacaagctctctcacgtggtgagagagcttgtcgtgagttgtcatgagcttggcatagagttcgagactcttgatgtcatcggcacgtggaccgatggtgaagatggccgggaggacaaaggggagcttttcggcactcatggcttggacttcgaaggtgtaattgaccggagagaggtcgaaggctgtgcaagattgacctgggagaatccatgcttttttcactagctttacgtcgtcgattccggcgccggtgattaccaggtactccgatgcctttgcaactttataatacattttgttattatattatatttcccaatattgatcaataattccaatgagtatttataagtaggatttgagaagttaatgacaatggttttgcaatttaatccttaattaaataaattcaattacttttcttttctccttaatcattcactttgaattggtctctatcctatttattattatttatttatcattttttatacgataaatgtggtatttaatttattattattaaatttgaaattaaggattgtttttgtaagcattatttatttttttttttggttttattttctctttgtatttggtaaggtggtaattatacagtttagtaatacactatattttaaaatgcaaggtgtgtttggatatgagatagtaattacatatgaattcttaatatcttgtttggcaaaatagttagtaattacatttgaaaataatattttttagtagctaatgtttaatatg

SEQ ID NO: 383923 - DNA, 3474 bp, Cannabis indica
aaatggatacagtgacgcacatgaagtgtcactgattattgtctttccagtcacccccattagtgacgcgcagtgaagtgtcactaaaatgttttagagtctcttaacaagtgtcactgaaacccatttttgtagtagtgcacgtccaccaccacatcacccaccccacccactgctcaagctgcccagacgacccatgatcgtctctaaccacattcccaaagccagcaaagctacgcctaggagtaacagccgcatcagagcacaatgaaaatgtacccacctccagcggacaccacctagttgaccgcaccatcctagccacgaacaacaaagcaaccgaatacacaccaactgctcctcaaaactcctcaagagaagcaatggcaagtttgttcaccacctccaaacgggattgttgttttccaaagagcacagagttttggtcaaaccacagccaccaccaaatcatcaaaatggtcgcaaaatcctctctcggcagatcctcgaacagcaccaacataagctaagggaatggaccagttcgacatcgagcaagcctctcccagacccccaatcgacaccacaaaggcacaagagtagtgcaaaacactaaagcatgatttggggtctccctatgcaataccataatgattaggcacgctatagttattttttaattgcagtgcacacttttgctaatcaaaatatttcctcgaaaatcgtgataaattaattgagtatatgtgacagaatattttcttagttaattattgtaatgaaccttcttttgttctgcaagctaccattgttcaaatttataatgaagataaaggaataaagtagaatattcttataactgtatgaaacataatgtgaaaataaaatgaatatttagttaccttacatgaaaattgaccctctgttaagaagtacaggtatataaatactgcatattaataaattttatatttattatacttaaaaagtttatatgtcaatgcaaataacatttagataaagtaagtcatatacctaggttggtttcatgaatcatgtgtaaaatgccaagtacttcattgtatgactcgtatgggcaacctattacattctatgcactcttttgccctccaagctttttggtaagagattggtacactataattttatgctatgttattaataatttggtatgtagattcttttgggatctatatttttttttatgcagtcagctattatactactttttgtttgagtgtggtcattataaatgagttctagggagcatgtatgattctccatgacttttttgactttgaagatgattgtttgtccatgttttgtggccagaaagtgtcatttacagttgttatcaacacatattaggctgtaatccgtagatgatgatcttttaactctgtattgttgattcatttttattgcaaatgggatcatagcaagttttactatttgtttgtctttaaaaaattgtccaacttttattatatcaatttcagaatctgtaatgatgttttttgtattttcccaagttgaggatctgtgatgatgttttttgggagttgagaagaggagccttcatttctgcttgcagcatggcccttaacagcagaactattaggttgtgagtcagctatttgggaaataacattgtcatttcctgcttgttgagtggccatggcaaaggcctaaggtagctctgataccaagtaaaaataaaaaagatgatagaaggtaataattcgcagctcaaaaatcaaaggagctggtgagttttcattcatagatagagcaatacaaaaggaaaaatatgaccgttggtcattgtacaactagcaaatcttacacaaaaaactacaaaatattctcccaaataattgccaatcattacagcatatacttgggaccacaaagagaaaaatatctgtaacaaactctgcaccagaatgtaattctttttgtgctaatctgagtacaaggacagtagagaaatcctttggtgagctgacttggattgctggtgtggattagtgacttggcatatcaggttgattcttaacaccaaccaacccggtcattacacgagcatgtacggttgttttttttctttctagaacccaatcaactcacccgatctttagccttaattaaaatagatttaattcaattcactcttaaaggcatgctaaactggactagaagatacaaagcttctaaattcaaaaaagaagtttatgttgcagtaattaatgctattatttacaacatatgggtggcaggaaatgatactctttgcacaaaaaaaaaatgtaatttatatatacagatagaattgtaaacacgaccaaatgtatagttaccaatagatttttctttttgtttttcttgatgatagataaatagatcttcccattttaaataagaactgatcaaatctggttcagctgtataaaagctcaatttgtttttttttttttgaaaaacgtgatcaggatcacattaggacaatcccgagaagattttaacaattggtgctggaacctcttcataccagcataacttattgtctagcctaagggcatgtttagccaaaccatgagccgcagtgttatttttgcagaacacatgagacaaaacttttaattgattggttattgtaatacttttgagcagtaaaatccttttttgattacaaaataaataaaataaagtaaaatgatatattgtccctacttaaaactatctatggtgaaaattaaataaatttgatatttgaatggagattgcctttgacacaatgttttatctaagaaaggttttgttcaataattttttaactgatatataggctagacaaataatagcaaatgtcaaagaaaattttggtactcattagcgcaatcttagtggaataattataaaagaatctcacaatagtttatacgcaagctgtctctaaaaaattgcaaaagtgtgtggtgtttggtaataatgttatctgtatcaattcatcattactcacacgcacggctataatgagtccaatttagtaagtgtacaacaccatatttatttgtttagactaaatgaatattttagaaataagtttttctttaattataatattctcttactttttcttaagggagtggtatatatcaatggaaatttgaaattgaatgcttaaaactagttccaataacaatatagttcccatcataataaagaatagaaatctatgctaatcttttatctttgttccaattttactcttggcatttcaaaagattctctatatatctctctaactctctttctctctatttctttctaggttagcatctcgcacccacgcctaaaacctgagctctccaccgttgaaactgttatattatttataataatataatatatagattaaatatgtgtaataaactaataatatgtaacata

SEQ ID NO: 383924 - DNA, 1459 bp, Cannabis indica
aagtattcttcaacttctcccatgtagcaacaggttctagcccaatgtttcttgtgggaattactcctgttcttaacatttttcatgggtttgtcataaacaaagggatattttcataaatgctataaattaaaaagaaattataaaaaaaatacaattttagatttttttcaatattttttatgaaatcaaatttttcttttataaaatacttttctgtaaatatgtaactaaaaaaatcattttaggtaccttttgtaaagatctcaaaaagaaaaaacttattattattataataataataataaattacaattgttattatcttttaagaaaggtttatattagttttatgaaactaggcaggtaagaataaggttaaagaatacctccttaagtacctcaatatgaactatgtggtatttgccactaaattataaaaataacaagtcatgttctaacttgctcaacaatgttaggagaaaaaaatgagtaaataccattttagattatattttgtaaaaattataaattagattttttattttgttaaatgagattttgaatcttttattttttaaaatggtataaaataataccttaaattgatttttcgttaaaataaaatttaataataatatcatcctgaaaccgttatgactagattagtgatatttttttgcttttatttgtactgaaatcttgcttggagttggttatatattataaaaattgagtttgtagtattattttataccattttaaattatacataatttaatttgttatttaattaaatagatggcttttgttcaaaaatattctagcatttttaattttcttacataataagagtgttattgattaaaaaataaaagaaacttattaatgaatagtgctatgtatccactaaagccagtctaagtttgagagctaacgacaatgtctaaagcctttctgctttgggcttaagctaactttcaaagtttgctttaataaaagtacattactaaatttaaactaaaaaattacttaaataaaaataaataaataaaactaggaaattgaccattaattacttaaaaactagggatgatttcaaaaataataaaaaaaaattacaaatatacggttatatggattttaaacattttaaagtttttaaaattttatttacagaaaatacactttttttttattcttttatgttatttttataaaatatcttaaaaatatatataaaaaaatcaacgtaaaagtgtaaaattttactaaaaataatttttatgtaaatttctctaaaaactatatgtgaaatatttgtccacaactcttctaatatttcattattattggaatggctaattaggaattttgtcctctgaactttgacatgtattaaatctttcctcatgaacttttaaggtcgttaaaaataccccttgaactattgagattg

SEQ ID NO: 383925 - DNA, 1411 bp, Cannabis indica
ttcatctaaatgcttgtattttttaataaaaataactttaatattaattaataaatttttgataacattactattcaacttttgattgaaatcaaattgtgatcgtataagttttttttttaaaaaaaaaaaaaaaaaaaaaaatctcactataacaagctcttacttgtggggtttatatacactttatagctaccaagtcttaatatagtagagttttaataatacaataattaatttaaattagtgagaagatatgtatatatatacactcaaaatatactaatgatgttaacatttatttacaaccttatcataataaacagaaagaacaattgcaactacaccaagcttcatatgaatcatatcaaatcattacaaagtatggttgtgggagaatgtgtatacaattcatttttggtttaaattaacggtgaaaaactattaatttttgtatgtctgaggtgaatttaaaaagaaaatctaaatctattgtagtgtagagttttagatggcccactaagttcacattctcaacatttttccattgatataagttaacttaaggtgcttaaagatatataacatcaattatttaagaaattgtaatttaatataacaatttgatatgtttgtgatttatgttcttgatcaaaattaattgttagaaaagacttgtctaaagaaaatctccaacaatggtcccaacaaagtcatttaatagattggcaccaaaagttacattaattttgttaaatgataatttaaatattgtattttttatatagtataaaataaaagagaagaaattaggaattggtgcactagtacgtaacaataaaggagaagtaatagttgtgttttctaagccatctcaaagttgtttcaaaagtgatgaaatggaaacaaaggcgctcttccacagtcttatttaggctactcaacatcaattgccaatagcacttgtggaaacgaatgcccaaagagtctctctgctttaaatgcttttcgtagaaatttatcatatttttttgatctcattgatgatgtctgctatcttttatcctctttccctagagttactgttactcatgctcgtaggcaagctaatcaaactgtccatggcttagcagagtatgctttagagttggatcaagatgtatcttaaataagaaaaataccttatcctagtttctctattattgtaaatgaattttaatttataataatataaaaaatttctcatagtataaaaaaagaattattatatttttttacagccgtgctagaaactagtttcaaatcagttatattaagaaaaaaaatgattaaaattgaattaaagtctatttaaaacaacttaaaaaaaaaaaaaaaaaacaaaaaaaaaaaaaaacaaaaactaatatta

SEQ ID NO: 383926 - DNA, 864 bp, Cannabis indica
tttccaaaaaaaaattagaaatatgtttgacacctataaatatacaaatatgtttttttttttgagaaaaaaatacaaatatgtttttttcttcagaaaaaaatacaaatatgtttgacacctataatatatgtgccctttcacattaatccgttattaatacaaacatctgtacgatctaaagcgccacaagtgcatgacacgtaagcaattgtgtctagcttttcttatgtgtagcttagtttatttattttagaggcttagagaatgttgattaaagttttttaaatattagtaagaaatgataaagaaaaaattgagttgagtgtggttgctaatgtatttaacagtaataagtattatattatattgtatatacatgtcattctggcgcgtggtatatatattcttgtatattgtatatatcaatagtactttagctggtgtgcataatgcatgtaataagaatcaattaaaaaactactataaatacatgtgcatgttggtagttacatgagtataattgtgtatacatgacatttaattagatctatccatctccatgaattataattataagaaaaattagttatatatatatatatatattaaattgacatcacatgagaaaaagccaaattagaaatattatatgtggcctttaatttaatgggaactatatatacatctatcaaaataattaaaatataaactatatatgcgtataataaaaacacgtataagtttgctttcggtggagagaagtgggtgcgaataagatgagagtactaacttgagaaatgctaaaaaatattattggtatatattaatttttttggggattttttttttcttttatatttt

SEQ ID NO: 383927 - DNA, 3457 bp, Cannabis indica
taaagattatgtttttattgatgggtttatgttagttttgttgatgatttggtttttaatggagtcataatacttgaacttgttgccattgtctgataaagattgattctttttgttcttaggtgagaaatgaatttgaattggaagggattgatacaatgtttagtcaatgggttttttttgtgttagttttgttgatgatttggtctttaatggagttacaatatttctacttggtttacattggatctggtttattattgtattgtggttgcccattactcatatgctttggttgatatactgccttggactctttcttttctttgcttctatgataaagattgattatttgcatatacatacacatctttggattctgaatttaaaattcagtctgattgttatgtgcatactgtttcttctgttatgtttagttttgggttaaatttggatattgggtattgtctaattattcattgtatatatgagtttttcctttcttggttggtctttaccttgtttttgttaattctattgatatgagtttgaacaggttggatttccttttgttcttgagatattgcttattgtatttacttagaatctttacacaatgaaatcacagattaggacaagttgagaatgcaaggaggcatcttacctttccgggactcaacccaggtctttccgagtttcagaaattgcaggcacttgagaaacatctcaacaaatgtactgatggcaggcgaatcggtgattggaaaagtgtgttgagagaaggtgatgcagccattgcttgtggagccgaccattgccctcaggtaatacggtcttattcttaaaaattgtactttgctgaagttgaatggtttgatgtagtatgaacttatataacaaatgattgaacctgttccaaattaaatttacagctcgctatgtgtagagcggaggcgcttttgaagctccaccaatttgatgaggctgaattgagcttacaaagtgtgcccaaacttgaaccaaccgcaaaagtttgctcgcagacaagatttttcgggatgctttcagaagcttatcttcactttgttcgagcccaatatgagatggcattaggaaggtgagttcagaaattctaaacttcactgtaaaaccagatggtaaatggttttgtgagagtgagaatggatgatggatgtgctgcaggtttgagaatgcagttacagctgctgagaaggctgggcaggttgatgcacgaaatgtcgaagttgctgtgctcattaacaacgtacgtttggtagcaagagcgagggctagaggaaacgatctattcaagtctgaaagattcaccgaggcgtgttcggcttatggtgaaggtctcaagcttgatccttcaaactctgttctctattgcaatcgagcagcttgttggtttaagcttgggatgtgggaaaaatccattgaagactgcaaccaagccttgaatattcaaccgagttacacgaaagctcttctccgaagggctgcctcaaacaacaaggttagatttcaaacaaaccccttgaatgtttcctaatcacattttgtttagtctttctttacctatgtgatttataattgcagctagaaagatgggaagatgccgtacaagattatgagctcttacgaaaggaacttccatatgacaatgaagttgctgagtctctatttcatgctcaagttgcgttgaagaaatcccgtggagaagaagtttataatctaaagtttggcggtgaagtggaagaagtttcaggtcttgaacacttcagggccgcagtgtccttaccaggcatgagtcttaatatctatctatgtcaagaactaaaataatacttgccaacttactttttgtaatacgagttcttaaaatttttgtcttcaaacttacaggcgtgtcggttgtccatttcaaagcaaactcaaactcacaatgcaagcaaatatctccatttgtggacactctatgtggccgttacccgtctataaatttcctcaaggttgataacttaacatgtacatttccattcaattttacatgcctttttcttatattaatttcgtgtttggttggttgatcaaaggttgacattgaagatagccctgcagtggcaaacatggagaatgtaaggattgtgccaaccttcaagatctacaaaaacggtaatagagtgaaagaaatcatatgcccaagtcgcgaaatgttggaacactcggtcaagcattatagcttttagagaaactcatgacaacaacactgtaactctatctgcttctgtgtcatattttcgagtcttcttcattcttttctttttgtttggcccaaaccgaactcccccatctctcttcgagagcccttccagtctttaccctccttccttagggatgatcattcttacctgtgacataatcaagaccacataaataatctttattagcagccattggtagtggatcccagagagatattagtagcttagtttccttttgcagttttttatttattcattcattcctcattgctctctggttccattttcttttcgtttgttctattccttttcggaacttgtatctcatattcatgtaggcctatcctagtggttgtgtatcccccaaaatgaaaaacagaaaaagggaaagagatagtaagtatgtatgtatgtatgtacaatttgattaaatttggctaatgagccaaaacatggggaagaagggaagaagagaggtttagagtaaaaatggctggttggtagaaatgatctgtacatgtatatatatgtgatatatacaagaagaagaagaagaagaagaagaagaaaaattggaagttataagggagattggatggttttggtgggtacttattgggttagtgaaagaaggattgaatatgttgttattattattgttgttttattttcctttaaaccatttatttttccattaataaaaattcttctaattttctctgtttctttctccatgtatgcactttcgagtttcgagttgaggctagctcaagtttttatcgggtgagtatatatataaatatataataagtgaaatggtatggagtttcaatcttcaaattccatgtttgggaactaatatactttgattcacactaggttttctcttgtgtgttcatgagtatttttttttttttgaaatgatcaaattcattaattagtatttagagtacaataaagatttaagttcatccgaggcattatacagaaaaaatacttcgatcagaagagaatcgagagcttctagctaaataatgtgctactcgatttggagattgttttaacaggttttctttctcttgtgttttcaatgtacatgagtgtttgttcacttaggatacttagttgtgttttttgttttgtttcatgtggtaaagtgaatggtatttaat

SEQ ID NO: 383928 - DNA, 1300 bp, Cannabis indica
aaaaaaataaataaataaattcaggaattgatcaaacttaatcaagactaaaaataacttacatttttgagaaattgcaatatctcaataccgtaaagtgctgattctaattgtacggcagagtagaactccccacagattgaggagaaagagagagagagttcaataaagcgctgaaaagaaataaagaaaaaatctaataaatagaagggtggaggaagagaagatattttgtacatgtaatgtatcagtccaaacggaggagaatatgctaggaaagcagacaaaatgaattgagtgtgagagtatttttggttagtttcctaaagaaaaaagagtaaaatatcggaggagaaagaaggaggagttggaggtggaaaatctttctctttttagtttttttctattttgttttctcgagaaagtgatggaatggagtgagtgaacgtgaaggggtcacatgtagagagagagtacttgcggttcatatgagagtgtggcagtaatcgagtgaaataagtttttggcgtttttcgggatcagatattaaaggagctattacacgtggttctgtttatttatagtgttcattttgacttggaagaattcacggcggttgtattgtatgtgctttcgtttagtttaatttaattaggaatgagtcctaataactccttcctactaacctctgttattaccattggattagctccagtccagcttttatggcactgtttatttattcgtttcgttggtattttattctaaatttttgttttcattagacaataaataattattgaaaatctataatgggagtaaattaataaaaaaattttacaccaaaaatacaaattacacactttattacatataaacctacacacggttaaagcaacttttttacattttctttatattttattacacatataccacatacacatcacatctatgcaccagtcacgtcaactcacctatcaaccatcatgcatccctcaatcacttccctctctttttttcttttgttttcctttgatttttttatttcatttcagtttttttttttttgaaataacaaataacctccattgttgaaccttaactccccacgattcctcaaccattttccctctcatttttgttcttcaaaattttttcaactcccactaaaccatcccataacctttttctctctttctttttgtttaccaatctttatataaaatggatgtgacccgttcttcttcatctccttcccctgttcaaaaaaaaaattcaaaatgagtttgaaatcact

SEQ ID NO: 383929 - DNA, 896 bp, Cannabis indica
cacatgacacgtgtcaactacccattaattctgaactttagaaactatatcaaacatacccaaagtacataaccactactacaacatcattaattatatcatcaaccttaacaaagcataaatatataaatagctataatcaagtagagatccatcattaattaataattagaacctaactataatatacacatatatataatattattatatttatagttttatacgtttcatcatgcatgggagtccggtgagttacggctgtaggaattgaggcgaagctctagggaagctcgggaaccgccgcggccaccgtcgggacaaaaccacccggagtagtaggcactgccaccgccgccaccgccggagtagttgggcttaaaactgttggagaagcagccattaatgtcctcagcgtggactgggaaaagagggagggtttcaatcttctgggaatgaatttcttgatgatgttctacttcaatattatcttcttcttcttcatcatcaagaggtctcttctcaaacaaagtattataagttgaaggataaggatccacatgaccaacccatccaaaattgtgaccattattcacttcactgctaccacaatcctgctaattcattcaaaaaaatatttataaatataaaaataaaaaaataattcattttgttctcttttcataataaaaaaaaagatcatttaaagatcacttctttttctacattttgaagattatgtacttttttttttgcaatatattatagttgtgagagtgtgtctagctcatttattaacattaaagaaccccccccataaaaagaaagaaataaaaggaatttgatctcttcaagatcaatatcatttcaaaacaaaaaagaatatatgtatatat

SEQ ID NO: 383930 - DNA, 2428 bp, Cannabis indica
aaaaagaatacaagtaagaatgtaatcttacaatcaaaagttgcccaagaagaaggtttggtggccgtactatcctttttcacatcgtggacataaagtaagctgaagaggtttgtggtgctggagttttggccctctgacaaagttgaagtaatattataactttcatttatatctagagagccctgcatacaacaaataaaaatcttcttaagttaatttctctacactttcaagaaccaaaaaagcgaagcaaagatgatgcagtggcaagaatcacagaaaaagaatgaatggaatcaaaataacaaatcataaatccaatatggtgtaaagtataatgcatttacaatgctgtaaagtgtcattgtgttcttttggcttaaacataataataagagataagatatgacattactgcgcgcggtttagccattgcgaaaacaggttgtgttgtgtgtttggtaagaatttgttcctcaagagagagacttcgtactttccttggactatcagtaaccaaattgagattgctttgtgattcacctgattctgcaattgcttttgtacttctcttcttagtccatatttttccttcatacctgttagttcctaatttcatttagtgaaaaatggggacaaataacaagtccatcctccataagaaaatgctcaaaataggcttcatgtaaagccacatacttgtcatgaattagctttgtgatgccacttctgtcaaaatctgaaggcattgttgcctcccaataattgtttgccttcttattccccattgctatgaaaagacaaaatgaaccatttaatgttccttcatatgaacctaacaacagtgcataaataatctaaactcttatggaacagaccagttgtgtagattcttacattccatgaaagcaatttgctctggaagccatgtatccaaagtagtagaccgtacctgttttcaatagaaagaaaaaagactaaacaatgagtaaaatatgtcattgctgaacatgttcagatcatacaataaatgatatatgtaatactccacaatgtgctgatagaaagagcacacatcaatgtgaaatttaacacataaaatcaagtgtcaaaagtcctgagtgagattactcatgatttgactactgaaaaaactaagaaaatgcttgcagttgcactcaaattggcatagaatccatttatagtatacagctgcaagaaatgaaatatagaatcataagaaacaagaaaatacaccttggaaatatgaactccaagactccgatgaattccagaacactgcatgcatataaatattccaaggttcacactagcccatcgtggtgccctgaagaagtaaacaacaacaatctttaagcaataatattacaggtgatacttaatttttcatcaaaggtttcaagatcaactctgcagcactttccaatataaactatcaatttaaaaagggtatatgatggtaattaatgtttggcaatcaaatcgagaacaaaatattttctaatataagtattgttaaaatgaatctgtaaatggggatgatgatgcaaaggttatgaatgtacttgtttcgacagtcagcgcattctcggttttctggcaacttcagaagaccttcaagaatctgcatacaaagaataaaagatgatgaagcaatgaaagcacattaaagatgattgaatgattggttaataaggaaagaaggagaccttggtgtgcttggcattgagctccttagacacagaagccttcttgttcattatgattattagttattatgtttggtttggttggaaagtgttaatggggggttgggttgagttaattggtgatgttatgaatttccattgaaactaactaacaaaagcgcattctatgcaatgcaaggcaaaggcagaagggaataaggggaatgatatgaatttggaatgaaatggataatgggatgggaccccaaaaactctcttgtccattcaaccaaacacatcacaattcatcggtttaactgattccaagggacaccctgggaaacacactaatcaagattcaaaacacctttctttttcttttttctttctctttttttccactttaaagcattgtaacacaatttaaataagaaaaattataaagggcaccataaaaagtggcatgtattggtgcattttaagattgggtctcccatatcaatataataaataatatatggaagtatgatgttgggcaccttaccaaataataatgcttttaaaataaatatataaaaggtagggtaaataatattttaaattttttagtaaaagttattgattggactctctgttttgtaaaataataaattagaccataaattttctaaaatattactatatagtacctgttgggaattattttaccaggatct

SEQ ID NO: 383931 - DNA, 2052 bp, Cannabis indica
atttttaatataaataaaaagcccccaatgaatttctgataaactaaaaattctgtcatatacacactttatatacaatagatattattctgtttatcatatatagtagcggtagcaaaagaggtttcatctaatataataaacagaattaaagtagatttgtataaaacccaagaatataatgaattaaaccaatatttttaggtgaaacaatattttcataaatattaaaatacatattatatatgtatatagcatcgtaattacttatatatatagagacagagacatatataaatattgtggtaaaatctgaagtacatatagctaggtaggtaagtaggtcttgagagtgttacatgagaagaagagaagcaaatgtagccaaagacaacttgccgatatatatttgtataggcaatacttgctcatcttgagggtgtccaagttaagcaaatactacaattaatactattctgcggcaagtcatccttggctgcactcaactctagctctaccccttcacgcaaagctcttgacccaaataatcaaccacctactttctctgtaagtgatctaaatgaatgagttaataatatggcctaaatgtgccatttatacactaaaaacttctaccaaattgaaattgggctatgataattcttaatgttttagcatatattctgtctgaccaactttctgaaagggactgcgaatgggctcacattccacaaaaggattcctataacatattgtaatataactacaaattttacatctaggaaccaatcaaatttcacaattattttaaacttcaaaacaaaatccaacatgctatttgcatgcaaagtttaacttatatacatgctaattaacattaaaaattgttgaagtcttcaccaactatgtagagttttcaaaactagatgtttctatcattgtgggtcaaacgcattgtaataacaagtaattagaaattgtaagactttgtggaaaattgaagaatgttaaaataaaaaattaggtagaattttctacaatattatagtttgtgtttgagtataatattatagttggtgtttaagtagcatgaataggaccttaagttctgtacccatgcagtgtgtcaaaaagagttggagtctaaacaatgtatctaaagtgtacctgtaaaagtgtaagctatatgtttgtaaaagtaagtgttattaaataaaatagagtttttcgtgtgtaatgttgccaattcgtgctgtaattatttttgcaataacaaaataattacactgttaaaaaatttattttgatgtcaattcaagggtaataatattcaaagaaaaatatcatttatcataaccctaattattaggtgatggttatagcatataaatctacaccaaagagtactaatgggttagttagaacaacattactaaagataaaccgacatttaaaaaataaaaataaataatcaacatcttttttattgtttgtgaaccaacacttatgaggttaaaaaataaaacatttaaccatttaagtgtcagttcagaaacgacactgaaaaataaaaacctcttaaatatttattcagaaatgacaccaaagagattcaaaatttacttcaacctctttcaaaaattattttattttagatttattttggaaattttttttaattggagtataaaaggaaaagtgtgaaactttaatttagaaaaccctttaattaaacaatctctttctttcactcacccgatctctcacttcccctctcttcttcacgtagcatcaaaggctaaggcccaatttccattttcgacaatcgaaaacccaagctaaccatacaaatcaaatcccaccctagaaaacccaagcctgagaaccctgatatactcggtcccttccttgtttgtctctctcttgttccttatggtttggtcaagaatggacatctttgatcttgagacaaaaatgaagctcgtggtgagcattagcgagcctgctcaatcaagtggtagaataagggcccatgtgtaaagaccgcttagt

SEQ ID NO: 383932 - DNA, 4058 bp, Cannabis indica
aatttattggctatgtatttaattctactcatactaatacaagatcatacattcataaatgaaatataaattttttgaaatttatatattataaatatttaaataataatttaataatcaactatatttaaattgtttcactttatttaatatttcaaatgtctaatacaattttttaaagaataaccctcaataactcatgttgttatttgaaattttaatacttatattttctttttagaagaatctcctcaaagaataccaccaactagatcaaaacactctaaaagaggttgaggacacaaattcattgattgttcgcatctatcataagaatgttctaaatacaatgaggataacctgaccaccaaacaatactaatcatgataatcatgtgaacatggtaatagctaaggtgtgttcatagttctagaacaaaacatgaaacaacattcttaaaaaaattacaatcatgaataatgtcttgtaaaacaagacacaaagacgaatcaagtgatatccgactacttaacttaatcacaatgctttgacaagtcgtctaaaattgaaatttattttttacttttactctatttctttactatgaaaatggtaagttattagacaattttcaaactaaaatctaataaaagggcattgatccataaattcattttttcattatttctataacttctactagtttttgttttttaataaaataatagttatggtttacgatctaccaaaaaaatttcaagtatatttgtaacatactttccaaacttcctcactataactatatacttagcttttggtacttcatgtcttaatcacacatgacaaatgttttctatcttattattaggctttcaattccacacaccaatatcaaaacaagaatggttgttgttattcaaagaatatgtgtatttgactgtttgtgttagagattatttctaaattttaataaatatcccacttggaaaagtaaaacaaaatcaacgtaatattcctagctagtgtgatgagagaaatctctgacaattattcatcaaccatgtattggatgacccatttaaattattatttctaacttgctaagttgttacttttcaactccttgtttgcaaaacactctatagtttatatttctattataaaaataaatagaagagcattgttatcaatttggaagtatccttgtcagtttgatgttacattaaaccaaatgatttcttgtgagaaaaataattaattataaaatattcatggcacccatttcatattttcactcctttgatattagtcatataaagtgtttattaaaatttccctaaattaattgaccacagtagtgagaagagttcatgtaattatagatgattttcactagggctgttcatctgatccaatccgcacttttttggtcaaacaacatccaatccgcactaaaagcggatttcattttttggatccaattcaatccgcacaatagctcaaatccaatccaatccaatccgcaaaaatgcggattgaatcggttactttggattggttactttaatatttatgaataattttttttttcacataattagcaaacaaaaaaataaattatagttattttatatctctaacaacacattaaataaataaagtaacaaataacaaattcaaaggatgaaaaaaaattgtatatataaaaaatatttaattttattttaaattgtatgtagaaaaaaatatataagaatagaatatacattttatctattaagttttgcaatataattgtattatatgtattagacttttaaattaatattttctttatattaaaatgttatttgtatatataattttttaattttgttataaatatgtgtagattggattggatcggttacttttacatgtcaatcaacatccaatccgcacaagtgcggattttgaattttccaatccaatccaatccgcacaagtgcggatatccgcactttgcagattggattggatcgtgcggattggattagatcggctattttatgaacacccctaattttcactcaatttgagccataactagtcttatagatggttcttaattccttggagatattttgtgaaagttaatgaagaagatggcatatggaattgccatctagaaatgaaaaccttttgatttttgtttgttttccttggaaaaaaagttgttgaaatggctaatatatatgttgggtttctttataaacttttttcttagtttatagagatgtggtcaccaagctagagaagaatctttgacttggaagaatgatcatagaacatcacaacatgagcttaatgaatgcaaaaaatcaacaacagtaaaagtaattaaggtcacattgtcgagtcatattcaatgtttgttttctaaaatgttagagccaaaattgctttgttcccaataattaaaatcaacaccattaggaagtagccttgtgaagaagatgaccaaagtaaatgaacctacatatttagagctcatttggcagttgcttaattggtcttcttaaaattctagtccaaatctcataaatggttggaactgggtgaagaagatgtgcttttagtctttattcctcgatctcttaacatttgccaaatctgtctcttaacagcatgtggttctttattaacctcacttttgcttttaataccaatctttgtctcatgtgatgagagatattcttttatgtaaactatgaagtttctctcacttattattacaccgttttttttaacctagtcaaaaagagagtttaattacatttgtagagattagattgtacaaaaacatattatatagtacatttttaactttttaaggaataaaaatagagaacataaaggaattctgttataatgcaattcttgggtttaagataggttgtcaaagctgacattatgagccaacattaaagaagaaacagttgggttttggttctctacataaaaagctcaacatagtttttttctttttaaaaaagaaaccctttaatttcctttaaatttatgtggttatagtacagcttaaccttatctgcaaggctacttttttctatgccttgcttaggaatgtttaggtactatttaattgattggaataacattgatttagctttaaaaaccttccattccatcaacatgtataattgcttttctttccaattcaccaaactaaaccccacagtttatcagaaaagcaaagctaaaaacctaacttgcagcctttagaaagagagggagatacatagatataacatggtagtgaaatattgtttgtggttgtaaagtgatgaacactgtcctttttctcattatgcctttactggaattggtttttttttttttacattttccaaatctcttacttgaaaaataatagaattgctaaaagacattatcgatgcctaacatccttcttgatgtcatatcactattggtgtaattaaatagcgggtctcatataatttcagaaaataatttttacaaaatatcgctaactaatcataggtactacctataaaaggtgctaggcatcacttttaaagaatatctagctaatttcatgtctaggcatttaagattttttttcttcataaatatgaaaaaaattaatggagtttatttttatatgacaaataaataatacaaaaagttatgggattaaaaaataatcaaagtttaaaatatagaaaaaaaaaattataaataaatttgataaaacttctaaaaataaatatcgccaaaaaaattaccggcaccagaagtcattgaaaaagtcacagtcgccgaaaaattcactagaagtagatatcttagaaataaattaaaatagaatcggttctataacataatgaataaaaataaataacatagaataattcaaattggttattaattaaaatagaaccggttatataacataataaataaaaataagtaatacacagtaattcaaactagttataattaaaaaaagagttggttctataacatataatgaataa

SEQ ID NO: 383933 - DNA, 1712 bp, Cannabis indica
tatatatatatttgtatgtatttttatatatcaaatagattgccaccttgatcatttatgccaactaattaatttgttgaaagaagtcatttattaaataaatatatatacgaggaaatacgaaatatatccaaagaatatccccaaaaggcatacagaataaacacccctaacagggagacatatatcaataataataataataatatataatcaaaacccactagctaaatcataatgaaaagtaatatcatatggtctcaataatatgtatagtagtaaattaaatttgtaaatataatattataagtcaatatatataaatatatatttttagggattttttttagttacattttagtgaagacaaggttcctatttttgtaaagaaaaaaaatcttataattttaaccatttcaatatatatgtatttatattagagcgaagtcacgtgtctatgataattacagctttaagaaaatgaaagaaaagaaaaagaggaagaaagaagtatatataggaaaattgatcaacaataataaaaattaataaaagtaaaaagatcatgaatggagcatattaatattttcttgataatgaaaacctagctatctattgttgagaatcatggggttcaatcggacattgtccggaatatcggatatgatctcttccccgcaagggaatcatggggtagcccatattcttatatatgactcaattctctaccatttattttatgtgggatattgttcacaatatctatatacaatggtactaatattttacatgttaatctttttttgataaactaaatgagcaacactacttaaaactttttataaaggatattgtaggatagtgtttaaaatacataaatcaaatctagtactcatgattatatctatgatgtatatttatatatatatatatagatgtatatgactctgtaaaaataagataaatcttggggcgcgctgagccccactagtaatggctgtatattcaaattatattctcattatatataaaaagtccatagatagatcaccacgaaataattataatcaattaataattatacgttttttattcatgcaaacgcagtttatagtctttactatattgggtttgaaacaagtaatagtataattaataatgtacatttatatataaattataatcctagagattaatatacattttaatataaacccagggtagctttgtattatatttacattaattaagttggtccccatttaaattaacatatatacaaagtactatattgtgtgcgtgcgcacattatttatttatttgacatgttactttaatttttcttttaatacataaatgaatataaatctgaattatcatcaatttgtgggaagtaatttgattttgatcaaatttaaaagtaatatattgttaggggaaaaaatacattcttcattcaataagatcattaatatttttactgaaattatgcatattaataagtctctctaacccaaatatgtcagcaaatagtaatgacgattatcttcactattaatattaattacatacttaatcatcacgagagaaataactacgtatacttaggctacaattaattgcttttccaaatattgaaaatacaagcctttaattacttgaaatctcgaaaagaagcttaattttatttttctgtgtgaaactttgtgtcg

SEQ ID NO: 383934 - DNA, 2298 bp, Cannabis indica
tcattagcatggcagaaaagcaagctatcatcggcgaataataagtgagaaaccgagggagcaccacgagaaatagataaccccttaaaagtaccattctgctcttctaatcttaataaagctgagagaccttccgagcatatgagaaagagataaggatagaggggatccccctgcctcaaacctctttgtggagtgaccatgccttttatcgcaccattaatattaaaagagagagttgaagaagaaacacatctcataacaagctcaacccaattctcatggaaacccattttaagcataattgccttcaagaaatgccattcaactcggtcaaaggccttgctcatatctatttttaaagcagcataactttgtcttcctctttttattctttaggcaatgaaccaactcaaaggcaaggagaacattatcagtaataagtcgtcccagtagaaaagcactctgattcagagaaatagccaccgacaaaacttttttgaagcgacccacaatggctttggaaaccagtttataaagaacagagcataagctaattggtcgataatcacgtaagtgctgaggttggtctactttcggaataagggtgatgagagcagcattaatatctttcatatctgccccttcattcaaaatcttcaaaacactagtagttaccatagggccaaccacatcccaatgttgttgaaaaaacatagcagacataccatccataccaggtgatttatcaggagccatcgatttcaaagcctcatccacatccaaactggtaaattccttaagtaaaagatcattcatatcctcagtaatagaaatattaatggcttccaagataatgttcaaggcatcactgtcaggagtattcgaagcaaacagttgtgaaaaaaagagagaagcttcatcagcaaactcttgatccgaatagagaagtcttccatcactagtacataaagatttaatcttgttattattaaatcttgcctttgctcttgaatggaaaaattttgtatttgcatcaccgctttttaaccaatccacccgagccctttgttgccaataaagttcttccttctcaagcaaatcatctaagactttctcagcttctaacatttgatcgtactgagcaggagagaaaacctgactgttctgcaaagcagcggcttttttctgtgcattgttaatatcatgtttcatctgcccaaacttgttgtggtgccatgactgaagggctgtagtacataaggaaatattctcaaggagattaggcataggctccacggacaaatcattcttccagttgttaataataatctgtctgcaatcggcatccttcagccagaactgttcaaagcggaacctgctacaattcctagcagcaacccgatctcggataggaagggagacattaaattcaatagctctatgatccgagctataataatcaagatggttgatatgattctctaggaagatgtccttccactcaccattgataaaaccacgatcgagtctctccttaaccaagaaaccattgtaatttttattggtccaagtaaatttatctcccataaaattcagtggagtcacattacagtcgtcaatagttttcctaaattcttccatcaattgttctcttcttaaaggaccaccttctttgtcatcattagataaaagttcattgaaatcacccattatcaaccaaggatccacaagagatggtggagccatagaaagcagtgaagtggaaccgaggccaacaatcatacgaaacaaaaacatcgaaatgattcattgagaaggaattaagtgatacatcaacatgatctttccataacaataagcattcgtttttcgaggaccatatgttaaaaaacaaagataaaagcatagataaattagattgtattctttgaattattattctaattttttatattttcaggactatgtagcaacaagatggtacagggctcctgaattgtgtggatcatttttctcaaaggtgctgaaattttacctttcacttttttggaagtagttttagattgacatctacaacaaggattaccatttgatttttatcttaaaaatcataacagtgacttttgtagttggattatgattgcttatttgttgatttgcttgtattatatttatgctttattgagttattctatggaaaaaagagttggggtcagtttggccgagttctagtttatgcacttttagctatgatgtggaaatctgctaaaggatgaagtgtttagtaaattataa

SEQ ID NO: 383935 - DNA, 2296 bp, Cannabis indica
ttacataatttattaacattttaataaaaaaaaaatgagaccaaccaaaagaaaaaatgagaattccaagaagaagaataaaagaaagaacttcaatcttggccattttttttttatagttttctccttttttttttctataattttttacacatttttatatccaattgaaaaattaattaattaaaatttctattttctttttcttcaactttggtaaaattagtgatatgtatataagttttgttacgagatattgtattttaggaaaatatataagggtgattatggttttctagatatagtttgttttatttatttattttgaaataatacatcttgttgattcggatgagttttaggaagtcaactaagctattttgggcgctattttgtaatttttatactttgtaaaaaaaaatggacacattatatacttagtaattttgaacgaaaatgataagaaattgagtggaaaatttatcatggcatcaagagcataaagagattctaaggacgaactagagtgttttctaaaatagtatttctaaaattaattaattagtataataattttataaaaggaattaatttttagcaaaataattatgtatggtcgatcaaaagttacactatacattcataaaactactattatggtcatttatgagaccatcatgcatggtctcgtagagtaaaatgagtgtagttattttgcaaattttactatttcaaattgttaacttggcaaagaaaagaaaagaaaagagatgaggacaagaaggtggatatgacatttcatctcggatcaagtgatggcgcaattacgtgatgagaattatgatgaatgcatgggttaaccttgctaaaagcctggaagggatgattttgaagccaaaaatagaggaaaaacttgagggttggattgttttgcattcgatgttgttggtgtcatggttgaccaacaccattgaattgtcgatttgttctaaacttggagaagaatatcatgttgatgcaaaactcctgtggaacaatctcaaaagcaggttttgtgtgataagtgtatgtgttggaactttcactaaattttacaaaatctttgtatgagaagtgaagtgtatgagtgtattgagtcccacatgggataggattaatactttattagaagtgtatataatatacaattttgacatgtgggttgggccaccaaacggtattcagttttgtgcgcatgagtgagaactcacacattgtgcatgtcattttatattttggaaaaaatttatttattaaattattattttttaattaattaatttagtttttaaatgtgtttaattaattattaagtagagataatttcttatctgtaatttcaacaacgtttacatgattcctacgatcagaaaaaatgattttcttcttgttacttcattctgtacgttcctatataatgcattgaaaccaacgggagaaatatatcatctttctctaaaaaaattatatacagttttatacgattatattactaatatattacgcacgagcagtagttgtggtatagttcttccaaataaaaaggtctccgtaaacgtcattgttggaaagttgtccactccgggttcaatcttcagtatagctagccctcccctggaaactctcctggaaaggagttccagctggctagttgtctctcatggaatggtaaattcggatagtcgactccaacagactatatcctatccgaaagcagcatcaacaagtatccttggtccgtgagtccaaaaactcatatatgttctcggaggctctgacatttaagctggcgtggagactttgctcaaagaggagctggttaagttagttatttctaactaacttaacaatttcgtttcttggagccactgactttagaatcttaatcctaaacctataaatacccattgacttcgttattttttgataaattaagaactcaaatatacgagattaagaactcagagagaagagattaagaactcagagagaagagattaagagcttgagagataaaagattgagaggtagagagagaggtgcagagaaaagagagaaattgagtttggattttgtaagaagaatcttctgtagatgaagaagattcttgggtgtaagtgtgagagttgaaacacttagtgaggactcaacagagaatcttgtcttgactgtattgtacctattcttactcaatcaataaagaaaatttttggtggtgttccagaattggagtagagccatagatcacatcaatcta

SEQ ID NO: 383936 - DNA, 2092 bp, Cannabis indica
ttaagttactttttgaaaaaaatcatcgaaaattgagttcaggattctatttatattatgttggaaaatatagtgtctaactgtctattttgtcatctaacaaaatagagagtctaattaataatttttgcaaaacacataatccaaaataatattacctatatataaatacatatatataagcatctacctataatgtattttaatattaaataaataaaattcaatattaattttaacctatgatttattaattaactcgatatcaatattttgagcactacttagatgtgatatactgttattaatgtaatttaatatacaatttcacatactttattttaataactatcataaaaaactgttaaagtaacgtcttattataatattagacaccactgatcaattttgaaaaatgttaataaaaattagtagtatctaacattattacaagatgttatattataattggtataattatatattaaattttacacattttaaagtaatagttattgtaaaatatgagtgaactcaataatagtgttactcatctattctcttaccctttaagatgccaaaacactttgttttgagtaattttatgatgcctttattttgatccaatcatataatacataggtggtaacacttgtttattattcttcttctatatatgtccaaacaactacaatgtagttctagaaccaaactgttgtatttgtatggtaggaaatttaaatagtgtttcaataataccaagttgaagatattatgttttctccaaaagaatttaatagtcatcacctttttttctttttattcactaaaatatagaaaaatgaatagtgcccaaaagctagcattttttttaggttaatactattttattattgattaaattttctattttattagataataaattagactctatatttttcaaaataatacaaagtaatacttttagcttaatttttaataatttatctttttaatataaccaacttgcagataatttctagcacgaataaatacaacaaaagtaaccaattttaaaaaaacacatctttatcgaattattattaaattttattttaataaaaatttaattcattatttaataaataaatagtccgatcaataacttttaaaatctcataatctaaaataatatatattctaaaataataaatatgtatatatgtctaaattcttatatattcttctttttattgttggtgctttcaactttacatcattacacaacaagagattgagaaaagagcataaatatgtgatgcccacatggtatttttaatgttttatatttaaagaacagtttcaaagtaaccctattaatcctttttaatatttgcttaaatataatctaatttcaattatagtacataaacataggaaaaaaagagaactcttattacccttgattatacttcttttgtttaccaatatattattcttaattatagtgagatcagaatatatatatatatttagtgtgtaatctaaatgataatattattaattgggccacttaattaagcatggcagacactaattttggtctagagaaattgagaccaactttcacaatttattaatgtctttttttttttttattctacttttttttaagttgtttcatatagttatgttcaacaaggttacatcatgaccccatttatacatattatatatatataaatttaatgtataatatatattcttggatttggggtatacttgctcttaaattaaattaaaaagatagtttctattgttggtggatcatgaagaaagctctctttcacttttttatatcacaaagtgggcaactggtcatgagatcatatctcaatcttcaccactcaaaattagattctctataccttaacaaaatttatatattaaaaaattgttggtatttttaatcactatttataaatatcttttatacatagaaattttattttaatgtatcgtataaatttttaagaaattttgtataatttagaatctcaaaatcaagattgaaacaacttgttaaaagtattcttgttttgatatttat

SEQ ID NO: 383937 - DNA, 2429 bp, Cannabis indica
tatatatgaaccatactttcaattacatacttcccgagacaacaaatgtttaaacatgccatttcccattttttgaggctccattttctaggtcaaaatctttcacaggatcaaacttcacctctcctaatagaaatcaaactcttcacatagaaacaagcccaatgatcaaatctgattccctctagatcacaaacaacttctctaaacttttgggtatgaatgttgcaagacactaactgtacatgtccatctttctggatttcaatcagtttctcatcattcttccaaaatgatatctcactcctaacattttctagtggtccaacgcgaaaatagttagtccgagaaatagcaccatcttcagtaccatcaatcgggaagaaatgatactcacaagagcttcccctttcagttttcatatacacaacaactgaatcattccacactgaaaggtggaatccatattcacaataatcattatcaatatctcgcatataaatcaaatcatcaataactggcaaatgtatcagatgaaattcttcattacttatattgaaactaaggaccatgtcaaattcaaaagcatctggattatgcaccaaccagtaacaaactcccttccaacataaaccactgaacagataagaatatgttatagtgtacatcatgtcttcagaatcagcaggcataataatctctctccacgaattagaactcagtgtgtacacctcaattttgcaattctcatgacaccaaatggcaacacatttgtaatcgttgctttcaggatcaagtccaaatcccatagcggaaggagacccttcaagaatagcattctttggttgtggaagaagcatgaattctttcaaaacaggattacataacatcattgttccaaaatcgtttactagcagaatgagcccatcacagtggtaagcctggtcccatttgtccatatccttatatctttcattttgaattagtggcaaactgagagcttcggtgactgataaaaaaggcttgctcttatcattatcataaaatatagtcaacaacgggaatgtgaataaactatgattgacatggggagaaggcaatctgaaaagtagggatgcagaagactggtttttggtaaggaagaggtgcttggaaataaattccgggtcattgattaaaggcgagataagagaatagcaaaacttgttcacaaatttcaattgcaccagtgaatcagcaggtaacaataataagattacctccagtatctcctttggaaaatcagagaagcttctcatttctgccatgatcaggtaagctttatatcataactaatttgacttaaaaaaatggcatcactcaaacaaaactaattttatatagacttgttagaataaacttagttttgtaaaatctggtttataacagacttaaccttttatttttgggtctatacaaagaccagtctctgtaacattttactttacttgtgctaatacaatcaaatagcaaagcttttattcttctcatatctctagtaagacttttctttttctaagagaatacatactaaaatctcaggaacacaatatacagtacaagattcacgttaaaaaaaaaaaaaaagaatcaaagatcaaatattaatatcatgttgctattacatgagaagaatcacattaaaaagaagctcgaaacaaacccacatcaaaattatcaattgtggtctgttgaaaatggaataagttcctcgccctaactgttagtaataagtaatcaaaactaataataataataataataataataataacagaaatagaggtggaagtggaggctgaccttaaccgtgagaatttaaattcgggtctctccaaaaatttcttgtaaggaagctgtatgtattcgctcaccgagactgaaatgagtaaaggttagtgatgatgactaaggaaagactgcactgtcaaagtgttttgggttgggctaggactaactatgtaggttgggctctcaaatacggttttgtatgcaaaagtacccaatttcaattttttattttaagaatatgttttctattttggcatacattatatgtaaaattaaataaactagtatataaaatatataactgtaaaaaatatttgtatttataaaacacaaattgtgtaaagtgatattttaagactttatatatattatttactatagctttttaattctatacactttaaatattttttttttttcaactatttaaattcacactatccccaaatcacacaagccatttgtttcaagtgagcctcctatagagaatggaatattaaaagaaaaatttactttggggaacgaaattttaaaattaatctcataaataccactgtcttttttatttaaataattacataaggcactattttttgtaa

SEQ ID NO: 383938 - DNA, 1295 bp, Cannabis indica
accctagaataaaacaattatttttctaagggtaatttgtggccaagctacctaaatttttggattttgcacgatcaacccctgtactaaatttttgggggtaaaactccccaaactacaattttttttactatgtattgtttcgttagtctagctctatgatttgtcaggtgggccctacgtggaaccaagttaaaatttccatgtaacctacttgcctccacgccagatgcaattaggattaatatcaattctatcatcttaaagacaaattaaaaataaaagttaaatggaaattaaaaaaaaacaaaatcacaggttaaagagagagaaacaaacctaaaatctgcattgccattgttgtctaaagaagacgaaaatggctagggttcctcttctgagttgcgattgcaatgatgctaaaatcgcaaaaatctacacctcgtggattacttccaacccaggaagaagatttgcaaattgcatctaggtcccatgagttctcttcttctctttcttttttctttttggtctttactctgctgtaattgtacctaagtttttcttggctggcatcgtcatggtgggtgtgaattctaggaatggatcaatcctcctatatgtgatcgtgccaaaattgtgattcttagcctgttgaggaagattctttagttgaaacatgaaatatcaacaatttataagtcataagtaggagtactaaatgagcaaccttaccttataaagatgcccgaaagtgatagctttcatgagttgccataaaataatagaagtgtcttttgtaaaagtatttccatctgtgttggtcttgcttttgtattgtgttggttcaaaacatgaactttagtttaacgctttaactttgataatgagtaggatcttggaaaagtgttcttgtatgtttggcatgtaatacttgacattttgaaataaaaataatttttttgataagtgtagaccttctattaccaatataaaagctaaatcatttcacttaaaaaagacaatagactgcttgattcaagacaacaatagatatcccaaaatatacctatcacaaaaggttaagcatacatattccaaaaggttatctgtcctaaaataaacctatcacaaaaggttaagtatacatattccaaaatgttaacgcagattttcgttaactaaatttgagcctcacaatagtaattttacacagaaaaaatgaaagctataaaaataaagaatatgaacacagggttttttacgtagttttacagttaaaattctgcatagtc

SEQ ID NO: 383939 - DNA, 2439 bp, Cannabis indica
atatatatatatcaacatcaaactttttatttaaaaagcttttatatcaacatcaaacgttttgtcacttcccaaaacatgacaaaaaatatgttataataaaagacagtatattaccatataaaatttataaaaatacacagtaaaaaataaaaaatactgcctaccagtatttttgtaataaagtggggaaaagtcagcatattatgtaattttccctacttttaaggtctaacaccagctcatgagcccattcatcaagcccaaacaaagttgtgggtttactcataagtggaattgggttatggctatgaattcaattatgacttcagctcgacattgtcggacctccttggtcccaaaaggataactctcgtctagggagatggatattcaaagagacgcactcggataccctcgggggtatcttggaagagtagttggggaggtgtctgggtgctattctacgtgacacccttctaacatcgaatctcacagaattaggggtttgttccctatgtcagacttgggaaaggcgtacaacaccaaaaagcaacataccttttgtccaatgtccactacctcgatatttcactgtacacaattgacgacacaaagacacctatcactatcaagttgtacatcacgtgtagataaaggaaatcctccaatttaggcatcatctacgtgacccaaagttaatattatgatatattttaccctaccaataggcttactttcatgtacaaaaccttaacgggtctgggttcacctgaaaacctagtttcaacctatatgtaaggcttcatcccttcatgtaaagggttacgagttttggtaagaacaattgtgtaaaatagtccacaaccaaagagctttataatattgactcgtggattaagcttttttttgtcttctttactttaaaatcgtcttttctgagctcaatcctttactaattttttttttgaaaatctaaatgaacatatttgtgctttcattgagagttgaggaaagtattatccattgttgtcatctaaaccaatggttgcaactagaaacataatcatcaagctaagtgcttgtcaagactgtgaagatgttgttgctcacagtgggtcaaactggcccccttcagagaacttctaggcgggcatcgcaagggatagagagatttcagaggtgggtagctagccatcctcctcgaaaatgccaacaataggagaaagacgttgataaaactcacatcaacaaagatgactaggaagaccatggtgaggaccaacggggtgacaatggtaaaaattatgacaaaaactacgaagaggaatactatgaggaagacctcgaggtggtgaggttgagacaagtggtagcagacaaacaaaggaaaatggaaaaacactcagaagccacaagccaaatacaagacaccctcctatagctgcaaaacatggtagcaaaagggaacctcaatgctaaaacccaccaatgggaaagtctaaccatccgagggctggaccttctaatccagtaaacaacaaggggaaggccaaaataactaagcccccaaggaagaactatccgccgagacccgtgcaaaacgttccacataacaacaggaatgtggtcgacccactcttgtggaaagataggacaactcaagccccagggctagaccgtccagtcgatctgtggagcagagtcgaccaaaacaaaaggcaccatactaaagtactgtagcttgttgtttgaggaaggaaaaagcaccccagtagtcttattaaatagagcgttgaaatagaagacctagatccccaagacaacatgttaacaacggatcttagggacggtctgaatgccaaaagggaaaaactaagatttgagaaagccaagcctcgtagaggatacctcataaaatatataaatgaccgagtctgctgatgtaaagttctgaatgacaacactagaaggttggaggatcaaattgccgccttaactaaaatcacagaccgagtggtccataagcaaagtggcaccttatttgatactgacgacgaagacccaaagccatgcattagaaagattttagaagcatcacttccaaaacacttttgcatgccctgaatggaactatatgaaggttggacaaaccccagggattatcacttggtataataaattgatctcaagttagtgatgacggaagatgtctttgtgtcccactcactttagcttgatccattgaagattggtggatttgtgcgaaattggcgagatttgcaagaaaaaatatgaaagttccagaatcaagagtaagtctattcacactgaaatctggtcaacatcgacttgctagatgggcgagataagtaataaatagagacacaaaatttatagtagttcactcccaatgttgcaatggtaatggagctacgt

SEQ ID NO: 383940 - DNA, 1020 bp, Cannabis indica
ttcatcctcccttatgtattgtatctctagtttgttattcaattcttgtctattctcattgtttgtggatcagatattgagtcttgttcatttttaatcttgtttctcgagttcttaatgtgttaatcttggattgaggtgattgtgaatcacaaaactatttttattgtctttgtttttgttcacatctcaattagggttaatatcattaatcattgaatgattacctcatatcacatccaaaatataaagaatttgcaaaaagataattctcttagggaaatttgatttttatgcataaaaggggcaaaaaaaaaaaaaacgacccaaagttggtcaccctctcaaatttatgctcattgttcgttaggttcccaaaatacttatcccatttgaaaggtttcacttttcctctatcaaatttctctctcccataagattcgaacaactacccccattctttcccactctgtgaacgacgaatctgttgggattttatgttttaaataaaatctatttcaatataattagagttactaattaataaaagattagaaattattttatgttgcatggttcacatgattacttttttaattgtatgtttaatatataaattctattaaattctgaatatataattattcatgattatagtgttgtctacacagtggaaaataatcttgattatatgcttcaaagtatttagtcccatgatttattagtgcactggatttacattaacgtgataattagtgataaagtttactaacacaataatatgtaaaatgtcctttctagggcattaccaaagtatactagtatcgaatgtattgggtatacatcacatttgaccgatattgacaatagaaaagatgttgggattttatgccctaaataaaacctatttcaatgtaatcttattttctatcaatagaagattagaaatcatttaagtttacatgttattttcatgtttatggtttcatatacaattttttgataaatccagaacatgta

SEQ ID NO: 383941 - DNA, 2167 bp, Cannabis indica
ttttttaaataattatttacgtgaacgagtaatatgaataatattatattatgtgcacactgtattcgtgtaaactatgtgcatatagataactaatctttttaactgctaattaaaataaataaaaaatattaaatgctaatagaacaagagttttgagagtttttccatttaattgctaacgaaagtattggaagttatctcccaaagaaaaaaaaaattgagaattatatcccaatttactctgtttactttagctgtgataggaattaattggttgaacgaactaaccacatgctaaatcatgagtcaagtaattaactttcaccatctatagataatatgtttttttaactttcaattaaagttttaataataatatttacattatactatctaaaagttggcaaagcttatattactattaacatgtgtgtggctgcatacatatacatggtggtggagacaagttgcataaggttatacatacatatatgtttttatattattaattaattaaaaatttaaccaagaaagcaacattactctttgtacaggacaacatactcacttcacttaatatatcttatgttctataatattaataattaagctttaacccccacattataacttaaaactcgaaccataattaaaagtagtttatagattataacacgtaataacgtgtagtactacgtactagtacgtgaaatttaagtgaaatatattacaattaatatttaactactttcgtggcgatcgcaaatcgattccataactggaaaagggtctttactaggtagccacgtggaactgtgacacgtaagtgttgggaggtccttcagcttcagatgccagtggttcattaagaaatgcccagttacttctagtccaccttatgtatatatatatgtatccaaagattaataattaagtaattaatttaggattagatagatggatataaaattaaatatttctaatttaccagccatttttcttgatatgattttcaatgcttgtctcactatccacatccacttttaggctgtgtagagacaaagagcttgatttcacctgagacttttttccagagtagtcgtctttctcaaatttgtcaattttctattatagataataaatgagaaacatattatttatttatttataaaattaaacagatacagagataattaaatatgtaaatgaaaatacctgacgatgttgtttggcctctgagaggtctttaaggtgttcttctactgttttattctttgttctccaaaaagcttcaatatcttctttagtcagtgaccgattccgatttcgcttatttgtttctgagaatgagaccataacattcatgtggctctccattaattaaattacttttaactttcaaactaaaagaactacacaatacatgatatatatacttaaaaggaaggaaaaacagaattactaaattattaaatatctaactttgtacctgatttagaagcgaaaacaggtgagtcccaacctgacattagtgaacccatttgatcaaaagtacttattccacagaagttaatgatataagtatgaacacttgtatatatatatttatgtgtatatattctcttcttcttccaaactgcttttgatgatgagaaattattatgtaataagtatgtagctatatagtagtgcttctacgacggtggacctatatatactatagatacatgtttggatgtgtattattatatatatatatatatatataagttggtggtcatctttcattttcttgtcctttagtttctttattattttttatttgttttgataattcatatgttactgtttcattttctttagcaagtatctttttatttttgtattttattttatatattcgagaaatctcatttgtttattatgtacttttttttttctgaattatgtattatgtacttatttttattatttgaaatgctataaaattatttttaagttttttatttttatattttaaaatatttttttataaaaatttatatacctacagaataattttaaattgtaactaaaatctatattataaaatttattaaaataactcttataacaatccgaactgtaaatctaaaaaaaaaaaaacttaaaaaataattatata

SEQ ID NO: 383942 - DNA, 1519 bp, Cannabis indica
ttgtaaattttcttgtattccctttcttgggtttgaatgaatccaggggaaaaccagtaccattatgccaccttccttaatagtctagggaaccaatggcatagaagaacaccattagatcacgctgtattctgatcagagccagtgtcatttgttaatggtttttatagcatcataaacccgaaagtttgttgacagtttttacgacattagagatgctcaaattctatcttcttctcacttgtgtggctctttggactctgcaggtcttctctaagctaaaggaacaaaggttccccggtgaaattgaattaagaggccttgtggaaaagagaatcggtatttcaagaacagttagtggcctttgagtaggaggtattttgttcctaatttttgcttttgggattgttctaactttcaaattggacacagaaagtctggcagagacaacaatgggaacaatgtgttggtagtttcataattcatatactcaaagtgggggcccaagattagagattatatgcctacttttacttgccaatactgacatgttttttttttaactggtaattaaggtgttttgtttggctggtactagccattattaaataaggggttgtttgtaatggattaatgttaagagggaaaagctaatcttaatgattacaatgcttgttaagaagtttttaactttttaaaccccttaatacttttactgtagtattctaactataaaatggtgtaaaacttttttattcaaacacaacaaaagcagcacagtacaaggcaaaagcctactgcagaaagcagcagctcaaaagagaaaacaattaccagttcttaattacattataaaaatacaaatctttcccttttatcttgttcacaccaagcaacctgaacttaattttaacatgagtgttacaatagagattaaaaacactatagttcttattcatccacaaaaaataaatggtggcagccataatagaggtctgtattttatcctacagattgaggagagccttcgaataccagtctaaaaattctgtaaatcaaagggtcaaggtaagatatcaaaccagttaccaatctcagcaataaatctacagtctgtcaaaagatgatgaagagtttccgtttcagcttcacaatcagggcataaatctgagggaatagacaatattttgctgggatgatccctagtcaagagttgggttgttaattgcttgccaacatatgaaacgatgctcagggatgttcatcttatgctaaacttttgtaaatggaatttttcaagagaaatttttttcccaaaaaggtaaatggaatttattaccatttcctttcaccctcaaagaaaattgtaggaaatcaagctagcaattagttgtaaatttacatttaatgtattttccatttactctagtattactaggtgttcacattgtattatatataccctttgtatacactaaaagagatcatcagaaataaaaatcatttctctcatttttct

SEQ ID NO: 383943 - DNA, 2144 bp, Cannabis indica
tattaagaaaattgtgattgttgtttgaatatgagatgaataattcaacatatttgtgttattacataatgtgtttttcttttcatttaataactgactaatgagtggttaaaaaaaactcagaataaaactgacattccaagttaatatagtacaagtcgaagtgatctaataaaaggcttggagctatttaattgaataaccaaagtaacaaaaaaaaaagagttatagttgagggccgtcccattgcctaactaattttaaatagtagtttcatcgattggaatgatcacaaatagcaagacactacaaatgagagaaatagaaaggaaataaacgagtgagaaaatgaagtggtttattggctaagaaagagctcagattgcatgtattcattctgtggtttaataataatttataagagcaggcagcagagcagccacaacgacaagctactcctatgtattaagaaactatagctaaatgttaacaagacacaaataggagtttgttcaattactatacttctctatattaatttaatcctatacaccaccaacctgatttcccaaaacgactaggaaagaataacactatagtaaagaatggataactaacttgcctctgtacacggtcaacgaatgctttcacgactgccaaaacacatctgggtcattgctatacaagtagtgatcctgaatctcttgattagccacatggcgatcgataagccgtgcttggataattttacacacagccaatccagaaggaagcacccaccattcactttcatccctgcattccccaaaatgtatgttgtcatgaactgacataattataattcgtccattatgccttaacttacatggcaggctaagatgattaatcacttacatgctaaaattccaggactgaaagtcaggacgctttcgatttgagtgagctgtataatgaagcagtccacaaatgaaagcaaccacctgcagaaaagagaccaattgcaaaacatatgaatgtactgagaacatgatatccaaattagcaatacaagtaattttaatacaaattctgcaacaaattgtccaccaaatgaaatatttcaggtgtatttatacaatgtggaacttctttgaaaggaaaagacatttgagttgagataacatacaacatttatcatggacgtgagattccaaagagcatacaaacgtgcaaggcctgctgaccgtctaggtccttgactaaacaaagcactgattccagctggaaagggaaaaagtagaccgaggggaaggataaatagtacaaagaagaagttgagcaacgagatcgagtactgttgcagcaaagtgaggaaggctaagctaaaatctcctagaagcagaattgagatgaccaaaccaacaagatcctgtaataattagagagagagaaagagaaagtcagagagtgtccaagaatcataacatgactacaaaatatggaaatgcttagtagatccagtgaggcacaattttacatacctggtgtccaacaggtttagtgttataaactatgaaagaaaagagataaaatatagacgtcttttccttcagcgtttttaagctctctattcgtaaaatctctccaaaaaaccttttatgtgtcacaaaatgttcgtcgccattcaaatggcccagttgatcatccctgtcaaatcttggctcactgtaaaatgaacagtagaaagcagttatcttaactactaaacaatttataactcaccatgacaaaattaattatgagcatattgttaccctaattctggcccagtaagcagcgagatgtgctgactttcttgtgcttctacaacatcctccttttcagcagcagataccacaagtccaaattggcaatattcagatgctgtgtgttgaaaccatgcgagatcagcatgtacaccatacgcctttaaggtagggttcgcatgtgtttcaagccagctgatgacatgactcaatgttacttttaagtgtccacaacatactaagcgcagttgagcatttaaaccagccacaaagtcgataccaaatggtaggtgggatagactgaaagttgaacaaatttacaaataagggagcttacatttaaaggagaaagattggggg

SEQ ID NO: 383944 - DNA, 1210 bp, Cannabis indica
aagagttgtagattgagatggataaactatctgagggctgacttgaaaaggggtaatattacttcagaagaagaggaaaccattgtcaacttacataatgctcttggtaataggtgtgttttttctcttccaattattgcttatatatatatttgaaaatttttaggtaacaacatcacttttacatctattgtacggacatttcttattttcattatattgaaaaaattgtcaactatgaaggtatacattatatttataataggtctgttttttgagattgtttgagtaattttaagtgctgaaaatatgattcaaatagttagtttcaccgatattttattttattttatagaggcccaactaactgttttgaacatgcccccatagtcaatttgtaacttctgtccattcttgttttcctctcccattgaagaactttcatttttctctcctacttcctcatctacatataatttattttattttaagtgtgaacataacaaaaatatttttaaccatttttcattaaactcccaaatcaaaagtctattttgggttaatttgtattttgtgggaacatactccttattttttgtggatataaaaatgaacaaaccggcttgaaaaagacttgatttggaggttttaccaaaaatggtcaaaacaatattacatttaagaaaagtttttgtaatagttatttctagatgaaatttggtttgtttaatgcttctagttaaaagatcacattatcttatacagtactataccacctattttgacagaaaaagtcaccaaattattgtttctactgtttagttgaaaataaacacgtacatacataattcaatatatttttatacgcatcttcagattcccaaatggattctcatataattttactacgtataatgacatgtttggattattacttttaaagctttttgttatctttctatatatagctagcaactgtcaactattaataaatttcatcaattatataaaaggaccacaaaactagcataatatataatatatacgggttttaatgattatattaaatctgtaattacgataattgtgtatttattttatttgtaattgatactagtctgattttatttatttcattataaataaaaaataaaagatatttataaatattaattgtaaaaaatgtcttattaatattttaattaaaaat

SEQ ID NO: 383945 - DNA, 1375 bp, Cannabis indica
caattaatttataaacaggttaatctgaccgacttatttagttaaccaaattatataaaggactatgttcaatataggtcaatttatcaactctttaaacttgtttaaaacaattaatgttaacacattttacagtcttacatgatatatttgtgagtcattatgacatatttaactaattaattaaatatagttttacatgaaatacatataataaaataaagagtaatttttattttttatgtatttttaaagtataaatatgtaaaaatattagtttttttttttacaaaaaatttattttataagtaaaattttaaaaaaaaagttaaaaaaaaataataaaaaaaaaacaacatatgatacttggttggtttttctcttataataactggttaaccatctagttacccctatttatttttttttccatatttttcaactttttatatttttacaaaaaaaaaacaatatataaaaacttataatttcatagtaaaataattatgatggttgtgacatcattgaagaaactcagagccgtttattgatgtgagtggaaaaggataacattaataagttagtgtcggtgacggtattcggttgggaagtataactgacaagaatcacatgattgttgtttattgcttcaggcccaaattcataaacttcaggcccaatactaagcccaagttacacgtgatcccatctgttagatagaatctaacgaggattaaacaattaattaatttcacatgcaaatatatattcgatgatatctattagattttcacaatttttgaaacttggatattttgccatgtgcattttacctggcaccaaacacaattattctaatacctatataataataataaataaaaaaaagtaggtgtaaaagaatgagccaatgagggatataaataaaaaatgaaataatatgcacctatttcggatacttgttgtatttgtagggtacccttttgataatatattttccataagaaccaacttgaattaacaacaagatataaccaatcatgcttaagcatatttcctagtattcctacttgggaattctactttgtacataggttgtgattggttattttataatgtaattttgttatagagatgatattttaaaataaaattttacaaaaaatatctctctaatatgggattagattaatgaaataattttaccttaaaatctcgtactttttcacattttaatagtaagtaaaattataatgttgtgcccaataaatttcttctaactaaatggcttatttctaactttatatatagttaatgtccttttttttaaaataataaaacaaatgtccttttttattttttaatacctaaaata

SEQ ID NO: 383946 - DNA, 1935 bp, Cannabis indica
ctgatcgaaataaactaaaataaaaaaaaagaaaaaagaaaagagagagagattagagaaaattgggcccttttgttgtgtgggccctgtgtaatagatcaggttgcacacctaaagggctaggcctgctgggatctcttagctacttcctcggttttcaggcttacagaattgacagcaagctatatctaaaccagtccaagtatgctcaggacattctgaaaaaaaaaaaaaaaaaaaaaagccaatatggaagagtccaagccttgcagcacccctatgtgtccaagaaaaaactattcaccaccaaatatgatcagtttcatgatcccaaattgtacagaagtatcataggttcactgcaatatctaaccctcaccagactagagctctcatttgccatcaatttaagccaatatatgcaaaaccccacaaacactcactggaatacatgcaaaagagtgctcaaatacatcaaaggaaccaccaaccttggcctagtgttttaacctactacatctatgaccatagctgcctactcagatgctgattaggcatgcaatctcgacgacagaaagtccactactgggttcagtgttatgctaggtgacaatctcatcacttggggatccaagaaacagactgttgtagctagatcgagtactgaatccgaatataaggccctctcaactactgctactgaagttgtatggatcacttcaatcctcaatgaaatgggcatcaccctatccaacactcctacaatatggtgcgacaatcaaggtgcccaaaagcttgcctcaaatcctgtttttcactcaagaactaaacacatagaggtcgatatctattatgttcgagaattaatcaacaaaaacaaagttcaaatttcctatattcccacaaatcagcaaccagctgacttactcaccaaggctctcactctcccaaaattcaactttctttgtcacaagttgtcattatagtattttccttccagcttgagaagggatattgaggatactcaagattagtttaactgtctgtcagttagtggttaagtcggttgtgtctgttagtgctgttaatagagttagttactttagtcttgtttttagctcttataactactctgctcttgtatagatgatttctaaaatagtcaaccttgcacaaaatgtgctctaataggatgttaaaagttgtacgaaattcgacacataaaacaagctcttttaaatttggcacataatatagtataatataaaaaattacattactagtttttttattattaacttctatgtcatttatattattttattattttagtaatattattaatgattacataaaataatagactattggtaataataaattattactattttatatttttaataaaatattaattattaaggaaggatcgattaaatattaagttttgtataaagttttgtaattgagcaatactacgtacataacgctaataactaatgcatatatgttataatgttatttttttatgttaaatataacaaaaattttacattttttattagaatgattttaaagcctaccaaacgtgccataatttttcttgttcttcttctttcactcttctctaataaaaggattaattgttttgttttctttatatctcatttttaagtttttactataaaaaattaagaacattattaagcaacaatagtgtctctttaacacttagaggtgatacagaaatggttaacgatatttcaaaatagttattagactaaagggatattggcggctaaactacctgaactttacggtttgtaacacttaaccacaaaaaccaaatttttggcggctaaactacctaaaccctggttctgttttgctctgcacacctccgtccaaaaattacagttaagtgccacggtggac

SEQ ID NO: 383947 - DNA, 2423 bp, Cannabis indica
atattttacttccaaatattgcctttcaatttggaagaaacaaaagtctgaatagccagtatacacaaagcatttcttaacatacaaaaatggccgaaaaactaaacacataacttctatattacctcattctgtatttcagtggtttcctcacagccggatccttcatctccttcagagtcagtcatctcctcacactcaaattcaacattttcttcatcggagtcactcaactcttcctgttccatcacaatctcctgatgcgattggtcatcaatgtcatccatatattcatcgatggtattacttggtacaccagatgaggagccacctgttacaggctggctatgtgaggaagaattttcagtatgctgataaaatgagttgttgccattttgattattcattgtagatctagaaacctgtgcattagtagttgatttggctagattacgtgtcgttgcacctttaccccacgagttttccttcctagatgtggagctgaggtgaatctccaaatcaagttcattagctttctcaagtgatctgcctgctgcaagcggatctgtattcacaatttgagcatcatgaagaggacgctgaagttgcatacattttccacctgaactaataaagtcgctaggaagataatcatttctttgcaaaagaggatggaaatcaatgttttgtgctaaagaggtggattccttagatttcaataatttagtaaaactaccaacgtgattttcttggtgaggattatgtaaaagactcagatttagttgtggttgattccctggaaagaaactgaaagaacttgaatcactagtgctacaatttaatgggtaatagggtaaatgtccattctcttgggcctggaatagtaaaggatgcatctgcagatcagaatcagtacttctttcatcatctacacatttatccttatttaatctggattcttctatctgcaaactagtatggcgatcatttggagcattaatgttattccctccagccttcgtgagatcatggatccccaaacttctagcattaggaagttgagacatcaaattatctctttcaatgtcacatgtaccgctcgcagcagcaaccgataaagatgcaccatgaagagagcttctaaaggatgactgagacacaaccctaacagatggtggaagattaactgggggcaagtctggtgctaatttgaccaagtgtgtaccattagatcttcgagctcgatatggccgaaaatgggattgagatttcaatgtattaaaagtgctattaactaaactgtttccctcagtggtactggcttctaaatgtctagcaccagcaaaatgaaatgagggatgctgatacattgatggaaactgctgcatgctaacagccagaggttgacgagccatcccacaaccattattatgtagctgttcctgaacagcctcctgtgatagcataccgttgtgaggatttcttgcaatatctgagcaagattgtccaacgtaatcacttggtctccagtctgccaaaaaggcctcatgaacataagttttgcccccattatctacacaaccatctgtgttgttattgtctccaccagaaatttcaacctgagaatcctgcatcaatactaaacttgtaatacaattaccatccacagaaaatgcctccggtcacccattaaccaaaattatctagctgcacccgcccatagataaccccaagaagtcctatgcggcccagcaagtaaaatatataaagtagagtaaatatgtttttttgatagaaaaattctaggcattcaattgctcataaaccagcaaccacacctatattaccaaccatgcacctctcaagcaatcatgaagaaaagaaaaattaagtacttagttgattaatgtgttcagagataaaaaataatgataataataataaataaataaatattatccagacctctttattttgccacattgctgatgctgaagatttgaattttcttttgttgaattcatatagtctccgtttctcctttttatcagcatcaagcttatatgatttctgagttccaagagccactcgccactgtcgaggcaataaggatggatctctatgtgggacaatgaattgccatatagacctccagtcatacttgtataccctaattgcctgaatgataaggattactaatcatacaggtctaagtttcatgggaatacaatgctaaataattacatttacataagtattaccaataggaatacataaatagcatgtagcttctaaacaaaattacctcctgaatacaagctacctcttctgcagtgagtggagaggttttcatcctcctaactgcctgcatgaattgcaagattttgagagagagagagagagagagagaggaggagagagag

SEQ ID NO: 383948 - DNA, 2081 bp, Cannabis indica
tcagaagtttcattgcagattatggtgttccttccatggtgttggtgtggacagccttgtctttcagtgtaccaagcaaagttcccactggagttcctagaaggctctacagccctcttccatgggattctacatctttacaccactggactgtaatccaggtaaacatgttattcttcatctcaagattttgtgaacaaatttcttttacattatttgttttactacaggatatgggaaaggttcctcctgcatacatatttgctgctttcattcctgctgtcatgatatctgggctttactttttcgaccatagcgttgcctcccaattggcgcagcaaaaggagttcaatctaaagaaaccttcagcttaccattatgatatcttgttgcttggattcatggtatataataatgattgtattttcttgttgatgctttaaatctttatggtctactgcatacatgtactgatggtgagaatattgaaattggttatagacactactctgtggactaattggtttgcctccatctaatggagtgttgccacaatcgccaatgcacacaaaaagcctagcagttctcaagaggcaggtatgtacaacaggacatgggacatgtcatagttttaatttacatttttccttgtgattgagctaactttttagatgaatgactaaatctttttttatgtgcagttgatgagaaggaaaatggtggagagtgccaaagaatgcatgaagcaaaaagcgagcaactcggaaatctatggaaaaatgcaagccgtgttcatcgaaatggatagttgtccatctgtaagtagtcttctcaataaggaatagaatgttttatgaatacaagaatatttttatgtcattccacaatggttttttttcttctggtgcagactaattcagatgtacatgagctggaagacttaaagaaggcagtgatgaatggtaaaaacgaattggagaatacaaaggacacatttgatcctgagaaacacattgatgcacacttgcctgtccgagttaatgagcagagattgagcaaccttctacagtcacttcttgttgcagcatcggttttcgccatgcctgcaattaaaaagattcctacatcagttctatggggatattttgcctacatggccattgacagtctgcctgggaaccaattttgggaaagaatgcttcttctttttgttactcctggcagaagatacaagtaaatgaatgacacttctctaattataagtgcctttttttcaacaattcaatatgctgatttatattcaaacactatgtttttggcagggtcttggaaaaaggtcatgcttcttttgtggagattgttccatacaaatacatggctatatttacactctttcaatttgtatatttcttggtgtgttttggtgtgacatggattcctatagctggaatattgttcccattacccttcttccttctaatcagcataagacagtatctccttcccaagctgtttcatcctcgttatcttcaggaactcgatgcagccgagtatgaggaaatcacaggcgccccaagactctctcttagcctctctctaagggtacataaccatagttagtattacattactatcatctatacatatatgctgatgaactcataaatgtattgacttttgtatcaggggagagaagcacctaggcttggggaagaagatggagttgagatgtgtgatggtgagattttagacgagttaacaaccagcagaggagaagtcaaggtcagaactttgagtttcagtgaagacaaacgtagtcaggtaattgactcttatggtgtgtttacttgtattcaatagtaatcagattcatcctcaatcttattattgatgaattggaatcacaatcagaataaattatttattttactattacgatttgaaattaaggcacgtttggtaatattttttagtcagtgttttgtttttaaaattagaaaagtgaaaatattttttaaaatcatgttctataaaactgttttaactttttcaattttttaattaagaatctaaattttaaa

SEQ ID NO: 383949 - DNA, 1187 bp, Cannabis indica
atgtggtaataaataaataaatataacatatataattataaaaaaaaattagattaaaagactcttttgtatgaaaaaataattaggagatttaccaaaacatctcgtaattaaacctactttttaccaaagtataattattaaagaatgttacttttttggacatcatatatgtagataaaattgtttgattgtgtgaattaattgttactatatatttggacaactattatataaaataaaaaaaaaaaaaaatataactaatgaagaataagtcaaattctacagtgaacatacagagaaattaaggagaaaattatgcccaaaattcacatattgtcttagctaccttatccagaaatcattgactattgttgactatttataacatcaaaatatataaataaataaatatacactaattaatttttatttattaattactagtgtgttctactgtgttcatcatcaaacttcaaataattcatgcctaacctttgaatttaattataagaaaaaattaatgtgtttaattatgttgaaaccctatactccaatacccattacaaaaatcttatagatatatatatgtcatcatgatcaattttagtttcctaatttaattatatggtcaaaaattacacccatgaaaatcatgattttgatgcttaatttgttataaaaaaagtacttaatatgatgtgtaaaatatttacttttattatagctaggtggaattaatcatagttaattagttaaaggaccaaattgagaaatgatattatactttcgtacatattatcattataatattagagaaaacatttttatgtatataaataatattagctagtgaaacaataattttgatacattttttctttaaaaaaataattgatataaatcagaatagtagagacaaaaacagaatgataatttggaggattttactataaaaaaaaaaaaaacaatttatgtcacaaatcgtataatattagtcgccaatattgataaaaaaatatatatatatatataaaattttaattaatttactaaaaactattcaatggttaacttaaattttgtaatgacatgctataaaaggtttgtaacatgtaaacattttgtttttaaactcaaattagttatatatttaaaataaattattttttaaattaaatatttaa

SEQ ID NO: 383950 - DNA, 1073 bp, Cannabis indica
atgttgttttcttgttactttcacatgatttttttgtgtttttataaaataccataaaacatatataaaaaaaactttaaatgtaaaaatataaattttttacaaatttttttttttacaaaaattaatattttatgtaattattctaatatattaaaagttataggttacagtgtaaaatcccatttaattggacctcattctcatcacttacgcgtgtaattatgtcaagaatctcactaattttgaagaaattcaaaataattaaaagtattaaaattaaaatttaaaataattaattacataaaaagaatatctgttataccttaaaatataaaaataattaatttaaaatttaatttacagtcataaattatttataaaaaaacttaaaatatatattataaaatatctgttataactatagcattaacatatatagtctcctatatataaaaacaattgtaaattaccataaataaaaaacagctccacgttaacctcaaaatttcccatatattattactattgcattgactttgtttttttgagaaataaaatatggaaacggaataagaattattccctcagaaatttgaattttgttcgatatttaattattttctaaggtatgattagattcaatcaagctattgttaataatcattttttataaatagttaaactcacatctactctattaaaaaagaaatatctaaattaattgagatgtcccctttaaaggaatgaaagttgaacataagttttacaataaaaataaataaatattatctcaaacgttgtaccgaccactctgaaatatattatggccaatatcatgattccttctcaacgtgatatttgcagtaaaatatgtatattaaatatttgtaaggttaaaataaaatttattgttggtaaggatttaaatatatattgattaatttaagaaaggtttataatttttttaattaatcaggagatttattaattaaactcattcaaaataatagaacgcgttttagaggaacaattctccaactgaagcacacaacttgtagagaaacaagagt

SEQ ID NO: 383951 - DNA, 3090 bp, Cannabis indica
aaaataaaaaaaaaatagatttttctttttagtgaccattcgtattttcagtgacctccattacgggagactaacacctaacatttaaagtgtaattatgcatgtcactaaacataaatcataactattttgtgacctggacttttgtgcgtgtcactaataatgtcaggtaaaattgtagtagtggtttgaagcatgctcaaggcttttgagattactggttttttacctctaacttttggttgaagagggttccaacaatgtcgttagaattttctgtttcgagtaagcacaaccatttccattcttttctctttaattccttcgtctttcaaattactgtcttccagttggcaagggagatcttgtataagagcttatctccaaattcattaaaggtaaaagaattagtcaccaccgaaaatatctggttggttggactgatcgctttgcatcaaagcatcgacccatacatttctcgtgacattgctaaggattttgcggaggtcaaggaagccataattgaaatcgtggcaaacgagatcaaaaaagccatcaagaaggacgataaattgttggcagactgggtgctgcctcatctgaaaccaatgagtaagaaaatggagctgaggagccactttgcaacaatcatcccaaacgatagggtgtcgacacctctagaagagataattcgctctattccatctgtcttgcactctgcctctaaaagagtttgtttggatcaaccaaggagggttcgatcattaattttgaaaaataaaacccaataggttttcgatggtcgagtattatgatagagtagatgaaatcgtagatgattgtgtttgcagagaagctgtctgaagcagtgggcaccatagttgcaggtatagcaggctagctatgtctcctctctgttaattaagtaataatttctattctggatcgatcttcttaattgtgttataagtatataacagtagctgtctcacaaattagtccactgatgagaagcctgtagtatgtagtatataaagggcgcacagaagaataaaatatgtagttaatatcaaactagtattatagtatggtatatatatataaatatatatatatatatgtattaattagggtacaaaaagaataagagtatacatacataggccgggtccaaaaggaatatagtataatactctagggcgctggacctcctctaggtttaggttcttcagaagcagtaaaactcatcactaatatattagctactctctgaaatttatgacaattattatcatatatatagttcgcacaaacctatacgtatatatgggtttgtgtttaatattatttgatagataaatttacgtatgtgtcgtcatgaatttaaaattgtacagaggcgtatggatgttgctgtacattttttcttgtttaatttacttgaagcacgcaattttgatattaattttaatcaacaacatagttttcttcaaaattaatggtgtatagactatacatgtattatttttgataaacaagtagagatcactatgtattgtttctcaaaactttggagcttcagtaattaaggggcacattggccgagtttgttagtataaactcgggtactgtgacctgtgtgagaaggtacatataaacccacctcgttcatgcatatatattagtactaaacaccatggcgcatgactaatattcactactagtttctatataatgcaaattttattgaggccaaacttaatgctataatcttatattggttgagatttaaaacctctttctctcttgctctctaaaaattactaatttccttcaagaaactcatcaagtattgcttgatttgaatgagtttcaaagctatcccacttcaaacaaatttaggaaacactaattggaatagatatttcaggcaataataataaatcaattgtgtcaaaccttttttaactagtttaaattggttacatttttctatatctttgatactttagttatgttagcttctatccattaaattatacatccagctcaaatatcacaaatccaatattatttccaaataacatatcaaaccaaaaacattataatgtggttaagttattcaagatcaagaggagatattcaaaggcagtggttgagcttaagatagtgtggttggtgtgatgtgatttaataatttttctcgcagtaatggcaatgagatagaggattcaccgacaatagtagtattagagtttatatcctatgtaaagacattttgattataaatattaattgaacattttgatatatacttaaattattgatattttatattgaataatttatatactgtggaccgagattttcggtaaccaattaaataatataatgaggagagctatggaataattaatgcaggtgatttttacgtggttcaagcattaatgagccgtagtctacgagtctttgttatttatgagagttcttatacagagaatgttcttggtgaatctctctctctctcttctttactccctttgatttctcaatcgatcgatcgacccctttcccatctgtttttggggtatttatagagttttgtaaggatcactagcaaggaatcacttgtctttaagtgtcaaccagggctggccaaagggtggggcaaccggggcctcgaccccaggccccacaattttggaggccccgaaaaaattgaaattgatatatatatatacatataaaaaaaaaacatataatatataaatatttaactcaatgtttacatgaaaaacaaaaagcacaaatggtaagtcgggctctttggggaagcgaggttaagggttcgatccctcccttagtcaactcaaaatatttatattgaacagtataaaaaatatggaagaggtttcattggttacatttttattgtaactacatttttttaagccattggattagtattaaatggttgtgattaatttggaaattaaataaaaataaataataaacaacttgtaacctgaaagtaacctaatcatttaagtccttattaaactttaattaagattaattatattttaaaat

SEQ ID NO: 383952 - DNA, 1959 bp, Cannabis indica
gtataatataggaaaattattaggtcagaatatccttgtaatttttattttttatttttcatataaagtaaaatagtacacattatcatagtcgatattctatctattttcaaaaaattctaagtttttaaagtgttaaagatatattcaactaattaactgtacgagtgcttattttattttatacgcttactagtaactattttaaacttcttttttaggcataaactattcaaaatttcttgaaacatactcgatgtctactataactatataaacagtcataaaaacgatattagaacataatttctctaaatgcatggtagagcaagaataacgcctatatcgaaaaaaaacatttagcaattaaaaaaaaacttgagattataagtattagtaccgatttgcatattgtaaccgcggttttggagctcgcggtactcttggcatagggcacaagtttcacagaagcaatgagtcaagcaatcgttgcaaggggactcatgtagggcatgttgttgtctcatctttgatctatagaagcaagaataacagcatgtacatcctgttacacacattatcagtgtgtacagtgctccacttgctccacatgctacaacaacatcaacaacaattcaattcactatcatttcataataatattcacaaatttatatacaataacattctttctaacatttttatgcaattttttatatatttacatttgtactgaaaattacgttacttttcctatagcagcaacgaatctgtattttttgtaaaaaaaaaaaactccacgtaaaaatgtaaaaaaatttgttatttttgggtatttataaataatcccattaatatattaatctctccaagtccaaataaataactatgatgggatcatataaattattatcaagagtaattagtatcatttatatatataatatttttgaaaatggaataatatttggaatttgatttttggcagggtgttaaaaatttaggttagctcaataattcatcaatttgggataaaatgataaaccatttgctctttttcagaaatatttgatacaattcaacaaaattaaaagtaaaattttgttaaaaaaaattaggtgtgtgtccaagtccaacactaataacattattcatgagatattaaatacaaaatttgttattctcttatttagtatttttgaaaactatgaaaagttttttctatgtcaaaataataataataagattttaaaaaatgagagcttttaagtgaataatagtccaccatttttgtgacaagtttagagatatattttgcaaaaagaatatacatgtgtaataaaataaaaatattaatgcataaataatttatacaatagtaaaatataattaacttacatgtagatcctttatcaacgatctctgcaatttggccaaaggtaatgcaagggcaccacatagttatacaacctaataattcattattaatacaaattaattaagacataattaattagatttagattagataagaaacgacgccgttttgaacataaaacacttacaatttttgacatcggaaaagcagtcgcagagaccagttgaccatgggaccagatctctgggccgtggaggaggaaagggttgcccagtctgagatgtactgtacccacttccatcgccgctgtagtatggggcggaggagctcaccggaatccctgttggggtgtactccggcgccggagctggtggtgccgtgaacttttcgtaagttgacttttggtcataggaactcatgatgatgatggtgatgagttttcactaattgattctgagttttgagagagaaattaagaatgtgtgaactgttggtactaaagaaaatggggttttggggttatatttatagtagttgcctatcttgaaaatattataaataaataataataaaaaataaaa

SEQ ID NO: 383953 - DNA, 3009 bp, Cannabis indica
tccaacaaaaatataaaagaccaatgtaaaatttacactggttacttcaataattcacttcaaacaaggtagatgaaccataatagtcaacttagtaatcacatttttatatacatggcattaactgtcattataaatagcatttcagctggttttggggaatagttggatagtctgtcaaattataaaagctatttggggttggtcaagctcaggctaaaatcccacagttttttagccaattcagcatctttagcaagagtggtcggattcgatttgttgttgtcgacaaaatactcaccgctcactcctttcacctgtggatgcaatgccacatagcattgagttgacgctccctataaaaatccgtcaagaatttgttaggaaaacaactgaagttgcatgaatgctagaaaaggctgcattaaaccgaaaagagttgtctgttcgtggtggtaaaaacatacctgctgaacatttttaaggacaaatttaccaactgcattagcaacggctgcattaaaccgaaaagaaaggacatatcaataaggagccaggaaggaaatcaaaatagattctcagcagctgatcaaaataacattgcatagcagcataatatagcatgttcctcaatatatgactagaagcactcactacccgtaatatggagcaaataacaaattaacaaaatgcatgagcaattgaatttgagcatgtaaatcagaatgattccaaccaaactagagtttggtcataatctatataagaacatgtgtaaataaatacatgcaaagggtttcaggatatactattcaagatactgtgatggcgcagaagattggtaataattgatcctggatgtagagcattaacagttatatcaattccttccgcctgttgaaaaaacaatataacgagagagaacagttaaattttgtgtctcgcagaatgagatgggtgtggttgaaagtgtcaacagaagagactgaatgaaaatggtgataaactaaagacaaacaaaacttatttcaaaaaagggcatgtactcaattgataaaccgtgcattagctttttattctttcataagaaatgagtagaaaacaataccattatcatttttttcagcttatgattttaagcacacacatctcaaagttcattactatgatcattaaattaaaatcatttaaatgatatctgaatcgatgcattccaagttcaagctaagtaccttcagacgcattgaaagttcattagcatgcagtatgttggcaagctttgattgtccataagcataaatgctgctatagctgtatcattcaatgaaattcaaactatcatttgatcaactcagaatataaattcattagttactgcaatctacagcagttaaaaaatggataaaactgtcaaatggtttagccaaaatgataccttgattcctcattgatcttatcaaaacgtattccttctttatatggaaacctgtgagcctcagaagacaaaataacaattcttccctccctgccactttcaagtaccgtctttttcatggtctccaataaaaggtttgtcaaaagaaaatgacctataaaagggtcatgagagaactctaagataccacttccacagaaaatcaaagaataggatttcaagtgattaaaaaaaaaagcttgaaaacaagagatagatagattgctaatttctctactcaaatcttttcttacctaaatggttagttgcaaactgcaattcgatattatctttggaaagcatgaatggagttgccatcacccctgcattgttactgtcacaaagaagagggaatattacttgttaattcaaaaatccaaggatggaataaacatatgtttctatgtttaattattttttatataacaaaaacattagaggatagagcactaagtggataatattcatcataaatataagtgtgcaagggagccagccagctaccaagccataatgaattatgtaatttaactacaacactttgaatataaattcttacatgaggagattcagaggtagaccggatgatttgtaatcggatgcaaatttccgaactgattccaatgagctaagatctagttccatgatatcaattttggcagatgggatttccttagttatttcatctttcaccttccttcctgcatccaaatttcttacagccataatgacatgaacaccacgcaaagcgaatactcgggttgtctcttcaccgagaccacttgatgctcctgaatacaaaaaaaagaaggtaaaaaatcataacgcaattggccatatataaaccactgcaatcagtgaagctaaaagtggacaaactacaaaagctaacagatttgattctgagtctgaaaaaaaaataaagttttgattcactgattttaagaactgaaagtgccataggtaagtaaaatcaactaatatatgcaaccaatatatgtatttttgtttgaatgctatgctatggttcttaaaatctctttgaagagcaagcaaagataacaagataggtctggcttggactgcatacaatcgttgacctttaatgttattcccagatgacttaaaacaactatgcatattcactagcctatgtttggatctcagatttaagcatggaaattgtatgaaggaaaactataaagaaaagttacataaaattttacaaccatcttttttgaatcaattatcttatagaatatatttacaattgctctagattttataaaatttcatcatatttaacattaagttaattatacagcttgaacagttaagtttagtcctgatcaaaatccaaatctaccagacacccaaattaataataacaatgaaaaaaaaaagccttcataatatgctcaaatcaagcacaccccctccagtgagcttgctcagttgtcagttgttcaagttaaaaataaccctcttacaaaggcaccaccttttctctttttccagtaattacataatcatca

SEQ ID NO: 383954 - DNA, 2167 bp, Cannabis indica
aaaataacataaatattaaaacagctcattatttgtttttgttggagttagatttgacttttacatgtgatgttttattgtggtcatgttaatttgctcaactagtttattgtgatccatattgattaaaaaatattataaataaaataaaattttaaaaaaaatgtaatttagttatttgactaattttgtcttttgggttgtggaaaaaaaaaagaaaaaaattgaaaaaaaagggtaggtggtgatgagtcagattttgatttaaaatgagcatgatgatgatcaagtgggcatctaatcacaaccacactatactttccactacaaatgaagcctatgttgattggacttaagagagtgtgtcaccatcaacaaatttagacactattaataaatttcattattaccatttgttttaattagtaaacggattatattaattaattaatttacatgctttttgtgcaacttatcataatttgacttatgagagtctacctttataatttaccaaagggattcaaggattctgatgattactaacaaagcatttcttttactttttattattatatatttagttgtgattgtgatatcacattcatttagatcttgtgcaaagggaatacatgtaatgcaatgcatgtttttctacttaagaagataacataatcaaaatgtcatgcgaaattattctactttgttttttcatatagatatatatgaaacaatgatttttttgggttggtttctcttggttggtcgattttttttttaactgatatgtcaaatctctctcacacacatatgaaattctatttttatgattacaaaataaaattaataaataatttaattaatgtgtaattattataaaattatttgaatagaattaaaatctattctaatagaatccgaacctgataaatcagaaatatactaaagtgaagaacataaaattcaatcacaaagacacaattttaattacaaagacacaaattttctaaaaataacaaaacaactatcctttaaaaaacactcttcttaaaattataagaaattaaaaaacagaagagttcaaccttttgttgttagtttagatcaaatttatagtgataaatggtacccaaaattgagctcaaaatgtatgaatacaaagagaagtcattaattagtttttttataaaaacccaatgaatgacaaaattctgtctcaacagatatggaaagtggtgtagacaaaatcttgatctgtctagtcagcattgtgaatctagacttcattaaagccaagtacatcccaataattcttctttggacactatgaattaatgctagcgggagaaaataatgtagatcataatagaaacttaataaaacaaattaattataaataaataccatagatagatataatatttattttataatgaaacattttattcttaccgtataaaagtacaacttgagtagcaatatattctcaattaatacaccacaaggtcgtgctttacaagtaagaaaataatcacagaataaatgaaaaatatttccaaaaagaaaaatcaaaatttgttcaaataaactgtcgatggttcaaatatatttactgtgcctgagagatttctagcaaagttttcttatataaataaggaaataagatacacattaaacatacaagttgtacaagggttcttgagaaagaaattagatcaattaaaataatataaatattaatactttctttaaacataaaaagtcaagataagatattctaaataaggaaactacatatttatttgactgttgactcaaaaatttgaacacaaacttctaagccacacccgcttgctagattgacgagaataaaatatatattagctataaatagagagacacaacagtttatagtagttcactccctgcatcgtgacagtaacgaaactgcgtctacttagaatttttattctcacgagatagattatagagaaatggctaagtctggatgttctaatttctagagaataatgctctaatcttacgactacgtttctgaatattaaaaatgagctagaggagctatcattttataggtaaaggaggtccttaaaaatatgaataaaataataaaaaaatataagttgactattatttacgttagatg

SEQ ID NO: 383955 - DNA, 1007 bp, Cannabis indica
atttattctttagatgtatttagttttttttttatttttgctatgtatataatagtggtattataattttgttagcataatacaaatattttaatgtatatatattaattttattagcatgctatatattatttaatttattatttttatatattttcattgtatgatacatatttattttaaataatatttaattaattttcattttattatatagactggtggtatattaattttattgtcatggtatatatatatttcaattataggatataattttgttagtatagtatacacatatctatattagtaatgtatattttttttattattattattaatatatatattttggtgaatggtatatataaatttttttttgttctacgatataaaatttaaggtaattttgtatcttagtgctatattaaatgttaaattatctagataacgtgttagagaagttataattattttaattgaataagagaagttaatttaatttagttcttttttcatgtatttttttttatatatataaaaataaataaataaaaaataattgagtctttaagttaaggctagctattatataatgcagtttaataccgaagtggtatattatcggaggagttaggtttggtagaaaacaatataaaatagccttttgttgattttaataaacgaataatcctattctactggttagtcaattgctacgaaagttccactttaatttatgagttttttttttttttcttttttctttgaaatgtaatttatgaggaatttgaaagagtcagagacagaattccctcaaaaaaaaagtcagagtgacctcttaaagtccaacacgtggcactaaattctgtcacgtgtcattgtaggtagacgtaattacgaacacgtttcctgctcgtgcacgacatgcgcgcacagtttctattttttgttatatttttttaatgattttttttactctgttttttaattaatgatttttgagt

SEQ ID NO: 383956 - DNA, 3053 bp, Cannabis indica
ggttagttgcagttgaacttggccgccttgtcggttgaacccgggatttcttaagatgtctgactcccttatcaagctagatggtgtgctttctctggtgctgttataaaaccagagtaaaaaaatacccacatcataaccaaataaaaattgtgcatgaaaactacaagaacttgaaaatacaccagagaaaaaattctcaatattttctcattatgatggcctagtttatccacatggaacatagaaggggtgttataccggacaagtaccaaaaaatttaggcatgaagctactctttgtcagctagtgcaagtcctaaaagagacatcccacatttatgtacctatgttaacatcagggcccacgagaaataaaatgccattcattactaaaaaattataaccgcaaattctctcaaattatttcactctaccatcattgaattgacaaaagtttggtttacactcttttgtgcattagaggacaaacaatgaccactaaagctaaagtttatgatattgatttttagcaaaacaacacgctacaactacactagttcttttctccttatcccccgttcttggcactatttgtactgggaacgaaaaataggtttctattgatccacacacctttttaatacaaaaaacactgaagaaaacaaatgaagacctaaattgataaacccatgtttcttaagagcaattatgctagaagatttgagacattaaatttttttccttttaaatgtaaatctttgataaacattatgctagatatgtaatagtacttttaacgtagtaaatagtatattacatacaccccacactagatattacaatatccccactaaaaaacaagatgcattaactcagctttccctctacgaggaaaaaatacaaaaattgtatcattaattgctctgatgcggattacccatttgataataaattaaaggactttttctcttaagtcaaacgtcacaacccttaaaaagttgtcaatgaaagcagttataaaagaaaaagtctcagaaatgatgtggcattaacaggcaattcaactcatcaaatgaaagcgataacacatgaacaaagaacatagacaaaaccaaatcaaagatcaaaaacacctcaaagaaatcttattttttaataataattaaaaaaaccaacaacaacaacattctcatccagaaaacatgacacagatggcactataatttcacgtctgtatctataatagccgaaaaatatgcgttaaatgtaagactgtagagtacttgcactgcatgaattattaattaccagaaaacaatgaataaagtatgcgcattacatgacagtcttcaagatgaaactaaatgtatgaatactatttcttctttagggagtattattaaagaggcaaatcataataactaaatctaagtatactaataataatagcttaattaaggttgcaattactcagaaaaaatgttactgaaaaattagcaaactaattaaaaaaaattagtgcccatcattagttttgaagatagaaacggttaattaatcgaagaaaagtgatacaatttacaaactacaaatatagaaatacataaagagaaaaagtaaaagtgacctaaatatttatatattaaagaaaaatggtcacaaacaaaagcactgtttattttctcagaaacgaactaactaacaacatagaaaaataagattaaaaaacatttagtgctttttttttaataaaatttgttataaaatcattttttatgttttctacccttcaaaattcagagatactattttatattatcaaggcaaatttgagacattacataagccaaaatgaatacatatagccctttcttttttcatatattaagttttttttagttatcaaaaaaagaaaaacccctcttacaaatccgcatgaaaaacagaactcgaggtttacttttaaaaatatttattatttcatattattgatgaaatattttagataaaaagttagaaagaaaaccaataaaaagggcattaacatgaaaaaatcgaaggaaaatagagagattattaaaaatatttgaagaatattacctatctctgccttgaaaatcagaattattctccccaaaagaggcttcttcttcctctgtttcgtcaccttttaaacctaaagtttcgtcagccaagcccgaatccaaagacctcacatcactcaacctcgaactccgccaccgaaacttagtcctagggtttttttctccacagcagtctctcgtcgtcatcaccggcggcgaaccctgtttctccttattctgcttctttgcttcactgagcaatggcggtttctccaaacggcggcttctgagctcgaggtaggaaaaagcagaggagtcaacagggtttgggttcgaggttggcgattttctctgctgttgctgttgttgctgctgtctttgtagggcaagggttttggctctggtacggacaccgagagagcactgaggagagagagatacctccattactgcaacttcgcctgtgattttaggtttcttcatgtactttcccatatctcagattcataaatatgaaatagcgaacgagcgagcgagcaagagaacgagtaagagagagaaagagacacacacacagagagagacgatgaagaagaagaagaagaagaagagagaaaccccaagtgtgtaggagagagaaagaagaaaagggttttagagagagagagagagaagaagagggaccaatttcgtatctgacttctttttttttcacagagagagagaaactctgaggttgatggtaaaagaaataaaataaaataaataaataaataagaaatttaaaattagggttggcgttttggggaacagtactttttcatcaattttataaatggaaaatacaaaggaaaaaaaaagaatattgtttttttttttttagtctttattttttttaataagttaattagagtttatatataatccatatctagattttaggtatctaattttttttctattattg

SEQ ID NO: 383957 - DNA, 1301 bp, Cannabis indica
agagagagagagaagccatacctgagttcgtctgccaccaaagctaccaacgccaatctatccaagagaaatacgattcagagagagaatgagggaattactgccaaaaccttaaaataaaattcagagagagaaagatggatctaaagttttaatggagtgggggtcttcatttcgttgtcagattagaccaccggatgtcgagtcacaccatctttcgcaaggcagctacaacaatgagagagagcaagaaacagttacagagggaggtgatgcgttttttttagagggaggaggtgttgtgttttttttttcagatggaggaggcactggtttttttgaaaaggagagatgaggtgttgttagaaaggagaaattttagggtttgtttatttaatatataaggttgtgtatattagaaaagaatatattaggtttcatttaattattaattaatggtacacactttttttattattaattgttttagtttcagcgtctctctatgtgcaagtggaaaactcttcccacttgtgcattggaagacactatagttagttaatttaaaatttcagaatagttttagtgagaggcattgcgggttagaaatattaaatttttagagtcccatagtgcgtgtcactaaaaattctctaaaatatttagtgagcgcaccttttgtgcaagtcactataaagtactaaaagtcaactttctagtagtgtaacttagtctcttaccgcaactatattagcagcccttacaactagatctcatacaacaattatgttagaaacccttacaacaaaccaatatcacacaagacaacaatgatattagcaactcttataatatagcttgttagtaattcaatctcatataacaacattgttagcaacctttatagaaacttaatcttataaaataaccatgttagcaacttttacaccaactcaatctcatacaacaactatgttagaaacctttacaatattcaattcttatataacaaccaagatagaaacccttacataaacccaatcttatattggatgaagataggggaaaggagatttgaatggtaggaaggtcttttagctatttttccttttcttttcctttgcaaattataactttttggtttataacccattaataatctcaacatcggttgtactctttgcaggtattaaagtacgcaactcattacttattatattgatcaaagtacacattaagataggggcatggtgaactagagatatgtttttatggaaactagttttaatatttttattttt

SEQ ID NO: 383958 - DNA, 1917 bp, Cannabis indica
caataacagtataataccgaaaaaaatgttaaacatcaatattattgtttagcaattctctttaattatttgcaacattaaaaacatgagagagagaaacgtgtggggcccaccattaaagaaagagggaaatgagtaggaaaatgaccaagtatatatgtataccactatttaagtaatgagagaaaaagaatttgggatattgagattgagatatatgatattagtatggacttaattagggaatttggattgaaatttaaggctctccaaaagatgttattaccttaatatttcattttttttctttcttctaaggtccttccaaactatttgactttactacacactaaaaaaaaattaaaaaaatataataaataaaataaatataataaatataaaattgagagaatatgaagctgcaaagcaaagaaccctccatcacccaccacacccaattattctccctcatttcctccttgccttacattttcatgacgatcctcactacctcattcatacaaatatattatataggaccggcactaggtataattagattaagcccgtatttagagctcatacttttcagggactcaaataaaaataaaatattttattagactttcatttaagtaaaattaaatttattgtaaacaacaaaattcaaaatttgagtagttgtggtgcatgacacattatacaatagttatcactttttttttttaatatttttgaaagttaaaactttaaaatttaaatagtcttaaacgttatatacatcgtagttatagaagacattaattttatatgttttcaaaaatttgaataatatacactacctaaaatatggttcaaatacttagttgcataaatataattagttattttgaattttattttagtattattataaattaataaaaaaatttaaaaacaattaaaaattgaatataattttttcaaataccaaaaatataaatactcttacccaacaaaagtgacactcctcctatcaaaatagtttggtcttctctaagtgtataatttattaatatgttacatattacactattgttgaatagagtagtacaagttgagaatatattatccactaaaccattatgatcatgattaaagaaaaagaaccaataaaatatagggacacttttaatagaggtgtccttgatccttttacttcaaacaaattctatcttataatatacatattaattagtctacaatttcatcactatatgatcaccaccttttaaatgacagagtaatcttaggttttggatttagaagacaatacccataatttttatatctatttatactagtttaataattaatcatcgaaaaatatttatgtttgttccaactaaattgatcatcttagaaattttaagtgtttttaattatattagaggagcaagggtgttcatagcaataacagacccggaattttatattaataacttaaggttaaaattataaaaaatcttaataaaaaattagtcaaaactattttgtagattgaattgaatatatatgacgtaaaatcatactatatcgtaccttaatatgtaatgtagtataatttacgcgatttaaaattttgcaatacaatgtgagtaattttttttgaatatttctacttgatcttttattatcctttatgaactcaaatcactttgtcattctttgatgtagtttgagaaatgggttggcatatttttgaccaactaactacttgccttttttatatttgaattataatgatttaaaattgttaaagaatttaaaacctaaactatataattaagattatttcaatcattgattcagtcgtgtgtgaaaatattattattaagtatcaatagtgtccaatacaactataatatgatgtcttat

SEQ ID NO: 383959 - DNA, 1804 bp, Cannabis indica
ataacaagagattcctgaaacaaatttttattttcatgaagtttttattattattacggatttttataaattgtttatctagtattacaaaactatgtttcaaaaatacacaagtgacctcgctggagttagggtgttaaactaggcattaaaattctaactgacaaaagaataagtattataacacttaatatgaaaagttacatagaaaaagtcatagagaaattttgtatgaaaggttccatgcaaactaaccagcctattcgtaattagcactatctaagtaaagaatagtctcttaagactatagaaagaagttatgtgtgagatatcttattctattgctgtgggatctataatgtacctaatggttagtacaagactaaatttagcctatgctattagtatcttatgtaagtatatggctaatccaagcatgacacattgggagactatgaaatttatttttatgtatctattgtgatctccagaattgggtttaaatttcaagaagaagaaaaagagtgttatgattactgggtagtgatgcagattatgctggagaaaaagatagtaaaaagttcacttttacctacttctttgctggaaagttcaactgcaacatgtagttgcactatcaaaaaaaggcaataaaggaggaaatttggctaaaggaattaatggaggaactaaagctacttgaagggaattctatagtgttttcaaatagcgaaaggtgcattcaactctttaagaacccagtgtttcataataaatgagtgcaagtgctttacaatgaagctcaacatattatgatgacttaaggaatggtgcactatgtgaaggaaatgccaacacccattaggaggaacaatccaagtagtagcgaaatagaggtccagagccaactaaagaaatgcaccaatacaccaactttgagaagagaatgtttgagagggtaaaatgtcttcagtcaatgcaacacatagtactttgtcacgccacaagattaatacttcctagatccacccattatttgtatagaaaccaatttaaggtaagtcgacctaccacacacagattctttagtgataaaattgtaggtgttggacttacaattacgtcgagagttgcaagatagatggagcagtatttacatcctattttacaatgtgttacatgcgatgggaaggggcagaggtacatatctacccacagtggccctgatcggcccctacatttgaagttatctaatgtatctatggtatttttctaatttatttatttaacaatacattactcctttcaaaatttatatctatcaatgtgtagttttcgtaaaataactgtacaaaaatttttattaataaaataactttctatggtcgcaaaaacgaccacgagttacaatgtgtgaccataaacgattattatggtcgtaaaacgactatagatttacacaatgcgactgtcataattgtatagaataaattaagtaaaattattttataagttttattatttcaaatggtttatttattaaattcctcgtagttttttatgtatttatatatatagtgggcccatagaaagaaagaagagttaaaaagtaacattaattaaaagagttaagattttatatttgttattctgttaggtggtgtttggttaggaggaatgaaaatataggaataggaatgggaatgggaattggaataggaatggaatagaataaaatttaaaatgtatacaaaaattgaattttttttcaaatcttgcattagaatggtctttccttctattt

SEQ ID NO: 383960 - DNA, 3019 bp, Cannabis indica
ttttttttttttacattaaataactgttagccaaagttcacacaaatctttgacttatattgtaatctaattaggatttttctggtgcagaacaattaattatttgtgctgaatatttatctagattctcttctgttagtgaagatttagagaaattgtattgttggaaaactcagctcaaggtctgagtagcagggcatttcattaaatagagaaagagtattacaatgacaggtacagagtaccaatacaatcattacacgtgtaaaaggaatataccctaaacaaattctaatagaaagttgttatgcagcaatgattacaaaattattattgggattccctcattctcatgtcccgcattcgattctttcaattcaatttctttaactctaccccgcaaacgaaatggagactgtgtcacattgagtttggtagtagaaactgttaacaagttggagtgagacaattggctatctgatcatgagagggcacgtatcgtatttccaatttcttgtcaagcaccttatcactgacaaaatgcagatccatctctatgtgctttgttcttgcatggtaaactggattggaggcaagtgcactggcactcaagttatcacaccagatgacaggaactgaggagcgcttgaaattcaactcatttaacaactcttgcagccaggacagttctgcggcaaggtgagcaagagctctgtattccgattcagtgcttgagcgagccacgacagtttgcttcttggatgaccaagaaatcagagagtctcctaggtacacacagtaccttgccacagatttcctgtcattgggacagcatgccaagtcagcattcgagaaccctacaagagttagattcacactaggagcaatgtgaagaccatggtgcattgttcccttgaggtatctcagtattcgtttggttgctccccaatgaacatcagtcggctgtttgataaattgactgagtttgttgacggcaaaggagatgtcgggtctagtgtgactgagatactgcaaagctcctattacactcctgaatattgttggttggctgagaggtgttccatcagaaatggacaagggttttcctgctgtcataggggttacactaggcttcgtgttttcaagtttagctttctgcaataactcagcactgtacttccccggagacaaataaattccggtgttgtctctaaaaacttcaatacctaaaaagtactgaagtggtccgagatcctttagtgagaatgtttgattaagtcttgccatgaaggcatgaagttcttttgagttgtttccagttaccactatgtcatcgacatagacaagaactaagattacatgcttcgggtgtttcatcatgaagaatgaggagtcagcttttgaattctcaaaaccccactgaataagtgtcgtttttagttgatcataccaagccctcggggcttgtttcaacccataaattgacttgtgcaacttgcacacatggtgaggtttttgaggatcttcaaaccccggaggttggatcatgtacacatcttcatcaagagttccatttaagaacgtgttgttgatatctacttgtcttacttcccaatcatatgccactgctaaagtgaggacaacacgaaccgtgactgccttaacaacggggctaaagtctctccaaaatccaaaccgggtctttggtggaactctttagccaccaagcgtgctttgagtctttggaagcttcggtcagcattatatttgactttgaatatccatttgcagcctacaatgttataaagagctgaaaaaggaaccaaggtcaaggtcttgtttcgaattaaggcataaaactcggttgacatagccttgttccacctatcatgctgaagggcagcagccattgaagcaggttcaatgaagtcgagagagaaggttgattgaccaaggaaggtccgaggcttaaagataccagccttgcctcgagtaatcatgggatgtgtggcttgaatagccgctgcaggagcagcaacagtgggattttcagcaccagcagcagtagacaagggactagtagaagaggttgcagcaggggaaactggaagctcttggtctgtcaagaatacagtatttggaaaaggaattggagagccaacaacatggggagaggaacttacagagttatgttgagaacctgaggaagttggtgttgcaggggcacttgaggatggtctcgaaggagatgcatgagctgctgtaggagaggaaaatggtgcagaattgtttacagcagggaggttaaaccaggcatgaggagtagacatagtgacaaactgttcaggttgatggttattaagaaaccctttggcaaaaggaaattcatcctcattaaatatgacatgtcgagtaatgtaaatccttccatgaggacttaaacatttataacccttatgaacatcactataccccgaattgacacagttaattaaatggaatgcaaacttatgactttgatatggtctaatgcatggaaagcaagatgcaccaaatactttaagaaatttatagtcaggaacttttgagtaaagaacttcaaaaggtgactttcctttaagtataggtgttggtaagtgattaatgagatacacagctagggttaggaatattttgttatatagttatgccatttggcctcatgaatgcaggggcaacctacaaaagagcaatgaccacaatttttgatgacatgatgcacaatactgtcgaatgttacgtcgatgatttagtggtcaaaacaaaagaaaggataaattatcttgatgatttaaaacgagtctttgataggctcaggcaacacaatctcaagatgaatcctttcaaatgtgcatttggggtaacatcgagaaagttcctcgggtttatcgtcagacatcgaggaattgaaattgacctgtaaaaatcaaagcaattttggaaatgcctcccccacgtccgaagattcatctcaaacctc

SEQ ID NO: 383961 - DNA, 2627 bp, Cannabis indica
caaatgtcttctttttcttttctttctttatcttttacatttaatccttctcgtgcgtgaagagagagagagagagagagagagagaaaaacatgatatgcatgcttcctgagtaaaaagtatacatatgtcaatgattaatgacacttccattacatgcatgcactctaatttatgaatagcataacgaatatgtccaagttttgtgatcaaaattattactatatagcaagtacgtatacatttagtttgattcaaatcactttcaggtaatttgaacctagtaaatttatcaataatttcttaccctgctctcccagagaaatccagtaggaatgagccatttatatggacgtactaatggaaggttggaaaaaaatatatgtatattttaattaattatatatatttgtaattaaatactatatatatttattgacaaagtgttagctttttgttttaatatttacagtttactttttagaaaaagagaattctggaatttgattgcctaccaatatgatttatatatatatttagtgcttcaaattgaggttaaacatttttattgttaattttgtattttaatttatacttaataacatatacatgtataaatttatatcaatttttaaccgatttttttaacatattgtattatataaacaaagtacgctcaccttcaactcatatgtaaggacttctgcacttacttcaagcactatagatactcaggttttcatgattacctttcccataaaaaataagggaataaaaaaagaaaaggagaaagaaaaagcagaaagtaatagctaattatcattacttatgtgattatttgtactcgtgtctgtggttagatttatacgggattacaaaattttgaatgtcattttttttatttattttctatttttttgagggaggaaaagaaatcaaaatattgtacgtatgtaaattaatgcagatgtaattttagatgaataacatatatgttgtcaaaatcaatgcaagaatatggaccctaatggagaaattagtgcatattctatttcttgtacgactaatcacatatgatatgtggcaatatcttatattaattaaaatacgttggaaaaacgaagatttttgtttccatgcaaaagttgaattttcccgggaaaaagacgcaaaaaaagcagtgtatcaaagaataatctatctccatctattgaggtccaaaagccatttttctctcttccatctatttaaaaatggatacttgcatttgcattccatgggctgttttgtttcttatcaactaattaaaagtgtaatttgagtcactttagaattacattaaaaggagagaacaacaagagttgtctttccctccactacgtctttctctctctctctctctgtttttcatcctcttttccttttctttttctttgctaaagacatgatcaaatcaagttctacgttctaaagatgcttccatgagcacgtaagattgagactttatcgaatatacacacaagaataccaccaatagagagacttattatgagtatattcctcactgcgtaccaatatatatatattaaaattttgaaaaagatcgttgagagatatgatctatttgatgtgatactgggcctaacaattccactaataacatacttttgatcagtgcaatgatcagtccatccatggccgaccctttgcatgtcttcaaacaaataataaataaataaatgggtcccagaatagattaaaattacggaaaagagaaagaacattagtatgtatgtctgacctaaacatgattaaccaaaaaagaacagattgagtcaccaaatgtcaaaagaaggcacagaaggagaaatggtagtttggtatatatttggttagtctaatgaaagaagaagatcaagggaacataaaggctgttggatcacatgcacatcacattctttttctccttctcttctcttctttttatactgttaaagaaaaggtgttttgatttgagaaatatatattgatcagtgatatataaataaaatttaaaaagaattcaaaaatcaattaataaaagggccccacgatttcaaggctgcaatatatttttgctacagaggattcatatttaatatttaaaagttttacaccctacaattagttagattaattaaaatgtataggaactaataacaacagtattatactgctttttagtactttcttttcccatatacatttacttcctcaatccaagggattccgtgggatgatgaagctctatatgggacctctcttcttatcatcatcatcattccatgcatatatgtaaataaagacccacctctcacgtccagtacttaccaaagcaaagtgcttaaaaagtggcatttttttctgatgacagccaataattcatatactaaatgccttcacaaagtcacaattatctgatcttcccttttatccatttatatataatatataatatatataatcccctttatcgaaatctggtgaaagttatttctatcatacatattttatatagagaatgttataaaaaatacttttttttttttacaaatatatatttctatatttttatttattatatatat

SEQ ID NO: 383962 - DNA, 1434 bp, Cannabis indica
ctctcctatgtgtcaatatcgctattggtccaattaagtatcgggtctcatataatttcatataatagcttttaaggagtatcgctagtcaatcacaatgcgacatgtcgagaaggtgctaggcaccactggtgcctaatagcatatagaagacgatacttaattacaccaataacgatatgtactaggcttcagtagtgcctttaaacattgagaaatgttaaaatgtaccattagtatctagacttttgtgagatataatattataattagtgcaatttattattaaagtttcatttattttaatttaataaattattaaaacaattataaaatatcattttatagtggtatttggcaaggtgcccgttggtatcattccaataagttgtccaaagagtgaagagtgaagaataatgtctaatactatttaaaagaagtgacgttttgtgattagttagcgatattttataaaaaaaaattattgtcattaaaattatataaaaattttaatatttaattgtaatcaatagtaaatatatcaatattagaaggtattaaacaactaatatgttttagtatttttcttttataagattatgtgattaagttaaggactaaaggtcaattatgggaccatatggctatggctatggctatggaggaacgtaagtcaaagagagagagaaggacatttagtgttggtttcacatattataaatgcattttgactaaaatttatcaatataattaattagtttacagatgctactagaaaataaggtggagaagaggacaaaattatgaagacgcgtcgtgaattaaaggaccatgattttcatcatattcacatttacattcacatctctataaatatattatttgagcatctcaatcattgattcttaataacataaaaccattaattattctcatcaacatctttcttaataacttaccttattattaccttatgacttgtttgtactcttattcaaattctatttttatatatgtaaatcattccatatatattgttctcaaatgaaatgagtgtctaccattgcatcatgcatgcatgcaaattattacttgtcacatgcatggtcatggatatgatttagagattacttggtacgttaaaaagctttgcatattgcatttcccttaatttagtcaacaacaccatacatagtacatagacaaaagtcgtgattggtagtgaacatatacatacaactttacaacttagaacaagtttgttttcttaaaactataactagatagacagtgacttgttgttgtggaaagaaaaagaacatcgttactctgctaaattgttaccacaaaaggcggcaaccttttacaaatggttagcaattatatattagagtaatttgcggcgaaacccccttatgttttgatttttataca

SEQ ID NO: 383963 - DNA, 869 bp, Cannabis indica
aatttgttggaacgttagctctcggtagaacgctttataaaggtttcctctcataaatagtggaagtaactatcagggccttaaaaatagtgaaattacctattacgacaattgtccaatcaagatcaagaattcaagacaagaaagtttaaaaacgatagattttctattatgaatacaagatacaataaggtggttatgctctctatatgcctaaagcatatttttctagattgtgagctaaaacattagcttcacggacaaaatagctcgaataagaggcatttatgtcttcaataaggtctcgcacgaagagaatgtttgcaaagcaatttgcaatctgattcaacgatggcaatgtcaaaatggttgccattccaccaattgagagcatgcaatagggcatgcactttcatgatggaagttgagtggcaactattctaggattttgcaattgctgaggagacttcaccatcattatttcgaattacccaggcgagcccaatcttgtttgagattttgtcttgtgttgtatccaccatgagctttagcattgcgcagggtggggacaaccagtgtactattctgttggtttgttgttgttgactgtttgtagagggtgtctttgatgcaaccttgaatattgatagtggaccagtactcatttaggtatgtttcactctgctatctgcttaggggcagtagtaaccccttggtgcacatactgttgggttttgtgccctaaataaaactcattacaatttgattagttatcaatttagaagtttgaagtgatttatgattacatgtatgttacatgtttatggtttaatatattatatatatatatatatttgatatatgcacaa

SEQ ID NO: 383964 - DNA, 3094 bp, Cannabis indica
  modified_base (61)..(61): a, c, t, g, unknown or other
gttttataagtatttgggagggctaagaatgcagctttatgggatatggtagtgatgatanaatttagaaaaattcaatataatttctaaaaatggaatttttatctagcagaattaaatggtattagccaccaagagttggggtggttatttcacaaattgtttgagaatgtaaaagtgaggttggaggtatatatctcagcttttgtataattttctagtttgtgcaatacaagcgacttaaataccaaaaataattgtgaaatattcacccacttgaaaaaataaaataataataatgaatttagacttggtgaagaggttagtcattataagtaactttttcacgtgaaaaaatcgtcattttctgcttggctacaccaaattacggaccccttatgtattatgctatctttggtcccatgtgcttgccatgtttttatgtttcatatgtgattataaatgacacaaaaataaaaagtctaaatccaattagttgagagttgacatttaagtttagactcttatttctttatttttttcttatttaaccaaaagaaaaagaaaagagtaaaattaagaacgaaaagccatttagaagaaaacataaaaatttgagtccaataatttaggattgaattatcacaaaggtgtattccaagaaagaaaaagatatgtattgcacggtcgtgtacaaccaaccaatcagaagaatcctgacagcatatgcttgatttattccactgtacaaacagtccttttaaagattgaaaatgattttctttatttcttttatttttaaaaaatatataaatttattttgcttagtcctcataaaatataaatgttgatatatattaaattaaatccagctgttgcaaggcctagttgcttaaccttaacatctatctttatcttttcattttggaaaatataaaaaagtacaacacgttgtattacttagatttcattttatatatttatttaactaaaagaataacacgttcttcattacaaagaagatacacttacacatattaattcattagttatgtatttagattcccaatctagtattagtgcttcttttagtgctaaccatgtaatttttttctttctttcaatattcaataaaaacgttccctcttattcttttaaatctttatattatatattgcaactcatgcataatattgcatacttaaaaactataaagtatctgttttttttttttgaacaaaaagtatctgctttttaagcttgtaattggcagcatattttgtgtgtggtgtccctagctaaaacatatactcaaatattaacctgaatcttttgactctttttcggtcactgggcgaaatgaaccactaattttcaggacatcgaaagattcctatttcctagctatttattttacttttttaaataactagaagaaaatctaatctaatataatctatatatttaaaagtaataaggtggtacaaactttaagttttcctaaagaaaaggtcattatttaaaagtcgtctaaaaatacttaggtgtaaatttataaataaaaatttaatttttttattttaatatgactcaatattaattttaatttatttttaggatgattgattaatatattacataattagttataaaagttttgtagttcaactaatatattattttcttttaaaaaaaattaatatattatttatatatttatatttatttaattatagctatattatatattgagttcatatataaagagttgatattataagttagattattttttttatttcaggtgaataatttagtagtgaaaaaaactattttatgtatgaaaataataattaaaaacttaaaaaaaatattatataattaaaaaaataaacattataaaggaaagtttaataacaataatgaggtgacatgcatcttatgtttatttcaatgtctttttacaatttttttatttattgagagtttcaaattttcatattattttttattaacttaataaaaagtcatacattgtttcaaaatattttaggagtattcgcaagtcgatgccgatgagagaagaacgatgaccccctagttctcaaaatacaataagagatgaagttgactccttgaatcacagaagagagaaggacatgaaaccagttcttgttcataaacgtgaaggggagaagaacgtaattttagagtttagggattttaatgttctcaaattttttaagttttgaattaatttaatttaaattttttgtgtgtaacaaaacaagtcctaatatttttttaataacataggataaatttttaagtttatgtgtttgataatttttatataatttttagataatgtatacagaattaaagataaataatgattatattcatttttttatttattttttataattttaaaattatttttaaatatttaaataataaataaaaaaattaatgaaatggactaatgaacgagtgacacgtagatactaacttgacatttaacgaccaagtacctacggaagttctacactagtgacgaaaggtatttttaccgtcaaatatacgacttaaatactaatctgctacttggcataaaatttaaatatttataccgcaaattactccttattctattacaaagtcgcacgaaacatggttacatttactagcatataatataaagcaattcttgcagaaataacacgtgcttttttctcaacataaataacgattggagagtaagacatatcgtacattgggccatctccaagaaccttcaaataactatggctaattatggtttttttccttctaaacttttacatgtaccaaatcatgtcccttgaatttttctagtcgttaaattcccccttaactattgagattgttggatttaaggacttttgtgtaatttcactcaattttactgattcaactgttattttatgtactaaatcatgctcctcagactttaatatctaccaaatcatgcttctcaaattttgacacatactaaatcatgctccttgaactttcatccatgttagactttctttactaaaattagacaaaa

SEQ ID NO: 383965 - DNA, 3650 bp, Cannabis indica
aatgacttccccttgctcatttgcataagcaactatgctgttctccattttcctttttttcaagaaggcatggaaaaaagcattgttctcatcccccttacaaagccaatcaaccttgcttctttgcctcaaaaagctatgatacattttctcatgcttattgaagttgacagccgcctctttctctttcttttgcaacaactaatcatgcgggttaacttgggtgtccattctggcttccatgtacctatctttagcttcctgacaagtctttccaatatctcctatgacctcctaattgaacttttttagcttgtgtttcagtcgcatgagcttcaaaaaaagacctttcataccaactgcttgaactggccgagtccaatcttctatcacaactttcttaaactctggatgatctgcccagaaattaaagaactggaaaggtttcctacctatattctcatccaccctcatcgatataacacacacaatgatcataaactacttcccagcgatagtgagcttttgtcattagaaaactgtctacccaatcttcatttacaaaggaatgatcaatcttcgagtagatccgcttgttcccttattgattattcgtccaagtgaacctagaacctgttttaataagaggcacaagatgacttctagcaagccagttagtagcatcttcaatatctcccaaagttaccaaattacctcccttcctatcatctaactcgaaaaaagcattgaagtctcctgtaacgagccaagaattagcgggaagatgcacccccataagatcagcccataaactcttcctatcctctgctgtattatacccatagacaaagcttatactcatagcactactttggcctgccattttgacataacaataaacatattgaggatcttctttaatgacaataactcgagcatagtttttcctccacattattagaatacgattctcaattgtaggactagtaaaatatccccaattagaaaatttcctatctatcatctcctttattctgtcatcctttaactttgtttcaagcaaaccacaaactcctattttattcagttgacaaaactcatacgcagcatcttgtttctcttttttattgatgcctctcacattccaacaagctatgtttgtattatccatgagcaaacaaggtctggtctgagttacttacccccatctcttccatctgctcctctctagggactgccaactcctccttttgctcatcctccaagtcacatccctgctcgtttaaaatcgtaaatgagttgctggtgatttctacagcctcagcccccttatcttcttgcaaattcagagatctcatggcagcttttttcattgggataacccaattctgttgttcgaacttgccttgaacctccccaccgttttctggtcttgctgcttttgtgcgcttgctggtttttcccatctttcctttcctttctcaattcatagcttgtgtgtccaaactttaagcaactagcacattttgcaggcagccattcatactcaatggattgatcttgtaattgtccaaactcatctatgtaaggggtgaattttggaggagcatccgtgatctccatttccaccaaaactcgagcaaattggatacgagttcgatcctttgtatgttggtccactataattggttttccaattgtgctaacaagagcactcaagcttttgttcccctaatattgaagacctagatcatgtaatcttatccaaataggaaccgaatgaacaagatttaaagatttcagatcaacagaccagggtcgaattattaccggtttcctgtcgaattggatcactcctgcctccattgcttggtctcgagttgcctcatcgttaaacctcaccaagataagtcccatgttcatctttgccacttgctggatgcccaaatggccccaaactcttttaatgtaaccttcaaaaactgttaccagtggattagcacccaaaactttacatacaattgctgatttccagttctcctcctgctcttgtacttcctccaaatccacttgagctatcttaatcccatctctaatttgaggttctgtaaatagcagtttttgatccctagtgatcttctagtcccgaatgaaagattcccaattcttcttagctgaatttcgatatgtctccgccaattgttcctgctttgcttcgacttcctccccccaactcttgccttgtctcccagttgtgaaatcgtgtgtctctgcactgtcttcccctgtaacgattgtctcatgatctacaattaggtcgtgcgccaccatatctgctatgagattcagaccttcattttattccgatgcctgaacttcttcattttcctcgtcaacctccacttcctcaaccaccggagccctaatgactggcttgcgccccacttttttcctcttcgccatgggagagagaaagcaagggaacgaagcttctcttggtgagtacgtatttaattaatactatacatatttaggttgtaaaatttatttcctatttcattttcagttttctaatcatttgtattcagcatatatatataggtcgttctcttcatcaataaaattagattagaagtattgttcaccaaaaaaataaaaattacataaagttgtagtagtctaaaaattggaaaattttccaattaatttctgcccttctaaaaaaaataggattttgcactcactcaaccttagaaaatcatttttaaggtgatcttctactctcacctcctacacaggaagcctgctacaccccgttctccggccaatctcccacgcatgtggcgcgtgtacgcacgtgcaacaccccgacaacgagtgagattttttcagtgatgtcctcctcgacactccctacttcatctatgattttattttttgaaaaagagaaagggacttcttgtcttagacaggaccctcacaattatgtattgaaagtcctcacttgtggcggaggaataccttagttacaaaaacgctcagaaacaaaagttagcactcagcaatgcttaaaaaaattgctagtcaaccaaaatactggtaatacattactaatctccattctctacagaaatctacataggaaaaatcctagaaaagtttggtcttaaaaacccaaatagctgtccaaaacttaactttctcccacacagccgcttctagcttgccaccccatcaggtgcagaagatgtgacaagatataccaacaaatcatcatcctccccctgacgcgtaggagtaggtgaaaatgacaaataaggtatgtgttccacaaaggtaacattaatacaaacaaaatatttgttgagatcacgacaataacacctataccctttttgaagatgagaataaccaagaaagacactttaatatcttagggtctaatttggtgacatgtggacagacatcgcgaccaaaacaaacactattaaatacccgaggagcaactgaaaacaataacttactaggaaaaagaatcttaaatggggtctcacctttaagtacagaggatgacatgcgattaataaaaaaacatgttgtagaaactgcatcgacccaaaaaggtttatgaactttcatttgaaacaaga

SEQ ID NO: 383966 - DNA, 2795 bp, Cannabis indica
ttcaaacttttctttgtgctccatatacacgatcactttgctgaactgctataaattattttcaaggttttgattgcaaaagtaatattagccaagttttcaattataaattcaattccaactagctataatgatctcttaagatttaaataacgtactttttgcagtgacagaaccaacccctaaaattaagggctggtgaaaatgtaatatacatatttatatgaataatatttatttttaaaattatatagaattaaatttttaatttttagataattttttttaaaaaaacatagaaattatcttttagcttaaaacccaaatgattatagagaataaaatttagatgtccattaatgagctaattcataacgagcttccatagtgataattaattaagtaaaaaaaaagatgtactctcttaaaatgttgttttggtatattttttagactattttttttttatcacacacgttacgttatatattttaaggactgtcttatattttcaaaaaaattctgcatagtttacaaaaatataaatagttactagctagtataagaaaaaaaaaattagtatgcaataaaatatttaaatatttaaaaatttataaataattataaataactataacatatacagttatttaaaaaaaaagaaagaaaaaaaactctaaattgtgaaaacagataaaactaaacaacccagtttaatataaatgtataaagtgtatatatattgaaaataattattggtaaaatgtatatataatatacatgtttcataaatgtatatactaatatagatcgatggtaattaataaacacattcaagaactaacgaagtagctagtaacccattaatcaaattatcaaataaaattctagggcacatatatatgggtggtcgatcgattaatacgcgtcagttgttttaaaacttgcaataagaacaaaataatcactacatcattttttttcatataaaatttatttttacaacactcatacatgcatatataattttatagctgtttccactaagtaattattatatatgacatacaccaaaatgatcacataataactatttcaaagaaaaagtagtgtatatatgcacgcatgctattgcaatttgcatccatttttcttattcattactaatttttgaaagaattgatctctacacctatataattaattagctggatcaaaagtcaaaatttatgaccacaaaatttggtataattttagttgaaattaagaaataagaattggaaaatcccatgaaccaatctagctagtagctagctatatgtgaatacactatataaattctttttcaatttatatatattaaattctcttttatacataataattaatgttgaaattcattggttaaaaaaaattgcggctgcaagataagaatttgaattctaccaaaaaaaaaaaagaaagaaaataataatttgaaaacgatgatggctcgaaagtctctcttatatcaaaatattaaagtctaaaacttttttctttttcatataataacatctaagaaaaagttaatttataattaatttttttttcactcactttatattattagagttaattaagtcatatatatttctgaaaattctacgtaattacactaattgtagccaaatgtctaaattaacaaagaatattcctattaattcgatatttttttctttatatatacaaaacgaatggtttcttttacttataatattatatatacaatacacacgtggcgaaagaagacaattagtttattaattatatgtatataataattaataataaaataaaatagtaattagagaaccttcctagctaggccttatatattattattattattattattattcacagtcaaaagtctatggcttcagactcagcaatatatatctacatatgcttttgtttggttttaagtatatttatatatacatattgatcatcagagctcttgtatcatatcacacacatatatatatatattaatttgaatgattgatttttatacatatatgtataaaaagtgatatatatatacagagaaaaataaattaaatgggtgaaaagggaaagaaaatgggagtgagaaaatacaacaaatctgaatttccacggcttcgatggacaccccaaacttcacgagctctttgtcgattctgttcgaattctcggcggaaaacacagtaagctaattttaataatatatatatagtctcatcaatataacatgtcttcttctttgatcttcctttaatttttagttaataaattttgagaaaaaagaataaaagaaagaaaataatagtaaaccctaagctagatggatatatatatatataattaatcaattaagcttatggttttattatttgttgattaatttaaattaatgagtgtgtgtatatatatatgtataggacatattggtagacaactgtaatagatgaagaaatcttttctgactgaaattaactatagtatatatatatatatatatatatatatatagtttagacttagtaatttaaattggtaaacaaatatagtacagtttaaatctctgtaatactataattttgtgtcctcttgatgattaatagatattcatatatatatatatatattaatatatatatgtatatgtatgccatcaatatggaaaatatttcatagaataattgttacttagaataataactattattaattagttagtggagatacctaatcttcctcagttatgt

SEQ ID NO: 383967 - DNA, 1337 bp, Cannabis indica
taaactacattaattaagcactcctttgagctattacgtcgggttgatgatgcccagttcctaaaagcaatatatgtcgtatgatattgtgttgttgatagttacaagtgtggatgtgcaccgtcgtcgaaaaatggagtgttagagtaatgttgcttccctaaaaaaagctgatctctttttcgttgtgtaccttttaaggcttggtcgaggggataggtcaccaaaatttcttgagttcatgttagaggttgccacacgtaggcatcttctgagacaataatctatttgagataccatttaaattttcattcatggacgatccctaagattgcttttgtacactttgaaattcttgtatatttcaatcaccagctatgtatgtaaccattgtatatgggaagctcatgaaactaaattgtcatatgaaatttgaacgcgaggtccaaacttatctttattaatgaaaaagactctcattcatcttcttgggccaagtgatgggtctaaaacccattaatcttaaataagtacaaccaacacgattataaaaaaaaatatagactaaaaattctttaaaattaaaaaaatgatgaaatagatatagtgtactaaattgactattttgaggtgtacaacaatttttcctataactttaatttcgttattatcttccaaaatgtattctttttattgaggtgtaactttttgatttgtgagaataggtagtaccaatttgtctctactttgcatctccatcatgttccacacctatgtggataattctaacttatacgtataggtttcttttatcattttattttttgtgataagattctttcacttgatattgataggtattgcatcagaacttggaatccaactacaaggcatacttagccaaattatatgtgctataatgatcgagtttcttttttgctcaaaatgtgataaagagtttcttgatctaggaatgtaactaacatttatgcatatcaaataggatactaatgcttcccgaatataggaatgtaactataaatatatatatatatatatatttatttatttatttaagtgagaattgagaaagtgaggtaagagaaagtgggtcgggatccggcatcgggtctggatttagggctaaagactggggttagggtttaggttcatctgaggactaagattggggtccgagactggggattgggtctaggttggggccaacccgggtcaagttcgaatattgattaaaaacaatacaaatagactatactttattttttttttaaaaaaaattgtttaaaaaaattaaaaatagttttattttttatttt

SEQ ID NO: 383968 - DNA, 2628 bp, Cannabis indica
ctatatctgtgataagttttggtcatctttaatcattgctcttgttgttgtatctagaatccaaaggaagctcatgcaagaaggggaggtgaaatttctatactcattatttgatggattaagacattgtagctaccaaaagtttaatatttccagttggtgattacagctccatggacatttaaccccgagttacttcttacatgtctcaagactctgaaaactcaggtgattggttgatgttaacaattcataataattttattattcccaattcaaaagtattgcttgctctgcctagagagttgcaagctcggggttcactaatattcgtcaaacaaaaggttttttcagggatcagtttctgtaccgtcatttgaccatggcgttggagatccagtagaagatgatatttttgtgacccttgagtaagtaatatgtgcctttctcatattatagactttggctgtagctcttaattcttgtatatgaatgttttaacaattaaatacgttttttcaggcacaaaagtggtgatagtagaaagaaattatatattcttggaagatggttcatggaaggaaatatcatcgatcttcgatgagaaatggtaagcgtttggaatcttgtattctatctatcacccgtgtcgtgtcgtgtctgtttgaatgaattgtttaccaccatttgtgtttctttctatgtttgaaggttcattgacattgacattgacaaagctatgcaaagagtattaaagagacatatctcaacaggtaatctacttgtgctgagtaatctgattctgaggttaaagaccactaaattacaataccaatgtatgttttttttcttcttctgggatttcaggaaaacctcccgatgtagctaaatggagggtgagttagctacgtacctacattacattacatgttaatttaataggataaatttcctaaattgaaaataaatataataattgcagatacagtacaacgaccgcccaaatgcagagctgataataaagtcaaagaggaatgcagatttgataatccactcagttgatttccaaaattgaaattgagaattttttgttaacctttttatgaaattttcaatataaataaataaaacaaactacaaaaaagtcagcttaattacaatataaacataataggataattataattagtttattgtttaggtaaaattagttatactttcatatttagttatatgataaaataatctcttagattgggcactaatctaatttcaagttgatttttttttatctatttgggaatatggttcttttcatataaatattataaaagctgaaataatatgaatataataattgcagattggaggaatgcagatttgataatccatttagttgacttactaaactgaaattgcttataataaaaactaagctgtggatttaatcgatagcaaattttattatattttcagttcatggttgaagaatgattggcttcaacttttctcatctcatgttttggttttgaatctttcgatcgagacgcttctggaaagttatggtgtagttgaatttgtgtgtaattaaaaataattattccgcaagcctgcatattactcatttttgcatgatcattatgttcctaacttcctattgcatgtatgaaaatcctcacacttactagaataataataattttttttttattattttttaaattaaaaagagaaatatataagctttcttattattgcacatgctcatgttccccattttcattcagccagttcatcatatgaggcttttatttcaaatatcataataacaaaatatttcttagaataatatgttatatatgtaggaaatttctcatatgattaataataataataatccttatttagctcctatgtatcattgcacttgatctccatggctcttggtgctgatgaggtacatcaaattaattaaatatgtacacatatatccatatatatccatatcaaatcaaatatacatacataaatttaaaccacactgaattaagcaaatatatttgaattaattatcaaggaattaaagactaaagcaatatattgatatatagataatttacatgaggaaatatatctactatctttttgaattaatcaggaaatttattaattaattaacttaatcaaaacaatagaacccatttcagaggaacaattttccaactgaagcacacaacacgtagagaaacaagagtctcttgtcaagcaatgagccaacttgtttgcagatcgtttaacaaaatataactcaataaaagataaagtcaaaagtaaattcttaacatcttgaacaataagaccaaaatgtgaggacataaagactttactttggactgcttgaacacacaccaaattatccgtttctaacactacactgtcccagggatgaattgcaatctaactcaacgcttctttgatgcctatgatctcagcaatttcgggttggacatatccaacctttcccttcttgaaagcttctaccatggttccatgatgatctcgagctacacagcccactccaaaccgacccttctgttcaataagccccatcatatacttaatcttgtt

SEQ ID NO: 383969 - DNA, 2250 bp, Cannabis indica
tttgacaaattttcacaaattggaagattatattttaaaggtttagacgggagtccccccctccccttagacaaagagaagtttctctccttccctccctctccatccacccatctctccctccatacctaccaaacatagtctaagataaacacatacctacatacaattctctatcttcatcaatagtcacatattgaattttgtgctctctcgtgacctagtacggatcactagtgacaaatatccaacaaaggtaaaaaaacctcaatcacatatatatctctgtctatgattcaaatttcacacaaaacacaagcatacaaaaacaaaatacacaacttggctgcaataatatatgatcatatccttttctacgtatactctagctatctcttccactcaatcaaatccatcaacaagaacctcacaattcctctttaaaaacaaccccaccctcctcccaatagggcacaatgcatctatacatcacaaaataatacaattaattatatatagtatagctagagaatatatctttcatatatttttctctatatatctctctttctccttatagccaaaacaataataataaaataatatagctagtcaatatggcttcttctggtaacaaggtttttgcagccattgtaataatgtccatccttaatttgcacacttgctacgcttgtcacaataccaataagtgcaagccaccaacaccggcgtcagctccgcccgcggaatattgcccaaaagacacgttgaagctaggagtgtgtgtggacgtgctgggattggtgaatatagtggttggtagccctccaactaccaaatgctgtgctctcctccaaggcttggcagatttagaggcagccttgtgtctctgcacagctcttaaggccaatgtacttggtatcaacatcaacataccagttgctcttagtgtcctcctaagtgcttgccaaaaaacacttccaccaggcttcacatgccaataaattaagatgaccaccctaccctttacgtacgtatacgtactaattaagaagaaaataaaaaagaaaaaaaatcgtcctggtggtggtacgtgtcttgcatgtttttgtttttaattgtgattttcttctccaatattaatttgttggagagggagatcgagtacgtacttaattagttaatgtgttttattatattttaattcgttttcgataataaagtaggcacatctctttgcctatgtgtattgtgtaagatctggttttaatggaatgaataatacgtacgtaatatttgttattgccttcgaaatctgcatgacaatgcacaataaatatgtaatattacataaatatatatataaaattcgaaaatcgagaaatataactttaacagtagaattaataacttgcacttttggtttccgtcaaagaaatgtcacttgtgttaatgtgctggcaaaagttagtattgcgctggtaaaatagaatttacttgtgttgtgttggcagaaggacggtattagaacttttgccagcataaaatgaaaagcgctgacaaagatgacttttcccagcacgtaaatatgctggtaaaagttagattttagccactgtaaatgtacgctggtaaaactttgacctctttaccagtgcagtttacaaaatgcgctgataaaagttacatttaccactgcagtaacgaactgtgctagtaaaagtgacaagtttctcaatcctaaatgtgaaatactgtggtgtcaatcacaatatacaatgttgtatactggtatacaattaaatataaattaaatttcatatacttaatttataatgtttattgatataattaaatattaaattttaaatatttaatataaaaattattataaactatcattaactatatattcacaacaaatcacccacaaatttgtttaatcacaatctcattccaaaaaaaatctgcttatttataattttttttgttggtttaacagaatatttgaaaattttaagaatattttgttaaatttaatggtgttagtagacttagttttataaatatatataaatattaatattatttattttaaattaatttaaatatatataaatattagggtaactattcaatgattacatttttctttgacctgtaatagtaggttactaatagataaacattcattttttagaattagttaattataattaactattttcttaaaataattaattaaatatt

SEQ ID NO: 383970 - DNA, 1632 bp, Cannabis indica
atatatatatatatataacaggtcttgttttattattttatcaagatcaaggcctttataattttattattacgtactacttttttctcttttggtttcattgtcattattctcttgttgggggtgtgggtttttttttcttctttcacttggagtgttttgttaatcatgttgttatgtatttccaccagttgaacaaataggtaatgatggtgtggtttgtgtacttgcatttttacccaaaattatatatataatatttatatatatgtttatgagtaaaaaactgagacagaaagagatttgtagatagtaactgagagaaacaaatccttggacattgattttggtttgtttggattatggcaaagaatatgggaaggatctttttcgtgggaagaggaaaaaccttataaagaggcagaagatagaaatatgtggacttgatagaactcagatccggtttaaactcaatgttttcagagtgtggggtttttggggttttgttttgtagtgaattattatgattaatattattattttgtttttctctttctttctttgttcagttgttctcgttcgtacttggcagtgggaattatagtcattcgtatgaataatgaatggtcatgacgacgtatagttatcaattatcatcattattatttttctgtgtttgtattgtgatttgtacgtatatatataggttgagtctagtgagtcatcagtcccaccaattattgttttgttttatctccttatttcctaatccgtacatctaatgcctgtatttgttctttgtatatttctgttctagttaattttcacatcaaaatgaaggtgaaaccctagtcagggacaggcattttctgtattgacgagtgtataagagctgtgattgactgatttagcaaggtagaaacgtcttatgaaatgtacatttttgtgtgtgtaatgattacatatatatgtattgacgtatatatgatgaaatgtacatatctttgtgtgtgtgtgtgtgatgattatatatttgaaagtttgtaattatatgttacgatatatatttgattttgttttccaccacttcatttccttgattccttaataattaatgtcttggctgggtttttcgttgcggtcatccttgaatgcatgtgcaaaggtaaacattgttttgacaattttattactttttgtattgatttttttttcttgtgcatttacacttacatttgcagtatattaaccgttaatatatgaatgggtgtttaatacatttttataggtaacgattggttagcatatttatatttatatttatatttatacgagatttgatacttaattataccgatagcgataagataccgataagataccgataagagtgttaagcactactagtgataccttttaacaattctctttatattagagagagaattttttttttatttagctagaaatagagagaattgttaaaatgtaccactagtgtctagcattttttttttttatgtcagattactattggcggtttggaataggttaatgcttgttgaccgagattttcggcaactaataaaatattataaaattactgagctgtaagaaagtgagagaatgatt

SEQ ID NO: 383971 - DNA, 4592 bp, Cannabis indica
aattacatatcggtccatgtcatatataatctcgattatatacaacaccttcacttagatgtcatactacataacgggtatcagtgaaccgtactagcaaccgttgattaaagattcctaaactttaatatgttgttaactgttttattcatggctaaatgatcttaatttttcatataatacaagttacaacctcatgtataaataaaaatttttcttatatttatatataattatttcattaaatatttataatttaatattcaaaacgtatataaaaatattccatttttatttataaataaaaatatctttacacacataaacactaacactaattaaactagcattgacaacaatttattaaaaaaagtacaacaatttatttagaaaaaagagtacagcaattaatgaaagaatgatagttgaaaattgatttttcatttttttttttataatcttttgttttaataaccataaacgtcattttgtcaaatacctcttattgtaatacacttctagtgaccttccatcctcaacgtaagattaaattcacatcattttattttgttttattaaagtcacatctagttgttcaaacttcaaatattagattcttttttttttccctttagttctctcatttatatataattaacttttggttggtttatcaaaatcttgtattgtattaattagtgctccctcaaatcaactcaagtccaaaccaattctcaattggttggcaacaaacaacactaaagtcatagtattatttgttcatattagtttcttcaaattttcttctgtaaatacaatctaatgttgtaatgtccatttttattcagatagtgacaatgttgtttaagaggtctatccacttgataagaattaagaagagagtaaggggaccatgactatgacccttcctttatatatatatttatgtatttaaatttttgcacatgaaattgcaccacatatacttacactattacaatccatgttgtgaccaaaacacagctaatttgaaaattataggccccaaaaagacaaagaagggaattgaatttttttttccttgacatttaatgttttattgtaagaggatcaaataagcacaacaaaagaaatagattctttttatttatttggttccaagcatagttagagcatctataaacaaaatgtaaagaatataatgtgctgttatacttttgcacactttaaaaaaattattatttcaatggtattctaaaaaaatgtactaaatttggcacatactaaaatttgtgtcaaattcaatataagatattgcactaggtcaaatttagcccacaataaatactaattttttatttactataatactaataattattatgatttattaatttttgctgtattttacattctttatttaccatattaataatatttaaataataataaaaaaatactaataatttttgcatatttttaataaaatgttaaataactatcaatctaattaattattattttttattatttattttacattttgtgtattggagcacaattataagtagtgagctaaatataacataaactcattttcatgccaaatttaacatgaattatagatctcgcattaaaaatagtcgtatgtggtacaacactacgaacaacatgtacatataagatgaatatctaagaaccatattttttattattgcaaattatgtgtttatgccatctaatcacctagtagttccatttaagtatgtattttctaggtttacattttaagctttgacaggtcggctattaagtgataaaatatcttggccaactgtcataagctagcatgtgagctgttaaagtcggtttagtgagatttgagtttatatatacttgattcttaaagatcctaactaactctcactcctttgattctttgatagagatttttcctgcaagagaaaatatctttttcttcgtttcttgcaggttcatccattgttgaagagttcaagcttctgtgatgaagtgataatggaggttgtttcatctgaatggagctcagattcatagctgaatggatttcagctcaagcgaagcaaggggcatatcttcaaatataaagggacttagatttgaatcttggttggttaatcaagatcttagggtaatttgttgtaagaatctttgttgtattattttacatacatttgatttacaaactgaagtttgtatctaacattgattcttattggagttatttatcctggtttggggaacccaagcactacctgatcgaaatgtattttcaatgcaaggggaagcttgtaaatcttgatcttctctgatttacattaaactttatattgtgtgattgaatccattatttcaattagtagcatccgattagatcgatttttcatttgatattcaagctaactttttcaattaatgaaactaagatcatgttgctactagattgattttaggtcgtgtgtgttgattcttgtttggagtttttaatcttgttgtcctccaactgtttatttattgtttttggaaaactgacccactccgagattcatctcgcagtgcaacaaagttattgtttgttaatttttggaaaactgatccactctgagattcatctcgcactgcaacgaaagtgttgtttatgtgtgtgtatatcaacatgaaatagagatgttttgagaaggaggatctacatctcgacctcctatgttggaaggagctaattaataaggaagacgaaaatgggagaattcttgatagttaaggatgaacgggtgtggatggccgtggctgagggttggtcaccacctacttttaccgatgaagatggggtaaagaataaaagatctagtgcatggaaagttgaggagatggaacgagctaactttaatttcaaagcgttacatgctctatttaatgttgtctccactaatcagttaaatgtcattttgaattgtgagattgctaaggatggatgggagaagttgaaaatagagaatgaggaaaatgaggctgaaaaaaaggcaagattaacaactcttgctaaatctttcgagaatttatccatggaagaaattgagttggttgctgagtttcatgccaaactatgtgatatttctaatgagtcttatgctcttggaaaattctactccaacaaaaagctggtcaaaaaagtccttggtgtagtactaaaaagattcatgtctaaagtgacttcaattgaggaaagtcgagacattgaagctcttcacttagatgaactagttagatctctacaaaactataaaatgactttgcatagatgtgacaagggtaagaaaattaaagacttagaaaaggtcaaagttaagattggagtagcttttattcatatggaggaaattagcaaagatacagatctgtcaatgtttcacaaatggaaattgctcttttagctaagaattagggttagttttaagaagaataattttagaagtgaagaaaattcttctagtaaaatttttttattgccaacaagcatcctcaataaaatgagaagaagagcaaaggaattcaatgtcgagaatgtgaagatttcgaccatatccaagcagaatgtgcaaatacattaaagaaaaagaaggctcttattgttacttggagtgatagtgaagaggaagaaactaatgatgagtcaaaggaagaaaggtttgtgattgcaagacataaacaaggaattgatagccaataatatggagttagaccaaaaagtaaaaaactagttcatgagttagagagtaaggaaagtgtgttttacaaattgagttctgaacttgttagagaaaaacaatctttagaagttttagcgcccgatacaacatctctcaaccaaaaacttcagctccaaaagccctatgagatagaacatatactggctacaaagtgttgtacaagaagggactggacttgtcaattgaagggccaattgagtctgcatcaggtgccaaaccatcagttgttactactgctagaaacagtagcaaagatggatctgaagaagcatcagttgaagccaatgaagctgaaaaataaaaaaggctatctactgaaaagagtgtagacatttcaaaatgatttgtgccaacatgtaacttctcaatagaaaaggtcacataaggcctcgatgctataagttgcagacatatttgaaaaataagattcaacgacaaggttccttctcacagtcaaatcataatcaaagaaaatttcctatagtgagtaagagacctatgtttgaagctctagctttggtggcacacacatccccatcaaatatgatgaagaatcaatggtaccttgatatcagtcgttcaagatatatgactggaaatcttaaagtcttgaaaaactataaggaggtaaaagaaggaatggtgatttttggagatggaaacaagggacaaatcatgggaaaaaagacctaaagttaaatggcattccacagctaacagatgtaatgtatgtattgttgggttttatgtcctaaataaaactctttacaatctgattagtcatca

SEQ ID NO: 383972 - DNA, 2734 bp, Cannabis indica
caaaaaaaaaaaaatcatttattgaaaaaaaaaatcaacgacaaaaacaagtcgttattgattctttatataatctagtaatatactatagatgtatatctccagctccgagccaacttgatagacaaatacaaatttgaagacttataaaaaaaaatacaaatttgaagtccaacacttgtataaaagaatttggagacaaaaatgatatatttgaaaatcttggaaggatgtgatatttattctaatattaattatatttttatgagaatcaaaaatggggggtattgtctttttagtgtagacaattatggagcacgagaattaagagacatgtttgtccatggaatattgaccaatatataaatgtatattttataaaaaataaagtgggatataagagagtggaaatttctatgcttgaagtaaaaataagagataacatgattacattatatgctaaactagcattaccttcacctttatcaatataaggaaattgagtacatatttttcttttttcgcaaggtgaaaattgagttcatatgattttgtatgacattaatttgaaaagatcacaaagcactaatattaattttatcctaattattcatattgtttcgaaaaattaataatgctatatctattcccctttctccttttaacccaatctcctcatcctctctctctcatgtggtcaacgtaatgaccatcaccaccgagtctcatccctttcgttttcattacccctttctcttagacactgttagtcattatgatgtcatgttagttacagttagtgatattcataactaacttttgttaattggttgctgatgtccttagcttactctgtataaataccctttgttcattaataaagatcaattcagttttactttcactaatatggtatcaaatgcttaaaattttctctcttcttcttcatcttcattgttcaaactctgttctgccattgatattcaccatggttcaaactcgtgctactggttcccgaagttctggctaaaatcctctacctcatacttcatcgacaatcccagatgctccaacaaacgatgatccgatcattcttccagcttctgcaattattggagaaaacaacaacaatcagaatcttcttcatcgccctactcatgtagatagttcgagtccttattacctcagttcaggagatcaccctagattaatcttggttactcttccattgtctgatcacaattttcaggcttggagacgtgatttcaagctttctgttggactaagaaacaagactgtgtttctcaagggtacattacctcaacctccaatcgaagatcctcttcatcatcactggctccgctgcaatcaaatagtgatgtcttggattcaccattcagtcacccctgaaatcaagagtagtatcatgtttcttgatacttcggctgagatgtggactgagctcaaatcctactttgatcaaggtaatggccctagaatctttgaagttagagaaactcttatcactctctgacaaggcgatgggtctgttagttcatattttacaaaacttaagtgtatgtgggatgacattcaggaattgagacctcagattccttgtacttgtgctgcctctgttgatcatttggctttcctgaatcaagaacatgttctccgatttctcatagggttaaatgaatttttcttccctattcgtgcacaaatccttctcattgatccgtttccatctttgtcgaaagttttcttcatggttgtccatgaagaaagacaaaaaaaactcaaaaatcctcaactcccactactggcctctgtccaagaatccactcaaccccctgctgctcttgctcaaaatccctctgcttctgcagtatctactaatccacgtcccaataaaaagatgagactctactgctttaattgtcacaaaccaggccatttaaaagaaattttttttcctaatcaattttcctcctggttatggtgacaaaaagaaatctgatcaaccctctgtccataatgcctccgcataagtcgatcaatatggtgttcttgttaatcttacaaagcaagaagatattcaggccataatctcactgctcacacagaagctccagccaatacctacatagatgcatctaaaccttttgcatctcatgtttctggtaaatcttctaataattgtttatggattgttgatagtgatgcttcacaccacatatgttgtcatatttctttattttctattgtgcataagaatactattgctcatactattactcttccaaatggttctattattagagttcataactcgggtgacatcaacatatcacagaatcttttcatctctaatgtactctatgtccctagctttcaattcaacctatttagtgtttccagttttctcactagtactctaacaatattcattttaccactaactcttgcacattacagggtactcagaacacgaagattgagatagctaaacgcattggcaatttatactttctgatgcaatttgccaacccacatcttcatttccttgtaatcagtttaataaaacttgtaacagtgccttttcatggcattctagacttggacatccttccttgtccgcaacaagattactcaataaacaattacattctgctaatgatgttatttccccatgttctatatgtcatttagctaaacaaagaagattactttt

SEQ ID NO: 383973 - DNA, 1300 bp, Cannabis indica
atttaaaacttttatggagttttgtaatctcttgcctaagttttgagcgttgagtagagttgtgattaattcaacttcttcagtggctattttcgtggtaaccccccagcatatgctcatgttttgccttctccaattagtgtctctccaaaggctacaaccacaccctttgattccatcatctcttcttcaacagttctttatcctaggctgaagctgggattgatcctactacatcaactttcagcccaaatttggtgactgctgttgagaatcgattgccatccttgtttcaaaaaggaaattgatttcctcaggtggtaatgtaagacaagttctgaattgttgtctcactagaaacactccactcatttactctacgaatacattccaacatcaacaaccagaaaccatcgctgaaatgtctaatatttctctagtggcagacaatattgatgcttctttggcgtaggctgctacttagccttgccaatcaccatgaatatcttatcctggaatgctcggggcttgagtaatctgagagcatttcgacaattttatttgctcatttcagaaaaccatcttgatgttttatttattatggagtctagacttagcgttggttctattacgaaattttgcaatactattaattttcctaatgggattgaggtccctagagtcagtcttagtggtggtttgctttttctttggaagtctcatgtaaatataagtattgttaactagggaataaactttattgattgctctatggcttttgttgatggtccttcatgccatttcttgggtttctatggtgctccttctgtttttaataggcatctcacttaggagcttttacataaacttagagacacttttccttggtcgcattggcttgttatgggtgatttcaatgaaatcatttctcactctgataaacttggaggtcctttgtcttctgaagtacaaattgatggatttcatgacattgttaactattgtggtttgttggaacttaacctctccgatatggttaatgttaaagaaagatcagactgccgctttcttaataatgcttggcttgagagtttctcgatgcccattttatcacacttggattttttccatttagatcacatggccttaaaagtttccattatttctttgctgaaagctcctcctccaaaatataaaggctaattcgaattttttttccccgaactttgatatgtaccaaatcaagccccctgaacttttttggccgctaaaaattcccttcgaactattgagattgtta

SEQ ID NO: 383974 - DNA, 3101 bp, Cannabis indica
ccccacttctttcggaactcgtcaaacttgtcattaaagttggcctgaaaaagcaattagaattgtcattatgatttaacaaataagatagaaacttacaagcatagaatgtgtttcgggatttaccttaatagcctcgaggattttgctgaactccatcttatcttcattcttcacggtggtcaaacacaatgcagcagctgtcttctggtgaacaatctgtcaaaaccagaagtgattagatgatgccatcaaaaagcaaagccttatatcatcaagcatacagatgaagcagatcattaccgatcccaaacgggattttcccttcacgatgcagtaagggatctccatctttctgcacaaggcagggagccagacaaccaactcaattgggtctacatcatgggcaatcactaccaattgtgctttgttctgaaaaaagcataaaagggattacataatgtgagattttactaatgaagcatctacaacaaagtttatttcagatagcagttaatacactagaatatctagattatcaacctgctcaataaggtatgtgacgtggttgagcccgtatttcacaacaatgggcttcttggtctcagcagtttttccttcagcctcagcttgagcacgtttcacaagacgttccttcttttcggctttgtcctcaggcctgtacttaagaagcaacttgaagagacttgtggctgcacaatattatgaaaaatggaggtcattacagagtacagcaaaatattatggtcagagattcagagttaacaggcaagtgaaattttgccacaaaaaaaaaataacaggcaagtgagatttcagtcctgaaagtacaaataagaaaattaaacacttcagcaaaggaaccaaaggtaataacttgaacatttcattttctctagcactggaaagacaatcaacatatagatagctattttgagcataatacagctaatactaggaaaaacactatttagaacaaggattttagttcctcatgttgaacgtacacaacagcattatagagcaatgtttatcatccgatacgaacaatttttgtgttttacacttcttggcagatttgcctgtagttggttcaacaccgtaaatactgtctttcaacttaaatcgtttcaatttcaatcaaaaggcagtagataatcaaggttgtgtaattaatacttagagtcatataagttatgtacgaacataacatcaacaatttccctaaacttaatatgcaacatcaaacacactagtcttattgttttacatgggattaccatccaagtagtcatcattaatacccacactaattccaccatcatacaatatcaataactcacttccagttctaaacaaaacaaagtaacacatttactgcatatttatcattatactcattcccaactcataaaagaaaaacaaagcttatccagaccataacgaagaaaattaacaaaaaagggttgttgttccggttcataccaaggtttttgtccaaagtcttggtgaactggttcaactgaggtggaaccttcaacctctgcttaaggattctcttcttcctctgaagttgaacagccttaggccatttgacaaatctgtgcaaatccctcttcggtggcaaagcacctccaataccgaactgtttaggacgcttctcaaacagtgggttcacaaccttctcctgtttcacaacaacacacataattaagattcgcaatcacacactgttcagcactaaatttagagctaactaaacgctcaaatacaaaaaggtaaaggaatgaaaacaaaaatggaatactgaaaattacaggtttcttcttcgatagtgccgaggcctttccggtcttcttcggaggctgcatcatggtaaaatcaaaataattaataaatgaaaatgcaaatacatttacagaagtctgtgagagagaaatgagattaccatggttgatgatggttgagatcttgtgcgaagaaaaccctaaactaaaaatggagttagctcttggaggcagacaacaactagggtttttcttgaatatatactatgacttactgtgaagacatgcttgtcaattcggatgggtcgggtcaacccgacttggcccactacaaatttatagggcccattcttaaatgttgctgagccatttctgaagcccagatacagaaagaaaaataatttgttttgcatagttaatttttacaaaatactgagaaatcttttcaaaaatactatatttttataaaatagcagtagaacacaaaacaaaacaactaaaaagtaaaaacaactgtgaaacaactaaaaataactgtagaacaataataaaaactgaacacagtataaaacttacacagtaatttagaaaaagattctaccccacagtaaaaaagtaaaaaaattaaaaatttcagtatagaatataaattaatcatttttttctttttcttttttgccactgatgaaattttcaataatttcatttaaatgaaattttatactttaagccattaatctatctatatatttataaataaatcctatatttttttctttttatgttatagattttgtgagatcttaacatattgtctaaaaaaaaatagtctattttatttttgcgatcaaagaaaaaaaaactttacttttgcaaaattctacattgtttagaaagtgttgtgagtctattattattattatggactataactaaaggttttatttgataattatcttttatctcaaaattaatatttttttatactaggtgattgataaaattatctttacgtgatcagttataatttttaaaatttatatatatattttttttactcaaattggtaattttattaactaatcaaatcgttaaaaataatagaacgtgcttcagaggaacaatcttccaactgaagcacacgacatggagagaaacaagaatctctggctaaacagtgaaccagcttgtttgcagatcgtttagcaaaacgcaattcaacattgtctaaagataaaagcaatgcacgaacatcatgcactaaaagaccaaaagaagatgacatagagactt

SEQ ID NO: 383975 - DNA, 2355 bp, Cannabis indica
aagaaaatttagtttttctagttaaagttcttcgagtattgtatcctatggttttgtaatgtgggaggttatcgtacactcagcaattattgagcaatggttatagtaagatgtgggtgataaagtgtttataccaaccaaatctagaggcaccattcaatgctgctgcattcagatcgaggcaatcttaattcataaaacttttaggcacaagatattgatagagagacaggtaattagccaaaattaattgttagtgggagcaaaactgaaacaaactagtgaccatacattcagggagcactttctatcgtactattatgaaatgaacgtattggcaaacactattatatatttctattgtttcaaaatatttttatacaatctaccatttgatgctgagttttactaattagtgtatgcaagttcaaactattgggttagtacacaatctactatattgatgcttcttttgactaaaattgtatgcatgagattctgatagaaaaatgacggtgggaaatttttggaagagaaacatctagaattatgagcaattttgctggataaactggatggttattcatgtgactttagtacacagaaacatgttcatattggctccattccactaaggttagacagaataaaattcatgcatagtggacttggactagacagacacctcctcctattggcctagaagcacttgaaagaataaaagacatgttgcttcttgaggttttaatttcatgattcttggttttccatatctatggctactaaaactgtaactcgtattaacgcaaaatatacatgttgctttgcatacagacattttgtatattgctcatgaatgtaaatattcgtattcgtattttcctagtctaataatatggaatataggattttctttaatgaagtcagattgagttaataataataaccaatatgttgggtatcaatccaagtcccaaattggaataatatacaagagttgtcttggatataagtgttccactttcttcattagtatgagacattttggaaaggtgtctgaaaacaaaaccgtgagggcttagcccaagcggccaatatcatactgaggtagtcgctcaacatggtggaagagaggggcccaacaaatggtatcaaagccaaagattaattaggagcactgggatagtgggctgcatttgcgatgtgtagaaaaaaccatcaatgtgatgacttcgcaattgaagatataaatggtgtcttgtatcgaaagtctatctgatattgaggtagtcaggtgacgtgtcccgttgatgattacggcggtacaagatgaaaatcggtattagaacctgtgtcaaaagtcgtcctcacaaaggtgatggtcaagtattgtagtccttggtttgaggggaggattggaagaatacgagagttctcttaaatataagtgtttcaccttcttcattcatatgcgttcttttggaaaggtggctgaaaataaaaccgtgagggcttaggccaaagaagacaatattattctaaccaatcataggcattccataaaaaaaattataagcaagtgtctaataatgtgataatagaatcaaacattttttttttcattttagtaaatgagtagattcattaaaatcatcaaaacattacatcttagcagcacctcatgggaatatagtctttttctatagaatttatggtaaaatctttacaatgattcaaaccactccatatcaatactacttactgatttaggcataacatcttgtactctatataccattttgcgaaacatactctatacaactcttacttatatgacattcaatgaaaatatgagtcacactttcttcgtgaatatcacaaaataagcatgttgaattgttcatcatctgatgtttcaacaatcttggtttttaatctgtcacgaatgaccagctacatcacactatcataatatgttcagttatgacttatgagtaaaagtggtaggtaaccatttttaataataatcattctatccatgcatgttttgttagaaaaattaataataatctgaagattaatttgtatataatataaaacactataataatatataataattatatatgtattgatttatagtaattaccgcaatttgataatgcaatactatcaataagtcttcctccctaagtctctaaataagaaatagttttatttatctgattatcaaagatatataattgtgatgtgataatttgtatttatagagttagctacataaccctagttggactggactgctcatcaaggcttcagtcaattaaaaaaatccacacttctgcttcacctaga

SEQ ID NO: 383976 - DNA, 2805 bp, Cannabis indica
tcatttgtttcttatctcatcctctgagaatttagatactatacattattttaaacccaaatatgatcatttgggtattgttatttggaatttgacaaagtcaaattttagacttgtgtttctgcaatcgtagtcgtcaatgggggcttcttggccacctcatgatgattatatttttttatatgtttctcatggctgcctgctctcaatgcttagtccattttatccatatagctattcacactcataaacatatcacttcctatctctcaataatctcacccactgctctcttattttcacctgcaacatcccgacaaattggttggtggagttagcccatttagcaattttgagagctgccccattacagtttctaggaatccagtgcacctcccaaagacaagggttgaaaggaataactctaagaattgattttaacaagagagagtctcttccaatctaccaaagaataaagtcatcaatcatatagaagtggattctttatgttcacaaattaattaattattatttatgagtctagctattctttatgttttatttttacttgatgacagttgataaagcaatgtataggcgaaaaaattgaagtataatgcttatggtagattataagatgttaaaaagaagactataattggaatgaaatggtaaatattagaattcactcaggcctataacatcacttatctaatgccacaacatattgggctgctttcaacaatgagatcaatccaacttacataacgattttgagtaaagaacaaatgtacccaaacacgatttttattataattgatcggttttacttcttcttcccttatgtctttttctattttgatagagtattctcatatatattgtgaagtgttgaggaagttgatgaccattgtgattaacaactaactgtctatgttggttagttagttaggatcgttttctgttaggttgttaagaattcttgtgtactcttatagctacactatatatagcttgtaatatgggaaatatgtcaatgaagaatcacactttgattcattctctttctcttctcttgcttttctctgtttgcattctattccttagaatcaacttggtatcaagagcaatcgacaatggcgacctctgcaaacaatttcacaagtcctactgtggttccaaccaccatgttcttaccaccactaagataagatcaaagcaactattttttttggcggtctcaagtgcttcccacaatccgtgctcatgattttgaagatattatactatgttgacatccaagaccagaataatacgtacctgaatcaactggttcttgaaacattgtacgtaaccctgactttcatcgatagatgcgccttgatcaatttattttatcttggttattgtcatcaatatctgaacctatgattggccatgttgtgcactatgactgttcttggatccaaggccagaatgattcatctcatgtctcatcttcagaacaccaagaaaggttcccagtcgattgatgagtacatgttgaagatgaaaaactatgttgatggccttcgtgctgctcgcaactctatttctgaggaaaaattgattctttatgttcttggttgagtaggcagtcaatatgaatctgttgtcgtgaatctaacttcccaagacaaactcactcttcaagaagttcagtttatgctccagaatcatgagatgcgacttgaacttactcagtccactgccttgctggatctgaattctcctcaagcaaatattgctcaagccaagaaacatccatgctctggatgctctcaaactggtcgacctccaacctctaatacctcacacaatgctactcgtggaaggggcagaggcaatagttcttacagaggtcgtgggagttcaagcaattccagagtgatttgccaactttgtgggagatcaggacatactgttcaacattgctacaaacgttttgatgtcaatttcacaggagttgaagatgctgctccaccatgaagcgaatctgctccacaggccaacatagccttttcatcgaccccccgatgatggctggtatctggatagtggggcttctaatcatgttacaccagatgccaccaatctgatgcagaggacatcttacaaaggcaaggaaaaaatgcttgtaggtaatggttcttgttacgaaaaatatgaacaatatgcaagtgcacataatcaagtagtaaactcacacaggtgaggtcgaactgcagggaattggactgaataccactaaactagatttttgattctatttggtagataaaaataattttgacgaagtttaaaataaaggtaaccaagaaaattaaagaaagaaaaaaagttgttaaatcaaggacgagaaattagagaaaagaatcatgttgatttaattacccaattgttaaagctaattactactctctttcttaatgtgaatgatagattataaaaattatcctaactcttttcagatcttttaggccctaaattacatgttatctaatcatctttgaattagactaatatgaaataagcattacgcaataatctaattgtcacaaaggctatgcaaatacttttgtttcacatcggaacctagtttatccaattttagcattctcaattctcacttttcagattttgaattgagatcatagagtatgtaaaaggtgatcaatcttaaacattttattaaacacaaatatggataaatttcacaatcaagaaaggagaaataacaattatcattaactaaagataatgtca

SEQ ID NO: 383977 - DNA, 1739 bp, Cannabis indica
tatatatatttatatatagttaatagttatgttgtacatttgttgctttgtacatgaacatctattagtagtgtaaaaccttaagtataggcaattaatttgattttacatttgtttttatgtatatttgttcttttctaatttaaagttcccttcacattaaagttgaaagctctttcaacctttatacactttgatagatattaagcagtgtgttgtgttgggcactagttttcttttagtaattctcttaaatatttacttataaaacccacacacccacatagataatgtaaaagaagatattttatttcaaattttttagaaaaaggctgaaaatatgccctttcatgaatctatgataattaacatatgtctcgtattctattttcatatatcctttttattattgtttactttgaaataaatatataatagtgagtgggggattttggtaaactgaataggttgtataatgatgatatatatatttaggagccattttagagaaagcaggtgatgggagagatcattgggtttgaataaaggaactgaatggtaaaattttcaacaaatcaccttacgcttacctttcgcatgttcgtgagagagatcaatactgtcatgttgctcttttgtggaacaagctttgaaatagcaaaacacaagaatgacatgaagtgctttggtcgagtactctttccaatgcccttctaattcgattcatctttagagaatgaatgaacattgaagttttctcttgtacgatttttgggaagagaaaaaaaaaattataaaacatctttcttttcattgtaacatggcttctcatttgaggagagcttctgcttcgattctcatttcgatttaggaatcaagaactagtttgtgggattgtgtcaaattcttttaaggtttaaatgtgagaaatgtgaatattggtgagtgagaaataacaaaatactcaataactatatgtatagcatacattattatattgactaagtgcaacatgacggttaggaaaaatgtaatgaatggcacgagatcatcttaggaatatactttgggttggtacggtagttggaactttctacaaagaaagacttgtaatttgtgattatagaatatgttctacatagttattaaagttgtgaggttaaactggatatgggaaattgagaattatgtagtgtactataaaaaagccttaataactcttttttggaatgtaatttgtcaatgtttctaattttttttacaatttaaccaagtgtgcttttaaggtaacatttgttgagcaccatagctattaatgtaattaagtaatattacttacttaattagtattattaagtaacattacttaaattacaaaatattattataaaatatcatgaattatttattaatttaaataatttatagatcgaactataaaattaattatattcaagtaatttatgattgagagtaattttgagacggttatcaagactctgaaaagaaactattttatttggtgtattgataactatattgtaaacatcactctaatcttctatttagttgtaattgttcgtttatttctaaactttgtaattttatagccctcaatgtagcggggtgggcttatagtaaaattttcttctataccaaattacatcttatataatgatcgagagatctaattattgttttttttttttatctatataagcttttattcaaaaaaaaaa

SEQ ID NO: 383978 - DNA, 696 bp, Cannabis indica
ttaggaaggaatcaaatgatgatgaattgacaaactatgtatgaatcatatatatagttagttggcaacgcttacctacatggctacatcatccacggccgtaattagccacatggctacatggctacatgtacaccaatggagactagctccaacaatctttctacagatcgaaaacaatagctctcacaactcactctctttatttatttattattattattatttatgtatttgttttatgaaaacaactctttctaatataccattgaaatatatattgaattaactttgtacaaagtgactgatatagagccttatatactcatttagctaactaggacaccaacttaatagtcatcgaataaccaacttaactaacttcttagttaattcatgaatatcaactttgagtggttagtattttaactcattgtaatatttgagtttttagatttattcattacgacttaccatgcagtttattttacaaactaaccaatatttacattttaaaaactcagtagtacaattaaatgggagttattgttgtaaccacaaataagtatgaacctgattatataaaatttgattagaggtgagtataataaggcacataaatactacattaatacaatatcatgtataatggtataccacaatctatatctatatatgtgttacaaaaaaaaaaaa

SEQ ID NO: 383979 - DNA, 2416 bp, Cannabis indica
aaaataatgtgtatcctattaaagtaattgtgtcttttaacttatttattatttaatatgtcatacacaggtatatatttgactataaaatgtatacacttaaaaagtaatattaagcaataaactattaaaataccccaatcaaaacttaatatttaaatattataaatcataacctttttcatttccaaaaaaaaaaaaaaaccctttttttttttgaaaatgacgttttataaatataaaaagttagatctcacggtcattacaaaggttagaaactggtatggacatcacgtccatcctaccgaaaatagagttagtataagcccacctggccacattgtgagccaagtagttacaagttctggaaataaacgaaaaattacaacttaacataaaggtagacagctttttagtttttacaatgatgcacatagttattaattccccaactggaacaatttcccatcatggccttgataatcgtatctgaatcattctccactaaaacaaaacagtgatgttacagcagtctcaactactagcaagacagttgcagcttctccaacaaggggatccgaaaaggctagcaaggatgtagccacccataaaatagtctccttatgatccctagcgatgatcactatacacacatggagtcgcaaccaactttggcatcacagttgatcttgacccagtcttcaggaggcggaacccaagcaggagacccagcaacctccgagtgagtaagtaaactagagccataatttgcgtaacaattagagatagtgtcaatataatgagtgatgctactcaggccattcttatgtaccttgtcattgcgcgctctccaaatcgtatcaaccactatcaaagcataaatgaataatttgtcaatgtccaccccttttgactttaaattctacaagaaattaacccaatcccaaatacgtgctccagaatccaaaacaggcatgactccccaaggggatgaacgccaaagatgaaaagcaaagtcacagtagagaaaaagatgctccactgtctcttcttccatcctacacatcggacaagagacctccccaatacacattgtttttgcaagagaggctcgggtgggcagagcattagaaagaatactccaccaaagtattttatgccgctctaaaattttagagttctaaagtttattccagagagccggggcgacactacacaggggggcacgatcaagggcttgaataaggtaagtagacttggtagaaaatagtccattcgattctttagtccatacccatctatcaccgtcatgaccactaggcttgccacctttgataatgttactaacagtctcatggtcaaaaaactttacgagcttagggatgtcccagtccctgtttggtaagagtaagtccgccactaacctcaggttatccggcgggcaagtaataggcttcaagacgaaatccctactatgaataacccaggggtactcccagatcttagtctccttcccattagaaataagcttacaagctccttttatgaggatatccttggtacgaactacattcttcaagaaccacgagtcagagttcttaaaagagcactcaaaaactttttccctctaaggtatttggcccttggaacttgacaacataacggctggtcctcattcaggagcgcccaaccccacttggccagcaacgctttattcatctccctaatcttgcgaaatgcaagccctccccgagacttaggcaaacacaactgatcccatgcttttaagtagataccccgttttccttgctcgtatcccaccagaagtccctggccatcccatcaatcttcgaggcaaggttttttggagagctttgtggtctgcatagtatacacaggcaacgcaagccccacagatttgatcaaagtagcacgacccaccttggacagggatttcaatttccaaccatgaagcttcgaaacaagattatccaaaataaaattaaaatcagcgtcattctggcaggacctaaaaatcgggagctccaagtagttgatgttccctaccgggatattcaggccaatatccctcatgattcctctcttcatacactcagtagtattgttgctaaaaaagatcgaagtttttagtttattaatcctttgacctgaccagctatagaatttttataaacaatcccagaagcccctggcctcctcaacattcgctcttcccacaatgattaggtcgtcagcaaagaacagacgagagagcctagccatccctacttgttagatattagatgtatattagctgtaaaagaattagatatttagtagatatttagtctcctaactttgtatataaatatgtattattctatgaaatcaaaacacaattcgaatcactattttc

SEQ ID NO: 383980 - DNA, 2290 bp, Cannabis indica
tctctctctcagtatttcttttaaccttgacacgtttattaatatgaatgaagaaaactttaaaagggaaatcaaatggaaatttcccacttgtatttcctaaattttaattattaaaacaaaaaagtaaaagttcaataatcctataaactttttcttaagggtataatcactatataaatatcacttctctaggggcttcttcttcacttctccctaatatccaaacacacatgtattagtcaattctaaaacaaaatcctgtttagccatcacttaaaaccaaaaaaaaaatctctagtcctcaaaggaatacaattcgagtttaaaggtgagtttttcttttgtttatttgttcttttgatatttttttgtgtgttcttttttatgtactcataacagaataagtcagtgaagtgactaatgaaaaatattacatagtaaattaccatcattatttagttacatttttagttcctattctatgtcttctctttgttagttattaatttcatggggttttttctttcttctataacgtttggttgccaagaaaaaaatttctaggaaaattttgatcttcatcacttctcctttgaagaattgttaattattcgaatatgcatatacaaataatccacttaataataaggtgtagatttaaaatgacatctgacaagatttataaatattatatatttatatatacatatatgcaactttcctttatagttttgatcttcatctagtgatgaatttgaaattaaattgagaaaatcttagaacaaaatgtttttttggagcaaagatgtgtacattttgatataactacctaatatgtagcctcttttttcattgaatttaattgttgcgccatatggcgctaaatactacatagatacatatattaagtcaatatgtttgttaaagtttgattaaaaatatatttataacatgtgtttgaagtttaattaaaaatatattaattattactcggtatcgagtcaacgtatcaaatgattgggaacatatttattattcggtagataagatatcgagtcaacgtatgaaaaatgtacactttatacgatcgtataatcatgtttcgtaagtgtaacaaattaatgaatattctttataaacactaatgtacgattgatctattaatgtaattattttttttcttctaagaaagaaactaaaaaaaaaaatattaaatttatttcataatcatgtgctaataaagttattaaatatatttatagctagttgaaagtaattaaaagaaattattaccttttaataaatatatatatatatatatatatctatatataaaattagatgttctatattgtaaaattattttcacgtttaattttagcgtactatatttattaattactcaaaataagcatttactttaaaatataacaaaaactataagtttcctaagaaaaaaaataaaagagcatgcaacaatattaaatgttataagctatagcctacatacatattttcaataaaataataataataattaaaactacacaaattgataattaatttcagggataaatgcacaaggcgaaggccttggttccaaatcaacatttaatttattaaaaaataatatatttttctttttgattaatttatttttaacgaactttgtttggatgtgtcgttgttgctaattttttttttttattttttttttggaaaggaatgtggcttgaaaattggtttaatatattttatatatataaatatatatatatatggctcattaacattaataaactttgcattattgcctaagcatgccctgatttatgagacattaaattgataattttttgttaccttttcttgaaacaaaaagaaaaaaaagatagctatgtagagatgaaaatctccatataaagacattaaaagaagatattgattcactaattcaagtatatattgttcaaaaaaagtatatatatcttattgaatcagtgtaatatcaagtaatatatttggcttcttcatttgtcatgcctaaatatacaataaacaattctatggattatttaatacatagtatgtgatattatgactaatatttttttctcataattaccagaataaaatagaaaaaaatcttaataatctcaattacttgaagatataccatgaggctggtatcacctgtagtactgctgcggctccttgttgtcattgttctggtaataattatttccataatttccaaataaatttatattaatttgattgcaacatt

SEQ ID NO: 383981 - DNA, 2171 bp, Cannabis indica
cttttttttttttgtccttttttttttaatctttctacttctgtaaaactcgcaatattacaccgccaacaccatacataccatcatgacagtgaaaaccactaacccctagagtcaactaaaagatataatggcatttcctaaccctccaaaattgacaaacacttggaagagtgtatgaacttgctttacttacatacaacatatttagaggtcgggtaagaaaggagggaaaaacagctatgtacaccgtagaatttgtgtcgacaatgcaaggtggaccacaacaccttgctccaaccgtatatataattacgtatgaaacaggacactccaaaataccaactccagacatgtcaatagtgatatatatatatatattcttcatatttatatatattttgtcacttgcgccatccatttttgactttatattagacgagaatttgtattccaaaagagcctcacatcaatcttgtttagtccacacattcaaacaagaatggctctagacattggtccctaatacgatgaccctgaaataaaagttacagcacttaaaagaccattttacttgaggagttaaagagtaagtatgcaaatttacaaacacattaataaaacttggtctaacctttatataagagctaacagttctcgggaacagatgataaaggaagtgtttgagacttctctttggcatccataacctcagcaaccgaaggatttccatccccatgcccatttagggtccctgggctcatcttttgaacctcttctctagtatagataaaaatctttttaaccatgccacaaaattccctgataaaataattgcacatcatgtcaatgatccaaatacccactaagtctaaagtgggggaaattagcatacatattgatctcattaagctagatgtgacattctaagatgaaggtaaaataaaatacttactgccagggatcatcaccaacaagcatcatatcattctcgtcatcagtgtacacaatcaaccaattcttttttggagccattagttcaccaccaaattcaaacaactcgtccaactcagctatcagctccttgtaattgttaaacttggtaagatctacagatcttcccagtgcaatcccctgcttgtgaacctggaaccatagcaaatcaataaacaagttcttactagtactatatccaaaacacagacagtccacatacaatcatataaaataataccttggtgcagctcctagttgaactattctgtgtttttccttgatgttctctagattgttgctgagtagtttgcatgggtttttccgggtcactactgacgattggattatccgcaatttttgtgcccattgtctttgcaactgaacttttatgtgatactgcaggctctggtgcaattagagagtacccaaagatcttgcagttcccatctttaggttttgcaacctcaaacttctgctcagatataggttttgaggtcagctctcttgaatgaacagtattctcaaagtgaggagaggatggtggaggcataaaccagtttccatgtgcgtgctcaactctatgaccactcaaagtggtatagtcatcaaaccccccatatctaacattcccctgcccttggtatgatatagccccttgaacagaacccttcatattagtgtccaagctaagtgacagagacgaaggcaccatggacctggggctactatgcaagttcaacctgccttcctgatctaaagaatgctttctcattgaattagcagttgcaacagaatgctccgtaaaggaacagaaaccacgggtagaatcaacagttgtaccgaagccagatagcaaatctgtgtaagtaggttcatgcttcccagatgaagccctgttttcgggcacatatcttcttgaagcagagactacatcaactttctcatcatcaagggaaggttgccaaacaacagacttttctgcagtatcagaatcattgctctccacaaaatttcctctcaaggtcgataattcttgaccttgcaagaccctagaaaatccacttggcagtgaagggtctacagtcactttcgatgaacctattcaaattaaatatgaatacatgaacaacacacaaaaaaagaaaagaaaagaaaaaataacaaaataaaacaaa

SEQ ID NO: 383982 - DNA, 1506 bp, Cannabis indica
atttgaacaaaaaccagctagaaaatattattgaatgtgatatcatatatcatacaaggagagccattacatctttatatagtatagtaaaattggttttagtaccaaaccaacttagctaattaagaaaaaaagagaagaaagaaagagctaactaacttggtctaacaaaaataacagaaattaactgtaaaacagttaacaaataattaacaacaaaacaagtcagctaaaagtctaaaaatggagtgatatataaaacttattaaaactaaaatcattttgttaattattaagaataccaaaataatagaaataacactttggcatgaattgtgtgtacatatatataacttggattaggattaccaattaattaaatatgtcaaccaacataacataaacacaaatatatatgatagcacaaattgccacttattgatagaatgttgtctctaattaatatcaaaattaatgtttcttattcatgtgatgtgattgtacatatatatgttttgatagatagataagctaatgattaacacgcgtgcatgtgtaaaacttataaataatatataaatgatcaaatcttaagaaaattattagttatgcgtacgtgacaataaaatatataattataaattttttgaaagaataaaaaaaaaaagaattaatttttattttttcaagatatcaaaaaagataaaaatatactaattaaaacacctatttccatagataattattactacaagtacaatagtaacataagccaatcaattaaaaggatgaatctgaatatgatgttgatatatatagagttgaatgaacagtactttatcttaagttcctaattgagtcagtgcatgcgtgcgtacataaaaacatacatacttattaatagtggaagttgctttcaaaggcactaataataagctcactgtgtatatataccaataccggcctatctgattctgatctattcttccatgaacccagctcaactatagcctataggtacaaagctgtctacttaattcatatacccaaacccatccccatccccatcatatatatttatatataaattgactaattattagtagccggcatgacttcatataaaatatatatagagagagagagagataggattaggcttggaatatatagtatccttatattcaactgtattaatttataataggtttatttgtagtgaaaatatatatctaatctattctaattaacttattatatgaatgtatgtatttattaggtggccaaccttcattattattttttatttatattaatcttttctgcattttaggttaaattttgattttttttaatgaaacttaattatcaaaattataataataataatactagttttataatttttttatttatttataggtaaatactattttggactatgtgttttacaaaaattactatattgaaccatttgttttgttaaatgacaaaatgaaccctgta

SEQ ID NO: 383983 - DNA, 2381 bp, Cannabis indica
aaagaaaagggtttgaaaaactaaaggatactcatgctagcaaccccagcaaagtgaaaagttttcagtgtcatctgagtcccgggttctccaatactttgagctccaattgctccaattgcagttccagcttcaatctttttcgaatgatagcgggagatacaagtatccaaaaacacctaaatgcatataaatgtattattttcctggtacaacaaactctcaaaaggaaaaatactaatatagttacaaaagctacaaaacaaagattattctaaataatgaaaataattaaacaaactggaagaaaaaaaaggagcataaaataatccaaacgattacaagaaaggggcgaatgagaggtaaaaggggacaaatctctagtagaaaacttcagaaaatatgattcgatacctctaactgtttagcagtaactccagatatatgtttgacaatatattctgcagtggttgaattttccttcccagaatgatcttctttcgattcaaaattttcttgtgttctattcaatgcttttacatattcatctagaaaagactgcagagaagttttgaaagcggctgagcaacctccctctggtgtcaagtcatgttttgaaagcctggtttcaactatttcagaaactttttcaggagacagcttttcatttcctctagcaggagaagtggcctgtgtaaaacaacattatacaagtttatcagataatagtatcaaacaagaatataatatatatggacaagactatagtaaggagaccacttttgtccctaccgatagggaaatctaagattttggcatttcaagaaattataattaataatttacaatgtcgaaaacagagtttaaagtgcaactgaatgtttgaaccttgtttcaacactataaattattctaaatttttcgagaacaggtgaatgtctactataattacagcgtacattgtcatataagaaaattttagttttaatttctctaaacgctaaaaacaagagatgactctattgataggggcaaatgtgacgtccctacgataaaatttcccaaatcacaaaactaattaaacaggaataacgatcaattacagcatttcaaacctttgctttgaaaaacaaccgttcaaaatttaaaggacgctccatcttttccttccatatgtgcaggatccatgccatcatccccataacagaactgaactatacctccacttgcattccttacagtgttatcataatggataaataagtcctccaaagcttttatcaatctacgagacatgtatccagtgtcagctgttttgacctgcatcgattaaaaaatataaaactacagataagggaccattgctggttgaagaagttaataacagactatattaaaacagaatttcctttattaaaataaactagaacaccgaacaagtgtaacttaaatatcaattaacatagccaaaaacaaatcctatgttgaaatagaaattgtaagatgacctcaacctgcaagtgtgttactgggttcctgacagacaaaggccaatgagaaagagcacaaaagctgtctataatgtgacaaccatagctgtctataaactgtcttttaatatccaaaataactattatgcaactctttggggacgagccctcaatgatcaactgagcgagccataagggttgctaacctagtagcagtaattactgctttttcaaaagcaatgacccctttaccaacaaataaaatacgttattaattttctgatgcgagtcctcatgctggtaatcatagtttaataagttattattaaatagtaagttttggcaattaaaagttgcagtagactggaacagtaaatttgttttcaaacatttgaaatgaggataacattgaatttaaataaaaatatttaaagtatagactacatactgctgtatcaacaagaccttctcgccctcccatagtgtggaaaaaaaactctgtagctgataagccatcatagaaggaatggccaacaaagcctttagcctgcaaaataatttgataaaattagaaaccatagcttatgtattaaagttcattcttataagactattccaaaataaatacctaattgtttgtctttgctttcataatatgattgagtcagagggttcaggaatattaaatagaaggttactccaatcatttaagcttacacttcattcaatcacaattgacaaatcaaatgtgagattacaataagatatattttagaaagcatagcttggatgatacgggctttttcagaaaattcatctgatccaaaaaggtttcactgctaattaataatagttggctccaatcaatttttttttttttatgttttattt

SEQ ID NO: 383984 - DNA, 900 bp, Cannabis indica
caactgccaggtccaaacccgttagaaattatgttgccagcttaaataaaatgctatttttgatgaattgcatgtagaaatttaggccaaaatgttgtttcgtaaggaataaaattatgcaaaatgggtgctcagatcagatcacctgagttgtaaaaactagaagcgagagatattgttaaacaagaagaacacagaaagacatgaatttggattgacaaatagttggtttaatttacctattactggcaaaatatgcttgcagacttgcaagaaaggcatggtgagcatttccccattttcagacttgacatgcttgattccttccaaagcgggagtgaacacagtgccctccattcttccttgactgcaataataatgaattcagagaagaatactaccctcaaaactcaaaacaatgcaaaagcatgagcagagagaggtgatcgcaaatggaaatgaacggggtaggtggatctgaaaggagttgaagagatgaatttcaattcagaaaaaagcagataatatggagatcaatgagtagatagagaatcagattcaactgaaaagaatttgaagaagaaattaaagagaaagaaagagagatctgaacctgtaaaactatactcaaaagtggagaaaggtgtagagtttttgtatttctttgagggaaggatctttcacaaaggtgaatgtaagtaaaagaaaaataaaaaggaaggtggagaattgagacacaatcgacaactagaatcgtaactcaaatccattgtttggataaatatttagtggatgctcttctaaaaagtaaatactaataattaggataacttgttagaatttgagaataagatggatgaggttacctcctaaaactaattggtaagggtaggagtagtc

SEQ ID NO: 383985 - DNA, 539 bp, Cannabis indica
agttcaagaaaggctcttcaatcttggaagaaggcaggccataacattaatgaacaagacattcaaaagatggagaagagattagaatggatccacaaccaacctatctcagaagctcttagagaggaggaagccaaaatcctttctcagatacaagtagcttggtccaaactcgaatgtatgtggagacaaagatcaagggaaatttggctttcacttggggacagaaacacaagatttttccatgcagcgactgtcatcaggaaaaggcggaataacatttgggcgatcaaagacagagaagggaaaatttggaaggagaggaagcacatcggaaatatcattaacaactacttccaggatctattcacatcttctcggcctcaactgaatggtgttttggatagcctgtttgtcactcggattgatgagctctcaaatgaaagtatttccaaaattccctcagaaacagagatcaaagaggccgttttcagtttacatccgctcaaggccccggggccagatggattctcgggctg

SEQ ID NO: 383986 - DNA, 1097 bp, Cannabis indica
ttttttgaattgtttgtttgtttgtctttttaaccatttgaaggtagtcttcactctagggggggtccaaactccaatttagttgggtcgtttatatatatatatatatatatatatttatttattttttctagttatgtttctacacatatgcagagaaacatgccaaaaacagatatcaacaaatgaaagatgacttttcctataaattataatgaacagtacttgagatgcttttaaaggttgtagctagttatgtttctaatggtcccctaattgttatttcattgatagttattttattttacttagcttttagttcgactttttctcaaacaccaccataggtgtttgatgatttcatcatagataaccaaaaaagaatgaataggaaaaagaaaaagaagaaaaaaaaaacgcttagtcactcacttaagagagcaattcccagaaaatggtactactgttttggccaatgatggtacttgtagaaatccattgagcaagaaagttggtcagacccacataccatttttggtctcgctattgcccacatcccattttctattcttttctccttaatcactgtctgggtactatttgatcaaactttgggagttccctatgcaaatctgaaccattctttatgttcccttccccactataaaccatataaagagccactgtttttgacaaaaccaccttctatgcaaaaactaaattcgaagcctccattttgttgaccataatggaaaccaaaaaaatcttgaagcacctataatttagcatgtaaatccagctgttgatcagtggagttgagaaaatgtattccactaaatgcccaggtttgttattagattggtctcgaactgtagtttgtaggtttagaattctccatttgtactgattttttattgttgtgtttagtgtttagtgcaaaataagatcagaagcttttggggtcgaccctgtctccaccttaacttagtggcttctcacatcatccccaacaccactaaacaaataagaagataaggaaaatgaaaaagaagtcttaaatggaattataataattttcatcactctctctctctctc

SEQ ID NO: 383987 - DNA, 1297 bp, Cannabis indica
gtagtgagcacagaagccatgaccctgaactggtacggcggcacaaacaagtcaatgcttatcaccaattgccttttccgcctaggcggcgctgctgttcttctaacgaacaaatcatcggaacgccgtcgttccaagtaccagctcatgcacaccttacggacacacaagggcggtgatgacaagagctaccgttgcgtcatgcaacaagaagatgatgacggacatattggcgtgaagctctcgagggacctcctacctgtggccggaggcgccatcaaaactaatatcaccatgttaggccctttagtccttcctatatcggagcagatcctcttcttggctaatgtagtagggagaagactactaaggatgaagatcaagcagtacgtgcctgatttcaagctagcctttgagcacatttgtatccatgcgggtggtcgagctgtccttgatgagatcgagaaaaaccttgatctcaccaaatggcatatggaaccttccagaatgaccctttacaggtttggaaacacttctagcagctctctttggtacgagctagcttacactgaagccaaaggaagagtccgcaggggagaccgggtatggcagattgcgttcgggtcgggttttaagtgcaacagtgctgtttggcgggcgaaccggtctgtcgatccggcaaaggaaacaaatccctggattgatgagatcgacgagtatccagttattgtgccagaggtgcaacctgttctagccgaataattgcattttaattattgctagggaaacaaatggtgctcgagtaataatagagccttaggtcactcgtgtcttgaagccctatggcgtgtggtgtgatagcatcatcaccaatcaccattgatcgaaattaaacttcaatttatgttgcctttttatcttctttctgttttggtgtactttgtgtggttatcgtccatcgatctgaagggcttatgtgtttggtactatagtattagtagaacgtgccttttatattgactgcatcatatttgaagcaagctaggagagaaaactattatgtttttttttttaaaaaaaaaaataattatatgtacgttttcccaatttctttaagtaattttctaataaattttagaaaattttataatgcaccccgtaaaagggacacatcgatatatttctatctgttttagtatccgaaataatttttagtcaaatttttttctataatcatgtaaatgttagataaattaactattaacccaagtactctatttgtatataacatagaaca

SEQ ID NO: 383988 - DNA, 690 bp, Cannabis indica
catctattgggagtgctctaatattagctatatatttatattttatatataaataattggacttaattaaattaacttcttaattaattagttaaatatttctttgacgtcatgaccttttgaaatgctgaggtttgcttgctttgttttagacagccataaatttaggaatgtataaaccacaaatatcttgtggatggaaaagtcacatgcatgtttatatatgtagggggccatttttacgtactatttagtttgtctcaaagagatcgatgtcgttgtcgtccttcaatgttgctatcattgtcaccatcattgtcgtgtcccctcggtgactccacttccactgccatttgagtcttctctgtatcgtcgttatcatggagaggaagagagcaagagaggatgatgggcgctggtggccgaagaggtggcgggggctgctgctgggttgtttgtacaggaaggagagaaagagaaagagagggataggcaggagtgttctcgggctaaactaagaaaaaaaatatataatattgtagggtttcttaaagagatttttacgaaaaaatactggattttaggtcaaagtttacaattttattgccagatttttttttttaaaatactgtctttttataaaacaaccgtaaaacaataaaacaggacaattaaaaataacagtagaac

SEQ ID NO: 383989 - DNA, 2055 bp, Cannabis indica
tttattttaataattatatataaatttgataaataaaaacattttatttgtacggaccaccatatatatatatatatagagagagagagagagtagtgtttgtgtgtgtgtgtgtgtatagagtggtaccggcaacaacagagatacccatgtctctatagcgatcaaacaaaaatatcgacggtgtctttgaatgccttgtgatctaacaacaacgtcgttatatcttgaaacattattcctgtacatatatatatatatattatatgatactccacgtgtttgaagaaagttctaaaagagattccgaaaaaaagaaaaagaaaaaaaaaaaagaatatagaataatatggtgtaaagaaacaaaaggttgtgtagtgatctgagctgagctgaaaggttgaatgagctcgttcagctcatatgagcaaaacagttaagtaataagataactaaaataactgtataactattatttattaaaaaatagaaaaggaatttgacagaaccttgtttgggaaagtctgggatgaccctaatagagtctgatatggcttgaagccttggatctcctttgagtccattttctgctgcaaacatcttcaatttcactttcttcagctgcctctgtttttttataagtaaatgctactcaaaatcactcttttggaggagggttttttttccttacccttgttcatttcatagatgccaaggccttgaaattgctccctcaatttattgacagattcataccttaaaatggaaaaagaaaattagctttatttggtatttctcatttttctttcctttccaattttcaagaagagaagagaagagactttgttgagttatttactatcttttaccctcaacgagaaaaaagagaaaaaaaatggtataaaattactctgattctcatttctcaatatgagaaagagaaaaagaaagaggagagagtaattactatgggtttttgtttggtcattaaatatggtggccatacccaatataccactttggaagatacgttccagattagttcatcattacgcgacccttttgcacgtgtactacacgccgccttaatcactctcttcagattatcaaagattcggttcggatattactcatattaatttacaacaacagtaatcacaattactattatagaatatgagaaatattaaaaagtatggtgtgtcaacactttttaaagtctcattattgatataatattctcattataaaattaatttttgataaaaataaaatcttaaatttaaattaaaaaaaaattaaaatgtaaaaataaaaaatatagtacaatttcttgattactctacattaattaatcaattgttttttgtttggctacaacaagagttcaattaattaatcaattgtttaaagaacttttttttcttcctactttttgaaaccagtcacttttgttcgtcattatttctgtctaaaaaccatggtctctccaatggtatatatattgtaaaatttgagtttatctttttttctcctttttttatttgaatgatgcctcactaatttttaaagttttctaattgaaattatgtatctaattttgattggtttaaagaaagagaaaaaaaaatacattgaaaaagaatatttgatatcaatatcgataatcatatacaacagttttatatatcgataatctattatagaattacacaaaatattaataagtttgttgactttttaagttattttgtccctttctattggaaaataatttttaaaattatgtcaaaatatagtattgactcttttctacactaaatttcactacaaattatgcactttacattattgatggttttatattaaaaaaatgtgaatatttatcgagtgattatttaatggttatatttttattataattattatagttatattttttttctttataatcatggttatatttttttttccttataataataggttacgtactaataggtaaaactttctttttaaaattaattaattgaatatttaacaagacctctttta

SEQ ID NO: 383990 - DNA, 2432 bp, Cannabis indica
ctatatatatataataatttactattatatcattattaatattattgttaaattatataattaatgattaattaattatatattaaatgatataattgctgcagttggaactgggtaaatggagcttcattagcaaaaggcataatacatattatgaaggttacatgtttcctttgcttgtgaatgagcaacttgatttctggcctgagaaaaatactccgccgaagaatttgggtacctagctatacaatacattaactaattcttctttaatttatcctacactttttacacacaataatttatatataattaatcttaactatataattaaaagtgatgttattcttacctaaaattataaatgattaattaatttttaatacacatcattatcattgtgtaataacaattttttttttttttaaaaccaatcatatttatttaaattcagggctggtcttaaaattttgtaagctttagaataaaaaaaatattattgggtcttcatgaaagaaatatttaatatttttaaaaaataaaaaaaattatttatatttttcaattgaagaaaaataattttgaaactctgagttgagtgagccttaagtgctggcctaactcaccttagtggaagtttgacccaatttaaattagaatacactatttttcacctcattaattatgtaagtgtaatatttttgatgtatatatatcccggtcaaatcatacatgaaatattattgcaatagttgtaatttactagtaatattgtacaaattaatatatatatatttatttgtatttaaagggtttgatgtatatgttgcagatgagtgtaacagaagcaagagaagtgtgccaacattggtggatgaaagaagctttagacattttggtggaaaggctttcatcatcatcatcatcatcatcatcatcatcatcatcatgtccatgtccaatagatgaagaaataatagtagaccaaaatcaacatcaacatcaacatcatgaacaagatatcattattagtagtaataataataatgatgaagatcatgtattagcactggcttgtgctcttagttaaattacttaattagtcacattccaccactttctgtaaatatagagagagaagaaaaaaaactactcaaatcatcaacagttgttttaatggattttggagttaatttattaattaattaattcctaaaatcatgacattaatacacccccaaatagatttcagtactcttaattaagaagcttattgtcaatatcagtcagaataatgtgttttaggcagagaagaaaaaaaggtgtatacattaattaaattgtaagtacttgcttaggagtacttttcataatgatattgatatgcatgctttttttgggaatttaatttaatttctatgtattttcattataaatgaaagtattttcattagctatatataataaattaatattgaacctttctacgccttgtttagggctatcaattcatgtattgtgtcatgtttcttgacgattcgattaaagattgtgtcataaaatgtgaacatgaacacgacatgattataaataaattaatttgtgacacgatattcaaatcatgctaattaatcttacacgacatgtttaatgcctcttttacccacatatataaaatataaataaatatgtcaaagaaatttattttaacaagtataacctattatagttttactagtaaattgatacacatttactaatttcatgtaaacatttttaaaatttgttttttaatatgtacttaatcgtgttaactttgtcaattttgagtttaattagttaatttatatttaacctaaaatttaatcgtgtttaatctattttaacacataactatttatgttaaattcaaatctgatcgtcgtttccaagtcatattatcatgtcatgacttattttgtcactcttagtttgtttgggtgaattttcacttctgttttaatttttgatttctgttaaaaaagttttttaagagttgaaaattaaaatttattgatcatctaactagtagtaaaagtatttttgcaatttgtagcccaaaattattttgtaaaaattaattttaaaagcctacccaacaatgccataaattgaacattttcttctagattttatatcctaattagtaattataaatgattaatggaaggctcttctaatcaatatagaaaaacttataacaaattcatttacttttaaaaaaaactctaatgtgtaattaatatataaaatataatgtccaaaaaaatttatttgtcaaaatataaggttcaacttcaaatataagtattaagtaattacaagtatatatctattctatataaagtgtgtctatataacagaattttttgagaaattcatgggtaactttt

SEQ ID NO: 383991 - DNA, 941 bp, Cannabis indica
ttaattaattattatttagtaaaaataaatataagagatttatcaattatatacgtaatataaatatttatcaaaatactgttggtattttaatattgtttgaatagcgaattattcaattactatgtgtaccactagtatcaaaatatgtttttattttaataccgccactatttacaactattggttagtgtactgtaggagcagatctatcacttcctgccgttaataaagtacaagcacttattatatagcatacgagtaaaattagtataaatataataattttcatgatgtaattaattttttttttatattaaagatactatttggtaattttgtaaatttatatattaatatattaaaattgttttattaaattgttgttattagtatattatactgtaattttaaatacaataaaataaaagattttatagtaatttatgatgttacttgatatgttgaaattctaaagaatatttttgatgatctagaatccatgatgacacattattatgggagtgattatgtaaaaaaatagaaaatgcattagctagcttggcataaattgtattttccaaaagttttaaggggaattaaatttcgtaactttgagtatcataataaagcattattgacagcacaagcttggttcattctcatgattttcgactctcttcttgccttgcttttcaaagcaaaatattacaataaaatggcttttatgaatgctactcttaggtatactcctagctatatgtggcgtggtattctttgtggtagagcttataagaaattaggtttacaaatacacatgaatcttagactcatgtcagattatcaagattactctataaatcaataagatggaagacatacctgattctatgatattggatacgatatgagattgtgggtatatggtcttccacagacta

SEQ ID NO: 383992 - DNA, 2271 bp, Cannabis indica
ttttttattttatatttgaaattttaagttgtattattcatgtttaccgtttctctttctttttttttttcaaaagtttcttcttcctcactcaccaaaattagaaacatttgagaagttttttttctctcacaatctcatcctcctccttcccaaacaacaaaattcattaacattcccacacactcacccaactctcattttcatattcagttaagttgaagtagatgctcatctaagtcaaacatagtcatcaaaattgttctttttttcttcctcttatgctcttttaatttgtttctgttactaaggtaatctctcccccactttctctctgttttctatcaaatagagttggaataccacgtgtttgatgaaatatctatgtgcatgttttagattatttttgctttgttttagaagaattagtttttaactcttatttgcattatctctagtagttgaatactatatatgtagtttgattgagttttatcttttcaatcttaattttagtattcaatagtaaattttttgaaataataactaatgagcataacttctatttgaattttacagaaaaaactacaatcacaatctaaatagcaactcaaatcgcaacctcaaatatccattgattcctcaaaatcgaaacccaagttgcaactctaaatcaaaattgaactgtatcacaatttgagccacaccccaatcactaagcattctcaatgatgccactgcgattggcattgagtcttcagtgctggaagtttatgtcaatagtattctaacccactttgtctttagatctctcttctgattttggtatcatttgcataatatatttcactattatcaaatactcactaattaaggttttgattttttttaatataagctttgagtttgtagtttcaatctattatctttcaaatttatatttgtatattgctgttgttctttaattaaaatattaagcaagaatgaaagatttcaacatatggctacatgtactctttctcttgcttagtttgtttaattaagatggtaataatttgtaaaattatttatggataacttgtgcaatgttgtcctgatttattaaggttttttttttgtcttccttgtgatgcagtataaattttatttcttttttttttttaaagaaagtataaatttattcaatttatgtattttatacttcacttggtacttcttatgaattttaatgtgttaaatgttctttgtaaaatggcaattgcctgatttagaaattcataaaccaaaacataaaaactcattaatccattttttaagtgtaatcaccaagaaatgataaataaatatgcatgatgattataacatcaataaaaaaaaaaattcttcaatcaaacataaaataatttttagttgtctgacagaatagtttggggagcttatgaaaataagagcctataattatctatttataggattccttctaggattagggtttacattatatggaattaaaaaagataaataatggctaaaaactccttaagtggtcggtcttgtaatgggccccactgttggaacttattttaccaagatctagatttactaatatgtatgtttgattatattctataatctaacaccctaaacatgaattttctaaaacaataaaataaccacatataaagtttaagaaaatcttacattggtagtagcaaaatattatggctcattctgttcagatctctaaaccttgttcctttctgtcactgagtaataacaagatctgaacttggatctccttcaagtgttagaattcttcaccatcttctacactatgattgagtactgacttgatatgagtgggcacgcactctatcactatgggttcaaaattaatgaagagaagaatgaagaaatttcgaattctatataagagaggctctcgatttctcaattgtctgacaaagatagaaaactaagttattaagttatgacaatgagagtcatcttattccttatataagattttatctagggttaggatttaaattatatggaataaaaaagattaaataatggctaaataatccttaagtggccaatctcactagtggaccctactagtttcaattttcccattttatttaacaatttatcttttcttttactaatgtcatattttaatttcaatcttataaatgtcaaatctatttatttaataattataattaattatcaaataaaatttttatttaacttatttattaatta

SEQ ID NO: 383993 - DNA, 1377 bp, Cannabis indica
tttctttttcccctgcatttcagaagagaattctgttaacgaaaccattagattaacatataacaacaatgtggactcacttaaacaaaggtctattaatagaggagttaaggaaagaaccaatgcaaaaataattttgaagagtgagcctaggtttacactttctcttacttccaaagaacatatcagtttgaattactttatttttaaattgttgtgttgccttctctttccctgttgttttaccccttttttgtctcttaaaagttttggcagtcaaagaaaataaaaaacaagttcagttgagaagggttctttttgctgactattttaagactagttgaacttgaagcatttttattggattcttcaccatttattgaccagcaaataaatgacactacactgccccaagtatgttatgttaatttaactagttgaaatagggattaacattaagtaaattacagttaatccactgatatgaaacatgtttgtctcagtacttggtttacatatgagatcttaaagcgtgtaaaacagtgaagaaccattcatgtggagggagatgaaacaagtgttcacatgaataaggctcacttcttagacacacatataagtgaggagaagggcatctaagtaatttaaccaatataaatgatcccaatcctgttttcctaatttgggcatgacacaaccgacatttatgattttgtaggtcgagaaaataagctcaaacttaatttggtcacaacattttcaaaagaatcataatcacaagggcaacacttttaatttttccggactacggaaataccttcaccagaaaccacaatgatttggttttcaataaaatgaccaaaccaccaccacccctgcccctctatttcatttttcttttcttttcttaataattattatatgaccaatgtgcccctagactaaaacaaaaatttgtcggtaggccgacaaccgctgggccatgatccttcatttttcttttcttttctgttaaacaagaacaaactggttgttaccaaggcgataagtataaccttcaaatcaattggaaaacgacaagaccagcccacggactaacaggaactgaaaattctactgccttcaaaagattctattcataaaaataaagctacctagtttcaaaaagctttaacataatcttacttccctatgaaaaattcatacaagaaaattaatttttaaggtatttaatgctacgaagttgtacacaattaggtagttaataccactaagcacatattattgtttcattaatatgaatggggaaatttgattttctatgcttagaaaatcaaaaaatttgatttataaactaataattaaaaccctaaaaaa

SEQ ID NO: 383994 - DNA, 2721 bp, Cannabis indica
ataatacatgtatgaaattatatttacttcaaaatatttctattatgatatggtattaatgttttatttattgttattattgttacattgatatttttaaaatttttaatttttttctagtgtaattctatttagttataacctcccaattagaatataatttacttgtctaagtgtatttttgaatagagattctactatatatatatattgcaaaaagaaagaagcataatctggaaatgggtattttagaagaaacggttggcaaaggaaattgagatctcaaatggttggaatccatgcctctggtgaacattactgcagttgtatatcaaacattactaaacacggattcaataataaaataaaaccatacttttatcattctcagtcattatcaacaaacatagaacaaaaaaatataaggtaataagttaagagcttgccacacataaccttatagagttggaaggaagacatcattttcaataagtttaaattgatagcattacattactaaattaaagtttataaaaagcgaagaatgagaacatagatgtgttccaatatcttcttctctatttttattttaaaaaggtgcaattttattgaggaatgaacacagatattccctagtatctatacatagatagatagattagcttaggcaaaaatgccgcactagggagagttagggtgcaaacgttcaagtaggaaaaggggctgtaaaatatagaaagtgtgaaacttctaactcaacttcaaaattcgcaatttaatacccaaataaatacataaaagtaactagttcaaaaatgtctctgcttattcacaatattcgggacacaagcaatgcgtagttttctccctagacactagttcttcgtgatagcttcagaatgcatgtaaaatacctcaaaccaatagcttcagagccaatgtttattagtttacaaaaaataatttcaaaaacatttgctttctctggatgaagaaatatggaaccagtaacaagtacaaattgaaaagagcacagaacccaaaacttggtacttcaccacacaatgcaaccactttttctaggcataaagcaaaaacataagatcaagagattacaagtctaaactttacatatatatcaagttgtcaatattattcctgtgggaaccagaaaaatattaaacagctagcaacgatttcacacagaagaaaagtattttatttgcatgttgtatctgtaagcaattttagcataccataaatgattcactgggatcggcacattttcctgattgtacgatcacttcactaaacttattcaagcatttctcaaacaaatagaatccaaatcttgtatgtacatatcaaacaagacaaacattctaatgtattctacggtttaaagatggtacctaagatattcttctccactacacagaaatgatatgcaagcacttcaattgttaatcacaacgatttcatttccaacaattcaaaattacctcaaccacgcattatgatttctcccaaatttctccacttaacagtgcattttttaccatatctatataatctagaataagtaagaaataacaaaaggataattagtgataaaaaaaaaaacaaattgggaagacaactctattgatagggattaaggaaacacaacaatgaatacgaaacttgtcgtaataccagatcaacaatgcacataagactgcaaagcccaaaatttcacctcaaattctatacccataaaatcgataaagaacaattgtagcgccaataaatgaaaatgaacaaaaaccctaaaataaaaggtttcctcatataggcataatcagaaatccatatgccggtacaagatagatctcggcacagaagttctaaacaaagcagaaatcctaaatgtatcaccattcgattgtaatataaaagctaagaatccctaaaaaggacagatcaagaagatgcctcttcattctcaacatttgaatcaacaacactctcagtttccgggtgcgaagcaccatctgcgggggctgaaccagaggaggcggcggccctagccttgacaacatctagcattcgtttactgacctccttagagtagacctgaagaatctgaatgccatcatcctcggaagcagcagagctagctgcggtggagaaggcctcctcttcgatgtggcgggcggcggatgaggcctcttcagaaggcaaggtaccgtagcggttggagaggacagaaggggctgaaagagtctcaatgaggcggttcaccacggcgtctcgggtgcgctgggtaggcggccatatgctgaatttgacctggctaggcttgttggtggtcgcttcaagctgctcttttgccgtagcctccattgttgagtcatgctctgaggcagagtatgaagacggaggtgttacggcaatgctctcttggtccgacattgttatcagcgccagcagttcccaattcaatccaattcaattcaagggtcttgattgaatgcaagcgatactacattttatactcatcctgtgccactttctagtttctaatttattcactgtgcaattatcaaaaaaagtttattcgctgtgcatttactaacatacccttattacactagaaatattgtagtaagactaattttacattttttttttagggattttttaaatattatacttaaaattgattttatttacaaaaat

SEQ ID NO: 383995 - DNA, 1433 bp, Cannabis indica
ctagggtaattataaagagattattttttttaatcttcttctttttgattggtaaatactaaatagtattaatagacaaatattcatcatcgaacataatcaacgaataggttaattaaattatttacaataattaagaaaaaaacctaacacaacaacttcaattaattgtagagaatataataattcatatgggactatatgtctatattttttattttttattttttttgaggtgatattttatagtatttttatttttggtacatgaacaaattgtaattatatatttttatcttgatagccatgtataatataattacaagcatttctgttaaaaagaattccagataaataaaattacattgtataaagccatgagccaatactgttagcaacaatatgccaatatggatgatcattattacattgttcactttttttttccttataatcacatattcacacacactgttgttattttatgatatttaaaataagatcattcattattcattgtataattgaattggtgtgaacgtttttaagtggttgtgtggtagctggtaggtgatcacacgtacaaagcaccatgccattatcagtatttttaggctgaaatcatttttattctttgtaggattctcattattattagtattatatttatatataagatacatttaccataacttgaactctacgttactcattaactttaacacaaactcaatttttaataactcaaatcatcataatcgttacgacctaaattcactagcaatcacattcaagggtaattaattaggatgctgagataatataaagcaattataaatatgcttaattaattataatatagcatctactacactaatactagaagtataatatcgatattgtgtactatattattatgtaatttaacggtttattgtctttatcctatactatatacagtaatttggatcttaacaaataaatacttatggggaaatgttatgtgaaaggtcgtattctcgtaatattgaaaaaagtagtatttttgcacatatcagagtttctagtttgggccgagagcctaatcttaaggaagtgggatgatataaatttgggaaaatttcaccgtataccaattttaacttagtccatttcatttttaccgttcttttcatattatttcatttatagccacttttataagtcatgtccctattttgcccttagcttaatgaaaaaaataaaatcaattacttctccagagtccaaatatgatgatcacctccgctcctcctcttgctcctcttcttgtggtaactacattccgatatgatataaaaaaaattattgcaaatatggaagctttctactaatggaatatagtgactgttaaaataaaaacaaattaacgatatgtataaactaaatatgca

SEQ ID NO: 383996 - DNA, 837 bp, Cannabis indica
ttttttaataatgatgacaaacatgaagtaagttggatcagttttatagtgttatccacttgtcttcaatagccttttgagttcaaatatatctaaagcgaaagttcaaattggtttccaaagtagatgatgtttgagaaaagctattttggaagaacttctaactcatgatttaatgattctttaaatctctatcaaattatattaaaaacacaagtgggccggtggttccacgttattttctttttaattttttccaactaaataaatctctatcaaattagtttgtagtagtagtaatcacaaatattaatatattaatatcgatcgacaattgcttatccgtatgtataacttgaaattataaaaacatgtaattgcaaggcaaaaacaattctacaaaggtgtgtagtatgtgtgcaaagaaaatggtttgaatacacaacaagaaattaagtacatgctaacacattaaaatgattaattgagtctcgaattagctagaaaacttcaaactaattaagcaatttttcgtgacaaactcaaaatttgggattattttcaggcaattcttaactagcccttaatttatatatatagctggtattgtttggcacttataaattttaagcaataatactaattatataaataaagcatttgatttcatttattgctaaacagagaagagaaccaccgcggaaggaggattacgtatcgaatatgaaaagcattgtattattaggagtcaaaacaaagaaacaaacaaaagggttggagtcacaatgctctattctataatgtagattactgtaactatagtcagtacaggctgtt

SEQ ID NO: 383997 - DNA, 1363 bp, Cannabis indica
tttttggtaatttaatatttttttaggaatttttaagttgtgttttgaataataaataatatgtaattgttaaattatatatatagtttaatatttttattgtatttaaatttttaatataaattttagtttttaattagggtattctccatcccattcgtgatggagaatatacgggaatggggcagggataaagattataaaaattcttaacaaaaataaggacaagggagcacttcctattaatccgcctcgtatgcatcactaattaggaggactcttttttccttaaatattacttttcaaggtatattttttaaaattaaaaaaatatattaaacaatagcctaatcaaacttattgcttgacatgtgtaattgtgaattattttcttttgtgaaaaatatatctcaaaaaataagaatattattttggaactttattaacatctattttcagcaaaatatattctcctaaatattaatttaattgaagcacaaccaccaccaactaaccctactaataataactcatagtagtactttatcagcctataaaatgagaggacaaggtagagcattcactcatcggtgtatacactcatcactacacacatcttctaaactatatactccacacaaaatatatacatatacataatcttgatttgctatttagtccctaatatacaacaatggcaagttcaattgtgaaggtactttgcttggtggtattggccatggtgatagtatcaccagtggcacatgccataacatgtggccaagtgtctagtagcattgcgccatgcttgggttacttaaggatgggcgggagtgtcccggctgggtgctgtagcggtattaggtcgttgagcaatgcagccaagacctctaccgaccgtcgagctgcctgcaactgcttgaaatcagctgcaaacggcatcaaaggaatcaactacaatcttgccagtggacttcccggcaagtgtggtgtaagcattccttacaagatcagcccctccaccaactgcaacaggtagcattttatagtattgcattttattagttatacatactttaagggtccttttagtacgtaggatggacgggattagacaagctaatttgttcagtccaatgtttagacatgttggaagtaaggataattaattcagctagtctcatctgtctgggattacttatctcatctagcaaggtggattaaataatcccataaaagtgaatttttatttatcattttgtaattttgattttgttaatatattttaaatttaataagaatttaaatgaaagaattattacaaatttatttataattttttttatcaaaaatttatttatta

SEQ ID NO: 383998 - DNA, 818 bp, Cannabis indica
ccatttggttcatgttattgttttcattaaaattcatagttttagataaatgtgttatatatgtgatattttcaaattttcttaaatttgcatcgatagtgaaaatatcttcaatatttccataaaattatagcatcgataattccaccgatattgatatttttcttccttgcatgcatgttattctacaaggcttggtttgagacctaacttattaaaaaaaaatagggatagtattaagaagagaggagagagacgttaaaaaaatgatgaggggtagagtcaaatagttgagagtgaatgaggaacatgaaaagtgaatagagtgaaagaggtgagaaggttgtaacaatcaatatgcattagataaatagatacacaaacatatcttttgtagaaacaatacagaattaaaataaggttacttctatatttaaaagaaattgtaaatctgaccaatcacaaaatattctaagatctcatttttctcttttctccctaaagacctagaatcagattttcccatttatgcgattaacaaaaataggagaattctaagttaacagccagccagaaaaaacacctttgaataggagatatatttggtattgtcaacccttccgacttattctcgcccttcttactcttagagcccatttggtacgcaggactagattggcttcgacaggttaatttgtccaacctagtgtttgagcatgttagatgtctggacaactaatccaactaatctcatctgtttgggattatttatcccatcgagtaggatgggataaataatcccatgcaggtgagatttt

SEQ ID NO: 383999 - DNA, 1358 bp, Cannabis indica
tctctctctctctctcagatctcttagcactaattatgtccttatccaattcaaaatactatctaccttttcttattccatattgcagcaaattcaactgatttgatttcagtcaaatgggtcctactgccctagtgtgaagggatttaagcatgcatttactacttgaagctatctacagtaaaaaaaaaaagatacgtaaatagcttgattaatttacgatatacttacagaaatatatacagttatatatatatgtatttatattaattgacattttagctgcaactacttaattaacaattaatctggctagtaagtaactgccaaggcttggcatgccatggtcacaacacattaattaaccagtttgatcaagggaattaaataataatgtgtgtaagaggtttggatactcttgcacatgcaaacatttggatcagcagctagctattagctagcctaattagttacagattaaggttttgttttttgttttaaattactattatttattcaaatcaaggtgtatatacatagctttcatttaaacaattttattaagaggaaattgaacctgcatgtgaccaaattaaatcgtatgatcatgcctcatataggggtgtttggacagacagaaaatattaattgtaatagtattacatgtataaaataaaatcgagatttgcatatatttgtatacacataaataaaatagtgattcataattaaaaggtttgagggtactcattagctaataagtaaagtttgatcttttttcataagttagtcaacaatgtttatccaaagcatgacttaaaaacaggtatcaatcaatttattattattcgatccatcatcatatattatgtatatatttatataaatatttgtaattttcaatgattgaagaaagggaaaaggaaaacgaaaagtgaaattaaagaagcacgaggaatcttcaactagattattaggtgtgctaattttgtcaaaaagatatttggctgagctggtcaaaaatttccaatatattgtagtacttttagatgccatgcgccattaattagtattagtgtaatcacaaatttaagcaaacaatttaaataactaatagtaagatcaaaatgtggttcatatgtgaacaaattttcatagcctactgttttttttagggataattacattagacaccttaaattacatcttaatatcaaaaataacttgacccatttaaccatatccattataacgtttctgcataattacataccgttttttattgttggacttagtttagtcacccacgtttttagctttaatctacacattttttttatttatttatgatctttaat

SEQ ID NO: 384000 - DNA, 1179 bp, Cannabis indica
aaaagactgctaaagagagatgataatggcatcaacaataaatgcgcaggaaagaaagagaagagaaggattaaaatgaggaaagatagtggattaaacggactggaagatgaacaccagatgaagagggaggaacccctaggaagtttccagagcaagctccttgtttctaagcttgtactcaacttatattgtcaaaacatctggtccaacacgactcacaaatattgtattgtgtcaaacctaaatttataattttttttgttatgatattgtgctcataatttttaagcttgtactaaacttatattgtatcaaaaatcttggtccatatttaaatgtttaatttgaaacatttctttcacttcttagaaggaatttattccaccataatgagattataagattttagataaattatatagcaaaaaaaagaaaacaattatattctgttccattaatttcttttttaacataacatgacccataaattggggaaaaaaaaaaaagctgtgtaagtttattaaatatatgtcaaaaaaataaataataattctaacgagaaatatgacaattatacgacgacagaacaggagtcatgcatgcaaattgggagacctacgagggtccaccacaaaaatggtgtggacgcatatgtagcaagctcttcatttgacacattaagaagtgattctcaacattagaaaatgattagttcacttttgaccaattagtagccacattaaatatatattaaaacatttaattggattctttgaattgaccaactaactaaattagtcatcaagactaatcactaagaaagtttaatgataagatttgttttgactggttttttttttttttttatgaacaacttaaatattttgtacataaaaccttttattgttgctttgactattaattacatagtatttcggaaactaaaagtttttttttttttcttggcaacagtctaattttctttttctaatcaagtaaagtaatggtcaaaaagaaaacatatcaatttctctgttcatttgttgcagctttggtctgctctgctctcaaccaaaataaaccaataggatccaatccaagtggctccattgttcttacctattgaaactagccatcatcttgagtgcttgtatatttatttatttaatatatata

SEQ ID NO: 384001 - DNA, 1171 bp, Cannabis indica
attacaacatagtctatattcgaaggacattaaatagtgtctttgaggaagtaatcaatgaaagtctgaacgcgcagtatatttttccattaattatcatgtcccataatattataaatttaactcccaaaggatctcacatggaagatcatgtcttactaagtatgaaaagagagtaattggtaatcaagcatttaatgtgtctttattctttacgaagataagacattattttgacaactattattgtgatatggcatccacataagcatacacaagacacctctggtcgggtttcaccaaataagtccaaagggttattctaacccttcatgcaaagagttagaaattcattcctcaattgcttagggaaaaacagagatttcacatcttcttgtaaaccctacgacttttctagccttacagtaataatattgacttaggtactaaggctcattaacttccaaccacgtgaaaatcctagttgttcttattctctttctctttgaattactgttctttagctcatataaatataaatactcgattttcaaaaatcttggtaaatattttagtgctttcatggagagctaaagaaagcagtgataccatcaaaggttgtatattacaactatggtactcacccaaaccaaaactggtggtggagatggagatactcttatggacaacacaaatcttgtcgcacatgcggagataggagttgatgaagatcaaagagaggcaaccagtttccttgctaaaaagactcaacatatactgagaaaaacattcataaaattcccatcatcgaggatcacgaagaggaagatctagaagacgatgatcatgaaggcgatgggaaagagaaagataaagagggatattattacgagccagatcatgcagttgttgaaattatcagagacctcgctgagacaaggctgaaattggtgacaaaagaagaattctctcaccaaaagcaagcaaccttgaccaaactgaaggataggtttgaactaaaaaattctactcatgatgaagaaaatcttgtagatcctattattaggacaataatattacaaaaagaatggaccctaaggatcctggaacatatgatgccaaaagggaaaaagaaaaaggtttcatgggagaactgttggaaattatttta

SEQ ID NO: 384002 - DNA, 1487 bp, Cannabis indica
aaaattaaaatattaccaagcgtgatctaagtatttagaaatcaaccaatagatactaaaataataattaaacacacaaaattaatgaaatttatgagacaatatgcattatatataaacttcttattcatgaaggcaagtgaaaaaggtgtaagaaagagtgcatagatataacaatgccagcctctctcgatttattattagaaacaaaaatgtaagagaaagaaaaaataaatgagattgaaattaatttatttggaagagggggtggagctggaaaatctggctcttgacgatagcaccaacaaatagtttgagtgttgcaaacagccttggtcatggttgtaccagcaaaccctttgcattgttcagtgcatcctggaatctcacatggatccattggaattacaataatatcagtttttccagcttcacttgttctaatcatcattgtcatcattatcaccatcaaagttagtgataagcccactatcttcatattcaaatccttattaccaccagccattaagaataaagaaagtacacagagacaaaatatgtagattaatattattatattttatttgtagttaagcttattttttcatttatgtggatcttggaggctgaatatatattaattaaaaacaacacatatttagaatattttaaagatagaaatattctaaaaatagtttgcaacctatttttgagcatttcttgatttagctcccaaaaaatttatattaataattttattatttctgcatttgtaggattcagttacttgatctgcaattttttttttcttaaatgatccaaagaatattgtttcatttttttaaaagtaaagaaaaaattatgtatgtaataaaaatatcatttcaaaaatatttttcatatatttattttattgtttgtgcttaaggatttcccttatctataggctataggagatccaattttttttttccttttacaagaaggattcagttgttttctattattataatttttatttttatttcttatttttatagtttattttttatattttatatttctattattattatatttcttattttagaacctcacaaatcaagcgcctacattcctcttcgacactggcgctcctactgccctgagtctcattgccttggtctgtcttccacattctgggcgagtgagttttcttctttacttttctctacttgattaggaatagtctttgagagtacaaatccaaattacaacccaaaatcaccatcttcatcatttctagtcttcttccatggcattctagtccactctccctcatagtatctgtaatgatcgcatgttagagtatggattagtaaagacaattagcattaattgttgacatttttatagttatgcatgattttattaagttgtgggtcgcattattagaatttggcattagagttataatttctcaatttcgaagattttattaaactcta

SEQ ID NO: 384003 - DNA, 2925 bp, Cannabis indica
aaaactaattaaaaaagtgttattaaataccacttaaatatttctcaattttaggtggctatattgatgagtgcattatattttattaaagtgtagttgttatgatggctaattctttagtattattgattatctgagttctttaattgtaaagttattagcaagtgaacaagtgggaaaaaaaattatttacaatgacctctcgttgagcagtagctagctaccttgagttgagttgataacatttactttaggctacagcaatgtatcctttggaattcagtaatcccacctcatatgagtcaaagtacataaagaattgtataattatatacagaaaatacaagcagttttatcataacatctcttgatcgaattattattaagtttaattttgacaaaaaatcagttcaatcaaaatcttatttgtaaaattttagagaatacatggtccattttgttattagtctaagtgatattttttataaaacacaagatctaaaatattatttaatcttatatgtattgtataatttattatttattgtgatagttcatgcaaataacagtgcacttttctctccaataataataataatagatgagctcttctaattaaaatgaataaacaaataacttgtcttttgatatggtttgatattctctctaaatctatttttgtttctttatgtccgataccttttgttctttcaatgaagcctgggaatcaatctgaacctaccattgaggagcaatatgcgaatgtccgaatagaggatgaggaagaagacagtttggtttatgtaggggataatgatgatctgactgagattgacgataggtggtgtttggtgggtcggttcctgacgaatagaggagtgaatttttaagcgatgcagaataaaatggcaatgctatggcaaccgggaagaggtatgtatgttaaggaacttgacaataatctatttctatttcaattttaccatgaagttgatattgaacgagtgatccaagggagtccataaatatttgattgtgtccctttgaaatttgaacgactataacaaggtgagaatccaagaatgattactttgaacaagttggatttctgggtgcaaatacataacttatcaactggttttatgttggaacgtgttgtgcgtgatcttcgcaactttgtggggacattcatcaaaggtgatccgaataattttattggtgtgtggcgtgattatcttcgggttcgtgtcaggattaatattgactgccctttaaaacgtaagaagaagattgaaaagcaaggaggggttcactgttatgcacaatttaaatatgagagattatctacattctgctttatttgtggcatccttggtcattcgaagaggttttacgagcagctttttcatactccgttttttgaacaaatacagaaaccatacacactcgacttgaaaactactctaagaaggaaaaattatgcaattcgggagaagtggttaaggcctggagttgtttctagagtcgtcagaatgattttttaaagaatgttgcagtggaggatagagccaagaccatcaatggcagctagacaattcacaatcatggtgggaaatcacaacagagtaaattaccccctacaaatctgggatcctcttccaatcatccaattattgtgagggatgacaaaactaaaatggtggcaaattctttaccactaacgaagacaagtaatgttgtagttgaccatgctttgatggaggatatgaatgctggagatatagtcatgaagccaaatgctatcaataaggaaactagtattcttgttttagatactaaaaggagaaggactgatattgttgatggtagtgggcctgggctagataataatggggatcaaaataaaaatgttgctgaggaagtctagtgaggtcacgactactaataaggaaggtaatactgatggttatgatgttaatgggccagcgcaaaatcaatgagatgaaatggatacagatattttgaaaaatgggggttctgtttcacaggcccgcggagggttatgaatgttttgagttggaattgccatgggcttgcgaaccaacgggctattcaattccttaaagagattgtttctcaaaagaatctcaatttctttttttttttatgtgaaactaaatgtaataaaaagaaaattgaaagtgtgggccgaatgttgaaatttgaaggggtgtttggtgttaaggcccaagggagttcgggtggtttagcttttctttggagaaaccaggatgatgggcgtgtgctgggtttttcgaacaaccatattgagtttttggtggagtcatctgagaaaggggcatggaaactgactagtttttatggtgaaccaaaccgaaataataggcatcattcatggactctgctttgaacattggctgctggttctactctcccatggtgtgtaataggggacttgaataacattgtgcgacatgaagacaagcgtggtggaataccatatccccagagacttattcatggattccaacatgctttaaacgaatgcaatttatgtgatttggagttattgggtcattcgttcacttgggagaaagggagggggactcgaaactggattgagatgagattggatcgtgcactggttaacactcctcggtctcagctttttcaaggtgcttctcttctaaaccttgaaatttctgttgggttttgtgccctaaataaaacccatttcaatataatcaggtttactaattaataaagatcagaaatcgcattttatgttgcatggttcacataatttatttcatgattatttaatgtataaaatctattaagtccagaacatatgtatttgttcatgattatactgtcgtcagcacagtggaatataatcatgat

SEQ ID NO: 384004 - DNA, 1247 bp, Cannabis indica
caagaactgatcaagcaagctagggttagggtttgtggaggtagctgctgggtaatttggctgaaaatcatcaaatagtttattaacatcaaagatctcatgatgatgatgatcagattggaaccctatgggctgatgattaacaagggagaaggtggtagggttttggttggaataatttggaacagaagaagaggaagaagaagaagagttttgttttttggtagaagaagttaatgatgagttgttgagtttgtgcttcttgtttttggtgttgtttttgcttttctttgtatgttttcttttatgtgatgattttttattattagctttgaaacgacgaagaagatcatcaacattagtcatcctcaacttcttggaagctcctttgccaattggaagaaatttgctctgaaaaattcttgtgagatcatagttattatggtcaaagtttgtagctgcggtcaaccctttcaaccttatcactgcaacatcataagctttcgctgcttcctcttcagtttctgatcataattaattcataatttaattaattagtcaatggaacaaaaaacaacacttaattaattatagtttcttaaataataataattgaaaataagcccaatcttaaatatagctaatatagctagcctaattatgtgacattaataacccaaaaagttaaaacataattaattaataataagatttaattgggtaaatttgatttttgtaaggaaaaataattaattaattaccaaatgttcccagataaattcccctaactccctttcctttccccattctggattgccatttcctacaacatgtgttcctgctcaatctgagtatatataaacaaacagagaagtaattaattaatccaatatatatattgaaattaattaatagaattatatatgaataaatattttatattatatataccttgaaactccacggtagcaagatatgcccttggcaaagccatcgcttctcctgaaataatttgtatttattaatgtacttatttcaatgtttaattaagctagctagcttacaataattaatcaaaaaagttaattaagtaattttataattatttaaattgatatagtaattgatctagttaaagcattttaaaaaaatgatctaattatagctatatataaaaattaaataatctttttttaaattaaaaaaaaaataatcttagccacaatctctctaacaaactgtatatc

SEQ ID NO: 384005 - DNA, 1965 bp, Cannabis indica
tcgtttaaacgaagaatgtatcaacagatagatctaccgtgaaatggaaaagaattaagggaattgaattaagaatttagatgaagaatctctcttcacttttctctctctctctccctatacatattttttttattattattatgttgtgaaatgacaatgccaaacaaaaccccaccactatatatgtatatctatatgtatatacaaaaaccacaaaaaagaaaatgagagaacagtggttaaaccccttacaccttcatctctatatataccatattgcaaattttctgaccacacaaccggaccatcgagtaaaagggtataaatgtacgatttttttgcggttttaccaacactcataaaccccccaaactcccttcttggtcttgttggaccagttctcctcactttaactccctacctttaaaaaaaacaaaaaaaaaaaataagatcagttttcgccacgtggagtcttctctttttctacgaaaccataacagagtttttttttttttgggagaagcaaaagattgcacgtattaaatattggaaatgagagatagcgttttcctagtcagttccatctttatttctattggtccacgtgtaactatgtctagtgatgtcattgccataccctaccaatttttggatttattggcatggctattatgaggccccatcacacataattaattaaaaaggaaaaagaaattagtaattttttttttttttgaaaagaagaaattagagttagaataatattgctaccattataaaaaaatatccttttagattatttcaatttcaatgcttcttgccttcttggtaatagttgtaaggaatttaatgtactcatgattggttcatgtaaattaaatggtatccatttaaccaaaaaaaaaaaaaaaattgtatctaatagtatctattacgactttgtctgaccggaaatctattcaaatcataatttttatagaaattttttttccttccgagtaaagtttttaccaaacttagctctaggtatctaagttttctaccttcccttacctttctttctctcgcatttgttgttgttaccctctccaccttacatttacttctggcgacgcatgttctatcacaattaatataggttcagagaactgatggtaattgcttcatccaccgattccaccctccaccattaaccaccatttttagtttcttgaggcttttgctagtaatcattgctaccccaatgatgcttaccttagctcaggagaaatctaaacagtcgaacctacagattttccactctttaaggaggcctttcatctccatgtatcttctcttccttctgtttttttgctatttaaaggtctaggttcttgtcttctccattaaaccatcccacccagtcaactaccccaactctcagactactatcatggcttcatcctcccaaaacccaccaaaccaccctcaatctcatagatgaagaaaacctcattcataattttgatcatttttctctcaactctgtcgatacgaatgactctttctacctcatcttcaaaattcttacctccaaatctctcaagcctcagtggattgaagaggcaatgcgtgaagcatggaccctctgttttccagttgagatatcgaactatcactctagcctgttcttagctacctttcaatgtgaaggcgatcgtcgatgtgttctcaaggattaaccatggcatttcgataagtgcctcatgatctttgccaaccctgagggtctcgacactcttacgccaaaccatttttcgtttgttccattttggattcaagcccacaacaccccctttagccaaaaattaccccaacttgttcagtttgtggctgatgagttgggagacctcatagaagttgaaaaactgagtttttgtaaatgtcaacatatatacgaaaatataaaactatatacgcctg

SEQ ID NO: 384006 - DNA, 3134 bp, Cannabis indica
attaactctcttctaattattttaacatctttcattaattagtttctaaaaatctcagccaacattttgatgcttacattgagagttatacaaggccttaagtataaataataatataagaagattcacactacgatggtggaaggccaactgatgaagaagcagcttcgcgaatagatgcgaagatacaagagcaagacaaaatgtatgatatagagtatgataaaaactaagaaggttacaacgactatgatcatggaagttacactaaactaatatccttgagagaaagtcgctaaccatgaagccgaattggcagaacaaaagaaaaaagtaggaaaatgcaagaaataacggtcgccacgcaaaagtatatggagacagagggcatccatgtacatccaaatgccaagccctttggaccagactaaatgagagaagagtcttcaccaaacactcaaaaacataaaaattgagagctaagccctatttgatatccgtcagaaggctctcccaagatgaaccccacatccttttccaaaagaaacaagaaggctcaggatttgcaaaaagatcgcttcgatttcgaaaaaggaaaaggtctgcagaggggcaatatcaaaagggagaatgctggcccttaagactggggaaaccaaaacaacatatccgtgtaccaagaactgaggtataggggtggaaaccataaaaacactcctgttcatttaacacagaaactcaatgccaagcatggtgatcttaggaattgactggagaagaaaaaaccagcaatattggtctctgaaggcaccctaatcctagttgaactttcgatcatccgaaaagatatagccaaagtctcctgaaggcaaaagggcgatgattcaaagtctaattgttaggaccgagagccttgcgctagaaacatcctggaagcggagctcctaaaaaaattaaatgcccgaaatgaacatgtacgtaggagacacagaccccagtgaccacttatttatgtttaaccatttaaggacagtgacaagagtaaaaagcaatgcgaagtgtttgtgtttcccactcgcgttaagaaggttcattaaggagtggtttaagaagttagaaccatgattcgtagattgttggaacaaactacaggtcagttttcaaagacaatttgtagcggccaggaaagtaaaccttgaagtcagtgctttaactaacatcaaacaattatcgattcagaatctaaaaaacttcattaaaatatttaaggaagaagcttccaatactaaaaaagttgaccatgggcagcagttgtcgttacttcaagtcagaatctagacgagaacttctttctagaatgagctccaataaggaggggccactagccttcaagacttttagaagagcgttcaaaagtacatcaacttagaagaagcacaaataccggcttttggaggatattacccgattggtggaccagggtatacacaatgatcgtaatttctgagagttactctccttgttgcacctaaaattagtggggcacaattttcaacaacaccaggatatactcataatctcgctcttactctggcttagtctagttattgggcactaggggtaacccggctcccaaagtaagttcacaatattttgcccagtctgtgcctcctgcagcaagtgcaaaaactgctctatagacctctcaaagcaagaggtcttaaaaaagaagcacgttgactaaaaacaagaggcaaaagagaggttacacctctcattatacacagtataccgattttgtggacacatagaaatgagtacacttggccacaagataaaatacttattatcaaagatctccttctctgtactgagatagctccaagagaggcccaaacaaaatgtgtgaatatcacaatgacattggtcacacaatcaatgagtgtaagacttgaatgacaaaattaaaagtctaattagggatgggtcacttgtaagaatggatcaaagataggttgcctcacatgaatggcagacaagttggaactctagtgcttttgggagcaccaactcaggttctgcatgtgttagtacctccggaactattcaccatcaaccaacaactaaacagcccccaaggccaaacaaaagggtagccatgatctaaggaagaccacatgtaggagcaacaacaagaaatgagataaagagttatgccaaagccttagatcatgatggagaaatatgggaagttagccagctcacagtgtaaagaccacaacttatggatcaacctattacctttacagaggaagatgctaagcaagtacattttttgcaaaatgatccactggtcattaaaaatcttatcaacagcaaagctatctcttaattttttgtagacaatggaagttcggtgaaccttctatccaaggatgctttcatcaccatcaaactcaatattcaggatctttccccgaatggttcacaactcatgggatttagtgggactacccttgttcccatggggaaagtgagactccctctaactttctatccaaacacctcccaaaacacgttcaagtattgccccttcattgtggtagaatgtcccacgacttacaacacaattttaggtcatccgactttagtttatttcaaagctataacctccatcagacacttgtgcctcaagtttcccacacagacggttggaagaggaactgcctgtgggaatcaaggagaagcaagaaagtgttacagtgtggttgtgcaacaatatatttttatgatctgaaacactgccaaagcactcttacccaaaagtcaaaattaattggaccgtcacattggctctggaactgcattatagcctatggaggagattgaggaggtaagaagttttgatcaagacccaattagagttatccgcttaggaaaaggcttggtcctgatgaacagagtgaaatccttgttgggattttatgccctaaataaaacccatttcaatttaatctgatttgttatcaatagaagattagaagtcatatctgtttacatgtaattttcttgttattggtttaatgtgtacaaaatctgttcagtttagaacatatattgttggaaatatttta

SEQ ID NO: 384007 - DNA, 3472 bp, Cannabis indica
ttttacaaaaaatagtgccttaattatgtaattatgctaaactttaattagtaaaatactctattagaaagataaatgaaaatctataactttattcctttttactagaaatttcattcaactcactataaaaaaatcttcattttagttacaacaaaacatgtaactaaaagtaaaaaaagctatgattaattataaattattgatcctatatgttgtgactaaaatgtttctggctaaatgtattagttacaaaaatcacaatttgttgtgattaaatgtattttttaatcacaaatttgttgtggctaaaactaaattaatgacaacttgtatttaaatattatattttagtcataagtaactttaattgtgactaaaagtcacaatctcacaaaaatattatgttatgactaaaaagttgtcactaaaggtaactattttttgtagtgactaaaaaccaactcagccttaacaatgatagcaacatcagaagggagattatattccaaaataatacaatcagtatgtaaataagacgctctagccacaatgtgagcaacccaattaatagatcacttgacaaaaattaaaaaactaaaagtggactgcaataaatttaaatttggaacagcttgtaccaacaccaaacaatcagtttcaataatagtactaatacccaaataatctctttaattaacaacaaaaacacttccttaagatctaagacttaacgatttttgacaaaataaagttctttgtcttttttaagttgaactactttctgttatttttatcaaattccttacctaacttctttgtcatgcacttattttaatttgtcatttttatcacatgacatatctaacttcttgtaattttaatttgtcatttttatcacatgacatatctaacttcttgtaattttaatttatgttgccattctcaccccacaattaatggaaacgcgctagttggatcacataaaaatatatttgaactcaaagagttagtttgcatgcactctcaaaacaatcccctatacattaactaatataggtaactatttaataattatatttttactaatgagtaaaattttctttaatagatcaataaaaattattattttcttaaaatatttaatttttaatttaatatttaacaaaatcttttttaacaattaatatttataatttcttttatatttaaatttttcttataatttttttaacagttaaaccatttaattataatatttataataaactttttttttcaaaagtaactttcacccctacaaaaataaatttttaaataattaattaattttaaaaatgaccattttttttccagaatcgcttgacctattccttattaaataaaatagtctacaaattcaaaaattaagttttcactatgtcccaacctaatatggtgtggattttccatttcgatgcaatctcctacatctctgccacaacttattcctataatccaccaattgtatcacgttttttcctatttctctggttctcaactgtcctgtcgtacgaccaaacccaatgacgttgcacgtcattcataaatcaattaacaacaacaacaaagtattatttcaccttatctctactttcttcaaattctattccaaatatttaaaacattaacatgaagtcatttttaagttcactcatttttaaataacatttctatcatgattcttatgtcgttcatatgtaaagtcatgaccgttgggatgaccgtcaactgaagggttagtctaggggtatatacccctaccccctacaccttcatggtacaagtcatgcattttatcatagatataatgaccttctcaaaggtatatgggacatccacattacaccataattactgacaacagacaagggtctggggggtcaccccgagatgacgattgtcatccccctcaagttgggtctcggggggtcacccaacaatgacggttgacgcccccctcaagttgggtctcagggggtcacccaacgatgacggttgtcgcccgtcacggggggtcacccaatgatgaccagttgttgccccccctcaagttgggtcttgaggggggtcacccaatgatggcggttgtgaccaccttcaagttgggtctcagggggtcacccaacgatgacggttgtcaccccccctcaagttgggtctcggggggtcacccaacgatgacagttgtcaccccccttaagttggatctcgggggtgttatccccaagtatgggcttcatccctgaagatggttgacgaccatgtcacacctataagagaccctcgtcgtcagtaactctttcaaatgttcaaatctcacgaaaggctcaaagatagttgtcaacccacgaaaatagcgagatattatcatgaaaattagacttcaactacctccaaaattcaaggagatggttgaggtggcttcacgttggtcgcatctcttgaagcgagaagcaccgaccccctcccctatataaggggtcatccatgacctgggagggagatccccaatcttgaacattttaaaaaataaacaattatcattcttttgtaatcaagggcatgttattgaccttttcaactcggattaataaaatacaagaggagtaagctatttcgacatctgggaccgaacctctttaaattcttgtgtcttttatttacatttattgcaaatttttgtgttattaattgtaattattattgtgatttttgtttaaatctcatttattatgacttcacgtcggttggctaaaaatttagtcaacattttggtgctttcattgagaactttagccaaaatcttaaagtttttcaccggaaaaaatggtgctcgcccaaagatttcaagagcgacttggcgatgaatgaaaagatttataaggccaacctcgtgccaatagaatacatattcgaacccagcatcaacaccaaagaagaagtactcctacttgatacgacttaatcatggatgaactccatagaaacttacttagaacaaggtacactgcctaccaacaaaaacaaagcaaataagatgagaagaaaggttgcacggtacctaatcatcgatggtgtcatgtatcggcaagggtaattctcaatgcccctactacgatgtgtacatcgagagtaagcccaaagactaatgaaagaagtccatgaaggtttctacggtaatcatgtgtggggacaaagctcactactacaatttagccttttagtgacactatttagtgacaagcatttttgtgtgggtcactaaagagttatgagtgatttttagtgacatccacaattagactctaaatgttcgttgttagtctcatgtaatgtgtgtcactagaaatatggagtgtcactaaagagtaaaaccaaaattttatattttttttattaatttaaaaaatattagcctatagtgacacac

SEQ ID NO: 384008 - DNA, 2212 bp, Cannabis indica
aaaaaaaaaaaaaaaagtcaacagatataaacaaaatacaataatatttaaatgtggtctccatattaaatctattattttctcagttaaggaaaacacaatataattagtttgagccttgagggttcaacaagatgataatgtgaaaaacagtaagttttctttgattttaaccaattaaagatggagttagtgcgagggaggaatgagagaatgctacgtgaaataattattttgattttataatgaagtgagtgatgaggtgtcaccgacggttgaataaaagcgatgaagtggagccactccacaatcatcaatatgcccacgtagaaaggactttaattaatctttaaccgtcaacagctcagggacccactaagcattttcaagatgaatcacggccgttgaatgtggagaacatggtgccaccatgttcaatctaattttcctataggttaatggtcatcgagtgtgaataattgtaagcctgatgaagagattagtctctcattggttgccatatttgatttaaatccaataggcagagctcggctgtgaccgatggaaaagcggctagcttgggacgtttgtgcctggcctgggtccgcgcgcaataatgtcaacaatggtgtttactcctaacgagggaatttaaacatcgaatttaactgaacaaaaaatttatttactccatatatatccactatccagtacagtaatattataatacattacacaatcaaataaatttatccaatatttataccatgagtgacagtatatataaatgtaataatgtcattactgtcctcaatttcattttcacatgccaatccaatatttgatcgatagtactgtaaaactgcataacaaaaattggagaaatgctaaaagattactttgtagtttctttttacgtatcaatatattaaatattagctctcatataaggcaatacatctaaaagatataatactataattaaaatctttgctttactactgtataattttcagtcaaaacttgataaactcaccatacatagtttgataaaaatctgaaaattaataagataataataataaaaaaagtcataaattaatacaagtcgttttacatttctcctcacaaatgaccacgcattctttctcttacactctatccatctctcaaactccctttttccctcacttgttttaaggaccctcttaattggaaagtatttagaattaatatgaatcatgctaaaagatattagtgatgactaacatctttttacatattaatatctcaattgatataattaagtgtaataatttttaggtattatcatttactaattgtaaagtaacgcgtctagaagatgatagataagtgcctattagcaatgcttaattgatattgcatcaatacaaattggaagacagatctcttattttatcaaaaatcgtcatctatccataaagcatgtttaatcaatctctaccgcaacattaaagttacaactaacatatgagaatatatacttatagaaaattctgcaattcaccatcttgaaagggatgcaccaaagcactttcatgaaagggatgcattattgatgcacttctatatctatttcagtatccgaaataaatttttttttcaaaatttttctcatgatctgcatgttatagttttttaaaatattatgtaaaattttaagaaatttaaaaaatttaacacgccaaaaatatgattcaaatagtgtattgcacgtgtaactattttattttatacgcgtgtgaaataaattgtttggatactgttttctatattttaaatttattttttattttttaaaattttgtaagatgttttaaataattataacatacacaaatattaaataaaaaaaatttcaaatgtctaaataggtaaataatataatgctttaccctatatttattaaatgtatatattattttatattttgatgatttaaaatatatatatatatcgatagtaatgaattaggaaatgtgttttgcaatatattattattattattattattatttgtgttagatttttctttatttgatttgttgtacatgttaattcgcggttaaatcgtctgaattttaaattttcaacacttaaccacaaaaattaattttttggaggcaaaactacctaaactcttattctgttttgctctgtacccctccgt

SEQ ID NO: 384009 - DNA, 2033 bp, Cannabis indica
tggtaaaaaattatgggttttacataataaaatgactattttagaaaaataaattgagaaatgatgctaattttgaacttaaagaattaacaggtagttagtattctttaatttaaaattgtaatgaaaggagataaaaataaatatgaaaaattctttgagtttaaaaattagttattattacttaacaaaaaaaaaataaataaataaatgtgagcagaaacatatatactttttttagatattaacatagagttttttttttaaaaaaaaaaaaagttattatagtattactttttataccaaagtcaaaataaataactatgttggtataactcttctttcaaaaaaaaaaaagcgtagagaataaaaagcactaaaagaagaaaaaaaaaattaagaagtggctaattttcacataatgaaaaaagaaaaagaaaaactaaaaaaaactaataggttcagactaacgaaaaaatattggagtgtgaatatatattattttattttaagtataaaagtatacgtaatatttatattaaaatttgtaatggtatcagcgtaaataatttcagtattgagtatataattaaaagttcccttatttaaaaaccagtataatatgaactttcgatgttataactgtcatatttcagtaataaaataatatagtgtgtaagtgtaacaacaatgtgctcctctcaacagatgcttttaaaaaaaatggattgattcactttctacctcttttgacattagaaaataaaaatttagtctaacttttttcttattattatttttcatatttgtgtacgttataattactttacaaaataactataaagtttataatatattaactgaagactatttagaatgaatagattagggccacattcacacatttacgcatgtaatataatatttaaatcctatttatagtgttttaaatatttttaaattttacaaaatatcttaaataactataaccaattatgagaaaaaatttaactactaaaattattttaatataccaaaataaataaaaatatattagtacatttatctaaaaaaagtgcattatcaaaattttccaataatatatttaccaaataaagtcaaagaagtacttcccatatttccacaaagattaaagaagccaaataaaagaagggtgtcatgaatttatgatctagaaaatatttcttcaattgcttttaatttaaaccaaaaatatctttacaaacacacaaaagtacctctccttaacataatttagaaataacataacattttcattatattattattatatataataaactatagataactaagtaattaattatccactaaagtaggccggcaaacattagccaaggcactaactttcagtgattacttaatttttgcattaaactattgtttttttcttcaaaataaataacgaaaaaagcaaaaaaaaaaatgaaaatataattaaaagagcccaaacgaggcccattcagcgtcactaatgggcctaggcgaccatcgacaggacaacggagaagacagagacgacggagatcgttctcgaagtggcgaaacgaacgattttcgagacgaaaaggacgatcgccgtggaggcgtttctagctccgatgatgcatattcattattattcttcttcttcttcttgatgctctcctttttcttaagctgtgcagaggaagggaagcatcccattcccataggcacagttacagactcatcggatcggaaaagaaccgacttttcgaaacgccaccgcgaagaaccggaccgaaaagaaggactagtctggtgtggtggtggaggaggaagagggtggtgatgattgttgtggttttgttgttgggattccttgggaacaccgggtatgatctcccacttgaatggaattgttcctgcctttttaaacgattcatctataccatttttcttttctttctctttccgactctctgtgtttattgtttaaatgtaatcgtaatgttttggttttctttctc

SEQ ID NO: 384010 - DNA, 1024 bp, Cannabis indica
acaaaaacaaaaacaaacaaactctacggcttggctcgtataattataaaaattttgtgtttgcgtaaaaattaattaagagaataattaaattaaattaaaagtagtgtgaatgagtgagagttaaagcataattgtaaagtaaaatatttattgtgttctgaacccggttttaatactgtcgtttcttcattttaacctttttcgaatttttctttcaaacaaataaaacaatgctagagtttcataagaaagaaaatgatgctagagtgacggcggcattcacgtttgaaccgtcacagtctgacagacccaaaaattggtttttcttttctagccgtccaaccaaaataaattacattgattaattaaggccactagatgcaagaataatgaatgatcatttgaactttaacttctttttttcgtttttttttttactgctcgacggaacgatgctcatgaaataagttattttagaaaatataatggtttttattaacaaataagttataactaaccttaatttatattgatatatcgtgattcattaataaaagtttgcaagtacatctggggcaatcaatcttttttatccctactaattattttctcaactgaaatttgactacaaaaatcattagacatggtttcggcttgcgaaaagaattatacttgttttgtttgatttgagggggaatatggtgttgctggtcatcttactgaacaactaactcttggtgaattttagtatgagaaaatgttagattaaaattctatttgtgggcatatatgtataatgtataagtgtgatataaaattaagtagctaattatctaatgggtattaaaaaaaagtattaaattatgataaaaatgatatgtagatatcatatattgatttataatttgttgagggattaaattataagataaatgttaaagggcaacagtggtgcctagcaccctcctacgtgtcaatactgttattggttcaactatgtatcggatctcatataatttaa

SEQ ID NO: 384011 - DNA, 1365 bp, Cannabis indica
taataataaaggtggcgtgagttgggaccattttttgctttgcaaacactgattggtatctgaagatgcacgtgatctatctatctgttaccagatagtatatagatagatacagaacacaaaaccataatgaaagaaaatcccagcaaagcaaagtgtgattaaatgttaaaatgtgaattatgatgcaacataaagattgaaactttataccttgtctctcttaaaattggagtttggatcactagttgcaatttgcaaattaaagttgaatccattattgtctctttcaaagttcaacagcattaagatcatgtatacaattgagcttaaatttagggttgaaggctttacttatagttccataaagttaattgtgactgactatatatatcactatcactgtccctttcccactttttataggaagctcttcattccaactcaaagtagacaacatgatttctatggtctactactatgaataaaaataaataagaaaagcaaaagatgacagaaaactcagcctccttttgacccaaaaaagcattttgtcaaaatcctttgttataatattcttctcttgagaaaataaccctctcttaataatattcttagtttttgttttgaaaaaaaacttggttatatcacaacttggttttgtgttatatttgagaaagatggaatctttaacttggttgagcaatgtaaattcatagcctaacttttacttaagcaataaagtaaaaaaagaaagaaaaaaaaatgggctaaatcttattgttaaagtatgctaaagtggtaaatgaattacttacaaaatgggcataaaaaggtaagcatagcaaagtgttaataataaataaatgtgtgaacaatcccaaatccaaacatctccaatcatagtgtctttctttttctcttttgcagtagctttttgaagggttctgaagataacaccaaccacagatgaaatcatgatgccatccattggcaaattatttataaactatatattggaccattttcattttcttctcttttttttattatgacttcactaatatcaacttgtttaattttaattcttgtattaaaattaagatgattgaatttaatgaaatgaattattgtacataggggtatgaaaaagaagtcaaaaataagatgattgaatttgtactaaaagggcaggccagacatgttttttaaaaaaatttattaattgcccacttaattaagagtattgttattgagtattagtagtgtcaaatattttttataagtagcgtttcacgattgataaacgatattccttataagttatattttttaagttatatgtaacttgatacttaattacac

SEQ ID NO: 384012 - DNA, 3022 bp, Cannabis indica
aaaatactagggggaattttagaggagctagaacgggataggtgcatctttaacaaagggaaacatgttgctggtgatattaacgttctaggggagattgcagcttttgctaatggaccgacggagaatggggtggtggcaagcaagtcacatgtgggacaacgaaagaaaatttctatcaagaataaagctagaaatatgacaaaatcaaatccgacgaatggtgcaaaacagtctctattacaggaggttgtgggtgatggtacaatggctgtggtggggggtgaattttgtgtttggtgccgagaatggatcacaaccatcaaatggaacgtttactatgaattctgcaaaaggggtaagtatttctagtagtgtggatttactatctccaaactcttttgatcaagcggcaagccttgcgaagcaaggtcgctgagtacaatgaaactcttgagttagaatgtccaaggaattggaaacccttggacatgaagagcgctccaatcccatttacaggagtttgacccgagtatagtgtttttggctgagagtaaacttacgagagctcaggcagtgcgactgtgtgatgtttttcaatttggagagaacttttgggcagttgataggattggtttgagtgggagactactgcttatgtggagggaggatgtaaaaataagagtggattctagttctcctgggcatatagtggcagaagtggcggggaaaggcttcctaccatggacgctaacatgtttttatggtcacctaaaggcggctcaacgcaaattctcgtgggaattgcttaggaaaatttgcagggagactcacggaccttggttgtgtgttggagactttaatgaaattgtaagcttggcagagaaaagtgggggttgtatgagggggtcatctgctatggaagcatttaaaaaagtgttacaccaatgttgtttgttggactttagttcgattaagacaaaatttacatggtgtaatgagcatgaatcgagcccagtgatggagaggttggatagggggctctgtaattttgaatggctaagctagtttgaaagggcagacatacaattattggagtggtgagaatcggaccatcgagctctggtgattgatttaccgatcaggaagaggggttgcaatgtggaaaaactaagcggaatagtagactccatttcgaggaagcgtggtgtgaggaggatgaatgtagggccattgtggagaaccattggaagggagcggttgcgagtgtgtcagcatgttctttttatggtaaaatagctcgggtggggaagctattgcaagattggaataagaagaaaaaaaggagttaaatggtaggatcgtcaaggttaaaaaaactcccaatgagcttacctcggcacaacagcctagggtatggactgaaaaaaaaagttgagaagcagctgaatgtattgattaaaaaagatgagaagtactcgcgacaatggagctgagctctttggttgaaatgggtcgacaaaaacacaaattatttccaccataaatcttctacgagatggaagaagaatgaaatcaagggattattggacactatgggggtgtggcaaaatgataagattattgttcaacacattgttgaggactacttttaaaaccttttcttggccacggaggtgaataatgtgattgttgagaaagtcctacaagcagtaagtctgaaggtctctcctaagatgaatgagaagcttctagtgccttttagggaggaggaagtggttcgggaaatttcgaatatgaatcctacaaagctcctagtgaagatggcttgcctgctcttttgtaccaaaaattttggaactctgttaatagggagccggtgcaagtttgtcttaatattcttgacaatggggctgacttgagttgtttgaatgagacaataattgctttgattcctaaagttgagagaccaaaaagtgtggccgagtaccgacctataagcttatgtaatgtcatctataaaatagtgtccaaatgtttggctaataggttgagaggggcattagaaggagttatcttagagtcacaaagtacttttgtcaaaggaaggttaattcatgatcatgcgatagttggttatgagagcctacattgtatgaggaagaatcggtttcaaaatgagaagaaattgaccttgaagttggacatggcaaaagcttatgataggattgaatggagctttatttgaaaaatgatgttaaagcttggctatccagaggagtgagttgacaaagttatgagttgtgcgacttcagtgacattttccttcctaattaatggcgagatacaagggaaggtggtaccataaagggggatatgacagggggatccgctctcaccctttttgtttctattttatgcaaaagctttctctagtatgatacaactagtggaggctgaggataaccttaaaggtattcagtttggtagaagaggactctcggtgtcccaccttttttagcatggtgctctttgatgcaacgttggaagattgcaaaaggttcagaacattgctcgaagagtattctatggtgttgggttaagttgttaattttaataaatctgaagtgtgttttgggaaaattgtggcagcggagacaaagcttgagttggcagagtttttgggagtaaaagtggtggataatcatgggaagtaccttgggttgccatcttttgttagaagaaataaaagcaactgtttgatgtcatcaagaatagggtttgtaacaagttaagagggtgaaagaacaatatgttttcaatgggtggaaatgaggtgcttataaaggcaatcgtttaggccattctcacttatactatgagctgttatcgccttccaaagagcactctcaatagtatacacaagatggcagcgagattttggcagggttcattggcaaaaaaagaggaaaatgcattggtgtaaatggaaacacttatgtaagccgaaagaggaaggtgg

SEQ ID NO: 384013 - DNA, 2238 bp, Cannabis indica
atatatatatatatatatatccgaaagctggccttgctacatgcctttactagagcatttgttggcaataataaagggtctctcagaataatatcaaacaaatggatggagaaaattcctcaaaattagttacatttagctagctagctagcctctaatatatttacttaattttctcatattgctattcaaaaagggtactggatttagtattcaaagctgtatttaatcttagtttagttatttacacaacatattatactgcctcgtgtaaatataattagcctactaataagctatttacaacaacctttctacaacaattattaaatatatacctaccattacctacagaatctcaagacacaaacaacaacaacaaaaaagtgtttttcatgattttaatgctctagtatatatcatcatagtctttcgatcgaaagtgagaagaaagatatcatcataagtatcgatcgaactcgtacgtataaagcacacaaacatactcatttcacctttgtgtctggtaagtatatatacgtactataacttcttttatatatatatatatatatatttatatatatatatatgcatgtgcataatcgttttattattaattagttctctttatttccaaatgcaatttttgctaatatatattattattattatctattcatctttattctttcctcacaattagttacgataaatatatagaatctaaactgtaacttatttttgtcccgttgctatattcaaaaggtgatagtttttgacttaattgatatataatataatatacatataatctggtacttgaaaattgttttgccaattatctggaactttttttttgtacccttaattacctttagttgcttggatctctccagatgagttagactttgtaattgtttgaggttgaatgaatctttacataaaaggtgtccttagatggtaatcaatgtgtgccaattacacttttttaaataattaaatattaaaaatgctatttttatatgtatatagttactaactttttttatcaaacataaaatagtaatttatcactttcaaaaaatgtaataattttattgacatccaaacaaataataatttgtgttagtaatatgtggtaattatataagtaactataaaaatatagggagagacccattcaacgatgctaaatttggtcctttgggttggttaggatttgtaatttttagcccaatctaactcaattagcctaaatatatgcataacaataataataataataataataataataataataataataataataataataaaccttatatactatttttaatttttttaaaaaaaatttatgatttgggttgctatagatttttctttataaaaatgtaaaaaaaattatttgaaagtgtgaaaatgaaaaaaattctttgtaataatatatataaaaaaactagtataggtttcttatatcttgtaagttttaaatttttgattcggtcgccaataataatggataacaaaattatttaaggagttaatgcatgaattaatatgattattattgttatatatatatatttaccaattcaggattttccgaatttgcttttgagattttcccttatccatttttggattcgctttagaaggcacattttatttaataaattaaaaggcccattattcattaggaaaggagaaaatcacaggagaggaactgtagggaaattacatagtaataattttttaaaattaattttcataaaagttaagtacacatttatgaaaaaaaatagaaatagaaagaaattacaagagttacaaaaggtagaaaggataaattattatattatttattaaaattattaaaataatatataattttgaagagaatatttattgtgaactttctattatattctctcaactacgatttattttttaaaaaaattcttttcataatgtggaagatatcaggaactcctcattttttttttataaaatatttcaatctgcttacttaatgaaggtagagacttttctttctattttcttccctaggaaacaaattggtgggtcccatatcgattttgttttcctccacagtgctctactctttcttcaatctaatttctttatcttagggtgcatttgctaataattttttaattaattttttatttttaaaagtaaaaaagtaaaataattttttaaaatcatgtt

SEQ ID NO: 384014 - DNA, 1696 bp, Cannabis indica
taagtttaatattggttttaaataacttagcttatgaaccccgattaaaaagattagtttaatgcaatcatgacatgtggcgttcctttgagtaagacgttacatgaacttcccctgagcaatagaccgaatgcgacatcctttctcgttcttgatgccacatgatctcagaacatccccaacataagggcctatagacttgacctttgactcaaaaagttctgcctcgaaggtgacagaagggttctggggagtcttggatttgcgaggtttttgagccataatttcaacgtccaagtcactttgtgaaaacagtgagtggaggtaaaaacattagtttcgctaggagaatatcagctaaataaggtggttctaaccaagaaacttctcgcaaaaaacgacatttacccttaatatctcttgtaggaatcgcctataatggtttgaagtttcttctttgctagactatataagatggctacggatttttacatcattgatctgacgtaaagggggtttctagatttggggtttataaagactggaaataatggacattcagattttgaggattctgggagtgttaaatctaggttaaattgggacatgatttcatttatttatggctataattaattttgtagttcatttattacaaaaaaactaatattattggttaacaaaaatctgcgttaacaatgctttcttaccaatgagtatagattttattgttaatattttatgtttaaaattactttatagaattgtaattagtagaagtctttaaataattattatgaaattttaaattattttaattgaatgaaatataataccataaaaaatatatggaattacatgtggcaatgaccgaatggagtaagacacaatatttcatagttaatatgttgaaaataaatatgaaatttaagtgtataaaattgaaatgataatcatgctgcaaatttcctaaattatacataccaaacaataatactaaaattcatgtaaaatgtaaggttaaaaaaatcctataacctttgtaacgaaaaatatatttactcgtcaaaagtcaaaaccacattatataaatttattatataattaagaagaaaatcgatcaccactaataatttttttgagctctgccactagtagctacaaaaggaagaagacgacaactggggagtaggaggaggaggccacggtgcttgaaaatggactgagggagaaattgctactatctagggagggttgagattttgttgatgatttggttttgctgagagagatgataagacaagagagattgagagtgagaatcctagggtattaatgtttaccaattctttcattttgctaaatattttaaaaggatatttatttaattcttttgtccatttagggccattttgttacaccatagtttcttaaaaatcttttaaataagtattgatgctattttttcttaacaaataacttgaataaaacgcaaacttcaaaataattttgttttttttttgaaagaactacaaagttcataaacaaggaaaaggtaccaggaatcacaaggaggattccttctccttgaacaataccaacattgtggctagaacatctaggacttttagctagtgaatcagcaaagtattggaacttctaggcatataaaagaaattactgttgggttttatgc

SEQ ID NO: 384015 - DNA, 2605 bp, Cannabis indica
gtgggccagttagcctctcatcatggttccttgatgatgacccctctcgataggcagcgacctggtccgcttccatccagctctcgaagagtgcctttccttagggcaacatgttctccacaaaagcctcattgcccatgtatgacagattagctctagggttgcgcaacttgaactcataagtgagttcagaggacaagttagcatactcctcccttatggcctgctggtcatcaagagcctccctcaatctctcctcatgctcagtaaattcagacttcaacctaaaagataaaggcaactaatgaggtgttctccttatttttggcaccgagcatgatctccaagccagaaatcatgctctgtctctcagcaatgagggcctccatctcagacatggctttgtactttgccataaggaaagcctctagggtcttcacctactcgcgaaaagcatccaagaacccctaggagctatcacgtactaagcttaacttaattaaggcttgaaaacaaaaaaagacaacatcagtgtcaaattacaacactggccggccagcccctctttgggactgctatggccggccagcccctcacagttacatccatggccagccatccacatgcaaccaaccccttagccggtcagcttacacaatgctagaaatatgaacaaagctaaaagtataacttaccagagaaaggtcccgaaggccaatagagtagagcctatctagctcgccatcaccaagctccttgacatccatgaaaggaaaatctctctctatgcatttatgggctgccttcacatccctctgacctacagctgaccctactcctctatcgagcctctgagcaccttggcctgccaaccatgtcacatgctgccgagtaggtgcaggccctggtagaggaggtagagacgacccagtagtatctcttccacgagaagtctgggccacctaagccctcacttgtcttgtgggctcatctgaaggccccccagtgagacctcttagcctggaagacatatctacaaaaataaagtagcaaagttagattgcaactataaaaattcaatgcaagacaagaatatagtgttatcaactatcaaataccatcgccatcagaagaggaactgtcaaagtcctctataactgccttgtccttgcctctagatgaaggcaaggggcgagcaggtccctcagaagcctggcctctaggcctgatccagagaaaagcctcaacaattggacccccgctggccaagcgtcggcagagggccctcttttctctctccaaattctgtgtaatgcgagacaaaggtacatcatcatctaagttaggaacctatccatcttcaggacaggttccctctacagttggggctcctgcaaccccaggaacaggaggatacaaaccatacttctagaagttggccatgttggtcaactagagtatgtttctctgctccattgatagagataagatgtggtttgcactatcccttatttttaaggtggggatagagcgcttgaagaacgacacccactggaactcatagtgaccaatcctctagaagccataagcaataaagtacttcttggcatacccgccaactttcaacataactgtactattggtgtctcccaactattggtgaccgatttgattgaagtaaaagtacccagtccaatcttctttggagcgaacttcaaatcaaaatagtatcctatctcacaaggagtagggtgaggccagcctagctccctatataagacaaacatcgctgaaaggtacttgattcttttcgagtgtgatttgtgtcggacacatcccaaagtatgtagtaatgtccaggaagtatggatgaagtggcaacactacctcatgctcaatgtgacgttctaaccatgccaacaaacccaaaagatgccagtgtgcacgttaatctttgttatgtatctcaaagtggacaccccttattaagccactagcaagtatcttgctaaaaagcctcatcagaaatggtagaaatgggagagacctaactgtctccctgtgatctcgcatctagtatctcaggcttagaagactgatccaatccaagcattgaaggctcactaagcctgttcagccgattgccattgacatcgtaatgacccaagggatagttcgggagggcagtataagtcacgtacctcctcttcctaatcggcgaagcctcctcaagatcagactcgacattgggactctcagtcccttgatcaatctctagatcaacatcagggcggcgttgagtagcctcctctacagtcttgacttgaccccttgtagctgccctgactacatgagggtcacatggaggcgctctacaaagagtgtgcttcgttctggccataattacaaaataaataagcgacatacgcagccatcacctcccctattcaacattcagtgctacctccatagaagagataatgggaggtgagtaacctgataaagctacaaacaaattcaagtcaataatacctaatatgttgggttttatgccctaaataaaactccatttcaatgtaatctattttattcaacatcaataaag

SEQ ID NO: 384016 - DNA, 1857 bp, Cannabis indica
atatttttgttagtgggggctattaatgggtccgtccctacttgtaatgctcattgttataacagatgttccgtttgattaataaaattcttttttaataaataataataataataaggtagaataatattgaaattaatacataactaattttcattcttcatacagaatagaaacacacttgaaattaaaaagacaagactatagtacttgatccaaacctaaaagtacttataatactgaaaactgacaagactggtcattttgacttgatccaaaaacaaaacttattgtactaataattaatttaatgtcatgatctcacttttcacttttcccactctaccacaataggacaatttttaaaattggggtcattctcgattaagtgaataaacacagaaaaattgtcagcattttctattttcatacctttattgttggaaccaagttttggatcaaatgacattttgatggaatgtttcatggttttggaatccaatccaagctcttcacatattttatgaatgaaccaatcatatatcccattgtatgggtaatatggtgaccgcagaacgtaaccttttgtcataattatcttaacttggtgatccacataacttcttgacttggatttctcatcaataacccatcttccatcgtacaaaacataaataagtgtcctctccttatccatttctgcacaaattttcaaaatcaaacaagtgatttttcttaaaatattcatatattaaacttatcaaaaaaaaaacatgcacgacaaaaatgatatcaaaaaaattaatacgtgttgatatacatatatatatatatatattaaagatatatgacttactggggagaaaggggacggtaacgacgtcggagttactgaggagaagaatatggttgatgactgactgtatttacttgtgtggtcactgtttggtttctctagctacctagggtttatgtatatatatataatacatatgcgttttttatttttttaaaaaaataataaataaaaagtaggggaaggcaatggacataggaaatcgatatgttggaaaagaatactatatgcattaattagcgtacatatttatcataaattaagtaggtacgtaatagatatcaacagtcaatatttattactccataaatttcaatagcttttcttcccaatatacatattttttcttaattcaaaaaaatgaaatgattttttttttctttaattgatatataaagaataattagccatattctcttacaagctttcgacaatattaattttggtccctaaaatgtatacggtgtgttaagaattccctgaattattatatttacaaaaatttagttatttctcttaagtttcgtcccattatttcgtttaaatgatgatgtgtctttgtcaattagcaattttgcttcctaaactttgacagctatcaaatcataccctctcaaaataaaaatgagaaagattaagtattttttttagtaaatcttaaaaaattaatttagatcttaaaaaaaatcatattgaatgattaaaaaaatttaaaaataaattaaaattttaaaactaattacccgatataaaaaatttatgtagatattaaaaatttaattttgtaaatatatattaaaaattaaatttaataggaacaaacttgaatatattttttttttattcaaaaaatgtagatttgtttaaataaatataatatattttttttcttcaaaaaaataataatattttttagtttaattattttttttctaaataatttatattttattgaattttaattattttctttatttgttaaggtatgagtttataaatat

SEQ ID NO: 384017 - DNA, 1020 bp, Cannabis indica
aactatactttaaaacttatctcctaatgggtgaacaaaatatggattaaactattcaatccggctaattcaacctattttttttgtagtaaaaagttatgttaagagtaagtcatgattcattgagctaaaaattgataagtcgtataattgtagattgattatgggttggactaacacgtagcccataattattctactactacaaataattctaacatgagaatcaattgctattaataattttgttaactacacaatagatattatcggtgttatgtcaggtggcaactattttaaagagtaattattgaattgaagagattttcttaaagtagctgtcacttaacgtagcttcatatattttatgcgttggagttactcttaggaactatatagatccactcatgaggcctgggtcggtcctaatagactaaacttgtccttagggcaccacgagatccaaatttttaaaatgttattgtttaacatataacaaacggttcctaactttttaaaataccattttatatacaattttcttttcttttttatggtttttcttttttgccaattaacaaaaatatgactttttcaaaaaaaaaatattttatgtgaaaaagttaagagaaaaccaattatccttaggtcaattagagggtaaccatttatctcggaggacataaatccccaaggagctgagttgaaggcttggctcccaccacctcctggttgggtgatgtgcaatacaaatgtctcaattggtaagtcgcaagcagcgggggctgcagtgttcagaaatgaagctagaactttcatcaactgcttcactttctgtttggctgtctgtgagccactcttaggagagaccatgacgctatgcaagggagcggaggaagcaatcaagcaaggatataagaaagtaatcttccaaagtgactcttccaacgcaatttctgctctaaaaactaacttgcaggacatcggattgcttaactacaatattcaggagttggtgca

SEQ ID NO: 384018 - DNA, 1252 bp, Cannabis indica
ctaacaaagaaaaggctttgatttgatcaaagaatgtcttcatagagtgaattggtgatcctgaatggttgatggcttacacgaaagcgggtgttaactctttaacaatacaagattctgacaacgcccctctattgcttgatctgttatatcagcaaggtcactaccataaacctttttgttttttgaatgtctggatgagagatttaggttgtatggaagttgttcgtaatacttggaagcttgttgtctctagggctagaagttttctgttcatgtcttgtcttgctcacaccaggaagcagttggcggtttggaataaaaaacattttggatttcacaaggaaaaagtgaagttgcttgataagttttttcttgaaattcaaatgcgacctatcctttcggaaaatgcccaattggaagcggatatcctccttgagatggaagagattgagactcgtcaagatattatttagcgtcagaaattgcgtggaacttgtctttgcgatggagactggaatacaaaattattccatgcctcaatagttattcgtccaaagaaaaatttcattgatgttgtctcagatatggggttacattggatttctagtcatcccaatgttaaggtttattttttggaaaaatttaaggatatctatcaatccacccctaacagcttagggaagcaactctttgagttggtctctccctctattttggctaccctgaatgaagatcttctgaaaatcccctcaagtgaagagattagaagggttgtttggtctgtgggacagttgaaatcactaggacttgatggcatgccaggcagatcttaccaggcacattggaatattgtgggaccagatgtggtggttacggttacagaattctttcacatagtggaatttacgaaggagctaaaccagacttttttagtgcttatccctaagaggttggggtgcttctaagtgtgattatttctgacctactttggaacttttgtttataagatcattgccaagattaatactaatagaattcatactactctctcgaagattacctcaccattccaatctacctttgtaccaaaccattagattgcagagaacaatattttagctcacgaaatgatggattatctccaaaacaaaagagaagcctactggtttgttggtcttaagcttgacatgtctaaagcttatgaccactgtaacaccctaactagcctaggcatgttatgtgattttta

SEQ ID NO: 384019 - DNA, 2150 bp, Cannabis indica
tatagttcactccattagaaataaactactgagagaaatcatctcattcactctctcattctatttttctctttatcttctctcttctccttatttttttattatatgtttggatcggccttaaattaatatcagatcttatataaattaagaaaataatttttaaaaaatattgttaacaaatagtaaagtgccactataaaaagtgatggtcaccaacatacaatttttttaaggaatttttcatttttatactttaaaacagttttttttacatttatatggaattctacatagaaactcatgttgcaactagcgctacaacctaaatcgcaataaaaaatcgtatagcaacccacatagaaatcaccggaaaaactaccgaaaaaccaccttaaaaactcaaactataaattaaaaaaaaaatagtatagacagtaattgccttttttattattccattgttacaaaagaaaaaaaaaaaagacaagtggggcctggaaatcagtgggtatataggcttcacatgaggaaagcatttcattttttttttttttcttatatgatcggagagggagtgaagtgttgagattgacgcgttctaaaattttaccacccgattggttcggcgcctctaactaaggcttagcctgagtcaacggctttgtggggacaatcattcttgcaaagggtccacactgctgacgacttgggttgtgggctccacacacatctcacttctttgaccacaccaccaccaccacgcggccttttctttcctctcttcgatcgagggtgacgggttgactccgtccaccactattatatccgattctctccttcttaattttcataatagaatccaggtgtcatattatgggtggcccatagttggtaaaagtccaaacattggactttggctttttctacacatgatgtatgttagtgtttaactctaacaattttttttttctggtgttatagtaataatagcctatattttagcaaagctataagtatacgtcaaataattaagatggatttattattattattattattatacgtgtaacgtgattgatcgcagatttcgtttctgcaatttgtggtaattgttgactacttcatgtcagatcgattgtgttttctttgtttttttccaaccaattttttttgtgctatattgaattaataattcgtattttttttttttttttgagtaaatactatattttaatttgtaaaaattattaattaaattttttattttgttaaattacaaattaaattatatattttttaaaatcataaaaaaataggagattgaaccgatggttatattttctatatttgttcgtgttaaaaattatcttaagattgattatattaaaaaaaataaaattattaaaaaattgagctcaaggtcctatctatttttaccattttagaaaatataagtttcattttaccatttaataaaacaaaaaatctaattagtaacttttacaaaacacatgatctaaaatggtatatttactttttttattattattttcatgtaaatctcttttttttttttggtgattaataagataatacttataatttaatattaaaccctttgattcgaaaattaatttctctctcttgtaaggttggaaatgaatggttaagcatatatagtcaagcaagcgtacataattagtgatgattaatttgtcaatgcatacatatttttaattttccctccctcatctagattaaaataatattaaaatttatagcttttctcaactatatacacaaaaaaaaaccctagtgttgaacataacaattataaccacatgtgtgatggtaattactaatttgtatatttctttttaaattattatttttaggtatttatagtaatttcagtgcatatataaataaattacatatgcatatatatatatatggatggttacattttattgacctgcaatagcaggttaccaataggtaaaaattccatttttagaattaattaattataattaattattttttaagtaattaaataaatatttaacaaagacctattttagcaattaaaatttttaaataatttttttatttatatataaatcccttgatttaattattttaac

SEQ ID NO: 384020 - DNA, 1716 bp, Cannabis indica
tctaaagctgggcgagctgccttatcaaatcggtggggatgactatgccgtgtactccatgcaaactaccaaactcttgaaccagcttgcgactagaattgatgcaataatttatgatttctggtggggatccaacaaaagtaaccacgggatccacctcaagtcctaagtcaaattgtgccttatcaaagctcgaggagcgctgggctttcaaaaaaaacaagagaaatgaatcaagccaacctggctaaatggggatggaatttactgatcaaattcaatcactatactgccagattttggaggccaaatacctcaaagggaagaattttctcaattgccagtataaagagtcagatttctagttttgtacaaatgtggtcaaagataaaactactttcttggcctgtaaagtgattacaaatggtaaggatactaatatttaggaagagccttgagttgcccaagggaaagacttcatatctaaagctgttggtaggctgccacctaatattactaaagtggtcgacctccttttaaaaaacagtgattggatactcgaaaattgagatgcctatttgataaagaatctatctctgctgtcttaaaaggaggcaagcccttagagcaaggaaatgactattagatttggacaaaggagagtaatggccagttctccaccaaatttgcctatctaatccaggctttggcttgtgctccattatgtgatgtttcccctgccctatggaacaaatttaaaatagtaaaacgttggagcatcacaagatcttttggtggtgcatcgtttcgaatgctctccttactcaatctatcctaaataaaaaattctcagttgaggatacaagctgtcctttttgcgaggttgaggatgaatcgatggaacaccatttttctcaggtgcaatttggctttccatctttgaagttcctccccttggggtatttttcctgtttctgactcaagtacacgagtgtgggattgggtcaagtttatctggagcctaaatcgtaaagggatcaattcaaatgaggttttcctttatccatcaactgctgtagttgcaatttaaaaagcaaagaataaaaaagtccacaacattgtaaaattaattaactctactactttttattaagctgattaagctaaactgtaatgtaaaagttagtttgtagagctcttgcctagcagatgttgctcgagatcttcttgttagtgtgatttgtgtgactacagctaacctacaattttctaacactcttcgtggacaaatagcagcttgttgtttggcccatgaagcagacaaaagatgaattttgttattgtaaaaagtgattctagaagagtgatcaactcacttaaaagtattgaatctaggcgggagatcgttaactactctaaattttgtaaaatcctttctacacttttattaggataatttttctaatattataggatcttataattttataaaggaaatttgaaattctatacataataaaccctaatattatttttctaaacctaaatgttataccataggtcatatatgactacattttctatattcccataatacccctcacatttgaaccaaacaattccaaagcttctctctttctctctcgcccaaacgaccacccacaacctccacggctcaaccaaagagcccggctccgacacctccacgacctccga

SEQ ID NO: 384021 - DNA, 2032 bp, Cannabis indica
aaaatttataaatattttttttacatagcccactaaatttcaaagccgatcctgaatattattacgtgattttatcatattgtgaattaaatagtgacatgaagttaatttttattaatggattttagggaatggcagtatatactttggagtgagttgctacttgttaatgatatataatatatatttcaattttgtcaaaaattgtatatgtttatctgtttgttttgactccgctagtgtaccacatgtttgatagcgattgcaaatttctagtccctttgattcgtgtttttttttttttaaaaaaaacatttagctaaaggataatagtattagtattggggttagtttggtacaattgtatcatgagaaaatgtagttgcagctgtgctgtgagaaaaaacagctacaacagaattgtagaaaaaaattgagataagtatttggtaaattataaattttaaaatactttgagttgttaatatatattataatgataatgataatgttataatctaatttattataataacaaatatgtaaaaatttattttgatttttttttatatattttatttttaaatataaatttatatgccaaacgaaacctttagtcggattactatttatttatattaagaaacatagacatcattgaaaaataacatgtcaaataatgtttctcagacaagtactaatactaatagcaaagcaacagataaaacagttcagctaaataataagctattatattaagtgattattcacaaataaataaaaataataaaaaaaatttacaaaaatacgattttactgaattttaaatatttttacgattttattaattttatttacagaaaatacagtcttttttatgttgtactcttattaatttattgttgatttttttatttgtatgttattttgatgttatttaaatgtaatttttatgtaattttcttattgttttcgtgttatttctataaaaaaaccgtaaaagtatatataaaaaaatttaaatgtaaaaatataattttttttataaaaaatagtgcattatctaattatcccttatactaatagtgattgattagctttattaaaagatgttatattatgattgataaaattaagtattgagattacatattttaatttaataaattttataaaaaaaaattgtcaatcattcacgtaataccaactcatgaggtgataattaactcatggataaattactaaatgtagtactaaatattattagtatctaataataattttcattaatcttttgttccctttttattatagaggattgattgcaatattgtataatttctaaatcaatctaattaattatatagaactaagtcaattcaatctaatgacaaaatattaaatatctaattataactaataaattttaatgaatttgaataattaacttttaattggattgcatataaacttgtttgactaaatttttatttttgcttatagttaaaagtatagaaaaagtataaattttgttttgtatttactgtttagataattattatatgaatttttttttaataaaaaacacttttcaaagtgtttgaatatcatttaagaaagatcttttgtgagtaaattagtaattatgtaaattattttaatttttaaaatagcttcttaagttacaaatcctaatttcttccaaaaaaaaaaacacagacttttttattttttttatccaaacacctctagaagaaattttttaattttaaaaattaaaaaataacttatcgaagctatgccaaacataatcataataaaatgagtgcaaaaatattaggtgagattgaaaattcactccaaattaaaataggatatggctatgtggcttcgttgctagcagataacagcctacaaataatggtttagtgcatgattttaacatgcactaaaataaaataataataataaactaatagtaagtttttttttttttttttttagaaatttaaactagaaggttaagtattac

SEQ ID NO: 384022 - DNA, 1509 bp, Cannabis indica
cttgactcttgtctcgaggaggctaaccaatccaacttgttgagcgaaaattaattgcttaatttgactctgcttttgggttgttggctcctcgcacattccaccataaaaccttatccattgacaagagagggatctccccccttctcatgtcgttgcttcttcttccacggtttcatctgccagaatatcagtaatgatttcagcatgctcatcctcttccaatggttggaaaacattccctatctgtgttggctttaactccggtttgttttttggtttcccaccctttcttacttgttgaaagccctccttatcaatctttggggcctctgttcttgcaattggccttttatcctctttgatcacccattctttcttagtctctctatttttccagcattcatcagtggtatgacctaagctcgagcaatgcttgcatattacaggtttccattcgtagtgtatccctacaagagtattagaaccattttcatcttcaaattccaccatatcaggtaaatcctgattcatgttaacctcaattagaatcctggggtaactaagtctctctctttcttttgttacttcatcaaccattattggtttgccgatttgtccaacgatcttgaacaaggatctttgtccccagtatttgagttccaagtcctccaagtgcacccatattggaacagttcttatgtcttcttttttgaaattagtattaggaccccaaattttcataatcaccagcctcttattgaaaaatatatatcctccattgagaacctcatctcgaaaaagcaatgctctggaatcgaattataaaaattccatatgataggagcttaactctatcaatttttccattccaaattctgttagcaaaaccctcaagtatatgcagtggaggattggatccaaggacatagcatacaattgaaggctttcagaattcaaccgcatcctcaatatcttccatagtgatcttgactttaggattcttattagtgctattgaaagatggttctaagcttcaaattatagttccagatctcaaaataggtgggtttgaggacttaccttgagcaatgttactgttacattagttattagcagcaagaaaatgctcaaagtccttcctcgcttcatcctgctatataatcaatctcagaaaggttcttggtgacaaaggagaacgaaacacatttcgaagcattggattaaagttggatcccatattttcttgattatgttcctcttcctcatcggagaagacgatcagcttaacaccaaccaaatcgtccatggaattatcaatctgagcttctacaaataatctcggacctttcttccttactttcttggtgctagatttctgttttcctatcccttttgacctagtcttcgccgttgcagcagcttgggagctgaaagtctagagagaaaataggagagaaatttcttttaatttgtgaaattattattttgattaattatgataattat

SEQ ID NO: 384023 - DNA, 539 bp, Cannabis indica
tatcaaatactttactaattcatctcaatttgattcatttaatctttcctttatattattaatttaaatgatataagatattgctccaacttttgaagtcatccatccaaaattgtttgaatgtcgttgaaagtgataacatagatcgtttttgttaaatcgttacattattttgttgttattattattttatttggttttgttttggtgtggataatatatgataaaatttgtacctaatggcatgaatctcgacattcaagctaattataattaatatgtatgtatgtagttagtatacccaacaagctttctaaataataaaacttgccaatcatctcacgtgtaacattatttaatgtacatttaattctccctagggacaccaatttaggatggattatagcataatatcaatatttatataaaggccacatttgcatattgaattgaataatatttataatataggtggcgtttggtaacacttttttaatcagttttttgtttttaaaataagtagaaaagtgaaaatattt

SEQ ID NO: 384024 - DNA, 1876 bp, Cannabis indica
gagagagagggggagtgatcagagagagagagagagaaagagaaaagagaaaagagagaaatttagaaaataaggaaaatagggaagaagggactttggcctctgtattagtcggaggtggtggtgcatggtggtggtacgtgcatttttgcgaagatttttcccgatgcaaaagtgcactggtaaaactcttcccatctaccattattaccatgcgagaatttttttcccttttttggaacttttgtcggcgcataattaccccaataaaagtggaaaagcgcccttaataattataaaaaccaaatttggtatgcgtcgaacattttttttccctttatttaagaatttttaccagcatattaatgcgtcgaaagaagtctatgaattgagaaaaactgctcgcgccttttggtagtttatctttttgggtttcaccagtgcaattcaccaaatatgcatcgatattaagttatttttgccaacgcattattgcaccgacaaaagtagtggttgagttaaattagcgatccaacaatccctttatgtcaacaacttttgccggtagtgtgtgtacattatctccatgtagacaataccttatgtacacattgacaattatcttgcagaaaaagatcgtggtttagatctcatctcttggtgatttcaagcccaacccgaactagaccacatgctctctatttgaggccaaatttgaataagacccaatttttcccaaaattaatatagctttatgtaacgtttttttttaaatgttatggtttttgtaatcaaaaggtaaaattcttgtagtgttggcagttaagtgtcaaaaataaataaaaaggctaaatactaaccgaacgcgagttttagggaatttttgtaaaaaattggaatttggaggttaatttttagcgaaataataatattgagagtgttatgtcgcaatttactcttatatgtttacaaaatagcaaggctttgggttttctaaccttttacagtttcggttaacttgagttaagttaagtttaaatataaagtaatattcaaaaataaatatctttacaaattataattttagagatgtctctagaatatcacgtaaatagcctttggtgatatgtgacttggaacgtgagtgtagctacccagtgtcacgtccatgagagcctatagtaggtggagaaacagcagggtcaacctttggtcctggtggcggagggtcggccttattgctggtgatagagggtcgaccctgttgctagtgatggagggtcggcttcgtggatcatcacgaaaggtcggctcgtgtcttgtccatggtcatgcagggtcagctatgctcgtggtggtgtacggtctaccccactagtggtaatgctccccagagtgtcttcacgatgcccatggatagtttaatgactttcctaatatcttgaacaaaatccatgcatattcatgttggatttttaaggaataacaacctccaacttataatccctccattatattcaatttttataaattagaaaagtaacctcaacaaatattattaaaaataattataagaatagaaataacaattttataaattagtaattatctatcattccatcatttcatcctttctaaggacaacataaaatgattattactactctctcttatattttccatctttcattaattctcaatctatcttcctcttcatgcatcccaccaaatatagccttaatatcatctttagcatatgctattgtatttttgtttagtttttttaacacaatgtatttcttttccctactaagtgggctttactcatagaaatttcatgggattttttcaacaatatacattattatcaaactat

SEQ ID NO: 384025 - DNA, 2271 bp, Cannabis indica
taataaacctaataggaataactaaaggacaagaactcaactggcaaaaagactattttgcccttgcctaaactaaaaggctttcttacaacctagtggtaatttggtcatttctaataccttgaatatttctgaaatttccaatctctacctaagtttccccgctattacaaaaatactaaattaattttaagtgactctataggccgcacgtcgcattccactgttaccgagcataaaacatgaaattcataaaaatttacatataacataattaatgcatctagtattcaaatatatctccgtaattgagaaaatatttttctaagacttatttcagacaataagccctaattcctacttagaaacacaaaattacataataattattgaacctcttaattttctgctaattcctatgatttaattatgcggtcattacaatgatccccctgttaaaaagattttttcctcaaaatcaagtctaaaattttggacactgagcccacaaattggattctagtttccaggtgtttcccttcaccttattgtttccttaagtatcttatctaatacaaaagttcaatttcagataactttgtctttcttatcgagatccataacttattccctcaataagataggcctaagtgaagttctcaaatttcataattgaagatatgagtcaaactcccccacatacagtttgaaaaacattttatgtgttgcaaaggttacttgtagggtttagatgagaaattaataacaatctgattctttcgggaaattccaaaattcatagtaacctatggtatatttatccttgtcttcaaagttgttccccatatttgagaattctacattgttgaatttcagattaacatgtccttattatcaatgctgagaaacaagtatcctatccatattcttttctatagtcttgtcaattattgaactaacctcaggcttagacgcttcctgttctgggttaaaacaaaacaacttcacataccatttagtattctgtagggacccatccctgttacactatggtaactattgattacacgaaaacttgatcaaacttgatatttgctccataagtccttgcgatttgccacattaatttatagtatatattgtaatacctaaattgtccctctgaattagctatttgtccaagagtagaaagttatataagctttaactacaatatgtcagttctctgaagacttcactaaactgggagataaatttcaatttcttatctgatataatggactataaagtcgcataaagtcatactatctcccttatggtttccatactagattttcagcaacatttctcactttacttgaaaaattaaacccatcaaatccaccttataaacttctggagattaaccctaatccacaacgaattaaatatttgaatactacaatgaaggagtggtgaaaacttccctaaaaatataacttctgagctcaaaattgttcgaaagacaaacttgagttttataatgtaacattccataatccaattgcaagcataattctgagctatatctgttagggctttcccaaagttttatatccattaacttagcatttctgttcttattgattaaatctggttgaattgttaacttgctgaactcgcctaacataaactctgatcttaatttcgattatgacatttactaactgaaacatttcctgcttaagacttctgccactgcattggccttcttggagtaataaatggttatgtagtaccaatcttaagctagcttcaaccactacttctaatctacatcccaatcctttcgagtaactaaatactttaaattttctccatagagttaacttagccaaattcttaagtacagaacccctgttcacaagttccgggtagtgatttgggtattgctacttatacttctttaatttacaaggtgaataaatagttattctatcaattactttaaatcaccctctagatcctttctgactgcctcacaaaagaccaagaacttttcttgatttaatagccatgttaacattaaagttgtattcaactgtaacttcagctcttggaaaccagtttatcaattgcctgttcacatagctcattacttcctcttaattagctctgctgtaagcttgaaatcttaaaataatccttccagattgtaactccatattttgtgtgatctggatcattaagaatataccatttaaggcttttcaggagcttattgctcatata

SEQ ID NO: 384026 - DNA, 1640 bp, Cannabis indica
taataataataataataagggtaggtaaatactgcttttaattatagattttataaaaattattaattagactctatcttatttaaatcataataaaattaattgcaatcttgttgtatataaatagagccaaactatatcatccacacatatattgcaagagagtattagaataacaaattaagcaattagtcccatatacataaatatatatatatataataataataataatataatctataatggctgcaatattaagtagtattattagcttgaatagtaataataataatgccttcactagatctgtgaaatcatgtttaagttcaaaccataataattataatattattcataataaaactgtattaatgtctaccaataataataataatattaataatattatttctcgaagatcagcaaactatcaaccttcactttggcattttgattatgtacaatcactttctacccctttcaaggtaacaataattattattattattattattatatgtgcattttctttgttaatttgatgtactaaaagaagatacataactcgattttttctttattatataaatgtgtaaatatagttagttatatttatatgtacattttaaataatttgaattataacaaactttctatcaatatatattttttttttgaaatttttgaaataatttttatcgttaaaaataaaatttaaaatagttctacgtgtataaataaatacatttaaaattaattatttgaaccaactcattttcaatattgcatatttttatgagtttctcataatatatatgttatggcacaattacaaaatttatattttccactaatcaacccgaaaagggttgattggaattgaaaccctattttgtttgttagttaagaaccgactcaaatttatggtggtataataatataggtcatatatatcttaaattataaacttgatataaaaattagataccaaaaataatatatatatatatatatatatttagatatgtgtttgtgtggtaggaaggagcatatgccaaaagagttgagaaagtaaaggaagaggtaagagtaatggtgaagagagcaaaagaggaggagaagcctttatctcaacttgagctaattgatgtaatgcaaagacttggaatctcttaccactttgagaatgaaattaatgacatattgaaagatatatataacaacaataatgtgtgcaacaccaacaaaaatgtctatgccaattctcttgaatttagactcctaagacaacatggttatccagtgtctcaaggtatatatataatactttttctactcctttatattcacataattaacaacatcatttgatgaaaattattattatgaatagtagttaaatggggtagtctattttaaattcaactactactcatcatcatatataatatgtcacctaataatggtattatgcatgcatttttagatataatataaagtaaaagttttgatatgtatatttcaaattatacaaatttatggatttttatacaagtttttcaaaatatttttttttctcaaaaatattattttattagaaaaattcaaaaagactagggcccgtttggcacagtttt

SEQ ID NO: 384027 - DNA, 1242 bp, Cannabis indica
atttttcaacttatccctaaaatcaatgatgcttactaggcacaattcatttaccgttatcaatcattggaaaaatgattccttcaattatcatatcattgtgtgggccatagagaatatatttctgttattgtatcaaccaatagtgtgatagcttctagtatattctctgtgtatataaaaagaaacattctctattgtattgagagtagtgaagtgtaattactcggtaatatacaaaggtttatcaattcctatttttctctgttttagcttgtatcaaagctaaaaatcctctaacctacctatggaaaatccaacctcagccgaaatgttctctgcatcaaaccctgttgatgcatcgcccactgcctaactagttaacccaccagtcagctccccagctacagccatacaaccttctcctttccaaagcttagcccctcttaccatcaaactcgagagaacaaattacccatattggagatcgcaagcccttcctgcacttcgtgcacatgatcttgaagggtatgtactgggaaccaaaccatgtccactacagtatgtggataacacattcagaggccctattcctggcgaacctcatcaactcaaccttaggtatgctatgtggagacgtatagatcagtctatactcagctagcttctcaactctatcttcgaatccatgtttggacgtgtgataagttgtcttacctcttttgatctatgcatcactttggaacatctctacactacaagttctaaggctagaattttatagttgcgatttcaattgcagtccctaaaaaagggcaatctaactatacatgattatattatgaaaatgaaaagcatagctgatggtttatctgctgcagggcaattaatttcagatgatgatctcattttgtacatattgggaggccttggtcatgagtatgagtttgttgttatgaacttaacctcaagacatgatcaagtcactctgcaagaagtgcagtatatgctgcaaagtcaagatattcgacttgaacaactcaactcaacccctggtgactcttccatgcctgctactcaccttgccacacagatgcgcagatctttcaacattagaaatctcacacacatcccaaattaacctactggtggccgctcctacaaccctagtggtcgtggtcgaggcagaggacgatccaacaacaacagaccaatatgccaactgttggatatattttacca

SEQ ID NO: 384028 - DNA, 4011 bp, Cannabis indica
cccaagattggactctcattgacaataatagagtgtgggggtaagacacgagttgagatgaagtactaacagagaaaaagttagaaacaacagttccatttagaggtgaggtcataatagtaacatttgggcatgagtgggaatcataacaataaaggtattttaggggggcataagatgagaggcagacaccatactagatctaaggagagaggtgaaacaaagggattgattcataagaggacgcaagggaagaattggaccatagaaaaagttagcaagatccaagtcagcaacaataatagcatattgatgaggatattgaaaagaaagaggcttgtcagaagatctctctttgcctctaagcagaatgtcataagggcaaaaaggaagagtgatattctcatcacacttttgcaaatatgtatgaaagtacttcctggtatgctcaagcttaccacaaaagtaacaaacattaagaagcctttcataattgaaatccagccacttaacaatttctctacccatccttaaaaacctaacactaattccccttctaatagacttgttaacatctagaaagatcctaattctcaaatatggcccaattccctcttcaacagtggtattatcaacttcaataagatcacaaacactcgtagcaaaaatcttaagaagatcataagatttgcacataaaagggataccataaacctgaatccaaaaaggcacataatgaagggttttaggagtgataggaaaaaatttatcagggggcggcaaaaatggttagactttgtgcaaaattccatggttgaccctttaagattcttcttttatccctctcacacccaaaattaacataaaaaagctcatcagaatgttgagacacagtcacaagaaatcaacattgcaatttctaaatttcaaaaagggttttcattaggaattcatgattaaagtgttcgacaataaatagtttaagcaagagactgatattactaggattatcatttaaagagttaacatcaaaggtaaaaacatcattttcatcaagagttaaagcaagagcatgtgagacattaataagaaaatcatccagtttgaaggtaatcaaataaaagactatagtgataaagattatacttagttcttgccttaaatagaatgaagagataccccttcaagacgtttcttgaagatctcttggccacatccccttccctatcccctttcctagagtcagtagacttgataattacaagtacaatcgtagctccaatcttcaagtctccacctctattttgaaagaaaaagcattttgtatgaaggtaatgatttgggttttacattgggagaagaaggaaaaagaaagaggaaactaggtgtaacgattataaaaaaggaagacgaatagaaaacaataaatgggctttgagcaagcttcaagattaaaaagggaaataataaaagactcagagatattaatggagtaataaatgtaaaagatagagtaataaatagagaaccactaaggctagtttagcagtcagggagagatgggaaaaaataagaaattatggattcatgggttcgaactcaaaacttttaagagggagaagtatcaatatagcaaacgtccaatggaggaaggacaaacaagaaagactttttatttttatttaattgaaattaaatcatgttttgggagttatatgtaccaattagttttattctcatttaattacttttttataaaagttttacatacatataaaactttaatcccagaggttaatgttggcaagagaatggtgatattaaatattaccttgtttgtttggaaaatgtcattcccttagtagggaaattcaatccggagaggggcctaagacaaggcgaccctttgtcccctactctttacatcatggcggctgaaactttgtcacgtcttttgattgagaaagagcatcatggtctccttaaaggattcaaattgacaaggagaggagactcggtcactcacttgatgtttgctgatgacatcattctgtttggagaagctacagtccgtgaggctagatcctttttggattatttaaactactactgtaactgcttgggtcaggccatcaacttctcaaagtcttccgtatacttttcgcgaggtgtgcgggaagaaaggctcaagtaattgctcagactcttggaatgagaaagatgaacaggagagcaacgtatctgggaatccccctctttagatctgtcaagcgaacggaggatacgaaacatttaatcgacagggtgcttaaaagaatacagggctggaaagttaggcttctgtcaagcgctgggaaaatttgcctgatcaaggcagtcggctcaagcctttcaaactatgttgcctcctctgatgtaatcccttctacgacgactaacaaggttgataaacttttgtgggatttctggtggggtgataccgaattaaaacggaagctccatctggcaccttgggatcttctttgtaaaccgaaaagtgctggaggtctgggattccgcgccacagagactatgaacagagctttcctcatgaagtgggcttggaagatccttatcggcgaagactgcttatggcgcaaagtaatgaatgataagtacatcaagaatcagaacttccttgatttggaggccaaaccgtctgactcaatcctatggaaagcgatactccgtatgcggacggatcttggaaaaggcatttgtcggaaaattggagatggcaactccacctcgatctggtttgacccgtgggttccaggggatatccgtcaaccaataccttgtgtagatgatgcggaaaggattagtttggtaagtaattttattactaatcatcagtggaatgccgatttgataaggagatggtttcgacatgatgatgccaaacgtattctcaacatctcacttcctgggaggaccgtagatgactcttggttgtggctgccaaatcctagtggagagtattcaatcaaatcggcttatagaatgctaaaaaatgttaatcacagcgaggaaggggacaggaaatggaaatccatttggggagcaaagattcacaatcgccttaaaatgttctggtggaaaattcttgctaattgcatcccaactaaagaaagacttagcctgtctattcccattcaagataccatatgctcattttgttctgcctctgttaaggacaactttcacttattttgggagtgcatatacgcaagagcaatttggttcggttgtagttggagctttagagccgatgttgtctcggtttcaaactgggatgattggcttggctggttttcgaatgcaaataacagaccatcctatctcaacttcaatcaattattggaaggggctgctattatttttgaaagcatatggagagagcggaatgggcggcttcatgacaaaaaatccaatcccattgcaatctcaatcaactttatcaacatcagactccgagaactctctcctccgaatgattccttccactcctttcaatcagagtggaagcccccctgaaggatgggtggcatgcaattcagacgtggctatagggcagaatcagtcatcgggggcagctgttttccgagacaacatgggcaccatcctgagaattgcctcctttcgtctgaaccactgcgatccactgccgggagaggtgtctgctgtgtgtgaaagtgcagcagtggtagtggaacttggatacaaaaacatagtctttcagtgtgactccttaaacgcagtggctgccttgaaaagcaaatccaaggacattcacaatttgcaattcaatatccaagacaatgttcacaagtttctttcatttgcaggtaagttaaatctctgggagatcatttagaccccaagaacctgcaatggtgtagcccattcggtggctcattgggcaaatcgaaataacaagttcgggtttatcgatttggccaattttgatga

SEQ ID NO: 384029 - DNA, 1545 bp, Cannabis indica
aaaaaacagagtttcctttacaaagctcgagaaaaaagaaaaggatgcatatcatattgataagatacaggcccactaacaaaaagaatattaacgctacatcttaagaataatagcttaaaaatctgtcaaaactaaataataaagacaaaaacaccaagtagctcaaaaaaaagatcataattcaatttaaaattacaatagaagttatctcaaaccagatcagggaaggttgaagctcaaccaaaatcgagataaattctaactcgggtcgtactaaaatagatcatagttaagaccatgccgaaataagatctgatcaagtaccaaccgagatatgattacctcagattcaattgaagtttagataagttgcattcagaacagtccgagataaactaagttgagattatgctgagataaacctgtttatataccgattgagactcagttacctcatactcaacaaaagttatattttacccgaactaagctgagatagttatatctcaggacaatccgagataaaccagaaactgagccaatgtcaaagtcaaagtatgactataactcgatctaataagcaaaataaatcaataatcaaaagtagttagcatctaagatcaatcaagagcatatcagagtttaaatactgccataaataaaaatagcataaagtcgagaataaatctcatctcaaaccaatagaaaacaaagtaagatcgaataaaataaaattaatccaaagagagataattacaatataaaactaattactaaaaattaacaactcataagtgtacgtatcagtcatagcattaaaaagcacaatcatacatccaaggaacgtacaatataaagtaaggaatttatgtagactaaagggtaagaaaaaaaaataccaaaatggagagagcattatgaactttaagagagaaatctcataaatactgaacaggtaatctgatcagaaaaggaaagtcagaatttttggcaaaaacagtaatagatcttatgtttattgagaacaaatgcaaaatgaaattgattgcacaaaagaacaataagggcccaaccgggttcgaaccggtgacctcttgatctgcagtcaaatgctctaccactgagctatggacccctttgttatctgctgtctgtttatttatattaatcatgtaaatattctaaaatttttgacctcatctgttgccacgtttgaagtcatctctgtccgcatgtcacaccaatcaatttttagtgacagttcacaccacacacgtaatcatacaaaatagccctattttttagcaataaaataataaatgcttatatttattcggccaaaaaataaatgcttatttagcaaattcaacctatttctatttctttttattcttttttttttctttcttttctgaaatgacctatttctccaaaataagttggacaaaaatattaattgaattgaggaaattacactctataccctttttatattgttctattttatttttacccttctttttttaaaatttgtcattttta

SEQ ID NO: 384030 - DNA, 1133 bp, Cannabis indica
atccattcatgggtatatgtgtattatttgtaattaaatatataattaagaaaatttattttaatatattcttaagagtctgttttggtatttaaaaaaactttttagccaaatatattttattaattatgtatattatatttatttgtgattatttgtaaatttttagaaaattatgaatatttaacggttaaaaattaagtttaaacatttacttactacgagtataagaaaaaatcgttacgtgtacaacttaaacaatttaaaagtaattctaaataattataatgtacacaattttttatatatttgataagtaactatttgaatcttattttttacacggtaaattatttgattttttttttaaaaaaaaaaaatttatagatgattttaaatagttatgacataaaggattataaaaaaaaaattataatgaactacaaaaaaattctagaaataggtaaatgatccatgaacattcttttatagaaaaattaagaaacaaaattagtggaacaatttttagaaccattcaccacacacgtgcggtggaccagataatctcttttgtaatgatttaagtcaagtcaggtgcaatagagcaatataaagctatagcatttactatttaattagcacgtgctttaattaaacttcatcctgaatgattgtttgttcttatatatacttaaaggaaagaaacaaaaagattaaacttcaatagattaattgttatatgagaattgatattttgtattgaccaacataatttgattaacgatttttatagttatattatttattaaattaaaacttataaaatttaatattaataatatgtactaataaaaaaaatattaaattatgttgtttatttcttttcaaatgatctttactattcactatcaatagtgtatttctttctaatacattggtacatacactttatatgaagtatcactactatctcgagagtttttattactcgttgaggccaactccttttttagaagcacactatgttagactatatatatagtgcatgtaatatagcatatacaaatgatatgaaatgcggaaaataaactgtaatcatatctataatatatgcaatgaaaggatcgatgtac

SEQ ID NO: 384031 - DNA, 2307 bp, Cannabis indica
ataatagtaaaataattatataaataatcattttaacaaattgaaaaaatgaacgatagaaagagaggcaaaagaaaactttatatttgatggcattattactttacttgttcatgtatagaaagttagaatattttgttgtgtgtgttctctttttcttttggtttctcaacatggtgacatacatagttgattattaagagatatttgtgatatatattaattgaacaccacaccatattcatacattactaatatatagatagattttacatatatttcttttaacaattacacacacttcaccatataaattgttattacagtcataaagagtcacatgattccattttacaagtgtatagttaaaaataccatcacaatgattaatgtagaaaaagaaataggaccatctctggtgtcactttttaatttttattcataggcatcatttgattctgactagtaaatgaaataatgtacatgatacagttaggttagttaaattactcataaattactatgtcaccagatacaaaaatcccccaaaattattatttcatatacatgaaattccaaatcacacattttgtagtattgtgacctgtgagtgagtgacccatacaaataatggacaattaattaattaatataacactgtttagcaagttttaattgagatagattcaatgcttatccagcattcaccaaccaaaaacaacaaactaaaaaaagttaattgaaaggaacaagaagaaacagtaattggggtgttgctttttcctttttttattctactatttttagcataattattgaatttgatataaagtattcgaattaaactcattatgctaataataattaacagcataagcttagaatttgtttgctaatttttcaatgacttaaatacaaaaatataaaacccaaggaccacttttatcaactcaagataccaaatattcaatatatacgacacaaatgaaaaaaagcacaattggaaatggggccatgaagtgatatttttcaaccctttctttagtgacccctaagacccatcaatacccaaaaacaaacacctttgctgactcactcactaactcactcttctttactcttctcactatgggctcctacaattaatgtcgttttgacaattggctccaacaataattgtcgtttaataattagtaaacatagaaaagcaaagcacatataaagaaaaatgacttaagctttcatttattctcatcttaattgtaattaattataataattaccataataataatgataatctacgtacaaattgtcaacaaattacagaacaaaattacagctttaaaaataaaataaaaagaaaaagaaagaaaaagtacatgtgcttacattaagatctgccaaactatcttccttcctatatttctggtaagaataactgaacaaaggcacagaagtaacccaactatagtttaaacaagaagggtatttccgtaatttcacctcgaagcttcttctctctttctttctttcccaacttttccaatcgtgtttttctttttagatctgcgaatctgccacattattctaatatatatatatataatttataaatattaaattttccttcaaaacaaacagcgaccaacaaagataacagtagcagtaatgagaagagaaattagtgggagcagagttgaaggtactgttattcgccgacggcggcggagggctataatagtaaaaaggaaagtaaggaacgatcggattcggaggcggtggagttggataattcttgtcgtttggcggtggatagtaataccctcctcctccgccgttatttccgccgccgccttcttgggtcgccggagggggaggggagtagtagtaagttccgccggaactaggctgagagggaggcggaggacagttggaggaggaagaagatggcgtcggtggcggaggagagggaggtggcggcgattgggttggtgtgccgcatgggttttcgcaagcggtgcacattgtgcattctttctgttctttagatgtggtattgattgtggtggttggtccaggcgtggccatggcagtgagaagaagtagattgagtgtcaggaattgagagaagaaacgggttttttccattttgggtatatgataaccgatcatcaaagaagaaagaagatgaaagaggtgaagagtggtaatgggtttctgtgagtatttatttctgtacagacagatagagagagagagagagagaagagagagcgtgtttatatatatataataaaatatatg

SEQ ID NO: 384032 - DNA, 1154 bp, Cannabis indica
caagtaaacattatggatccatttgaccctagtagagaaatgaaccctaacattgctaatgaaagaggaataagaagaaaataaaaatgaaatgagaacagagaaaatatgaaagaaaactgaaagtttgaaatgatatgctgaaatgaaggagagagaagaaaaaaaatcatgtataacaccccaaactcaccccacgtatacattgtgtcccaaaaattttaaaatgtaccactatttttcatgaataaaaatatgagcggtaatcatgggattaaaatgtaaaaaacgtctctcaacataaaaatctttataaatatagacctcaatacagaattaagagcaggactctaacaaccaagaacacaacacagctagactaactaacttgtattgtataacaacctttaactaaaaaccgttttagtcacatatatcatttgttttctcaatatagattactgtgaatttggggttagttttgtctatgtcatatgagtttattttattttattttgttgttggttcttcattttgtttatcgatgccttagtgttgttagtggatgggaataacaagtccactgcagctaaaggggttgttagtggtgcagttacgtactttacacaatagttgaatactcaagcaaattaggtgagtaaacggaatattataagttttcttaaaattaactattatgttgcaatctttttcattcaactttattttagtttcttttgtaaaattaacaattcgggaatcaaacggctgatacgttggctcattttttttatctttatcctaattgtattttcaatatagaggatgttccggttaaattgtatattgctattaataaaatggcataattttcttaaaaaatatattgaatatttaaattattaattgagtagataatatctatgcattaattaataacattttattattgtaactgttaaaatggttggccaaatatcaaatgacacttgtacccttaccgaacttaactaatttaaccaactgtcagttatgacagttggtgttcgggtactttgcatcaatgctgcaacttcagtatttaaaagggccattctatctactacatagactaatcttggagaatagaaaaacagagagtgaaagggagttca

SEQ ID NO: 384033 - DNA, 1963 bp, Cannabis indica
tgctgttaggttagttgctttactctactatatttgtggaatatatggtactataatatatatattactttactcttgtcatctctaggtgttggattttaatattgatgtttagaattcgtatgtatacttgattgatcgatatatatcattccttaagcagaaaacataatgaaaattaaaaaaccatatggatcaaaacgtcataattaatcaagctccaataatgatcatacccttttttctatcttcaagaaactaaaagcacctaaaggaacaaagtgaaacgatgtaaacaaagaaaaacttctaactattactattatatatttaaagagatcaacatatataaaattataaaaatcagtagtgaaatttggagcagaaccattggttattctcaagtcaattttcaagggattattgaaaaaagttgactttgtaaactaattttgtttgaacgaaaagttagtgaattttaattccacatcaattttaaagtgaaaattggcaaaatcccacatcaattttgaagtgaaaaattggcaaaattaaaggctataaatagtgtcatttaggctttcatttatttacacaaaattaatcttgttttaaaaaagtgtgcgcttgttactatattttgttgtatccgggcgaatttgaaaccatttgagaaagcagattcatccttcgaaactattgtcgtaatattttgtttttgaaatgaagattgttgtaatgtttaatttttcctttattatattttacctaatacttaatgtgtaaaataacggcaagtaaactgggatgatgacgacaacagagaaaatcgcattaatccatggctgctgaagattgccaaggaaaattgcaatgctactacgcatattcagccttttgtattcaagtaaactgtctatactctgatagtagaatatgatagaaaataggacctaaaaagagaaattatataatgtttgctttttgcttctagtagttcagggcatcaaattgcaaagctctcaaaattgagtcaagtccaatgtcaattatcttcacattcttcttataactacaatttcaaaataaacatttatgtgagaaaaaaactttacaactgtaagtatacgtagatccttttaacaccctaatgcttaacgcatatttgttggtgaaacaaatcaaccattcacgtctgagtttttgaaagctttcagactattaagagcaagtctcattctgatgcgtttaccaggggaatctctagcacaagagagccctatctctattactatctctattactctgctaaggcaatcacaatgcttctctggacttattatagcttcatatggtctgtattgttagaattctctgaaaattgtaatagcttagagtctattacatgcatcaaatgttcaaggaaagctgaatatgtgtgggactcatccctgtgagaagagataaaacaacagccctccaaaagttgtatgcatagcagccatttaaagtgctattagtcacacataatgtaattatcaaaataatttattgtgaacaaaaaaaattattatgaagattgaggtagtaataacaatgattgataatgttaaggccatttttcacttcctaaagaccttaaatactcatatattctaaatatactgtctatgcataacaattaaaagtataaggagcaagtccaattgtaccgttcaagacatgagtggagctatattttatatcatcatataaaaaatttaggttgtaaaattgctttctattcttattctcttctaaatttgctctcctccactaaacataatgtcagtgaatgaagttttactgtgtctacttattagagggtattaattagttcatagtcagttatgttagttattaggcagttagtgttaggttttatgccctaaataaaactccatttcaatgtaatctattttat

SEQ ID NO: 384034 - DNA, 1098 bp, Cannabis indica
aataataataataattgagcagcctcagcctctctcaattataatacagttcatttaaaatattaataagtgtgatctagtattttttatattcttttgatgtttcacagttagtaacttataagtgattaagttgaagatgttgttaaggttatttttcctatgtatttggaacacattaatttatctattattattgattgcttgatgaataatacctacatataataaattatattatatttacttattaataaaaaaatttattaataactattttggagttgctcttgttagaaaggatgctcatgaaatattaatagaacttttagtattgatagaacttgtattttcacagcccacaatgtaactaagcggatatttacccaccaacagtatgattgtttacgtatatctaccacaacagtcaacttattttgtaataaccataaaatccaattgttttctatatatgcacacttattttttttttaaaaaaaattctatttatcttttcaaaacatatcaaacaaaaatatccaatcctaaatttctccctataccctaataataattttgaacattgttataagacatttatggtacctaacaccacaatgaaatgtcattttataattagttagtaattttttaaaatattgattaaaataaaataagtgggacacgatatttagttgtactaataataatattacaccttacaaatatattaagcaccataagtgccttatgacatgtttggtttgttgtaatcaacattgtaatggaatcatgattacaattccaatgtttggtttgcttttaaactcttgtaatgagattccattgtaatcactattacatcacttgtatgaaaagtgattacactcctataactcatgaatcctcattacaattactcaaaatgactatcttattacccttactttatattttttcttactaaaataggaataattttgtcaatttactacctattccaatattctttccgaaaacaaaccaaacataataagagtaaataccattttggaccctctattttacaaaagttaccaattggaccctgtgttttgt

SEQ ID NO: 384035 - DNA, 2545 bp, Cannabis indica
agattaatgcactttgattgtcacaatgcactgttatgtcatctgatttgaacctcgattccttggtaaaacacatgagctagatagtttcttttatggtctctatagtagtcatatatcgtgcctaaattgatgatagtacaaccaccttctgaaggttggatatccagctaacacattcacttaagactgtaaatgcataccctattgatatcatttgtgtctatgtttccttcatagtcagaatcaacaaatctatttatttcaatttttttccaacttattgttatagacaagaccaacatctattgtaccctttaggtacctcaacacccatttaactacaaatcaatgctctttccctgggtcagatatgaatctgctaaccatgctcaaggcataagctaaatttagcctagtacacaccataaggtactgaatccatgtagttcttttcttcttctattttaggtgcttgagcttgtttcaatttgtaatgttgtgataaaagtggtgttgataggctttgcatatagaacttgtcaataacttttcatatgtaattcctttagaacagtgatatcttatctagtctctcttttttgatatctattcctagaattctcttagcctctcctaaatttttcatttcaaattatgtgctcaattgtactttcagtttatctattgcatctcttttctttcttgtgatgagaatgtcattaacatataataataagcagattggttcattattatagtacacacatgatcataatcacttactgtatatccaatatagaccataaactcatggactctcaaatttcactatctaggggcttgcttgagcccataaaaagatttctgcaataggcatacctgatctagtttgttgctgttgtatccatctagttcttccatgtagatttgttcttcaagtgtgtcatggaaaaatcatgtgcgtagatccatttgacccatttctagattaaattggactaccttggtcatcataattctaatagaggtctgcttgacaactaaagaggaaaatattatttgcactctatgatattttgtctagatggccttagaactaccttccaggtcttgttggaattttatcatctatggcttttatcttcttgtctttgatgtttacagttttcgcataggtttgtggctaagtggtttcaatctcctctactgaagccaaagaaaatgcagtgcagtatgcgaaacctaatatatcttctttccttacctctcacaagctaatagtactgtgtccttgttgttgtaggttcttcttcctcttctgtttcatcttctacttgagtacaattttgtgtatccacccgagcagaactttcttgatctcccttgtccatttgcaagtgaatccctctttcaatttgagctttctaattatcacatgcgcctacaactttcatggccatttcttgttcattgaatactacatccctactgatgatatacttcttgtatttatctttcaaacacaataacttatacccttttacccctttagggtatccaaaaataagcattctagtgctcttgattcaagtttatcttgtcttgtgtgtgcaaaagttgtgcatccaaagaccctaaggtgttcaattgttggtatttgacttgtccatccctcttgtaaacttttaacttcaaggcagtagagggtcgcctattaatcaagtagcaagttatttcaagtacctcaccctagaatttcttttctaggctagcttctttgagcatacaccttaccctttccaatagggtttttctgcaatcccatttgttgtagatttttcacaacaaccttatgtctatcaatcctttgattttgacaatacttggtaaactcatttgaaaaaaattctaatccattataagttttaacgatctttatttttctacctgtttggttttctataagctttttccatgtaacaaatgtgttaaagcttgttcttagttttaagtagaaaaactcaaaccttgctagtatagtcatatactatactcataaagtagttggtccctcctagtgtttttgttctagaggcccccatagatcagagtgtatatagtctagctttccttgagttatatgtttacctggtgtgaattttatcttgcaacatttgccatagacacaatcatcacaaaaatcaagtttgccacccacttttcctttaagaattccctattcccctctcactcacatgtccaagtctcaaaagccataaccttgtgttgtccatatctagtttcttaatcaccatatcattttccccaatgatggttttacccttttgaaaatagataccatctttcagttcacctttcataaccactagagatccctttagaatctttagtgaactgtcaatcttgatggtaccatattttcatgtaagttccccaattgagagcaagtttcttttcagtttagatacaaacatgactgttgggttttgtgccataaatagaactcatttcaatataatca

SEQ ID NO: 384036 - DNA, 2360 bp, Cannabis indica
aaaaaaaaaaaatagatatagttctatggagaaaaatatatttacaaaatggagacatagatttcactaaaaatgcttgttggtgtttgagaggctcgcctacagctacatgtatggtagcatttgtaagtaatgttttccattgaagggtcttgatccaatctttggacttgctctgtggccaaacatcctaaattactagatgacaaagagtagtttcatgcctaaatgttttggtacttgtccggtataacccccttctatgttccatgtggatataaactaggccatcataagtagaaaatattgagaattttttttttggttggggtgggcgatttcagacttttcttctctggtatatttgatctgtggactgcagtagtgctaattttttaagtgattaaatttatttacaagtgctaattttgggtattttgtcactctgattttataggagcaccagagaaagcacaccatctaatttgataagggagtcggacatcttaagaaatctgggttcaaccatgaggtggccaagttctattgcaactaacaaaagggtgagaaatgaaatacgaaggaatatcccaacagcgcaggagatcgaagagttctttgctttcgccgagcagcagcaacagagaatctttattgagaagtatactatcttatctcactccattattttgagtgtgaattttgatacatgttttgactgctagtggtgcacaatttgggaccacagcacacaaatgcaaataactgatgaaccttttatttttttaggtacgattttgacattaccaatgaatcgccactcccgtaaggtacgaatgggtgcaagtcgttccttagatgaggaacattgaattggaagttgaacttgagactgcaagttctgagtctataattagtgctaagagaagttggattacaatcaataacattgtgaacttgactgaaccttttggtatttgctcaagtacaaaattaggtttgctgaagtagcctctgcaatatcacaatattatgttagaatatgtacaccttgttttggtatgcgaatcttgtatgagcgaataactaatagttgtatttaccgaagaagaatatgtggtgtgaatttatgagttagatctaatggtcattataaacgatgttgcttaggatagaagaagacaggtcaactaagccagatttacttctgacaaacgctcactttgccacattatgagttgcaaacttacaagttctcaaaacaaaagaaaaattacaactaatcaaaaggttagagagtattttacaatgatgcgcatagttatcaataccctaagtagagcaagctccctttagcgtcttgataactgtttttgaaatgctctctaatagtcgtttccaaagctaatagacatgttacatcttctccaatgaggggattagagaaattgagcatgtttgacgccacccacaaaattgtcccaaagtgatcttgagctagggccccacatacattgaatcttcaccaattttaatatcatagttgactttgatctaatcttccggtggtggagaccaactaggggacacaagatcctttgtcgatgcatacaaacaaaattcatagtctccgtaccaagtagaaatagaatcaatataatgtgtaatgttacacagagaattattgtgtaccttgtcattatgagttcgccagatcgtatcaaccacaattgaggcgtaaaggaataatctctcaacatctactcctttagacttcagatttcacataaaattgacccagtcccgaactcgacctcctgactcttgaacagggataattcccacgaggatgattattgggaatattttaccaggatctagatttactaacaagtatgttgattaacatcctaaatatgaatatctctataacaatgaaattaaacgcataagaatttagaaaactttacattggttgtagcaaaatataatgactccttctgctcagatctctaaccattgttcctttctgtcgcaaagtattatcaagatctgagcctagatctctttctctccttcgggttggttactaccgtcttacctactatgattgagtacttgatctgctatgtgtggcaggacactctatcactataatctcgagtatgaagaacaatgaaggaggcttgaaaactgtatggaaggtgtctctcatctactagttgtcagagagtgaaaactagatttggtaggttgaaaagtcttcgatgagatgagaatattatgtacattatatagtgtttcaactagagtttagagtggaattatatggattaaaaaaaataaaatattggacaaaa

SEQ ID NO: 384037 - DNA, 1946 bp, Cannabis indica
aaaaaaaaaaaaaaaaaactcctgtatttctttaattttgcttaataccagcatgttttgacaaatgttgttgagacttgggaaatttaaaaaaggtaaaatagggcaggttcacaatccaaattaattttggatatttaacatattcccaaaaataaaaattatagactactcaatatctgagaggtgttctaatccaaaactggacaactcggcctctgccaaaatggatgtcataatactaatttgaaagtccgagccacaaaagatcacaagttacaagcatacctttttgcaatgaacatgcaattacacaagctctatccaaataaggtactgagcagattgatgttattctgtacatttgcagtcaaagttttacattgatatggaaattatcagttaatcatcatcatcatcagtttaagtcaagaacttctccaacaagttcccaaaaaagaaacttgttttggcccacccactggctgattcagctgccttagaactacttgttgggactttcttcacattgaccatcattgtatgcccaatttcttttcgaagtgtctcaattattttggtgtctactgggttacctgaggcatctctgacaaagaacacattcactgcttcttctccaactgttgagactcctgctcttgaaactgacaacccattctctctcaaaacccttgtcacttctgatagtaatcctactctatcttttgcgtgcagctctaatctcaggccctgattacatgtataatataaaccattgtacttccatgagattatatttccattttgcatttgttatgaaaatgcattgaattatatatgctacatatatttatattgtatctacaaccattattatctctcattttgtatcatcttggcagcttatgaatgaataggtcacgatattattatatatactactaaatagcatgtgccaccaatttgataaaaattaaaaagacaagaatactcccaacaagttctatatatacaatatcttttaaaatacataattaaaatttcattttcccaattttattttaaatttttacattatactaacattagccttttctaaatacatcatcaaattttcattttttataatttttttaatatatttcactcatttcaaatatataatattaatctattcacatataaaaaaaatataaaacaattaataaaatatacttaaagtaataaatattattatatataacatgaataataatttttataaatgtagcatatttttagattatttcttcaaaaaaaaaaattaaacaatccctcttcacctcacctattgtgaatattctgatgtaatagtaacttattagagcactcttatgaccgttttttttttattcttcaaaatgcattatcataatgctaattagggtagagccactacattcgggtggccctccctctcaacttttttttatataataatgcatcaattactattacaatgataataatactcattttaatttaatgtcctttatctgtattaatattttattatattttcacttttcaaactcaattttctttaatatttgtgtactattattttttcctaatttttaatttgatttattattattgttaacgatactttttaaaagttattttcttaaattatatgagacccaatacataattacactaataatgatatgacatcgagaaaaataataagtaccaataaataatgcattttagcgattctctttctaattatatacttattattttataatttattttgtggcagagtcctctctagcttttaggaggcccaaacagaatttgaaaagtattccaattttttgggggccttttgtgcaaattaaaataaagtctaaagaaaaaaaaagagaaaatttacatggtatactaatttttactatttt

SEQ ID NO: 384038 - DNA, 1417 bp, Cannabis indica
atacacttgttggtacaaggaatacaaagagaaattgctaaaagccaaagtaggagaaaatcattcttttattgaataattttggattggttacaagagtgttacttatacacagtgcgaattataaagttttttttttttttttttacaataaaaaaaataatttggtatgtattgtacacctatattttgattggtcctttatctcttttaacattcaaaaaaaaattatttttttttcaataataatataagttctaattatttacaactaccaatacatttttagaaattgaatagtttttagaaattgaatagtttataatcatgacgaagataaagtttgaatattttactgcaatcatgataatttttttatatatacctagtaaacaattgtttgaacaatattttcgataatatatatacaatttaaattttttaaaatttacaagtaatcctaaataattacaacatgcatacacaattaataaaaaaatctacgacgtacaactaatcctaaataactacaacatacccatttaaaatctaccaagttgtaattttagaaaaaataaagtaagaacttcaaataattaacttttaaatatatgtataataatcaataccatatatattttttactagaaaaatattgtatataaaccacaaattaagttacaattaggagaagccatgtccctatagactaacataatttcgcctacgcttatacaagtatgcaagtggcaagaactattaactagttgtaagattcaactatctcttatgacaacaaaaactagttcatgtattcaattgtaactaacaactataatttaactaactcttataacaaccaaaatcattttagcttaattattttgattctcaagatgaagtgtatatactttgcaaccccattaaaaaattatgtttttgcatatataattttatttttttaaaatctgcaattaaaatgcgagtgtaacgacttcaagcaagagattgaaaacttgttactgtagaacacagacttgctgtaaaagaacaaaaataaaaataaattatgcagaatttaaaacttgacacaagaaattatacgtgatattacggggccatgcccacagagtataattaattagtaaagtatcaaatattacaaaaacaactgacttgaataaaattaaactttgtctaattattttttgcaaccttttgtagttcaccttgctaatattgatctctgaaacacacgaagtagtgaacttccttaagctattaatgcatgctcacttcctcccgaaataagtctttgacagatcttctcacgaagacatatgctcacttcctcccgaaatgagactaagaaaagtcttattttaagacccacacttattcaaagcttctcttcaac

SEQ ID NO: 384039 - DNA, 918 bp, Cannabis indica
aaaaaaaaaacttagactttcatccaaacaatttgttccaaatacaatcaataatagattgaaacaagtcagttttattcttccccacaaaccaatgtaaaccaacatatttgtcatagcacgaaacaagagccacacccaagagaccagccaaagagatacacatatccggagccaaccgggatgaaaaacaaataacagacttattcaaattcactaacaaacataccttaatttttattacttcattttgtcaaactccttgtttttttttttttaatatttgagaaattttttaaactcattataatgttgaggctttcttctgtgtgagtttgtatatgatagtgaaacaaaactagtgaacttaaaatactatacataaatatgaattaggtcgtgtagtgtgagatttaaaagaatagtattttccaaaagcatgtatataaaattgattagttattgaatttgatgtgatttctatcgtcaacttcttattacaattttttttaataaatttttgtgctcgaaaacacatgctaaaatattttttttcattttttttttccattagcggtgtttgttataattacggcatcattccgcaagtttttgaatagttcatagtacaaaaaataagtttgaattttttttaaacaggtagtggtaaacttgaatatcaggactatgtatttcggtactgtaaactattcagtaatttttcaaaaatttacagggatgatactgtaactataacgaataccgctaataaaaaaaaattaaaaaaaaaatatttcagcatgtaattttggacgtgaaagttgactaagagattgtaataggaggttgtaattagtatttctcttcttttatttatcctatctatattgttgattttttttattaaaaaaaaaaact

SEQ ID NO: 384040 - DNA, 1850 bp, Cannabis indica
aaaaaaaaaaacaaaattaattatacatgctaaatatatacataaaaacataaaaattaagaactaaatattgcacgtaatattaacctaattatattaaatttgactattataaaaagtgatctttttttccaagtattataaatttaaaggggaattaccctgtatactattttcttaaccttttttttttttttttttctaaatttacagtttgggtttttaaaatagttgcagcgttagttgcaatagaggtttctatatagaattccgtaaaaatacaaaaaaaaaaaataatttagaagtgtaaaaatgaaaaatgccctaatttaaatttaaactcactgcacattatttttcttatcttttatcttatattaaatgtgaatatataacattaaatttttttttaaaaaaaaaacattgcaattcaaatttaaactcattgcacacatagtaaaaaaaaaatatctttctttaccttagtcattattatttaaaagaaagtgtatgatatttctaaaaaataaaaagtattataaaactaatagtatattgatactaaaattataattaacgataaattttaaatattattataatattttctttttataaatagcacttaaattaaatatttttaataaaaaataatatttattcaataatactccacacaaaaaaaaatattaattatacaactaaaaatatacataacacaaataaaaactaaagatataaaacatgcattacacaagatattaaccaagtaaatgaatatatagtatgaatcatgaagtgtgatcaattcttttcattatctaattaattttatgtaactaaacctatttgtttaagggtattttttttcatgaaggttgaaagggtaaaaatattaagttaagatgaaaccgtggggcaataaagtgatagctacaagaggcttgtatttgggtctttattgatcacctaaatgacttgttttgcttttgcttgggacattttagatatatttgatcactactttgaagctaaaatttaaattggagaaagaaaatgacaacaagattgattctagaccgttggattgggcgatgatgcacctaatgacttcatctacgacagagacagtggagtggttattgttgatgaataatgatgacaaagccaaccacgccttttattatttattatttttaacatgatttaattaataagtaattataatttattatttataaactataattaattttaatatttttattttatgacttcctaaggaggctttgtattaatctctaccttgagtacacggtagtgaatggtcttatcctattgaagtatatatgacaaatacactaatgtattatatcatatataaaataataatttgctgaggatacaatttatttatatttaattgcttttggactaagggatagagtacttaaattaagattaagtgtgcagtttggagtctgcatttttggtaattacattatatatcattttcttagttaaatggatagtcaatatataaatatgaacctcatgatatatatttttataaataaagtgactacagatgttcgttagtttaagagaatataaaatcgaacggtattaattttataaatatacataaatattaatattacatttttgattattttaaatatatataaatataaatattatttgttttaaattaattacaatacaaatgttaaattaatttaaatatatataactattaatatattatttgtaatatgattatttttaataatattagtatatggtcaattttaatatatattcttaaactttatatttattttctttaa

SEQ ID NO: 384041 - DNA, 3053 bp, Cannabis indica
ttaagcccttgatatacatgtacacattatttcgttttttgtatccaaattaactgatcattaatttctccaactttatttccctataccaataatgctctacattttttttaatatataaattatatcgtatatatcatgtattatcagctatgctctacattgttgttgagtatttattttcattcacaatcacactggattcttcaaccactttgaatatgtgtatttttttatttatttatgtatcaaatatataaaataaatttattaattgacattattagagagcagagacacaacacattagtcactatataatttatcaccctttctggtcttaatatttaacatttttttgatcaattaagtgattcgaaatggaatatatagcgcataaattcgtagttcatatcaaatatatgtagttcaagagctgaaataataaagcaagtaaagatataaggtaaagatttaatcaataaaagttcaaatgatctccattcgtgtttgaagattcaatggttgtaaacctaaaataaaaatgtttgaagaaattatatattataatgtaataggatcaagttctggacagtgtcttgatcatatgaagtcattctgttatatatttacgtttacatatatagggtactatacttcacctcagctaaaaagtttacgttatatcataatttacatgcatgatttttaccgaagatgataactttccctgcctttgatcctttgtaatttgtttttgaagaaagagaaagaagaaaagagaaacacgacatcaaagcatgcaatcctggaaatggaagtatctttttaatctttgaaatgtccaagagaagaataaaaagaataagagagacatcattatgagacatttctcatgcttttctttcattattatgtatatatatatatcataataatcataatcatataataatcaacattatcatcaccatcatgcatccaatgtcccttttttcatcctgggatgctttctgttgttgcccaaatactggacacgacccccttaaatattgcatttatatttttatatattaataaaaataataatgatgaaacgcacacactttcatcaacactcaacagccgaagactacttttgaattttgattgtgtttctcaagcgtgacgaatatgaaacttagcatataccattaattaattcatcacattttgtatgactaattaattatatataatcacttccaattcaactatttttataagtatactttatatattatatttatgcacttcgaagtttgaagtagtgagcggcaattaatgaattattatggtaacgtgatttacgtgattgaaaagttgagaatatatataacattataataaatattatatatcaataatttatattagtctaattttattagtgtggtttcacccttttatattaatctaattaatttgtatcaataatgattcctataattcctctcatatgaatatgagatcatgagttccattaatttatttttatacatagaaaagtctaattgaagttgtaataatgaaattaaagtatgtgaaagggttttatttctgtcttaatgactaaagctttcttgatccgataattgtttattaagtaataataataagaatatatatatatgatgtacgaaatgaagatggtaataataaacaatatagatgaataatcagggcatgataaggaagacaatgaggcaaaacaaattaaagttgggaaaaaatggtagaaagttgagatgttgtgataatgatgaggataattgaccagaggacaagttgattgataaataaataaaaaaggaatatttatggcttgagatatactctctctttctctctcgtgtgctcaatcatagccttaccctctcccaatcatttcacctcactccattattatccctttttcttacactttccaggcctcaaccaaaataaattaagaaaaccaaaatatgtgtaattacgtgggaccaaacaaatttatataaatatataatccatttttttttttttttatttgaaagggaaatgttttcattactcaactcatttctcaagaaaaaggaataggcatgacaagcagcaaggcataagttcatgttaaatactcacattacaagatctaaaacagatttttgttttaatatttaaagaattaaacacaccacatatcatatgctttaaactctttcttaattttaaagtttttttagaatttatatttaaattatataatactatattattctatatatattttgctaattattttaaatttaattttttattttacaatgtgtatatattgatacacacgtttaaaataaataaaatatattaaaatttaaaaaacataagatttaggtgatgtattttaaaaaagttagtgttcgtatatagtgtataatataaaaatttgaagtaaaattagaaaaaaaaaatggtaatatatttcaaatatggtaaagtacaaaaactattatgactgcttataggccattcttaatgttagtaattagggcatttagccagtaaaaaataacaaatatagcaagaaaatttcgagtttacaggactaaagaaaaaatgtaaaggacatcaattatgctaggaaatatcatacaattattaatatatttaaatattaaatgcataaagatcctcttaattaatcaagaagctcaagctcggttgaagtatactgaagctctagttctagcgagtggattgatttattagaattagtctcacattgctaatgtgtagaaataaattgtgatatataagatgaatgggctactcctcccattgccaattggttttgagatagaacctcattcatcttattcccacattctaacatggtatcagaaccacttgtgatccgttatgagcccaaattttcaccggtccaaaaagccatttgtgatccgttgtgagccaaagtgccgccggtccaaacaaatacttctgctgtctcccctttaacctctatttgggac

SEQ ID NO: 384042 - DNA, 1051 bp, Cannabis indica
attcctagccaatgtgggacttgggttgcattcccaataaaattaattttttaaaaaaaaatttgtttaaattatttgtgctattagtatgataataagttatattaagaaactcgtattactttatgaatgtgtgtatataatacataaatacatcaaattataataaaataaagcaatggagaagtgagactttgaatgaaaaagataaaaagtaagactagtttaataaaattgaatattaaatatgtaagaaactattatattatacatgtgtagtatatattatataacatatatgtttggttagttctcaatttaatcggttagtttgccattgacactaaaattgaccgtgcaaagacagttttagtcggaggtagatttttcatttttaattttttcggtgttaatttttcagtattcagacagacagtcggtgtacttaattttttcgatttctttaactttttgctcagccttaattgaggcatggtatcctgcctaaaaatgaaacatggagaggtcaagagtaatttttcatccttgaatattaaacaagcaggaagagagtgtgagtggagatgagaggatgatactcttctgattatttttatttatttgtgatgatatttttatttattttaaattataatcatattagtagttttgtattttttttggttcaaagtgttcatatgatattattttatttttatataactatcatctatatttataatatttgtttagataattggcgtcaaaatctcattatattttaatttaactctgtaattttattttacttttgcagcaatactccttaacttcagaaatatttttgaagtgccagttaaatcttaatgttaaatgccaattatgttgccactgtgtgcaactgtgcatagtgatgtaaatatgtcactactacaaaatggattattcccacggtttagaagaaggtcaattatgaaaatcgttggaaaaggtaagtggtgttataaaataatataaagtagatgagaagaaagaagaagaagatgaagag

SEQ ID NO: 384043 - DNA, 1921 bp, Cannabis indica
ttttagagtggtttcttcggtagtttctatgtgggttgctatatagattttgattgcgatttaagttgctccgctaattgtcataagggatctatatagaattccgtaaaaaataaacaaaaaaaaaaaaaaattattttgaataactttttatattgtaaattgttcagaatttatctaaattttgtaaaatatatcctaaataactataacgtaattaaatataaaaaatttgactcaaaaattattctatatatcaaaacagataaataatgcactccttcttttaagaggctcattgtagaaacataattataatataaatatatatatctgacatatatacattgatggtgaaataatattttttttttaaacagtatcagtgatgaatcatattttaaatgcatgcatgtcccacttatttatttattttgacagaatacacactcagtttatgtcacggaaattttatattttattatcttctgaaaatgagaaaaaaaatatattctgtgtttttttttgggtgtgtataaaccaattttcaaataacattttcaattaatatccgtatattatattaaacgaacaaaataatcggttaatattattaaatgagctaatttctgcacattttaaaactttgttttcacgtgaaaaacattcaaaataaatgtgaatatataataagttattaccttcactaggcgtttgtagaaaaatttgagagttaagtttgtctttagaaaaaagagaaaaagttttgagtggttcaaaactatattaattgggagacctgaaaaagccattagtactgtaatgggtaaaaaaatgcatatgctttggcaaattgaaaattctcaattacaagcatgaaaattaatgtttgactaataaatgacaagtacttcccatcccaagaatcaacccaaaaatatctctttcaatatcacacatatatatatttatatatatagctaatacctatcttttgaatcttgcaacattaggatacatagctataataattaatgagggatttaaacatgaaaattttgaaagaaaaacaaaataataatggcaatatataacatttaaacttatagtgttatctttagtttaaagctttaggatggcttctcatcaaagataaacctacctttgactatacaatatatgaaaagtgattaatttaatgttttttgttgttaaatgtagtaatgttttttttttattgctgttttggaatgataattgtttgatcttaatctttagactattggaagaaatagtttccctaactttcactccatgcatgaatattgtcttcttgtggtttacaattattattgattaaacaaaggttgttgaaaacgaaaaataaaattcaacatcaccactactttttcaggaccttgcttataattaaagacaaaaatatgattagattttttctttttcttttttctttttttacatgaaaataacatttaaataacatcaaaacaacaacaaaaataacatacaaataacaataaattaacaaaagtacaacataaaaaaactgtattttctgtaaataaaatcaaaaaaaattataaaaatatttaaaattccataaaactgtatttttgtaattttcttattatttttgtatatttgtaaaataatccatttctttttaataggatcagaaatcattttgatattgtcttttcttttactttacagtattgggccaaattttgagatttgcagcagccaaaaatttaaaaagaaaatggtattttcaaactttgccaattttatggtattttacatgctagtactcttaagaattttgtttgggaaatttacacagtttactgtgttttcccattttctttcttttatactgttacactccaaaaataacttt

SEQ ID NO: 384044 - DNA, 2941 bp, Cannabis indica
aatttgggttggtagattctgaaattttgcactttaatttgtaattatttagactttaaacttagcattttgttggatgcctcttaaaagggcgcatcaattgctgccgatttgagattgcaaagtgttatctggttgttgttatttatgattctttcttgtgttgtttagtaaagtttctaataattagtaaaaacaaaaatggcaaaaaagaaacctcttttttggctatgttcagcaataaacactattggctataagttagttatggaactttttgatggaggattataacttgtagacttagaactgagatattcatagttgcgccttaggttttaatcgttgttgtttcattccctttgattgatatattgaaaggtcggatacgatgtgtaagtagatagttgttggtggatacaatgtgccaagtagattagctgtgattgtctgttgttttcttttaaacttttcttcatattttgcagttaagaattggtatgcttgaccatagttatcaaacgcttcttcaatctagaaatttgtcattaaatgctaattgtgttgtaatttgcttcactttcagagagcaagaaaaacattgaacagtggctttcttctctccaaaattgctgatgttctgaaatgtaaggactcaaagtgatcaagtatagcaaaagaaagcataacaaaggggtaaaagaaaacaaaaaagttgagacattcccagtatgatattaatgctggaagaaaatatttgttaatgttgattgaagctaatatttttgaggagcagcagcagaccatacaagattttggtactatacaaccagtttcaattgctcctgctgtagacatgatttgggaatttaggacaagtgggctgctgatatgaatatcctttaaaataaggagaaatttccaagagaaggataaaagaaggaaaacagcttaaaatttgcaggaaaaacactaaaaaaaagggttttgttagtgattgaagaataattttattaattggtgtgtgtcatttgcctgctttgtgattcatttatgtaaataaaagtgtacatattagaagtgggtctatgctctaagagctttgtaagtaacttgtggataaataagtatgtcgtgttgataacaaaaattttatatggcttctgctaaagcagtgctactctgtaacaactttgtaattaactttgtgaaacattttttttgttcttatttctttgttgtcatcaggttgaattgattagatttcattctattattacattattcccatgatatgcttagttatattgtctgtagatgaataatgcatgatttatttaacaggtcctggcatcagaactgagaatgattatatgatgtcctcatttattgctcactatttagacagcctatgaatgtctgatcacatgaagacttgattttttttttactgtagtagggtaccattggtggtgcaacatgctactattaatctagaccatacaatcaatcctaaccattaattaatataatgaatgatcaagatcgtacactaactagggatgctctacggtagtctttttcctatcttattgcaaaattatattatataataaaacttcacattagtaattacaaggttgttaggtagttttcaattacgagttatgggagtaatttcacacagacacaagtgtatgtatgctccactattgagtgttgtgtgtgcatattgcattgacatacagtgcattgagctatgggccgatcatgttctagaattttgagttttaggccgatcaagccttgaacgaggttttaaagttgatctatttgtgcttgcacactaatggatcaacttgacctgcctgtgtcacataaggatctcttaaaactggattggacacaaagtaatttttgttgtctggttgtacgttcagagaaatatcttgtccatctaatcctcttatgcgattcctgaggtcgtgcacggtacccaatcgatcaaacattgatgtgtatggaggcctttgtgcttgaccgttgtgaattatgggctgacttgatacctctgtttgaggatgggtgctaagttgatcatttccttccaagtaacgacttggtaaaattttcccgtctacatttggcccacaatttgatcatgtggtcttggattggacggtccgttaactggggtttgttgagtatgttcaactggtcgttcttctgaccatgttatggtccactaggattataagtatcagtacctggctgctggtcggtgacttaataggctcttcagatcagtacggtggcttgtctggaacatttgtcaatcaatgcctactaggccctcatgacttccatatcttgatccctccactcttcgaagttcgaactgacgtctttgctcatcaaaagcgagatttatagctcctcagatatcttgctggtcttagtgaagagtgttattgtggccttgtattagccccaatgcagcttgcaaattttgcagtccggtgtcatccccaactaatctttgggaatttgcagtggacgacattccagtaccaggagtaatttgttcaatcgcggtattagcagttctagtttcttgctgttgtggtaaattcaacacgcaagtgtacgtgtcgtaacaagtagtagactcactaagagtgagatcgatcccacagggattgcagttaagtactttaaaattaaacttttacttctatttggttgaataaaaattaagagagaaaattaaattaagaaaactagtggaagtaggaagcaaataaataaataaataaagttaacagttaataaaaattagagctttgatttcaattgttcctattaattatggcctaatatgattatcttcctattataaatttctatgcaatagcaggtttactaaggtaatttatagtct

SEQ ID NO: 384045 - DNA, 1472 bp, Cannabis indica
gacaaatggtaaaaagaatttcttctatccaaatataatcactatccaactgtaatgcttgtttagccaaaccatgtgcggcttggttggcgtcccttctaatatgagataggcaagcattagagaaagaggataaatgatatgaaacatctttaaccaaatcatgaaaaatagaatattgtgacatttgtccatttaatgcattgacaagcattaaacagtcacttttcacattgtgaagttgtagttgcaattgttcagcccaatgaagaccactgaacatggcttttacttccatttcttgcgatttgtaattgccaactaccgatgttgacattgtagccacaacacatccatttgaatctcttataatcacaccaataccaattttactcctcaaagaatcaacagccgtatcgacattcatttttaatttgttctctggaggaggtagcttgtgacaaacggactgggtttttttattgttttccatgaatgaagttgttctgatctgaccaaataaaccacattatgtagatgactctttccaactcagacttggtgagaattttggacaaatacatgaaatagtcaccatctttcatttgaccagctctcttgaaattgaattcaaacccagtaatttgccaaactgctttggcatgaaaccggagaaaagagcatgtccaatagattcccatgccattgaacatagtgagcaggtagtagaggttatgattttcttatgaaacaaagatttggcaactgggagggcagattgtataactcaccatccaaaaaatttcaccttgaaaggaagagttaagccccaaaacagatttcaccaaacctctgagtattggaacttgaagaaaaatcacgatcttcataagaacaagccaagtgataacttgtttttacagtatattcccctaaacaattttgatgccaaatctatttatcattgcaaggatggaaagacaatggaatagtgagaatttggtccacatcaactggtgaaaaatcagcaattaaaagctccaagtcccattcacatgatgctgatatgtagtttgcaacctgattctcagccggtctagtatagctcaatggtttaaaataatcatggtcaggtatccatgaatcataaccacaccttacactattaccatctgctattttagtcttcatgcctttcgttaacaaatctctaccccaaacaataccctgccatgttgaagaagacaacccactagaagtagcagacatgatattggagtagtagcaaccctttaaaatacggctcaacaaagtatttcggttttgaaaaattgttattggagtagtatattggactggactgatattgatcttggttaagatattataatacttaccgttgtatctttcccattcaatatcactagttgatcttagatcaaaaagatcttaatcctgatatgcttaggctc

SEQ ID NO: 384046 - DNA, 1369 bp, Cannabis indica
aagaaaaaaaacagagagacagagagagaagagtgaacaaataggaaactagaaagatccagaggcaagacaaaaataataaacaagcaaacgaagggaaaagagctagttttagtaaagttttttttttttccaagcatatctaaaatgggcgaaagtgctagaaccatcaactaccttactaaacatgatcaaaaccagatctaaaatcacataaacacaaatttgaaggaaaacccagtacagatccaaatacagagaaaacccagatgaaaactaagaggactcatcaggggaagaacgccataccagaccctaaaattaaaaggggaaaactgaaaagaagaaaatagtatacctattaatttgaaagacgataaacctgagagttgaggtgctttgcttttgcagtgataaaggagaagcactgtagaaaagagagctcttgtagttgtagcataagaataacaatagcaataataataaaagaaaaaaaaaagcaagcctagtttagtgagtgtgagaaactaaataaagaatagaacaaacagaaaacttgagaaagcaatacaaaatgaaaccggccctccgcttctggtggactattaggcagagaaagaaagagacagagaggggtcaaagccaaagtaaagtttttttcttttctttttcaataaattataataataatatttatttattttttttggtgacaaataatatttattttcttgatgcaattatttcattggttttttttggtccggaaactgaaggcttcctaatcaccaaagagaagagactctctcatatcaaagagtgatgcacttcacacttgtctcccatgcctttttctcttaactgcacttatactctttggaccaaaaattggactcttctcatcttataattattttattattttattttttaattagtgaaagaatgaactgttattagtttataattggactcttctcatgttattagtttattaaaagaaaaaaaaatgcacatacttttttctaatttgattaaaaaaaaaaatagtaaaattatattcttaaatatttttcttatttgttaaatattttatatattattttaggtaggtatttttaagctatgatcaccgtatttactccttttttaggagaatcgttattcaaatttataattattggttgttcaaaaaaaaatagttaaaaatttaatgctttctattctcttcaaaaaaaaacttaatgctttctatttattagacattgagcagttagcaatgtagcattgccattcttctaaaaaaaacaattatagaattttaaacataggcatgaatatttcaaaatttcaataaataaccaacctc

SEQ ID NO: 384047 - DNA, 1780 bp, Cannabis indica
attaagcgatttgtgaatcgaattgcgtattttgttgccagaaacattcgtttataagtttattaagtatatttttagagacttttacttctcttgaattgttattttagagagtgattacttcgtttaatgaagtttgcaaattcagaattaaaaaaaataagaattcaaataataataatgttgatatgatgcagcactaatcaaaaaggtatgcttgtataaactattacaaacttttaaaccaatctaaataataattataattgtaaatcctgtattttctttacaattaatggaattctttgaatgctttgattccagtttgctccattccaacgtctccaaatttgatatacaactgccatagcaacaactgcatataccttcttaaatttttgatattttggccctctccatttcaacactaacaaaattgagtgaggaaagatgctcactgctcttcaatttcccaaaaagttcataaaattggttatggtttagcatttttacttataaattctccattctttttaatggttccatgaatggctattttgcttccaagagaggtcttcagttaaggagatcctatgtcacctcttctctttgttataggcttggaatacctttcaagattgttggcaaagatttccaagcggctagatatcagctatcaccctcggtgcaaagatctgaaacttaaccatctttgttttgctgatgatatcttacttttttgcaaaggtgatattcattctatcaagctcatgctgagaacctttcagacattctcagaggcttcaaggctgcagactgggtctcggatccagatgataggctatctacctcagggtactgcatatataccttggttctaatcttgtatcttggtcctcaaagaagcaaccaatagtgtctcgctctagcactaaagtagagtatcgcagtttggctcttgatactgttgatttggtctggattgagtctttactcacttaagttatagttccttttcaacaaccataacaatgtggtgtgataatcagagtattgtactcatgtctgcaaattctattctccatccttggaccaagcacattgaactagcactactacaaaaacaagcctttacatggataattttttgcatgcgaatgtgaggattaagggagtagtgtctaggtaattttgaagtcgttgggttattgacatgtaagagtgggtagaactctgggtagtcttattcttgattcattttttttttgtactggttgaacacaagtcatgcctacattaaatcatgcttaaagtccttcgtttggagtcattagggttcgagatgatatacttgggtttgtgtcaattattcttgtgttcccaacaaattgttcgaaggtatagctccacgaggacaaaattgtgccttcaaatgatcggtccgacgatgacctcttcaagcagctcttaaggggggtcttcctagtaccatgctattcttttagggcccgtttggtacgcaggactgtattggattagacaggctaatttgtccaatccagtgtttgggcatgttagaagtctaactaatccaatttatctacatttgtctggaattatttatactcatctagcacactgagataaataatcccatgcaaatgagatttttttatcgttttttaaaaatttgattttattaatatattttaaatttaataagatttaaatgaaaaaattatcacacatttatttacaaatttttttatcaaaaacttat

SEQ ID NO: 384048 - DNA, 1869 bp, Cannabis indica
aaaaaaaaagaaaaattcgaaaacaaaagatcaaacaggtaacaggcaaagcaagagagaaaaggtcagaaagtattaaaaacaagggaagggaaaggaagattcaattcgatgaacatagatatgaacatatatatatatacataccaaaaatggaagaaagagtttaagttggattagatttagggagtaaagatttggttagttggtgaagaagaagagagaagagtagttgtttgtactattctactgatagtcatagtagtttatggtaataattgaattggttatgagatctgatgaggagaaagaatgtatttctttcaccgccattagactgtagagagagaggttgggattctttgtctctgtcggtttcttcactatatatatatatataaatataaatataaaagaaactgattatttgtagtcaaacatgaatctttatttaatttaataatagttacaatttacattacgaaatagcaaatgatttttgcttgaattacacacgatcacactcagacacaactttaagaaatagattatcatgtactgtactgttattatatatggttttatatcatttatttactcgtgtagatttgtttttaaacaagaaaatatttggttagatttttaataataaattcaatataatattatatactagtggtttcattcatttcgtttcattcatttcgagaaaatatgtatgaatatagaaaaatgatgtgaaatgaagaaaaatgatactaattataataatattttcaactttttaataaataaaaggcaattaaatgaataagggtatcctatcttaatatccaatatgaatattcaaagggtgaattattgagagaaatagtgtgatgtgttataagtgacattttacgattaattagtgataatttataaaaaaatattataatactcgatacttaattacatcaatagtaatatgatactgagaaaattattaaacacttttagcaatttcaatattgttttcttagttaggtatacttgtcctacaagtactactacaactacaactagttctattgttctagtctagtgttcctatcttatcctatcctctactactagttctactttataattatatttcaacaccaaaaaagacgtcctctattctaaattatcaacaaaaaatctaaaccaaagccatcaatctcagtctcaccccacccaccttataatggctaatgctatgcttcattatttgctttgctttgcttgtacccaaaagtgaggcctaaacctacttaatttctcatcactacctaattattatttctcattccaaatttccaattaattatttcaaaaaacaaaaccaacccatatccatatgaactacatagttagtgcacacatatatataggggtgtttataaaatagctgatccaatccaattcgcacgatccaatccaatcaaatccgcaaagtgcggatatccgcaaagtgcggattggattagattggaaaattcaaaatctgcacttgtgcgaattggatgttgattgacatgtaaaagtaaccgatccaatctaatccacacatatttataacaaaattaaaaaattatatatacaaataatattttaatataaagaaaatagtaatttaaaagtctaatacatataatacaattatattgcaaaatttaatagataaaatgtatattctattcttatatatttttttttctacatacaatttaaataaaattaaatattttttttatacatacaattttttttcttcctttgaatttgttattttatttatttaatgtgttgttagagacataaaataaccataatttgttttatttt

SEQ ID NO: 384049 - DNA, 2702 bp, Cannabis indica
tttaagtatatcaccatgtaatcaaagaaagaaataagataagaatcagtttatagttaaagacttgtatactaaagtacgaggatcatatgtttcgaacagctttacgaccaaataaaaaaaaaaaaaaagtggtaagtggtaaaactttgtgtgaattatttcatatgaaggatgtgtggacatttaatataatatataagatgtatggattattcatttaattatttaggagtttagagatgaaatcatatatatgtatatctcataatattctactctctccagtctccaccatacttcaacactctggacatggtgtaaagtcaaaagagttattgtgattcatagataggtctaagattaattggtgagaaaaaaaataaataccatcttaagaagatgttaaaaagtcttacattaataatgtatagacacttaatacaatatataagatgtgtaatttttttattttttttttcaattaattttaagataaaatcttatacattttactattcaataataataaaaattagagataaattggatttttaacatgccaattggtttacatatgcgcacactaattttattttcatgtacatatagctaggtagatcaattaattaattagctagcactgacagctgttgtgagctgttttttttaattattttttaaaacgtcagtcctcctcatttttatttacttttccttagtattattatttagcaacgttaattaatccaagagctgcatctccattaattttgttatacatataaccaattataaatgtagattattatgagtgttttataatacgtactatacatatatttaccgtactcttctctccaatatttgaagtttatcaacattaatttgtcagtgtgtatatataattaattattatatataaatatcttatatgaatggcatatatcgcattatatatataccatatttaccattattatgttgttagaaagtacgtaattatactcatatacacgatgatatacatcaatatagagaaattttcattatattctaacaatttcctgattgtactagcttctgctctctctttattaagaaacacttgcgtcaatcgtactgccctgcattaatgtatattaatttgcatgcaattttgtttattcaaatacttgggattatggtagagttaatttgtcaacatatatatcttggtcatttatgctagagtgattgatattaattaatttatgagaaatgctaaagagtattagtggtgcctagcaccctcctatgtgttaatattgctattgatctaactaagtatcgggtcccatataatttaatataatagcttttaggaagtaagtatcgctagccaatcgaaatgcaacatgtcaagaaggtgctaggcccactagtacccaataacaatgctcttaatttattaatgaaattgaccatcacgtttatttaccgcctcacaaccattcaatcataaacaagttaatttaattatctattttttaccgtcatttaaattaattaaatcaaccgcttctgtaccccgaaaaataacattggaaaactaataaaactataccagacaaaacaagcacgttttcaataatttaataattacgtctcaaaagataaatgatgtaaatacaatttataataacacagttcatgaaataataaaaatatgtaggcgacattgcataaaaagataacgtgagctagatctgataataataaaaacacaatgtcacacatgtaaataaacaaaaaaaaaagccatgcccagctgagagaggagaagagacactaatattataggtaataatagtaataatatatgtaattttgagtagaattaattattaatgaccaacgccgggactatgtccaggagtggttggtcgaaaagcatcgatttcattcttggtaccaaccaccagcagcggcggtggcttggattttcccttgcgagctggatggctgatcatcatggtatgttgcttcaactgatgatccaccctaattctatgttttcttgcttcaacattcactactaactcatcacacaaaatcatcattacaaataaacacaataatatgcacattttacttgatgatgatttcaccattttcctgcctatgtatacgtacgtactttgaactcttatataaatatatatatatggctagtgcaactgattttatttttgcctagcttcttaatatcgaagatagatcagaagctatatatatatatgtatatatataggtaagattataaagatatatagaaggtatacttggaatgtgttgctccaaacgctatttatagactttgaaaataagcacacagtcacatgcatgtgatgccctttgcttttgagaaatattaataataaaaaactcaaaaaatatatgaaaaagaaaatgaaaagttgagagacatgaatcaagtccaaagtttacggaagattcggaaagatattcgaatacttactgcaagagttaaaagagagaagtatactatataatatatatatatatatataattaatgtggactgttggatcttgtatgtgattaatttaagggttgagattaaatagattgtacacgtaacactactacaatgtaggcttttagttttctttttttcaacccattttataaaaagggaa

SEQ ID NO: 384050 - DNA, 1885 bp, Cannabis indica
tataatattattaaaaaaatactttaatttcaaacttatatgctcgaaatgaaactaatcctaattttattgtaatatacgatttctttgacttgtttgttaccagcttacccgtaagaatagcctatatttatatctttgagtaggaacattaatcatttatatgtaatctatagcttttataactatttagaagtgaaacgataatttctttagagtttggcttaacgacataaatagaagagctctcatttcagtaaatatagtagtttactaaaatatcatttataagtatctaagtattttaagaataaaatacattgaaggataaaacggtaaattttatccctactcgatgtcaactgtccatagagggtcaacgactatttagattgaaattaataaattaagagtacaatatgaatctacagtgaagtcaggagaaattaataaatgagaaaatttacatggtaaatttagatatacttattaggagtttggttacataggctcaatttcccacattatttgggattacatttccttgtagacttaattaattcattaagttaatcaattaaaattctaaaaaaagactgtcttatatatgaattttactaagaaatgacatatttgagaagaaaaattaagaaaaatatttatttattaattaagacactttataggtgtaattaataaacatatttaaatggtaattttatttgataattaattataattattaaatagactaaaattggtattgacataactaggatcagaaaatagtattttcagaaaaagatagaaagtttcattgaatgaaataaatatagcaaaaatcaaacccatttaaccctatagggtattcggccacgggtatgatttttagggccattatctttcctaaatagtccattatacatttaccctaaaccttgagaagatactataaaaggaaggctaaggctttgattctaaagacacaataccatagcataacaattaagaaagaataagtcttccttttctctctaagatattcaagtttctctttctctctcaaattttgagtacctttagtattgagatattacacatactattcaaagcaatacttatatctttgtgaaagactgtgtagaagaagttgtttttaattttaaggaagctattcaggttcaatacttgttattactttacaacagaaacgaaaaaaagttagagtactaaactaaaggacccatattattccactgccattatgtaagtaatttgaaacttatatgtgatttattgttttacatatttagaatattagattatattgtatataatcaataatcaatatacatattagtaaattaaaattctaataaaataagttctggcagacgtgccttattagatagtcaccttttaaaaggttttttggaaagaaaaaaaaaaacttcagggaactaagttcctatattattgtattgctatgatttgtgttacttccttaatggtcattacccccccccccccccccccccctttccctttccccctttcacgtaataatttgagtcataacatggcacaaatggtgagctaaatgggctctaaatatatctgtatgttgcaaggggcaatgaacgagctatcactcgggacgatgccaagaagccttagttattgtcttcttgctttaaagctaaatcactggttattttttctttaatttaagatgattttgttttgaactatgaatgatacttctatgttatagcgatgtaataaaaaccaattgagctatataagggaaatttgaatttttatgcttacattaggggaaattttccctaaacctaaaataaggggtattggtaaaatgggacaa

SEQ ID NO: 384051 - DNA, 1635 bp, Cannabis indica
atatcttgaatattatactgcatggatctgtgttgatataggtcttttttgaccactgctttgatctgtggtgagattgtagatttctccattaatttgtatataatttactaatagaaacaaattgatcttctaatagacttttctaccttatttattttttgttgttttgttataattctttattatttcgtacgtgtatgaacaatacattttttttaacaaaaaatcatcagtctaaaatatattgtggttttgacaatgaggcccattcattctgcatgtgtattttcatttttgtatgtatcaaaggtttatgttgatgatttgtgatggcacatatataagaatatatagacaacagatatgttggtttttgattttatgtatgtaattaattatgcagtagaatcggtctcataaaatagttttcttatatatataaaaataaataacttatttaattattgcataaatcactgtagcataattaggatcagctcatatatttttatatttatatatatataagatgtaacaacaattatgttgatatagaggattatcttatgtccgtacctaatacagtatggatctagtctcgcttaattgaacaatatttattaagtaattagttacttttcttacaaattatatatcttccgcaataaaaagaggtgattaatctctttttgaaattcaatctaacactaatctcaagtcaaatctctcgcacatacaaattaaacataataaactaaaattgtgcagcacaaacacaagaataattaattaataatcacacaattcgaactagctagttaaagaagtaaaataaaaaaaaaaagacacaaccaaataattagagtttgccaatttctccaaagttggaaattaagcctattcctctttctgaactcccaataatggattcagattcttgtactattacgattcaaatgagaaacttttagaacagactatcaattaccacactttcgagatattcatctcacaccaacagtaagcattttctctctcactacaatctaagatccaagaactcttcactgatcaacttctcctaagcctttatatatatataggttgctcataatcataaacaacttgggtcatacccaataatctcttttttcaagaataataatttagatatatacacaatttggtatctcatttgagactatatatccttgtataatatttgtataaagtcaaattaaggagaaaaatagcttctttcttataaagaaattaagaaaaataattaagttttatttttcttctctgatgtacgtattgttattatttaattatttatagaattgagacaagacaaattatatatgacattccaaatggactagtagatatatgcttgggcggctacttgttccaaacacacgaccattgtcaatttacttgttactctttcattaataatttataattaaataacaagtacgtgtacacacagttttatcaaaattaaccatataaaatatcacatattttactaattttccatcatatttctcaaatcaccaaatatcttataatattctaaaacttaattgtgaataattagagtttattatatattatgggattaat

SEQ ID NO: 384052 - DNA, 2013 bp, Cannabis indica
tttttttttttgccaatttttttaatattttttcagccgataaatcaatatcaacccatataatgtaaaaatgagatctttttctaattagatagaaaaattaagtttaaagactcaaatttttctaatattacccattcataagtaatacccattaaaaatgtacctttttaaaatcgtgttactaaaacaaaattataataattataaatgtttgataaaaatttcttttaatttacataaccagacttgggatcccaataatattcacaaaagatactacaacttatttatttacttacataacagtcgatctaggaacaaatctgattttcaaaccaaagtataacttcccaaaagatatgtccaaacccaataaattaatctgatcagacatgtatatctcccgtcataactctccaacacatggttgttggcctttgcctttccttaaccagcatatatagcaaccatgagcaaagtctcagtgataaagggtttacaagtaataaacatgtacaataagcattataagaatacagaggcatcatgcctttctaacaaagatgaatgtctcatgtgttcggtataaaaccctattagccaaaccacattagtactctcctaagcactttaagaacaaactgttatatccatatttcaagcaataaataaatagatttagttgtataatatgtgtaccgaattccataattaatgaagctaaccgtttgtgtaacgaccgcataattaaacatagaaattaacagagacttagtgattaaattaatgttaatgattatatgtacattagtagaaaataagtcctattgtcattagtgatataatttctttattatggagattttattaaattctaagtgtgtcatacatgttgtatatgaaaatgccattttaatgttttatgcccaataacagtaaaattttgacggtttgaccaatatcgtcactttgatacagtttagcatcttagatttagcgaggcaagatttatgacagttagaatatcaagattatccaggatatttaattatgacccattttattggtaggattaagatttttggtctagatttcttttcaagtaggagtacttactttattggtaggattaagatgagctcaaagtgtttcattttcaaacattaaattatattatcgagcttttctagggtatctcattatgttagtcgtaatttattgttgtggcttatggattggttaaacatgactttaggatagataatgagttgtgttgaatgaaagagacacctcctctttttctctttggtgctttttatgatcatataaagggtgtcaatacttttaattattttagtataaaaacaagtatagatcgatcccacgaggactatgttcaattattattcaagaattgaaaaaggggaatttttaatataaaaaattaaacaacataaactagaaagtgaataaagatagataatatgctataaaaaatagttaagagttaatctccaccctcaacaatcattcaagatcaataataataacaattattccagtttatcaattaaactattaaccctgtagaaaatactgaaacaatcaattttctcaatctccatattacaattaatcaaggcgaagtgctcaataattaaatatttttttaccaagcaatagatccactaaccatgaaatctatttatataatcatttgatgaataattgatgatgtagttgttggaatatattttaccaggatctagatttactaacaagtatgtttttaacattctaatatgaatttctaaaatgatgaaaataaacaaataaaaggtatgagaaaccttacagtggttgcagcggaattaaatgactccttccgctcagatctctaacccttgtatcttttctgtagcagagtatcaccaagatctgagcccgattctccttcttgttgtttggattttttcacagtcttacatactatgattgaggactcacttg

SEQ ID NO: 384053 - DNA, 856 bp, Cannabis indica
aactaaataaaagattagagaaatatctacactgataagtataattatcaatacactaattggttactgttaatattagagaaacaaatggctataaacaaaaacatatagaactttgccaataattccacctgtcttgttttgttgtctaaccaatgcaactaagacacgtgtatacaaataatgatgctcattatttggtttagaagtagaacccacccaaatttaaacgtttttcaactattattatgactacaattcaattcattatcttaactctgtcattttaattgttttgttatttttttatgctctttattttaaaacatcaaattgctcctaaaaaaactagaaataataaatatgccttcaaatggttttcaaaataaaataacaattaattattgctattagatctcatacaatacaaaaactaataagttcaaaaatgtaactcggtaaataatgatggatagtggtaacttacttacatcactaattatggagatagagttaggtaggttttgtgattgatcatcaggaatcagtaataattcattttcctaattaccctcttttttatttattttaattttcttttgaacaataaaccccatattctatttaagcaaagataacatttcaatttgcttttatttatgtattttcttaagagaaaaaaaaactatcataaatgaaattcatttaatgcaagtttagaattgcatttttatgtaattaatacaattatacaactatatatatatgatttgaaaataaaaaaaaaactctatatttacggataatgcgcgatcaaattatgtgttttggtgtcatttggtaacacttttttaat

SEQ ID NO: 384054 - DNA, 2671 bp, Cannabis indica
ctttcaagtattttagaatgtggagtaattaaccagattatgataaaaagattagagaggtttgggctcatcaaattaaaggaaccaagatgtacaagattactttgaagcttaaagcattgaaaggagttttgaaggagattaacaagagtggtttttctgatctacatgctgcagaagccagggctaaggattttctagctgactgccagacccgagaaatcaggtgctgcaatctgtagaaatggaggctagacaacagtttttaaagtcccacagtgatttaatatcgatgttgcagcaaaaggcgaaagtctcctgggtgcaaaaaggggatgataacacttctattttccatgcaagccttagagatagaaggaggcaaaatagaatttggtccataaagcaataagatggcactcgaactgagcaaccagagcaggtaatagatgcttttcttagttattataagactctgttgggtgctaaaatggatcatggaacgaaagtgatgaaacaggtagttaacaagggaccaaaagtacccaatcagcaagcacaaatgttgttggagaagttcacaaaagaagatgttaaagttgccttatttgcaatacctggaattaaagcgccaagctctgatggtttctctagttattttttccaaaaaaattgggagctaatagggaatgatatatatgaagcagtggatttttttttattacagggaacattttgaaggagataaattccactgtgcttactcttatctctaaagtcaagtgcccaaacactgtaaaggacttcagacccattgtctgttgcaatgtcatatacaaaattgttaccaagatgttatgctctcagctaaataacatccttcctggccttattgctcgcttccaaagtgaatttgtaaaagggagattcattgctcacaatgtcatgatatgtcaggacataataaggcactatgggaggaggaatgctaaggcaaactgtatgattaagatggacctgcagaaggcatatgacacaattgagtgggacttcatagaagaaattttgaaggcctttcagtttcctatccatctcatcagcttaatcatgaattgtgttaggactccaaggttctccctcatgtttaatggtactctacatggattttttgaatccagaagaggtctgagacagggagatcccatatcaccattgctatttgttatgggaattgagtatttgtctagaataatgcaaaagattagagctagggaagatttccaattccatgaaagatgtggtggaatcaaactcaattacttgagctttgcagatgatgtgctacttttcagcaaaggagattttaaaagtgcctatctcatgttacaaggattgaagttattatcttgcacttcgggtttccatcctaaccctacaaaacctgctgcctatttcagtggtatgcaagatggagaaattaaaagaatattggacatgtatgggattaataggcaggatgtacctttcaaatacttgggggtttcgatatgtgctaaaagaatatcagggcaggattgcatattgctggttgagaagatgacttcccgaatcaagacctggagctccaggaacctctcttttgcaggtagggcagtccttgtgaattcggtgttgatggagatccactcatattggagccaaataatgattttacccaagaaggtagttaacgagattgaagctatttgccgagctttcttgtcgaagggacagaacaccctgaatggttcaggtctaattgcatgggaatctgtttgtcaaacaaaatcagagggtggtattggtttcaaaagggtagcttaatggaatagagctgcaatgttcatagtgtgtacattcgggaggaagattggtggggctacaaggccccatcacaagggagttggtactggaacaaggtagtggaggccaagaaccaggttaaagacttggtagatgtacaacagtttacccaatccaagtactacatctccctcaggtataagttacttgttcctccccaacatagagtccataggagtaaggaagtatgggggaggttcaacactcttaaaaccagtttcatcatgtggattgcaattcaaggaagattgaggacaaaagagagacttcacaggttcggaattattgatgacctcgtgtgtgtactgtgtaaaactcatgttgaaacttgtgagcatctcttcttttcttattcgttttcaaggcagggacttcaaagaatcaaagaatggttagggtggaatgcatccactttgaatatcacaagactcacccgatggattgaaagaagcaaaggcagcaaattcaggaagcaagtgctctcggctgcattgtcaagcttagtctaccatgtttggaagactaggaatgatcaaatatggaactcgaaactaggtaatgtagacagagttgtatgtacagttaaagaaatggtaaaacaaagaatatatagtattttgcctaagaaagttgggcatcaagagttggaatggtttagatccttgtaagttcgtagagttatactcatattgtgtattacatacaaagttttgaggtccctcaattgggatgctcttaggttgtaaattggtttattggagtaatgaaa

SEQ ID NO: 384055 - DNA, 2182 bp, Cannabis indica
ggctttgtcataaaatttagacaaaaagcacaagttcgttcaaataataaatacacccttaatccttggtaattagttgctacattttgttatagtagtaatattttgaaaacattagtttctatatgcatgaatgctacgcaaatatgtaaagatgttgtaattaatcagtatcttgttcttgttcatgtacgtcaacacactggtatatctctcttcgtttatgctcgttaagtggtaggctctttctgcacagttccaattccataagctgtgtaagttaaacaagtagctttgacattgacataaatttattgaaaagtaaaaaccagtaattatcacctttgttgttgtattttggagtaatcaatctcaccaaccacaacagtctcttgatcccctgatgttgcaattatctcacccgactgccatgttaccaccaataaagccattttaatatatcttttcgttaaaatagtattctggttgcttttcccatatatgactaaaatacagaaccataatagttctaaatgaagggaaagaaacgcagaagtttgtgacagtaccggtccaacaagtgtagaatggccccatatcatataagaacaacttgaagcccgggctggtgactgaaatcacaaagaaaaaaattataatgttttcaactcttttctaggctaatcatcaattcaatttagatgatttattatgtagtgaatgcagtttttttatacacctgattatcagctgccctgaaaattggaaaagatcaaatcagtgcctgtgaacagctcccagctcccacaacagttcaccagtgctcatgttaaatgctcccggatagcatatcatatatatgaacacctttgacataaaattaaaaagtaatgatatcagtacatgaaacatgtacataataagattaccgaatcacataataagacttttcaactaaattaagaacctttttccctgtatagcatggcaagttcaggaaatcgaatatcatgacatatccctattccaatacgaccaagttctgcatgcatattattaacactacttaattatgaggaaatattatgatattatttacatttgaatcataagtaatttttttagtaaattaaatatatttgttttatatataccacctatattaataaaaaattgtatattatcctattaaaatataaatttatattctgtgaggctgtagagatatgcttaaatagtcttatagttaaacatacgctagctatatatgttacaatttaggataatgagtggagtagctatgtattttactatatatttaattagttttcacgcattatcagtgtaggagtctttaatagttaaagagcaccaaataaaaaataaagccaattttaatatttgatacacctttatttttagagcattgctatttggcaattactagggctgtccagcaccatttcagataatgctttgcgattaattgtaaaagatcttacttttagtcacaacaatatttctgattaattaaaagtaaagtagttgtgactaattataaatcataatttgtgactaaaaaatctattgtattaatcacataaattacaatttgttaggattaaatgtgtttttatacttgttatgactaaaactaaatttgtaaaaatttgtatcaaaatactatattttagtcacaagtaattttttgttgtgagtaaaaaaaattaaaatcgcatttaaaaaaaatttatgttattaaaaaattaacactaaagctagtttcttttttatagtaattgattagcaatttataaaaattattatattactaagttatatgatactgatatttataacagacatttaaagataataaatactattgatacctttaacatttctcaaatttttattgttcggcatgcatgcacctaagacgtcataaaaataatctcaatgatttcaagataagtataggggccagaaaaataatcaaagcatttcttagaaatgagtaaaaggaaatttgcgtgatatttactgttgaaagatatttattaatcaaagcatttcttagagcactcccatgtacacatatatatatataattaagacttaaaataattaataaattacagtagaacctttatttaagaatactctattcaagaataacctc

SEQ ID NO: 384056 - DNA, 1291 bp, Cannabis indica
aattgtgctacgtgtacactatgatcgcgtagatatacatatggatagtccaatatgacacttaacacttaaaatagatgaatatattaaattgctaacagaatacgagtattaagagttttgttgctaaaatttgaattttagagactaagtgaaagcgaaataaaaatatttgagattttaccacaattaactttctttatatactctttttaaagtctaaaagtaaattatagacttgcattattattaaacacaagtagataataacgctactataagatgacatttttgttaataaataaattttttaataataactattactttaaaatatataaaacttgatatttaattatactaataatattataacactttataaatcatcgcgatgatcactagtgccctttaataattttcatgtgtcaattttatatcttttttacaaattatagaaagttatttgattacctaagatgcgtacaaagggtttgcctaaacctaaaagccgaatagacaaaattaaacttgtaaaatacaagtgaccaagagtgaaaagtctgctcagtcacttagggagcaactatacccatacaatcattggtaaaaaacaagctcaagcaaaaattaaattcagacttaaaggaaaatatttatattaagataacaaaccaggataagttcaggattaaaagctgcacggctagtcaattgtcttaagtaaaatgaaaatatttttccaagtttaaaaccgcttggtcggccacattgtactaaaaaataggcccttaggccaaacagatcaaaaaagttttaaaattttactccaaaggagttccatgctctttgtattactcggatgaatcttgagtggcaacagttgaatcttcagcagcagggttctcgtgctcttgggtggaagaggagtccttatcagccatcctttcttcttccttggctttctgagcctcgtagaagtcaaaaaagctagtacggagatctcccttaagatagtcgaagttggcctctagattcactttccaaaaatcatagaaatcgtctaaggcgggtttgtcttaagtagttttcatattttgcattttcggtgcccggtattttagaacccggcgtttggctcagtagaaatcacaacttagcatgttagtagtttggggcggtttattagacattgggaatgtcgggaatggccgggaatttagaagttcccaaaaatacccctttagtgtgttttatgtgattttagtgtgtaggggcaaaatggtctttt

SEQ ID NO: 384057 - DNA, 1587 bp, Cannabis indica
aaagcaagtttattctctcaagcggatagggaaattttgttgaaagcggtaattcaggccattcccacctatgtaatgagctgttttcgctccctaaggaactaattaaggaaaatcatggaatgatggcgaggttttggtggggatcgttgcattcgaagaataaaatccattgcgggaagtgggaaaaactttgcaaatcgaaggacaaaggaggaatgggattcaaaaatttggagaaattcaaccaatctttattagcgaaacaaggtaggaaaataattaacaatcctcagtcattgatggcccgtgtcctaaaggcgtgctactacaccagttctaattttttggaagcaaaagtaggtggatatggctcttttatgtggaaaagcattctttggggccgacaaatcatcgacaaaggcattcggtggagggttcaatcgggctgagaggtgcgcattaatgaagataaatggttacctcgccccacaacattctcactccgcaccccagcaaaggttagtaaaggagctactttagatcaaatgaaagatgagaacggttattggaagcatgagctaattgaacaatgctttcacttggatgatatccctcttattttgggaatggccccttgctttaacaatacaaatgaagatcatgtgtggcacttcaccccaaatggaatttacacggttagtagtggatacaaagtggctgtctctaatgaatttgaagctggcgcatcttcagataaaatcacaaggacttggtggaatgagatttggaaaatggaggttcctcctaaagttcgaaacttcatatggcaggtttgtaatggctggattccagtgaacacggtgctaagatctcggggaatgaaaattgactccatgtgttgttggtgtggggctgaagaagaaaccattgagcatggcctctggttttgcccatcaattaaatggttctggcaaaaatttcaggtgtggaaagtgcttaaaaactgtagaggaacaaccttggacatgattctccacatacattagcaggtaacacactcaaattttgttcttttcatcatccttacttggttgatatggaataggagaaacaagaaacgcctcaatcttaaactccttccaaatgagttatgggaaaagtgggctcaattggaagctaagtttttgatgaatcataatcatttgaaggataccaacctggaggcgattccaaaaccaaaggttcgatgggatccgcctactcctggagtttactgtattaatagtgatgcaagtgtcccggggcaaggttctcttagcggtttgggagctttaattcgaaaccacctaggcaaggtggtggctgctgaaattcatcagaataaggggtcctcttcggtggaagtggcagaggtgttggctttaaggatgggcatccaattagctattaaagtggaggcctatccttacattatccaatctgattgccttcaggttgtgagttacttgaatggtgtttcccaagccaaaacggactggagtgcattgctagacgatatcagagagtcccctgattttggccact

SEQ ID NO: 384058 - DNA, 2419 bp, Cannabis indica
ccattggtggccttttctagttttgcataagtgaaagtatgcaaattgattcctggtatgaattgatctagcttactcaccctccttgctttatggcgaaaccgatagaaaaataagatggctgctacaagtaaaaggacattcacaaaaactgagctgcttaaaagtattgatccaatgagaactagtgtggattgatctttcttatttgaatttgtgcctcctgtcttcaaagttgaattgtcttttctaattttaattagagatttcccaccaagagtggaatctatcctcccatttgataaagggtgtcccttcttccaacactcaccatctctaaaaaaagcaagaacacaaaaacaatcagcaaggcaagccttcctacagaagtcctcattcaccgtttgaaatttctcataatcactctcaacccaatctgtgttttccatgctaatgaaatcgaaattatcagcatctcccgagtcttcatcacaactttgagcttcaaatgtctgtttgcagcctttcatctcatcatttggatcaatgaaggtgtaaccatttgggcaatggcaatgtggtctctgatcaattcctagcaaacagtagctgttgtaaccacaagctccacttcctctttcttcttgaattctcaaacatttattggaaggtatggaagttgatgattgagtccatgccatattccacccactagagtttccaccattctctttcgggtacacatattgcctaaaaacaccatcatattcaagaattgccctttggtagaaattttgtgcttcattaccatttgatgataacatgtttagtatggtaccattctttgcttcaaggtatatatagcctgattgattgaagatgagttgaaagccactgtttatagtgttgctagaccaataagggaaattttgagtgtcaagtgggaaagttcttgtgtaaagtactaaatttccatctgactgtagtatgaaatggtatcttccacttgaataatttgtttccgaatagcgagcaacaagcttcattttttgactcaaagtttgcccaaccaacaatgtgtctgttggcttagtaaaactctcccacaaattgacagagttgttgtttgccaagacaaagtttcctgtgtcaagcatggccccataagcaagatcagttcctgaagtaccggaactccaaatctgattacctttggggtctttgagaacaagcccaagttgtgtcaactcgactttggatccttcttccacaagattatctctgttggctgaccaaacaatagttctctcgggtattttattgaaccaaatggctagtaggaaaccaccttttccaattttctggaaaccaaaagcaaaatcaccagatgatgattcccaaaacaagtccttattagttgcagtaagaaatgagcttaaagatatgtttttttgagtttgggcagtggaggaacatagcaacatcatgagaagaagaaagatgtagataatatatggttgtgttggtgataaagccatggttttctcacacttaagtttctgaagaaattagttagttctatgtatgtatgatcaaatggacttgttatgaacatgttttaatgtttccaaagtcagagttagaattcacctaacatgtttagatttttgttttggttgacttgtgttttgtcactactcactactaattccttaaaacacattaaccaatgctttgtaatcttctttttgttgtagtggaaacattggatctcttgttgaaaatgtcctaaaaaaaaatcttcatttgtcgtttgttgtttgttgttttctctaatgatcaaaagctagacatattccaatgaagactaatcctttggattaaaaaaagtctatttcttcattatcttatgctagtttgatttgagtaatacctgctctttcaacaattaataccttatatacatagaatgaatcatcatgtttttttataagagaattacttatatattttcatgtttcaataattcaatggcaaaaaaaataaaaaacaaaagaaaaagactttgttgttaacatctaataccattatgtttaggtcggccaaagctaattacatcatacaagttagttatataatactttatattaattttcaaccttagagaatagaatgtcttctactctttgtactctactattttcatttcttaaactttgtttatgtgttgtggtcaaagtgggcgacacagcatgttggctttgtcctaccaaagatttcgcctttggatttcaaacaaatgcaaaatgatcacttcttgctagctatcatcatacaagttagtcaccattgtttagtatatgctgttaactaatcgattacaataaattggatcggattttgcagttttttcttctgc

SEQ ID NO: 384059 - DNA, 2472 bp, Cannabis indica
tattttagtacttttagttaaaactaaataaaataacataaaatcaagagttactattaaaaggctttgttgttattattctcataatatcactaagttataatttttttcagaggttttaacttttaataagcactcttattcagtgagttaaaataattaagtggtataaaatttagttaaaataaatgtttaaaatgtttactacatcaagtgaaatataatattttaaacttttatacatttttcttagttaaatgtagctcaataaataattgtgaggaaaatatattttttatttgtcttctttctctatatctattattttaattaatttttttagtctttctttacttttttatgtcccttttttgttttaattaataaaatatatgtaaatatataatatttaaatggagagaaaaatgtagagtgtaatataattgtcatataaaataaaaaaaaactaaaatttaagtaaaaatagagtaaataagctaattgataagaatactcttagttgaatttacatgtaaaaagtgccatatatcaatattactcttttgctaatcaagtaacataattcattattattaattgttttctaattttggtgtacaaaagtaatgacatgaacatgattgtcaatataactacatgacatataattaaataattgattaattaattattattaattaataattaaagctatatgtgaatgtggaaaattagttcctttttgtgcaaattatataatagtcaagttcatatatgagtacatgtgtttgattaaccttttttttatggacttgatttgtcattgaaactctccatatatctcttatccaaaatccaaaattcagggtttgcttacctcataatattaataacaatttaataaaaaattaattattattattaaattattatttattttgtagtgtgcatagaatagatagcttcaaccttttctttggggtaatcatctcacctttgtattattttctttctctccccatatttcaaaaacctaagctatatatacatcacaatatatatacatatatatctcctactttctctctctagactagtagttattactagtttctatgttctactatacttctctttttctcatttccttttcaatttctttctttacccaagtctaagaaagtgactcacaactacttagaaaaccctagccacaaagcttcttctttttttttgagttccttttatttttgggtttaattttttatttggaaaattacaaaagctaataataattatggagcaatgaaaatgtgataaattaataataagtatgagtccttaattagcataaaatatgtatatagtcatccaattttatatatggtgatggtaattaatctttagaaaataacatttaagtctttttttagtaaatttatagataatgaatattgaaaaaaggtaaacaaaaaatcattggagaacttggaattattttgttaaaaaataaacaataattttttatttatctaattatttaccaaataaattctatcatatgatgagttaggctattatttataattactagtcggagatctcttaataaaggttgagtgtcaaaatattttgactacaaacacacaaagtaaaaagaaaaaaataataataaagtcataattattaattagccaaaaaaattgtctagaatattaattagtgtccaattaatatgtataactataaaattattgaaaatttactgatcagaatcaatatgaacaagtaccttactatgtttttttattgctcatgtagagtagtaatatagctataaattaatatatttattttcatttatgtttgacaacagtagtaatatatatatatagctatatataattaatagactctttattattatctggagtcactgttgtgtatgggactagtagtaattaattagtttcatggagtttaataatatattatatgtttgtttttattacttatattctatatgtgtataaataggaattttgagagtgatatatatctttcaatttattccataaattactgccttaattagttacagtctatattttccatataaaatacctatatatatatatatttatactaacttaaagcttttatgtctctctttattaaatgctttggaaatttgactgagaatcactaacaatataaggaccagtaccacagcatatacctagttatatattctttaattttgaataaaaagattaaaaaaaattagtacttgtcagtatgctatatagagtgacaactaaatatatagggcaatgaatacatgatattaatatttatatagggcaagactatggtaggacttagcataagttccctaccggtagggaactttttttgactattgattttagatcatgtggttattaagatgtaaggcttatatttttatga

SEQ ID NO: 384060 - DNA, 3376 bp, Cannabis indica
tttttaaaaaaaaaaaaatatttctgttatttgaatttggttctcatcgtttttctcttgaagattttagttttgttttaaatttttctactctttttcgttgttatgctaagttctcggtttccgttttctgcgtgttcttttttgtctttctctcgtctttttaaaaattcttcactaggttgacctaaatgaatgcgtaacgttttgaggcatttacggattaaaatatcttagttaaaagtttttgatctgtcatcgatctgtatttccggcctatgaatcccagtctcttcatcttatttgtacagaaatcaaaaatccaaagttttcgaaacgtgtcaagtaacaatctaaaattgtctcttggggctggggtggtttgacccagatttagaaatataagcaagcgtctattggtttttcgtgcattaatatttaattttacctaatttagctctaattgaacgtttttaaagagttaatttaacttatacgaaatgtagttgtagaacgtgccataaggcgtctgtaacccattatcctaaattggatttctagggctagaacctgttcttttgtgtttggttctgaagacacgtatttacgtttacagctaagattataaagatggcggaacaactaaatattgtgactattgaactacatgttcacactgctcgatggttaggcatacaattagctccacaaagtttgagtttccagtctcccttaggcacttaaatagcaattgtttttattttctgctccccatagttaggcaggagcctagtttggacatatctacaccaattcctatgtagctgcaactcgttgatgctttaaagtttcaccttaaacatgtagttggagacttggagtgagctgttctttcagaaaatgttgttgtaggcttctgtgtcaatcatatattatatatgtatatatatattttgttccatctaaaagcatgcttggacatttttcatcaaatggagtgatcattttccatcttcactagccattgtttctccttaatgcatgttattacctaagagcgaggtgtaagatatgaagaattttaagcagaaatgatcccaaagaggcataatgttccttggtgcattttcatccgttgtcttttgctttatcacaaatgtaaatgcatttgaatctatgataggcttttcaaatagaatatttctgtaaatttctttgattcacttcacaccaaatatcccatgtccgtggctctgacagtgaacttttgcattattcaggaaaccttgttcagggtataaaatgaaagagatgactggtagtggaatatttgtaggcgatggagaagatgaggaagcagaagctggtaatgccagtgctaccccaaataacaaaactggaatacgtatgtaccaggtacgaacaattgttgcattttaatagcattgcctatttctatggtaatatcattttggcgaaacctatgaggtaattttgtattttaatggtttaaaattccagcaagcgatggctggaattagtcacatttcattcgctgaagatgataatgtttctcccaaaaagcctgtatcacttcctgaggtggccaagcagcgcgagctgagtggaaccttggaaagtgaggatgcaaatttgaagaagcagctttcagatgctaaatgcaaggagcttagtggacacgacatctttgcaccccctcctgaaattttgccgaggcctactactgcgcgcaccctggatttgagaggacacatagatattggagaatctgcttcacctgatgtaagtacttcagtcaaaatttctagttctactgaatttgtgtgaatgcatgcatattatattagtaatcatcaccatagatcaattgctgattcacgtacagattcacttcttacacatgacattataatcatcttaatttgagattttttttcacttgggctctctccaattttgacttacatgtgggagtgcttttataccatcctttaaacctctaactgggtcgaaacacttcaattcttactgtagcccgctggaggtcagagcactgtagtttctgctgatgaaccactgaaaacggcgaagaagatatacgacaagaaatttaatgagctctcagggaatgacatattcaagggggatgctgccccatcgtctgctgaaaaatcactaagcgtggcaaaactgcgggaaattagtggaaatgatatctttgctgatgggaaggtagagtctcgagactaccttggtggcgtacgcaaacccccgggtggtgagagtagcatcgccttggtttaactttgttttaggtggtggtctaacaactggggttgtatttttcaatcctttggtttgttttcttcgcatagtggggatgtgttattatataattattgttattattacaattattatttgacctttgtattttgggttttgggaggaatttattgttttaggttttaacgtgtcgtcggccggagctatatggagtatggactattacatctgctaattgggttgtatgtccataattgttttttttttctttttctctgcgtgtcttaatcgaatgcttgggctgtctatttacgaggtttattattttcttggcctttattattatttgaagtaaaacggctaaaatatattggggctttttacgcaagtgggcttggtgattttgtttaaaactcttatgtgagtcttaggacgtgtttctgtgatgttcttttctattttaccttacaacgttcatgaacgttgatactagtaaatatataagtattgttaatttcatgcggaaaagactttacctatggctacattttattatgatatattcttataaagaaggtataacagataaattttttattatttaattttttatatacagtagatccatatagtaattaagttataattttgattgattaattgtaaataagaataatttctaaattatagttatccatacattttttaagtctcaatattaagaacttacacctctatataagaatataattatatcataatgaaaaatatatatttggaaaatttatttaagtggagttaataattttattctaaattgtaatacataaaaaaaaaatattatatttactaaaataattttattatcatgtagtattaaagatttattattgttattgatattatatttaatactttttggcgttttgacttttatttttctaatgtatttctatttactttaatattttcacatccctagtcatttctaaattttaggggaaaatttccaaaaaaatgaaaaataaagattaattcagataagtacctaccaaaatataattaatgt

SEQ ID NO: 384061 - DNA, 4231 bp, Cannabis indica
aaaatgtataatattaagtataaggtggagaatataataacccatattattgaccatgttttaactatataaatacttccttacaaaaataaataaaattatttgagtaatatccaatccttaaagcaaaagaatcaaacacaaccaaaaatagaaataaaagattgttgaaatcataagtaacaaaacacttttctcattacaataataataacaataattgtaactacttcattacatgactatgtacacttcttccttttttttagcttatgaacaaagttgagtaaagtaaacccaaagccattacaacttacaacccttctcttctctttcatcaccatttttttcaaatggtaaaataaaattaacaaaaatgaagaatttcctatgttacaaacttacaatactatgttgttgttcttgttgtttttctatactttcacatccaaaatttgacaattatcttggagagtggttttttcaagcttgtctttgagattaagtgatgtgtaaattgacataccacatagagctgcaacagctccacaaatgctcacaatcccaggatctgaattgaaaatgaggtaacttcccaatagtaacacacatgttttgaactgtcctaggacaacatgtgatgttgctgaggttgccctgcataaatggacaaaatcaaattcttgtctttatagtttaagaaaataagtttcccaaaaaaagagtgtagctagctcggatttcgagtatttcttaggtatctaaacctagatacaaagtagagatgggaacgggattggggaacgttggtttttgaatttaccattctcgttcttgttcctattcatgtaccaaaccgttaaattttacgggttgggtatggttttcgggtgcgatacatatacataagtcacacataagcttgacacacacttatatagtaataagcgagaccaactcaaataaagatgattgtttgaaattacttgttaggtaagtaaacttgtgcacaaaccgttaaatattagggttgggatgattttcgggtgcaaacttgttacacaaatcacacataagcttaagtcagttttaataggcggaacttatcttaaataaagatgattagttgaaattacttatcacgtaaatgtgttaagtttatctgtgaatcattactttgttgaaattcttttaccgtcctatcttaaaatttctaaaactacacttttacattggaaactacacttttacggcctccaatttctgaaggccgacctaaaatattgtaaggttagacggagatagtctaaaaagaagagaatgaaattgaaaagtaagaatgaagaaaagtgtgttgaaaagtcatattcactcacccaagtgctaaagcaccagaccattgaagaagaaagccaagtaaagcagagatcataattgcacaagtgttattgaaatcccaattgaatgataatactcctggtgggtctaaccatggcatcaaagttaccaagaagaagattgttattggggttgtcttccacataagcctgcatataaatatatatataaatatttgtttgtttgtgtttaattgtaacaataatctcagctcataataataacaatatttatttatacttacgccaaagcagtccaattggcttgttgttggagattagaccaaagaatcttgtttattccacttgggattatccatgcaatagcaataatagcaccaaataaattgaattctaaatctgttactgttgccactgctacacctgctgaaactaccactagagccacaacctgaaaaccaatcaaatcaaattcaatttagctccgattgagattttcggtaactaatgataaagaaaaagtaagagagattaactgatgtaataataagacatcacaagaatttttaagttgttcgagtattaaaactatgacctatatattattgtgctcgctgaatttttcagctcgttaaaaatattccctgaactattcacaatgtggtaaaatgatctttttgtcaagttttttcacactcgacaaatagaataattgtattacagttgatgagtgtttacaacaatgacgattctttaggctatgtttgaaaattggatttcggcgagtaaagaaataggtaaggaaaacttagaaagaaagttgcgtaacataaaaaattttaacttttcataccaagttctttatttttttcttcccctacaaaatccaacttacaaacataggattagagtaatatctcactattttcagagtaattaatggaaagaatctgttaaaaaagtttcatatgaagatatgtttttcttccttaaattatttacttaccttttgataagaaatagatttcttgaagagaataaactcagctaaaacaatggtgggagtaacagcaattttagccatttggtaaaaaccaacactgcatatcatatcatatcatcaaatcaaaacaaaaacattatcaaaataaaaaaaaagggttattattatatatatttatcagaaagattccaaaaatcaaaacctgttatgttgaaggcttgtattggctaaaccagaggcaaaagccatgacagcacccaatgagaaaagagaagaaaatggagttgtttttgaaggaggagacacaggtaaaagtgagaatgttttgaatattgctagtaaaatccatgctgttgtgtaatgaatcaaagttagaaatattggaaaattgaatccaactcttcccattacctgaaaacaagaaacaatcccaaattatccaaacaatcaagatcaaatacaagagtgaaaggggttttaaaacttaaagaaccaatgtaaatatccaactcttctaaaaaagactgttgtttataatgttgaagaaacacaaatctgtagaaatgtaaagatattctgtttttaggtgtattgtggaaatttccccgaaacaaaacccgaaatcatccaaataatcaagatcaatacaagagtgaaacaaaaaggggtttaaaagcttaaaaaaccaaaccattttattagctaaaatgatcccaacagccaccatgaaattgaaactcattgccacaataggtccacaaaatctctgttgttggcgtttagcaccttctgatgttctaatatcattgtaaagagtacttctaagctcttcaagggctcttcctgctaattttttcacaaagacattttgtcaaacacattaagatcacacaataaaatcaatgaaatttaaaccaaacccagaaaagaacagagctttataagaaaaacccagattcatattcacattatataaatctatatatatatatatacctgcttctccaacatcactatctttcttttgataaatttttgaagcttttaatgaaagaaagtaatcaaacaagccaagatcaatccagaacttaagcatttgcatctcaaatatttaacaacactaataatagaaacaaaatgatgattatgaagaaatcaaatcaatgtgtttatatatatatatatttgaaaaacacagagagattcttttgttttctgtttgaaaaaatcaatgaagagaaacaagaggaagagaactatgtatatataggccatttgtaagagttttatagtattgattcaaatcaaattacttaaagttgagacaaccttaatcttaactaaaatataattattatattatatttttttaaacgtataattattatattattagagaaaataatattattaataataataagacagtaattatttatgtatgtaatgatatacaaagtatgagttgcattatctaaaattggcatttaagtgaatgtttaaatgtatatatatatatatatatatattttttttatgttttatttacaattttacggtttgttcaatgaaaaataaattaaaaaaaaacaaaaaaataaaatttaacgaaaattataaataaactataaaataataaaaaaatttaaaaaaataacccaataacagctataatacaattataaataaactataaaataattaaaaatagtttattatttttgttaaagagttattttttaaaataaaaaaattaaaaagagtaaaaataatttattttttcaaagttttgtttattatgtaaatttttctattttatttcactttttttttaagaaacaaacatttttttttgaacaaatgtaaggat

SEQ ID NO: 384062 - DNA, 2289 bp, Cannabis indica
ttttctcattttttttttcttgaaaatgcagataaggtgtcaaagccatcagtcaatccgcaaaatgcaaaaaataagccagtcaaaggagtaaaccccccttgctatatagctaatgtcaacagatttgttgaagagatattggataaaacatctgcgctattgctcaccgaggtagctgaatagtaatttttttttcctaatttagctgtaccattgggctcatgagttcatatcatacagatttcggaggagagtattaagcaacacggagaacagctgggaacagtagtatccaataatgttaaaagcagacttatttcagagttgaacagcacaaccgtgagtatattcatgaattttttaattatataaatttgtcacaatgaatggaaagctcttctcttcttaccttcttacgatataaacttttattttgttgttggggcttaattactgttgtgctggggttgaggattgaatcagaggagatgaatactcaaaactaaggaaatgaacaatattcacaaaaatatgaaagaaaactagagaggcttgaccaagttgaaaaattaccaaagagaatacttgcggatcctcactaggaaataagaattgggatgagacaagtctttaaatttttttaagaacaatttttttttaatttcttggcgaaactagttgatcttgaagatctaaaatggttggaataactgtatgcctaatctatgtagctaagcctttaaataattttagtagtcccttaagcaagtctcatgtttaattcaaaaaatgcaatttttggaaccaaaaatataggacttcctctgcgtcactacttttagtggtgtcgtgtgttgccacactgtttagaaaaatcatttgaaggtctgcaatgcctcccctttgggcaatgcaggtccccttgtttttgacctccttgacttgtctaaatcacctcaaaaattgccaaattattctaacatatcactagttacatattgttgccaacgcatcgctagttacatattgttagaaccctctttagggaagacgcgtttttatttgaaaaaacataatcttttggagtcaacagtatgtaactaccgatgcgttcactttaagacatgcgatgtgttgttcgatgtcagatgaagtggcattacatagcctatcactgttctaaaaggttgtcgtaagacctgtgatgcgttgcacgcaacacaaagcagatctttttaaaaggttgttttaaggcctgcaacgcgttgcctgcgcaaagcagatcctcctagtttttgaccttgacttgcccaaatcactccaggaattaccaaattgctccaacttatttaaatgtgtaccatatatttttgtaaattgttgtattaaactgttgttttgcatatcacattttgttaagttatcaaaatatttacatccaatccaagctcaattttatttgccgtttcccactctcgcctgtagatgtgtaccatatatttttgttaattgttgtattaaactgttgttttgcatatcacattttgttaagttaatcaaaatattttgtacacataatgcaagctcaattttatttgctgttttcccactctcgcctgtagggaaattgatttttctatacaaatataatatttgaataatttatcatataatttatgctgtaatttgatgactgcagacgacattcaagaacgctgcctatacagaaggatttcatgctggcgttcaacatcatcccaagcgtacttactgattgttgattggtttggtttgattttgttctatcttcatgtcctcaaaggaaggaggaggaatatggagtgaaacaacaaaatatttatggctaattgttcctttgatttaaattggatattattataatgagatagattgtatcatttctatggttggaacttgtggattttaaaatacgatcgcatttctttcgtgatactgatgctagcaacattatctttgaaagtggttctcctttataatcaattttgctgaactcgttatttttattttttgcggtaaacatcactcaattaattgcttattaactttgttcagaatagttgtgaaggccatcatcttatggctctttgtagttaatatggaagtgtgaatcatcaccattattattattattattatgcatacagtatctattttacatcaacagataattaatgaatcgtatatagtcctgcagaagtaaaagtcatacacctggattatgtgcatcaaaaaaaaaaaaacaaa

SEQ ID NO: 384063 - DNA, 6298 bp, Cannabis indica
tcagtctctcgtatttttcatcccaaaaagattagttaaaaagtttgaaattaaataataaccatttacctggatgtttccattagtaatgtgaaaaggagcaatccagatagaacaatgcaaatgctgaaaatcacttccagccaattacttgtgggctcaagatcattcccaaaggtactgatcaatgatacatagacaccattattacacttcattacatttaaaaacataacagaattaataagtccccaaagattacctgagtgtcattaatccccaaaagatgggatagagaatcttaacagcaacagaattactagatataactggaagtgcccactgataaatcccatagttgaatgtcccattaacatccaaacaaagcggctttctaataatcgtcgtcgagttaccgacgcaaggattgcctactgtgccggcaggaagcaaaaattggtaacatatttcttctctacaagacaaagatagattacagttgacatttctgtcacaatgttggcgaagacatgaagccacacgttgtattgcaaggacataccaacaccctccagcaacctgtgttataacacaagtactagttcatgttattgtaaggcttgaaattttttatgagttttatgaataataaggtagctagcttacgtgagaggctataaaataagcaatgaggttgagaccaaaaccccaccaaattgtgccaaatatgtatcctgtgaccttttgcattcttctcattaaacatatgctgtgatagactttaggcaggaattggaacaagaatatcagcaaaagtattgtcattatgagtttaatcttctcttcccttatcaattttggtagtattaaccaaaacacggcctgaaaacgagtaacattaaagacaatatgtatcattaattaattgcgagatgaaattttgacaaacaacatgctaattttatttttaaaaagagcgctgttattggaaaccagtggttcccagcacctttaataagtagcgtcccacaattagttagtgatattaagttattttttttaaaattatacgagtttccatacttaatatgatactaagaaagatattagtcttttagcaatttttggaaagtaatgtcttaactactacagctgggctgaccatcgtttggtcttatagttaataagttcatctaattattatactcaaaaagtcttttggtaccaaacttgaataagtaacgaagaaaaacaaaacatgtgagcaactcatatatgtaacattcaaactcttaattgcagaatataattaaaagccaattgtcatttataaggggtaaggtaggcaaaactttttgtgcaactcgaaaattaaagtaactatagctatagctaccatgactcatttccatgtcactttattacttcttgaaaaaacgccagagttaatgtcctttcccatcgttggacaacttaccactattagcatatagtaaagaaagttacatgtattaattcatttttatcattttaattaccgcaagtacaaacacatgcaaaatagagagagaagagaagaagtgaagtgacatgtatatagcaataatagaatgacgataatataaaataatatgggatataagaatgagtggcagttactctgtggtattaatcattgaattggagaaagattattattattatggcagtttgttggggtaatatcgtaattgtggttttcataattgaaacgaaaacagagattaaaggaattattcttttgatattatacctgaggaacaggaagaataacgaaggcgtcgaaccagaaccccttaagagaccttacgtagtgtgaagcgatggcacgtggatcccacacgagttttccacacccaattacgagcgagtccctcgacacgtaagccaaccggaattgaagccagagatggcagagatgaacagcgtctaagcacgtgcgtagcacggtaaccaccgcagccaaaccgccgtccatgtacagacagggcgtgccaccacgcccgatagagagcgagtagaaaaagagtgggtccactgcaagagccatccctcgggccaagaggaccgcgcggttccatctctgcacgcgcttgcttcgagggtcgagcacgcggccgaacgagccggttggaagtcggcgtcgcttggcttcggcagccgcggctaaaagtaggtcgttttttaggtcggttcgggattgaattgggatcaaagatgaaccagccgaggcttcccagtattgagactgattggcgcggtcgcagctggtggagtggaacgctggtagacccacctgagtacaagcgtagcattccaccgtgcttgagtttgggttgatgaattcatcggcgtcgctgtgtgaagtcgaccctgagctctcccgctgtattccaatcaacctaattatcataaacaattattataaatatatatatatataaaaattgaaaaccatgcatatacatattgatttatataaataatatatatgtaccttgagagggaggagaagtgggaggaaggcatgttaattgaagatggagatgagaattaacaaccatggattataactagagagagatgaattttaagttggttgcttagagaaattgaagtaaagaaggggaagtttagtgaagtatagaggtatatttataagggagagaagtgagattgagtaataaaatcgcatcttccatggtaacacttcataaaaagtatcaaatggtcccactaccaccaacaaccaatctaatttttttttttaaaaaaaaatttagtatttatttggttagcaaataacaatggtgccaagttttgatatataaatccaattataaacacacaaaattactttttctctcttccatcgatctcatacttacttggatccactaatgtataaacctttttgtagtactatgcatatttgtgatgttgtaataagagcatctcctatgaaagttgtctattttgctacatatgcaataggatttatatttcaatacaaatgttttctatatatagggtgagtgtgtgtgggaacagagaccacggccgggtggtattctccatctctctctaatttttgtttgttagttttattttaagataaaagttacattttacccctaaagttaattaatttaatatttaagtgataattttttgacttgttaattaatggagtatttttttttgttttgtaaggaagagtgctaaatcttatgtaaatttatgtggatgaaatcgaaaaataaaaaaatatatattttgagataatgtgtataactttagcaattataaatggtatcaatgctctaactataaagtggcgtttgatttaaaggaatgaaaaaaatgagaatgagaatatgaatataaatggaattgaatataattaaatttgaaatgcatacaaagtttgattttttattattttatatattctttctattttaaaattgaataatcattctactaatataatagaaaatcaatacatttagaacaaaaagaaaaattaataaaaattatttatttttatattattaccttaaccaaacttgtactaaagtggtggtaactacggaaatggtgtaacatgtttaatggtggagtacgtattactgttatatttttataaaccaaatactacagtacaaggggtaaatatatagtagaaaatagttttttattatgtaagttttttatttgggtgggataattgttttactatactttaatctattttataataagtggatgtagatatggatacaaaacgaaatataccaaaacaaaaatccttgtaattttttcgaattgtcagggtgcacatgtatgtaagtatatagagaatgaagagagagatggttaagaacgtaaacgtacgtagtctcgtgggagagggttgggttgggttgggtcggggaggtgtggggcccggacgaaccgctgtctgagtttgtccgatcgatcaaggttgggactaataatatggggaccactcaaactctgatcaactcatcaagaatgaccacttccgccgggaccacttctattctatacatatatatagtttttagggtgatctacgtacagtagatttccaacttttatttaataataacattgtgtctattatacatatatatatatagtgtgtatatatatgttactaggtatatagtgtgtaacacatgtaacaatatatgtatctccatgtgatatcgatgacgaccacaaattcattctataaaaatataaaaacgtttatgtaaaatgtatatatatattgggtggtctaattaaaaccatgcttgcgaagtcatcaagtaatataggtatatatatattgctcctgataatatagtatgggtaagagtaaatatatgctattttaagattccgtaggagaaaatgcaaaagaaaattcaaagctgggagggtcgttttttatccaaagccaaggccggtaaggatgaggttatgtttatgattgtggcgcaagcattgcctagtcgtgctatctttcttttaccctgggaaatgtgtagctagccagttggaacatttgatgtgaaagtattagtgaagttatggctttaacaagttttatgggataaactggatgatttggaatcgtttgtgtaagcataaaagtgttggcggtcttggctttcgtagtcttcgtgtttataatctctctttattgggtaagcaaagttggtaactcttggttaatgacacctctcttgttagccgaatctataaagctatagatactacgtactctcatggttcttttttaatgtccaacgtctagtttcatttgaaagagcattttcgaaattcaaactatagtcaagtttggtgctagagtgcgtgtgggtttggggcgtaatattgatattcttacgaacccttggctacctgattcttctttccctattgtctgatcttggctactatataaagacatttttaattataaatattagttaaacattttaatatatacttgaatgttattaatattttatattgaataatttatatataaatataaatataaaaaaataaaaaaattcatcattcatatatgaggttatgacttcttacaaaaaattaagatcatcattgttagttaagacaatagtagtgcctaccactgtgttattacacagtgatagacgcttatgataggataggctccattgaatttgttttggattcattaattacatcgaaagatatataaatatttatttaaaatttaaaaattattacaaatattttatatggttaagatagtccctcaaattagttgtgagatttattcgatcaattagttattagatatttagtttaaactaaatatttaaatacaaaataaatttctataataaaatcagttgcaaatatttatttaaatattcaaatgttattattttaaaatttaattaataaatatgttatttaattaattattttattagtttaaattaaaatacgtgtatatcttaaatccttatatatgtataatttaattacgaaacctaaaaaagttaatcagaaaattaattattcactcttagagttcttgctcatgtaagagaaaaatcaagaacatctttatttttagtttatcctaactaattagctcacgctaatctttgtgtatggtagaagatttagaagatcaaggtgtgagttcatcatcatcaccattatatgataacttactaaaagattcaaggatatcttaattcgcttcaaaaggtacgtaaatgatatcatttcatttttttatttcatatttaatatatttacatatggagatctatagtgtgatacaatgataatatattacatgagttcaatgcaaatttgatttagtatcacaacattattatcttatctgtttgttgtgtctagttggaaacattcaggcatcgaccgtggtggtctttttccggtggagtttagcatctagttctagaatatattatctcagggtaagtcgaatttagttgaagaagcagccagggttgcttggtcactttagaatattttatctcagggttagtcgaatttagtcgaattagcgtttttaccttctaaactttgaacaatacaaaattttgtctatttttattgtaagaaaattaatttcaaaaataataatattctattttttagaataattataatattctattaattcaaaaaaaaataaaaattattaaaaaat

SEQ ID NO: 384064 - DNA, 1663 bp, Cannabis indica
tcccttgatatatatcaatattacagcattttgttataaatcttggtagagttttatgatatacatatttattttttcatttagccatagtttattttttgtggggtactatctatgcatatgaaggagaagaaaagtatcattggattttataagagcattgatattgagtattggtagttttaatactttttataggtgacccatgtaattagttaacgatccttttaaaagttataatcttaaattatgtaagatacttaattacactactaaatatatgacacagaaaaagatgataagtaccaatactatcttttaacatttctcattttataagtattaaataaaaatttagggactatatatagtgtcatacaaaaaaattctgtggttttattattttttttttacggctgttcaatataattataacatttcatttgtatttagtgtgtctaattttgttgtacatattactatttggatgtgtttggtaatttttttttaatgagtttttaatttttttaattagaataaaaatattttttgaaaataagttgaatataactgttttaactttttaatttattaattgaaaattaaaattttaaaaattttcacaaaaaaaaaaaaaaaatcactttcaaaaattttttaaacagaatttttttttaatttaataatatattggactccgaccccaacctttaccttagaacgcgaaccctaacccagccacggacccaatcccggaccccagactagaacccaaacccgaaccctagactagaacccaaactttgagctcgaaccccaaaccttaccctggacctcagactcggaccagccacggtcgcgtatccaaactcgaatcctggttggccctggtccaacctcaaaccaagaccacgaaccatggaccctagaatcagcctcagagcaagctcgaacataaatccaacttaaataaaattaataaataaaaataaaaaaaattaaaattaaaatataaaagtagttataaaacacatttttattttttaaaaatataattttaaaaataaaaattgtacatttatatatttttgtgattagaaaatttagaaacaaaaattttacccaatggcctcaaaatattcatatgaatagaaatagagagcttagtaatgggctatatacatgggagattctcatatattattgtaggtttggaaaattttgggttggattggatcctctgcgatcaggtatggactgtgaattgaatactgcaacccaccagctgtcagtgagggtaagacaacatatgaaacatagaatgggccaacgtttctgccagttttacctgaaatatttttaatattaaccattatagcccccactctctgactatttgccttggaaaatatgtacggtgaattagtaattactatgtgtatataatgcgaaatattccacaagaccatgccctactttctagtacaaaaaaaagaaggggatggtaaataacaatcaatgtcatgtggtgtgtggtataattataatagtagtgtagtggtcatcatgatcatctgatgctccacacgagtgcccaggaattttgggtatggagaaaatgactgaaccaaaaggcaaaatacatgttcatatatatatatat

SEQ ID NO: 384065 - DNA, 859 bp, Cannabis indica
ttttttttttttttttgcatcataaatactgtgaatatataatttgttatttctttaattatttttctatgtgcactctgatttctaccaagaactatataaataccaactttatgcaatctcatccacatgccaatcatgtgtcacccatgctactatagttcaagttgtcatagttttgatattttattcttttttttcataaatgtatatatacatatatttatactagtatgtatgtgtatctcagtatctgtattaggtttactgccaccaaggttcttgaaatcgtgttatgtttgcatggcagcacattgtggacctattcttttattcatatatatttatgaaggttaaatttaattcactagaaacactcatatgttttgtaaactctccacaaaaattacataacaaaaaattatatgaaggttcttgtactttcgtttaaccttttgctagctgtttcgacttgtacttgtttcttatttttgactaaaagaaaatcatttaaggctggggacagtgggcctactcatttaatgttttggactgggatcttgtcattttatgggccttgaaaaatgagtctcgcgtggcccataaatgttttcaatgattattacaacaaaataattgcattctcaaattttgaccaccagaaatttatgatggggttacttttacacaatataatgacactactatttcgattttggactggtgatataaaatgaaaaaattatttggaatattagtagcaaaactacattgtactatacattttgttacactttttcaatagaaaaaacactttattaggcacatgccaaaatattcaaaaacacttgcacaaagt

SEQ ID NO: 384066 - DNA, 1587 bp, Cannabis indica
acataagatatgatttccgttacctactttccatcgcaaaactttacacagtatttctttcccccaaataatacttctccacgtgagaaatgggtaagagcccaaatcagcttccaaaaaggtgttaaacttaaagtatcgggccttgagtatcttgtgaaggagtgatgaaggattggagaagatcaaccatgcttgtttggtcaataatgcttggttataatgaacaaaactcttcaatcccatgcctccttcaactttagcttgacaaagagtattccaagttttccaattaatcccagaggatgaggaattggatccccaccaaaatttattcatcattacttcaatttggtagattagagacttggataggcgaaaacaactcattgcatatgtgggtatagattgagctatcgctttaagtagaacttccttacctccaatagaaaatagttgttcttgccatgctgaaagatgattccataacttctctttaatctccccaaataagacttttttatctctcccagagtacgaaggaagtcctagtagcgttcatgacaaggcttgataggcatctgaagagtttgttgtatgttgagttgtattgcagaagttgtgtttggtgagaaagagagcactgatttttctgcatttaaccgttggcctgaagcgcgacaatagaagtccagagagcgcttaatagcatcaatagatcttttattgtcatggctaagaacaaggctgtcatcagcaaagaataggtgcgacactgacggagcacctcgagcaactctcaacccttgaagattgcctcgactttcctcttgaagaagtcttgaaagaccctcagcacaaataataaaaagataaggtgataggaaatcaccttggcgaatacctcggctaggggtaaagtgtatatatagtttattaaatagtaaaatgtaaatatgttttattgtatataaattatagcaattttttttaatgaataatgcaatttcttagtaaactaaataggataatttcccactctactactatagaattttgtctgcaactctgatcgtccccatctcctttagatttgtttttcctacattggctgctccaacttgattctatttttagaagtgtgtgtcggtcttcctccctcctttgacatatattacacaattaagttttatataatatatatgattatttaaatttatttttataaaaagtttcgtctattttatttgttcgacgtggttattttcgtaatcaccatgaagatcgttaaagtctggttataaaattttttgtcaaatttgtctgtattatttcatctttaagtttagagagtcatcgccattagagtctccaaagagtagtgagccgacaaagtctgtcggtggcctgcagtgattgcggtaacgttgaaagctgattggagtgatggtctgcttttcacacattctccctttatttcgtttagtaattttactagtattaattttgagcaaaaactttattagtatttttttttgaataaaaatcataaaatctattaatgaataaattcgttcaaaacaatag

SEQ ID NO: 384067 - DNA, 2144 bp, Cannabis indica
ttttttttttattttacaacacattttacagctcttgagttatatccctcttgtagcaacattgaaaaaatatatggacatttatttctatagcattttcacatattggacatctatcttcaaaagtgattcgaaatcgaacaagtcggtctctagtctgtaatctcccccaagtagtcattcaaacaataaattggtgttttggctcacttaatctattccatataatggcattccacttctttttttcttaaagccacaattttatatacaaattacccactccatatttcatttgggctacttctctttcacttattttctcttttacgatgtctttaaccaatactagcttcttccaaaaccagctccctctgggtggagcctcatagctccaccaatccttatcttttatatacaccaagtgaatccacctaacccataagttgtctttctttaaagccatatcccacacatacctacccactgcagtaatgttccatctctctatgcacctaaaacccaaacctccttcatttttggtcttacaaatctcccccaagctatctgacttggtctagtagcctctactaaccccagccaaagaatggtcttgcatatgctatttattttttgtaaaatagacttatgaagaataattatttgagcccaataggaatgcatggatatcaatacagaatttattaaagtacacatgtcaacataggagattataacgccctaacccataagggcgccacgtgtgtgcctttataatttagtttataataatagactaacaatttaaggatgagaatgtgctttaattaaaacttttaaaaaaaatcaatttaagtataacttaaactctttttcaaaatattattggatttggggtccccttagttacaaaagaaccactaaaccagtttgttacaaaatattactacatattcaaaagattacaaaaggtagatcctgtccactgagaaccaaaagacggtgacgctgatatgtacattgttgagagacctctgactcatcgttggtccatttttcttttacctttagttgcaccacaacacacccgtgagtcacaaaaactcagcaagaaaagcacgtaaaacacaaacatcacatatagcaaaacatttttaaagacacagagcatacattgcaacatatagtttaagaagttattcaaagcgtaatcaaatgctaataaccaactatttatcttattaagataagccaaaactcaatactttataaagcatccttaaccctcgttaccaacgagtttctaatgtcactatcgttgcttaattaagcaaccgataagtaagaaaccaatcaatggtttcaaaagagagtaataactctttcttaataacagtaattaccgtatcttatttttgacatgctaagtagtacaattgactttttttacctaaagtcctaagttaggtgtgcatgctaacctgagtagaattatactcgacaatcttaggccctatgtcacaacaacgccaatcgataaaaaaatcttaatcgatctcgaaccaaaacctaaactcaaaaccggatgaaccactatcaataaaacacaaaatctagttgctaaaaataccccaaaacggtccaccatttcctaaaagtagattgtcattttccaagattttttttctataaaaacggtccaccatttttacagtacactgtaaaaaatggtaagccatttttcatacagaatagcccaaacttgagtttttcacacaaaatcccaccaaaacttctccaaacctattgaaactttccagaatagtttaacgacataatattaacattgatcatcattcaaaacacagaaaagcatcaaaattgcaaactcaccattgttgagtgagtttttttcttgaactcaactcacccaactcaaagcataatagccctagaatcataaaattaaagcttaaacaaccttaatttacatccaaaaacaaactctagcaactaaaaacattcacagaacctaattatcaaaagatcccatccaaaacaaaaccttagaaacctaaaaccttcaagaacaccaagaaaacttacctcaaggttgtacaactcctagaattgattaacttgac

SEQ ID NO: 384068 - DNA, 1932 bp, Cannabis indica
aaaaccatctgcaagctgatcaacagcaggaacgtgtttgacagcaaccttatgttgctgaactttttcccgcacaaagtacaagtccagctcaatgtgcttggtgcgagcatgaagaacaggattcgcagtgagcaagactgtacttagattgtcacaccaaacaacaggtggttgaggcagctcaatatgtaattcgaagaatagggactgtagccaagttaactcagcaacaacattggctagactgcgatattcagcctctgtacttgagcgagaaatggtgtgctgtttttgtgatttccaagcaatgagattcgaaccaaagaatattgcaaagcctgaagtagatcgtcgatcgtcaatatcagtggcccaatcagcatcacagaaagctttgatttcaaagctggaagaccgttgcagatggagtccataatgtgtagttccagcaacataacgaagtatcctctttacagcaagccaatgagattgaaggggcttttgcatgaattgacataccttattgacgctataagatagctcaggtctcgtgatggtaaggtattgtaaagcacctactatcgatcggtacatttgaggattgtcaaaggcctcactgccatatgccgagagcttttgaccactaatcataggagtattgataggctttgcatcttgcatctgagctcgagtgagcaaatcctttgcatatttgttttgacacagcagcaaaccagtggtggtagacaacacctcaattccaagaaagtatttgagtgtaccaagatccttaagagagaaattttgatgcagagaatgaatgagggaggatatagcttgagaatcactgcctgtgattaaaatatcatccacatatactaagaccaatgtaaccgaggtggtagtatgatgaatgaacaatgaatgatcagactttgaggagatgaaacccaaggataggaggcagtggtgtagtttatcaaaccaggcccgaggtgcctgttttaaaccatagagagctttgtgcaacttgcaaacaagatgaggttgtgttggatcttcaaagccaggtggttgtgtcatgtatacctcttcagtcaaatccccattcaaaaaggcattgttaacatccaattgccttattggccacccttttgatattgctaatgtgagaacaacccttattgtgacaggtttaacaactgggctgaatgtctcagtgtaatcaaaaccaggttgttggtgaaagccttttgcaaccaacctagctttgtacctatcaagagagccatcactattttccttgattcgaagcacccatttacatccaataggctcacggccagcaggtaaaggaaccaaggtatatgttttgtttctcacaagagcaagtatttcatcagacatagcttgtctccatttctcatattgtaaggctgatttgaaatttgtgggtatcttttcagaaagataaacttttggtttacgaatgccagctttggctcttgtggtcattgagtgagtattggtgactgaaactggttcaacagagacaaactcatttgtgttggatggagtgacatcgggtatgggattggtaagtgagactgggacagtatgtgaaatgagtgtgggattggaagattcattagactctatttgtggagactgagacacagaatcagatgactcacctgcagcagatctggaaggatgagagtgagtgaataatggtctatcatgagcagtagttgatgagttaggtggcacgggaattagagcagatggtaagtagctaattggttcatctgaagcagtagagattttgtgagcatgagggaacactaactcatcaaagataacatctctagagatgtagacacgaccaatagaatctaaacacttatatcctttatgatttatgctata

SEQ ID NO: 384069 - DNA, 1219 bp, Cannabis indica
taggtctctaaagatgctaactctagtagctttgtttagactcaacattactaaaataaacttgtcaaaattcaagaacttgcttcaattgatttttttaaccatttttttaagcccctttttcttttggaaactttgtctaggaaaacagaagctaaggtttatcattatgattgattgtaacatggaccaaatcttaagcttttcatatctgaaataatatgcttttactattatttattttactttttttttgggtgtgttaaatgaacaatttgtatttaggaggcagaaatgtggacccaattagacaagcttgaacatgaagaatccaaaatgatcaactaataatcagtactgtctattctacaatatgaccttttagttcaggtacaaaaatattccaagtttaacattgttccttcaagtgctgctcatgctataaaagagtaaaaaagagagaagatattcttagggccccacaatgcagcctcaatttggtccacagtaatgaaattttttattgcaatatatggcctgtcactcatttaagctgatagttaccatttgtacaatattcgaaagagagccgttgaagcatcatgagaatgtaaatgaaaaaagaaaaagaaagtgaaaggtagttatcactggcatatatatagcatcacaatctcaccaactaaatcaagtaaagtcaaaaagaagacaaagaatgacaaacaacaacactgaagatccccttaacttcgagaataatctgatcatcacaattgaaatagtttgtttatttgattgatgaattaagagaatcttcagaaaaaaagggatatgatgatggttttgcttattgtttggctgttagccactctgataggatacatacatacatacacagttgttttagtatacactaataataactagaaagccgcaattagaacactagctacccccacttttcccattgtgttcagattttatattaaatataaaaaaataacaatttgttatttagtttttaaatggaaagtcaaagaacaatctaatggaatacttattgttatatagttgacattatgagatattattgtatagtaataaagtagtgtgaaaatgaactaaaaactttttggctctcaaacattagagaggcatgcattgatccaataaaataaatgtcagtatttaaaagaacggtcatggtgcaacacaatat

SEQ ID NO: 384070 - DNA, 1319 bp, Cannabis indica
atcttaattttaaatatgattgtaatatgttgatcctaattaattacctgccttgtaaggaagggaattaataaaaagaaaatcattaatatattggaattaattcaacaaaaaaaaaatgaagaagaagaagctagcctcatgcatgcatgcatgcatatgtataattaataaaagaaatatatataaatataattataatgaatatttatatatataataagctctcgattatcaatgctatatatatataatccaaattaaacataccaaacatatatatcatgaaataacctttgtggctatatatagctaaaatattcctaatcatattttgtgtctcatttttcgaaagcaaagtagtaaatcattgaattattattcacggattagtattcaaaactactcaaatttcaaacaaataatatatatatatatatatatatctatataatttggttgtatctatacgatctcttcttcaaagcctaggaagtagcttcattaattaatttcacgtaaattcatgcatgtcaaaactataaattccgcccatagaattaattataatgacataaaaactggttttaagctttaattaatttcgttgtgtacgttggaatttattccaaaagacattaattacatgtgaattttaactttctattaatatagaaatataatgggttgtataaatgacaaacgtaactaattaattatatgtaatttgttaatatgcatgattaatatattgtacgtacgtatttatacgtagttacgttcttattatgcatgcatgtatataaatttaagaaaattattcgtctcatgctgttattagtgtaataaaatattatgtttaagaaaatagtttttagggaagagtattgttattgggcaccgctagtgcccaggtatcgtcctacgattagtcagcgatattctaaaagttatttttttaagttatatgagtctcaatataaaattattgtacacaaatagcggaacaccgagaaaggtgttagatataccagcaattctctttagataatatcaataactaatcttaaaactgcctcttatcaaaattgttgagtaccacttgtatttatatagaccatttcaagtgggttaagtcagaatgatcatatatacatttcgagtttatgcaattgtcgtcagaaataagtgattatatatatatatatgtatatatttatatatatgtgtgtggcaatctgactcaattaatcagcaatggcatgcctcaataatgaaaacggctgtgctcaatacataggacagcactaataatatat

SEQ ID NO: 384071 - DNA, 1300 bp, Cannabis indica
tttccttttctttcttgttatggattctcttttaattcttctgctcaaggtttagagtgaatgtgatgaagttgaaagggtgtatattttaaccttgcaatacttgaactgggttattgtctcgaagacaactactagaggttatagctagaaattcactcaaaagagaaataaattttggaaaatgatatcacacaagtgaagatggaagagttgatttacagttccaaggatatttctctttaatatttgctttcctgtatttacagttccaaggagcgtgaattgcttgaagaactagctttactgaaaaataccaacaccagccgaccaagaactcgccctcaacctcggccagctagtagtaagtaacatgattgtggtaattctgtacttggattttttgtggattttatattatgtcttgtttctgtagctaagagtacagaaagtcaagccgagagcagcgaagagaaaaaagaagaatcaggagatcaggatgacattttgcagaaactaaaggattttgccgggtaataagttctctcctttcacaattaccttcatatttgtacccccataaaaaaaaaatctatacatagtctcatatcccttggatttcttatttggcagctctgttgcaaatggagctctaaaatggctgaaagacaacctctagagtggggtcttaattcagtgaattcaaacagacaacggctctcccaaccttaaaggatgctgatctttttctggtctcaattaaggggactctgaggactgcagtggcagatatttttttttatatttatatttgtctttgtaacttgtaaatcttagaaacccaacaagcgaactatactaaatagccatcatttgataatttgatatatatgcattcaaattttgaatagaaacatagtgttttcttactccaatacacattacagaatgagctcattaaagagaaaaagtttctagcttggtttgtctttgcgactttgattgattagaagcaaaacagctataataacaggagaagtatgatgaaaagagcttgggtgagattgggtttggttatttctgggaaaactatacttccatacttgattacaccagcacctacgatagacccagttgccaatttccccaaataagccaaatcctccacctgtaaaacaaaccattatcattatctcatcttatctcatctgggtttcttaaaaagcttgttacagagagagagagagacagagagacagagagagagagagagagagagagagagagagagagacgtacg

SEQ ID NO: 384072 - DNA, 1741 bp, Cannabis indica
atatatatatatatatattatgaaactaataatattttatgtaattattaagtattgaaatgagtacatttttattatcaggtatggaatgctgggaaagaaattcaaagacatatttgggcacgttggaggtccagtcttgagtgggtatgtgggcaacaaaaagcccaacaaccatggtgtcccttattcattgacagaagattttgccagtgtttataggatgcacgcacttctccctgataatctttacttgagagacatcaatgctacaccaggccccaataaatctccacccttgattaaagagtacatatttattgaaaacttcaatcctagcttcagtttgattattccatgtacttaaaaatatatatgtaataaaaaaaatatatgtggtttgttggcagaattcctatggaaaaattaattggtagagaaggagaaaagacattgacacaaataggcttcacaagacaacttgtttcgatgggacaccaagcttgtggatccttggagctttggaactatcccttgtggtttagaaatgtcatacctcaagatataaatggcagagatagggctgatcacgtggatttaccaagccttgaaagtatgtgtatattttgttttattttatatatattaattgcttaattaataatttactagaaatccaaataaataattgatttattacatatataaatgcagtctatagggatagggaaaggagtgtaccaaggtacaacaattttaggagagggctgatgttgatacctatttcaaaatggaaagatttgacacacgatgaagaagccatcaaaatgcttcaagaagtgtatggtgatgatgtggaggagcttgatcttcaagtgggtcttcttgcagagaagaagatcaaaggatttgctattagtgagactgctttcgtgatattcttgctaatggcttccaggtaataataatatttactaaatacataactaattatatgtatacatataacaattaataacatatcaagcaattttgttttttgtcacatgcagaaggctagaagcagatagatttttcacaagtgattacaacaatgagacatacaccaaaaaagggctagaatgggtgaacaaaacagagagcttaaaagatgtgcttgatcgtcattaccctgaaatgacagcaaagtggatgaactgtagtagtgctttctcagtttgggattcacagcctactcctcataatcctatcccactctatcttcgcttcccagcttaattgaactacaatattattatcaatattatattaccatttccattataaatattatctattaattttctgaaacaattgaatggttcttatgaagaattatgtgtcttaacaaaagaaatatttgtatcaaaccaaacatattgacacatatatattgcattcttctattacttggtatttgtataattaattggttataaagcttcctattctttcaatatttttttttatacttaattctaattttatgttttgccaaagcctatcgatttcttttactactggcaaattaaagatcttcatagtttaatatgttaattgtaatgatagtatgattagactatagattaaggcaataattaataattattgatatttaatgattatacatgagtttatacttattgtgggtcttattttcaaaaataggcataggaatgggaataggaatggaatagaataa

SEQ ID NO: 384073 - DNA, 3682 bp, Cannabis indica
taagttttttttaattttttaaaaaattacaaattaaaaaataaattaaaaataaaaatgaacaaatttcttaatttttatagcataataaaaaagagtaagatgaaacaccaaataccaagagtcaccataagctcaaatatacaaaagtaaaaagtacattacaaaaataacacttgctattaataaactattttttttttaatatgtgatcttcatataaacattttaattaaacgtttataaaatgctcaaaaacaaaaggaggacggtggcgcgtgtttatcttttcaaaagcgcgtgaaaacaatacaaacagtacattttcctttcttattatttggtttgccagaaaaacaatttttccattttaaactgtactgaaagtaagttattgaaacaaacagaaccctaataaggaccagaattatcagctacagtttttattaattaaaataaataaataaaaaataataatagatagagataacgatgaaagcggttgagtaaagtttcttttaataaaaaaaataatttgaagtttgttttataatattttagtctgagtttgactgggtaagccaggctgtataccatttcgtgtgagatatttttttattttaaaattttcataaataaataaaaaatttggttttcaaaaaaacggccgcacggaaattgtgagctggcagaaaacgacaagagcggtcgccgaatcggagagcgaatcattactgcttttctgtcagtccagcctgtaaacctgccacaatctccacccttcacccacacaattaccaccgacacgtgtcgctatctccttcacttcaaaaatctttcccactttttttcttttttaacctgtacggaaccggctctccacgtttccccacaaacacaggaactttcctcttaccttcttctttcctactacttattaactattattatgctgagtttactaatttagaattaaaataaattaataaagaaatctaaaggaataaataaaaaataattgaataataatttattttgtttatgtaatatgtagtgtaattgttttgcaagacacatttaaaataaattgtcattacatatttaattataaaataaaataaaaattaatataattattatccttatgacattctttaaaaaatggtgttaaagtatttttttagagtaaatactattttgaatcctttccaaaagttaccaattggattctctaatagattttatattttctaaaattgtacaaataagaccttgaactgattttttgtcaaaataaaatttaataatagtctgatctagatatgttatgacaaaactgtttatattttctttatctgttttagttatatgaaaaaataaaattgttgaaaattgagtttaagttcctatttttaccattttagaaaatataatatttattttgtcatttaataaaacatatggtctaactaataacttttgaaaaacacaaagtacaaattagtatttacctttttctttatcacataattaacaaagtttcccattacttatatttatttctaaatgggtactaattagagcctcttatgacaattttttaaaattaatgttagaatttttgaaaaattttaaattagcttacactaccgaaaacagaatttataatattttagtctaccacgtatattcaaaaaaatttcaaaacatatttttctagtgctataaaattttttcaagaataaattgtgtaactataataaatattgtcataaaaaaaatttaaaaaaaaaaattataataaaaaattaacgggaacactccttttaagagttaaaaacttaatatttaagctgcaatttacatctactattagactgtgagtcatcaactcttaatccgttattagtttgagtttaattaagattaattaattaattaactaattaggggaataaaggtggattgagatattgaatgaataagatagggtagagagatacgtatccatttctgttactagtacatcgtacctactacctaatactcttttttaattttttaaaaaaattataaattgttttattttatttttgtttgcatggtgaaaggtctagatttttttatttttttaatataaaatgaaattattatttggggactttgactcaactattttagaatttggtaccaatatgtttaattgcattaagatatttgttaactacctaacgatcgttatgttttttttttttcttctatgtataatttgggagaacatacgtaccaaattgtcggcaaaatttattttatttgctattttttttattagagaaaaattaatagcttttgttttaagtattttcagtaggttgttattaatatttaagtggagctaataattttcatttaaagttaattatcaaaaagaatgaaaaaaatgaaaacaaaaaataaaaatagtacatggattagagagaattacaatagatactatcatattaaaaaaatttatattaataattttttaaatatttttatataaatcatctaattttattaatagcaatcagttaaaataatagtgtgtaatttaatgaaaaaatcgcccgtttgagaaattaaaattacaaaaatgagttaaataattagtcaattaattctcaaattaaataaactaaaaattagataaaaaatattacaacatcaaagttaactttaagaacacttagattttaagtttcatctacggctcaaaatatacaagagtagaaactgttgcagttcattcaacctcgtaacttgaatactcaattattaggcaaagtacgtaactgcgcactcagggacggagggactttagcccatatgttggcttaagccctcactcaaatatatacatcaaacttttttacatgtagatatatacatatattaattcatttcactcaatttattaaagtccaattcacaaagccatcactcaatatcttaatcatgattcaagagcccaccctcattataatcaagcccattttaaagtagtccaatacaaataataaaaaataacactttattaaaaaataaaataacactattgacaatattttattttattttgttgaagatgcaaatttgaaatgatacatttatcagttattattattagtttttgacttaatatttattcaagccctcactcagccaaatttctagattcgtcactgactgcactactaacaacttattcaatcgcaaaaactttttattcctaactacaaactgcgatttgatgataagttatcgaagaacaaagaacacctaacaataaaatataaaaaatgtcacacatataagactaaaatacttaaaattacactgagacaagactaatcgtaataacaaaaatctcgtaataaaaaaaaagataatatctatatttataaatttaagaacaaaaaactctaatttttttttttattttagttgatgttaaataatgttagaaaattgtaccataattatttatatattaaaaatataaaaagataaatcagtatacctattttttttaatgaaccctattaaaccaccaaaaaatttatattgtctagttaaaaaatagattcaactaattaaaaaaccgttccacaaaaactataatcaaattgatagaattact

SEQ ID NO: 384074 - DNA, 1034 bp, Cannabis indica
gattatttaatttattaattcagttattaacaaaacggcaatcttttctgatctggccaaggtcgtcagaaagtggattattctcggacaagagtagtatggcgcgagagaactggtcatggaagtagtcgttatcggcagccattttctggacaaaaggcagagtagaaggatcagaagtgagctgttcgtccacaaggagaagacccttgtgctttagaatattcttgaagtaattgttgtcaaggatcatcggagtttcacggtcgtttcttgcgtataacactgcattcggatccgggtttgggcttggacaacgacgtttcaagtactccgcatatgttggatctaaagtcgggtccactgttgggtataatctatccacaagattcacgcagtggactcggcccactgaatgagcccctgtattcaaaattaataataacaaaatcattaataaaatctttcaactaattatttattatatttgtcaataagtagttcttcaactaataattcttctttttttgtcatttctttccaataacccatttattcctaattttcgatttcacacagaactttattcataatttgtttcctataaatgtaaattttatgaattattcaacgctaattccgtaattaattttagttctctgttttgtaaagaaagttttatttgcaattataaattataagtatactttattttaatcatttttattttatataaaatatatatttttaattgatgctagtttttttaaaattttcttctttcttgtcatatttttaagaaaatacttctaaaataaaaataaaatatattttaaataataaggcaaaaaataacaattatatgaaatattattttaaaaaaaatattaaaataaaataatgtgaaaaataaaaatttaaataaaatattataagaaaatgaagtaaaaataactactaatattaaaagaaaattttcaaaaaaaaaaaaatattaaaagaaaataatgtgaaaaataaaatttttaaaaaaa

SEQ ID NO: 384075 - DNA, 1182 bp, Cannabis indica
atggaaaaagaggaaaagtggtaattgaagttacaaggggtacttataccaaaaaagcgatccacatgaaggggatataaacaaccacgatcctacttctagaaacataagtcttcattaattggtcagggagcctaacaagctatgtgtatcctggcaattaatgtttcccaaaaccaatgtgtagatcaatgatgaaaatgctcttttttttttattttcacaccaaaaaatgaatagccgtaaaaattatatccgtttctggaaagtgactcctcgatggttgggccctatccctcaagaacgattgacatatggacatatcatcaccacagacagaagccaacatccgcgatcgagaagtattcaaaatagcatactttaatacctgaacttccacatgttcaaattaaaagagtgattcaaccttccaccatacgcgacattctataagcttgggagggtaaatgttatccgcatttctggtattagacatgtagattccaagtcagcaatctaaaccaatcaacgggaaccttagtaaagataaagtgggccaagcccatctgaatgtgttctaccaggaacatatcttggttctgcactcacagaggcttctgccttcagcaatccatatctggaagacatctgtgataccacgagactagagagatgaggcaatgtgttctcaaaagacctttctggtttccttttttatttcatgtgcacaaataaggaaactctagttgtcaaatcacaccagaatatggtattaagattaaaagggaaacttcctataacgaatattatacaattaatttcgattaattgcccacaatcaatgtatgtagttttgaccagattaatcaaaatccaatctgtctagtcactggatcgtcttctccatgggctggactttatgagcaagcccaagagtattatttactataaacacctcaatagagagaaaggaatcaaaacctaatgtaattctcaaactactataaataccccacatatatggattaggggttgaactctcttgcaaactttactcaagcaaacttgagaacatacattctgtgtatttcctaagctattcacaagtgaaagacttactgaataatactgactcgtggactaaaggttagtgttatactgagatttctctcacctagaaac

SEQ ID NO: 384076 - DNA, 2960 bp, Cannabis indica
attaattaaataatttagaattgagccagccagccatgctcaagtcaaggtatatttagaattgtctaacgacattaataatactaacctgaaatattataccactgtgtacaaaaaaccccagcattaaaatataaccattgtctaaaattaaacctttcctagctacctaaccaaaaaaaaaaaagaaaaagaaaagcagccgttcattttggatatttttaacaattagtaaccatgactaaagtgtcttgaactaactgtacatttggtgagtaaaaacaagagtgtgcaattttctaaatacattttcaacagaagaaaattcaacatcaaaaccataagtctgccctccatactgagcataaaggtactcttttggtgacaaaactggaggtagaatttcatacagctccggcaaacttgagatcggcggtgaaggtatgtcatttttcttcttcattgagaaataaacatcagctaaaagaagccacactaggtcaggatcaacacatgctaagccgcaaagagcattcacggaagcatcacgcagtccaaccacgccgctacaagctatccccaccacaagaccgttgattttcttaaggactacttgcaatgctgaagcgcttcttttatttcgggccaaatcagcaatcatgttcagtgctgcaacctgaactttcagattggaagtttccgccatcaagtcttctgaagaattggaaatgtttcggtaaggtagttgtagagggatcttgtctttcttcagattggttctgtggaacggcgatgaggagagaagtttccagaagtgggaaccgtcggtgtggaagcggcgtgaaaagaactcgccaccacatatttgcactacattgctcaccacacttaagcacctacgaacagcctaatgataaaaaagaaagaaagatcacttagttaaatatagatgtttttcaagggtaagtgtaaaagaaaaatgactactcaccgctgtgttcttgttttgaacacccacaactaaaaatggccatatcttattcattgctggaagcaacctattctcatcagccccttcctctgcagcatctagagtatcttgaagatgatacaacgagcgtgattcgatcgcttcttctattgcttctttagtgcgtctttcttgtctataagcctcttcaactttcgctaatgccataacaccttccttcatattcggaaaggatatattttaagaaaatatcataaagctcatcgaatctcggtgactttatattttaataccatctgttataacatgcatctatactgagaagctcaaaacaagaatggactaaaaagatacctcaacaatgtccatggccaccaaacaagcagcttgatttgccaaggctagtagaggggttgcagccgtaatacatgaaccggcaatagatccgacagttcgtctatatctctttgagtcattcaacttaaacaaaatgttttcccattgttctacaaataagaaaaaattgcatttaaattcacaattaaaaagaaagatagctgtagagagagaaaagaaaagaaaagaaagaaaacatatgtgggaaccacaaaaatcattttcttgttgtcttttcacatttctttgtgcaatagaggttttaacatcataaatgaaaaaagaaaaagttaaatagaaaagtaataacctgtttccatgtcaaccacatcaatatcggagttatcatgtcctacaacctgattggattcttcagtttcgctcacttcggtattacttacagagttcacgtaagtaaagtaagactcggcttgttcaggcagtaaatgagcctcacgcttggctgccttggaaatttctaaaacagcctaaaaaaagaaaagaaagatatgtacatattaacaacaatgagtataatatttgtacaagaccagacatcattagtttagtagcaaaggttggttgcatatggaggttatataactgagtccaatgataatttttcaaaagcagttaaaatgtaaaaataaacatacaatgatcagagtctcaccaaaatttgaacttaactttaaatttaagaaaagagggagggattgaacaagactataaaggcagtaaatgcaaactttgctgattagatttctatttccattctaatgaattagcgaatcttctttcaaatctaagaaccaaatagacaaacataattacactaacaaattaatgatggtgcagaaacatagaaggaataaaaaataacctttagaaagggaatagttaattcggggtgttgatgcctgccgagaatttcaagttccagtgaaacagagcgcatctgcaaatatcaaatcatgaacattattaattaaaagcatctattcaaaagtttaacagagatgaatatttcctcaacatggaaagaaatcttcatgatgcttcttgaacaagaacaagtcaagtacagcaagtctagaaggtataccggttcctccaataggggcaaaatcttattagctactccaatataggaaagcatagcagcaagcacattggggacatgagggttaagatccaaatgccgcagttgccgacaaattgaatcaatcacataatccgcatttgccagtactaggtgtccaacctatggaacaaatgaaaaagacaacagtatgtttagactcgtaatatgtaaataaattctaccacatatatttacagttgaatcattccaataccagataaagttaatatagagtcatggtacagttagatagcgctaggggttgaggtaacctcacaattgcttgggtgagtgtgtgcatgtgaggaagagagagaaagcacgaggttataggttcgaaccccatccgggactaacttgaaaagggttaattgttgcttataagaaaaaccttaccgttggattgccagatgtagcagcaaggacgtg

SEQ ID NO: 384077 - DNA, 1871 bp, Cannabis indica
taggttgaaaaaagggaagctaataaaaagggggaagctaaagccccatgttgtagtagtgattttttagccttgtaggcaagcattgcatattacaagtgtatacggtctggacatgccctctctatttctctcattcctctctaaagaagaagaagttaataggaatttttagcagaagttttgtaggttgaagaagttactttcccttggtcatgatatatatgggtatttataagtggtttcttgatcaacatgcctttaggaccagcccttctgccagagatctgactgttaatttggtaggtgacaattccagtgtgcagtgcacaaaggtatgaggagtactgtccaaatatcccctacgtgtcactcaaaggtctttccttttcgaatcatcccctcacatggctattggataatgggcaggcacgagggtgcgcatgccttgtaatatgacctgacagtggcggggggtgggggacaaaaactaacgtcgtacctgaaaagcattgtcatcactcctgtgatctgacaggtacgtgtggtggcctcccgcgacaccgtattcgaagaaaaatctgtcctaagcctttccactgtaaactaggagagcgccttggcttctataggcatttccttcccaaaagtgacaccttcccttttgctcggggtatgcacatgaatccttcatgtgctcctgccttgtggtgggagtaattttcacggaagcccttcatggaagctagaaccgtgggcactaattaactgcagattagcttgacttcttttgctgaattccacgagtcatgcttgcataaatttgtccccaagcttctggagcaccccgtgttccgagagctttgtaatgtttccctattttctcatgattggtccctaacacgtggcgtcacttgaaatcgaattatgtcacgtgagtggtcgtcagctgatacgtcactaatagtgaatatcattaatatggtaaaaaggcagtactataaatgcaacttctggcagtacgcgcgtgttcgatgcgtgtcttaggagacgttaatttggcagtaaggtgattgagcggagccctcatttaataagaaattttcacaagacataccataattgatgttaagcttttgggctgatacaaccttcccaattcaccatccatcaaatcctgagatgcaatcttggtgaatgatctgggccgtttgatttgcgtggaaggaacaccacttagcacgtactaaatattcaaagcatcctcattcccttttaagtttaaaattttcactctttgcaccagaggttttacatcttaacttaactcacttttttccaagcacaactctgttagtcaagtcagggttagctacgtaaccggacatgatgtactcgagccctcccaaacaacatccacatccatcactcagtaagtagtttgttgctcttgctctatatatacaacttcatgcttatcgtaaaaatattaagggttgacttaagtttatgtgtatcgtatgcgagtctctgtactctgtgaaagtcagtcttatttgaatgatctgttgctaaaagagaagcgtggtggtttggtaggacgaccgtgtattgaggggccatccatttgggaagaaagactacctaacgcttgatagattatttctactaaccccattattttgaattgacttactcaagcctacatccaccgtctttgcaggcacttcttggtctaacatgctgaactcaaggaaggaagtgttggatatattttaccaggatttagatttactaacaattatgtttcattaacatcctaatatgaattttaaaacaatgaaacagacacataagagtttaagaaaacc

SEQ ID NO: 384078 - DNA, 1569 bp, Cannabis indica
tttagttttatcattgatggaataaacaataaaataataaaacatgacgatgatatttgatgatgatgatgatggtgatatatattatatgttattattaattattttctaaaatatatttcctatatttagtttgacaaaaggtatatacattcattaatcactacttaatcatatctctaatgctatggaactgtagccataattatagcgtaatagtatagtatttccactaattttggttaatcttcatcaataaacgggaccacgaaatactcgttccattaattaattctactatacatataattaattaaataattattatttaaactttgtctaacttaactaataacttgtttagttactacttatctggtgttggtgagctccattaaattctttaaatgttctagatgatgtagttttaatattcatagtaatagaaatacataaataaataaaaaaaaatcgtatgattaatttatactttagtatagtaacatttttttgttatatataaaattacttcaaattttatgttaatatctttaactaatattcatttaaaaaaaaaataaaagtaaactaatatagttatatgatatatatatctcttaaaaaatataatatataatatttattatttttttaaatagaattatcacttttgttcataatataaatttgtaagaatactctttttttataaagcatctaacttactattttaaataccgaaaatggaaaatatctctattagtagaaataatttttaagttctcatattaagtgattttttatgtgcatttttattaaatatatgtggtatttaataccactactatgcaccgccttgtgaatttagtaaaaaaatatatgacattcaatatttaattacgctaataattaacaatatattatcttgtagtaatattgaacaccactaatattttttaacatttctcaattccctataaagaattttaatattttattattttctataatatttcaaagagcattattaagtatcttaaggtgttcatattatgtagtgtttcataattagttaataattttttatatcatttatcaaattaaaatttataagactcaatatattaaatacactaataataatatgatattttttttgtagtgtttaggcccttaaattacctcttaacatttctctattttaaataactctgaacgaaaattattcttttttttttttatttttatttttgagagaggggagatctgcattttttacgtgacttgtaattaaattttaatggtatgtttacctaaagggaatgggaatgaatggtatggtattgattctcatacaattctttactacattttggaaagggagaaagtagtagaacccacaaaaatttgagagaaatcaaagggaaaggttctcctcctatttttatagggaatacttttccctttcctaggttaatttattttaattttaattttattaattaaaaataaaaaagacaaatatgtcctttaaaaatctataaacaaaaaaataattacatattctaa

SEQ ID NO: 384079 - DNA, 2344 bp, Cannabis indica
actcaaagatactaaataatctttttcactaaatttgagagaacctaagaaacctaaagcaaaatcattagttatataaatataaaattgacctgtcaaagcaaaaaaaaaaaaaaacttgaatagcagccaaattttggtgcttgaattgatagatgaaaataaaaccaccacccaaagagaacatgaaacgtgccacaatattttgatcacatcacactatattcctttacatcatggaaaatgactttcgttttggggaggtcactaaagtggttaccaatctatttcagaaccagaaattaaaaatgaaatgaaagtttttatatataaactttacaagttggtttgctttgctcatatgggtaaagatagtaggaagaaaaaaaaaagaaagaaagaaagaaagaaagtagtatgcattccaccagatcatgtccccttaagatttattggtcaaaagtccttaagttataccaaaacatcatctctaaggtattgagaagctctaaaactttgtagtgaaaatatgagtttctgtaaatagtaaccaacaagaacaagagagatggggctttgttgagactagagttttgatgagtattctattgctaaatcatcaggtattagtaccactcttaagagattcaaatctagacttaagtactaaaccaataagaaaaagctctttaacaaaaaagtatggatagaaagatataataccacttgaaataataagacaacgagtactatgtaactaactgtatacaaagatataataatatcagaaaagtactcccactaacttgtcctaagaccattattagtatctgaaaatgagttgctttaatacaacccttttttttcttcctttaattattgggacaattgtgataagacagaggtagataacacgtaccattttggagtttccatactgaatgacatatatggggtctgactcttgattgcctacaaagctcatggtgctgaccttgatcactacccactcaaaccactaatgataaatacgaatgagaatccaagacaacctgtgacctatgtatgattattagcttgttacacagggagctgcagatttgaatgcttgaagcagatgtaattctactcaatattttgtttaagtaccatatattccccatgtggtgaatagaaaaggaaaaaaaaaagtcacttttcttcattctgtctttcattattgttgttcttatgtttacattcagtatcatagattagtgtactagtgttttacacagctttaagcagccatgaaagaaagttgcaatataaaccaactaaagcttataaaaataaagtacatatacagcttttccagtatattataacttgtcctctgcccagtgtacaagggagattacgcataaagtaacactaacaaatggcctataatattgcgaagaaccatattgatctagaagaaacgcataattgcatatgtagaacctctcgagaaccatcgacaactgaacttaccagaatcataaatttacagtatttggcttgaagaagaaccaggacagctctttcctagtattgatggtccaggactaggagtctgttttacttcaatttccttttcgggcgatcgagggctttgtatccctctgattttactgtgatgtgggctgtatactctatgtgacagccttggactataaacttgttttgtatgctctagcgaagaaggcgttgagcttgtaacttttggactctgggtgcgacgaatctcaccacggcttcttgtgataatttcatcaagtatttctgcaccatcaatgttagtacttctttcctgtggatcctgatcctgttaacaataagggtaacaatggtatcagtagataaccttgaggataatctggttgaccaacccactatggttctccattaaaaaggctgcacataggtccacaaatgatttattcaacaggcctgaaaatgaagtgaggatttagacaacttacttcgtacgacatattgaaagcaatagcaggggcctcctcatattctgcagcatccaggtcctgaaggtgagctgatttgaaaaacttagggagaaaatattgcctcaccgggacaagaagcataatgaacattgggaaaagtagcccggcaattgggatccatgttatgccaaaacagacgagcaaataaactgtctggaataaggtgaatgtgacgattgttttgaagggtacagtttcaacaaaagttgcatgatagtctccagcaccctaacaaattatacaagaataatccattcattctccaggtcaaaaatgaaaaatgaaaaaaataaaaa

SEQ ID NO: 384080 - DNA, 1707 bp, Cannabis indica
agtagttggaaagagcaattattttttgctagtggaaaggaagtccttttgaaagctgtggtacacacaatccctacatatgctatgagctgctttcgtttgcctgttacactgtgtcatcaaattgagagcatgatggctaacttctggtggggatcaacgtcatctggtaatgcaattcattggaaaaattgaattctctttgtaaggctaaggttcatggtgggttaggcttccagaatttcatagatttcaatcaagctctcttagctaaacacgcatggcgtctattggaatcacctaattctctccttagtcgtatattgcatcacaaatattttttacatggcaatttgcttacagctggtttgggtgcttgcccttctctaacttggagaagcattgtctggggtaaggaacttcttgccaaaggccttcgagggagagtgggtactggtacacagattaattgcaaaatggattcatggcttcctggacatactgatttcacaccattatgtttcataggcattgataactctcttcaagttgttgatctaatagatcaacataggcattaggatctgacagtagtttctactaactttgggcaggcagacattgatcgaatactctccattcctctcagcatcttacctacagatgatgttttcatttggaatggcacaaatttgggtaattacatggtcaagtcaggatattactttgcaacttcaattgctgaacatcaagacacgggaaatacctttaattatgagcattggtggactgaattctggaaattaaagttaccttcaaagcttcgcatctttgtttggaaagtatttcataatgccttaccagtagctgccgaactgaaccgaagacacattgtagacactccttactgtccattgtgcaaactgcagcaagaaaccatcactcatgcactttttctatgcaccagggccaaagaagtatggcgcctctcgaatctaaacctgaacttcaaactggctgctacatcttctgctgaggaatttttgctctatgtctcggccaacacatcaacattagagtttgagcaattcttagccctttgttggagtatctggtttgagcgcaaatgcagaataccatgacaaatctcctaaacatcctgctgcaattctggtatttgccacagaatatcttgccaaatatcattccgttcatgccaaacctgtggccactagctctgttgctgccccaattgtacctccaacaattcatacaccagctacagcattagaagatccatggatagcaccaccagaaggcaaatacaaattaaatacagatgccctacaacaaagctgacaaaataattggaatagacgcagttttgcgagattcttctgggttacattaaagctgctttctcaaagtctattaaagggtgttataaaccagaagagatggaggctactgctctagcttttgctctgcaatggctcctaagtcttggattatctactgatcatattgaaactgattccttactagtagttcagggattaaaagctgcttctacttgtaattctgcctttcatgctatattaaaagatgttaactatcttgtatctttttttccacgagcacaggtcactcatgttaaacgatctgctaatacttatgcccatgttttggctaagtttgctcttacgg

SEQ ID NO: 384081 - DNA, 827 bp, Cannabis indica
gttaacgatattttctaaaagctgttcttttaatttatatgcgatctaatacttaattaatagcggtatgacacctagtaaattctctaaaataataataagtaaatttatttcttataagggcttggcagatttcaaaaatggtgctgctgatattgaattctacatcacatgcatgattcagatactcagccatgtgttttcacatgaaatgagggggctgcaaaagggtctttaaagcctgaccatttgaccgtcaaactcaaatatactataaaatatattttgtgtacgttttacacacattgagccaaacatgtatccaaattataatatatcgtacccttttcttttttgctaagaaaacccttttcattgaagttactcacaacttttttcttgaataaaccattaatacaattatttggatagaaaagtttattatatatgtgtcatgtggcataaaagagagtctttcagtctatgaattgagtgtaccatagtcagtttaagtttagaatataatgaaaacagaaatgaaatggccctgaactcgaggtagcttatttatatatatatatatatacatatattcatatagtgtaaatagagagagagagagctggttgtgagcagcaaaagcaatggcttatatgtggactgtagtgaggtttattcaactttatgagtgaggtgaccaaccagaagagcttgggatttggactgaaaatgattggtgactgtctctgagattctcagtatgtatgtacaattattattcgatgatgaaggaatcgggcaatttgagagcttctgttagaaatcac

SEQ ID NO: 384082 - DNA, 1020 bp, Cannabis indica
ttttttttttttttcactttgtgcagtttctttgagaagatttaacttctttcttcatttttggggttataaaaagataatttggaaattgtgcagtaattattcttgtagtttggttgggaagaaattgcaggatttgtcaagataaacaatgctcattgaattattctgtgataggagtaaattatgtgttgctgattggcttaaaagtgatatttattttaaatcattttcatttcatgtttttttttgagataatggcatgttttggctgagtttgtttttgtctttgcttctgtgcctgttcatattgatttttctagtggttatcagaatgcaatgcttacgttttttagttctgccatttataatgctatgattgttatctgtattaatattctaaaattgtgtggattgtcatgtttgctcgcgacttgacagcctccagaatacatgcccgagaatttgacaatgtattcagcatgggtaggaggagccattcttgcgaaagttgtgttcccgcagaaccagcatgtaaccaaggcagactatgatgaaactggaccttcagttgtgcataggaaatgcttctaacttctgacagtgtatttggttggcttaaagagtacttaactttctagtttttttttcttggtgttcatttaatatatacaattgtgtttactaattttagttgggatcaattgattgaattaggctctacctccacaaagatagcatctgatcgtgtattgttaatttattatgaaatatatatttatgtgatttgtggaaggtttgagaaaatgatgatagaaaaagtgatgatgagattgtgaatttgtgatgagctagaaaataataggaaaaaaaaaagtaatagagaaaaatgatgtaagatatgattatagagaaagtgatggagagagaggtggtgaaggaagaaaaaaaaaaacagtttttgaaataggagatatatatatatttatattttatttcttaattgcatttggtaaaaat

SEQ ID NO: 384083 - DNA, 2924 bp, Cannabis indica
acgatatataaaagtatacttgtttgactcgaatattagacacgtaaacttcaaacatagacttacagatttatatatatacacacgcacgcacgaggcaactaatttttaattagatttgaaaaaaaaaaaaaaaacgtattttatcagagataaagagagagatagaagagtttttatataatatatatacaaattaattacaaaatttaggagcttatatactctttttaatttaattatatatgtgtgttaaacatggtgaagttaaactttgctgattatatattcgttataagttgcatgagatttgatgtaatttattttgttcttaattattataattaattattagtaacatactttaatttaattttgaattctgatataatttattccgacaccttttcaggttactttcgtagcgttggatcccaactatcaaaataaaaaggccaaaataataaggatcatatataatatatatacttttaactgactgatatggtataagcaatagaaatagaatcatttttcttttttttacttttaacgattccgatgttaatgccccaaaatgtaacctttttttttaaaaaagaaaaacaatactagctagtactaaccagtccctctaaaaaaactcaaaaagggaatctcttagtcgaagaaattaatggggtttataagattgtagggtaagtatgtctcctcttttatgtaaaactttcctgtttctgttttgagatataaaactcctcttgttacattttgagaaattagaaaagaaaacaatgtacaatttcataacactcatatatatataaataaatattattattagctaggtagcttttctctccccgaacaccttttattctcgtcaaaaaaatcacttgggatttgattccctggccttgtttttcaaaaagcttgatatgatcaccttgcttcttctaaagctgaccaacacatttgggccccaaataaaaattaaattcacctacaaattaaaattgttatatgtgctctcttttaatttatttcaatctatagacgtaacaccttgcctacactgccttgccccactctcacctaccatgaataatattacctcactagctatatatatgtagctatttaattctaataataattattataatatgcttatgagctcgatccataatccatctttatctttaattttctcatgctatgatattctctcactctcactcgtaattatgattaatcagagggaaaaaaaaatcattgaatcatgactaactggtcttcgatcgacaacacaaagtcacaaagttagtccctagccaacaaccattatttatgcctggagagcatatatatatatatatttatatatttatatatgtaatgtatgacggcaattacattaattaatatatatgtgttactatgttaatattaattaagccagttgttaaaaatatttataatatgtggttaaaataatttgtcggcgaatcccttaaacgcgttttaccataaataaatctcaatttcatcttagttgagacttgtgtgttgtgatgtaacagctattaatttctaattcgcccttagcttgagaacatatagagtaatcatcattaaaaatatgacctttgcttcagacaactaactccctaacctaaatatatatttcagtgtaaaaagcttcatgtctcttccaatatttcctactcatcattttcccagccattatagtgacatattttataaatatcttaattaattatcttgcactaattatcttattaccatacaaatatatattattattacctaattaattataataattcaaaaatgtcattatcagtttccaatgttttcaggacaacttttatgcatattcataatcaaaaattaatttttttatcatcatgttcatggttaagatgtccttcataaataaaataggtgttagacttcatacatattatatataattgtatggcactcatttcttatttttaaaatcatactaataaaatcgtaaccaaagaataagagacaggtatatatatatataatatatttatatatacagtagcacagtggtagaatctataatccaatttgatcaaagcatttttacaatttcgtttttctcaactagctagctgtaacaagttgggataaagttacacttacactttgatgggggagcgctagaacttaaagaatatattatattgactcgaaaatatttttcattaattaggagagagacggctattttaataaattagttataatacattatttatttatttattttacagaaatcattacaaaaaattactttttttttagtgataattttatagtcgatcataacataaattttttgtgattaaatgtgacttctatagttacaataaaaatttacttatgattaaaacataatatttagatatatacaaattgtcactaatttaattatagttgcaacaaatatcgtgacaaaaaacacatttaattacagcaaatagtattttctgtggctaaaacttttagccacgaatcttttagtcacaatataataaaatgatttataattattcacaacttttttacttttaattataaattttgttgtgactaaaagcaagattttatacaataagtgataaaaatcaatctaatatgagccaaaatcaacaaaaacttccctaaaaaatttacacaataaaaccataaacaacaacacaagcccgacaaactcattcacattgtacaaaaatccaaaaaactcttaccaacataaatagaatgagaaaataaataactctaattagtaataataatgaaattattggaaaattcgcagtacgtttttttttttgtaataaatatacaaaggtactattttt

SEQ ID NO: 384084 - DNA, 1454 bp, Cannabis indica
gatatatatatatatatatatatacttaattatatcattgtttgtattgttagtaagtaataattaataatactaatttttatgattgtaatattaattaatatgtggatgcatgcagattgttctgttagtgggtacaaagcttgaattgatagtgatggagatggctgaagaaatccaagaccgaacgaccattgtgaggggtgctcctatagtagagccaagcaacaaattcttctggttcaatcgccctcactggattttgctcttgatacattttactttattcgaaaatgcatttcaaatggcatatttcctatggacatgggtgagctacctactctattctactacttctaatatgtatatttaatttcagtcaacttaattagtacttattttaataataatcataataaaaatacatataatgcagtacgaattcgggatcacatcttgcttccacgaaaacttaacagcaattctgataagagtctgcttaggcatagccttacaattcctttgcagctatataacttttccactatattcattaataacacaagtaagtaaaactcaaactcaaactcaccatccatatatttatttatatatatatatggggtgattctccattatattattgatttctgtgtaataagaacaactttccttaccctatatttggtagagaagaaagaaattaggatgtaagacaaaagtttgagaaaaagagaaattttaagatggaaatgaaagtttatttcttattatagatgtttggtatagaggaatgaaagaaagattatttttaagttataattttattctttatttattatcgtaaaattaaattaaaaaatagtatattagtaactaaattttttattagtagccttaaaatgttttccacttgcttttctctttaattttggagacatgaaaagcagcgcctaagattcctgcaaattactgaactgttagtaaatttaaagagtcatttattttttcacagttaattgtcaacataaagcttatgtgtacactcttgtacacgtaacacgtttatattagtacacctaataatattatttaaaaattataacaaaattataatattttattttctaatatttatttttattttataattttatttaattttaaaataaatattgaaataataatattaagtgtaccaatataaacgtatcacgtgtataagagtgtagacataaggagtcaatggttgcaattaactgtatgacaccttaaatttactaacaatttaataatttggaaagttttatagccaaaatttaaacttaaagggttaagtgtaagtgaaatgatagtttgaaggtttaacagccaaaaagtctttccactttactaaacgaagagtaagtgcacatagataggagaaataaaatttaggaacaaagtgtaaaaac

SEQ ID NO: 384085 - DNA, 2131 bp, Cannabis indica
ctgttttttaattttttaaaaaagttttgtcaaacgattcctataattaatttttaaaaactgatttcagtttttaaaaaaaaaaaacaaaaaacattttttaagatatgagctaaataggctctcctttattagtggtaattaagtattaagtctcatataatttaaaaaaaaaataacttttagagaatatcgttaaccaatcatagagtgttacctataaaaagtgttgaacaccacggagatgcttgatagcaatactctttataaatatataaactccatctctgttggtgctggtgtggtagtgtttttctgtaatggtgcctttttcaaactcttaataacatacaaattaacagtcaacagattctaggagtgttgttgtattttaactgttgaaatatgagttatgttgatttaaatttcatattattaatatatttttgtgctataattgtcaataattattgtgtaatgtaccatattaccaatatattattgtgtgccaaaaacaaagaaatagaaaaaagaagaacaaaaaattatgtctaaaagcatcaaaacttaactcaaaaaaactccttaaaacaacgaattatatataactaaattacatgactaatccttacaaataataataataaataacatgactaataaacacgtttgaatatatttccattattaatatatatatagtgatatgcattcagttttttcaacggtttaaaaaaattgttttagtatatttatatttttgtgtacatatatatttatttaattattttgatacgtaacatgtaattttgtcaacatatatacaaagcctatattatgtgtataaggtaaaatgtgagattgtaattataatttgagcataccaaactttaatttgaagtaattagataaatactatatttagtgtgattttattaaaaaataatttgaaagtacatatatacattattaggtcgttagatttcacagtgacactattggaaaaattatcaagtgatgagatgatgagcatggagcaagctgtggaagaggcttataatattaccttaaaaccatggcatagatggatatcttcagctgcctttaaggtatatattatctttttaattttgtttaatttgatacatagtagctaataaaatatataatataatattatattacaattatatttacaggtagctctgaaattagtaccagatcgtgaatacttcattagtcttattttggccaaagatgaaaattatgctactcttaaggaggagatgcacactttgattctattacttactccattactcgctcacattcattctattctggtaattaaccaaataattaattaattatatgtatagaacatgttgtttataagcatctaataatgattttaagtttttttttttttttttggttttgttgcagagtattttacggcttggaccggctaagggccacatgaaacaacattaattatatctatacaaatgacacatttgtatattgatctagctatacatataataaaaaatgttacaattgggaaattaagtaggtatagctaggcatgagctgaatgcaaattagttaatataaatagtatatcatttaatttgcatgggagggatatgatctccctcatgatcatgaatgtatctgaccatatatagtgtgtatggacactggacagtattagtgctgctgttatatattactatatatgattccactctgatgttataactattaattaatgctttcataaaattatattaattaagcttttaattactgctaattaccatttatatgttttgttttgcaaaataatctataacctatataattagctttttgggctttcactaattgaattacataattagcctttattatatattcaattataaaaattttaactaagcaattgaaacatgtacactatttactttttttttttctaaactaagcttctccctaattaatattttatcttttgtgaatatttgtgaaaatgagtattttgtcttattgtttttttttgttgctatcaataagtatattttcaaataaataatgcctctttattttttaagctaattttactaat

SEQ ID NO: 384086 - DNA, 1191 bp, Cannabis indica
agtaaaatataatagtgttggtggtaaattattaagtaaaataaaatatacaattgaaataaaagctacgattaacttttcccgttagaataaaatatatgactgagtgttggtggtaaagtttttacaataaaatttttggtttgggaataattacaactcgatttatatccaccttcaggtgttttattctaatcagatctagcttttattcacaaaccaaatcagttcaatggaaaatgctgaagtgtacaatagaaatcttttaaggagaatataatcaattcatattttcaacggtgtcgattcaaatttaagttttttgccctttttaagaatatgaaacatggctgcgtcggagaggaattacggactgtacaatcccaatggtactctggtgtataatatttagtcaaagttgattcttctctccaatattaaaaatttaaactaaaattttgatattgttttgttctccagcaaaacaaaaagatcataagcaatacacataaaaaaaaatgttatttatttaatcatttctacgatatttagttcaaactaagaaatttggtccttttttttatttaattgtagcaaggatctcatttatttattttatattgtattttttttttaataaaacctatttaaaaatatttattgtgaaaatattttgaattttttaaaagttagatatttcatattagttttttcttaaaaaaaataattggaaaataaagaggtatattttatgatatttaatcttattaactgaaaatttaaataaaaaaattcaatcagtatatccttctttcaattggtatataccagattttagtattcgatatgtctatgcatgtgaaaattaatccatgtattaaatcaattatatatgtatcactcataattattctaactctattcctttttgccaccatcactgttattaatttactaatagattgaaattatttttgttctattattggtagggttggttttgttgggttttgtgccctaataaaactcatttcaatataatcagatttacttattaataaagatcagaaataatattttatgttgcatggttcacataatttatttcatgattatatatatatataatgtatgaattcttattaagttcagacatatgaatttgttaatgattatagtgttgtcagcaca

SEQ ID NO: 384087 - DNA, 2299 bp, Cannabis indica
tatttctggaatatagacaggtggcgtaatcttaaggtaatcatcacttaaagttgggctcaagccttcccgctctcaaaatgccagtccaaacctggaacaggcccaagcccaacaaagacccaaaactttgtctcggggacataatgttcttctaaggcccgaaaattaaacctctctagcctctcgggacacgaatggaatgaagacctcctaatgacgataaggtcacatcttgaggcaggctacatgtgatgctcctagatgcctaccacaggataacgcttagaagcctaccatgaacctagagccaaatgtctatcgcaggttgagtaccagatgtctaccgctaaatgagagatggatgtctcccctaaaatgacgtgtccacctcttttacgcaagatcaaatatttttccctatgttagaacatgatagtgtgcgcaccaccactgcatacaccccttttgtttgacagctcccttaacacctttgtcttttaggcgtgacctccgtgcaacacgtgtaatgcactaaacggtctcctcatcaatacaaaactgttgtcccacgagctggatatccttagtgagacttatagtcatgtatttgtgtattttaccccattagtggactccctttaacaataaaacttgaatgggtcacgggtatgtccagacccaagctctagcctatataaatcatactacccattcatgcaaaggggacagaactttagccgaagctctactagtttttattctaagttttcttcttccctaagagagacttagagaaaccatcttatagaaaggggtagggttccttattgtaaaatttatttgtagcattttcaagcctaaaaggccaatacactaactcgtgaactaggaataactaacgtccgaaccacgtaaaaattatccatctcttttacttaatctttatttaaattcttgaagctctcacttatttagtttttcgaaaattttaataaataataaccaattataggacgccacctctagataatgttaggcaccactagtacccaataacaatacttcaaaattaattagggacaccgtctcactcaagcatacaattttgtacactagccattaggactttcaaccattgtaatttattatataaaaattttaaaaaaaatcttacaaattaggtgatgtttgatttggtgtaatagaaatgtaatgataatagtaatagtaatgtaatagaataggaatcgtaatggtaattaattacaaattactgtgtttggtttggtgtgggaatgtaatgaaataaatgtatattgactgaaatattcttattacttttattttttataattataaaatatttaaataaaaggtaaaataaacttttgaattttttattatatttttattataatattatattaattttgtaatggattgtaattgtaatgaccattacaatggttttattattgtaaagaggattaccatatacaatgtaataaccattacaatgtaatggattacaaaatttagaaaagaaaagtaaacaaagtaataaacatattgattaccatgacaattctcattcgtataaaccaaacataattagttgtatatattatagaactaatagtacccagaataaaagtaaatgtattagatgataccttgtatttttaatataatataagataataccctaaaaagcagtaatctttatattatttttaaaataaagactaattactaatttaaaaaaattaaggtttcttgttcttaaattgaggttgtcttcttttctccggtcaagcccaccgaaatttcctaggcataggtgcgatttgattggagttgtgtacttgctattgcgattcgatttttgatactgtgagtaatcttgtctctgtaacatggttttaagtattttagtcttgtctctgtaacattgttttgagtatttaagtcttgtctggtgacataattttattttattgttggttcttttttgttctttgatggtttgttattaaatcgttgttagtggttgggaataacaagttctatgtgactgaatgaatttttggtagtgcaattacttaccttgcataatagtgagtgctcaagctacgaggttgagttaatgaacctattgtaatagtttttactgttgtatttttttgagtggtagatgaaattgaatataaatattcttaaaattaatggtgatgctgcaatctttttagtttgattttgttttagtttttttgtcaaacgatttgagaattaagcg

SEQ ID NO: 384088 - DNA, 935 bp, Cannabis indica
tatatatttatatatattgaaatataactttagcttttgtggtataaataaatgttatttatacatacaggagtcaaatatgtagttacaaataatcattataaattcacaatccaaatcaatttgttgagttggtatagatgaaatgatcatgttagacatatatgtgtgtgtatgcttttttttgggtagagtttggaagtgtaaaaagcttgcaaagaaaatgacttatcagccaatagccctctctgcctacaagacttgtgcctgtggtccatactctataattatttttttgggatctttggatcacatcgatcattgactctttgatgtggttttaccatgtatgctgcacaatatcatagtaattaatttgtagtctttatgagtgtggataataattccttcttcaattcattcatttatatgaataatttctcttcttaatttaatgaaagttgtaagtctggtttgttttttctatttaaattttattctttttaggagtttctatttatatttatatgtatttattgatcattggtgcagatctcattaacgtttctgagttacaactttagtagtgactggtatcattttatgaaaatgacaattaattgttattttaaaagaagaaaaagctcatctgtacccattagattatatttttttttttgtagcaaattatactatatacttatttcaatttgatatctttaattttaactctattttttaaaatttattatgtttatttcttttttctaatcattctaccaattttacccatatcactttacgataattttcataaatttttattcaaaatgttggccaaactttctcacaaacctacacatccatctacaaaaaatataaatttattatgtttgaaattatatcgtagttatgtgagtgtgtgaggataattt

SEQ ID NO: 384089 - DNA, 2079 bp, Cannabis indica
ttagttatgtttttctaaaagttattttcttaaattagatggtacccgatacttaattacactaataataatataatatcgaaaagaatgttaggcaccaatagtaccttttagcaattttttaattatttttttatattatttgaatgaggttttcaacgtaatttttaattattttaatattatttgtatgaaccctgtaaaaatataaaaaataaatctttaaccataaaagtataaaattttaccagaaataataatttatataaaattttcttttttaattttatgaaaagtaaaaggtgaccaaacaatatcatatgggcctatatgacaactatatatgatgaaaataatatacaaaccaccacttttgtgtattttggatcatgccaaaactatatattatgaatttatgatgaaaagaaatatcactatcaatagaagagaagattggttcatgcaccttccatttattacaaatactcatgacaccttatcattgtgttttttattctattttttgcttgagtcattacttaaggtaatttattttttatattaatttttttcttttgataattgaaatgagtttaggttgtgcatatcttaaccttaatctttcggcttaataacaattccaaaactattgaggagtaagttaagatttatacacgatctttaagatagttgtcagctgagactcttcttacgcagaatacactgacacttattacttaagataacgtattaccatgaaaattcaaactccaaaaaataacaaagtgagaaagcgtatacaaagcatctcaaccactataccctacaatcaataatttttttatattggttattaaatttaaatttaaactcttcatattaaattatactaataacaaatatatataaaaatatttaaaccaaatagattaaagtaattattattattctaatttttaaccatttttatcaaataattaaagtgatactccactcattttttagtcacatttattattaatttctctaaccatacatagaatctgtggagtgtggaagcttattggtaagaaaattattataatctaaaatatgttaacatatcactattactaacctttatatgtatcacatataggtcaatatgtaatataaatattacatgtaataatactagaaaaaaattatgtaaacaatgacatatataaatatagttatttgcattaattaatgtatattattgccacttgtagagtttgtcaagttgcaaatggaagctatatagaaagagcaacccattatagattcttataatagaaaaattgtaaagagtaaaaataacaaaatcattggaagtttagaagtagacacaagagtagagaccacctaataaagcaagaccaaccacgtttctaatgtatgtggacctatatatataaatattatgtatatttgtggttatataattaaagatgaaaaaatatctcgattttaaatttagtattgctacgagatacttatggtgtttattactacgataaattctcactttataaataattaacaattttctgtaacatttattataataaaacaagtcacattcgatattaagttgcatcaataatatacaaaggtattagacactatgagtaccctttaacatttctctttcgaatcgagtcggatttaactggcagggcgctttaacgccgttgccctgccatgccactgtataatttatattcattatttatttgtcgggggtattatagaacacttatttttttatagtgtttatggtagttatagtgattttttttttataaatttttgagaaattttaaatattttacagtgtttaaaaataaatttaaacttaataacttagttattttgtacatgtttttctattatacttaagtgaaattaaagttttgatcaaactctattttcgacattattgggtgcttctataaatactttctttaaaaagaaagcacagatgcactatttacttatttcgttatataaaaaaaaactattctagtttatgttttttatatttgtgtatgttat

SEQ ID NO: 384090 - DNA, 1379 bp, Cannabis indica
tttttttcatttttagccaatgtaagaatttagttgcacaattaataacaattctctccaaataaattagggccatcttgccttgctagaacgattttctatctctctactctctagtaccaattagtattttccctttaatgtgttagaaacacatcttacatgaagcattttcgttctttaggccaattcctctatttaaagcacactgctggactaactaaacatatctacaaatcccatcataagattattgaggttcatctctttttttcagtaaattttgaggattcaatcgtattgctaactttaaaattcagttttgataccacttgttaaaacattaaataatatttatctttgttttaggcctaagtactcacaaatttatttttgaacatcatttcgaaaaatatcataacaatagagatactatccatcttattttccatttctagctggtttttagctgcacactcaacccaaattataatatatatatatatatataattacatattgtaacgtatattaattactatcttatatatgtagactgacatgtatagaattcttttctaacatcactatataagggtgtttcctgagaaatatataaatatatatgtattaggattttgtgatgaatgatgatatatatggcgagacatgcaaggaatatttttcaatgtaatagtagcttttgatgttagtggcgatgggtgtcctatcaattataattgcacacacatatgtatataaataaaaacttaatattgctatagctagggaacactagacctcactagcgtatatatttgtgctttataattatgacaaattagcatattgctattcaagatgcccattagtatatattcttttatttttcagggttctgtaaatttagccatggctcagtcatgttaaaataaaattaatacatataatgttaatgtgggtcccattacatgtaatatttttttaaaagaaaaacttttattgcaaaactaagccaattggctgaaaaaacatcagccaatactggaggaaaattgtccaatcaagtagaattacaattagaagatttagcaagctgggccagaaaaatgggttgacttcgttttaaggcaagaggaatggaatgaactaacacagtgttacaccaaactgaactcgaaagcttcatccaagagagcgctccactccgtcctaccagaggatctatgacacagatagttaatattgtgatgcatgcaatcaaaggtcaaatacaaagcttgaatctcaagttattgcttgattaaattcaacccaatatgacagtcaaacattcagccaaatatacagagatattcatatttaggatgttaattcaa

SEQ ID NO: 384091 - DNA, 1382 bp, Cannabis indica
ctaactaactctctcatctaacaatctccctcaaactaagtgtagaagctgaaaccacactgagtttgtcacatgtaacaggaaacctgaagcttgaaatggccttggttaagcaatcaacaagttaatcctgagcagggacatgtaacacttgtaagtggccttgaagaaccttgtcacgcacataatatatgtctattttgatgtgctttgttcgagcatgcaaaataggattggcaaccatcattactgtaccgagattgtcacaccacaccttaggaatcgagggagatgatatgcacaatttagagagtaaatattaaagccaggttatatctgttacaagagcagctagattgtgaaactcaacttcagtagatgatcgagagatagtttgctgcttctttgatttccatgctacaaggttagaatcaagaagaacacaatagccacttgtagaccttctgtcatcaggatcagaggcccagtctgcttcacaaaaggcttgtacagcaaaactagagcatttagttagatgaataccatggtcaagagaaccaactaaatacccgagtattctcttcactgcaatccaatgagattcaaatggagattgcatgaattaggaaactttattgactgaatatgctatgttaggcctagttattgtagcatactacaatgccccctgtaaagagatggatcaaggataggatcacttccaaactgagatagtttgaggctattggtcatagaggtagagcttgttttggcaccttgcattttggttctacagaggagatcttggaggtatttcttttgtgatagatggataccagagtctgtatgtgtcacttgaatcccaaggaaatagctgagttctcctaaatctttttaggcaaatgttgagtgaagatctgtgatgagtcttgtcacttgagcatcactatttccaattaaaagaatgtcatcaacataaactaatatgtaggtgacatgttcaggatgaactctaatgaagtgggaagtatgtgtttttgaggactgaaatccaaactgtattaaagcttttgaaagtttgacaaaccaagcccttggagcttgctttaatccatagagatatttcttgagtttgaaaactttatttggaaattaaagatcaataaaactaggaggttatgtcatgtatacttcatctttaagatcactatttaaaaatgcattgatgatgtcaattggccttattttccatcctttagggcatctccagtggagaaagccaaatttggtgttaaatcaacaccaaaaactactatttcaacactaatttttttttcaattccaaccacaacactaaaaattacaccaaatattatattctt

SEQ ID NO: 384092 - DNA, 929 bp, Cannabis indica
aggagagaaagacataatgatatatgcaatcagttcaataagctggatcccaacaattctggaaagataacattgcctgatctgtttgagaatcgcatgtgatgcaaagaataggttggaaaattctattctattctttgagttcgagttgaagcaaagggatttgatttcctttgattttatttttttgagctaaaacttcatgcaagattgagagggatactactacgcttcacttcacactagtttttgctcttcatacaaactgtgcatacatactcttgcactccttgccacggattgtgcatttacagaaaaatgtagatatcgataatttttttcttcttctttccatatactatatttagttatatatcaaatgagaaagtaaattatgaagaaaaaaaaaccgagaaaatgtatagattggattcctttcttgaacttgagaaaatttatctcatgtaatgtggtatcaaagtgtataatgtaggtggatatgtagagcttttttgactttgtaatgtaatgagtctaaaagcaattactgctcattttgttgttagagttaagaatgtgtgtctctctacatgcttatattaaagtagaaaagaatgttcgttccttagtctagtctctagtaaaatgattgtgatgcatcttgtgcaaaatagaagaaaaagaaaaattgtttgtgatgcataggtggtccgatgtctgttcctctatatcattaattaatggataattataatttaattaattggctcatctctagtggtgactagtgagagtattgacaaaagaaaagggttcacaatggcactctcctctccactccacattggagggaaatgaagaattaaggtaaacactattttggaccctatgttttgcaaaagttaccgattggaccctctattttgtta

SEQ ID NO: 384093 - DNA, 1084 bp, Cannabis indica
agtaagatgagagggcaactaattaaaattgtaattataaagtagtgcgaacataatgataagaaaattgcattgaagaaataagattatactgccttttatatttagactacactgcatgtaatgatgaaagcgaaagccaaaaaaagcaaagatagatattaaagaacgagcacataaatcccattgtttttcgtgtaaagtcacaaacacgcagacttctggcatccaaagcagtggtcatgaagctagactccctttcttttttacccctattttcaataaataaccctgtttgtttcttcttttatgtttgaataccattcacattcttctgtcgtttcccattttaaaagctgaaaaaaattaccataaaaaaaagggatggtctctttggttggtcctatatgatctgccctgcgctcctccaaagggctcctctcgttttatcctctacttctattttatatgttctcatctttgtttttctgcccaatactatacactactactacaggtggagctactacttccatatgtacatatttatgtgcaccacacccacctttatctctactttccatttataaccatacatatatacataaatgcatatgtattaccttctaacactatgtaaaggttgacaacatttttgaaaatgggctagtgctacgtacctattctgcacatacatactttggtccattctatttaaatttcgctatgtacctttaaatttttgcattattattgcatgtggaactggggaccatacattttaaataaattagctagaaaatttgagtttttatgcaactaagaacaaaattgacctactattaaatttcatgacaaaaattattgtaatgtttcattgtgttcacaaaacacccctctcatttgaaaattctccctttcttctaacttagtttcccacccatcaactctcattcattttgatgtttcctgttagtgattttatcataatacaaaaaaaattataatatattacaactctatctgcatgtgatataatataataactaataaaaagattaaataaatattagagtacatatat

SEQ ID NO: 384094 - DNA, 1703 bp, Cannabis indica
ttaatgtttatgcttctgactgaatctagtttcaacttacaggttgtcacatatttcttttacaaaaatcttacatttactttgactcaattttggttcacctttcaaactggattttctggtcaaaggttctatgatgactggtttcaatccttatacaatgttatatttacggccctgcctgtgataatggttggtctttttgacaaggtattgctgtttttttggtcaaacacacaacttgtacttttaagctacgggaagtcataaaaatatgtacagtatttgcagtttacagtttagtattttttttaaggttgtattcttattagtaaatgcatgtccatgtataacttccatttgagatgataaaaagatgatcattgattggttatttctgctcttttcaggatgtcagtgcatcactttccaagaaatatcctgaaatatacatggagggaataaagaatgtattctttaaatggagggtggtggccgtatgggcctttttttctgtctaccaatctctgatcttctactactttgtgagctcgtctagttcaaatgctcaaaattcatctggcaagatgtttggtctttgggatgtcagcacaatggcatttacttgtgttgtagttactgttaacatacgtcttcttttgatgtgcaattcaattacaaggtggcattacatcagtgttggaggaagcattttagcatggtttgtatttattttcatatactctggtattatgactccatatgatcgacaggtgggttttgatttccttgtttcttagtgttgatttttatttttcataaatttcatcccattattctttgtgctgatttgcccatttctggaatatttcaggaaaatgtttattttgtcatctatgtcttgatgagcacattctatttctacttgacgactctacttgttcctattgttgctcttcttggggatttcatttaccaagggtatgaaaataacgtattggagagagaatgtgtggtttttatattaagttttgcccatgatatgaatagctcctgatttttgtcatatgtatataggattcaaagatggttcttcccctatgattatcagattgttcaggaaattcacaggcatgaaccggaaggtagaaccaggacggaattgctggagattagaagccagcttacaccagccgaggaaaggagccacgccatagctcaactaccacgagagttatcaaaacacacaggctttgcttttgattcacctggctacgagtcattcttcgccgcacagctaggtgtctttgcacctcagaaagcgtgggatgttgctcgaagagccagcatgaagtcccgacccaaattagggaataagaaataaactacacaagattcttgtataaaaatcccattttgacactagatttagaaaaatttgtaaattagtttgttcgatatcttagtattagttatgtttttgatatatatatgtatttacatataggttacatttgaattttgtttccacttttatggactttattgagaagctgtagttgttctagggttgtagccaatgtacatttaaatggtctataatcatacactgagtatttttttctcctacaaatttttgaaaaaagatattggccataaaattatttaaattttatgttttttaacacttaattacaaaaatt

SEQ ID NO: 384095 - DNA, 1132 bp, Cannabis indica
atagtggaggacttgctgttctttggagaaataaggatgaagagaattgaagaccttcagtactcaccacatcgatatgatcataactgcccctgaatggccccaatgtcgtctcactggtgtctatggagaaccaaatcgatcaaaaaaggaaactcacctggaagctcattagtgatcttgctaagttgtccaatctgccatggtgcctcataggagatatgaacaatgtcacttgtcaaagtgataaaagaggaggaagaccttatcctacttggctcattgaaggctttcaaagtgtgttaactagttgtggactcattgatatggagatggaaggttacaaattcacatgggaaagaggaaagggtacagataactggattgaagtcaagcttgatcgagcgtttgtcacttcaagttggcttgataagtttccaaatgcaagactcaccaatctagaagtttctacatcagaccattgtccaattcttctatcccctgctgtccaaattcacaaacctcccaaccgtaacttcaaattcgagaatgcttggctccgtgagccaatgtgcaggaagttggttgaagatgtttggttgctgcatcaagacttatctattgctgaaaaaataaaaaaatgctctgaagtcctggccgactggggaagagaaataactggtaattttcaagcaagaattgctgaatgtaaaaaaagaattaagttgctgaaagggagacgggacattgattcggccaaaagatacaaggaggaaaatgaaaagcttgctgaaatcctttctcagaaagaaattttttggcgacagagatctaagcagctatggctcaaggaaggtgaccataattctaaatattttcatgctgctgctaagacaagaaaacgaaacaatcagattaattctctccgaaatgacgctggtattatggttggttgggatgatggaattcaagatgttatggtgggatattttcaacaattattcacccccacggtaactagctggaaccaggtaatagattgtatcccaacaactattactccgattcaaaatatgcatatttcagccccggttgaagagagtgaagtcaaaaaagccttgttccagatgca

SEQ ID NO: 384096 - DNA, 1961 bp, Cannabis indica
tatataatctttgattaatataaataaataccttggtttcttgactaggaaccacctcctcaacaatagttgaattgggtgtgtataagatgttattatatcattttcaaaggagtttttccacatggccatgggaacctgtctgaatggctcatatatccccatttctcttgacctttcaaactgtacagttgatgaagaagagctcataccctgtcaactaattaacatcattataattactactattaatcaatatatgccctttctttggtatgatttcatttgggtgtgatcttatatatatatgtataggttaattaaatgttgggttcaccatttcacaaccacaactcctaaactaatatacatttatttactttatagcattaaacaaggaaagataaactaccatattatcacctctgataaaatccttcagtcagaggccttgtttgcaaaactggatgactacaaaatcaccacccaataagacctgaaacatctaaaataaaaatcatcaagacccaaaatataataaggaaaaaaaaagctatttatgtatgtatatatatacagatataatagctgaagaagaagaacaacactataataaaggtctgaactttgaaattatgtgttgtttatctttcttttcttcttcttcttttttttttttttttacttttttttgtttctcattttccatctcactttctcagtaaccaatcaatcaagagttgaacagaacaaaacagaggaattcaataaaagaagaagagaagcacaaaaccaactaaccttaggaatgaaatgcaatgggcccaagtgaagaatgagagatgagaatgaattaagacagagtgtaattgtagtattgactattaaacagtcctggattttgggaacccaaaacaaaaatttcagagaatgagactgctaaggatattataaagcaaaactaaaagcaattgtcaccaaattattattattattattaaataaaataaaagaaaggatagaaacttgctccattaaaataattcagcttcttttgccaaagtggtacagtaaacccgtttgtgtagccatttcgcccctacttcgtaccaagtcactgatgtgtctcattgccactcttcactttttgttttcgttttttatacgaaaaaataaataaggaagaaaaaaaaaatacatattaggaaaaatttgttgacatcaccggtgccatcatatcatgtcgtaatgtgtggttgagatgtattcatgggtccactaagtgaaaatcgggtagtgacacgtgtacagattcaggtggttgatgacattagacccctcaatatagtatatagaatataattgtttaacaaaaatctttaaatctaaccatcgttatagttcataaagaatttataacaaccagaaattcaagagacataatttagtacatgtcaaagtttaaggaaaaaaaatcttaattagtctttcgaaaaatatacaaaacatttcttttttaattctttttaattaaattacaaatttcatatataaaatgataggatatttgtgtagtacactacacatctttaaggatcttttggtaattaaaaaaaatagtttaattttttttagatgcccaaacataataaatataattgtatactaatcttgtaacttaaaaataacccaaattcattaatatatttattttgctgaaatttcaaatcatattatagtgtctaacttattattttgtcgcttttatcgaaagccaacaacacaaaagagtgtagattggagattgtattgatttgtttgtgtataatattatattaaaatgtgtttaatattatatatgttgggctacgttcttttattttgtcaagtcactacttcattttgcctcccacattagtatgatagccttcacggttttatttttgggcaccttcccaaaa

SEQ ID NO: 384097 - DNA, 811 bp, Cannabis indica
tatccaccaggattcaaaagcaacaaaacaaaagatgctgcaactaatcaagttcaaacaagttctgagcagatctcttcgaaggaagaacctcatacactgctgcctcaactcaatgccactcaatatcaacaacttttaactcttttggccaatcaacatactggtataaccactaccgatccaggttcttgttcaggaactacaggtactatcttgtccaactattgtgttactcccacaagtgaatcttggataatagattcaggagctactaagcacatatgcaacaatataaaactgtttcaattcctctgtcatataccaaaagtaagattacttctacccaataatgaattcatttttgtccagcaaagtggctctatcttcatcaatgataatcttactttaactgatgttctttatgccccacattttaaatataacatcatttcggtcagtagcttaaccaccaataatgcaatatctgttaagttcactgataatgacttccatatgcaggaccaactccacctgaaggagattggcagaggtagaaacataaatggtctttacattttggatgctattcaacctgagagagttctagctgtcacggctgacttatggcattcaagattgggacacctatcccacaaaagattagctcttttgagtgacaaattaaattgcactgtaaacaatttacataaacattctccttgctacattttccctttggcaaaacaaagaaagttaccttttttgatcttgttcattgtgatacttggggtccttatcatatcccatc

SEQ ID NO: 384098 - DNA, 2947 bp, Cannabis indica
cacaatattgttctttttttttgacgcgacacatattgttcttaatcgtacttaatttaaaattaatctttgatcttgatgcctacaataaaaatatgaaaattactaaaaagtatgtgtttaacactctcttaaatgtcatacatttattgatgtaattaagtattaaattccatataataatttaagaaaataacttttagggaatattgctaaccaatcgtgaagcgtcacctataaaaagtgttgggcaccaatattattacaataacaatgactctaaaaatatttatgtctttattatattaatgatatattaattaaaaaaagaagttactatagaaaagccaactaatttgtgggaactttaatttggtcacaataatcatatatattatcatgcattgaccaaaccttgagaaattcaacttgataattattcattaaacattaaacactatacaaaaatactttagtttatgtaatatatatacataacttgttggttgagatatataatatattgtggtataatatgtatagatatagtcctccattaaataaattatatatatagagagaattatttgtcacttgcgaaagtgttatagaagaacaaagcacaagaaagacttttcacgaaagcatcactctatctactttatattccaagctgatgatcattttaatttcttattactaacattaattattatttaatttaatttactataagtatacatataattaattaatatactcattttaataataatattaatgataataccattcttcctaccaatctgaatcggagtagttgtgtgaagcttctttgaaacttaatatatatcaatcctaatcttatcatatcatcatatatgtatatatcatatcatgtataatatatatggctgcatggcatcatatgactcatgcatatgatatatatatttacatatatatatatatagatatagtttttgttgatgtgtgaatatattaaaaagggggcaggagaccgatgtaagaagaggacagacatcctcattctcaaataatggggttagatccgcattaataggctcacgtattctcatgcaaatttaattcatttttattaattatataaatatttataaaatgtaataattaatattatttctcaagaaaaaaaaaaaaagagacaaaactactgttggccgttgacccttcgatcttcacaggctaactgttggactgaatcttttttatgttatcttttccattcttttattcaaataatgacaaaaagtattggtactaatactgtcctcccaatctgtgtaaacatatataatattattatacatttaaatcttatatatataaatatataactaaatatttataataatgatcatgaaatctcatcatattcaaattcaattccaattaattgtgaaatattgggtttgtttattaattaagatttaagggcaccataaaaaaactatatggtggtttcaaactttcaaatattggtttctatagcattattaatattgcattaagttaatgatgatttatatatatatacatatttatatatatagaatgttattattacaagtaccgattaaggtacgtagctagggcacactttattaaaaacattatttctccctggtacaaattcgaaaagtttatgaatcttaattttgattaaagtctatctagctgtacacgtaactgtatatgttcttttaaatttatatgtatatataatatgcttaattaaaatgtattgtaaattataaattaactgtcaaaatatgattaatattcaaagagatccagactatagcattagtagtgctacttatatatatgtacattgtattcagcatcttttaatatcttataatataaataattatggtagaatattttatatttagtaattaatgaattgattgattttattttgatttgataaattaaagaaattatttcataattgattaaatattctaatattgatagtcatcatttatttaatttctcaattaatttttttaataataatattattaaattaaatattatgataattaatgtgtcatatatagactttgatgaaatctatataaatataaggcatctactcattcagtttctatgaaatcattatcaaagagagcttggaagatccattaatatgtgctttctctcttatttttccaaattcaaaaatccgatcaacatatttgtgagatataaatttacattcatcaatggcttagggtacatataaatatatatatatatatattcgatcatctttattcattattccgcaattgtttattacggatacatatttatatataatcaaaatatcgaccgtaatcatttcttcttctctgatctgttttcattatatatatttaaatgtatttttcttttgtggtatcgagccttacaaatttttagaaataatattactaatgtaataatctacattactaggatatggtacatatatatgatctgtagtagacgagaggcccgtgagtgtgatgtgtgtgtatatatacatgtatatatgtaagggtatatataatatatatataaatatatatatgtatggtttttattaagagttagtcccacattgctaatgtgtggaaataaattgtgatatataagacaaaagggctactcctcccattgccaattggttttgggatggaacctcattcatcttattcctcaaattctaacatggtatcagagccacttgtgatccgttgtgagcccaaattgccaccggtccaaaaagtcgtttgtgatccgttgtgagccaaagtgctgccggtccaaacagatacttccgcttctcccctttaacctccatttgggacctttcgaccaatgtgtgccaatttccagtgttggggtcttt

SEQ ID NO: 384099 - DNA, 1765 bp, Cannabis indica
  modified_base (1681)..(1681): a, c, t, g, unknown or other
ttttattccattccattccattcctatttctattctcattctcatttctattcctatatttcattcctcccaactaaacgcctcttaaatttatttagtccaatcttatatggtttggttagaattgattaaggtttgcaacacgaattcatatcatatgagcatgcctaaagtgattcactcaatctccataaaaagtatatagaaaaaagtacctcatcatccacataaaaatccatactttgacccaacccaagaaagggtttaaggtaaataaaaaccctattttttgtttcatcaacttcttcttccttctcctatttactgaaatcagttaacaatgaggtttggattcgcaatctctcattgcccaatcctaccttccttccgccgctctttcttaacccatcgctatctttcttctcaatcccaaatcacttcaagcttcgatcttcaagacccatcttcaccagaaaccaaagttgaaaactttactcaacccacttcacaattaccggatttgacacaaccccatgtgataaacaatctcctaaaccacagaaaagacccttactcagctttaaggtacttcaaatgggtagaaggaatgagaggctttgctaaagggattgattccttttgtgttttgcttcacattttgacaggtttttctgagactcatggacaagttaggagcttgcttaaccagtttgtttcaggtgattcaagtccatctccatctgtgtttgtagatcacttggttgagtgtggttcaaggtttgattttgaattggattccagggttttcaattacttgttgaatagttatgttagagctaataggataagagatgctataatttgttttgataagatgttagagcatgagatagttccttggattccatttatgaatattcttttgactgtattggttagaagaaacatgttgattgaagctagagaattgcataataagatggttttgaaaggagtttatggtgattgtgtaactgtacatgtcatgatgaggtcttgtttgaaggaagagaggttagaggaagccgaaaactattttagtgaggcgaatgatagaggtatcgaacttgatgctgcggcttatagtattttgattcaagctgtttgtaagaaacccgattctaggatggcttgtgagttgttaaagaaaatgagagaattgggttggtttccctctgagggtatatttacttgtgttattggagcttgtgtgaagcaggggaatgtggttgaagcattgaagattaaggatgaaatgattaggtgtggaaagcctttgaatttggttgttgcaacaagtttgatcaaagggtattgtgtgcaagggaatttggatagtgctttggatttgttcgataatctcaacaagcatggcttgagtccgaacaaggttacttatgcaatcatgatagagtggtgttccaagagtggaaagattgagaaggcttatgagcttttacaaccaaatgaaacacataggtatcgaacccaaatgtctacgtagtgaattctttgttacgcgggggtattggaattcggttcgtatgaagatgctttgaagttgtttgatgaggctgttgagtgtggtgttgctacatgttcacatggataaccttttatgttggctttgtataaaggcagngtaaatgaagcttgtggaaatatggggatagtatgagtagtaggggaaaatgggtacctaatagtgtaatcttataacataatg

SEQ ID NO: 384100 - DNA, 1495 bp, Cannabis indica
aaaaaataaaaaaaaaattaattcacagacatttaggtctgttagaatttgaagcaaaaatcgtccgcttctatttatacccaacgctaaaggtcttagtttctatttataaatgaaggtgaaggactcttattatacgaaatccccatattcaaattaggtttcccatttctatcgtgtagtagagcctagggatgcacatttccctatggggatggggctcgcggggacccacccctaatggggaagggattccccgtctaaatggggaatgtgacgaggacgaagattattttttttcccctaatgttaaacggggtggggatggggatcacagtccccgccccaacaaggatccatttagtattttatcttatatttctagtaatattttataattttatgtttgcatttttttagtatattaatatctttttcatgaattttaagttgtgttttagataataattagtttattaaatactaattaatgtgtaatattttcatttttatgtagtttattatttttttatattaaaaattttattacaaactttattttcctattaggggatcccttgtccccaccccccattaggggattccctgccctatccccgataaggaataagcggggatggggattaaaatccttaacgaggatggggacgggggagcactccccaccaattcctcgccccgtgtgcatccctagtagagcctctcttctatctctctctgtgccttaaacctaaaccccattgacgccgcaccacctcattctgcatgaatcctagctctctctttctctaccccaaaccaaaaaacccattgacgtcggagaactctcctccacttgctcctcccactctcgttctctcgttcccttgttctcttgggccttcttctctcactctcttctcctttcttgattttctattttgctccatcaagttggaagctcatctctgttgctccacagcaaagtcagaattagaagcacgggctctcttcagcatacttcgaatggatgaacccatctggtagctctgttaagtgtaggatctttttgtggttgtagcagtagtcataggtgccttgggtggggtaggttgagggttgagagatatactccgtgggatttcagggtacatgggtggttttcctttggataatgaagttatcactgtagaaacaatgatggggttagagataatggggcaagtaatggaagagggggttggtgcgttatgggtgatattggaggtggtcagtgttggaaatattttaccggtatctagatttactaacaagtatgcttcattgacatcctaatatgaatttctaaaacaatgaaatatacacataagggtttaagaaaacctaaaatggggagcagcggaatataatgactccttccgttctgatctctagcccttgattcctttctgtagcacaacattatcaagatatgaacctggatctctttttctcc

SEQ ID NO: 384101 - DNA, 3912 bp, Cannabis indica
aaactctcttattacatatttacttcaacccatataacccattcatgatgatatgttgtgtactcaaaaagtagtacttttatcagcttttggtttggttagaactaacacacaaagtttttacaaagctcaatttacctaacatacacgcacatactcaagtttggcttgttttggattattaaaaaaagcaaaacacttcacttccaacaacttcaattattctatgatttttcttcagattaacataatccttcttaaaataagttctacatttctacatttcttaaaatagaaacttcaaaaggaattcaacttctaattttttttttttaatttattgatttctgatgtggcatttaggattaatacttacaaaattataaataatatagaagcatgaagggcacaaaagaagataaaaaaagttccttcttgttaatttatcaaatctgttattataaaagctcactctgttatctaagatcagctcgtgttaatgaacagaaatattctaacaagaaaagaaaaaaattgttcagttcaacatacatattggagagagaagattccggcaccattccagtcaatcttgttatcatcacaggagctttctgtatgagcaaaactacaaacaactgaaaccatatataacccaaaacacattagtctcaaaatgcagaaaatagagaatactaacttagagactctgcttgtttgcttacagtgataacaaggccattaccattgtcacttgctctatattgtctcccttcttttcgacatcaagagggcatcccagaattcacaaaccacacctgttgctgtcattcttttcgactaaactaaactaccatacgttcaaaaaggttgtgaagttttggttttttgatacgagttctttcaagtttgttctttataacacttgtgcgaaaaggaaacattttttctttattttcacaccattcaaagataacattacatagtcatccattgatctcacttattttcatttacctttattttgtttcagttgtccttcaaaacatagatgagtgctctaatatatacttacaattacaagtgcctgaatattgaagttatagttacaattaatataaaaaggaaacaccactactcctcctatagagaaacagggcgaaattacaatttaatcggatttaattactataaccacaaaatttctctataagaatataatattgaatcaatttatacttataagtttattccacagactagatagattattgggttacagaggaaggcaaagaagagttattgttattctgagtctcaccaccaccactagaaattgactcaatgtgtaaacgggccatattcagcatcatctccacctctttcttgtactaaatacggcaagtaaaacacagatttttattttcatcattttcaattccaactttcacagggagctcaaagccaaaaaaaaaaacactcaagttgatcagagttgagcttacctcattaatggcacctgcccttattttggattgcatcacacaccatttcttaaaatgtgctcctgaaaaaaagttaatagagcagatggtaaccagcataattccataacatattcaaattgtttcaataagaggaagaaagaatgaaacacatatagttacatgtttagacagaaatattacaggaaacttcaaaaattttaccacaaaaatggacaagcaaaaaaactgaatacttacccacttttatatctattgtacacgaattttcagcattagtctccacacaccacctacaatggatctacgaggcacaacaactcacagttatgagaaaataagaaaaacaatggcaatagaattacttgagattttctttagcgtaaatgataaaatactatggcacttattcacgaattggacacataatttgacagaagatctccatctatctcaacagagcaaatgaaaaaccaggaagtttctcagacatataatcctactagttaaataatgttataagatattacatacctcaaaacaagacccaaatggaacatcatgtgcctgctgcacagtttcaaacacctaaaaaaagagacaatatttttagaatatgtagagacataaataaaaataatccagaaacagaacccggcattgtacaataacattaatgatctaattaccagcttattcctgtcagatgataaaacagaatgctgatactctgtcatggctgtatctggagggcacatgggactcgtacagagggatctgaattttatttctctaacttgaccatcatattcatccgcagtatgccactgtcccatctgagaacaataacccagttggagcacagttatacatcaatagaagcatcattaacaaagagtctcatttacaatgagaaaaaactaagagccatgcatgcaacaagaaaaaaattgacagaaaatatctttgaaaaattccccgcatagggtcttacaggttgtggagtccacataaacacaaaattttaagaaattctttgagcagaagcccaataactttttctttcaataagtatcaactcaatgactacctgttatctcctttcaaaccatattctacttgatataccatctccataagttaaaatacagaaaacaattcagtctataataaaaccaagaattggcatggttatcaaactgtatccttagctatatagtagaacaatgcatgttagcaaacataaaatgtgcaaggactgtaggcgttttagacttacagttagattagtatcctttcgcgctgaacgatattcatttgtaaaacttgaatcatcatttaataataagttaaagaacttctctgctgtgcaagggaaaacatcctgaaaagggaaaaaaaggaagaggaagaagaagaagctctctattagtgtttaacaataaagataaattaaagaataaaaactaggaggcacagaaatgggctgatacatacattgtatataccagtaagacattcatctttaataaaagattgaagctttcctgtctcaggaacaatatcttcaggaatagtagcctgacttttatcccctttaatagaactgctatgtgcccgaagtgctgattctacattctcctaaataccaccggaaacaacacattacaatcactctctcttctttttttcttgatcctaaaaaatgcaggataaaaagtaataatgtaagtaaaccttcttctcagcttctaacattgcatggaaattctttgctgcacgcagtaaagatcttaaagcgtgattcctgttccaaaatgaagcaaatttgtatcttactctacctgaaaatgccaaaacaaaatgacaacagtggaaacagattaaaaggctaattctttgttaatttaaactaaaagaaggaaagatatttcatggatttttagaactcgttggtcgtcactaaccatcagggcttcctagaggaggtacaccatgcccaccagctcccatccgtagaataattgtcacagcaggattaatgaatgcatgctgactcctccgaatcttcataaaccccaatgaaattctgtaagtgctaaactctaaatcttttcaccaaatatacaagaagagagagagagagagagagagagagagagagagagatagacaggagaatgtgtacctcatcaatatcttccaatggtataatcacctgaatgatgttaggagaaatgtaacaatgaatgcaatatgctttacttaaatgtaacattagaaaacataataataaaatgttcggcataaatcctgtactgatgagaactattcaataagtgcatctacaaatcaaagtatctgctaccattactaaaattcacattctctatgtgctcccatacaa

SEQ ID NO: 384102 - DNA, 1521 bp, Cannabis indica
ttttttttcttttttaattattagcgttgtaaaatgggtccagattaataaaaacgcaattagacacgcactcgaaacgcggcggaaaacgtacgcagagacgacaaaaaacagaagagaaggactaaccaaccaattgaaagcccttctttctctctctctctctctctataacggcagttataaatgaatgtaaaggtactagagtatctgatggaatcaaaattattggcgtcacagccaatcataatctgccatgtgtcttttggtgaggggagattcgacgttgtaaactatttagatgattgtggtgatgcagcgaatgggcagcgcagcttcattgcaaaactattcagcggcggctgcgagtcttggctcatttagccgacttctttttcttagatccgtgcaactctttccaagccatttttacatatgattctctttttatttatattattattattttttgaaaattcatggaatgacgcacaagactcatacttatcaataatttgattttagtttgaaaaaaaaaaaacttaattttgaaaaaaaaatattggaaaattaccagcacatattattattcctatcttcattttagtggtaacggttaaatggattgggctggacttgggaataattttttttttcttttaagtaattattctgactattattgttgtagtcagaagtgtcactgttaacctaaaattggaaagaaaatatcttctcacttttgaaaagtttttatagaagaagaaaaatcatttcactggttttcgttggtaaaatgtaaaaataaaatcctttatataaatgatggggcacactctttctcacttcttccatatatttttagaaacaaagttcataaacatcttctataagaattcatttttagggtgaactttagtcagggttttttttttcttttttaattcattagttgtttgtacatttatagctcatctgatgttaataatgtccaattctatttacattaattttcaactggatgcaaaccaccaaaaacacccatgcagataaagagtattgttgaatctaatactcttcataatgaaggaagatggaagcaacactaccaccatttcaaaagatcaacaccaccatcttggaagataaatatatacttagccaattttattgtagaactcttagtttatacctcatggcagaggatagtttttttagctaataagtttaaaatcaaatagaagttatactgtgttattggaggaatttagataacaccgaaatacgtgcaaataataaagggaaaaaaacaggaatattctaaaaagggaaaaatattacaacaatactgtgggccggcccaatgaacatttgtacagcccaaaaggaaaatattacaaaaataccacttgcccttaccttcagccgcacgtcacaaacggagaggatgaatgaagctccatcgatgcagtcggccacgcaaccataatgaaaccagatcgaacgtaaaacagctgtaaa

SEQ ID NO: 384103 - DNA, 919 bp, Cannabis indica
ttttttttttcttttcttctttcgtgacatattcagataaggaaaattaacattgaaaagaaagataaaatagattctatggatctatttaaagatgttttctaatatgatgaggatgataaacttaataaagtttaagttgattaatagtttttagtaatagaagtcagaagtggggaatacgaaaggataagatattataaaagggtggtttgtcacgtgcatgacctattctcattgcttaagcaactgttggaggaaccagacaccaaaggggccactgtgaatgaactactttgactacttgcttggcccctttttttatcatttaatatttattatagtattaatactagatgaattacttttaatagggactggaaatttgtccaaaatgataaaaacaagaaaatgaaaaatgaaaaatggaataccaattttcagaaaatagatcaataattagttggagaaataagggaaaatagaagtgggaatgaaatgttgtccttttttctgtaattttggtgggcatttgccatttttgtagcccaatagccttgtgcttattgtgttatgtgttccccattttaaattttagttgtaaaggggaagattcaaatattcaaactctaccatattgttgtcttgtctcatgccagttgtgtccttataggacttgtatgtataatcaataaataataatggatacatatttaaactccataagttttatataaaataaatagaaattttattccgaaattttttatcttatcaagttttgcccttaattatatactgcttattaagaatacctcttaagatataacaaatgtggaaattctacaatatactctcttaaaatggatatattgatgtatccttatctgttttagcacctgaaataattttttagtca

SEQ ID NO: 384104 - DNA, 1538 bp, Cannabis indica
tggatttcatatgttttaatatagtagtcttttaattttgtaaataaaaaaatattaaagataaaattgttgttcaaaatgtgtagagataattttgtaataaaaaactaatttgtatttaagtaaaattttctactatatttatgtaatattttataattgatttttatatcatatattaatttataatacgtaaaatttgatattaaatacaccaataagagtaataacaataaatcacctcttttgcacccaaaggtgtccctagcattttttgataataaatttaaataaagagaactttataaggacaggccgactcatatcaactacgaacggccaatttccaaaagaagaaaattaaataaaagtgatccgatctgaagacaacccacctcaatatcgcttttcttttaatgagagcttagcctgttttcatcatttaaacactgtagaaatatatatatgatccttacaatggagctaaaaccctcgtttatgtcagcctttctggtcatcttcttggtcatggcagcatcaagtaattactactatctctccctcatctctcttattacttgcatgtgcattatttgttttatttttgtggaatataatttgtttattgactgaaacatgattatcattatagaagaagtaattattaaggtggaaggaagaggagagtttcgttgccccaaaatgatagagtgcaagagcgtatgccaaggctaccccaattgctgcgtcaatggccagtgcctttgcgaaccttgccggactctgcttccacagccgcttgagtcttcttctccacctgaaattaatgcaaatattaactcatcatcatcaacaaaatttacttatatcttctcttactttaagtctttaattatctttatttctttattgttcaggcgaataattgctaattaattgaaatgaatgtgacacattaactttatacatatatattttataattgagtatgagtactcttcttttaactactgtaattgtgaattgagtgcttaaatatttcagtcaattattattaattaatttcttacattttatttattatatccgtttaattttctggtgaaacatctataaacgacaaaagggaaaagatgaaggcaatcaagacaagaaaatagagaaaatgacatctgcctaccactctccttcagatatctaaaatatatgacacgtacctaccactacgtaaagttcgtgataacattaatttaccattttatttattcttataacacactattttggcttctttggctggtatgctattgttattagagaaatgttaagagatagtaattttaaaaactgtaatattattattggcgtaatttattattaagttttatttattttattttaacaaatattataaaaattaatatcatttattttctttataaacgaataagaaattatttttgtgtagtcttaggactggcctgtgcaagttggatgactgcacatgataaaaataaagtaaaaattattcaaaatat

SEQ ID NO: 384105 - DNA, 1426 bp, Cannabis indica
aaaatgcctgatttggatcttgtgtgcatgggatgagtggaaatggcattggtttctgctggtatagtgggattagtaggttgagtagagtttgttgttgtgggaatggacaggataggttgtgtaatagatcttgtgggatcgggtgtgggatctgtatgaggctcctggtgtgaaacagattgtgcagatggtggtaattgttgtgtacgtggctgtagtgaggtattttgtgggacaggtgagacatcagtaggtagagtgatatattggagagtagtagttggggaggatgaatcagttttgggagaaaacagatcagtatagggaaaacataactcatcaaaagtaacactacgtgcaatataaattctacctgatggatgtaggcacctatagcctttgtgacatgggctgtagcctaggaatatgcacatagaggttcgaaaatcaaacttgtgtttgttataaggtctgagtaatggaaaacaagcacacccgaaagtctttaaaagactataatctggtttggagtgaaagatattctcatagggtgatatgtattgatttttctgtatggggagtcgatttatgagataggtggaggagacaaaggcatcccaccaaaatgacagaggcaattttgcttgagctagcaaagtaaggcccatatctgtgatgtgcctatgtttcctctcaacccttccttgttgttgatgggtgtgaggacaaggatgtcgaaaaacaattcctaactcatagagaataggtttgaggggtctatactcccctccccaatcagcctgtattgacttgattttggtgccaaattgtctctcaacataactgttgaaatgtttaaaaatagtagaggtttcagctttggaagtgaggggaaaaatccaagaaaactttgtaaaatcatcaataaagcaaatgtaatacttgaatccttcaggagatggatagggagatggtccccaaagatctgtgtgcactaaatcaaatggtgcatttgtgctattttgagaagaatgaaaagaaaattgatgaagttttccatattgacatgcatgacaaatggacagttgagagggactaatgtgaagaaaagtgagaactttattaagtacttgttggttgggtggccaagtctattgtgccatagagatacaagctttgaattcttacaagaattgaaattggaactagcattattgctattacagtgggaagaactactgctattgcaggaagaatttgacacagcatgtgcttgatacaaagagctgttctttgttgcagcagggactttatttgttgtgtgagtgaggtgaggagctagctggtagagcccatctttaagagcaccctgaagaagaggggtcttcgagtgattgtccttgacaaaacacaaatcaggggt

SEQ ID NO: 384106 - DNA, 4653 bp, Cannabis indica
ctcattatcatttcattttgaatcgaaactcatgcatcttatctcaaattctaacatggtatcaaatttgttgtgagcctaatcgttccattgtctccccttttaacctctatttgtgatttttcgtccaaagtgtgccaattttgagtagtgtcaagcatttgagctttgagaggtgttgttacttaataaataatttcttcaggtgtggctagaggatgcgggtggcagcgcatggttgtttatgtgaatttgataacattttatttggttggcgtgactgttgggagcctccttgcatttaaaatgaaactatatgttaaggtaatatgttagtcattttaatatttatttttatttctcaaaatatttgagatttgattttaaattgttatatatcatgtcaatagtaatactctaatataaaaattagagttttgatttatttattgatttggattttggtacatatagggattgtggattggcttgatctgtggcctggcatgccaagcagccacacttgtgttgataacaatgtgcacaaactggcacatgattgcagcagtcgtttaatagagagtaaagatggatatatttagtatattttcgttacactaagaagttgtaactttatttatacgatgtatgaattaccctttaaaaaaaaggaaaaagaaagaaaaaaacatacgatgtgtgattccctttggaaaaaaaaaaagaagagaaacatatgatgtatgatttagtttaaagaattttagcttccaatgtcaaattaaacatgatgtgattcattatatagctagaacttctaatagctagctgatggcatggccaaattaaacatgaagagggttctttacattattacatagctaagttcattggtgcttttattcgtttagcattttctttagtttcactttctttcaataaaatctttgtctgatgcggaaaaaaaaaaagtaatcatgatttattgggacaccgtatttttggtgatgaaggtgtgatagattttgttggtaataaatttgagaagtgttaagagtgtccataataagaatatatatatgttgaaatataatattatatatatataagatgcatataatatttttcattgtcagttgatttatcaaaccaacttctcgtcgctcttgttagtgatgttggaaataaaatgctagtacttgctcgtcttattgtgttaaaattatttaggtgtgcagtgtgctaaaagatcagttgtctcgtcatactgtgtgatatgcaggttcttgaatccctaagggaattgaaaagttaatataataggataaaaatgctctgtctcttcatctgaatcatatatcctgataacttcctatattctccatcttgtgttgctagggatcgacctacgttttgattcaatcgatctcgaagatctagaacgttacaattcaagtgctcgtgcaagtcaggttgtctatagtttaaatgttcgcgtagatcagggtcgcgtcgccttttatttctccggtcgtaattgctaattaaccaacttagttgcagataactctcaaattgataactcttagaattacttatgctttcttgatcaccttgataatggcgacgcgtaccttccccatctcgtgtttgcatatcacgtgcatgggttcttcgatctgctctgcccatgagtccttgatctagacctattaggatatgtacttgacccagtctctagaggttcttctcacactggcctctgtcttcgaaatagatttgacatgcgcccctgcttaagtgtatgcgctgtttttgtcgttgtggtttggcctttgtgagtgtctcagtggttgacctgtcccaggccgattggcaacacccctcgcattgttttgagagaatccttgattctcaggtcgtgattgtctgaaatccatattcatgcgagatgactctgggtttttaggttgtacattttcgtagtttgtatttctacaggaagttcctagatcattgggtcgagtttccctatttctattatttcttggattttgggagttctcttcatccattgagatatccctcgtgttcttagctaggttgatcatcttgagtattcgtggatttctaaggttattccctctaggggtatccccatgtcttttggtcctagagcctttaagtcttcctcgagatcgtctaattgatgtgattcgaagggcaatactgcacgcagcccttgcagctgttacttcgcgctctaattttgcatttatttgatttgacttagtcagtccctgtcaaagttgcctattttatagctccactaatagaacatatctagtgggatcataggcatcctcacttcgtgggatttaatccccacttttctcaaattctccaatatttcctctcccaaagcgagaaatctcagttgtatttgtcctatgagaattttgatatttttttttccctggacgttgagttgttttcccttgttgattctcttcattttgaggagcatttttgccatggatggaaagttcgaatatatttcaaggagggtatttcctgagttttttcttacaaggctcttaatgaaagcaccaactgttaatacagattttagttaactaataaataagcctttttttttgtaattaatatactcattaattaaatgagcaatgataataataataatagtaataaatgataagaaaatttttaacgagctttttgaagttaacttttcatagtctacaagtccatcttattctgggattaataaattggatactgaatacaattaataaattgtatacaaaatgaaagactagtatagctctctctttctcaaattggtcgtcttttattctcgggttctgtccctatttataggagtttagggtgatagttattctcttgggatcttatcacgtataactgttcgtgaaatgtggacaatcctcacgtttcacacttgcatcacatgtgataatgataaataacttctcgtaacaactcatttaacttaatctataagtagttacgctgactttgcctctacctcatccttctcacaatgcaactattttcctttagacgctttattataaaaatcagcgtctaagtatacgttaagtagtacttctcacgttttactattaatattgagtgaggcatacacgagacgtttatcatagtatgacaattgcgaggtgaaccatgctggggatgttgtctttagtttttcaacatactcacgagtatatggtcaatgagctgcgagctatttgaattcattatctaccattttcaaacaaccatttgtcgtgtatcttgtgtatcccgagatgaaccatttttgttcttcattcatttcgctggtctcatcaattagtagttattgtttatagctcaccattgtttttaagtgggcgagttcgaagatttctaccaactgtactttccgagacaaattgtttaaatttatttattatattgtttattttgggcgggtccatattccagtttcattacacgtgtcagcattatattattattcaaaatatataggtataacaggaagaatatataggtgatcatactaatgtaaacaaaatatactcttccgaactgaactgggttgttttttaggttcaagaaatccacattttttatgattaatgctttggaaaggcagctccatggaaataaatacatcttcgatattcagatccatagttgatattaaacttaactattctagaggttttatgccacagttttattatatatataccctttaattacgagaaagtatgctttttgtgggtctagtcatgtattgttgtgttcaaattctttaaacgagttaagatttttctccagaaatgagttggtattcttctaatttaaattataaactttttcaggtttattagactttcagtaggtagtagataaattatttaaaacctcacctaatagtcctaatcatattaattaaacaagttaaatgtgttctatttatcaaatatatatacatatattaccaaatgctagaacaaatggcaaatgacagttagatgcccaataatttattagagaagagttaaaagatcatgagagaggcagatggagtagtgatgatacttttataattaaaatataatattaaatagaaaacaaataaatataaatttctattcaagaatataattgtaattaagtaaattatattataattgagaggttataattacctaaatagaaaaaaaaaattaaattaataccaaaaaatattaatgtaacaataataacaataaacaattattagtatcataatagaattattttagagtaaatataatgtttatatatatatattataatttggaatgaaattattaattttatgtaaataaatatttataaaatatatgtatatattttattaagatatataattattcttatatagaagtatactttgttaatacaggacttataaatgtatctctaattacaatttagaggttatttttatttataattgatttaaaattgggacttgattttttttataacaaattatgaattattcttgaatagagtattattcttagtctataagatagaggtttt

SEQ ID NO: 384107 - DNA, 2823 bp, Cannabis indica
acttaaaagttaattttttttttcattgttgcatgcattaaattatcctggaagataaataatagatacattaagtatacaataattgataaaaaaataaaaaagcaaataatatgaataaaaaaaataatcatcttctcatcaataaaaatcaatatcgatacttatcaattctctattcttcttcgtattaagagactttaacattctacaaactctaattttagtattccaattatctggttttaaaagaaaactatttgtatcaatatttaagaaaataacactctatcataagaaaatgagagagaaataaaattaagaaaacttaagtagtaaattgaattttgaagttaaaaaaatatatttttatataaattttttaaaagtatgaataagtattccaataaatttttattttcttaataagagaagaaaaatagattaatattttagatcttaatttttttttctaattattttagaattttaaaaataataattaattaataaattataaatttatatattattataaaatcagttttcaatatatatatatattccttgcataaattaaattggaacccgaaaaaaaaatataacaataaataaatctataaaaaaaaatcatcaattttaaaatcgttgtcatcactgtatttctcttacaattgtcattatcataaacaaatacaataattgataaatctatttaaaacttatcgattttaaaattgttattattattgtatctcactcgttagaatattcaaaatcgttgtgaactgtatctcacttgtaattgtcaccatcttaaaaatatcaaacataacaattgataaacttgtagaaaaaatgacgatgtcaaatagagagaaggagagtatcaataaataagaatggaattagaaaaattaataaaaatttgtgagataatatgatgtgattcgaaaacttttttgaatgaactcttgaaaacctaaatatatataacaatttataagtataattaaaactcgtcaattttaaaattattgtcattaccgtatttcacttgtagtagtcaccattctaaaaaccaaaataacaataacaaatctatagagagaaaaaatgatgacatcaaaaagagagaatcgagagtatcaataaatgagatgaataagcaaaattaatgtaaattatgagatactatcatataattagaaaaatcttttgaatgaccttctagaaaacatggaaaaaaaaaataaacatgagagatcaagatgataaatatgcaattaaaaaaataataatgaatatagagaataaagagtatcaataaatgagaattagatttgataacacataaacaaaattaatcatgcatgcatgacctaagatgtaaccgaaaataaatttttatagtcatttaaaagtgttctatacttatttgtagttgccacaattttgaaattttacaaatggtataaagaaccttcactcaataggttcttaaatttaaaaactattttttttttcttattgttggatgcattagatttttctgtaagattaatgatagacgcattgagcaaaaaatatgaaaaaaataataattatcttctcaccaataaaaaccatatcgagacttatcaattctccactttttttcagtattaagagatcttcatattttacaaactctaatttttatgttccaactacatgtattactttttaattcagtaacaaaagaatactccattatgaggaaagaattgagaaataaaattaagaaaaattaagtagtaagatatatagagtttagaaattgattgaaaaaaaagtgatatataagtctttggaaaagtaaatttaaaaaatatatattatttaaacatgagatatgaaccaagtgtagagttttttaaagtattatagaataataatattaaaaaattagaaaataaatatgggaaaactgataagtatttatgaacttaataaaaaattaaaagaatgtatttacacaaaaagtaatcctggtaacgtggacatcaatgtttgacatgtggcaagaaggaaaatgtttcaaagtgaatgaactcaagtcatagcagtcaacttgggaaagagtccctagccttgcgcttaggttgactttgaggctttggaatagatattttgattctgcaatttgtttccaagtcccatcctttagtattatgagtcatgaagacatgaagaatccaagttcaaggcctgaaagctgaaaatacacaaaacaataccccgaaagtcaactcggatgcttaggatttcacccagtgcctaggttgacaatccaactaagactttgatttccgacaccgtcttagtacaaatgagttaaaatttgtaatgagacatgaattagacatgtcatgaacatatttgaggcatcttaatcaatttcagagtactttcattttttcaacacctagagcaccaggtgccacaagcactcagcgcccagtttgacatattgtcaacctgggcacttccaagcatcatactcaagaactttcttgagagatttctttccatcaaaaataaggaaacaagtgatttttggggataaacagaccaaccttcaggctagaatggaggcccagtgcccaagttaacattttatcaatttaggtcatttctaaggagttttttcgagaagtattctaggaatatcctctgttttttcaaagattaagatataagtgttttcgggaatcaaatagaatcatttggttgcctgaaactagacccaacgtccaggttaatattgttagaaattatttt

SEQ ID NO: 384108 - DNA, 1538 bp, Cannabis indica
atcttctttggacccactggtggacctttggtgctgacataaaatctatgtatcccttgctagaaacacgagtaacaaattaaaaactaagtatagcaattttttcaaattaaccaatttaccctatgaattatgactgatctgattgacatatattgaaaaataatataactatgaagaaaaatactaaaaacaacataattataaagaaaatactaaaaatattagtaccattagattttttaagttatttttggccaagcttcgattcctctctgattgtgttgttttcaataaatctgcacaattttaggttgtttttgtatctttttgaattagtagaggtagaaatctttattttttttggtttaccttttaattttggatttgtggggattagtggttttcttgttgagatctacattagtattacacaacttggacgattttgttggatttgaaatcgtgcctccattgagaaaaaaaaaatagaggaaagcgagatgatctagttcgacaaggggaaagaagatgtgaatgggtaatttagcccatatttttgaaaaaaaaattaatttgtttttttgtttaatttctcttaaggtgaaaatataaaattttagcaaaaaaaaatagcatattattaaaaagagatgctaaaaaatatgagcatagcctaatactttttgatgtgttaatattattattagtttaattaaatatcgaattacatatagtttaatataataacttttagagaatatccctaataaatcgcaagacgatagcagtaattcagtagcaatgctacccttatttagaaaatcccattagagggaggatagggtgatatatctgtttattcgaatctcatctcccgatccagctcatttacgtctcacaagtcatctcgctcatctctttctctctctctccccgtgtccctctcttgcctcctctctcgttgtgcctctcaccctcagtcgatccctctcgctcatcgccggtgtcatctccaccaccttccgttccccatttctctattgtctccaccaccctccgttctccatttctctctcctctgtttcttcatttctctcggcagacggcatcacatagctcctcttccctcggcagtcccagctccggtatccctcttatgaatcttcaccaggtatttaattttcagcttcaatcaatgtttgagtaagttgagctaattattttgtttaattttgtgtttttcgctgtaatttgttgaggatgtataagtattgttctgcctatataaatttcggtacttttggtttgcttttaggatcaataacaagaatttggtatttgtttctgtttcaccaatttgggtacacctccaagctccaacaggtattgaattttgatttgaggttgattttccctaatttgagttgtttaatgattgtctataaactttattatttctcaatgtaatctacctactgtatagggcatgtaatttgaataaccatgttattgtgcatataattatttcctcatca

SEQ ID NO: 384109 - DNA, 2913 bp, Cannabis indica
tttttttttttttgaaaggaaccaaagttcaaattaaactgattgaaaacagataattgggatccagagggggaaatctctccccttgaccttctttagaaagattgtcaatataagagagaacctctcgattagcaaaagcaaaagatacattaataaaactctttttaagatccaagaccaggtagaacagtggccaaatcttccaattcaggggcctttcaaaaaatttgttggtcctttttaaagaaattcctcctatcaacaaacaagtaataatttttctttaagaacactctaatcaagttaattattcacataagaatcaactctaatcaaggatgtcattgttaaacattgtttattggtattttttttcacgagcattgctattaggtaccagtggtgtctagcactttctcgacatgtcgcgttgcgattggctagcgatactccttaaaaattattatattaaattatatgggacccgatacttagttagaccaatagcgatattgacacataggagggcgctaagcaccactggtgccctttagcatgtctcttttttcactccaataataagcatctattaaaagatattttttaaaatattttcattggaaatgctgagaaatattggtatcaaaggcagagcactcttttattttgtggttggccaatatctgaataggctgaaaatataggtgagattacatcgatttggactgaatgttgatcggaattgctgtatttgtggtggccggcatcaagaggatcttgcacacctattttttgagtgtcatatataattattaccgtaaagaatgtctgccaaaaattctggtgtggcttgggcttgggtgacgtagtagatcgaggatgttgaagtagtggtgagggtaagatttatcagtgtatgcgattacatatatagtacataccatattaatttggagagttggtaacatagctttttgggatagtaaagtgttgagtattatattaattgtacagttttgaacattagaagagacatacatgctcgtgtgagcaaaggaagaatttggtggttgtatatttggttttggtgaaatagaatttgcttacttacttactttacccaaataaatgaatactatgatatatatatatataatttgaagtggaagacttataataagcttattacgacttaaactgtttttggaaaatgtaccataaatattaaagatatatatcgatcctcccaactggggtcgctgctacaaattgattaattaattaattaatgatttaaaagccatttggttgttcgtatcgtattaattatgagcaaatggagtacgtctgaggttggaagagttccatatattaattcatgactggaacacatccttggttgatcttggaatatgaattgaccctccgtacgtggaagctacagaaggaatcttatataaatactttgaggagtttcaaacatgcatatgcatatgatccagatcgagagagccagctagctttgtctatatatatcctcaccatcaacaatactacaataccagcctttttatgatgtactaattataattacagtattgttatagagcattaaaagtacttagcactactacgaaatgatactttatagcggctttttattataatctttattaaaaaaataaataaaatttgatattaaattgccctattaataacattattacacctcataattaaggatattaagcacatttagcatttctcttataattacggcccttgttccaataattaataatataaccacttttaattaattataagaaacatatatgtatatattataaatactaaaaactactagcgcttagcacctttctatgtattaatatcactattagtgtaattaaatatgagtcgttgtaataaattttagaaaatatcgtaaactaattgcaaatgcatcatgtcgtctagaaggtactaggcactactggtgctcatagcaattctctgtctcaagcttcagcaagatcttaggcgaagcttgaacaaggccttaagagaaaattaaattacttttttagaaaaaaatattaattatattaaaatttattaaaattttattttcaactaaaagacacataaattaattaaattcttattattaagttattatttttatattaatttcatattactcttcacatattctataatcttcattgactattttttttaaagaatcttccattaaaaaaacaaacaaacggtggatactgtttgtttttggttggaggattttccacatccacttataactgttatataatttctttaaattaatataatagtcttttctaaaaaaaatattatgatattatttaaatgtgatttatatataaaatttcactttagaaagattattaattgttaaatgatagttctataattttagattaatttaacgtaatatattaatgttcaaatttattgaatattttatgtttatcactcatatttggctgatattgttacaataaaaatgtaatcataatggttgcatttttttatgacatgctataacaggtcactaacaaataaaattctatacttaaattaattatatacctaaataaattaaatttttaattaaaatatttaataaaaccttattagaaatttatatttatatatattttttagtttaaagaataaatcaaattaggttaatatcatgttacaagtaatttattaattatttttagtaaatttttcaattaatcacaaccgtttaataatgattcaacgactaaaagtaaatgtaaccatcatggttacgtatttaatgtaaccattaaaacccctctctcgcgttttccctcagccaccaccacccaccaccca

SEQ ID NO: 384110 - DNA, 2394 bp, Cannabis indica
tttggtattatgtatatcattaacaaccaacttaattacccagtgactttgaggaagaatctccatgttttgagaatgatggtattgagtttggcttggtaaaagaaagcagtgttgtgatcaatcccaatgccacgtctgaagattatgtactacaaataagcagaaagaaagttgttatataacacaatatatatatacagacatataatcaaataagagaaaggtgtattaatgatgaatgatctcatatatatataccttatcagcaaactgtggaagattgtctttgggatactttgtaaaataccttgtgagaagcctcttatctagctaaagaaatgataccaataaagtgagatgagtttgatgtgtatatatgtgtgtgtggttatatataattatatatatgtatatatatttaccttggattcatcaacaatgataggaagatttagacgatattgggcagaaagtgcaacctctatttcatcatcagttgttatcttgaagttgctcttatccatcaccttcatcatcatcatcaaaatcaaataaatttgagttcaaacattaacaattgcagcaatacaattcatgtatgttaattaattctttattaccttaaacaaatggtttagaaaactcagctcaaaagaatcaacttgctctggtgtcaagttgtgttgctccaatttcctagccccatatacaggatcaaaaagtgcatataattgctgccaaacacataaatataaatgtaaacaaaaactcataatcttactattaatatacgtagacacatttcattcttgaataatttagtgattttgtaacattctctagtaatttatagcactgttaaagtgatttagaaataccattgtattgatcaatacaatgctgcaaagtgctctagaacgggactacatttggattagtctcgagactacaccaagaatccaggatcagtctcgttttattatgaagctgcaaattgctctacaataaaacgggactgatcttgaatcatgactacatcacgatcagtctcgttctattatggagctacaaattgctctacaaatagaatgagactgactccatctagattagtcccaggactacatcaagatcagtcatgttttattatagagctgcaaattgctctacaatagaatgggactgatcctgaatggataagtcctaggacactaatcacgatcagtcctattctataatggagtaatatagatcatgcggtaaattactctacaataaaaccggactgatcctgagaggttccattctattacggagcaatatagattatcattaatgcaatgttatttctacactagtttaataatgttataaatatataagtaaatatattaagtaccatgagatcttcaaattgcaaaagataccaagctcgaattgtgcattcaactctctggcaaaatttaacaaactcatccctctctgaaacatcctctgcaaacatcatcatcacaataatcattcatcattcatcataagattcatacatatatagtgcatgtagagaataatggatttgtacccttttcataaaaaccagaatggtgtatctacttccatagatgtaataagttagtagtggattgtatacgtaccaaaattgtatgacaaggtttcgaggagcttggacttgaggataggcaccacagactctcgttccaatcgaatgatatctttcttcttcttcttcttccaatacattattattattattattattattttttgcaattaccttaaacttattcttcttcttcttcttctttgtatttgttttgttttgttaataataataataatggtgaatgaattaaggaatgaatatggtgtcttctctatctaccattactgcattaccgctcacttcggcacaacttacttctttgcacgaaacattctctccatttctttatttttagaaataaaaaaaggaagagaaaacatacacatactaatccatttacttaaacaaataatttattataattactaatcccttgacttttgctgtgtcaattcattaaacaaaattatgaaacgcgttaaataatatgttaaaaaaattaaattcaattcctataaacatgttgacacaacaacacaagataacttgtgtcgtgtacacttatttataataaaaataaaataaataaataaaacatgtcttattaaccttgccaaaaaaccaatgaacaaatctgagaaaaaacacttgaatgaggccaattaagtccaacctaggagagctatggctttaaccaatttgagaaaaaacacttataacttaaaaactgttttcagtaaaattgaaaatagtttttaaaactaata

SEQ ID NO: 384111 - DNA, 1617 bp, Cannabis indica
ggttgcgttgggttgctacgtagctgcccgatgattgcgcgatagttgccctgaagcatggatttgaaggtttgtgtaagtggtatttgtgtaattttttttatttgagctgtatttttgtttatttggccagtttgaagtatgtttgtaatattgttactttttttagttaaaactaaaaaaaaaagcccaataaaatataaaataaattagatcatcaatttttgttttgcttaacaaattagatacctctagataaggactaataaaaaatacagggaaatattatcttaactaggtaggtagattgatttgttcggaatgcaatctctcatcatgatatggtaatattggtttgattatgggtagatcgtccgacaaatccttttagaaccaaaaacttctcttctgagtacaatctctcttgaacaatgggggatggtaacacctcaagctctttgagcttcaacacttcttctttacccatctcatgtttcaatttacaatttcattaattaatcatgctttcattcaatgaacaacaagtattataattattgacatattaatttattgcagcaaatgatcaattagaaataataatattaagcagcaattaattaatttgagcttcaacacttcttctttacctatctcctgttttagtatacaatccctatgcttgaggagcacgcaatcttcaacaggtgtcatgggtgcatcgttttaagtattgtagtgtcaaatttatgtcgttggacaaagagattgttttcttttgatagtgtgtgcattcttaaggtctaacataggggataataccctgtatctatgggatttggtgtcaaaggactttgccacgtcatcctgtactaggtctctgcggtgcctcttgaaatgctttctccggatgcgtcctagatgcttattcagagagtttcaatcacttcttatcatgagagcgagaggcccttctggatccgtatagagccggtctagggtgtatatcttcggcctcagatgggcttagatccatcattccatacatgttgggcatgtcctcttggtgggacctctaatcaggccataattgactgatataggaattgggaacgacatgtgttcctttcccgaaatgtggataacataagcaatgaccaaaccagctcaaaaatttatgggagtcaatacatataacaaaattaaatttatttatttttatttttaagtattttttaaaaaaaaaattgggggaggggggcaggcacgacaccctttgacacgaatcaataatacttttagttgcgtttcttctgcctaatattgcacagttagctaatattgcacagttagcagctagacttcaaaactttccaaaaaatctaaaattaaaatatcaccactattattgttgaaattcatataagaagaaaagaaatgtcttatatttcataataaagaaagttttaaaagaagtggaccttgtgatatttcgcaaatttttccaaatattaaagcttggcgtttttctttggcagcctaaaataattgtatgtcttcgaaaaatatattaaagtgttataaatattattaattatgtggatgtccaaatctttt

SEQ ID NO: 384112 - DNA, 2870 bp, Cannabis indica
tctctctctctctctttctttaatttttgattaaaccttaaagaatgaaaaaggaaaaggtaaccaaatagtaaccttaattatatacaatcatgaaaaaccatttgatattatatttggagtgataagataatgatgatgagatcaaaatggtaaatacaaatgtgaaaaaaatagtaagtataaaggaatttttttgacagtggatagagacatattaaaagggttaaaaatgttaaaaacagagagaataatacaattaacgattttgttttctttctccattgattgacaactctcctactatatactaaagctaatttactactttgcccctcttttctcttttttattgaatattagtgctctctaacatattttatagatgttactttatgattatttttaagcattaagggtgtctaaaatattttataggtcagtaagtaatatttttttaaattatatgaaaatttagtacttaattatattaataataatgtaataatgaactaaacgtttatatattacaaccatattttacttaggactcgaacccaggacctttaacactcacacatccacttatagccacttgagctaacctcaagtgattaaaactaacttggaacagttgcattaattagtttcattgaatatttttacatatatatggttggaccccaaatactcaattcttgtctattattacactatatatataggtctgctcaaacactctttgttgcaggaataataatattattatgtgcaacaaaaaataaataaataagtaagatatcttcatcttcatcaatcactttagttttgttatgattgaatggggaagagtaataaagagctacgtctatagctataactagcaatattatatatttatatatatatatatgtatatgaattaatggagagtagaatttcccaatatatattattgtttggcaaaaaatagcctagacatacatcatatataatatatattttcagaaaagttaattactaggtattataaatcattgctttataatttcaatgtgattatacatacattttaaaaagaagtttattaaaaaatagtctcaactattacaatgttcttcaaaaaggaaggagcattcagctcattaaacaaacaacctaacaaagaacaagactcccgagcaagacaatggacagccttattagcagatcggtaaacaaaaaaattataacattctttaaagtaggtaaaatcaaacgacaatcctccaccaacaaaccaaagtatgaagtcatatgaactgagttgttgagtgcttacaagacaatcaacaaatctgtctcgatgatcacttcctcccaccctttcctcttaatccaacttaatgcttccttcataccaataattttagcaatttcaggcaacaccacaccaattttagactccgaaattgcttccaagagatgaccagcatgattacgcgccacacaaccaaaaccaaacatttatttagctttaaagatagcaccgtcaacatttaccttgatctttccacccattagtttgctccaaatgttgctgttagaaagtacaccagtaccaaaagaggttgttgtgttcttgtttgcaactcgccattgatcaaggaccttcttagctgactgaactactctcaacgcagtgctggttttcttttgccagaagacttcgtttcgtgtcttccaaatgctccatgaaatcattgcggcgtcgacaaccacctcagcttgattgctgtccaaaagattgaaaaaccagctgctgaaatcatccacaacagcagcaattgcagcagtcgagaggtgccagcaggcttgggcaaaacgacacccaataagcacatgaaaaatcgtctcataatagacattgcataaaggacatatgagatcgacattcacatgtttagtgctaagttgtaccttcgtaggaagacaacccgaacaagctctccacaaaaagtgaagaaccttagaagggacatcaagtttccaaagctttttccagtagctttcatcatcaagatggagccaattttctattattatatataacttttttattttagaatatatgatatatattgtagtcagttaaaatattttttaagatttattaaaaaatattaaataatttataatattcatggaaaaaataaattatcatttctggtacgcttataaaataggttatagaacatttttcttattctttttgtattttcagcatatgaataggtggtgcggtggagagagttgagggccgacgagtggaaggaggtggtggtgtaggtttctttgtcgctaattaaggtggtggctcgatcagaatcgctagatgcgagtaagcaaaagggataatatgagaatgaaaaaatgaggtatgaataaatttgagttttatatatgcaggtgtcgtggtaattgtaacacgcatgtatacgtatcgtttgaacaagtattactcacaaagagtgaggtcgatcccacgagaattgtagttaaatacgttaaaattaaactcttacttctatttggctaaataaaatttgagataaaattaaactagaaaataataagaataataaaactaaggaaacaagtaaattaatggcaaattaacaatgaataaaagttaggacttttgatttcaattgtatatattaattatgacttaatatgattatcttcttattaccaatttttatgcaacagcaggtttattaaggtaatttatagtattctcagatatataaatctcaattagatgcaaaattttcactctcgtgataaattaaacatgtaacagacattaaacacagaaaccctataag

SEQ ID NO: 384113 - DNA, 1701 bp, Cannabis indica
aaagttaaaattaagtatttacgccacgaattacattatactcttatttttaaagattcactatctagtaacttatgtatagtacattttttcactatgcatgatttatggttaaggtatcacatgttggagtatatataaatgtatataaggattttaatagtttacatatttatgatgggtgaggaaatataaaagaaaatgaggtatatatgtatgatgtataattaccaaataagtcctagcttattaggttaaaatatagtttcttattataaggtcttatcaaattgaactaaaaagttcaagtaagaaaattattatatatataaaagtaatattttatattttagacgaacaataacaggagttattttcgttttaccaaatagatccatagcttattaggttataagtgatgtggttctcccctattggttagtaacctgactaccaattgggagagcccttcaaataacttgttagtattttttttatatatcaagtgctaatgtttgtttaaatacttaattagaagattaatcgattaatagtggtttaattctttgattggtttgtttcttaagattcgttggatgaccaaagggatgatgaaggtgcggggtcgaggatctcttccccaacatttcttatcataatggaggattgcatccacactttcatgaattttctcaaggccgacaaagaaaatacttgccaaatcataacatctttgtttagaagaaaacgaagaagaggctcagtcgatcctacacttctccaactcattaagaaagtcaatcaaaaagtaataataatatattttaattaattaagtattttgaaacatgatagtgcaccgtgtcttactcttagtgtacaatcctgactatttattaatataataaatgaccaggatcgtacaataccagtaaaagggcactatcatatagtttttctctaaatactacaaatcggtattaaattcttaattttcttattttaatttttattgtgatcacagaagaagatgaagcttaaagatcttcgccgagctcgaaaatgcttaagaagaagaaggttgaaagttgatgaagggatggagatagtaatgggtttaatagacctcaaagtggtttctagggttttgagaatgaaagtgttaagtgaagagcaaatgcattggtgtgaagagaaaatgagcaaagtgaaaattttggatggaaaactccaaagagattcttcaacactttttttcccatcacattgactgaccccaccaaagaaatatatgttttgcttaattaaattaattaattaattatttgccaaaaaaaattaaataaaatattgactgcacaaaattgaatattctactatacattagggcacttgtttatttttgtaaatattaatatatttagtgttacatgctccaatctctttttcatagaaaatttgcagagtggggcctacatttcaaagtaattgcatgtgggagtgacatggatttaaagaatccaatatgaatgggccctcttctgcaaagtctaaaaaaagagagatgatatggtattattggttggtgtgcaatgtgattcatcaatatgttgaaagtgaaatataaaagaccaagagacaaaagcaaagcaaggaatagatcatacaatacaataacaagaccaactttattactttaat

SEQ ID NO: 384114 - DNA, 1135 bp, Cannabis indica
gtcaatccaggaagatcattctctcctttcttcacaataaccagattcaaaaccgagagatcttggctgacgatgcatccacggactgatttcctccttcgctctccggtacgccttccgaaaccacggaaacaaggggttccacggtggagcaagagacggactcggcctggagtcaacactccctgcttcattgggaaaccttgcttgtcacaacctcccatgatcttaaaaacgtatcctttgaactcttcgcccaaagaatcaccactgacttcctgtgagattctcttgtcgaagaatgctctgagtttctgatcatcatcgatctcaagcttcttctggcaaccggtggtcggattggcgatattgaatttcatgtttacagaggctgcgcttgtctctctcctgagcaaattctcaaaccctaatcgttgtagagaaaccctagttgttatagtaacaaatatatagaataaagaagaacaacaactgggctgggctggggccttcggcccataacgataattttttatttattttcttttattttaatatattattgcaaatatctaataattaaaattattctactaagccaataacaccacgaggggttattaattagataaatgctatatttttttgatataattatatacaaaaagaaaatttacgagtgtgaataatttgtagtatttatattacacttggttactaaactatagctcattttgacaattaaatactatattttgcaaaattttattttgattatttagttgtaatttttatactttaagttttggtaaatatagctaccttggccaatttttgagtgatctgctattgtcacgtaagtaaaataagaatttaatgagaatatatagacgaaaccttaaaaatacatacagattagtattttggagagttttcttaccaaaatttgagattgtaagattcattataagtgaattgagaattatggggatttagcctcaaattactaaaaaaaaataattgaaaattacaaattattttcaacaaataaaaatatatacataattaaggccaagactaattcaaataacaatatatacttaataatacttatatagggaaatttacatagtat

SEQ ID NO: 384115 - DNA, 1600 bp, Cannabis indica
tgggggttcttaggattgaatcccagtttggataggtgctgccacttcatctgtttctgcatgaggggcagataggagggtgaatgcagcttgtgaaagtgtcagagcaatgtaatactcttgtttctccccataaaccataatagaattttatgttagtgctcatacttgtgtgtgagggatcaattgagaagagtgaaaggagaacatctaaattttagtttaatctgccttcatgcaacatcagttcagaaatcagcatgtgaggtcttttaattttctcattatttttgcagagtaaagacaaaccctaaaaatgcaatcaatgaacactttttgccacgcttcctagacttcattgtttggggccatgaacatgaatgtcttgtcgaccctcaggtacagatcgcattggaatatttcttgtgtatacattagttttagcttgataatgccatgcatgtatttctatttgtcttctcaaataataataataataataataataataataataataaaataatgattgcttttcacaggaggttccagggatgggatttcacattacccaacctggttcgtcagttgccacatcactgattgatggagaatcaaagccaaaacatgtgcttctgctagagattaaggttgtcctctttgaaatttcaaatgcatatgttctagtaacattatgtataacaatgcatgtggtatgtaggggaatcaatatcgtccaaccaagatacccttgacatcagtgagaccgttcgagtatacagaggtaagtttcatattgtttttccatttatcttgtaaatcattcccttatgaattactcaattccaaattgcaggttgtattaaaggaagaatctgatattgatcccaatgatcaaaattctattcttgaacacttggattcagtggtctgttttccttttacatattcatgtgttatattaggctcagtcggtttcctttgttttggcaaattattgtcatatcaaaggtttattttatcttttattgggcttatgctgtatatcacaactaactgaataagtataaatgtctgtcaggttagaaatctcatagaaaaatccaggaaaaaggctgctaatggctcggagtttatacttccactaatcagaataaaggtaatttgtgacttcatcagaaatggtattgctatcaaatgtgatctatttttacccttgtgtctcctttagtcctgttttctgtcccatggttcaccctttatgttttgagaatcaaacaattatagcaatggagagggagggagggagggagggaggatgggagagtgggagggagggtgggggagaggagggagagagagaccgtcccttgaatttcatataataggttggatgtaccttctgcatttcctcttttcggacttgttggatatgtatctctcaatttacccgatcgcttctcttatttttttgtagctttatcttttttatctattttttatttttgaataaatcttattttctttttcttttagtttgtttgcttacttttttttttttgaatctggatcatttattacaactatttattttatttat

SEQ ID NO: 384116 - DNA, 1618 bp, Cannabis indica
agctagcttagctatgtataattcaattatgtcatggatcttagcccttctcaattagctaggtcactataaatgacagaaggggactagctaatagctaaatattcaagtgatgatataggaggtgcctattgattaccttcaatttacagaactagaataattaattaattgggaaaagaaagaaaaagaatattcaccataggttttgagtttttgcttcattttggtttttacacagttatggctatatatatcagtgaaatttcaagataaatataaccaattaaattcctctgtgcccttatatatatatatatatatatatgcttggctagctagttgtgatcaaaagtatacatgctgtgaactattgtcacgatagttatatataatataaatagaaaattctacacttatccgatttggtatttagtagaattatttagtcaaatttttttatagtcatttacagaattattagcacatcatgtaaaattttgagaaatttaaaaaaatttaacataccgtaaatagggttcaaacagtcttttttacaagcatgtaaaataaactttttttgagatgaagtatccaaatatatatactttagagacatgatgataaacattttactgttatattatctaattgtaatatacatggttggtaatttatatttatagcttgtgctctgtcaattatttggatataattctaattaatatcatttgtgactatagcaagtacatatatttaattagtgaatgatcgaaaaacgattatgtaacctagatcgacattatttgttatatataaaatgtactttctttctgagtatatatataattacattagtaaatttcgaatattgatcgaagaagaaaaacagatgaggctatatgcatggctgaatgaataattttatcaatatatatgtattttaagttcacctaaataacctagttcatatattttgattgttgattgtgtacgtgtatatataaatatatatgtcatatatgtgtgatctggaatatataattaatctctctcatgatcaggagcaccggagtatatatctggtggatttgatacccgaatataattattacaatctaattttgtatattaataattgtagttaataggtatcttaacaattttagaattttcttcgaaaacatgtggcctccctaataactaaaatgtcatataaaaaagaaaattatactaaatcagttagtactctcctaattattaggaagagtacagtagatatccccttaaatatgaaaaaagtttctaagatttgtgagaaatcccaagtacttataattttttactatattattgctatagctttttataattgatttgcagttttttctaattcttattaaattaaaataaataaaattcgatttaaattatactaatagcgatagtaatgttaaactccattttctctttatatatctaaattaattattacttttattactcatgctgcacttagactgtgttttgtataaatgattgtcatgctcaattttgaagatatatttgtgtgatcttatttgtttaaaagtttttggaaaattaaataaaaaaaaaa

SEQ ID NO: 384117 - DNA, 1622 bp, Cannabis indica
aattcattatctttctcatgatcagaacaaacattctctaaacttttgaagaccattgatttttcattttcttttatcttattaggtttctcattttgttagatttgttgataaagctcaaatgttcgaagtatcccaccagctccccaactttcattgtgctaaagtctttagcctcctccatcaccaaaatcttcgcattaaacctatcaggaaaaactcgaattattttcctaactaaaatagattcattaagtttttcacccaaagaaaaaaattcattggtaatgtcagacaattttatgaaaaaattcaaaaagagtttcataattaaacattctaagatcatcaaatctactttgtaacataaagattcgagaacacttgacatatgcaattccttcaaaattaactagccaagcttctcttgtagattcacataaggagatcaatataataaagtcttcatctaaacaattaaaaataacatgcaaagatttattatcttcctcatttgactattctaattcatattttactttagtattaccttcatcatcttcttcaaccggtggagaccaaccagttagaataaatttcaaagattttttattttgggatgatttgatgcagagccttattcctaacctttcaataagagtagttagaatcatttagcaatggtagaacaattgtagatcttgttcgaaaaaagaaacatattgcaaaaacacacaagaaaaaaaatataggatcacattaagagtttattgtcccgctttcataccaattgaaaatcagtattttgaaaaaataaaattaattctacaataattgtaattaaattgaaaatgtaacgagttgcagttacaggttggttacttgttaatgcagaaactggacttgcagtaacatgatagttgtaggaataaataatgcaaaatttaaaacttgatacaagagaattatacatggtatcaatattctttcaaatactactagtctatggggccacacctagagaaaaaaaattaattaataaagtctaaaaaaattacaaatacaattactttaaactctcttctcacaaagataaaaaatataaaataataagaccagaagagatgaaagtcgtgtggtttatttaggtcatatttatagaacatagaaaccttagagacatctacaaacacatttttacaattgttagaaactttcctaatttaaaccccagtctgctgcgacaaaaacgcaatctgcagtgacaaatcagacaaaattttccaaactttccatatatatagccaagataacgattttagctctaattcctgtcataaaaataccacaaaatctattatatacaaagtaataccaaagatatgaaccaagaattgattccaatcaattatgaccaaatatatacaatattcaatacttttcataattttttatgaaaaacattctaaataaatacaaatcagctataaccactaattgacaaaatcaaatcaatacttaattttccttaattatgaaaattaaattaaataatattttgataatgaatttttttaaaaaaagactttataatttatatgttgatcaaatttaaagaaaaa

SEQ ID NO: 384118 - DNA, 1573 bp, Cannabis indica
ggggcctgagcgttcgggggctcaaggcgcaagcgttcgagggctcgaggcgcacgtctagcccgtctaccctcagggccggccctgggtttatcttaattttaattagcaatgaaaggagtagtatatttctatatatattattttattttaacacatatatgtcttttaataccatattcttcaattgaataaaaaaaaaccattttcaagaaagggaccttgaattattattttcatgtatatatttatttaatataataaattagaaacgacaccactttaaaaaaacatagaaaacgacaataaagactgatatataagaaaaacgacagtagtaatgaaaactagaaataaccgactccattccataaaacgacatcaacaaaatgtaaaacgacaataaatgacaccatattacatgaaacgacaatgttttaacagacaacaataaataatggcggagctcttaaaacccgaaacctggcccattaattttcacgcggtacctccaaaacttggcccagttccttaaaaaaaagaaattattctctctttctccctcaaaataaaataaaataataataataataaaaccttcatacgtaaccaaaaattctgaatgaaaaaaaacataatacttgagtaaaaatgaaaacaaaaatagaataacagaatttaaaataaaaacgacaatataaacaaaaaaccacaattaagttccatcagtaaaaacgacaataataagaaaacgacaataaatgactgcacccaacaacaagaacaccaataaaaaatccatcagaaaaaacaacaataacaagagctagaatgaacaacataaataacaaaaaacgacaataaatgacagcatccttgaaaaacgacaatattaaaaataaacgacaatatattttaacaaaaaccacggaaacccaaaactcggcccattagttttcattggattcccctcctctaaagaccatacaaacgctccatttttatattttttcaaagaaaatatttccttctatctctttccaaacaaaataaaaataagtaaatattaataataaattagggcctacacgtaaccaaaaactaataattcattaggaattattgaggaaaacgactataaccaaaagttctgaatataaaaatacataattcttgagtaaaaatataagaaaaaggaataacagagtttaaaataaagaaggcaccaaaccaactagaaaaaacgacaatagaattctatcagtaagtaacagtaacaaaggacacataataaaaacaacaacaaacgacaaaaataaagaaaaacgacaataaaaaagacaataaacgacacagataatgaaaaacgacaataaacgacacaaataatgaaaacgaaaataaacgacacaaataatgaaaaacgacaataaaagacacaaataataaaaaacgacaataaatgaagaaacgacagaaatattaaaaaaagaaaataaatgacacaaataataaaaaacgacaataaatgaagaaacgacataaataataaaaggaaaaataaacgacacaa

SEQ ID NO: 384119 - DNA, 890 bp, Cannabis indica
cgaatttttaaaaaatatatataatcattaggtattagtaatagatagtgctgtataaatagttagtaattttttatatttattattaaattaaaagatgtgagttttaatattgaattatattagtaacactaattgatgaattatatcaatatgacatcaaaatattaatatctatataatggtaattaataaatctacgccttctatatataggctgtttagactttgtttcttctagcttctcatgaaactctatgaaaaaattactaaaattgatttatgttaaaaagagttctttaaaagtaaaatctgaaaatcatatattatttatccgaccaacaacataaagttcaatataaatatttatatatagacatgtaataaagttgttggcccttccgccactggtgtttagcctcgagtttggtgtttatatgcatatatagccggccaatattagtagtatatttatgtttagatatattgaagaaaagtggatatggtttcaaatttcatagtgcctaccttacccatttcaagtatatatatatatatccattccattctactatatataatataacacatatttaattagtacgaacaccaatttgttggaaatcaaaataatcatatgtaaaggattcagtcaatccactactacaaaaaccttctttagaggcggtttttaagtcctttcagcatcggttttcgcaaaattcgctaccgacgctgatcagagtgatgctaaagggtccatatgatccgacgccatagatggcgtagcaaccgacgccaaaagatcgcgaatttcagttttttcaaaaaaaaataaaatttaattatataattttaattatatacttattaatttatatattatttta

SEQ ID NO: 384120 - DNA, 2694 bp, Cannabis indica
tttcggcatttaaaagaatttttaattgaatttttttatagtcatttacgttatggttatgtaaaacatcctacaaaattttgagtaattcggaaaaatttaacatacccaaaatagggttcaaacaatctgttatacgcgagactcttttatacgcgtgtgaaataaactatatttgaactatttgtataaatttctcaaaattttgtaagatgtcctaaacaattacaatgtaaatgagtgttaaaaaaatggactgaaaattctctcaaatatcgaagtagataaagggtttatcggtgaaaccttttaaaattttcaaaatatatattataaaaaattgaaactaacaaagaggggaaataaaatggaaaaaagaaaggtacctcccccgaatggtggaaacccacttagaagaatgtataaaatgactccagcactccacacatctatctcctttccataattctgttgtaatacttctggggccaagtagaaggcacttcccacaatgtccgtgtacactttttctggccacaacacacaattgaatttgaaattgagtttcacaataaataactttgtgtgtgtccttatgcctacctcgattcctcgttcccagtttcttaatcaacccattattaatatatatgcgtacttataataagatcatttataaataaatgaacattggtttcacaatgataattctaatgttaactaaaacatctaaagctccagccgtcataataataatcaatgagttggttgattaactagtcatttttgttgttgactaactaggtgctcttcttgagtgatcttattgactcgtagatagtagatacacatcaattaaatttgactacttatattatgttttgtcaagatctaacaaattcataattttttttaataaaataatactatcttgaaactaaaaattgaaacaaaacaaaaccattttaagaatttttgttcaattaaaaaaattgttgttattatttttatgcaaaagttgtaaaaccaagaatttcaaacaaataataataataataataaattaaaaaaaaaaaacaagtcatttgtaaaaggagagtaaccttgttcgataaagacagagagtccgaaatcagtggccttaataggtgcgttgtcatctttactggcaagtaagaaattctcaggcttcaagtccctatgcattactcccatgaaatgacaaacatgaacaacattcacaatttgcttgaaaattttggctgcttcacgctcagaatagctccctttggatatcatccgatcgaaaagctctcccccggagcacaactccataaccaaataaagattttccctgtcttcgtaaactcctttaaattcaacaatatttggttgaccattaagatgcaacaaaatgttgacttcccttctaacatcttggatctccttttcattgataagttttcccctagaaattgacttacaagcgtactttctcccagtggatttctccttgcaaagataggtcaccccaaactgaccccttccaagctcctttttgagcttgtaaatcgattttatgtcatcataaggtctttctaaaatggttcctttttgaggagaagaaggaggtgttggtgatgatgatgatgatgacgagttatgggggttattagtattaccataggttataggacgtcggtagaagcaactaactatacgtttaaaccaccgaaataagcaattgcccatttggtatccaaggaagaaaaataaaaggtgaagagaaagaaaggaagtaagtgtatcagtttttcaggtggcttttggactctacgaagaatttgtatatatatatatatatatatataaatatatatgattataataacttgtgaaaaagataatactttacttggtcatggcatttccctattaaatggtttgagcataccattccttctctcttttttatctgtgaagcttctacaaatggaaaaagggtaggaggccgtacgtggtttttgtcacgtaagtatcaacatggaatattaaaacttcagattcaactctcactcaaaataatagtgaccagtcttttgactgtcgaaatttctactacagcaatcctgttaaacatgtaaaacctcacaacactaaaaacgtaattaatttattattgtaagaataattacaccaagacttgaacactttatcttgatcacaatacacaccaaacacttactctttttatttactagacactcatacttaaaagtttacttgcacactatttgatgggacactcttttagagtgttgttgggactaggggtgttaattggatcacaatccaatccaattatttgttggatattggatttttccatccgattcaattcaattgaattgagtcatccaatccgatccgatccaatggatgtattagattggatcggttccatccattggatgctttaactggttttttattggattggattggatccatccaatagatctcatggatgaatccaatccattttagccactatttaggctaatttcattaaaaaaatatatatgaaaaaatataatttaaaacctaataatctaacatagataataaaataatatatataatattaaataaaataattaaatatataaaattataaatattaaatatgattgg

SEQ ID NO: 384121 - DNA, 1025 bp, Cannabis indica
agaataaataaaaaaactttgtaaaaaaagattcatgtatggtataaatttccttatatatatattaagggaagaaaatcaaagaaatgatgatatatatataagagtatagtgtagttatgatggttttatagagaaatctgtaaatttcttccctgtaaaacaacatgatgatgatgaccaaaggagctttcagtgctttcatttccccacccctcctgacaattaaccatgaattttttttttatattgacagagcattatactactgtctctttgaccatctctttacaaacaaaatatataaatatatatatatatataaatatatgtctccctcatttagtactactagctatgccacacagtaataaataaattattttcatcatattgtaaaaattaataactattacaatttaaataagccaaacacaacagttactatcttattcatttcttgaaagtgacacactttgttatctctccataatttcctctttcttatttggcttcttcttatcagaacaacactacccacattgtgtctttatcccaagatagagatagataggaaataaaaaaagataaaattaaaattaaaatttcttggaatatattaatatatataaaaaataatataatttgtaagtaaaatatattagaatgagaaactgcaggggcctgtggaagatgaattggtgatgtaagccaaaaaaggattgtaatttgtatgttagtgaaacatattgaatgagcttttgtattttactaatcatcatagtggtgagagacaccataatattttaatatatatttatatatttggttttaattaataatttgattctttccttttcataaataatatattgactctatattatacttgattatatttatgttgaatttctttttcatattttttgtggtggcaaaaaaaaaattgagaagttagtatgggaagaaaagaatggcacaatgacaaatatatatgtatttatatgtatatatatatatttata

SEQ ID NO: 384122 - DNA, 1288 bp, Cannabis indica
ttaatattaaagttaaaataataggataattagttggggaattactttatatactattttttaaacttttctttcaaatttacggtttggatttttaaagtagttgcagtgcagttccaataagggatcctgtacgatatttttgttgcaatttaagttgcagcgcgcaataggagtttctatatagaatttacgtaaaaatgcaaaaaaaaaaaaaaaatgtttagaagtgtaaaaatgaaaaatgtcctaattagtttttgaataattttgtaaaatatagaataatgcgtttataaaataaattggatcatatttttttaaaaaaaagttcggtttgagcggtttaattagatttcttattagctagggcaaaaacacttgcaaaaaatacttcaaagtttttttagctttaaaatattaactcgcgaattaagactcatcattaacgttctaatcacgtaaaatcctaattttcttcttctttaatatatctctcttaaatttaattatcttataatgggtttttgaaaatctcgaataataaatcctcatattacacatgtagaataaattagagagaagatgatttacatccctaactattctgtaaatcaaatgtacaatagacacctatgaaaagaaatgggaggctttaggtgcagtcgtttttagagactacacctgagcatatcacatgtatgatgtttcattttcaaaaatggataagatttttagagaattataaaggatggtaaattaagcatatggcgtagaattaaatttaattagtagtgagaggtttaccaataaaaacgaaatatttatttgtaggtaggattaggatgtcatgcatggacaaagtatcaacataagaagtagtcagtagtctcatattgatattcccattcatctagtcataattttctaaaagtcattattaagagtcgtgttttaggtggaaaaggaattgatataaatatatacatttttgtattatatatattatttttgatttattattactcttttcattctcttttctacatatatgcttacgataaatcagaataaaaatcaaccatacacgcatgacgcatgcagacgacaaacccctattagaatttaattatttgtaatcctaaataagactaaatgtctcattataattacccatctatattatcatcacacaccctcattttctcgacactgtgcctaactctcataattaataattaaataactgcaagaaataactggaagaaattatatatatatatataaa

SEQ ID NO: 384123 - DNA, 4359 bp, Cannabis indica
ctatcagagcaagctcaaggtatgcagcagaaaagtatattttggcattatttacatatatatatatatatatatacatatatgatcgatttggttatggaaatacttaactctaaatctatatttttttttctagggattcgtttgggaaaatggcacttcatgtcatcactgcttggagctaataaagaagaacataaaccaataatccatcatgtaagtatatatatatacataattatttttttctcttgttttttattttttaatctcttatatattacatattcaaagcccttaccttttctttttcttttctttcaggagaaggaaattattacttcatcaagtaataaaagctgtaaagaataatgataaagatgaagagggtaataatattatgtgcaaagatgaagaatgttcaggtactaataccatgaagaaagttactactactactaccacttctaaagtctccaagaaatcatcatcatcatcatcatcacattggtccccaagtattcatgaagattattatggacctaggaggcacagatccagacaccatttataaccattacttataattaattagtattaatttattattagctatatagatatatatagttctttcatttttcttacctaattagttctattataattatagctaggtttttatcatgactacactaattagctagctagttctttgattaaattagtctcataagaacctgtggttaattattcagaaatctgaatcaaacccacgttttaatttaccaaaattatgtaatcaaacagtattttgtcctagttactacttattattatctaattaataacatgcattaattattaatatttagtgcaaagttttttctttttactgttttttccttacctttcttaaatggtaaaaaagtgcctagaaaattaaagcaagtaataactgaagtgaagaagcaacttgttgaccatatcatataataattaataaagttaaataagtagtggttaattaatttctcatttttacgaaccatgcaggaaatagtagaaaacttttcagtactactactgtgactacaccaccctcttccactagtaccaccacttctaaggttggtttaatttaaatatatattattaatttcaaaaaataataaaaacttctacataattttgatatatttaattaaattatataaatttatcaattaatttttttacagaataataatgagaagaatggtggtagagaagaagagaaatattcaagtcataataataataataataatgttaattcgttaaagactactattactacttctgatattgatgatgatcaacacccagatcagtacgagccatattctgaagctgtagaccttgctgagatggactattctccagctaggagaaaaacccctattcacaattaattaattaaataatatatgtaacaaaaagaaaattatattaaaaaagaaagagagataaaataagggaaaactagctagaagaattaagtgagacagcattacgagatagctgcagtttatttaggactaagatataaatatatatattaaagttttttgtacatattattattgttgtattaaattattaatatgttactcttattattatcatttccttaaaaactgtcgcattttagagatgcatgattgagtaattaatgagcactagtacttattatatatggtcttgtattataggttcatcattaacaagttaattctgttataatattttcctcttactaatcaattaatagatagtaatataatacgcctgtctgtgcaactcggagcccactaaggtttgttcgtactgttttaatggtgatggtatatacaataatggtgataatataattacagtaatatttattagtttagttatagtaaaatagtagataatataattacagtaatatttattagtttagtcatattaatatttattgtaattttttttagtcacaacatagaatttagaaattatgatttataattagtcacaattttttaacttttagttactaaatttgtttaaatcccttaaaatatcaatttgatgcatacaagtttctaacttcaaaaatagacagtaatagtcgtataaggtcaccataattataagtcggttagttcttttttctaaacgggatctactatctcacaatgtcacgtgttgacaaataatgttacatttaatttaatttaaattaatttattttttaaaaattaacttaaattattttttttctttcttcttcctctctacgctgccctatacttcgacatgaaattgatatatagtccatggaaaagaaagttaaaagcttgaaattgggtgatgctatgaaaaaaaaaaaaaaaaaaggggagagagtgttacatacaaattgggatctaaagaaatttcacctctttttgagccattatgtgaagaaaaaaaaactccaatagtaaaacccaaaaaagcatttcagtttgtgttttatattcaaaaatgcggttaaagaaagaaagaaacttcctttctcttttggccttcattagtctcaggtttaggggaaacaaatctctttcaaaaatattcttcttcgtccactattttttttttttttgatgaaccagcagtattttcattactccaaaaacaattgatacatcctaatagcaccttctatgggaaggcctattataatctatacagtttagttgataaatttacaaaactataaagtattaaaccattctatatcttcatcctttacatgatttggcatcaccatagattttctatttttgatgagccatttcactcgctgcactaagtcaattggagttataatattcgaattccatgacttgggaaagtttgattacttcaaaatttgagtaggtctcaagagatcagaattcaaatattgatgctttagcaaaattggccatgtaacttaaaaatgatagatccaatatagtgccaatcgagatactgcaacatctaagcattttttagaaaaaaatgataaggaggtcaaaataatagatacgcaaccaacttggatgactctgatagtggaatatctcacaactggcaacttccttctgacaagaatgaggcttaaaaattaatacacaagatcacaagatgcacactcgtagagggaaggctttaccgaagaggttattcaatgccactattacaatgtgtaacaccaacagaatctaaaaatataatcaagaaaatacatgaaggattttgtaaagaccacgtgagtatgcaaagcatgtctaaaaggtaattaatcccacaatcgtattattggtcaataataaacaaaggcacacctgaaaacgtgaaaaagtgtgacaaatattaaaggttctcaaatataccatgaacattcctacagagctacacatgatgacttcctcttattatttgcaatataggaaattaacctcatcggttctttagccgttgtacgaggaggagccaaatatgtaatagtggttgtcaatttcttcacaaagtggatcgaatatgagcctctcgcttcaatcatatgaaaaaggtcctaaactttattgtgaaaaatatcatttgtcgcttcaacattcccatgaaaatagtcttcaacaatgggactcaatttgatagtgatttgttcattgagttttgtgagaggaataatattataaaagcttctcgtcagtagctcgttcgcaagctaatgaccaagtacaagcattgaataaaactttgaaggattacattaagaagaaacttgatgcagcaaaagggaggtgaaaaaaaatagtaatgggacataccttatttttgttagcattcagattagaagaaatgttaccaatagaggttgacataatgactcatcgccgtgaattttacgtctagatgaaaaaacatgaattattatgagaatatttggatctgcttgaggaaaagcatgttgagccccaattacacaatgatgcttattggcaaaagattacaagaaatttaatgaaagggttcaagaaaggctattgtaggtcaaagatttggtctttcgaagagtcttcttgcatactcgagatctagcagtaagtgtatttaaccctaactagaaaggtccttatgtaattgaggccagtaattggacttggtgtttgtaaattagcttttccaaatgggtccctcgttgaaagagatgcttatcaatacaattcctaactagaacaatatagaattggacacaaggaattgtaaaagctctaaaactttatgagctgaacctttcattta

SEQ ID NO: 384124 - DNA, 1237 bp, Cannabis indica
ggtctcataggcacccctaaatacaatcagccaaaagtgaggctaattcagctgagatatcattctcactaagaatacaatcaccatagatcgactaactctagcaacaagccgcatgattcgcagatcgttcaataaatcataaattgatatgtaagaattctgagaaaaaagttttacaatcactaataattaaaccaaacaaaatacacatagatattgaacttctcatagcttgaacaaccactaagctatccatctcaataatcatcctgtgccactgcattttcttgatccagctaagtgcttcctttaaacccatagcttttttcaggttgcattacaccaaattttatctaagaacaagcaaccaccatattcccatgatgatttcgaacaacagttcctaaaccaatcttagcctcctcaaagaacatagttacattaacatttattttaatactattttatgctggtctagaccaaagcttagcaccatctccaaagcaccaaggccccaaagatagaacataattaatttactaagcttttataaattgattaaaacgaactcttacagagacatccacattctccacagaaggcatcttatggttccaaaggacatcgttctgagcattccaaatcgcctaacaaagcattaaaacacaggcaacctcatcaagacttctcctacccaaccgaccttgtaaccaagcaccaagatctatttcagctgaatcgaaacccccaagaccagtgtaatatcccaaaaatgtaattatgttctaatttttaagtttaaggttgttatagtttgagttgagtgagttaagttaaagaactcactcaacaatggtgattttgtgattttaagtaaattattggttttgaatgtttaattatattggatgtatgtttataaacatatttggaaagtttcattaggtttggaggagttttgatggggtttggagtgtaaaactccaagcaggctatttctgcaggaaaaatagcttactgtttttacagggtactataaaaacagtggaccatttttctagggcaaaacccagaaaaatggtggacctttttagggtgtttccagcagctaagtttttacgttttatcgatatttaggctaattctgcgattcatcaataggggtgttggtattatatttatccaggatcttagatctatttggcaagtatgttgatttaacaacctaatattg

SEQ ID NO: 384125 - DNA, 1778 bp, Cannabis indica
aaagaaaaaaaaacaaaaaattattagaaacaaattgtataatgaagcctcaattattcataaaaacccaatattcactgaactatactactgattctaatgcttaaaaccccaaaattggtttctatatcactacattgaacaactcttaagcttcattgtattttaactgcagatagtggcggactcaggatttttagttagccggaagtagaaccaaataaatatatactgagcgtattagtataaaaatacttataaaagactaaataataaaaattaatctaatcacctttaactatatgacatactaatatatataggaaaaaaataaaacagaacaatatcttagcacagttgaaacaaatacaatctttaagctggctggttattttggctactgagatgagtaagatgatatattcaaatatatatatgtatatatataccgcgggaaagtgtgtatgacatggaggcatcctccttggaatcctgcattgaaatagctcctttggagcgttgctgattgaatgcagtcttggcttcaatgagaatctccatctgttttttcagagactctcctctctcaagaaactctttctcttttgctttgtagaactgattgactttgttgagctgaaggtctaaacagttgaagaactcttttgcagcatcggtatccgcgaattgctccaacaattctgtctcatacacgtctcctttacttgctgaagaggcaagtttcttgtgaacctgcacgtagtgatcaacattgagctccacattattagctcacaacacaaaatagaagagatcatcataatgcaaaaagagaagaggaaatgaaagagctttgtgtacatgaataacttcatgatgatctttacgtttaggaccaaacaaagagaagttcctcagagttgtcaaaagggtatgtgacaaagagttgttttggtgcttattttcagacttgttgttgatgttagtgttaagaaggtggatttttttgaggtccttcttgagtttccaataatcaacaaatgcttctttccattcagggactaattggccttcaaattgcttagaaaacttcaccatcttttgtgttattgttatttttctgttctttctttctctcttaaaacttactctttttgagagagagagataagcttacttaaaaagagagaagagagaactagcgttgaagttgttgtgatgagtggttcaatgaaaggccatggtgagacaatttaagggggtgaaaaaggaattttgattgatgtgctcgtaccgatgctcgacagcacattctaaaatatcctttgcacatataccgtcctatgcttcctccacttgaaagggtatcatatatagttatagtagtgggttatatatctatataaatgtatatattaatatatatacatatagatatagatagaaagcttggccggaaagtttctcacaaatcgccgccggcaagtatgactagtcagctagctaactaaatacttccctctatcccaacatgtatgcctcttcttaattccccatgaagatttttcaaagagaataattatatgcttatttaaagtgacatgcattgaagtttaaagtatatatgaaaaaaaaaattgcaaagttgaaagtatttcaaagtaatgaccatctagagggcaatctacaatagaatttgtcatttatgatcattattataagttatacatgaccaatcaaattcaattaatactttttttaaaaaaatttatttattg

SEQ ID NO: 384126 - DNA, 3513 bp, Cannabis indica
aaaaaaatcattgtgaattttatttgatgcttctttcatttctgaagctcttatttaaaatctcagtaaacattttagtgcattcattaagagctgatgaaagacccaagctattagtttgcttaaaccatggtagctacacaaaaaataataacaaagaagactcctcaagtagaccttgaggtcatcatggatgatgtagaccctctttcttcaaaggatgcccaacaagaaatgcgagaggaggggattcatctgaagctaatgctagaagggatgacctagattgatgtcgtaaacgagttgaattagaagaccttgatgacgaaaaagacgatgatgatgatgatggatatgtcaatgacgagtattataagatgggtatttttatgaacaatatccaaatttggcttggcgatccaatgagttatataagaccaagcaaaacttggatcgtcaagagatgttttctcaaaagatggtgaggacaatgacaccgcctccaacaaagtttagagacttggaatttgtcaacggatcgaatagagaaaaccctactaacgcagaaacctcagctcctgcaaggggtaagggaaggcaaatgtaggagatcctcgaaacccgacaactcctttacctctaagaaaaaatgtgaatccagacaaccagcccttccagacgcagaaggccattgaagattgtgggctcaaatgcccttctaatccaataattcaaacttacgcaaaagggcctgaatggaagtgccatgccaaggcaaggataaattgcccctatgattttgttaactaggatgttaggataggaggacagtactttgatgatatttggtccactgtggacaaccaaaggtgtcatgatgcgaagtacaaaaaagctaaaggggaaaaggcgaggccacgtggcattgatctttaaaaccattttaatcataaaactttcagaaaggaccttccagaaagtgaaacaaaaagggtagagaagaaaatttcttcactaaccaagcctatcctaaagtagggtggggccctctcaaacacaaaagatgagaacctaaaaccttgtgtcacagagatcgtagaaccccagtcatggagaacttaaagataccacaaattgagttgtatgatcgttgtgcagacataagaaccacctgtccaagtaaaaaaaaatgatggaggtggcaagagtgagtgatgatgccaagttcttgtgtttttcattagcacttaccatgtttgcagaggattggtggaaaaggctagcttttagattaattaatagtttgaaagaattatgttgatgtgagatttggccaaccaatataagagttgtattaatacttatgcttaccacatgttacacaataagaataagaaaataaaagaagagaagattttttagaggttcaactccattagttagcggggaacgacctactccctttttcgttgtattaatattgattgataatactattaagatcactataggtgggtctgagatagctatcttaaggttacaatgtaggaataaaagatggtaaatcttaagttaagaaataagcaatgtgggtgtgtgagagaaagagagtttagacttagagcttagggtttagctagagcgcagggttttagggtttagttaaggtaattcatacagggcagtttaaaacctttaattaggtaaaataaacagggttttaaggactaactcgcagtgtagcttgcaaaccacgcatgatgctgtacaccaaagtcttgccatgccaatgtctagctggccatgcatctgcaggatgtagggtggccaaactttttctgtctagaagctagctgacctgtgctggccatcaggccggccaggggttgttggccatccatcttgaggtggctggtccttcattcgtcatcccgtttgagagctgggactcttcactggtttaagtgcttagtagatgacttgcccttctacttaaacatggcgctgatattggccatgtagacatgccatgtcacgtggaaaaacatcacgataacatttccacccaagttcctgtgtagaagtttatgcagatagggacttttcaacttagctgggactgaagtcgccttcactgaatacatatggatgcatttttagtctttgaaataacttttcttgactatttgatctcatttgttgtagtaagttaacgacattccttctacatgttttttagttaaacactacgtggcatgtgaagaagtggttccatagaaggtatataagccttaaggagggaaactcatcttcatttttcacttttcactctctcactagaaaatgtaactttgaaaatctcctccttctccctagaggctgaaacccacatcgctccatctcttgagatttcacgctacttcgatgatccatgcttcccattcccttcgtcaaaggtttctcgtagtgggtaagctttctattccttctatttacttgatttatttgatttttccgtgattgcattaaccttttctttgctttgaaatttttttgattcccacattagattgtagtcctttcaatatttttatccgcatgataatcttaagatgtattatgtgtgatttctagataaaaaagatctacttctgactttcattgtgattattggctctttgagtcacgaggaacatgaagaacatgtttatgttcttgaacaacacatgtttagatccttcgtatttcgtggtcagccatggaggtcttgtttaagatctggccaaccatggggtctagcaggccatagggggtaccctatgagctggttgacctatgcttcgaaatacaactcctggttggccctaggcgttgtcatgggacctacccaaccctctaaggcttgggaagcctggctagccaaggctagggttccaagcaggcgaccagtcttttgtcctcttcagacatcagctagggtctcgtagcaaccttggtatgcatatacaaccataaacttatgtgtggttcccttgaaaactctatataagactttgtagttagtccgttatagtcaagtgcagaacttacgactccctatttctctaagtagatgtacttaagattgttgtaaagaccgcttagttaaatttggaaagtagtagttaattatgatttaactatggaaaattatttatagatatttaaataattatttatgctgttattttagaattcagaatgcatttttatgtcatatagtgaaatttcataattttgcttttccggtgcccggcaacatggaactcggtgtatggctcagtagaatcacaacttagtatgttagtatattgggacagtttattacacattgggaatgtcgagattcgtcgggaatttcgaatttcccaaaataccctttaataccccttttatgttattttagtgcggagggacaaaatggtcattttgccccaatgatattttttccttcagtggacttagtgtaatgtg

SEQ ID NO: 384127 - DNA, 4121 bp, Cannabis indica
gtgtaattctgtagtgttgatatctgtgacactcattaattacttagcatacaaaactgaaaacggtgatgagataatgatgtgagtcaggaagctcattactttgattgagatttatcattgaaaagttcatccatttccattttgactactcactcacttacttaaattaccaaagcattcactattttaaacacattttaaaatgttatttgtgctctgataaaagtcaatatttttttagttaatacctggtaaagatcaaggttttactggagtaagtaactaagtaagctctggtgttttgaaatttgaacctctttttttcttcttacaagaaactcggattctgataattaaataacagctttattaagaatgaagaacggacttgattgacccagtattgttcgtacaacttcagataatttttgtaaagagtgcaagagaaagagagagagagaaaaaggacttttgaaaccataatgactttcaaagcttttaagtgtgtatatatataggagtgtgtgtctcttctacctcattctttttgttaagtgaaaccagaagaagaaccagcctgtctgaaaaagcaatatcccacaaggcagtatatataggttttagttttgttgaggcatatgcggtggttctttactaataatactgttccggcttataaaattatatctcaatcttttcttctttagtgatttttgtcttctttctctctctctctttcttgcacatatcataaaaagaaaatgaagagaaagatgttattatgctgctactttctaatggcttttctcatgagtagttgtgtatctaacacaaaaagcaggccttttgaatccaaacactttgttcagcaacaaggtattattattataattattacaatgtaatattcattctctttcactttgaaaagtttatgtcagtttttatgtgatgttgaaaacttgtttacttaacagaccaaatctcacacaccccattatctggctttggcttcactaaggtacataactacatctctaatatatctgttactctgtagatatttacattcacatgttgagatataatggttttgattggttaaagggaaatgggaatgaaattgaagaagagtacagatcacttagtaggctggggtcaagacccccaaactgtgtacacaaatgtgaaggttgcttcccttgtgaccctgttcagattccagccactgctaaccgaatcggcatccaaattgctaattacgagccagaaggttggaaatgcaagtgtggtgcttccctcttcaacccataaaacaaaaatagtatgtattttgacacgtaatattgtctcctatcaaagggttattgagatgtataagataggattagattaagatatgtttatttatatacatattatatatatatatattatagtttccaatagttttataatctctaatcttaatgatctctacaaaaaaatgtaatcaacttgttgtcttgtttctactgaaattaattatctctttggtctcatctggttttgttatctattttaataatttatatatttggatgtttgttattgtttatttaatatgaagtgcttacctgttttgcaacattaaatgcttttttgacagtgtttagtccctgtctcactgcagtagactgtagtaatgttgttgactatagcttaccacacatatatattttttaatgtaacaacacttaaagttgtatagatagttcatagttatagttgttagctgttacaatgcaaatggtgtttagatccctgttctaggctttatattttgaaagaagatcctctgttttgttaataataaattaatatatcttacaactcaattttaaaataatataagaactaaaagataaatatatattacaacaccaatatttctttactattgatatactgaatatttttcaaactaatttataataaaagctcaattttaacgtaaaaaaaaaatgaaacttgaaactaatttcattactaaagaaaaagttgaaacataaaatacattaaagattaaattaaaataaaattttataaattttatttttatttcaatttgattaggtagaaaactaaaattaagcaatattatgtaatttttcataagcatgaatttttagtgacaaagttgaagggataaaactgttattattattgttgttgaaaaaacaacttattatagaaccaaaactaacaaattgaaaaatgtagtaataaattaactaaagaatgagatgctttatagacaagagtgaaggcatcatgatcatatggcattcctctcgttattcagaccttgaaaaggtatgaggcaattgcggaaggtgaagactgcaagaaagaaggaaccaagtggcaagtaattacaataacccatgtagattgtacgcataattttgagctcatttgtattgaagttatactgcaacttacaatgtcagggccaaagaatatcacacaaggatttgggcctatagcatacggtccatccatgataaataacgaactttgactttcagtttagttagttattttactattagagttagtttgttatctctgtccacttgcctctgtttctttaacagagtttgttttctgtttctttgtacaaactctggtatgcatccatgcaaaccgagaacacaaccctcataaagaataacacatggaaacttgttccctatcatccctccatgacacttatagggaataaatgggttcataggatcaagctcaaggctaatggttccttagacaaatacaagtcaaggttggttgcaaaaggctattctcaaactcccggcattgatttcaaagagacatttagtcccgtcgttaaaccagccacagtgaggattttactcacacttgtagtatcattcaattggccgattacccaactcgatgtctctaatgcattcttaaatggtacccttgaagagactgtctacatgcctcaaccaccagattttgttgatcccaaataccctcactatgtctgccaacttaccaaggccttgtatggccttaaacaagctccacgagcttggaatcaaaaactcaaaagcactctgtacaacaaagggtttcaactatcaaaggctgacaattctttgtttattaaaggctctggtgtgaatctcattgtgctcttagtttatgtggacgacgtcttgattacaggaccaaacaaagatgctattgctgccattatcactgatctaaaccaggaatttgatatcaaagacctcggatctttacactattttttaggtgttgaagttcatcgaaatgcatcaggcatctatctctcacagtcaagatatattgctgaacttcttacaagactcaatatggagggtgctaaaccttgtcctagtccaacaagtgcctcttatgttctatctctgactaatggtgagtcgtttcatgatcaaaccttatacataatcacattaggcgctttacaatatttgaccttgacaagacccgacattgcatttattgtgaataaattgagccaatttattcatgctcctacaacagttcattgggatgcatgtaaaaggttatttcgatatctcaaaggcacaattcatgagggacttcacatcaaaccggctctaagactgtttttacaagcatactccgatgccgattgggcgagttgtcctgatgaccgtcgctcaactggaggctatgctgtctacttagggggaaacctcatttcctggtctgcaaaaagcagcaagtgttgcatggtcagcacagagagtgagtttcgtgctcttgccaataccgctgctgaactcaaatggctgcactctgttttacatgagcttcaagtgaatcttctagcatctcctattatatgggttgacaatcaaggagctgcctcattagccgccaaccctgtgtttcatgctagatcgaagcacattgaaattgatcttcactttgtgagagatcaaattttggcaaaggagtggaagtcagatatgtccttctatcgatcaaccgcagcatctaactaaagctctcaccaagatcgattcttgtacctc

SEQ ID NO: 384128 - DNA, 1245 bp, Cannabis indica
atatatagaactctcaacttcattttaagtaactacaaataaagaaagaaagaagcaattaatttggtcaaattccattgtgtttattttccacaaaaaataaataaatgaactatgcaacttggaaccttaactaaatataagactagtgtagctagggtgtaactatctctccaaaccaaaaatgttggactaaatccctcttgtcttctaaggatattcatattggatcataattagcatttacacattcctcctatttggatccaatcaaatctgaaaattgagtctatatatgctcttcttattcgtgtatgaatctgttattacaaggctactttaaattctaattaatgttggtctctatttataggaccattgagccaatttcacatgtgacaaaacagacctaactaacctgttgttgacttgcaactaatatgaacaactaactcatatagtacctagatttaacacattagctgaggacacatatataagataagaagctctatatatacatagatgaccatacagttggaaaatcgtatttaatatagtcaattttgaggttaatgtatgaatggaaaattgatgtttaaaatataatctattaataataaaggatattgtggtgaatattatgattaatcaattttattaattttgtgggatttttttggcatttatttacttgtatttacacttggcttatgaagcctataaaaggaaacacaccaacaaagagtacaactcaaaaacccaaaagttcctaagaaatttttatatagaaatatagtgaaagtattaattcaagttccctggaatagtaattgtatatatatggcatttttactattaattgtattttctaattaattgcaaatatcgttaattttaaaacatttccaaaataatcgtggaaagtgtaatttttctatttaccaattcttaagaaattatagcacattgtataatcataataggttttttttttattatttaaatgtacaaactaaaggaaaggaaaaaaacataaacgtataaattgagtagtaactagtaactagtaactgactgctgcctttcaaaaaaaaaaaaaaaagtaactggctgcattttgaacaacaaaaatagtagtcatgtatacacccttaagttattctaattttttatacacattagaaaaattttataatgcacccccttaaaagaaatgactaatacatctttatttgttttagt

SEQ ID NO: 384129 - DNA, 4441 bp, Cannabis indica
tcagcaatcagttcattaaggataatgtaagttgtcattcaataacaaaatcacaacaaacaacatttcacagaaaaatgaaacagataatccaagacaagcaaaggaacgagaagagtataccaaaagcgctgttcgtagtggctgcagccgctgaaagtaatctatcatagcagtccctcatatcttgcatgtccttcaagaacaacatcacatcaattataagaaactatgcttttccaattatacgaacagtcgtaaaagacaagaaagtaaagttctggtatagcaatggaagcacaattctagcaagacagttcgccatggttccaagctttcagtttatactttagatttgtatgtatgtataacagttgatactacagttcttcacctcgatatatacattcagatacatacatcaaataacaataatcgtttcggaagatataagccgaaaatactcgctccctagattgtcaaagccagccctaggtttctaattcgaggcagcgtttcatgcaagtaaaactccagacgaaaacagatttgtgtttccaaattgtaaaaagaaaaaaaaattaaaggaaggggttaaaaatggcgttaattcgaatgatctttgttcagcttgggaagaagcatagaacacaaagaaaatagaaaaagaaaggcgtacctgagctgcctgagcaagctcgtctaattgagaaagaggtcggagatctctgcggtctttaggtccctgcttattcagtgcgaaacctcgcaattttctgagagacgtcttcatcttcgtatcttcctttctagtttccactatccgattccgatgcagaaagcgagggattatgttagaaattcacaagaaatgaatcaattgacgacgacgatggtgatggtgattgaatatttgcagagagagagagagaaagagctgaataaagagcaaatatgaagagagagagagagagagagagagagagagaagaacacactagtatttcttcttcttcaactccactccattctttgctctggtctggtcacgtcacggacccataagcatattattattattattattattattattattattattattattgagtaattgttattttgtattaacattaacaataattcttgtaataattggtacactaaaatagaagggaatgaaaacgtatcgtttacttttttctttattgagtaccgttgaccgttattatttcattgacttttcaaacaaaataaaataatattatagatcggtattataagagactaatttactttaacaataatacatttatttgtgtttttagcaattttttagtgttaggaactaattataattgggtaaaatgcttgttatgttatgtgtatatatatatatttagctacattcaaagtcttcaacatcacatagtataattggtcaagaatacaccatatataatagtattgataatactaaatatggtttgaactttgaagtattactttacaatattttatgtatacataaaaatacatagctaaagcatagattaaggtttctcatacatccattttattttcattttaattttgcccataactgcagcacgactggtgtggtgtgtttacagtttatgcatgaaaactatgaattaagagacattaaaatgaaaagagttgaagaatgattattgagtgaggtttctttcttgtaccaatatcctttcaaagttttaccaagaatgaaataagcaaatcattgtaaaatccatatcgaacacttaacttgcataatcaagccatgtcggaattaccttttttgttttgatgggttttcacctttcatgcgtcaaaattattggctattacctatgagagaaggaaagaaaattaaggtggaaagaactaaaaagtttctctagggtcaacaaaacgtgtttcttcataccccatctatcaattcaacacaaagtgtaacccttttcttctttgtgaatatttgtctaatttcctgtggaaatccccatcaaaccatcgacgaaattgtttcaagacttctcagcataacaagtaaaaaccaaacaggagcctttagctaaaaattgcccctttagttattggtactttattgtctcatttggcagccaaatttccacagattccgtgtttaaactgaaaacttttcataattaggaaaaactaaagctatgctttgtaaagttttggaaattctataaacataataataactcatattgatgaatatttatgtgggtcatcaaatcgaacaaacaaatgactagtgtaatttaatattaagtaaataaattttaattaaaataattagtgtaaagacgccatggaatgatggacactttaaaaactcattaattatagaacccttaaataaacaaataaaaaaccctcattaatagaggatgtgcataagatcataatccaaaaggtgactttcgtgtatatatcttcaatcatttatttcctcttattaagaattttggtcataacaactcttgaattgcccattcacatacaagagtacatcaatcaagagtcaccgaataatataacatggaacagaaaaaacattggaagtcaagccagtcacaaaacagcattacccaaaaccaaatgtttgggagtgaaagtgaagattggaagaaagcaaataacgttgtgaaaaaatggctgcctgggagtagagtagtttttcatgttgaactgcccaaaaaaagaaaaacacaaaatagagccacaagttatcgctcctgtcaacatattctccaagttatttgacaagcatttcctccccctaagagatgtgaagagaaaataatatacagtcccaatttctcctgaaataatttaaacagcagctgtttacgtatgttagaatacaagtttgctatattcaagagctaacctaaagttttgtgcgccataaacccatggacaagtaactcaaactattatatgatgtaaatagtttgacactacttaccagggccaggagatgtttgtggatggaattggcaaaaaaaaaattaagcagttgcagccaaaggcacagctcggtagcatgctctctttgctgcacgtacgatatcgtcaatctgcacaatcaaaattcagcaagatgctcaatttagagccacaatgatgaaaaagtctatataaaatagccaaattaagactaacataatcattagtaagtaatctacaaacctgaggaacagccaatctctccaagttagctgcataaggcattggaacatcagccccagcaattctttccactggtgcatcaagatagccaaagctctcctcaataacagatgtgctataagaaaaacagaagagcgctatgtatgtaagcttaaatatcaagtgacattaatacagagaacaaattttgcaatgatgcaaaccatatttcagcaccgacaccgtgctgagggagtccttcctcaactgttacaagtctgttggttttcctgactgaagtgttaatagtggctctatccagtggccgaattgaccgcaaattgattacctatcaagaaaacaagccattaccaatttaccgtgtctgcaacaagggtggaactatataataaaaaaaaaaaaaaaccgcgttctttcaacaataatttacctcagcactgattccttccttggcaagtatctcagcagcctgaacaccatgtcatagaattactcagtggaaggaaaacccaacttaaaaaaggcatgtcaacaatttaaaaatactaaaactaactttcaataaacagaaaaaatgtatgcatccacactttgaagtactaaggcaactgagcctcactggctcactcctaatgctcagtacaaatgcaaacctcaagactttaaaagacataatgtaaaacaataaagcccatctcattttacaataaaatctcagaaatcttatgatattgactacttcactaaaattaggagccttcatttataactgcttcaaaaaataaaaaagatactagacataaatttccaaggaagacgaaatagatttcctacttagtgccttagtggcgcaataataccatgcaagcctttcccataccatgtaagtttatttcaaacaataaatattatcacacacaaaaccaaaggtagctgatgaagatggaatggacaaaccttgagagcatagcccaccattttggagaaggctgtaattgtcacgtcttttccttctctctcaatctataatcattaaataatatattttattcaaaattcagcatattagtaattcaaatatggagataaataaatcaacaatcaacttttcaaaatcaatcaccttggcttttccaattggaaggcaaaaactagaatcaagagcttcagctgaaacagggaacgattcacc

SEQ ID NO: 384130 - DNA, 1992 bp, Cannabis indica
ctgcagtaggcgacatatataatacttccacgttcgtttctttaaacccttagtcgtctaacgaaatgaatgtcgatttcgatatgctcgttcttgcatggtaaacgggattagatgcaagtgcactagcactgatgttgtcacaccaagtgatcggtgtctacaggtaatttgaacttaagttcctttaacaaggattcaatccaagttattttagaagcaacatgtgctagtgctctgtattcggactccgtactggaccttgaaacaactgcttgtttcttagatgaccacgaaacaagagtttctccaagataaacacagtatccagcaaccgatcttctatcatctggacaacatgcccagtcggcagtccgagtaaccaactagagataatctgtcactatatccaatgtgtaggccatggtgaatggttcccttcagataccttaagatccgcttgactccactccaatgacttgttgttggattttgcaagaactggctcagtttgtttattgcgaaagcaatgtctggtctggtgtggcttaaatactgtaaggcaccaatagcactcctgtaaacagtgggattagtgagaggatctccatctttttttgacagaggcttttcctgcaatcataggatatcatatctttccaacaattctgtaatatatttagtctgagtgagatacagcccatactcatctcgatacacttcaattccaagaaaataatgaagtgaaccaagatctttcaatgagaagtgcttgtttaaccttgctgtaaactcattcagtttttgcgtgttgttccctgtcacaattatgtcgtccacataaatcaaaacaagtatgattagctgatctgacatgtagaaaaacaaagaagtatcggccttggaatttacaaaactccatagcagcagagtttgtttaagcctgtcaaaccaggccctaggggcctgtttcaggccgtagagagacctgtttagcttgcagatatgatttggtttcaaggggtcttcgaagccttgaggctggagcatgtaaacatcttcttcaaggtagccatttaggaaggcgttgttgatatctacctgtttaatagcccaatttcttgagacagcaatggtcaaaataattcgaacagttgacgatttaatcacaggactaaaggtctcgctgaaatctattcccggtctctgatgaaaccctttagcaacgagtcttgctttcaatctctctacagtaccatcagccctgtatttaatcttgaagacccatttgttccccaccaaatttacaccattaaaataaggaaccaacacccatgtcttctttgtctttaaggcaccaatttctgtactcattgcagcattccactctttggacttgagagcctcttccacactcctaggttcttcaactttatgaatccacttagctttactgaggtaagtctttggtttaaagatgcctgccttggcacgtgtcaccataggatggcagggcacagggagttgttcactttgtggtgcttgtgtctggtctgttcctcctggttcagcttgacctgaagcagctgcgtgtggttcagttgcatgatcagcagcagttggtgtgtgttcatggttactaacctgctgaattccattatcagtagtatcatgactgctgggagatgatgcttcagagaatgcttgaacactagaatcaggagctgtaccagtaggcaaggaagtgttgtgttgtaaggtttgtgagaaaggcagataaggcaactgagaccatgctggattatgaacaatgacttccttttctggtgcataggtgttcagaaaaccttgtttaaagggaaaatcggtttcattaaaagtgacatttcttaagatgtacactctacctgtggaacttaggcatttatagcctttgtgagatgaactgaaacctaagttgacacattttaaagagtgaaattggaacttatg

SEQ ID NO: 384131 - DNA, 2333 bp, Cannabis indica
accgaacgggttaccaaacctaggtaaaatactaacaaaaaaaaaaaaaaaaaaaaaaaagaaaaaactaacttatttatttatttatgtcgggttgggtgctaataccttatttcatgctttctaatatgatgattaatctttcacattcctttttttgataaaaaaaattcctttcctctttcaaacacagaaattttcatacattcttttcacaagaatacatacttttctttttattatttgttaatataggaatgtaggataatgaatcttttgtgttggaactcatgtcctctcatattcactaattgcttacaagaataatatgtataaaaacatagatatataccttttcaatactttgatgttgatgaaacttccactcattttcagtaaatggttgtagtgagacactgtcaatccatatctccactgctgtattattgctctgaaattaataatatccatttcactgctaattaatttttccattaaatgcttaattaaactacataacagccaccattaattgctttaattacctcaaagtagagttgggctgggcctgactcatccacagtaagcccacccttaagcatagtccaacaattggactcagcaactgtggaaccagcaaataattttaaaccactacttgtttcaaaaccagctcttactgtcacatttgatccattgctcacttgtacccatgctgcaccaccaaacatttttatattgttgttattttagaaaaaatgtttagtgcaaactcctcccgcacccctaattaatttcagcattcaaaaaaaaatttaatttatttttttcatgatggcttaagtttttaagatactatgtaaattttcagaaaattcccactaatttatagtgtcaaaataaaatttaaatagttatttaacacgcatataaaaaaaagtaaaacatacgataaaatatttaaattttattttcagtactataaactatttagaattttctaaaaaaaaattatcttccaatagataccaaaataacccttttaaagctatattataaagttacctattttaacaaaaatattagattttggataaaaatagaacaattaaaaaacaattgtggaacaagtaaaaacttaacacagtacatagtataaaacttaacaatatttttgaaaaaatttctagcccacaataaaagagtaaaaaaaaattataaatttaaaaacccttaaattcattcattcaagtaaatatatgaattattttttttttttcaaaaaaaataaaaaaaaagtagttaccagagaatgtgtagagataattcttatccaagtaaagcttctgagtcaaactatcatttgattggtttcgattatgagttgcaatgtagttgtttcttgataataatggcgattctctgtgttccaattttgagtctccaaaggaagaccaacctttcaagccatcattcatctctgggtttataattatccctccattatattgggctgttaaagggtttgccaaacactgaaattcataactaataattaaataccaatttcacttccttttgtaattaattaatggtaattggaaaaatgctacactaattattttttcatatatattctagttttaattagagtacacttgcctcaatagtggctgcataatcgtaagatgttaaagcgtttacttcaaatcctgccaaccaaaattgcttaaattattagttaaccacttgaaatttcaagattactaattaacttgtttaaaaaaaaatatatcagctaaattttagagtaataatttgatgaaacatgcatgcttattaggctaataatttaagctcaccaaagaaaattaacttttttttattgatttatgtaatataaaatggggagaatttgcattagattaattaattgtcatatcattattaactcaatggataatattgcagcaagtgtaatgatcatgttcagttaaattagttaaattatttattaaagcattacgcgtaaatgcataatcacttggtaatatattttttaaaaatatagatttatctcaaataaatgtaattagttttgaaaaaaactatgtatgttaccattaattaattagtaatattttagtgtataactgaggtacgtacacacattattattactccaacaaataaatattacaccaaaagagaagatgatcaatgcatattatcctatatatttatattatatactttgagcttgaggtatatatatatatagtagaatctctatctaataatacacttgggattaagaaaattatattctaatt

SEQ ID NO: 384132 - DNA, 2614 bp, Cannabis indica
tttatttgtttttcattatatatatatttgaaaatgattttttatattaacaggaaaaatatgttcctgagctggctgagctaatccatgacaaaaaataataaagacccttctcttcatattaatctcaagggtatcctggttagtcatatatacatgtaatatatttgtatatttttaaataaatatatgtgtgtatacacctaaaatacaaaaaatattacacacagtgatcctatacgaaaacactgatcactagggatgaaaattgtacgggtaataggcgaggattagtgctcctctatcctcgttaactattttaatatctatccccgcgacccaaccccacatattctcagaggtggggcaggtaatacccacaggagacccatttattttaaataaaaaaaattatgaataaaaaaggtaaacagggcgagcacgctagggcaagtagtgtccttggggctccatactcacgagtgcaatttccatccctgacaatatgacaatagctatcagaaataagtgtgattattcgtttccaaaaagcttttgtcacgtcactagacgtagtattttaatacatattttatgtatcaaaatagtaaataacgtgacacaattttatgatcgcgtatgtagtatgttatttgaaataatctttagtgtataatatatataatcacttttaaataagtagaattaatttttttacagttgggtaatcctgaaacaagtgatgctgaggattggaaagggcttgtggattatgcatggagccatgcagtgatatcagatgaaactcacaaaataataaaggaaaaatgtgatttcaatagcaataagacttgggataatgaagattgtaccaatggtgtggatgaagtactcaaacaatataaagagattgatatttacagcctctacacacctctttgcattcctcatgatcatgatcatgactcaccatcaactactaataatactactacttctctctatcaaatcatgaccatcaaaagatcctctactatggtaattttaaataacttatctaaccctaattactaattagggtgcttctacgatgcactttttgttgtgtttctgatgtttaaaaatagtgggatcataagaaaaaatttatttttgagcccttatttttaaaaaaataatatttttcaaaattaataaaaaaatgtgtaattttaaaaagaatttttttaggcctctggactaggtgggtcctaggcacaggcttaactagcttgcctatgtccaaggtcagacttgaattcagaatagtttattacaatataaaaaataggattcaaacaatctatttcacacgtttataaaattaaagaaacatgaaaggagtgcatcagtgtacatcgtagttatttaaaatattttgtaaatttttaaaaatttaaaataatttaacatcgtaatagtgcaaatgaatgtttgaaccttttcgatactacgagttatttcaaatttttcaaaaacggatgaaatatctacgatataactacaatatgcacagtcacatagtaaggacaaacaataatattcctactatataattatattatttgatatattaattaaacattataaataaatatgtgcagatgcctaggattttgggtggatattatgatccatgcctagatgattatgctaaagcattttacaacagattagatgttcaaaaagctcttcatgtcactgatggtgttcaccctagaaattggaccatttgcaagtaattaattaattaattaataattatatataatttttaatttcatgattttaaattacatatgtgttttagttaattattttttagttgattttcagtcacaatatatttagccaatggattgattccaagccatctgttcttcctatatacaagaagctcattacagcaggccttagaatatgggtctacaggtatattatattatattataattaattaatttaatttggtttagtaattaaggtaatcatcatcgatttaatacatatagtatacaaattgtcctttgttgaagttataataagttttagaaaccctagctttttgatgtataaaattgttaaattaggtactaatcgaattttagaaattggtaatttatttgaatatttttaccgtaatatttagaatttgcggtatttattaacaacaaaataaataagatcagtatttatgccgtaaatttttctaaattatatatgtcacgtgcatgtagtggggacacagacggaagagttccagtactgtccacaagatatagcttgaattcacttggacttcccattatcaagacatggagaccatggtactaccaaaatcaggtattattagaaaaatttgagatgttgtatttagttttgtaatctaattaaaaaatttctctcattttaatgaaggctaattagtaatttttccctctgaactttgacatgtactaaattgtgcctcctgaacttttttagccgttaaaaattctccccgaactattgagattgttaaatttaaggacttttatctaattttagtaaaagaattctaacatggatgaaagtt

SEQ ID NO: 384133 - DNA, 1644 bp, Cannabis indica
ccaatttctgtgcctgggctaacatttcttcgactttcaacgatgcttccttctcagagtgttaggacgtatgagataatcaagaaagaagcttgatatagggctttctcagaggatcaactgattgttggagagttgatgacaattgaacttctccgtaggtccagcttgatcaagagtgtgaattatccgtgatggcattcaccccctggacttcaatgctagacttttttagatggccaatagggactattcaatgttcaacgatctctagatttagggccaatgtagctaacatatcggcgaacgagttttgctctctccgaatttgtcgtatattgtaacttttaaatccctgaacaattcacgcgacattaagacataggtagccatttgctcaccttttgtgtgatactcgcaagagatttgattgaccaccagcttggaatgactataaatattcacctattgggctcccacttcttttgccaacttaagatcggccaacatgtcttcatgctctacttcattatttgaggtggagaattcaaaacgtacaggcactctaaagtgggtgcccttgcggggagattaaaattactccatctctggctcctttcacgttggacgcaccgtcgacatagaccttccatgtaggtagcttaggaataggctcttctaggaggtcattgaagcttgtgcattccaccacaaagtcagcaagggcctatcctataactgacactcatggctgagaatggatgtcgaactagctaagctccatagcccacttcagtaacctgcgaaaaaactctggcctttgaagcacatgtcgtaagggataatttgtgagtaatcttattgcgtgagcttggaggtatggtcacagcttgcgtgatgcaatcaataagcaaaaggttagcttctcaattataggatatgtggactttgctccctacaatattttgctcacataatacaccgggtgctggactttgtcttcctctcgcacaagtgcggcactgatagcgtgatctaacactgccaagtacaaaaacaaatcttcaccctctacaggtttcgataacactagagccttggtcagaggctccttcaacttttgaaaagcatcctcactgtcttcaatccattcaaactttttgttgcctcgcaacacattaaagagtgggatacatttgtaggtagatttcgaaatgaaccgactaagggcggcaatgtgcggttttatactttggacatcattatgctttttgggagagggcatatcaatgaaggctattttctctgggtttgcttcaattgcccaggaaccgacaatatacccttgaaacttcccaaaagtgcatttcttagtgttgacctcacttttagccaacgacagcgagtctaatttagtaagtgataagtagtttataacgattgaaatataataaagcaatataaagacacaggaattttatagaggttaagccccaagcagttcggtaatagcctaatcgttgttatttgtattaactcaagaacaaggagaaaggttccttttcttatagctcttacaataatatctctgaatatgaattcttagacaatatctctcaagtaaaaatccttcgaccctttgcc

SEQ ID NO: 384134 - DNA, 2074 bp, Cannabis indica
ttcgtccatggatattgtgaagtatgatttttctcttcttttatctatacaaagatgaagttgcctgttaaattttggttcaagtattttgtcatttagtgtggttgctctattctgttttttcctagaatttatttatcttaatttgtcaaaccaaaatagaagaaatctttctttcttccaaaacagttgttcctcttctattcacaaatgtcttttgatgttcttccctattctcatgaatgttactctctaatattgagtgtaggtaaaaattttcttcttattcttgttttttccttttaatttcagtttactttgtttaatttatgtccccattttaggcatctttagattatttgacaaaagaaaaaagaaataaataaatattgtagttgtgttttggtttcattgaggaaaaaaaatttctttgtatttattcaccatatattgttgtaaagagatgtatgtatttattccttttttagttgatcatgccggagatgttttcttcttcagtcggcaacccaaatctacaaggatcgtagttgataaaatgacatgccacaaaacataggatttgatagcttccctttgtcttctctcacatctcacagtagtgcgaatataggaagcctccacctctacaggtaattctttttttgcttttcaattttcttctttgatctttccatgatatatgtttctttctccttgttggatgcttaaaaaaaaaaaatattggaacattgaattttgttaagtgttccattattcattgacacaaatctcactgctccgtctaatggattaagataacgtattttctatggacatttgccttgactctataccaatataaggttgttgcatatttaatgcgtatttatatgtttgtattatctagtaattattttttcatgaatttagaacaacttttatctttttgctgtgctagtaatattagagcaaagttttgtgatcaatattttatctttctccacctttaatacataagttaaagcaatactaactttaggccttaactctaattataatacttcttttaatttatggactataaaataaaagaaatacggtatctctgcattcacagcttggagttcgagagcctccttccaattttctctacccattaatttcttttctattattttttatgttgtttttactgaattttgtattcaattcattaatcttgctttttcctttcatggttaatccactctatgtatttgcaaaaatgtcccactgtacttttttttttttttttcaaaacaaaaaagtactttggattgaacccatgttgtgctccactacttgcctcccttctcaaataagttgtattttagatttacatgtttctttggtaaaggttaaatgtatattgattataattctttaaaagcaatactgaattattaatttgaaacgattgattaaattcaggacattattgagctaatctatgttaaactgaagcactattaatggatttttgttattgttctagaaaattagtttagtgtttgcttaaacataaaatatagctgttggttttgctcatagtagtgaaaatggttggtgtcaaataactcaattgttgctttgtatttgttttcactttcagatgttcaatttgatgctcacataacaatgaagcttctacatgtgaaatttcctggttgaatgatgcatgaaaacaaccttcacaattcaaaggaaagatgagatattctgcatgcattgtctgtacaaagcagtcattaatttatccattgtataaaatttaataaaagtttttaagtcatcccaataacaattataatttacttatcaatttatttttagatgttttcatagaaaatattaattttctttaattttttttttaattttcttttgcttcatttgcttcagttcataactgaagcaaaaaagtaattagcgtcggtacactactattagcttcggttataagccaaaacaaaaaccaattagcatcagtttataaccgaagtaaaaatatcattatttgcgtctacggttatag

SEQ ID NO: 384135 - DNA, 2652 bp, Cannabis indica
aaagtttcagagacccatttttagcagagctatttgaaactccattgctatggactttactcaccttactcacttgactcaattgatcaatgctgttattgctcttactaggactcggaggaagaaacttgggaatcttattctctgattgggtgatactttcagttataccctctgtatgaccaaacaattgttttctacaaacttcatgaagattcccaaatagctccttcttcaaaccctcgaacgccatatccaacctctctaattgctccatagcgttcttgttatacataaacaaaccatagtacaaatcaaagctatcaccagccgtgttatgaacaagattcaacagagtctcgtaacccttggtgttaatcggcgaagattccaatctgaaccgttccagaacccgacccatggtgtgggtaacgaattgagatccggcagcgaatttatcgtgttcggcgcaagacatctccaccatacgacacccttctctggcgaaaatccccaaaaattcatcgcaccggtcggtacggtagtcacccgacccgattcgaacccgatcgaagacaaagggtaacccgacccaggagaatttaccgctttggggcccgaacattgggtgagtacagaggatatcgaattcgggtggtaagtaactgaggagaagatctctagggaattccttaacggagagaacatcgacgacgagtgtgttgcggcggagcctctgaaacggtatcgttttgattactttttcagttgataaaatcgaagtacagagtacgactacttcagggtgttgttcgcagagatcatccgggtcactgaagaaggagactccgagcttttgagcggtggctgagtaatctgagcgagaatgagctaagacggtgtggccttgtctgacgaaagctttagctagaaactgaccgaagtttccgaacccaattacggcgattttgagggaagttgggttgtgattgaaaaagggttggttggtttgggtggatggctcgtatggctgagaagactccatggcctgagctcggagagtggtggtggtggtggtggtggtggagttaggggtcttgggtttgtgggttttgatcagaggaggaagaaacggtgtcgtgttggaaaaagagtggagatttgtaagaggagacttggtttggatggcggttgagcttaaggaaatcattgtcgttttttggatttgtttgtcgttttgaaatttatagatttgttgttgatattattatagttagagaaaagagagaagagagagattttagattgaggtgattcggaaaatggagaatgagagaggtgtatttatataggagggaaagatgaaaagagtgagttgatgttttattaataaaattaaacaaaaaaagatgtgacggctcaccaattctctatactatatggctgcgtagtggggctacacgtgtcacgtagtttccacgtacgtgctaaaagtgtttcatttttgaacaattttgtgtttgggcttaattaagcttaattactttcttcctacaaaaaattaaaaaaatttacaaaaatactgtaatttaagtgaatttttataaaaatactgtcacacagattttttttcaaaaatactgtgtttttataaaacaccagtaaaacacaaaacagtatactacagtatgaaacttataaaaaaatacaataagaaagtaaaaaattccgcttgacagtatttttgtaaagaaagagcaaaaattagtataccatgtaaatttcctaaaaaattaacccatattttattttttaatttacggttttgagttgctccagtattaatttctctaatgatttctacgtgggttgctatacatattttagttgcgatttaggttgctccgttaattactataagaatttttgtgtaaaattttataacaatacaaaaaaaaattaaaaaaaataaattacatctaaaacaattatattaaagttccatttaaaaaaaaacgattatattaaatttcaatatgtataactcaatactatttagctatgataggcatttgtatttgacattgataattttctttgataattagtaatttttcatatttaattatagtgataatacttcaattatatactaaaccctctcaagtctcaaaataagggttaatcttattgactaataagactatggtgcgtggtaggtgtaaagtttgttctttgaaattaaaacaagtacaaacagaagtcaaactgttgtagttgtagactttttacgaactacaaaaaataattaggttcattcatattgagaattaagatttacagatgttacaatatttatggtaatgtatatatgaatgataccgatataaaaaaatacaagataacctcttttattgttttaatttttttgaaatgcgtgctcttttattattattctaatttttactactgtattattattgttattattattattattataagaagctgcttgaattatatatatgaattgaaaagaatttttttcttcttttttttttaattaaaatatcagatatctttatatattaaaagtgtctatctaacggcatttcttggtttaacagaatatacttaaaaataaaagaatat

SEQ ID NO: 384136 - DNA, 1480 bp, Cannabis indica
atgacgacttttcatactaaattgacttgtatctatgctcaataatttatcatttaattagtactacttgaattgcattgtaccctctaaaatttaattcggatagaagaaaaggaagatttttttttttatgaaaaaaaaaaacaaaacttaaaattgcatattgaaacaagactaaaatattacaacaaagaacaaactagaatgggttggaaatcgacgggcgcccacacattacagtcaaacactagaagcctagttcttttgtttttaaacaaacactacagtctacaagcctagctggaccatctatattctagtaaaataaatatcactatcacactactaaggttttgtaaacacaaaaacggcgcaaaggaaagctttgctttattatgaaaataatattgacattcagcccaaaacgaaaacttgtttaaaaagattttaataaagaaatctaagatataaattaaggcctaaatttgaagtggttccactattactctctctaataatataataaataaaagaaaactatgatgggataaggtgtttacttgtcgtaacactctgtctcttgtttgagagtttgaaaattcatcatgctcacccaatcttcctcaatctcatcccaaaactcagtgtcgttttcccaactggaagtactctgctgaaccaccacacttgactctgaatttgattctgtgttcatgcactttcttttttcttcttcttcatttttatattcgtattcagacattgggaaattgagctttgcctttgaccctctgaattcaatcgctgctctatcgtaagccttcgccgccagctccgccgtctcaaacgtacccagccacacacgcgccgccctcctcggatctctaatctcagccgcccatttcccccacggcctctgcctcactcctctgtaattcttcttcttcttcctctccaccaccgcactcttgttattcttgtcgtttgaagcttttgtcctcgcaaacgacaacgacatcgacgacgacgaagacgacattgtttttgttgtcgttttgcttaaggggaagtagttacagcctaagcagccgttaatcttgcacacgcgacacgcgtcgttatctggaaacgacatgaatagagtactcccgttcgtaccgttaattgctgatgtggcaatttggagtgatttaagtggctgtgggcccacttttgtgggcccaggatcggttccaccacatatgacgtgtttcaatgcagagaccatgatagagtgctcctcgtcgacggtcacattacgcggaaacgaagggaaggacatttttgcaaataccgtattttgtttgaggggcttctgtggaattatgggatttgaaaaaaccttcttagcaaatatctcaaacatgaaagatcttaaaaaaaaaaaaaaaatcctcagaacgacagtttatttgggaattttttttttctttccaaaaat

SEQ ID NO: 384137 - DNA, 1665 bp, Cannabis indica
aaaaaaaaattaaagaaaaagaattaacatatttggtaaaaaaatcaagataagttcaaacgaaattatttattatttttttctttttaatggcaaaatcaactttttatataactatttagctaggttatagaggttgttgtgaggtttcattcattctatcattatttatattgaaatcatttatttaattagagagattgattgatgcttatttggttttaattaatatccacataaagcttatctatactcatatatagtacttactaattgggtaatattcaaataaaaaataaacaacaaatcataaatgtctaaattattagcaagtatactttgttctattatgatcactaaactatatgttatgttaaatcttgtctctctttttatatttcaacatcaagagaattaaaacatgtatttaattatctttataacataattaaattaaaaaaaaatttattttcttaatttaaaagtcattttagaagaagttataagatttgtagtttttcttaaatggacttttaagaagttattttaaaatttaaaataattttcataattcttaatttactcacaaaagtattttttttatgatatccaaacattttgaaaagtatttttcattataaaaagatcttcatataatagtaattaaaacggtaaaaataagacaaatcttatatatacttatcaacgtatataactttataataaaaggttctatatttactcatgtgacaaaataatcctccgttacattcctcctacttcatagctttaaacggttctccatctccttgagtctccaagctcactacaagaaatgtcacttttaccagtatagttcgttactacaagaaatgtaacttttaccagggcatttacgcgttaagaaaagtcatttttgccagcgctttttattttgtgctggcaaaagttctaataccaacggtgatttgccaagacatcagaagtaaattctattttaccagcacaataccaaacttttgtcagcacaaaaatgtgagcaaaagtgacatttcttgtagtagctaatgcttcaataacttttattttttgtgttggaatggaagaagaggatgtaaaccaggtattaaataatgcttctagttttgtaagaaagtcattgccatttcattatcttgcttccttaaacgatcatctactgctgatttggaaattcttgttgagaatccaaagaattagaatgtggagcactcatatgcaggaggaattattctaataaactcgattcttatggatattatgatctttccaaagctaatactgaaaagaatagagcaaatgtgtagagcttatttgtggagtggcttagttgatcataagttcaggttgtattttttgggacaaaatttgcaagccaaaaaaagaggttcgggatctcggtgcattggtaattagaattttaaatctattggaaaatatgtgtgggctataactttgaaaatgatagtctttggattaaatgggtacaaaagatatatcttcatgagcatgagtggttaatatatgatggccaccaaggaagtaactcttagagtttattgttagataaattaacaattaacccaaaatcaatttgtatataacatagaacacaataataagata

SEQ ID NO: 384138 - DNA, 2494 bp, Cannabis indica
agacgaagctctagttaattattatttttataccatatagaactttctttaataaccatataaaacaaagtcaagatttttctttttatattacataatattgtacggaaaaaatgttatatcgaatcgacatatatatactccaaaatcatttttttctatggagtttcaactgagatcatatcaaagaaactttatttttcaccactcataggttcaatcgtacttggtgaaaatatcgatcatctgtacttaaaatttaacttcttttcacataaaaaaaaattgtgcttttctttttcgaaataaaacctaaaaagaacaaaaaaaaaaaaaaaaaatcatttaactgcccatgtgaatattatcagtacaaacgatgagaattatttgactattttcactacataacaactacaccataaaaaccttagccaaaaaaaactacatattattatttacaaacactacaaaatgttacaataaataaaatttgtttcattgtgtattagttaatgaagacaagtatagatatataaaaatacaaagtgacctagctacatcacattattgattaatattattacattcattattatttcctaaaaaattaagaggctgttacataattaggattattatcaacttgtaataatataccaacatatatatccaaaagaatattatattattctggaaaccacttgtatagtaatattatcaatgttttcacaacctttcattatttattacaaattcaagatttaagttaaagggggaactttattttctacataaaatgtatgctaaaattatatatgttaaaattttatgtaaatttaaatttttagcattaaatacagtttaaattagtgaataaaaaacaaccacataaaaagtttgactttaatagttaaagtacttaaatataagtcttattagtaaaattcaaatcctacaaacatgcataagatttgaatctttgttcgctaataaattaacttataataaaccattaaaacaaaattagcacttaattaataaaatattatttttaattacaaatatatgttataaataactataatatgaaatttagagaatacctaaatagaaaaaaattcacaacattgaactaatttaaaagaattaggatttttttgttcttaaatttatatctacagaagattgttttttttctccgctcaggctagctggccttccttgggcatagttgcggtttgatcggagttgtgttttgctattgcgattcgatttctgctattgcgattagctttgtctttgtgatatggttttgcgtgttttagtcttttctatgtaacatagttttgagtattttgctcttgtctatgtgatataattttattttgttttgttgttggttcttctttgttaattcgatgactcatcatcgaatcactattagtggttggaaataacaaattctctgcgaccgaaaggtgttagtagtgtagttacataccttacacaatagttgcatgctcagcgctgcttatttgactcgttttttttattctaataataatgatcacatatttaataggggattaaattgtaggctattattttagatgattgctattaaaattacataatttattaaaaaaaactataggacacatttttttttctctctcgcatatatatgtatgggtctgcccatgtatgtctacaagaaaagtaacttttaccagaacatttcgcgaactgtgctggtaaaaaagtcaaagttttaccatgccagcgcatatttacagtggttaaaatctagcttttatcagcgcatttacgcattttgtgctggtaaaagttttaataccaacgtttgatttgccaacacatcagaagtaaattttattttaccagtataatactaagcttttgccaatataaaaatatgctggcaaaatgacaattctgtatatatacaccaagcattttaatttgctcttatacatacatatagctagctatgtaatgtcaagttgtccgtacaatatttatatgattatgattatgtggtgaaaacaaaaaaaaaaaaatgttttaatttaattttcaaaaagggataaatttttgaatctccaccggccacttgattgataggtgttgatctaaatatgattttgtggtgaatatagaatggccataatatgattgaaacgtataaaattagaagtgtctcttttttggattaatggagaagggtgtcattttcaattcgttatatattatacataccaaaaaaagagagcaaaaaattgatcacgtgtatcaatcactataattcatattgggaaatttcaatttttgaccctaataatacaagtcatttcaaaatttatacccttccttaatttgtacaaatttagtccattaattacatgaacttcccattttaccctttttttttaaaaaaaaaaaaagctaaaatctgaaagtggtatttctc

SEQ ID NO: 384139 - DNA, 1876 bp, Cannabis indica
attttggttgttgcctttagtggttatgtctcattgacccgctattgtgctttggtgtttcatttcagttacttattggttgtaatttaatgcaatacactgacgtattctcattaacgataatgagaagtccatctagtttttgctagatgttgcaataatttttttccttcttaatccttgtgtttgtctagcaaggctctcttcaagtatggaagtgacacaaaccccactacatagaaaattatgctcttacatagaaacttgaggtgctgctagttttaatactgtggaggttgattctctaaaattgaaccagctagtcaaattacaattcaagaatcctttcctcttgtagagatattaattacttagataagcttctttcaaagatcaatgagagtgtttgagagtctttaagttgtgaaagagcttctaagggaactgttttgcaagtttgggagagtgcttggtacaaagaagccattgctgatcttcaactgtaaacaaagtgtcttgttcaaaattgaatgtaggctattatccaaaccagtataatacttggtgccaatttcttttattatttataatctctatttgcttaagtttattgctttgtgttctgttcttgaacttgtgttgttgaaaaacacaacaaatattacatagctagtaacaatataagcacttttacagtaagataaccatttttaattctcaagtgtttatcttttagttacaacgtgttaagcaaatggttcattccattattttaaattgtatgtgccaatgttattatcaatccttattttagtctttcttgaactagtttatttttttattgggcgagaatatataaggtcatttttttacttatcttttattgaattgatttttattgctggatacttatttttatttttgttcaagttattgttatcatactcaattgattaatgagttgattttcattttcttgtttctgtgttagattagactagacaatatgaaataatgaactaaattttgaaatgctagtgtaactttcgtatatatgtgtagtgtaattttttaattgtttgtgtttgaaagagcatgcaaacttgtttattagtacttttatagttatatattaaaatattattaatccttaataatatgcagcatatgactacttgtgttggcccatttttttaacttgtgtttttcctactttcctccattgcattcatattttgaattttgttctcaatgaaaggccccctccattaataaagctctaatatgcttctctctgtattttctgtttgtagatttggattttcatcaaaataaaagtgtttccttgtatgaatgtgttgtaggtaatattagagaagcgaagcgatagctttattagataaggtaaattttttaaatttatttattttattacaaagtttaatatttgaggagtaaaatgaattttatttgattaataaattgaattgtcgtagactcatagtaataattaatattttttatcttttgttttacagtttaggttagacattccctacactaacaaggagatcaatgcagtacgagatgagtgagccgcatttatgaagcctttgattattaagtgagtataatattaccattttttgttatgatgcgtgggatataatttttatgatcgttgctattaacacttttggttttatataattggtttatagttaatttttatgataatcctgtaagttttttgaaaaatcatgtaaacatgaataactcttctttatttagttttattttaattatacttttaatataatgattaatatttttttatcttttattttagttcaagtcagacgctccctatagtaac

SEQ ID NO: 384140 - DNA, 1611 bp, Cannabis indica
  modified_base (36)..(36): a, c, t, g, unknown or other
tgacgccttagtccatgagtcactgatatttaatanattaggtgttacttttgaggaactattctacactatttttttattatgtccatctcgaatttagctgggggtaattatagccttatccagagaccaaaaggcttcatttatctcaagcgttcaccttttggatgcacaagttcccaaaactcaaatagtaggacatgcatatcttcataataggttacataggacttctctaggtagtaggtaagacaagcctttatccttgatttatgcgacagttcattatgcaactatcactaatccccttagttagagtgtaatcgccaaagaatgggcttaatgcgtttaacatgtgtttttagattcatctacagacgtttcctccaagctgcatttaatgcatttgtataactcatctttgaatccttgagcccggtcttgaaggcttttcctaacttggagaggaacaaaatattggtcccttcagtcccaactttagctcccagagggacctcttggacatgtctactcgattcgtgacaattttagtcgacatttctgaactcttctagatcttaagacttaattgccacgttatcaatcatatgactgtcacatattttcggacataagtagggcaacactaaacatatttttgatatagtgtaaaaataaagtttttttattttttattatatatctaaattaagtatagaaattcaaatttctcttttattattcgatatttgaattaaattttaatgttttattatttatagtaaaaaatttttaataacgattaatgagtgatactcattgagaagtgttctatatatatataccaccatcaagattgcggtgttaaatttatatcttgaaaataaaactaaaaatgttgtatacatttgttgccactactagaccattttttgtgaatcatactagaataagaaaccatatgggttttttccctgtacatatttatttgatttagctcttatcaatgatatacatccaatctagttgaatcgacccattcaatctaatactattataaaacattcaatatccaattaaaataaaataagattggatattaagaattaaattcgattagattagattgcctgttagatgtcaatctagaaatctaattagaaatcgattcaattcaattacatttacatattaaaaatataatttatatttatttatatattataaaaatatatattttaattacattgttagtggcttttttgtgtatgtgttgaatttgtagttggttattttctgtatttttttcatgatattttgttccaatatattacttttatatattattattttaataatttaaattttcgttgcataacatttataaagatgatatttatattggatatcaaaattaaataaaagggcatatttatggtgcgtttggtaaaaaataaataattttttaatcattttttatttttaaaatttacaaaataaaaatatttttaaaaatcatgttctataaaactatttttacttctcaattttttaatttaaaactaatattttaagttttttttttaaaaaaaaatcactttcaaatttttt

SEQ ID NO: 384141 - DNA, 1028 bp, Cannabis indica
gctcacatcttgctaagacatctggtgcatcaacctcttccactaaatttcttcttgactggggacaatcaacagcattcactcgtctctttcctactcccatactcatactatgtgaatcacccacatgctcgagttatttattaccaccctattggcccctaaccctaggtagtgaatttggagcacacatccacgatccatattgtctactctggattggtccgatttcctcatcttaaaagtctttaagaggacaatctaacgctttattgccaataataccaccatcataggaaaactccaggagacactcatattaaaagagtagaaacacctccatacccttctcatcaactacaactcttaagccccgtttgagaggtccagtaatattggtacacacacagaccttcataataccattagccactcttacatccttaactttcccaatcaagcttcccctttcatgagcaaacacttcacacatacatgtaagcgacacattattaatcaaaatccaaaaggaagcatggtcaaaattcatcctagaaacctctcctaatcccattggtttgacaaaacatataaactgtttctcaaacgtccaaggtttgccactaaaaacactttgtcgatcctctttacttccaaaaaagaatcaaaaaacattcttcgcactcaattcctcaacttgaaattgatgattaatcttccaaatattcctcatagcattctcaattccttctcgacttgccggctaaggaccaatgaccttccctgccaaacaaacctccaatctctttctacctcgaggctatatttattcaacttaatcacaaggccatcagcttcatctaattgcagaacttttgccaatttggccaccaaatcaaaatccatatttagctaccaaacaccctgaaagtacaatcaccaaaaataaacccacacgacaccaccacaccgtgaaagcaaccacacatagcactcacccacccacaccgtgaagcaaacacacaaag

SEQ ID NO: 384142 - DNA, 1085 bp, Cannabis indica
tttttttggcgttaaaaattctccatgaactattaagattgttaagactttttgtccaattttatttaattttactaattcggtgattgtccataaactaaatcatacctcccagactttgatatctactaaatcatgtctctcgaacattgacatgtgtcaaatcatgccccctgaactttcattcatgttagacttttcttactaaaattagacaaaagtccttaaatccaacaatcttaatagttcaggaaaaaattttaagggcctacaaagtttaaagacatgatttagtacatgtgaaagtttaaagagcgaaaattctaattagcctaattataaatatgtaaaaaaatgattatttttttcttcttaaattgtttttcaaaaaacccttgtctaataaataaatagagttaatttaattataatggcatatttataataaagttaaaaagtcatgactatttatttgataaaattaaacattccttacaggttgacatttgtactcattttttaaaatattctacttttaaacaataaatagtaatagtgattaaaaacacaattttgagatattttgatttttgaaaaaacataagtattttgaaaatatttagtacacttatcactaaaaggtatattaacaacataagaatgtaatattttaaaaactctagctatttcaagtacaatccaacaacatgctctaattaattcccttgagaaacttcattattgggtaagccatcatcatcatcatcatatgttttgttattctacaccaaacttgatcaatatcaatgggatacaagatccaatttacatattcagaagaaaatcaccttttgaatagtcagtcaactatacaagtgacactttttcttattaaaaaaataaaagaaaaatagagcattcccaaggtagcaaaggttatctttgagagcacaagttattgtgtctgtgctcatatacttgatcttggagcttattctgcattatattattatattagaagaataacaagagattggtataacccacaaatgattttcaatattgttctaaaaaagaagaagaag

SEQ ID NO: 384143 - DNA, 2482 bp, Cannabis indica
actgtgatgtctaagaatttgttcttttacctcttcttcaaggtcatgtaatactgattgagtgtctggaataaaacccaacttttttatctctttccagatcttttctatcattctgtagatagcctctttctgtggatggctaccatcttctgcaccaaatacatggactgtgtttcgaatttgcacccaactaaatccttgttccttcttcactcccctatccttcattgactttctaatccttgcagcatcctcccattttccacaagctgaatataaattagccaaagctgagtaagccccgctgttttcaggctcaataaagagcaatctttctgctgcaactttagccagctcaacattcttgtgaaccttacaagaagataacagtgatccccaagctatgacatctggttcaattggcatactttctataaactggaatgcttcttgaagcaacccagcacggccaaacaggtcaatcaagcatgcataatggctgagtgtgggttcaattttgtgctcatttttcatcaaattatagtagctcctgccttgttcaactaatcccacatgtgtacaggcagacagtacaccaatataagttatatgatcaggcttaataccaagcccaagcattgtctcaaaaagttcaatggcttcttctcccagaccgtgttgagccaaggatataatcatggaagtccaagtcacagtatctctgctcctatgcgttagattaaatactttcttcgcagaagtgatcgatccacttttggaatacatcgtgatcaaagcattactcacagaaacagatgacacttcccccaatcttatcgcgcttgcatgaatttgcttgccatgatctaacgatgccaaaattgaactgacacttaaaatagcagcaaaggtatagttgttcggtttggggccctctcttgtcatcaacctgaagagctctaaagcttcattgtttaaactattctgcgtgtaacccacaatcatggctgtccaagcaaccacatcttggtccaccaatgaatcaaatatatgtctagctggttttacattcccaagcttaatgtatccatccaatagggctgtgaaaccaataacattgacacttgaagttccactttgctccaagaccttctttgcaatttcaactccacaacatttagcatacattgagatcaaagcattttccacagccacagagagttcaaaattattccttataatttgagcgtggatttgcttcccaagttccaagtttccaagatttgcacaagctgacaaaatgcttgccaaggtgaacttatctggtttcaagggagaatcttttagcatattagagaagaaagctagtgcttccatatcaaatccacgttgattgtatcctgcaattattgcattccaagaaactatatttcgttctgccatttccttaaacagagaaagagcaaggtcaaagcggccggattgcatatgtgaagaaatcatggaattccaggttgatatgtcttttgatctcatccgttgaaaaacaaccagagctgttttttggtccccagactttgcatacatattcagtaaggaattggctacacaaacataactactaagcccgtgtttaataacaaaggaatgaactttcttgccaatattcaaaccctcaatagcagcacacgaagccagaatgttagtaacagtaaactgggtaatcagaactttatctgaaatcatcctgacaaacatcctaatagcattatcaaatcgacccatttgattataacccacaatcattgcagtccaagaaactgaatcacgctcgggtatttcatcaaatattctgtgagccacatcaattctaccctgcttcgcataagcagagagaatcgtattccaagataatgtagtcctgacaggcatttcctcgagcaggtggtgagcatcagagagagacccagttttggcataaaaattgatgagattattcatcaagaagacacccatatgaagcccagatttaatgattcgggcatggattaattttccagcaaaagggtctctagatttgaggctagcttggagctgatacacataaaaatcggaagtaaacaatgtagaagacgagcttggagaccccattttccgaagccacatttacctttaaaattaaaataattgaaatgatgaacataaatattctgaaacctgattcatgattattaataacagagatagatatttggatgatgaaaatgaaaatttttggcgggagagactaactgaaagtagaagggattggaggtggcacacgaactgttgcatagtaagtagtaacacatattttgttggctaattagtaatttttcctcccgaactttgacatgtactaaattgtgccccctgaacttttatggccgttaaaaattcccccgaactattgagattgttaaatttaaggacttttgtc

SEQ ID NO: 384144 - DNA, 1896 bp, Cannabis indica
aaaaaaaataaaacactgttttcagataataattacagaacacaatcttaatacttttgaattaagaattaaaaattaataatttttaataatgattttaaaaactatttcataacaaaaaagagtcctcaagtccaagcttcttacaaactcaacagaaactcgttctaaaacattagatttagagaaccatattaaccacaaccctaaacacaagacaatacaccaaaatcactgtaccaaggagttgaaaattcagcttcttctttattcatgttaccctacttaagccctttcaaggggtcggtaaccttccctgacctcgagtcggtccatgcttttgcaatagttcgcttcatatcctcatccccatcctcgtacatattctacatatcacaaaactccagtcacataattcaagcacattttcacaatgatagtaaaataactcaaatggtcagaagatttgaggtttgagttaaaatattgtagggtttaagtgaaaatgttgtaaaacactttgttataatccagttgaacatgatcaaacatataagaaaagtatcaatttgtaaaatgttgaaaaacataagcattttacttagtcacccttaaaaaagaatcatgtattatttgcctaaaatttaatgcaagagaatctcaccttcatcaagtccatgattcctgccattgggtcttgttccttatcaagctttggcttcaactgtaaggatcaaaatcataaaagaataatttggttacatagttctcagagttcccaatctaaatcatgaaaatattaccttatcttctttatagtacaagtccaaccaatttcccttggaagctttaaaaagtgtaagcacaacccttttaggcttaaccaacaccttacacttttcagggacaatctctttgttcagttttggaatagcacatcgataattcttcccattaacatcatggaatttgatatcaaaagccatgggcttgaactcagttactagtttctcctggtcaactccctctaaagagatatataactaaaaatgaatgtgaagaaaaacagaaaattaaaatcataggacattagtgcaaaatgatactataaaataactttttcaaaatgatattattaccttgactttatcactatcctgctcccaactaaacgaacctagagtaatgtaactcacagatggagttgggggaactttggccgcagttgcaactggggttggagcttgggatattggtggtgttacagcctctttagacaactgtttttcaacaaacgtcaatacatttcatcagtaaatatatttagaaattgactttatttatatctatatatgtttcaaaattccatataccctcaatcttggccttccccaatccccaattttcattggcaaaccgtaaagaacctaaggttttatctctaccggattatacatggagcttttgtaccaagaacataattttgctatttaataggtaaagaaatgagaacttatataacgtattgatataaatataaacacacatatgatgtatatacacataatatgcagtagtaagatgaatatgaatacgaactaacccaaatgaaaatgagaaaaagaaaagaagaagaggagaccttttccaagttgcgaatctcagaggagatgagattgagaacacgaggcctcttggcgatggtttggaaatggcggagttcttccaaatctaatgctacctccttttctgccattgatttttctcagagtaacttagctttcttgttgtggttgttgtgaccgtacaactgatgagtgttattcaacaaacgaaaatgggattttggcctttttgaatgaaagagagagagagagagagagatagagagagtta

SEQ ID NO: 384145 - DNA, 1229 bp, Cannabis indica
cctacaaagaaaaaaaagagaaagatgtagaaaaaaaaataaaagatcagaaagaatggagaaagagaaagaggactagggtacccattggggtcgtcactgctacattttcgaggcttggtcgtcgatgatgcggttggggtcgtgggtgggggaccgtaccgggggttagaggtggctgggggtcatcggggttgggggcttagtcgggcaaggagatcgagaatgagagaaagagaagagaagattgaattggatggagactccttgtgtgttgaatagaaggatataggttgcatttcatgtgtaaatgagttgttcaacaatgtcgtatctgtttaaaaagacgttctataacatctttttaaaaactgacgtaaatactttaaaaatcagttttatgctgacacaaagtagtatcaatctcaaatcagcgaaaaagtttaatgtagcctttttttttgtcggttttgagtgttaaccaacgcaaaaagactattgtgtaatagtgaaaattctaaaataattaagtagtactcaaaaaatgaagtgccttctagcacttgggtcttagaccaaagcccaaaacaatttctagcgagattttcttacaaaagttggttaatgcaattaattatgagtagtatatatacgagatgttaggtctcttaagagtcactacaagaaaaagaccttttgccggcgacgaagctcgttgccaaaactaaggggaatttgccggcataactttgcgggcgttcttttttgccgacaagaaaaagatcgccggcaatggctcgtcggcatatcaacttttacgggcgacattagtagatgcgccgacaaaagactttacactggagaattaatttatcagcataagtacatcactgacaattgagtgtcggctgaggtgtccttgtgttttgccggcgagttaatgcgtcggcaaaagaattggcagaaatttggcgcaaattctcaatttgccgcctactttttgccgacgcattaactcatcaacaaatctatttaataataaatattaaatacttttgccagcgagttaattcgccgacaaaattaatattaaaaatattaaatagttttgccggcgcaaattaacttgttggcaaaagtattttttttaaaaaaaattaaaatttatactataaataaatttaaagttaaattaaattaaattagaaataataataaataaatataat

SEQ ID NO: 384146 - DNA, 1299 bp, Cannabis indica
ataagaatagttaatattttcatagtggtgataaactgtaaatatgtaatatttacaggtttgaaaagtatacatatatataatatgcagtaccattatgaatactgatcatctcaataatggccaagaagatcaatcggcacacggttcattgtattattgcatggaattgctctttctttgatttgtcagtattagttgacgtatcttatatattatttatagaaaagtacaatacccagatttgcaaatttattgatatgatcagtcaatatatctatatacatttatatcatttcatttgaatttagaaaatttaattctgcatataatcgaattgtaatttggataaatagaaaaaattaaattgaaatatatatttatttttttctttaacgaaaaaattaaatttatgagagaaataataattaatataagtggactggagttgcttgaatatctggcggtcaatataatttccaagcagctggcagatatgtactttttgagataaacttcttctggctcaattaattatatggtgagtttattttcttggcccagcaaaaagattatcatttcattgtttgacgacaaaatccaatttatagtcagtacatgatcatttggttatataatatacctaatcatatgttgcagtagtgactatttattcttccttttttttttttaattgttaaaacatggaggcttgaggtgtttgcagtcatggctttctagtttataatatacatacatatatataacaaaagttttgtattgtttacttaattaagaatatgaattcgaactctctctctctctctctgtctctcctaatcttgatattgatattatgtaccataattttcttctaaaaattagctagtaattaataagagaattttataatatattaggagagagagagggagagaggacatgaggtggagcataaatgaggtggattatgtggaggatatctgaatggtgacgtaggcgcacacgaggtcttaggtggctcaccaaataaaggctaaatatttatttattggcgcagccaagagagaaagagagagagagagagagagactatgtcggatatacatatcaaggaaggttactactaccatagatacatatacgatgactttggacttttctatttttgcagtgtatgcattctgtgcatggtgtataaagattaagattgaggtgatgtaatagatggaagctaaaatacattccactttaatcaaatcaaactacttaaaataaaactaaagattaggtcatata

SEQ ID NO: 384147 - DNA, 1885 bp, Cannabis indica
aatcttctaattgaaaaaaagttctattatctcatttcatatctaataatagctacacaactatatatttatagactttcacattctttgcaaattactaataagcaccaataatattttcatattctaatatttttcaaccttctcctcttggtggtaaaattaaaaataaaactaaaaataatcacaaacatataaggtaaatatctatatttttcttttttttaaaaaaaaaaattattaatattctcccaagataagttagttagagagatatgtggctaagatgatttttttaatttaaaaagagattattaatatttaaaagattgtttaattttttgggtttaattattgggtttatttgttaacgggagatcaaagctaatcgttaaatttaacagaatattcttttatttttaagtatattctgttaaaccaagaaatgccgttagataggcacttttaatatataaagatatatataattcattactcataagtttaattagtagtgtgttaatatattaattaggctaattaggatttttttaccgaattttgacatgtactaaaacatgtccaaggtgtgagcttgagattgttagatttaaagacttttgtctaatttcattcaattttactatttcaatctcaatagttaattaggtacatgtgaaagttaacgaggtaaaaatcttaattagtctattaattaactaatcaattaggttttctctttaattttaactatttttatgaatcaaatggaaggtaagtctacattgctttctttaagaggtgttttggtagattctaaaattaaaacgctagtgaatgagaaatagaatagatcaatcaatcttttattattaataaatattatttttgttgatattatagaattaacaacttgtttgtgggtatggatttgggaattatactcgtgaggtgtatattaaattggtttttaagctagtaattaacttttctggtttaatttaatttaattggttgatgaattttgtacaaattaattaataacattatcttgtgttgtgaaaactaaataggaatttgcaaaaatgcaaaatccacaaaatcactactgcaatacttacaagaatgatcctaactacattgatttcgaaactaagtacaaaatacaccaggagcaactcaaaacttgggaggtagaataactaataattatatgtctttttattttatttattttataattagaataatttacaacataaataaagtttaaactaactaatacttatttttttatatatgtgattaattagggttttcatgttgataatttggatttccctatggaatacactccatttcctatgattcaacaagattctacttcatcatcttttgtaaaggatgctgctatattcgcgcttgagcaacacaacaaatgtcgtactcagattgagggtccactcaagttgaagaggattgtgaaagccaatacaatgttagtgcaaggaacttggttttatctaacattagaagcaacaaatgggcaattttatgaagcaaaagtgtacctaagtcctctaaactccacacaacttgttagtgaactcaaattttttaggcttgccaaacactatcctatgactcctactactaccaccacaccaattattaatgatgtcgactcactactataatgatataaagtatcagaatacactcttcaaaccattgtcaaactctaatttcattcattactgtttatgtttatctaatattaagtttatgtttggttttggtagaatgtattggtaataataatggtaatagaataagaatagtaataggaattgattaaaatgtttggtttgttattagaataaat

SEQ ID NO: 384148 - DNA, 2606 bp, Cannabis indica
gtagtagaactgtagaagaagatacataccccgggattcgaagggagaaaatgtgagtgagtaagtgagcaagtcccaataagaaatagagaaaatgacaatttataataagattaattagatctcatcgtggccgacagctatagggtgtcccttaactccctcagttctttcacttcccacaccgcacgtgatcccaccttcatatatatttacaccttcctatctatacaacttaatatctccttcattttctaacacatatatatatatatatatatatatatattattgcaattacaattctcaacccaaactatatagttcatggaattgcccaatttcatactagttataactaacgtactacatgtgtattgttattattattattattcttctttttaccttttgagggatcttttttcgtaggatttacatatatatagatcctttagttgacttcaatttgtcaactttataataacattttgcagctcgtgatttatgatattatatttgctatggaaaattaatcatatgatagtagcacctacctagaaattatatgatgagtaattcccaattttagaatctcattctcaccatacagtgcaaccacatcgatcgatccataaaatagaactgtctcgtggataaagaaagaattttaattgtatgcaaaatataaataaagtgcaaaaatcttaaaccaccatatgtcatattgtaaataaatacaaaaatatatacaataaattgttgagctcaaatatttgggtccatctttttcttaattaattataaggaaggtcaggctagctcaagtggtcataggtgggtgggtgagtgttggaggtcctgagttcgaatctcaggtaaaacatgttgtaatatataaacgcttaaattaaaaaaaaaagtatttccttaatcgatcggaagcaaagaccatggctttgctgactcatcgatccacaaaataaaaattgatcttggctaacatcaatctctgtgatcgataccttagaacaaagtagaaataagtacaggtcctaatttcaaatattcattaattcaattgcattagctgacacatattatttttgatcttattcactgtgagctatatattggtagaattaagtaagaagaatcaattcactctctaattcaaattctcttactagaatttgttttaagaatttttttatttttatattttaaaatagtattttttttttttgtatttttatgaaattatacatagaaattcttattgcaactagcgaagcaacttaaatcacaaaaatcaaaacaaaaaattatataacaacccacataaaaactacatgaaaaaaacagtaaatgagataattctccttattgtaaagcatcgaaaagtttttttcaaaaaaatctctcgcgtttctcacagtttagagaagatttaggagatcaacaaagaagattcacgagatacttgctataattggcaagtaatcactgtcaaatttttggcctatatacaaataataattcaattattacaccaccaataattatttcattttcatcatctttaattttaatataatcacattcaaaacatgtagtaatgactaattggttgagtctaataagaacacacaactacgtacacacccacacatataaatcaattttgcattattcaataattcttaggtgaaaagtaaagtagaaactattcaagtgttccaataatttttcttaattaacctatatattttcctaaagcacaaaatataaatgtaattggactaaatgacaacaaaataagagagagagagatgagaagagaaaattggggcccatccgccgcagcatcatttcccacttgccaatactccctctccttataattgtctttttattatttatttatataataattttggttttggcatatttcaaagaattatttatgccctctaatctcaacttctcctaataattaatcatggttagcttaactttatcaagtgctaattaaacctggtcaacttttgctctctctaaccatggttaagatttgttaattaaagtccaaacaacaagaccaaagtgaccaacatctcaatatatcatctaaccccacccacaaatttcctctatctaagcttcactaactcaaatcttttatatattaaatatcattacatcatcaccttataaaaacattttgaaatagacgacccccacgctcttcttatccttaacacctctcattcatctttattaatattattattattattatattatgtttctcctcaatactcacatttgccctttccttttcgtttttgtatatataattgactttaattaatttgttaatattatattatatgaattattatcattagtaacaagcctattcaaacaatcaagtgtgtgaacaaataattttgataatctaccacactactactacgcactattacaaaaatagtttttgtcgatatttttaaacagccgttttaagttttcctatcagtttcttttctataatcgttaggggtgttcgcggtgcgggttgtgcggtttttaaccattttttc

SEQ ID NO: 384149 - DNA, 2814 bp, Cannabis indica
gaggactcatgctaggggcaccccgccaaggaaaattgttatccaagaggactcatgctaggggcaccctgcctacggtttccaccccaaaggatggaagatgtaagatctatctctctactttggttaaaggtcacaaacatataagataggagaggtacctcccacaacctccatgcaacccacaaatagggttaaggttccaccaactaacccacggggaaaaaaagtgaattagtgcaaatgggtcaaacattgtactaggacatgaattagacctatcacgaacacatttgaggcaacgaaatcagaatcagagtactttttgtttaaagcactcagagcacaaggtgtcccaagcacccaacgcccatgctgacatattatcaacctggggtgtttctaacaacaatactgaagatttgacccatgcattttattcatcttcatccaaaaaaaactgaaacaagggctttggggggagaaatgggtcgacctggaggtcaaaacggggacctagtgcccaggttgacactttgtcaacctaggccacttccatccacatttcacatgaagtcttccaaaaattaagatttgagtgcttttgggaaataggcggagccatctgggggtcaaaaataagacccatcgcccaggttgtcttggtgctgggcctagcgcccaagttgacactttgtcaacctgggccacttctaagaagtttttctgagaagtctcccaggcatattctccatcttcatcgaagattaatgtacaagtgtttctaagaatgaagtgtttctaagaaactggactcagcgctcaggttgacacctagtatttggcccagtgcccaggttgacattttgtcaacatgggctatctccaatcattatcctaaaaaagtgttctagaaatttttttcatctttaggaataacaaagatacaagttatcttggggagaaaatgagatttccagtgggccagaatagggcctcagcaccaaggttgacatggcattgggccctgtgcccaagttgacatgtaacctagttcgaatgtttctacttctccaacacaaattcagctctggtcattcttcttaaaatggtcaaaaataagaaggagagctcattcgaaatatcgaatgccatagaagtatcaaaatgagcctcgagaaggagcctgggaagcacccagcgcccaggttgacacctaacctagtgcgctaggttctgcttatcagagttcaattctgttttgagcattcaactattttttcatagtaaatgagggctacaacttgtgacagatcaaatctaaactttaatattttaacctttcaacaaggtagaatattgaaaaaatcagggagttttaagtcttcccgatttcacgaaacaacaacatcatcgagaatcggtgaacaacttcactagaacattgaatctgattaagtggtgtgagcatataacttaggcatcaaaaaatacaattctaggaagttttggcacttacttggcatccagattgacgttagaatgtcaagttgggcgttgagtgtcaaccggggcgctgggttgtcaacctaggcagaggatgctgaacaaccttcagtaaatcgacctaaacttactctatattgatccgatagatgcgatttaacttgcatttcgaagctatttcaaagatctatcaattcaaatcacatgcccacgttgcaattctgaagattttgggttcaaaattcatcctcaacaaagttgtaatttttccaacagataacccaaaaacgacccggcggacgagattcaaagtccaaaaattgacgattttcaccaacagtcaattttcactattggatcatcatgaatcattatcaatggccaagatcagcccaaagttattatatatatatatatatatttttttaattattattttaatatttactcattctatataatatgcaagctcctctagtttattttatgcattctgctaagttcccacaaggtcagagcatctctctctcaaaatttttgagcctcccacttagtcaattttttgtaattctcgtgagaaaaaaaaattcgaaatagacatagctcaattaccgtcgtgtcacgggaagtgaattattataaatttgttgtgtctcttattatattacattcccgtcaatctcaaacgagtgtgcggccagatatctgtgtctatatttttgtgtcaacacattgaatttttggcattaacttagctttcgagttcttaccgtgacaatatagtcctttaggtgctcacatatcattataacctcttctgttattttattatattattatgttagttatagctagatgcaagccttcaaataattaagtatgattattgtactgctagagcgctaactagcttgataatcctttaattaattatatatttattgactaagtaaaagtaacttttgattattgtggtagtcaaattaatatatgtttacatgtacatgtcaaattaaacatctttcctacttaattgagctgactaattaatatttttgtgtaaaaattagaataaaaggagcaattaatttccactcagtaaagtaaataatgatttagttatgtaaatgggatcatattataattatatttatcaactatatgtagggcagaagaaagtaaattaattaacctgttttctgactgggcaagattgtgaaactgtgcaacggtagtatgctcgaggacatggatttcctttagctattttttgaccatattttctccattggcatccatcatgcatct

SEQ ID NO: 384150 - DNA, 1759 bp, Cannabis indica
cctattttttatacttaattacttaccctagactcaactcagccctaagatacaaataactctcccatcatgactgtacgtacatcacagaatacattctgtagaaagtacatccttagacaaatcgtatccctatatatatgagtattttattggacactaatatatctatcttttagaaatgactcttatattagttattgatatttttttaaaatttattacattaaattacatatttaatttgatacttaattacattaatagcgatataacattaaaaaggatgttaagtacctttttagtatttctcatatgtatataaagaaaaatgttaaaaaatatcagtagtaccagtatctatctaacatcctcttatatgttaatatcgttattactacaattaaatattaatctcatattttataataatattccttatatatatatagtggagtggctatactactgctataatgatttaggtctcacgtcttcccattatgactgcgcccatttggggaagcactttcaataatattatgtctcaaaagcttaattcatcatcatcaccatgtccctccctccctctattcttttatccatctaattaatttgcttccacctttattaatattgttaattaattattattatataccccacctttaattaactcttactattgacatatctctccatgaaaaaaaaaacatgaatgcaataaaatgttaaaaacatatttataattttcttatatatattatacaaacataacacttaataatatataggtggaaaagaaaaatttaaaggacttcaattgagaaataaagggctcattaattaggtacttctgttaagtgaaaagtaggggcaattagaacaacacataattagtctctgtgagtactgagtacgtacaagtgagaaaattcattaaaattcattggcccatagctgcttaattaagagttaatataattgtgcatttatgggaataattatatatatatatatatatcagtacaaccaccaacatgaaaaccaatttaatttcattaacactttcattgaaaaaggtagagtcacatattataaaagtcatatatttaagaaacaccaagtaccaaaaagaagttccgtacgttatttcagtctaccaaaaaaaaaaaaacaaataaagaatttatacgtgcaaattaattctaagaaaattagaagctgaattaatacatgcatggaaaaacgacgtgtaaggcgcacgtaatatattaaaattacactaattactatataatgacttgaaaatttgaatattattaattctcataatattatattaatttagttagtttattgtaaaagggcagtaccgatcgcgattcatcaaattattaagtaatgtttcataatattattaataaaatagctataaagggatacttaaaaattcaactagcccaccttttgggttagatggggttatatacatatatcgtgacttcttggatggaatgtctgtttgtgtattgctttgcctttttttttttataatataaatataattaataataacaattcatggcttccactaactatattttaattcttcatttatttgttatgattattttaaaggtggtacatgctttttcttggaaagtccttctaatttcgggaacaaaaattgggagtgctagatagagaactttttttagtttgagttcttcattttttacatttaatttttttttat

SEQ ID NO: 384151 - DNA, 1485 bp, Cannabis indica
catttttctcgtcaataattccctccaacactttcaatctcccattgaaacgttcaaaagccgcttttataacaggatcatcagcccatgccttctccatcttctctccaagatactcctcatccggagaatgattcgacaaaatgtctaaaacggccataaccctagttgcttgaagttgtgaagggaaacatttcaaaagagcggattcaggcttcttaacaaacgatttccattcctcctcgtcgggatcttctgttggcattttagttctaacaattgtaggtcggtttgggaagtaaccgccataagtgtattgaccaaagttaacagctgcatggtaaccagaggttacccacaacatcgttgtgagtatctctataaggtctttcggcgtgttaaggacaggccaccatggctcgtctttcttgtcagcatgccctactgttcgaatttctgtccaccatgcttggagctcttgatctgactcaacaagactagcttttgggtagtaatgattgatgtaatcagtcacccattctttgatggaatcccacattattaatccatcatttgcataagggtaatcttcaattgtgagctttagaccatgtggagaatttggatcttcaacagccattcccctaaacaaaataatgattaattattaattattagtgcaaaaaataattagtattacatcatggttaggcctaaatctttatttcttgctttctatcttttaaaatttactattcatgctctacataaaatattatttattaaattaaatatattttattgattattttagattttagtatttatttccatatacgtacattcatatttgaatagaatatgttagaattttgaagaaagtagagtttttgctaataaatttaaaaaagttaatataatattataatctgaagtaaaataaagaaaataaaatttaaataattaaggtgatgagtttgtttaaattactaatttatgttacctatcaataagatcggctggcaatgcttgtaaatcgaatctccattccttatcatatgcaacagaactaagctctacagaatattttccgggtgaaaatgccgtttcaatggtaccatcagcattgataagcgcttctcgagcaagcgcattaatctccattgtgtatcgaaaatgaggatgtaacaacctatgtactggatgcattatactaagttgtcgattagtagcaatgacatatggctctgttactgaatgtgttttcaacctgcacaaaaaaacacattattggaaataaattttttttaaatataaaaaacacgagaattaaaaataagaatgaaatagaataaaatttaaaaatgcataaataatttaaacgatcatatatgcataccaatgacaaacaagttgatgatagccagaatcatgggcaaggacatgaactttagctagtctccatagccaaactcccgttgaatg

SEQ ID NO: 384152 - DNA, 1551 bp, Cannabis indica
actataaatttgtgttttgccgtgtaacaagtttttaatttgttactgcagattcaaagtcgtatttttcttactgatattgaaaaaacttattaccatatgtaaaaatacaatttttcaattatttcacgagaatggctttttttttttcacaatttttatattgaaatatattcttcatcaattatatataataaataagaggagcttgagccccaaactctccctgcctctggcactgatatggatcacgtctcaaagtatccatccgaaaatttttaatttacttttataattcataaacagatgactccttatttaaaaaatttaattcatcactttaatttattatcttaattcctgtgccattattttttttaacctatacacattcatgcaattttttaaaaaagtataagaaagcgtgcaaagaaaatgaaacaataaaataataagaaaagttacatgttcatagtgcctcatacaggaagaaaaatatttattgactacgtataatatgagcaacaaacaaaacgaaatatattattatacttgtatatattttattattttaattttgtcagagaaaacaccaaattgcatgatatagctagctctgtaattcagagtttcatacaattattcattaatttttgtgaaaagaaatgcactatgtcgacgatatataatattcgaaagttatcatgaataatttagaaaattatttggaaaaagaatgtcgaatatagtgtcatatacttgcattacatttattcaatggtataatgcagatacgaaataattgagagttggagatcgaactctttattatcatatacctatatatgaatattattatggatcgttaatatggtgtcccaacaccaaaatttaatgtggcacatatttaacaccttattatatgtacctaatatagtaataaaatataattaaaggaattttagtcaaacgagaaataaacatagatgtatggaaacgggtacaacatagacattaaaatattctttcgattaaaatagtgactctctcctttctaaataagaaaaacagtgccatttaaaaaaaattgttaaaattgggaaggaaagtcaaacatagtcaatattgatttgaacaaaggaactgaaataggaattccttcatttcttgtaggtcttgcctcaccgcaatgaatgaaaatgagtggatatcatttttcccctgctatggatgagggacggaaaaaggcaatctctaccaattttccaactcggttagtattcttatttggcaatgtgcatgtctcttgttcagtagttacatttttgcttttttttttttcaaacaatttgcatgatgtaacactaaattaatactattttgcaggttggtcctaaggtatatgagacttaaggcgaaattaaaatttggggtccctatatatatagattaactattataaaaattatagctcaagtgcttagtttaatggtaaagcttttaaaaattttgagagctctaaggttcaatccctcataactacacattaaa

SEQ ID NO: 384153 - DNA, 759 bp, Cannabis indica
aaaaaaaaaaatggagaaaatgatgtagtttggcctactaattaaaacttttttgtataatcaggtcccaaaacctcacaagctgaaatagtcctcaaaattcaagaaataaaaattaaggactgaacaggcaattagacctttagggattcaattataaggtaccttttcaaatgtatacatttatttgtgtgatatacatagtcatagataccctaatgataggacaaaacacaatgaaaatgaacaataatgtttcacaatgggacaatttcaatgaccaagaaccaattgtttgtttatttggttatagacaaaacccatagaaagaccttcaagacatcccatgagcaatagcatgaggttcatcagccatttgagaatgcagtcaataatgtaatgtggtcattctatttctctctcaaaaaaaaatatatatatttattggacccttttttgcaaataagggattgtcttactcattggaattctttgttaagagcttgaatatgaagcctttattatttatttctgttcctatttgagatgaaacgaggtaggccataggtctcaaagagacacttatctttttgtggggccaagtagtttgtgtgctatcttttagtaatttgaggtccacatggatgagagagagatgttatctttacattagcaatttagcatataaaatagaataattagtttttttagtccatgtacttatgacactatactatgatgccccttaatttataagtg

SEQ ID NO: 384154 - DNA, 1050 bp, Cannabis indica
ttaatatctgattaatatatatgcaaataatcataggactgttgatcattattagtttttttaattgggtcatataatgtaataaatacattgtttttgatgagtttctgatcatatagaattgagagtcaaggatttggattgcatgacgtcatcattttgactatctaattattgtggcactcttctttattagaattcatgagttaacgtattaaccaattgaaacaagatggcttaatctattaattattctaaatatatatagatgacattatatataactacagccaaacatgtttttgaagtgaaaagatataaatgaataatatacataatagggtgttgtgcaaataaggtatatatgaaagttgaaaggttaaattttcctaaataaatagaacacacatgaaaaaaaaaaataccagatatatataagactattagtaaatttcataatcataataatacaaaatggaagattgaagaagaggctatatattgaaatcacaggacatgacttataaataaataaatagaattaatgactttgcttatttatttatttaactttgactgcattttcctagcttattatagtctttttcgatgtgactaaatctaaaagcgtatataatatatattaatatatattacttacaaattaataaacaagaaaataatttctaattatatatataaatttactaaactcacaattattggctgtataaataatggtgaataatagtacacaaataaagaaaacaattaatatgcatgtctgaaagaataactgtatagatatatggcaagaaatgaaattctatggcacaatttactatacactaaactaatgacatgtttactaattaggatttgaaatgtgatgtaagttagtgattctctttccattatttaagtaatgaaatggaattaatagaaagaaaatcatttttatttcctttatttgtagtattaaaatgtaatttacaataaaatgaattttttattattttagtggaatgattattatattttaaaataata

SEQ ID NO: 384155 - DNA, 4432 bp, Cannabis indica
aaaaatttatgtacagccttacaaaatacataacaataataatatgtatttttttcaaattatatataattatttagtatatttgtctaatgaaaaaatagattttttgtttcaaatgtattttaggttggtgaaaaaaatgttgataaataaagttggtgaaataaattatgtatttttgtaatattatttattttatttttagagaaatgatggaaggtactggtgtttagtactgcgttcggtgttatatcgttatttttcgtgatcgaacaacgtttggttatggtatagtcgcttgagactctcaatgagtattagtgatggctaagtcggatagttttgttggtaaaggtgctcaggaattggctaaatcaattggtataaaagaagcgttaagctggattaaaacttaaccattgcggaaagtggagctggagtcagattgcttggtagcaagttattcgaaatttattacctatgctttcttcatttaggtttaaacagtgttttcttactttttattaaacggtatgctaacatggttgtttataatcttgctagacatcttgttcttttccaaatcaaatgttcaatatgagtgatgtttctgttgaggtacagtcttgtcttttagctgatttggtaaattaataaaggttctatatttgctttcaaaaaagtatcaggtcatgtttatgagatttttagaaaccagtaaaatattataaagcttaaaaaaagattgtagacgatgaataaaaccagctaatttttacgtggttggagcgttaaagagtcttagtacaagagtcactattattgtgtttagacttgaaaagccttataatttacacaagtgtttgaaccctaatttttttctgagcacttaaggaatgagattccaacccttttcatgaatgaaatttttaaatagtgttagggttctcatccactaatggggtaaatacaaataatataatgacattaggccgatttggtgaggcccaacccgtgaagctttgatcttttgttgacgtggaggccacatcacattaatagttctcaaactgtgtcttacttttgtggataataaagacacataaatgtttgattgacaattattttatttccttattcggaagatacgaatcgtatacgtgatcctggaaataaagtcttgatattgtgggatttgacaataaattgctatgatacgaagctggatatccagacggtcattaattactcattcggaagatctatccgatgccatctaaagatacgctatgacgaaggtgtatcttatctggacgggtcatctgtccaacatccaaaaggcttaacttcgccaatggatccaatccattaacttggttgagcctaagattgggcctcgagcaattgagttgaaagcatattagaattatatgtgtcctccatctgaaatatgggtagtaggttccatataatttaagataataatttttagaaaatatcgctaactaaccataaagtgtcacgtataagtgttaagcaccactgatgtccaataacaatgttcatatttttactaggttgataattcgtggtcacgaatcgtgttcatgttactcatttattaatcatgttaaaaattaaaatttaatttatttacgataagttgttctaacacgatacttgtaacccgtttaaataaagaatagtgttttatttgaattaactaattaatatatttatgataagtttgatatgtttacaactttttctaacatgtttatgtccaattcaataagtttatggcattttaaccaacttgaggcatgttaacctaaaaataatccaaaattgtttaagaaaatctaaactcgttttcttatacaggtttcaagtatcatgttatcgtgttatcatgtatgacctattttgtctgctctaattaatagtagcaacttaccatttattgttgtttgatgatgtttacatgctttgtttttcaagtattattagtgatttatagcaccataaagagttgatgttttgtgtatggttaatagtttttcattcgaaggtggaaattcaaagatatagcccacaagaaaagagaaatagtatgtcgtgtgaaaaaattccattattttttaaaagtttattattaatttatttctatttatgtaatttgtaggtattttgttggtgcaataaagaaagtgtaacgccctaattcttagggacactacgtgtgtaatttttggaacatagtttagtaatagtagaataattatttaataaaatttgtgataataataaaaatttcactaaaataagatcatagtaatgacatcgctaaaaatttatttcaaggatcccctgttacaaaaattttacaaaaaatactatatacaacagtaaatcaaaatacacattaggtacaattaaaaaacaactcctgacaactcgaccatacaagccggataagttgatatgtacatttgtcgaagaagactatcgtctcatggctaccctagttttctcttgtccttacctaaagtaaccatttttattgttgcttaataagacaatcctgatgccttaacccgacactcatatatctcattttcctaataaggtaatgtcggtgccctaaccgacatccatatatctcattgcctaataaggcaatgccaatgccctaacctgacatccatatatctcattccctaataaggcaacgtcgatgccctaacttagcatccatataccgttgtcattgtctaataagacaatatcgaaaagtagtaggaaacctaacaacgatttcaattgacgtcatgactttaattcgcttaacggtaatcactgttcctttatctcgatcataatcgagtcataataataatacgcgtatcttaacatgctatgtagtatggatgtatttttcttacctcaaatttcgattcaagtgtatcggtcgacttgaatggagaaaatcaacgatcccgggcactatgtcacaacaacaaaaagaatgattaatcacttaacctaactcgttcaaggtccttaattcatcaccgtaagtcccccttcactaaggtaccaataccctaaacattaagaaacacatgaaaaatgggagttctaaacatcaccaaaaatggtaagccgttttcgagatttcttggatgggaaaatgagattttttgctgttttttacaagaaacatgaaaccttgagtttcaacttctcaaaaccccaccaaaacttaaccaaatcacttcaaacttcacagaacaatcatataacttccatataacaatctatacgtgatagaaatcaaaatcatgccataacatgaaaaatgtcatgagagcttaagctttgagttcaaaaactcaagcttggctctcactccaccacaactacaaatagaatgctcaaaatgcttccattcaatccaaaaaaccaacccaaagccttacccatcccatatcagctacagaaccaaaaacgcacttccaaaacttaaactttataagaaagaaaagagaactaaactcttaccttagcttcctttcaagtttggcttaccttacctgcgaccaaaggattgtagaactaaatctggacagaagaaggagagggttcaaaatgagggtttggtgtttgattttatatcaatgtttatctatatatacttcaactaaaaataagaataataatagtaataataaagaattacttttatttttaatagtaaaataaattattttatttcttttcttgaccactaagaaaactttaacctcaggacatttgatcaatttcgagtacctcgaaataccctagtaattctaaaaccaacttacctcaataattctattaaaattactaacaaaactcgttgtgacatttttgacctccgattgggtcttcaaggctgccaaacctgaaaaatatttttattccacaaataactcatattataactacatattctaaataaatctccgtaattaataaattacgtttattcatccacttatgacaaaatttcataattcatgctgaattaaattagttaggatcataattgtactcattactctccaattaacccacaatataataaaccttaattattcataattaagtttataggatattacaaaaagcaaaatgagtacttttacagatacaaactttaaagttttattgtctagttctcataggtggtgtttggttggaggtaatgaaatagaatggaatggaaaggaaacaatctctattctattcctttgtttggttgcatattaaagtattggaatgtcattccaatagaatgacctatccaccattttggtgaattgacaattctattttgaaatggaaggaaagaccattttaaattttattccattccattcccatt

SEQ ID NO: 384156 - DNA, 1080 bp, Cannabis indica
ctttatatagaatagatatgtagtttatataaaagcaaatatgtatagtataaatatcttgttggttggagggtaatacaatatttatgaatatatatcaattgttatattctattttataaaaaaaataagtaatgttagataatattttatcattattatatctatagaagtttacaagataaaaatacaccttgaagatagaaaaattaacaaaaaaaaaaagactttgaccaagcgataaaagacaaaacagaggttaagcacgaatagtgcgccaagagctggcccaagcggttattaagggccttaggcaaaaaattaaaattgggtcttttataaaaataccaattaattctttataactttaattaattttaaaaaaaaaataaaaaaaatacttcataaattttaaaaatatgcaagaattttagaatcatgtgtattgaaaccacgagattttattaagttttcttttgagtgcatatttattgttatgaacatttattatgtatgatgtacattatcaaaaaaaagtttattatattaaatatataaaatgaatgaataaaaaaaattaggtcttttaatatagggggcttatgaattggcctaagctgccatatgcttgggcctgccctgtaagtgacacccttgtggcaagaaaataggctacatgcgagcaatgcccaaaggagtgtcagtgctcctgtaatcctagggtttgccttaaaagtctattttcgagtgaaatgtgtttcccaagtcaaaaaattggaaaccctaataccactaaccacgaggaaggtgactcggcaagtcaattattgtgtggtagggttcaagaattgagaaagaattctaataaggtaccaaaccctacttggttagaatatcaaagtcaagacatgaagaatgacaccaccaaagctaaaaaaaaggtgtagactcgagcaagggcatgcccttgctccagtataaatcaagggaaagaaaggccatacacgagcaaaggcataattgtaacgtctccacttcaagcctccattgggctctgacactcacggaataatggctctt

SEQ ID NO: 384157 - DNA, 1104 bp, Cannabis indica
tcatgttctgttggttttcttgtatggtttgaactcaaaaccttatcaactattttctcttggttctttgagatagagcataatgacatgtgtccaagatggaactaaaaggacactttaccctctttctatcaagtactgaatatactgatgatgttaataagagtactagagcatctgcagtgtagggtgttattgccgttgctcaagtctcttgtggggttttttaagtgaggtagccaccaaatacttttcccattgttgtcaccaattattttttcttctctaaatcctgattggttgaaaaacaaaattggagtcaagcaagcaactttggttgtttgattacactgtcatgctctaaaagagcggagcatatagctcagtgtcactcagaacaaaatgatatctcttttcattgaaaagaaactttgtcctttctattgtgagcaaacaactatggctttcgaaaagaaaaggcattaaccaatgataatgaagatgatgatgatgattccatctaccatatttgtaactagtgttataaaacattatcaagtagtgtcaagtggtgacttcttctgcaactcgacctaggacgtggcaaggaatgtttcgacgacaataaaggatgctaaacgacatagtattggtctacttgtctttgtccaatttaagaccgttcatttataaaaaccaaatgaaaatggcggctttcaagggtcccaacctcacgtgctttttaggcaaggtgtcgatggtagagaggttgttaattgtaagttgaaacttattagtttcgtgggctaaatttgagacaacacctcattgtttagtacatgcattattaatattcttttgtttttctttaacatttcactttcttagtacctttttactcgagtgtgacagtattcattggctaattttgctctattataaacaattagaatgtgatagactatatatatagtgtatataatatagcatatacaatgatatgaaatgcggaaaataaactgtgatcatatctataatatatgcaatgaaaggatcgatgtacctccagccattgatctttgagcttcaatccctgcgatagct

SEQ ID NO: 384158 - DNA, 2830 bp, Cannabis indica
gacatctttaggtaaccaaaaagttttaaatgcactagtcatagatgttgtacaaatcacgtaactaaaatactcaaggccaattaataagtagctgtatttttttaataccagagcatcatatataattatgaaccctcgatatcttgctacaaaaattgtggacaagaagaaataatatttccaagatgcaaataaccaagtattatgcaccatcagtaagtcgataaagctataattcttcctataggatgtttcattctccacagtgtcatttgatcaaagcttcctggaaatgacttcatagttggatttgacatttacacaaaaaaaaagggcttagaatactcccacaagggttggcctataagcagttcttcacccattaggagaaaatcatcaattactttcacatgacgcaagacgtattttcattagtaaaaaaaaattgctaatacaaaggtcatgtgtaaattctcactcaaaattctcaacgaagtgcgatcatccattatggaagaatgaagaattcaacatctctctactatttgattgtaatagtataattattaaatatctaaaaattccttagttatatggagaaggtataatcttgtaagaatgtacaaaagaattaagattatatgatatgaatcggatcagatactcggatcggatcagatctgacccattggggattgggatatttcaaatatggagtgcatttttgataatgatagtgtccaagatattcttaaaggtggtatgccaaatggtgagaatggtgatgattggtcccggtgtaaagagaagaatggtaggttctctaccaaatctgcttgtctttacaaaccttgaatagaactccaaactgtgttgtggctccttctctttgggttgtggaactctaagatcctcgaagacgtagtgttgtggtggtgtatcctttcgaatgctcttcctgtaagggtgattatggctagatgggtccaattagaggatgatttatgccctcttgtggcatgaggagcgaaatcttggaacgccttctcttaacctgtgacttgacatatcatctttggcgctcgtctccttggagtttgatttggaatgtggataatgaagataggtgttggtacagggtccaatttatttgggggcgggatcgacttggtgtcaatatcaatgaggtttattccttagtggtggttgacactatcttgaaggctagaaatgaaaaagttcaaagccaaaattttcatgacattcttcatcatattattattaatgttgtaactaaatattatttgggctctttctaagtctctatcattcatgaatcctttgtgcaaagaggcgactacttgctctcttgctttaaagatggcaatgaatatatgcacgtacatagtaaagaaaaaaaacaagtcaacattttacaaagtacaaaaataattgtggttgactatataatgagaaagtaaattatttcaaacaatgtcaatataaaattggggtttttacaccacatattgaaatttttaattttacttttttactatgaggtggaatttttttcaaaaatgctatgtaagttttatattgtatactatgttaaattttcactgtggttccacaattgttttttagttgttccactattattttaattatttcagtttggttgttttacagttaatttataaaaagacagtatttttgtaaaaacccttataaaattatcaagatggtaatcatagcaagaccgaaaaaaaagctcatataagtattgggttttctttttttgaaaaaaaaaattaaataaatttcaaagtttcagccaaatatgttgtaaaagttgtcataaatgttaactagtacgtaaatgaataataactagctctattcaattactttttttcatgtatgaacaagtaggactattcatttggtacatgaattctagtacagtgagctctatactatgaattttgaattctagtagggtgatttgggtgtacacggtaaagttagacttttcagacgctctttgtggtgaagctgctgcagtttgtttggcgcttgaagtggcaaaggacaaagaacataatttcatcctagttgaaagcgattctaaggtagtgatcaattcgctcaatgacttcgaccctaaatgggaaattgagaactattccttattttataatagaaccatttcatcttttgctagctgtttgctatgtattactgtagaacttgtaattttatggctcacaatgtagccagatgggcgttttcccataaccgctttgggtgctttgatgtggcatctatccttatgaatattttatgtaatgaccgcgaggtctaactttatgattaatgaacgttaattatcaaaaaaaaaaaaagattacgtactttagttaggatgaatagaaatatagataaaataaaatagaattgttaaattttttctcattttataataaaatatatttttttattataaatagaatactaaaattaattagtgaatattaattagtaaatttctgacttgaacattgttatgttctgacatcttacattttttttaattggttgagaattttaaattgggagccccttaaaataaacttgcataatatttcaatttgatacccaaaacaactatcaagtatatggtctctacttctcagctaaaaaaaagtacaggctactatttctcaccataatatgtagtcattcctattaattttttttatggatgtaaatgtaccgtttggtaatacttttattttttaactttttaattacaaaatgaaag

SEQ ID NO: 384159 - DNA, 1692 bp, Cannabis indica
cacagaagttgacatggtcaacctcacacaataattcagaaaataaatgtctaaaattcaaatcaagactatgttcacctactttcaaaacaattaaatgaactactcaaaatcatagatttaacacttgttcattgtatttaatacctaaatacaatgacatataatagctttcatcacattaagcttactcaatttctttattttatttttctcccttaaccaaccctaattcaaattcaaattttcagaactaccattaaaaccccaaaactcaaaaatcaatttttgaaagaacagtcaaaatcttgctaaatgaactgaccttgcatagtgggtttaggacaaacaaagccgtcattaacgagagaaatattagtgggtagaggaacactcggtgaggcaactccgaactgagtcccaaccaatttaacctgaacactcatctgggtctcgtctccagcagtctcaatagctgttttcagatccgtcatcggaaaaccagcaaaaaccgttccattacccacaccaccgggaatactattcccatcagcgagaacagcattcgaagcagagaccaagtactcatcgtgctgaaacccaacaaagaccttccacgacttgagctcctcaagcccgttgttgagcacagtcaacgtagactcaaaccggtaaggctgacgtgatcgatcgttctttagattcggtgggatacgctcgccgtcggtgtaggcgtacgataagtagattccattacaagtttcgttggccggcggaggaggaggaggagccgctgccgtcgtcgtttgagagatcgaaaagggtataaaagtaagaagaaggagaagaatgaggttgaaggtgatgagaaagagagagcccgagttcaactcggccatgtctacgcagctcaactcgactcagagtccgtttagattcaaagttgggatttttaaaaagaaaaatggtaaccagaaaagagagaaagaagaacttatagaaaagacgtttttttaaatataaaaatggaaacgcgaaacgaaacgcgtagtacagcttagtggaggctgtagtttgaaaaagaaaacacgcactcttttatttaatttgtctaaaattaattaattaattaaattaaattacgatacatcaatatagtaaaagagaaaaatatatattaattttacaattttaatttattttctatataaaaaaactagattttttagaagatgtttgttaagagaacatattatataattggataattaaataagtcattatttgttgtaaaaaaaaattataattacaaatataacaagaaatctatataaaactaataagaaaataacatccaaataatatcaatacaacaaaaaaaaaataatatactgataacaaaaaaaatcaacaaccaattaacaagagtagaacataaaaaaaactatatattctataaaaaaattataaaatcgtaaaaatatttaaaatttcgtacaattgtatttttgtaattttttttattgtttttatatatttgtgaaataatcctttatataattttgggtacaaggtcgagaatattatttgtaaacaatttttagttgtaaggttagttaaataatttttttttaaacttttgtacatatgtattaaatcatactttaaattttgtaactatattttttaaag

SEQ ID NO: 384160 - DNA, 3232 bp, Cannabis indica
gtcgagttattatttttgaattgaattagattgaattatctattatattttagatttaatggatccaataaaaaaagtagtaaaatttaatcataattttcataattaaatacatatatataaaaaaacgtaaaattaattacttatccaaacaactaattaatatagatttttaagcaccccaatatccggcaaccgatttatatatccaattgaatattcaaaaaaattatccaatctaatttgattacaattagatatttaatatttgatactcggtataattggatttgaattagaattcttaattttgcaagttattttttgaaatatatttaattctagaaagaaatttatgaataatattattgagtttgagtataattaaatttttatattactaacatatataatatattgtatgatgcatggatcataatcagtctagaattagtgggcttaattaatataatgaaagcagagaaatgtaaagagagtagactgtgtgattgtcgcaaagagaaaacgtacggacaacgtggttaataactatccatgcattctccttattgggcgttgaactgatcacatatatatataaggtgtgaaagtgatggatgagaacagatgttgtgtgtttttttaagctttcctcatcttcttcttcttctcctattaattaaagccccttttttctttttcttctgatcagctttctgatatgtgataacaacccttcacaattaatagtgtcagctatatatggctggcctagatcaacgcagcatgggtgatggggtacgttttactactttttatatattctttaattcaaacctcacgaaattagaggaccaatccaaatattgtatctctatcatgaatgcaaaagttaagcataaaatggttcactgctcattttaacttgatatcatataaataatatatatgtttaactactttttccttcaatattttcttttttgtgtgggtaatatgaatttatgtttttgaacaaaatggtaagtactgtctatttagaactattgaattatttgttaaatctcagaaattaagtgtagtactctctgaaatacatttattcatttttcttaatcaaatatttcgtgaagaaataatcaatttttcatatcttttctaataagctaaattacttagtacgcacggaatacaaaaattacaaacaaatttattattatatgtatatgcaaggtactcttttctttttatgaaagaaacgtttcactaataagcttactgtttcagtcaaatgtagttgaatcaaatatataagagttgatatatatacatatatattattgagaaaaaaatctgttgatgatgactagctatagacaaagccttcagttgcactaacagccaataagtttggtacgtacacaaaaagtaggcactaagatattctctgtttgtgttttcaagcaaaagatcttacactccttgggagagaaggttaaagagtttaaatggtttctctattcctaatttctgaaataatatctaaatcaacactagctagtacgtgtacgtattatctggatcaataaagcctggagagtactaaatgcaaatatatatagcagcgaattactgctctctgcatcctgcaaaaaacacagcttttgttttggactcttctattattaaatcctttatatatcccagagattagagagacatatttgttggattttagtaaaaatatcataaatttatactttaaataccatctctatccaccattgattatttttttactgttggtttttatttttctttgaaacaaacgtctcaattgattccatacttcatatatccaattgttcaattcagcattgctatatataatttagacatttgcccaaacataatccaacattgcatcataaggttaggtgtctttagttacaagtggttagagttttctataaaagaccactcttatcaattgttctaaaaatagagatatttaaaaatattggaagaatcaaactaaaaacagactatattaagtacttttaactttgatatatatatttttaatttatgattttatatttactgagtactatttatcatattaaataggctaattagtaatttttctctctgaattttgatatgtaccaaatcatgctccctgaactttttttggccgttaaaaattacccttaaattattgagattgttagatttaaagacttgtgtctaattttagtaaaaaaattgtaacatagatgaaagttcaaggggtatgatttaatacatatcaaatttgagggacatgatttggtagatatcaaagtcttttcttttttttttttagtaaaaggagttagatatcagcgtctgtggagcataatttagtacataaacattcactgaaatagtaaaattgaatgaaattagacaaaagtccttaaatctaacaatctcaatagttcgggagaatttttaacggccaaaaaacgtttgggggacatattttagtacatgtcaaagtttaggaggaaaaattaataattagcctattaaatatattttagtacttatttggagatttttttgttacgggcggatatgttttatattattattattatatatttaaattcaataatatatattgttaggttataattaacctatatttcgggtctttaaagttagcattatctcgtctattggtgtcttttggagcagttttacgcttgattttcattatttcaggttcccggggtgttaaagttcgaattcagtcaaatggcgaaaaactgggataaacttggaaaaattggaaaattcggttccagaagtgtcagtagtcgcgacctccagagagccaggtcgcgaccctttttcctggtcgcgaccctggtcgcgacttcgtgagtttggcagaaactcggtttttcgagttttgcctgtagtcgcgaccagcttaaatgctagtcgcgactatgtacggaaatcgcagatttgacctaattttgatttttcactcaattggaggctcaccactcatccctatataaggaatacgacattgaaggtcagatctaagcaaaaacagacctaatagtggaggcaagtggagagctagcttgaagacccggagcgataccaccttctagttctttctttacccttttttattcttctttattcgttgttttttattctagattaa

SEQ ID NO: 384161 - DNA, 4390 bp, Cannabis indica
aaatacatgtagaaagatttttttaattttaaaagctgaaaaaaaaacttatagaagctaagctaaacaagactaatatatcatttggagattcaaattaaatatataatgtagaaagatatatacatatatttattgtagaaaatcttaaaatagaatatatatatatatgtatatatgtaaaattcattattataaaacaaaattatacataaatatagattattattattattattattattattattattattattactatttttctttagttttttttttaaaaaaaagaattaattcattattttttaaagtaacaacaatcttgggacaatagcttaatcaattcatataaaatatatgtagaattaattcatgtcttttaaaagtgaaattagttcaaattcatttaataggggattaaattcatactattacatgcattattttaaaatcaatttacaataaaataaaaatataattaaagggcatatattaattagaacatgcatggattagaaaatgtttgagcttttttgcttttgaaattattaaaattaattaattaagataaacctggcggctatggcatatttttgttcaaatatttctttattttattttttgaagattctataaaaaaaacaataaaacaaaatcaaatgaccattttgttaatgatcatatatacgtagcaaatataatattctctattaatttgtatataatatattatatatataattatgttcaccaaatctagagtgagagcagttaatattctaattaaaacaacataactagaaactaattaattaattattatgtcagaaaaataaataaattaattttaatggtttacaagtaaacatataattatttatttataggttcgtagaactttcattaggaaaaaagaaaaagaaaaacccatttacagctttatatacaaaataaaataaataaagtaaattaattttatttattttttttaataaatatgcattaatatttttatatatgtataagtcaatatataatattgttattgacaatgagtatagtgggctgcatattctataataatttaatattttatattaattaacaagtagtaatattaaattaattaacattattattaataatttctttttggggttcaaattaatggtgctagctaggctaaactaagatttactttggaatttctttgcaaatctattaattaattaatgatttggtataactaatccattctaattaacaaaagacaataaccaagacttcatctgtttgttaacaaaaatataattctataaaattgttgtatattgttatatataggtgtaatttaatatcaggtctcatatattttaatttaataaataatataaataattcgatctaaaggtgttataataagactaattacatattttctcattttctgcattgttagaaattatctctaaattggttatacgtaaaaagaaattatcgaaaattgaatcaagtgtactattttttctatttttaaaagagaattgctaaaaagtattattggtgcctagcaccctcttcaatgtcatactgctattggtgtaattaagtatcatgttccatataatttaaaaaaataatttttagataatatcgctaactaattgtagagcgctacttatagaaattgctgggtactactggtgtcctataacaatgcttaaaaatatagagtctaacttataacttaataaataaataaaccgatcagtaacttttcaaaacacgagattcaaagtagtatcacctctactctatattattcataaataatcacacatttaaacatttttgtcaagaggaattttccaaccatattgcgtacaaactttagttaattaacttaattaataatttattggaggatcaaaatttcctaggaagactacaaaaactaaaaatattaagttatctagagagaatattaggtagcatagtactactcccactacccaaaaaaactgaattttaatcagtacattttttccaaaggaaattttacgattctaaaaattaaaattgtatgaaaaaattccttatacatattaaataaaactaagtctctaaaaatataatttattatgattaattgttttaaaaaaatttaatcatgattaattatacactgatatatacaatatatatactctatatagagcggtaaattatagttatatagtagtactctactatattcatttttaattatttttaataatttacgatatcaaaataaaattcaaaatacacatgtaaatataaaagaaaaataaatattcatgtaactaaatatcttttaattctatttcaattaatacatagtatattgctttaaaaattttttgaaagcaaataaactattaattgtatcacacaattatttatatatataaaaaaatatataatttctttaaaaactataaataaaaaattcttaaaaatatactatataagatatactgataaaccatataaaaatgtgtataaatatataatattaattccttaatgttgaaatgaatattagttaattaatcaaatcatcaaaattatcaaccacgtgatcaaaagtacagtagtcattattattttttctatagttgatcaatttgtattgggtgagctaatattaattaactaataatataggaattaattaataagaaatgttcacttaacgtatcattataaaacaaatccaatcctcattctaatcttcattctaatcccaattaacaaactctaattgatcaaaagaaaattcataatcaagagagagccaccaatggcttctctcactagcccttgttcatctccttttcttcaaaaagatacccaaatcccaaatctcaaaaatcgacgttttaacccttcaaaaatttcacgtaaattttcatgcaaagctagcgcaaacaacaataacaacgaacaaaaccctaacaggagaaatattctcctgggcttgggaggcttgtatggtatggcagggttacagggtggacgcgatccatttgcatttgcagaccctatagccccgccagacctttccaagtgcggccaggctgacttaccagctggggccaacccagtaaattgttgcccaccattcacttctaccatcatagactacaaattacctaaatcaggcaagatcagaataagaccagctgcacacgcagttgataaagcttacttggaaaaattcaacaaagcggtagagctcatgagagctctaccagctgatgatccaagaaattttacacaacaagccaacattcattgtgcctattgcgatggagcgtacgagcaagtaggtttcccaaatctcgatatacaagtccataattcttggctattttttccattccatcgttggtacttatatttctacgaaagaatcttgggaaagctgattggggaccccaattttgctatgcctttctggaattgggattccccaccaggaatgcagttaccctcgatttacacaaacccgaattcttcattgtatgatccattaagaagcaaacctcaccaaccgccaaccctcatggaccttgactataacggtgttgacgtggcatcaacgaatgaagctcaaatctcgagtaatcttgctatcatgtaccgtcagatggtttctaacggtacaagtcctcgactctttatgggcatgccttatcgagccggggaccccaccgaccctggagcaggctcattggaaaatattcctcatgggcctgttcatatttggtctggggatcagacccaacccaacttcgagaacatgggaaatttttactcggctggtagagaccccttattctttgctcaccattctaacgttgatagaatgtggagtgtttggaaaactttggggggaagaagacaagattttaccgatcgagattggcttgatgctgcttttcttttttatgatgaaaatgctcaattggttcgtgtcaaggtgagacaaataattcttatatatatattgaatttataaagtactattatttttttactacatatagtgcacatagttttttcttttattattatttatatataaaatcacattaaatatagtatttatttgggataattacataatacattattttttgtaaatcttttatatttttacgttgaaagatttttttttatatatatttttacagtattatataaaaataacaccaaaataatacgaaaactacataaaaaataacatcaaaacaacaacaacaaaaaaaataacatacaaataacaaaaaatcaacaagagtacaacataaaaatacattaaaagaccgtattttct

SEQ ID NO: 384162 - DNA, 2125 bp, Cannabis indica
atcacatataagttttgtaggattctctagctcatccttccatatatatcttatcatttccagctttctaaatgttgtaaaccaaactagccaaggctgctgccgttataagttttcgaaagttgctagcctttgctctgccaatccatcgaattagactaggaagataggtagaaacagttctccattgtagacaattcttaatctcctgcaaacactggacaacactgacattcaaagaacaaatgcaatattatttctttgtactggttacacaacatacatgtctcttcaatagagataccaaatctgagaagttgatcctttgtttttagcttgagttgtacagtcatccataatacaaaaccgtatttagggtattgagtctcccccaaacttcctgcctccagtgagctttgttttgtgatggacaaaacattttatagccattagacattgtgtacttgtgtttgtaaagaatgttagccatgtagtaaggatttgaactgatttataatggagataagactcttctagtaccagctcccttgaattggagctttgtatctctaccaaatctcatccttaatatacacacattgtgtatccatctcatccacaggctttcttccttatttgttattacccacacatacttacacatcacagacttattccactctgccacctttataaaaccaatgcctccatcagcctttgattgacagattgtatcccatgctatggatccagacccaaacatttcttggcccttccataagaatgcactacagatagattctatgttcttaatcactttctttggcagtatcattacctgactccaacaagaatgtatgccaagcagaatagagttgatgaacaccactgtgcctgtaaatgacaagtttctggagctccatgtcttgattcttacagtcatgttctcagctagtatactgcattctttaccagagatcttctttgcacatataggaacccccagataggtgaatggcatttcttgtttagaaaaaccagaagcctctaggatgcgctgcacatcttcctttggcatattactacaataaattacaaatttaataggattagggtgtaagccagaggtcatagagaaaagtttgaggccttgcaacatgtagtacacactttgaagtctactttgcagaatagtaaaatatcatcagcaaatgctagatgatttagcttaagagcttcaaatctatcttggaaatataaatctttttcatctcctactttcccaattatccttgacaagtattccattcccaatacaaagagaaataaagccatgggatcaccttgccttaggcctctcctagattcaaaaaagccatgcatataaccattaaacataagtgagaatttatgagttctaacacaattcatcactagtttaatgaatgaatgcattgggaaattataatccatagagcatttcctctaaaaaaatctcattcaatggtatcgtaaagcctttttctgccgatctaacttgatcatgcagctagctttgttagatttccttccatagtgccttactaggtcttgacatatcataatgttgtgtcctatgaacctccctttaataaattccccttgattcttagccactagatcaagaagtatgttcttgagtttagagcataataactttgtttcaatcttatagatcacattgcaacaagctattgttttaaaatcctctactgtgttaggaatttgatttttggaaccagggtgagaacaatagagttgatttcttttagaatctttcctgtctccaagaaagatattacagctacatatatatcatcaccaattaaattccaattgtcctaaaaaaattagtagagtacccataagggcctgatgatttgtttccaggtatctcaaaaagagcttgtttaacttcatctttggtaaatctttgaaccaaaatctcagcttgcagtggaattaaaattggtcccctattgtaacgtcctcgcttcaagcctccattgggcccttacacccacagactcatagctcttatacacgagtacgccactctagctgcttcctggattgatgactgacc

SEQ ID NO: 384163 - DNA, 1783 bp, Cannabis indica
catagcaatgtcaatattaatgcaattgcctttactaatccataatctaacatgcggtcattacaattttcttacctcaattcaaataaaggtgagcgggcaacctgagtggaacaacgctcgaagatctcggaccctatgtcacaacaacagtaaattgataaataactaatttaattattttttaggacttaaattcaaaaactgaaatattcctatcgacaaatagcgtgaaaatatcctaaatattgataaaatacaaaaatctacatgctagaaatcaccccaataatttactatttttgggtttcagtcctaggaaaacggttcaactgtaaaatcgattaaccgttttccctatatagaaatgggtaaacctggttttaaatctacaaatccaatcaaaacttctccaaattctgccaaattttttagaacagttcaaatatcatatctaagaataaccaaaaactctgaaaccataataacacaaaaattgcaaaaccaccattaaagctcaagcttgagttccttgaacttaaacttgaaaaaaaatcactcaccatctaccaataataaaactcagaactttattcgaacaaattctcaatctatagaagctaatttacaaaatttcaacctaaaaccaatactaaacttaagaaaaatatcaatgtgaagaagacataagagttaccttgagtttcctcttaattttccacgaattctcggcagaaatcaatggctacatgatgaagattacactaaattttcctagttatatctttgggttcttggagtttattctagccgaacctagaaagagaaagggagagagagaaattgtctttgttgcgtttgactttatccttaataaaagaactttaaaaaaatataattaaagaaacttatctcgacttagttactagaattccactaaaactaaaataaaataaacccaagtaaaaagaccattttacccaagtaaaaagaccattttacccctttcttagctactaagtcaactctaagtttaggggtaatttggtcgtacccaattacctcaaaacatcccgacaacactaacatctaagaaaacattctgataaaattaattctcacatttattactgtcgtggcatctttgaccaatgcatcaggttttctacggttgttcaacgtgaaaaatattttatttcataaatagcatatacaatactcacatattttaataaaatctctataattaataaattacgtttatttatttattttttccaaaattcttacttattacataattagcttagtaagattataatcttacctattctaccataaaaacccatattatttcatatttaatataaaatatttagttaatcataatcacattttcgagatagtacatgtggtctcaaataaaattgatgctcttcaaatggaatagaagattaaaaaagaaaaaactccaaagttactacctgttggagtaaacctccacttacactgataatggacttaatacaaggacaatacagtaaataaatacaaatccctttggccttcggcctctaaaatccctaacagaagttagttagaatggattaggttataatccacacctaactaacttcagtaactaactaattacaggtacaaagaaaaccctagatctatatatccctgcatcaaagcacaaccagatacggttgagagtttgtcttcaaaatccagaggtgaaacgcttgaagaaggaggagttgttgctctcacatgcaca

SEQ ID NO: 384164 - DNA, 1077 bp, Cannabis indica
ccaactatttttctaacactagaactttctaaaataattcttccataattctttcattgacgttagctgtacccgcacattttggatcatgatatgattctgataatcctccattgtcagctgaatatctactagagaagtccccaatcggttgtcccatgttatcacgaagttagcgagctctaatttgccaatttggtctacaatctagtgccttcataaacatcccataaggcttttcgattgtctccaacggtgcttcaaacaatctgtgatagaattttttagagtggctagtaatgccacatataaagcaaaagttggtaccctttcatacttaaagtttgcccagaaccattcatccttgttcttataaattctcattcttcttttaagaggctagtcaatattaatcaacactcggacctgatattaatccctctaaattccattgaaatttttgggacaagaggacacatacttgctaatataaacacctgttattttcagtactctatttgatcgaaattcaacctgtaaatcgtacacctgaactcaaatctccatcgtgtttaatgaaaggtgtattctattaaatgtccacatagtcccctccaacaccctgttaatgtcgacctcgtgtaaaagttggaatagatacctgttggtttctaactccttagcatacatacccttgcctggcctcaaaagtgtcacattctttacgaatcataatcagcaggccaatttgtcaataatctacccaccaaacaccagcgtgactcaaactcgtctctcaactcttccgattgatcaaaccatactccaatttcttcttcatcctccacctacaactctgtccaccttcttcccatatcctcaatctcacaactactggaagccataagaagccaacctctaactaggcaaacagtcacatagcaaagcttttaaacaatctaaataacaaacatgtcagatgacaagacctttcatagttttgctaatttcataggcaaaactctcactttttatttttgtttcatgtacatgttggaatttattttaccaggatct

SEQ ID NO: 384165 - DNA, 584 bp, Cannabis indica
aaaaaaaagaagaagaagattatagatttcggatagtaaaatacctttaacttacataaaagtttttatgttatgcatgatgaatccatgatctaattttatcgcaaagatcatcataaatgtatcgtttttgaaattatttttgcgtcaaaaattaattttttatgtcatcattgtaaattcattgttaagcattttaaatccatcattacattttttttttatcaaaaataatattttcaccacaattaaatgtcattttaaaaattctgaaaacatcgttaaccatcgttaaccatcgcaaacgcataatttttattctaaaagaaaaaaatacaaacaaaaccaaaaaaatcttatacttactcgaattccaacaacataaatataaaaggcacgcatggtgcctaacacccttgtaaggtataatatctttcttaatgcaatttaaaatcaaattgcacttatttcaatttgataaaaattatacaaaatcgctaactaagggtgcgtttggtaacacttttttaatcagttttttgttttaaaagtaaaaaagtgaaaatattttttaaaatcatgtt

SEQ ID NO: 384166 - DNA, 1387 bp, Cannabis indica
tgttggtaagagtcgatggtactgtagaagatttttcataccgcaaatgtgtacgtggcgctctggagatcattgaccctacaaaggcaatgacttaccgaacgaagaaacaaaatacaaaatgggatatgagttagctgacagaaatctaaagatgaacatgcagttataagcaataatctttaggccattcatttcatataaactaagcttctataaataatgttgctctttctaacaaactaggaaactttcattgttttgttttgtgtatattacaatctttccaaagcttctttttgcttctttcactctaactttgtttgccctccatgaagatttgggcaaagaaaggtctagttgaagcagcaaagagaagctggtcaaaggtcaatcctttatttattttgaatgcttgacatttgaataaatctttttctctttatattcacttggtaatgtgccttgtgttttagcactagatttcgctatgaattctcatatcataaagattaaacaatgaaaaatgtagatttatatttttctattttcatgcattaaaataccatttaatctagttttactttagttattgcccccatgtggctactggcttctagatctattaccccatcacgaggagactttatactctactctatgacataacatttctacattaaggtgtttgattacatgtaagtggggttaaggtttggagactttaatggggctaaccctgaaacaaacaatgaatcaggccagaagttaaaaaattatatatatttttattgaatatttgtattcttccataattttatcagaaagcaatcaaagcagttgttatggaccgttggatcaaaacaacacaagtcaccatgattgttaagttcatcttccccatcacctccccaagccaagttggatttggttgactggtaaggtttaaaataagggggttggatcataggtgtcaacatttagcaaccatagatcgtctttttggtattattagctttgttgataatgttttacactcacatggctttctctattatgttatctttgaaattcttttctatcttctagagttgtgtagcagaaaaggtttataatatatatatatatatatatatatattgaagaggtttcaacagttacatttttattgtaactatcatggttacattttttttttaaagaaaatacttcatatatcattatttaatttgggaatttacttcatatttcatggttacatttttttaagtgattggattacaattgaatggttgtgattaatttagaaattaaataaaaataaataataaataacttgtaacctgaaaataacctaataatttatttccttataaaactttaatta

SEQ ID NO: 384167 - DNA, 1223 bp, Cannabis indica
aaaagtaaaactaaaaaaaaaaaaaaataattcgattattttttttgaataggaaaaaaaaaaatcgatgttaagctttttgtttttcaaaatttttgtgctatacaaatacattagggtcaatttttgaattttagattcatttctaaagttgtcttcaagaatataaaactgaatgaattgatcaattttgggtttaagattcaaccattattttgaatagagttcaaacttaattattagttcgatgaaagatatatatagaacattatatctaaatttaattaattaattaattatgttcaactcaaatttgataattaagtttgctatgaaaactatttaaaaaataaataaactcttttctttctcatacacaaacataatatttaaaaaaaaatgaccctacaaaaaaatttgaaatatttcaaaaatgaatttagcataatttaagaataaatgaagtttcgttctctgaatttgtttctgttgtgaaaattactcccaaactataaataaaatcgttgcaaatattctcaccagttacacttttctcatctttaaaataatttcttatgtgattataagttaaggtttatttaatagctttaaactacctaaaatttaattaattttttggcattaaacatacaaataataactatacgaatgtacatatatactctcataatttatcattagactattatttatgtatttattttttgtcttgattcttgaattggactaaattaatattatgttagtactatatcaacaaaatatttaaagaaatgagctgaatgtaactataggaagatctttgcgatgatttttataattcaggagattttttacaatagaaaaaaattcaagataaaattttacaaaaattataatttagggaggttaaatcctatttattttaattttagacatactttataaaaaaaaaataataacaagtataaatgtttataatgatagacatatttacctaatatatattttcataacagtgaaatatgcacaaaatggacttatctttggaaaaataaaaaagatgccattagtacaattaagacttttaagcattatattttcataatattccccctttacatttgctttatatttttcaatttattctttaaagagagtactacataacttgatgtaacaccccgatttcccgagatgtcacataggatagtccgtataaa

SEQ ID NO: 384168 - DNA, 801 bp, Cannabis indica
atatatatatatatactacatttttatggtgttttattaaacaacaataaaataatataaaagtaacaaaaaataataatattcaaacaaaatcaaaataacataaaaataatattacaaatgacgaaaaattaacaacaagacaaaaataaaataacaagaatataacataaaaataatatgaaatcatcaaaataccgtattttttgtaaataaaattttaaatatttaaaattttgtacaactgtatttttgtaatttttgtgtactttttacataatccttcaaaaaaaattgtccttagtacgaaaaacataatggggagattaactagtcaacacactcttatactatatcggtacaacatgcttccaaataagtacaatttcgattttaattcaattttttcgcatgactttgctcattgtttatatgccatccattcctatttcctcaaagtaaacatgccattaagatttagggtttagaatttttcaaacaacttttaaaaaatttaatattactacaatgaatattattacgagaaatagtcgagattgaaatctctatatgtatatgtaccaatttagagtgttttaggtgttatataggtaactccttataatgattatgattctaaggcatcacaaactactttgagaaaattatactgtatatttattttttttatgttttattttaacttttatatataaatatatttatataaatatatctttatatattaaaagtgcctatctaacggcatttcttggtttaacattcttggtttaacagaat

SEQ ID NO: 384169 - DNA, 748 bp, Cannabis indica
tctctccaagaaccacttctttttgctttgttaaacccttcacctatcactttcttcatagacccttctccagaatttaaaatactctttgagagtacatgatccgaagcattcaaatcaaaagaatcacccaagaacacttccttgcccttattctttatgcctaagttggaggagcttgaaggggagaacgggccagtatttctactttgaatctgtccaagacttgacaaatttggagggcctttatctttgttaatcacagaattaggggaattgcaatttgtatactggtctcttatttcagggaagccagggggagcagaattatggccattcagagcagagaaaccattaatcgaagaggcaggatagactcttttgtcatcaactttcagccaacttccataactcggtttgacatttcccagaccatcttcatagtatttaattggttctgcacaaatccgagtatcatggcccacaaaaccacaattaaaacacataaagggaagacgatcatacctgaacgggagccaaatttttcgaccttcgctcggaaaaaggaaatcggggcacagcggttttgatagctcacaccagactttgaaggagaaaaatcctttggtagcaatcttggtggtatcaaccttttgaacgttcaacttacgtcccccacaaaacgtggccaggcgctccatattggcttgtgtgatcgatcgagttggcagctgtagaactacgccca

SEQ ID NO: 384170 - DNA, 2500 bp, Cannabis indica
acccggatccctgaccccggaccgaacctaaacccgaacccgaacccagatccagaaacggagctggatccagacctggaaccgaacctggacccgaaccccgactcgaacccagactcgggacccgaacacggacctgggacccaaacatggaccgggacccgaacccaagacccgagactcgaactcggactcagacccggacccgtagttggtgttgggatcgattgtattgaaaataaattataattttatacaatctatcaatacaagtcaatagcaaattaacatagtattgtatcaaataatactaatacaatataatacaacacaatccaacacaatacaatacgtcataccaaacgagcccttaattattgaatctctagatgtttatatgtattataaagtaataaatagaattttactccctaaaccatttttaaattttattcctaacttttttactagttaaattcttttgaattatagtggcgaaaaatcccatatttgaaagtgatagtaaggggtatccaagcccatcacctagcttggtgagatggtgagagccttgagtgagaagtttgattttgaatccctaaatgtatgtattatattatattatactatgttttgtgtgagatgttgttcttttgcgatgatatttatttttgggcctttgatctaattaatgaatagaatgaaatgattatttcacaaatacacaaaaacaatcaaagaattacaaaaatataattttacggaattttaaatatttttacgatttagttgattttatttacagaaaatgctatctttttatgttatactcttgttaatttgttgtgatctgtatgttattttttgttgttgttttaatgttatttagatgttattttcatgttactttatgcaattttttcgttctttttctttagaaaaactgtaaaaatataaaaaattctttaaacataaaaataaaattttcttacaaacaattatgtcttatgtaattattcttagaataaattaaatgttaattatgaaattttatatatttcaaaattaattattaattaataaaatatcgtacgtactcttacatatagtattaaatatttccacacatcattataaattatattttaatatgtatatagcaacacacaaacattaataatttccaagaatcttgtatatatgttaggtatatataaggatggaataaaatttagaggaaaatgactagttgatctctacggtggtgttaatgatattaatgtaggttagtatagcacgtatatgtgtacgtgtgtggatatgagtgtgttttaggtagcttttcttttttaggtttataattcttctgccacactatttgagtagtgtttcgatcaaaaacacacacatacacatacattataagtctattcttcatatgattgcaagcttgggaagaaatgagtggaccactttgaattttgatccaacaactttattaattaacctttgcaacttataatcaatgtcatatttatacatacaataaaacctagctacttaatattgtccttttgtgagtaattaataataacatatatatataatatccttacaattaagtcagagatatttataagcttcattagtacatattactccaacttaacaactttttttaccataaatatatattaagagaattgctaaacacaacggttaatgatcagtttcttaaaaagatttttatttcattttatttttatttattagttttttacaaaagagcttaatgttggttgatataaaaatcgttaactcattatcgtgcaaataacttaacaaataatatttgagcaacattattaaaaaaccactgcacacatacactgaagctatatatatatatccagaatattgaaaaataataaatttcaaataacaatcaaattgaaaactagcattatcatcaacatattggtgccctaataatgagtattattattaattaatttatatatcacagttcagagtgtgtgcctgcttatatctctctctactccaagagaaactgtcattattttttgccatctattaagcattgatatatatatatatgctctaagtgtgtgagtacattatatatatatatttatataatgaaccggcgaaaaggatatagcttaagccgaccatcatctttgttatgatagttaatgatatctattaactaacaatatatatatatatatgttagcatgatatattcatttcgaagccaccactatatattccctctcttctagaactctttaatatataattaagccatccttataaccgcccttaatatacattacttatatataaaattcgtttgataataactcatatattgtattcgtagatagatcagtctctcatgagaggccttgcatccaaattgtttattttttatatatattattataattttgtaattttttttttataaattaat

SEQ ID NO: 384171 - DNA, 1558 bp, Cannabis indica
acataggttcttcaactgttgctaatggggttctagggctggttgttggagtgattacgacattggtggttgacatggctttccttgtacaggtatggatgtttcatacgagtttataatagttgtattcaatgtttctagacttgcattgtgttagcacagaattgaaaggctactaatagcaaagtacaaagtctaatatattaagagcgctgatgttccttctataaatgtagaccaaaagtggtaatgttggagagtatttgtgggggttttattcactatggtttattcatttctagagtttattctttttccattcactatggtttgatgacaataacgtcaatttttttaaaagatgagatgagactaggaaaggattaagacaagcttttccagcaaacatggaaaaatgatgaattaccttattttgtttcaagtttattggcatacatgccaatgaaatgttttgcaaattagcaaaaatgtctgaatttaatcagcagtagtttaagattggccttttcccatttagccatgttggtggaggtatttgtgcataatagtacagatgaattgcctggttaatgttttcttattctttgcaggcaaatagtacagatgagttgcctgagcggctaattggtgccgtacgtgtttcacatatagagcttaaatcagcaatagtcccgaagctggagccagatccgtcatgactaaccaagaacacttcacattactgattccatacaaaatcatttgtttagattgggatgcatgcatgtggtgcatcctgtttcatgcattgctatatgtcaatatagagcaatgaatatcatcagttctttctgggatttttgcgcaaaatagtgttaaagtgttcatactgttgttaataagtttacgtacttaattttgttcatattattctttcccttcaatttgaaatatcttcattagagccccttctatacttgacacatatgggcaaaaatgagtttaggtgttaccaagtattctaggtgatagagaactggcttcctctgcttgaggagaactcatgctttatcgtgttcaagttttggaatggtgatgccatactcttggaatgttaaactttcttttataaagcattacacgatggaatattcattttttatatatacataataagtaactcccttgatggcatattttgttcgtcatttgatattttttttcttctaaattccaactaattatattctttataactgtggagcatatgaacaagatactcaagcataaaaacactagggaacgaagagacaacgtgagtgagacaatgtcaaaagtaaagtagatttcgccaacctaaagcctgtggggaattgttttttgtgaaccaagccctgttattcaaactgacttggagtttggcattaaaagtgaaaaaaaaagacaaattttgggcgaaagctttttagataaccttttctagagtgagggaaattaagttttcaagagttgagtctaggggtgttcatccgatctaatccgcacttttttggtcaaa

SEQ ID NO: 384172 - DNA, 1362 bp, Cannabis indica
caccaatcgatcaaacagaaactcaagtgaagtagagagcaaagcaccagcaacaaattcaacagccatatttgaacaacaaacaaagaaaggaagagtctgtattgtattgtaaagtgtgttgtcgtattacatgtgcaacaatcttgtttaattaaattaaatggtctactatatatatacatcattaactaaatgcaaagagctttctatacttggaatagtcatcactttcccaaaaatgtttaatactgcaaacaaaacagctgtcctcgtgtattaattttatagtggattctattttcccattcaaaaaataataataatataataataataataataataataataagagcattgttattagagaaatgttaaaaaagtattattaattcttaatattttttttggtacgtggtataagttagtatcatgtctcatataatttaaaacaataacttttaaaaaatatcgttaattaattgtaaaagattacctataaaaagtgtaatgctcttattattaagcactttataatatcgtactgatatgacatgttataagtgtttagtagttttttatgtgatgcttgacacttttaatattttgttttgatactatgtgatataatgtgcactatctaataataatttcctccatgtccttaaaataacaaagaatttcattagtgtctctaaatttgctaggaataacaatgtgtatttttaatttcaatgctaatatttgttttgtcaagaaagagatgactcatactattattgatggggatgcacaaaaatagtctatatactttctattcttctcaaattggacctatctcttcaagtcttaataataccacaacttctgtttcaagttgtattagatgtaactctagtatgcaaaatgattttaaagtcacttttacatatatcttatttagttactattaatcttgtttatagtaactataagtatttttagtattagagttgtattttttatgtaatacttgcatgcatttcttatcttccatcctttgttcaaagcttaatctttaggagaaggctcaggaatcaatgcctccattccatataagataattgaaagggtaaataccattttagaccctgtattttgcaaaagttatagattggatcctgtgttttgttaaatgacaaaatagaccatgtattttataaaatagtaaaaataggaccctgagcttaatttttgataacttttttttataatacaaccaacttgaagacaatacttaatacgcatagatacaaaaaatataaacagttttgtcgtagcacttttagatcagattataattaaactttattttgacaa

SEQ ID NO: 384173 - DNA, 1810 bp, Cannabis indica
atgagacttgctcttggttggagaatttacctccactgttttactttattattgtaaatgacataccatcttaatttagaataacaagtatcttttcctcaaaaaaaaaagtttatttttagatctacgatgatcttaattaggttttaaatgacatttaatcttagttagtcacttaaaataatttaacttattattttaattaaataaatagtttaaaattaaacttgttgtgtgcctatataaagaaagaaaagaagatagtaaatcctaatgtctcatcttcctctcctcttcctttctgcaatttttgataatagtctatgccatagaatttcaaaaatttcatctcacttccctattgattttagccccaatgaattgaatatcggcccacactattcaagatggttctcagactattgtggaagagcatgtagaatgttacatgttactcattaaacgaaagatagatttgggttcattactttgaaataccctgctacaaaacaagaatcaagagtacttagagtaattgaacctcatgagacattatatttcgatgcattctaaatggaaggaaatcttaatctttatatgtgattatttattgttttaggtttatttatatttaggatgttagattatcgttgtataattaaatgttcatgattagtaaattaagatgctggtcaaataagatccaataacttgcctaagagttatggtaatgatttacttttatgaaaatatgaatgaaaatgattttgataatttttttgtgtgatttggatttgttcatattgtgttaatgtgagatttgatgaattttatgtgaaattcaatttgtttttgtgaaaaatatttttattagttatttttaagattaaaaatgttttagaaataaattttgtcaagttttgcattgaaattgagtttgatgatttttatgtgaaagtacatgtaattctatgataaataattttatttttcacattcagtgattaaatttattttaaaattaaagttggcgaaattttaggcatggtagttttttacgaaattgaattcgagtcaaagttggacacaaaaagctgatttgaaggtggctagcttagaatgggcatgcatcaatgcatctgtgcacacaaatctcagacatgaccaagatttctcgatctcgtcccaagatcctgcgtgcatggccccatgatcttttttgttgggaatattttacgaggatctagatttaataacaattatgttgattaacatcctatatatgaatatctctaaaatcatgaaattcaacacataagagtttagaaaatcttacaatggttgcagcacaatattatgactccttctgctcaaatctctaacccttgttcctttctgtcgcagagtattatcaagatttgagcctggatctctttctctccttcgagtttggttaccaccatcttactcactatgattgagtacttgacttgctatgtgtgggcatggcactatatcactatagacttgagtatgaagaacaatgaaggagccttgaaaactgtatagaaggtttctcaaatctagtaattgtttgacagagaaaactaagtttgatttggttgcaggcaataattgaatgtggtaagagcatcatgttccttttatagtgtttcaaatagggcttagagtaaaattatattgattaaaaaagaataaaatattggcaaaaaacacattaagatcggccactaaatgggaccattctctagttacaattttgtcactttatttcaaccacttattcttc

SEQ ID NO: 384174 - DNA, 2931 bp, Cannabis indica
tagctagatatgccttaagggtggattctgatattgtttggagggctgtttgtcctagccccattgaagctattcttgtaaatgaatttgttcattaataataatagcttttctctcaaaaaaaaaagtatgctatatcaaaactaaaccaaccgaaaaactccctgtttaaaattgttttgagtaggccattttttaagataaagttggaaaaaagtgtaaattttggaaataagttatattctacagtttcatcactttttctttccaattaatttatcttgtcatctattggaaactcggacaatatttatatataataataattttttattaaaactttttttagtattatttttcttaatctattaaatttaaataagtactgttttgtgttcttgttgaagaaaacacaagttttaaaataaaaataaaaagaagcaatgtgaaaccagtttcgtagtttttagttttattgtatcacacatttgttaatttgaatcttcttcctttataataatatctttgttcgggatcaactgaaaatgaagcgaaatatgttagcctctgaaatagaggatggtgttcgaattgacttttgttccaatttgcagacacgatacatgtgggagaggtcagctactgaatctgttgccagatctgataatatacatataatagggtaaggcaatgtatatccacaacctcatttaatctatgcctgaatggatatcagattaataggcttacccccaaatgcgatttaaggcatggagattctctatccctttatctgttcatatgggcggccgagattctatcgcgtattcttgaaagggaactagacaatagaaccattaaaggaatcaagtggagtaggaatggtactcgaatttcccatctattcttcgcgaatgatcttattcttgtgggtagggccacgttggaggaggctaagggtatttagaggtgtttggaaaaattatgtgactagtcgggacaacgtataaataaattgaaaatttctattttcttcagcaagaataccagcgaggggatgaaacataatatcaagaaagaacttggccttaacattgccgctagaaatattaattatagggggctcccactgtttcatagttgaaataaagatccaaactttaatttcattcttgataacctagtctccaagcctcatgggtggaagttgaaatttctctctaaagcaggtctagctactctgatcaaatcagtaggcctctccttaccattttacgcaatgtaaacaacgaagctatctaataggttgcttctaaaattgatggtatggttagggatttttggtggggttgtgagtggggaaacaagggtatctacttgaaggcttgggatcatatttgtttgccaaagtctagaggtggtcttggcttcaggaaaactcaggaaatgaaacgtgcacttctggaaaatgggacttggctcttcttactggagatcagtcactatgttataaggtcctaagtgctaagtacctgaagggaagatcgttcttgaattgtgcctacaagagctcagactcttggttctggaaaaatgtggtaaaaactaaggtaatcattaaaccgggtgcctataaaataatttcagacgggaaagatactaatatctgggaggatccgtggattatgcatggcaaagatttctaccctcaaccgaattgcaattggatggagggtttggagaaagtaacagacttactaactgaaaatggggactggaatttaactaagataccaagggaggtaaacctagaggtcaaggtacggacatgtggatttggactaaagagtcaaatggtttattctctactaagtcggcctacctggttcagaccttgaatcaggctcctcattgcagttttgctccgagtatgtggaataaaatttggaattcaagaattttggagcgtcacaaggtgctttggtggagcattctctctacagctctgcctattcgctccattctggctaaaaggttgcatattgaggatgtttcctgtcctttttgtagagagagtgattaaacgatggaacacatttttctctattgcaactttatctttcacctttgaagatcatccccatgggttgttttccctatcctggaatctggagcccaaatgtgagattaggtttaatttctctagagtttaaagactagaggtgtgaacgttcaagaacttttcctatatgcttcaattgtagttgacacaatctggaaagctcataatgagaaggtgcataataattctatatgttatactaaacagtatattgactctatttatatgtgctacgcagattatggttcttgtttgttaacttctctgatgacatctgagtctcccgcttggtcccctcacctagatgactaggtcaaaattaaatgcgatgtgaaaattggcttcgattcgatgtacgtggtggctttggttagagataataaggagacaattttgtgggcaacatcaaaagtgctcaacttctccgaccctctaattggagaagcgatggcttgtctgttagttgtggaatcagcggtctcgaagaagtactattttgtgatgattgagagtgactccgagaatgttatcaatgcgttgaagggaatttattcctattggagcatcgataactatgtgattcaatgtaaacaattctcaattctattcattagctgtaattttatttctatttctatcacataatatgattaaaacttttgtcacgaatataattagaatagttgatcttgtcgagattccaaataatattttatgtaatgaccatgaagtctaatttttagtttgaggaaattacacatactctgggattttaaaagttttatgataaatatggcacatttaagttt

SEQ ID NO: 384175 - DNA, 2129 bp, Cannabis indica
gaaagttttgacttctcaacaagcatggtcgagtgacttcccgggagtcttggccgagtgacttcttaggaagcatggccgagtgccttatcaggagtcttaggtgaatgacttctcaagaagcatggttgagtgacttctaaggaagcatggtcgagtgacttcccgggagtcttggccaagtgacttcttgggtgtcttgacccacaaaaccaaaagggaaaggaggagaactacacatgcttcaccctcctaactaagagtcttgagaccacctacatggccactaaaagttgatgtcccatacaaacttccttgacatggttgtggtttccgtggaccctcgtcgcctccacaatgcagtgttgtaagacactagaaaatatattactaagaacgtgaccatcactgtggagcagcgaggtcattccccaactatcaagactaactctatttttgttgtggttgaatcaagttgtcgatgaatccatatatcggcaaggcacagggttttagatctctaagtcctagtctcatctcgcataggactgtgaagtaaaggatatctactgaactcccactgttaaccaatgttcggtgcaatggagcattagctaactaaattttaagtactaacgggtcatcgtgtggaaagtttactcctcttgcatcttcttctgtaaaggtgattgggccgctttctcccttgaaattttctagaggtcttttatctaagctctaaacttagggctcttgccttgcctgtctggtgtacctatctcttcccttacgagtgcccctcctatgcaaggtcctcttctaatagtttagacgtccctctacactttgggagcctcgtcggatacttcttgctgatgccttccatcaaatctctaattttcttttgatactcttttagtccacgttgcaagacttaagagttctctagtattggggcaaaagtgtcttatgggtgttgggaccctttgcctttgcgccccatcttcacctttgatcgtgacagaggttgggactctgttttgctacttatccatcaggatttccacatggcgagtgtccccttgctttgcttcacaccatcacatgtttgcgtcattcctttctcttgggggtctgccaacattctcactcccttttcttacttttaggcctacgactacacacattgtcttcttcggtgatgggttgcattggatcccgctcttatgagatcacgtggttgccactggggtgaatttgcgtgccttgaaggcaacgagagtctctagtcatcttataatggttattttgtgaaggaatgacaaagaacgattgttgaagcttgtcgttccaacatacggtgccaaactattgatggtgagaactcatcaactaacttgctggccgaaaaatcaaactctacttcaaacccagaattaagatgaagaaaaatatgaaatacaaacttaactgactatctcaaagtatagaaaaaaaagaaaattttctattactctcaatatggtggttacaagaatgatttttcaatgctcttctacatctgaaggaggggtatttataggctataaaagcctaaggtacatggtggtcccaagggaacaaagtgtcactttcaccctacaagctgcatgcgcaggaggtggtgttgcacctcatactcttgtctggtgtcaagtggtcctggggtgcacgggtagtggctatagagtacacttggatgggtctttagaccttgtagatgcgatgcctccacttctagtacctcctttctttgagaactttcaaaaggcatcgtcgtactctccttgtgtgcttactctatccttgtgtctatattcttgtagcttcattctcttcttgcttgggaagattccaccaagttctaaactgtcatgactgagtgtcttcgtgggaggcttggccaagcgacttctcaaagtgcttgaccgagtgacttcttgaaggatttggtatgagtgacttcttaaattgcttggactgagttgacttcttaaaatgcttgggttgacttcttgaagtgcttggccgagtgacttctttaggtgcttggtcgagtgactccttgagaaccttggccgagtgacttc

SEQ ID NO: 384176 - DNA, 2015 bp, Cannabis indica
atataaataagaaaaaataaaatgaaatataagatatggaaattaaaaaaaaaaataaaaaagtaagaaacgtaccttctctgttctgatcttaagggttagcatgctccaacagcaattaatattcaaaagaaaattcatcaacttgataaaccaaatggactcatatttaagaagataattgcaaatacagaatgttccatgcaaagaattatgtgatgatgagtccattaatatactaacattcacatcaccttgataaaaaaatgatgataattttggagctgatttaattataacagtcaccaattcatcacgataattataattattcaagttcaaattttttaaagtttgactcgaaattgaaatgcgattcaaattcaatccaagttcgttgcacaaactcaaattttcaaggagaggaaggttcgaaatgagtgattcaaacgacgatgactcttccgataaaccccaatcgcaagttaaagagagatatgtaattgccttgcattgtgacaagtctaatttttcaaagcaaacaccatttaattccaaacactcaagatttatggcttcaatcattattttctttactataaacctaatctgatcagtgagtgtaatttccaagtacttgaggcttgaactaagtattttaagctcataattagtgcttagataacaataaaccattcttaattcttcaagtgatggagaacccaacaacaacttatctaccacatcatgatgtttaatttgaacaaaattcaatgacaatgatttcaaagatggaaaattaaacgagtaagaagaatctaactccactctactcaaccttaaagtagtcaaatattttgcgttgactactaatgttttaggtaaacggtagtaatgaagttgaccatacaaatctttgtccttgtctaggcgaagatttatttcattagctttattcttaactgcgaaagctaaccatttatctacacgaccagactcacttctttcataggaattcatccaaaccttaaaactggttatgttggaaccatagacaagaaaataaatacctctgttgcgatgttccaaacaattatcgacataattataaaacttttgtagtccctcttggactctaaaacggttcgttttagtagtgaaatagagtttagggactgaataccacatgaatttccaatatttggaaagaaggcaagtatgaacgacatcttcagtgggaagaaacgacagtatatgatgaatgatttccttaggcagtttcgaaattctatcctctttctcctcggccatcatcaactacttctcgattatcatcaataagtggaatgtagtttaatcgtaagtgcagagattttttgttatgaaagtttgttttcagagagaatatatatatatatatatatatatatatataaatagatgttatagatatatttaaattttaaataaaattagtttggataaaaaaaatgaaaaatcttaacaattgaaattgaatgcttcaaaaaaaaatcttcacaattgagtttttcaaaaaaaaatatcttgattaaaatacttacgaattgaattaataactaatttttaataaaacgaaaataagaataaaaatcaataacgaacttctcttttagaaaaataatttataaaattaaaaatttaaatttaaaaaaaaaacagaaaaataattcatcattattcaattctttttcataactaattaagttgaagttacataatattggaaaacaattgagaaaaaagaggagattaatcatatagttggcacatgaccagataattaatcgtactgtataattgatattatacatattgtataactattattactattaaaatttagagcaatttgcgtagaaacactttttatgttttaatttttatacacttagttatcgtttggtaatatttttattttttaattttttaatcacaaaatgaaagtaaaatttttgtttttaaaaaatttattt

SEQ ID NO: 384177 - DNA, 2438 bp, Cannabis indica
actcatagataagagtaagcaaactatagtcattcattttttgtatataaatacaattatgagatattccataaatatattttttacaatattttatatgaatttataaattatattattgacataaactattttaccaaaaaaaaaaaaaagatatataatggttcatttttatcactgaaaattttaacttcctttttttaggtgtttaggagtcttttagagaaatattttcattaattatgtgaattttcatgaaattatatggtcaatatcctaatttaagaacacaaagccaactcattggtaggtggctcagcctcttttctataaaaatcacaataagtttagtgaatatttcttttaatatcactaaattttttttataaaaaataatggtaagtattaagtcctcttgggatttttttttttaaatatataataaaaccactaatttcaagcttcaaccttggtaatataacacttaacttacaagtttagtccttaccaaaaaaaagactaacaattttagtgaaatattaatcatttctttttaaaataataattaataaaaattaaacccctccttttaatttagtgagatgattaattttgacacaaaaaaaaaaatgcaacttaataaaaatgatttgtaattgtacttaggttggcatgacaatattatatgcaattatgcttagatgtaagtaataataataatttattattgaaaaatttatcatcattaattattagttctaacactccgatatgataacatgcatatataacaaatataatatttattattaattgaattaaaattacttaagattttggtacataaatgaaaaccaattgaaactaagatgatatatatgggtaagtttatattacacttcctaattaaatcggtgttttggtaaattttctatttgtttcatttcaacatttaaattagtttgttagtttattttttaatgatctttttaaatttttcagaaaatttcaaataatttacaacactaagatttacatattttattgtatacacaattttttttatatacatgtggtatgtaactatttaatttttttttttttgtgaaatttataaattattcaaaaatttatgaaaattcacaaatgatcttacatagttacaacgtatgtttaaaaaaaaaatattgctaaaagatatcactattctcaatattattggtgcaattaagtatttggtctcatataacttaagaaaatagtttttaagaaatatcgctaaccaattataagacgcaaaatataaaagatactgtacaccactagtgcttaataataatactaaaaaaatatcaaaacagataaaaaatctacacgaactaactctttaaaacggtctagtacaaaaatttccattatatataatacactcacttaaacatataactaatataatattatatactaattgaatataaatttattaagtaatcacctaacctaatcctatttttttttttttattaatttgttattatatatatatatattttatatagtctttcttagtgtgtggaataaatggtccagatcggtgattggtcaattttacatttgttgaacttggacacgtgattgagtaatttgtcagaaaccaaacttcattttattattattattaaattttaaactaattgagatttttaattttaaactttgatctctattaaattatatcttagaattttttttgaacgttaaaaattctctccgaactattgagattgttagatttaagaacttttatccattttcatttaattttactaattcggtgattatccgtgtactaatccccaaactttaatatttatcaaatcatattcctcaaactttgacatgtacaatgtactaaattatctcctttgaacttttattcatgttagacttttctaactagaattgggcaaaagatcttaaatccaataatctcaataactcaagagaaatttttaacgaccttaaaagttcaaagacaaaatttggtacatgtcaacgttcggggacaaaaatcctaattaattttattttaattttaaagaatattgtatataaaagataatttagatttttaccccaactttaacatgtactaaatcattctatctaaacttttctggtctttaaaatttctccacgaactattgagattgttggatttaaagacttttgtccaatttactaaagaaaatcttacatgaataaaaatttaagagttcaatacatgtcaaagttcaggagacatgattttaaaaatatcaatgtttgagaagcacgtacgatttaattagtatatagacaattgtcatattagcaaaattgaatgaaattagacaagtttttaaattcaacaattttaataatttaaggagaatttt

SEQ ID NO: 384178 - DNA, 1313 bp, Cannabis indica
ttagtgtaagtagattacgtattgaataattgaatttctgttagtacattcataatgagaaaagtgtttcttcaataaaatttaaaacgagtgatttaattggtattgtaggattcttactttcttaaaatgtaacaattgagatagaatcagaccgattcgcttaatcgcttaatgacctccccctctatgtcctgtggtttctatcttgaaataatgaattgagttcggataggcatttaagattttgcttaggtatatgcaattttaattaatatgttgttttatggtcgcacagtataatttttagtcgaacaaaacaggtaatgaagattcacgccccattggctcacgctgtagggacccatctcgtttctctcgagcttgaggatctttgctttcggtatcttttcccttattcctatttgtatgtggatacttggttgagaacccataatgaggctcatgagatgggaaagtctcaatctttgattgatgtatataaggaccagttgttggtggctttgaaagctgattctttgttggctggaatggttactgatattaccgttaagggtaggtacaaaagtaggtatagtactatgaagaagctcttgaatgatgggagaaagccagaggaggtgaatgatgttcttgggttgagagttgtattagagccaagaaggtttgagagtgatgatagtgatgtgtttgaagaaaatggtgtgagagcttgttataggacccgcgaagttgtgcagtctttgtggaaagaaatggcacatagaacgaaagattacattgctaatccgaaaccgaatgggtataggagtttacatatggctgttgatgtgagtgaagaaggtaggagtagacctattatggagattcagattagaacttctgatatggatgtttttgctgctggtggaacagcttcacattccttgtataaggctggtctcactgacccagaagaggtaaattttgttctgattaatttctaatagttgattctcatagtcatagtgaataagggtattgttatagacttttcttagatttgaataatttgcggcgaaacccttttgtgttttaatttgtatacagttaactcctgatctatttttagttggcaatatccccttaatttcacttttatttacaattccgaagtggaattgaaacataagggagtttaactgtaaattactcaacaaaagaagacacaaatgttgtaatcccaaaatagctcttggagaggcttctcttctattctaacctttcaagagagttagatctctcccaagaga

SEQ ID NO: 384179 - DNA, 1089 bp, Cannabis indica
agaggaatatgagcaatctttttcttgatttttccatttccattgcttaacgtacatttttctgtaagaaaaccaaagccagccacaatggtaaattagtatagataaaaaataaaagttttactcagtttaaagaaactacacggaaaggttttgcttttggcaccacttaatacaggcaaactgctaagcaaggcttcattgtagatggcagcttgaagatgataggtttggcattgtttcaccaagtgcttgcacaaagtttgttgagcatctacaagtttggacacaaattacttggttggtcaatagagaaacaaagtcaagtgattggtcgtggtagacaacggcatagtaaaaaaaaaacaagatgaccagaccagccacattgggaaacaacataaaccattcataagacagggacctcagtggttggattacctgaagagcaaatgaactttaaatcttcaaattcacaggaatgaagaaccaacggaatctctggagccatgagatattgaggtttccttggtatcctgtcaacatccagtaatgtgtctattacctacaagttgaagcatttatacagagtgaggataaatgtttatagggaacgttgtatgtatgatgagttgagaataataacgtcagtatgtaatattactataaacccattacaagacaatgttttggggttcacaagaaactcggattatgctcaaaatagtaaagttagaaggacaactgatacgcacatcaggggattcaagaccttggccaatcatgaatagtaccgcaaccatgcatcggacctggtgccacaagaaggcactacctttgattctgattgcccaaagttggtttccttgaaacctaagaatttcagcaaaattattaagaacagatggtagatgaattttattcattctatacagcaaaaaccaaacattgtccagatagtagataaattttgttgattctaggcagtaaaaatctaatccccaaaaaacatcactggcataaaaaatcaattaaaaaattgggaagcaaatttgcatgagtattgaacagcaaaactgataaagatga

SEQ ID NO: 384180 - DNA, 920 bp, Cannabis indica
tttgcattctgttattttattttcaaaggtggtgtgcttggcacccgatacctgatccataacattcttggtgactggtatccagaggggacctcttctctacagttaagggacccctattcctgtaatgtcctacaagtttaagcatgtcattgtgatttcttaattattctgctaatatttactaatcaaatggtttaaaaataaattgtacttaattaaaactttataataattaaatactttcataaataacgttgtaaataaaaatcattttacaaaactcgggatccgaaaatctgttctttaaattcaaacataatacaagtgtcactcactgactaataaaattgagcccatattgttccacagatctaaatgctctaggtctaatcatccaaatatatacaatcttcactgagctctgatactcacagttattcaaccctagtccttacctacacatgcaacatatatctgtgagtggatagactcaataagaaaagcattaaacataaacatataaccgacctgtaactaggctcctatacacctactcacaagtctaaaactaggtcaggaaagttcttggcaaaagtatgattgaccataatatcagcctatactcagtagggttgtacataaattttataaactgcccaaatcgaataacccgcccaaaccaaactgacataacttgatggataatccaactgaataacgcgatgaaaatataacctgcccaactttatattgagtaggttaaaaatgatactaacccctccaatcaactcgaactaacctgaccaacccaattaagagagttatatacatatgtatacatgttttattatatctatgtacatatcatataatttacatacatatttaaaacatataaagttcaaactactatattt

SEQ ID NO: 384181 - DNA, 1933 bp, Cannabis indica
tagtttagtcttatcctatttatcaaatttttcattgaaaatcgatcttgtatttaagcttggatgatctggatgttggatgacttaaagtagctatgcatatgtactagttaaaaataaaaaaaaaatagatggaagctaaatattattgtggtgtttatttacttattaaatttatctattctgtgacttataacagtggaaatattattattcttttatattaatgatgggtcctgattttgttactaatatttactttgtagatataggagatatttcattatttttaaatatgtattttgctatataaattaaaagatcatttataagtaatattttcctataaaggtcaaagtgtaacctttgaccatcccagtatggatgttacatatttaccacggcctagggctcaggtcgtgacaacccagaaatccccctaaagatatactgtcgagatcccaatgaaccagtgtcgatagaccgactcctctgcccacctaaatccctagtcatcgaagccccgccaccaagccatcaaccaagaccgacgaactcttatgagaaatcccaaaccagacctagcgccaaaaaatgaagaaaagagaactctcaatcctaaaacctacccataaaattgtagtactaactaaggcgaaaacaagcagcctctctaaccaggcacatatagaacccagtgtcggcaatcctagcagagaagaatcgagaaaaaccttcaagaaccctcaaacagtttttgagagaaaaaaaaactctagcaagagtcaaaaaaaatataatatgtgactccttaaattaaaatatttgagacttaatattaaaatatacatcaatatcagcatgtcacatgttcttgcttgacaccttaaggtgtgtcttataatattttggtttgtaaaaatagaaatgaaacaataaaattattaattaatgcatcattagtgcctagcactatctaaaggtgatactttgtaaataattactaatgttacataatgtacttattaaattaaataacataagatttataaaattagatatttaattatattaatagcgatatgaaatatctaaatagtatactgcactgcgatgatagatgtgtaatagtttgattgatcatatgatcataaccgaatctttatgtatctatatatttatatagctacaggtttttatatgcatatagtaaacatgagctacattatcatgtagtgttactatcaatcagaaatttattatatacataaataaacaattattggaatttgaaactctaattttatcatctaatttagttagctattaatgtagctatagctaaatatatgtttatatttataattttggtatcccaatatatattattattttaaagtaaattaatttgcatggaaaagaagaaaagttatagtgattttctcgtccatatacattgaaaagttgtataaattgattggttcatgaattttctaaaataagagaagttttcagactgaaagaatggtttcttgaccagaaatggccataaatagtatctaattatatagtaaggaattaaatggctaaaatattttgttaaaattaatgattaatatactgatcaaactgatagatatcaccaagtctcgtgacccaaaaattagcaattaaagttaaaaacctataatgttataaaattttctttaccttattataactatgatcaccattattattattattattattcaaacaaaaaaaatataaaatctttttaatttttgaagaaatatttattaattataaagttactgccaaatataaatatgggttttttttcataaatgtacaacaaaaacaaaataattacaaaaaatgtgcaaaaaaaaattatttaaaaatttatacattttgaaaacttattacatga

SEQ ID NO: 384182 - DNA, 2561 bp, Cannabis indica
cttaatcgccaattagtttagtgctcattttctattaaataaaagagcatgccaagaaaaggctaactagtttctattagtatcttaaatataatactatttataaatcaactatgcttttttattataatcaatttgtttccgtacgtagtgatgggcagctcgttgtgtattaaggtgattaactgaggagatatcatataatatctttattatgatatcctgtaaggtgtggtactccatttacagtccttgaatctgaccatgttaattaaaaaataaaaattaaaaagaagaagaaaaatcaggtcccttccacaatcccccaattgttccacaaaaagaattagctttttctgcatatggaatctttttcttttttttcttatatgtttgggtgaagatagcgtatggaatctttagtgggtcaccttttttattgtgggctggcccaatagagaaataagggattgttacaattaagtcacaatcgagtatttaccaaaaaaaagtcacaatcgagttgacatgacttgcaagaatgaaaactacatccccattacttttccagtgtagctgactcataataatctgaggcccacatctcaaaaccattcacaaattcctcatcttataacaccagccataatagtagtttgttttctattttgtttgggaagcccactacagaagagcattatcataagctcaataataaatatgaatgttctcaacaaagagaatgctgtgctatgctatcttcattcctcgtactagtttgcataaattttgaaacaaaaattgttgtctgtagtattcttattgaaaatttgtgacatggacaatactctcttctatggtatgtatctttaattttacaaaagtatttattgcttttttgtctatcttcgacttcgacttcttcttcagtttatctacttttaaatcacattggatataataaatgaacaccagactccagagcaaatctactcagaatttcgtgttcacaaatgaccctattattaatatcttcaaacagaatatgttatagttcttattaaaacagtcaagaaggtatcgacgtgttactgcataatacttacaaatatataataaaaagaatgtgtaagcaattaccgaaatggtctgggcggtttttcaagtacagcagaaaagaaaacctctcgatcatctctatcaagttttggtaccacaacccatttatgcttcttgtatcttaacatcttaaacgactccaaataatcatccaaatcatccttcaaacaaaagaagctatcaatccacaagagaccaccgggcctaagcactctgtcccaatcatacaaaacaaagtccagcagcacaaaatcaatccaaccatctagaaatcttgtggtatggatcaaatcaagagtgttgtcaaagaagggcagccgttgatttatcgttaagtagagtgggaccagtccccgaagagctatcatctcactgaagggtgccccaaaattgattgtagctgtaactatagtcacgttaaattctctcatcctggctgcaaaagttccagtcccaacgctgaaatccaagccaattctaatctccccagactttaggtcgagcacttggtgtgcaagaaaatctgcactgtcttcattcggattctctagtttaacccatctgggcatctcgtgatttgagagattgaagcaatctgcgcacttgaagaacccctttcgagtggaattagctgctaggcaggtgaaattcttgcatcggtactgactccatcggacatttctgttgtttgggagtttccacaacgactcttctatgggaaaaggcttgtcgtatagctgcggtgctctggagaagcatctccttcgaggtagcggatcacatccatgaaccatgagcttctgggctagtttccagtcatcgttgcagatatctccaatgtcataatccatatactcttccagatcctttctcatggcgaaacaagcatggccaatgcttgtaaaagttccattagctcccatgaaattctgcttccctaacctgttgggtttcatcttcacgtacttgcgaatctcttcgatcaaaaaatgattctctggcttatcagatagttgcttggatcccaacaaatgatgggtttgattgatgggagggttgagttgaatatcaggcaaagattctttgactgactcgataagacccagtatatcagccaaaaatgtatgtcgttttattaaagaatctgtagttggtgtattttcaaactcttgaatctctttatggatcatcttgataactttatcaagtgcttctcccacttggatttgggtcatggattggcttgactgtgttcttgattgcagaacgtattagctacgaggattgatgatctgaaagagtagactttggagaaagtggcgaccgaaatgaaaagactaagtgtgcccagtactacgagtgacctgtgaattcctctccatgttcctaacttcgatacaacactttgttttggccatattttcttttattattattatatt

SEQ ID NO: 384183 - DNA, 1165 bp, Cannabis indica
aaatactattacataacatacgtataaaaaaaatatacacgttcaataatatatttaaattattattaatttttttaaaaattttaacaagtaattttaaataatcaaatgcaattataaaaaaaaataaaactgaaaaatttttcatgaatatacaaaacaaataaaaaaaatatagaaagaactgatcttttaagtgatttactatagaattaccctactatacgtatgcttttgttgaagaagtttatagattaattaacaattaattattagtatatttaatactcaaatcttaattggcgagagagagagagttaagaaaaagataggtttgaccctccaaagacaaagatccttgaaccccaccaagtaatagaaagtgaaaagacatttgatatatagtctctaccctaaaatccatatatagttagttttgaagatttttttttttcttcactatatttctttctctgtttgatgggtcctttggacactatattaactactatttcatttcaacaaaataaggaaaaaagaaagaaaagtcattgctttaccgatttgtcacttcctatcctatcttcacatcacagctatataactatataaacatgttactattttgtctattccctactttttcttttttaactgtttcttgagtaatgggctctcttttttctactataaactcccccacacaatccaccaacttaagggatgtgtttcaatgttttaattgactgttcggaatagattaatattcgcagagaatagtaatgtaaaaatattattttgtttgttggaaggtttaatcttatgttatttttctcttagtaatataactattgttgaaaagagtaatgttgataacttaaaaaagaatgagatttaattattcatttttattatattaatttgaatactattttttaattaagaaataaatttaaataccatcattaatattttaattattataaaaaatattaggatatatgtgagattaattttttatttttaattgagttatttctatgttattgacaataatatatatatgtattatataaatgacatagcaaacaaaaataaataatatagtaataaaatatataaaaaaaaaggtcattttaattaataaaaaatataataaaattta

SEQ ID NO: 384184 - DNA, 3228 bp, Cannabis indica
taaatttatttaataactaatgagtaatacttatttaaaaaatattatatatatatatatatataatattatgggtaaagaaatagatttgataacacaattaaacatctcattataaaattaacccatttaataattgggagtgagcattatttgttatttaataatttgtcaaagagttgcacatcaatatacgtgcgaaaattttaataccatttgtaagattattgtgaattattcttcttatcatacacttcatcatcttattttattttctaaccaattaacttcaattataaactaaaagcaaacaacaaaaaacaaaaaaaaaatctaacgagtttgataacttggttagagttgaaacaaaaattacctactagaaacagacaagctaatttaaaaggaaactaactgatgccctagagtgaggctagaatgaaaatacatggcatcaattatttcataataaccaacatcataataaagtgaagaattttaacgaaaaacacatatggcgtcagttattttgtaataactgacgccgtagggtttatataactctcatctcagctttcgtctttgtcatttcatctccctcaaatcgcaaaccagagccctttcttcctcaaaactcgcaaaaacctcgcctatttcttcatttttcatctgattttactttttttttatcttgtatttttcatacccaaaaatgtattcccagagtttgatcgtattttgttttattttttttaggataaactgagcttagagatggtggttgtggtggttgtagctccgatcgtcgcttttgggggaaaaaccattaacgcttatcaatgtataaatttaatctctaataattttattaatgtaaattgctttatttttgattttgtaattttttttaggatttttctagattgttaagattgtgttcttatgattgtgtgtggtggccgaatttctataataagataaaagtctaaactttaatagttttgttataatttttttagatttgatattgaaatggtaataacactcacctatatttatatatataattggataagtttgggtatgtatatatatgcatacatataagcacatataaatgggtataaacagatagtatttggtgtggttggttttgggtgagagaggtaaatattagttattgggtgttctagttatagggtatattattttttatattaaatatgttaaatgttgtatattttaactgttatgtccatatttcaagccataaatataggcataatacgtgaataattggacacaaaaattatggaaaactcaggataataaatgaattatctcagagaaataattaagaacgagcaatatcggtctcgcattatgtattggtaataagatagcgagataagcaacgtatggcgagataataatgatagaagtcttctcggatataacaggtcgaaactgtgtcgctagaaagagtagataatgagctctttaagagctttgcaactcattaacccacatacttgtgagtatgttgaaagattaagagaaataatcaaagtaaaacttctctaattatctcaaaagacatagtccaagagtttccgtgaaaggctataggaaggacaaacatcttaactagcatttcgcagaatgcgaccaattattcttgagcactgttgaaatattttaccttgacaataaaagaatacttccagataagatcaaaaaatagttatcaacggttattttattttatccacatgttgtaaacatgaaactaaggtcgatcttaaggtatatggggtttaaggtaaaattatatatagtttaattaataattattaaaattatagttctaaggctttagtgtaatggtaaagtttttaaaaattcttaagagcttgaaagttcaatccttcatagctacatattagataattttttaaaaaatagaaaagtagagattgggaattgatcctgaactcttcgcttaaatgaaattatttaccactacaccaaataatatttattatattttcttcttatttaatattttatctatattaataataatttttttctacaatttcggggtcctgagcggtcaggggcccaaggcacacacctagcttgcatctcttaggcccggctctgcatgaaacgtgagaattgttcacgttttatgaatagataagatcgaaaagaataactatcatagttaaaacacctataaatagggacaaaacctaagaaaaaatatatcgatcattctgggaaggaaaaatcctgtgagattgagtgaatattcatagttattcttttgtaatataagtacattactaagaagtactcagaaataatagtgacttgtggagtatgtagattttaactacaaaatcacgtaaactcatgatgtttcatatatatatatatttattaagtataaatagttaacttttatttacaaggcttcatttattggtaataaaaatttgagttaacattaattatcaacttcttttttttttttcttattcctattcatgtatttttttactagttagttactattagtaactagttactgattttttattcctattcatgtgttattactaactagttactcattagtaactaggtactcataaaataactagtaagtagttaaataattacatttttaattttgcagtatttctttatgttgtagattctgaggttaatttgtaaggatatggcttatttagtgttgatcgaaatctagctagctcgagataattaattatgaatacttaaaagagtttgaatattttaaatattcattcaatagtgaagtaagtctgcgatatattgtactacggtcggatgagtagaataatatgcttgttaattagataagtttgaatatcttaaaggcctatcttaaatatttatctgtagtaaagtaggttctgcgaatatatgtactgcggttagatgggtgccaaatttttatattcctaaatattactgtgattgttttatatattgtttggattgtattttgttgttattaatagctttaaaagttattaactacttataatgggttatattaatatagtatttgacatcctaaattttaactaacaatgctcttacataaactagcattacacaaaagtttatgtgcagctgtgctgtgggaaaaagcagctgtagctgtgctgtgag

SEQ ID NO: 384185 - DNA, 976 bp, Cannabis indica
cccaaatgtcatttggattaaaaaactaatatcttactaaatatataaagagaagaaccaaagcaaagtatatagtataaaattataataataacaaaaaagatattgaatggacatttttggaatgaattatgaatagtcatcaatatagaagctaaaaatttggatttctttttttagggaggctctcccttaaaatgatttatatatatatacatgagaagagtcttattttgattaataacaatgataataatggaggaacagatgaaagagaatgagacagccataagagaaaagagtagaattggagcaataatagttgagtctataccatatattatctgcgtattatgtagcttttctggtgcaggctatttttggtctctaaagtttctctaaacaaaggtatgagtaggtatgtgcttgtcacctatggctttgctattgggactctatctactgctctacttgcctatctctttgaaaggttttaccttatttctcaaactctatatgatcatctcttgcttcttcttaattatgtttttttctctcattatctaattcttgtagtactttctctcttgcaggaaaaacactagtaaactcaccatccctgtcttgagaaatgtcttctttctaggtctgcttgggtgagtaaatatttaacttgaaaacacatactataattatatcaccatcctaataatttttactaactttatgtttgtattaattaattgtttttcagagcattagggaggacaatgttttatgtgggattagaatacacttcacagacttttgcttctgcagtgtccaacatatttccagtgtttacctttgtcttagcagttttgttcaagtactatacatcttaatttgttgtcttataattatatctaaatagtgatattttaatattatattttagttttttgtggtgataataatatataatgatgatgatgat

SEQ ID NO: 384186 - DNA, 1753 bp, Cannabis indica
tctctctctctagatctaactctctgtgtgtttctgtgcatgtacgagcttggattctcccttctcaagtcttcttactctggatcttgaagaacacactcaaccacccagatctggttgttgcttgaggtatatatagatcttagggtttttattttgcttctgaatgtattagttagttagttacagaaagtagttaggagtggatttttaaccaaatccactctaactaatttctgttagggttattagagaccgaaggtcaacttagggattttgcatgtatttccttttctgtcctttgtgtcaagttgtatttggtcttaatatcagtgtaagtggaggtttaatccaacagtgagttatactaacacaaggagaaataacaccattaaacccttgaaaatgaaccacaaacaacaaacccagaaaaaattaaaaaatctcaaaacacagagcaaaatgcttagactctgccactatcgactccttcttcttcacttgtcaaactggggtcgtccacctttccatccatctcgtagactatatccattaaacttgattatattaactacttggtatggatccatgccaccttggtcatctcatataactaaacctaacttttcatctacattgcttcactgatgctgatttggcatcctgtcccgatgatcaatgaagcaccagtgctgaattattgcatcttcctttgtatgaatctcatctcttggtcctcctcaaagtagaaagttgtctctcattctagtagtactgagtaccgtgctcttgcaaatggggcttcttaagtgttttggattgaatctctccttgttgaactcaacatcaccttaaattttgctccaaccatgtactgtgacaatgtcagcactctctaatccaaatctccatgcccacaccaaacacgttgagcttgactatcgttttgttcgtgaacatgtactcaacctgccaagggtctcctgcatatatatgctccttctactgatcagattgtggattgttcaatgtaaccaccggttacttcttgctttcacgagctccgtaccaaactcaccgttctacttagtctgctgagtttgcgaggggatgttcaaccataattaatgaactgttttaatttgtattcaaattttggctttttctatcttttgctatgtacttcacacgtataccctggtcccctcttctctttaactatttagcttgtaccaatctgattatttaatgaatatatacaacattattttacccattccttctgacaatatgcatgtattatcaaaattaaaaaaaaaaatagttgatatgggctataccctcaaaaaaaaaagaaaaataaaaaagcaaacataaaaagtttatgtagagctctttcaatacatcgtattgtattgtattgtattaagttggattgtaatatattgtattagtattatttaatacaatattatcactacaagaaatgtcacttttaatgtgctggcaaaagttggtattgcgctagtaaaataaaatttacccatgatgtgttggcaaaagggggttggcaaatcaatgttggtattagaacttttgccaacataaaatgaaaagcgctgacaaaaatgacttttcccaacacataaatgcgctagtaaaagttaaattttagccactgcaaatgtatgctggtaaaactttgacctctttgccagtgcagtttgagaaatgcgttggtaaaagttacttt

SEQ ID NO: 384187 - DNA, 3190 bp, Cannabis indica
tttctgatttaattttagatgtccgttgtcttctttcctttttccaggcattgttgtttctcatgttaagagaaatgctaaccaagctgctcatggtttagcaaaatatgctcttgggttggatgtagacacttgttggagaggagaaattcctactcctattttctctgttgtagtaaacgatggttgattataataacagtgaaactttactacaaaaaaaaaaaaaaattaaaagcccataaataaaatgtaatttttttagcttcattttccccctaacactgtgacacgataactccctctctctctctctctctcgctcaatttcggtctctttcttcgccgttttctgttactggcgagaagctctaaggctgtgaatgtgatcaagcagcagctatataaatatatatatctatataaattcatctgaaaggctcttcgtcacttttatttcacttttaatttgatatataaatttgcatctgaacaagttcttgagcaacaaacgaaaaccaagaaaacaactggtgaagtttttctcttctttgactatcactacctgcctgctcctgcttttaatcattactaggtaagaaatagtttggcggttcgaccaactccttctctcttcctccgagacccaaatatgcaggtacttctttttcttctgcttcttcagttcttaaatcttaaatcttttttcctttaaattatttatttaataaattcttcgtttttgatactcgatcaatctttctcccaaattttattttgaactgtaaaccctagaagactaaatttcaatcgttgtgttattttggtctgtcttataatatgaaccctagattagaccaggctgcaattgttattttgatagtggttgtttgttaacaattgtgtgtgtatggtgggtgtaggccagtgataggttcaatatcaattcccagcttgaacatctacaagctaaatatgttggtactggccatgccgacttgaacagattgtaagttttctttttgtcatttttgtgagattgttatatcattatgaacataattatatatacatatagttgtgatgagaggagaggagatgattgattttttggtggggattttgtagtgaatgggctgtgaacattcaacgtgatagctatgcatcctatgttggacattacccacttctggcctactttgctattgctgaaaatgaatccattggaagagaacgctacaactttatgcaggttcttctctttctctttctcttgttcctctcttgttgggttacaagaaagcaatttagcttaattgaactcatagacgaacctatctcatttgtgatgttgcgccacttctatagggaattccatgccattgctattgctatgttttgatgaataatcttgttcatttcattctaaccctctgtgtgtttttgagttaacgattttctacttgctttctttttttaagactgctgctcatgagtcatgacatatttaatatttctactgctcaacttaaaattatgtctccttctgtttaactttagtcaagtgacaacatcagctagtatatgttccacctttatttaactgaactccatagaaagtatcaacacacttccttccttctggttctggtgcttatgctttggtaattcattggtgatatttggaacttggaacttaatattgtaatctgaagcaaaagtttatgtatagtttatcataactgcttcttctccagttatagattctaatgaatttcttactgaaccatctttcttattttctatgcagaaaatgcttttgccatgtgggcttccacccgaaagagaggacgactgagaaatcaagctaaaacagttcaatctcacgtcttcttcatgctttgtagtttccatttccatttggggcgtctatatatctatctgttgcaccgaagcaatgcttatatatgacattaaataggaaattgaatgctgagattggtttcttgtttgtgaatttcttatcattagtttaagtaagtcaagaattaattttggattttatgtgtttgggatagattttgttttgtctcttctcttgttcttcatattggaagtaaaaactgttcacctttggtgtagaactaatatcattaccaatgagcaaatgagtaaaaaatataatcattaacaagcatttgttcatttttctctctttttaactaaatgttcaataaagattgaacatatttggaggtgcaaaagacagagactttgtaccaatatataacgttttttttttgtaaatgccaactaaactagatatattttgaatatcttgaaaccaaaaataaataactactctgaatttattccatttttccgaagaagtttccaattcttttattggattttgttacaaattttgtttgatcctgatccgaccatttatttgattaactggaattaatttacaatgtttggtgaacaaaataattcaataatattattttttaaaaaaatattaacatatgttgtataagaaaatttgtaggggttttgttgtctctattaatttgcaagctattttttataattttttttttttttttttttgtagagttttaagttttcactaaaaaaattcatatcatttttcactaatttataaaaaattatcacattgtctaaaaatattttaggttttgcccataaaattttttaataaaacttttaatttttttttctttttgatgtgacccaatattaattatatttatttttagttatgcatgtgattgattaatgtcttataaaaattttagttcatctaaaatatattatttatatatttgggttcgtttatttaaactggaggatgttttaatggctatattttaatatggggttaattgtgccaaaacctctaatactttcatttaattgcatttaacctctaaaactcaatttaaatctaacaatctaaatagttcaaggaaaatttttaacggccaaaaaagttcaggggacatgatttggtacatgtcaaagttcgggaaaaaaaatcctaattagtcaattaattatacctgatttagatatatatttgtgggtgactattcaatggttatagcagattactaataagtagacattctttttttagaattaattaattataattaactat

SEQ ID NO: 384188 - DNA, 977 bp, Cannabis indica
cgtttttttaaaaagataggcgccactcaggtggcccttatccaatggaacaagcttcaatatggaaaaattaacacgacaattaaagagctcgaggctaagcttgaaaagttacaacttctccctgtgggaacgagagactaggatgtagagcacgtgatccaagtggagttgaataaggcacaggaaaggaaatctctttattggaatcaacaggcctgagtctcgtggattaaggagggggataaatgttcaaagtttttctttcttgctgctactttccgtaggggacgaaattcaatcgagagtttagtggacaataatggtcactggctccactccagggatcggattggcaaggaatttcttgagtatttcagggggatcttctagactagaacccaagggcagaggctgaatggtgcccacttaattcctgatcgtctctctcaagttgatcaggacgagctactcaaactccagaactcagaagaaattcgtagaaccctctttagcatgagtaataacaaagcgcctggcccggatggaatgtctgttctcttttataagcattactgacaaattgtgttgggcaatttctgtgaaatgattgaggatttctttcaaaccaactcaatgtacttggggatcaatgctaccaaccttgttcttattccaaaaatccaaaatctgaaaaggagtcaccattttaggcctatatctctttgcaatgttgcgtataaagttatttccaagatcattgcaaatagaataaagcctatcctgcctagaatcatttgccctactcaagctgcctttgttcatggtagggatattcaagacaacaatgttattgctcaggaaatcatacattcctttaacaggaaaaagggcagaaagggtttctttgcaatcaaaattgatcttatgaaagcatatgaaaaacttagctggcagtttgtggatcatgtcttaag

SEQ ID NO: 384189 - DNA, 1971 bp, Cannabis indica
tttaatagaatattttaatattttttaaaaaatattctgttaaactaataaaaattaaatatacattattttttatataaagatatatataacaagaaattagaccttttttttttgttaaataacaagaaattagacttgttaatctaattcttatttttcttaaggaataaattgttaatctaaatagcaaaaaaaagaaaattgttaatctaaaaatttaaaagggtgtcggccgaagaaaagcattatgcgaagatagagcccaccaaggttaggtaatattgatgtaaataattattaatctcactaaacacacgcgtcgcacagtagaacatcctgttgttcatgacacgtggcacaaatcaacaggcccagtgggatccatggaagaacctacgtatgttccctccatgcaactgctgacgtaacatttatatggtgccacgtgtacggtccatggatagattcttatccaaggttttcaagctgctcacgtctcacgtgataataataatatgtattaaaagactaatctcgtttaataatatctttctcttttaacatgacatagcatcgaaagcttaattacgataattttaattaattttgggatgtaaccaattagaaatgaacacgtggagatgtgataattgtgatgtaatggaagtattaaagccaaagtggtatgtgacaagtgtccactaattaagattaagaaaaccaaaagctttgggatacagttgtgtagccaatcttaattggatattgggttttgagtgagaatgacctattgataaatgttaattgttatctatcatcatcaactatagtggtggtcacaatgtttaattattatataaataacattattattgtttttatttcttagaaattaaagttacacattaataaatcaaataaatccttaactagagatttgagagaactccgaaagcgaacacagaaagaagcaagctgaattaagagcactttaaggtggtatacaattatatattggtataatttaatattgagtcctacatgtattttaatttaatgaataatataaaaaatcactaatcactcacaatgcattacattagtatagtattaatcacctaatacggtaatacctaataacaatattctaatttttaacatgcatagtaggtagaactaaggtatatagcatcttgtattaacataacaatctcaatcctagactagttaggcacttattcattaaccaataataataataataatactaataatactaataataataataataaatatataggactaaatataatttgttctgactaaatatatttttagtgacaatacttgttgtgattaaaattaaattagtcacaacttgtaactaaatattatgttttagtcacaaataatattttgttgtgactaaaagtcacatttaattataaaaaagttatactattgtgattaaaaatttattactaaaaataatagttttttatagtgtgcaaaaaaaataaattcgtatctaccaacaataaagataaaaatatacatatacaaatatattaattaagtgattaagattttttttttattttgtcttcttattcttagatggtagtgatgccatacatatatatgattgtaattgtcatatatttacaactacaagacatgacattttttttttaagttatcgagtgaaaccgcgttttgagtcatataacatgtgtcaagttttttctgttgaattcatgtaatatatacattgctagcttacaacaatatatttccaatatttactagggctgtacagaaattttcgtaaaccgcccaacccgaataacccgactaaaccaaaccgacaaaaccgaaaaaaaatacaaaccgacataacttgacaaaattctaaaccgcccaatctgtaaattgggcgggttgaattttgacccaaaccgtcca

SEQ ID NO: 384190 - DNA, 2282 bp, Cannabis indica
aaaaaaacaaatcccatgtagtactaaaccgagcaaattcttcaacctagttacaatttattaaagcacttccctaataaaatctttctctcccattgtaaaaagactagatctatagttgattcaagttattcattcatgttgtgagataaacaagtcaaaacacacttacgcagtttaacagctgcggtcggctcattgaacatgtcttccaatgtccgcgccaaggcttcatagctcttatgagcactcagatcaaccttcctaccaattggacttccatccatattcaccttcacaaacatagaactcctgagattattaccattctccttagaaattccattcttcttgtcatctccattatcagccttcccagtcactttattcatacatctattctcttcatcaatggagctgaatccttcattgagtggcgatttcgcatggttgttaaccaagctattcattctgtaagttctgattggaggccaccccacaacttgactgcttcaacatacaacataacaatgaaaaagatcataaatgtaagctttgaaactcaattatacacagatttcaaacacagtcaatatggtgatcacatactagaaatatacacaaatcaataatggaaattgaacaatcaataaacataacaaattaaagaaaggttttttatacaaaacttttggaaagatcataaagggtttctcatttcttatttatcataacttttggaaactaattatacagagattcaaacacaaaaacacactaaatacacaaatatggaaattgaacaatgaattaacataacaaatcaaagcctaacaatcaaagaaaggttttttatacaaaacccaaatcatacctggcgccattagcaacagaatcagcacttctcttggtaccagcagaaacattagctctgctcaaagaggaaggagatgatgatgaagaagaagatgatgaagataacgatgatggagaagaagaagaagaagctgaaggaaaatccttagcagtcaagatcctagcatattgacctctcaaattttgttgagctttcacaccactacaactacttccaaggctcaacccaagacccaattcgagctcagactcatctgggcaagaagaatcctcagaagagaaaaccaaattgtcatctttagacacagtagagatcgacccacttgcagatgaagctctagaaagagctccaccaccaccatcacccaaaacaacaccctgcattgaaaaagcttgtgactttcttattttttccgaaagcccagaagagaaaagaggggtttaagagagggttaattgaaaagaaagggtatggcgaaagaatcagataggggagatacagaaatggaaattgaaggaaatgggaaagaaattttgtgtttgagataaaaagagtaaaggaaagaaagttaggtttggtggtggtggtgaaattagggaaagaaagagaaagagagagaagccatggatggagtcatggaccccattgattgaagctctgaccctacctgtctgtagtatgcgcctccatcaatgtctttgtttcctctttcatcttctctcatttcattttctcacctctaacacccccgagatattcaaattctcgtttaatttttttaaataatacacacattctcaaatattttttttgaaaaaataaaataattttttttaaaattaaaaaatagatattttttaaaaacatgttctatgttttatatgtagtgttaattaatgaattattgttagtggagatgatgagtaataagtcttggtcacaaatatagggtttattctattagtttgattctaattatccaaaatagtttcttattggggatcgatgtatctcccatctgttttgatatttaagaaaaaaaattaatataattttttcattgtcgtttacgttgtagttatttaagacaattagcaaaattttgagagattcaaaaaaatttaacacgctcaaaacaatgttcaaataatttgttgcatacgagactattttattttaggggcacgtgaaattgaatgtttgaatcttattttacagaaatctacatagcaactcacatagaaattacctgagcaacttaaaccgtaaatttataaaaaaaaaatggtatataaagtaattaccttttattttatacgcacgtgaaattgaatgtttgaatcctgtttttaacgtattaaatcttttatagggtgtcctaaataagtacaatatagataattat

SEQ ID NO: 384191 - DNA, 1918 bp, Cannabis indica
gttttttggtttcacattatcttttcaatttttttctctatgtcttcaaagatctaagcagtgtagaattgttcaaaagcttcatcatgaaattaaacttgacatcaggagaggtctttggctgaggccaagctgctccatctggcaccttgatacttctgaaaccctgactcttgtacagtttgtggctccaggattgttcagatcacagtgcaaggcaatcgctcggcaaccccatctctgtgcatgagattctgcctttgctacgagctgtttagctattcctttccgtcgaaatttttccctgactgcaacatttgatatgtatgcaatgccagtcctgtagttaagaggatgacattttagaaaacaagcccctgtagttatccacaactctagacaaatttaacaatggatgcaaaacctgagcagaactatttattaagtgattgttagaattaaattatgtcctagtgttatttctacttagttgctgtcatagtaaggattctacttagttgttagtcttcacaaattatttctagttgagggaaagtaagagtctgaaaagttctttaacagagtggcaggattcatctataatccaaagtaaatttactcaatgcaacaaaacctcacttatagctagaagcaaatttaataaaaactcactcaccttctctgcctgagaggtcctttcctagggagaaaatcagccacagtatccactgttaagattccagtcacataccctttattaagactaattttcccatcaaaacctccaatctttaagtcttgagttcctaagaggaatgtttcatcaagtgagctactggttacagcaaccaaacaagttctcttacaaccattcggaatcgaaaatccagccagcattcccacaatcctgtcaatccttaggacaaagtctaatgggaaggcatactcagggaagaaggagctgcagtgagtctcagccacttcccaacagtcctctaatcttgcttcccgaacaacaatctcaggggacactgttggaaacaagtcaaccacttgactagctctgcacactcctacatccacaaagcagactacttacttatataaaccaaccaaaagtaatctttgaagtgggaaactacaaatgcccaacactctattactttatttccctcccttattcctcacacatttacctcaaagttggatttgaaaaaataaaaataaataaatttgtattgaaaagaaaataaaacacagattcaacaaaaaaaattcatactgaaaaattgaattttttttattctccccacctttttctttcctcaccaaacactaagcatagccttatttttctcttctttcctttacttagaaaatgttaagaaagaagctgtggtcaattgcaaaccgtacatggctgtttcttaagggaaactaagtagtaaagcaaagcttattgaaactgctatgaaccacaatctaatcctaaaggctagaaattttgttaaacagaagaattatacgcagatattttagtattagtttcagggaaacttttttcttggttaacaactccaaatctgaaattgaaacagaaaaagaaaaaaccatctttgaatcagccaaaaaaaaaaaaatcttatttttgttttccaaaataacggagaattgggtaaggtacctgatttggaaagagaaaggagagagatttgatgagtggagttaaaaaccctaggaagaggagaagggtaaggatttggcttgttgggattgaaagagttgagaagagaaggcgttgcagttgcagtagcagagcagttaatggcagttgaagatgccgataatcccaatgaaacagtccgcatgtcttggagttggagggttcgtcttcctctgcttctctctctctctctct

SEQ ID NO: 384192 - DNA, 1354 bp, Cannabis indica
agatatctcatatatgctaattaatgtttgtttgccacttgaatttaattaggtgaaaggaggaactcttcgagcatcacacacatttccaggaaatcgttacctgatagagctatggtctccatcttcagtccctatcgatacagactcaccccatgacttcagtggtgatagtgttggaattttctacgaggatataacttttcgtgacatactcttcgattcaagctatagaggaggaggaatcttcataatcgactctgttagaatccgtataaacaattgcttctttcttcatttctcaacaaaaggaattctagtccaaaagggtcacgaaacctttatatcaaattgctttctgggacagtactcaaccatcggtggtgacaagggagaaaagtacttcacaggagttggcatcgatatagaaagtaatgacaatgccataactgatgtggcaattttttcagctgaggttggtatcattttaaggggccaagccaatatggtgactggtgtccattgctataacaaggctactggttttggtgggataggaatattagtcaaggtggcttggatttcccagactaggattgataattgttacatggattatacatctattgtgattgaagacccagttcaagtccatgtcacaaatgggttttttctaggtgatggaaatattgttctgaaagctgttaagggacatattcatggggtgaacattgtgaacaacatgttcaatgggaaccctcaatatcacactcctattgtgagagtggatgggagtttttggagcattgaacaagtagtaattgaacgaaacaatgctgttgggatggacttgaaatctacagttgggacagctgttatcaaaggaaatggaactatgtgggtcgctgatttttcaccaattttattgttccctgatcgaattagacacattcagtactcgcttttcattgatgggcttcccaagtttacttctcatgctatcaccaatgtctctaataatgtagtgcttgttgagacggacaaaattgtaagtgggaaggtttttatgaccgttcaacaataaaatcaaattctatatttaattttgctgtcactaattttccatataatatttgtaacgaatatattaaaatatattatatttgtttaatagtggcctattctttgttcataatatgagtgtacaaatagctttatttgtaagagaatttctttttgtaatgattttgactttatatgagtgtatatttgtatgagtgtatatttagttgtttttctttttttttgtaaagaaagggagcccgctagagagaaagaaactcaaaaagattac

SEQ ID NO: 384193 - DNA, 1425 bp, Cannabis indica
acaataatgtgtattaaatattaaccattcataattttaagtagagagcataaacttttaatttaattgtgtagttaagattaatgaaatattattgtatgtttgaattattattataaaaaaataatatcaaaatatgatcatataactaattattgatattgaatatattgtgttagattgccatggaagtagtagaaggaaatctaaggccaagattagttgaagacaagaataataatattattattagagaagttattgacttgatttgccaatcatggaatggagatccttctaaaagaccatcctttactacaatcacttctcttcttaagaagattattgttattcaaaacacaatgatggaatctactaatactattaatcttaatttaatgtaaaatatatgtccaaagttgcatgtgctagataattatgatcacaactaatatatgcgtaatgtattttttcctctccaatattaatgagattttataattgaaattgatatccctattctttataattattggttctttaaaatatatattacatatttattataattagatattaagtattaaattatatttcttcacactagctagtcctaaatgggtgaggcttaatacaaaatttgttattgctaaattttttgtatattaattatactaaaccttgtgaaagagccattctaatacatcttcctatttgggagaattttttagtttttttttataattatatatgttatagttatttagggcccgtttggcacagcttttggaaaagctaaaagctgcttttcaaaaaagctgtgacaaaaaggtgtttggtaagcagttaaaaaacagcttattgaagaaattatggaaaagctacagctaaaagctaaagctggtacaacccaacttttagaaaaagctgttttgattaaaagactttataataaattatttttactaaaaatttatttaattatttattatatattataaaaataaaatatttttaaatgaaaaatatttaaaaataaataatatttaaatttctaattttttattttattttaaaaaatattttatatttatatttttattattaacaaataatatcaatttatgtttcttataaactacaattttatcttttgcaagtgataaaaatataatttaaaaatattaaaaattatttttatcaaatgcatataaatttatactatagaaaaaaataattaaaaatatataaaaaataaaaaatttatataacatatttttttatatatatttgtaattataatgaactagattaaaatattatcattattgtaatagaatcttaacaactcacagcactttaaaaattataatttaccaaacactcagctcagcttttttccacagttctgctacagctgctttt

SEQ ID NO: 384194 - DNA, 781 bp, Cannabis indica
gttgaaatagttgagaagacaattaagtttgcgtacatttaggcttgatatgggctgttttgttaatcaatcttgaaaaataaaggctacaaaaacatggtcatcctatactgtattgtgacatttttctaattctctattgacttaattatctaacttttacatgtgatttggcctcttctattgacccaacaaacataaccatgaaatcaaaatactacatggtattatgtatacatcaaattgtcatgcactatttgttggtgtaatatataatgagtgataatatatagtaaaaataatttttaattttgtttttttagattgtaatgataagtgtacttaaaatatatttcaaattattacaccttatgaagtactatcagtactttttataaatgtcgtttcacgattagttatcaatattccctaaaaattaatttcttaagatatgagatctgatatttaattatactaataacagtatgacattcagaaaagtgctaggcaccattatgattgatacacattaatgtatgtaaattttttgtgcatgttttaacttttaagggcacatcattactcttaatgaaaggtagtgattcttttaataactcttttcaaagaagctttcacaacacaatggacatttaaaaaaaaggctaattagtagtttttcctcccgaactttgacatctacttaatcgtgtcttctgaatttttttggccgttagaaatttctcccgaactattgagattgttaaatttaaggacttttgtc

SEQ ID NO: 384195 - DNA, 1916 bp, Cannabis indica
aaaccaatttataaatttagaattgaaaaattgtgttttatatgccaatttatttctttaataattgtaatgacttgcagaaatagattgaaaattcgttactccaaaaaatagacttgcagtaacaaagcgaaaacagaaataaattgtctagaatttaaaacttgacacaaaagaattatacgtggtattagtgtcctttcaaacactactacttcacagggtcacacctagagactgaaaatcaatgagtaaagccacaaaaattacaaatacaattgacttaaacaagtttagattccctataaaacattacaataatcttttgtactttcttttgctaatctgacttccgaaaacaccaaatagtgaactctttttagcttttggtgtgagcgtgcttacttcctactgtagtaagtcttttacaagtcttcttccgaagacttattctcttgttcaacaaatctctcaccctattctaagaacagtgaaagaacaacaatatagagattaaaacctagtaaaacaatctaggttttcacacaagaaactctcttctcacaaagatgaatatagaaaattgaaatcttagaaacagccacaaacacattttgacaagtgtacaaatttttctaaaataaactggaaaaatcacactctatagtgacaactcagacaggatcagcaaacttttcatgtataaccaaggtcacaatttcttcaatatgccataaaaacaccacaaaatctatttatacatagtaaaactaaaaatatcaatcaaggattgattccaatcaatgatgactaaatataaataatattaaatactttacataaagagaatttcttctctattatgtaaacatattaagtaaatacaaatatatattgtaactaattaaatattcatttttctcgattatttttttcgggagatgatttaacatcgtttctatgtgatccgcctctctatatatatccatcagaattaaaattgaatggaggacaaacttttttttaggaggacaaaaagtaaactaattattaaaaataaagatacttatactaggatttgattacttgacttctataataggtgtaaaataacttaaccaacatataaaaattataaaaattaatattatgtttatatttatcacctttaattataaatatccgttataactaaccaaaatatttctcaattttttttaaggggggattgcccctctagcctctattgggtcgcgatatttcgaacactatcactatgacataatacaaagtaactttaaatcattcttttatattagaaaaggaacatatcagtgaccaaaatccaaactcaatcaacaaatatatccaaaggaaaacatggccaaaataatcaacatacccaaaaagaaacaactataattggtatacatgtaaggaataaggatgcccaaaatagtagattttatttttcttctttaaaaaaacactgaatcaaattatagtactctaaacaaataagtagctttaactttttggatttaatcaaccgtgatagttgttcgattcactatggtcttccagttccattagagcggtcgtacgtctgaccttgtggatggtctctcccatttattttctccctctcttctttgttctttcttctaagccagccactggagtattcaatacgttgtttgaatcatttgtatatagaacaaaaaaaaaatgaaaggagattatcaaatgtcccacaatctacataatgaaattcagttcctattatatgattaatcaaagaaagttgtactctaataggaaaatttccttgatatactaacttttgctatttctttacaaaaatactgtcagacggtatttgttacttttttactgtgtttttttataagtttcat

SEQ ID NO: 384196 - DNA, 1913 bp, Cannabis indica
tagtgtggcccaaacatatacatacaatgtctagctcctgcactcatggctgagtagagacagatttaccctttcctgcacagtagaacacccatgagccaagcctaagaagacagtacaaaatatcaataattataaataactcatcacgtaataataatgccatttcatctttgtttgtatgacatagacctacgtgttacactcacacgcctatttatgtctatgtggtatagacctacgtgttacgctcacacgtctaattacaataaggccttagaatagttcatcttggttctagttaccgagtccaacttgtttatgccttgaacacacaatcctaaatcttaacatactcatataattaacatggcataccctttacacatcatatatcactagggtaataagcctaggctatgaaaccgctcatgttaaggtaataaccatattcccagttactaattactcacatataacatttccaatataggcgccaccgtgcataactctacatgctaactactatcttgcctgatgtcctgcaatagtagagattccaaatcccctggtgctcctgaccaagtgttggtaatcctaattacaaattccgagatttacacatatagggttaatccctaagtccacatttataaaatacatacttggcattcaaaacacaaatattcacatagagcttgaaataaactttctaacggtatatagaattctcaaattggagtctggatcacaaagttatcgctatttgaagtttgcatttggatctgcccagaaataaaagggcggaccgcggcgcccaaaagctgggtcgcggcccctgggttccaaacccagaaaaaccagcaaaaacttcgaattttagcccctaaatcacatccaaaaaacccaaatcttaaccaaaactcccaaaccatgaaataggtttttaataactatacaaagaatttaaaatacaatttcatgcattaaaaatccaataatataccatgtaaaattcagattaagcaacaaagaatcaaagctccaatctttagcataattcatcatcaagaacttgaatcctcaagctatcttcaatattatatttccagcaataaaacattaaacaagacttggattctaacatagaaattacccaaaaactcatctataacccaacaagcataatcactacaaagccaagcaattcacacccaaacttaacaaaattaacataaattctagctacatgcatttcaagaaagcacaacacaatctcatgcttttcaacataaaattctcagcaataaattcaattaaaaaaaaaaaacacagcaagagacactacctcaaacctcttcaaacacaagcacaaagccaccaaaaatccaagcttgaaacaagcaaaacctcaccaattcaccacttgaaacaatgagacaaagagagggagagagggccggtttggatgggaacaaaacagaaaattccattctttttcttactcaaaattgtattttgttgcaacataatcctataggcaagattacaataatgcccctagggccaaatacacatacataggcattcaagggcaaaaattgtaacgtccccacttcaagcctccattgggcccttacacccacggactaatggctcttatacacgatttcgtcactctggctgcttcatggattgatgactgaccctacagaccaacacgagtgaaataaattaatttcactattttacccttctcgagtcaaaattactaaaatgcccctggctcaccaacgggttcttaacatgtcatatttcatataaatcctcatatattaaattatataataatataatttcaaaataatacacaattaactagttaggtttgctaatccattctcttaatccta

SEQ ID NO: 384197 - DNA, 1990 bp, Cannabis indica
gtagaggtccctgttactatattgtacactatcatgaaagtttgtttacagcttatctatgtattggaaatattaaaagtatctataaatagtgattaaaaacaatgaataagataccctgctatgtaggtgctgtttattgacttgattgtttatcaccaattttattattacaaaagtcattgagtctctttgtgaaggtcttttgtggcttctaattatgtgttaccaatgttttctttagcggctctaggtagaaaaaaaaattgcagtgtctgtctttagagattacatgttgacaagatcataatcctatacaaaagtctaaacccgatgcttatagcataacaaagaaaatttgtgaaaagatttacactaaatatgtaatagcaataagctgctaacaactgagaatactctcctcatcatcttctctcaactgtttgcatagcctgaaattttgtgacttctcttattttaatttgttgatttggttggtttattcagagaaaggttatgtcatcgtatgacgtcaacgcaaaatcgatgggaattgctaagcagaactataatctgccagtttgaactacctaggtgtttacaacttgctgactagtatgtccaacttctcatctttttctctggtctcgtctttgccctccttttgaactttcgatccttaataccaagttaccattgatgctatagcttgttttggtatgataggtaggatcatggctctaaaatgtaaatggtgctagcacagcaggccatatatgaaacctttagtttagagatgaatgcaaccacaacatggggaaagcattgaaagtgatgctaaatggaagtgagcacgcccatgattagttttggtgagttttgtaatcatcttagtgtctggtggccaaaacaaaaagggataatgaaatcttattgttattctgtttaaggccttctttaaccagagaagtatgtatatcgtgtaatattagttttgccttgaaaaaaaaaaaagcccttattttgtcaattttccagggcttgtaccccctaaagccatgtaattacaagcatttaaataataagctttcatccttataaaagtttgatgtttattcagccaaaaaagtttgatgtctgctacggagactttaaagaactttataggactgttgtagttctggatttgacataactataatctatttacaaagtaattataaaaaagacagtgtagaacatacaatatttatcaatgattcaatgtaccttatttttaaataattcaagtatgatttatttctatcataataagtaacaatataattagaatttattgttattattattttgttaagatattactatatacccaataaattagtctgtaaaatgataaattagaataattttattttattctgtatttattgcttaataatattttttgatttttttttaaaattttttttgactacttgttagtgtacatatataattttaaacatgcatcaattatcatatataattttaatatatacttaataacatcttttacttgttaatattttatcatttccaatttataccaattagtttatataatttcaaacatatacttgctatctgcgttttcgaattcacaacacgtgtatttccaaagttcaaacttagccaacacgagtccattcttgggcctactcaaattaatagattagcccatagccaaattgagttacggttttgaatccagatgcaagcctaacttacaagtatgataaagtcgaatcaccatcaggatgtatccagatactctcttgggataatttaaacgggcaattgaagagtcatccggtagcattcggaaaccatcctacgtggcattttccaaatacaatgtcccactaagttagtgttggttttatagtactaaatcaggtacgcagcggaagagttttatattatctgattatcatcgtactatagcccc

SEQ ID NO: 384198 - DNA, 2431 bp, Cannabis indica
ttccctgatttctctctggctgtagggcttgatttgttgtgtattggactttagtttttgttaaattttttcaataatgatatttatgagccattgtcccacgaccaaattgtggggtttgtgcgtttcatgataatgtttctttatgtttcattctcatgtatttgattataagtttttagccattgttaaaattgatatatttgatgataaataaagtaaacgccagttttcctttaacatgaaagtactgcggttaagaaagaatagcatttctaatgaaaaataaacaaatcttgaataatatataaattgagatccacaacataacatgaatcgtaattattataatatatacaaaaatattataacaaaacgaaaccaaggaaaagtatcaaagacaaagagacattaatgagtattagacctgaagtttgttttccattaataatgcctgaagatgttgatcttctgcctcgaattccacctggcagtcccctaacgccaccgctccagccgtggccacggctaccaccgcgcccgccaccaactcgtccgcctccacggccgccaatttttatgtgagtcccaatcttgtgatcatgatgagatttgaataatgaagaaagaagaacatgatgtttgggttttgatgatgatatttgattaggtaattgatttgtatccaaaacataagctgaaattggaagacaatattgaagtaatgatgataataataccaagaaaatcaacatagaaagataaacagagggtttcatatctcagattggtattattatatctttattcattaccattatttttataatatatgtatatatagtataaactaaattgttggtgttttaaaaattaagctatatgatatattacttataatatgagattgaattttgtactgcaagataagaaaggaagatggaaaagacaaaagagataggtagaatatattccaacggtaaaaacaaaagaaatgggaaaatgtagggctgggggtttgtggttgtagttgtacgtatacatatatagtagagtgtagtgtggtccaataatacaatatattacaaatgatcattcaatttattatacaatcatcgcactggtttatttggagaccaacttgccataatatgtattctaagataaggtatgatatcaaccacgtatgtggccaattgcctaaccagctcaagtttgtaggaagctagggtcggtagttgtttttatatatcatttttcatatgtatttaaatataaagaatatttttagtgggttgctacttgggttacaaaattctacgttcaaaattgttgaaattaaataccatatataagagtttgccaattaattttaaaataaaacctcctacaccttatcatatatatacttacctattctactaccttaactatatacacttctgccttttaacatatagggaaaagatcaatttaaagtatgagtacgtaatcttcaagattgtctataagaccgaaaggatggtgaagaaatcacattttttctcagaaaagaaaaatgaggataatgatatcatgtttgtacaaaataatagatttgttgttatattaatttattattactgttactaacaatatattgatttattcgatagtgttatacttaatactattaactaattatgataacagaataataaataagaaaactaataatattagtgtatattttcaacaaaagttgtctcatatggtgcaactacaagagattatatatattgcaaataataaattattaaaatgagaagagacacttttaagtgatattccagcatgtaaattatacgtacctactctaataagctactactatatatataattagtgccatgttatttatacttaaattaaataaatatttatgtaacgaatataacttgacttaatgtaaacaatacaaataagactccttctttagcttattccaatttcacctgtagaaatttgcaagtttggcgagagattcccatgacacatgaaaatgtttgaataacttcattatttttcaagcgacacattcatgtccaatatcatagttatcgcgatgttgttataagagagagaacaacactgagtggataacaattgctagattcacgagtgttgagctagcgattgttatcgttgattgatcaataaagaagggatagtgttggcataataaaaagatccatttattcggattggatcgaaaactgatccgacaaattacttctgattcgaaacattcagatacttatcgaattttggatctgatccgccccaccctgcctaattcaatgtatttaaaaaaagaagaagaagtggatctcaattccctaatttgagatctcaactcgatctcttctcaagcatcagctcattctcagaa

SEQ ID NO: 384199 - DNA, 1545 bp, Cannabis indica
tttttatgtgaatattcgaagatatatcaagatgtttcagataaagtcatgttatataaatgacatacaactgaaacatcgagatagttatcttcaagtataagagtgtgaatatttttaagaccaaaaaacacatctggtagagagctaagattagaagaagaaatatcaaggtatcttaaagaagataagctcttaggaccatttttaagaaatgaatcatctaaaaagaatggtcttagatcaagatgaacaagcttagcgagattggaaattcagttcagcaatgaagattgaaaattattgtctgataagttaagaaactctagagaagtaaaattaacatttgataggggtgactattggtaattctacaccaagccatgtgtagttctaacaatgaagggattttgtttaatgagcttagccaactgtcagatgttgcactaaaggttattacttgacaaatctagatattctagtgaagaaagactagatatccaatgaagactatcagcatataacatgtcaacttccctattggtaagaataatgttactcaaacttgataaatttccaagttggtgggggatttttccctcaaacttagcttcaacgaagtttaaatattttaaactgaccatagaaccgatgaaactaggaattgagtgccaacaaaaaaattgaagctcaaatctaagtgagttagatatatgagtttgagtaaggaaggatttatcttaccacttatgtaatacactagaattatgaaatggattagcaaaaccctaactagataattatgataattgagaaattatattattatataatttaatatatgagaatttatatgatttatgacatgctaagtccccgttggtgagctaggggcattttagtaattttgacccgagaagggtaaaacagtaaaattaatttatttacgtgcttatagaactatattattatatagtatgcatgtgatgtctttttcaggtgtgttctgacaggttggcgcggtatagtcacaaccgggtatttcaggccgaatcgggttcgggcccaaaatacaatttgagttgaattattggcattttaattgttgatgaataatctaaaaattaattgggtttattatatgtgagatgtcattttttcccttgtgagtgaatatgtgtgtgattttagcctaggggcaaaatgatcttttgacctttatttgtcaattgataaaagatgaaattttgagtaaatcaaatggaaaaattctggttttgcttcctctagcccgtaccctctctccctcaaaccctcttctttttctaaatttgattcttgaagagaatttgcttgatattggcttggattaagctttgagtttgagggcctttgggtttgttcttgaattgagcttgaggattaccggcacctggtcaggagcacccggggatttggaatcctactattgcgggacatcaggtaagacagtactatgcacatacagttaagcgcaatggcgctcatattggatattgtgattgt

SEQ ID NO: 384200 - DNA, 1383 bp, Cannabis indica
ttaaaaaaaaaactcatggttgggggcagttatagtaaataaccgacacataggatttataaagcgtcaggttattactaataacccgacaccataggcgacaaagtaaaagtttaaggaaggccctatgtcgttgaatatttaataataaccaacaacatagggggccctatgccttcggttaattcaacccctttagcgatccttaaaacaatatcggtcgtagattttgccaaaactgacgtcttatgcctaaaaaaactgcccctaaagcctaattttgtagtagtgacactgggtcaatttgatggagcccgacccatgaggcattgatcttctgctgatgttgacgccacattatgttgataactgtcaaaaatgtgtcctacttttgtggataacaaagacacataaatatttgattgacaattatctaatttttatattcggaagatatgattctcgaacatgatcttagaaataaatccccgatattgagggatttagtaataaatgaatttgagactgaattgcatatccgaatgcttctcagttacccttctggatgttggttttatggtactaaatcaggtatacagcgaaattttttttatgtctgattatcattgtaccatagccaaagaatatctaaatgtgtaaatattaaatcaaaaataaaatacatgaaagatatatacctcttgatgactatttgggtatcctcaaaatttttgtaagttggatccaataatcctcacaccgtagtcttccatatcaacccaccacacataaggaatagtgtggattattaggaagtgtatagtttattgagtaactaattattgtcattttaagttgttcaaaaaaaaaaaaattattgtcattttaagtaactatataggtacttatattttaggtaacttagtatctagggtaaccaagtacttatattttaggtatcgaagtaattgtattttgggtaaccagataggtactatattgcgtaaccaattacataaactttgggtaaccaagtattatcttgggtgatcatctacttatacgttgagtacctagtaacttatattttgggtaaccatgtattattgtgggtaactatctacttatattttgggtaaccaggtacttatattttgggtaaccaagtactatcttaggtaattatctatattttggatacctagttacttatattttgggtaactatcgtgggtaatcatctacttatattttgggtaactagctacttatattttgggtaactagctacttatattttgggtaattaggtagtcggtacttatatttttgggtaacccagtacttttttttgcataactaggtactgttgggttttatgcc

SEQ ID NO: 384201 - DNA, 1044 bp, Cannabis indica
ttatttgaactatgatcgacagacctaaatctaagtctctagacctaaatataagttgatgaatattttataaaatatttcattagaaatttttcgaaaacaaaattatccttaaatctgatatttaattaaaacaaatctaattattaaaaattttaaatgcaatttttattgtactaaagcatcaaaccatacaaacaatactcttattttatcttaaaaatttgggtaaaatagtaaaaatccaaaaagataacaacaatgataactaattattttcattattcatttttttttttgtaaggatttttattattcatttttaaaattgcatgtgttgggtttttctttagaatatatttctcgagggtgcatgataagaatatgattctcgacacatggaatccaaatgttaaaaacatgaataaaaatacaacctcaatataaggaacaaaagtcttttaatggaacatacagatttggatcataaaatattggacatccttttttttgccttaatttataataataataataaatttgtaaaaaatgtgatattccaacaacaacaactatactagaaaactttggaatccaatggtcaaattgcattgaaaaagttatatctattaactcacttgtcctggtgataccaaagttagatatatttggttctctttctcatcattcaatgatatatattactattattatttttgatatatataggttgttaaaattagacctcactgtaacctttattattacagttttacagatgaagtgaaaaaaaaaattacaaataaaatacaaacagaatacaacagaaatcagatcctaggtggcttcacctctagtggatcaagaactagttgttagttacaaccaaagttgtaactaactcctagttctgtgatcaaccctagaactacaactataaaaggaacagaagagaagagatgagatataccagatgcaaaaagccctaggttaccagatctgagagattgttcagctccagttgttgtttcaagttcatgcaca

SEQ ID NO: 384202 - DNA, 1451 bp, Cannabis indica
tttgataaaatggaatcttcgtgctatgtggggctcaactacttgtcctaagctaaattcgttgtttattacttgtctctctatcttttttaattacccaatacagtgttttattcttttcaactggttggtttaccaaaaccatcaacagctgttgatcgaactctactcagtggatgaaatcatcttttgcccaaaaaacaaataataaagtaatatgaccttttgcatagattgttgcacatgtaaatctcagccatcatccccaaattttcattgtcccaattttatattatttgtacatttctttcattattaaattcaattaggaaatcttgacatttttctgttcaactgtggtgatacattgtctcatttttctctaagtggtttcatgttaacaaacttaaaagttttgctgacattgaacatctattttcagacactgtggtgctcgatttcaaccagtacacaccaggttcgcgatggagacatacaacagtcagtagaaaagaccatagagaggaaggaaatgaagctgatggtttctatggcggaatacggaagcttaacaaagaggaagaaatttcgacatggaagaaaatttggcctgctgaaacgttggattaggcttttggctttaggattttaggagagaaaaggatatactactaccacttcccacgcttgatcaatgtacaagatccatttttattcagatcaaaatgacttctcattcaatcttgcttgatagaagataagatttgaatcgagatatgtgaggcaattgaatgaattaaaatgccatacattcttatttactcatattccatgaagttaagatccattatgtatattgctccaaattggtgcaacattgatgatttgatgtactataacacttcataatagaaagttgtacttttacactatcttctcttgttcatataatgtgcatcaacttttaaattcatctgtcttctatggatttgctgaaaaaattaatgagaatttaaagcaaagcaagtgcctttacactaaacatgttattatatgtgaagggagaaaaacatttatattgtatacagcataacaagaactagttctacgattagtctttaaaaaatataataattatatgatttatttatttattttatgatctctttagatttgtttatttatttattttgattactagaaatttttcatttgaacaaggaacagagccttatttacgctaaagtttgttactatgcatgcaggaatgaaatgcaaacatctttaacaaccaaatggtctcaaaatgtgtagtgtattgcctcaatagcctttttgtaactagctcttttttttttcctctttcacacatgcttataagagtgaaaataatatagattagtggacattcattttttgttagcattgttattaagtattagtagtgccta

SEQ ID NO: 384203 - DNA, 1571 bp, Cannabis indica
aaaataatttccaacatattcatcatccgctttcataaccaagatcagagagataaaatgttgaatggtcgttatgttttctttgattgtaagcttgtggtaatgaagccatggaacccgatggaagatttcacgaaagaagaaattacgaaagtcccaatttagatccagccgaaaggattggacattaaatattggggagaaacttctttgttcaagattgtatttcaattaggagaatctctccaagtggatgatgtcacccaaaacagggatatgctttcttatctccgaattcttattgaggtcagcctagcacaagtgtttcttgatgtagtttctttcacgggtgaatttgatcatgatattgatttggaagtaaaatatgaatggatcctattagtgtgctataaagaaacaaagcaatgcaggaataagagatagcaaaagaaacaaagaaagtcttggttcctaagaagacaatggaagtacacacggtagacaaggatggttttcagttggtttccaacaggaagaaactgatactggaccaacaccagcggaaacaaatgtaaagaacaaatttgaggccttaagtacagatcaagaaatgggagaagaagttgatccagaaatggaggagcttgcaacagttgccataatggataataagggagaaggggagatccctctattttcaatggatagaatcttatgttgaaatgtgagagggattgacaaccaacaaaaacatcaagaaatcaagcaattaatttattcgaagagagttgggttggttagtctcttagaaacaaaggtgaagaataagaacatgggaagcatgtatagtagtttattttctagatggtgttttacaaataataatccatggatggataaaggtcgaataatagttgcgtggcaacctagtatttactctattgatataagattttgtactagtaaactaattcattgtgtggctctatccaagttacaacaaggggagtttcatatcacctttgtttatggcttcaaagaggagaagaatagagaagagctatgagataatttgaaggaaatatctactatagtaaagaaagtctgcattgtaataggtgattttaacgacactctcaatgctaatgaaagagttagaaggaagattagccaaattccttcaatgaaattttgaaattgtgtagaagcttgcaagttggaggatttaaaagcttcgggctcattctatacatggaacaacaagcaaaattcagaagatatagtcttctcaaaaattgatattgcccttatcaactctgaatggttggatcaattccaaaatttggaagcatgtttcctttctgaagggtgttttgaccatagtcctatcctggtatctattcattaggatattactcatgggaaaaaccttttaggtattatagcatgtggaaagctgctgatcattatgatgtaaaaatcataatagctggaagaggaagtgaaggcactgacatgtacaaacttgtgagcaaattgaagagattcaagccaattttgaaaacataaac

SEQ ID NO: 384204 - DNA, 1755 bp, Cannabis indica
attggatgaacacccctaagtagcagggaattgagcaaatgattctagtccaacaaaggacttgaaaaacctataaaagcattttttttcaatttgtgcccaagcttgtgacatagctaacattagggtttttgaggatatgcattctgatttcctttgccataattgggaccaccacgacctgcagtgttaggagaatagtgacaatgcctaaagctaggatcacctcttgacatagcctattgaccgaaataaccatcattggccctatggggggggggaccttgattgttgttaaagggaatctaagatctagaggaaaatttgttgcatgaattgaaattgaaaaaagaaaggctcattataggaaatattagcttcacctttagtaatattgagagacttgacactcttttaaattcgaacagattgagccatgaggagagcttcgatctctggaacactaaacgcttcttttcttgttgtaacagaagtcacgaacacatcatacttaggtgatagaccattaaaagttacttctatatgatcttgaggagtcttcttgtgcccaatggtggctagaagatcaatgatgcccttcatcttcaatatataattgcttagagagccactcattttggtatttctaagttgagttttgtataggtcagtgttgcctatgttgagagtcatgtagtactcattgggagagctccatatttgagccaaaatgtcataaccaatcattcgattggttgtcttcttgggaatggatggtagtaaccaagaaatgagtaaattgtcttgttgttcccagtcttcataagttggattaattgagtttgttactcaatctgcatcattcaagaacttgataggggtttgagaaggatcaagatacttatgtaaacgaattcctttaatcaatgcaaacttgatgtttccatgaaatatagttgtgtttatcaagtttgatcgagagtgaatgagtaaatgaaatagggtatgattgcgaaagatgaacatcttactagtttctggtttgagcttggttcaattttgaagctccaccattgttagttaccgaatctccattaaagaacgagaaggatattatatgatagtacatgtgaagattagagagtgtgagaatgaactaattaatttcattgaagagtgagaataattacaattagtttaattatatagaacatagagcttttagctatcattataagataacaaactaacaacaaacataataaacagtcaactaactaggtctaacagacttaactatcactatcgttaacacttagcatcatatcatagattaaaggtcaagctttatatttgcataatattactaaaataagaatttttacaaggatgaaaataaggtaaggcaggattgaaaattttcttcaatttcaacctaaattcgatcccataaaatctatcaatcccaccctgcataatccttagtgcggcggggtatgaatggaaaaatttcgtccaatttagagaattgatcataaaggacataaaaagtaaattatgataaataaaatgcagcaacattgtacaatgagattgtatgtgtgtgagtaatttgtggtgattatatttcacctagtttaacactacaaaaaacaactatttttggtgataattttttagtcataacataaattttttgtgactaaatgtgatttttagcacaacaaaaagttatttgtgaccaaaacatagtat

SEQ ID NO: 384205 - DNA, 1309 bp, Cannabis indica
tgtcttcttaaatttatacaattgataatatagattagaaaaaattgacaatatttttgacatagtatttttttttacaaaaatgctgaaatatatatagcactttaataaaaatgttattataatcaagtattactttaaattagtttatgtggtgaaaaaaattatttgttatatggagataaaataattaaaattaatattgtgttaaaatttaaataacatttattttaaatttttgtttaaaaaaactcccttttaaattttatcacctcttaacatcttgagaccgcgcggcgctgagtatactaataatactaatattcaacccttaacttaagcaagcaagttccctcaaatttcacttacgaaattaatatccaaatatgtgatcatcgtgtaattagatatatggtcatatgggacataatatgaactacatataaattatttaaaaataaaaaataaatcaaatcacaacttgacaaaacgatgatagtaattaaagcaacccacatcgtcttaattgtgaatgtctccacattattttcatactgttactcctttttcaaattataaaataaaatataataaatacgttgcactaccataaatgaatgacaatgtcacgtttttctacaaagttatacacgtatataatatgagtattgctattaggtactaatggtgtttagtaccttctcgacatgccacgttacgattgactagcgatattccctaaaagctattatattaaattatataagactcaatacttaattaaaccaataacgatattaacacatatgagaatgatacacaccactggtaccttttaacatttctcatataatatatatttatttgttttaagttaacattttaattggcttgttataattttttttgctacaacggcttgttatataatttgaaaattgaatttttggtcccgatatctttcaagataagataatacatttgtatatatactataaaaatacacggttggacacgtgggggcattttcatttaattttattttattattataattaaccatttttatatattacaaggctaattagaattttttttctgccaaattttgacatgtaccaaatcatgccccgtgaaatttttttgccgttaaaaattttccctaaactattgagattgtaaaatttaaaaacttttgtctaagtttagtaaaaaaattctaacataaatgaaagttcagaagacatgatttaatacatatcaaagtttgagagacatgatttgatagatatcaaagtttagggagcat

SEQ ID NO: 384206 - DNA, 1572 bp, Cannabis indica
ctagagagagagaaaagcaggggctgtaaaaaaaggggaaaaggaggtgtttgatgtaaaataaggatttgattccttacttttaagcattaaccacgaccatacgtatctctacggtcggcatccatcaatcaaattgtggatagatcattaccgtccattattaatttaataattggccaaaatgaaaaatagcgttaaattactttcaacctaattagcataaaaaaataattagagatcaaactcagaatctgaaattaccaagtaatagagacgagctaaactgaagaagaagcaaactcgttgctaactgttacaaacatatagaattatatatacatcacttaccaaattttcgagcgcttcaaattcgaaatcaaaccagaaacgaaatgaaaacagcgaaggaaaaacctgccaaagttttaaccagaaataataattatccataacaaacctctacttcagttatgtacagaaaacaataatatatacatatgttaatattatatgtccactgaaatagagatgagaaacaaaaaacagaaaaacaaagagaatttttttagaatagaggtgaggacgaagaaattccaacagagtccaattccaacttacaagtgccgattcaattaaaattgtaaagggataaagagaaatattataacctctagaaagtgttactccgaagaaagaaaatatttctcacatcgtgaaacagagaagagaagagaaaagaaaaagatattttgtgctgaaaaaaagaagtggaagtgggtggtgtgttctaaagccaaattgctagtagactaagctgctttcgacgtcggcataccactttctctatttttttttatttttttttctcttcataaataatattaaagatttgagcgtggcactggcgaatgacgatccccttgggaatgaggccatatgatatggcatattttacaatataaacccttttctctttccttttaaatttttaattaatcgaacattttcactatttttttttgaaacagtatttccactaatttaatttaagttttttataagtaaattgcgaggccactaattggggcgattctgggcatgttcttaattttatacctggcgttctatttaggcgcgtgtgtacacgttcaaacatcttattttactcgtgtactcgtgcacagtttttagaagaaatcattccattaagcaatgaatttaaatatttatttttgttttttttgatccatttcaaaaaaatatatatatatttatttttgtgccataggttaaattttaattttcttttaaatatttataattttattttatttattttgtgttattatttatgaataaagtattgtaaaagttttcataaaaaaattaatgtaaaagcacaaataggagaagtgaaaggagtgaaggcaactgttgaccgagattttcggcaaccactataataataataataataataataatttagtaagctatatgaaattaagggagagatttttacgtggttggggcattaatgagtcttagttcacgagtctgtgtatttat

SEQ ID NO: 384207 - DNA, 2900 bp, Cannabis indica
attattttagaagaaatatgtacagcatatataattataatcatgatctgagagcatattttgaaaagtcatggaataaccattatactacataaaaaaaattaataataaatgagcaagtttccactagtagttaacagaataataataaatccaccaaaagggtatatatatatctccaattttggctcctccattcacccgcgcaaatggttaattaattacctaatttatatatggaattgctttgaaaaaagaataaaagtatatattattatatattttcctaattaagttacagtacctcacaattacgaatgaagtcgattaattggagaatcacactaatgatctacaacataaaatcttttaagtagtaaaatgacgtacccatttctcacattatataaaattaattaggtgcagagaattaatatatatatgtatataatataaaacatcatatatatccataaatatccaagtggggcatctcatgtatatatcacataggcatcttttttatttttttcaaattgggcatcttatattagtgtttacgtggccattaattgattttaaattttactaactatatcgatcctatataaatgtatgagtttatggcaaaatgataatcctcaaacaaaaacttaacatatatttattgtaagggcaaatacacagtatatataattatattatgtcaagaacacctggaggcatcattattaagagtaattataataataataatgcaacttcattacaagtgaggcttgaagcaccaccacaaaacatggtctgcccagaaaggaggccaagttttctgagaagattggataccattcaagaagagagcgctactactactccttctcctcctcatcaaaaccccaataataatcgtgcttttaattaattaatcctccaaccttatagctaagaataatatatatatatatgtatatatatatatatatatatgatgatcagatgaagtagtgatcgtgtaatcattatgaataacagaatatatttataatatatatggttgctctttaaatagttagttttcttgtacaatcataaatatacatttatatgttttggtaactcttatatgtgctatgctaccctacaaaattttttatttttagtaaaaatttgtgattaaaagtaaaaaaaaattgtgactaattataaattattattcttaatgtgactaaaagtattaattagtaacaaaaatcacaattttttgtaaataaatttattttcaattacaatacatacttattgtgactaaattaaattattactaattttatttaaatattatatttaaatcaaaataattttttattaaaaataaaagtcatatgttaatattattacaaaatatttatattgtgaatcaaaaattatctacagtaatatagacgttcgtagtaaatactaatcaagttgataaaaaaggtcatcttcttaacgttgtggagtaaacaagaaattaaaattattttaagctacattatatattgtcattaataaaagtactatttattaacatttaattatataaatatatatttcactaattaacattttaacattattctagcttagagcatctctaacggagtgttaaaaatgtggtgtatagttatatttagcacacttaataaaagttattgctccaatttttaaaaagtgtgctaaatttggcacatgctaaaagttgtgctaaatttggcacaagatataatattagagaaacttataaaaatactgaaatttgggttaacttttacaaaaatactgtcacacgaaaatcttttcaaaaatattgtgtttttataaaacaccagtagaacacaaaacataacaactcaaaacaacagtagagcaactaaaaaacaccagtagaacaacaatgaaaactttacacagtatactgcagtatgaaacttataaaaaaacacagtaaaaaatatcgtctgacagtatttctgtaaaaaaatggcaaaagttaatataacatataaatttccctaacattattgtactaaatttggcccacaataaatgttacttttttatttactataataccactaattattatattcattgatttttactaaattttacattctttatttaccatattaccattatttaaacaataaaaaataataatttttgtatattctcaataaaatatcaaataactattaatataattaattatttgacattggaacataattataaatggcgggttaaatatagtacaaatttattttttttgtgttaaatttaacacaaattttacattattagagatggtcttagggttctactttgacttttcaataaaaaactttaaaaaatggttcaacatcaacatggcggtgctcatttatttgtttaattattgaatacttttaattaaataaaatatttaaaaaatttgagtcgacgttaattacatatatggtgtttcattagagatgccctcatgtgcaagctgttcaaaagacaatgttagaagaaacttgaattagtgattaaaactatatggtgacattttcaaatatgtgtgtgtactgtttctgtctagaaattaaaggaaataaattttgtgtagtgaagcttacaaattaaaagaaaaaatgtgtggtgatgaaactcataataattaaattagaagcgaattaattgcatgcccaccaacttgaaaggaattaatattatagtatagtttattcaaaaaaaaaaagagcaatttgcggcgaaacccccttatgttttgatttttatacacttaacccccttatctttatttttggtggcaaaacccccttatgttttaatttttatacacttaaccccct

SEQ ID NO: 384208 - DNA, 2395 bp, Cannabis indica
tttcatgtgacacttcatataaaaaatatttcactaataatatcattattttaaagatactattttaaaaatatgctattctttccattttttctaaaattacccatctcacaaatcactcccttttctttctatccattaccatctctcatagatgaccatcaccacaaattttatcaaaagatctatatcaccactcaccattctcatttttgtatataattttcaatctctctttctccctccaattttttcctctccatggacgttatccgtgtttttagataaacgacacatgtacttcttcaggtccaagaacaattgaaacgagctcattcacatgcctaactaatttagtgggtctgaagggactccgtctaacccgacactctccatcagtttcacatattctttttgctgatgacattttatttttttatcgggctacagatagttcagctttggccattaaaaggacacttgacatataccacaacgcatcgggctagctaatttctcaataacaaaaatcggtgatgtctttttctcctcacactacagtggctgctcaaatttttttctctcaaactttaggaatgcctatcagtgagtgtcatgaacgattgttaggattaccttcttattccggtcaagataaacaagaacttttcaacaatatcaaagaacgagtttagaaattacttcatgcttggaataaaataaaatccattagagggaaagaagtacttttgaaagcagtggtcctatcaactccaacttatgctatgagttgcttcaagcttagtaaaaaattttgccatcaacttgaaagtatgatggtaaatttttgacggggtaccaatcaaaatggatctaaaattcattggaaaaatatagaaatctttgtgcaaatcaaaatatgaaggtggtatgggtttttgcttatttgttcactgtatcaagctcttctagctaaacaagcttgacgaatttttaaagtgtcagactctttattaagtcgtttgctaaaatataggtatttctcaaactcttcttttttggatgccaaccttggacactctccatttttaacttggcaaagtatttgctggggtaaagaattgttgattaaagggcttagatataatgttggaaatggttttcacatagccagcagaactgatccatggattctaggtcacaatgagtttgggcccactgacttttataggatctccatcaatgcttgtttccaatttcatcaccgatattagggaatgggatagttctttgctgaattcttatttcaagcctattgatattgatcgaatcatgtgaattcttctgagtttctttgcaacccatgatcgactcatatggcattacactacagctggtatatacaaggtgaaattcagtttttacttggcgacattgttggaggaacaactggattcttctacttctaatcctcaacgcgattggtggaagtattttttaaaattgaattttccaccaaagatcagaatttttgcttggaaggttgttcaacatgttttgctcgtggctgctgctaataattgattcaacaacttgttcgctatgtacaccagcatggaaatcgattgggcatgtgctatttggttgtaaacatgctaaagtaatatggaagcactccaaatttcctattgattatggacaagcacatcgtatgtttaatggtgattatttgatgcacctatcctctcttcacaatcatgctcacttcgaattaattatttgcaccatgtgggttatatggagtaattgaaatagagttttccatcgtggagtgtgtagggaaagttccttaatttgctgcttatgcaagaacatatcttgataatttcctaaaagttaaaaaacctcagctgatgcctgctgctacatcaacttcaacatccaccatacttagaaatgaaatgccaaaagaaggtgtacttgaatggcctgaagttaaaatttgatgctgccgcaaactttgatgaaaaaaagcttagtataggtgcacttgtacgtgatcatgatggtaaagttattacaaccttttcaaaagttgtacaagggtgtttctgatctggaggctaaaaccctttttcatagtcttaattgggttaggcaattacaattctctataacgcatgttaaaacttatgctttgcgagtctctaatactttaaatgcttcatttttagatttatcatgttttacagatttaatttctaatgtgcattgtcttttattctttttttttttgagttattgtttctcatgctaagagaaatgctatgctaatctagtcgctcataaactgtactaaaatacgttctagagttggatgaaaactttgtaaata

SEQ ID NO: 384209 - DNA, 1134 bp, Cannabis indica
ccctttttttttcttgattatttatcactttaatcactttactatcaggatctaggtcggttttagggtagttataaaaaagtaagaagaagatggaagaagagagagagaaagagagaatatatatatatatagttgaggtttgactatatattgtatatgtacataatgtttttcatatctcagcagtagtagtactagtgaacatatatatagttagtgagttgtgctctgaaccttaatatgtaacaatcctttatagtaaaagagttccaccacagtactgcacgcattcccttttcttaccaattttacttaaaagtccaatattaattttctcccactacttttattacaacataattaagatcagagaattgagaaaatgaatatgttaatttacaatgattactaacactttgtacactcaaattattattacattatatattcttattaattatagatatatattttcaataagatcacacataagtgtaatttacaatatataatagttggagggtataaattttttattaaagttatttaatttgctaataaaaattttcatatgaatgtacatatcaaaaatgtgtttattatgtattaatcattaagtatagctaactttatgtacacattataatttgtacataatattttcaggtgcctacggtgtagattttgcttactcatcatctaaggctacattgcaacagctataatctatatattaatatatatatatatatgcgttattaagcatcaatcaatgtgttcaactctttctttctatagatatatgtccctcttagtgatgctaaacccactctgcctaatagcaactatattgcattgatatatatactatgtgaggaagtatgcgtatatgtatgtataagtgtttacatatatagtgtttcttgctttatcttttgagattacatttatatgtaatttacttgttgatgttatgaactactttgtgggccaatactttttgattattggatgtttatgctttcagttaggctttgttatattctcgagaataattgaattgaaagcatgtagttcatatcttgttgtgatcattgtattttaagtatatttactaaatgacaatgatat

SEQ ID NO: 384210 - DNA, 1934 bp, Cannabis indica
tctctctctctctctctatcatcagtaatggcgcttcggaaaatgctagcgaagcgtctgttaaccggtcgcagactaatcactccagaaatctctctttcaattaatacgatcgttccaatcaacgacgcctgcaacgcgaaatttcaccgggaatatataacctcgccggattcagcagagaaaggatttttccggcgattctttcaccggagagctcctgacaaatcagccactcggctgccggaatttctgtccttgccggtcggcgaaaaactccgggagaagctcagaggaagcgacattattagcagcgatcgcatccgactcgattgtctgatcagtcctccagcgccagaactcatcagagccgatgatgaatctgatattttcggcttatcggtagacgacgctaagaagattctaaggcttgcacaaatggagaagctgaaatcgaagctcagagcaatcccagagaacttgatttcctattctgagttctttcgaatctgcgttgaagattgtgagaacgaaaatcaaggagcggagttcgcaaagacactagacgatactggaaacgtcatcgttttgggaaacgtcgttttcctccgcccagaacaggtatacattatttttttttaatgtcatttacgtcatttcaccaatttttttttgtgagtgtgatagagaattgtataataatcaggaaaaaaatatatattattttcaattttatcttgtttttttaattaattttttattattatggataatctaggtggcgaaatctatggaggccataatttgtgaggcagtgaccaatccaaacgatccaagaagaaaggtactggaggaaatggagaaacaaaaatcgatgatcgaccagaaagcaagagaattggtccgtggggagctttatattgggctgggcttcgtactggcccaaacacttgcggccatgagactaaccttttgggagctgagttgggacgtgatggagcccatatgcttctttgtgacatcgatccatttcgctttgggctacggcttctttctccgtacctcgacggagccaactttccaaggctacttccaacgccgctttctctccaggcaaaaacggctcatggagattcatagctttgatatacaaaagtacaacaagcttcgagaagcgttttacccatcaacgacgacgacgtcgtttcatcatggccttgtttaggcctttatgggatttgtaaatgtaattgtaatcatcgttgaaagaagagtagagggacggttaacagttgaataacgtactacgaacatgtaggtagagcagtaaaatttagggtaaatgggagtgtgtggtgtgggtgaaaaagtttcatgtagataactgtaaaaattgtatatatatatagtttggtcattagagtcatggacggtttaagttcagtttgggtcacagtttagttttattagagtgatctgacatggaagggccttccccttattaggctggaatctggattatggagtttggacttcttctactttatttttggaaaatttacaaatttatatattttatattaatatttgaaaaactctatttttacaaacactattatatttattaaatttcattaattaaaaatacaactgtcacgatttacagtaacataatgaaaatttgttactgtattaacataacaaaaacaaatttagatagtgcaaaatttaaaaacttgatacaaaaaatctataagtggtaccagtattcttttaaacactcttagcccatagagtcacgctcaaacaatgtaatcaattagtaaagtattaaatattatacaagcaattgacttaaataaatttagactcactttaccgcaaccttttgtaatccatcttgctaatttaatctctgaaccacatcaagtagt

SEQ ID NO: 384211 - DNA, 880 bp, Cannabis indica
aataataataataataatacattgttaagagaaattgaaaacaaaatcaaaataaattataaataaacactaaatgaagaaaaaaatgaaaattaaactattaagagtaaactttataaattaatttaattttttttataccaataatataaaagtgtatatatattataattttttggaatgtcaatttggtgcttacaatttttttgggagtatgtaagaattttattgctcactaaaataccaatcacaacttacaaccaagtacaagtaactagtgatactcaaattatctgaccaaatactattctctatactaattttttctttataaaaaatgagaaaatctcaaataaatttctctttaaattttatgaacaataaacttagctattccataaacaattattacaagtctcccaaatagtatacctctgaaatatgtgttttagaccttttggtacacatctatctctttcatcattaatgagatttttttagtattattttttttccttttattaattttgtatattatagtgttttaacactacatgttaattttttaaaaattttaaatagtttatagtgtcaaaaataagattcaaatattttgttacactcgttattatttttttgttatatatatacatagtaactagttatttagaattttcaaaaattttacaagttatcctaaattattacaaattacaggatcataaaaaaaaccactaagaagtttttctctaaatgttgaattcaatagaaagtatactaaaacactcattttaggaggtatgctatagacttacctattattatcatgttagataaattaacaattaacccaagatctatttgtatataacatagaaca

SEQ ID NO: 384212 - DNA, 1557 bp, Cannabis indica
aaaaaaaaaaagaaaaactaattctaaatcccttcaaaataaaataattataataataaaaattctaacaattctaaagtcatctattgtagcaatatttcttctttggtctgactatatatcactgtcactaaaaattctttgtacattagttttattattaatttgtgatgtaagtagaaaagaggcaaagctaattaccacattggttgacataatgacttaaaagtataccatgttagaaagtcctgttcaattatctctctatttttgttctcaaatttaaaattaatcctttatttattttatttcaaaatttgatttaatacatgttacacttcacttctctctaagttgtatttttctcatctcctttcacctttgataatataaatcaatttggcatataaatactataaaccataaaaactgtttgaacagaacaacaatatgtttaaacagaaagtaaaatcaaacatgaaataaagaacacaatattataaatgatattaacaatcatttcgaattgctactagttcacgggttcacgccagagaataaaatttattagataaatcttaagtgattacaaaactaaattgacttatacaaataaagattttctttttgaacttaccgtaattgttgtaatctattattctaatcaaatttctgaagtgttgagaccatgaacttccttcaaattgtagcactcgcacacttcctcctgaagagtaactcacttgtacttttcctctcgaaaagtgactcacaaataagtcttctcccgaacattgatgaacgatatctaaagtgtacaacttgcacaattttaacaagaaacaatacaaaataatgtattataataaaatactaagaactaattagactcaagtttttcacgcaatgaagaaactctcctaattttgaaaataatttgaaaaaatgatgcaccaagagagatgatctaaaccaacgacctaagggtgtatttatgcactttagaaaccgtctaggtcgtggacaaagaatcaagaaacaatcaggtcaaaaaatagagaaacttcccaaacaagaaaatcaaattttgtttgaattgtccaaataaatacattgaagctggataatttttttatcatatataaataagaaaacttgacaatctttattcatacaacctttacacggtttcttgactaagaaatcacatgagaatagaataaatataattaagactttccttaaaaatataaagataataccaaatagtttaaataattaaaactcgtatttattggccaataaagtcacaatctaatttgaaagacctttcacactaggaaaagagaatatttttgaaaaagcaaatgcaaatatacaactaatttcaaaaatactatatatattatttttatctattttatcaaatatgtcaataaataattttacagaaaaattgggtcacatcacattataaaagggaaacttacaaaaatactggaatttgggttaacttttacaaaaatactgtcacacgaattttttttcaaaaatact

SEQ ID NO: 384213 - DNA, 2373 bp, Cannabis indica
ggagaaccagtttgtatctataacattagtttttttggaccaaaaataagtaattctacctttaacatgatttttgatcttgtttatgatcaaagattctttgactttacccgaattctacactatttcatttctagcgcgccaattctaatacactaaagttgtcattgcagtcgcatatacttatttatatgaaacttgctatatttgatttttccaatccaacgaataagcttgttcaaattactcgatccagccctccaagagagccatttttcacctgttggagacaactaaggggcaaggaacattggaagaaaatattatcagccgattcattgtgtggcagaaaacacaatttgcatcaggcaccatgtgaaattcagcaacctttcttgcagttttgtattgcaatccacaacacaaaactatattgagtgatctttcccatacttcattgctctatcggattttgttttggtttggacataacaacttatagccttgagagatttgatatttaatctctgagaactattgtaagtcaggcacattgttgagatgatctttaacagctatcaatctctgctaacaccaacttccatgcaaaggtggtttataagaccatcaatcttcgtctttgatatacacactatgtacccaaagtacttatagattttctttcttgttagcaattgtccaaacatacttaaagagtattgtaatattccattctattatcctcttaaaaaaaaactaatataattaaaaactaatataattaaagatatatattttatataaaataaaaattattaaaattgagtatatataaaaaaaaaaaaaaaaaattaggagtacatgtacaaataaaacttcccatatatatattcaagtttttttccattaaagatacatattcaatttgttaatcaataaaaatatacatcataaagtgaaacatgagagcgttgacgaaattaaccaacaaatatttatagaagaatatgaagataggccaaaattaaaacaatagtaaatatttcataaataataataaaaaatattgtaagggtaggacatatattaagaattatttatatggaattttaaaaattcttaaaatacaaaaaaaaaaaaagttaacaaaaatatgagagtcatatttgtaatgaaatatttatttctccatgaacaaaatttacaaatttaataatataaaaatatatatattttgtaattataatttataaatttgtaaagtataacttacaaactaaataaaatgttatagaattgttatacaaactgttttgtgttttttttttagtaaatttttcaaaaatgtagaatggtattaatattatatatatataaggaatattaattatttatattaatttattacgagatataagcatatatagatatattgttagggacaaagctccaacagacaataataaagtcaagtaagaaaacgttaggtgtttgttgaaaggtaacaacacaattaaccacatttttgtgttataataataaggtgtaattctattatcatcatcaatattaattaatatatataggatatattagaatgaatattattaaaagtgaaaagggtagtgaagtgatagtaataataatgattttctcttgtgtatatataatctttgaattggataagacaagacctattagctactaatttattctctatagctcttagttatatataaatcctttttggacttttaacctaaaaacatatagactctactctttaattcacatcattgctctccacaattttcatatgcaaaatatatccttcaaataattagatttctgccatatatgtatgtggatgcaaaatatacactagtataatttagggcctatctaattgaagtataattggtacttgtttgtaagtaggaacaaaaggatcataaaataatatatctcattgattattaaagtaaaaataatacataaggttcaacagaccaaagtatataggatgcctaaattggagttacctttaatgaatagtatttttttttttaaattgtggattcaaccttaaaaaaaattgtcaagtcacttagtattattatatgttagtgtgcgtatcattactccaatattaatagctatacctaggagttagaatatggtctcggtctttaaaccaaggtcgagtatgtactaattacattgagcattgctattaggcaccagtggtgcctagcacctttgcaacatgtcgcgttgcgattgactagcgatactccctaaaaactattatattaaattatatgggatccgatacttagttgtaccaatagcgatattgacacataggaaggt

SEQ ID NO: 384214 - DNA, 1947 bp, Cannabis indica
tttttctagtgatttcattttttcttttctcttccctaatttgagatatattgtttctattttttttattattattatttataaggtattattgtattgacaaatcaatattggattttttttttgagtgtctaaaaacataggtcggatatggaagaagtaaaatagtaaatgaagtgttatgacttatttgggtatgcttaacctttacattggcccacctcttaggtagctgtcgacttgaacaaaattaataaattttcatttattgacttgaagtattcagtacaattttgtccctattttttgttttttattttagtttcctactattagtattaatccctaaattataatataatactgtttatacatttgtaagcaaatagaagttcaataattaaattataaaaattaaacagatagttgatgctatttttcatacaccttagaaattatttaacttttaacaaaaaccagtattaataacatgagcaattataatttgatttagtagtaatatttaaattatatcagtaaaaccatgtgggcatttggtctagtggtatgattctcgctttgggtgcgagaggtcccgagttcgattctcggaatgccccttttttcctccctaatatctttttcctctctcttttcaactacagaaaaagaacaataataaaactcaaatattgttctaagttataaattacgtttagaacacaaaataaaaaattccaagtcagacaaatgttacaataatattggtgacagcacttcagtgcttgacccaacttgaatgaagtttttgttttgttttgaatgagaaatcatctgttttcatggtttttcttcatgccctttttgcttgatattacttagtcttgatgaagatgtagtttcaggtcaaatgccttagtgatcagcaatcttggttgattcaactgaagaacaatcttaaatacaatgctaatataatccaagaacaatcttggatcttcaaattttttacatgtttgtatgtagatagtattattcattatgtaacaagcattttttattgcacatatactaaagttttctttaggattgtgtaaaatgaagtgatagaccgaagcaagcaatgtcttaaaaaaaaacgacaaatggccttgaagaagttaaaattttataaaaagcaataacttaaataaataaaaataaagaaagtgccaaaacttaaatgcacatatttttacaaactcttaatacaaaattcagaaaaatatccattttatttttagtgagcagctagccatcataagagccttgatttcttgatttttctattctagctctagtagagaaatgctaaagggaattatggtacctaacacttttatgagatgtaatattactatgggaaattttattacatcccaaaaagttctaaagacacctcattttgataatttttattttatataaaatttatatttttaattgtactcattttttttaacttttttctttcaatttatattcttaaaatgtatacctatcaaacaaaaataacgtgtattttaaatattatgacaaaaaaattaaaataaaaaatgatttgaaaattttttagaaaaaaataaaagaaaaaatacacatgagtgagaaaaaattaatgaaaatgaaattaaaataagtattgaaattaacttaaaataatgtgaagaaaaattttaaaaaaaatattaagaataatttttaaaaattatttaagtttatgtttttttttttaattaatagggtgtatttataaatttaagtggtgcaaatagaactctcctattactatggatacaattttatatcacgtcctacttattttaataaaaattaataaaaaaccgttaatcaattataacatgtcatatcataaaactgataagcacttccatctaatctacacat

SEQ ID NO: 384215 - DNA, 529 bp, Cannabis indica
aaatatacattttattttaaaatatgatataattactaaaatattataattatggcttaataattacatagttacttcgcccttaaaagtcattgtgcttcaattttgtaggttcgcttttattgatcgagtatatattcaatatatatttgatgggtgtgggttctaagagcataatagtatttcaatcaaagttcaatttctatatttagacattcaaatacaatattaagtgtattaaaaaatatataatatatataacatatttaaaatatatatttaaaaaaataaaaataaaagcaatgtagaaactttttcattcacaaaaaaacaatttctttgacttaagtatttcttatgatgaaatataattaatttagaagctaagcttactcattatcattacaaaggtggtcctacaacatttttatacttaattgaaggaattggtcttattacatttcttaaataatttgatcacgttttgtatttatatgactacttatttataataaattctatatatata

SEQ ID NO: 384216 - DNA, 2253 bp, Cannabis indica
tatcagtatttataaaactctggcttatcttaaaaacaatttggttcctcatttttctcaatccctttctttgatgaacaggctgttgctgcaggaagcttagtaaacctggcaacaattttgtattttaattccattcgagtgagcccttttcctttcttgtttctttctatgatctcggtaagagtttcttgtatattaagtattttgtttctcaggttcctgctatgaccgcatatgccttttgtgcatttttcggcattcaagttctcattggcattataaaggtaaagaagctggatgagcgtgaaagattaataatgggaactgcttaattggtaagtgaatcttgtttcttacaattgctctaaagttcaaggttgcatacttcatagatcaacttatgatcttcttgcaatttcagctgttggttcatctcagtggctattcaacttagaggttaaaccattcaactgttgaataaattgggaaactgaaaccttctaattcaaaaatttgcccctgcccaaatttgagatgtggagatgtttggcaccaaacaaaagccttgtcatgggcaattgtttcaaagccacattcagtgtaaatttccacttggtattaggatagagtttaggttagccaatgccgttttgttctataactacaccaagtaacgtccgtttatttcaagatgcacctgaatttcaggcttattattgtcttatttgagcagcctttggccttgatgtagagctgtttttgtaactattctgtagtttggagtggtgatcagtgtagtcacgtggcttcccatcataatttacagagcaaggatctctgcaatatcgttgtataattctgtaaccaaaacacactactcaatttcaaataaggagaaaaaaataatgcaagtaaatataatataatccaagctagatactgattttttcattttttttttaaatattgattttactgctgcgactcatttgtcttccttagagggcatattgtcgtatttttgtgtgaatggttacactaacttatgaactgttgctctctaatctgataaagtggactgtatatttatatacacaatataacaaagttgcagaatatgggttcagttgacatgtgatgttactctgtttggttcacatcgtgtaaagctgagccacttttattcatatataacataatatttatatttgagacaccgagagagagagagagaggcagctagcttagctaggtagatgtttttggccccaatttcattatattttgtagagagaagaaataactgataacatgttgggattggtgaccacaccacgtcattggtaattatttattcatgcagatgtgctgttgtccttagtccttactttcttcagtgtgtgtgtgtgtgttcacttgtttcacaactcgacaccactgctgacaaataagtgttcaacatgtttcgtctcctttcacttcattggctttttgtcctcatcctatacaacacttcctttctctttttctaatattaaaatttacataacgggaagataccactctctctattcaaatggaaattggcattcagttaatatctttctaaaagtaacttatttattctctatctctatgttgattacagttttctcatttgacttggcattttcattcatcttcttagcaattgttgccttatattgacaattagataagtagtttgttaagagtattttaaaattcaagaaatatgatgtagtaactaatattatatatgagtttatgcgacaaaataattaataattacataaaaaaataatattttttaataattaatatttaaaatagaatatttttactaattgcacaatttaataattataaggaaatttacacaacacactctacatacatactttttttattgttattttgttttatatttttacagatttttttttaccttcttacaattttttttattacttacattttcacaaattctattttttattacatttgtttttttctttgaaaaaaatattactttcacgttggtttcgcacaacaatagtgtgaaaacaacattgttttgaagcaacagaaaaatgacggagatcttacaaaaatactcatttttggttatttttacattttcactgtcatattttctaaaaaatatctttactgtactaattttcaaaaataaaaaatctaaaaacaacttaacaaacatcataaaataaa

SEQ ID NO: 384217 - DNA, 1805 bp, Cannabis indica
ctcatggagattctaagaacttattccaccttgtcgggtcaatgtatcaactacaccaaatcgaatctatgcgttggtcggaaaatccagcatatcgagggtcaaagacttgctgcatcgcttggagtaaccttcattgagaatcatactaaatacctcggcctccctgcttttgtgggccgaaataaaaaagaggctttcggcattgtacgcaacaaggtttgggagaagctacaaggatggaaaaatgggacttttctctcaagcaggccgagaggtattaattaaatccgttatccaagccataccggtctatttaatgagctgtttcgaataacaaagggattgattagagaaattcaagctctaatagctcggttttggtggggctctacaactacaaaacaccaagtccattggggaagttgggagaaattatgtgttgataaatgggatggaggtatgggattcagagatttggaggattttaatcaagcccttcttgcaaagcaaggatggcaactagttgctcaccccgatagcttacttgctcaaactttaaaggccctttactatccaaatactgattttttaagagcaaaggctggtacttggtgctcaaatgtttggagaggcatcctttggggtcgcgatcttcttttgaaagggattagatggcgtgtgacggatggtagcaaagtccgcataaatgaggataaatggctccctagaggagctcctttccttctccgaacaccggccatggtgcctccaaacactcttgtcaacacccttatgaatggaaatggtgagtggaatacagaatatattaaggagaagatgcatgaagatgacattccttggattatggggattcaaaccaatcaaggatatggggaagacaatctgctatggcactatacagagaatggtgattacaaagtggctagcggatatattatcaaccgaattgagaaacagggggccgaggcatccaataagtcaatggaaagaaattggtggaagacagtttggcattctaatttgactccaaagatgaagaacttcgtgtggcgagtatgccacaattggattccatcaaaaagtgaactggtgcgaagaggtataaagatggagagaacttgttcgggttgttggaattatgatgaaaccattagtcatgctctttggcaatgcccaaagatgaaacaattttggaaagctgctgggttttggcacttattcccaactggtctaagcaatatgaaagatctgacagagttcctaatcttcatgagtaaacaatgctcagttgaagatctggaaactttcctggggctgagctggttggtttggaaccaaagaaaccaacgcatttttcaaaataaaaaaactactctggatagctggactccttgggcattagactacataaccaacactcttcacaggaattttgagaaaaagccagcaacaaggacaaggaatcaaaactactggatgcctcctaaaccaggtaccttcatgttaaactgtgatgcagcggttaatcacaacgatccggagtttgctctagctgctgttatccgagaccaggggggattgcttattgctgctgaagtagaatatcatacaggtatggtctcggtgaaactagctgaaattttggctatcaaactggggctgcaactcacccgaaaaaatgcagaccaaacctttactgctgcttcagataacgtttcagcaatcaaccagataaggtgaaactcaaatgctcgggcagattgggggacctccgtttaaat

SEQ ID NO: 384218 - DNA, 3991 bp, Cannabis indica
tcggctgtaattggacagagtagactgtcattttgttcagctgtaaccgagcggcaaataccattgactacaaagccgcaaatagcacgatcagtagcataaagagctaagaaataatcaacaattacctggtctagccctgtgttccagcctttccaaactccatcactatcttggagctgcacaatttgattatttcgtttgcgtgagcttgcggtggcgtaaaaatatttgctattcttatcccctccatttaaccaaaactatttggaccgttgcttccaatagatttcttgctgagctaaaatctcaaaatagttacattgttcactcaaaaaatcttcatttgaacccggattgtcacttatctagagtcttgctaatcttttcttactatttgacagcctcttcttaaaatgcccggtaagatcacgaccccaatcaatcaaagtttcaaggcatagttttgttttatcaacaagagagagatggacatttgcctcccaacagtttcggacaatttgaccacataaaggctcacgggaccaagcgtttttatagcgtaaaatagtgatcggtttactcataacagcaggagcaggttcaagaaagataggtgtatgatcggaggacgaaaaatcaaaatttaacaaactagcctcattaaaaatagttagccaagattgggtagcaaaagctttgtctaacctttttcaatgtgattttgagtccctctaccacgttcccaagtatatctgtgaccacgtaactgaagctcacacagtcggcagtcatggagagctgcgttaaagccattgattagtgattctggatagagccgaccccctttcttgtcttcatgagtagtgatgttgttgaagtcaccgataatgcaccatggcaagttcgaatcatcggccaggtcacgcaggagctcccaagttgtatgacgtagagagcgatttggttcaccgtaaaatccagtgagacgccagtgatcgtaacgtgggatatggacttccatgtctatatggtgggcagagaacttgagtaaatgagcatcagaagagattttccataaaaaagctaatcctccttttctaccttgggctggcacagtaaaataattttcaaagcccaaccgaattttgagcctatccacaatttcattgttgcataaagtttcacaaaggataaaattgggcttcttttgaatgcagatatcaacaaggagttgaatggcccgtgggttcccaagcccgtgacaatttcagctaatagtattcataatgattggtgggcctggacattaggacccacctattccccatttttctagaagcccaataacatcaatattatgaaaattatttggctcagaaatacaatccacatcatcttccactgatatagccgactctttattggagagaatgtcaaccattttcctcttcaaatcataaagattcatatcatcctcggacataaatgtggaatcattctcatgaatattcaaaggtgcctcatcaatgtttttcgaacttgattgacccgtgtgcctagaattaaggatagattgctggaaaatcacttttgttgcaggtgtttgattgctttgcctggttggactcgtgatttcagcctggaattgaggcatggcattgaaggtaggagattgtggcaaattattgctaccagcagaggaaggagcaagtttttcggtgcaaagccaggggaaagctgtgaggaagctttgacgttttgaaggagcacgcatttcattactgtacggttttgtgatcatgtcatacgacgtactgcagaatctctccgaatgtcccatgatgccgcaaataaaacagaaggtgggaactctctcgtatttgaaattggcgttgaacacatcaccatttttcttcttgaacttcatacgcctctttagcggttttccaacattcaatcgaacacggacacgtaaatattcacgccaaataccttgaaaattgttaggatccgattcgtgaaacattccaatgtaattatctgcttgacaaacaaccctttcagttttgaaactagtctgtaaatcatggacctgcacccatatatcgagtttgttcagaggaatagttctcgggttttctccttgtttgagtcgttcaataataagttgcttgcgatcatacgtccacggactgcccgtaataacacgctgtatatctatttcagggtaaaattgaaataaaaaccagttttgttcaagaatcttaacatacatgcctttccccggtttccatagatcaactatcatgttttggaatatctgaaaatcagaaactttcccagttaataatcgtccaacgagacaccaacaatcatcaaattcaatctcttcgatttcctcctcctcgtaagtcacttcattttcttcttcttcttctagacaaatgtgtttccactgctgttccaaaccggttggtaatcggctgcttgaagccatagagaaaagaaataatgaaacaaaagaacaaaactctaaagaatagagactaatcccatgtcagaggacatgactaaaaaattgacctctttttattaaggtggcatttagttgaagataatgaaatagaatggaaataattttcattctattcatttgttttgtatggaaatatttattaaaattaacaaatatgcatatacaaaatcagcctagtatagttaacatgcatacagtttttttcaaaataaagttaatagataatatttaaatttggttaattaataaaattaatataatatctaatagatattttttagtatggcatagaaaaaattatttttaatgttatatatattttaaaagtaatttttaatatatatttgatttttttttgaaaacaatatatttgatttcaaataataatataactaatttataatattattttataaatacttaaattcaaactttgtttttttctaaaaaaattatcattatatatacctaaacctatattataacgtatcattatatatacgttttttctattctgttctcttcttgaaacttaaaaattttctccattctcttcttcaatatagtttttcttttttggccatcaatgatggctacaccaacgctgtggtcttctttgtctacgccatcttcattatatccactctcactctcaacctttaaatcaagaaggtattatattttttttatgtgaatatatttgtatatattatagttatatatagatcacttatacactattataatgtttttattatacttatggaaactacaaagacatataacattatttttatcatttaatttattatttattattattattattaagttttagtgttagacatttttaaaatcattattttattacatatatatttcataaatagctcttaggagatacatgaggtttgctcttacactatgtggtattttatacttactagtttttacaaaaataagaaataagaatgtgccttttaaaaatatatttaattttatgttatttattaattaattttcactttttcctatatttttgaaaaatatatgcattaggactttttaagatttgaaagatggcctttcttccatttgaagtagaataaagtttttgcaaaattacttatctatcatctttgcaagcttttttttttaatgccaattgttctgtctctaattttatttttataaacacttggtgcttagaaacatccgccccaatctctttccaaaggctcttgaaaatcccagaaccaaaccctattctgcttatatatttggtgcaagactatttcttcttctttatttcactggatttttaacaaggtcattttttttttctaattacagatggaaggtaagtttttgataattagttaaacaaaaaaatactcattttcttgtagcaaaaagaaaaaaaaaattaactcaatttttaggaaaaaattt

SEQ ID NO: 384219 - DNA, 2353 bp, Cannabis indica
aacaaagcaaacacatttcataatcttatccacccagctcgtgtcataacccaaagagatcatcaatgcttccaaaaagtctctgacacatgcttgggattagttacctaggtattaaacatatccttgaagaatacttttctctctcgggccagagaataaatttgcaaatatctgatctttgtgtgggctgaaaagtttctcaaatggaaggacaacgccttgcctcagttttgggtgtctcacttgttgaatgctatacccactaccctagaatgccaacttatgagggttggaggaaaaacgaattgtttggttccattttgggaaaaagtgaggaataaactccaaggatggctcgagaagtgatacaagccattccgtgctatgttatgagttgttttcggttgcctcgagaattgattcacgatattccctttatgatggctcgattttggtgggggtcttcagataataagcggaaaattcattggggaaagtggaataagttgtgtaaatccaaaatagagggtggaatgggatttcgagatctgattaaattcaatcaagctttgctcgcaaagcaaggttggaaaattattcataacccgcacacaatgctagctcgggttttaaaagaatactatttcactaatggcacttttttagaggacaagccaggggaacctgctcctttatttggcatagtattctttagggcagaccttgattgcaaaagggattcgttggcgaattggcgaattgaatcgggtaggtaagtgcggatcaacgaagaccattggcttccctaacccatcaccttctctcttcagttccctgcaacagccactccaagttaagttgcgggcactcttaaaaatgtggatggttcctagaagaatctcatattaccaccatatttcataaggatgatgttcctctagttttgggttgagctctttgtatctcaacagataaggataatttggttgagcactatacatctcaaggcctttatacatttaaaagtggttatgaagtgagttctaatgtccattaagctcttggcaattctcaagaccgtcatctggtgtggtagtaaacgttatggaagttggaagttcctttcgaagtcaagaactttacttggagagtttgtaaaagctggctccctacaggttctgcccttgtacaccgaggtatgagattgatggtatttgttgttggtgtaagtcccatttagagtttatcccccatgccctttaattttgtcctattgttgtggaaacgctttttgctttggcaatactttccgaactatcatccagaccccttggagtttattcttcatgtgctcacaggtatgtcaaggtttgattttcttcaatttatgattattttctgcctgctatggcaaagaaataataaaaaatgactcaatatttacacaacttcaggtgagagctagttggattgagccaattttgagcttaatgagctgcttccttcaccaattaaggatcttaacagtaataagcaactaggtgttgagcattttggttggaaatctcttccgggagggatgttttgtatcaattgtaatgctagtgttcatattcttggggattgttgtggctttggaattgtagaaacgggaagtacattttttagtggagttggcggaaagtcttgatgtccaaataggtcttcaccttgtcttcaagctgcaactctccccatgtattctgtaatccgattgtctgttggtggtctattttctgcagcacccaagccccaacgacactaactggagtgttttcttgctggaccttcttcattccgagagttttaagatgtgccaaattgttattcatgctaaaaaaagtgtaattgtgttgctcattgtttggttaagttggcttttatgtttggttgtaaccaagtttggtttgaggatttgcctagttgtgtgtttgctcatgttaaagcaaacttgccctccatggtgtagttgtgtgttttaataaagttactttttttttttaaaaaaaaaaaaaaaaaaaactactccttaattttgatagttatatttgcaccttataaatttgtttccttttaggtggactggactataggggtgtgcataaatcgattcaattcaataagaactaatcgatctaattacaaccgaccgtcaaatattggatctccaattgttattggatcagatcagatgttaattttaaatatttaattggatcggattggatgttagatggggtgtccaaaaattcaatacatccaacatccgatcgaactcattagtatttttatttaatttggatgagtaatt

SEQ ID NO: 384220 - DNA, 2514 bp, Cannabis indica
atgtagggtattattatgaccattcatgagtccgagtgcgtcatggagattttggaattcattggcatctccgatagccgtctgggcgttggttccaagcgaaacagttgtgttatgaatgccttggttgggtgcgaaactgttattcccagtctcttgcacaccaggctcaatttcatctacaggaattgcttcaccattccccacactcgtcggctgtccaggattaacagcaggcgaaaccctcatgttccctgggttctgcgatgtagaatccagcatctgtaaatttgcaggatcagccaggcctctacgagtttgcaccatcgtattggcgattggatgttgaataaagagcaattcgtgatccttctctcaatgaaagcaccaaaatattgacttcacttttagccaacgacaacgagtctattttataagcgataaacgatttataataacaaatatatgataagcaataaaaagacacatgaattttatagaggttcagccccgagcagttcggtaatagcctaatccttgttatttgtattgacttaagatcaaagagaaatattctttttcttatagctcttacaacagtatctctaaatatataattcttagataatatatttagggtatagtcttagctcaactgctttttgaccgatcttttgcccagtgaatatgcatcactatttatagggttcgtaagcttggggaggaagagtttcccctctcgttacaatgcgtataaacagaaagatcgaaggatcaatgttgaatgcaaggatcgtgggattgaggctgaatacactgataacaggatcgtgtgtatgccatatccacgtaaattgatccctgagttatagggattgtgctgatgactcatgatgcgaaagtagacttcgctaagtgtttggccattctgtgaggattactgaatactttgctctgggcatgccagtgaggcatcctgctcggactatgcttcccgagcaggtgttccaagtagacttcacgtgtcaccattcatgtgatgccatgtcagagtgcaaaaattgggataacaaaactcatctattttagaagaaggaaaaaataaggtggttgaatgaccttaaagtgtttttagtgcaggtaagtgatgaaatcagtatattctgttctcttgctctcttctttcatttattcagttaaacttttagttggagattacctattgcttgtaatgcttatgtcctttcttccttctgtctaatgttggtgacttacttgcctaaataaattaatcttattttttgttaattctgaagttgaattttgtaccatgtttttacttactgttttgggcatttttgtgcagctagctattccttcacttttgatgtggaagcatctaaaatgataatttagttgtaatataaattttgttctaaagattttatatacacaatcagttaagttggaatttaaattttgttctaaagattttatttacacaatactgatctgttttctccatcagtatagaaaatgaatatattatttaatgtgaagctgatgtgatacatatctcttatttgttagagtagggtggagcgtatacttgatcccttgccttagtttctattttgtcatttaaatttcttatctactgttttatttactccatcagtatcttagaatatttcttttgagtagcaactttgaaagtacacatatataatatattatatattgatgagcaccttaggcttacccattttattctatgtttgagaataatatgctaaattatgtactcctaaaaacatatgggtaagatggccacaaagtcaatgaggagcttatgggttgtgattgtctcaagctgctcttcaaattgggactttcgaaaaataaaatgagaagacttgtcttcttagagagggaagagcaagttgaaagactagttgattgtgggagttacactttcatttagtatactctttttgttgcaggacaaatatctatagtgaacgtgtttcttattgtttataatcaattcttacaccttttgctctcacgaaaattgcagattcaaaaggaaaagatttgggaacttgtttaacctcatctgaagcttcaatgtgttaagacttcaagactgaacaatattgataaattggtataatgagatttataatacatttacaaggccaatttagtttgtgcttgagattatgtttgatagaaatattttgtatttcatattatgaatattttttttttttgctagatattttcaatcacaaaatagattttatgaaataaaattaactaatctttctaattaattttgttatgaagagaaaaaaatattatggaaattgaaatttttttaattatattttaggtttgggagaatgataaataataaaaaaaatatattattattaaatattttataatattaatataagtgtaaaaatgtattatgaaaattaaaataataattatattttaagtagt

SEQ ID NO: 384221 - DNA, 3893 bp, Cannabis indica
gaggcaccaggtctcagggtcattgccggagggttggcttcaatggcaacagctggagccattcttgttttgattacgtacgtttcttcctcggccacatttgtaaccgttcgagtaacagtttttgtttttaccagatgagagattgtaatggatggagtattgagattagatggatggccaagggtgtagttgcagggtgagtttgtgtagttctttatctcatgagcatcaataccgggtgttgtgcacaagaagcccaagtaatcttcgtaacctgagccacggaacagaacaccaaaatattaggagttaggtagattccaaagaactgtgccaaattcttattttgcacgatgacaagaattcagttggaaatattgcagggacagaagaaacaagctaacatccaagaaaactatagaatcagagaaacagctacagtcccataaagcaccaactgtccatctaagcccttagaaaatgtcaacatagttttcttttaaaaaaaatctctttgttgaagtccctagcacgactaagccaatgaaatccttcaagctaagaaggccttcattcaattagactacactaaaagtaatagaaaagcaaagaaggagaacatacccgcatcaaagatgagtccaggatctaatgcagctcgtggattaacatgaccactaccataatcaaaaggtgttgctgtgactagcttcaaggcttcagtttcagaatattgttgtgcttgaataggtcttcctcctctgtccattgtcgctgttgttgtcatcaatgctgatttaatggcagcagggctccaggtaggatgcttctgcttcacaagagcagctattcctgctatatgtggtgcagccatgctagttccagatatcatggcaaatccctctcctgtcaaaatcaaaagtaaataatagcaccaaagattttgtttttcaaagcatctttctatttttatttttcttttccagcttctgataaaaacaggcatgtctacaaactaatgtcattagtttgtacgagaacacagagaagtaaatagttctagagacatttcacatggagtacaaactaaggtcttggaaccaaggagaaacgtatcacaatattactaatttttgttgtaaatcctaagaatcgaacttacaagaacttcaattttgtgtactatcttttaaattttcttttttcttttggccctggcagttcaacactctcagtggccccaagtttttgagtcaagggggattcgaacctttagaacaacacttaccagcactttccaacattcttccttgccattagaccaccccttggggtttgttaaatgtattatcatgtaaattaatcaaattttgaggttagtatccagcgaatttagctccttaataagatcattaatttatcaaggttatcccatattttcaccatgctattaaagcgtgcattgccaaaattctagttaaaatggtcccctatttagcaccattatattgtggtttctcagctatgttaggtggagagacaaacatgggtcgatttttgggatccagaacattagaatctatcagaataaagtaaaatgcttaccagcatagttaggctcatctgttccatttggagaccatgcagcccatataagagaaccaggagctagaatatcaggtttaagaagatctgcatcttggaaaccaaaatccttaatgtttggcccccgagccgagtatatagccacctgaggtgctgatttatggagtattggcatcaaaccatctccaatctttccttcacctttgaagcttttcactcgtccggtccagtctcttgatgtagatatattataataatctatgagatcctacagaacatcaatcacaatgcaccagaaaatattaagaaaaggctggtgcaagctagcaaaaacgtagaaataacaagaaaatcaagataaaaaaaatagaagggtacatttatcagagaactgagcgaatttatgatcaacaacagtatttggtcaagacaactgaccaatgcaaactcatattaagggaaacatttggatcatacactggattctgtttcaacaattattaaacagctttaaagtacaggagacaacttgaaagaagcaaataagggaatagatacctgtgacttgctgacatcagtgataagaattcccggaatgccaacaggaacaggatcaaacttcatccctggagaaacattttccacagcaagaacgaagccagctgcaccaagagtctttgctgtttctgaaactttcttcattgatgccgtaccaacagcaaaattgaaggaatagccacaaagaagaatatttccctcaatcaacttcttgttcagaacttctggtctctggcagtctgaggggctatatttcattactgaggaatcgagcaagacatcgtttgcagcaaccaatgtatatgttccatttaaatgtgttgatgctgaaacagaaaaataaaatacaattcataagaaaataatgaagcaagatcattgcagatcttagagacagaattttaatgataagaaaattgcaactgccagtgcatggtgggggatacagaatgcggaaaggttgccaaatccctttcattagatttttatcaatacgtcccaggcacagtaagcagaagcaggctcaaccttacagcagagtggcactacttaactgaatcaccatgccattcattaaaggtaccatttctagtctttcacgatgggatttcacccaagaaaagtaaatttgagctaatctagaattatgaaacccaggtggaacttagttactagtcagcgccgacaatatttctttctttaatcattttatcttcacaattgcttatctactacccgccctttgtatggtcaaagtagaactgtttcctttccatggaataatgaagactttaatcctctgtcgaaagaatgagctctatttaccttggatgtttatgggtcatttaaataaaaaaaacatacaatgaactacgtttccaaccatagttaaaaagagacgctatgaatgaaccagaatcttcatttgtaaacccaatcctaaccccacacttgtttcattatttagttacagtgaaaaagagggattgggtcactgcaaactctgccaagttagttcactatagtatgatgaaaataatctagtacgttcataatggcctggccactatttttctgggattataaaagctgttattcacaagtagaaaacaatgtatccccgtttattgtttccagacgtccaagaattctatataaaaataatatgataataaaaaaaagtgcttggcatgtcaagattcatttcttccatttcataataataataatatgtttaaaagacttacgagacagtcccattccggttaatatttttccatttccaagggtcagatggtttttgtatctgcggtcatcaactgcagcagctacagatgttatccatgggctataggaaaccagagtttttggaaaaggacctccatttccagctgcttgtgcaacaaatacaccagctttcactgctgctaaaagtgtagcatcaaaaggattcagaaaagtggtctttgttgttgctggtggactgtttggccctactgaaaggctgagtatatccactccatcgtatacagcctgctcatgaaccacttttgagtaagaaccaaccactagcataacgcataaccacttacaggagctgcctaagtatgtatgatcctattcaattatcttcactaactacacatgtactgctttatataccacaaacagctgacacagctgtcaagaaaaaagttacaaaacatatataaagacattcttttata

SEQ ID NO: 384222 - DNA, 580 bp, Cannabis indica
atacagaataattaaggagagaaaattagatgtatttaacaatatttaacaattaagagtgaacaatcattaggttaattagttgattaatattatagataataattatatatttatttttgaatgataattacattaacgtgtatatatatgaagctatgtgaattttttaaaagaattattatagactaataattttttaaaaaaaatagaaaaaaatataagtaaatagataaatatttatgaatctattaaaaaagttgaaaaaataagataattaaggagaaaaaagatggtgttatttggagtgattttagaccgctacgtcacaacctcatacttcttctttatataaatatatagatttgtaccgttaatataatacatatatatattttcacaatttttctttattcttatgattttttgtattttcaattataattttactcagtctgataagcaacacataaaaactatataaactgtggaaaaattacgagtagatgtgcagattaaaataataaaattataaacaatcaaacaattagcaatgacaagattaacaaatcgagaacaa

SEQ ID NO: 384223 - DNA, 2374 bp, Cannabis indica
atatggtttgaaaaaaaaatcacctttttcatttttattttgaaattaagtgataatcaaatttcttaacaagatattttacttcctataccctgttaagaaagagtacaactttttttgaaggaaaaaaaactggatttttttttcaccttatgtttcatgaataagagattttttttttctccatattccttaaaaaaaaataatttccatattttaaaaaataaattatttttagaataatcaaatcaaacaacaaaatttctttttagaggcttatttggattaggtggtccactaagtaacaccgtgtacaatccgtgttaatcaagtggcctattccttgccagagttagtatattctcatttcttctcttgaattaaaattattatttaccatattcaactctatcatactcattatttagttttaaaatgatattaccaaaaggaaaaaaaaaaaccgacacgtggcagttacaattccattaaaaaaaccatccaggaacgtctttcaggtcatcttacttgctctgcttaatacctaagctaattctcttctcttccctcccgagtattatcttccccagttgttaacaatctttgactaaattaccctttcaccatatacactttccccagataaaataaggctaatttcgtcattcattatctcccccaaaaagttacctataaataccagactcaactcgaacactgaactcaacaccaccagactggtagttctctctaattctaaaccaacaaccctttctctaattttaccattttacccttccaatggcttctcgttacgaagttgaggtgaagctcacctccgccaaagatttgaagaacgtgaactggcgttacggtccagtgaggccatacgtcgtcgtttgggtcgacccaaaaaacaagtgttcaagccgggtcgacgaagagggcgacacgaacccgatttgggatgagactttgaagattcccttgcccggtccgatcgaagacgagaagtattcaactctctacgtcgacgtggtccacgccgggtccgaacccgataccaagaaactgatcgggtcggccaaactcaggctcggagaaatcgtcgatgaggtgggtttcggagaacgcgccacgcgtaccttgaagctcaaacgaccttctggaagaccccacgggaagctagacttgaaggtctcaatcaaagacccttactatcgtgcgccggatgcctacaacgcacccccttacggggtcccaccacctggttcaagggattacaacgctgctccttacggtggaccttacggtgctccgccaccgttgcctcgtgatccttactacgttgctccgccttctggatacccacacagttcgtacaatgcgccatcctatggccaagcctacgatcagccgagttacgggcaagcgcctcagtacggtcagccgagttacgggcaggctccggcgtacggtgcgagcgggtacgggcaaggggaggagaagaagagcaagtttggaggaatggggacgggattggctgtgggtgcggtcgcaggagtgctcggtggactcgctttggcggagggggctgattacgtggaagacaagattgctgatgacgtggaggatcgagtggaagatgatcttgggtacgacggcgacgatttctagagaagtattttgttgtgtgcttggattggttgggccccactatttggttttggttatttagagtggttggatgaaacggtgcattttgttgacgtgaaaatgaaatgtgttttgtagtttcaagataataattgataaatttggaagttttcgtttgatttgtcctaaaatacttatttaataataaaaataataatgttaaattgacgaaacaaaattgataataaataaatctatattctttcttttaaaaatgacgtacgtgaccgtgtccaatgaaatgtgatttgattcatgtgttattttatttattattaatattaaaatttatatcttgttgacttgtgactgaaaatttagtttgttttaatgaaagtcatgcaccatcacgcagtcgtggaaattgccctaatatttagagaaaaagagttgcatagcactaaaaatatttaaatgactagtggtttaatctttggaaaagaatacttctacactccctttcaaataaaataaaataaaatacttccacgacttaataagctaaaaataaaatatcataataaggttgtgcagaagtttattgcaaaatatttaactataatggatcataaaaatcaaaggcggattccaattattaggtaatatttggttggaaagaatgaaaatttaataaaaataaaaatggaatagaataaaa

SEQ ID NO: 384224 - DNA, 4990 bp, Cannabis indica
cataaccttaaccatgaaaagatttctaatgaccctttttccactatggtaatcccttcatctctcattaatgatacacctattactgattatcctctagagtctttacatgcaacaggtacaaatcataacttggaggggagcacttccacaagcaccactagtaacccagctcacgatgaatcaaatcagcatcaagatgcaactgagcaacacacagatacatcaccctctgctgctgcagcacctgttctcccacgaagaacaaccagaatcacacatccaccaacataccttcgtgattatgaatgcaattcattcatacaagaccaatcctctactccttaccctcttcataaattcatgacttacactaatttgtcaccagctcacaaggcttttatttgtgcagtcactgctcactttgaaccacaaaatttccaacaagcaattctacatactgcttggaatgatgcaatgcagaccgaattatgtgccttacttgctaatgggacttggacaatagtcaaactcccaccaaacaaacgcgctattggatgtcgttgggtatataaaataaagtacaatagtgatggttcggtagaaagactcaaagctcggcttgttgcacaaggatacacacaacaagaaggattagacttcttcgatactttttcccctgttgcaaagatggtcacattcaagcttcttcttgccatttctgccatcaaacaatggcctattctccaacttgacattaataatgccttcctcaatggggatctccatgaggaagtttacatgactattccacaaggtcttactcttccttcttctatttctgcagatggaacaatggtatgcaaacttcacaagtctctctatggactcaaacagtcatcaaggcaatggtacaagaagctctctgatgttctcattcttgaaggatttacacaatccaaagccgattacaccctattctcaaagggttccaacaacactttcattgctttattggtgtatgtggacgacataatcatcaccggtcccaacattgatctactccagcaactacaatgttccctgcaacgacacttcaaactcaagactttagggcccctaaagttttttttgggttttgaaattgctcgcgcaccagaaggaatttttatttcccaacgaaaatacacagttcagctcctcaacgacactggatacactggctgcaaaccagcaaaaacgcccatggatcctcgcataaagctaaacgatgaagaaggcactcccctggcagaaccttcctcctaccgtcaactaataggacgccttctttacctcaccctttcacggcctgatattacctttgctgtcaacactcttagttagtttatggcgcaacctcgaacaccacatatgcaggctctctaccatctacttcgttatctaaaaggacatccaggacagggtcttctttactcaacaaaatcctccctgcatttacgtggatttttggattctgacttggcttcatgtccaactacccggcgttctaccactggtttttgcatctttctcagtgacagcctcatctcctggcgtaccaagaagaaacctaccatctccaaaagctccgcagaagctgaatatcgtgctttggccgtcactagtagtgaaatcacatggcttcaatacctcctcagtgatttccaaattccacaagacaaaccagcttttatctactatgataatcaatccgccatccacatcgccaacaatcctactttccacgaacgtaccaaacatattgaactttccactagcagaattctactacagacattgctctattgtattttcatcccttattgtcacatgtttatttatggcagttgagttagttagataaattaggtttgttagttatggttattttccctttctaccctcggttagttaaagccttcttggccttttcttgctttcctttcctgtataaatatgtgctctgcacatcttgtaaagttaattaattccaatcaatcgaatctttctctttcttttcaatttgactctccgcaataagtgtaatatagaattacccaaaattacatatttacaacttttatctttttaaaaaataataataagtatatatgtacttgacatatttttttgttaatcaacaaaaagaaaatcacatggtccagatcctttctctacctattcggtcatattgacaatcctaggatcatgtgtcaattataggagtatgatatctcattttgtcttaattgagtcattggtaattatttcaaggattctcattaaataaatgacactacctacagctaagctaactttcagaataacaaaacttttaatccctttcaagaaagcttgtaataagtttcaaactcttgactcaaataagaaaaatatcagtaaaaataattcctactattacaccacacatcaacatgtggtaaggtatggacttggtagatttatgcacgtgcatctacaactatttggtcaacaaaataacaagtgcagtgactagtgagaggagtgaaataaatagtggaaattaaggaagttagtgaagaaaaacaaaacattaaaaatgtggttgtttatgggagttggagacacgtgtcagttaaacactggttagggcggcagtggtcggtcgtcccagattagcaaactactacagccgcctatgatatattgtatggctgaaatgggcctcgaccaacacacaattgaaaaaactactctctaaaatggcatgggacccattattattgtttatgaaaatcatgattataaacataataattcttatacaccaattaactttttaatttagaatttggttatccactatcataatgtataattatatgctaattaatattttgtattagtttcatatataatattaaattttgtcatcgggatcgttaaattgttaatatttgcttaacgtactttgtgtacattaatctataatttcaaagcacagattcctgaaaatttaaaatgtattatcctgacaacaataaagttggctctttagtaacttattattatgattataatgagtacattccattttgtgctatgattatttgataataaaatatgagagtaggtctatttatctaccttattattgtttattatcaatatcattaacaagaaattttttatggaacattaacaagaaacctattaggcaaataattgagtatttctaatattggaaactccataattacactacatgttgttctataaacacatctaaacaaaccatatattcgtgttttaattatggttaatattattttagactttcttgtaaaaaattattaattattttttattttgttaaataataaaatagatctcgtatttttcaaaatgatatataaataaagatattaagtttaatttttaataatttttctttttaatataactaacttgaatacaattcttaatacaaaaagatcatgcagaaaatataatcagttttatcataagacctctataatcgggttattattaaattttattttgataaaaatcaatttagaatattatttagtactattttaaaaaaaatacaagatctaatgtataccattcaacaagatagataatcgaatcaataaatttataatgtagatagttcaaaatagtatttacacttattatttgataaaatttttaatttattagtaaattaattttttattagtaaaacaaaatgtttggatggccgcaaaaaataatcaaacactatactattggaacataaaacgactatatatattgttaaattaaatattgattcttggtatatttcttatttatataggtgtccattggataactatagaattagacaccacaaaataatgtggaaatcctacaatacgtgtcactacctcgggaataataagaaaacaattttgttacgaccgtcaaccatttttataatataaatatacaaaggtgtattgtattttttgtgcaattttatatagagtaaatacatattacaacaaaggttacttttagttactgtaaaagttatttttatcagtatatttcgcaaattgataaaaaagttaaagttttacagacgtatatttatagtggttaaaatttaacttttaccacgacattaatgggttgaaaaatatcatttttgccagcgcttttcattttgtgctaaaattttttttaataccaacgtgatttaccaactcttttgccaacacatcagaactaaattctattttaccagtccaatgctaaatttttgccagcatattttaatgacataacttcttttagccaattttcaatactttcttgctctttttatttctaattttgtatcaaagctcatggcatcaaatgggtaccaatccaattcgtttgtgagtcagacacgaagagaacaagcagctcgacatggtcttgatgcacctattccccttcaagctcccccagttgtagatggtccaattgcaccaatcgtccttgttccacaggttgtagctgcacctctgctttccccaatcatgatttgcctaaatagggaggacttacacttactagagatcctaggttctgataaacgcttaaatcaaaaaaaaaaagagagatcctaggttctgtcgattgttcgtgcgcacgactacaacgaattcctatttggcactaggccttgccctcctcaattcctcgatgtacctattgattttaatcctattttactaaggcaggtaaaccctgatcaatacaccttgtgcatctgaacgaatcaaaccgtttattttacatgcgtacatatataaaaaaaaagtcacgcgtgcaacagactccttgaaccctattttcaatagagcttttttcataaatgtacaacaaaaacaacataattacaaaaaatgtgcaaaaaaaaatattt

SEQ ID NO: 384225 - DNA, 2412 bp, Cannabis indica
tttctcacaaagatctgagggaagtgttgacagaacctagtccaacctttccttgactgaattaccaaacccagccccataacacaaaggaaaagggctgctaaatcataaggctcgcgcacagtggcactcccagaagatatgcaaggcggactcagaagacccatcacacaagggacagctcttatcccccacgaaatcgagtctatctctagttggcacacagcccatgactgctctccagatcataacagaatacctataatgcactttcttaccccaaactttcttccacagattgccatcttccaatgaaacacccccaagagtggcattataaccactcttaactgtgaacctcccatcactcgcctccttccaaactaccaagtcactattgtcttgaggaatccagttaattgtgccaattctttcacccaacacatccccaaacatctctttaagaagctcaatattccaactgcgattggggttagaattgtctgccacagaattaatgtgtggataccgaggctttacttggttcataagctcgataaattcaccatagtccagccacggaatccatggttgtgtccaaacgtccaccgagtcacctttccccaccatagtcatgcttcccttacgaagaagatctctagaattcagaattcctttccaaaaggctgaatcactacctcattcatttatactccaaaaggactcccttttgcaatattttttcgagaagcaagagacccaaggtctgtcaaaactagaggcaaattgctatgccagctttgctaaaaggaccttgttcatatcttcaagcttcctgaatcccaaacccccattaaccgtaggcttacaaagatgatcccaccctaccagtgctagataacgatccttttcagtagtcccagtccaccgaaatttccttatcattttgtcaatttctcggcaactagaaactgggagtttgttagtagacatcgcatacaaaggaatcgagagggcaactgatttcaccaaagtagttcgacccgtaaaagaaagcagtttagttttccaaccttcaattcttttcaaaaccttttgtttcagatacaagtagtcttcgctcatcttccttttgaacacaaaaggattttcgaggtgcttctcttggccatcgcactctttaacattcagaatgtccaggatgttgtttttgtgtgtgcttcccatattgctagagaataggacacttgatttccccaaactacacttctgaccagaccaagactcgtatttatggatacaatccagaatatttgtcgccacccttacgtttgcacgtgcaaataaaattgtatcatcagcaaacatcaagtggctaaccacctgggctgatctagagattgagattccatggatctgccccctgatttgctgtcttagaatcaactttgagagaacatcatggcataacagaaacggaaagggagacatcgtgcgaacacactccatgattaaagcacagactccactatcaaagtcgttccctttgagcacctcatgaagaaaattccactcaattttatcataagcctttagcatatccaacttaatagccataagccctccctttcctttccttctcgtaattgtatggaccaattcttgagtcaaaattgatgattccccaatccaccttccaggaacaaaagccaattgaaagggtgatattaacttgtcaatcacccccctcattctagtgacgtttatctttgaaataatcttagaggcaaaattacacaagctaatcggcctgaatttatccaccgtacacgtgttctcctcctttggtattaagcagatgaaggtgtagtttagttgcttctccaaaatcctagtggtgaaaatattttggaccatgtgaagtacatcggtccccactatctcccaatatcttctataaaagaaacccggaataccatccggccccggtgccatcaaacgatgcatagcagcaaccacattccaaacttcatcgggagatggaattgctttaagcatcgtgttcacctccacggttactaatggagaaagaagatcatagaatgcttcgtctaaaaccgttccttcagaactgtacaggtcacggaagaactcattgaaaacagtccctatcttgtgtgccttagtttcccatcctcccaatttgttctttactgcattgatctcatttcttcgtcttctaataactgtggaagtatggaagaattttgaattcctgtctcccactttcaaccaaatctcccttgatttttctctccacatagactctttacgtatccacaactctgaaattctaacttgaaggacaacttccttgtaacaccctaactaacataggcgtattacgtgatt

SEQ ID NO: 384226 - DNA, 1745 bp, Cannabis indica
gttactcttcgcgtttatttgttttttgtagcgacaaaaaaatatatgcttcccacttatcaaaatgatcatcataaaaaatagattacaatggtgcaaattttgagtcaaaataataaatagtgtatatatatataacgtactatcacctttattcacacacaaaagaaaatggttttagctactagctaggtaaaagaaaaaaacagtaaaataaaaagcataaataaatagctcaggcgtattatatattagtgtaatagaagagagaaatattttttaatttcagtatacatttcaaaaacaatataaaaatatatcggtatttgaggcaataaaataggcagagagaaattcattaatattttcaaaatgaagttgagatgcgcaattaatctgttttttagtatttttttcactctaatggcaaacatctaataaaatacgtcgaaaatagatgcatgtcatcatttttttaatatgaaatgacaacttttttaaaatttaactcagagtacaaaaggccttgtaaatcaggcgggacattataagcatgaatgctacaaccagataaaaatcgagaatgcctaaactagagttgccacaactttcaccaaaaattagagttgtcaactctaggctgctgctgtttttgcttttgtagtagattataggcccatttgactgagaataagctagtgctttttcctgtccatgaccagccgtcttcattagtagaaaaactcaaagacatatcgagtatcagagtcacatcttgagcattaaacatgtcttgaataatctcagaatcccaagtgatgctactatgaacaagaagggagttaaccattttgcggattaagccaagatgagttgatgtcacataagcattggatgggtcaagtaaccatggatgagaaaaaatgctagtagtgcttctagaacctatggtaggtctaacaccgaacttaactagatcttgtgattggcaaatattttaccaaataaaacttggattatgactaaaatctgcagagagaaaatataaactagggtaatacttagatgcatgtcatctagtattttttgaagcattctcattagagatgttcttaaaatgttgcttaggtagtcacccaaaataaagaatagtattgattataaagtgagtcctttagatgtgttgatttattattattattattattattattattataagcaaaaaaggcattatcttttaaagaatgacggagcaattgttgtgatatagtaagggaatatcataggttattgaggacaaagtgtttcttaaaacttcaaaatgtaaaacttttggctatgtttggtaaggagggatgaatggactaacgtagaggcataatttaggatggatggactttgtgttgtttagtattaggaataaaattataaggatggagatggagtaagttattaaaagtaccataatatcctttttagtattaatatttattttttaaaagtataatttttgtatttgatatatttaagttatctttttcttaaatctttccaaaagtggcagaattagatttttgggatatggagggagatattctcccttgttaacttgaaaatttttcttggtgatgtggacatcaatgtttgacacattgcatgaaggatgatgtcacatagttgagtagacacggacattaatgattgacatgtggcatgaaggatgacgtcatggagttgagtag

SEQ ID NO: 384227 - DNA, 5877 bp, Cannabis indica
tatatatatatatatatggagtccgggcaaacaaaggtgaattaattgtttcaagggataagggataagttagaaatatctcttttttatattcattaataaaaaatactcttatattatattttattaaaatatactttttttgtgggtgagttgtccaatatactattactttccacttaagtctagcatataatttatattaacttaagaggtataataggtacatcatctataaaaataggtatatcttaaagaatatgaaattaaatgaaaataaaaattaaaacaagtaaaataaaataggtatacaatataatttcttcgtgtctcaacgtgacttattatttgatcataagctactaaaaaaagttggattgttctttaaacataaaatcgaagctaatattattagcgtcggtttcaaaatcgacacatatgccaacattgcaatttagatatttagagatgttatcccaaaagtcgctctaatgacgtggcataatacgatgtgagacgcggcgaacataaaagaggttgagtgggtgagggacctttgaggagactctccagaagactttggtcagttgtatagaccaaatggagtcgtctagccttgggcatacgctggacgaggtaaaccgaccagtagtccaagcaaccaaagagccatctcacagaaagcgtccgtccgactagtgagttcgcagaaggaaaatgtccagattcattccaataatgtctttccttgcaagtaggtcaatcaacactccagtaattgagggattgtgagaattaggggaaatgagaagatttcatgggattctaattttattaaatgaaaattttatactaaagagaaaaaaatgaaattttgaataattcattcaaatattaaatgtcttattctataattaaatgtaaatattctaaatctttttacctataaatagtggatcatattcattattacagggatcgatcgaattggatattctcaaaagagcttttacgctgtcaaattatctgtaatatttagaaatagtaagaaactcacttgaccatgttcacgtgatcttgctatttctcgaagaaatacaataaaaaggggagtaggtcattaccgatcaggggccgaacctctataatcattgtgtgacgttgatagttcttactatttacatcatcataaacacttaaaattatcgtttcattgactctgcgctgttgactaaaaacgaggttaatattttgacactttcattgagagcttaaactatttttgctctctacttaaaatctacgtttcaaggatcattaaatgatctccactttaagaccgatggttcaaacaagaagggtatcatcaaccgaaccgcgtgatcctatggctacaaattcgaatgtccaaatccctactagcattggaatcgacaatactagtgtccatcttcctcctcgcaacaacactttagtggaaactagggcttgagaccccatttttagaggtgttagaggtacgacaggcaatccaactggagttactactgagctgccaaggttcacccctggtgtctaggagacagtgaccaccagtcaatactctggagagactgcaatagggacaggcccgccatccaaaggagagcatcaagtggacctgggagataaatctgagttggagaacctcagagaagtcttggggtaagtccagacgcataccaacactctccaccacaaccaggaggagacccatgcaacggtgaatcaggcattcgaacagtaaaggcgtgaattctaggcatggatggatcacactacttgagagatgcgggcccaataggaagaaatcaaccgtagggcaaaggaagctgatctagcaattttcccaacaaactagaaggtagaggattgaggtccaactgcccaaacaggatgacaaaaagggaaagaggttgtatatcctaagcagggggcttgtgcacggaccagaagagcatctgaccaactatgtaaaatagtccaggagaaacaaacccaccaattcaaggccacgagaggtcaacccttaccgccacgctaatgaacaagtcttgcgagatcactacctcgaaagggacgatcagaaaaatttatgaccaggccaaaaggaagaagtgaagatgcacctcctcgacatgcatgagggtcgtaagggtatgtcactcaatactaccaggacggaagggtccatgtatatgggtggaacaagaaaaataaccagcaaccccaacaagatcgaacaagatctcaaagtgatgagtcacaccctaatggaaatgatgacgatgttgaatgttggcctcgtgatgacaatgtcaacgaagatgtgataatcgttaggacaatccacccaataatggcaataataaccaggataatgttttcaatgatggaaatcctctcaggttagcgaggtccactagccaaaacccgagtaggaggcccaaagtagattcaattttccaaaggatgggactcaagcctggacatgaccatcaaaatgatttaaatcgaagaagggataattgggatggacgttttgtccccccacataataaccaacctatcgacctagacaacttcatcccaaacagcggaggtaatcttgagcccatcatagttccaaccaatcagccagtgacacaggccgataaacaagtagcacaagttgacttgtgggtgcaagcccaagtggatcattttaaaagcttgatacaaagcctgaagagcctaaatcttactatttggaactcgaatgaacttgaggtttgccattttctgcacgggtcaatgccatggacctccgaaccaagttcaaaatgtcaacttagaagatgtatactgggaagcatggtccgttgtctcacatcaaatattttgagatacaaactgacttgcaaggagtaaaaagtggcattatgtgtcaaattttaccagcaacgttagcagaggtttcccaatagtggtacttcaagctaactcttacaaattttggctcctagaatgcctttgctgcataattctacaactaattttcctcctctcgataggtacccacacaccttgaagacctagttaaggtaaaataagtaccgggtgagcctttgaaggactacatcagtcgattcatgacaagtgcaactaaagtcaaaggactaattgaagaaggatgtcttaccgcagtcctaggaggaatagaacctaaggtgagctctggaaggacttaaagagactcattattggttgaatgggtgagtttttcaactgagcagatggtttcatcaaacttgaagaagcagtgagaagggtggacaatgttggctagagtaagactgacccgattcaatttttatccacaccaacctcctttgcatctgctccgaactagcaaaacactagccatgttatcatgcccctcacaaaagacattatatattttatcatgtagaagttgacttatgaaagtaagattgctcattctttatttcattgacatatcttttctgggcattattactctctccagcgagatgtggccttctcgagataactaatatatcctcaccctcaatagggggaggttgcaatctttggttatctgggttattgcgctgattgggctggtttggcttaatttccttgacgcttcacatactgtttgaaatatccatgcaagattaggctctctatctcgtctttcggttgccgacactcttcggtagtatgccctatgtctttatggaatcgacaaaattttgttgaatctcgtttatgtctcgcatgtctcattggttcaggtttgcgaaatgtaacctgtgttcatttgcaagaaagatattttcatgagtttcattcaactcggtgtatactatttaaatcgggacatattcgtcgtgctttttttgtttcttcttatttttagatgattctcttgagtcatcttttcttttggtgtttgaaccacttggattatctgcttttgtcgagacggtacttgctgtggtagtacttgtgctgggtttgtttcccaagccagtcttcagcaacttcatctcgttccttgcttcctctttgtgcacaaacacttgcgctcttttgttgaattcattaatgtttcttactggacgatcctgtaagtcatcccacaactcacccccaactgttgaaaggtcagttgtaatccctacttgaagagaagtaagctgaatactgtcatttaaatttctaacctttacagcagctgtgctgaagcgactcaggtaagcctttagtgacttgcctggttgctgttttatgttagttagagacgatgctttagttagtctatctctgacaacttgaaattgtttcttaaagtctttggacagctgttcctaagacattatcgaatggtgagtaaacttatcgaactagctacttgctgccacagttaaagacgtcaggaataaaatgcaccgcagattattcgagacgttgttggctcgcattatggtattgaagttattcaaatgagcgactgggtccgtagtcccatcatactgcgaaaggtgtggatttttgaatctctaaggaaattcaaaattcagaatattaggatgaaatgcctcaatttcctcatttgagtcataaccaggtaattttccatgttccccatcctgatattttctaaacttatcctccaactcaatgattcgcaactggatgaggtccacttgctgttggttggcattaagttgatggcgtaagttaggtgtattttgatttagtcgctcgcaaagatcgggttgtcttcgattcaaatgttcacgaagatcacataattgctcacagatctcgtctctgagtaactcttagattgatagctttgcgtatttctcatgctttcttgatcagcataacatcgaggtctgcttccttctcgcgtttgccttcctgatcgactgtgccctcgagacctcaactgtcccgagttagaagttgctttgtcttgtaccagtcttctccttcggaagaggttagatacacgtcctctatttaggtacgtgtatacaccttccctctctgatcgagaatgatgttgagattgtcttggtggaatcccacttgtcctaggttgagtcccaggatttctcttgttaccacgagggatttcctattccctaggttggggctgtctcgtgtcttcattcctgcgagaagcctttggttcatcattacattcattccctcggttcataaatccttgggatctttgaggaacatcttgacttgaacatccctagtacccctaagttgttcctcctgggtgttttggggatttccttgatttgcttcctgtctcttagttcttgaagcttgaggtcttcctcgtggtcttcttaccccaggatcaggttgattctaagtattaattccttgagtcgctctagccgctgcaacctctctttccaactcagcattttgtcggttagatttggctaagcattggcagagttgtctaatttccaattccactaatggtacatacctagttggatcatacgcatcctcacttctaggtacatatcctgcagaagtattggtttcttcattcctcccttttgggttttgattatcaccaccataatttctccttgaacgtgttgttctagaagtatggggtctttaagaacccattggctctttcccagggcgatgtgtagtttcctcaggacgatttccatcgttttgattatgatcagccatggatagatttctgtttgcaaggagggatttttttttttgagttttatcactaaggctctcataaaagcaccaaactattaacgcagattt

SEQ ID NO: 384228 - DNA, 1600 bp, Cannabis indica
acttatgtgtatttgttttttttttttcttattctcctataggcactgcagtttttgaggttctgctatccgggtagctgcagacaaatacatggctcttctgattcttgataaacaggcagtgctgagcgtatttaccattgacactaacctctcttctatcggaatccagttggagccacatcgccgaatctgttgttttcaattcttttggcttcaacggagcgcattcacaattgggtgacacatatttccaggggagaagaatatagtagtgatgtacagcctattgatgaaagtgagaatgaaatgggtggttttctgttgcgtgtcatgctccatacttgcttatctctgaaagactacttgcctctacaaaagcagcttaagcttgctaccatggttgctcattgatataacatacgacaccgtcccttgtacacaactgctgaccactaatttgctcagagagattacaactagtttctatagaagaattatgatacttttcattttcaatgatataaatatatatatttatttttttctaaatttttgtaccagagctacaattatggtgataaaattatatttgaaagattatgtctcaaacaaacaaagaaacaaaaaaaaaaaattacatacatctaattttatactcaatagtcaacaaaagacattgtaaagataataaaaaactataacaatgcactaaaagtaaaaccttaaaatattgtagcttgctacatttagtttaaaattgaattgaatataaggtacatgcagggccggccctgggcataggggggctaggcctgtgtctagggcccacctagtccaggggcccaaaaaaaattttttgtccttttaaaattatacaattttttactgattttgaaaaataccattttttttctaaataagggcccaaaaaataatttttaccctatagcccactacatttcagggccggccctgggtacatgatatttttgtgaacataatttatcaaattatattatgggaacctcttttatgttataataattttttttaaaaaaaatatttatttatgtttattatcaaatgtccaaaatattaaaagagggtcgattaattttgataaaaataagggatacaaataagtcagacacaataacacgacttaaaattagtacaaaatagacgagtttgggtcatttcaagttaacacgactaacccgtttattaaacatgtaatttttgaattgagacgtctagcttgaaaatagtacgacaatgacttatttaaaagtaaactcttatatttattacatataaatagtattataaacatattaaattgctcataaatatcgtatcatagttggaacatgttaatagttgataagttaataaaatttaaacacaattctttatataaatagattagattggattaactcgtttataaagggttgggttttagttttcaacacaattaaataagttagatttagatttaatattcatttgtattacctaagttttgatactagacgaacacgattttagaaataaaaaagtatttcgcataaattttaatgagttttgaattttt

SEQ ID NO: 384229 - DNA, 3806 bp, Cannabis indica
acaaaaatttgagatagtgttaggtgcgatttagttttctgtgtccctaagcattttcattttacatgacagaaaatgcttcgtctggatcccgtgaagagaattacggccagagctgctctcgagcacgagtacttcaaagatatttccctcgtgccttgaattttgcatccgttttcatggaaagacaatttgtctatagtatgtttagtaatcatttggatttcgattgtgtgagaatcgtgtgcttgtgttgtgatttatatttttgatcgctttcgacatagttttgataaaaatttgctttggcttttgatatgttaaaaatctctcaatgggagtctgctctcaattctcccatgttctatccatggaaagatatatatatataccaatgttgattgtaattttcttctttttccctttttttttgagaaatgggaattatattaattttgattagctcaataatttaatgatagatgaacactccactctacttagtttgaaatattcttttgacctctttctcttatttaactactttgagctttggtacctgaattgaaacgacatgatttggcttcttttagttttgatgttctgttattgccttagaccaaaatgaacaaaccaaatctgaattaataattagatttttgtttttaaggacccttctattgctttgcacactctaaagaatttattttcgttcattgtattgttacccttttagtttggtcacttatttttttatttatgaaaagaattgtctgatattgccattaaaacatcatgatcatattctcagttgcaataggtgccactaaggttgggtattcgatccaatctaatttttttttttcatccaattcaatcctttagtaattgagtttgaaaaatcatcatccgatctgatctaattagaccttaaaattcaatccaatcggttttttactttataaaaatattattgttacaagtgtaatgcaattaggtaaaacaacaatgttactaagtaataaaataaaaaaaaaaacattataaaaacaattatacaaaacaactacaaatatataattatattatatataaatataattagattagatcagtttttaatttaattttgaaaatgacatccaataatcaatctaattcaattagaatctaatttttgacattcaattcaattcaattataattagatatcaaatttttttgtaattagattgaattggattagttcggttcaattgaattggattgtatgttgcccacctttaggtgccacaatacatgagagaaagaatatccggtaaagtagaacttgcaaaagaaaaatgacaagaattcacggaggtcatcatgttgcttagtttgcccccaacatttgaaggttcatttcggttgttcattcaaagtttaagggtttagattttttgacacgaatctttagtttttaattgacgagccattattatgaccctctaaaacagaagtgttgttttatcataatgagtcgtcaatagtcaacacccgagttgaatcaattattatgaccctctaaaacagaagtgttattttatcataatgagtcgtcaatagtcaacacccgagttgaagcaagagtttgaagcccgccctttataaggtgagtcttagactcttagactatggtagtttaaggacagagtaatctgatgagttactctctctcaatgttactttctcactcactcgaatttatgttttaatagtggttctaccaattaaaacatagcacatcatttaactgccatctaaagttgaaatttcattatttttcattttcacatatttatgctaaataatttcttaagtattatatgtactgttattggtacaattaaatatcgagtattatataaattaattaaataaattttaaaaatatcgttaactaattacaaagtgtcatttttaagtggtgttaaattttattggtgcctaatagcaatgctctttttcaaactgtttactttttaatttttttttttttaaaaaatcttcttaactaagaaaactcttcgttctccgaaacaaaaagacattttaaagtagagctggagtcagatttcttagtagcagtccaaactatttaaaattcattatttatgcgttctgttttttaggttattatagaagtttgtcgtaaatttcatatatttttaaataatatttttttttgttttttattaaacgatctgcaaacatagttgttcataatatttttaaaatatattgttattttttcgatcaagtgttcaacatgggtgatattcttgttgatgtacaatcttatctttttactaatttaacaaattaataaaaattctatatttacttttaaaaaaaatatcccatatattcactatatattttatttaataattttttagttttccataaaataatatattatatataatatttaataataatataataaaaaaaagtaaccataagaaatattgcatctctcttcacaaaaagatatctcaagtttgaaccccattccacacacatcaaatttcttttaattatatgtttgtattttcctaaaataaggatgtgattgtagattgtaggtatctaaagctagtgtgctgttctaaattagtaagagtggtgttaaaatttaattggacaaaataaagtaaaaatagctacctcacttttttcaatattatcaacaactatatccgattcattgaaattatttaaaatctcaccaattaaaggataacaattcacttgatattgaagactctcgatcgaagcaagcatttggatatttgagtaatacaaagtcaaataaattaataaataaaagaaatcataatacttttttttttacttttgctgaaaataaagggatcatggtacagattatttccccacttttttagttatttcaatagttttatagtaatagtttaaacttaattaagttatcagtaatcaccttaggatttccatcacacaaataattaacactttctaataaagtccttttttaatccctttacaaaaggaattagggtgtatttcaaaccctttgatccaaacaaaaaaaaaaaaataactaataaatacaatccctagctaccattacactacgtggtaaatcataatattcttttgtttactacattatttggaaccaacttttatttatccttatatgtaagataagatataaatcttttttttttttttgagtgtagcgtaatggtattttacaatcagttaatagcttaatagcttcaaggtcctaggttcgaacccataatctactccctttttccttcccctccctcaccactaagctagccttagtggcttcagacaagatataatcaatattgtgagttttatatattattataatttacgtatcaaatacaattatattgaagactaagtatcagggtgaattaatacttatacaaaaatgaaatgaaacaagaactaaagtactaaaatagtttaatcaaataatgatataaactagaaaataaatacagaataaactaaataaaatagagacaaagtttaacgagatttatcaccctttttgtggtgactaatccccaaagaaattgtcatttggtcaagttttatttgatcttcaacaatagaagaatacaaaggagaatacatagttttatccgatcaacaagagtatcttgcatcttactaatagtgtctttaccttacaaaaatcaactcacttgagagagatgtgatcaaacacacttatt

SEQ ID NO: 384230 - DNA, 2625 bp, Cannabis indica
aaataagcattgctcagctacaagcttatgtcacaactgtgatacaaatggctccataatggattatgtaacatcagatagttcagctgccaagaaccttcaagtcctcgagtgttccaaacatggctctgcagccatccatggtcgatttgaagaaattacataccaagttgaagggtcttcagaacaatgccttacagagggtgcagctgaacattctcgccactctcaaggcatccaattcgctgatatctgggcacagagagatgggccagaattacactcacaggggtcaaaagacatctactgcgacgatgcagataaatctttgatccttcctaaccctgatgagaaagaagagaagattatagttatggacaatcaaagcgagtctagcgctgcaaagttaagtccaccggcaaatcatgattctagttctgtttttgatgattatgagaatgacattagacaagagctgagatggctcaaagccaaatatcaaatgcaaatgagagggcttaaacaccaacagttaagagccaagaaaaagccatcaagcttagctccaagtcctgagaacatggaacaaaaggcagacagtaatggagaatcaatgtcttcagtctcacaccagctgaagaaagataatagaagacctccccttaaaacattccacctttgtaaaccatttttccaatgtggataatcaaaatgttcaaagcatggaggcaatgaagggttcatggagtccggaccaaatattcacggctaagagtttctacagtggatctatgttttcacagcctcttcatagagcaacttctcttccagttgatgctatagatgcttaaaactctgttaattctttctctgaatctctcaccaagagtcaaagtgttgattatttaaaaaagcgacttaagtaactatcaagtcaagattatgtatggggttctcttcttatcacttggtaattatacttcaattgtaatgtacattgcgtagttaacatgacaatgaataagatttcctcttttttcattatgaccacatttaggaaagagggcagtgaaacttcctttttgatcactacagatttcattgctggtttaaattaatttacacggcagtcggtcagttctggctgatcaatacaaggtgagatattgtttttactttatatctttgtcatacatgactcatattgatgtaatctctgtgcatgtgtatatatatgatatgataataataacatgatttgaaagaagcaatttggccaacccttacacgcacgccagtctatattttttgtggcctaagttcatatcctcctactactctttatcccaaataattgtcactataatctaccttcacttccttctagactcgtgtcaataaggccaaaattagccgaccctttacacttcagcgcaaaatctttgtagtgcttcagtggaccaacaggcaaatatatcaaatccactttatttatcattctctctatattttctttcttaggtgaatttaaatagaatagtccaaactgatgaattgtgatgccatgtcattattgcgtgcccaatttgtcaacttaataaaaggtcatatatacttaataaaaggctaaaaattgattaaaatggtgcttgttttttatataagttatctaactttcaaacttgaaatttggctcttcttataatttgaatccagagagggtaaaaagaatctatacatgtaaattactcagttcccatgtgaaaaagtgctgatataaagtgttacaacaacactacaacttatattgtaatttttttttcttttaacttctaatgcttgttgcaccggtgtctacatgtggttcatggaaagtagtttttctttgggaaggtaacatgggaaggtttggtcatggaaaagttctcaaccaatggttggatcacacaaacacatattcctctactaaataaaataaagggtttttttcttttctttttcttacatatcaaacttcccgtgttgaattttgatatcacaaaaagcatcaaaaagcaatagtgtccgtacatatagtaatgcattgtgaccactactacaaattcaactactttttttcatttgcaatgaatgttctctgtgtttggtcagcatcatcagtccccgaccactgttttattagctgttgaactatcttttgacctatcaacctaagcctaaggtcacttcatgttaaagatttatattaaataacaagtaagatttgaataaaatattatattatattatattaattattataatataaattttaatataatgtaaaacgtattattgtttagtatagagtaaataatttatagtaactaatattataatatttaggttaattaggaattttgtcaccaactttgacatgtatcaaatcatgctgttaaatttttaagattgttaaaaatatctcctgaactattgacattattgaatttaaggacttttgtcccatttcagtaaaaagtctaatatgtataaaagttcatggggcataatttgatacatgtcaaagttcgaggaggcataatttggtagatatcaaagtttgtggagcatggtttagtacataaa

SEQ ID NO: 384231 - DNA, 3469 bp, Cannabis indica
taaatatacgtgtaatgtgcgtaacaataacctagtatataatatatatatatatatatatctttatacataaaatattgctatctaacggtttttgtggtttaacataatacaatattttaagaatataaaaatattttattaaatttaacagtgttagtaggatcagttttataaatatatataaatattaatgttatttattttaaattaatttaaatatatataaacattaatattatttattttagattaattgaacttatacaaattttagattaattcaaatatatataaactttatatttattttctttaaatttttaaacctttaaatattattttttttaaaaaaaattaaacaattaataagtttttataaaattttaaaaatacacataacaaaaataaaaattagaaatataactaactatacgtgcaatgcacgtaacgataacctagtacagattaaatatgtgtaacatactaaaagtgagtatgacaaattatcgttattttgtaacatatggagagttacttgttgttatgagtaacctctacaattattgtcgatattaagagtgtaaaagatgttacacgtcataatttcaaaatttaaaagttataagacttatagttgttggagaatgagttttatacttatttattgagtccataacctccatatgatttttttattttattttttgaaagaacgtcttgttcattaaataagaaagtagatagaaatcacaggggaaaaaccctcccctacatacaaaatagctggttggctagcaactctagcgcttttagctacatcatccgccaaagtattaaaacttcggttgataaaaaagaacttacacacattaaactttttaatgacattagttatcgaaaaaaacacacttgaaatcttccaattaggggggcttctacttgctgttaaagcttgtacaacgatcttcgaatccgagagaatatggacaacacctcaacctatctcaacagcctaggaaagagcaagaaggatagctctgaatttagcttccaaagcagattgcgattgaattttttgagaattaacaaaccactggccattcgttctatcaacccttaccgctgcaatgccagcttctcccagaacccaggaagcatcagtgaagaggacatggcacacctcctcttcatgcagacacatgggaaaggcaggacccttgttaaaatcagcaccaggatctgtgacactacctcttccattgctgaagttaaacaaattttgaagctcaagattggcttttccaattctagccaaatctaaagtaggattagcagaagcatttttaatgcagagtgcatttctctgttgccaaatttcaggaaaaaggcatccagtgtaaactagaaactcgttcctgttgacctcgatcgtattagagataagattctccataagtaggattgtagtatcccctggaatggcttcaattctcgtcggatatttccctacaaaccagagggcttttgagaaactaaagtcgcgaaacagatgaatggcactttcctctacgagacaacacaagcaacactctttatcaggaacaaaaggcagtctattcttagtaggtatggcctcattcaaaattctccacagcaagactgatattctaagatggatccccgcatcccaaatccactttcaaatattttttgcaggagcaaacctccaagattaatcaacacaataggcagctttaacaaaaaactgacccttttgattgtttttccagtacacctaatccgaaaaagggaggaggaattctcagagtactcagaatgcgatcccccaactctatgccgaaaatttgtagtatcatttcctcattccatttgttagcggttgaaacatccgacagtgtttgtatcgtgaatctcatgctcctaatgttattcattagctctaaaaactcctggtactccatccaagggatccaaggctgcctcaagaaattgatgaattctcccgaggcagccactaaaatcgatcctttgaatagaatttttctcgactccaaaatacatttccactaatacgaatcattattcttttggtttacacaccgaaaatactcatacttacaatatttcttctataggcaagagacccaaggtctatcctcattcgttgcaagcctccaagccaacttggctaacagagttttattcatatcttcgcatcttcttagacccaagccccctgaagacttcgattgacaaatctggtcctaagccttcaatgctaagaatccttccttctctgcatttcccatcccccaatacttcctcatcaaggaatctaactcacgacaactagaaataggaatcttggttgtggacattgcatagactggcatggacgaggcgagtgtcttgattagagttaatctcccgacataggaaagtagcttcatcttccacccttccaatctcttcatcatgctatccttgagcctcatatagtcatttttttttttttgaaaataaatgaattgcccaacctctccacgagcttgattaatattgaaaatacttagaatatttcttttccttacactgctcatattttttgagaatagcacattcgacttagatttgctgcatgattgccccgaccatttttcataagttgttaagcactcaatcaacttcttagcatcattctcattagcacgggcgaagagaatattatcatctgcaaacataaggtgtgatattggaggagcaaattgagcgatcttgattccatgaatataacctccctcttaagctttgacaatgatctttgataacacatcttggcaaagaagaaacaaaaatagggataaaggatcgccttgacacaaacttcttcttggaaccagccatttaagagtaccgaatacgaaacacttgtcacacacgccatcaagagcttgcaacttctttcactaaacccatttgctctaagaaccttctctagaaaattccattccatcttgttgtaggctttgtgcatgtctaactttaaggctataagacccccactacccttttacgaagaatcttgtgaatgatttcttgcgtaaggatagatgattcggttatccacctttcaggaataaaggccgactggaaaggagaaaccaaatcgtatgagttaacacttgaggacgccaaaaaagaaaattgttgttgtcgagcttcacagaaagcttatgaaaaaaaaaaaagtgagaggaattgaagcagcagacgccagagcagggtcaaccgttgataggaatggcaaatggggcgggtctgccccgccccgcttctgacccgccccgccccgacaagctattgccccgccccgccccgccccgattaccttgaaaatttaattgggtctgacccgacccgacccaactgggtcgggtttgacccg

SEQ ID NO: 384232 - DNA, 1293 bp, Cannabis indica
ttgttttggtatgtaacagagagacaaaagcagcaaatgaggcaaaagagatggaagattgataagagaaggatatggaggattggtcttgcttccactcacgcctcttcggccctttgacttcacttttggattcgttaccctttattgccatacaacacataatgaagatgcttcaaatgtagatctctcctaattttttttttcaaaactcccacttcatgaaagaaagaaaaatattagaagtaaaaattattttgttctaattagttccaatcaaagtacttattctataattagttccaatcaaagttatcaaacttttaagttcccatatagatattaattatatatatgtgtctgattaagcacatgtagtagaaagtcatacttgtacactgttaaatgtgagggatttttacatatggattatattaatacaagggatatgatagtcataatattgatctccttaattttgctaagatttacttgctgtaacaaattatgactgttgacaatgtgaaagaacatattcttgtgtaggtataaattatataaatatattaatttatatagtctttattcaaaaacacaaataaacataaaacatcttgattggactcttgattaccacacttaccaatactagacagctatagctataatgaaatgaaggtttgagaaaattatgatgaggaaactttatatcaatcttttattaattttttgggctgatattgataaatagatttttcaaacgtttgtacctctaaattctgattaagactagtttaaaagtattctaattataaagaatctttataactggacaaaagttaagcttccaaaaatgcttgattcatgagtttaacttattaattaaaatgtcttattaattagtaaactggcgataatgatttataataaaggcatcctactaacatagattggacttgaatgtgatgtcttgcgtttttgttcataattaacaggcagtcgatctataccagccaacaaatgtattgtatgttttacatatatacaatactatttaggatatataatttacggtaaaactatctaactctagtaattggtacgctacactcttcaaactaattttggaaggcaaaatctgtcaaactttgggtttttaaggttacgtgagttaattaggagctgttaaatgtcaagatgaactaccacatctacacgtgtcatattttatggtttttttttacacttcaaaatatatatttttttgttgttgtatttttacggaattttata

SEQ ID NO: 384233 - DNA, 974 bp, Cannabis indica
tatttatgagatagagatatattaatttgatcaaaatttgaattcttgcagtttgttaaaaattcaatgccagaaaatttttgtgttgggcacaacaacaatggagaaactccagaagccatcttcacaagagaccacaagaagctagttgaaacgggtagcgaatggatgagaaaaaccgccgagtcttgctccctcgtcgcagccctaatcgccaccgttgctttcgccacatcaacatctctacccggcggaactagtgatcaaaatgggaaaccactaatggcaacagagccagcatttcatgtgttcgcggtgtcatcattaatagctctttgcttttcggtcacttctttagttatgttcctagccatcctcacatcgcgattttctgagaaagatttcgataaagttttgccatggaaacttttgatgggactcacctcattgtttttggccatagtttctatgcttgtttcgttttgcgccggccatttctttgttctacaagatgctcttaaggtagccgcctttccggtttacacggtcactttcatcccaatttctttctttgcaatagctcaatttccactctatattgatttggtaagagcaactttttggagtccctttggtgatcctagaaaattgtttgctccaagtgaatattaattcattatggcaaaaatgttttgcaataaatatacatataaatatatatatatatatatatatatttatgtatcactaataagtactctcaaacatatgtaatgaattgtaatggtaataagaatagtaatggaacagctagataatggcgcgattgatatgaggagtgaaaaataataattttctatggaatcaaacctaaccagctaaagaagctcactcactcacaaacacatacaaaaacacaatatttagaataattaaaaaacaaaaaaaaaaacaaaaaaaagaaaaaaagaaaa

SEQ ID NO: 384234 - DNA, 871 bp, Cannabis indica
atatatattaattttactaattatcttctctattatccatgagaaccctctttcttatattcatttcagccttttaatgtattcactttctcatacacatattttaactttgatccttttcatcctaattaagcttcacttataaataaaatatcaattaaacaaacaaataaaacaatataagtaaagaagataaatgtatagagaacttagatttattgagaggaagaaaggcaaatctaaggaagaagaggtgggagaatatagtagtactagtctagtctagtcatggtctaaggcaaaaatataagccaacttaaatacttccatgatgtgggggcctttgctttgaagctctattattattaaagcaaaaaagaaatgaagacaacaattttactttccaagatcatccttcaccatcacattcaactttaacagcaaaagttatctattgaatttggtatctatcaatctcaatttcattttatttgtttgtttttattttttacatccaatacaatttatcaaatttggcatattttcttgtacattaacttaattgtttgattaaagtgatgagagataagtgagataatatattatatatgtctgcgttgcattcccaataagttttgttgtgtaattaataaaacagttaccataaaatatattattttttatatggtcagtcattcactaaccgaaaattcttggagaatttcaattcttgaatcaatgcgctttgttaaatagaagatatgacaaaagatttgagttcaatatgaaaaaagtaaggaaaatttacatcctatattaatttttgtcatttttttacaaaaataatgttatgcagtattttttacttttt

SEQ ID NO: 384235 - DNA, 1527 bp, Cannabis indica
gttactctgttaattctgttttgcttttgtctgttgtgaagtcttgatcagtataaatacaatatcagcctctaagccttgcatcttttgcaagcttagttttccttactgcttgtattgataagatcgttcatggtatcagagccattgacggaagtctattatggatcctaccttcgttgaaaacccaccgcgcccctctggccaaaaccaagggcagcaaactcaaaattctcacctccagaacaactggaatccctttcagaactctcttaattcatctctcactgtcaaattggatagatccaattttctttcctggaaatcgcaggttatccccactgttattggtcatggattggatgatattcttcttgccggaaccgctccaccggaaaagttgctcaatggccaagacaacccgatgtttcttgcttggaaacggaaagatcagcttctcctcagctggcttcggtcatcaatgtccgaatccattcttggatctgtagctcatcatgttacatcttcctctgcctggcgcaccttagaacagaggtttgcatctcagtcgaaagctcgactactgcagatcaagtctcagctctcaacgatccagaaaggtaatctctccattgcagattattttgacaaagttaaagttcttgcagattcattatccactgcaggtcaccctcgtgatgagagtgatctcataatgcatctcttgaatggcttgggacccgaatatgatccagtcgtggttcatgttacgagcttggttgataatctctcattcgactccattcagtcattgcttctcactcatgagagtcgtttagaacgtcactacacgactggagccccctcttcaggcctaactgcaaatttgtctattggatcatcaagatttgggtcacatagtcgttcttctggcaacaatgggcgtggatatagttctggctatccaatcgtggaaatggctcaggcggtcgaggcagtaacattcgcacaatttgtcaagtatgccacaagagtggacacacagcagttgtgtgtcactacagatttgacaaatctttcattccgcccaagatcggagactctcaggcatttttgacagaaatggaagatgatgatcacctcaattactcaaccaacacagttcctgatttttcttgtgaccaagattggtatgcggatacaagtgccaacagtcatgtggcaaaaggcatggaacaccttgactttgaagcaccctatcatggacatgattctcttgctgtaggcaatggcaaacaactacatatctcccctattggtaactcttctctcccttcaaactctcgtccattaaaacttaattccgttttaaaagttccccacatcaccaaaaacttagttagtgtgtctaaattaaccaaagataatcatgtctttcttgaatttcacactacatgttgttttgtgaaggacaagagcaccgggaaagttttactcaaagggagagttaagaatggcttgtacatg

SEQ ID NO: 384236 - DNA, 2336 bp, Cannabis indica
ggaccccaaaggtcagtatgaattagttcaagaaccttggtagctttgttgttagatgatttgaaaggtaaagcatgtgatttaccatattgacaagcttcacaaaataactgattttcattcatgtgaacttttacattgaccatacttcttgactcaagattttggatgaaggatgacctaaccttctatgccaaatatctttttgattaacatgaccttgactagtggatgaaactgactttgaacttgactctactaaaccagaaaaagaactaaagtttgacagaaaagactcatggttgagatttgggataatggtggcagattggttgtgagagttggacctggttgttgacccttcaagctgatataaaccatccttgagcttcctttgcagcaccactttctttcttgccatgtccttcacaaaacacacatcagagtaaaattcaacaaatactttattgtcagttgtaagtttggaaatgctgatgagagttttagcaattttagggacatgtagaacatcatttaaatgtagcaggttaccacagtcagattgaagaattgcagagccaatatgtgaaatggacagttgattaccatctccaactgtgagtttatccttaccactctatgaagctttgttggacatgttgtcttgatcagtagtgaggtgattacttgcccctaagagcaaaatggtctttcaggctcttaatgaaagcaccaaaatgttgatctcattttggctcaatgacgtggagtcaatgaaacaacaattataattatttgaataacaatgataatcaaaaagctataaacgacacaagaactttatagaagtttgacacctgtcagtggtattagcctaccactttttttttttttgtatttctatgaaaaataacaagttcgatcacaaggactagccaggtgagtttcctgctatctcttgaggttacaaatattcctgcagactctttgttctctcgagaatattgacttcggtcctcatttactgaaatggaaccaatattcatggagaagataatttagaatatttacatttaaataatgaaatgaatagagaagatcgtgggaatttcattaatcgcatgattttctcatccttctaaattaatcccacgaaaataaggatttttcgctaactatttcttgaaaattagttaaggaatgaatctggacatctcctctcgtgaggatatctgatcggatgtatttcctgtggtgggtctttggtgattcgaaataatactcgtggatataagtatgcccaacatatgcctgaggttagactgctccatctagttcatagagccgaccaacatcttttggggagttttggagggtcttagatcctctcaacctctttcatgttcaccatgtgtcacatcattctatgccacatcattaggaccatgttggaaatgacaagtatttaaacataaacattcaattaattatgatataattaaaaataatagttaattttgagtcttggacttgaagaatcaatgaagaaaaattgaagccactatttctgtatggattttgaggattttgaccaaatatagaatttttatcccattttttttttcattttattaattaattgtctaaggaattaaatcagtcccgactcaagcagtttgggacctttgggcaaaaaattaaaatttgaccttatattaataaaattatcaaacaatatttcataaatttattttttctttttttatttaaaataaatacttcgtaaaatctaaaattggcaagaattttagaataatgttcgggacaacaatcttttatcatttttttatcatttcatatatacattatttaactagtttaatttctaatcagaatatgatttttattagatttaaaatttaatatcattatttaaatcaattaaatatttgtgtatataatgaagcttaagtttataagttgtcagacaactcacatacaactgaatcaaaaaaatcataaatcaaccctagctttagttttgggatttttttcaaaaatataagtaaaatataaaataattacaaaaataacttaataaatctcaattacaataatatcttgccacatcattaaaaaataccttaatctcaaaattatatacctgaatgaaactaatcccgaaattccttttttttttttttttttttattaatttcatgcatttcaaaagtaacattttggtttacttatgatgttgataataaaccaattaagtaactttttacataaaaaagtaatcacttttatattatataatttgagattacattttg

SEQ ID NO: 384237 - DNA, 1272 bp, Cannabis indica
ttttttaaaaaaatataaatcttttaatataattaacatatttattaactgttcttgttaatcacttcttcacagctaacaccaaaacaaaattcactggtcttctcctcaacatcctcccaactcgagcttaagaagacaaagatatataccattcaggattaccccagttgaattatccattgagattaacaattatatgtacttatatagctaaatactgagtaataagatcattaattgtgcattatgctaaagatggtcatggcatattactattagcatgtatatatatgccatctttattaatagtatttttcttataatatttatttagagcttcaatttaattatatattttgatccatgagtaatttgtaatgattatatatacttaagttaaattttatgaaaagggtattatggttaaaaatttaacttatatattaccttaaataagagcccagtaaaatattttaattacagatgaaatactacacaagttgataaaaagatgaaataagtgcaactggtttggtaggttaattcttagcctaagacttcctcaagtttgatggaactcacaatacaacttaaaaaatgtattggagaatattatcccacatgaaataaatataaaaatattaagtcatatataaaatatgggttactctactcattgccaattgattttgagatggagcccataattctcaacaaatgtaaacaccctctatttcgtaaccttaccatacaataaattaacaatctattttgtaaccttctataaaaatcaggctgtttaagctgctacaaaaaacaggcatagcaaactgttataaaaaacagacggtctatttcacaaacttctatataaatatcaaactactcacactacctttcggcaaccttcacagtttatcaagcttgttcttaaatcataagttcccctatttataacctttttttgtttacaaactcaattatactttctaatatatatcctatttatctactaaatactcacaaaaaaccaacctaacaatcttagttatgatatgacatgtgttcaaaactagttatcttatagacactatttgctttttctttgtaatttttcacaataataaagatgcagtatttacttcttactaccgtatgttagacaaattaacaattaacccaagatctatttgtatataacatagaacacaatagtagtatatgataattgagtgtgtgtacctgattgatccatagcaattatctctg

SEQ ID NO: 384238 - DNA, 912 bp, Cannabis indica
ggccattttttatccttaatctaacttaaaacttctcggatccccaatattttattcgagaattttttctcgatttgtgataattttaagtttaaatatgaaaatatctatgaattatgtatcctttgagcttcttattcctctttcggtttttcttgaacttgtctccttatttttcaacagctagacctggattcaaaaagcgcgacggtgatagttcatcaacacggccgagtttggaacctattcccacaaccgaaaatggtttactcccaacggatttcgtcttggaagatccagattctcacttcatatacatatgtaaaaaaattggatgaaacagagctgattaccaatgtcttgtagtaatttactatcgcgacatggcaccgacgatcatgtccgatgacgacgatctaaaggtacaaaaacacaaaacataatcattcatggaattacaattcttgattgtacaatgaggtgatgattgagaagtaatcatttagcatcctttgtggtgttttgtaacaaataaatgttaccatttagtaattggagtgtgttagctttaacttatagagtgaaaaatatatataagaaaatagctaagaaaattaaggactttatttttttcttcttcttattaattttttttatttgggacgtttctttggacatgagaataataatgtttctttcatataaatttatttgatgagatatttcaattgtttgtgtgtatgtattgtccctctttttattttaggtttctttttataagaaatgctagaagtaccatatcgttattgtagtaaataaatatgagatgttatatagtatttaaatgcttatattaatactagcaaagaattacgtgtgaggcacgtatactaaattttattctagtttttt

SEQ ID NO: 384239 - DNA, 1031 bp, Cannabis indica
tttcttgtatattcatgtaaaataataaattaggctaaaaaaatagtaatgctgtttaaaattttgaaaagagtagcaaggtcgaaggtctccaaaaaagaaaatgttattacaccaagagattgtatgctaattgtcattctagaataagccaactttcattctgacaaacatattttagaatagcaacacacttatgtcggtaactattaactaggtgagatatatatacacatatataatatacacttgcatataattatatataatgaaagagatatggccaacaaaaatgcacatgggatagaaaaatgatcacaatttataccaagacattctagacaaaaaagtagataactcaaacgaggcataaaatgacttgtgcacaataaagtactgaaaatataaatgaattacaagataacaaccaatataaacatatatatatataagtaccagattctgatgaaatcatggaaattttgagttgatccctcacaaatcacaacttttcttgatattgaccaacgcttcagtagtagagtacacttagtctgaaattttctgaaagttgagggaagttaatggtaaaaaattggtgttgggaaattttcagcagcaagcaatagtaatctatttttaaatacacatatataagagagagagagagatagctggagtggaagacataataaaaggagctatttatgtctaaaaaagaaaatgtaaattcatagttgtatgccaatcaagatagtacaaatgtatacaatggtcgtccaattgaaatttatttcatttataatcataaaaggctacacacatctcaaaatcaaaagaagcaaatcaatgacattttacttattatgaacgaaaatggtataaaaggagtgtttcgcaatattcagtggttgatgtctttacttacaaatttagaaaaaagagtattgtgtgagtcccacattcataactagaggaatcgatatataattaaacagccacaaaagaaatcaaacattcttactctctct

SEQ ID NO: 384240 - DNA, 3816 bp, Cannabis indica
gttttagtagctttattaactaataaaatcgttaataacaatagaacgcacttcagagaaataatcattcatctaaagcacacgacctgtagagaaataagaatctctggctaagtagtgagccaacttatttgcagatcgtttgacaaaacacaactcaacatttttttaaagatataagaagagcacaaacatcttgcactaaaaggccaaaagaagatgacatagtgatttttctttgaatagcttgtatacagaccaagctatctgattccaaaatcacctgtccccacgagtgacgatcgatccaacttaaagcttcttttatgccaataatttcagcaatttcaggatgtacctgccccatctgtcccctattaaaagcttccaccacatgaccatggaagtcacgagccacgcaaccaaaaccaaacttgccttcatgctcaaataaggcgccatcaacattaaccttgatcttgtttaaagaaggtgcactccaacgctcaactaaacggtctccatcgatcaacggagacaaagaaagacccgtttttacttgagcagatttgaattgatcaagtagtatacttgctgaattaaccacatttgctgcagtccagcttttttgttgccaaacaaagtcatttcgggcacaccaaatagactagttgaccatagccgcctcctctatctcaccatgtctgcctcgactcagtaacaccagcagccagttgtagaaattgtcatccaattcactgccaatatccacaatagttctatgccaacaagcacaagcatattcgcaccctactaatgcatggatgatggtttcatctgaggtaaggcacaagggacatgtcttctcttcaactgagcataagttggtaatgaccccgaagcaaccctccataaaaaattattgactttaggaggaacttatagactccaaagctccttccaaaaaccatcagtaggccaggctcctttctcctcttgtaaatacttgtacgcactcttaaccaaatagtgtcccaatttttcatacctctagttccagtagtcgcaaatagcagtagaactaagctgaattgagaagattagctcttgatctctatcatcaaaaagatctttaattatctcctcatcccactcacgagaatctagcttgaagaggctgctaacattttgattttcgagtgcaggatgtgaagaagtaacataaccattagtgctatgtggaagccaaggacctcttaaaatggaggtttgttcacctgtacctatagttcgggtagcccctgcttgtatcagtccttttgcttcaaaaatactcctccatatgaagctcaggttgtctcccaactcagttgaaaggaaagctccatgatcataatattttggtttaaaaactttactcaccaaggaactgtcattgaccaacaaacgttagcattgcttccccaacagagccatattaaaatcacgtgaacttcgaaaatccaaacctctagcatgtttacggcgactcaaacgatcccaactcatccaactaacactaatttttaaacagagtctgtttgccaccaaaactttgccataagttgctccaaatccttgcaagtatccatagggagcaaaaagacactcattgcatagctaggaattgcttgcgcaatagatttcagcaacacttccttccctgcacgagacaatatccgaccttcccatccctgaattttcttctttattttgtctttaaggaatccaaggatagcattcttattcttccccaccgaataaggaagtcccaagtaagacccattttcatccgcctcataaatatctaatagctcacaaatgatatccctttgagaggtgctagtgttattgctgtaaaatactgacgacttagagaaattaattttttggccagaagcaatctcataagtatacagtaactcttttacattatgagcttcttcctctgtagctttacaatagatgtaactatcgtctgcaaacaacatatgtgaaataactagagctcttctagcaattttgcaacccataattaaaccattctactcataactacgcaacaaactggagaagctctcggcaccgagaatgaacaagtatggtgatgaaggatcaccctggtgcagccctctttgtgcaacaataggtcccaattcttttaaacaaaggtacattaataaatgacaaaagagttcataaaaaaatgataatacattttaattgtattttttttaaaaaaagttaaacttaaataattttttcttatgaatatacatttcggtatattatatataaaattaattaatgtataaatttatcgaaaaatatatatatattatataaaaaagtaatatattattagtattatattggtaattaaaaaatttacggtaaaatatccactaataaaaaaaaattaggaattgaaatttttctagtttttattattaagtttgaatcaagtatatatatatgctgatgtggcacgataattttttaaaatttgttttgtaattattttaatttgatgtatatttatgtaaattttcataaaatatatttaaaagatataattgatctaatttaatatttaattggactagactatttacaatagatggtgtataatttgagcgaaatttaactaaataatagaaaagtataaaaaaaatcaataaaaatattattaaattgagagtatatatttaagtgagagagttaataaaaaaatgatatttattgtgatgtaaaatttaattcatgtgatattttgtattaaatttaattaacttttagtatgtgttaaatttgaactattttatatattattattagagtttatttttataaaaatgggctaaaatatgcaattgtactgaaattaattggatcaaatttgttgaaaaaattcaacatccagtgtatattaaaagatagaactaaaatcattgaatatgacaatgcattgttttcaaatatgtgtattgtgtagtatgtgtagtcaatagcgcgttaaaatatgaaaatgacttccatttttaactaataaattaataatatatagtattacttttacacatggcgatttcagcaaagtatatgtttttcccttaagataagataatcaaattaattaggttaataatatcattcctatttatttagaaaaataataaaagtatgcttagtatttttatttgtgttatattattattaatataattaaatattgcgttttatataatttaagataataaatatctctaatcaattataaaaacatatgcatagaacaaatatatataaataatattcaatttaaaagtaaagacaaagaacccgtccatattatttgtttacttttggtctgtttattattcccccttcaatagttaacaaatacttatgcatgtaattgaaattgtaaacgacattgactttgacttcgtttccagctaaaatggtaatattataaataataaataatggtataagtacctaaagttttaagtttgtaagcggcataaatctaatgtttatttttagcggtataagtacccaatgtttgttaaactgtaatttttctttagttttagtcagtatagaccccgttttaaatttattaaaagaacatttggaagtaaccgatattacatgtttctgtctagactcaatgatcaagaatctagaccttatatgtgatctgtttaagaaaataacagagtttgtacagacgaaattagagaaaaattacatttttacaaatattgggta

SEQ ID NO: 384241 - DNA, 1934 bp, Cannabis indica
aggacatggaagattcttatccggctttctctaagggttttctctttggggaaatttattagcatttggtgacatcaccattgtttctttgtcagtcatctggtacttttgattttagaacttttcttcatttatggacggtgtcttgggggttgacactagatgaccctggtatagaatccagatttcttgaatagtcagtttgtggacaaagatcaccttcttgttctgaatcctcatcactcactgatctcgctgatgaatcctgagatttcgcaaaaacagaggcatatttattagtaaactaagaaccatgtatgcaagacacaacaaccaaaaaaacaaacaaaaacgtatgagacaagataagctttgactaaacaacttcacaagataaactcttggtcatgttttaaatggatgctattattcttcattttagttattgacaatatatcaaagcctattaatcttactgtattaaatagaacaaagggttttttttggctaaagctcacgggatacggagttgttaaaagagtaatatccactggaactaagaaaatataaataatgaacagggttatttaaaaaaatccaacaatagcaagctacttcttgttataggggcttttaaggaagtggatgacttggagtgacttctaagaaacgtaaacagaaaaacccagaaagagtacagcttttttgaacatttagttcctaaagttgcttaattatgattgatagtaaaattctgcacaatcaaccagcagatcagaaaaattaatttttttttctttttttttttaaatctttataactctaagcaactactacaaattagacacaaaattcaatagaggtctttttaattcaagaacaaagatgataacactttttaattcacaaaaactgcaaaatatctaacaagtcaaaacagtttttttcgttttcaattttctttcaaattcttatttgtttctgcatattcaaattcatcctcacttacacaaacaaaaccaaaacagaagtaagctgattaatctcaaatcacgctggatatgtttgttttaaaacggcaataattaacccaaaagaaatcaaaacaaacttaagaagatcaacgaagtcacaaaattcgatgagaatttttcaaaaaccgaaacagagcggttttaatttctcagcatgcgaacaacagggtcatcttcaaatttccattcgaacaactttcaatagaagaaaagaaataaaaaaaaaattactgcgctccaatagtaccttctctggttcttcatcatcatcattgtccacttctctctccgaaggccgagaagcaaaatcatcaccggatacagccggagcctcgttctcgcacggcaaaggaatcttcattccgaacagcgtgatagccgggtccttactttccagcattttttattcccctctactttccgggcagccaaacaaacagaagaaaagaaaagaaaaggcgcgagaaaattgttggtatcttttggaggtgcaagggagagtgttctgaacttggcattaaacgacgtctatgattttgatacgcttaaatgagaggtggatgccacgtcagctacttggtttgattctcagccacaagttcttgtggcctctagattttcttctcttctaaaaccttattaacagactttctcaaagtttgttctctctttttaatattaattctctaagttgcacaaaatttttggtgcaacaaatggtatttagcttttgcccgaacttttgacctgtacacctggtcttgagatatttcctcgtgtgggtacacaaacttttgcagaagttagtgacgtggcttgttttgattgcacacgtgtttggtcatggggataaattcggaaagtacatatatatatatatatatattgaaataaaattaa

SEQ ID NO: 384242 - DNA, 1850 bp, Cannabis indica
gggtttctaaagtggttgcagcgctagttgcaataggggtttctgtacgattttttgttgcaatttaagttgcagcgctagttgcaataggggtttctatgtaaaattatgtaaaaataaaaaaaaaaaaaaaaaaaaaaaactaagttttgaattataaaaatgaaaaaggcccaatatttttaggctaatttaaagcctaacagacatttggcactcataacttaatgctaacgcaatacagccaaggttattacaaggtgaatggaattatcagagctcttttgtttttcttttctttctgttccctaaaaataaaaataacaacctagaatcaagatgcattcatatttggtttgtaatgaaaatgaactttcttgttataatagttcttacaatttctattgtccatttctatcttttccattgaaagacgcagcactaattgacaaagccatgcacatggaatatattagccctaatcataaaaattaaataagaaaaaaaagtttgcatgtacgattttagctcgtgcatctttctccactacctcaaccaaaacatgtgatgttatactattaacatattattgtcccgcataaaaaactagcagagtgattcacctttcggcatatacaagattctctaaacacagttatatttaagaccaacagctgagttttttcaaacaaaaagttcctaactttccatctcatacttatctgcttgtcaggcaagagataaaaaccaataaaattccaccatatggtaaagcttacccttgcttggctagttcttgaagtagcaaaccatttccagtcccaatgtccaagacactccaagaagtaagatatttatcaccatattcaacagaatcagatgtttcatcaacgtgatttggatggtgacctttagaaatatcaatgcataagcttttggtccaagaagaaacaacttccatgacatcagttccgaacctatagaaacagatagcaagaaaatagatgtattctaagtctctagcacaatttgtgaggacaaataacaaaggttttaagaacaaggagccagaagattcccacagatgtgtaggcccgggggcattccacactcaactgttatatatcagctcaacaaatcaaacaattaagcctcatttcaattaaaatggtgattcttacaaactctaattagtaatatacaaaagtgaacgcaattcatcaggtaatatacaaaagtgaacgcaattcatcaggtaatatacaaaagtgaatgccattcatcggattacaaagaagaagaagaagacggtagatgcttgcatgagacattgctgataattcatagtaaaaaaaataagcctatccaactttcgggaataaagaacttagaagtaaaagcagtggtaaagtatattgtaccaaacttcaccggaatggccatgttcgcggaaattagtcaactcatcggcatatgcggaatcccaataactctgaagacctaacattgatgcctctgcttcagaatctggttcatccttgtcagaactgtacacataataaaacaccaaattctaaaaccagttgcctaagctacgtctattcaaacaatctagaataaccaaagcataatcagatgcctattcatacatggagaaagttccaattatacatatatttcaatgaattcactaacaaagtaatacataattccaacacacagccaatccaagtttgcaaccctaacttgtattcaataatcctagttgtttcccaagacaccttcatagcaacattttctccagagtcaaaccgaaaaacaaaatgaaagaaaaacctgtaatcagaggc

SEQ ID NO: 384243 - DNA, 1312 bp, Cannabis indica
gggtcccgggtcgtgggttagagattggagttgactccgaatcctttagtaaaatattataatacaagctaatacgaatcattttgttatgcatcaaataatataacttatattgtaattaaaattttagtcgtaataattgatacaatatattattttatttaatataatgttatttattatttaatacaatacgatctttatacggcctaccaaacaagccctaaaagtataatttatgtcattattgttctgattctcatataaatatatatatatatatatatatatcattttgttattaactttattcgatttactccaagtattagattgtttgaaccattagttccttatattaaaaagtcatttaaattttcttttaatcattttcttacatatataatataataaatgtttttttatacatatacttaataaatattattcataacaacaaatatgtacttacaaaaataaaaacaaaaatattataaaaattcatgatcccaatacatacatataattcgaaaggtttaatttttaattttcgttcaactctcaaataaaactacttgaatcggccctgcctccttattaataataaataatgatccaatatatagtcattgtgggtctaattatatatatagatcaatgaaaccgatctacaataagttaaccaactatacatatatagagacttttatatagttttattaaaaggaagaatcactttcactaatataaacttatggacaagattaatcagtcaactgttagtgcatggcttctttatattaaaaccaaaactttgaaaaaagttttgcctttggttttgacacttgtcaacaaataatgatcattaatatctcccaaattgcatttgctgtgttaacctccaacgataaattacttttgttacattaaagaatacatacaattaatgtggtcctaaaaaattaatttatataataatctgtataataatattaattaaaaaagcaaaagaaatctcctaaaactatatagctaattagtaattatatacgtaggtcatgtgatatggaaaatatatataaaactatatatttatatatatatacgcaatcgaatcaaagttagttgggatgtagatgaccaaacccccaactgcttggtcagctatttatactctcacattcaatctttttgaaattaataataaatcaatttctatataaatctccaccaatgttttacagcaaaattaaattcttcaatatcaatcgttttcattacattttttgcatgaattattattattattatt

SEQ ID NO: 384244 - DNA, 1656 bp, Cannabis indica
aaataaaatttaaaaaaaataaacaagatcgaccaataatcattagctcttttaaagagcaatcatcatataatattccatcagtgtagcaagcatacctccaaagcagttttttaactgttccacactttcaaaactcacaaaacctacagtcatgcctttcttcttcttcgaagacttaaaaggaatttccctgaaaggagaaaaaaaaatgaaactttaaactcagaattattgagagtaacgaaaggaaagaattagaggaaaataaagagagaattcatttatttatagttgagaaagtatgtacaagagagctatttatacagctcaaaaaataagctgcttacataggagtaggactacttaacacagtgtaactaaactaatgagaagttaacttactacaagaatgaacaaacagaacatctaactatccacaagagtggcacatttctagcccaagcctagctcaatgtctcaccagaaaatgttgttgtgcactaaaactaaaataagaacacaaagaagccctatttagtctctatcaaaatggaagtgaaaaaactcagctaaactgaaaattccgagtaaagcaaagaactttagtaaaattcttcagcagagaattttgtcagaaaaaaaaaatggagcttacacttatgtttagtcctaaaaaaactcagctaaactgaaaattccgagtaaagcaaagaacttatgtttacacagagaatgtttagctcaatgcttacacttatgtttggtcctaaaaaaactcagctaaactgaagatttcgagtaaagcaaataactttggtaaaattcttaaacagagcattttatcacaagacaaaaaaaaaatggagctttaacaaaataaaagataagagagaaacccacttgcctgctcactaagaaagctcttaagagtctcagtcctccaatttctaggtaaatgaaccagacatttgctaagcacagggtccaacccaacaccatcaccatcaccctctgcatccccatcctcatcctcatcgccacccacagtctccgtcatcattatcacctcattcgaaaccgaagccacaggcttctcttcatcctcggatttcttctgtaccttcttggcacgctccgaggtcgggtcccacgtattatcgggacgctgacggagctcttcctcgccgtgagcgtagcggcaggtacttccgtggctgcaagagcccgattgacggcggaagaaggagcatagactggtcttccagagaggagtggctgaagggttagtagggttaggttcctggtccttctgatcgtcctccctcttgcgcttctcgccgagaggagtatcatcggttaatgcagcgtcggaaggttggtctgggagtgaatcattgggttcggttagggtttgagttggaagtggttcgttggtgggagatggtgccgccatagctgagggactttcaaatcaaattttgagttagttaagactctgagagtgagtgaggactgaggactaaggaccactttgcaaattctcacaaataaggtagacccaaaccaaagcccaaccagccatcctgggcctagcctggcccatttatgataacatcaaaaaaaaaattatataattagataaggcacaatttt

SEQ ID NO: 384245 - DNA, 1760 bp, Cannabis indica
tttttttgtgggggatgggggatcgtgatttcatggtcatatccaaccacagtggtcgggactcagtcgtctgtctagccgttcgcctggatcaagagacagaaacaaatagaaataggggagatgccagagagaaagtgtaagctaaggacgaggatcgtaattttgtgatcatattcaatcattgtggctgggatttgaccgtgcatccggccatccactggccttccgcctgtaccgagagagaggaacaaagagagagggagaggcagctgggattaatgagatgaccttagggttttttttttttgttcagtttagaagaagaagaaaagaaagagaaaaggaaggaaaaaggaaaaaaaaaaaaataaataaattttttatataattatttattttttataatttttaaattatttttataatttttataatattttaataattaatattacgtggaccacaaaaaatttatcacatgtacacttgtgtacacgtgggcaatccactgtagcacttaactgaagtttttaaacagaagtgtaaagagcgaaatggaatgagaattcaacaagttttatcgtcaaaaattgagcttatgtggttgaataataaaaaaaaaaaaaagtttcaagtagttttgccgctaataatttgtttttgcttctcaagttttgatttttattttaaaaaataaaatcaaacattaattttacctaacatatttttgaaaaatatttttaccttttcaatttagaaataaaaaaccataaaaacttatttaaataattactgccattaaatttacgcaaaatgtagatatttttacagcaattttaattatatgtattaccttaatatgtttgagtggtaggtatcattaaatgtttaagcattggacaatttacaaatcacaacatctagactatctttaatgtaagatttaaatattgtattaaattttgtaaaaaaagaaaattaacaaatgttatatttgttattgtacttgaatgtataataatattttatgatgcaaactatgacaaaaaagtaaaatatcattaacatatcaaaaaagctaatcattaatgactaatggaaaaaattgtaattaaaaagttatatttattttgtgtaaaatttggcatgatgttatatctttgtgtcaattttagtaaaatttttaatataaattaaatttagcacaacttttaacaaaaatttaattcaacacgagatttagcatactattacatgaatgagtgtaggaatagaattgttatttctaaagaaagatcattcaagtgtttggtttgtttattgttattggaaaactcatttcataggaattgtatttcatatatgtaaactaaataattacttttcctaaataaaatgatttgaaaagcaatttcataccaactagaaattatttttccttatgtaccctctcataaataaatgattaaagttttaattatatggataacattttttattttaaaacatatatcgacaacatttaatattacaataatatgtttattatattttttgtttgtacataattatacgaaagcaatattattattataattatatggatatacgatgtgtgatgattaaattatatgaataacatttatgttgatacttaaatatttaatataaaatagactattaaattaaatatttatttatattttattatttgataattaaatctaaaaaattcaatttgagagtgatacataaat

SEQ ID NO: 384246 - DNA, 2145 bp, Cannabis indica
aatccaatccaattcgtacaagtacgaattagggatgcacacgaggtaaggaattggcggggagtgctcctcccatccccatcatcgttaagaattttaatctctatccatgcttattcctcatcgcggatggagcgaggaatcccctaaaaaaaataaagtctataataaaaatttaaatatataaaaatattaaactatataaaaattaaaatattacacattaattattattcaaaaaactaatttttatccaaaacacaacttaaaattcataaaaaaaatactaatatactaaaaaaatacaaacataatttataaaatataaaataaaatattaaacgggtcctcgtccaggcagaaagagtcatcttcgtctccaccctatttaatattcgaggacaaaaaataatcttcatccctaccttgttttccatttagacgggaaatccctgctctattaaaggtgggtccctgcaggagtccgtcttcctagagaaaaaatgcatccttagtacagatatttacactttgctgattggattggattagatatttcatgaaaacaacttagcagttagccataaattcttctttgttgtaatttttttttcctaatgagtttgtgtatattatcaactttataagctattttgaacaacaacacccacagttgtttgggctcaaagttttagcatcactaagctaaggtaggcccatacttaaggcccacttagtgcttagcccaatggcccaatttaatttaattgatataattaccatttaatataaatatatatataatttttcttaaattaattttatatttagaagagctcatataccagaacaccctatgattaatttgtttagatatgattcattgttttaattttatattttaatcatttgaaaaacatttaaaagacaaaagtatataagtgtcattatctaggatggaaaaaactattatccatatatattaatttattcttgagaaattaggtaggttagttgatattgttgattgttataatgaatacactttcattatataatattatataattagtaaaatattcaaagtatcatatatataatggataaatatccaaagtaacttaggatttgttcttaattaatgtttttctttgacaattacaaaactcttttaagtgttacaaaacttataaatattataatactaattacaattaaaaataagaagaaaaataaataataaaaattaccaaaacttttatgggctaaaaaaatatttcaaggactaaaatgtaaaattacataaaaggaaggagatatttatgctaataaaaaaaattataaaactcattgatttttatgttatatttgtgaaattaggtaggttagttgatggaggtgaatataatacctactcattattatcattattagtctttgtttagatttagacaagcatgttatagcttgtaatttggagattttgtcatatatattgagatatatacactcaagacacacatatatatatatatatatatatttatacattgttactagaagaagatgagctataacatgagaaaaaaaattgatcattatatataagtgcattactttatatataccaattaagtccatatcccatggcatcattttcaacactatcaacttcatgagatgactactatattagctcggtactgggtataggagggataggcgtgtacttaggtctatttattttaggagctcaaaatttatttttttattaatttttaagaataccatatttttttctaaacaaggacccaaaaataaatttttttctcataactcactaaattttaagatccccctatatatatattatatgactatattgatcaataactacatgagaagaaaaaagagtgttaatcataataattatgtttgggctgtaaaatattacttgttttaattttgcatctatggcttaagttacaagtaacactatatattctcacctaataggtaacaaaaccttttgacttttacaaaatcacacacttgatatataaaatataatcatatcaaattagttaaaattaataactttttttaattataattttttattagacaataatatttgtttgattt

SEQ ID NO: 384247 - DNA, 930 bp, Cannabis indica
ttttgttagtgggaactatagctgtgtccctattctcaaccgaaaaagtagtatccacctgttgttagtacataatgtcaagatcaatgttgatgcagtgaaaacctttagtaaagacaagtgcagcacgacaacatttgcgtggaacatgatcttttctcgataagcatcttgatagtatcacgactgagttattggtcttcgaagaaggctcttcgagtctgattgtgctgttgcaatttctcttctcttttcctccaatccaatgactactatggtaaccttgatgccattctttggtctatcaagaacagcattcctctctacatctttgctggtttcagcctcatctttagagaatctaacatagttactcatttggtatactcttatgctagtgctgccttagttaaagacttgtcatttcctttgtaaattttctccctcttgtgggtaatccattttcattaaaagaataaagaattaacaaatcttcaatggaaatgatataaagatagaatggtatattttttaagaaaaattacaaacttcaatagtatggtaaaaagtgtcaaatttgaaaaatcatattaaatttaacacaaaatatattataactcaaattaaacataataaattcatattttcttagttactcttacacctaaaaatatgtttgttaattaattagaagttcttacctttttatattttaaaaaaataacatagcattcttttaactttctaaattgtttggcacatttactagaccattaaaacaaaatagctcatgttaagaacatgctggtgtgatttaatttataaaaaaaaaataacacaataatgcttactctgttagtatgtttatttaaatacaaaatcaatagtagttataatttttggctccaatataatatcaaaggtaaatag

SEQ ID NO: 384248 - DNA, 1482 bp, Cannabis indica
ataaggtgttcatgctcacgttacacaatgatggaggctctattagaatatgcgaaagaactcgtcttttgggatacaaaacagctgtaatagtggatgcaacagtatggctaatcgacgtcattgaggaattgcagaaaagagaagggacacagagggtgaatttcaaaagatctttttgaaatagctcgaacagttgttttctggggagcttccaaaatagcaaaggggtgttcatcaagttatctattcttagaaataatagtttaaccatggtgatcattccggaggaaagacacgccagggcatggactcgacagaatattgagagtaggacaccggatacttacttttattaagccaaatctttagaacaaaacactttgagaattttttctttctagacttgtgtagggagtggagtgtgctgatgttaaaagacccgatgttttggtgtgttttttgttttctgatcttatttattcctattctgtactcaacttttgtttaccaaggtattcctctgccacaagtgaggttcttaatacataatcggggaccagtctcagacgagtggcctctttttctttttcaaaagaccaacaaaaaaaaaacataaatttccaaatgttttgtaaatttcataaatcattatagccctgggtaacaattcaacaatataatagctgaccaatcataatctttttccataacaccttaacaacaaaaacaaggttgctcacagcgccaacatgctcaagtttcaatagaatacccttcccctaacttaaatatatatatatatatatatgtgtgtgtgtataataaaaagaagaacgcatacccacatcgcaagttggattttgggaccggatggctcttcttcaatggctgcaacgacaatatgtttatcaggcgccaaaaaataatcttatacctaagcggcaatatgtcgagtatgttatagacaaaaggtgaaggctaaagtatgttcaccttgatcggactgtgggaactcttgttcactgaaaacagtaagagaaacaagtgatacagcattagcaatgattaaggaaccaaaaagaatggaaaggaaaataggcgtgggtgtggaaaattgaaatttttacttacagtggaagttgattacggttccgactgccttctccacgatgagaattttgaccattgaatcgtcttggcttgttgtgacccattctttcctttattttggcaactctgcaggaaccgcaagtgatacaccggaggacttgattgagttgcgtccgccgggcccttatcagcggctcagtggtgaatcaacgacacaacacaacagcttttaatgttttctctttctatttcaaagagtatatataaatgcgcaattctaaacacctatctactttggtttgcattatattttttattaataatttataatattattatacttgtttattttttagaattaattaatta

SEQ ID NO: 384249 - DNA, 1543 bp, Cannabis indica
catccctacacacgtccattccttagtacactccacattttgaaaatcaatcagaaatatgcagcttcatccctgttaatcacactcagcattggcgtaccacaattacctagtaacagtagtaaagaactcaaaattttcttttgacaaagcttggctcagtatggttagaaaagacataacaattgttattattttaagtacaacacacagagaatgcatcgccatgactttaattatttatatataaaaaagtcaaatgtaatatttgtacaaaatagtataacatgctctacaccacttttataacgaccactttcacaattataaaaaaaaaaaaaaactccactttcacaatttgtcatcatgctaagttttccgtccatataaaactgaagagaaattaatattttaaaacaaaattataatataaactgaataataagagccaattactgaaaaaatatttcaaacgtaaactacaatgaattgaatataaataatatatattattaaaaaaggaattcttatccaaaatttcatagttaaattctgtcaattttttgttacatttcaatttttaataataaatttatagatttcaattaaacttatttatgttatatcttttgaatgattaattatcaagaagttttttgtcatttatatgattatacattgaatagtagcataatcacagattcacagtacatttttaataacacgctatagaaggtctcatcatgctatcaatataaaattttaactaaaagtacattatgccctacttgtttttcttctcaatggggcttagtgttgtatgatattaaaaatttattgtctctcattccagctgcaactctacttaaaatatttttgtaataatgctactcataatctagtaaatttgcacttttgacaaataatgagttaatatttctttttcgcaagggtaaataataagttaacacgacactacaatattcttctaaccttaccagaaaattagagatataaaaactttactataaaaaaaaagtaatcccaaactcattttggtattgtgtagaaaaccccaaagctagagtgaaagataacgaatgagtaaaaaccctttcagaggtagtccaatatttcaagcccatctaaatattataatatattttcaaaaattaaaagtagggcaaatgtaattttttggatctgtgtgatgtaaaaaaattgtttatagtcagttcaatgatcatttagactttatatttttaaacatattaaaaaaataatatattgagcacaatttttattaaataaaaatataataatatagaattgttataacgagactagttaaatatatatcggagtgctatcgttaatttcttattctattagtcaactttcgtctccgaaatacatattgggatagtttttaattttttttataacggtgttcgttatgcttacaacgtcatccttgtaaattttaaaaaaatttcaaatagtttatagtgctaaaaatacgtttgagcttttttaaaaacgc

SEQ ID NO: 384250 - DNA, 1618 bp, Cannabis indica
acaaaaaaaaaaaaaattatatgatacgttttacaaaaataatattacaattggttaagtatagattttctcttcctaaaaagaaatagttctataagttttctatgctattataactaatctactaacatttcaagggtgtatatagaaatttgcacaattagccagtcatgttcacccttctattatacatatttatatatagggttccaaatatagtttcgcttcgtgaccaatcatgtttcatcttacaatcaatgtaatatttttttaaattgccaaaaaaaaaaaaaagatttgtattatatgtatgcataatgcatgcatgcgtctattaaaaaaaattgtaatttttgtgtttactatatgtacatcggttgggagaatcaacgctaaaactacaagaattttgtatagtagtaatgttggtggtcttattcttatcctttcgaagttgtattggtagtgtagttagtagtgtggtatatgtctactcccttcgaattatgaagaggataaatcgataatttttttttaaagttaagttgtaaatgagcttgtatattaaagatgaattattgacattttttcatgtgttattaaaattgtatatccttaattaaatatgtaatagtaaaaaaagaaaaaattaaacaagtgatgatctcataattcataagtataaataagtttagttttcaccaccgacaaacataataatgaaagtctatataactataaaaattacggttttaccttttcattttaagagcaaaattaataaaaattaaaaaaaaatattagggttaatatttttttatttttattttctatatttaaagccgtgacataaggtgtttgattttgagtattggatctaaaatataaatatggtggcataacaaatctaactctttttatgaaaagatttatgtggggtctctttaaaaggtgacccttcaacttaactcaacctattatatatttagtataaagtataaactatcaagtaagagctatgtatcaatgtcattgttaaaaataggttaagaaaaaaaggtgatttgtcttctactattttgttaaaccaatttcaatattaattaaaaagtgtcaaaacataaaattattaattaattctaaatgtgtctagtgggaaaatttctatttgcaaggacataatgtcaatgattaaattgggttatacaaattttgggtcacttaattaattatatatatttccatgaacttagtcatctgtttttgtacgggtttaattgagatatgatcattatgaatagtgggtaataataagtagttagtggaggtaaattcagatttaaaattgatgaagaagacacttaactcaatcattcgatgtacaccaagatattataaaaataatttacgctataaatatttaagtttaactttcagttataattttttacagtaataatacctatttatatttttggaacttccgtaagtaattggtcattaagtctcgaattaatgaccacgtggcagtccctaatttgttcatgtcattaaatttttattttttattgaaaaattaatttaaataaataaataaataaaaggaaatttttttttt

SEQ ID NO: 384251 - DNA, 2119 bp, Cannabis indica
tcaattaaaacttctatgatcccatcaataataattaatgagtacaatgtcttatagatacaagctcatgaaaagaaaaaacattagagtggagacaagaaaaattatatatatgtacactatatataatatatggcccatataaacgcatggaatagctaatgtttcaacaacacatatagcaaactgatccgttttcaaaatatatgtgtgtattcatcaaatagattcaattaatatatactgcacaattaactgattggcctcccagatcttgtacagccaagattcctcacaaagaaaaatttgaccattcagactgattgagattatgtatcataatatccaaaaacaaatcaaatgaatattacaactggaaatggaaagagaattaaaaccccacagaaacaaaataagattgcagttttttagggttttgaatttttatgagatggagggttttcattttgacacctgtctcctacataataataataataataataataagagaattgctaaaagataccactagtgttttactctcttcggtgttataccgttattagtataattaagcatcagatgttatataatttttttaaaaaaatacttttaaaaaatattgctaaccaatcgtgaaacgcgaaggagatggctaggtgcgcatgtacctaataacaatgctttaataataataatgaagacaaaaaaacaaaggtttggcattgatgaagaagatatatattcataggaaatggtcggatttggaatatgaatggacaagggaatgcgacccgttaactagtggatagaatcaatattggctattactcacttggatatatgtgtgtgtgatcgtattcgtatgaacaagaacatatataatgtaatgttaaatcaaaagctatagggccacaatatctaataatacatagcctatttgtcacaaaatgaagacgcttcaagagatgagtactactgtacagaaaaagctagcactgaccagagatcagcatgatttatcatcaacatggttcgtgtttcttatttatcattaactacataaattaattcttaaactatgttaaattaagaaacctgggctggcttgtacattgttttcatagaatagtaatttagaaatcaacacatgattctcaattctcatatatatattatatggtcaaaccgaccaagtacgtacctgatgagaggctgagatgatgagtggtgggtgtgtggatgggactgatgattatgagtagggataaaaggaggtcagctgaatcggttggtgagttctcagccttggttgtcatcaaattaaattaaattaaaagagtaacacttaccctgtcctccttttcaattatcattttcttcattaattgtaataaaatgataattcctaatagtaataatacacattttaagcttttttttttttaatttatgataaaaaaaaagtgtttgatttggattaaaaatatttaaaaaaaaaaagaaattaatgtagaaatcatttgtttagagaagttactagttagaatttgtaacttctcccaattttttttaaaaatttaactttgaattgtaaataaatacctaagtttaatcttttacggtaataatacctaagttatatttctgaaacttctgtaggtactgcactggccattaagtgttaagtaaattgccacatgacaatccctaattggttcacgtcattaaaatctattattcttttataaaaaattagtctaaatatatgaataagaaaatgagacgtggatatataataatttgacatttaacggtcaggtatttatggagttctaaaaatataacttaggtattattaccgccaaaaattaaacttaagtatttatttacaactgaaagttaaacttaagtatttattccgcaaattattcttttttaaaattaaaataattcatctatattcccaacttactcacaacaatttttttttaataatatcctagcgctttgaagagaacttttcaattaaaataaattatataataattattcaaacataacaaataaataaaaaaaaaattactttttatacttttagctattaaaaaaagta

SEQ ID NO: 384252 - DNA, 1013 bp, Cannabis indica
agagagagagagagaatgattaataattaaacaaaattgagaagattactggtgaaaagtacaactaaattaagaatgaataaaaggtaaatcactaaatcagtagtcaaaacattttagataacagagagaaatgtcaactttgaaaacgcaaagaatttaataaccacaaaatatgtgttgtgtggagattttttattcttggagaagattgtgtgaggtggattccaacgaaacaaatacgtgaattcaggatcaccacaatattccttcaccggttttattgtctcctatattcaatattaaaaaatcaaataaattaataataactattgtttgatcaagtacaaactttttcgtgttgggattagaaacaataataataataataataacggccgaaaaatgattttaagtggtaaatatcgtgatttgtttatgtggttgtccatcatttaaaaaaaatgagtgaatcaaatttatgatcggcacgtacaattagcaataataatattaataatatgaagaaaaataaactagtgaacattatactaatgccactcgtctcagtgtaacagaacttgatatgatacgtatcactattaatctcacgtaaagcatagaacaattaatcttgtcataacaactcaacagtcactcccttggaaataaagtcaaatatataaaccaaaactgtctaacttgaaaatctgccgacatatttgtgagatactcttttgttaagttattattaaatactatgattaattattaattaaccagatgaggaggatcaaggtccaagtcatgtgtgatgtaatcactaatataatatcagtcccattacttctagccctgaaaaaatatataatttgatataacagtagaagattatgtgtcaaaggtgcatgttttcatcaatatactatatagtcatactgctaattctaattttattaggtcaaactaatataattaacctagtacagttattcaaatcaggctaaatgggc

SEQ ID NO: 384253 - DNA, 1038 bp, Cannabis indica
aataaaataaataaacaaaaaaattgagtgagaatagtgctttgttccctttattgttaagtgtaaagaaaattgggttttaagcactttggttggaatggctgtgccgcactatcccataaagaaaagcaataataatttaaattgtatttcatgaaagtttcaataaaaattaaattaaaaaaggtgtttttgaattttatttcttaaagatatttttatatgaattatttggaatagcaatactagactctatttgtttaatctattaaaaacaagtggattcacacactttctttttcttacttaaaatatgaatggtattcttattattatgtgtttataaatattcagtaatttatagcataaatatataagtttaacttttgcttgtaaataaatatttaaatttaatttttcgtggttgaaacttctacaggtacctgactgtagtgtttaagtaaattaacatgtggcaatcctgattaattcatgtcatgaatttttatttttataaacaaaattagtttgaatatactaataagaaaataatacgtagataatgacttaacatttaaagacaaagtagctacagagtttcaaaaatatattttaaatattattactattaaaaattaaatttaaatatttatactagaaattaatttttttttttttttatatatatagattaagaataggttgattatttttattaatttgataaattagaaaatttgaaaagggggagggggggtttgatttgtgtgtgcattgagtctaatcactacaagacaatttagactgttttctaataatcacaataatttaagtaatatcattaaaaataatgttaattattaattattaattattattaattagtgtatttgtttgcttaaattctggatggacccactgctaatcaagagaaaattacactctataccttttttatattgtcctcttttatttttaccttcttttttaaaatctatcattttacctctttttttaaacattgtaccaattttaccc

SEQ ID NO: 384254 - DNA, 2417 bp, Cannabis indica
gacgaaaaagacaatataggaatcagcgtctgatgtgcttgaccttgaaccagcctttcttgcaggagtttgagacgaccctaactcccttctttagcaagtgcttgagctctctggctctctgcttcacttgatgctcaaaccctgacatactgtaattgtagtatttcttttcttggagaagaagaaagaaagaaagaaggttttgagatttagggtttaatttgcagactgtggagatctgaaagtttggctcaagctcatatatagagagaaaataaaggaaggatgagcggtggatttgggtttttgaaaaaggaaagtctagtccagattttagtaacgaaaccatcgtgggatccaacgcattttcggatgacacgtggcagatatttgtgctatttggtattgatatttatctcggttcgcacgtgacagcgtatcgacgttgattgcgggataagcattgggtacctaaagcaatttttttttcttttttaaataaaatcatttaatttgtggtctgatatttttcttttgagaggttaattgttgttgctttttctttttttttctttcttcttttgttggagctctcaagatcaaaaataggtaggtggaccactgttttattctgaatatataatgtaacgaaaaattggaataactggagctgttaaggctgtcatgtatgtgttgtgtgcacatcactccattctcttagcactggagttttggaccaatctaaccaaccattacgattggctgcttccaacaaacttttttggattttttttatctgagagcaaatttttagctttttaccaataataaaagatatgaaaacatcttctgaagtatgtgtgataaaatatataagcaagatttactttttcaatattttttacaaagttatcttacacaaaaaaaaatatttgcatagtcagattttattaaattccatatacatgtgtattttagaatttatatatagaaggtaactatctagaaccccttcttgttagttcttttttctaattacactgaattagtagggccatacacgcaaactccagcactacaccatgacccatgtgtagtagtgttggccacgattaacaagatatttgagatgaaagggcactctaccccagctcacctcagctaggcccttgtttatttatttagttttaattaattgtttacatacagccatagctacaagcactaggtcactagagaattattaaagttcctcatttaagtacgtgtagccaattgtcaaggcttccaagttctacacagctcggtacatatttgactaaaagaagttgaaaaaatgaaaagaaaaagagatgttgcttaaagttcaataattagcaggacagagctcaataaagatccaaaatttaagcatattgattcttcggtccatacaaattagttgtttaagcagttgcttaaaccacttatgtaaattatgatgtgggtggtggtttacaaatcagtagcattcttttcaaaattttaaaagagtattttctctttaattggtggtcttgtctgattatcccagctaaatatgtctatcaaacaaaaggcaagattatgataaggcatatttatatgtatggggtctacaagcatgggtataaataaatatgtatatctatattttgaaaatgacaataattattaatgagataggcggtggagtggagtaaggaaaaataactataatcagtcttgctgttcacatattatatatgagtattatgttatgtagtagctagccagtagccacgggggaaggaaaataactttatgacttgcgacaaagtaaagggaaataagccaacaagggagcagaacagagaaaggttttccaaagaaagatgatgtttttggggaccctatcttctctcactgtttatttactttttcatctatataaacggtatgatggtttccccttcaaatcaccatggcccatgtgtagactttttttttttttcatgaaagaattaaagttcattaactaaaaaccaaagatgggagtcagagggagactccttccacatgatacaaaccagcatccaggttagaaattttaactcttgaagatagatcatccgcaaatgaatttaacatctgacacaaaaacattttttttacacatattgagcttattaattaacttcaagaaacctaaagacgcatgaaaaacaccccttcggaggacaaactaacttagaaaagctattaaccaaaatcatagagtctgagaagatacgaaccactctgagagccatattgtaaagatcgcttagttttaatttaaaaataagcagataattgttaattatgaaaattgattattagttttgaattactaatttacgatgatttatttgaat

SEQ ID NO: 384255 - DNA, 748 bp, Cannabis indica
atgtgaaccaaacaccaccttagggaaaagagaataatggtaataactttttggatttatcgtatttctagtaatgtgttcttttgatagaaactagttgtcttcacaaatgaaccaaagatctttatttatatagtgtttgagggatcacatatgaaaattaaaatcccttcaccacatgattgttatcagtactttaatttgtatttatcaagataaaaacgttgaacaaaaaaattgaaaatatgttcaataaattcatgtatgtatatagacattatttcaaaatttgttctagacgaaggagaataaccataaaataatattttatcaatcatataataacagtttctaaaaaaagtcaatattgagtttttataactcctctccgagccaaacatttctctaactatactattaattttataataataactcatttaattatatataataatctttaagatatatcattaaactatatattatataatttacgaactaacatattatatataaatatataatatatcatcttgatattttaatatatattatattttcataataatataacaaaaccaaccatctcataataattattaaatatcttaatacaacgacagcatcaattacttggaccaaaagttatgattaaggcattatattaacctggagagaaaaagtcaatatcaattgagatttttacacctcatgtcaaaattgacaccttttttacatttttatc

SEQ ID NO: 384256 - DNA, 1209 bp, Cannabis indica
caaaaaaaattgttaacgtactgttcattactttggaggagtcgaaatagcaaccacaacaacttaagtttatgaatttaactgggatatattatatgaagcacattatccaacaacgagagaaaaaagaatacttaggattaggtaaaattttgaatgtgccataaacatgtcaaatttatattctaagcttacaaaaccaaaatgaaaaatgcccacaaaggatttaagacaacgtaatgacaaaggtcctctcttccatgagaatgaaaccattctacctcggtcttcaagcaactgtctgaactgctctgtcaaagctctcttcggcagttgccgatcttttgataaggatgtggtctggatgtgcaagtttcaattggctgcaaaaacacatattcgcattcacacaaaaaattaaactctctgaacatttactttggataagtgtttatgcgttgttattctttgaggggccacagtagagaatataaagtgtgcaaggaaaagcaatagaaacacactgaaatcaacagccagtcaaattttatgtgatttaagtggattttcttaagaatcttgatgaaaacgtcaccttctaaattaaattaaaattaaaattttctagatgattatgatcaatgtgtgtgtctaccattgtagtacgacaatgaatgacaaaggagtaaatgagctatgagcgtgtatacataaatatagaagaatttgctaatatattaaatccaataatgtggcagaaacttcttacaagaaacctgcagtggttttagattacattgacaatttaatttgcaaaagaaaaataataagttgagggaatcagcagaagtcttacgtgaggaaacgagaggctgatttgccaaggtgaagacagcatacaattagattggcaagagtttctggatccttagcgtcctgtcaaacaaaagaatagcaccacaagataagtaaacttcatgcattactcatgttatcagtaacattttttgatggtataaaagtgtgttttgaaacactgagtaatttcttctaaaggtgaataaaagggaaaaatgccataaaagcaacaaggacaataaaaagagaataaaacactgggttgaaattgaattataaaagcagtttcattcttaaagcattttctctgagagagagagagagagagagagagagagagagagagtatac

SEQ ID NO: 384257 - DNA, 1965 bp, Cannabis indica
tattaattttttttagtaatgatatgttaatattcatacgtatattgacttgtcaaaaggtaatttttttaggttattcatcacgatatataggatatatgaaaactatatatatagagagttcaatatcaataattaataaatattatacagaagagcatacgtacattaattaaagcctcatattacattaataagtacatgcatgcttagcttctaggctagtgaccttattataaaatatatatatatcgtatacatattttatatctctacgatcgtcactagctatagcattacatgatggtccatatctaatgattcagtacgtacgtatagtagtatacatacatatatatataaatattacatgtattaaaccacacacgtacgtaattaatagtataatattatattaattcttcttcatcatcatcatcatcatcttaattaattatttatagattttttttttctcatgcatgtcatgatcaattccgggagaagcttcttgccctagagggcttctctccttggtcaccgtcatcctcctccggcaacttaatggcggtgtaagtggcggccccgaaaagagctccgagaagtggagcaaggaaataaatccacattgctttgaagttatgtgcagccacagctggccctaaagttctcactgggttcattgaagctcctgatcttggcctatacaagcatatacatatatacacacacatatatatcaccaattaaaaggcttttcaattatctctagtactaattaattaattgcatcattaatatatattaatatatacatatcatcatcatcatcatatgcatatgcatgtatgtatatatgtatatatgtattgtgcatgcacatataatatatatagaactataataaatatatatattgtgggaaccagggacaaagatgaggaagagattaatggatcttaattatattgattattaagtgagttatgtttatttcaacaaacccagcaataaaattattgagcatcacagttgctcccactgcaattccagccaactctcccacctgcattcaccaaccaaaaaaaaaatacatctgaaacggttagtcatataatcatatatttaaattaattaatcatgattagttattttttattattaattatatatatagagttgaaaagtatatctatatgggtgttctgtttaatttgttactatttatttcatttaatatttggatgttacacatgcgacttataaatttgtttgtggtttaaaaatgtttgaataatactaatcttgtcttaatcatcaattatcaacactagttttcttagtaaacctcttctcttagataaagacacaacatatttagttcatgtaatatttatatacatatcaacatagttaagacgtctatttttataacatgtacttaaatgttatacacacaattttttcctttttggcgttttgtatttatgaatgatagagattaggaaaattaaaaaaaaaatatatgagtagtaccatgtctccaaataataaataataataagcggtgtctagcatccttcttttcagatagatgatttttcaaaatatgcgtaacaaatttattcacagtaacgcgataataatttttaagaatcgcgagagaaaagagataaagcttacagctctagtatcggtggcgacggccatgttaacaaacatgagaatgaaggtaacaatgaactccaaagcaaaagcttggccattagggacagtaggaacagtgacaccaccggaacccgtcaagggatgaaacactgcctttaatgcaaatgcagcacaaagagaccccaacacttgagctccaatatacattggcacctacccaacattaatacacacaataaatatatctatatatatttttcatattaataataaaaaatttaatatatgtggacagtg

SEQ ID NO: 384258 - DNA, 969 bp, Cannabis indica
attacacaaaaagaaaaagaaaacccttttttacagcaataaaagaaccatacataacatagccatttgtactccaaaacaccccatcatcacctgcaaaatatacaaatatgtaaacccaaaatttcatcaataacccaatcaaaaactccatattcattcatatatgtacaaatatatttcatcataacaacactatatacaatgaataaacttcactacattcatgattgaaaaatgcacataatattaatcacctaaaaacttgataataaattagtacattatacacactaatattacatacaatagtttgcattcaatattaatcattatattttaaaaaaatgtgtttacattatatagttaaaattaattaattactatataattattaaattattattcatcaagtaaatagcaaaagaaaagttgagatttttattatatttttaaattaggaaaataattattaatatttaaatatatatatatatattttgttacctggcctccatggctggacatgggtaaaggtcgaatagtagcagagtcaacttctccggtgggcagaggaaccgccggattactgttaataaacggaataccgcctcctttgtccggcactaacgacggaataaccgccggagatgttgcgtaaggtcccggcgccggagaggcagcttctttggggcgaaacggccacggataagtcggagatgatgacactactccacctgagcttggtgccggagccttcatcggaggaagtttcggggaaatggcagatcttttcggtgaagaagttactttcacggcgagctttttggagccttggcaggtactactgagagagccattgttgaaagtgaagtagaagaaaccagagcgagatgggtaccactgtatatttttagggtaagataaaatttaaatttttatgttagaaatcagaaaattagattatgg

SEQ ID NO: 384259 - DNA, 1400 bp, Cannabis indica
ataccactagaccaaatgcccatacatggatattgtgatgtttgtattgtaatcattgtgtacgacgagaaaacacgcaacccaaaagttaaagcagaaaacagagaaaaatgaaagcaattattttgctaacaaaggattggtttttggttgctttttccgtttgatgcagttgcttttctatgcattttcttgtctttcttagattgtttggctcaaatacaggcgttcagggttaaaactgttttaatgtgcttaaaaaaatgaacaattttggggcatttcgagattcgaactcaggacctctcgcgcccgaagcgaaaatcatacaactagaccaaatgctctgatgagcctctaattgaatttaaagtcctattttaaaataattaaaaggagagcctacactaaacatctagttttactaataatcaacttcatatgatgtgttcggtgttttaattaggataggcaatgtatgtttgcactttatatgacttttggtttttcaactatatatcattataattagtgattgtggaccaaaatttcatatctattttgtttgcagtgtctaacaactcttattatgacattaattatttaagaagaaaattggaacttataatgtttgcagagggccaaaaattaagatctggtttgaaaacctaacaaaacttggaacagaaaacatagttggggcattccgagaatcgaactcgggacctctcgcacccaaagcgagaatcataccactagaccaaatgcccacttgatattgatcgtttataattataattttatacaattttattagtttggtttttcacttcgacggcgtaaaaaaatggggcattccgagaatcgaactcgggacctctcgcacccgaagcgagaatcataccactagaccaaatgcccttttaatatattgtaataaagattaattactccaatgtttcaacctaacaccacagggtttttttttagtagtttggttctgcattttttattgggtaaatgcatgttagtttggatctattttgttttgtcgtgttacatattattatattatatcatgcattgagttctgtacataattgactttatgattatttttctccttgagctggatccgaaaaccaaagtttatgttatccaatgttggtatccgtatactaagattccgtgctctttttcaacaatagtgtctattaatatatactatatagccttattataggttaattttatgagcagcataattgcaggagatctagagctaacatttaattattacttgcctaccaaaaatggttcacgtgtctttctcatctcaccaactataataataagagattttttctattatagaccaaaaatagatgaaatttacattt

SEQ ID NO: 384260 - DNA, 3083 bp, Cannabis indica
gaaaacttactgaaacccaattattgctatgcaagaaataacatcaactgctcaattccattcaagtaactatataaaacaaccagaagcatggaaatatggattaattatttgatttccaatcaccattagatcgtcttataagtataagaattgagaatttgagagtttttcttactgcccaagactagtcactagcatttcataacaatttgggtatcaatcacataacagtcccaaaatttctaattcccttaacattattgttattatgtttcccttgcacattaccaattaaggttaagtatcgtatcagctaaataaatgcctttcaaacttttagtttgtcagactctacttccacatatttgcattaagaataagaagtaaaaaagaaagggtataaacaaggagacgtcatacaaaaatcaactgaagagaccgaaaaaggcaaaatagatatgaaacagattatgttggcaacatgacaatcggttatgctcaaccagaagattgtaaaaaggaaagcaaaatggtatagttaacatacttgtttctgaagctcctccaaagaatcttcaaataaatcttttgcagttgagccagaggtgtttgatgaaactgccacatatgcaggcaagtccttaacctaaaaatatataacattcctcagacctcacaaagaaaaatactaaattaagggtcaagacaaaacacatgacaactagtatttgaatataaaaacccagacttcatagttcatacaagttctactaagaaaatccaaggcacatatattaaccttcatgaaataatcacgccagtgagtttttattgtaagagtgccatcaacaacatgatcttccatcattttacgaaactcatcacgatttttgcgctctgcctttcttaattcctcctgaatgacataaaattgagatcagacatcaaccaagagagcagaaagtaaaaaaaaaaaaggcaacgcaaataaacaattaaccttctgtatcttcctctgctcttcctcttccttctctaaatcacgtatatattcctgaacaacaaaataaaataagaactggctctggttcaatctacagctaatgaggagaatataaattacctgaaagacatccagtcgatcaattttttcaagacatgaacacctctcatcagcttctaagcgatcttgaagttttcgccactggctgtttacctaaacaggaaagtaatgtcaaaacgtgaacgcaataatgagactggtgagtaaaaccaagtatatgacaattatgctaaacagtaaacaagtaccttgataaagtcacaagactccaaaaactgcctgtattccattatatggcgcttacgttgctccatagccttttctcgttcctaaccaacattacagtattatttttaaacttcacataagatccataaagttcagatataactactgatgaatttcaaaagtaatccaccacaaacatttgataatacaaaaaataccttctttaggagttcctcaatatggctctcaagcagctccctccggtctctatctcgttcaactgctttaaaccgcacatcattttcaaataagctctccaatttactgcgtagtccatatatcccgattagcaaaagagtaatgaccacgacaagactgaaaaactaaccggacaaatttttaaagaaggccatatgccaggaaagacaaacctccatcgtgtagatggtgtaatatctgttgattcctgcaattgaatcaataaaaaataaacaaagtaaaatacatgtatgtacatctgaccatagattacaagaagcttccaactcagtagaaaacatacctccaacatttttttaaattcttctcgtgcctttttgtgcttcatccgtctttcttctgcatccagctttttcctttgattcaagaactgcagcacaaagcaatgaaataagaccaaatattttttttttctagcatatatatgtgtgtgtgtgtgtgtgattgtgtaaaaaaatgacaaattttgacaatgaataaaaataaaatgttgctcttcaaaccaacccaataactcttagctttaccaataacttggacataagactatcaataaatatttaaatcataattatatagaacactgttttatgattaactgtagagtatagaatgaaaaattactaaactgaaaaaatattttattcatgattttaatattttgtaaatttaagtaacaataatgtggaattttatctctgataaattttaaaatgaagaaaaatagcttctacataagctgagaacagggaatgcaaaacgaataaggtttcccttggtaaaaaataccaaaattttcaaaaaaaaattctcaattaaaaatataaatgtaaacataagaaatggtttctattttttcttgttatttctatttatgataaaacaatatgaatattttaattaaattacatttttaagaatcaggttttatatagaataagaatacataataaaaattaatcactctataatttttttttgaaaaaagggaaagaggccaatgtcttagactagccccatccccggaatggatataaatcctcgcttgtggcggaggaataccgttgttacaaaaataaagcaggttccacagctttaaccaaagctagggacactaaaacaaaactcgcttctctgtctaatcgaatgaaaacttctgactccctagtggcctagcacaaaactgactccctcacagtataattacctatgaggctacaccaatacaaacttacaacaaagttctccaatctctaattaggtctaagaatgaaagattttcgaaatgcttagtcttgtacacccatgtggctgtccagaatttgattttttcccataggacctctgtcgagctttccgaatcttcaaagattctcttatttcgttctaaccaaacaacccaaagaaccgacaatactgtcgttctccataggcttgtgcttcgtttactgcctccaaccttacttctaacatgtaagaaaccgaaccaggcatagcccattgaatctca

SEQ ID NO: 384261 - DNA, 1355 bp, Cannabis indica
aaaatactggcctgtaaaatcaggttttaatgaaactataatcaataacctcattttggtttctaaaatcaaatttttgtaaaattattttcctagcatcgttaataacatcgtttcatctaaaatcaaatttgttgtgaaaccatttcattttataaaatgaaaatttgagttttatgcatgcttgaatcatttaagttaaatgtgcctcacataacaaaacaatccctcctacactttagaatgatattttttcctcttctactaaaaatactcatctcattatcttcctaaccaaacttccactctctttcctttctcctttccaattttttgcgatattctatgatgcatttgagatgataaaccaaatttgaagttaaagatgatgttttgcgatatttttgactaaaaaattaaacatgtattttacaatgactctttgatgtatttgtaatgtgtgactaaacaatgtaaatcgcatcgtgaaacatcgcaaaaaatactcaagctttcacgatgattttgcaatgtttcacgaagtgatttgtatttttttagtcattcatcgcaaaatatgcaaatgtttatttttttagtcgaacatcgcaaaatttcatcccttacctcatatttggtttattatcgcaaaatattacaaaaaactgaaaaaccagacaaaaaacgcttaaaaattcgaaatccaataagtaagaaaaaattaacaaaacacaaatgtgaatctgttaaaacaaacatacatataaataaccagctccaacaacattttttagtaatataacttgcccatatttttgggcaaatggtggctgctctcgacggtggtggatggtggcggtggcagcaatgttggcaaatggcggtggtgatggcgggtagaaagagagagaaggaggaaatgaaggaaaagaaaagagaggaagataataagaggggtatttttggtagattggaaaagaatagtgtaaatttttagagtgtattatggggagaattgttttactatgtgagacacatttaagcatgcaaactcaaattataagaactttgtgagacaacatttcaccatcgatagtttggccttttttttttacatgtaaatgtttgaggctatgtaaacaatgtgtagatcccaaaaacaaaatcacctcaatttgacaaccgagtaagaatcatgcaacaccaattttacaaaatgatgttatcaacaatgcgtagcacaaataattataattttagataggggtagacagaatataatccaatccaattaaaacgaactgatctaattcaattcaattataaaaaattagatatccaattacaattggatt

SEQ ID NO: 384262 - DNA, 3535 bp, Cannabis indica
ttttttttttttttgttacaaaaagtgtaatcatccatagcaagaggcgtatgaagcttctgcactaaaatgaagaattgaagaagtccctattttgcttatgaaaatcagagtcctcaatacaatggcatgctatttcactttcatttacagagggcaatggttgggtgaatgaaacacgtggcgtcgacttttcatataaagttgtggaatagtttatatatactaaaaaccagtgagagagaagacaaccaaatctgaaggttctggaaaatttcacttcatagcttagcaatcgcaggtgtcactatatataatttttttaaggtacaacccactttcatgctgtgtgtaccacatattttgctccgaaccaatgaaatcagataattaaaatataaatatattgtggtgtatatactttatagtttatacattgcattacgtaattagaagttagaacctccaaaactctcatttctggacaaatttaacatccccatcacttggactatctttacactccaaggctccaattaatttttctggtttcgaaaaatagttactattctctatttctgatcatgttcatcttctcaaaaaagatttttctaagcattgtagaattaccacaaatgcaccaaaaacgatgttttgtcttgttttttcttccccactcaactagtgatcattacatattcaaatcattcaattataaatattttgttccaaccaaacctttgtttgatcgaacagtgttcaaaacttgttgaattgatttagtattaattggagctgatcttattgatcaaataacaacgataatgttatccttgcgcttacctattccgagtgagaacgttcttgctccaattaaacagagttcgccacgctttcacaatccccggacccaaacacacctctactattcgccttcaactgcggcaaagcccgaagccaagctacagattccccgggcgaccgccgcagatgtttctcgaagagaagagagcagagatctgcacggaaaatcgccggaggaagaggcgcttccggaggggctccggcaagatttgatgccgaagcacgtggctgtaattatggatgggaatgggaggtgggcgaagcagaggggtttacctcccggggcgggtcaccaggcgggtgtggagtctttgagagctgtgatagagctttgtgcgagatttgggattaaggttctcactgttttcgccttttcttacgataattggattcgacctaaggtaactaacttcacctctctttctttcttttatgacttaagatgttgtttgactttggtaagtagtttcgtaagagagtgatagtattagagaaatataaaaagggtaattaagatttttatctcttaaactttaatatatatcaaattatagcggttaaaatttttatctcaactaagatggttagaattaaagatttttgtttaatttcattcaattttattattttattgattgtttccctaaatttttatatctaccaaatcaagcccctcgaactttgacgtgtaataaatcatgacctttaaacttttattcatgttagatttttttttactaaaattggacaaaagtttttaaatttaacaatcttaatagttcaaagagtatttttaaccacaataaaaattcaagggacataatttagtacatataaaaatttaagagataaaagtctcaaatagtatataaaaaggtagcctttctcaattggtattagaaagtgatatgttagaaaaaggagaaattgattgcaacatttgtagaaataaactttgaaaaattatgttaatttgacaaagtttacaataatagtaaactttatttattgagcttttttgtgattcaggtggaagttgagtttttgatgagtttatttgaggaggtgataaagtcagaattggacaattttgcaaggtagtgtttcgtactttttgtgttttgaaaatgaattgagaagtataattgtattattctcaatcaattgagtagcacttgctgctatagattggatcataacattaattttagcacttagcaaaaaaaggatgatgtccggttaatcaatctttgacttgtaatataagtcacttagctatttccaacttatatagtttgcctctttttttagatgataatctgttgaaggaactataaataacagtttgagttgtatcttgttgtgtaaatgacagagaaggtattcgagtatcggtgattggcgattcatctaagctcccgaaatcgctgcagaaactgatagctgatgcagaagagataacaaaagaaaactcaagattccaattcattgttgctgttagttacagtggtaaatacgatgtattgcaagcttgtaaaagtattgctcaaaaagccaaagatggactaattgaagtagaagacatagacgagagcttgattgaacaagagctagaaactaactgcacagagtttccataccctgatctacttattcgaaccagtggtgagcttagagtcagcaacttcttgttgtggcagttggcctatacagagcttttctttgcaccagaactctggcctgattttggtaaagatggttttacagaggctatagtttcgtttcagcaacgccaaagacgatatggtggacgaaatacataaggtgtgatcatcatcatcatcaccagttcaaacatacttaataattacttcatccccattattgattgagcattgtacttttatagaaagaattttttcagcctaagattattaggaataacaggtgctgaattcacacattagctagacgaatcaatccatttctgtatcaatatttgtaaataaaagatgaaaattataattttgttaccataaaaaagaacttatttttaatatttataattaaaaaaatccaattttttggaaggttatttttcttctccttcttttattttgtttctccatttagttctgctattaatttcacttgttgataggcatcatttagtggttacaaatgagatctcaatttcaaattccctttccctaatgtcagaaaaatcacttttttacaaaaaaaaaaaataaaaataaaaaatcaatacatcattacatcttacaacaaaattataacatagcacacaacaataaatcttattatacaatcgtaaacccaacacaacctgccaaaattatccatgaagataaaaaatatggaacctcgatgataaaggaggaaggaatagcattaaatcatcaccatcactaaagagaatgataacaacactacataaaaatatatataaatatagagtaagttcaagttatgtacaaaacacatgtatttagttatataattagtatccgccctagaagctagaagcgttcaagagattgtttgaatcttgttaaatatcatcataaaaaaaataaaatgattaatataaagtatgaaaataaaataccatatgctattagattgattttatcttgatttaagcttaata

SEQ ID NO: 384263 - DNA, 1268 bp, Cannabis indica
tttagagatgataatttgtgcttattaccctaatgattaatgattttaaataatatgccatgctatatatgttgagtaaagaattatgcgttcaaggcataattaagttagactcggtaattagaaccgagagaaaccattctaaggtcttattataaatagacatgtgagcataatacgtgggtctataccacatagacataaataggcgtgtgagcgtaacatgcgggtttatgtcaaatagacaatatatgtaatggcatgtttatatatgtgatatgtgttattatgtatattgatatttataatgttttattgggcttagctcacgggtactctactgtgcaggaaatggtacatctatctataatcagccatgagttcgagagcttgacgatggattgtacatgttcaggccatactagaccaagtgggttggggtctaccagcgaatgtattttgaaatctcaaatttttgccgcttaggtcggcatgtaaattaacttgtaatattttacaaaaagtttttgtgggatcccgaaacatgttgtcttttaggattgttgtaagtttaaattattagaagttatattttcattccattgcaattaaagttttttaaattttcttgctcttatctgtctagtaatcctggtttagtgggattaggttatattacttgttgtcacagcgtgcctaattattagggcgttccaatgagagggtttcatccatttgattccttacctaacaactcattaagtgttagtcatgtcgttgagagaggttacgactcattacaatgatcaaatgtagtgcatgatgttgagtgggtctctaaggattctaagtgggtctcgagggcatgatatcgactagttttcaaaggcatgatgccaagtgggtctcgagggcatgatgccgagtgggtctttctgtaccttaggttgtggctaggagggatcgctagaccagtagccagaccaacaatgctcttaagggcatgatgtcgagtggttctcgaaggcatgatgttgagtgggtcttaaaggaatgatgtcaagtaggtctcgaaggcattgtgtcgagtaggtctcaagagaatgatgccgagtgggtttcgagaaggcatgatgttgagtgtgtcttgaaggccaaatgggtcccgaaggtgtgtgatgtcgagtggctcttgtagcatgcatgctgagtgacctcgtgacatgcatatcaagtgaaacttatgacatgcatgccgagtggccttt

SEQ ID NO: 384264 - DNA, 2213 bp, Cannabis indica
tgcctgctgcttggcagagtgggccaacacgaaagcatccacactgcagcaagaggcccaagtctccatgggcagctctgtggcgctcccaaccacatggtctagaagctcagtggcaaaaggtgcagccattgtacccaccttatatgcaggcctcttctccaaagcctcaacctccacaatcggccccgtaggcggcagagcatgcatgccatctgagattttggccttgtggaccgccgatagcacgaccaccctcatacggacttgcatcctttttgcctccaaacgccccttcatggccctgctcaccttcctctccttctgcatgatgagggggtcaaatggaatagcctttatggggaaggcgaaccccaccaggggtattcttggcaagattaagaattgagatcgaggcaggcccagcctccgtaggggattgtggcactaggggtggaccctcgttctagaggctgacccctcaagcttctacttcttcctagtagtatgccattcgctacttcggaggaacctgttcttttcattgcatgcttaatgcaactaccaaaagttgaaaccatagaaaaatgagttagcgcattacgtgactccagaattctcaaagatggcagtcatggaaccagtgttcctaaggcaaatgcaccctcacaactccctcaaaactcaataacaaataaacaatgagaaaacttaccagttgtcaagagaaatccgtggctggtgatcttggtgcaatgttctcgtcgatagaatttgtgtcagactatgaaggtattggaaaagcttcataagataggggaagaactggaattaaggaactctgacttgaccgacgggtaaaacgaaatgagcggaacaattgctaagggtatttaatgagcatctggaagaggcactttccacgagaagcgaatagtttgacgtttggataagtgggaagttgagaagatgtatcacctccaaccagacggcttctgtcatagcaagcatcataaaaagcactcgacaattgggaattcgagtcaaatccaatcatcgtcattttgggcatcccaccaaacacacgcctagcactcatgtaaaattaaaaaattagcatttaaaacccttacaagaaaatagaagtaatcatgccttctgaataatgataccatagattggcgtctaatgaaatcacgaagaaaagagcatgtcataattcccacgtgcttaagatctcttcgaggtaaatactacaagctcctaaaccgtggcatgccccgaaagcttagggagtaaatattatctatattttcgtaaaaatgacacgtggacttcaataaaaaataagataagaagttgttagctggatcaactttctcaattaatgatttgggaaggtaaaggcaccaactttgcaagaagaggttccgtgaagaggagttccctgactgctgccacacgaaaaggatccatgaaaaaaggtctccctcacccccaggagccaacaccatgcattactgcgaagagtggggattttccaagaagggccaagacattttgagaatgcctccgtctcggatacgcatttggcttgcacgagaattgtccacgcttgtcaagctacgaacatagtgactaggctttttcatgtacaatgtcagaggttgtctcccatgacacgctatcgtacagagcatgcgtatccttttgtattgagctaaataatccaatgactagggataagagaaattcaaataagagaagccccagagtgtcacgcgtccaaggacaagcttgtccagtcagtacgatctgacagcctcaaatgccatatggaaaatatgccacctacctatcaacggtgggatttcatccctacaaagattcatccaaggcagcgtatacatgaagccggcctataaatatctccaaaaaaagaacaagagagggaggacctttttttggggggatagaggaaccattcttcatcatcctaggcaacaacatttttagttaccctacgatttaccctagaatattcctactaagcttcctacttcttcaagagtaacacgatggaatcgagtaaatgtccaattcatttgtatttgtataaaaaaatcaccagccaatgagcctaataaaataagactcagggactaaggataattaacacctgaaccacgtaaaaatctcttatttgttatttc

SEQ ID NO: 384265 - DNA, 957 bp, Cannabis indica
attttataaattaattttatttattcaaaaaaaaatataattaattttattcaaccaattcaaattataaaatattattaaaataattaaatactaactaaaatagaaagcataattaaagcaacaataataaaaatgattctattttaaccttttagttgttttagccaaaaaaaaaaaaaaaaaaattataaagagtcattggagatgctcaggttacatttggttagatgacaatgaaatggaagtaaatcagtatttattgcattttaaagtagtagaattagggacggaaactgggtgggtaatgcacctctcaattccgtcctcatttcccatttatgcccctgccttcgccccacttaattctcacgggtttgggataaaggaatccctgttgggtatggggacctattggatacccattaaaattaaaacaataacaataaaaagaagaaataatgtaatgtaactcaaaatgaaaataaaaagaaaacaatatattaattttaaaataaactaacattctacattttattacacaataaattaggaaaaattaatagtaaattttgtaagtataactaataactttaatacgtaatatttaaaaaaactatatggaatgtttagaaactatatatctaggtcgaatatgggttggatagtatcattcttgatcccgctccgaaaccgctttgggtatataaagttacacttcaaccccgccccattacctattaaagtgggtaatccccaccccattcggggtgggtgctcgtaggtatccgtcccgacaggtcaaattttcatcactaatttgaatgtcattctcctagaatgactatttcattaaaggaatacttcttaatggtatcacccattcatgggtactaaacaaatttaaatataaatattaattttaaaaatattaaactattagattttggtccgata

SEQ ID NO: 384266 - DNA, 969 bp, Cannabis indica
ttcctgtcacctttttgtaaaaatcttcaaattttgtttacgtagtaccaaacttgttcttattaacttgtttataataacaagatttgtggtcatattttgcagaaggatacatggagtgaagaagaagacaaaatattgattgaagcacatgcagaaataggaaataaatgggcagaaattgcaaagagattagcaggaaggactgaaaactccattaaaaaccattggaatgccaccaaaagaagacaacactcaaaaagaaaatgtcgtaattcaaaaaatccaagaggctcaaactccactctccttcaagattacatcaagtccttgaacttaaccacttcctcaagtagtagtactaatactaataatactactttcacaaagcaatatcaaagaaaaacgacaccaaacctcacaaacgacaacatgttattaccatttgttgaggttgagcactcccctcaaacgacaacattagaagtttgctatgctaatgatgatgatgatgttgctcgtgttgagaacactaccactactacagtggatttttgttatagtaatattgagtcttttattgatgagatgatgccatttgtcgttcatgatgaggataagaagttggtaccaggtagtgatcatgtggagctgcctgtagaggataacaatgtttgttctgtgagggaaggtggtaatgttattggagttgtaaagaatgagatggatttgatggagatgatctcaaaggtgtagcttatatatatatatgcccaatattggtgtttgctaagtgtattttggtgtgatataaggttaaaatcatgatgttttcttgtattttgttctctaatatgaattataaaaatatatgtatgtatcactataagtggtaataataaattataggagctttttcatcaaatacatttttttttaagattatctttaggacctatacattttttt

SEQ ID NO: 384267 - DNA, 1553 bp, Cannabis indica
gtaacttctaactaatatatataatacaagtgaaatgtgaaaaaagtagaaaactactagttgggttggcgggttggacttattttcaacctgcccaattaacagattgggtgatttataattttgtcaattttttttgtttgtattttttgtcaagttttttgatttagtttgaacgggttattcaatttgggcggtttatatacaaccctaatcgacagctaattaattaacttaactgatactaacagctagacactgaaagattaaaatgaaaggattaaaaatcactcctttctaacatatacaaaaatgtacgatcagattctgtacctactttgttaaatgccaatggaagcctttttgaataattaaatcaaccaacctttcagacaaatccatataatcaattgaaggaggagaacaattattgaaagcattcaattgaaagagcttcagtaaaatctagctccttaacttaacctcataaacttcattactcattagctccttttctaataagcaaacccattgtcgtcgttttgaaagtatagtatgacactgaacaaacaccaaacactttacaaactaaaagaattcaacaaatataattaatatgtcataacacagtaatgaaacctcacaaaatggtctttctttctatttcaaaatggaattgtcattccaccaaaatagtagaaaggtcattccatcggaataacattcaaacactttaatatgcaaccaaacaaaggaatggaataaaaattgtttcctttcctttccattctatttcatcacctccaaccaaacgccaccttaagtcattcgcaaggttaagaaaatccgtctccacaaccacaccagtctattctttagtttttatccagctcaacgcctccctaagtcccatggcttcaacaaacagcaccacaacaacttttctaatttcaataactaccccgcctgaatcccttgccaccatatcaaaacccaaacgattcgccttttgaaaaattacaccatctacgttatgagataaagatacaaaggtgtagtccaatgctcaattacaaaggatacaattgcatatattttaattcaagagttttctattttttttaatataaatataggctaattatatataaaatctcacttatatttgagggatgtaaaacctcactaaattttaaatcattagattgatgtaaaatgtatatttttggtatcttatggttatgatagcttcatttataataagagtatagaaatttaagttaaaattggtgacagccaatattagtgtaatgtcatgtatcaaataattttaaaattagaaaagtaagtagtagtagtagactagtacttatctccaatggtactttaaaaactcaaatttgatgtagttttttcattaaaagccttcaattcaactctaaaaatattcttattttggtgggagttactttttaataattaaataatcatttttcaagtcaaaaataaataaataatcctttttttttaaaaaataaataattatataataa

SEQ ID NO: 384268 - DNA, 1332 bp, Cannabis indica
cacacacacactctctctttctctaccacaagctaggtccagcagtctagtatggccatggcataccatctttgccaaaccatgctctggtgcaagccatacaagactgttataattaggagcttaaaaatcaagtcttgctatgaaaatcataatgaaagcaaactaataatccaaacaaagaaaagatgcctgagatgcaatactctttactcagaccaagacaattcacccactgcttgctccttccatggccacacaactggtacataataatttccttcctcttatccattcccaaccacatatatatacacacatatcaacttttgggttttgtttttgtgttcttcaaattaagaaaagaagacatttttaagctattgcaagtttttcttatatgggttctttctttaatgtttagatttgtaagcaaaaagggtttttcttatatgggtcttctacataaccaaaagggtttttagctcaaagaaaaagaagacatttttctttctcaaatttatatgtttaaatttgttgatgaagctaacaaaaaaagtttatctttttaagtattcaaagttggaaagattgtgtttttgctaaatcatttttgtcttttgctttgtgctatagcatctattctacataaccaagaaaaagaagacttttttaaggtatttgaagttttttcttaattgggctctttctaaagtatttaatgtataataggagaaagagggttattggcattggctccaccacaccaagggatagatggtgagtggagtgaccggtctggtgtaatagtttacagatggaatgagaggaataacagaccaaacactggaagtggcaattggaagaagagatggagctgttgttctgagtatggtgaagatgcaccaccttgtagaacaggttgtcatgtttcctatgatgatggctacactttgtattaatacataatcatatgaaagagaacataaagatttgtatttgatcaaagtttctgttgtagcaaagaaaaatgctaaattatacaatatgatctttgtcatgtgattattactttccacagccataagaggcactagagagcttaatcctacaaaatctaagaacaaaaaaaaaagttagactgcagggtcggtcctgagaataagacgaattatatttcggagtcctaaaaaatatatataaaaatatattgaaaaaagtgtcatggaattcgagatcataacattgtataatatgttatacccttcaaccgactaaactataaatattttttgtttacaatatacttaattttacttaaataaaaattta

SEQ ID NO: 384269 - DNA, 1656 bp, Cannabis indica
ttgtaatttttccgggttacttcggtttgtaatttttatcggttttttcggtcggtttaggcgggttattcggtttggcggtttacaatttttttttgtacagccctagtgtctagtatatgaatattctgtgggaagttctcacccgtctccatcctcatttccgttaaagattttagtttccatctggaattatttcttatcggagacgaggtggagacagaaggaaacccctgtaaaaataaagattattttaaaattttaaatgtataaaattattaaattatataaaaattaaaatattatacattaattattaaatatttattttttgaaaaatcagaaagagaattgctaaaaggtactagtgcctaccaccctccttaatgtcataccgctattagtgtaaataagtagcaggtcctatataacttaagagaataacttttaaagaatatcattaaccatgtcacttatgaaaggtgccttgcataaaaccaaactttaaaagctaacaacacctttttaaaggtctgagttctatacataattctcatcttactttggtataagattttcaaaccaaataccattttcaaaactaaaatgataagtccaaatcaataaaatcttacttgttgtactttcaatgattttgtttacaagtacacacaattttgttaatttttgagatcacaaaacttatttcgagttctccacaaatggcatgctaaagaagcaaagatacttgaaaaataactctttataaatttactcatcttggatccagctatccacctatataaatcaacaagtgtgctaaaaattgaattgtattgctagagtaaaggtggagagtctgtgtattgtgatagttgctagagaccatcacaataaggtggtttgggtgactaatatgcatttagacttcttttattctctttgtggcgagacttaattaatggtgaaaaatatacatttagtaagcttaaaatttaaaataaattaaatataaattaatattttcataaaattaatgagatatatttttatgttgaaaatatttaatttagatttaatttattatctttttttgtaggaattgaaattatggtatttttgaaataaagaaattaaagtaaaagaagtaattctttttcagagttcggctctgatagaagcccactcgcgtttcagtaagctcctcaatctaggccgtcagtgtgttgatcttgcggcccagatgggcgcgtgcttcccactccagacaagggcgcatggtccctgtccctctcctgccaagccgcctacgttccacacgcgtgggacccgccaacagcttctctctccgccagcctccacatgtgcgacaagcagtagcttctccttctccttccatccgccaattccaagccattttttcagctgctatttattctaatggatgaacaatgtgcccaaaataccaatttcaaaacacacataattttaatatttttttgcatttatttggctcattttactatttctctattgcacattgtatattttactattctactcttctcatatctcacctacctcatttatcccagatatttctagaaaaaaatattaaaataattaatttattaattattttaattcactcacttt

SEQ ID NO: 384270 - DNA, 1412 bp, Cannabis indica
taaaacttaaatataatactaaacattataatactataatttaaactattagaaaatataagaataaaactatactcaattctatatatgattgtcattacactattgttacaaaaattataataaaaaaaataagttaataaaagtacaaaaaaaaaaaaatgtaattaattcaacaattattaaaaaaaaattgcaaaaaatagtaacatgtatttgagtttagatatgaaaacggattttcctatctaataagaataggccggactcaagtaaacacgacacgaaaaaaatactaggcatacaaataaacctactcttgaaaaataactcattttgaagtggatcgggcacgcacgtatttacaacacttgatgaatattctcaaatggttttaattttagggttagattttgtgataaataaaagtacgccccacactatatcattaataaattattattattattattaacatgttattgattgtaaaaataccataaaaaaacatgttattattatgtttcgaaaaggtacgctccataatttgaaaatggtactaataataacaagtggggtcaagtagtactatgaattatcctagtcatataaattaatgggaagaatagtcaaagttaataataataataggtagaaacgatcaaaagaagacagcgatgtagttgagttattataactcacctaatccaaatcacttacctaaataataataaggtttttatttggcgtgctatttaaaataaataaataattgctatgtatattatattttaaataatgtttttcttaattaatgaatcatacattcaattagaagtattgccaaattaattgtgtgtagtactttttctttacatattctataatacttattaaattaaaaataaatgctcaaaagtactagtagtatctagtattttttttttgtgtcaatatctctattagttcaattaagtattgagttttatatagtttaatgtaataacttttagagagtatcgctagctaatcgcaaagcgacatgtttaaaagttttagccattactagtaatttaataaatattatgtgtgtgatgtgatacttaattatataacataatagatatcaatagtattttttaatatttctctttaattaattataattagtagaaggcaggtgatgtagctccaaatcccagtccgagagagataataataattaattaacattaattaattaggtagcaagggaggtgataaaagagtaattaaatgcaataatttgagagtaagtaatgtattattaattagataaatgttttggagcaacaagacgtacgtgatatattattactgccacacaatttttttttacaaaaaattatctttttataaaacaatttaaaaca

SEQ ID NO: 384271 - DNA, 2112 bp, Cannabis indica
gaacctgtctttaattccgatgctcagacaactacagaatgggatctactggttcgacgtcaaagtggcactgttggtattgcagcaaatcatacggaacccgatgacttggggaggtattcacctcttgcaagcaggtgagcctggtcaaatggagactgcttctgtgaactgaatacaaattacaaccatctgcatttgttggtgggttctaatttcatttaacttttgtgttgatgccttgatggtcgtctatgcataaataattgtccaaaatgtgtcttctttatatgcccaacttgtattattgttagagtgtggaaggaagcaaaagaaacgatctgtggaaaacggaaaacctaatgatctgtgtgtcaagtaacatttgtgattgggaaagcaaataaaggtttttgtggcatagtctgccaataattttttttggtttgctgtttatttgttctgtttatatcttatgatttgagcaagtattgttctctctctctccctctctctctcaaattgagagatgcacgaataatttttgtagcttgaaaggtcctactaaaactgtggcaatgtttgtatgggagaaaaggaaaatggttagaaaagtttggagagaaaaataaaaaatgtttgcttggttgaagagaaaaggtggtggaagagaataggggtggaaaaaaaaaaggtttttggtcccatcaatatataaccttcccaatttggagagaaaagttgagtggaaaatgtttattctatacatctaaatgaaaactacctatttacccttgtttttaatccaaataatcttttaaagttgttaaattgtaattgtaattttacttttatttttttatttttcttcctcccaacaaaacaacataagagactatattgtcttttctatctctcatacttatcttttctcttaacaaaacatagagtatgactgtatgtctagtagagagtgaagaaaataggtgggatggaaaaagtataagagatggaaaatatagaggatggaaaggatgatgtttttcttttatagttggttggtagatgacaagtataggaaactagtttattttgtaattatatattttcacctaaactgttactgtaaagtttggtgtgcaagtagtatgtaattctcaattttttttacaatgttttctctttatgttcttcactctggtagcaaataactagcgagctctctgtcccatatttttttttcactcaagtttctttttcttctgttttctctcacatatgaaatgacctatttcaagcataacatcgactaagtgtttgtcatgagagtgttgcctttgcactgagagactataaaaggctttttacctgcacttttatcatttgttttttccgtcctcaactgccttttcttttttcccttgttgtatttgaaaggtcactagggtttgcaacctatcaatcattattcaccttgattatccgtataaaaaaatcaacctgaggagacgtacgtatttaattgtagatgcctaatatattactaactcagcaactgcctcattcatgttcatctgttactgaaaaattgtgtttacatgttaatagcaatcatatgtgacaattaagtgagggagaattcaatgctttgtttatattggaagtgttccccttatttgaattgtttgcatgccttttatggaaaaaaatgtaaaaaagtgtaaatattatttcaaaatagaagtatgtcttttcaaaggtgtgccattttggtatcttttgtgggtttccatttgaaagagatttaagaatgttccacattgtttgtggaattaggctgtagtgtaggtttatactttgctgtgggtgtctgttattgtgtattagttaatacttcaagttcttgtttcttgtggcctgattttaaacatttgctgtctgtattatgttaggccttaggataaataaaaagggtatttgggtcattgtaataggggctattgggagagtatatgtatgagaacaactagaagggtttgggtagagaatgaattagttaatgagcagtagctcttgggagagcactgggtctctcgaatacccagcaatcca

SEQ ID NO: 384272 - DNA, 1026 bp, Cannabis indica
caatacctcttgtaacctatcagaagatcctcactatctcttagtattactttgagcttaaattaaagctcaactcaaagccaacacataactaaaacatgtcacacaacaacatacatgcacaaaatcttgtaagcttcgaaacttaaaccttcaaagcaaaaatcccagaacttcaagtgttctactcagaaatcaaagtgtaaacctagaattacacatcccaaactcaaccaaacctcccaagacaattaagatgcaactagcatgaacttaatagcaataacacacccaaaaataccacaattcatacaattcacaacaacatgcaaccataaacctaaagaacataaaaatcaccaatagaatcatcccatactccaaaaatttcaacaagaaaatagatcaagaaattacctcaagcttctagcacaagaattcacaccaaaatcaagccttgtctttcacaagttgagtttgaaaataccaattaaagagagaatgagagagaggcggtcaaagggattcaaaaaccataaaatatggtttctaatcttcaaaaatcttatttgttgaatattgtcttaattggccaaaagaccaaaatacccccaaggccatatattaccatactcatataaacaagggtagttttgtcattcaactcacaaacatatatcacataaatcacattttctcatatatcatataaatgccataaataaatcccgaatatatattttaggtcccgaacttggtttggcccaaaaaacccgattgcgactataccatgtcaacttgtcaaaaaaatacctgtagatagacagaataaacatactatataatactatagtctacaagcaccgtatatcataaaaatacaattttacctttgtcgtgtcaaaattacaaaaatacccctaacacaccaacatgttcttaaatagggatgtaaacggggcggggtggggtgcggggattgctccccacccccataccctctttttaaattcactcccatacccg

SEQ ID NO: 384273 - DNA, 2242 bp, Cannabis indica
ctctctctctctctctctaaatgaaaatgaaatctttaatatactgccaaaaatcaaaagacttatataaatacgtgtaatcccggccaccacaccgcttcattaaaagaaagagctaatgtgacaaagttataagcaataaaattcacagagtgattacaaacgaaaatttaaaaacactaagacaatcacaaactacaaaaatatcttgtaaaactgtaccaaactctaccaaacaagtatctttttcactcaacaactttgcaacaacttagcaattcgtttccactttgacattgagatactagaatcgaacacagagctgaatccccattagaatgtcccattacctttgccactggagaagagagcaaacccactaccggagtagctgacgaaacgatgcatgtaccaacatgatcacgcaccactgccccaaagcccattcgaaactcgaagtagcacagaccaacatttgtattcagcttgaaccaaccattcaccagcaggacccactatgtgttctcaggcgagcacaagggttgtcaggttagagcagcaatagctgttgagacagtcaaattcgcctcttggaagttgcaggagaaagagaaaacccaaccaagaacacctttaatatcaaggagcttatggttatggacctaataactacgacgatagaaaatatattaacctgtgacaaagaagaagatgataaagcaaaagctaccaacttcataataggaccaagactatcacaatccctaagtatatgaaagaaaatctcattatttataccacaaagaaggcaagagagaacagtgggcactttatgagtagcaagattaacatttgtagggaacccatccaagcaagttttctacataaaaaccttaatcttagtgtccaatattcactcttcatcgtatacctgcccgacgagttacaatgccagatgaaatgatcgtgaacctcttgtgatcgcgtcatagcaaggattttggcatcttcttccaccgagaataggacatcacacttttattccaacccccattagccaatttgagatcacttgccatactaattgaaggatggatgtgaaagcaataagagagaagaaaaaaaaaaaaaaactcagtatccaagcttgagtcctaatactcacagtagtaatttccttaataaactagcaccccctccaataaaagctattttcctcatataatactcttccaaatataagactctttagttgattcttccacaacaagaaattaccactaaaaaagtaaagacccttcgtcacacgcactgccaacgaacccagaacagagtaggtacgttaagcttgttggctaacttagctttattgaagatgaaaagagcatgaaaactaatgccaccatcactcgtatgccaacataagtttttccacgtgcaccaatgtattttcctattatcattagctcattcccaccaaaaatctagcacaaagtctatgaaactcctcaaccattttcatcagaagacaaaaaaggttcatagcatacgttagaatggctagaataacagacctaagaagatcttcatgaccccaacaaagagagatttagccttctagccaaacaacttattccacactttatcacatgttaaaatatatttatttttattttatgtgtatattttgtaagaatataagagggaggaaaaaaattaaaaaatttagtatatagaaaataaatattattaagtggggagtacttttctaaatttttggagtccaaataaaatattacttttttgaataatatttaattacataattatccttacataaatagtctaatatacatgttcaattttttttttattttacttttaaaaatttatctttcataacaacactgcaatgccctaacccgtagagacacaacatgtgtgagctttaataaattagtttgtaataataaactaacagtttaaataaacttgtgatttaattaaaattaaactaattatttgaagtataaaattatttgaaccacaaagtacttgtaagtcacaacgacttaataagaaaaataaagcataaatattacacattacttaatcaaatatatacatttaattataaccaagtaatcacattacttaatcgataagtaagaaatcacactgtaatatcccagaaaataaataatatttaaatggacatattttattaaatatgtaattactt

SEQ ID NO: 384274 - DNA, 1584 bp, Cannabis indica
tatgtatcatagcataccaaatagatttatgtatgagaaatatgtttttaagcacgcgcgctcatattataaatgggccacattaggcaatgctctagagagtttggtcacttttgtattatttttctaagttaaaaaagctaatgcatgcttaattaaggtttagttaataaggttggcctaaaggtaggattaggaaaatttagctataaagacaagtttgaaaattttcaaaccctaatttgatattattttttaagattcgtcaaaaccttggcttttggcaaccttcaactaccctatccctatgtagtagattcgattttaatgtcattttatagcattaactgttattttattagttgactttctacttcttttaatctataggttaccacattcaaatatagtagttttatttttacctaacaaattcaataagggagtagaaagaggaaaaaaaaaagcaataaaaatctacactattaaaaaattgtctttttgcgtcggtcaacacgttggtttttagactatttttagcctattatttagatcatttttaataaatattctctttttaaatgtcaatttttgaaacagatttacacttgttttctttagtttcaggttttgacactttggattgaaaaattggtcaaatatcaaaaggacagtgcgggatcgaaaattaattttttttttgtagttggtgtgctagtcacagcgacaaggctcaattgtagccgcggcaaaattttgccatgggtcgccatgacgaaattttatagagtcgaaatcaatttctcgaggagctctagtcgttgcggcaaggcatggtgtcgctgcggcgccgcctccgtacgaagattgggaagtttcatctttttgcaatttttggctaaattttttgttccaaataaaagggaggcttcgaatttttattgagttagacaaaaacgaaccctaaaagagaagaataagaagcttgaagcgagcatcgacgatccatgacaggcccctatctagttttctactcttctcttcaatttcctacatttttgtttatgtttaatttgattatgaatatgtatttgagattatgagctactatctctatttattagggattggatgaatattgattgagattatcccatcgtttaatgctattttattgttctttctttcttgttattgtgatttgttcatctttgtgcttcttatacatatttaagactgatcaacttatgcatgaccgataatcctagtataaaatttgaaaagttgattagttgggaatgctactaaatatgaatgaacataggtcactactgtaacaatgtactttttgcttcgaattttcaatgatatataaagaaattttttcgattagtgtaatcgacgctataatcatagacgcaaatatagtgattattttttgcttcgtattatgaaccgacgcttaatatttttttttattaactgaaaggaaaaaccagtgcactgatgactaatttaattttttaaaaaaaagttagtataataatttttttttttggtataatgattaaaattagtattttt

SEQ ID NO: 384275 - DNA, 1045 bp, Cannabis indica
tatatgtataattctatatgaggttttgtggattgaattagaatggattattgttggataatttttataagagaaatgtttaaggagattcacggtttatgaagtctcatattgctaggatacctaataacaatgcttttaagctgagagaatatattgaaataaataagccaacaacattggaatagttaattttatcctactaattaattcaatcttcatatgttgaggtaagaaaaaaaaaagtgaaacctttacatccaacatttttcccccataccctacaaaaagaaaacattttttccccaatttagttatattgttttgttttgttcattcacaaatagttcatacaaaaaaaagtattgtgctttaattaagatgaatttattgatcagcaggaactaattactccattagatatccatcaccatacttgagctttgatgtttaaactaaggttattttatatgctgaattttttttttttttggatacagatcatgaatgagagctcaacaagctcaagtaataatggaaatgatgactcatctgccatgttaaaagaaaaggtgatttcttggttgaccgctaattaaaatgttgacaggtatcaagtttcccaaaaaactgtaattaaattcaataattttgtctaaagcaattgtacatatatatatacatatcaagttaacttaattgtaataatacatacatatatagatgagtttttcttgcattaatattagctattgaaattttgttattgtatatacattttgttttcccactctaataaaattaagcgttttgttttcaatacataaaattatattatatacgtactactgatcagagagaatttttcttaatatataaaaacaattatttcacaaggttatatttcaaataataaaatctacctgcattgtcattaattttggatattgaatttatggaatttttataggatattttacaaaatattggatttggggtaatacttttcattttactgtcagacggcagaattaacatttatact

SEQ ID NO: 384276 - DNA, 1360 bp, Cannabis indica
aattttgatattttatatttttaagttataagttgagttatctaaatactaaatatgctaataaaagagttcatgaaacaaatagacaatacatataaacataactactgactcagtcttccattatcaggatgatcagattgttgaggcagattctgcaatcctggagtcctaactagtttctccaactgtctaagctggtcctagctatgacatgagctccaacatatacactagcctgaggtgaaggagttgagtaaacgtaggtggtgttgccatctctcttgtgctaattagacgtccgtaacctttttggtgcccatgatatcttccaaaaaaaagtttggacaagtgacagatcttcctcttttggattcatgacattgcctaacttttcagtattttgggtggactgtgtttgttgtatctcgcgtatggcagtcattttctcctattatacaataatatttaaattaattataaaatttatttatacaaagcatataaagaagatagtatttgtttaaaccatacccatgtctctcttgcagtgtcagtcactcatcctttgccctgctatggtgagtggtctgccaagcatttgagattggtgccagtcgcccaaattctggatcacgctatgacatagatgtttttttactattcaaagtaataacaacaacaaaaaaaatatgataattatattaaatcactcttttataacgcaaagtaagtatagattgagattctccatggctcaactctttcaattttttcctattggatacattgatctctgagcgtctctatcaaaaataaatatggagatattaatatgtaaaattaaaatagtttagtaaaaaattaattgggtttgaaaaactaaggcaccttcacttcaggttattcaaaaaacgtgatggcctttttctactggtctatagtgcagccgacatatggagttgtgggaccattcttttcgaagtgttcttcgagttcatgcttgaagtcgcaatatttttcagaacaagatttatcagtgcctgttaagatactagagagatgaactgctccatatctttcgcaaccaatctaaaaaatattgtcctataaaataaactttcattagttaatattatataaaatttattgagaagcaatttaattgtaaaaataatttatctctactctagacaacatcctcgtcttcacaaagttaggtacttgtgcccaatttttgtagtttggattcgtgtattgttgtacgaataatcctaactccctcaaaaaatctaaactgtacaaacctactgccttgtatatttttcctttgatgtcccactcgataggcagtggaagt

SEQ ID NO: 384277 - DNA, 1221 bp, Cannabis indica
ttttgattttgattttgagttttgtgctgaaacaatggcttcttcactaggcaaagttgagcttagaaccctaggcaacactggcctcaagctcagctgcgttggatttggtgcttctcctctcggcaatgtcttcggtccagtctctgaagacgacgctatcgcctctgttcgtctagcttttagtctcggcatcaatttcttcgacacctctccgtatgtactactctaagcttgtttaagaaatgtaaagttgaaggtattcattgcctttgggattaggaatcaataaaaatttggtactcaaaagattctctttccttaaatttcactattttctttttccttttcctgtttttctttctttgcaggtactatggagggactttgtcagagaaggtacttgggaagacactgaaagcactcaatgtccctagaaatgagtatattgtttccaccaagtgtggaaggtatgctgagggttttgattttagtgctgagagagtaactaaaagcattgatgagagcttggcaagattgcagctagattatgttgatatacttcaatgtcatgacattgagtttggcaatctagatcaggtgcttataagtttctatgaatttttagatttgtacatgtgggatgtggattttttttttagtatgccactttatatcaacttgtgttgtttggtgtttgttattcaatgtctatttctcagaatgttgtgaaatgtgatataaggtgattattaagctcagatctttggttttctattgttgatagattgtcaatgagacaatccctgcccttcaaaagctgaaggaagctgggaaaatccgcttcattggcataaccgggcttccattagaagtttttacatatgttcttgatcgggtaccaccaggaacagttgatgtgattctttcatactgtcactatagtgttaatgattcaaccttggatgatttaataccatacttgaagagcaaaggtgtcggcgtaatcagtgcttctccgcttgcaatgggacttcttactgaggctggtcctccagaatggcacccagcttcatctgagctcaaggtacatttctcttgtttcattgctttagcttgtgcattggtgattaatcttcatacattcctggtcatagaatagaaatagcgagatgttcaagttcgaatccctctcctctaatgtcaaatagaaaaaaaaaa

SEQ ID NO: 384278 - DNA, 992 bp, Cannabis indica
acagcataatcaaccaactgcaaagaagacaccagctcatcctaagtactactacaccagtagtaggattggccattataaggtacccttagaatagtagagctgttgtgagccacagctccatctgttgataaacataacagtctcattcacacagttgaccactatgatgaattcatatggaggccttattagaacaaaaagcctttggataatgggactacatttccaaaataagtacatttgcagtatgcctcagagtaggtgaaagtaaaaactaaaaaccgtcaaactgtaaacgaccataaaactggcgttaaaaaaccgaaaatttggtgtcacatcatcactaaatttggcagtcggcttttacagttttaaaaaatgaaagttgcataatatatatttgttgacattatgctactttcctaaaatatatatgtaaaagaataaaagatgactgatgacaatgtaataatagtaatcatctaatattttaaaaccataaataatgataactatataaataatatatgcacggtataatattgattatgcaattaggaccataaggaccataatgggatgatcgattttattaagtgcatttaagacatataataacaccttaatgactatatattggcccattaaccgatagtccaccatcagtgatgtaggcctaataacccacttattttactccttagagtagagtgtttatgtgtatatatatactagcaaaaactacgtgcgaggcacgtatactaaattttatgctagtttttttctatgttatttgaaagtgatacaataaaaaattaaagaaaaaacattattagttattaggtgagattatttgaataaagaacaataaatagtcacgtaaaaattaaaaataattatttgaataaagaattcaatatacatttatatatatgaatctcattaatcaaaaaaaattattaaatatatgaacaataatttgtcac

SEQ ID NO: 384279 - DNA, 2482 bp, Cannabis indica
aatccttatagattgttactagtctgcggggtcacgcatggagatctcaaaaatataaagtaattgacttatacatagatatactccctcttattgtatgccacaagcttgatatatttcatcttctaatcgaattttgttgaaacttcaagtgctcaaactcccttcgatctccttgaagagtgcttgcttcttctcgaggtaagacttgaaaatctatctcctgaaagcttgtagaaccttctcctgaatgtagcacttgtaataattgcttaactttattatggaaattagcagataattagagcttattgtcaaaaattagctttagattaataatttctcaattagggagatatatttaaatttcaagtgcattatgcatgttatatataaaatttcatgttttccatattttatgcccagtattagtggaatacgatgttttggccattagagccacttgaatatggttgagtatcttagaatttacaaggtatgatagttcaaaatttggaatgctgagatttaatcgaagttttggttggaccattttacttttagattatttaggttgcttcagggttaagtaagggaaaatttgttatttgccataaaagtgttgaatattgtttttagtgggattctagtaaattccttagttaatttctgatgaatatttagtgattaaagataaacaaaaaattagagttatcctaaaatcaagataaaccattctctctctctctctccttctttctctcttgttcggcccaaacaaaccaagggaaaattatagatttttcactattttcagactaaaaacaaggaatttcaacaagggtttcaggtggttagtgaagcgatattccaaggtaagactaagttcatttttctctttgaatttttaagaaaaagttaagtttaagcatgcaattctaagatatccgttttgtccaagtttggaatgtttaggagttgttttctatggtagtattgagtttgtttgagttggagttgagtggcttttgtagctgtggttaggtttgagctaggtttgagattttaatctcaaacttagctcaataatggtgaaattgaattcggtgctttgatgatattatttttggttagaatatgttgtatatgtctttactaggtgaataggagagttataaaaagtttggtgtagtattgagctttgggtgaagttttttgtagaaaaatagtccatcatttttctagaaatgctgaactgtttctccaaacaagaccccagcaaatggttcaccgtttagggtttcggttcaccgaattttttcaaattttagagcgtagtttttcacgttttatcgatatttaagttattgccacactatctatctatagatgaacttttagttttgagtttaagtccctaaaaaatgatttagcgagtcacttaccaattttatgtaaattgtgacttaggaccttaaatcgttgagcaacagtttccactcaggttgactgtcacacctgaattcaaaatcgaggtaagactaatataataatatgcatgcttacatatttagtgtacatgtttcatagttgcctattaggtaacatatcaataagagcagtatttatgtacatagagttgcaccgaatactgacggatatatatttggcaaagtgcggattgatgctatcacattggtataattagagtgttgagtatatgttaatattacggtcgattgtactgtcgtacagacgttccaaacttagtacgtgttggatgcgggatacgatcgtgattaagtgtatgggcacctagttatgatctagttatatatttatgtttatgcttttttcactcagtctattgactcacagatattgtttaaatgtgcaggtaaaggcaaggcaaaggctgaacagtagtgagtttgggctagatgaagattgtacatatcaagatggataaatctgaattttttcagattttcgggactattaggcctttattttgatagacgctaggcgaaaaattttgtataaacatgttttgtatacagatttaactttttaatgggatcccggaatatgtatttgtatatatttatttaagtttaagtttatttatgaaagttttaattattcactttttttacaaactcttcgattaggaaaggagtgcacattaaaaaaatacgataatgtaactaatctagtacggtgttagatcactgttgttcttcttcttttgtagacttgattacagactcaaaataatacaaaatacataagcacagagaaagactacaaaataaagatactctttcttacaagatgtgaatgaaatacaaagatgtgaaaaagatactaaatctagttgatataaggtatatttataatcaatatacactttattgacaactcattcacggtctgaacaagaccacaactcacaagagactttcctaaaaaagatcttcaa

SEQ ID NO: 384280 - DNA, 1162 bp, Cannabis indica
ataactagtcataagttttattgtgattaaaggtaagaaaaatttgtagtatactttgaaattggtctcaaattttttttattttttagccaacttaaattttttgtagggtggcataaaaataaaacaggccttcgtctctatctcagttttcaactctccttcccaaaaaaattagaaaactgttcagagagcatttctcccatttttagaatgagagttacttttaattttccttcatgagtccttattattagttttatatttgtttattgttggctaatttgatttttttttttctttcaattttcttctttttttgatggatcctcattttttttacacttgaatcttgtagttttaggtttttatttgtattacattttttaatagataaaattgtgctttgtttagaatattgattttttatttagattggtttgaatattttatctatcatttgatcaagaaatatttttttttaatccatggttcaaaattaggttgatcgttttctttatgtcttgtttgaaacattacatttttgtaattaattcatactttttttgatgaggaattaattccttacttttattatatataattaatttatattaaatatatatacctgatctgatattatattttattatttttaactgattcttttttatacttattcctttttaattttgggagatatatttagaataaattgttattatttattttttttcaatcctattttgcatagtgatcaaccttttaattggttattttcgattgttataagtattaaagttgtgttctagtttttgttctacaatcaatatatttgaattaggatgttttatggtaataaatgttttttatggtaatttattattgattatttgtctctattatttttagttcccataaatatacatttttaatttttttttttcacatcattttctacaagcattaaatacataaagacttttttataattatttttataacaggtttctttctctcattacaaaaaaaattatttttagtcacaattaatcaaacttgtgactaaaaggaaaaaacttgtgactaatcataaattatcacttccacgttgtgactaaaaagtccgtgtggctaaaagtattagtcacaaaaatcacaa

SEQ ID NO: 384281 - DNA, 782 bp, Cannabis indica
tatcttttatattactctataatatatacttgtattgttttattttcaaaacgtatacttgtattttgtaataaaacgatcaaagagaataaagatttaaataaatactaaactgattatttcacatgtacgcaactcaaatactttagtaccaataagtcctcacacatatttcaaaccacaagcataaaattctcatacttaattgatttttttttttaacatgaagatatagctgaagttatgataatgtgggtcgtttggatttttccaacaaagtctttaaaaatatatttgtttgataattagttaggtgtcaagaaaatcttgtttggtggaaccctttttgatatggtgggaggtctactaaattctacaaaaaaatatattttctctacgggttaatagaactaattaatgtgttaatgtgcgatgaattcagtcaattttaacattattaggacatttttcccttttggaatgcttattgaaaaatcattatgctttgaatacttgtcaatatttcaatggcttaatattttataaatttattaaaaccacattaatgcctaaggtagaagattttttttagaataattatcttttttgcccctctacttatgacactatactattatgccccttaatctattcagcttgttacaaatagtccttgtataattttatatgcatacatttagtccttctgtttattttgtttaaaaataccgtttgtattgatgatgtggtattatacaaaggatagagtagtaatttcatct

SEQ ID NO: 384282 - DNA, 3380 bp, Cannabis indica
cttaactagctcgcctatatctaagatctggcctgtgtgtagtaagtatgtgagtttgagttttgtgaaatgagaatgtaaaactaaatctatatttgatataaatttagtaaatgattaattaagttggtcaggtggaattatctaaaattagggcctactacccaatccataagcaaaaaataatatttttcatttaagaatataaatatattttagtaatttttataaatataatattttttatcataaagagctaaatattttttttttaatctgaggatcgatcatgaagtagactctctactttaaatacttatttttagggtaatatcaaataaatacttatgtttgaaattcccttaatctcaatctgtcttaattaaattagtgaaacttttataccaaacactccattagaggttgaggttttgggtgaagagttaaaatttgacatttctaaaatatatatatatatatatatatataagaatgatgcataataaaaaatattatatagaagtctaatagttttatttttagtgtggtcataagtataagtatagtggtttcaaacatcttcaaacaaaaaaatcccaagtttaaatctcatcttctaataatatcaaaacaaaaaaaaaatgtttatttttaattagtttagaagaaatatgaaaatattacacttaaacaactagataaaacttatatttatagcctagattgaacaattatttattagttttaaattaaaaaaaaattggagcctgtacaaacttttcacttctattttgtttaatggattttaaatccaactttcctattacatgaaccctccaatttatgtgtctattcaaataaataaataaataaataaaaataaaattaaaatggtctattttttttaacaaattattttagttgtacttatattttgctgactctaatgaacaaaagagacacgtggtaacttattagttaagaaaagtacaattagttaaaccatataataataaatataaattattaataaaagaccccctaagatccaaaccaactaataaaacacacaacttttttccataaataaaataaacaaaccaaacataaaatataacacgaacaccgacagtgtccatagatatttatcatttatttcaataaaaaatagtttatccaaatagaatgaagggcaatttggtaaattcacaacaatgggttatgagtatgaccatcttagattgacacgtacaaaaaaaactagtaaagaaagaaagtgtttttctcccaaaaccaggggtactattactcctctctttttcattaaccactagtttcatctcaaactaggggaaaaaaacaacaaaatacaactcttattttattttaattaattaaaaaaaccacacaaaaataaataaataaaaaatcttatttttatttcctacactaaaatggcccctggttttgcctttcattaattcctagtttataaatatgtcatctttcattcacaccctccaccaaaaaaaagtgataaaatttcatttggggttgttctaaattggccaaaaatggaagttgaacaaggaagaagtgaagttagacatgttaagagaagagttgggtatgtgaaaaaagggattttgaagaagaaaaagaggatggtgatgatgaagacaccaaattgtggcccaaattgtgaatatttgagtactcttcaacaattgtttgtttcttgtttgagagttttcaaagggccaaatactattcctttgccttctcatgttaacatcctctctcaaattcttggtatgtattatatatgtatatatgttttgataatatgtatgaataattttgaatcttgttgtgatatatatgttttcatttttgttgttttattgtttatctattttggtgtgtagtttaaggtgggggtaaagtaattagatctaatatttagaaattatgagatttgttaccatttgattttatattatttttgaataattaacatttatttggagagtacaaaataaaaaattccatctatcattcttttcttagaatatacatctaaagaataaaataatgaacaatttttaatattagaaatcaaagtacaaaataatctcaaaatcaaagtacaaaataagatatatagccttaaaaatttggccttttgtagttagttacatgtagatagtaatcaaagaagagataattaatatatattataaagaaaaaataataaattaaattaattttttaataaaataaaataaattaaatttgattatttagttgatgtgttttggatttgaatatgagctttatattactaaatttgaattgtagatctagtgacttctttgcctacaatttaatccaaaataaaggtgtgcatttaatttcacacgtttgtattattaattgcaattgttatctatgtttattaaattaataaaatcaatattatatatgtattctttatgattagagcttgaatttgtaatattttctattttttgacataatattttgttaaatttcgattgcaataataagaaattaaattgtcatattttcttaaaatttacacttaacggtattgtatttatgaaaatttcgaaaatataactcgtaaattatttcaaaataaaataaattaccgaccatattataatcacgcaaaacaagaaataaatcttttttttttcccataaatttattaaaataaaaagaaaaaaaaaaaccaagatggttactagagggagcacgcttgagaaaaatcatcatgcatataaaatagtggtcccatatttatatgtattttttttcttcttatattatatgtacaatataatatatgcacatgcatgacatatatatataaaccatgatataagcacatagtttatttcaacaaatctaaaataaatcatcacttttacttttaccgtaacagctctaaattgtagttacaacatttcattagttcttaagtagttctaaattaataatttaagatatatcaaaaataaaatattaattttttgaaccctgaattttcctttaatggtaaacctatatatatatataataatatatataatgatgcattttcttatataattgtgttgtgttgtgttgtgttggacagatagaatgaaagcagaagattttgggcttagtagtgacatacattttttcaatcctaccgatgtagtcaaagcaacacccccaagagttacaaacacaaccatatatgagtccactaatttttctgtaagtcccacaaaaaatttatataatattatttcatttaggataatagcggtataagtatctaaagttttgagtttgtaagcggtata

SEQ ID NO: 384283 - DNA, 3667 bp, Cannabis indica
tgttagagactgccgtagttggcattgttcagcagtagttaatccagatcagaagcaaagcagtctgtgtcctcaggatgaggatcactgctctaatcttgatggagatagtggagctattgtgccatttggctctagtatggacacctctcctcttttacccaacattggcttagagagccttcctaaagaattgttgaatttacatgaaaagtactcagctacttgcagattattcagtttccaggaacttttgctggcaacatctaacttcatcccaggtttgtttttgctcttactttgagtgctctggttttaaggttgtgttgaagtttgaacttattaatttgtttttttaaatgttcttggtgatgaatatggaattatgatttcagaaaatatggtaggcagaggtggcagcagtagtgtttatagaggatgcctctcagatggaaaggaattggcagtcaaaatgttgaagccatcagaagatgtgataaaagaatttgttcaggaaattgatattattacggctctaaatcacaagaacataatatccttattcggtttttgttttgaagatgtaaatttactcttggtatatgattttctttcaagaggaagcctggaagagaaccttcatggtataataattactttctgttttagattaaatcaatttttcatattattatttttgtttttgtttattcatggcttgtttgaactcatcatggtggatggttattattatcaaggtcccaagaagaatggaaaagcatttggttggcaagagagatattatgtggctgtaggcgtagctgaggcattggaatatttgcacaatggttgtaaggaacctgtgattcacagggatgttaagtcctcaaatatccttctgtccgatgattttgaaccacaggtttgcatgctgtaatttcaatattttcacctttatttcgtcatttgaagccttctgttgtgatctaaatgtcatgtatttctcagctctcagactttggacttgctagttgggcatcagcttcgtcgcatattacttgcacagacgttgcaggaacttttgggtgtgtatttccatcctttctcttcccagaagatagtaatatgcctcaagatattcttgaacttataattcttgttttatgtggcagctacttggctccagagtacttcatgcatggaaaagtaagcgacaaaattgatgtctatgcttttggtgtggtgctcctcgagcttctttctggtagaaggccaatcaacagtgaatatcctaaggggcaggaaagtctcgttatgtgggtaagtttgcatagctctgttcgacttaggggtcatggaaatagttggcttctttaatcagtttaagctttccttattactacgtagtcagttaagatgatgctatttattttctatgaatctaggcaaggccaatattaaagtgtgggaaggtttcccaacttctagatccagaccttggcggtagtgactttgaccagaaaaagattgagcgaatggttatggctgctactctttgtattagacgagtgcctagattacggcctcagatcagtgttgtaagttcttttctcctaaaagttgtgtttcttttatttcacgtagatttgttctaaatgcattagttgatatattttttttcttctcttcaaaggttttgaagctcctccaaggcgacgaagaggtcacaaaatgggcaactcaacaagtgagtggcgcagaagatcaagaagaggccgtagatggagagctactccctactaacattcagtcccatctaaacttggcattgctagacatggaggatgactctctatctgttagcagcggcgagcaaggcatctcaatggaggattatttaagagggagatggagccgttcatcaagctttgactaagaaagaaaatttgcatatcgaggaaaggtttttggtaaattgaaaatttttgtgtatattcattctattattgtgcgtggtcatttcggtgatggcttgtggttagtttgtatcaattattgtaaacaaaaacaaagctgggtcttggaagagaggtcgatgaaatgcttttgccccctccttgacttgtgtggcaatgagaaatgtattgtatctatagtttttggcaacacaaatagtaaagggatggcaaaaaaatgaacacgctacctgtcttatgttataagcccagcatcagcgtctaagttgtaggtcaaattgttattatttgaaacatgtaccaagatcaacatgttaccataaagcgcagacgtattggacatacgtgtcttaatttataagcccaacaatctcaatgttttcatgtatggtcaaccaaactaaaggaaaccatttccttcttttaagccaaaaatgtaatattagtaacatgttacaataaagtgcagacatattcgacaagtaagaatacttgaattgttgatatttccttcctttaagtaattgtgtgcctttcaagtcttaagcttggttacctctcatatggaacggatcttctttggggaacttatccgacagtctagtagatagctcaaatcagcaaatattttcccaagatagttcttcatagaaaatttctcttcttcgggcaaagatgctaacaatgattgattttggttctgtgtgttgtggcattaatttatttgttgatggacattgtgtactcattccactgtgtagatgtatggatgtatgaaaagaaacccattcccgacccaatgtctaccaagcactcttcctgtgacttttctcgattgcttgctgatattgtcgcatgtactatttcttctattcccatttatactgcttacaaaacctcatactattcttttgccttttaacattttggtgatactgctaattcctattctaatacttgattccaatttcatttgagttgacatatgagtctacaaattttcaggtttgcctattgctcctatacacaggtctggcatcctatgaaaacatacttggaccatgtctaatgctgaaattcaaatttagtattaaatctacactaaaagagtactagttcattactaatcttttttttcaatattacaaccacaatattaaaaattatacaaaaagtatactctttattattatattattctattatataataaaaacatttacaaaaaacagaatgcggtggcctacattgtctcacaattatttgtgggacacagtagacttccatcaaaataggatgggttttaaggtttagttggagtattttgtaaaaaacaattacactatacataagtttttaatgtgttattgtagatgactttagaacgaatggaagtaacattcgtccatggcaaaagcatatgattcattatagtctcatcaacactcttttcaataatggattgtgtcatttgagtatccaaattaggagtgtaaatgggtcgggtcggatctgatccgactatgatctgacctgatccaaatcatgtaaggatctaccccgccccaccctgctaaatcagatactcgaatcagatcagatccgactcgacttattcggatcagatttgattcgacccaactctttttttttttaaagaattttaatattaacttataattttatatcta

SEQ ID NO: 384284 - DNA, 2808 bp, Cannabis indica
aaccaaagggagacaggtttggaccttatttcccttctttatcttgcaagtgtatgtttctcttgggtttgggagattgatgttaaatgttgttttaattaggcgatcaacagagatatctctagtaattcgtcaagccatggaatcttgtataatgacacatttaatgcctcgttctcaggttttattccaactaataattttgcttaccccttttttctgtctcttagtctaaatgattgtaaagtatgttatttgttaaaagcatttttgtttttgctctattttgcagatagatatctttgtccaagttctgcaagcagatggaggtaattgacattcataaaattctatgtctggtcactcataagctctctctatctgtcttttttttttttcacttagatgctgtttagtgttggcaaatatttccaggaatgtacaggatgtctcattgttttgatattatagttgaaaaggtttgctcttaaattttgaatatggtttcaattctgcaggaactagatctgcatgcatcaatgctgctagtctggcccttgcagatgctgggatcccaatgcgtgaaattgttacttcttgtagtgcaggctaccttaatagtactcctttgcttggtaatctctttgtgtttcttgttttagttttatattttcgcaattattctttcagaagcaaaattctctctctcgctttatcttgatatgtattaaataagtatagtaatttgatagcttatagttatttgctgttacaacagatttgaattatgtagaagatagtgctggaggacctgatgtcacagttgggattcttccaaagttggacaaagtgactcttcttcaggttacataatttgtttgttcgttttctattcacaatattaagtatattatttgtgtaattatatcttattttctcatgtttatattacaattctaacattattgctggattggatatgaaactggctgcataatattgagcttttctctgtttcaaagttgaaaccctttgcaggttctgacaagaagtgttacataataaactattttaaggactccatatatcaagatgtttttaattaagcacaatttcctctgaaggagtcatgccaactttcttgttaacaacctttgttgacttctgctaatgcagatggattctaagttgccattggatattttcgaaactgtaatgcaattagcaacggaaggttgcaaggcaatagcaaaagaactaagagaagtaagtatataaacacatacaaaccagactaatattgcaacccaagcataaaacaacaatgtttttgtcacttttattgttttggtatagttttgtgatgagtttttatgacagatactgctggataatacgaagcaattagaatttcgacgtggaggataaatcgtaatgaatggtaaggagactatttatttgtactcttcgaaaaatagcattgccaggcaaggtctaactctcaggtgttgtatttttcacagggttaaaggcgatcactctaccattgggccttccaaatcaggagagactcagttgcattcttccatacacatctttgaagaaatcattttggcttctagatatttttcatttagatgaattttaggaatatttctgatgtaatcaacaaaccatactggatgccatcttttagcataggcaccaggcactactaaagttggagccgattgaggataattgtgttgtgtttgaaaaaaatatttttcagtaaaattcgaatttattttattgaagcagataggaagttatttgtttattgatttttaatagttacaattctcggtcatcatttagttatgtgataaattaaaggtgtacctattggcaacgcagtttattaattaaaattagggtagttattagttattaccattaacctttaaacacccggaaacatcagagtggcgcagcggaagcgtggtgggcccataacccacaggtcccaggatcgaaacctggctctgatatttgaatatcagattggcttccaatttttaagtgattttttgatgacatttcctataatttatcagggtattatgtatgatgatgttcatgtttgtggtcatagttgtgtgaagctaaaattcaacttattgctttttaaatttcaaattgtttgtttatgattccaggtattattctttgtagggaggtaatattaaatttaaacaaataaaaagcagatttggagttataagtttgaatgtttgagagttgcacgctcgttcctgatgtgataaaattactctgacaagtcaaaatagaatcttattagtagcaaacaccatcaacaatcagagtggcgcagcggaagcgtggtgggcccataacccacaggtcccaggatcgaaacctggctctgatattgactatcagttgggcttctaatgctttatttttgtgattgacataaggtgttttggtggattttttttttctaaaaaataatttgtatttttatattgtgtattgtgttaaatttgtattattgttctatggttgtttttttttttttttgaattaattaaactcattcaaaacaatagaacgcatttcagaagaacaatcctccaactgaagcacataacctgtagagaaacaagagtttcttgccaagcaataagccaatttgttcgcagatcgtttaacaaaacataactcaataaaaaataaattcaaaagtaaattcctaacatcttgaacaataagatcaaactgcgaggacataaaaactttactttg

SEQ ID NO: 384285 - DNA, 1031 bp, Cannabis indica
cataacaatagtcaagtttctgttaaaaactatctctagattaattatttttagtatattaaaaaaattgaattccatgtattattatatataattttaaaaaatacatggatatttaaattatttatcaaaacagacaatacaatttccatgttaacacacaattggtttggaaaattttataacacattatttcaacatattaaaaccctagcctaaatatataaatatattacaaatatatttatcccatttatgcttcctttcggtcatgcaacaacctacttatatagctttaaatttaaatagacaataaaaaggaaaacctattaatatatttaatttaataaaattataaataaataaaaaaagatagagattgtggtgaaatgataatattttggatagacttgttgttaaaacccatgtggggaaaatatattaatgaaaatatttgttgttgtagtgtcacttctaaagaagagatatataactgattttgtacatgtagactagagaatccaattagacaaaattaattttatatattatagaattaatattatatatttatataaattttaattagtttgtcatgtcatcatgtggaggtgtcccctagctatatgtatgtgtgtttaagctaaaaatgtatagttgtgggggatgagtgttgtgtatatatagccgtctaagtgtcctaatttgatcattattttaattattataattaattaataaataaaataacatttaatttttgtctcattgattgaccctaagtcccctctagtgatccaaacttatttcacgggacttctaattaggaaatttaaattattatttatttatttattgagacattctagactatatataatctaggcatagcatgaaaaagcttataataataatatgattaatatattaatattattgttaattaattaggtttaaaaattaacaaggggaaagtcacttcacatgacttaaagctaactccacccaaccttaattattattattattat

SEQ ID NO: 384286 - DNA, 1077 bp, Cannabis indica
attataaataataaagtagctagtgagtaatgtacataagaataaatttggaataatggggtatgttcacacatgatgagaaagagatatatgtggggacattgatattgtagtattaatgaattgcacgtgggcatgataataaggctgccctgttgaccaatcaaaccttctcacgggtcctctgtacaatgagatggcaactactcattggccccaaaagaatttaattccaccttattttggaccattcccacttcaattttttgccctttttcatttttgaactctctgtacatgttgtgatggtccaattttttttcatttccagtgaccaaaccaaactaaaagcattagtagtagtagtagtagtagtagtagaattaagtagggatagggaatcatatactgtgagaattggacatctctatcatgattacatatatcgtttgcacgtgcaaatagggttaaaaaaaacttgggcacatcatcatcatcatggtccataatattattttcttcactatagtctttggtcagtagtgtacgtgtagtgtctgtgtttttgatcttatattatttattgtcgcaaagagccgaaagtggttactatttgcccactattacatgtttcacagtctcaaataaataatagattggtgtctctaattaattttttggtccaccttaacggcttgacccttccttttcttttaatactttgttttgtgtagtactagagatctcaataagctagctagggaatgaagagaaggatatatatatatatatatatacatgtgttatctattttaacatgaatagaaataaactagagattttaattgtaagtattattgatgtatataatatacatatgcatgcttatatgtatataattttacatgtcggctattccaaaacaattatagtgtactcaaaataaacattgcacattaatgacgtggtactattttaaatcaagttttagataattacgattgatttccattttttctttattgtatatataaatgtacatatatatatatatactacatacatgtatgtagttga

SEQ ID NO: 384287 - DNA, 1052 bp, Cannabis indica
aaaaaaaaattccacaaagttctaacaatttatttgatgaataatctttattatatttaaattatttgattatgtgcatatatttatatatttattagataaaaaatgataaatggtgtatagtaacacccaaagtacactaaggttattgatataattaagtattggtgcagtttagaaagaagttgatgtactgagtggcacctaatccagcagaaatagactgattagtagcagaaatagactgattagtgaaactcggttaacccttctcatcatagaaaacgaatacgattcagggttttaaaggagaattagcatatttataatgccatatttgtgtgaaaataatctatgaatataccatttatttagaaaaatttaacgaacaattgaatcaataatataataatttaataataaaataaaaagctctgttaaaatctgttaaagttaacgaaaaaaattaaaaaagaatatatagctgttaaatcaaaaattacctacagttataacagccatatataaatatagtcttatattttacgtgaatttgattgaaaattaatattgtgtattactggacaaaattttaatgtagataattttattgattattatggttgagtggtacgtcattatattattatattcaatttggatataattttagctgattggataataaatttatcatgacttgtcgtcatgtactcttgttgaatcttaaaccatccatatatgaaaactcatatcattttctcttactaatttagtcaaaccaagaaaaaaacaaaatattatatatttatttatataaagaaaaatgttaaagctgtcaattaataattcaatatcagtgtttttatatattttaatttaataaataatataaaaataaatctgaatgaatatagtgttgatgagtaacgttgctcttgtataaaagatgtatatattagtggtttacttaattaatatccaacctttggggtccatagtctgcagtggctggcgcccttaatttgctatcgttatatatatatatatat

SEQ ID NO: 384288 - DNA, 1458 bp, Cannabis indica
tatttgaaattggcataaaagaatttcgattcacccctcttcctgaatttcattcttctcttcagaggtaaggtaatatttatacggatctggattcgaaagtagtcgcgccacacccctgagaagttgttggggtctagctcaatgaattctccaataaaacgtcctgcctcccgaattgctttttcagttctgaagcctagttgaaggtcgtggatttgaacccacatgtcgagtgtattcagcgcagtgtgcttcggattcatgcctggtttgagtcgttctataataagttgtttgcggtcgaaagtccagggactgccgttgatgactctttgaattcgatttcatgaaaaaattgaaagagaaaccgattcggctccagaattttgacatacaatccttttcctggcttccatagatcagccatgatgttctgaaatatttggtaatcagagatttttcctgttaaaagcttcccaactaggcaccatctgtcatcaaagtcaggttcgatgtcttcctcgccttcctcgacgtcaaaaactgcctctaattcttcctcttcatcaatacatagatcagcccatgatttcgttatttctgcatcagacttactgcttgaggccataatgcaataaaaacaaagcagaggacaaaaagaacaatatatgacaaaacagatccaacaggggagacttcagtaaaaaagacaaacgagattcaaaagaaaagacaaataaaatcactaaagaaatttgaacaaaaattaattaaaaaaaaaagaaaaaatacaaaaaaaaaaaaaaagacttgttagattgaacaaaaattattcaaaacctcattacaatattaaaggaaatttgtcttgcgagccaaaccatttttcattaaaagcgcaaatagagttatacaatgaggagaagatagttttaaagaattaaaatagtattttttttaaaaaaaatataatcagagtttaataatattttaggataagttatcttagaaaaaagaaaaatttacaataaagtatcttttttggtaaaaaatttatacttttccaaaagttttttttttttaacatttgtatgatgttctttaaaacaacacactatcaaaacaacaagaaaattacatgaaaataatatgcaaacaatatcaaaataacaaaaataataatatataaataacaaaaaatcaacaataaattaacaagtatacaacataaaaatacatcaaaagaccataaataaaatcgtaaaaatatttaaaatttcgtacaaccgtatttcttttaatttttattgttgatgtttttgtgttcgttttgaaataatccctaaaaataagctcgcagaaattacaaattttattgggcattttacaattttgtatacattattttaattaattacaaaatatgtgcaaaaaaacttattatcattttctcat

SEQ ID NO: 384289 - DNA, 1010 bp, Cannabis indica
ctctctctctctctctcctcacgtaaagggtagaataaaaaaaaaacctggaacttcaacctaatttttagctcagaattgaagtagatgaaatgaagaacttggaataccttggtcctcccttctcctctttgaatttggtaagaaaagcttttgaagtccatatgatttttttgatttggttctgtatagctaagtttatgttagattctattctcaagttcaattttaggctaattgtgactgagtttagtgtttgtaaagtttgagctcatggaactcaagtttgagcttcaatggtagtttctaaattttgtgcttatgggataattgagctatggtttatgtttcaatatgtcatctgagttattttgtgaagtttgataggttttggagaggttttaattaggtttgtgttgcaaaaaccaagtttggtcatttctgcaaggaaaaatagttgaccatttttacagtcttctataaaaatggtgaaccattttccaaggcagactcccaaaaaacagtgaaccgtttggaaaaaatgttgaactgttttgggtgatttttgggagcttatattttcgtattttattgatatttagggtatttctacgctatttatcaatagggaaatttttttttttattttgagtttaagtattggaacaggattaaatgagtaatttactaatttaccattgtcatgacataaggcctgagaatcgttgagcgttgttccactaaggttggcctgcacacttgaaattggatatgaagtaagaaaagtcaagtataccacatagcatgtcaatataagcaacaataatgacattggtataagaatatttctatattgggaaatatatttctatttaaggaaataaaataaaaaaaattgaatttgtgataaatgaatatttatattcattgaatctggacaaaataaattacgtaatattctatatatttaaatattcattgcctgatttgatttcctgaattaattgtca

SEQ ID NO: 384290 - DNA, 2645 bp, Cannabis indica
cacacctaacaaaggttcttaaacatcatgcaattcatgtgtaattaggactagtcatgagtcgtcactgtaaaactgaaattgtgtcgaccccacatatttattcaaaatataaataataaataataaattttacaaaaaacaacaataaatatattagacccactctatctaccaataatgtccttttcttctcatttatttatttattttaaaaaaaataataattacaataattactttgaaaacaattaatataacaataattcaatttaattaatcacaatatttatatatttttatcattataaactattattaaatttttgaaaattataagtatttttaaataattataatataattaataaaaatttatactaatagcaaaattaattataataatacttgtaaaaataaataaaaaaaaagtaatttaacttttcattacaaataaatacttaattttttgaattgtctctcttaagttttgtttgagaaataaatatttaattttaatttttatagtaatacttaaattatatttttaaaatctattactgttttattaatatatgtaaattaatttttttaaaaaaaaaaataaaaatttaataatctaaacgactccctaacaatttaattaacatttaaattagtttaaaaaattaataaaaatagattttttaaaaattaataataataataataataataaaattaattaagcttcaaaaacgccattgttgaaagcttcgtcgtcttcgtcttcatcttcgtcttcgtcttctcccatgctaagcttctcgctctcgttctcctccgatgctctctcactttctctctaataccgattctacccctgccgttactaccggcaccacctcctccgacgacatcgctaacgacgtcgtatcttcctctacatcttcttcttcgtcttcgggaacgatttctaagctttcagagatgtggagttacttatggattccgttcttgatttccttatccaaagacatcgttccaaccaccacaaaggccgctgctcactcttcttcgtccattctcttgcctagtcagactgatcgtagctgttcttcgcctgatcagaaactttattatcgaccggtcatcggaatactcagtcatcccggcgatggtgcctctggtagacttagtaacgctactaacgcttcttacatcgctgcttcgtatgtgaagttcgttgaatcagctggtgctcgtgttattcctcttatctataacgaacctatcgaagttctttaccaggtcaactttttttctctttactaatttcagaatctttcgattaatttcatattcaaatttaattatttaattagagaggagtttagtataaaattttatcctgagcattattataaacacagtcagtttacttttttcttttattaatttgagaattttctgattggtttcatcgaatcaagtcgtttatttttctttctaagcaatgaatattaagacaatatggaaaatcctgcaaccaaactagttgtggagctacaatggattagggatactcttgaaaatttggataataaaattgctatatagggtcatcaactagcaaatcatccaagatcattgaataaggaaggaatgtctcttcgtaaaagcagagaatagtgttggtgaagtttgatgaagtgatataaatttagatttagtgcaattgtgaatgaatgtcgaatgattacgtattgtcttactttatccagctgcattgcattgcattgcagaagcttaatcttgttaatggagtgcttttcactggtggttgggcgaaaagtgggttgtactttgatgttgctcaaaaaatatttcaggtaattgtgtaactagttgatgatatgcatagtgttttgatttcatatatggggtttgtttcggaatgagcaatggatattcaaactgaatttttgatattttcaaatgggaattgcagtccctggtgacagtttgttgtaaagtatctgaaaagatcatttgttgtttctttatttgttttttgcagaaagttttggagaagaatgatgccggggaccatttcccattatacgccatctgcttaggttttgagattctaacaatgtccattagcagggtaatttttcataactatgttctactgcaacactgagttttatagtctcatatctaaatatttgatctttctctaatttctgttcttgattttgggattggcctattgagaaagagagcttcagattgtaagaaaatatcctcattttgagctagatgaattgcattgtgcattcaatactaatttatgtaacattacaacatttgatctttcgttttgcttttcctttgaaacatttttcatgtggtagtcatttatttcgagacagtcgtttaatatgctgttttctgttactttgggatgaaatatttcgataacaggacatgaaaatccttgaacccttcagtgcttcagatgcagcgactccactaaacttcctcccgaatgtgaatatcgaaggaactgtttttaataggtacttaattatcaaccacattcattgttgtgacttgtgagtagttaagactttttcttttcttttcttttcttggtaatc

SEQ ID NO: 384291 - DNA, 2736 bp, Cannabis indica
aatttggaattattcttacccaacagatcttcatcattgcccaaatgtgacgacacgggtacccattagtctcatagaataagcacgagcattcgaagtggtttgtgccaagtgtacgggtcactttgtgctttgactggccatctctaaaattgcatacattgaatatagtgcggttggcgtggtcttcgtgaccatttgtgtagtaaccattttctaactcaatttgttcaacaactttgaagtacatctcccttgtgtagaattttgcgcattgctcgtagtagacaattaatgcatttgattgttgtactccacttggtttggtatttctgctgttaaaatcgttaaccttctctgtgtatcgaatcttagacgatgcttggtcaattgccatcacaaattctcgaaatgtgtatcatttttccaaaaatttctttaggaaactattcatagcctcacatctttgtgttgttcgaattccagcaacgaacttactgtggagaaacgtttcagcccacatttgcttcctattgtattggttttggcaccactcattgtcttccatttcaaaggtctcaatgaattatcgccatttactttcaaacacctcttctttgtggcatgtgtacatcaaattattgaaagcttttgtgaacttgggatcacccctacctgctctgtttgcatttgtgctaagataccaacaacatagttgatgtgtggattgtggcagatgcgtggttattgcatcatgcattgcatggtcaccatcggtgacaacaacttttggtttcacttgaccatggcattctagaaatgttgtagcatccacgagtagctcagctctttctcattcattaggaacacaaattcgaatacacatgttgtaaaatggtggttcacccctacgataatgcataaaggcttattgtacatgtttttcatttgcgttgtgtcaaatgcaatgacatctccgaatgccttgtagtctcttcgcgctgccccatctgcccagaatatgttggcaaatcaattctcgtgatctggctggtggtagacatagaaatgcgaatctcgagcgcaaagacaatctaagaaacccaaggctccttcagcatttgtttccaattctcttctttctttgcccgtgcaactttattgtaaacatctcttacttggcaaggtaacttatcatatccccctgattggagtgccaagtgggacattatttgagaagtctttatacgcattgaattcattgaacgtacctgtgccagcaaaccatccgacacatgacgatttgatttcagcaattgtatctcatgtagcgatactagatcgtggttatgttcatggcaaaactctcttgcctcccacatgttattgtgtctcaaatgaaggattctaagagcaacatgacaacccactcgtgtgtttggtcttgatcgcttcttgcgattgtccatgttcgaactctctcctctcctatgaccttcgcaagaacacacccaccttttgcctgaaacttgtttgtcgattcttctctttagatcatctgctcttttgttaaaacccatccacttggcatatgttgtgtagaaataatcccatttatctatggtggcaagagacttttctatcacatcatgtgtttgtatttctttaataggttttgttatatttagttcccccaatatagatgcccacataggatcgaattccgggtctatgtccaccatctgcagtttttcattaataattagaggctctttcatttttacacttcaaaatacatttgttttttatatttttatgaaattctacttagaaattcctattgcaactagccgaacaacctaaattgcaactaaaaatcgtatagtaacccacatagaaaccaccaaagaaaccactttagaaacccaaactgtaaatttgatgaaaaaaaaagttaaaaaaatagtacatggggtaattctcctaataattaatacctgatcatatatttttaattttcatgtattgaattgcataatcaaactttaggaaaataagttgtttataaatatgatttattttgtttggtattttgcaggggaactgtcactcgttttaggctactatatgctaacccatgtaatccttcatactggcccaagtggttgttattaattttgtttttttaaaaaaatgtcaataaagttatgggctgaattttagttgggcttttagaaacttcttctgtgaaaacaaaacagtaaagtaaatacccttgaaagctagagcgtcttatttttcacttttatctttatttttttatccgtcaaatagatgaccggtagttggaggggaaagtgtaataccactactgctagtgtcatttattaaatccatgtcaaattttttttaaaaaaattaattacttttcttataattgttttcagccattggatataattgtaccacactcaatcgttatgatcaaaggagagtaacatgttactctccttaataagcgtgaatcgtttctctaatatttaattagtttctattttattatatacaatggtggcatataattttattgttagatttaaggacttttgtctaattttattcaattttactatttcaatgattgtttatgtactaaaccatgttccccagactttgatatctaccaaatcatgccctttgaactttgacatgcactaaattatgccccctgaactt

SEQ ID NO: 384292 - DNA, 1896 bp, Cannabis indica
tattaaattacctacaataataatattactagtacaccgtaaattacttttaactaatttttaaaaagttatttttttaattaattaaagaaaatttaatataaatacatatacatacatgcttacatttatatatatacaacccaaaaaaaaattaaaaataaaaattatatccacattaagtttgatatatttaatattattattattaaaataaaaatggcatatcctatattattaataatcatactatctatatctttcggaattggaacatttctttttctctctttttcttttttgcgcatgcacaacttggccacataaaagcttctacaaggactttacaagtaattgggttataataatctctaattaattttgctgctttaatttaaactataatgtatagtctgtctttgtaaggttgactgacattaatgaatagatcattactatataacgacgccaaaaaacatggaggctggcttaaatgttgtaaagtgtgtgcatgcatgtgtgtctttttatctctctaaatatataatgccaaaggcacacacttggtttagtttgcgactgtttttatgaccatcacatgacacgttaattggatatatataaatatatatatatatatataaacataaatatatatgtgtgtgtattcttcatcagtgtaacccaagtggttaaatttcttccacttgcagaggcaccatgcattaaaacgataatacagaccagaatattataactacaagacgtacagtatcaacaatgtatcattttagtgcatatgcataaaaataaaaataataattaagtcaaaaagaacttgcactaaatgtatgcatatctcatcatccttaatccatgctctgcactagctaataagaaattattagaaaattcaagaaaaagacaaagacaaaggaagtaatttgacctaattgctgaatattggtttactattttcttattaaagtatatatatagggggaaataaattgataaacaattaacataaaaccgacgatcgaaaagttctgtccaataaagaaagggaaaaagcctactattctgagtaagagtaatataggaacttggtctaatattcattaaattcctttatcgataagtacatccccgcgcgtggcggcgccgcgcggtccacttagatggcaatagaaaatgccataggaaaaaaatatatgaaagagttatcctgtattatacatatcctcttagaataaatatatacctatcatgcaaaaaaccatgtatatataaatacatattcaaaagaaatatatatttgtatgcatatccaatgtgttagatacattcaacaacttgatttttttaacgtacgtcagcattatatctacgtaatatacagatgattattaatgtatattctaatctttttagtgaattaaatgttctactttgtaaaacgcactaattcctttatgcttatatttcacaatatttttttttttttgacgtgtataatatttataaaacaaaacttaaacctgcaatatctatattttcatccaatattgaagcacacaataaataaataataataataacgatgaacaaatcaatgaggatgaaaatactagtaatcagcattactactactaaatttaattatattaatacgtgtagcacatggaacaattttggatggaaataagccattttaattgccaatgaaattcatcaacatgatgtattcatcaccactattaattattacacgttaatattgttaaaatgcatgtataaacattacgtaacgtcaccgcgcgcatattaatatataaaaaatagaataattatctttttttaccccttgtacttatgacactatactattatgcc

SEQ ID NO: 384293 - DNA, 806 bp, Cannabis indica
aaacccaagctctgaaatataacaggagcgtagaagagtatggaattcatgccagtgagctgttggaaggcaggaattcccagagccccaagaaccaactgaggacggtttttcctttgaaggagattcctgaaagggtgctttatagctcttgctgcattgctggcatcgatcaaatcagcaaactcggcatcaacttttgtagttcctctaactttctcaagaacttttcttccttcatctaatctgccttgttctacaagactgtttggtgtctcaggaaggaagagacccccaatgaacataagagtagctggaactgtagccaaaccaagtgataatctccagccccacggatggatcttttcagttccatagtttattaagtttgctactaggattcctaagcaggttgtcagctgaaatagttggttaactgctccacgaattttcgcaggagccatttctgataggtacaagggaactgcctgcacaatcggaacaagaaagcattactttttagtgaatggacaagtttcttattataagtgtctttcgatcattgttttgttagtaatttagacttacttgattgccaaatccaatgccgattccaaggaagattcttcctaggatcaacatggcaatgttaaccgcagatgcatttaggatcgctcctatgaagaagctgattgatccaacgatgatgctagctcgcctgcctttgtttctagtaacataagaggcagcaaaagtgaaacaagcccagcaaagtacaaggaggaagtaaacagagtcagaatctg

SEQ ID NO: 384294 - DNA, 1601 bp, Cannabis indica
attccaaacttatgaataacacaatcctccttaaattatgtgaacttctaaaaaagatgatgtcgaaactattgagctcgagtttctctttaagtttcaaaatttgtccttgtacaatttaaaatataattggatagaaaaagagtgagaagatgatttgagagaaatttccgtttttcttgctctgtgactgagttattcttccattctctttttagtgagatttgtgaagaaaagtgtaaaaaaaactactatattatgcctatgatcacaaatagataaatataaaaataattttaaaacaattgacagtattatttcttataaaaaaaaaaacagtttgatgaaaaaaaaagcaaggatcatttgtactgttttgccatgtaatttggtgttagtgaagcacagtcaaaagtagattaatgattatattaatgtcaaggctaattgtgactatttaagatttaggtggcattcgcatatatccaattgtttggcaaagcaaagcattatctaatttataaccccttatctaacaatagataaagtattagtgatacctatacttgtacaacaatggaccagaagcaaagcatgaataaaaaatggatgtataactcattatctaattttttgttgagatgataagattattttgattttagtgactctttatagtggaaactattgcttttgggaaagtacatttcaaattgttccactagtatgtgcaccgcccaatactctttcaataccctcacaactcatttccggtttcaacaatgataattttggaagttagaacaaattatagcataaactttgctctgcataaccagcctatattaagcaaaaatgcagcgtttgctcaccgagagtatctgagccaaaggaatgtatagctgtgatgctggcttcgtaacatgtattgcaaagatgtcgtgttgttgttctttctcttcactgtaaaacttcttgtaaacttggacacctacaagaatttgcataattcatcttattaattagttttcaccggatattaataatgaatggctataacattaatttcacaaacaagagtttgctaatcatctattgcattttttttttcatctttttcaacaaaaacaagatgttctccctataaaataatctagattggtaggaattttgatagacgaataaaaatttggtaaaagtttgagccattggagtaatgagttttcaaagttccaaccaaattataaaagaaatttacgctatgtaacaatgtaaatttactgaatcccataccaggttaatttcatgttcaacttgcaaatcatttgcacttaattttatcactctttctatatccctatttcagctatcaaacatgtcttctttttttaaggatcatgtcttttaaccattgaatagaggcatatacaatcataatagtagcttagaaaagttagcaaccaccttcaaatacaagataataccttcttgaatggttttcactcccgggaggacttttgcaagactctccgcttctaacatgtaaagtccttttttggcaagttagctgacaaaataatttttccatttatggtaaaatt

SEQ ID NO: 384295 - DNA, 1492 bp, Cannabis indica
acttatatatagtttcaatattttttacattttgatccgtggggacaatattatccaatacaaagttagggatgaccaaatacgatcattcacaatggttatacaattgtgttatttattttgacatttttttcgataagtttcgatagaattttgatatttttaataaatttcattgattgcttcaggcatgcatgataaatatccatagaaaaaaatatcaaaaatttaagttttaagcaaatctaacaaaattaattaaaattttgataggctttcgatatttttttcgatcaattttgtcagagttataaaaacttacatttttgtagggttttttgaaaaaatgttaatatttttttatggaaatctattagaaatgcaagcttgaagcaatttgataaatttatcgaaaaatatcaaaattctatcgaagacttatcgaaaaaatatcaaataaataacataatcgtataaccatcgtcaaattaacatatatggtcgtccctaacttgggacactatatatcatgaaaggtaaaaccattgaaaaattaaacgaaacaatagaaaaatgcaaaaagtcagatctaacgaattaaagataaagacacccaaaattaatgacaaatattttaatcaaaaaaactttatacttttataatataataccaattatatttttttaaaaaaaaaacattactttgggtgtaattgaagcttttgggctccaacggattttgaacaaagaagataaagagagatgggatggggtggtggttggtagttgtaagacaaggttgatactgttagtgaggctttgacgaagaacttggtttagtctcgccgatggtgggttctccttttttctatttttttaggaaaagatctaagtttttcattcaacaaagaaccaaaggacaaattccattacaaagctcaacaataagcaaaagcaaatcaataccaacaagagcgagcacatggtaacaaggccaatagacccaccaatcgtggcacaaatgtccatcaaagtcaattattttcaagtaccataccaccataaatggaaggtaaagaactaaaacatggatataaaccctcagatctctaacaagagaaaattcattactggaccaaaaagctaaataaaaaaacaacataatgcattagatcttgtggaaaaattacgactaacagtgcaaaatcaactcaatgaaactttaaacaatcaaacaattagcaacgacaagatttaacaaacacaaaaagtaattggagaaaaatagaaagatttaacaaacacaaaaagtaattggagaaaaatagagatgaatagagtatagaaaaccagaaataataaaggcataaaataaaaaaaattaacactaagaaatatattggctcaagtctgatagatcgatgtgatatatggctctactctagttctagaacaccaccaaatctttttattgattgagcaagaacaggta

SEQ ID NO: 384296 - DNA, 1770 bp, Cannabis indica
aagtatacatatatatatatagaagtttgtttattagtattactaaagtttgagacttaagacttcaaaaactaatagactatttacacgaatattatattggtgtttgatgttataaaataccaaacactttttataataatagtaatatataaggtacaaacattaagaataataatatggaaggaggccggaggagatataataattaataataataatatgtctagaaattagaaggtttgtcttgtcatagaacatcctttttattaatttttaatatgaaaaaattcattttctagggacccaagtcttcccaaaaataagatatatatgccactaaatttgtaacggcattgctatgggtattaggtgcctaacaccattataagttggtatttataaataattaattaatattaaattatacaagtaataatattatgcatttcgagattataagggtgagccacttctttaagaaatgtataatggcgatatgtatgatttgacttagctgaaacccaaattatatctacaactcattctatataatgatctcatttctgctatacgcgtagcctagcatgctagctcttgaattggcccactctttttttaattacttgcttgaaaaatcttctataattaacttaattaattcgatccaattcaaattaataatctcaatactataaacacaacatggattcacgtttcctataatatatgcactcctaataacactccattgattaaattcttacatacatatatgtgtggaaaatcttcaatatttccacaaaccatatatcatcaagtacaaccaaaaactcatttattactcttctcattctatagagtaaagattatatagagatacatcgatctgttatatcttttcaaactatatatagtagcttatataaatatattctttgtatggaaaagccggaagggtatccagaagtggtacttcaagaagaagatgacagaacttggttcccgcctggtgtcaaagacgacatgtcgttattaaaaagtgctactttgggaaaatactatggtcataatagcaataataatgatgatgaagattattattgctactataattttgagtcaaagcttggaatattatccgacccaagattgttagctgtggtggaatactttagggagctttactttcgaaggagggagttgtttaaggaaaccttcccacaatttcaagatcatcacatttttgaggtgttaaaaaactcaggcaccaaattgtggagagtcaaatcgggtaatgatatccaaacccgggttgtcaccctcaagaggagctccagcctcggctcgcctccccggtctcctccagtggggactagaggatttgagccaccacctttgaggaatgagtggatcaaggttaagacaattaacaccggcggtgctgaaactaagtccgacaccgccggtggttcgaaatgattgggccatacctgacttatggaattggaaactaattaatggtttgttttttaatttaatttcttatttttaactatcatatttatctaaattgggatttattcttttaaaaggtgatgagtatataatatattttagttcacatatcatatacatattaagaaaatttacatatattgatttttgtaatttttttataaaaatactttcagacggtattttttatatttttactgtgtttttttataagtttcatactgtaatattctgtgttaagtttttactgtt

SEQ ID NO: 384297 - DNA, 1409 bp, Cannabis indica
aaaaaaaaaaatcaactttgttgtactcaaaacttgagggggatggaccttggtgagatatttagagctattgattttttcttgatgtaatctaattacttattgattattaattaattgattttataatgtatttgagctcatttggaagtggtttatatggccatatcagatcttagaattatcaaattttcagcaattgaaaataacaaataattcatagatagagagatcacaactttttttttgtttgattatgggtttggttacctgtatgaataataatagagcaaaaataaaataaaaatttgggcaatatttctactctaatgttggagccaaagaccaataaattaatattcttgtggttgtggctacaatgctggcttattataagcaatgatactttataagagcatggcaccaaccatggcataatggttatttaaattacaataatgccccttcacatgtgctccaccatatgattgatgggccctacaatgaattcaattttttttagctgaatctttagttccaagtctaatagactgaatagtgagaaacaaagcagtgtgaatttttaaagtcttaatgagaaattgatttcagtgtagtagcacgaggaagctagagataaatccaaacttttggggtttgttggtataaaaatggccaaaaatcaatagagtagtctgtggagtttttgttttcattgtttaatgtgaatgaatagcttgtagccacaaatcaacttgagaaattcatttaaaaatgagaataaatacaaaccaaaacattctagatctaccaacttgtattaatttattttaaatgggtattactgttttctaaccataagctttgattttacactccccacatcatgaaatgctaaatacaacctaaaagaaaaagaagataaaaaagatttattgtctttttcaattgaatgaaatgtgataatatgacacaaacccaaggaatgtctcctgaaaattggatataaaatacaatgctttatcctctctgatcccacaactcgtaatttttcatacaaacaaagattagaccaaattctcttagtcccaaaaaaaaaaaaaaaaaaaaaaaaaaaaacttagacattatgtgtcgttttggtgggaggaaatatggcacatgggatgatggggtggactgaatggagacctgaattttgaagatccaaaatcttatttgttttcttaaggacacagatagatttcaggataaggttaaatttatatgcacatggaaggacacctttctagctactactcttaacacaatatatgcctgatatttattgtacctctcgttaggctactttggaacatcgtattaagttgtattgtattatattgaattagattataaatatgattttt

SEQ ID NO: 384298 - DNA, 966 bp, Cannabis indica
aagtaagcgaaggaatacaggttaattaattcctagttttcttcgacattaaaccaataacaaaccaaagtttacgaagtaaacaaagttgtttaagatatatatcgaatgtagacatgcaagaaagcaagagctcatattatatatgtctgtaattgacctgaaaggattaagaaaaatataaaattaaagagagatcgatgtgccttaattggggatacaaattcaggaagggaaagaatggtgggtcatcaaataataaagaaattaatagcaacagtagtgaagaggatactcgaggattgctagttgatgaaatagaaagatacaatgaaaagcagcagcagacggagttattattggctgtaaaaaataatgatcaaccagattattcctcaaatccctccaaatccaaccattaatgtatgtgttaaaattttaatgaaattaatttgcataatcaattaagtgtccactatattgattttctcgttcatttcagttttccattaagtcaaaatgaagattattaaatagcttaatcgaagatatgcattacacatgtacatgcatatgatcttttttataaggacacaaatatggtcttcggctctagcgattaagaaatttgagaaagaaaagaattaaaaggaagaaagtgatttttatttattgatattaaagaaatgttacagctgagcttatatatagtactttcttacaaaaataaaccagtaactgttatattatttatcaataatataatgtgtagattaaatacatgtaacaaactaatatgtaacacatgacattatatattatgtgtcatcattttgtaatatttggaggagttgttactatgagtaacttctaccattatcaccaactttaagagtgtaaaaggtgttacacatctttatttgaaattcttaatggtataggagttatggtgtgcatgagttacat

SEQ ID NO: 384299 - DNA, 628 bp, Cannabis indica
actctattacatttataattaatgagctataaaggtatatattcatagacgaattatgtgctctattttaattagtgaagatagacctacttggtcaggcaggacaggcgtgctttattggatccatcgccccaataaaagcaagtagggaaactttgtatatcaaaagcatccctaatattgttattttctgtactcaacaaaaatttaaaacagaaaagctatatagcatcttatttttatatatatatatatatttcttaggaaaaaagaatagtagtactgaaattcaccaaattaagtttcgtcgtctttgtttcttttaaaaaactttattaatagtctttcacttaattaattaataataatggacctaaaaaatgatagtattagaacatggattttttaagtgttcaactacaactgctacctgaaaagaaaagatgagtcgtcttaaaatatgatattcttttcctttttagaacaaagttgttgcacgatattcattaatcaattaattaattaagtcttcatcatttgactaacaactatagatcttatattatcttttcttattaaccatatcattattatcatttatcccttaatcatgacacaattaattatt

SEQ ID NO: 384300 - DNA, 2135 bp, Cannabis indica
cagtgagtacttctaaggaccttggccgagtgtacttttgttactttgaggtcttgtcatctaaccttgcacaattacacgtttcaatttccaaggttaacaataagctttcattcaaaacagttgaatgcctatttcttggctacaacactgcacgtaagggctatgggtgcatgcattcatcaggccgtatttacatagaaagaactgtaaaatttgatgacaacaattttacctacaacactctctttagatcctcatcaccaatcccaacctttaatcccataccacctcctatgacctctccagatgtgcctcaacaaagtcaatctccttcaataaatccatcctccccaatgcaaccacaaaatgaacctgttacacaactttgaattccatctccagttcagatacattcctccataacccaaccatcaaatgaaaacattacacacgaccttgtgccagcccaaaatcaaacaaaacttgatcatgaaccacaacctattcttatttctataccaacatctattttgcaattaaatatccctatggttgcacctctcaacacacattccatgatcacccaatcaaaaaatggcataacagaactaaaagcttcactgctatttccaaagtctctcttgaactaacctctctaaagactgcccttcaagaccctctatggtttaatgctatggaaaattaaatttatgctcttgtttaaaacaaaacttggaactttgtgcctcattttccaagaatgaaagtggtgactaacaagtgggtgcatttgattaaatacaactctgatggtttggtggacagatacaagtctacgctcgttgcaagaggtttttagcaaacaccaagtctagattacattgaaacttacagtccagtagttaaaccatctacaattcgagtcatcattacacttactgcttgcaaaaattggacaattcaacaagttgatataaataatacttttcttaatagggagcttcaaaaatgtgtctatatgactcagccgccgagtttcaaaagcattgaccatccaaatcatgtttgcaagcttaataaaactatctacgggctaaaacaggcacgccggccctggttcaacaaacaaaaaacttacttagtaaaatggggatttgacaactcaagggctgacacatctcttttttttcacaaaaagaaagaacaaactcttacttctccttgtatatgtcgacgatatcctaattactgaagaatacattgcttaaatcaccaagtttataactgatataaattcacaattcgccttgaaaaatctaggccctgttagctacttcttgggctttaaagtcaccagaaactcaactgggatgtatctcactcaataaaaattcatcagagatttactcagcttagcaaacatgacagatgctaccccaactcccactcctatggtccaaggtaccaaacaatcaatatcaagtggcagacccttaacagatcccaccctatacagaaaagtaattggggcattacaatacctcacaatgtccagactagacatctccttttctgtcaacaaactctctcaatttcttaaagctcccacttttgagcactggttagcttgcaaaagagttcttcaatatttagttggtacctgtgatcttgttctccacttcaagccatcttccaacctttaattagtggcttactctgatgcagacttggaccagctcagtacatgataggaagtctacctctggttactgtgtatatctcagagacaacctaattcactcgtgttctcataaacaaacaattattgcttgctccagcacagagtcagagtatcgagctattgccttagctacaactgagctgatctgttacaatctttgttcacataaattagattgtctagtctttcttgccctattctatggtgtgacaatctcggggctacttgtcttacttcgaatcctgttttcacgccagaaccaagcatattgaagttgatcttcattttatcagggatcgtgttgtaacgtcccaactttaagcctccattgggtccttgcacccacggaatgagtggctcttatacacgagtatgtcactctggctgcttc

SEQ ID NO: 384301 - DNA, 3419 bp, Cannabis indica
  modified_base (1624)..(1624): a, c, t, g, unknown or other
ctatgtggttagtactttaactaagtaataatcattccatttccatgttataactagtaagaaaaagaaccaaagatcactatattattcgattcccaaattttatttgataataaataaaaatttcaggcagtggtaacaatgaccaacttccaaatgtaccggcacataatgagtccagggtggagcatggggtgggtttggaccaagaaagaagtaatatggtcaatggttggggcccaagctacagagcaaggagactgttcgaagttcaaagatgggaatatgccccactgttgtaagactaatccaacagtggttgatttgcttcctggtgtcccttacaaccagcaaattgccaattgttgcaaagggggtgttgtggcctcttggggccaagacccttctgctgctgtctcttcttttcaagttagtgtgggccgttctggcacttccaacaagactgttaaactacccaagaactttactttaatgggccctgggcctggatacacttgcagccaggctaagattgttacccctactcctttcatctcacccgatggtcgtaggaaaactcaggctttgagtaagtttctttctttctaaacaaaataaattaaaatttccaaagtttgattgaatcctactaaaaaaattgtggaaattgaacactttatttgtttttatacaatatgcaaataatggttttttttaatcaaacaaaattattttattgtatgaaagttaattaatatgagaaaaaaaaagtactagataattagttactaaagttaattaatatgaaatagtagtttcataataaatgaatgcggcatagaaaatttttcatatttatggtttgttttggaaaagtttacaataatatagtttttttaaatatatataaatatatattatggggaatatttaaaaaaaaatattaaaagatattggaaaaatattgaattactctgatggataaggagaatgaaaattaatgctatggtatttattctcgtataattgtttcctaaaatttttggaagttgattcacacacaaattagagagaaaataatgagaaaaattctcccattatttttatagagtacatttttcttttctgactcacatcatttttaattttatttttattaattaaaaatataaatataaatagatcttttaaaaatctataaataaaaaataattatatgttctaacaataataatttaatcaaattatgcgaatttctttttcaaataatttcgtaaataacataatcaaattttgtttgtaattattttaactgatttattttttttattgattatttcgatttcaattataggggcataactgtatatataacaattttaagagtgatgtttaattagcagtcactcacatgagtaatttcttcttttttttttgggggttaattttgtttgtagctaataatgataacgtctcatcaatagagatgcacacgctcctccattttatttccattaaagattttaatcatccgtatattctttattcatctccgtcctaactttgtttaacattcgaaaataaaaataacccacgtttccaccttgtttctcatttagaacgngtaaaaaaatgagacggtcccgcaagccatccacacggagaaattgtacattcacaataaattttttaaggaaaattgtaatgaaattatatattctggtttttggtatagaataaacaaaccaaacacatctaacaaagcatattggtacgctcccaaagaaggtgcttttaacagtgttttatttcttgtgttcttttgtagtgacttggaatgttacatgttcttactcacagctactgtcttcaaagtacccaaaatgctgtgtctccttgtcatcattctataactcaaccatcactccttgtccaacttgcgcttgtggttgtcaaaataagaacaaatgcgttgagtaagccctcttctccattcaaatattcaaatagtttgatttgaacttaatttaatgacatattacactgctgtaataatgtgattggaaaacttgcagaagtgattcgaaactgtcaagtgttgtgggattacatacacctagaaaagacaatgccccattgcttcagtgcacacaacacatgtgcccaattagagtgcattggcatgtgaaaattaactacaagcagtactggcgtgccaagattgccatcacaaatttcgattataggtataactatacacagtggacccttgttgctcagcaccctaatctcaacaatgtcacccaagttttcagcttcaactacaagccaattgtgcccttccaatccaagagtgagtcatatatctttttctgttttcataatattttaattactatcattgaaatagtacaataaatcttcaatagtgaaatatatatatatatatatagcaaaatgtactattttggaattgtaacatgtttttggttttaatttgatttttcagatgatagtggtctgttttatgggatgaaattcttcaatgatgtcttaatggaagctgggccaaatgggaatgttcagacagagataataatggagaaagatttagagacattcacatttagagaaggttgggcgttccctcgaaagatctatttcaatggagatgagtgcatgatgcctccacctgattcctacccacgaatgcccaactctgcccattcatttctaccaaacctgtctctcttttgggttttgcttactctactatgaatgtaagattgcgcttaattgggatgaaaacatagaaatttaaattaaagtagaaataaatagtggaaagaccatttcattaaaataatattctaatactttaaaatacaactaaacaaaaaaatgagatgaaatttgtttcttttctattctattccatttcattatctctaaccaaacgtcacctacctaacgtgacgtttggttgagtggaatgaaaatataaaattaggaataagaatggaaataagaataggaattaaattaaatttaaaatgaataaaaaaattgataaaaaaattattaaattttttctcatgttgtattggaatagttgtccacttacttttttctttttttaatttctttttcttctattttaaaatagaatagtcatttcaccaaaatagtgaaaagaccattccgttggaaagatattgcaatactttaatggcacatttactaaactgtaattggaatcagaataatcaatgggagaaatgtattggttaaaaacagaaaataattagaaataatatcttattaagctgtttactaaactgtccggaaaaaaattgaaatcatatattttgtttacataactagaaacggtaattagaatgttgtaatttgacaaaatt

SEQ ID NO: 384302 - DNA, 982 bp, Cannabis indica
acttcggttttgtggtagggtaaagatgcaagctctttttggtacaaaatggactacaaggtgccataaaaggtgaaggcaagatcaaggggaaggcagagaaggagacgtctgaactattggaaaaggctcacaatgcaatcattctatgtcttggggatgaagacttagagaaaggtatcaaggagaagaatgatgcgagtttatggaagaaacttgagcatttttacatgaaaacgtctctggcaaacaagtttttcttgaagcagaagctgtatgcttttatattaggacctgagaaattgattgaagatcatcttgatgactttaacaagatcatccttgatctggaaaatattgagaaaaagataaaatgtgaagatcaagcgataattcttcttaattctctacctatagaacactatgaatatttcatagacaccatattgtatggtatgagttctttaacattgtacgagatccacagtgcattgatgtctaaagaacacaaaagaaagtcagaaattaaggaaaaaaaaactcacgtgagggattgtatgttcgaggaaagtatgaacagaaaaggaaaaaggatcaagaaagtggaaagaataaaaaatcaaagcaaaagaggatgtgttatatctgtcattatactacacatttaaaaatgaattatcctgagttggcacgatctagaaacaacaaaagaaagttaggaaatgcttatttggtttttgatggatatgatagtgagggatatgacaatgctagggtgttagttgtatcaaatggatactctggactcgattaggtaattgattcttaatgttcttatcacatttgtcatgataagtctcaattttgtagctactcaaagattgagggtgggatagtgaaacttcaggacaacaagtcctacaaggtgataggaatgggatctgtgaagttggagttggtaggaggtgttggaaattatttt

SEQ ID NO: 384303 - DNA, 1623 bp, Cannabis indica
gcgatagtttagagaaggtctaccctcatccaatcagggagacaagctgaaatagcagaggggggcatagtagtggccctaaaatagtaatggattcatctaacttgagtaggtatttggaacctaggattgagactgatgaggtgccttttgttatggaaattattgatcaagtggaaaataacatttgcgacgtaatagcaaagaagtgggctatagttagtagctctaaccatgttatcttatctcatgtagttaaataataaactcttggggtaagcacatcactatggctcctttatttctattttgatgttgtgtattatgcgctgacttgtattgttttgttatttcagatggctctggagcgaaaaatgaattcttttgtaaacttcttctgatttcatttcatgatgcctgtcggcgtacattaaaaagagaaattacaaaaaacacagttcaatagaaggaaaatgtttggacccagacaccccaatttactgataataccagcacaagtgatccacactcctagttcgtggaatttctgatccatccattcccttcagttgataggttccatacccaatttatgttgtatttcataggatcctttccaatttggtccttagacccccactctcatttcttaagaagctgggaatactcttctttatgtgagatctctaacttcaaatgtccagcttttcacttgagaattgaagtgcccaatggtcttcccttggtacatcttcaattggacttatgattgttccctgagctcctcgattaagtctagagattcttgaagtagaacatagttttgggttgggtcataagtctcttgtctatgtgaagggatggtgttttcaactaggatgacaacctctcatccaaaagccattaagtacagtgtgtgccccattgaagttcttttagttgttctatatgcccaaaggactcttaaaagatcatttgtcttgtgggatttccaagcttaaagttttttctttaacatagtttttagaatgttgttgacgacttctgcttgtctgttagcttgtggtctagctacaaccgagatgctcttgataattctgtgttggacacagaagtctgtgaaatgtagactgtcaaattactttccattatatgatacaattttatgtggaagtccaaaatgacaaacaatgtttctgatgtcaaagtctatgacctttttggatgtgactgtgttcatgagttctgcctctacccatttgggttaattagttaaaaactaatattgcatatttcactcctcattttctagttgggaaagatccactaggtcgattccccatactacaaaaggccaaggactattcataaaagtaatctcagttggtggtgcacgtgaaacctttgtgtatctctaacactgttcacatttcctgacatattcaatgcaatctttcttcatcgttggccaaaagtacccttgacgaagagtcttttttgaaaggcttggtctagaagttttgtctctgcaaaaaccttcatgaacattgtgggtgattgcgcttatctcaattctgtctatatacctcagatatggtacatattactgttggaaattatttt

SEQ ID NO: 384304 - DNA, 2120 bp, Cannabis indica
tttgggttaatttttacgaaaaatacagtcacacggaaatctttttcaaaaatactgtgttttcataaaacaccagtaaaacttaaagcagaacaactacaaaacaatagtaagaacaccagtaaaacacaagtagaacattagtaaaaacttaacacagtatactgcaatatagaaacttataaaaaaatgcagtaaaaaagtaaaaataccgtttgacagtatttttgtaagaaaatgacaaaagttagtataccatgtaaatttccctaaaaaaataaaaaagagccatcttagacatttacacaaaaaacactttaaaattaataatgaataatacttttaattatatttgaatgatgcgttaaaaaatttatttatttatattttttaaaaaaatcggatcaattctcttaataggcacaaagtctgaaaaaagtctcaaaatacaaaaaagctcaaaagattataaataaattcggagaaagtttcgagccaccaaatatgagactcatctatacgaagagatggtttgctaaagaatgaacatcaatattcttaaaccttttacaatgagataataaaattactttcaaacatgagaaatatcattaagcaagatactaaactcattatattgagtatctaccattcacagtaaaaatcaagcagagacaatcaaagaagactgtaacagtcttaaaccccaatcgaaggcaaagggagagcctataaaacaaggcaaagacctccacaattaatgtgtgactcaaaggtgccaatacttagaaacgcaccagagaaaaacaaatgtccattgggattcaatgcaacaacccttcattcctatcttggactcttcatcacgaagcctagcctccacaaataggtttaccgcatccaaagtcaaatctaattcggaagcagtcacaacactcgaccccgaagtagagggagattgactattggacgatgagccaccagcattctcatcttgatacctctaaagatagttaagagctcgagaactaacttatgttatccaatagaagcttgtggtcaagaacaatggtgttacgtctatgccaaatataccaataaagaataatgaactccaattctcatttactcaaaatattcatgcagcccaacaaaatctcataaaaataggagacatcctttagagtatcaagccctttcagaatcaattcagatcgaattaacttaagtgaaaggtaaagccacagcgcatgaatagtagtctcattattcttaaaacaaatagggcaaaccttggcgagtcaggtttgcataaagcgacaagaaatttaaacgccttccaaacaaagtttttaatttttggcaggagcctaagactcaaagaagcttccaccaacaagaagtcactgagaatgtcgaaactcgtccccaacccatgcttgaagcagtgctccaataaccactcttcaccaaataaatactattagttgaaaagccagataagcctatcttctctttcaaaaaaggaacaagggatagacaaaattactctagcttccacattatcgaacgattcctgcacaggaaaggagtcccaacttcccgaatcaggcttaagatcgctaaccatttgcaaatgggggcccctgtaaaagaataggcacgaccgacttggtcctttagaatccaagcatcctttcgaatatttatagtatcacctttccaaataagcaaaggacaacccttcttccaaagattctgaccctaaagaatactctttcaaaggaacgaggctcgtttcatctcttcaacatcaggtaaagaaccatcaaaataatagaatcccttaataatcttaacagccaaagaatcgggacgattaaacaattgggccgcctgcttatacctccataaatattgtgttaacataaacgagaccaagtatactagtacattttcttcttattatcatcccgccctaccaaaaaatagcacacattcaatgaatctcattgttgagaattatgaggttccatctcaaaactaattggcaatgagtggagtagctcatgttcttatgtatgactcaatacttttacatttaatccatgtgggataat

SEQ ID NO: 384305 - DNA, 560 bp, Cannabis indica
tgtaagaagtgacattttgtgccgacattcatgcatgtaggcactatgaatgaatcatttgcaattaattgctcattcaactggcttgtcacttgtcacaaataatattcactagtaagcctatatagtgtatatatatatacatattacaaatatcacaataataattatcattatatatatatatttatctttaacacagaaaaagactaaaactaaggtcaattgtattaatatataaatatatatagtccatttccaaattcaattttggctatattacattacactattagctagttgctgaaatacattatttggattagatttcaaaggtggaacagagtttcgctattcactaattgaactgttcaatcatgcacacggggagagagagaattattgataccatacacatttatatataatttggttatataaatatggctaatttcaatttttacctattctgaactttgacatgtactaaattatatccattgaacttttaaagtcgttaaaaatatccactgaactattaagattgttgaatttaagga

SEQ ID NO: 384306 - DNA, 7673 bp, Cannabis indica
aatatattttgaaaattattattatactattatatttcaaaaggtacacattctatgattaatttttaaacaggttcttgttttcttacttaaaacatttaaaatattttgtaagaacatgtttcataaattgtttttatcttttaaaatgagaataaaaaatttgaaaacaaaaataagttactttcaaaatttatttaaatagtattttttcaattaaaatctacttatattctcttttattaatatacctcaactccagacgtgaatttgaatctcgtctcatgacctcagatacaatcttctatgggagtccaaactgacatatatgatgttcttgatgataacaaagtcaaggattttctttgaagttatagttgccaatggttcagcctctgtccacttagtgaaatagtcagctgcaacaacagcatattgtactactccttttccattaggaagtttttcaatcaagtctatcccttatatagcaaagggccagggagactgcatttgtgtcagctcatttggtggagctctcgagatctttaagaatctttggcacttgtcacatttctcaacatagtccattaaatccttgatcatggtaggccaaaagtacccttgtctaagtatcttcttggataggctttgcccccttagcgtgatttccatagaaacattcatgcacttcaatcaatagccttttatcttcttccttggtgacacatcttagaagtggcattgagaagccatgtctatacgtaacctcgttcaagatgaggtaccgagcaactttattccttatttttcttgcttcattcctgtcctattggaggactcctatttggaggtatgctgttattggtgtcatccatgtaggactgtcatccatgtctatttcttctaaaatagtgatgcttgggtcttttaggaactgaatgggcaccaagttggtcttgtttctcaaggtactactggctagtttggtgagtgcatccattgttgcgttatcttctctagggacttgccgaatggtgtaccctttgagctgacttaacaagtcttgtatctttctcaagtaggccatcattctttctcctccgtaagtgtactcacctaggacatggttgatgaccaattgagagttactatatatgttcaggaagtctggccgcacttcatgtgcaagctttagtccgaaaattagagcttcatattcctcctcattattggaggctttgaaactgaacttgattgcaccatgcaactgttgccccccaagtgtaattaggtcaatacctgcactggacaagcggtctgtacagcttccattaatgtgcaacttccaggttgaattctcttgctctcgcttcttctctaactcttacttttctcctaaatattgagtaagagatatgtctgtacattcagccataaagttagcaagagtttggcgttttatcgccactcttggctagtaggtgatttcatatagaccaagttttattgcccacttgagtaaccatccagatgcttcaagtttttaaagtatgcgccgcaagggttggtcggtgtacactcttattggatgagcttagaagtaaggtcttagctttctcggagctaggaggaagtagtatgtcaacttttaaataagtgggtatcgacttttagcatcaataagtcttttgttgacatagtatattgggtgcccaatgccattttcttctctaatgagaactgtagtacaacaaactctgtgactgtcaggtatattcccaattctttattgtctagatgctttgataggataggaggttgagctagttgtttctttagctcttggaaggcagcttcacactcctctgtccattcaaattttttatttcctctaagtatgttgaagaaagggacacacttgtctgtggactttgacactaatctgcttagtgttgttatgcggccgattaagctttgcacttcttttatctttgtgggtaacttcatgtctgaaacagcttagatattctcgagatttgcttctatttcctggggattcactatgaagccaatgaacttgcctaagctaactccgaaagaacacttgaggggattgagtttcatgttgtactcttgaagaatcttgaagcattcatttagatcttccatatgcccctgggcctttttggacttgacaagcatgttgtccacatagacttccatgttctgaccgatcaggtctttgaacattttgtttacaagcctttgataagtagcccctgcattttttagtccaaagggcatagtagtacaggccaacgtctatcaagaagcttgtatgttcttagcctggtggatgcattttgatttgatcataacctaaataagtgtccatgaagcttaggatctcatgaccaattgtagcatctaccagatggtcgatcattggtagtgggaaacagtcctttggataagccttattcaggtcagtaaaatctatgcacacttgctacttgtagtttagtttgggcaccaagataggattggatacccagagtgggtagaaagctttaatgataaagtcattagcgcgcaaccttgtgacttcctcttttagagcttatgcttgctctttatccagcaacctccttatttactgtacaggcaggaagtttggatctatgtttagggcatgaaaaattactgatggatcgatccccgccatatcttcatgcgaccaagcaaggacatcaaggtttgtgtttaaaaatttgatcattgcgaattttatttctagtgctaaaccttgcctgatctttaatttcctggtcggtgagatcaatttcgaaatcttataattcctctgctggtccaaagctttttgtaggatccccaaagagaggatttaagtctgcctctccgctttgggatgaacttcattgcccttggtcagactcttggttagagatcttggaaagcatcttttctttcttagctttggacaaagccaagttgtagaagtgttgcagattgttgatctccctttaggcaccctaccccatgggttgttgggaactttaggcataggtgttaaattgacatcattacttttaggtcatacagagctggctgacctatcattgcattgaacgttgatggcacatcgatcactatgaactgagccatcggcatctttgttgtgggactttctccaactgtcaaaagtagcaagatgtatcggaagggtgcaagaccttagccaaagaacccgtacatcagttgtgtacagggtgctagatctattaattggagccccatcttttcatatgttgacttgaaaggtatgtttgaagaggctccattgtcaatcatgcacctagcaactgtcatgttccttatttgtgttgttatgaccaaggggtcattatgagggaacttggcctgagcagcatctccttttgtgaaggatatggcaggctctccaaccttaagttgcttgaaatctcattcctctatagctaggacgtcgctttttttactcatgatggagggtctgagcatagcgctccatagctttgcttattttacccattatatgggatctgccaattatgacccctaagtgacccaccactggtggtggtattgggtctctgttttgagcacctcttgcttgtgtttagtcgtctttcacataatgacctagatggggattgttttcctgatcaagaacttaatttctatctttaagttcttgcactcattggtatcatggcaaaaatcatagtgaaattgacagaatttagaggtgtccctcttactcatttctttccttatgggaggaggctttctgtgcgaaattattgactctatagtcgagtaaactatttcaagagttgttgttaggagggtaaagcatgtaaagctccttttcttgtcctttgagtcttatggcgtgggggaattattaaatttcccatttttgccttttaattggctagagttgttgttgtcacgcttgccttcattatttcggcctttagggggctggccgcctatgctgataggtgtgctgggcagaactgagggcaatccaccactcaaggtctgtctagcacctgcatgtctcctactttgggctgtccgtcaacttcttcaagcttgacaaagccttctgcctaatcaaggaaatcagccatgttttgagttgagtgtcggcggatgaccatccacaactcactcaaaggtagtatgccactcattattattgtgtaccttcctttttctgtcagatttttgaccttcgtagcctcaatcatgagtctttagagattgtctttcataggttcaaatggcctctgtttgacctcaattaactattccagcctataaggtaattattgggaaaacaaaaattatttgtagaattcttttgggaaagagttctatgaattgaaccttccggcagcaagtttgaaaaaatacagctgtgcgatttcagacaaggttttgaggaagaattagcaacgggtatcaacctcaaaatttttcaaatccatttggatttcataatatttaatgtgagctaagggatcttgtttccctgtgtacatcctccaagtaggcatcttagacttggtaggcaaaggtagtgtattaatgcacgcagagaaatgtgaccctcaggtcctattcaactctaagtcagacaactttgggccaaacatgccttgtatcatgttcttaagttgatatagatgtgcttgcactaaaagatcaacttcaggttgtgtttacccagtcaatttttgacctggcagcacacggctggccacgctggccaatggatggacaagaagttggtcggccccctgctgggttggttgggttttgtctgttcttccatgttggtcgagtgttcaggggtgggatgtacccatcttgatcactccttcttcggttcaagccaacccaaagatctaccctgacatgagggcccattttggcaaacacaaatactctaggcctcgggtcagaatgtgtctgaccattctagggaaaaacatcgtttttgtgcccagaactttgagctctccaattagtgcgctcaccccttgggtgactagtggtactatcatcattaggattgaggtaagactctccactataagacctgctctagccttgcattggtgggatgtcctccacttctattttgcctctaggcagaccttgaaattggccagccctgccatatgatctttcaggcaagacctggccattattaggctgataagatggccttattcaagatacaattggccctcctagccttgaggtctgtccatgatcccttgggcactgagtttcctttgggacatagggaccttttccccggtgaggatcttttacgagggaggactcttcaacttgagatctaactctctcgttgaatgacctaatcaggtggcttcttccttattttggcagttcagctttgcatgttgggcttggaggatcgtggctttccaatccatccactcccaaaattcgtgtctctgttgggtgaaagcatcgcctatagtagcacgtgtttcgtattggtcatggtgcagaagattaatatgaccttgaacttgacctatagcctctctcagcctggaaagttttgtatcatcccccaagtcaatgtggggtttgtcaatgctcgggtcgccgaccctaggtccagtctcaccagcataaactgaggtcccactcctatgctaggaatttcagttgtgggatggacagtgggtctagcagagaattgttctcctgaccgaactgtggtggaagctttgggaaggtggtcgaaacgcgcgtggtggccggccacccaaggttggattggtcacatcaagtggcacttggatattagggtccatggccataaggtctcgtgattcagtcaaatttccatgccttgtgaaagccactctgaagatgagagcttcttgaatgagaatttttctcaatgaaagcatcaaaatgttgattgtggatttagccaaccgatgcagagtttgactaggattgttgcttatgaccaccacatgtagaacgataataaatgtaaagacaccagaatttatagaggtccggtcccttttgtttaggtaatgacctactccccttttagttgactcttgagataataccaagcagattataggctaagaccttataatttttggcaagactctctttagtattacaatgtgttttgcatgtgagaagtatgagaaaagagagaggacttattgctatagtgcttctgagtgcaagtgaaaacttagaacatgagcatgtctatcttgccctttatatagttgtaaggcttacaagctgcacatagagatatccttgaaaaatagggaagttacgtacatttgaaatacaaagtaaataataataatccctaaagaatagggttattatttattgatggagagttcctatctttgtgggtagtttgaactgttttgaagtcgtgggaatactgacggtgagttggaaggctcgtgagaaaacacaagtgttgaagtgttttgcacctttgaccagccaaccttgttgaaggctgctcggtgcttggaagttagcactcctagccagccaactataggtccggccaagaccttactggcaggttcatacatcccattctttttgtgtgtacagtgtagcatggaatctcaaaggttgagaggctgcttggcactaatattggtaggttagtgttgacctgttttcaatgtattttctactttttgcctcgtcaagtgaataaaatttgggataacatgttttattgttgatgagggtcctgttattggagaaattttgttgtggaagatgtcattcaaaataatgatcaataaatagaagatattttaaaagcacctctttaagaagatctcaatgacaataagtaaataaggtgtgatggtaattttatttaccttggaaaagaagaatatgatattagtcattttgtgaatgctctcacttatagtgaagcacttaatagtccatatttttcaaaatggattaaagctatcgatgatgagattgagtttatggagaaaaataatgtatgggagttagttatatttaccttatgttttaaaccaataagctgcaagtaaatttttaagaactaaaaaggataaaatgggataaattgaaaggtataaagcacatttagtgataaaagtctttacccaaagataaggtattgattataccataactttctcgctagtttcactaaatattcattcagactttttatagcttcaattgcacattttgttttagagttacatcaaatggatgttaaaactacttttctatatgaaaaattgagagagtaagtctatatgtcaaaacctgaaggcttcaagcaaaatggagaaggaaatttgtttgcaaattgaaacgattcatttatggtttcaaacaggaatctcgccaatggtacttgaagtttgataatgttgtgacatcgtttggtttcttgtcctttatgtgcgtgaaattttacttactagtagtgatttgtcattacaatatgttattcttccatatatgtgaatacaatgttagacttttatttgggcttacat

SEQ ID NO: 384307 - DNA, 722 bp, Cannabis indica
attttggttgaaatttattaattaaaacatattatagtggggtttgaataatattatagtggggaacaatcctcatgatatgattgaaaagagggaaatgaaatgcaatgggtgatgttatgtgtaaattaatggaatttggacatataaacattggcaatgtgagggtgagatcatttctaatgctacatattaaatgcaaaacacatgccaaagtcaagctcttaatctcatggggctcccgcatgacgatttataattagggccgatcctgaaaatatgataaaagcttgatacaaaatatgatatcgatatctaatattagtattacatataaaatgataattttcaaaatatgagaatttttggaccccatttgattgggactttaggtattataggaggttacattgccaaaatctatttagttttaaattttattgaaattattttatttaaaatttgatttgaattgaaaatagaatagagaatttattagattatcaaataatatataaataatttataataaaaaaattatataataaaccaaaatttaaaaagaaaaatataaaatacgttaaacacgaaaaaaaatttatttataaaaatatctcttcagtaaaaataataaactattttttttttattattttataattgtcacgaggttatttttgattgttttataattgttgtgaggttgatttctcgttattttt

SEQ ID NO: 384308 - DNA, 2006 bp, Cannabis indica
taactcccagtagaaacagtgaatacaaatagactaattcaaaaaagattaccaagaaaagattaagacacagtactagagcgaaagagagagagagtaatgaaccttagaactagttggtgaatgaatatgaaacactgtatgatgaaaatcggtgtaagcattagattgtgctcctgtcccaagaagtttctcacgtttctgacttccaaggaaagctacatgttcgatcatatgtgcaattccttgctcatcatcttcctcatctattgatcctacatgaacttccatgtgggcttcaaacctagaatcccaacaattttgaagttggaaaatgcatataaaatgatttttaattcgtattcaacaacataataacaaaatacataaagcatttgtaatggagattatgtaaaagaatatttttgcataatatactaagaatatgaattgggactagacatttttggaatcttctaacattattctcaacctttttcacatattaatttgtccgaagagaagagtttgattggaaggtttggttaacaatgtgaaatactaaaatttgtaaaataatttcacttatttctaagtgaccatgatggtcccacagtataattctatggtcgtcttccaatcataataatataagtttactaataaatttttttgtaaaattattttgctaatagaaaagtttcataaggctgtttttacaaaactcgaaggtttggcacttcaatgtctgctcttcgtttcaagtgttgggttgttcgtccattaaagtggtacgtgagatgtaaagttaaaatgagaaatgaattgaacagtacctgttaggaggaactttattgggtaatataagataaatcaggccattgttcaattcgcctcgatagagttttgggtgagagggaagttgacaaggtaagaactcatccaagtctctgtcatttacttctggcaaggcagtcctggctgcgtgtggctcatgcgaaccaacagttgcacataaaacctttacaaaggaaagaagacacattacattaacccatatttacaaagtaagaagactactactacttaccagctgggtatcgcattgtttggtattgaataagcaaaaagaagatggtattgaatagcctcgacgtcgtctcagaggattagctttgggaaacaaggccggatcgccatagatagctcgaattcgatgcctgtgggattgagaaaaaggaaaacaaaatgatcaataatcagttaagagaaaccctaatgtaacgattacaataacaacatcaatgataatacagatataccttgagatggaggaagagagtaagaaggataaaggtgaatgaagattcaatggcggaagaagacggggacggaggcatttgagcttgaggcgatcatcgatgcttaatctgtgggaaatgtacggagtgattacagtggcggccatggatcaaccaacgtatatggcgtaccgtacacgacaagcaaaagaaagcacaactttttcttttttcttcacgatacaaaaataacttttttgttttaaaattttttaaacaacaaaaataaaaacacaatttttgtttcttatttatttacacgacgtttggtaacatttttatttttaaattttttaatcacaaaaataaaaataaaacttttgtttttaaaacaaaaatgtattctataaccacttttgtttttcaattttaaaaataaaaaacaaaagtgtgttctataaattttatttttatttttatttgttaattttatttaagtcgggtttagggccgagtccgaagtcggaattgggggcgggtccaagtgtggggtcgggtcctggttcgatctccaaggtctaagttggggttagatcagtctaaaataatgaaaaattgtttaaattttttttaaactaatcgtttttgtttttaaaatttagatttttaattaagaaattgaaaaataaaaataattttatagaa

SEQ ID NO: 384309 - DNA, 2348 bp, Cannabis indica
actttgaagaaagtatacaaggaatggactttggttggtgcactgactgcatcaggacttcctgctgctatatatgcattgcaaaacagtttactgcagatttcttaccgaaatctcgattctcttacgttctcaatgttgaaccagacaaaaatattctttactgccctcttcacatttttcttattgaggtatgttgcgaattctatcaccgttaactatcataatttctttggcatattgaaccttacattaactgttacctatagaaggtataaaatttacttattcattctgattttgctgtcatgtttaacttatgaaattgctgtcatatctgatcgaaagcttattttgctcattgctgcaacttatttttgttttttttttttgtggttgatagcctctatgagcttgtagtattatattatattcgaaaataagtctacgaatatgtacattttgctcttaaatttttcattatatttgacgcgttcaaatgttaatgcgccatattcttgctgatcaaatgtaggcagaaacaatcaattcaacagataggggctttattcttgctgatcattgcagctgttcttctgagcattggtgaaggctccaacaaaggttctactggtgtcaatgctgatcaagttttattttatggcatcattcctgtcttggttgcctctgtgctctcaggtcttgcatccgccttgtgccaatgggcttctcaggttgcctagaaatttactctctttaataaagaattatttttagacatttcctctgatcttttgctgtgtgtttgtattataggtcaacaaacgttcctcatacttgatgactgtagaaatgtccattgttggaagtttgtgcatgttggctagtactttcaagtccccagacggcgaagctatcaagcaacatggattcttttacggttggactccattaactgtggtaataatcttgaatatggtatctttcaccaaaagggaaatacagatggattgcttctttattattttctctgtacaaatgtagttacaatggcctttcattaattatttctgaaaaaaagaaattgttttcctctttccagatcccagttttgttcaacgctttcgggggaattctcgttggccttgtaactagtcatgctggtggtgtaagaaaggcaagtttgactaatttctataatatatataactaattcatctgaatgatctcaaactaagcttctttataatatatttactatcatattgaccagtaaaatcaaaagaaaatatgaagttgcatctgtagcattgaagttagcacctgtaattttgtaactaatcaccttagccttcgtatttccttaaaaatgtatttgatcaaacaacacgtaatggtttgtaaatcgatgaatatacttatttgctggcaggtttagctttttattaagcactctgatagaaatgactgggaggattactctattgttttagtactaatctcaatagtcattaacacatcataagctgttttctttatcatatttgcaggggtttgtcattgtttctgcacttcttgttacggcattgctgcaattcatttttgaagggaaaccgccttcaatgtattgtcttgtgtctcttcctctcgtggtcagcagcatttccatataccagaaatatccatacccaattaaaaagaaggaacactaaaatttaatgcttaattatgcaaagtgttcatattaatcagcctttattagttaccattgcaattggagtagcttgctgcactttacatagatgttagttagagtttcttttagtagcttactagcttctatgtttgctgtgatcaaatccataaactagatggatgataaattgttaagacacaaaagaattagaccatctccaatagagatgcgacttatttttaatattttattattaaattttatctacgggtcccgggtctgaatcccggtctcgggtcatggtccgggtccaggttcaggtcccggtccgggttcggatcccgggtctaggtccgggtccgggttcgggtctgagtcatgagtctgggtccgggttcgtttgggtccgggtctaggtcctggttcgggtcccaggtctcgggtccgagtcccgagttcgggtcccgggtccgggttcgagtcccgagttcgggtctgggtttgggtctcaggtcctgagtctcggatctcggtccgagtcccgggtccaggtcctgggtctcgtttctcggtccgggtgcaggttcgggtccgggttcgagtttgggtccgggtctcgggtcctggtctgggtctgggtccgagtctaggt

SEQ ID NO: 384310 - DNA, 1920 bp, Cannabis indica
cgaaggtagcagttgaggcaggtagtgaaaaaaaatttgacttttttcaatgtgagtaatctcagtgtggtgaattcctttatagccacaacacagtgcaacgtggagtttagaattgaagcggcaaagatgaggtttgtgcaatattgctcaatgttcgaagagtgggaaattactcatatttctcgaatgtgcaaatttcgcagcacacaatgttgcaaagtgggcagcaatggggagaaaatctggagcctttgtgcctcatgatatggattcaggagtcttggatgacttaagagaatgggacccgggacctccaaaccaattgtcaagtagatgagctgatgaagtttctgatgtagttttagtttttcttttgctgtttccagtttttttcttagcatctttttgtaacttgctctggttttcgtatctctgttgtttagactcttgggcgtttgtttttgctctggttttaatgaatgggtgtccttggacaccccccttcataaaaaaaaaaaaaaaaaaaaaataacctacattatttattgtataaattgatgtaggaattcttgaattccaagagtgccctacaccaactcaatatccttgcaaaatgatagggttaagattgatcgagacaattaaaaccaatttgattaaaatcaatgaaactacaggtcgtttatcccccacgacaaattgtttaaaccaaaaagatttgtcgttctcccatagcaaacaatagatcccaagtgagctaaccctagcttagatccaaccctagaaccttcgagatttgaaaccaaatctcttatcccctttcttcctttgaaagaaccctaggaatcaaatctcccttctcgatcaaaccagatcaatattaccataagctaaccacaaaaattttagatcaaaaccatacaaacacaagagcatgcatcaaaataaaagagatgaaagaaaaataaacacatggtttataaaggtttgccctaaatcaaggggtacatcttctttgagctcgccttgaagaacgatctcagatctgcactatacttcgaagaatattacatcaggtaagaaatccaagtcacaatcttgactggtattttagttttttctctcttcttcttctctgatatttttctctcactaactctcttttacttttccttacatgaactcactgaactcaccatgatagctcctctctctcacaactgggtctcacacacatctgggttgctctctttgacaattggtgaggactcctgcttttatagttgtttatttctgctataactgagtagaggaatttctgttataataatagaaattcagttagggtacgtagttgatgttgtttgttaaaatctggtgagtgagaatcacgagcctttagttgtttccacgaaaaacaaaacatggggtgattgttgttgaacaagcaattagagatgtcttaatgcactcgggttccccaaaccccgtgcagttttgcttatgattttcatcatgagttgcgagattgcaaagaaaccttcgcaaatgagtcatttgagagactagaatccattgcaatagaaacttgactctctgaaccatctttccattaattaacgttattagaggcggaggagtccgctagtaattatccctcaatccgtcggtatttgcccgccagtaataacccgtcgctattaatgattaatagcggcggactgacacgtccgctgctattaatcattaataccgacagaccattagcggcggggcccgccggtaataacgcctcgaattaacatctttgacacattattaccggcgggtgtccgtcggtaataatgcttttttttaaaaaaataaaaataaaaaaataaatattaataatacatattattaataaatattaataat

SEQ ID NO: 384311 - DNA, 2336 bp, Cannabis indica
gtagaggcatagcaaaaaaaaaaaaaaaaaaaatctgacctttttccctgctttgctgggttttgggtttgtttcattcttttgagttttcacattggtgaaggattttcccgagaaacaacaagagaaaaaagtttctttctttctttcaatggcttcttcttcttctaaggtgtcgtttatattgaccattctcctggtcttttccgtcgttttcatagccatagccggaaaccacaacaatctcaacagccccaatggctctgctctctccggcatcgagtttcctgagcatatgagctttaatgtcgtctcttcctcagaaaacagtggctgcagcttctccacttcccaaaacgacaaccaacctacaacaaacgacaatattgactctctgttttcactaaaccagataaacaaacagtcaagctccacctgaaacggcggtcggagaataaagaaaccgagccaaagaaatctctgataagctactcaatcagagacacagcaagaatccaaacccttcacagaagagtaacagagaaaaagaatcaaagcactgtctcaaaaaaaaaaaaaaaaaacaaaacaagaaatcactaacaaaggagcaaaaaaaaccatctcagcaactgcgccggcgccggaatcatacgagagtgagttttctggtcaactcattgcgactttggaatcgggagttgggttcggttcgggtgaatatttcatggatgtttccgtgggtacacctccaaaacactattccttaattcttgacacaggtagtgatttgaattggattcggtgtgttccattccatgattattttgatcaaaatggtccttattatgatccaaaacactcaatctcatataaaagcattacttgtaatgaccccaaatgtgaaatggtctcattttgagctgcggctaagatcggtgttggttgtgcgtggagctggaaatggggagtcagttagggtttttgaggatggggactatgatggggctgattttgggggagtcggctagggttttaaaatgaagaagttggagagagaagaaggaggcgtgactgtgaggatagaagaagaagaagaaagaaaaagaaaaagaaaaagaaaaaaatataaaaataattttttaattttaaatttttttaatttttaaagaaaaagaatttttttttatattttcaaattttatttttaaaataattaatttttttattttaattttaaatatttattacgtggactagttaaactgtgccacgtgtacactgtgtacacgtagacattccaacctggcacttaacacccaaaaatggatgaaaaaggctaagtgctaacacagaacttaggaattgggggttggtggtaaaaacttgaccacttaaggaggttatgccgcaaattaccatttatatgatcatttgattatgtctttaattaatacactgaaattacgtttaaataagttataatttacacgtctagtccaattttatatattcacaaatatataaaaatatcttctctaaagtgtcatacaacactagttatacagacttgtgtcatttatattcataatattagttgttgattcaaaaaattatcaacggtgtgaagctaagactacgacaaaagtgagtacgatatttgtgaagtaaagaacttaaatataaacgataccaattttaacagagatttacgtctgccaatcttcttcttgttgtatgtttcgtggatagtaaaactattagtatagaacttaacatagatgagatcattattggcaagacaactaactatttgaagctagaaacatacaaaacatatgtaagaattaaatgtataaagatagctattgtaccactttgattgaccaagagagtttcattgtttggaaaataagcctagtggtagaagtaggacaaatgaatagaaaaaaactttatatctgagcaaatataccttgttgcccctgagtcaacaatctaggaatcatggtaatattgaattatatatatgataggatgatacttggtttacctgttgaggtgccagggtcttgtgggaggcattatatataccattttgctgtccagctagaaggttaaaaagttgttgatattggttggctgcgatttgaggacgagctgtggagtttctaactgtgttgttgttgctgttttcattgctactttgtacttggtttgcgatagcatctttagatgtgttttgcgtgttgtaacacagtggatagccgtgcaacttgtaacacttagaggatgtttagctttacagtttaaaaactgttttctgttttttaaaa

SEQ ID NO: 384312 - DNA, 1944 bp, Cannabis indica
acatctaacttttcattcattgattcctaaagaagtacatacatttatataattatatatgtatattttcacttctaaacttgaaggtgaagattgttcttggttaaccaaacttggaaataatttaattcccttaaaaatatatatataatttggtcttgttggaaattgattaaaaattaaaaccacattaattaatttctaaaattggtttgatatggttgaccctagctaattaaactacgtgtgtttgtatgaactaatttaattcataaaacacagcaagattccaaccatttttttttttatttttatatttttttttaaaaaaaatacaagtttccatttttaaatttcatttttaggccaatcatataaacattaaatatttattttattttattttattttaaaaaattgcattaaggacaattttgatgttaaattgttgataatatatatagtactataatttatatatatgtattaaatgttggtggtctactatttatttttcatgtaagaaatgtaattatttttaattaatttggtacctaatgggattaatgatactattaactatttatttattgaaatttgtcacattttatatatatgttatataaaaatgtggaccacattgctaatgtgtcaattaatatgtatataaataaatattattgatttacttttattaaatatatattattaatttactaacctaaataaaggagtgctatgccattaattatgattagataagttaaaaacaaaaaaagaaagcaataacattgatatatatattatatatttattattatacctaagtctataagtttatttttatttatttatttaattaattataacttgtttgaaagttgagacccaataattgtaacttaatcataatatatagtttctttttctcttataaaaaaccttggatgcttaagaagtttcctctttcactattttttcttccttttagcaaaaagacatataacatagcaagaatccaatgataaaatattttttaatataatttaattttttttgaatggaaatagaatcaaatcaagacacaaaattaaggtactaaataagaagaacataattaattgaataagaatctaaaaaatgataggttgaagctaccattcataattaaatgagctataattttaattagttacatataattataggttgttagtgtatttacataattgaagtgttaccgttaattttttagtcagttttttgctaacaaatacaaccaaaatatttttttacggtaatattcgttatagttataataccatctttataaatttttgaaaaatattttataatgccgagaataagtttaaagttttttaaacacatgtgatagactcaaatatcattaattctgttttcggtactataaactattcaataatttaaaaaaaaaattaaaaataatattataattatgacaaatagatttatgaaaaaataaaaaaaaaatattattgtaatccctaaataataaaatagttacatgtagatatatggagagagaaagtgtaagagaacaagtgggcccacctatggattttgttgtgttgtaaacattacaagaataatgatataatatctatgattccatacttcaaacggtcggatccgtcggtgcatcccattcaatccaatggccacaattgctccacttcttcatccaagtgcaactataaattcatcccaattccttaatacaataaattaataatcattaatgatagagtaacctttcaaataaataaataatagagtaatagtgtcaagtaattgaagtgatatattcttattaaacttaggctaattagtaatttttctctccgaactttgacatgtactaatcgtgtttcttgaactttttttggccgttagaaatttccc

SEQ ID NO: 384313 - DNA, 2497 bp, Cannabis indica
tttaaatattcatacccgagtcgttaacaggatggggagcaatccccatacttgcccgcccgtttacatccctagtaacttaaaaaaaaagatgagtataggttataatatatttagatttggaacattaccattctaaatagcctctctctcaagtcctaaaattattctaattaacttatgaagaacaacattaaattgtctaagaacatgatgaaaaaatactaaaggaaagttagagagaagtgtctctatttgactaatcaaatctgagagtgcacgacttgtcttttcatttatgctttattttattgactaacactttataatcacttttaatgacactgaaaggacacttaaccattaaacaccggttgagagcccaaaccaatacttttgcttcagccaaaagaagagacaagtttccatgcaaaagagaagacaaagccgcaacaacctctcctctataacttcttactgctcctccaatccttattttatttctgctattatccatggcaacatcaacacttagtttataacaatttggtgtgactgcattattgttaacttgactcaaaacacctctgactgcatccatgtccgagggacaatttaataattaattaagtttgcaaataaaaataaaagtgaacagaggggcaaacatcctccgatgtattataattgcttgaaatatttaaagttaatcctacaataaaatgaaattttatagcaaataccattaattctttcaaaatttagttttaatttgccaataaataagaaatagtcaatattcaataaacaatcctaattacatacaaataaacagataattcttctttacgcaaaaataaaaaatatttacgacgaaatttttttaatattttcaattattatgtatataaccataactaaaaaagaatatcggtaaaaatattttcttttataattttattgcacccaactaggatagttaagtacaaactcagaaccttgtgacaacatattaaataaaaaaatagttttatgtttttctcaaaaaaaattataattattatttgtttgattaaaaaaatctgatttattttattttatttaaatttttatatttttaattaaaaaatagaataaataattattattaatacatagtctaataatatgtcacgacgtatttttaagttaaaaaagtacgtctgcaacaaaattataatgtaacgccctaacccgtagagacgacacgtgtgtgcttttataaattagtttaataaaattgtagattaaattcaactaattacttttaaaatataaagttacaatatttaaaagtttctaggttcggggatccttttttataaactttacaaaagtgttactatcacattttattacaaaacattaatacattcaaaatactgtgaacccatagtcacaacaactaggcactgcatgccggatgagctgatatgtacattcactggtgaagacctctgactcataattgatctattttttccttttccttacctacactacgaagcacttgtgagtcacaaagagtcagcacaaaaaccaggaatacaaactcatatagcaataattaataatattcaaataactgattagggaatcacaatatgacacaacatttacaatctcaagcatttgtctaatacgacaaattattctcgatacttcataaaatatccgctaactctcattatcaaatgagacactcgatgtcactatcgttgcctaatgagacaaccgataagtaagaacctaacatcaatttccagtttgagtaataacgataattatcgtgtcatatactgacataaaaagtggtacaattgttcttttcttacctcaaatccaaattcaggtgtgctggccaacttaagtgaaaaatgtttcaacgatcctaggccctatgtcacgataatggtaaatcggtaaataatttgcttaaacccgttctaagacttaaactcaaaatcaaaagtttctctatcgataaataacgtgataataccttgagtattgataaaatataaaaatctaggcacataaaaacatcacaaacagttcaccgtttactccaaccgattcactattttactgagttcttgcttggggaaacagttcaccattttatacgaaatgattaactgtttttctgcagagtcaaccaacacacgaaccctaaaatctcaaatcttacccaaactccaccaaaacctgtcaaactctccagaataattctcatatcaattctagaggtgtatgtcggtcggtttggtcagtttatgctatattttattcaacccaatataagaatcgggttacaaaaatttaagtgcaacccgcccaattaaaaaaatagtatctcgtctaatgaaattggtcggtttggtcgggttaacccgtccaaaccgaccactaattttatttttattttttacattcaattgttatattttaattaatt

SEQ ID NO: 384314 - DNA, 896 bp, Cannabis indica
atggtcaaatctaaatttcttatttcattaatatttactttcttttcaagtcccacaattagtacgaaggacaacctctagtagcattgacacctctaatcatgaacaaaaggagcttcatccatgatcatattttattttatcttataattttgtgattgtatttgtaagtatgatgaataaaaaggtttcttaaaaggaaaaaaaaatgtcttaattacattgagcatattattcaattagtgtttatattattgttttttttttttttaaattttgttgcattacattattagtttttttgtatcagattttgtaattatctaataaatgtaatcgattactctgtgtcaaattctaacgtctaactctaatgactactttgatttctaactcaggtaactttcacaatgacaaaaacaccaacaacttttctttatgggtgtaataacaccagtaacatactttgtggtgacaatgacaactttagtggctttttgttgattttcatgtgactttcccaactgtgatgacaactctgacgactttctaatcgtaatggagataattgttattaaaatcttgttaagtttatttataatattttgttagaatttctatttttatacgtatgtataatatttactatgtactatattaaaatcatgtatatatagatatgtatatacacatacttaagatggtgagagccacaacacgaggggtaagatctgcggggcggtgatgatcttgagctagaaagacaaaaaggagaacgaagacgagatgagagagaagaagtgataaagacatacaccgccacacaccaccatgcctgcaagagagagagagagagagagagagagagagagagagagagagagagagagagagag

SEQ ID NO: 384315 - DNA, 1362 bp, Cannabis indica
  modified_base (55)..(55): a, c, t, g, unknown or other
ttattattattattttgcttgagttatcatatatctctacccacactttttaaangcactctttacctaaattagagaatttctttaaaaaataaactccagccataaaaattgctctctaaaatagagaatcaataaactccctactttttctcaaaatacttttatattattacaataaaagaaaaagtaaggttacttttttttattacttttaaaatatttaaaaactaaaaatcattaaaataataaatgctaattaaaacagatgcatggttgtggtgatattaaaaaaaattgggtctctactttaggccgctagatatagaatgtagaaaccaatttatttttccaaatatttttataaaatccccatactttgatcgaagacataaaattaagttgaagcccccaaaaaaagggatgttgcagtaaaactacacacctagcattaattccaaagagaaagaaaaacgataaaaatatagatgtttctttcacttttgtttcgcattaatgggtaaaaagtaaacccactttattactattgtgaagttgagaaaggaagaaaacgacttgagaagcctaaattaaaataaataagcaatagatcctttttcttcagaggtcccccacctaagtggttactgctaattcaatatatgtatagaattggtcactcatggagtttttgaaaactcagatcatgttgttatgtgacacataacatctaaagctggtcagtaaacaaagacttgtgtcccaatcacgggcataaattaattctgcattgtcaatggcaaacgcaatgcaagtagcaaaaaaaatacccaataattcatcattattattatcactgttgttaatgcttgagaatcataaagtcaaatatctggacccatggtgttagaataattgaaccttaaatcaagtttttttttcatgtggtcactggtcgttatatttatataaatatatattctatttatatattgttatatctatgtatctatttatataaacacacaccaagttaaaggaccaccaccaatgtgacaaagtgaatatttgagccataatataattattttgtttttgtcaatctgcccatcaatatagcctttctctttcctctaccttagtctttcacttgacaaagattcttttttattgctattctgttactatttatttatttattttttaattgggggcggggaagtcacacgccttatttaaaaaatggttactcttttatctacacaaggctagacaggttaagaacaaatgttaaaaaaatttacataataaactaaaagttttttaaaaaaaaaaacttaataaaataacgtctaaaaaaaa

SEQ ID NO: 384316 - DNA, 1511 bp, Cannabis indica
tattaaagtaaattaagtaagacttaatattacaaaaaataatatgacatattataaggatgctagttacaactaccctttgctatttctcaaatcaaactacccatatgccatatctctaccttattaaaatcctttaattaatgatcattcaataatcgactttcaccgactgttgtgacatttaatgatttaaacttgtcggatcagagttcaaattttaaaaagtataggccatgtaattaaaaatcttgatgtcattaacatgaaaataaaaagaaaaaaaaaaagtaagtacgaaccatgatcataaagattagaaaagatacaagtggacgaatcctttcacccaattgataatgaagttaatttagaagagtacacttcctagcacatgaaacaaaacaaaattagttttagtttgatataatggaagatatttattattgatgagttgggtattttatgataagggtatagaagtcatgcatatatatataaaaataaaaatcgatccaaagcttaatcatactcagaaaggtccaacttaaagttaaaaggctaaatagggtatagttgattgaagctgtataatgataatatttatatatttctatattgatatatatcacaatcacaaatcatcacatacattcaaatacatgtaaagtgtgttactttggcaaagtgacaaaatgagcatgtgggtggcattcaggccctcctatatactatattcctatatctataataaatataatgttatctttttatttatattaatgaaagctatactaagtccaaaaattagaatcatggtatattggatactattttgaaaagatgcttgcttatagcaatttgatataaacatatatagtgagagttcaaaatataaataatgactagccgcggttgttgtaatccaatctactatacttgagttgattacactacaacattttttgttattaggggcggaccctactaaaattaccggcaaatttagaagacccgccggtagtagttttaaaataaataaaaatttaaaaatatatattaaaatgggaaataccggcgaataagtaattataacgacagatcccaccgtcattattaatagagttatttaatgctagaaaagttccgcctatttattcgaaatattattagcggcggatctttaccagtggagatttgtcgctaataacaataaaatattaatataaattatattaccgacgaaaacctttattaccggcgggcctccgcggtaatattcccctatataaaccctcccagctccggttctcccatttttctccctttatttttttcaccatttcatctttttccctttctgaacattccaccaacagctccagccattctcaacctccgcccgtgtagtgctccgtctcagatgccagcaacgtggttagttttgtgccctaaataaaacccatttcaatctgattagttatcaatctaagaaatttgaagtgatttat

SEQ ID NO: 384317 - DNA, 638 bp, Cannabis indica
gatacttattggattttggatcaaattcgcttagtctcgccatttttttttttcggatcgctgatctgctttaatatatattaaaaaaacttagttcaagactcagaccctggacccgaacccatatccccttactcgagacccagactgagactagactcgcccaagatccaaacttaggactggacccgaacttggacccaaacttggaactcaggcctgggatccagaccttgacccgaactcaggatcagacttgaactcgagactggactcggacacccggacccaaccctagactcgaactcgggacccgggacccgatttggggccctgacccaagacttggacctaggaccagacttgaattctgggacttggacctggactcgaacccgaacctgacactcggacccgagacttaagacccgaacttgagaccaaacccggacacatacccagaacttagacccaaatttgggacctaggacccgagacccgagactagggacccaggacctagacccggactcgaacccaaacccagacacagaattatggaccaggacccgttctcgagacccgtgacccaaacctaggactggacctagaccgaacccaggacctgaaactgaacc

SEQ ID NO: 384318 - DNA, 1275 bp, Cannabis indica
agaagaaaagaaaaagtctatcgatctcaagttccattcattacataatatggttaatgatcttagtggtggatggagtgaaccggtgcgtcaagagtgaggttcttccaagaattataaaatagtaagtaaatttgagaaagtgaatattcttaacagagtaaagcattggtggtggccgccccaagttgatgattcttttgtggtttgtgtggcacatagtacatattggagagaggaaaccaagcccaatttctggcttaagaaatgttgaggtctagattttgacctcttttctaacctctactgcctatctgagctttttaagtgagcactaacaagtctcctaatttgtgattgaggtataataataaaatgttctattcatattctacctccatcttgggtctcgcaacatctacctattgtttgttgcaatttgtgatttgtctccataatttagcctataatttatgtgtacttttgtttttttgttattattaatggagttataaagagttaaatcttatcaaaaagatgtatacaatattgtcttcagttattgtttacttttgccatttttttttacgaaggaaaaagaattcaggccagtattatggtcgtcatcccctattttcttctacttcagagtcagtatcaatctcgtttccatttgacgcccacctaaattgaaccgaagagaaaaatgatgggcttttagtaaatttaagggaaaagtatagaccgtttggcgcttaaaatcatgataagttttgaatgcaacaaatataacaaagagaatcagaaattaaaatcaaagagaataaaaggaacaaagaaaattaaagagacaaaaatacaataaaaaccataaaaaaataaacaaaaaaaaaaatagtggaatgtgagaaaaaacaaataaataaaattagtttcctcaaataatcaaataaaaaattaaaacttaaaactcaattatgaacaacaataaaaaaaaatagttatgaaaactagttatttaaaaaaaccagttataaaaataataaaataatatgtgtttcaaaaactgattttatacaaaccaaaaattatacataacattataaaaatagagtaaccgcattaccgaaaaattaaaacctgtgaaactaatttcgaccctgtgaaaccagttttgacgctataaaaaatcataaatgttaaataataaagttaacttaaaccagtttcatcaaacaatcaaatgaaaaatgaaaaaagaaaaacacatacaaa

SEQ ID NO: 384319 - DNA, 1597 bp, Cannabis indica
aaaaaaattgagagagggagagattgtatgcatgtgtgagtgagagatttttggctttagtgaaaagagggtagtattagaagtagtacttttagtatgggttgctttaaggggaatttacgtaaaaatatgagaaacttgacgtgtgtaaatgtcattctatcattgggagccgttggtcgatgatcatcaaattatcaatcactaataataatgtttacaatcaataaaagatatgtatctctaggtaattaagtatgttgtattacattcatcataataatataatggatacattatattgttttaatctcagcttctattcattgttattgaatattagtagtgctcaatatcttttaaaagtggtactttatgattaattaatgatatttcttaaaagttattatattaaattatagaacactgctattggtcactagtagtgcttagcacctctctacacatgtcgtttttcaattgactaacaatactaactaaaaattattataataaattatatcagactcgatacttaattggatcaataacgatattgacacataggtgctagacaccattagtgtcctttagtatttctctaaattatatgatacacaaaacttaatcacaccaatagtaatatgacacttaagtgttaggcaccaatagtgacttttagcattactctttatcgagaattgctaaaagacaccactagtgcctaacagtacactcctcggtgtcataccgtcattggtataattaagtattaggtcccatataacttaaaaaaaaacttttaaaaaatatcgttaatcaattatatataagacactacttataaaaagtgttaagcacgactagtgcctaataacaatacaacccttcattttaatatggcttcttctttaggttttaaagtcaatttttatggttgaaatattggttaaagttgactatacattgtcacacaacacaactcatcgactcacatgaaaaaaagaaaagaaaagaaaagctactcgaaaaactttaccaactactactactacgactactaatactactattactatataattatatatattactatactaactagatggggggccaattgtgtgaggttgggtccattattatgagagaaaatcaagttgaatgttaatataattagtttcatgaattgataattgactaattatcaattactttagtagggtgttccccggtcaaactcaaacacttgttgtcaaacacctacaaagggtacaatttcatctcacaaatcatttttcagtccatctaaatcactataattatatgcatatttccttaattttaatttctatctataaatttttggtatatgaataagttaggataagttataattttttttttctattattattattatgtataatatatgatggtattttgaaaattttcaataatttagattattaaaattataattgaaacaacttgatagttgtttcgagtgtacaattaatatagatacgtgcaacaaaaacacttaggtggcgtttggttggaggtaatgaaatggaatggaatggaaaggaaatga

SEQ ID NO: 384320 - DNA, 1466 bp, Cannabis indica
taaatattaaatagtataaatgtaaatttttctttgtattagaaaaatatttatttgagatatttataaccctaaaaaagaaaaatctctataacaagggatgttattcttcctattataacttcttaagttaatttttttatggcagtgttcgttatagttataacatcatccctgtaaaattttgaaaacttttaaatagattatagtgttggaaatagatttgaagatttttgaattcgaagaactcagtttttaatactccaaattattcaaagtttttcaaaaatttacaagaataataatttttttaaaatcacaagaataatattgtgactataaccaatacgaccataaaaaaaataatattgggtgattacctaatataacaatttttaacttttttgaaaaaaaatacgatttgggttgctccgatggttcctctgatagtttccatatgggttgctatgtgaattttggttgctatatgaacttccaaaaaaaaaactactttaaagtgtaaaaataaaaaaaaaaaactctaaaaatatttcaactgtgattttattatcattcatattttattttatatataatgaaacgttcctttcttattaagagtagtgagctagaggttttagtgaatagttagttggtaagttatgtcagctgtcagttttgttatttttctggttttttattattgcttctctcttcattgtattgattaggagcttgagctatataagactcactcctcttgtactcctatactattttcaatacaatcatctcctttctctttttttcctcttcttctatattctagttttgtaatatggtatgagagccacgatcttagtgtgctcagttctttctcttgttctctctcatggcttgtggaggaactcaaactcaaagtgcaactaatgaaggagatggatcaaagaacactgacaaattctctattctcgaagctaatgacaaatgacctggagaaaatcctcgaagtccttactacatttttaatggtgatcagcctatggttaatcttgttcctaaaatcttgactggatgtgagaactatagctattggagacgatcgatgatagtttcacttgcagcaaggaacaagatcaagtttgtcgatggacgattaccaaagcctaaagaagattatgagatttatgatgtttggtttagatgcaacaatttagtgatttcatggatccttcatgtgatttccagagagattgtaaataatttcatgtaaattgacaatgcaacaaagttggggattgagctacatgaaagatattatcaaaagaatgcacctagggtgttcgaagctaagagatcaatgcacgcattaatttaaggttcgaattctattactacttacttcactaaatagaaatccttttggtatccgatctaggaatacagtgttgggctttgtgccctaa

SEQ ID NO: 384321 - DNA, 4690 bp, Cannabis indica
taaactcgaccccaataccgactccagatcgggtcccggtcccagtctaggttcgggtccagtcaagtcctactcctaagtccaaggtcttggtccgagtcggagattaggattgaccccagattttttgtaaatactataatacaaggtaatgcaaactatttgttatataataaataatacaatttagattgtagtaaaatttttagacctcaattgtttataggtcatgtctcagtgtactcctcctcaatataatcctagccagccaccaagacttctccttcctcggaaacaggctctccgacctcattatagccaccaaaaggaagtacccaaactttctcatcttcttctcccacttctccctcggcctcggaaggagtggcagggtggacctcaccctggtcctcaacctcttggacttcgatgtccccatcaacaacttcttcttcctcgctcggaggtctagcttgctccattctagctgttgcgaacaacagagcaatgtgaggatcagttattgaagccttcttcatagtctgcttagtttgtgccatcattttacgtctgggcagatgctttgtttcagtggtatgtttggcaatagtcacagcaaagtctgctacaggagcaagttgttagggtttatgccctgaaaagcctataaagacattattgataattacataaagagttgaatattttgatatatgcttgaatattaaattattaatattattattgaataatttatattaaatatcagaaattgttttatttatatatgaggttgtggcttgtagttgtacagagcactaagaccacttagctatgaatacaatagtcaggaacaaattagagttatggaatctttaatcaatagttgctaatacgattcactgatgcgtgtttttcggtgcaagtaatctcagttcaaattacgaatgtagtatgacatcaaagtaaaagtgttgtatataatagagattatatatgacaagaaccgaaataaagttgtctttatgaacatgtcgtttactataaagacctaattcatatcataacgatgatcaatagtagattagcctaaatcctgagtaatcatgaactcttgttcatgttattagtttctttgattcactcgttaaagtttctcggagaagattattcttacaacttctgttttgagaatttaataatgtggataattgagaacatgatttacaattattgaatcctaacttttttaacggatcgaatgttggttccctttaagtgttaattctagaactagaatgttgtgcacaaaatttagatagaatctaaattatacttcactagtgaattaattgaactaaggataaagaagtaattaaagggtaaaatgatattttgaccaaaactaattacgaaccaacacatggaaggctaatcacttaaattgattatatcaggacattgcagtaaatctcagtgaatataattctataattactaagagttcaattctatatttatagtggagtaatcatggaattaataaacaaggattatttgattggtgagactcaataaataatctagtttattggagcttagaattatgggtccatggtccccaaatcgctaccttgaaacactgccaagggttgggataaagagtagtataataatttttggaaaaatgtattttgaattggcgaaatagtaattattaaatttcaaaataattaaataggaaaaatacaaaaattgttaagacaaatttgtcaagacaagatttgttgagacaaaaattgtcaggacaaaaggcaccatctttatcctaaatagacaagggtagacgcctagcttatgttgatgtccctatggaatttgtctttttaggttaattatttatttaattaattcaattaagtaaatattgtaattataaatattttaaggttgttaagatattctcttaagtagttgagagatttccctataaatatcagtaaccaaattcatttatagatatttatttatttaaacaatcaaatataatttaattaaaggaattcaactactataaatagaagtctgatttgagaaatcagaacatcacttttacaacattaatttttgaagttaagagagaaaaaaaataattttctctctcaaattgttcttgctcatgtgttgagaagtcaacaagaacacattatacactttatcctaataactcacattatttcttgtgtgtggtgaaacgattttgaagacactggtgtgagttcaaattgtattatttggattaaagatacaacaaacgagaagtttcaaagatacattgatagtaatcaagaggtatatgctcgaaacttattatttattattttcatttaatgtacgcacatctggagatccaatgggatatggtacaatgataatcagataatacaaaactcttccactacgtacttgatttagtattataaaaccaacacttccttagccgatagggctagtcggccttcaggtagtgtctcagtgaccccagcttccaacctttcttcaattctcaaataattaaaatgcccgtgcccttctccacgtatttgatcggggtactggtggtgctgcaccatgggctctcgagactctatatggtcactactcacttcccaatcctcaaaactagagtttgaaagactgtcattggatgaagatgagtttgctccaagccaagtatgatctttatacaaaagctgaagtagatcctggtcaatatggtatttgcctccccagaaataaccagggttcatctacagaaagataggagccaagaaatgagagttggattgaggattcgttgaaaaacaagtttaatatgttaatcaggctgattaaagataaaaagaaggggtttcgttccagaatagaattctcaaacccagaagttcaaaatctcgaaaaaatatttggaaatttttggaaacccatgaatgggtgaatgtgaacaatttcaagtaaaaaatgatatgcatttagaaaattagaaggcctaattgaatgttagtcaaagttacaagccctaatgtcatctattctatgatcagtcaagaacagttcaagaataaaaaattttgcagcaagaaattgagaaataatgcatatagtcaacaaaaattgcataaagacaaggaaaatcaacttactcactgttcgaagctttgtgaatttgctcagagggtatcagcaatggagtttccagcaaagctttcttcaaagatttgaaaattaaaggagaaaatttttgctttggttttctgagagtaaaaatgactaatagaattccctaaaagctttaatcccttttaaatgcatcttaaaatggtaattaattcatttaaaattcgaaaatttgggtttttcccccaaaagtgaacgttagtactcattacaaatagtacagctgtcactcaaccgtcagtgcatgattcaaggtacaactttcaagaggtatttaatgccccagacaccgaagagacctttgatcaagtcacatcagatcaaagatgaaaaccagacacgcgtcacccatttggacagcttcctagtcgaataagtccacgtgcgaccaagaagatcccacagacttaggggcaaatgttatcctaatttttgcactatggcgtgacattcacctaaggtgacacgtgtaacatattccataaattgggcgaatgattctactccaagtaggttgtataggttgttatgatgctcaaagtcactcgtaggtggtaggatgtccgaacaaatcgtggacaggcatctgaccagcttcactaagcaggtagctcgcatacaaccgaccaaggagtgtgagtcgacaaaatctaagatgtatctcgtatatctctaacttgcaaatcacggtacaattcctacatttgtgggattagttcgtattttcagaaaataaaggcaatcaacccgggtttcctattttttttattgtaattatggaaatagactaacttcccattttatttcttattgttcaagggaaaccaatctcatgtaattgactcctataaagtctcatctctattattcagtgacacgaaataattcagagagaacgctcaagagagaaatcacaatctaagagtaatttgctcatagatcattgtaagagctttcaagagataatacttcattcttcatctcctaagttaattcaataaaaaggagagtaggctattaccaactaaaagctcgtcgaacctttataaatttggtgttttctttactttataatttttgctttctgttcttcaactattatcaatcatttttaattaatacgacagccgtaatctaaaagcgatgttaacattaataaatgatgtttttgtttaatttttaattttttttaataatttaaaataaaaataatgacgtggatcaatgagatacttccacatgagtactgacctgcatttaaccgttcagggagcatttttaacgaccttaaaagttcagatgacatgatttgatacatgtacatgtaaaaatgtcaaaatttagaaggcaaaatttctaattagctaaatttaacacaaattttatagggaaatttacacagtttactgtgttttcccattttatttcttttattactgttacactccaaaaa

SEQ ID NO: 384322 - DNA, 1216 bp, Cannabis indica
actaattaaattagatcgaatgagtagaaatgatcaactctattataaacatttaaaatggaaatactttttctcaattatcatctcattaagcatttagtgtaaatgtggcaaagtgacatatatcattctcttgtttttcattatatgtttttcattatatggttttcttataatagcaacttcttcaataattaacaccatttcttttttcaaactcaaaggtattacgctacttataattcgatcccccaaaaaccacaataattatactgacagagatcgatctactaagaacaatatatttgaaagcagtgtatatttaattttaaaggttatacttaaatttctttttctccctagctaagaatacattagaagcaaagtaataagaggttaggtgtggttaaacaataaggtgtatgcaattatttattatttattatttattatttattatttatttattactttgctgttgctattaatttgattgatctctattaatgcgtcggaggagttggtgtaggttgatgttgttggttgaaatattgctcaaccaagatcagatatatcttagtcaactaacaatgtttatcttatttttgtctttttctgtcttggtacttctctattttttatgattttttttatcaaatgtctcttctttatttagtctccttaaaaaaaaaaaagtcaaccatgaaatgagattgcttatcctattatttatacttgagaaaaataaaaaatgagattaaaagtatttttgaacattttataccacttatttatttgacacttaagaaataaaaataaatgcatttaatgacaaagattatgtttggttcggacttaaaaaaattacacaacaaaaaataagttcaagataaatttcttaatgaccaaccaaacaagcccatgattgatgagatattgacattttatatcactttagaataagggccttgattagttggtcttaaaaaaaaaaatacattttctaatcatttacctattatctgtgccaaatccttttatcacttttttcataaaactagaattaaaaaatttctgtaaggaaataaattacctaacttgctcgggaaccctagatgcaaaagacactagtgttcatctccttttcctacaccataatccatttttcaggtatgctcttgtaacaccctaactagcataggcgtattacgtgatt

SEQ ID NO: 384323 - DNA, 2283 bp, Cannabis indica
gagagtaggcggtatgcttgtgggataaggtgatatggggcgagtctgatgaaaactaaaaagtttataatgtaatcataaagtagtagcatggctcccgaaatgaagtgagtttggattcacactccaaagtcgttgaagttgtggttgggtgtttcctcatccctgggcagttggtggtaaactcctaaattggatggcttgatcccattcacggccacaattttctccaactgatgagcacacgtcagggacgagtgcaactcatcagcctcccagtcattagagcgacacgagtacttcttgtaaggtacaggaccttccataaccacgtctagggggacaagtttttgagattccttggccgaagaaggattagcgttaggggtagcatgcgatggtactttattgttcgacattttattttttatatgaagctcaaaaatttcttggtcgaatccaaataaactatcattatgaagatcctgaagaacttcactcatctgaaagacaagaagcccatcagttagcccccttgtaaaaacctaagtcagaaaggggaatgggggtcccctaaccactaggaaaaggctccctccagatgtaggcaaagaagaatctaacgattcttattgtcatacatcgggtttaaacattcaagccgtaatgaaggaataaagaaaaaggaatgaaatgggaaacttaattgttatctgtgtttcaggtattagacacgtggactccaggtcagcacccaagacctgccagtgggacccccaataaaggtgaaaagggccaagcccacctagatatgtccttctaggaacgtatcttggttccacactcgcaaagccttcttccctcagcgagccatatccggaagtatgttcagttgcacgagaccagagagatgagatattgtgttcccaaaagacccttccaatttccctttttattcgtgcacacaaataaggaaattctagttatcatatcataatagagtatcgtatcaagattaatggagaaacttcctataacaaatattatgcaattagttcagattaattgccctcaattagtgtatgcgttgttgaccagaccaaaccaaattcgatccgtctagtcaatagatcgtctcctttatgggctggacttcatgagatagcctaagggtattatttatcataaactatctaatagaggaaaaggggaaacctaatgtaattcttaagtcactataaataccccacgaatcctatggatttgggttgaattctcttgtaagctttgctcaagcaaacttgagaacatatattctttgtattctcgaaagcttttacaagctaaagacttactgaataatactgacttgtggactaaggctagttaacgccccaatcacgtcaaaaacaatttgtctctttttatactttctctttcgataatttatttttcaattctttttaattaaagttagctttcaaaaatctcggtaaatgttttggtactttcattgagagatgaaaaaagcagtatgaccacttgaagattataattgagtaatcatggccctcacatgaaccaagtcaggtcttcgtttcactggtcgtagtgctagagctggagactctagtgatccccaagaggtgactagttgttaaaaaggtcgttgggatgaagatcgaaattgagatgatcccatcattgaggatgcaaaatctagagaaagtagctctgaggatgctgaagttaacatcaaagacataccaaaggacatgcatcaagatgaaccttaggacaaagttgctgatgaaaacgttggagagaaaagccaacttgatatgagtcagagcttgtggttatcatggaaagacaactgcaactggccaaaagtaggttaactcggcaagatcaattcaacgagttattacttggcaagatgaccagaaaggaggctataatgactgctttaactaaactatctcttgacatgctagctcctccaacaactgatgcacttgagagtgtaaatctgaaggaccctgaaactttaggcatttgcaaagataaaggaaaaagaatcgctattgaataaccaaagaagactccttccgaaaaatagcccaaaaagtctaaagttactgaccaacctcaataaaagagcaaaggaaaccacacctcaggccacgctgaccaaaccaattctagagacaaagtcaagtagaaaaataagatagaggctgccagagtctcgaagggaaaagctgttggaattattttacc

SEQ ID NO: 384324 - DNA, 2742 bp, Cannabis indica
gttttacattgtccagccactagggtttgaagacactttcaacccaaatccagtatgcaagctaaacaaagctatgtatggattaagacaagatccttgagcaaggtatgacaaactaagtgttactctcaatttacttggatttcatactgcaaagtcagactagtctcttttcaccagaattacacctcaacacactacttgttttagtttatgtcgatgacataataataacagggagttcttcctctgcaattactggtcttatacaatgccttcggtcaaaatttgcattaaaggatctaggctccctcaaatactttcttggtattaaggttcattacactaatgatggtattgtgctctctcaaaagaagtacatcacagatgttctgttgtgccaagatgcaattcgccaatcctataactgctccaatgactggtggtgagacactttcagctataggtagtgatcctataccagaacctcatgtgtatagaatcttggttggtgcactttagtatgtatgcattaccagactagagatagctttctctgtcaataaagtctctcaatccatgcaaaaccccttatagtccctttggaaatcagttaataggctgctgaaatatctcaagggcacacttgatcatggtcttcatcttcagaagccctcaaatttggatatactggctattgtgatactgattgggccagtgatccagatgatagaagtatttctgggtactatgtttttcttggtccaaatctagttacacggtcctccaaaaagcagcagattgtttcccgtagcagcactgaagcgaaatattgaagcttggctccctcaacatcaaaaattacatggcttcagtctctgctctcagaaactcaaagtccctcaaaatagaccttctatagcatggtgtgataatcttagcacggttctaatgtcaactaatcctatgttacatgttagagcaaagcatattcagcttgatctttttttttgtgtggaaaaaagttctcagcaaacaactgagtgttcatcacttacctgattggatgtgatcaagtagctgatatcttaaccaaagctttaggctgctctaaattcactcttttgaggtctgaatttagtattcatgattctaccacactaaaatttgagaggggcgtgttaatgttagctaatcttgttatttagtttgttagtacaactgtcatttgtaactaacttatacctgaatgtaactaactcattcttattgtatactcttgcacaaactgctaagcaattcaattaatgagaagtaatttcattcatcaaattttttgttcaacattgtgcacctctacctcttaataaaacaccttaagtcactgtcaacccttttcttcaaccgccagttattccacccaattcagctcctgttgctccagttatctaagaacaaaccagtactcaggtgctaccaccttctgctattccaaaaaatcgtgtttcagccatttttgaacaagccaccaaattcataagaccctgaatgttagaccgcaagagagagtaaacattcattgatatatcaaatgtggaatactctactaaatttgttacaacatttttctgtatcactacatattttatatcatttttattgtttcagtagtatatctatttttacttttttagtattaaattataaactaattataattttttaattattattttactataaaatgatagaattattattattttttattttaataaaatataaattaatttttgcatcaaattttataatagtgtattggagtataatgttaaaatttgatacaaatttattatgaaattcattttttgtgctaaatatataatgatatttacatgtttcgttggagatggtctaatagtaattttaaatcttcttatggagatggtctaagagcattcttttaatccaaacatgaattcattttgagaacattcaaataaatatgtttacaaatctaggctataaagtttaaacctgaattattgttttgttatttatttggatgaagaagaatattaaaatacacgaattcattaaactgaaacttgagtccatatacagaccaagaaaacaacaacagtccacgaaagaataaaaacccacagtaactaaaataataaagaacagtgttagcttcagtcaaccttgtttgtctcttttagattgaaaacttctacaacaaccttagtattgtgacttatgagaaagagttaactcagaaaagtgttcgttttgttatgtgtgtgtactggtcctggttttattttggcatttggttagaaaatattagcttaatatatatagtctttcttaatcaggaaagcaagaagacagagaaagaagcaaacaagtgtaggccaatgtgcgaatcgattgggccggcggttgcggccgaattaatcaaaaatctaatttactggtgctttggacaggcaaatcgactttgtcactgtgcaactcacagaaggcgtgtaaagacactgaatgaacaactagaagaactggtgaaatacagaaatgaattgtcaagggaggttgagtcgaagaaacaacacgaactaattcatgaagaggttaacgattggctccgtgaaacagagaataatatctttgaaaagcgtgaagaggcagagcgtgcaagccaaagcttttgtatttcacattccatccaaaagcaac

SEQ ID NO: 384325 - DNA, 2240 bp, Cannabis indica
tttggtgtttgattttcagggttattggcaatgtcaacaacaatagtaaccgatccaatggtgatatcatcagccccagaaagtcaagcatcaaaactggttgttcaagccgaaatcgagttcgccaaatgcgactgctgtggattaacagaggagtgtacaccagcttacatagagcgaatccgtgaacgattccatggccactggatttgtggactgtgttctgaggctattaaatatgagattgttaggtccaagaggctacttagcactgaagaagcgatgactaagcacatgaacttcttcaagaaatttaaggcctctggctctactcctccacctgatcccacaatccacttaatttcggctatgagacaacttctacgtcggagttttgattctcccaggggtttgagatcaactccaagcagtcccatgtccaaaatcgactcagagatttgtggtcctggccttactagatccgagagttgtttttctactttgacacgttgatgtgtaggaaaaacaagaatcaaagtgggaaaatgttcttttgtggatttggaaattccattggcaaaaagccaagaaaaacttttataagaaaaaatgaaaaaactagattttctgatcatgtgtagtttgtactagtagtgatcaataccataaaaacttttctattttgatcttgaaaatcttgttacgtttttgtttcattcatacattaatttctctgctttttgtttagcatagagaatctgatatgatctgatcatctaatctttgatttgtattaacttattcgttcttgtaaagagcaattagctaattaatttgttatgaatttttctaaattaggaataggagacatgtgatggagcatatatttagccagagattttttgtattcttgttttttgtttttttgtatattcttgtttcactgatcattgttatgctgtcagtactgttttttacaataaacttatattaaatttcaccattaactataacactatactagtagactagtagtgtcatctaacaatttttactgtaattaatgtttctatatctagtgtaattaccaacaaatttgtatatatatattcatgtagccacatgaatcatgatagatttatcaattatgagaatgtgacatttaagtttcataaatttatagccacgtatgataaaatctgtgtggccaaatctgtaactaaaatttcctccactaattatgctgattggtacagcaatctgtaaatggagtaagtatttgtcttgacaataaaaggaaaaaaaaaatgatacgcctggactagactgtaaatgattgttagctaggatagtagtgtggaaatagtgaaaaatatataaataaataaaataaaaagaagagtgaaagagaataaaatggagtgttttgactttagtacaagtgaaaaaggaaatgtttgataataattatggcttttgctggaaacaacgaagaagaaaaaaaaatgacaactaagatgagagcatcaaaatcagggctacagtgagaagagtacatagcactgttagtgtgatttaggtcagattgcagtagtagtagtataataataataatgatactgataatcctttgttgaaacccgacaaaaaacttacaaagtacatattctctgatctcatttatatatatattaagaaaacgaaaaacaaactaaaaatttcatttgtttatttatttggcagtggacgaaggagatttcgtataagaaattgttaattgacgagaaaaagtaaacaaaaacaagacataattagtacttacgcaacaaacaaacaaaaaaaagcaagcttaattaagttaatttactaaacaagttattattaatgcatctacatgagttgtaaattttttttctttgcaattatatatatattattaattagtaagggaaattaaaaaaactatgcataaaatattttatgcataaactaatacattttaaaattaaaaatatatggctattttttaaataacttaacaatacccctctcataacaataccccaactctctctctcttcctctatctcactcggttctctcttaaccaaacccctcaccaaatcaaaaccccctcaccgcctacagcctacaatgtcggccctctcccaaattaaaaccgaccacttctcaccgcctaccgcctaccgcctactggcgagaatgtcaaaggtgaaggt

SEQ ID NO: 384326 - DNA, 1006 bp, Cannabis indica
caagtccttatggcaaagaaaccagtgcttcatggtgtacagattctgtttcggattttcttgatttctctgtaaataaccctgtcgagaatactcaagtagaaagcagtagctgtagtggtatcattgtatcagaagaatttggcaagcgcaatgattggcaggactggggctgatcagcttattactgatgatgctgctgctttaacttcgaattgggatgaactccttgctgataccaatgtaaccgatattgacccaaaggttggatcttttatatgtgggtgcttaacatgctttcttaaagttcttaaaaaatcaagaaaaatatgcatttgcaaagtaaagtgggaatttgtggtattattatcaacaaatattttggtttctacttttgttgcttcagatggcatatcaagtatcgacaccatcttcgaatattcaggctcagcagtcccaagttcttcagcagcttcccgctccatctggagaaattcaggcagtggctactccatctggagagattcagacagtttctactccatttagttcggctaataatgctgcagccaagcctcgtatgcgatggacaccagaacttcacgaggctttcgtggaggctgtcaaccaactcggtggcagtgaacgtatgcaacccttctgacttgtttattttttttttttgaaaaaatcatgaagcttttgcttttatattaatttacttccttttaaatttcaggagcaacacctaagggtgtcttaaagctcatgaaagttgaaggtttgactatctatcatgtcaaaagccacttgcaggtatatattcttcattgttgggttgtgttgtattaatgcagattttgtgtaataattttaatttggtctgatgggaattcttgtttttcgaaatacagaagtataggacagctcgatatagacctgaatcatcagaaggtatattactattatctctctctctctctggaatataaaagtatgtcaagta

SEQ ID NO: 384327 - DNA, 1824 bp, Cannabis indica
ttttttttttaaattttttcttatacatctgttcccgcccatgtgaccctattacttttccaatctgatttcttctcctttcatgtcttcatcgacttactcccattgcctcctccaaagcttttatggaaccactgatgagcactttgaattccaccctttccctcactaatgagaaaagctcgatcattgtactgcctgatatcccaaaccactcatgtcctttacaatcgggccacattctcttggctcgtgttcttactgaaaaagcagtgtacaagcctagtttttatgaccaaatgtcgggtcagtggaagggtcagttttcgttacaattactgattacaaaaatgacttattccacattgcttttggctgcgaaagagataagcgtagagtcctgaataaagaaccatggcacttctaaaattatcttattgttcaatttgcgccagatgttctacaaaatatctcaaaggaggatctgatctatactcctttttgggtccaaatttaccggttacctttccttagtaaattctctgttttggctagggctcttggcaagattcaaagaggttcttccactagttatttccgaaatgcaaaatgcttttttgctgaatggattgataactgacaacattttggcggtatttgagttggttcatgcaataaaaaataaagcctcaagtcatcatggcattgtatctttaaagcttgacatgagcaaagattttgacagagttgaatggagattcattgaaagttatgaggaaaatggggtttactaatcattggatttaactcattatgggttgcattacaacaaatagtttttcttttctcatcaatggggaagtcactggtcatttggtcccaactagaggtttaagacaaggctgccccttgtctccatacctgtttctaatttgttcaaaaggtttatcgaggctactacatcatgaacaaaatattggtcagctccatggcttcaaacttacaaggcaagcaccaccaatctctcacttactctttgctgatgatagtcttcttttttgtcaagcaaatgaaagctcgtgccttgctattaaaagagttctggatatttatcatcgagcttctggccaagtcctcaaccagataaatttgtcatgtctttctcccctaacacatttttggcggctcaagtcttctttcattggcatctttccataccaatccgggattgtcataaaaaatacttgggtccgccatcatattcaagaagagacaagaaggaactctttatcaacatataagaaaatatatggaaacttatgtacacacggagtgaaaagactttctcagctggtggtcgagaagtccttcaaaaagctgtggtgcaatccattcctacttatgttatgagttgttttcgacttctagtctacttctgtaagtaatttgaatcgatggctaacttttggtggggtatgaacgaaatgttaggaatattttattagaatctagatttactaacaagtatgtggattaacatcttaaatatgaatatctctaaaacaatgaaataaacacataagggttaagaaaatcttacattgattgcagcagaatataatgactcgttccgttaaaaatctttagcccttgattcttttctatagcagagcattatcaaaatctgaacttggatctctttctctcctttgggtttggttactaccgttttactcactatgattgagtacttgacttgctatgtgtgggcatgacactctttcactcaaggtttcaaatggggaagaacaatgaaggaggtga

SEQ ID NO: 384328 - DNA, 570 bp, Cannabis indica
tcctcgtactataaaatgacactttaatcactatgcaaaatactatttttaaaatatcttgttattatttaatattttaaccatatattattaattttttttcacaatttcaagtccctaatcagtgtttatgaccctgtatataaattgacataaatgagtgaaaatattttctttttcttcgttttaagtggagaaatgataaaagacaatattagtggaactatcattatttaaaagtcatattattattggtataattaaaaatcaaactctacgtaatttaatttaataattatcataaaatatcactaaatatattcaaaatactaattttaaattgtactagttactgcttattgtggtgtgtaataacaatgctcttccaaatagtattaatctctaaatttatggcttagttttaaaaagatattttcttaattgatatatatatagagaggggaaatatgaatgttatgctttccatcaaaattaaaagaggaaattacactctatacttttttatattgtcttcttttatttttaccctctttttaaagtctatcattt

SEQ ID NO: 384329 - DNA, 1269 bp, Cannabis indica
aattacactcaattttcatggagagtatgaaaatcggagagtgtaattgatacctctcaattacctccaattatgcagttttagtgtaattaaacaaacacacaaagttgtataattaccatcatttacatccaatttcaattcctttatggctttctaaacacgcccttagttatttcaattatgtagttatagtgtaattatgttgccacacaaatacacaaatctgtgtaattactttcaattacatccaattttaattttctcttggctttctaaacacgcttttagtaattttaagtaattgatttttgtgtattaattttaatttgattgttttatgtaacttactttttttgtatcaaattttttaattagctgataaagttagttcgacgtccaactccaatgacgacatgaacgtctaactccgatgacaaaaaaaacttcaacaactttttcggtggtgatatttgcggtggcgatgagaacccttacgactttcccacaacttatttctagtaacattttcggcagcaatgataaaaattcagcgactattcgatggtaatagctgctatggcgatttgacaggcaataattgttcttgaaaatcatcatgttttgtgacattacttttttctctcatatttttataaactatgttaattttttctacctttcttaagttctccaatacttaagctccataacaggaaagttattatcagtcctttgcgttgacgttgctgcaatcacccagttaagtcctcttctcatgcattatttttatttcgttctaaaactacaatatggcactaccttcccactgcgataggacatcattttaatgttaccaccgccattagtatcgttctggccattcacacaaccatctttagcactacacatcaaagtattaatggtttatttatttatgttttattaattaatcaaaattaaacccaagaagactctaatgtaatttttcttattgatttattggttttaattactggtttactttttattttttcaaatctaaaactcctaattaacatctacaaaaggtttctatagggatgctgctaactttgatgacttttaagataaggggaggcagctagcagtgataatacttccataaaaactaaataattaatggtcccaaattcttatcgttttttacctaaaacaaatataaaaaatggaagcatctccagtccagagcatcacactacacatatacagtaactttttttttttttt

SEQ ID NO: 384330 - DNA, 1587 bp, Cannabis indica
caaaactagtccttcatgtcctcaatgatggtggatctccaactgctttcaacaaaacactatttagttaattaccaaaaaaaaaaaaaaaaaaaaattagaaggagatgaaagactttcggcaatcatcttgtgtaacgtaatttacaaattcatctccaagatgttggtatttcgtttcaaaagcattcttccacatgtcatttcggagtcacaaagtgctttcttcccgaatcgtttaataactgataatgtcgtggtagctttcaaacttgtgcatagcttgaagcataaaactcggggtaagattggctatgctgcactcaaacttgatatgagtaaggcattcgatagagtgaaattgtcttttctttctgctgtcatggggaaaatgggttttggtgttagatggatctctcttatcatgacttgcttgcacacaaatcagttttcatttcttataaatggtgaagtaccgggatccatcattcctcaacgaggtctttgtcagggtgatccgctatcaccatatttgttcataatttgttctgaaggtttatctagactcttacaatatgaagaatcaattggtcggctgagtttcgcgacgtgccccaactgttactcacttattctttgcgaatgatagccttttgttttgtcgagctgatgacagatcttgtgttgctattaaaagggctttggatgtttaccaccgtgcttccgggcaacaacttaatacagataagtccgtcatgtctttttcaccaaatactcaagagtcgggtaagctttctttccagcaaattttagggatacctatttgtgaatgtcatgaaaaatacttggggctcccgacatactctgagcgcaacaaaaagcaacatttcaacaaccttaaagatcgtatttggaaacttttacactcttgaacacacaagcttttttctattggtggcaaagaggtcctcttgaaagcggtaatccaatctattcctacctatgcgatgagttgtttttaattaccatctaagttttgcaaagaaattgaatctatgatggaaaacttctggtggggaacatcgaccgacaagaataaaattttttggaaaaaatggaaatacctttgctgttcaaaattggaagggggtatgggatttagagattttgttcactttaaccaagctttattggctaaacaagcttggttaatttttcaaaatcctaattctctactaagtcgtgtgttaaagggccgatattttccaaataataattttctagatgcaaggaaaggtggtttatcatctcttacatggcaaggcatttgttggtttattgaaagaagacctaagaatgaaagttggtgatggctcaacaaggttcggatccttagatccctggcaagtctcaatttgttcctttattttactcaggatcctctacaaataaagtttcagattacataacaagtgagagagaattggagcttgtttgattgtgttttcagtttttaatttttaaaattgtgtttttaaaagtgagaatagaaaatagtttttgtcattttaaaaatttaatggtgtt

SEQ ID NO: 384331 - DNA, 715 bp, Cannabis indica
cctaaacgatagtgagatacaatattatcaacaatctgagaatcagaattgacaaaaaaatagcaataggtatagtatcatgagacaaatttaaatagtataattccccattttgattgcccataccaatcatttgagtcttcatattttcctctataatattatacatagatggaaactaagagatgaggttagtaaaggaacatacaataaactatactttaaattaggagcatgaaggacattttttgagaataagatcatgagaaagttgaattgttccaacacatttaatagaaatatgagaatcattaggcaaactaacaatctaatgtggtgtaattttatgtatttcaacgaataaagatagaccaggacacacatgatgtgtagttcctgtgtcaattatacatctagaagttcattcattcaaccgccttatcaggttgcttggggtggtccagctccgcctgatgtgattggaggatgtactcttggtcatctatctacctcaagaatttgcatctctgttaagtgaatacattacaatcaacttgacgtggttctttagtttggccaacatggcagatgacctctctaagtctggaaaactcgagatcttctcccaagtctgcatggggctcgccaatggctagttcactaattctcggagccgtttctgtagcatagtactggggacgaggtctagttgtta

SEQ ID NO: 384332 - DNA, 1560 bp, Cannabis indica
tatttactttttattcctaactctttattgttgattaatcagtgattatttgacttcgagtcagttggctagttttctagtcaacaatttaaaaaaattaggaaaataaaattaaaatgagtattgaaattaatataaaataatgtaaaaaaaacaaattaaaataatatttaagaatgatttttaaaaattattttaagcttaatttttttaaaatgttgaggtatacttatcatttatatggtataaatagaattcctgaaataaaataaaaataaataaaagttattaaccttaatgacacttctttaaaaattagtaggggtagtattccctttcttttgtcctttatttaattaagttgtggcttttctaattttaattaattaagtaaataaatataaaaaatactctcttattattcattctcattaattattaataaatatttaaaaagttaaataattagaaattgttaacatatttgtaccatacggcatacgttataagatgtaataattttttttaatgtatatatataataaaaggtattgtttttaagtatgtcccaacttttctataatattattaaattaaaaatatattacactgacattaaatacccttttttgcatttctatgtaaaagttagtatacggcttcgagttcaaacttcaactcatcacgttattattatgggcctacttgtgtgggtacattgatcatatctctcttcatcaagttggcactccttttaatgacatcgaatccttttaattcatattcgatgtacggaaataaaaactatgggtacggtatgccagttaagatgagagagagtttttcttgttttaatttattttgtatttgtagatactaaacgtacaataatgcaaataagctgagaggctctaaaggacaggacaagagtaccgatgaatctctttattgatatggttagtagtgcagtactgccactgcagtgttagtttaattgaatcagtgtcatgtagggtaggaattgaatccagaggaaggaaaaaaacagaacgaaagagaagaaagataattatcaaaacacacttgaattttttttcaattttaatttatacctacaattaattccaagatttgtacataatacaatacaacgtacacaaattgaatgacactgtgattgtttgtctcatcatcacttcgatccattcattcagtttccttatcatgttaatttaactttatgatttcattttagtttttactgtgatcatctcatatcgtgtattctatttgagcacccacactctccaaatgacaactcaagtcccaattccaaaaagtatttttgatatgtaaaataagtatgatatgagtaccgatacaaacacgagagataaggcaatacaactaattaataatgtaatactatatatataagggtaaataccattttggaccctctattttgcaaaagttacaaattggaccctgtgttttgttaaatgacaaaatggaccctgtattttctaaaatagtacaaataggaccctgaattgattt

SEQ ID NO: 384333 - DNA, 839 bp, Cannabis indica
ggggcctttggagaggttagaaatatgcatgtatctgtacattaaatgcacaaaatccccattttcaatcaatattgatataattggttgaattggtggatgcaaaagagctctagtaaactgtaagacttgcatcagaaaggaaatgataattagtattaataatacgaaatgcttaaagacaaatgggacatctttaatatagaacaaatatgctggttatctgtttcatatgccttattgccttggttgtgactactgttgcaaagaatgtgttaacctttcttttctcttacgaaacatttttatcttgatattttacaggtcagattgtgcagggagaagaaatctggaaacatctatgctatgaaaaagttgaaaaaatctgaaatgcttagcaggggacaggtaagactaagatcttatacctagctgctttacatcgtttattaaaaactcaaatttatgatttgatttacatgttcatatgtttttgcatcattaaaccaactttgtcaaattaatgttacatgttctttgctacatcaacaaatagcttttttgtattatcttgcaatttatttacctgtaaagattctgaaaattttctaataatgtctgttccatgttgatgccatgctgtactgtttacaaagtgatatttacactgattgtgtcaaagtacaaaaagctttttgtcctccgttttatgggcaaaataattctattcatgtcaatgcggtagatgatcttatgggggtacttcatgattattatggcactgttgattgaaggaggtgataatttacagaataccgtctcaattcatcctatttcat

SEQ ID NO: 384334 - DNA, 4890 bp, Cannabis indica
taacttttacaaaatacaaagtcctaaatggtgtttaccctagaataaatacccttactaaagttttttaaaaactaagataattgatttttaaataactttcttataaaaacattagactttacttagtgacattttcaatggtttatccacatacttttatctttgaacctgagcttttgctttcttaaataacatcgttattaaagttctaaataatttttaatagctaatcaatttttacttaccaaaaaaaaccaacacatgtattgtctaactcactcacctgaattattcatataattaactcatacacacgaagaatgctagtcattaagacttaatatttaaggtaatatttatcttcaaatcactaccaagtaattgtcattaataaatagattcataaaacaaaaaaaaaaaaattgagatcatattgtactttaaaaattccatataaactttccactaaacagagaactaaaattagtgttggcaactggttaccttgaatagtggaagaatgctcaaaattctcatattgagacgtcatggtcgggtcttcaagcggatgatggagctgagcattggactataccaaatgtgaacaatatcaagataaatgttgacgctgctctctttgacggtagtaataagtatggttgtggccttgttgctagagatcattatggtatgctaattgaaggaaagatggtgttttcttctggttcggttacaccagaggtggttgaatccattggcatttgagaggcgttaagttggattaagagtcataattggcaacatgttacagtcgaaacggactgtttaatggtggttcaagcgataagaagtgaggtgaatatgatatcgttgtttggtcaagttattcatgagtgtaaaaaactgttgttagaattgaaaattatttctgtattatttgttaaatgatcagcaaatatggtagctcataactgtgttagagcttctatattcttctctggttgtattttcgatatagagtttgttctgttcgacttgctaccttctttggtagcggattttaatagttaataaagatgcattttctattaaaaaaaacagagaactaaaatttattcaaactatactatcctaattataattgaattgatttgaaaaaaaaaagttaattaccaaataaatattatatttagtgtgatttatataaaaataaattgtatgtttgtttctataaataatttgtggtgtttatataacacttaataactactaaatctttattttgataattcaataaatattatgtataatgtgatttattaaaaaaaattatgtatatttatttcacattcttcatgtgagtaatttttcgtgtttataattgagctcatcataaaaaaagtaatgagttcaaaaaagaaaaagaaaaattgagctcaccatctaccatattgagttcatagttttgtttttttttttttttgttcttcattacacattacaagaaaacaaatatgagtaacaaaagatatttatgcatttaaatgaaagcgtatacaaaacaaactactactaataataattagcaaaataataataataataatttccggataactaagaagccttctccaaccaagccccttttatattcttaaaaaataatatattcaatataaacaataatggatctggctttgttccaaattttgtcgttacatgccaataataataataataataagtattaagaaaaaaaaaacacgagtcagtaatcacatgctccaatcgttctacaaaatctctcaccctcccatccgattccgatcctcactcgccaagaccaactttctctctcctctgtctatatatacatatgtatatgtgcatatatgtgtatgtatacaaggctggtggttgttctgattgcagttgactaattcagaggtgagttttttttctcggtagaatgagtttcagagatgatggtagtgaagatggaagggacctcaggaagcctttcatccacaccgggagctggtacagaatgggctcaaggcagtcatccagcattattggctcctcagctcaggttctccgtgatggttccgtctccgttttactctgtgttctcatcgtagctttgggtccaatccaattcggattcacggtcggttttcccattttaactccacttttgatttctctattcaaatttttgctgtagaatgaattgaattttgtttgtttgtttcagtgtgggtattcttctccaactcaatctgcaataatcaaagatcttaatcttactatttcagaggtctgaatttgatttatattcttcaagtattgatattgttatgttttgctgatgatttgagttttaatggctgctttcagttttctttgttcggttctttatcgaatgttggtgccatggttggggctatagctagtggtcagattgcagagtacactgggcgtaaaggggtatgctctatctttcttctctcttttcattttgactgatataaaattgtgtagattttggcttagtttaacttattaggaaatgtaaagaaccaaaaactgaaaaagtatctatgtagtagctattcactaaattatgtttcttcatttctttaatatttttcctaacttttattattcaacatttgatgatatgaatgttaatgctcactttaaacatcaacaaaataagaatataaattaaagtggataagtatcaaacttgaaattggctatttttctcatatcagcaatcattttagtatttagtactagtagtttacttttattatttgttttctttcattttatttttgcattgtgtaataccagttgcaaataccgattcacagtttctgagagctactttgtgttgttgatcacagtcgcttatgattgctgcaattcctaacatcattggatggcttgcgatatcatttgccaaagtaataataattcataatttgtccacatttcattttatatttctagcaagctttttgtggtgtatagcctaattcttttgttcattgtaggattcagcatttttgttcatgggaagattgttggaaggttttggtgttggtataatctcttatacggtactttccaatacccatgattctttcggtcaaaattgtcggggtatacttagaacgtggctgattctaatttgtgatggttacatataggtacctgtatatatagccgagattgcaccacaaaacatgagaggaaccttgggggctattaaccaggttggtttttgcttgatttttgtaacattattctttcttacttttctccatatctctgaatttgtatcattcatacagctctcagtgaccattggcattatgctggcttatttgttggggctgtttgtggactggagagcgcttgccgtgttaggtgaacccatatatctaaactcatttacttgcgaaactttgcagaggttttggaattttcactgcccaattttggaaccaagaatctatgtgcctcgagttttatatggattttaaactaatttgatcataaattattcgttgcaggaattttgccgtgttcaatactgacatttggattattttttatcccagaatctccacggtggcttgtaagcgtcttatttggctaatttatagaatgaatgttgatacacttaaattttactgacaactttttgtttggacttggggttgttttaaggctaaaatggggatgacagaagatttcgaatcctccttgcaagttttgcggggttttgacacagacatcactgcagaagtgaatgatatcaaggtatcatattgaaatacctctttaagataattttttgttctaaacaacttggttagtcaagttcaagatgataaataataataaaaaaataaatctttcttcctgcttcacactagattgtcattgtttttcacaactacttctgacagagaacagtagggtcatcaccaagcaggcgaaccacaatccgatttgcagatcttaagagaagaagatattggtttcccttgatggtaatctccatcttgctctatcttactctcttttccatgttaagtttcatagtttactttgctcatttatatgctcttgatatttgtgctacaggtagggattggattacttgtgcttcaacaactcagtggtatcaatggcatcttattctattctagcaacatctttcaaaatgctggttaggcttacttcttgagtgttggtagcttttatttcattctagacacacacagtggaagtatatttctacaatttttctactgaaaaatttagtttatgtaactgatgtgtgagtgtgtgcgcgtgtaattatgtggtgattttctctgtgggtgaaaattttgattttttcttattgaatttttgttctactaactctgcaattgatacaacaggaatttcttcaagtaatgttgccacatttggacttggggtcattcaagtacagtcattcataccatttctctaattttcatcaagtcagtatttgaatgttgggaaataagttctaatggtgtcattaaaaatgctcaacatttcaggttttggccactggagtgacaacttggttgttggataaagctggtcgaaggctgctcctcattgtactggcatacttcattcaataattgtttgtcttttaaatttatagataaaacagaaatttaaaaaaaaatctatcattttgtagatatcatcagttggaatgaccactagtctcctcattgttgcagttgccttttacatagaggttagtattaatggttttatattgtgtattttttaagaaaaatttacataatagattaaaaattt

SEQ ID NO: 384335 - DNA, 1349 bp, Cannabis indica
ttttgtttttttttttttttataactatcaattgttttttttaaagtacgtaatacaaaaggtccaaatttttttatttagctaaaggcatgtgatttgaaagaatatttttcctataaaaatcgtacacgtgtaatgctaatttgggtacattattattatatttggtattgatgaaaaaaatagaaaagggttcaaaaaagggctttacaattacaatactacactactattataaaataattacaaatttaattattatgaaaaataatataccgaaattaattataatattattatatataacagatttttcaaatcaaacacaattatttcaatagataccctaataactctattcatgacattcctaaaatatttaggactcgtttagcatgttgtattatattatgttatgttgaattatattttattgtattgtattaatattatttaatacaataatatgtttgatattgacttgtattaataaattgtgtaaagttataatatattttcaatacattcgaccccaacaccaactatgggtctgggtctgggtcctaggttcgagaccaggtctcggttcgagtcgagagtctcgggtccgggtcgtaggtctcgagtttgggtccgactcctgggtctcagttttgggtccgactcctgggtctaagtcccagttcgagtctggatttgggtctagatccaagtcggagattggggttgactccgaatattttgtaaatattataatataagctaatacggatcatttgttatgtattaaataatacaacatacattgtattaaaaattttagtcgtaataattaatacaatacattgttttatttaaaaatagtgttatttattatttaatacaatacgacccttatacgacgtaccaaacaaatccatagtgctctttaaaataattattaaatacatgacatattccatattagtcattctttagatgaaaaaaattagtagtatgggtaagtgcatgatattttactatttcattataactacttaattatttgttattagtaatgtcgttactactattatattttgatacttagtagtaactaatacaatttaatactcattgacatctaaaataatttattgtcattgtgatactaactccatgtgttggattctttttgagtatatatatcaatatattatatactatttagtagataattaataatgtgtcaaattgcatagtttacataataacaacatattaatttaaatatgcattaataatttttttttttttaaaattaaaaaataaaaagtagttatagaatatatttttatttttaaaataaa

SEQ ID NO: 384336 - DNA, 1035 bp, Cannabis indica
aaaattttctatgcttttattgaaagagtagaagaaagaaaagggcttatcaatttaagtagatgtgaacttgtagtactatttctattacacattattactcattaatgtaatgtgtgtacatataaaaataaaatgaaataaataatagtcataaataggaagggtacatagccaaatgaataggggcatgagcccacatgggtaaatgaagaggagtaaggccccatcttcatcttcatcatcatcatccatcagatttgatcatttgagatattttgttaacaaagtttgtcccatttagtatcaagtaggtgggaggatttataccaccttctccttctctcacttcaatgtactatactatactctctatctgaaattcacaaatatcttattttatcaaccttgagatgttagcattaaaataccaccctagtagagtcaagaaaaattttccacctaccagtaagattttattttattttttaaagataaaataaataaaagaggtctcattaaattattataatttgaattatgttttataaatataatcaatttgtttggcataggtggagtggaggtccaactcgaatcttttatctccagtattgatcaaaatatagaaaggaagtttggttaatttacaaatacatttataccctttttaattgttattttgaaatgagtaaatgatttagtttaggggtaatttttacactttaaaatactttatttatttatttatttattttttttacggaactttgtacatgtgaaacactatactattttaatatacatgtataaatgagaaacactttactttgaattgtgtagttgagattaattacctattattgtatgtaaataatgtgtacaattttaatttatctcaatcattattcttagtcattctttagttcacttaaaccttttccgattatggtaactgaagttttgtttcttttaagtactccattacaaagatctgtattacatgtatcatttatttttaactatgaggaggtg

SEQ ID NO: 384337 - DNA, 2073 bp, Cannabis indica
atcagatcaacagaattcagtgacattcaatctcaaacactacagaaaaactgaataaacaaggcaagttacattaagatgtttggcatcatcgtaagaaagaaagaaagaaaagtggtacctcaaaaattacagtaaatataataaggtgtctgatcatacgcctccaagtttgggacctcctcttcattctagcaagaacagtggcttcttctttagaaatatactgaaggcgcttctcaaaatcatcgccatgtattctaaagattccattccaaattctggaaaagatacccttacgcttcttcttcttcccaacctcactcgtggttgttgtagtagttgaagttgttcccgattctaccttctcaccttctccaacgcctttatcatctgccatctctctccctctcactcactcacttacttttctctatcaaaattcaaccacatacaaaaatcattaatttatacataaatcaaaaatcgatatgtgaagatccaaacattaactgtatgaaatgcagaattaccttaagaataaagtaataatcgatctgagaaaagagaaatgaattagatgaatatgaatgttgtatcggatctcaaagagattaagagagagagtaatgatgatgaaggagcgtaggagcaacgtaacgcaacaaaagaagaaaaggttttaagatgtttttctgggttttggtgatgaaattgggaaacctgttttgatttgattttgattttgattttgatttttgggggtattcacttgtctctcatctcaactcaaaactcctcttcacatcacaccgccacgctcttccaatatataattttatattattattattattatttttaaaataattaaataaataatttaaaacaaaaaactcaaaagacagaaaacaagaagacatgttatgttatttcctaccttcttttctatcctcaacgactttactgacttcacttcacatacacattaattaatttattaattatactttgtaaagtaattttaaaaaaaaataaatgagtaatacgacaaaaattaaactcaaacattatagttaattttatattggtactcattgtgagtgactatgatggttaaatgtgtatattctttactcttttattacgtgctatatactatgagtcctactcccaaccaaatctacaactttttactttcattaattagatgataaaattctttactaaaatttaaaatttatgttaaatttaactttaaaaaaaattgtgttatatttagccaattaaatgattctatatactattttttattatttttttaaaatttacagtttggatttctaaaatagtttatgcagtagtttctatatgggttgctatacagattttggttgcaattcaagttgctacattagttgctaggactgaatattttgagcgggttcgacccgaacccgagcaacccgcccgaacctgaactggtgaacccgcaaattttttttaaaaaaatgttcgggcgggttgggttcaacccggtacccttcgagcgggttcgcgggttgagtttttagggataccgagtttcgggttgaacccgagaacccgcccgccaacctggtatataaatatattatatatatttttatttttttattacagtttatatgtatatatatattaaattattaattaaaaaataaaaaaccctaaatcatttacattcagcagcccctaacctaataacataacacacacagtacacacacacggctcccagacctcacgatcccactctcggcctcacccacacccaccccacacccaccagcgtccagcagacctcacccacgccacggccgacgacgacccaggggagggatcgatgacgacctcggctccatgattggcagctcctcctcttggctccaggatcggcggctcctcctcctccatgactccgtccgtcgtcgccaaggccaccacacggtccgcaaccaatctcactcttagcttattttttttttttattttataaatttattttctgttaaataatataaattaaatata

SEQ ID NO: 384338 - DNA, 823 bp, Cannabis indica
tgacgataaaccaagtgtaagttcccctaactgagctttgttgagtataggggtcaaaaaaattattgctcctacaaagaactcataaatatctcaaaatcagtaaaatttaaactgagtggaggagactacaaaggggtttcatatacgaactgacttccctactgcagaccagactggtgttgctactacggagaaggctagtgttgatgttttagaggagtggcataactttgagaagatgaaccaccaggagattgtgattgaccatatatttggacaaagttatcaaaatgtggcttatataaattggcacattattcaggtatcagactactccctaatgtgtcacgtttagttacaaacatatctaccacggtgttgtaaatttcattgggggtggaggatacgcagctgactgactttgattatatgattttttttcctttgccattgatcttataacccacacctctttgataattaggtattttctgaagaacttttccaagtatctcgaattgataactactattaaattcagtactagatgtatcgctctgagattatctttcgagtcgtttcttatcaagcttcttacgcagtttctcctatttaaataaacattattagaacatataattaatacaatatttaaaatttaacaatacaatattttatttacttacaaaatcttctgcagcaacttcgttgacaaaactactagacggttttctcgtatgagccaccctctatgcatcgactaaatgctcttctagtagaccatcctatataaaaataaaggctaattaggattttcgcc

SEQ ID NO: 384339 - DNA, 618 bp, Cannabis indica
cttaaagaagaaaacacagacgtaatacaaagttaaaagtgagactgtggagagtaagttcgagagcaatacttcataaacaaaggaaacatatgaataagagaggaatggaaatacctgtagcacaacagtaatgtcgtttggtttgacttcgctcagaaatggcttcaaaagcacttcatttgccgccctccataactgttctgttcttgctgccctaagaagacgaagacgccaccgaaaaaaattgagaaaatgggctgatattggttttatgggccaactaactaaacccaacggctctaaagagccactaaataaatactcaaaaatgacaaaagtttacacttttaccgatttacagttttttttaacatttttactgattttaactttttttatacaaatttatggagtgttgttttcacctacgcaaaagcaacatgaaaacaacgttttttctgaagaaaaggaaaacaagtgaaaaacctgtgtaaaaaaaaccccgcaaaaaatccaattttaactccattgtgtagatcaaaaaaaaaaaaaaatccatttgtaaaaatagatttaggaaattactctctatactctttttatattgttctcttt

SEQ ID NO: 384340 - DNA, 1811 bp, Cannabis indica
gaaaaaatagttatgcatgcaataaatatttgaactttattctcactataagtgatgcctagctctcacaaatctaaatagtttcacttgggaacaggacaaaagtcctgatccgatagggaaatgaccatcttagcgaaacacaaagcagtaacagctaagctcactgttgaacagataacctcttggagcttatatttccaaaaagattaccaccaagcgtggtccccaccagtcagcgtggaaacaagaaaagcattatagcttgtcccttttgtacaaatggcaaaacaagtttcccataaagcaaaataatcattgggattcacatacccactactttgacacacaccttacctatgtgcccataggcggctcacacagtcaactgtcatatcatcgacgagaagattagctccactctgttacggttataggataatttagatattttgttccctatttttcaattgtcttctgttcattacattctgtcccttgtctatcgattgtgtcagttatgacagttatattagttttgttagttacaggtcaagggtagtttagtctattcaattgaattatgtatctatataagttgtactcatttccctctttgattaatgagaaactattcttgataattcatttcgtttaacatggtatcagagcagtatgattctcattctccttcttgaaattagttgatgcataaacactctccttcttcattgttgatcatccatggaatcttctccgactctctcatccgcaaccagccagaacagagcaacatgttcaggtgattcatcgttcactcccgttgtattttcacacaaattagccaccaagctcgatcacgataattacctgttatggagacctcaagttctttccgccattagaggtcacaaactccagcaatatatctctaagactttcacccctccaccacaatttcttttggaacaagaccgaattactgataacatcaatcttgcgttcatggactgggatcaacaagatcaactcttgtattcttggcttctgtcttctatgacagaaccaatccttactcgggtcgtcacttagcaagattatggtctgatctatccacatattttgcttcacaaacagaggcgaaaatcgatcaattcaccactgaacttcaaaatctcaagaaaggtgctcctgctctcaatgagtatcttctaaaggtgcgttctctaatagataaactcaattctattgggcataaaacttcaccaaaagaacacattgctgctattttttgtggtttgccgtctccagattacgacacttttgtcatctctgtaaattcaggagttgaacctctcgatgttactgcccttgaagctcttcttctggctcaagaacatagaattgagagaaagaatagggatcttgattcagcctctgtcaatcttgcaaactccaattctcgatctcgaagcaactctggctagccgggaaacaatcattggaatctgttatcccaaattttacactctgacgtggcatcacgagaatggtgacacgtggagtccacttggaacatctgctcggggagataggccgagcaggatgcctcgctggcatgtcctgagtaagatattcagcgatttgtgcagagcaatcaacacttagcgaattcagctttcgcatcatgagtcatcagctcaatccctataactcagggatcaatttacgtggatacgacatacacacgatcccactatcagtgtactcagtctcaatcccacgatccttgcattcagcattgatcccac

SEQ ID NO: 384341 - DNA, 1614 bp, Cannabis indica
aaaaaattattaaatattaaatgtaggtgaatttaaaaattattactatattaaagattatcattaatgatcaatagaaaaaatgtatattgaaaaaaaaattatatttattatgtattaaattacaatttttaacacatgtcaaaaatttaatgaaataaataaataaaggctaccaagtcaaatgtgaaaccctttacgtatgaagatttgctacttcactatattacttccaccccacccataactttccaatgaagaccaatatacaacaaaataattgatgttttagctaaaaaaacaaaacaaaacaaacaaaataatgttatgtttgttgttgaaattagataaatattattttaaattttgtgatttataaaaattacattaattagacttcttatttcgtgaaatgataaattaaacttaaaatgatacaaaatattattctcttcacgagctaattttttttttttttgtgaaaataaaacttaataataatctaatctaaaagtattgtgataagattgatatattttctgtatctgtttgtattaaaaattatcctcaaagttggttatattaaaacaaaattgttaaagattaataagctcgggttaccattttggaaatacatgtctaatttgtcatttaataaaataaaaagtctattattcggcaactttttcaaaacaaaatgtgtaaaatagtattaacccttaaaaatatagaaaacaataataaacaatttatattataaaaaatatctattttaaccaattacatataatttttttttttattttttttattttttgtagaagatataaatctatattatttatgatcatagctatatttgtatgattaaattaacaataaatctatattgggggtatgggtttatgttcctttatccattttaattaagttcttctagccaaacaagcttggagaatttttgaagatccaagtacactaccgaccaaagtactgaaagcatgatactctcgagattgagattttctcaatgccgaaaaagaagtcatgccctctctcacttggcaaagtatttgtgatagaaaataactatcggttaaggatctttgctagaaaatggcaaaaagtttggatgtgggggatactacctcttcatcgagttctcctcgtaagtggtggaataggttttggtcattgaattttcctaaaaaaatcaaaaaaattgcttgaaaagttattaatgaagctatccctactgttgtcaatctcgtgcatagaaaaagtttacttgcattacaagcaagtactgatttatttaaatgtgatggagcaaaagaagtatggaatcaaactcagtattaagtgtctttacaaaatatcagcaaccttagtggtcacgatatatatctactcaaatatatatagcagcttctcataacgattttatattattctgaaggagcaattgttcaggtattattttagctatagatgtcattgctgcattttcaaaattcaattttgagattgctattcattaaaggagatggaggctactacatataatgatttaccagtataaaatgggctctttcaaatcggttggacatgtca

SEQ ID NO: 384342 - DNA, 1323 bp, Cannabis indica
ctctctctctctctctctctctctctctctctctctctctctctctctctctccttttaacatgtgatttgattttttaggaagaaggtaagaagtgagagaagaagaaggtgcaagtagaattcacaattttttgtttgatggtaatctatttcttttctaattctaaattaaaaaaaaaatcaatatcaaatacgtaatgtttcagcaacgaaattgtaactgttacttaaatttttgagaataaaagtgtcagaagaaattattatgttaacaagttttcatatcaataatataatgcagagccaatccgttcgccaagaaggattggtatgactgtgacataaggttctttctctcttcaaccaaagacaagctgtcaaaataaattgaggagtatattagatgatctcctagttttaatctatgatattttatacttatttttataggaagagatgatattaactagctctgaattaaacttcctcaagtaaatttcgttttgtagacatgtaaacaaaacaatattttctgttaaatacaatgttaacacacacaatgtatttgctggtctgtttttttcttcttccaattatgtcatgtgacttgtaggggacaagagaaaagaactttttgtatgatattgttgctaacagtcgtaatggaattgatgttgataagttttatctattattttactttttcacctgtacactgtgtagtattatttttaactaggtaaattcaattaaactccaaattgttattcagatatttaacaccttaatgttgaattgtatttgtagtactgatgtaaaaatgatttttgtatttaggtttaattaattatatcctccatgactcacgaacctgagcctgtgttcttggatgcaatttagagtatgccgttgtaattagtttcactaacacttaaatatttcaagtaaaaatagcattatacatgagtatgtcacaatcactcccgcttatagggtccgacatctttgttgatcacacttctggttgggtcaaggctgtgataccatttgtaacgtcaacgcttcaagtctctattgggcgttccccctcgaaattatgactcttatacatgaatacatcactctgactacttcttggactaacaattagccttatagaccaatacgactgtttttagcgtgctttgtccttactcgcatgcttcctaggaaaacctcccaagaggtcacccatgctaaaattgccccaagtcaagcacatttaactgtggagtttattcatgatgggttactagaaaataagatgcaccttgttgatata

SEQ ID NO: 384343 - DNA, 1599 bp, Cannabis indica
tttttatacacgtgtgaaataaaaatttttaaataaaatattttcctgaataccaaaaaagatacaagcaaatcaatacaccattatatatattatatatttatatcccagccaattatagaaatattcatatattcaaacttatataaagattttcaaattcaaagccgcccatttgtggagttggagcataagattttgggatcggactgttctcattgtattgcacccattgtaatgatatacatataaatcatgaatcacatgcatgcttggctatggccctctttttttccactacagatttctcttcaaattttcaaccaagccaagtttttctaaaaaaaaaaccccatatatttacatacatgtaatttaaataatttttattttaatatattttatatgttttagtttaatataataatttttataaatatgtcaaaatattaatatacacattttaaagagttttaaataatatatacacgtgtaactaactaggtcacaccatcggctgatcttggtgagcaagtaaataattaagcccacaaaaattataacctacgaaaataactccaattaaaaaaaactataaatatcagattatatattaatttacttgcttatatacatagatcacttacatattaattataaacttatatataatgtagccctagctatatatcctaattaatttatacacattttttcgtgcaagaaattaaccaaaagaacgaatataaaaaaacacaaaccccttaactcattctctctatgactctttacagtatacatacatacacatatatatactgtacgtacgtatacagaagaatatatataagatatgaagcacagcatgattttggtgtcactattattggtggtggtgatggtgttgaacttgagccaagccaaggggagtcgattattaccggccgattgctccattgccagtaataatcatcaccgcctccgtctcagacggcggccatttatgtacgagaagatcagtaggaagaagatgatgatgatgagcagatggtttcaacagctagagtcaggaccaagtcctagaggccctggtcactaataatatgtatgatcacatctcctaatttttttctcttatttccaatatataattaaattttttgtaagttaatcttttttagagagaaagtgtaatttttgcatgatacattcatttatgtttatattaaagtttgtgaatctatttttttttttctttgatatgtgaaatattggaaatataaaatatgtttatatgggtatgtatgtttgtctatatatttgaaaaaaaaaataactttaagacatcaaaaatggtactttcacttaaaattcaataaaaaaagaaaaataggagattctagtaaatttatgagcaatgccaacaacttaacatttgtggtcatgaagcattggaaatttatactaatgaattacaattcttaatgttataactatatataagtgaaaattacagttacgaaaatcacaatttgttgtgaataaatatatttttagtcacaatatttgttgtaaataaaattaaattagtgacaactt

SEQ ID NO: 384344 - DNA, 1039 bp, Cannabis indica
tttgcggatgatctaatcttggttggcaaggctattgtgggggaagctaaggacatgttgaattgtcttaaaaagttttatgattaatcggggcaacgagtaaataatcttaaaacatccatctttttcagcaagaatacctctgagatcatgaagtttgagattagaaatgtcctcaacattaatagtttgaaaggcaacatcaaatacttaggtcttcccttattacgctcaagacacaaggttgcaaattttaattttattttggagaatctgacttccaaattgcaagggtggaaagcaaaaatgttgtccaaggcaggtcgtaccactctcattaaattggtgggtctggacatgcctgtttatgcaatacaaacaacaaagttctcaagttgcattgctacgaagattgatggaatagtttaggacttttgatggggctttgaaaaagaaaactatgaaatccactagaaatcctgagacaagttgtgtctccctaaatcccgtgggagccttggcttccgaaaaactaagaaaatgaatcaggatttcttggctaagtaggcttggaaactgcttactaaatcccaatctttgtgttgaagaattctaagagctaaataccttagaggaaaggatatgcttaagtgtaaggctaagtctgttgacttttggttttagaaaagtgtggtaaaagctaataatatccttagacaaggcgcttgtaaagtaatctctgatgtgaaagatacgaatatttgggaggatccttgaatatctcataataaagattttttttccaaaggtcgttggtgtgccatatacagtgtacaaaaaggtggtcgatctgctaacaaataaagaagactgggatattcaaaagttgcgtatcctatttgataatgaaaccattggtgttattttaaagggggctagacctacgggtcaggggaaagatcattggatttggactaaagaaggaagtggccagttctcttgcaagcctacctatcttatccatgttgggttttatgcc

SEQ ID NO: 384345 - DNA, 922 bp, Cannabis indica
aaaaatgaaaaaattcctaaaaaagaaaattatatactaacgtaaatatattgtatatatatataaattctacaatctatatatataaaagtatattctataaaaattgccaacaaaaataatatatagtaacgtaaatatattacatatatgtagacatatatatattgttagcaatatgagtcacgacacgaaaacataatttgaaaacgatacaaaataaataagtttagatgacacatttaacaattgtatcgtgtccgtatttaagtttttgacatgtttagttattgttttgtgtttgtatttaccttaatcgtgttatgtcaaagtcgtgtcatgttataatcgcgttgacacgataacacaagtcaatttgcatagattccatttttttttcaaaaaatttgtgtttatcttgctaatcgtgttatcgtatcttgttcatatcgtgtgacctgctaattaatcatgttgtgttcgtgtttaatgtttcaacatgtttaataaatatgttatgttcgtgtttactttaattgtatcaatcgtgttataaatatatcatcacgaacacgatatgataacatgaattgcttgtcctaagattataaaaaaaaacgtcgctcatgtaataaaatatttaaatcttattttcgactgtgtatactacttgaaagtttctaaaaaattacaattgaccctaaataattaaaacgtacacaaaatttcttaaaaatctacctaaacacaacattttttaataattaatgtacaaaattatgcctagtatttctcaacttcaatatttatttacccgttttataaattcacatataaattttttaaaattaaataataataataaagaaaatcatctaatatactattggaaaattttataatgtaccccttaaaattgata

SEQ ID NO: 384346 - DNA, 930 bp, Cannabis indica
tcacaaaaataaaagtagaatttatgttttcgataacaaaatgtgcttcacggactagatcaaggccaagggtgagggtctgattcgggactcagagtaaagtttgagttcaagattcgaggtttggagtccgagtacgggtccaagttcgtggctaggacagaggtttgggatttggggttcaggttaagtttcagggtccagagtctgtgtccacgctcgggtttaaggtcggggtcgagtccaagtccaggtccagggtccagggtccgagccgaggccgagatccgagaggggtttagattcaagattcgagttgtgctcatcaagttataagatttttatgtgtcgtttttaggctagaatatttgtgcttatatgtcatctctatgatatatgaaactattcgtgtttttaatggaatttgttaatagaagatcacttggggtaacgctatttatacttgattccatactttttttcgtacttatgaggttaataccgaatttcataaaatgttatatgaatagttttactttttaaatttttcgcaaatattctaattatcttatatggttattaaataattactgttaattaaacttatgctatgtttactgaaataataaatatggtaatattttttattttttgtttgttacgaaatttgagaacttggttaataaaaaagtaaattgtaccataagcccaatagtattacttcgctagtaattaatcccaaaatttaatttttgactgtaaaacttttaaaaccaagttctttagtatttaactcctttcatctatttttagccgttaactgccaagttagatgttcatgtgtacatagaatattgtccgcgtggatataatgtacacatgtcactgtattattagcacacataaataaatatttaaaaataaataaaa

SEQ ID NO: 384347 - DNA, 4517 bp, Cannabis indica
ggcacgtcatttcatccgctaacatcacctagtcaataaaaataccaaatctaatttttttttactcataaaagtcaattttctcccaaaactcgaataattcataaaatgatgaaaaacactaaaattaccaaaaaaacaacatcctctaactatggagaaatcaataaatttagagcctaaaaaactttatcaatagctttgggaataatcaagcattagaattttttagcaaactactttgttgatagataactagttattcaaagtgagcattttaggtatctatttatagtgtttaagatcacacacttttaaatttatacaccctacacctcattactattactatttcttaattgggtgtaaacggacttaaataggtaatttgaaggttatgagaggtgttaaaaattatccccaaacattcaaatgttgacaacataaaaatacagtaattggttactagttacttacccattttttcagcttttttcaattactctccaaatatttcaaatcattctcatttaattttatatcacttatacacattgtaaatgataaaataaatcctcaaacagctataattctattataaattttaatttcaatgtattaagctatgtaatctctatatacacttaattaataatattgtgaaagttacaaaaatgtaacttcacctcatacattacaaatatttaaattaatttgttacattatatatttaatgtgtacaatatatattatttatttaaataaataatatagcagaaacatcattgaaagcgaaaaccaaaaacagacaagtctaaaacatattaacaagtgaaacgatgaaaacctttatatgataaatatttttttgggtagactagcttcttacagcaagtgatgtgaaacgttgaaaaatctttatttgagaaatatggtgtaattcatagaggagtaggagagtaggagtaggttaaacgaaacaagttccgggtcaaaaacatagtgtctgtgattaattggtccaaaaggtacgaaaaaagaatattaatgtgagattttccataatcataataagttgcactgaaaagaaaaggagtagaagaattcaacaaaaacatggatgatacatctgaactgaacaaagttatattggacagatctacaccaacctaatttggaccatttatcatataactattattaataatgcgctggatcaagataataaaatacataactatcatgtcaatcgggtcggcgcatatgaactaaagctacttctttagctaccaatttattttaaacttttttatttttcttcctaaactcaattattttaaacttttgaatcattacttttctacacttttgtctccttccttttggaccttagttaaaatgctaatcaatgggctgctctttttttttttaatcttttttattttaaagtactcccatttaatgttctatgactttattaattaatagagtaattgggggtgactattttatttcttaaaaataaaaggaatggtcgtatgtttggaagaaacctttccatgcttcaaagatcaacagatttgtcgtcacagaaaatttaattgagaaattagaaaactaatttgttgattatgattacatttaaattgtaaaataaattatatatcataaaaaatatgaaacatttgaatgaaattatttaatataaaaaaaatggtgaagaagaagatcaagtgcattaaagatatcctttataaactcagaaccagctccttcaaaatcaataaaagtaatgaaaaaagtgtgataaaaaagaattgagtatagacatagagatatgattaaagattgatgataatattaactcttcaactgtacttctaacgagagctataatcattagcaaagaggcttagtttacaagaaagtgaacctttgccaaaattaaatattgcttcgggagccatccagaccgacatttgcttctttccacatacatgtttttaataaataaactaggtacatataaatatatataatatatcaaaagttgtgcattttgcactttcaaagttaagcaactatattatgactcgaatctaaattctcagtatttatttaccatatatccttaaagcatacatcacattactttgttggtgttcatcttcttaggcaaatctaacatcaaattatcattcaagtcaaacctcacacacagctctacggttttcatttttcatatattagtaacgtagtctatttgacattctaaaatacataatgaagtcctaaaaagcgaatcgaagaacaaaggtgcactagaaacaaaatagatacataagtaaatcaaagtaattaacaaagtattgacataagataagataccattagattaatcaatctactgaaatattataaaggagccaatatcagtcaatcaaaaactaaatcattcaaaaggctgtatgaagattaaaaaatggcacaaaaaggaggaagctaaaaattatagcccatcaatttcatcaattaatgtaatcagtacataagccagcgtccaagacaacaacctttcacaaacttatttcttctcttgaagacaaaggcaataaattaagaagaaaaatgaaacccatatgactagtttctgtgtttcttaaaaatagctttcagcatccagtattgtgtttgttactccaaattattgagcctattcctgtgctaaaatgatgccaattttttttatatttctcatgactaaaaatgggggtgaggagacaaattcaatggagctaaggatctgaagaggaacaataaatagttgaaaagagaaaaggaaaaagtaaaaaccctcaagttctctcctagtaaaagtaaatattcaattgaacttgagtaaaatctgaaatgcttctgcaccttatctcccacccaaagagaaaaattaactaaaaaaaggaggaaaattaccaattagcaggacacttttgtcgatggacaaatcaatcttatagagcctggtgggggagtgagagagaaacaccgtttctgtaagtgtaaagtaaggcaatgcccggaatcagcagcccatcacagcacaattatagacaaagttacccgactgcttccttccaagtaaacgccattcggctggaccttcacctggaacccatgaattcacttctataaaagattcacctgatcttggcccccctatcacaataagccgatccccacaagctctaaacgctactccccagccatgcattgacacggctcgttcaggcaatctccccactgtgaaccaccggttctccaatttgttatatttttttacctccatatcagcatagttagctgcatacaattgatcatttacaactgcaacaagaggtggtgcctctgctgttgcaggcatttcattggctatggcagcacctcttcctggagacatgttggggatttccctccaagttttcgttcttaaatcaaactcctccccacatgttagaactgtgttctcattccctccaatccccccaataacgtaaaatttattgtccatgaaaaatcctgaacacatcttccgcggcttgctcatactggggagtgtctcccatgtctgagtctcagaattgtacagctcggcagagcttaaaatattcccaccggaatcacaaccaccagccaaaatggctctctctccaaggctggcagaaccaaacaagcatcttggagcattcatcctcattccagatgaccaagaatttgtcaaaagactgtatctatgtattacgtgggcattcatctccttaccaaatacaagaagttcagttcccacggccaaggattccttgtcagaacacatgaagcactcgtttgaggccatcctaggcaaatgcatccacctaccacgaaccggatcaaaagcttcccattcaagaagctggcaagagaagtacacccaatgttcaaccacaccattcagtctcctaagcttgtacagctcgccactttgaaataacgacctaaaacttttattcacagaagcaatggaaccataatcagatcttgaacaacgaatcagacaactaatggagttgtcccggccaattcgatggattagggaatcagaatctgaagaattgccagcatggtgacgattattcgatagctcccgggaaccttgtgacattccaagtccctcccaagaatccaatagcttggaagatttcctttgcagctggtcttcttcagagtcgatatctagttgtcgtttgttgttgctgctaccaatttcaacttcaagaagatgataagtcatgcaccactttgtttcaggctggcaagagctcgaaaatagcctcgacaccagacaggaccgaccctccaacatgtctccgtaaaaacccaattgagctttttaaggaagaaaagtcacagaacccaaaatttaatccagttgcctctctctttctctctgtttctccctccctcccccactctctctctct

SEQ ID NO: 384348 - DNA, 1980 bp, Cannabis indica
gctatcaaaagtaatttttctatggcttcccaatttggtctacttgttcaagatatccctaatttatttttagttttctcatatatatattaaattatattttattaaacgatctgaaaataaattggctcattagattaattaacaaaacttatgattttattaaaaaaaaaaaaaaaatcaacattagattggatatcaataatatcgatctccacccacgcggcttatcgatccatcttattgaagaaatcgctcctcgttaccaattacatcaggaaggctcagattacgatagtaatcccaatcaacgactctgaatccgccacatattttcagacaaatttctaaccatcgatatttatacgcccacttattattaacattatctaaaaggaaaagaaagaagtttcaactaatccaacacgggttatgtgtcaccaccagcttttaagggtcaagacaaagacaatgaccaatcttatcgtgaccgacctcaaataacaagtgtcaacacacccacttcgccacgtgtcagccaaaccgacgtgtatagtattaccataataattacactttaaatcgaacgtgtaagaagctagagacatgcacgtaattgagctcttgaagcctatatataaagagcctaacccaactcaaatttcaatccatcacactacaaaaaccacaaatataatcataaaatatcattttttgttttaagaagtttgaaaaatgtctcatttgcaaaaccaatatggggctactacagtaacaccccaaactgatgagtatgggaacccaattcaacatagcactactacaacaggtggccatatgagtggaggccatggtggggcctacgatactactggtggtcctaccggagttggttacggtaccactggtggtactggcactggcacttttgatactggtcttggcggacaccagcaacagaggcttcatcgatctggaagctctggctccagttctgtaagtatctttaatctctttcttttttcttaaaataaaaattctgtattaattaaattaaagtcagatatatattatatatattaaataatattaatattttgatgatgtgatatagtctgaggatgatgggcaaggtggaagaagaaagaagggactgaaacaaaagataaaggagaagctgccaggtcatcatgatgatcaaggtcagcagggtcatgttggtcaaacttatggaacttcaacaactacagctcccggtgtttatgatgagactgagcaccatgagaagaagggaattatggaaaagatcaaggaaaagctacctggtggtggtggtggacaccatgaataataaatatgaacaaaatactagtacttcaacatcttatatatatatttatatatataaagtgtgtttgtttgagttattaataatgatgatcatgatcggtgtgtgagtgatgagtgtgtatgcatatatgtatgtatatgtatatgtattgcttattcgatcgtctgttgtattacccagctgtaataataatatatatgttgtgcttttattattatttcgtttgatcagtattaatatatatacaactgatttcgtgaacctttctctctatttataagattaagtttatatatatataaataaaaaaaaaaagtttactttagtacaacaaaattgtcaaatgactaaaattattaattatttctgtagtatcactaaaaaactgtgataaaaaatattaatcagaaaaaattataatttgtttttttttgttttaatttagttaaaactaaatcagtaatattatatttaagtaagttttatattatttaattactataaatttatattttaattaaaaaattattaaaaataaaatttaatggcattgttcgttgtagttttaatatcatgtaaatttaaaaaaaagctcaaataatttataatgttaaaaataaatttaaaat

SEQ ID NO: 384349 - DNA, 1541 bp, Cannabis indica
caaggcatttatgtatgtcgagatggtgaaccccttatcctatccaagtcaagatctgaaggtttcaggccacctaggcccttgatcatgcctcttatttgatccaacagcgcttgcacagaaggatctgatgctgcagggacctggctgattggcccttcttggatgggctacagccctaaatggaccaaagcttggcaggccataccctgagaaagggtatgctccaggccgaccaacccaaatcctggttgttggctatggtcggccactcctaggtagggagactgaccttggctagccagtcctattctgggcaactactcatggccggccagccctatgctgggtaggatctagccacccgttcttccctgattggttggtgcagcctatgtactgacaaggggtagatcacactaattgctggagttaggtggatctaaatatctgaagtgattagactcacttctcaagttgttatcttggttgtttccacccgttcccaaacctagccgattaaagatttgcctttaggttactcgctcccggatgccccaagacgggagttcaccctataggttggctagaggtacaccagtaaggggctagccggccaaaggttgaccaatcaggggtgttgttgagcctgaggtccttagccgacccccccaggctgctcgttgctaggatctagctgttctcgccactagatatttgtagcaagaattgtcctccttctagcaggggaaggtctatcctggttccagaggaacctggttagatagattgtcggtagacctttcctgatctttcgactagtctcccttggagaggatctctaatgagatcctgacctcttctagcaattctttcatttaactgccttattaagttgctagcttctctattacagcagtctagctctgcctagtaagatcggaagatgtactcttggtcatccatccatctcaaaaatttgcgtctctaatgtgtgaatacattacagccaacagggtgtggttcttcaatttggccgacttggcaaacggcctctctaagtttggctaactcgagatcttctctcaaatctacatggggctcgcctattcctggccccgtctttccagcatagtatcggggactagacccagtcatggtgcctgggggtggctccacgtgggccattccttcagtacgaggtgccagtgggagtcctccctgggcgaaagaggttgatcattaagaccgatcgggttggttgtgtccacctgaccagtcgtggtggccgggttagtggtgcctgaacagatggcaaggttggccacatccgtcgagttcgtggagattcaagttgtagcttgaacacggacatcaagatcaactgccatagggtcttgaggaagacccgatgaggcaaacgttgtagccgaagttctcataatgttaaccatggtgtttggtcagataaattaacaacttgctcttaatgaaagcaccaaactgtcgaccttcgatttggccaaccgacaacagagtcg

SEQ ID NO: 384350 - DNA, 2909 bp, Cannabis indica
tatttgatttgagtctttgttttcacacttacttaaattatttaaaacaattataatttaatttacgaaaacaattataagtacttttccatgtatgtatacattatattatattacttaggaaactttaaagtaattagggttttcttttttttcttttttcgttttttttttttttatttatgaaacgaaacacacacattacaggatagtttaaagaattagttataataaattaataatggtcaacctattaaagaaaaaaaaaaccaaaccattttaaacgataggatagtttgatgggtttgactttataatttaaacatcaaagaattaatgaagccttttaattaaatataatcattcactaatgtgactatatattaatttaattgttatatataagcactttgatactttaattctaatagaccattactttttaaccaataatagctaattaattaaagaataagttagctctataaggaatctcatgcatatatatagcacaatatatatgtataaaagttttagaataagttataatgtataaaatatatatttaagggtatatttaaactagattttgcatttttctatgttattattcttattattattattattattattattattattattattatactcttttcgatcgctttaatatatactttatagcatgctatacatatataagtactgtgtttatttaatagaaatcgttagatataatataatttttttattaaaaataataccataaaatcaattaattaagtatttttttaaaaaaaatgaaatatctaaatttaatttatttattaaaatataaattagataattattttttaatataatcttaatttaaatttgaattagatattattctaattaattaatcatactttataataaatttattagttatattacttaaaatatctaaacttatttaaatattaatttattgtttaataaaataagttgtatatatttcttataaataaattttaaattagattaaattttctatatttaaaaaatataattaaattgtattatatttaatttatattattattatttaaaatatatattaattgttcataacaaccacatatacatagcttctttttgataatgtaataatcccttatttaatttttagtgttagtacacttttctttaagtgcacctctaaaaattgacatagcaaaagataattttagggtttaaattaatatgtggaaattagtgtatgatttatagtgtctttcacgttcatgtattctgttttattctctactttatataaatataaatatatatatatataggaaaaaaaaaagtgtatatgattagtgttgttattggtactattgcatgtgtttggattaatgagtgttaagtttttgtaggctagctaattagttagataattaattataaaacacttcattaatttgcacgcccaaacacagcctatagggattaaataattaatcttcaaacatatgatgaataagtgattttctgactaatgaagacaattaatatatatatatatatatataccatctacatatataatcctattgttaagaccatttatatgctttggatgtagtctacttttttatttgttggttcttttctctatttttttattatggagtaattcataatttttttttataaactgtggaattatattaaagcttaacaagttaaacattgtggtcattataaattaagttattcagtgtggaagatgaatctaccataccagtcacattattaaaaaaagtccacttagccacattatgaacagcaaagttacataatttagaaataaattgaaaactacaactagtcaaaaagtttgagaatagtttgcaatgaatcacatagttactaatactccaaatagaaatagtttccattagcgtgttgatcaccgtctcagaatcactcttattatcacaaacaaatgcttcccacgggtcgctgatcctagggctagcaaacaggccaccacttctccaatgagaggattagagaagttgagaatgttgctagccacccacaaaatagactccttatgatctctcgccaatgccaccacacattgagtcactaccgaccataacgtcacagttaattttgacccaatcgtccatcgaggggaccaaacacgaggcgtaaacatcaccagtgtttgaaaaaatactccaccaaaggactttgtggcattctaagattctagaatttcaaagtttattccaaagagcgagagcaacaatgatgaaggcgctcttgtcaaggcctgagcaagacatgcagattttgtagaaaaaggacaagttggttctttagtccaaatccacttatcactacttttgcccttgggcctaccccctttgaggatattaatggttgtctctgggtcaaatatgcagttgagcattgaaacattccaattcccattatcagtaattagatctgctactttctcccaacccttggagcacccgtttataggatggagatgaaagtcttgacaatgaatcacccatagatcatcccaaatgtttgtatctttcccatttgatatgagcttacaggccctttaagaatttctttagacttcacaatattcttttagaaccacgaatctaaattcttgtacgaacacttcaagaaaggtctaccttgtgacagtcagtagtcccgtgattcgtaaggagaaatactgggtaagctgtgcaatcccacactgcctggggaaggtcaagtgtgatgattctgagactgtataggtatgagactacacagcttaagatggcttaaatggattgattggtacgtactacctatatcaacaaggtgcatcttgtttt

SEQ ID NO: 384351 - DNA, 1504 bp, Cannabis indica
taacaatatagtgtagattttaaattttaataaatataataaaaattattaactataaagtctaaattttaagttaatacataaaatagtttaacaaataaatataatttattaaaaaatatataaattaatttatttatgttaatgaaacggtttagaatagtttgtaaatgactctatatatttattgggtgatttagatttttgttgtagaaataaaaaaatcttggtattatttttttttttgatttctacacatattttctctagtttaatctctgttttattgtattcttctcgagctgctaatgattcgatcacaacaaaaaccttttaaaagtatgtttcataaagatgtaatagtaatgatatttgctccttttaataacaattatggactccatgatttttaataaagttgggttcataaagtttataagttggataaacatacctaatttgttgtcactaataaatcttgtagatatcttaaatttctatatttgtagaaagaaattttttaaatatatattttatttataattttacattttaaattttttaattataaaaatacatttataaaattataaaattataaacatatattttgttcagcaaaaagttaaaaccaataaaaaattaacatcgagataactgtaaatcacctataaaataacaaaaaataattagaaaaataacatcataacatctataatataactatacgtaaagtgtaaaacaactagaaaaatagtttattaattattttactaaaaatatatttttgtaaataaaaaatttaaagaagtaaaaataaaaattaaaagtaacaaaaattaaaatagtatcataaacattggttgatcaattgaaaatattcaaaaggatcaatttatttaattacattttaaagtattataatattattttgattaatcaaatgattttttttatcattttagtggaatggtaactattctttctacaagataaaaaaaaaatcaaataatttttttttgacttttcttacacattcttatttttatctttccatttcattcaaatcccaatcaaacttacccttaaacttatttttaaaatttgtatgtgtagagtgataatttttaaattcgtgacactatttatcttaggcacaaatttaattgtaacatcagtttgccaaccatatctactaaatgcattaataatataattaattattgtgtctcacatagtttaatctaataataaatctaaaataattattaattattcgtaaaacgtcacccgaccaccaccttcgctaaatgtttttttaaattcttttatattatattttgtaattttttaaaaatttatttaaatagtcccccacttaattacttttttactactttaaccccttttacgattttgtccctaacacgtcactcctatttattttagtagaaatgctaaagagtactagtgatgcttagaactttcctaagtgtcaatatcg

SEQ ID NO: 384352 - DNA, 3061 bp, Cannabis indica
aagtgttcgtatccttatgtgtatgcttctgatcttggagaagtttataagcgctttttacagaaaacacacctgagctttctcctacccaagaccatgtgtcgctggtagcatttggactgaggggaattcctaaaatcatagcagcttcatggttgttaaacgtatcgtggactagatccgtatcccaagtccggttatcaatgtgaaagagtgagctgacttgttaattcactaatttaggatgattagttgacacataagggttttgtgaactagacaaccaaggatgttgtaaaatacttacactataattaaacacttacactataattaaggtagttaaatacttagacgtagttcatggtctcatcaaaaatctaaaaaatgaacaaaatgaaacatatttataatgattattatagtttaggaaatttttttaataaacataataataagttagaaggcaatactcttaaaagcaaggagacatagataattttaagtttaggtatgaaaaaaataataaataaatttgtaaaatttatcgggaattatgttaaaaaaatatgataacttttagcgcaacaaaataataataaagcaaaataaataaatttattcggtttggtaaaattaccaaactcacgaaaaagatatattttcacttattacttatactctctattttaatcttttcaccaaaatctcaatacaccatttacttcttcctcactctcaccacacaataacaaattcacactcacttctcttttcaaaactcactctttttctcacaccccacaagaacacacgtacatatgcatagaaaaaatgaactttggacggcttaaggatcaagtcattctaaaacttccttaagaatgttattcaaaacttagccaataaaaatattttacacattaattatccaaaattaataaaataaaactaatttgaatcaaatatctccaacaaattatttgtatacaatttgatagttaaattctttatataaaaatattctaaccttgagggattagtgacattgctagttaacataattcacttgaaactgagagatttttagagtgggaaagttaatgactcaggcgtagtattgttttagaatatatgcacaaactcatatttcttaagatccattcttatggaggcttgctagtttagaaattgaccttttgtcatttatggaaagaagaagataaatcaaatgcgggtgtaaacaatatcattgttttttaagattacttatgcaacaactcatcataagaaccatccacaacattactcatcacataatcacagctttgtgttatcttaaattgtagatttacataagtcaaattctcctcacttggagattaaccccatgttctgattcgatgaccaacctgaaagctgcagaatggcggtaagccggtgagactgagaaacaaaacttggacagaataagagataatactactttcagttctgtcatggccatgtgctgcccaatacaaattcgagtccctataccaaagggcatgtaagcctgaggaaacttggaagctccaagaattccatgctcaaatcttcctggattgaattgttgggcatcaggaccccacagattagtgtcttgttgcatcatagagattggaatttgaatatttattccttttggaactagaatgtctttaaattgaacatcctgcaaggcattccttacgacataaactccaggcgggtaaaggcgcaaagtctcttgaatcaccatagtgagctgacaagaaacttaaacagttaggggaaaagtaaaaaaaaaaaaaacattcattgtactgaattaagcaggggtttttagtaacataaaagtgactgactgaacattgtgtgaacttacaactttcatgcttcggagcatattggcatgaggacttccattcttccaaacttcttccacctctgcacgaacgcgagtttgccaagctggataagcagccagcagcaacaaggcccaagatgctgtagtagcagtcgtttcatggccagcaaaatatatactcttgcagttatctacaatgaatttgtcatgagtaaggccaactgatgggctatctataccgccacaagcttttgccccctcaactatcatctgcaaaaggtccttttcatcagcagcctcagttctttgcttcaccacctctaaaatcatagcattgatttgtttctctagtctccacacatgaatgttgttcattgttggaatgaatctgatttaaatacatttgtatattacaccaattaagaatgttgctgctcacataagatgaaaatattaaacaatgatgacaagaaaaaaaggaaaactaaacagataatcttaccttatgccaggaatcccaatagttcttttggacatcaacttttgaagagttctaagctttgagaaaatttgctccccttgtgaataactgcttccaaaacaggcttttgagattatatcagcagacaagcttctcaaatcatcatcaaccttaatatcagaaactcctccctcatcttcaattttcttctcccaagatcttatcaaggaatttgtagagttcaccataagttccaccatacccttgacaaagacacataacagaaattaattttaattgaatttaaatgcaaatctccttttccaaggttaacttttagagaaacatcattactctaaagtcaaatccttaccaaacagtaatgaaaaatttgagggaaaatggctcaaagtataattaaaacaaacaaaaagctaaaaaaacctgacttggtaagctaacattatattgattataccttgaccttgtcaatgtagagttcaggagcaataatctttttctggtgagcccaaatttgaccactagaggatataataccctggccaaacaggggtccatgattcttggagagataagaaggttttccaagacttaaagaagtgcatagactaacttctttcaccaactctatatctgttatgcataagaattgaatatttcctactgcataa

SEQ ID NO: 384353 - DNA, 3034 bp, Cannabis indica
tcaacttcattctaaatttgtgtggttcaaataggtactatctatgtaaagttgttaactttatttacatatatatttcattcaagaaaaccaatgttatgattttcacttgtaaaccgtgttggttgattttctttgtaatagcctattggcttgtagttgatttttttattattatttaatagttgctggttaagacaccaacaaaattttgttgaaatttgttaacttccatgtaaaatttctataattagatattcttatcacaatagaataacatcccaactcccaagccattaattaatcattcgaattgttctgatcaactttgctgtctacagattgctaggtgcaaaaggcacaaattctaaatgggtgttgaagtagaccaagaatcatccacccaaaatgatattccaacaaaatcattattacgatacaactctcccctggtgcaaataatcttaattggcctggtttgcttttgctgccctggcatgttcaatgccctctcaggcatgggaggtggaggccaagttgaccccacagcctcagacaacgccctcaccgctctctacaccacgttcgccatctttggcatactcggcggtggcatatacaatatcttagggccccatctcaccttactctctgcctgcttgacatatgttctctatgcaggctctttcctttactacaatcaccacaagaaccaggaatttgccattgccgccggggcccttcttggtgtcggtgcaggccttttgtgggctggacaaggtgccatcatgacttcttatcccccacctgatcgtaaagggacatacatctccattttttggagcatcttcaacatgggaggtgtcattggtggtctaattccttttattctaaactaccacagaactaaggctacttctgttaatgatgctacttacatagctttcatgtgcttcatgaccgtaggagctcttctttccttggctattttacccccaaataaagttgtccgtgatgatggaactagatgtagtaacattaagtactccaatgtttcaactgagtttgttgagatcatcaagcttttcttgaactggaagatgcttctaatagttccagctgcttggtctagtaattttttttacacttatcagttcaataatgttaatggggtgttgtttaacttgaggactagaggattgaacaatgtgttctactggggtgcacaaatgataggctcaattggaattggttacatgatggattttagcttcaagagtaggaggacaaggggttttcttggaattgcagtggttgcaattcttagcactgtgatttggggtggagggcttgccaagcaggtcgagtacaaccgagaagatgcagccaaagacgagtttaagcggttagattttaaaatgtcaggtgatgatttcgcaggaccatttgtcttgtattttagctatggtttgttggatgccatgtaccaaagtatggtttattggataattggaactctggctgatgactctgaaaccctgagcaggtaacacaatataattaattctatatttaaaattatgatatatcagtaataagattgtagtacagtaagtagcaacctatatttgataaacaaaggcacatgggtaattcagatagtcttgagttatgtgataatggcttcaagggcattgatttcaatattgtatcatagcttaacatagtgttactcatgtgcttgttaattaatactcctaatgagtaatagggtagtactgagttaaattttgaaaacttttaaagtagaaaatacaattttttttttttttttccttttgtttattcacttgttccacaggtatgttgggttttataagggagtacagagtgctggggcagcagttgcttggcaagttgatacacacaaagtttctttcttatcccaattgattgtaaattggtcactcactacagtgagttatccacttctggttattttggtgttctttgctgtaaaagatggtaataaatctgaaggaggagatgccatagttgacactcctgtatccaataaggccattcttgttcattgacaaacaaggaaccttgaggaattttcatgttattagcatagatttttcattgttttcctattttctacctcttacacatatttgcaccatgttagccaaaagttatgaaaacttttaatacaaacaagagtgatgtaattttactaatgaaccacacaaatcaaaaggttttacatagctagcaagagttaaaaatcaaaagttctagcccatatgtctcccaagctagattattgctgtacattttgctttaacttattcagttttctttattttatcacattcaacttgattaatccaatatgggaaaaattatagtacaattttaaattgatgtataattatggagaggagtgtatgattatcaactttgaattaatcgatttaggccacacaaagtacccttatgtgtattgtatggaaaactaaattgtatgatataatattatttttatagagtactatgtttggagttaattttattaaaaaataacatattaaattatactatattttttttttcagaaatgatatgaattactttaaaaacacacaatttagacattaacgattctcaaaacgattctcaaaggataaccaattgtttagtcaaaagacatgcttagcaaaataaaggaccacctgttgaacgataaattttaataacaataattattattattattattattattattattattattattattattattattataggaatgggtcagtcaaaaaaaaggaagagaaaattaaggagatattttctccacctccaccactttcacgattaagtgaactttatcaacaaaaaaataataaaaaaaattggatataaagagagagagggtggggaacggttggagaaaaggagagaaaagggttttgaaaaaatatctttggcaattgatacgtaagagcagaaacagaga

SEQ ID NO: 384354 - DNA, 1096 bp, Cannabis indica
tatttaatatctttaaaaattaatactattgtaaatgctattaaataacactctaccccggtgatgagtgtatccaaatggaatactaattcaaaaaattcttcaaaaccccaaatgtctcaaaattcaaatcacaattaaacactactcaaatttcacaaactcatctaaaacatattattattattaacaaatttgatgttaattatatgtaataaccattaaagcacacataagtaactaaatacgacaaacaataacaatttttgcaaatctaaccattgttaaactgtcatgtgatcacataaaactgtactcaacactgatgttaattatatcaaaagttatttgttactatatgagttaatttattagacttgctttatttatttttgtcatttggttatggaaaagttaaactaaagtaaacttagctctaaatttcacaatagccagacccactttggattctaaacactagaaatcaaaagattaaagataaaatgttgttgttgttattagtgctttatttgacatgacatgcttctaaatttcatatttatttgcatttatgttgtttttgtctttattattaattctaacgatacacaactaaaaaataaagaaaatttctaccttaagaggcacagtggaggatgatgggtatcaggggctttaatacacaaattcttttgcctgcctattcttggtgttcaaatatttattggtccattttttttgtgatcttttcagcaataatgtgttgattgaatttgtttttttttttaattattattttatatcttgtattctgcaaaaattactaactgaattttttgtcttattaaataataaaatgtaccttatattttataaaaagataaaaataagaccctaaacttaattataaataattttattttttaatataactaattttaagacaatttataacacgaacaaatacagaaaatataactagttttgtcataatatctttagattagattagtagtaaatttattttgacaaaaaataagttcagggtgttatttacacaattttgaaaatataaagtccattttgtcatttaaca

SEQ ID NO: 384355 - DNA, 1614 bp, Cannabis indica
actattgagattgttagaattctatccaattttactgacgggagtctgatgtgaatgaaagttagtgtacgatttggtacaaaaacagtcgtcacattagtaaaattaaaagaaatttgatgaaattctgtacagcctaaaaggttgggatttggcatttttttcatatcatattgtagacccttccctcatccccatcgttgatatatatgtcgttcccttcccattcccaccaaataatgtaatcttgaaactagttgttgccaaaatccatggcatatatatttacctcctatcaaggtaccgaggttgaatcccagaaccctgacacgtagtgcatgtcagggaaccagcaccatcgcaattgatgcatcgagacacttctttctcatcaccaccaagctccactgttacattcccacttcccaagcaaaatctgcacttttctgtaagaataaaaccactaatccattctcatcactaatccattctcatacataaaacaaaacaattagctagtaccaattcatcaaaaatatatgcacacaactaaattctgttattcaattctactaatgttacaaattataacaactttttagctactaatttccccactattgaattaagaaattagagttataattaatcatggccacttacgggcgcctgaaccactgcatgggaagcatggctgagtgttgtctcgtttcgcctgaagcattattgtgtcataaatttcagcaataattaaaaactaaaaaataaaaggcaataaccactctaattacaataccaatttatactgattttttttttttttgtttgtaaaaaataataagtaataaactcacagcattgtcgatttgggattcatagaagatgggaacgcctataccaactgcaacactaacgaccccaactgatattgccacaacctgtacaatccaattttctatctctaatacatataactaatttttcacatagatattatttataaataaaatccaccaaacataataatatataaaagtagtagtagtaccgtgttttgatcgagatccaaagccctaatgcatggataagacggtggtgagcgttgattattatttctggataatttttgggaagaaaaataagaagtggtgggagtagtagttgtggaaagcttaagagggcaagaaagaaatggagagttaaagcggggaagtgatggagctagtgacatgtctaattagttagtactctcaactgaatatttattttttatttttaattaaaggtgtggaaagaagaagaagaagaagaagaagagaggggtagcaggcatttgagtggtgaagatggaaatggattgaaattttgaagcaataaaagaagtggatatgttgtgggggtgttgcatattggctagctgtcctaaaagtaagtaagttaatttcaaccacaaaataaagacacgaaatgcttaagtgttgtatagatggacgagtgagtgacgagtcttaccacacaattaacacttgcacactttccccggggcctactactaccaattaatatgggaaatttacaaaaatactggaattttagttaacttttacaaaaata

SEQ ID NO: 384356 - DNA, 743 bp, Cannabis indica
aaaaaaaaaagcaattttgaagtgccagggcgtattagtggtagtactacaattattattttaatttttacgaaagttttgtatagttgccttatgcgttcctcatagacttcgattaaatttaaattgttttgttggaaaaagaaatggtttggtggctggtgcatgtatgtatgtgtgagagatatatttatatatactagaaaggtacctcataatttatttataatttcttgggggtgctataaaagtttcttattagtacttgaatcaattcatttgtctcctgatatagtatgaactgaactacgaagaatatgcttagtttcctttgattttatcttcgtttgcactttgcaccacaggcttaagaaccatcttaaaattaaattttattttagttggtttgtatttctggtttatcatcctaacatttactgtccttcacgcttaagtcatcgtttcgtttgcaatggtcaaccatttattttaggaactaataaacagaccgaagaagtttaatttttttttaaaaaatatatatatctatctatatcaatatatatctattctaatgtaaaatgtggctatataacagaattcttgtttatgagaaattatttgatgaccttttttgtaaataaaaaaaataacaaattattaggtgttgccacgtaaagggtcaacattcatagttagttaaacttaaatataattaatccaaggcgtttggttgggaggaa

SEQ ID NO: 384357 - DNA, 2039 bp, Cannabis indica
atatatatatatattatgaaagtcttactaagatgttggccctgctcactcagagagttctatatatatatatataggtgtgtgtggattatgctttctgattgagccgtgccaatatctctgttgtctttcatctttctcatgccatcccatttatcaactgaattactctcttctctagtgaggtttggatctttgatttttgtacataaacacacacacacacacacacatatatatataaatgtacctaagtatattgttttggttctgtgaaaaatatttatatttcccatgtaaatttaagttaagtgatgatccctgaagattttgatgttcatagatattattatatacacatgtttgtactgaaaaattgtaagtgtaacgtttttctttttatcttttatttttttatttttttgctgggtaaatgtaacgttgattagagatagaattgtttatattgtactgccatcaattctatatacgaagaagaaaaattttccataaccgtgagaaacatgttttgttatcaaactattttattttgaaagttcagctgtttagttcagatctcctaaggagagctcaaaattaaagggtgtggattctaaattagtgttgaaccttttcatataattcatgggtattgtttttgtttttctcttgtgtataagttcatacatatatatatatatatatatatatttatattgcattttgcaggtaatcaaagttggtgtgggaatagagagatctctttatattatcttatattggtttttgtttaaattttaggaatatcaagcatccttaattgtgttctttaatcggatagagtatgtatatatatacgtatatatgaagtttacctacttttttaattttatatgtacaaattacaattataattccattgtttatttaaatttccccttttaactataaaaatcattgcaattgttcatctttagttctatttacattcataaggtctatttaactaacatacacgagttgaaatctagttgatttattaacattatacaaatattagtttagagaatacttatacatattctattttttatctcagctcttaaattggggtaaattagcatcatattagtactgcatcgataataatttatgggaaatttacatactatattgacttttgccatttttttttactaaaatactgccagaccattattttttttacttttttattgtgtatttttataagtttcatagtactgtagtatattgtatttattttttagtttttttttgtttgttttagtattgttggttgtgtttcataatttattttttaacgtcgattttcagtgttcttgttccatcttgttaaaattaatgattgttttctgggtgttcttgtggtgctatggtggttttatccgtgagtgtggaagatggatgctataaaatacatttcttcttctttctctatggttatttttgtagttattttttttgttttagttctccaaaaaatacatttgactagctcactagaaaaaaagttttgaggtgtggttcttttatgtttttctaattgattatatctgcttattgttttacatttatcattttgttgttttattagcttttttgttctgattttttgagattggtcttgcaaatataattgctattgcattgagtattgaggatgtgcagaacattttttagtttttttaatcatgtattcctttcttttgtttgatttgttttagtattgttttacagttgtttctctatgattatttattttacgtcgattttactttttcttttttctcaatctcacctcaattaatggttgtttttcgattgttctggtgttcctgtggtacttctgtcgtgagtgtggaagatagaggcctttattttttttttttttttggtatttacagtataaaagaaaaaaaattggccaagacagtataaaaatagtttctaccgtgtggcagtatttttgtaaagattaggctaaaagtcagtatttt

SEQ ID NO: 384358 - DNA, 1245 bp, Cannabis indica
atcactatatatagaatttctctagacctaggtatttcctgccgctagtttcatcttagtgaattaggaaatggcacttcttactattcaacatctcataaggatccatccatatcatactttgataattgttgttgtacgaaaactctatcaagggtagacacttgttccatgaatccttaaaattcatcacatatgcttgtaacatctcttttagtatctaccatcctttagactggccatcttcctagggatggatagttgtaccgaattcaacataatattcacggtcctttggagattttcttaaaacttaaaggtgaacatcatatccctatccgaaataatgaactttaaaagttccatggagacttacaatgtcctttatacacaactctgcatactgatctacaatccatatggaatcaaaacatacatgtgattctaggaaatcgaaccacaaaatctattataatatctttccacttccactcgagaatttttataagctgtagtaagcatctgaatacataatctatcacatcattttgcatataacatcattagtaatagaatttcaagtcttggtacatcttggtagtaccaggatgtaatgatcaggaaatgatctagggtttcttttttgagctcaacactacttgagacacgaactcgactttttccattaacttcaaatccatcaattgatcacttttgattttgcctaataaatccaagtgaagtgtcaacttgttgagtttgcccaacacaaactcaatacctgacttcaccatgacagtcgctaactaaagagaaatgttagttgtgctgtcaacttgcctgggacccttcttacttagagcatccaccactacattggccttcctagggtgatagagaatcttgcagtcataatctttaactaacactaaccaccattactgtctcatattcaaatctttctgagtaaagaaatatttaacatttttctctgtagagatagttttgacaaatcttaagaacactaggtgaggctacacgtgcaatgcacgtgcctaactcttcatgttcaatttcatttatatttttgttaagtttttataacaattgtaatatgaatttatgtaattttctttttgcatcttaattattgtgcaaattataaatatatattttattattatattagagataccagtataaggaacaaatttcaatgggcattatagactatttgaacattac

SEQ ID NO: 384359 - DNA, 4263 bp, Cannabis indica
atgttggagaaaggagatggcattagagctttggtgaaaatgtctgccaaattctgttgtgaagagacatggagaagtttgagggagccttgctgaattttctctcgaatgaagtggcaatctatctcaacatgtttagtgcgctcatgataaacagggttctcgctgatgtgaattgcggctgtgttgtcgcagtagagcgttgctgggatttttggagagatgccaaaatcgttgagaagggcaaggatccatgtaacttctgatgtcgcatttgccattgcacggtactctgcttcagcggaagaacgagagacgacttgctgttttttggatttccaggaaacaagagattggccaaggaatatgcaaaagcctgagacggatcgtctagtgtcctggcaggcagcccagtcagcgtcagcaaagaatgaaacctgtacatttgcctcagataggctggtttctgcataggctgagatggtgggagaagtattggcagggaagaagagcccttgtcctggagtggcttttagatactgtaagatgcgatttgttgcctgaagatgagggacacggggtgcttgtaggaattgactcaaatggttgacagcataagtgatatcagggcgtgtaatggtaaggtatatgagtttgccaatcaagcttcgatatgtagttggatcagctagtaaggcccctttatccttgctgagtttgagattgtattccataggggaggatgctggtttaataccaaggttgcccgtgtcttttagcaactgtaaagtgaaggggcgttgagaaacggagatccctttgctggtgcggcctatttcaaggcctaagaaaaatcgtagagaaccaatgtctcttaacttgaacttgctgttgagagagagtttaaaggtagatatggtagaatcattgttgctagcaactaagatgtcatctacatatattaagacagcaataaacatgtgttgagatttttttgtgaaaagtgaattatcagaggccgattgtgagaagccatcatggatgagtgtggtgcttaattttgagtaccattgtctagaggcttgttttagcccatatatgcttttttttagtagacaaacagagtcggggggagcattgtaaccaggagggattttcatgtaaacttcctcttcaaggtcgccatagaggaaggcattgtgaatatctagttggtgaacattccaattattcattgcagcaagtgcaaggaaaactttaagagtgttgaactttgcaacgggagcaaatgtttgagagtagtcaagtccttgtctttgattgtagcctttagctacaaggcgagctttgaacctttctacagccccaaattggtcatacttgactttgtagacccatttacaacctatggctttttttccaggtggtaatttggtgactatccaagtttgattcttttctaaggcttgtgtctcagtgtccatggctttaagccagtgggtgaattgagatgcctcagcataattctttggctcgacttcagaataggctgccagaacagcagccctaaactgaggactgagcttgatgtaagaaagaaaaggctcaatagggtgagctgtagatgttgtatgacaaacataatcttgaaggtgagagggtgcctttgttatccgaccagatttggtggagggttctttaggaatatctgaatatggaggtgaaggagatgtgttgataggtttgttagatggtagtatgacttgtggaaaacacaagtcaatgtcagagttcggtgtgtgtgagagaaaaggaaatatgttctcatggaaaacaacatctctagaattgtagatttggtttgtttcaatatctaacaaagtgtaagccttcattccatggggatatccaatgaagatagaggcatggcttctaggagtaaatttatgtctttttgaagccaaagtggagccataggcaaggcatccaaatgtccttaggtgatcataggatgggggcttgctataaagtagctcatatgatgtagtccctttgagtaaggctgatggggttctattaatcaaatatgaggcggtctgtatgatgtaagaccagtaagaaagtgggatgtttgaatgaaagcagagtgcacgagccacattcaaaatgtgttggtgctttctttctaccaccgagttttgttgtggtgtttccacacaagagtggtaatgttgaatgcctttagaggcaaaaaatgagctcatgttgagttctttggcattatccgatcggacagctttaattgttgcagaaaactgagtgcaaatgttgttaaaaaagtttatgaacacggtttgggcttcagattttgttctgagcattagtgtccatgtatatcttgatttgtcatcaacaatggtcaagaaatatttgtatccttcaacactaattatgtgaaaggggccccatatatctatatgaagtagatcaaaaatattttgagcaaaattattgctagaaggaaatggaagtcttttttgtttagctaattggcaaatagaacaatgatgctgagattgagatgtaaaggaagggtcaatctttttattgaatatgtttgagacatacaaagaggggtgaccaaggcgattgtgccattgatctacattattctgaaaaataaaaggagtagattgacaaatatttgccatagcagatttttgttgttgcagcaggtataacttgccatttcttttagcaatcccaatcacccgattctgagagggttcctggattatgcacatgtcaggtttaaaggaaacaagattagtggtgttgtccacatatgctgtaacagaaaataaattgatcttgaaagtaggaacatataggacattatgtaaaaaaatatctggtgttagttgaacatttccaatagcatgaacaggtatattggtattatttggtaaagtgacatgtttaggaaatggaattgtagaaaaagaagtgaaatgacctatattggagcacatatggtgggtggcaccactatcaataatccaagatttagagagattatgtgtgttaccagccatatttgaagcagcagcgggaacttgaggatcggctgatggagcattttgggtgagttgttgactgagaagggagattagctgctgacattgtgtggacagatcaatatgaacttgattagtcgaaggttctgcagcagtgaggttggcagaggcttgaggagccaagtttttgcctttgtcatttttcttttatctccataacctgagggaagccatgaatgaaaaaacatttatctaccaagtgacctggttttccacagttggaacacgacggtcttggtttcttgtttcttggaggattggttgatgaagaagggcgaaccgaggaagcaagggcagtgatattggaggttccaagagttcgttgacgctcttcttgaacaatcatagagaagactctagataagttgggaatgggctcattgagaagtatttgagcgcgaaccgaagcataagactcgttcaacccagttaagaactgcaagacttgactctgattataatggtcaagaaacactttcatagcaccacatgtacatggtgtgtttggttgaaactcttttaactcatcccatagggatttgagtttggtgaagtaagaggtgacggattgatcaccttgatgcaagctagtgagctgtgtttgcaattgaaagattcgagggccattggcctcattgaatctttcagcaagatcttgccacatttcagcagcattatcaaagtacattatactttgtgcaatatcaggggaaacggaattgacaagccaagacattaccatattgttgcagcggagccaagaattgagggaattaccagcaatcggacgaggaatagaaccgtcgatgaaggctgttttgttcttggcagcaagagccatggtgatgccacgcttccatgactggtagttagctcctgtgagaattgaggacaccaatacgagacctggatgatcgcctgagctgaggaagaaagggctggacgcgtcttcaatcgaaccacgatcttgagatggacgagagttgttcggagatgaatcaggtccaggctgaggtcgagttcttgaagatcgacgagggacagcaggaggttgattgggaacagatgcaatatcggggatggcgtcttgttgaagctgaacaggatcagaattggatgggagaat

SEQ ID NO: 384360 - DNA, 1079 bp, Cannabis indica
tttcaaaaatagtacaatacttatacatgttcatattcttatttatatcttcatcactattaaaatttttacttttagtcaacaataaaacttgtgaactaaaagtaaaatagttgtgactaattaaaaatcaccatttttatatatgttgtgactaaaaagtctgtagcaaaagtattagtcacaaaaaccacaaattgttgtgactaaatgtgtttttagtcacaatacttgtgactaaaactaaattagtgacaacttgtgtccaaatattatgttttagtcacaagtaattttttgtagtacttttatcaatattgtgagcaaagaatttaattgtttgtgaaacataatttatttttaaattttttttatatatatatattaaaataccagataattgggataaatatatgccaacacactaatgccattctgctatgtatatttttccttttaaaaatctcattcgagatagattagagagagcactacaacaatttaaaatattaagagcgacacatttaagggctacaaaaaatcgcccctaatagaataagtattatgggtgacaaaagagtgtcacctttaaagaaacttaaattttttcagtacagtattagaggtgacaaatgtcacccctaaaagtattagacgcaacaagctactattagaagcgactctaataaattgaaaattatccattgcccaaagataggaattttcctgcttatactataggggcgaaaaaagtcacttctaatactctaccacctgacacattcaaaagtcacccctaatggtcgctcctaataattttgcatttaaagctcaaatctccttccccgacccattctcttccttttcccattttttatctgaaaaatctccattaacgaccccgatcccatgaccacgaacaagaagaagaggaggaggagagagcaaccattaaccaccctgatctcgagaccacgaacaagaagaagaggaagaggagagagcagccattaagacccctatagcaaagtttgtctttttactttctttttgttttttaattttttagaatttttttt

SEQ ID NO: 384361 - DNA, 673 bp, Cannabis indica
agactctgactactagctgcacatacaataccaaaagaaagtcactaactcggttatgtttttactagctctagaggttgtgtaagttgaaaaattcgaacccgtaaaaggtgtagcactctacaccaactgaggcagatatatgactgacaactaaaaccattaaggaagctatatggatcaaaggtctgacaaaagaaatgggatacaattcagacaatatcacagtgtgacaaccaatgtgcactctatttgatgaaaagtcctatgttccatgagagattcaagcatatacatctctgatataaagttgtactttatatcagagatgtatatcttccaagatagttggggtgaagaagatcagtacacatgtcaactcaactgacatgtgtactaaaccagttacaagagaaaagtttagacttttcctaaccttattgaaaattgaaggaaaatagatgtctgttcaaagacactcaataattgatagaacaaccaattctttatttactatttttattcatttagctcacttttattgtaacgccctaaataattaggcacgctacccaaaatgattatgaaaccctaatcccctaaccgggattactaattaaaaatagcgcataatttaaacttttacattaaacagactgaaaataaacttgta

SEQ ID NO: 384362 - DNA, 948 bp, Cannabis indica
tcacactttggtgatgaattgagcgatacagttcgtcatctcggcgtgcaagcttaacaatgccgactcatgacatggaaagaggctgcacatcaagaccactagtaggctcatcaagaaagagaagctttggctgagttaagatttcgatacatatgcttactcttctcatttgtccaccactaaggccttttacactccaacctccaattcttgtatccactgagccttgtaaacccatctctcgtattgttgcctcagctctttctctcttctctgatgttgacattgaattaggaagttggagttgagctgagtagtaaacagcctctcttactgttagtgtggtcattaaactatcatcttgtgtcacgtaggcctaataaagtcatgataagtcaaaataatactatgttaagctagactcatttatcatggttttctaatggataagtgataataacaatacatgcattttgcttaattcttaccgaagtaccgtaagcaagtgtctcttttcggccattgataagtatctcccctgtttgcttggtttgtgaatttagtctccctgcaattaaatacatattaatatatactgctctctatctttggggtcttatgaaatccatcaccttattttgaggtgtgtcatacttctaattggtttttcaacctgatattacacattttttatgttagagaaacaatattttataaaagaaagaataatttaaagcggtactaaagtaaattaattttttggtgagatgtatttttagtgaaggaacatgttttgagatagagagtattcaattgtagggtgaagtgtatacgtgtctcttgtaatgtgattagttagagagctgttatttttgtttgagttagttagggagtcctaaccgactctatttgctctgttttgtgtctgtatatatatcctctctt

SEQ ID NO: 384363 - DNA, 1513 bp, Cannabis indica
agtttattgttttttaggttcttctacttgaagaatgctatttggttgtacaaatgtgttttgagcattgaaattcactttcaaattaattgggataaaataaaagtgtaaatgctcttgtaaaccaaaataatattaacagcgcatgcctgaatggattgcatggccctaaataatttagtatgtactattgttcgattaatatatttcctttgcagaaaatcaaagtcaaagaaaactgtgtaattaaaatgggcaaattctgagatagctatttattaattttagtgatgaagttatgttaaaaaactaagcctaggaataaggatcgatgtgatcaaacttcactatgatctctaaccttaatgtcactcttctcatctacatcaccacaaagaaccaccatcttgttatttcgtctaacttcaaactcatgacaagccatccacaaacggcttttgacattcttcatccaaccaatacagctactgctactgccaccaccaccgccaccgctaccaccgatatcaatcctctcgagcggagctgccgcccaacgccggccataagtccggccaaaatagcatgatagcatcgtcaaaacgaatagtactgaaattactgcaaaaaagggaccaatggaaccaaaagaggctgaagcaatagtagtagcagtggtactactcgcttgactagcaggattattattattattatttggcaaagcactttgccctattactgactgttgttgttgctgattattattatttggcaataatgctgtacttgccatggatattatgttgtgaatttagagcgaaaagaattggtgaaattatatatgtatgactaagtgtatatgtaactcttatactctaatatatgttatatatacggagataaagttaaggctataacttttttctctatgggcctttgtcgctttattacgtgcttgagtggaagacaacatggaaagggctaaagtatacgtagaaagtaactttctttatgttaatcgatatcttaattgttgctgctttcatatcctttttttatatattttatataaatgttatagatactacatgaagattacaggcttaagctattcaatatatggtatgtgtatattcaatatatatagggacacgattttgttccgtgatgtacgtttaccaccgaatgtatttcgtgatgtacggcagtcgttaaataagagagttatttgatctgagggttgggttgatctaaggataattagattaattccaatgtattgtgattccacgtgactagtatatatgaactttatttcattaatttgtctccaatttcatctgatgatagataggtgcatattctatcttttatttcgggccaaaccccaagactacgtcaaatttcccattcatgagaaaattaatacttcgggctagtaccctacaaaataaataaataaagagcatttcttattaggcacttgtggtgtctagtaccttttcgacat

SEQ ID NO: 384364 - DNA, 1299 bp, Cannabis indica
tttagtcaaaagttagagattttttatcattaaaaggtagattaatttgtgcccaaatagtaacttatgtatttataacattatttaacctaatataaaatttaatattagtgtatatcatctagtatctttacatattaaaagtgtttatccaaccatatttcttggtttaacaagttttatttttttctcaattaaattaacattaaacaataagtttcaaaaattttaaaataataaataaataaaaatactggccaagtggttgaactaaatccctatttttctaattagttttgaatagagatatttttaaaaaaattaatctaacttcccaaaaatcatggtagaatgcaattacattattcattctcttcttctcttgttattgaatgcgaaactattttttttcaacaaaaaaaaacctcgttgaagtgtgtgacatatagaacccatagccatgcttttagataacttcaatagttaccttgttcaagcatattatcaatagccattacaaatctcaaatcaacttatctcttctatgtattatatctcctgaagctccattaatgcatatatttaaggtgagctattttccttcttattttcctagctttattaaaattgtatcaataatatgcaaaagaactactttcaccagaacacatatacttttagatagacgttttgtttgcttcatatttgcttctttggcctctcacaatcacgccgctatgatgattgtggaaccgatggcgataggcatccacaagagagaatttcatatttcatcattaatgtatgtattgggttttaaaaaattattgcacaattattcaaaagtggccttatcaaagtgcaaggtaactagatatttgatgtaatacaccaatattcaagtagagtagaaatttttatatgtgaaaattacatgaaatatgagaattttttttaaaaaaaaaagttacagaaatatagtatttttaagtttgtcactcttctatggtatttttttcacatttaaatttttttatggtattttatatgccatatttttgtaaaccaaatatctaaactcatatttcatgtttttgttttttgcttaattaattttatttttgagattatttcacaaatacataaaaacaacaaaaaattacaaaaatacgattttacgaaattttaaacatttttatgattttttttatttttatttacagaaaatacgatctttttatgttgtactcttgttaatttgttgctgattttttgttatctgtatgttaattttttgtt

SEQ ID NO: 384365 - DNA, 1235 bp, Cannabis indica
gagtcaatttattctagttctatcaaagaacttgtagatttgccttaagaggtaagacttattggaaaatggaattattagagaaaacgaggagtggacgataaagtaaaaactttaaagttaggatcgtaggtaagggctacacacaaagaagacgtggactatgaagaaatattttcacttgtggccatgctaaattccttccgcatgttgttatccattatcaatatttttcaatcacaaaatttggaaaatgggcatgaaaatgatatttctgaatggtcatcttgacgaaagcaactacgtaatgcaacgagagagttttgtgaataaaggccaggaccaaaatgtttgcaagttgcaatggtcgatctatggacctaaacaagcatctagctcttggaacatacagtttgaccaagccgtcaaaacttatggcttttaccaaaatattgatgagctaaatgtatacaagcacattgacaaagacaaagtatttttttctagtattatacattgatgacatattacttactgagaataatgtagatatattatcagacataaaaaagtatgtttatatgttaaataatattttttttccttaaaacatatttattttgttcctaactttagaagaattttgatttttattaggggtggttttatgtttagttttgttcatattttaggtagtatttatttagtgtgatattatgcttttgcttacttgtttttcaagttttagtgaatataggataagtggagcaaatagagagaaattacttaaaatcagagagaaaatataaactttttgtgttgattttgttaaaagaagaatccttaagagattttgaagattagtgaattttttggtaaaaaatggcaaaaaattgaataaaagtgttagagccataacatggtgtgttggaattttatgccttaaataaaattcaatttcattctaatcttatttacttttaataaagatcaaaaatcataccatgatttagtcatatgctttgttcacatattttatacatgattataggtttaatatgtaagttctattaaatctcgaacatgtagttattcacaaaatagtgatgtcatcacagtaaaaagtaattgtgattatatatgtaacactgtacttgcttaagtacgctacatagtttttaattactgtacgtgcctttgctaatcaaagagtttctcaaaaattgtatcaattt

SEQ ID NO: 384366 - DNA, 1558 bp, Cannabis indica
tgtcaactgagatatataattactcagccgcaaagcttgaaatcaaaagaaaaaagaaactaaaattgagaaatggacgtttttacccctcattcccagtctagggagtagggaccattgtcccttgacgttttaaatagtgatgaagaagagttgacggggtattccagaggcaatgccagaaaggttatatctatatctatttatatatgaacttcaatttgaagtgtgcacgtgcagtgacctccgaatgccgacagtcactgttaattggtcactgtccattttaagtattttcatttttcaaaataaaaaaaggaaaaataaaattaattaattaaattttgtattaccgtcaccagtcagcacctggtgtggtcgagacacacgccccagacgcggttcctccgccgatgccgtggcctctcttccgccaaaatcagaggcacccatgcacgtgacctcatacttcctcccacgtctctgttttttcgtaattaactaaatactaaatatatacgcctgttagtgttaatgtgttttattagaagtttttgtttacttaagaatatttattataaaatagtttgatttactaatactaagaatgtcaatagagtgttttgttgactttcaaactttattaaatttgccttaattttcgttagttagtttcttagtttgatgatttggacattcttggtcaaccttcgatctctgtttttcacttaattttttttttttatcttcaagtgattatattagattcaaagtaattgtaattcatgtattcatatttcgatcaagtgataaatttctgtaattcttatcatggatttttccgtaatattttggtcttcttaatgaagtgagattatgagttctctattattgaaattgttagtcttggaatttggtaaattaattagtgtattatcaaacacgtttaagtagtattcatgtatataaatttttataatctaaattagataattaattatggattaattatctataagattcaatctagctacgacatttcaccaactgaatattcggttcacagaggatattcaaataagttaagatttttgttaatatattattatatatatccataatgtattcttactaattattttactatgcatcactctctcactttatgacaaactttaaataaaatattaaatagtttgttttgccgtgttatatagtaagggcccggggaccagaatgaggtatatatttatatatttatttttgtaaaagagaaacttaatattctttggacacacattgtacgaaagtgacttacgagaaaggttttgctaattgctatatggcaacaatatatggttggttggagcctaattgtaattaaaataataatataggttacttacttgttagagatcaatcaaggcgagtaaattatcagatagtaacctcagtcaaaaagtacccaatataaatacaattttttttttattttgtatgtcaatccaataataaactaacaatcgtcttctatatataatgcaatatacgcaagacg

SEQ ID NO: 384367 - DNA, 1798 bp, Cannabis indica
tacggtttacggtttttttagtttactatagctgtagagtgtgaccaccacgtattattagtctcgtacatctctctctctctcttctgtatattatatatatatatatatatatatatatatatattacatagcaaagggcttatttattactttcttaataatctcatagtcatagaaacttatccaagataagaattatggccatggaaacgaaacctcacgcagtattcattccatatccagcacaaggccacataacacctcttatgaaactagccaagcttctacaccaaaaaggcttccacataacatttgtcaacaaccacttcaaccacaaccgtctcctcaaatcaagaggccctaactccctcgatggcttgcccggttttcgattcgaatccatcccggacggcattcctccgaccgataacaaagccgatgcaacccaagacatccccgccctatgcgagtccaccgagaagaattgcctagaaccctttagaaaacttctcctcaagctaaacgacactacctctgttgatccaccagtgagttgtgtcgtttcggatgctgctatgtcgtttacagttaaagctggtgatgagtttggaatacctgttgctttgttttggactatcagtgcttgtggcttgttggggtatacacagtatgagaatcttgtcaataaagggtttactccatttaaaggtaacaaaatatattaaccatatatctttagctagatctatactactcttttgcaatattataattattatgttaatttgtgttggcttttagtttatagttttagccattagtagtgtgattcgattttacctaacaaaaacgttgaaactaaatgacaaaacaagtacttattattggaccaagtttaactatatatataactatataagcatgtgctcactgattctcactgatcccttcgctgtttattttatctcttctctaaattatttttgaatatgaatatttgtcactatgtggtatggttgtaggtgtttttctgttgaatacatctagagctttaacacgttttcacatgtatttgaaattaatgctgaagactaacaatgttacttaacacccgatttcatattgttattagtctaatttaataacgggtctagcttattttattttaataacaattataaataattactaattatttatagagcgatcgatactttatggtggtaattagatattgtagtacttaatagcagtggtatttatagggtagcgatacacatcccgaccaccttcagatgttcataaaatgcatgattcagtttaatattttgcaaagttcaatctaattcaatttacaaagtacagatatcagtacttgtgcagattgaattaaattgaaaaatttataaaattagtactttgtaggaattggatgttgtttcaaatgcaaaaacatagtcgattcaatcctatttaaatttatttatatttattttaaaaatgataaacttattgttaatattttaaaataattaaataaaattaatgtatgtacacatatttttaaaaacatgatatgtatagaggtggtgtttggacaaaaaaataaaaagttcttttttaatttaaaaatccttttaaaaaagctaagatttgtagttttctcaaaataacttttgagaaattatttttaaaattaaaataatttataaaattcctaatttacttacaaaagattttttcgttaataatatccaaatattttaaaaaatattttttattaaaaaaaaatatt

SEQ ID NO: 384368 - DNA, 1162 bp, Cannabis indica
ttaaaaattttcattgaactattcataatgttaatgttgaaatacatattgttgaaatacatatgacttttgtaaggttttagtttcatatgtttaacaaaatatccatatgattgatgtgtaattagcatatttatactacatgtgccatttaaaatttagttcaagaggatattttcatgttttagttaaataaataaataaaaagagtgttactattaaatatcatgatgcttcacactacttaaagtgataccttataaatagttaacaattttttataattattactaaaataaaacatgtgggattcaatattgaattatatcattagtgttacaacacttaatagtagtgtacactactgtggagtgttaaatccaaccaaatgtacacttgaagtagcttgtaaacaatttttaggacatgtagatgtagtaagcaaaatgagggttgaagtcccttgaactgatgacttttaccacgttaaggtgacactctatcattaagttatatttctttctttgtccccattgaaaaatagacaattcaaaaaatcaacaaggaatgattgctttgagtaggtttaaactctacactaacacattaccactcttaaaaatatatttaagagcatttccaataataacattaagtttcaagactatccacatcatctaataatttattatttattttatatttctttcacattattttttacactcttatctttaaaagtacttcaataagtatgacacacatgatcatttaatatattatttatttttaactcctggttacagatagatacctaaatttaatttttagtattaataatatctaagttatatttctaatttttttgtgaatacctatcactaagtgtcaagttaatatccacatgttattttcttattcgtatacttcaataaatttttaaataaaaattaaaataaataaaaattaaaatttaatgacatggatcaatcaggctaccatgtggtcattaacttgacatttaatggttaagtacttaattccataaatataattcatattaggggtgtacatcaaaccgctcaaaccgctcaaaccgcccgcaccgcaccacaccgcaaaaaaaatgcggtttgaaattctttgcggtgcggttgcggtt

SEQ ID NO: 384369 - DNA, 1269 bp, Cannabis indica
tgagccaaatatacatggatctttgagcaaagaattatcaatttttggtcgaaatccaaaaaactgattaaaagaaattatagagggcaaaatattcttatgtgaaattagcaaacaaaatatgtttcgtaaaaactatatcaaatttaagttataaaactatatcaaatttaaatttaaaactatatcaaatttaatgatatttttgtattttatttagtgatattttgttgtaagatgtttaatgataataagttataaaactatatcaaatttaaatttaatatttgttatgggtgtgtttgttaacattttttaataagtcttttattttttaaattagaaacgtaaaaatattttttaaaatcatgtcttataaaactgttttcacttatttattttttaattaagaattaaaattttaaataaaaaaaaaaaaaaatactttcaaaatatttttaaacggtttttttttcttaattaatattttggactcaaacttcaatttaaactttggaacccggatccaaactcacacttgaaccgtaaccccgattcataccccgaccttggatccaaacttggactcaaatcttgaattgaaccctagacctagatcccgacccgaatctcagaccctgacctcgactccgactcagacctcaaaccttaaacttggaccacggacccagcccctcgcccctcgcccctacgacccttcgtccaagacccgaccctgtcctcagacccgaacttggacacgtacccccaattcgactcgaaccccgaactcatactaagttattggaattagattttaaactaattcataatatttccgcaaccttaatctagtatttatatttatataaaaaaatggaaatacacaaaaatataattaaattgttaaagatccaaaattataaccagagatcaataatttccatttctttaaagctctttctcctgcaaaaatcaaaactcataaatgtaaacatcaatggcaaccttggcatatcaaaacatggattacgaggacgagcgtcacgagcctacatgaccctctaggtctggtcaattgctcccctgcatctctctcggtctgttcaatccctatttctctccggtgaggtttcgtggtctgcttgggtcgcacaactggctaggggtgaaaatcggtcggttatggtcggtttttaaaattttataaccgaccggtcggttacggtttttattttacgaaaaccgtaaccgacagtttagaaatta

SEQ ID NO: 384370 - DNA, 2599 bp, Cannabis indica
gaacaataaattttcgaaaagcagagaactgaacacaattttcgaaaccaaacatacactaaagcgaaagtcaggacacctaaaatttaacatcatcaaataactagacaaaccagtttccctgattagatttaagtattgttgtgtaaagtaattgaactttaattataagaaaaacaatgcacaaaacacatggcaactacctattatacataaattgttaacattttcatgctcctcctaccaacaaacaacattttcattgctcagctaaactagaatttactctgagcaaataccagccaccataaaccaaatatactcaagctcatgacacagataaaacctaatcattttcagaaaataattaattatttaataaagaactttacaagaaactttctgcagacgcatcttacaagagtttcctggatctaacaccatcaccaccaacattaccactaatatctactctcatcacaatgttaacaattttttttcaatctcactagtctccattgtcatctatgtccagaaaatgtgactattacaataacacagtatatagcttagttaaatcttgaaatttcaaacaggtttttcgatataaaatatgaagagatttaccatttcaaaaattgatacgaagcaaatgtgaattgagctggagcagtgcctagaaactcttgaatgcggcaatctcacgaaaattgattgctgtaaactccattaaagcttcaaaaattttgaagaagaggaagaagaacccttctgctttggccccctttgtcctcaacttcaaaaatcaaaggaaaaaaaaatatgcagaagaacccttctggaaaaagttaaacgacaacagacatgaaaaacgacaataacgacagtactgtataataaaaggacataaacgacagtaaggtatagaaacgacacaacttttttttgacataaaacgacacttaactttaacaataaataaataacattaaattaaacgtgttaaacgacggtcatactgaaaaacgaccgaaagtgatagtaaactgtaaatatggcatcaaactacaataataagacacttaaaagcggatatcatttggctacaacggaaatttcgtcatctttaggtacaaactacatttacaattgaagattttacattttgcatgaagaggatttcatgaaacgttacttactttggtaggtttatatgatagacacgtgacttcgtacctaaattgctctttttatgggcattttgaaacttcaaatagtcatgtaatattctgacgtgaaggagtccaaaaagtttgacagttattggaatttgagttattagaataattttaatatagtaataaattaaatattttatttgattttccttcaaaaaaatattttatttgatttgatttataaaatataattaattatttactaattaattaaaatattataattatggtcagagaagattagggtaggagtaaggagaagagaaactttagcatatgcaaaagtgtaatgaatatagtcaatgcaatgtttcatattatccagtttattattgtgtaccttatcattttagatccgctagatagtgtcaataacaatcgatgcataaagaaaatttttatctacattactgccctgggattttatactacagaggaatttcacctagtcccacatgtgaatgtcagtgccatagacaggtgataaactccatggagacgctccgccacaaatgaaaagccaaattacaagagaggaagaggtgctccatagattccttctcagacccacaaatatgacacattgcatcatcagtatggaattaagcacaacccgaatagggagggcgttggaaaggatgcaccaccaaagaatcttatgacgctcttagattttgctattccaaagcttggtccaaagggaaggggcaacctcacagtgaggagttctttgcaaagcttaaataaggtaagttgatttgcacgagaaatgcccattgctttcttttatccagatccacttatctctaccctgtccagaaagtcttccccctttcaagatggtagtaatagtttatttgtcaaatagaaaattcaacttatgagcatcctaatcagcactcacagttagaagatttgccactttacttaacccaaactcaagtgacccattaagtttcaaggaaaaatctctgccatgagacacccagggatcatccaaaaactagtatccttcccatctgccaccattttgcaaaaccaagaatcaaagtctttgtacttgtaattagggaaatccttccccttcagatacttagcttgcaaaatttgacaacataacgactggtttccaattaataagttccacccccacttagcccggaaggcctgattcatctctctagttttctaaaaactaagacccccacaggatttggggaggcacatcatatcccaagccttgaggtgaagtccatggtttcttttttcaaacccccatcagaagtcatgggacatgccatcaatcttagccccaagacgattcgatagtttagtagtttgcatagcatacataggcatag

SEQ ID NO: 384371 - DNA, 907 bp, Cannabis indica
ctcaatctacaactcttcccacacctcagtaatcctacattatatcatagtataaaaagttacaaatttataattaacaaggtaatcttaaatatatatatacaggaacatcggcaatgccatgcaatgcaatagaagattataattaatttgtatgtacatacatatgtacctgcatttttgggtaatgatctccaagacccttctccattagactgtatatacttggtcaagatctcatcctcttctgaagtccacctccctttcttcaatccaattttctcacaacaaggagccctacccatctgatctctcactctttctctctctctcaatatattttaaaatattaaaggcaaacaaaaagtaacggggcgcgatgttatatataacatagctagggagagctagagagagatcaagagtgggaagagtagagagtaagtagtagaagtagaagtagagtggggtccaagtaagtagtgatgatagagaaattagtttttgtggctaaaaatttggccacgagggctagcccagaactaagctggcgtggcttaatgaccgtcgagacgcttctgacggggcatcaatctcccacgttcattgcccctcttacaaacacaactctctctctctctctcgtattgtcaagctgtcatgacctttttggttccctatactaataaatatgtaccttatcaagctcaatatatatctccaccaaatgccaaaggaacaccttgctcgttgaattttctctcctatatatacatatgtatgtgatattccacactatattttaatacaattaaatgttaatagaatacataacttagagattgctagcacatgtccaacaatatcgtattatatttatttgatgtatatatagccatataggtaa

SEQ ID NO: 384372 - DNA, 1181 bp, Cannabis indica
ttccaccatcagcaagactaaggaagaagaaaacgattactgcttgggaaaatgtcttactgaaacaatgcacaagaaaaatcacacttaattaagagaatcaatatgtaaacataaactaattaagcttaaatactattttacctattccttagcaagcacaatagatcttcaatacttggaaggttcttaaaaacccgagttcttatcgatgatttaatattcttttcggtatcatgttgatcttttaaaataggctgcaacaaaccttcctcattaggcaaactttccttgaggaaaattctcatgtatattgttgcaaacatagatgctgctgcagctacctgtaataataactcctcattcaattgttataatgaaaaaaccctaaacatgagtaaacgatattttaaatactgtattttgtaaaaattactgataaagaaacattatgatattctgagtatgattttggtgaaagtatttttttatactaactactcgactttcgagtcctagaatttcctattccctaattcttataattgttggggttcaattttattctattctaatctaaaaaaaatttgatcaaaattattagatttaaccatcattgtgtttttttttgtacaaaatatatggtttaaattgttatttaacaattgttggtaacttttgcaagttatgagtgcatttttgtaatactttttaatcaaatttttgtttttttaattagaaggataaaaatagttttagaaaacatggtctataaaatgttttactttaattttaaaaatgagaatcaaattttgaagaaaaaaaaattactctgaaaaaattttaaacagagtttttttttttaattataattatgtatttttatgttctttcattaatattttagactccgatctcgccgtagacttgaaactcgaacccgaaccccgcacatcgaccccatcccaaacctgaagcccaaccccaaaattggaccctagaccttgacctaaatatgaacccgacctgagaccccagccccgagctcgaacaaaaaatgcggactccacctggacctcagcatcgaacccgaactccagaaccgactaaactaaaagctgaaatttagagaacacttttgttttttattttttaaataaaaaaacaaaaattattaaaaa

SEQ ID NO: 384373 - DNA, 726 bp, Cannabis indica
aaactttacgcataattgcacataccttgattaaacaacttgaagaacttctccgcaaaaaaaaaaaaaaactagtaaaataaatcactattattaaataaaaagtagaaagccaatgactagatgctaaatgaaaactcttctcagcataggtatgggcctcagagttgccccctagtgtaactttgactcccatgtgtgcttcaacttaagaaacaataagtacaagaataacacgattttaaagcacatttcttccaacatggaagggacttttcccctattgttgcatataatatagctaattcggaactcacaatatggctaccctattgtcgctaaaaatatagctactgtgaccaagctctaagatctatagcaactctacaatcatgaagagaaaaaaaaatgaatacaaacaaataaataccataatgaaaaatcaaagaaattcttatagtcctgaattcatatttttgtgaacatgttttcaaagattgctgagccagcgtcaggtctgaaaagacaatattcattcctaggatatattattagattgtcatcataactcacaaaaaactacaaaactgaaattaacaattgcaatttgcttttttccaatcaactcatcatagatcataacaaaaatgacaatagtttcgaagacacacagggctcgtttggaacgtcatattaggtcctattgaattggattatatatcatat

SEQ ID NO: 384374 - DNA, 738 bp, Cannabis indica
tctctataaaaatgaaaactttgtatgtgctattatttgtttaaataggtagatcaacggtggagatcaactatttgcacatggctaattaataagatgatgatgatttaattaatttccaaatgtacaattgtttctattagtcctaacaacaatatatataaatggggatatgtcaaaaaattgaaaaagacataatgtatttttgttatgtaataatcacaaagaaaataaagaaattattttttaggaatatatacgacagctttcataaatatatttaaatagttaataattaaaataaaatttgttcaatcaaactatttcggattaattatgacaaatcttggcccctgatcacatgcagcgtcatgattcatcatctggatatatgctttttttcgtgctttgtattattattgttcataataattatatgctataaataattaattccagtcatacattttttttatttagtattttgctttatcgttattgtccggtctttttataaagcattttttaacgaaatgataatatcattaaaaagaaactgtaatcagtcatcacagagcaaaaatttcatatacaactaagaagggttgggttagtgttctaaataaatcttattttaatataattagatttatactaattaatataagattaaaaattattttatgttgcatggttcacatgatttatttccataattatgtataatgtataaattct

SEQ ID NO: 384375 - DNA, 1951 bp, Cannabis indica
atttttggttatggatatagaagaagacaaaggtggcaggagtggaaataagggagaagagcaacacgtatattatgagtgggggagggaaggagttggaatatgaagattatagtaataaactccccatctcaagccacgtatttatagtggtagtgtgaccatcaaacggcgtcgtcactaccaatgtttacaaccccatcctgcccccacaccctctcttctcctctccgtttttgccacgtgttctcacatggtttgttctcttcacctctctcttttttatttatttaataatatacatttaaataataatagaaaatgctaacatcttattttatagagctaagaaactacttgtgtctagcatctttaaacttctctttagttaataatactttcttaaaaaattattatattaaattgtatatgattgaatatttaattagactaataaacataataatacataaaaaaaaaatataagcactcatttagcatttaatatactgtatcaattacatatcggaaaatgattggcatctacttaaattacacacatttcgtacagtgataactaatattcattatacattattctgtctagcattactcttataatttactacatttttcttcataaatagaaatttccaagtttgaattctcacttctctaatatcaaaaaaaaaaaacgttaataataatataataataaaaattattagtacaagtaaacataaagacgtatatatatttatttaacttaaatttaattaaaaaatgtgaaattttaatacaaaattgtattataatttataatatagtagttaataaaagagaaatttttcaaaaaacagtatttttatattttattttataattttagagtctaaaattttatatttatataaatattcttaataaaattttaaaattaaaaaaatacattttggtcaggaaaaattaaaaaaataattcaaaaataaccaagatcaaccacacgacaacaactatatataaactataaaacaattaaaaaataattgaaaaaataatctcaaaacaactataatacaattataaataaattataaaaaaattattatttttactaaaaatgtatttttataaataaaaatgtatttttataaataaaaatgtttataatgtagaaagtaaaaaacaatgatcatgtttcgttgatgaatttttataatatttttttaaaaaaattggtttaggtaaattttattaatgttttaattaaggtgttcagtggtttagaatatatcatagtaatactcaaataataaatttttctatttaaaaattgcccatttatagtgtagaatactctataagataattatatttaattatcatgtgtgagttaatgtgagtacataataatatcatgtgttcgtttaaaaaaaaaaaagaaaaaaaaatattatgtgttatgggataaggtagggagtagtttaaggtggcgtatcaatgctctttctattttctcttgggtctccaagtttcccggtcatgcaccaaggtaaggtttatccatttccatgaaagtaagattaacttcccctacttgacaatgctgactcagcttttgaacatttctttctaatccggtcagaaaggaataatggatttaaatctactgtctaattttgtgtaatctattacaatctgacacttgtaataaatacttcatttattgaaattgacttttcctcttttccacattaaatggcatgtttactaataagtaaatggaaatcagtagtaaggtaatcattcccttacaatttgtttacttgcattattaaaattaggaaagggaaaagtttgattaaataagggagaaaagaaagggagaacttctcccaccaacttttgtaaggaatgccattaagggtaatgaatttttattatttttatt

SEQ ID NO: 384376 - DNA, 1630 bp, Cannabis indica
atttgcatatatttaagagttaataaaaaattaatttgactaattagtactcgttattaattcttttattcttttttataattggatgacataattttctattctctagccttacaaaaaaaattctattctgtagacttaattgaaactagctataggatcgttacaataatccaagtggacatgtcttattgtttcaactaatttttaaataaataaaattaaaatattaaattcccaacaaagtacagctacatatataccaaacatacattatacaatagcttttgaagactgtttcagagttcctacagtactttattacgtacaagatataatatgatgataattatgatgatgataaagcacaatgtaaatttgccttagcatatcctactcttgaaacaaaaaaaaaaaaaaacaacagaaaaataaagaagatgaagatgttaagaagtttcctcttgattgcataccttattagttggcatggtagccttcacggcagttcaagctcaaactgaatcaggtttatagtaattacatgtaacatataaggacgctcgtattaacacaaatttatatatatgttataattggtatacatataaatgattgtgtatacattagataaattcatatatattgcttttattatttaattttggatgtagggttcatcagcatagattgcggagtgcctgctaatatgacttacacagacaaaacaaccggcttgacttacgtttcagattcaaatttcatcgaaaacaacataggtgaaagccatacaatatcacttgaataccattcgcccaatattgagaaccaattttcaactttaagaagttttcctcaaggatacaaaaattgctacaccctaaagccagcagatggaaaagggtacaaatatttgataagggcaagattcttgtacggaaattatgatgaaagaatgattgtgccggagtttgatttgtacattgggactaataaatgggggactgtgaaattggataatgcatcacatgttgggagcatggagatcatatatatttcaacttcaacttatatatttgtgtgtatagtgaatacagaccatggcacaccctttatttcggctttggaacttaggcctttgaagaattctacgtacacccctactcgggcagctgttctatatcaacgcttggatttaggttccacgagcaataaatcggtcaggtattattagatattaattatacataatatattacttattatttaattttttgatatatccaatccatgtttatattattctatgaaaatgtatgtgttcttacttccgatcataatgtgtcattatattacttagggaaaaattatgtaattatctattttatatagtccaatatacatcacttaccatatatatgagcattttctatcttcgttattttgaagaaattataacacaatttttttctatataatagtgtatgttgtagtaatagcaatatttcactagttttcaaaaaaattgaatcatttactataataaaatatagggtaattctacaatggacactccaaaatcagatatatcaatgcaccccttaaagtcttaataattattgggtcttat

SEQ ID NO: 384377 - DNA, 1984 bp, Cannabis indica
  modified_base (20)..(20): a, c, t, g, unknown or other
aatagtataaataaaaaaanaaaaaaaaaaaaaaaaaaggtaatatgaattcgagtttgtatagatagtagcattaaagagtgtttcaaaagtaaacttaaacttgtacatgaaagaaaattatttggcattgctaaaattgttcttataaatgtaaaagggttgtaagtttctcttttgaatggaaatctacttgtgtggatgtaattgactcggtttgattaataaaaattatctttcttgataaaaaattaatttaaaagataattataatagaactatgtatgtaaacaaattggtagcaaacatacttacgtagtcaattttgttatagttttttttttttaacaaaagaaattttttattcaaaattgaacaagaaaaaacaacaaaggcaaacagcccccaaccgaacacacacactaccattcctcaattacatttataatatacttatcactattttttacattggaattaaaaatacccaaaatacgccatttcactagatattttatctcttcacaaacaaccttaacgaagctacaaacacaatcaaagacacactatttctatttttctaaatcatgtaaattgttgaagcaataactgcatgaataactttgtttatcagaccaatttgcgtttttgaacaccaaacaataagctccaacttgtttctcggccaataaaacttaccagccaagagccaatttcatccactattttttttagtatagatgcaatccatatacaaatgatcacgggactcaacttctaaatcacaaaccagacagtgagatgagaggatgctcgttattctgctcaagtgatttctagttaataaaaggttattgattacattctagtaagtaaacatgtgcttcggcgtgatgagcttgttctagatattcgagttataatcaatcttgttccttgtgagcaaggtgttgtaagaatgcttctctttgaatctccctcctttttcggcatgaaatagattaaactcatctatcttattatgaagattaaggagttttcgaaaataccagctcatatcttgcttgatctagatattccagatgttctgaccctttaagtaaatggtgttaatccatttaactcaaagattatccttctttcgagctatggcccataagaacttagccatctgagcaatgttccactttcctccttctcgaaaaccaatcccccataattctttggaagacacacctgctcccagtgatggactcatgatttttattttgtgggagcttatttatcataaaaaaatatttatcactacattataatcactcttactaaatttatctaattttgtgggggcttttctactattttggtttataattattaaattaaaaaatttacatttaatgttttaaaaggtagtatttttgttagtggggtctatagcccccacatcaatgttaatgggtccgtccctaccttctcctaagaaccaagatgaagcttgcttcaagtacttgttgtgccccacatgaaattgcgacaacatttatcgatctcagctgtaatcttttgaggaagaataaataaaatcatccagtaattacgaatccccagaaggactgagtgaatgagctgagctttcccaacaaaacaaaggtttctgcttgcctagcaatttagccttttgttcagcttatcaagaataatgctacaatctgaggctttccatttggttggtctcagatcaacccctaagtattttaggagaaaagaaccctcattcatttgaacattctctagaatattcactttactcccctctttgacacccccaaaataaatatggaattttgatttatttgctgaaagaccggaagcatcacaaattttttgaaaggttgcatataccatattgacagacttagcatttcttttgcagaacaaaattaaatcatcagcatcacaattttgttatagttagctcaca

SEQ ID NO: 384378 - DNA, 1286 bp, Cannabis indica
cctacaaaacttggtttcttaaacactacaccaaaaagagtcagcagttgaagttcaaaccccttacacctggacttatctacatgttttctgaccagaaaatgagtcaccgaccactaaaatactgtcactcagtgtcaaaacactgctcaactataaactcactctcaaactgatgcaaatcatgacacaagtgaacctgccgtatcaccaggtactgctataaacaaaagtcaggtagatctcactcacaatctctttattgatcttgatttcactgaccatgacatcactgaccaacacagcaaggtgttcccacatcttcataggctatttttgcaactcaaaacacaaaacttgtatcggttcagggtggacatcctatgataactcgatccaaagttggagttttcaagccaaaggtttatcttggtcaagctcagtggaattttagtaatagagaacccacttttgcccttgaagcacttcaacacagtggctggaataaagaaatgagtggagagttttatgctctcataaaaacaagacttgggtccttgttaaaccttcaccagaatacaatatggttggaaacaaatgggtctttaaagagaaatacaatgcatatgggtcactccagaggcttaaagcaaggctagttgctaagagttttcacgaaatacctggtctaaactttaatgaaacttttagcactgttattaaaccttcaacaatcagagttgttctatatgtagcaatctcaaaggggtggacagtgagacaacttgacattaacaatgcctttccaaatgaaaaattagaagaggttgtgtacatgattcaaccacaggggtttgtggacaaagacagaccagattatgtctgtaagttggagaaatctctctatgggcttttgtcccacaccaatgactgctgaaaagccattgtatctaacagatggtcaagtcctggacaaaccaacaacctataaaattcttataggggcaatgcaataccttgctcatacaaggcctgacatagctttttctgttaacaagctaagtcagttcctcaaatgccccataataaaatgctgctaaatgtgttttgagatatctaaaaggcactcttcatcatggtcttcacatcaaacagagtgacaacctgagtcttatgggatactcagatgctgaatgggcttattgtctaaatgatcaaaaatccataggaggttattgttgggttttatgccctaaataaaactctttacaatctgattagttatc

SEQ ID NO: 384379 - DNA, 1999 bp, Cannabis indica
aaaataaaatattatcttttaacactaaactagaaagtttggctagatcttcttgattttacaatctaacctgtttggtcgattatagtcaatcccttttccttaccatgatagaaatttattgcctatgatgttacttacgtagttgcaattgctcattattaaaatctacaacttgtaacaacaaatggtttgctaaaatcacttttgaaaccctgaatgacttttatccatatttgaccacagaatgtcccaatttaaatgacatcaagatacaaagtctgatggtagtaaagggcccaactgaccctccaaataaaaggcagtaaaatttctaacagaaaactggaaaaaaaattaaaaattaagctagaatagaaagcacagtaaaaagcaaaagtagtggtttggatgttcaataaggatccaacaagtgtcgtaggttctctagatctttatttcgttgacgaattattcgacaaaagaattactaattgttttacctttatttcttttcctagttacttcccagtcactgctctgtactaaattattctctgtttggttacctgaagccttaacacaaatctaatgaggcaagtttagttcggttcacgagtgtatttaagtctggtatttttcccactcctttgccctttaagcttcaaatttacggtccccaacttaggtggcctaattctattatttaatgtctagtttattatctggtttcaaatttaattcagaaattaaaataataataataataatatcctctctttcaatgtcttttttattttaatgtactttataactatatcccaagttctcattattccacaaactatcttctgaatgcctcatgcaaattctatcttcctactcctagttttaataaccaaaacctgttgaataatcaaattcaaaagaaaaaccaatttaatttcattgttttattaatgctttatacatgtaatcattttcgagttctatacaataatattatctataatacagtcggaaaggtacacacatacacatacatgttacatatgcatagcacgctgtaatttacatgtgaaactgatcgggtaggacaattctattagtacaactgcatcatagtccatgcatgcatgtatcctcttgaacttttcatctgtattttttctcattaactgggcctcgtggaatcttgttgaggaagttagagtccaattttctgtatgttctctttatctcccgaattaatctaacagcaaaacgatcaacttcatcttcatatcgatcatagagaaatggtagtgttcccatacagacaaagcctttaagtgtcatgaaatcaataaccaaaccaattaggccaatagtcataatgaaaaccataaaaaataactggtaaaggttcctaatatagtatcaaaaacagttagttggagggaaacatatcttaccaaaatacagggaatttaagaagctgaaatagtttccaatcaccgacacaacatagagagatataatggcctaggaaaaaaaaaaaaaagaaaaaaagaaagacagagagagaccttttagagactcgatctgcaattgaatttattgaattgtttatatatgtttcaatgttagaaaagtattttaacttcttatatgtaccaagaagaaaagtgggagatcatttccacatgcaatttcaaggaactttggcagtaactcgttaaatcttttgtggaaggttgaagccgcttttccaaatgcagagtcatctaatacaacctttggaatttgcggtcgagtcctgttttttatttaaaataattgattaaaatagtttcatctaatggcatgtttactaataagtaatgggaatcaatagtaaggtaatcattcccttacatttgtttacttgcattattaaaattaggaaatggagaagttgattaaataagggagaaaagaaagggagaacttccccaccaattttgtaaggaatgccatt

SEQ ID NO: 384380 - DNA, 1280 bp, Cannabis indica
cacctctagattacattattattaagttttattttaaccaaattagttcaggatattatttgtactattttagaaaatacatagtttattttgtcatttaacaaaacaaaaagtccaatttataatttttgtaaaatacagggtctaattaaaatgatatttacccaaagtaataactaaaataaagcaatgaagatcttatgtttctccatagattttgtaatgtcaaacaaaatataggcattttaaccattttgtattaaggagagaaattgtacaacaaaatagttgcttatttattctttttttttttttttttttttgttaaagaacctcagttcggggatgttgcttatttattctagtgacactttttttacaccaaatattttaacacttagaaattcttttctctctagctctcaatgctcaacaacatctcaaccatggcaatcttaaccgaacatagcttcttcgattcgtatgctggtgaatcgagagacagcagtgttggtgctgcaaaattctgcagaggtgacacaatctcaatgtgtgtagcatcatcccttagttccaaaaatgacataaatgatctctcttatgcttgcttagcactttttaagtcaaattttctaagaatggatggtgtaacatctgggggtttgcttgaaatcccaaaataagtcagctgcagcctctttctatgtgtggaaagaccttcaattttgctattcatggattttaacagatcaaagaagctcgatgttaccatacctcgaacgattttcgcttgagcttaagtatgacatttttagagtagtttatgttagtggtgatgacaatgttgtaaatgttgcttttgttgtttctcatcctcctaattctactcaaatgttggaagaagaaggtgaaagtaaagaacaaaaacaggttattaaaacctcaaaagtaaactacttgtggtagaaagaagaggaaagaaaaaactagttatttttttaggatttgtaaatatttgttaattaaatcttatttgttacatattgaaggcattactaattggaggtttttgtcagtattttttcttaactaaatctagtttattttgttatatatattaggctaattagtaattttttctcctgaactttgacatgtaccaaatcgtgctccttgaacttttttggccgttaaaaattcccctcgaactattgagattgttaaattaaggacttttgtctaatttcattcaattttactatttcagtgattgtttatgt

SEQ ID NO: 384381 - DNA, 2366 bp, Cannabis indica
aaaaaaaaaaaaactctaaaaaacctttaaaatttctcattaaaaaataatctccatatatataaataaatagaatgatagagatagagcttatataattaaattacataagtgaataaatataatatagaataagacttaagaggcatgtgttgccaagatgggactccatattacttaaaaagtgaatcacatgcatatgtctgagagtaagaaagatgataccaacacaacactataaaaaatttatcaactcttatacatataaattaaatatattaatcctttgtattatatgaatatataatttaaattattggatgtgacaattttgcaaatataattaaacctggcccctctaattaatacaaaagctaatacttgttggctcttggctggctcatccgtacctaagagcctctacggagtccttttgccctatccaattcccattattgatttttcatatttatattcattgatgttgattgaaataattggcacaatatttttttatattattttttttaatttgcagtcaaaattttaaaattgttaaatttggtatgattaaattttttaggccgcgaaaattatggttatatttttaattgggtaaatattattttgaatcttttgtaaaagttattaattgaattttctgttttgtaaaatgacataatggattatatatttttcaaaattgtacaaataagatcataaactgattttttatgaaaataattttaataataatctaatctaaagatgttctgacaaaattaattatattttctgtatctgttcttgttaaaaattgtcttaaaattaattatattaaaaagtaaaattattaaaaattgagcttaggatcctatttttaccatcttgaaaaatataaaatttattttatcatttaacaaaataaaaagtccaaatagtaatttttacaaaacatccaaaatagtatttacctttcctaatttttacaattatgttgttcagtaattattccgttcctttagtctcttaagtgtcaaagtagtttacaacaaaattttattagttcaccaaattttatttcaaaaaaaaaattaaaaattagaaaataaataattaaatatatataaaaaaaattaaaatacagatttcttttagaaataattaatatttagggtaaatactattttggaccctgtgttttgtaaaaattatcaattggactctctgttttgttaaatgacaaaatggaccatgtattttctaaaatagtacaaataggaccctgaactgatttttatcaaaataaaatttaataataatctaatctaaaggtgttatgaaaaaactgtttacattttctgtatctattcgtgttaggaattgtcttcaagttggttatattaaaaaaggttattaaaaattaagctcatgtcctatttttacaattttggaaaatacaaaggtccattttgtcatttgtccacttagtaacttttgcaaaacacaaagttcaaaatgatatttaccctaaaatttaaccaacatattccttctcttcttatcacccttcaccaccacaaccatcggtgaccctccgaaatctgaatactcaaccaaaacaccaaaccaccttgtagaagactcatcccctccctctcctccccgacccatttaaacccaacccctaccaaaaaaaaaaaaaaaacctcaaacaagcccaacaaaaccactcagatcaccactaccaccactgaaatcactcagatcacaaacccaacaaaatcaaacgaaaacccacaaacaccgcaatcatttttagatctgaaatcacaaataccacaaaccaaaatacaaaactgatcaagaaatgacgtcaggattcgcgggggggaaggaacctttgagttccgtgagttctcaggttgtatcgcctgaggtggtggtggtggtgacgctgtgatagcgagagcaccgagagggagaaagggaagctgggttcggggtttcgggttctgggttttgagaaaaaggaacggaggtccatctgaggtgagaggggagggttgatggtgctccttcctagaacgtcgtcgacgccgcaagcagagggaaagaagaaaagaaaaggagaaaaaaaaagaaaaaaaaaaaagggaaaaaaattaatttttttttctaattttgaactttgttaaatattttaaattatttttttattattattaaaattaagtataccaaaaaaattacatcatgtgtacacttgtgtgtatgatagttcattttggtacaatggtagaggtggggaaagtataactaaggtaaattgcggtaaaattcttaatactttcattttgcttgca

SEQ ID NO: 384382 - DNA, 1121 bp, Cannabis indica
aaaaaaaaaagaaaaagtataccaggtgttgaagagagagacataaagcaagacttgtagtaaaagattttactcaaatttaattgaggtggaccaaatgaatttaaaaactgcctttctatatgatgaactagaagaaagatctacatggttcaacatgagggctatgacacaatggaaattcagatgaggtttaattgctagctaaaaaggtcactgtatggactcaagcaagctcccaggtaatagaatatgaaatttgacaacttcatcactcaaattggcttcaacaaaaataagtttgatccttgtgtatactttaatgagcacgtatttttttattactgtatgtggatgatatactccttattggaaaagataaaactgagatatcatgaaaaaactaaaaatacaattgagtactgaatttgagatgaaagatcttggaaagaaaatctaaggtattgagtttgattagagtaccccaagggtactaattaagggttagtcaaaaagactatttgcaaagatcctatagaaatttggaatgaatgattccaaaattgtgttaacacccctggctccacactttaaactgtctcaatctcaattgatgaaaatggttccataaactagtgtagttgaaagccttatgtatgcaatggtttgcaccaagcctgctctagctcattctctaagtgttgtcaacaagtatatggctggtccaggtgatggtcactggagaggagtcaagtggatattaatctcagatatgtaaatgatcacttgactttagtttgatctatgatggaaacccaagatttaggtatggatagtgattatgcagccaacataaacactagaagatatctcttacatgtttgattttcactggactaaggttgttgccctttcaatcgctgaagctgaagatcaaagagtgttagcactgttggaaatttataggtgcttcaatagaaagaccaaagtcaaaatacaactcaaaatgaaaagtacaagaacaataatattgataaaataatgttacaactctagacaaaatatacacataagtataaaaaaaaaaaatgaagagaagattataaaatacaatataaata

SEQ ID NO: 384383 - DNA, 2450 bp, Cannabis indica
catgatttgatacatgtcaaaatattactactaatcagcctttaattcttaatatttaagacatttttgtttaaaagataaaaaaaaaaaagaattgttgtgatgaaacatcacaaaccctgttgataaaataacagaaaaagagtaagtgtccaatcacaaaccagtaagtcaaatgtccaatatactaacttcatagaataacaaagcacaatagtaacttttagttaactaataacatcaataaataatacaaactataatgaattgaataggttctatctattcatctatctattctatattacaaatcaaccgttatgattgattgacatatttaaataatgttggaaaattagtagtgaattcttttccatttctattttgtttgagacattaaaatgttagaaaaaagaaaaagagaaaagaactatgttattattaagtgctatggaaagatagagtattgcagaggcagtaagtaacagtgtagtgtagggtcaaatatggaagattttgacagagaagaaagattcttagctaagctagtattgtatttctattgtattgataaagactctgcaaagttctgccaccctttaaaattaaagactatgctatgcttttacaatttctttctttctttctttctttctcactcttactcatgcttcaattctttctgcctttatttcctattgtaaggtgcaaaaacagtagtgcctactctacttgtcttgcccatttacgcaaacaccttatatgcccaatcttctcaatctcatggcccttgccccctatcctaagaaacttttttatatattatttggtaattttatagtaccacatgtaggggtgttcataaaatagccgatctaatccgatctgcacgatccaatccaatctaatctgtaaagtgtggatatccgcacttgtacggattagattggattgaaaaattcaaaatttgcacttgtgcggattggatgttaattgacatgtaaaagtaatagatcaattccaatccaatccacacatatttatataaaaaaattaaaaaattatatatacaaataatattttaatgtaaataaaataataatttaaaagtctaatacatataatacaattatatttcaaaacttaatagaaaagtaaccaatccaaaataaccgattcaattcgtacttttacagattggattggattagatttgagctattgtgcggattggattggatccaaaaaaataaaattcgcacttagtgcggatcggctgcactatgagaaaaatagtgcagattgaattggatgaacacccttacccacatgttgggtgttatagaagtgtgaaatttgtcaaactaacaatgtgaaatattaaaacttacaaaataacctcacttaatttttaagggatgttatagttttattgtctaaatttccggagatagttttgttccatgtgacttgcgataagaattttacaacgcatggttttgcaaagcatgcccttcgattagatgatgagctatcctggtttgaggaggtcctgccaccgattatggattgctgcatcgttaatcatatgtgattttgatcaccacgtcaaaagaaaataacctcatttaattgatggtcgcatagtgtaaatttatggtcttttatgatcacactatataattcatgatcatttttgtgactatacatgataattaattttttttgtaaaattattttgctaatagaagttttgagaattcaagagctcttctgatatattctctatttgtttcgatatacaaaaagttttttaattcattttttttctcgtgatcgtatatattatagttatttaatattatctataaaaattttagaaaattcagaataatttataatgttgaaaataagatttaaatattttgttagacgtgtgattgttttttacattgtaaactattcataattttctaaaaatttacaaatgatcgtaaataagtacaatatacacgattatgaaaaaaaaatagtaaaaaactcgcttgagtgatgaaaagtaattttttttggggtttaatatagattttttttcttttctcaatgatacatatatccaaattaatatttttaattttaagaattattttattttaaaatattttcattgaatgttttattaaataaaattataacttacaacccgtttggtttggtgtaatcatctttggaattgaatgaaagttccaatttcaatgaccttatatggcgacgatttaacaccgtcgcctatactgtattataggtgatggggtgacggttttaaccatcgggaatgtaaaaaaaaaaaaaaaagaaaaaaaaatacaaatttttctgccctcagtggcagaaaaatctgtattttctcattttttttcttgcactagttttataattttacctaaatt

SEQ ID NO: 384384 - DNA, 3699 bp, Cannabis indica
acttaaaaaaaaaaaaaaaaaagctgttaattgttcctatttgaagataaagttgtataatttaatgtgttgatggaatatttttggtttgaatcattatatcgttgaacatcacatgttactctaccttaacctattcgatataatgaaattgttttacatgtgacatgcacatgacccattttcgattttggaggtgacaggcagcacaaacaaagtgtttttgatttagatctcaattctcttataaataacaaaccattatttaaacggcgccgttggtttgagtttcaactttcaattcaaagaaaaatatgtaatacttcttggactcattcttgtgggccaccctcaataatgggcctctaattgatccatttttctgcccaagttagcacttatatggaattacctaatttggcatggagagtttggagaccagatgtgatcaatattttttgtctcatttacattaatttatttaaataataaatcaaatacgcatatcataagaaaaaaaaaattacagtattttcgtgcggtgatttactcaaatctgtctgtttttcttaaacatgttggtcatctcgttttcatatttgagcttgaatttatatttttatcttccacatctttttataattactgagctaattgctaaactattcttatagttttaattatttttatataatttttgaataatattgtatacacaaatgaaaatattattaaaattagaatttaaaaatttactaaactatatttaaatttttaagccatactctaaaaaaaattaatatatagttttaattctatatttgttaatagttttaactatagaattataatttttagtgttatgtttaaattttattatcattatcttttaacgtgtcgttgcataactatcgggtttgtcgtattttgtcttttattctagtctatttgtgttgtgcttaagcgtcatgttgtgcttaaacacaatttttgtgttgtaccgtgccaattataccatcgtgtcgtatcgtattgtgctcaagtttatatttttccgtgcctgatcatatgcgtgccacccaaactcgtgtcgttttgtgtcatgtcaaaaaaaaaaacatgacccatatttatagcactatttgtaagtttttctaaaaggaaaaaaaaataatttcatgtgattagagcaccgtccaacatatctagagagatttaattaatttgtttatttagagacaaattatattggaaaacttcattatcttattatcccgtaagctaaaaaaatatgttgattacaaaaatatatttcttttgtaaaattttgactacactaatcgccccatcaacaactcctatcaccattgaaatacgcatggaagcaccaatttaatttttgtaatgctttaattcatcaaaatcaaatttaaaaacataaaattctaagaatgttcacttaattacatcaggaatttaaatgtttcaaataaatatatgtatgatttattggttttcttcgcatttgttttttcactcctaaacttttgaaaatttgcaaacttttgaacaaaacgatgcatttataatacttttacgatattatctaacgatgctctcagaacttttcatggtttttaaggttaaaaaaaattatgcattgccaatgattttgcaatgctctcgggaaaagtttacaatttgacaaatattatttgtatttgtatgttacaatttgataaatattatttattatttatatattatttaatctaaatattatatttatagtatataaaataatataacactaatatttactagggatttttattacaaaaatacttccagctagccaaataaacaaatatacaggccattttttttacacaaataccacctacacgcacattcaaccaaggatccatgtttcctgagcaactatcgcgcaatcacgcagcaacccaacgcaactgaaacaaaaattcaatcagaaagagaaccgccattaattctggcgacttcacctaagaagacgaccaaaatcaatcaaaacagaggttgtttcgaattcataaaagaagtgtagaaaaactattacgaaactaaaattcaaccggaaatccagtttaatttgcataaaactaatgtcctgacttcaattttcagatccatgagaggcagatctcaaaaagttgaattggagttcccaaacaatccaactcaagtataatccaaaaaaaaattacatcaatactatagtaaaatatttatcctagtgtattttttgttgttttccaaatttctaatggtgaatttgtttatattaaatcataaagagacatgtagatagagttacgtacgtggaaacactgttctgatttttaatgttttacaacagttgcattacaattgcataaatattttgctaacagttatttcgtctgattgaaaccttcatctgatgcaaccttcggccaatcacccagtaattaaccacccagaaactttcgtctgattgaaaccttcgtttgatgcaaccttcgaccaaccaccctgcaaccatcgtctgattgaaacctttgtctgatgcaaccacgcaacaactaccctgcaactatcgtctgattgaaacatttgtctgatgcaaccatagcgcaaccacgcaacaaccaccctgcaaccatcatctgattgtgtaagtgatagtgtaagtagtattttggtaattaaaatcacataaaaggtataaatgttatccacaccttataaaggtattttttttaaataaagtgtcaatttatattttctatgtaatcattttaatttactatttatttttaaatacttacatgtaccacttattagtaggtaatttatacataaatatatatattttttgaaatggatatatttttgtttttgaaagaccaaatttactatatcgttgggtagccaaatttacccttatatgtaatagtaaccaacgtgtgatctgttaattttgaagtgtttagatctggtaattttgatagtaaccaacgtgtgatctgttaatttggatacccttaattttgaagtgttaattatatacttagtaatagctacttagaggtagtaacaaaatgtatgtatcgttgtgttattttagatactcttaagtcatgcatataatttatatatataaatatatatatatatatatataaatattgtagtgaattaatagatcattttgctataaaagtttatgttttaaatatttattagtctaaaataaatgaataaaattaccaaatggtgttactaataacacctcaattaggcttcatgttgagagctactaaaggtaattatgattctaatataatcaagttgtatgtgatgagagtgtatacactcttatttggttgataagtaaaatgttatacaaggaaagttgttctgtttttaaatacttaaaggatattttgttaattcaactgggaaagtcaagatagaattagaattgcatagaattaaaggtaattgcacatttttgtgtaatattttagtagtgtaattactctataactatgtaattagagacaattaagatatttgaattatactttctaattctcatgtcctcatgaaaattaggtgtagttatagcatgtaattattaaaaaatttacattttattataaaatattagta

SEQ ID NO: 384385 - DNA, 972 bp, Cannabis indica
aaatgttagaagttgaattagtgatatttagtctattgtaaggtgttgtggtatggttatttaataaaattaaatattaattttcaggtaatttaatttaggttaattagaatttttattttttaaattttaatatgtacaccaaatcatgtttcttgaattttttttagccgttaaaaattctccttgaactattgagattgttagatttaaggatttttatctaatttcattcaattttactatttgagtgattgtttatgtactaaatcatgatccccagactttgatatctattaaattatgtccttcgaactttgtacatttactaaattacgcccccagaactttcatctatattagaaatttttactaaaattggacaaaagtacttaaattcaacaatctcaatagttcagaaagtatttttaacgactttaaaagttcatgatgtataatttagtacatatcaaaattcggagaaaaaaattctaattaacttttaatttaataattaaagtgtctcttttcaatttacaatgtgtacaacctctatctatgcaatgttttcatctaagttcaatgagttaataatgggtgtcaactcacataatgaaaggtatcattacacagtcaatattggaggactcacacatgtgttcatgtctacaatttcattactatattattaagatatgaggattattgatttgatatttttttttattaaagtataatatataaaatacagttgtaatcatactcaaatcatcaaatgaaatttatgaaatcagagtggtttatattttagtattaatatttaattatttttctcatcattttgaaaaatatcaatctattaaacaaccattattattattattattattatatttttaaacgaaaatattatattaaaaagcacaaacctaaaaggttacaagtaaaaaaaaaaaaactaacaaatacaaa

SEQ ID NO: 384386 - DNA, 1058 bp, Cannabis indica
aaaaaaaaaaaaaaactaactatcaaattttccttgaattttttgttcgttaaaaaattttctcaaactatattcgcagtgatgaaatatagaaattttgttaaattttatctcatatggctaaccaaagacttaagttttcaattattagggaataatcgaagacataggtctcactccacgcggaagcctatgtcttcggttattagaaataattgaagacatgcatgtgcctttatgtggggacttgtttctttcactacaaaaagaagggtctataacgaggacatttattagaacttcacatgtcctcagtaaaacgatacaacgaggacaagtcctcgctaaaaaattatttttagaggaggcttattgttagaagttgatttaattgagcgcctagaaacgataaagcaaacctttttaaaactattaattatagtaaaaatgtttcataattagctactagtataaaatttatatggaagaaaataatgtaactaatctaaaaagtaaatattagctcggatgaaatttgtcaagaaatagagaagcacatggcttggttttagtagaaaacaacttccaataaggatagaggcattatatggatggcttgggagagtttggttgtgcaccaacaagcttgcagttaatcaaccggttaattctctatttcctgttgatcatcgcaattggaatattgatttagtcaaggacatgtttaactctcgtgatgatgttctaatcttaggcattcttctgagttccaatgctactgttgattgttggtcctggtgtggtgaacgtacatgtgatttttctatcaaatatgcttatagcctctacaagctcaaaaaggtaattggtcaagtgttgataactttgattttgtaacgttcacgcttcaagcctctattgggcccttacacccatagaattatagctcttatacatgagttcgtcactatggctgcttcttagactgaagattgactctacaaaccaaaacacgagcgtttccagcgtactttttcctcactcgcatgcttcttggg

SEQ ID NO: 384387 - DNA, 997 bp, Cannabis indica
ttaaataaatttatactcatgatgattgaagattaaagattgattgatttaaagtgagaaattatttataatgaaagactgagagtgagctggaattggaaccataagccataaatattgatatatggtggtgaacattacaatattattcattatctaagctcatccactaccattattataccattattttataggcatatatataaatataaattataacattatataaaataaaatagtagagttatatacatcaacacctttttacacgtactatgtttcatcttgtttaatttgtttatttatttttatataaatattcattactttattcaaaaaattatgacaattagtctacataatattaattatttaaatattataaaataattaaaaattaaaaatattacaaaaatttcttcttccaacaagctccatgcttctctttctacaaaattcctaagtttgaaaactcaaaaacaaacgcaaaaacctttgatcatgagatttcaccttataccactcttttagaaaattgatcaaatctaatttcgaaagattccaaacctcaatcaacaaaaacatgatcggattccgtctaagaaattatataaaaaaaacaaatgaagcagtgagatcttgaagagaaaattgataattagatgcttatttcagtggaattgccacgggctctccaaaccggacggaccttgagttaaaatgagtcataggaaaacaaatatttttgggcccttaatataaaaataaatagtatttttaaaaattactaaaaagatcgatatgtatattttttgggacccctaaaatgagtgagttctaggcgcgagtctaacctgcctatagctagggtcgactctgtctctaaagatgatcttatattgagaccatctacctatatgcatcaatagtacttagtataatctaagtaatatattataaatatagttataaatgatattttttaatagagaaa

SEQ ID NO: 384388 - DNA, 774 bp, Cannabis indica
gatttcgaaaatgaatgcatagcaatcttacataaaagaaaattatttgtcactaacttgaccaaaaagactttacaaaatcctttggagaaagtcatgtagtcaccactcgataataatatattttcatctctctgattaaccttttttttaaacataaaaaagaaaaaggaaaagagagagaatatatattgtattactcttctaattcatttctttcataacttttaaccctatagaaaacgtgaaaataaattagtttaattatacaataggtcaaaagagatgatcatcgaaataagctgacttttcagcttgaaaaaggataagttcagtgaaagaaaagaaaacaaatgtggcgtataagtgggttgaccaattgcagcctcacgacatgcatagtaggatatatatatacatatatatatattaaagaacagtaaagaattagtattttttttagtcgaacgtaaggaaataattagtatttaacagtatagaagaaccaaattttaattagatagtattatattaattaggttattcaacctcttactcaagtgattttttagacaaatgtcacacaaagtaaaagatacctttcaggtccaaaggatttgatgccattaccttaccctaccttttaatggtaataaaatcccgtacaactttttaagtaattacatatctcttaagataatgttattggtacattaattatatatatatatattttattttactatatagtaattatatataatatagacatat

SEQ ID NO: 384389 - DNA, 1719 bp, Cannabis indica
aactttaaactccatttgagctgccaaagacaacatcaatcttatcgtcttgtactttacaacatatgagaatattttgtgtagttaattccttccatttgagtaaaacccttagccactaacctggttttgaactgcgctggttcattctcattgattttctctttcacctttagaatctatttgcactccacaatatttttattatccagcttcggtacaatttcccaaacttaacaaactcctcgtaacagaatctccacatcagcaaaagacaaagtgcttacgggtgtgacatacacttccaggacaaaggactgaattgtatgctgaaggacatcctagataggaaaagagacagctggagttgactctccgggactctcttccaagaaggaaaaaactagtcatcaagagaagactctttccaggtggacatgatagacatcgagaacgcccttccggatgataactatcatagacgagacttcttccagatggacaagttaactttccgaaaaagctcttttaggagacaactaactttctaggaagataaaaaaaaattcgaagatctttctcatgtgaagaaactataccacactatatttttacgacaaatacagtgcatacgtgtaaatttgatgattgattataaataaaaaaaaataacaaaaaattttgtaaattttttggttcaaataaatctgccttaaataattgagaaagaaatcttagacatcttgtcaagatattgaattaaacaattttgaattcatattcttagagtaaaatactgaaggtatcattataaggtaataccttgcaaaatattaatatttattaataataattattaagttaaaatatatgagatttaatattcaattaaccaatttgatacatttttttgttgaacatcaaacttcattaaataacccaaaccaagccataacagaaaaaaaaaaatagtttagaaacaagaggtgccaactccttaacattgaaaaaccaaacaaggaaaattaaaagcaagtttgagagacggtgagccatctcatttctagaccgagggatccaagtgatcgtcgactcagggagatgattcagccccatcaacacatgtccgaacacagcagctaacttccagacagaagccttatgagaattgatttcaagcaccaaggtttgacagtctgaagcaaaattaacattagaacaaccatgaaatttagagcgctgcattgcatggaagagagcccaagtctcagcttctagggggactttgcctcgagacgcactgagaaagcttccacaaccatgccctccgaattggtgatcacaattctagcagttgagcacaagactttgctggccgcatcaataaacaccacatggtcaccctgtagcagaaattattaggggcatttggaccatgaccaacaactgactgcgtatcccatgccaaggcaagatcatcggccatggacctaatccgatcaagaacctccacagaagacggtcgaatccgatcatgataggcttgctttcttgtagactagaggacaaaacatagacaaataccaaattgcctgaaggcctccaattcattccggtttctagcctccaaaaagtctagctccaggacccattcgaccagctgcagggggctgctaaaacacagagcctcacttcgtattattagaatattttatttat

SEQ ID NO: 384390 - DNA, 2231 bp, Cannabis indica
aatgacaagccatcgtactcatcccttatggccagttggccatcaagggcaagcttcagcttctcgtcactccttttgacttcagtccctagcctagagatgtcaccaacgagcgaggtattctcctaattcatcgtgttaagcatgagctccaaactagaaatcttgtcttgcttctattggacaagagcctctaagttggtcataacctcacccctcgccaagagcttagtctcctgggccttttgctgctctcaaagagcgctcaaggtccccctagatttgccatgcaaagatctaatctttatagaggcttgaaaacaaacaaggtcaagattagagcaagaggacaacactggtcgaccagcccgtctatggtgctaccaaggtcggccaacttctcaaagacactacaatgccaaccatcttcatacaatagccccatatggcaggccagctctcaatagtactaaaacatgacaaaagttagatgtgtaacttaccgaggccaactcttagagaccgatagaagatagcctcttcagatcgccatcactaagctcccaaagctcatcatctacagtgggtaaggctttgtccatacgctttccagctgcctccatggctctctgttccatggttgaatttgttcccgtctggtcctctgggctcccttgcccgaaggctaattcctgctcaatgaaaggtcaacgatcatgggctacccagctcgcataggcccatgaggaggaggaggaagataagatcctgtagcatcaccgaatcgggtggtttgggccacccaaaggcttgtctgaaggtcctccaactagacctcagagtttggaagccatatctacaaaacgatggtgcaatcaactatcaaataccatcatcctcagaagaggagtcatctgaatcatcagaggccgatttgcctttgcctctagatgtaggcaaagggtgagtgggcctgacagaactctagtcttcaggcctgattagtagaatgccatcccccacagtgtccttgtgagctaagctctagcggaggaccctctctttcttcttcaaatttttagctatctgggatagaggaacatcatcatccatatcgggagtatgcccaccaccagagtttgcctcctcagtagttggggctccatctaaaccacctaatgggccctcggcccccgtaactccaaactcgagggatacaagttgtatctctaaaagttggccatgctagccaaccttaatatattcttcttctctactgatgggacaagatgtggttcgctctatccttcatcctgaggataggaatggagcgcttgcaggtgggcacttgctgaaaacaatagtgttgaacaagctggatgtcccagacaatgaagtaatttcgggcatataccttacttttgacaagggcaaactgttggtgtcacccaaccaataatagctgatctagctgaagtagaagtacctcgtccagttctgcttcaaagctgacttcaagtcaaaataatatccaatctcatacagagtagactgaggctagcctagctctgcatagtgaaaaaacatcgttaaatggtacctgatacctttcggggtgatttgcgttggactcatcctaaagtaagcagtgatgtctctgaaataggggtgcaaaggcggcacttcccttgctgattgtggcgctctaactatgccatctagttgagggccaattgatgtgctctccggtctttcgatggcacatcaaattggatgcctctcaccagtccactctcatgtatcttatagagagcctcaacgatgataatagatggaggagagtgttggaaattattttaccaggatcttagatctactcacaagtatgttaattaacaccctaaatatgaactttctaaaacgattatgaaataaacacatataaagtattagaaatcttacattgggtgcagcggaattaaatgtctccttccgttcagatatctagcccttgattcctttctgtagcagagcattatcaatatctgaacctggatctctttctttccttctttaatgctgaaactccttcttgttgaatgtctttcttcacaatcttcctcactatgattgaagtatcacttgctgtgtgtgagtactactctaatcactaagagagagagagtgggcggccaagtatagagagagaaggctcaggtttttctgaatga

SEQ ID NO: 384391 - DNA, 1260 bp, Cannabis indica
ttatcggattggtagttagttaggattaccaaaataccctcatgtttgatttgagtttaagggttatatggggggcaaaatggtcattttaagtttaggaatttctaatttgtcctgtgtggttttagttcatattgtagtggattgttaggttaattgttttattccatttaatagtatatagtagtttaaaaaaacaaacaaaacctagaaactaaagaaaatcaattcaagagctctctctctccctatctttcggcctaagaaggaactaaggggaagcaaattttcatctccttttagtccaagattttgctagaaatttatcgtagttgttttttcatctattgaggtaaattcttgacactttctcctttggttctcttaagttttaagttgaatttttgctagggtcttagggtatttggggctgtggtgttagacttaagtttgataatgtttttaggattgttttagggtttgtataagtttagactgagtgattttagatgtctatggtttggaattggaaaattaggttttcacaacttaatatcttggtttaacttggtaatttgtttaaattgatgaattgttgtgaattgatgctttggatatgttgtgtttgtcatgttgaactgttctggaaaagtatagcaggtttggtggatgtttgatcggtttttggagtggaaaaccaggtttccccatggctgcccagaaaaccagtcgatcggttttccaagcaactagcaaaccggtcgaccggtttggccagcatgggaaaatttcaagtttatcttctccagtttgtttttgttcggggtatctttcaggtgtaattcagagtattttagagatatttttggttagtctgatctagagggaaatagggttgttcgattatgagaattagggtttatccccgagaatttaataaaggtttttattaagtttcggttgtcgtgacataggaccgagattgcatagcttattttccactcacgtcggcccgcacacttgagttctggactgaggtaagaaaaagtattatatatcacttagagttaaatgattaacatgtatattataaatctcgattatgatcgggttcagttatgactaagggttgagaaatggtcattaccattacgagtaattactcctgaaaccacagataggtttcttacttatcgtttgctttatcgggcaacgatagtgacatatacagctcataattaacgagtggtaagggtactt

SEQ ID NO: 384392 - DNA, 2715 bp, Cannabis indica
aaagaaacagaacttttagtgatttttcttggcatatttatctggggtgggaagatgaccgcatcgaaagatttacagccttctctccagctagctagaattggattgcactgtgaaagggattcgaagtaacggccggatcctcatgacggtcttgatcaatatgagcaattaatgttctagggtttaggcctcttgattgatggtggtgatgggcagccgccattgaaacggaattactagggttttctaattccctggtcgtagtagtgtttgatgtagtggttgccatgagaaaatgggaagtaggctttcgttcttggattatttgggtggtgctagtagtagtactactactcattataagctctggcttattattcatgtcacaaaatgagtagtgtggttttgatgagaagaagaagctgggtgatgttgggttaatgagttcccagttccaaggagcaggcaataaacctagaaaatcgtcctcggactttgacccattattattattattactcatcatcatcatcatcactgatgattcataatcggcacttttactaccagtggtagttgtcattgtcatcggtgaggaagtctctgtagcagcctgaaatttctcattaatcaaatccacatgattatggttatgatgatgatgatgatggtaatcttgtaatgatgatacctctggatgttgatccgcagtaatttgtgctgttttttgaagcaatttttccctcttgttctttctctagcccttgctctagccatgtctcttgattcttttgcaactagcttccttactacattcatgctcttcatctttttgttgtctctaccagcagcttcattattcttcatcaccaccaccaaatcgtcatcatcgtcttcgtcatcgtcgttgtcatcattattattgcttgtgatcatggaatccttgagttctgtaattgcggttttggatttgttgaagagccaatcaatggttttgcttgctttgtcgaaacccaacatgtcttgtagatcaaagaactttctagctatttgaagggaaagcctcatcctcctgtccctcagaccctgagctgtcgagatcttgctgtgccggtctttcttcccagctcttcttctagggttagtagtagtcttcgttttctgaccaacaatctgctgcttcttattctttgaaataaaccttttattattatttgaaggcaaattggtagcagtgaaggcgtaattattatcaccatttgcataattagtactagtagtggccggtactggagtagtactaccagtagtcattattggtagtaaatgactactaaacatcagcccttcttcttcttcttcagaatatgtgggaataacaagctgtgatgatgagtaacaactagggttttgatgatgatcttggttttcatcaattataatctgatgtgtctgattactaatgcgtgggaaattttggtaaatgctactacaaggaaacatatcttatatatatgtctctctattaaatagtgttctctcaaaatttaaaatggaaaattataagaatagtaattattaatagagagagagagaaagaggaggaagaaggaacacgtttgagtcttactattctctcctgatctgcaaattaaaagtggttggttagggttactgctttagaaagataagcaagcaaggatacagtagaacagagaaaagaaaactcaagaaaagaaaaaagaggggctttgtttttctttttaggttagtgaatgaatgttcctagctatgtttatcagtgtagctagatttatttttatacaaacatatctatatatggatgccatattgttggtaccacctgagatgggtgtatttatgatgatcatgagctagctagcggctggagaattgtgtggatttttcagctttgaaaataaaattgtttagaagaaaatttggaaaagggattggatggatgatatgtagagagagaaagaaaagagttgtacataaccttcttaattaggtatttagtaggatattatagatttatgatagtagatagatgatgaataactacagtacaattactatacaaagtcgaaaccccgaaaacaaataaaatgagaaaaaaaagttagctacagtgaaaacatcacgtgggagatgggatgaatagagtaatttagctgatgatcagtcaacatccagagaaaaataattacaaataaataaataaaaagaaagtgaaaaatagaaaagaagagaacaatggcaaaatttaatggcagaaaatggcatgtctaccgtttatagggccaagacttgctagagagagaaagagagaagccattatatgatgaatagatgagagagagaggacattgtacacagtgtacacgtaggtatgtatggaccgtaccgtcaggaaaggcaacgctcgttttgactgaactcactttctcaatcacttctctctctcactcactcacagctaataattaacattatgtaacttaatttttaaagctgttaaaatttctattaaattattgggattgttgaatttaaaatttttatgtatggataaaaatttagaagatatgatcatttaatacatatcaaagtccagagagatgatttagtaaatatcaaaatttagagaacatgatttagtttataaacgatcaccgaattaataaaatt

SEQ ID NO: 384393 - DNA, 1716 bp, Cannabis indica
aaaaaaaaaaaaaaccaaaaagagacccaaaaagcctattccctaacacaaagaaggagctagccacaaatggagcaagaataaaggaacacagtcatcttccgagggaaacattgtactatagaattatcctcaatttttatatctcacgtgtcactatattgattaatatacactgtaaaatttttaatacaattttatagaaagctaagaaaagaaataaaagttgggcatcaactcctactatgtagtagactatataatataaaagattaaaggcgtaacaatataatagagatggaagggaaaagaaacagaaacagaataagaaaaatccaaaatcaaaaatagacataacacaaaaaacacacataataattgcatatctcaaggcactacactgcccctaacccaaacccaataaaagatcacctttctgtgattggtggccaaagttaaagagtctgaaaatcatatcgtgattagcgccagagaaactccattggatcctcttatttttttaatttcgatttaagaaatgttttcaccaaaatctgttattaatctctaattagtcaaaggactttggattggaaacatctgtaccccatgttcttacatgatcactaatttttaattcccattcatcacacaagaaacccttttttttaattttagaagaataataagataatatggaccaaattttattctctaccatttttattccaactttattcttatgggagcaaaataaagaagggttaaagaagagggtatcaaggaataagaattttatttatcttagcagaaagctccactctacaataaaggagaatcattgtatagtagttgacctttttcttcttctctattaacctttcatttttgtagtagtttaaataaaatataaaggatctctctcttcttctcttatattattattattattattttgtacagagcatacatttcttctaatatgatattttttttttggtcacttccataacaaaaagggtgtttttgtaagagtgattaatttatatgttttagaaggtattagaaatactggtagtgataatattgttataatactaatcagtccctttgttttctaagttatgcacttgtttcaaggaactcttggaatttcatttgtttgtttgtactcttctgtccacaccctaccggacctgaatgagttaaccctttcatgatatttgtcacaaagctatattatttttttttttttaatttttttatggtatagtgctattcttaattttttattatatttttttagtcaatttttattattgaaaacacatgttagaataatattttttattattttttttcatgacggtatttgttatagttacaacataatctctgtaaattttttaaaaatttcgaatagtatatactactaaaaataggtctaaatttttttgaacacgcgtggtagattaacatatctgaaactctatttttgatactatgaactatttaaaatttttcaaaaatgtaaaagaatgatattataaatataacgaatactgctattaaaaaaaatttaaaaaaatatttcaatatgtaatttcttagactactataactgaaatgttgtcattaatactatattcaatatatataggtacactcttaaattagaaaaatttgagtttttataatttatttttttatttaatt

SEQ ID NO: 384394 - DNA, 3483 bp, Cannabis indica
aatataaataagcttcattttttctttagaaaaattagtttgttaaaattatttattggattttgaataattttggtttgattttttaagaaatgtatttacatataaaagaaaagtttgaaaatattttttaaggaataatttaaagttttcaataatttttataaattttgcagaatttatagaactttataacttttaaaattactttttcaataaagaaaacaaaatttaatgaaagtgacataattatgtaactgttatattagagaaaaattttaagaaaccgtatattttaagagacaggatccagtagtacgtgtcgaaaattcagggccaaaaatactcccttaaatagggaacataaatatatatttcaaatatattaccatagagaaatcgatataaagcatcatgatgatgttcactatcattttgatattaattggtgtaatgtgagaaccgatatgaatatttgatgcctagcatccatatggtatacctatgacgtttgtgtgacacatgatattgttaaataaaacttgcaagagatggagcacatctcaaatcaataacaacattttaatttgtcctggaaagaatattgtgtttacatacaattcaactctaatcttgaaaaataaacaaaagaaaaaagtttgactacctcacaatcacattgtatatttctctatctatatatgctgacggtatgtaatatgattttctttctatatgcagttagtacatataataaattaataatctcacaaaatggcatgagcattgcacagaatataatttgatgtaatcaatggtgaggactaaggcataatataaccatttttattaagtttaacaagacgattaaagcggtgagtagtattttcaagtggctcctagagagaaaccacccttaatttattcatttatcaatgttgtatgaattttcaattcatcaaagttgatagtatatactaaagctaaaattaggcaaaatttatatgtaaacaacataaaccttgaattcatttcaccactatatatttacattataagttatatagaacacatcttcacatataatcttatatcgctatcaaaatacaagtggagatcatgcgtgacatcccaagtcaccaaacaaacatataacctaaatggaaatttctttttcattaattatacattataatattctttatatatttattttgtagctctcacacttgatttttcctttttagaaagaaaaaaaaaacttgagactgagaagggtttattatcctatatacgcctggggcgcacgttaacgctgagtggattagccatctcacaagacaactttagaacctcagataggtcaaccccactttgaccatttggcagccattcaaattcgtgcaacagtgatgctacccaaaagcaaactgtggtcaaccccaaggccttaccggggcaggtccttcttcccgacccgaatggggcgagtcttagatccgacccgaatacagagaactctgcctcgtcttcgcctgtcacgaatctctgtggcgtaaactcaagcggatcagcccaaaactcctggtccctggatatggcccacatgttgaccatggtggtggtccccttaggcacgtgatacccatcgatagtggtatcggtgatggctaggcgggcccacgagagtagtgggcccggaggatgtagccttagaacttccttcactacagccgttagatacactaatttggacatgtcggattcggcaacagatcttgatctgcccaccaccttgtctagctcatcgtggaccgttgattgaatatcaggatgaatcaccattctcgctaggatccactcgatcagtacggcaacagtatcagtccctctaaatatcatttcctgaaaattaaccaaaaaaaccaacatattataatatgagcataaaccacgcacgtacagaactatacaaaaacaaactagtgctactattttaattataatgaatctacaattagtttaatcaaacctctctaactaatttttttatccaagtgtgattgtattgtactgatagtacgtataaatatatattttaaataacaaattaacggtaatttgtactcacccagagaacagcgatcatatcagagtcggataacttatcgggtccttgcaaggaaagcaaaacgtccacaaaatctcgggctattgggtcggttcgggagcggtgctccgacacgatttggctgacgaaacggttcactttggggacgagtttggagcatctgaatctgattctctgggcatcaaattcagccaaccaaggaagatgatcggaccaattcaacaaacccaatagatcgtatccttcgtcgacgagttcacgcagttcctgcaactcattgttggccgagtcaagatcgtaaactcttccaaaaacggaacacatcatgttgttaagggaggctcgcttcaacacttcacgtactcgcaagccctgttctccagccttctctttcgacattacccccaccatttgatcggcaattactcgcctctgaaactcggaggacttaatctgtttggggcagaaaagatgggtggcagcgattctcctaagagttcgccagtaaactccgtagggagcgaacccaatcgcacggttgaacatcaagccgtaggcggactccttgatcggacggtcagcgaaaacggggctgttgagtatttccttggccacgtcagggtgacacgtcaccataacacgagtatccccgagagaaaaggccatgagacgtttggcgttgcatgctgtagccatggcggctaagcggcggtgagccagagaagccataaggcccatgcttccgaagaggggaaggcctcttgggcctggaattgcagctgcaggcttaagctgttttaatgggtttttcatccatttttgcttgccccaggctgggcctcccggatgtgcccaataaactaaggacctagcgagccaggtgaggcccacgatgagaagcaaccatgcaaaggtttcttgggagaaggctctgcatgttttggaggccagggcgaagagccagaggttttcaatgtctgatttcatagcagaaaagagataagatattgaagaagatgaagagaggtaggaagtggtatgagtttcagagtgagtgagtgttataattacgatggtatttatagcaggggaatgggatagatatttgagagtaataaaaatgaacataaactgacgtggcttctattttagaatggatccccacacgtttgttttattttaaataaaaagatgtatatagtttatcaatttatctcatgttcttttcaacttcttcgtaaagtttctctataattggttttccttgaaaagaacgtgaggaaacaaatcatgaacatatttattttccttacaaaatatggaaaacttatttcttatttatatatatatat

SEQ ID NO: 384395 - DNA, 2708 bp, Cannabis indica
acatatttgttttaatgcttctactctgtcgtaggccatccttgggttcaagttggtggcgttgctcctgacaaacctcttgattccgctgttttatctcgcttgaaacaattctctgctatgaacaagctgaagaaaatagccattagggtgagtatttatcagtcaactcaactatataattatagcagttaaaggtgtgcacataaggttaatcattcattaaattactactggtcagctttttttttattttccaagcactagcatgtattgcaattaaggtatgattattatactacaatccatgtccatagagaaattgtacattttgattatgtttagggtgttctattctttagcgcatgacttgcaattgttgtgtcattgcaggttattgcagaaaccttgtctgaagaggaaattgcgggtttgaaggagatgtttaagatgatagatgccgataatagtggacagattactcttgaggaactaaagaatggtttggaaagggtaggtgcaaatctcaaggattccgaaataagtggactaatgcaagcggtaagtaatgattctaattcaaagaactgtaataaggcttgtaaaaattgtataatcaattttgtttgctatttgtttccttgctagtggactctgtttgtagcaaaatcaattgttattttgacatgtgaagatgttaggaacatagatcgacaattgttattaatagtaaacctcaaaattgcatcctaaaatttttaggatgatctttatttaataacaaaccagtagattagctattttcgtgtacttttgatatggcttggcttgttgagtttgataacattctgtcctttcaattaacttttcctgttcctctaaaaatttcaggcagacattaataatagtggtaccatagactatggtgagtttgtagcagcaatgcttcatctaaataagattcaaaaggaggatcacttgtatgcagccttctcttattttgacaaagatgggagtggttacataactccagatgagctccaacaagtctgtgacaagtttggattggaaaatgttcaattagatgacataataagtgaagtcgaccaagataatgtaatttacttaattgaaaacctggctgctattagaatatgttgtcctatgtaaaattgtttaatattcacaattgtgtaattttttcaggatgggcgtattgattacaatgagtttgcggctatgatgcaagatggtttgggaagggattacaaagcaacatgagcattggattcagggaaaacttgaagcattaatggcttcaacaatttgaccatggtacacagtcaaatagttcctatctaactaacatttgctttttcatagctttaacagaaaaggtttgtgatgcatagtgttgtaaaaattagcagacttcagaaggagaggaacaaaagttttactctcccatctatacactcttttgttttcttcttgtatttttaccatttttcttctaaggaccctaatattggattagaaagctgtttataaattacaatttttcttttctttcccaccatacaatgtgattcgtggctccaattggggtgttattattaaaagctaatgatgagtggtgccaaaattgaatgtttactttgcttgaaatacactaagtcacacaccaccaccgtatttattcctgaaatctactagagcccagtgctactactatactctataagagtgtcctctagctagtagctaattaatgttgaaaacgacattattataaaggcaagtaaaagttcatatatatgcatatatgagtatagatagtggacctttttgtactctattgttttggagacatgtaaatatatatatataatatatatataggtacttgtcaagcagtagctgcctcctgccgtgtgcctcaggattcttctaagaaaaaaagctgcatcattgccatgtcgttttgtgtacctaagattgtactactactactacccaatacccccatgtcctgtttcttgtcgttttgtgcatatagggggataatgcatatctctttctaaatgtttatcaataatagagacgagtcgagtcgatcgtatagtatgtatgtactgttttggtgtgtactattccttttccttttcttcaccttagctagaacatatatgaagatagcaaattggagtatgatatgtggtacgtggttctttatttatttatgtagggagttgaaataaatcataatcgaaaaagaaaggagttgaaataatgtgtgagtgaaaaattggatggggtaaaaaaagaaagaaaagtaatgtgagaattgtgaagaattaaatataaaaagagaagtgtgagaggaaaaaaaagggggaaaccaaaccaattaaagagtcctctctccaaaatagagggaatgaagtaaagaaaaggtcttcaataaaaatataacaacgagaatagaaataggaatgaaataaaacttataaaaaattattaaatcttttctcattatgttttagaatggtctttttttttattatttcaaaatagaatagtaattttactaaaaatgtcgaaatatcattctatatattagaatgacattctaatattttagtttaatatgcaaaataaagaaatagattgaaaattgcttattttctattctattatattttatt

SEQ ID NO: 384396 - DNA, 1407 bp, Cannabis indica
tgtacaaaaagagaaaaatgctaaaaggcacccatggtgcctattcctaacacccttatgaggtgtaacattactatcggtgtaattcaatattgggtctcacttactttaatttaataaaaattgtaggaaaattgctaactaattataaaacgtcatgtcattgagacgttaggcccttactgccccatagcaatgcacttacagaaaggggcctttccagacattatctagaagcccacaggccacaagtaacactgaaccagacattccaaatcctatgcccattaacactttattccaacactttgaatttttgtccaacaattgaacaggaccaacccccattttttttccaaaaaacataaatgaggggaagggaaaaagaaaagaaaaatgtcctatgaagtgagggtcattggtccaccaacacgttttctttttcttttccttttttttggattagcatacatgaggactttatttacagtcaaaaaaactctaaaaatcacatatacgctgctgaataggattcattccaggaaaggcattaaaaacaatttacaaaaaacaaaactctgaaattggtttcatacagaagaattcacattaccgtacacttgtctttcgaactttgttcagtccctgggtagacaatgtcgatggattccggcttctcggcacctgcaattaacatttttttgcaatgcacgtgcttccataaatcataaactcaaggtaaaatacagaagaataaaacacaagtttagagaaaaatgatatcaaaactaataattacctggggaccagtgaccagccttgaattggtagtaacagtcggtggttgctgctgcacattttgacgctgtggctgttggtcgaactcttgttgctgaagagctattgccaattgcaaatcaggactgccaaaacagaataagacttggtgatcttgaaaagcatataatgagaaagaaagctcttccataacatgtataatgaacaaaaccagttattacagtaaaggacagagcaacattctgatctaatattcaacaatatgacttaactcatctcatctcatccagatgaaagagacgagaaagagaaggcactaccatttaccactcatatttattcctttctactttcctccttcaaaatatgaatatatagaacaaagaaataagagtgttgcaaaccagcaaaagttagaatcttactttactgattgtgctgcagtatcaatgctagcaatgtagtcctgaagtatgtgaagtcgaaattgtatcatgtaagttatgttgtgcacagcaaacatctcaggtaattcagccaaaaaaaaaagaaacatctcaagtaaaaaaaataaagaaacacataccgcagtgctagtcatagcattat

SEQ ID NO: 384397 - DNA, 1386 bp, Cannabis indica
agggcatatagaattaacaacaatgtgcctacgatgaagctcaatagtaacatgtagtgccgtgtggaaggttctccacacgaaaattcaaatttttgatgcatggtagattgaggctccaaaagttatccaataacgctcagtcgaggtagaactattcccagtatcatctttttttatcaagattaagcaaactgatatatatcccaatttaacagagtatcaacccgtgaaaaaattatgctatataattgtatcctctgttggaaatagattcagagggatactaagaattctatcaacatctacttggcaaaaatttgcatgcaaagccacaaaatcccattgtttgtgttgaataatcaagtcagcaactaataaatcaagattagaacctttaaataggaagtgtgtaaaacaagtgtgccttgaaatctaagggtcagatttgtaaataatattgagaccagtttctactctccatcttaacccttttagcagcaactcgttacccccaaataatgcctctccaagtcaaagaatgggaatttccaagatcagtagtaaaaagttgaccatttaagtatacttgtgtaacgctctacttacttaggcatgctacaatgattttctaaaaactgtgcacacctttgttaattaaaggttttttcaaaaaacgtgaaaaattaaaaacttttgaattaaattttaactttaataaatacataactttacataatttttgagatctcgtttaaaagtttataactgtatacaaaatacatttttttacaaaactgttgtccaacgactacaaaataaaagtccatgtcgtcccgagaccaaacactccagacctaaccatcctgatatgtacaatcatgctcaaactctggactcattgctgctcaaccttcgcctttcctttacctacacatgaaacaatatctatgagtcgacagactcagtttgaaaaacataaaacataaaacatattactaacttgaaaataggcgcccatacacctaccaacaaggcttcagatgaattaagaacgttcttaacagaagtacgaaccctataccacatgcactaagtactcgttccatactagtgttagtagggttaaactgtacctcgactacagctgagttttgtaccatatgatcttcatactcgtcttgtactagtgttggtataatgttgtgtcataccccttaaaaattatgttgtgactaaaaaattgtcagtaaatgtagttgttttttgtattatgagtgttattgtcaacctctttcttaatctctgcgtttgaaaatacatgtcgaaatattttttattttcatgacaatgttcattatagttacaatattaaactaaattttt

SEQ ID NO: 384398 - DNA, 1682 bp, Cannabis indica
gaataaagaatttatcattaaacttttattgcattaaacataacatattatttaacagtactaaccttttgtctgtcactcataatacaccatggttgtctattggaagtatcgccaatttctccccttaataggtccaaaaaccatctccaactattggcattttcagcttcaacaattgcataagcaatggggtagaaatgtatattggcatcgatccccactgcagccaagaggatgcccttatatggccttttagaaggcagccatctaagccaaaaaaagggcgaaccctcgtaagaaaccagttttgaccccttcataacaaagatcctaaaaaattgtggctgcatttttgggacttcatcattctcaccgtcttcattaaccgccactagttgactctggataatagcagcagaaccggggttagtttgatgaatcatggctgcatatcatctcaaattgccataggaataggcataatcacgacccacacctcctcttgccttctgcctagctttccaaaattgtctatttgtagcctcgatgccaaaattatctttcaactcagttctcattttattcaaggtaattttaggatcattagcaaacttactatgcaacttttttgcgatccaacctgaggtaactactctgttcttcactacacattgacatttatgttgaggattcaaagttttaataatgaattctcttccatcaggagataaggatgcatgtattctccatgtgcatccttctgctttgcacattgaagtcactctacttctaacatgcttcactttgcgaagctcaaaaccttcttggattgcatagtctttcaaaacatccccaaaatgcttatgatccctaaatcttaaccacctccttagtattatttttccatttacatatatatcctcaatttctggtattggcattttactgttaggattggcctcatcttcattcctttggactcttttataacatatatgaccagcctcatcactatcatagtactctccaaataatgcctctatatcaggctcatcacaacagttctcactattagaatcgtcttcatcatcggtcgaagtatcactcctccctcttctccattccaagtcactttcatcagtgggactcaacaattgatcatttagtgtgggtacatctagtgtggcttgcgtttcatctagtatacttgcatcttcaaattcagcaagtgtattttcattgatagtattaggaatatcaaatgaaaatggtatagaactttgaccaactttcttacgcacacgttgtttcatgcgcccaccactattaagtcctttaagatcaatcatatttacctattttattacataatataatatcacttttattataactacttttttagtaagtaactcaagaaaaataattaaagaaagaaaaaaaaaatgctataaaagctttatatatgtagacatcttctagtatattttttcatggcacatcaattttgagttattcactcatatatatatatatgcaaattcttaacggtgtgtttggaaagccacaatgtaattggatttgtgtgtaattggaggtaattacacaatttgacatgtttgtctgaccatgtaattatactgtaactgtgtaattggaagtaattgaggggttccaat

SEQ ID NO: 384399 - DNA, 1953 bp, Cannabis indica
atcatcatcaatggttaaaaatagcctaaatgtaatttttttatattttattattattaatattttaataggacgtcattccatataaaaggagagttactctagctcatttttcacattcagaaagtacatataagtcagagcatctctctctagaaattagagctttcagacttagctattttttgttgtaatcattatcgtaagaataaaaactcagacgtagctccattactgtcgtcacacagggattgtagtacaataaattcttgaggttgctctctatacatatgagcgagttggccagatttctgtgcaaacatttagtgctttcgttgagaggcagaacttaagaagtcacttataagatggttccaacacgatccacaagtgtggaaagaagcacaactactggccaaaatgatgggggcacgccagttattgggactggtgacgggacaacacatgcatctcagatgccaggtggaggccttagaaccggatccacaactcatcccctaaggtcaccaactacaattggtactggaccagtgaataaattccacctggggaaccacgtgtggaactagaagacattgaggaggctgatcctcaagttaaacatcttagcaaaacaatggttgacctacaccaacatctacgagattctctcggcaaataacatgaacaatttcaagcatggttcatggagaattggaggaacattgagaatcagcgtgctgagtaggaacaacaaagagctaatctgtctgaacggattagagaagcttatcactccaatcacaaaatggctcccataaggagagtttttgagctagctagagagataccccatcgcccaactagccacatgggaatgagtactaaaggggaaacccttaatgcatggaagactttctccaaacctgataactgtgatagcacttagggagcaacatgtgataaggctcctcatagggaagcaaactctaagcccgaaagggctcaagcttaggcacgcaaaccaatggcactccacctaatggggtgaccgtatactgctgagagaaccaatccatttcctccactaggttttcctcatcgatcgaatgacactaggtcttgtgatcctacaaagggaaagggactttccactaacaccgaagggggaagacaatggatttacttcaaaactagaggttaagaaattcgaagggtaaggactaacgagctgcttcacactcagaagtattttcaagattagagaagtgagttatgccaatacttcactcgcagccccagtggcatccaatatgagtacttgcctcgagtggatggggaagagttgaacctaagcaatcaatttaactctcttcgtacttgtgatcctgctaaagactattttgaaggaaatagtcagtataatgttctggatgatcgctctcgtagcgcattatcccaagacaacctagcctttgtaccataaaagtctccagtgttgccttcaagaccccacagtcaagagacaacaacctaacataagttaattggtattttcgattgacttggaagatagagagacatgcatgacttttagggtttatgcacagaaaagcctgtaaagaatagtatacccaaatttcgactaacaaccagaagctgacacgtgtaccacagaaggaatgtgaatcaacttaatgattgtattattaaatgcaatttaaataactcacctcaagaattacggttgatagaaatattcaaactcgctgccacgtaggtagatgcgcgatgagaataataactattaactgataagattggcgagataataagtccatctcaagataaatagagtccatagtaaaagttgtacgagatgagtaaaccaagagcttgcagctcattgacccacatacttaggaataacagcttgcaactcattgatccaca

SEQ ID NO: 384400 - DNA, 1395 bp, Cannabis indica
gatgatgatgaagatttagaaattgatgatgaagaatatgatgaagattgggatgctgaaggtgagttcgaagatgacgatgggattattgttgtcagtgatgaagatgaagaagacaggactagcaaatccgatgctaaatccaaaactagcaaactaaaagctgagaaagtagctagatagatagtttcttggtttttcctttgtgccttgtttatgctgtcatgagagttttataggggaagttctatatagtagatggtagcataatttgtctaatattgggtaaaggaaaacagcctatacaaagcagagttgtatttggtagttgattatcattattcaatctagttatcatctagagaatcatgaaaaatagttaaaagactagatgttgtttaaggttcaactatagttcaagtaaaatcaagtggcatcaaacttgagatgaatgatatactctaaaaataagagccatataaatcatctcatcatcatgtttcactaaatatatatattgttttctctaaatcttttaaattgttaacaagtatttgaatgcttttacacaagtattacaacattagaagcaaatccaaaaactaatgtggtcatagacatagtctaatgctaagctttcttggcttaagactaagagctcttttggtttggacaggtttctcagtaaccaagtttattaccttcaaaactccacttggttagtcaaagttttctctttttaaaaccagtaaagcaactaattgtaacactaaaataagatgttttgttaatcaagtttatagtgatcaatttgtatgttgttttgttatcatttattgttttattatcttaattaagaatgttctaatcagcatagtccctaaaagtagtgatgggaggagttgcaatcactctctttctgtgcccaaatcttctacctaaacagagaaagttttgggaagtgacaaacttgattgccatgaacatgagaatcaacactattagaatttgtctttatttaattattttttatgggaacttcgtgaaatattaaaggaatgttcatgttactcttattttttttatagttttatttaagatacacctaactatatataaattacgattaatagaagtatttaagtatgatagcgatcttttcaaaactaaccctggtagtttttagttaatcacaatcttttagtcaattttcgcgctctaaataacatgtcgattttttttttcaaatatataatttcataacagtattcattatacttacaatatcattctgtaaattttttaaaaattatgaataatttacaatattgaaaatagatttcctgatgttccactttatcatgagagttaaaaaaattcaaatttattttcgac

SEQ ID NO: 384401 - DNA, 2202 bp, Cannabis indica
ctctctcttctcttcctccaaaaacaaaaaaaaaaaggtgctttaaaatactaatgcggatcgcctccctttaatactactcactcgtcactcgttagtatgatgtttggaatatatttgacctcatttattctttattaatttatgtgtggaaaatgaaaaaaggaaaatagtgaaaataatctcattattgggatctcatcattcttctctattattcatatatgatgttttgtacttttgttcacgtgaagatatcattcatacttggcctgggatggatcccatcactcttctctattatttaaatcatgttttgttcacgttttcttttttcttcaataaaatcaattggagcggggagaatcaagaatagatcttctcttagaaaattgtatccctgcccaactcaactaatttaattttatattaaataataaatatgctcctattttagactctgctaacaatacacagttttcttttcttttttctgtgaactaaattaacttttaaactttggtaggtctcacatttattacattattattattttaattggtagatcccacatttattaaactattatagtaaagaaaaatgatttagaacaattttcccaaaagaaaataattataatatataagtatcattttgtttttctaacaagaaaattctatttgttcttagaatggaatacttgtctcggagattctagcttgcagccaaggagaaaaaattcaggtatcaccctctttgtaaaaaacttaaactttcaaatctctgtttcgcagatgatcttgttattttctgtaaaggggataaggattcaattcatgtaataaaggaggctttagaggagttcagtagaacatttggcttgaaaattaactttgataagtctcaaatttattgtgggagagtgacttgtcctgaagacttagctaaaagaatcaacttaactattgggagctttcctctaaaatacttggggattcctcttaggcctactaattagagacttgaagattgtggaatcattcttaaaaagatgaaaccaagaattctttcttgggctaataaacatctttcatttgctggtcgtgttcaacttattcaatcccctttgatcggtcttcgaaactactggatgagagtttttcttcttcctcagtgtgtgataaaagagattgagaatctttgtcatggttttttgtggggtctgaaggacaatcggcccaagatccatttggctagctgagagaaggtgtgtctccctaaagctcttggaggtcttggtttcaaagatggctcccgttggaataaagcctcccttgccagatttatttgggacataatgaacaaaaaggacttgttgagggtgaaatgggttaatgcagtgtatctcaagggtgccagcttctggtcatacaacttaaaagcagacactagctggtattagaagaagttatgcaggctgagaattgattacactcaacctgacatcgattctgctggtgtgggggaacttttagagtgtttaaactctataattcgtcctttaatcaacttataggccctgttgccaaagtgatttggtggagccttaatgttccgaagcatggtttcattctttggcaggcggttcattcgaaccttctcactagagacatgcttagcagatttcagattgttgttgaaaatacttgttgtgttgtttgtggaataggtttggagagtcatcagcacctatttttttgattgtaggctgtctagtttggttctcaccaaactgtttagttggctgggattcaatggttgggcttcttcctttaacggctagtgctgctggctgtcttctatgcaaccgagctttataggtcggttgctggtggcagcaactatataccatctttggaggaataggaacaattgtatatattcgaattattctaaaacaagtgaattgtattgttcaaagcattagaaaagatgtaaagtatagattgagcatgatcaagaatagaaaagggaccaaaatagagattgatttacttgagagaatgatttgtaattaattgttgttgtgagtttggtctttctttgagaaagattgagggtgtatttggcttgttcgattaatgaagtttttttttcttgataaaaaaaaatattattagagaaacatttatatttgtcact

SEQ ID NO: 384402 - DNA, 1972 bp, Cannabis indica
tatgtgaagttgctaggttgtaacttccatgtttgtcaggtgtgacagttctaatataaatcaccgtaatttgggccacaaattttccttcccattcgcctcgatacaagtgtttttgggtcgatgacatgaccatatgtgtcaatttgaagttttacaatatgccatatgacaaatactaaggccaaactttttttctaatcacaatatatatcactattcaactactatttctttcttcaaaaaacaaaaacatataatattattattatttatctgcaaaacaagaaataaaccaacaattttttttgcaatgtataacactttaatgacttcttatcctatgttagaataaaatgaaatataaaaacaaaacatagaatttaacaaaccctagctaaattccgaaagattaatttgagaaaatagtaccttttgtttgttgttgtctgatcggagaaaaaccctgcaagttttttcattaaaatgctacaccatcgccgattccaactgcaaaatcatgaccatatatatatgaatgcgtatatatattaattatattatatatattattataccatgtatatgttacatggaatatgcatggctcctcatacgccatccacggaggccatcgattttccggtggactctgcaaatggcatacagggagccaggcacatacttttatatatatatattaagaacaatatctcataaaaaccatgatatatatataatcacatatgctacgtagatgtataattctcatatttttgtgggagaaaatcgagcaaggagaaatagagaacaattaaagataggctcaatccctactagcccagttgtgtgtttcccaggtgtttgtgacatatatatatagatatatatatatagccctagctagccatggctgcaggagggatatatagaagtaacgaagggggatagaagagagtgagaggagaaggtatttatggaaggttatagtgaagaagagagagagagagagagaaagagatggggtttgatgtggtgaactgagtcataatcaaaatgaaactttattgttttataaagctccctagctacacatataaatagaaaaataatatttataataataataataataataataataataataagacgtacattttgaattggtataaaccaaagtgggcagtatgctacacttgtatagggtattaaggtatatatataggttatattttgtggtctctcctctattgtggggtttcaagagggaaaagctggtaaaatatataatatatatataaatatattgtagggttggagttgcacacccaagctttttctgtttttctttttcttttttttttttaaaaaaaaaaattaaagaaaaattgatgtctaaatatggagacaaagagagagagagagaaaaaaaggaaaccgggtcgattgggattggattgggttagtaaccacgcaatttcctaagctaatagcctagaccttaaggtgttttgaaatctccttttctgggtcttaaagcatgcatgtgttgctttttctcttctctgaacctcattttgtctctaagtgcttggaacacatatggattccccatctcctctattcctactacaccttccttcttgctttttccattttcatttttacaaataattaatagaaatattcagataaaagaaaatattaattataataataattatataaataaacacaaacaaaaaacatcataatttctcttccttttcttttttcttccatcactagtcactactactactatattacttttattttatttattctattgtcttttgcattgccatctttcatataccttattagtagtattaatatatgattaatgtattgtatattaattattttcttgtaggagacagagatctgtacttaaccactttttgttatttttttttatatatatttt

SEQ ID NO: 384403 - DNA, 1898 bp, Cannabis indica
atgtattgtaaataataaatattcacagtttaattggttgacttgaagtgtgtatgtattgtacattacacaatagtgtgagtttgtgtccctctttttaaatatatttctaaaaataactttaaatccatatatttttaagatcaaccctgctttttatatatatagtatttacattttcatatacaatgtgtttcattattattctttctaaactccaaagtattgtcctcctaccaactatgtcatcattccaataatagagagcaatatagagctatagtacttattccatatactcctatgtatttgattattgttattattataaattggtattgggttttgaaaaaataaaatctttacagttggaattggcacctatagcatggccaaagtacaagtaagatatgtgctaacttattatttatttatttatttattattcttaattaattaatttctctccacttgcaaaaaagaaagataaacaggtttcttatcttagtcagaaaaaggcccatataaaaaaaatgtacatttatttcatgttgttaaattgttcttgacattattatacacattttttttatcatcatttttccttttgggatttgattagattcttggctataataagagattggagtggtgtattatttgggtcccacccaaaaattgggtgtaattttttttgatgatttatgttgactatttttctataagataaataaacatggtactttcttccggtagtcctatctatcttcagcttgtggtacggcctgcagatgctgatcctatcaggcccttaaactagtgggccatggcccaaattataatggcccacacattctagaatgtgtccatcttatggggccatccaatgtgcattaggtaataattctcttcttaattaccaaaccattttttattatatacacaaaattttgtctttggatcccactttctatatgttttgggccttaaacaatgtaatatttatctttaagtaattttaggcaagttttattaaattactatgtactactacttcaccaaacttctgataacatctgaactctgagcatagtatagcagaaattaatataggtatcattaataatatttgtccctatttgtatgaacaagaatatatttatgatatacacatgaggaggagcatcactatttaaattacttatgatttaatcctgtgggattaagtgaacatttatgtttattcttctataatcaaaatacttttttttagaaatactcagaaataatattgactcgtggaatatgtaaattaaactacaaaaccgcataaaaaaattgtgttttacatatatttattaattataagtattaattcttgatttaaaaacttcatttattgttgacgaaaatctatgttaagagttgctatgttatgaaactcatagtctccattattagtctaacactgagagtatgaggagggctttaagacgactttattttcgttcccctaagaaaggtattgaaccatatattgttaaggttgacttcctctttaggataggacaaatattttagtgttataccaccctaaggtgacattactaagttaagtcatgaaaactaaaataatgggtcacactcagaaaataatgtccctatctttgacgctaggggacattattaaccgtaatgactcttatacactcatggactgacaactgaccttacagacgaatacgagtgtttctagcatgctttgtcctcactcgcacgcttcctggaaaaacttgccaggaggtcacccatcttgaaattacttcaggtcaagcacgcttaaccatggagttctttcgtgatgggctaccaaaaaacaagatgcaccttgttgatat

SEQ ID NO: 384404 - DNA, 733 bp, Cannabis indica
tgcaaataagaaaatagcacgtgaataatgacttgacacttaatggataggtacttaagaaaattcgtattattaattaaacttaagtatttatttgttattaaaagtaaatttaagtatttgcgctgtaaattattttttttattctttttgagatttcaaacttaaatttgttgtcttttagtgaaaaaaaaaactatatttgaatacacaacttcctataaattaaagatattgctgaaaaaattcaagagagatctgaaaaagaatttaagaaaagtcatgaaaagtattggtgactacatttaatggctaataatgtaaagtataaacctttgttcaaaacccctcaaaaaaaactttagttcaaagaaattatagtacaatggaccccaattgcataacactatttataatgtgtgtaaagtgacatcacatcactagctcttacaaaataaatactatcactaaacttgtctttgagttttggcattaaaatacttaagcttaaatcttggattcttaactttgtcttaggttaaaatttgtgggttttatgcttttaaccctaatcttaatgaaatggggttgagtaatgaaaaaagaacaatcattatgttctttagttagacttttttgtaagtgaaaaaatattaaaatcatttaatagactttggacatgtatttatagaaaaattctcacttaaaatgttgtcatacattaatgaagaaa

SEQ ID NO: 384405 - DNA, 992 bp, Cannabis indica
aataatagtaataaataataattggggctaataagagagcatataataatggctacgtagctagaaacaaaatacttaataaaggttaagtatagtttatatatgtaagccatgtactaagttttcaagtggtcatcacctcctttgattaaggtgatctatcaaatcacttctaattactcatttaattaacaacttgcgttcttttaattaattgatctgtcaaaaacatgtacatgttaatattatatcttgtttctctcagtttaattaattcattttgtttaattatgattttaagtttcccaaaatgggttattaatcatggacatttcaactattggacttgttagctagttcacatcacttacatatagctataaatttagatccgtcaccttgtgtcgtcattgtaaccaaaaatagtggtagggaagaaatacgggggcaaaatataaaaataagaattaagaggggcaaatatagatttgtaaagaaaaataattgtggttggtcctattagctgtgtgtggtagacttgtaggcctatgatcttgagtttgaatcctttcggacgctcgcacgtagctcgtttccctaataggcgaccactctatatcaggcgaagattccatatattcatgttttcggatgcttgctcgtagttcgctttcttatgagaaatctcagtgcctgctgcttgctgagtagtggcgtgactagcgatagtgttgctttgcatgttcatggatgattgctgtcttgaacttatgaattccttttggaacaaagttcttggtagagaaatcgaaatgtagttagggaactcgagttgtggctctcaatgaaagaaccaaaaatattgacgttgaaaatgaccaatggctgcttgctgagcctttaaagtttccatctccccgtccctccattctataaactgatgtctttgctcgtcgaatgcaaggtttatatagcagcacggagatcctcct

SEQ ID NO: 384406 - DNA, 1590 bp, Cannabis indica
aaggagtatagccctaatttttttgagtaaaagggtttaacaatgataagcataaaaatataaggagtttagccacaaattaccctataattattattatggaatttaaataataaataataagggaaaaaaaggcaactcaaatctgaatttttgaagcagtgtatacatgcaatatatgtgtcataccactttttcttttccatggtaaaattttgatgatatccacatgtggtcaagctgtataatttgtatttatcgacactgaggtagaatataaaatagtgaagatacaaattataagtaaaatcaatattggggggggggggaaggatataacttatatcgtaaatgcacaaatcaagactttcttttataatgtacctcaaaagagcacccaagaacaaagcagctacaagcagactgggagaaacccaactaacataagaaacagggagaaaaaaacttcaaatccaaactaaaaactacaaggacagacattaatactaaagacagcaacctaaatgagaaaagaagaatagaaacaacaaaaccacaccacaaccatctgctcaatcattgagtagggagctgtcaaaattagacagatcaatgttcccaaattgattagaactgattgcccatttggccataccatgggccacaccatttagccttctagggatccaacaaacctccaaaaggtttaaatgctttatattgttgtgaaacttcaccactaattcctggaaattatgatgcaaggcattgatttcatgtggttttctaaccacggtagccacagcaccagccgagtaactttgaaaaataacattataaagaccctggttgttagcagtttcagcaccctagttaagagtagcaatctcgccaaccaaaggatcgctataggtaagaagcgcattgtgaatgttcgcagatacccagtcctcattcctgaatatgggtgccccaacagaatgttgatctccaatagcaacatcagtgttgcatatgatcgacctaggtggaggcgggagccacttaggtagtgtgttgccatcaggggtgcgaaactcctctatcttcataagtctcctattgatttgaagcattagcacagtaagaggagtagaacttgcattttggatgtggttgtttctttctttccatatacattcaaatataatcgcagcaccctccgagaacacattaaacctcaccctatgggccgattaccctcatccttaaactagattagccacgtatcccaatctgtaatgcaagagccactggttctaagtttccaaatactaccaaacctagctctagcgaaatgacgattccaaaaaagatgaaaggagttttccgtagccaaagaacaaaaagaacagttcgagtcttgcaagctaaacatcaaaagaagtttacctcttaagagtaggttgttggagagaattttctaccatagcatcttcagtctactatgaatttgagctccccaaatagttctccatttctcattgtggctttcatttgcatcaacattcttaaccaacctatatgctgatttgtgttgggttttgtgcc

SEQ ID NO: 384407 - DNA, 5604 bp, Cannabis indica
caattaagttctaccttataaaaccgagctctttaaaattgatatttttcaccaaagtaagctaaaatcattctaaaatactctaaacacgtgattagtcttctaaaatccaaattaaaatcacactaaccaaaggtttgaagaaataatttaataataataatgaaagaaaatggcataacttaatagataaatatgcacttatcaaacatggacttgtttttgctaatgatcggtgtattactccaattttatagaatgtccttaaaggaagggaccttatcaaacttagacttgagcaacacatcctcctccttaggtgagtcagccttgtctatattatatataatctattctgaattatgcgaccaattgtaatatttcaaaaaaaaaaagttaccaattgtaatatttcaaaaacaaaaagtatgcattgacgatattttggctccacagtgtaaattcttatttttgctggtttgaaggatcattacctaactaataacaatgatatttttttgctttgttttaactagaaaaaaactaaaaatatagaggttttacataattggtcttatataaaagcctataaaacaaaaacaaatagaagccttcaaacgatatatgatatatgtaatctatatgaagagtagcatatctagggagaccaatttagcttcatattatatgtcagaatttacatagattggagagtaaaaaatgttaaaaaataaaaatctctcacacatattcattaaggacaacaaatcattttgataatgtttggttcaatagtgaactcatctcatggaaggtcaccctggtacgagtttcattatgatgggaaaaatgagcttcatagtttggagactggtcaccgaaaggtattcatttaatcaaatgatgtggggatccttgatctctctcttcttggttcataattttaggagcatatgagaaactctcctttgaattgtacaagcaacaataatttatgggataagaatgacttgtttattttggatattaacgatttaatttccttgaaaacaaagttaaaattttttctacaactttcatgcttctactgtcgtcatatatgttaatattttatattttgtgtaaacacataaagaactaactagtcttgttgcatataattttgtatatgtttgttttatatataagagttttatttagaaaagctaatctgataaagaaggatccttaaatgtgttgcactttgaagaggaaatttccaaaaagaaaatgtaatttgtgaagcctccgttaaaaaaaacaaaataataataaaaaaaagggcattatatggtggtgtgaccacaatttatttttctttatcaacctttcttcctcactctctcatgcacatcactctctctcttctctctctccttctttctttctttaccaataaaaacatattaacaccactggtggtggagctccgacaaactatctctggctaccgttcgaccacaggtgccagagcattcaactcctccaccgttggagacctcaaccccaagcgaagccacctcatttgttgtcgttagctcgagattgtgagtcaaagtttaggcattcaaactttgaatgcattttcggccagctccgacctctgtttcacgatctatcttccccactagattcatctcattgaggagaacaactacactaagtcattccacccagctcgctacttttttcagtgacatttttgtagctcagacactcttcgactgctttctatcgatattgtgtagtattttgaaaaattgttagtgtgagtgtgatctactcatcgaggtggtcattttgatattttgacctcacttttagccaacgacactaagtcaattaaagcgataaggtaatagatagtaattaatataattaagcaaataagaacacaagatttatagaggttcaaccccgtgattatagtaatagtcgactccctttttacttgtattgctttgcagaattattaagatcacaaggagttggccaagtgagtttctcaataattcttaagaaaagcttacaattattttaatagcataagagctctcaagaacatctgatttcatatccctgaacaatggaatgaatccactatttataggaaaaaaaacatcaattaagtttcccaatacaattaagtataaattgggaaactaggctagttccctatttgtcagtgcgtgtcaatcccacaaaaatagggatatttaatttgaataattaaatgaagatatatttatgaaatatatccttaaagatcttattcatccgcgttattctgctcaaatgatctgacttcactagataatgaagatctgtacggacaatcacgtacaagttctgtccagatgattcctgttgttaactttctaattttaagtgtagaattccctaacacagccatggagggaaaatcacatgtccagacttctcaatattctccacatgccaccatgttggatgtcacatcaccctgtatagaatttggcataacatttgacccctaagtctagatgggaaccatatgcttgtatgtggacttatttagccattaagttggtcagatgggtgacacatgtttggtcttcgtgctctatcttgatatgatgtgatttgattgagggaaaacgaaaatatgaccgtctcttcaatatttgggcatttaatgccacatcttgaaaattggagctcgagacatgcaatgacgactacaaggtattgcatgcttgacatttgtactctttaatgggtattaactgttcttttttgggggaaaacccaaaatttaaattttgaattattgaattacccctcaaagcacatataaaaagggttttaatcctctttgacactcttttagccatttccattctcaaaaaataagagaaaattttccttttttctctcaataccttcaaagagttcttactggaaacccaatttgttgaggtcgtccaagtgcattcaagaatctgcaaacattgagtaagttttctttcaccttctcatttcttttaaattattcactttattttcaaatttgcttctgtaaaaatctgggatatatgaaactgttctttgacgatagagattaaggaaattagggctttcaaattttggtctaaatgcaagtgcataacttatgattatcaatttctagatgattcccaactatttgtgctgaaactacttgaaaatggttattcagagtttctgagcattttttgggttcttgtttttcctttaaatctttaattttgggaattttattcttggaatgaaatttcctttcttttttgcttttgaatctatctgatcagagcatcaaacatgtttcttccttgcaagctttgcgcttctctgcctagttcttacctctctttccttcttttttagatgaactcgagtcatttttggggaagtaagcaccagatagataattatttgcttcatttgctttacaaaaactaccccagattctgtgcattttcatcatcaccaagcgagagttcattgaccttgagctatgatgagtgggatgttacaagtgactcatcagagtctttagagctcgtcatgcaacaacaccattatcccgaccaaattggtggagaagggtacggtaggttcatttgggaattgaataagggctggaggcattactttcctgttgcgtatagggtccgggtagacattccagatatacttcttgaggttcttctagatccttctaagaaaaacttcgtactagcagagatcacagttagcattgcaaagcataccatcaaatagaatcacctatccaagcatagggtgatggctaaaactaagcaagcttataggaaggcctcagttgaggatccacactttgcatgacttttcactatagccaatgtggaacatgttgaacaacctagggaggatgctaaaatgcctgctggcgacaaagaagtctaagaagtagaagaccagggcaaagtccatccagctgcttctccaggtggtgaaggagaagaggtaatggaagaggaagaggttccctacactctcccatttaaagcgtataacgaggctaaggtgcccgtttcagagtccagcgaggtcttggttttggctcaagactatgtcgaggtggagtatgagacggcacgtcccatggggactagggagaagaaatttcctcagtgggtttcaccttcgtccactctcacttacaagaggctgaagaatccccatgataagggccttttttaagatgttgaagcttttcttcgtaccctcaggtagcttccttctaaccccagggaggggctttgtgcgtggttcagtccccacactgagcaaggtgcgatcttgccttttcatccatactataagaagatctctaattcctacaaaatttgcccgacccagttcacttcgaagggcatcaagtatttggcttcattatttgtgttgtatgacaagcaaggttagggcaagtcggtttctcatgatacaatttggattttttatttaaattctagctcgaggcacaatcgatcgggctacttctatttttcacaaatggaacacccatggctgaccaacataaacgaattaggggtatccaagataggtggatacattaaggattattatatcatgcaaggcatgaatgtcgaccaccaatctttctagttgaacttgacttactgccatccccctttcaccttgtggtgagataaagggcttaggccattcttgaactttcaatagatgctcagaacatctcaaggatggccaccacagagaactttctcaagtacggagtatatcttcccagagaagtacaagaagatgatccagtagccaaggatcctacttctgagtgggatgttctgaaggagaaaagaagaagaaccaaaagaagacatgttaggactcagttgaaaaacttatttagatcagagatgattctgaagaagttgttcgtcctgccacccaaatagtagttggtaaaaggaagggagtagtcaaggtgccaaacaaaggagactctttggatgatgacactccatctttgttagtttcgaaggtgctgctctagagttttagggtagctatttcaacattatctttactttttatgacttgcacaaatatttactaagtgttttcttctctatatggctatgatgagcagacttaaggacctgttgaagaggaaggctggtgactactcttgatagaagtctcctaccaagcagcagaaattacgagatgctcctccagttagtatagctttgagccctaagacttcctgccctgatacagagaaaactcaggcaattctgactcctgggacgaaggaactttccgctattgacattctagacccccctcctctgaccaaaaaaaccttctaaggcttgccccctagccgctccgtcgaaaatattctaaaatcctgtaaggcttggctgaagctgatattgcaaatgtttagcagcataatttgcccgaatcgactataaccacaatgtcgcttatcctgagaccaagaaaggccaaaag

SEQ ID NO: 384408 - DNA, 2270 bp, Cannabis indica
ttttccatcttgtttcatggaccaccaagctacattcttttggggttaatgcatttatttagcaccattattaactacattgctagtgtgctgtcattggagttgttttgcaactttattagaacctttacttctctccaacctcaactcaaaccccaactccaactccacctttatcctctttggtaaatagccccaagaatctgtggtacacccaagctttgttatctttccaactccatcatttccaccttctgagttttatcctattatattacttgtcttcttatgtcttttgaaatagtttttggctgccaacttgacattgatattgtatgttttgtcattttccctccttgacatttttttatagttgttagtttctttattacctacttttccaaattatgattagtatctcagtttttgggtgtagtctctcatgaatcaatgtctccatttctcacagatacagttggctgcaatgttggtcagatgaaccatatggcgaacaagcacatagcttcaacagacctaccaaatcatagaagactcccagagacagattccaatttagtacaacaaaaaaatctgatatctattaataattacttttgtcaagataaagctggtcactctggaagcattttgaacccaaaccctgtgtcgaccggccttaaactttcatatgaggaggaagaacacaactcttctgttacttcagctagtgagaatttaaaagctgttctccctgttatttcctcagtcaatgacaatctgaaggtcgagattgatcggcagaaagaagaatttgaccagttcattaaagctcaggtaattcacattgtttttcaaatcaacttacattgccattcaacttggaacattctaaaaaaaatatggagtaactgtttagacacatcacacataacatgatctattatgttttaaacaagtttattcagttcgttaagtttcttggcaatgtttccacaattcatggtgtttcatcgcattgtttgtccataaaggtgcaaattgttaccaactctattgaacttttaccaaccatttgcctttctcggcttattccattttgtaggaagagaagatcttcaagggtgtaatggagatgaggcaaagacagacagtttcctttctaaatgcagtcgagaaaggagttaccaggaagttacatgaaaaggagaccgaagtagaaaacatgaatcgcaggaacaaggaactaatggacagaatcaagcagatcactgtggaggttcagacttggcactacaaagcaaaatacaacgagtctgtaatcaatttcttgaagagcaacctacagcaggtgatagcacaaggtgccatacatgtaaaggagggctgcggggacagcgaggtagatgatgcagcctcttacacaaacatgaatcatctcggctctgtgggtgtctctggatctgcggttactggtaaaccgatcaactgcagagcttgcaaggttagagaagtttcaatcttgttgttaccttgtagacacctttgtatgtgcaaagattgtgaagggtttattgatgtatgccctgtctgcaacatagtgaagactgcaagtgtgcaagtatacatgtcttaaagttgtaatatgttaatgaggaaatgtatattttctttattttattaatacacttgtaattgtctttccctaattggaaggatttatttattttatttatgatgtttactacaacatctaatgattatgggtttcattagaagctcagtcacaaacacatagacacatcatagtctccattcacttttggtaatggcaaagaaaagtaagtggttgcaatcttggtggttcttaacttaagccagctttcttgttgtgtcttcttttgtccctttatattttatttgaaatttcactttgtattaaacaaaacttataacagggaaaacaaaaaacaaagctttttgtccaattatgagtagcaaacgtgggaacaacaagatggtattggtttttgtgttaatgggaagtgcaatagtatatttatctaattggaaaaaaaaaaatctatctttatcaaattaaatctcaactgggagtagacctggccggctctacatcttatatacattaaatatttaacctggtatctggtttggccctttcatcctattgctgcagaactatgggaaatcaagttgggacttaatctaggtgccgtttggtaaaatttttgttttttaattttttaatcaca

SEQ ID NO: 384409 - DNA, 1632 bp, Cannabis indica
tcctctagtggttcaatcattctccctatcctaattctgggatccagttcatctttgtaatcctctcggacagctttagctttcatctgaatgtccattccgggagtaaaattcgtctcttctcggaccatgaacatggtctagacaaagacattgtaacaacttttagcgcttttttggtcacccctgatcacttcgatgcttccattgtcacatgaaaactttatgcacaggtgccttatggaagtcacgaccccaaaattgactaagactggttgtcctagtatggcattgcatgcttgtgggcaatccacaactgcgaataggcagtgtttgaaggcgcaaatgttgttctcccctttgagtgtcactagaagctagattttttctatcggcataagagcatctccattgaatccttggatctggatgggatagggtgataaatcagcctacgtaaacccaatcgcttaaaatgcaatcttgaacagaatgttcaatgagcttccattatctaccaagaccttggaatccctcttgttggcaatctgggattctatgactaaagggtcattgtggggaagtgaacgtgcctggcaccgtcctctgtgaatgtgatttctaacttcatggtttgcggatgttgcattggcgagtgcactaccgcacacatctccccctctttgtccagttccttcaaatatctattttaggaatttctcgtacctctcgcaatatgaggtcctcttgagatcatggctacatgtccatctactggtggttgagctaggcctagaggatatgggttccctggtcctggagctaacactgccattgcagcctaagctggtagagcggttcacttcttacgaagggttacatcaccctactgtcccaaaataatcaacggtcagcgaacaaccccttatccaggataaataataggaatttagacccattgaacgagatatctggctctagccaacatttctatatcatcttttaaatagccacattcattagtgatgtgccccacgtctctatgatactcacaccatttattttgatctctattgtactttcctcctagaggcatccttgggagcttcctgtagtgaaccattttgtaggtcgtcttgtacacattatcccgagtgtccaccaagttggtgtacttagtgtactttggctcgtattcctttcttagtttcttcaaaatctcacttcaattttggttccttccacctctcttgctttgggacccactcacattttgttctaaaacttccatttgtggcttcgactgtcagggagtaatacttcatctagtttgtgccactacatacccaaagaattgattctgagtaggtgcttgcacggatgtacaaggttcgaagacagtcggagtgtaatgggttccgagaataggaacttacggagcaaatcctggagtagatgcggaaggggttggtgtcgaaggggctccaaacgcttgtttgtaagtgttgaccgaggttttcggcaaccaataaaataatataaaattagagaactgtaagaaattaagagatggtattttttacgcggttggggcgttaatgagccttagtccacgagtcagttgtatttatg

SEQ ID NO: 384410 - DNA, 2678 bp, Cannabis indica
attaattcattgctatattcattacacaacatgacataacgtacaattgacaatcaacaaaggattaatcaaactatatatctatatatatatatttatagcatgaaacaacacggaaatataggtatagagcaacagtggcaactgcaatatataattggtggcagattggttttaataaaggctatggacaccttacatgttttggggtagctttacagagacttgtaagagtctgtggttgtggtgacagaaaaagtcattgcagaaaattctcaatatgtaggaaagtaatatttattggtacaaaatcccaaaatttgctttctaaattgtgatccaggtaaccattctcaaatgtttgtattgggaattcccggttagtgtggaagcagagacaacaactacaacaagtgtgtcgcttggtttgatttgtgttggtacagttttaatcaaaaaatttctcaagagcaatcaataaaattccaagcttggattttgtttggcacaagctttggccaattaggtttggcatatgtgccccttagcatttccccacaaaatatcaataaatgcatgaattaatgagcactgattgaccttagtagctcagttgtctgggcagattaaacattttcatcttggtgaaaataaaaagatcattgttattgggtaccaatagtgtctagcatctttaagacatgtcgccttgcgattggctagcaatactccctaaaagttattatattaaactacatgagacccgatacttaattagaccaatagcaatattgacacgtaggagggtgcttggcaccactggtgcttatagcatttctcaaataaaaattgtacaacttttatttttattattaaagttgaaaattttaatgttacaaaaatcaacgtctacaaaacaacaaaagacagacttacttaaatgttacaaataaaataaaagattgttagtctctcttaaagagttttctcctatctacaagtaataatctcgctttaaatactactataatcaaattattcacataagaagttataaaaactttttgctaaaaaatacaattttgttgattccaccaagtatttcgctttaaattctagtttttttttcttcaatttcttatgtgcatttcatttgtgtttaatgcttataattgtttgatcactttttatttgtttatgatttttatgcaaaatttgaaaagtgagatgataaggccatactgaattacacagagatttcgatattgaacgaaagtaaatatagtctatgtagcaattaagattttttttgtttaattcaaattatatgtgtaatttaccacataagtgtaggagtttgtcatataatttagattctatatatcttaataagaatataaattgaattagttcattcactagctatcacatgaaattgaaataggagttaaattatattagaccataaaaagttaatacaattgacattaattacttaaacttatcattgttatttgcccattattttattgatttgttttaatttaattttaaatcttaataaattctttttttttgttacaagataggtctaacaatttaatcgtctagtacttaattacaatttttgtggaatctacttcactcttgtgagtctattacttgtaaattgtaataatatgtattaaatttcacatagtgtccgaccacatgataaaataattctttttaatacccctttaggagaacttggactatccatacaacttttaaagtggtttaagtctttagtatttatgaatttgtgtttgaccaactttgagttacctaaacatttttgagatacctgagccatgaaattgttcaacttgttaatcatgcaattttttatatcaaatgtccttatcaagatcgaagcatgaaacaaatgcatacatattttgttattttatatatttttttaatcaacacgcaatgacacagctagctaggaaaagtcttcaacatcttattgtaccatatatatcaacataatggacagaagggagattagtaaattattaatcaaaatcatcactttaatctagactaagttttattcaactcttctgagattttgggtcatgtaggattctttttatatatgaaatgttttctcatgtccttattgtattactataccacaagtcaaatagtcatgtctcttattcattaataaatatttccctactttcatttgaaataaataaatatatatattcctagtttttgaatcttataatcgaaaatcataaataactcggttcaaaaaacaaaaaaagtgtttgatgcagtatttgtgtaccaaatttaatcagagactgggccttcttagcaattcaaggctgtttggtattgtaattgaaaatctacttttatttctaccaaaaagaaaaaaaaaattgttctgagaataatttgtagttttcatttttttttttgaactttcttacgttacttcttttatcattgtcctcgtatcacttttctctcttcattttctatttctttatttttatgtcatcaatttagtttttctaattgtcatttctcaaaatcacatgatgatattaatgttataaatagagaatgttaaaaataaacctccacttacactgatattaagactaaatacaact

SEQ ID NO: 384411 - DNA, 1669 bp, Cannabis indica
atatatatgtgtgtgtgtgtgaattaagtactttgtgtcagagtgttgtatagtttgaattgatctgtgtgtgaatattaattttaattattggtttaacattatattttgtttagttaatttgttcctatattattgttggaacttacattatgtaataggggttgcttttatgtttttccctgtgtacgtatataatttaaataaaatagagagcccactactttcttatatatatatataaaatatattaggttaattatataaataaaagaaaagtaaactctttgaagaaatttatttataataatataatgatatgattttaagtagggaaaatgattaatttagaactaaactacactgtcaatattatatgtgtgtatatgtatatactgatgaaagtgtattaatattagtattaagggattccatatataatggaaaataattatatacgtttttttatagttcattctcctttggatgaattttgacaaccatgaatagtactcatcaatatatattagtatatatattatgtatatttgtgcaatattgcagtgctaatatatatgtgtgtgttacaaacaaaataaaaaatatctgttaataaagtttactttattaattaattagttattattatcaaatattatagaaagaaataagaaaacaaatgtttgatagataacatatatatatatgttctcctctatattgggattattcttacatgaaatacaatttataaataagataatgtgatgatctgtgaataagtagaaacagccccttcatgagattattcatcttattgtttagggttttgtaacaattacacaataatataattaaatatattctatataattatatatattgacatatataaatccatttattagctagctagggattgttagttataatctctttttctctctctagatgtataactatgagagatcggtataactaactttaaacactcatgaatcatcattacacattatataatattaaacatttaaacttttagttgtcatttaattatttaggttggtatcatggaattatgtatatgtatgtatgtatttatagtaaatattaaggaacttcgaacacaatcaaaagataggacattaatttcttgcttaaacaagatgtatactcgaaacatattgatattaatagagtgatcttcaccttcaacaattgtttatgtatatggatatacatgtaatactaattaaaactgaaattaaagaagaaaattagaggatgtttttcttttaagaatactccattcaaaaaaatttagactagttataaataaaagtaacttttaaattctaattagttatatattttttaagttctattgaaaaagtatatatatatttatataagaataattaagtcttaatcaaaaatatatttatatatctatataatatatgttttttttatgtagaatcaagaattttattctacatttaaattacatgtaatatttgtataatatcaagtttatattttattttctcagttggaaagagtaaataatgtgtcaaacaatcatatagaaatatttttttaaataatgtgtattaattaagaatttttcattattattgttgttatattttattctttttagtgtttt

SEQ ID NO: 384412 - DNA, 713 bp, Cannabis indica
ggaagtgtattgaaagaccatataggaatggtatcagatattccagaacaagataaatcaatataggaaatatttgattgtgtttgaagccaagaagggaaatgtggacctatcatgcaagatctcaaattgatatgttggagttgatgaaaaggtggaacccaagtgtttggcaatttcataatcaaagagtttgaagataaatcaaggtgttccaatttggagagtttctcaagatgtgattgagagacaactccactgaaagaattccaagaaatatctaatagctcaagactagaaagcttgcccatactttctggtagtgtgccattaaacttattgcttgacacatctaactctctcaagtttagaatcttagcaaaatctcttggcaatggtccagttagattgttatgagacaaattcaaaatttctaaggagttgttattgcaatcaatgaggcttttcaaggtatcaatgatggtggaattgaattggttgtaagacaaaactaattctttaaggttgcaaagattccccatcgatttcggtatttctcctccgaattgattcaaccgcaagttacaacgccttagagatttcaaattttgaaatgaataatgtggaataatactattactaggagtaacttccacattgaaattattagagtagagagagagatcaacaagattattgctcaaattaagcaa

SEQ ID NO: 384413 - DNA, 3972 bp, Cannabis indica
tttttaattttttttattttgcgccctgggaaagtgtgggccctaggcatgggcctagcccgcctatgcctagggccggccctgcacgtgggcgccaaatagaagcttaaagcccattagttggtctaaataatataaactttgtcaagcccaattgttattttgtctttcgggagaacaattgcactctctctagatgaaggttctattggaacttattttacctaaatctagatttactaacatgtatgtttgattataatctataatctaacattctaaacatgaatttccaaaaaataatgaagtaaacacatataaagttttagaaaatcttacattggtggtaacagaatattatggctccttctgttcatatctctaacctttgttcatttatgtcgcagagtaataacaagatctaaacttgagtctccttcaggtgatagaattcttcacaatcttctacactatgattgagtacttacttgatatgagtgggaaaggtactcctcactatatggactttgaaacttgaagagagaagagagagagagagaattagaaatagagaagagtctctctttttcagttatctgacagaatagtccaatgaaagttatgaaaataggagcctgtcatatctatttataggattccttctacggttaggatttaaattatatggaattaaagaaaagataaaaaaaaatagattaaaatttacttaagtggttggccatgtagtggatcccactggatttaattttgtcatttatttaacaacttattattttctttcacaaatgtcatatttaattttaaacctttaaatgtcgaatctatttatttaataattataattaaaaattaaataaaatttccatttaatttatttgtaaattagaccttacaaagtcgcttaattaacaaataaatcctaaaaccacttctctactcaattaagtcctagcttagtgaaaattcataaataagacatagcctaatttagaattctaattagttaattaaaaccaattaactaagtgtaaaagccaatattatctcaactagtgtagggaccattggcctatataatcaagcttccaataagtagttctagaatttaccgagtaaatttcctatcttactaattcctcctaactccactatagattgggaattgcactcttaattatatataacactttatatgttccaaatataaatacgctatgaattattaattgttataatccaaataatcaaagatcctccatagatgatttgttgggaatattttaccaagatcttgatttactaacaagtatgttgaattaacatcctaaatatgaattgtctaaaataatgaaaataaacacataagggtttaagaaaaacttacattgattgcagcggaataatatgactccttccgttcaagatctccagcccttgattcctttctatagtagagcattatcaagatctgaacatggatctctttctctccttagggtttggttaccaccatcttactcactatgattgagtacttgacttgctatgtgtgggcatggcactctttcactaagggtttcaaatgtgaagaacaatgaaggaggtgaaatcattaaggaaggagctctctaatctagattggttgaatagtcaagttgacattagttagatgagtgagagcatcatgtttcttttatagtgtttcaactagggcttagaaaaagaataaaatattgggcaaaaatcacatatggttgtacacttaaagtgaaccactttctagttacaatttcgccactttattccaaccagttattcttctttcaataataccatattttccaattcaatcatataaatgccaacacattttatttagtaattataataaattatcaaataaaattgtcatttttataatttattcattagaccatacaaagtctcttaaataacaaattgaccttaaaacctcttttcttcacaattaagcccttacttagtcaaaattcataaataagacatagtctaatatcagaattataattgattaactaaaataaatttactgagtctacaagcagtactatctcaactaattctaccttgtctatatattccttcgtgcataatttacggcggtttatgcttagaaaatacttgtcaaatcctccctggttgctttaggacatgcgactcaggctgggggtacgaaagatgcaggagggtatgttacctcttcctcatgtactggccccaagtggccccacgtcggggtaggcggcagcgaatctctttgagatctctactcctgcgggcagagggtcagggtggcatgacacccattcagagcgcatcacgtggtcatttttggctatgttggtatttataacagccaagttgacagcgattgcttacttcacctccttggtaggttgaagctgccccctgaaggctggcagtgtcaatgctctagaacttactgatcggacccgacctacgaaggtgctcagttgtcactaagcctccaaccttcaattactctttggagaaggccctgtattggtcatctttccttgctatatctttcgttctaatactcgaaaggagaagttttgctacaaagttaaaaaaatgttaattcacacacaagaattggcagaatccaaaaacgagcaaggcttgtaatgaactattaaaatacctaggagttggaagctcaattgaagggatggcaccatgcaggtagggaacccgaaggaaaagaaaaaatattcctgaagatcgtgggtacggtccgttttgaaaataggacaatatgagggtggctgtttatcctgtcagaaaaaccccagctttgacctatcaatcctcatgggattggccttaacacagtaaaagtaaaggatttctttcgcagaaggaacctctagtttattaattttgcagaacacgtaccaccgagccaagagtctgtaagatgaagggattagctggaagggcgcaatcccaattttttcaactaggctcgcaaagtaaatcctcaaaggcagatgaccacctctggaaatatgggacaaactccacacactaatggatgcagattctccaaaaatggagaacctgtgccacatcaaactaggaacgttacagaggccagaaactttggagtacgcttgtaacatcccataggattgaaagcaattggccttttgctccatatcccacacagattcatggcagacctgtgcttgcaaaggaaatcccattctcctggtgtttataggcaagctttcctcaacaataggctcatcttcggggatagcttctaaatctccacaagctgaggcgttactatggggatttcgatttggtcttgtctcttggaaaatattttggcgacataaatagagtctcctacgatggatatagctacgtctgcaagggggacttcattcaaatccatggaagacagagtaaactttttggaagagtgaacagattaaaaggtgagattttttacgcagataatcttactgtactacccgagtacggtcttggccctaacctaagctaaaacctttcttgccctaaaccagaaaatgccaataaattaagatagggggttagtacacttacttgacgtaaaaaaaggagtagttggcgactccagagttgtgttttatgccctaaataaaactccttttcaatgtaatctttattctttaaatatcaataaagaaacataagtatttttcactcatttgtgtgttatttggttcatgttatcatttacttgtttatttgatttataaattcatccaaacccttatcacatttatgctcttgtttattgtgtcgtcagcacagtggaaagtaatcaagattatgtgattaaatatatatcctagatttatcaatacacaaagggtttaactgatatgacaatct

SEQ ID NO: 384414 - DNA, 1143 bp, Cannabis indica
accaaacgcacaagtttcagttttattctacgaagtgtatcaatctttgctatagtgaagcacataaaggctataagttcctcagtccgcatggtcgtatctacatctccaagcatatcatttttaatgaacaaaagttcccatgtgaacatggtttctttaataactatcaacctgaaaaaattgtcactcttgacactcctcactcatggatcacacttctcactggcacccgcgactctcctaatgaatccacaccagatacctctttttcgacaaacacaaacgacaggtctcccgctgcagaaccacttacacagtcccagatcaatcacaacagcaggtaaatgctccgttaattcataatgatattatcctctcaccacactatcagtctccttctgttatttcacaggctcaagacactccagcttccactcatagctcatcactactaaactcccctgctgcagtgtcacctttgaggccctctcatcctatgattactagggccaaggtgggcattttcaagccaaaagtgtatctcaaccatgccaaatttgatctctcgcttcatgaaccatactcactcgaagatgcacttcggcatgaggggtggaaccgtgctatgggtgaagaaatgacagctctacgtcgtaaccgcacttggatacttattgacccaaatgtcgtccatgttccacatatagttggctgcaaatgggttcacaaaatcaagcttaatcctgatggcagcttccaacgcttcaaagcgcgtcttgttgccaaaggtttccacaaacgtcctggagtcgactttggtgaaaccttcaatcccgtgatcaaagtcgctactattcgtgttgtcttgacaattacagtctctcacaactgggaaatccgacagctagatgtcaataacgccttcctcaatggagtacttgaagaagatgtatacacgatgcaaccaccaggctttgaagatgctacaaaacctcaccatgtctgtaagttaaagaagtccatttatgtgctgcgacaagcccctcggtctcgttatgatcagcttaaaaggactttgcttaactgaaaatttgttagctctaaggccaactcatctctattcatgctgaagactcaaaa

SEQ ID NO: 384415 - DNA, 1804 bp, Cannabis indica
taactccattgaaacacaaaaactaactcaagataagatgttaatgacacagttacccaattataaagatattaatgtatgtttttgtagaaagcaaaagaggatgacgaggagtgtgaaggcaaataaggacgagatagagatgagggtggccttgtggctgacgtataatccgcgtctgtggtgattatcgttatttttatcttcatcagaacccatggttactacaccactttagattgatatgttttgaaggaaattaatataatatgtttgaccaagaatatggatgcaccatacaatttttcaaaactattattttttatcgttaatagtattatgaagcaatattatcctaacacgattttaattaataatatagatggtggatggtagatgaaagttaaccgagaatcgttaaacttgctgttatttagccacaaaaatagttaaactaagaattaaaaaattattattttaataaattgttataaaaaaagttacccaataatttctcataaaccaagaattcggttatatagccacattttatatagaatagatatatataaggagattgtctaggtagggtttgatatgcagaggtaactgtgtgctgagataaagaaaaaagaaaacagaaaaacatcaacgatccattgatctgtaatagatttggagatggagaaatggggttacgacaatatgttggagattctgagaagattaatagaggacaagaacaagaaagaactgatacgatacaagtgtgtgtccacattgtggcacaacgttatctctgatatgcatattcgaataatatggtcgcaaacccctgttggcaggatctatttccgcatcatgcgagctccccctttcgtaaactacatagtctcacgcctatcacctactacttgcactgttttggaaaggcagtttttgaagactcacatgctttccaattataatgaatactacaaaacaattttcattcccatgacttgggaccacggggataaccgcttcgactcaaataactctgtcttcatcgactgttgcaacgatttgcttctcctatttcacttcaaatacgatacttactacgtttccaacccctacactagacagcgcgcccacatacctaaaccacctcatcatcattacgcaaaagataatattttgtgtgcggctctagctttcgatcctattgaatctagtttttacaaagttgttattatcataggtggtggtgatgatgattttgaggttattgacatattctcttcctctactggtaagtggaatctgttggagaaggtagttagtagtttagttatttctgttattaattagttacacagttatgtatacagagtttgttacaactctttctctgcttctcttaacagaattctgttcttgtattttactcattataaatatatataagatctgagagactgtgtaattcaacacaactctttttcatcattctcaacttggtatcactgctactggttctttttcctttctctgttgaatcttgttcttgaagcagtctcccatggcgtcttcctcaaatgctggtcttacgcctgaaggctcctcttcctccgctgccacacatacgaatcaactcccggtcgtgcaaatcatttccaatgatattgttcctctcattcgtcttgaccgtaacaatttattttactggcgctcataggtgttatctactgtccgtgctcgtcagctcgaaggattccccaatggaaatcgtccacgacctccatgttggatatattttacc

SEQ ID NO: 384416 - DNA, 1670 bp, Cannabis indica
aagaaattggtatggtgttccggatgcacaagagtggagatgcataaacaccaaagaaatatttactgtcatcttgtttaaactccatatataattggtggcacatactaccttttactctttcattttatatctacatataatatggtgcatcaaatatcacataaataagagttatacaaagaatataaatagttttttttttttaaatacaagaatacaaaaggtttttcttttcttttaataaaagaatacaaatagtttttgtataacaaaattaatgtgaaaaattcaacctataaaagaagaataataatattaattgtacattaattatatttgggtcatgtataataattaaattggtaaatatattttttttaactaagttaatatatatttctttaaaaataaaaagaaaataaagaaaaaaaataattagtatattttagaataataataataataataataacttatatatacagtctttttaaaaatatatatagttattaattttaaattattattaatattattatgtcattactattgatgagtaatgaattgataataaacataatattttttctaacttttatttttgcaaatgcaatgaatgatcccatggacgattgagggtctagtgaccagtgaccactcaccttttcttcccaccaaaatttctgtctcactcactcaaagttcaaagctttctttaatcaaatatattttctcaagtccaatctagctattccatttccattccacacttctcaaagataaatttacagactactcaagtcatatatccttattcagttttcatactcaaattccaaaacatatattataggaatcaaaatgataaaaatagagatatgaatggaacctaataaaatattccatctaaatggcaaggagtagaaaagtcactaataaagtagaactaaaatgaaaaaccgattttctttccttttccttttgccataattaaattataagatacattatgatgaggtttaattagaaaaacaatatagaagaatttaattagtttatagaaattggacaaataaagaatataataaggaaattaataagttgttggattattatggttggaggtgaaattggtgcataaagatgaagcatgcacattcaagcttgcagaagtagaaattggtaagataaaatgttgaattgagacaattgaaagagcaccccaaaacagattggtttggtgtgattaggcatatcatcacaaagcaactcatcaaaagatgatgatgatgatgatgatgatgttggctcaatcacactgctactatcccaaacaccaaacacaccatcaagtaccaccattcttctcctcatcacacctcttttcttcttcttcttcttctttacaagttctaataacttctgtatatatagggagagggaattaattaactaattatgagcatggtttgatgggacaagttgcttctatattatagggaaacttacaaaaatactggaatttgagttaacttttacaaaaatactgtcacacgaaaatctttataaaaatactgtatttttataaaacaccagtaaaacacaaagcagaacagctcaaaacaacagtagaacaccagtaaaacactagtagaacaccagtgaaa

SEQ ID NO: 384417 - DNA, 2118 bp, Cannabis indica
gagagagagagaggggtcgggtttgaggtgcaagaaaactagaaaattcatcccttattttgcaaataatcccatttactacaaatattacaaatatgccaaaatactataatgcccctagggccatataacacacctaaaagcattcgaggacaaaatggtcattctcatcataaatatactcaaataaatttcagattattaacacttaaataaaatgccaacaatttatcccagaattgtatttcggccccgaacccggttcgacccaaaatacctagttttgactataccgtgccgacttgtcagaacacacctgaaaaaggacaaaacatgcataccatataataatatagtccataagcacgtatttaaattaaattcattgttttacccttctcgggtcaaaattactaaaatgtccctagctcgccaacggggtcttaacaggtcatatctcatattaattcacatataataaattatataataatataattccataataatacacaattaactagttagggtttgctaatccactctcttaatcttagggtattacaagcaccatcttcattaaggttggggtaagattccccattctgggacctactttggccctacatgggtgggatatcctccctcctttcatctttaggcaagtcttggaactggttagtccgatagtataccctttcgagcaagatttgtttatcatttggtcgaatgggaggcgatcttgtttgggaagcagtgaggccctttgggtgtgaggtttgcccacgatccctaggacgttaagtttcccttggcatataaggagacttccctgaagggggtcccttattagaggtggtactcaacccgagatccagccctttcattgaaccgtctaatcagttcattcgcatcgctttctggtggtttagctttatctattgggcttataggattacgacttgtcaatccatcaattcctagaattcacgtctctactgggtgaaagcatcgcttacagtagtgcgtgtttcttcttgttcatgatggatgatgtttatatgatcctagacttgccctacgacctctcttagcatggctagcttagaatcatcccccaagtcaacatggggttcgttgacactaggttggccaaccccaggtccagtttctctagcgtataccgagggatagtccttgttaaaggaacccccgtggtactttgggtaggttgtccaacattgaccgggccttgcccggtatttgtcagatcttgctcgatatcaactgggccttttggtgggaccctgtagatggatttgcctgaggtggccagatagggttagctggattgtcaccagttggtggaaaatggatattgggatccacagccatcggatcctagggtttagtggaaatgcttctccttgtcaggaccatggtgattactatgtgaaaagagatgaggtctttgtaagaatgttgaagctctcaatgaaaacaccaaaaatattgactaagaaaattgccaactgactcaactaataaatattgattaatcaccaataaagagttaagaataataaataaatagacaaaacaccaggatttatagaggttcgacccccttatagatggataatgacctattctccttttagttgtattgattatgagataatgtcgtgcaaattactaaggaagataaagtgcattctagctacaactctcaagatgtttacaaagaatactcagcaaagttcccttaagttcgaggttatgatttaaggttccttccccttgtgaattcattcactatttatagaaggaaggttgttacaattagctccttaaaaggagtgatcaaagagtaaatattcctacattcttaggtgtagttacgatctgttgtagctcctacaatctcgagtagatcaatcagatttgcatttgtaagattcagttagagatatttgtggaatttgtttgaggaagaaattgaggctcgagtagctctgcctgacattcctggcattgtttctctggctgacacattgactacccgaccatgctttttttgagacttatctctctgtgggattattgttgggttttatg

SEQ ID NO: 384418 - DNA, 1302 bp, Cannabis indica
agagagagagagagcttgagagcttgtgaagcaaccaacaatggcatcaacgactctgtcatggagttcctcaacttgggtacagagcttcagtactggaaaagtgtttaaggagcccacaaagttgtcagataaaagagctacctttctcattttggctcaaaagaaagctaagaagactcgagcggtaaattcaacaaatgggttcttctgactttttcttgtttatatcattttgttcttctttcattcatgtgcttatgtttttcttttgtttgcttactgagaaaaatttgagatttattatgaatgaatgaagttcacactcattacttagaatttggcataatttgttaatttcattgcattttcttactgtttctatgaaaataattgggatttagcatcagaattatgatgggattttgttgattttttgatggggtcagataatttttcttgtatatacattcatgtgttatgctttgtttggttactgagaaaaatttgagctttaataaatgaatgaagttcacactaattacttaataatgagccatttgatttgttttggcagaatttgaggtaggtttggtttagaaatttagtatattgcattttcctaccgtttccatccaaattattggggtttagcatcagaattatgatgggattttgtattatcagtttgttgcaggtgcattgatttttctcttttttcatgttgtttatgttttgtttggttacttagaaaaatttgagctttattgaataaagttgacagtaattttcttactatttctatccaaattattgggatttagtatcagaattatgatgggattttttgttgattttgtgatggggttcagataattttgaaggaggatgtatctgagttggggaagaaaggtcaactacttaatgtcaaggctggtttttacaggaattatcttcttcccactgggaaagctcagattgttactcctgacttggtcaagtaattcataaaaactcaaccttttttcattattctctctatttatttcttttgctgaacttcactattctcatttatcctatgaattgctttgtaattatttttagactggcttgatgataaaaggattggttagaaagaagagactaagtgcatgtttggcatcataactaaaaaactgttttttgtttttaaaaacagaaaattgtttttggaaaacaatttggcttgtttggccttgttttttgaaaacagttttcagaaaacaaagttacaaaaaacaagaattttgaaaacaacaa

SEQ ID NO: 384419 - DNA, 3110 bp, Cannabis indica
aaataaataaataaaaaaaatgaagtataaaaggataaataaaaaaatctcatcattttttttttgaataagttattatattcattcacgatcaaacattacaacattacaactttaacttgtgaactaattacatgtattgcatacttttcattcatatactatctttctttcaaatctcatcattttatttgagtaacggtttttttttttaattttattttattgaagtacctatatatattagattgttgggattcgatccagctatactctctatggacctagctcaagtgattatatatgtacatagtatctatactatatatgtatatattgaagtactagtacttttgttatgtttggtgtaatttataaaaagaaaaaaaattgtactacttttgctttcatttattttctaaataaaaagtatatttattatatatagtacttttgtctaatattatttagagtgatcatttgatttcacataaataataattataataataaaaagcagagaaaagatgagagttgcagttgttggtggtggtattagtgggctggtttctgcctacgtattggcagaaaatggggctgaagtggttgtatatgagaaagaacactacttaggaggccatgccaacactcttacttttgatggttttgatttagaccttggcttcatggtcttcaattctgtaagtaccaccctctttttatgtccttccctacactttttcatattcatttataatatattgtttcaagtattcccaacaagaattgggtgtagaacaagtttttttttttttgataaatgtgtaaaacaaattaattaaattgcacttcaaagcatataacaaccatttcaaaagaaaattaagaagagttcttgtgattggctaagagctctatcactatattgggttcattattcttgaaacaaagagataattgtataaattattattttttataaaatttaaattttatatttttactttagatagattttttttttttatatttttacggtgttttattaaaaaaaatacgaaaataacaaaaaaaaaaacataaaaataacaagaatataacattcaaacaacaacaaaaaatgaacaataaattagcatgagtataacataaaaatatattaaaaagttgtactttttataaataaaattataaaaatatttaaaattctgtaataatatttttgttttttcattaattatccttatgtatctttatttcttattgaaattacaataaccccttaattaatatatcctcaaagtgaaatcctttcatttgataaaaaaattatctacatagtaatttaaaagtgcttcaaatctaaatcacactaaacgatcatagttacttttagtgataattttttagtcacaacatatttacttttgtaactaaatatgaatttagtcacaacaaaaaattacttgtgactaaaacataatatttaaatacaaaatatcactaatttagttttagtcacaataagtattgtgaccaaaaatacatttaatctcaataaattgtgatttttgtgactaatatacttttaactacggaccttttagtcacaacttttcatttgtagatataatttttgttgtgactaaaagtaagattttttgtagtgtcatatgatagacctccaattagtccaacctccacacctaacgcctttgtggcttcaacaaacactacaagaagtagggctagtcctaaagtatatggggttaagatgaaattaaattttaggacccttgtaagtagtttaattattattaaaataataattttagtactttggtgtagtggtataatattttaaagttcttaaaaagtgtcaagattcaattctccataggcataatttaatatttctaaaaaaaattaaagggtgaatagcagtataaataccaaaatttttgagtttagaataggtatgaacctaatgattttttttaacagcataagtatccaatgcttgtaaactaattttcttttagtttcagtacgaactccgttttgaatatattaaaagaaggtttggaagtaactaatattatatatttttgtcaagccccaataatctgagtcttatgtgccctcttcaagacaataatagagtttgtacttacactcctactacttcaaaatgaccctttcgaccacgatggtagacactatatattttgatatataatttcttattatttaatagtttatctacatacaatttttttttcacaattttgaggccctgagcattcgaggcccaaggcacaacccttgctcgcctcttctgagggtcagccctgaccaaaaacagtagttgttcctaccttggtgccaaaaaatgtactcattaatgtgcaaagaagtgaacaaatttggcgcattacaattcttgtgctaaatttggcacaatgattcaagatttgcataaccataaatgcacaactatattatttacttttatacccttttattattttattagtatatttagctataacattaattatgaactctttatatttttttttattattttacataataaaattaatggtacagttactatttttatatactttaataaaaatattaaatttcgatcaatttttgttattgtgcattggagtataatactaaaaatcgatgtaaatatatcagaattttttttataataaatataacataatttttacattttccactgtagtctaaaaactattaattacttcctacctaatacatattattagaggcaacaattattacccttattattcaagggatacttacataacacacttattttttgtaaaaaaatttcatttttacatttaatgaattttttgttacatttttatggtttcccgtaaaaacaacacgaaaacaacaagaaaactacataaaaataacatctaaataacatcaaaacaacaacaaaaaatagcatacagataacaaaaaatcaacaataaaataatatgaatacaatataaaaagaccgtattttctgtaaataaaattaaaaaattcgtaaaaatatttaaaattctgtgaaa

SEQ ID NO: 384420 - DNA, 2082 bp, Cannabis indica
aaaaaaaaaaaaaacaagttcaatatttgttaattaccactgtatattaagaaagtgagaaaatatgtagaaaattaatgtgaaatttttgaaaccaaatatttatttactgcaataataataatggagtcacttgccctgtgaagtagttcaaggaaaaacagtcatagaagttatgatataaaaatgtcaaatctatattagtcttgctgcagtttgctatatataacaatttcattttatttttatattttttgtcaattatttattgaaaaaatgttggtgttaaacaacttcttttttattttttatattttatatgaaaaatatgtatttggaaaaataaaaaattccccaacaaccctgtcaatttttgactatgagatcattgtaccaatcaatggaatactggaagacaataagcaaaatcttattttagacaacaaaacttgtgactaatagttataaaaatcataatttaatgtatttttaatcataataaagttttattattaaataagtttatttttattaacaagaaagtaaaagttagtttattttttattattaagtattaataagaaaataattttttaaaaaattaaattaaacatgtagtattgatgtgataatgacatattagatatatcggtattttattagctacatgagatatatcggtattaatatcatatttaattgttatgtctcaaaaattcaaaaaataatgtggcattaatttttctcctagatatggaggagaataggaaatcatatcatctcaacactattttgggaaacctcaactaagtttaggtataacatcaaaagcttcatctcggtccaagtcgagataataactccaaattattatctcggcccaagccaagatgacaatctcaatatgtcattttggccctaggtggggtgctccttcttggccctacgtgtcatcttgaccctaagtggggagctcctcaccaaactattatttcagcctcacctaccttgcaacaccaaggcatcttcttggcccaagtcgagatcacaatactaggacatcatctcggcccaagccaagatcaagacccccctcatctcggccccatctttttcttggccctaggagcccctcaccaagcaccatattggccctagtcgaggtgcacattactggtgcatcatctcggccctagtcaagatgtttcacaactcagcacgtgcttctcgtgacttaccaatatcatgatctcgacatgtatttttcatcaacatgcattgtgctccttgtgatgaaaataaactagcatatgaggattaaaaatatcttcaactaattttttttttagatatttattttgaaatatgatttttgttatcattttgtattttaaacctaacccgaccatagttaggggaaggtgtgtcttggattaagagattttaaatcttaagaaagtcctagatgaaaacctataataaggtgatatcaattgtaaaggaccccaattgattctcacaaacttccactctctcatttcaaaactcgcttgaggattgaacttttggagaatataactctggagaactctcctaaagcgcattaagaccaataacaaacataagtgcactagtctaataccgccgaaagggaggaatcactataaaatctttgtgtttattttttttgttaatttttttttttataaaccggtttactttgattgacgaatacttatgttcattttatttatttatgattttcttagatccattaacaaaaaaattgcgtcaacattaagtactgtgaaaaatacaaaaaaaattatcaatagcaaaaagcataatttagtagtaacaatagttcaaataaaaaattctaaactaactattaattaataaatactcaaatatatattcctcatatttaaaatgtgaatactcatatatgtctccatcttctcttctaataatattatatccatccattacacttccaatcatccttaaactaatgggtaaataccattttagaccttgtgttttgcaaaagttacagattggaccctgtgttttgttaaa

SEQ ID NO: 384421 - DNA, 1344 bp, Cannabis indica
cattaggaaaaaatgtacactaaaaaataaatttaaaaagtatttttgaaaatatttattaaattattttataaatattttaaaaaataaaatatttagtcagttatatttttaaatttttaatactaaaaaacttaaattatttttataaaaaaaaaaatttacaaaaaccaccccaaaagctcgattttatttaacctagtatataaatataaaaatagatacaaaaaattatagtagctcgattcgagtctactccacttttgaagagtactcttgctttgtattattatactcaaacctgttttaaatggaggtcggtttaccttattataaggtggcaggtgaatattgttaaaaaaaattatagttataatgagattgtacgttacaataatcataggtgtattaattatactaattagagcggttacaaatgtttgtgaaactactgaattattaactcttgaatgtttgaattagcaccctccttgttgtaccgcagtctctctttaggaaagtctttctcgcgggcaaggagaaaattcatcccattgacaaaaggtaatcaaattatattaattaaacacataatcaaagttgggaaaattgaaatatactataattggataaattaaatttcaaggtctctatgggtaaggactaaggagtcaacatgaaagcgttcacacactattgaagaaacagccgtactatttggagatggaatctcctaataaatgactaagaccaagtatatactataatatgatcatggaattaatgaatttttgtggaattaatatatgcttaaaaatcctttaaaatataaatgcttaaaaataaaagattcattaagaaaattataatatatacaataaaaatgtaaccattgaacctcttccatatatatatatgaatatggaggaaactaattcttctagaattcatcggaaatttgctaataagatgtttattagacaaaatttaatgtttgtaaggtcatcttcaatggaacactaaaacactaaatattgtgtagtttcacaccatatttactctaatgggacactaaatctatccttataaatggcattgtctacagtgtcccactaaatttagtgggacactgtagaccacactaatttttttttaaaaaaaaaattaataattaaataatactttaaagaagaaaaagtaaataattatatatatttagtattaaaatattcttattatattaataaaataataaaataataaagaatataaaatttggtgtaatttttagtgttgtggttggaattaaaaaaaaaaatgatgaaatagtagttttttggtgtt

SEQ ID NO: 384422 - DNA, 2002 bp, Cannabis indica
ctctctctctctctctttaatctcttcaccaggggttaggtatttgaacttaaaaccagcgacctttctttgaccaactcgactcgcccaaacaaacaacctttaattctgccatcaaaaccctcccccaacccattaattatctcattcatttcgatccaactttttttattcttgttgtcaatatgaatgatttattttcaggctccttctctaggtttcggaacgaggatgcatcgccggatcaccacgtgattgagatgtcgtcttcatcggccacggcaggggctaccaatggagtcaatctcgataagttttttgaagatgttgaatcgatcaaggaagagcttaaagaactcgagagacttcatgagaatcttaactcttctcatcaacagagcaagactctgcacaacgctaaagccattaaagaccttcgatctcgaatggattccgatgtttccctcgctcttaagaaggctaagcttatcaaggttcgtcttgaagccctagaccgagccaacgccgccaatcggagcttgcctggttgcggacctggttcttcctcggaccggactagaacctctgtggtcaacggactccgtaagaagctcaaagactccatggagagtttcaacactttacgccaacagatctcgtccgagtatagagacaccgttcaacgccgttatttcactgtcacgggagaaaatcccgacgacaaaaccattgacctcctcatctcaacaggtaattaaacaaaaaatcctcgaatcctccattgaattcatatctatcaaaactcgattgaaactcattgaatttgtttccacgattggattcaggggaaagcgagacgtttctgcaaaaagcgattcaggaacaaggacgagggagggttctggacactataaaggagatccaggaacgtcacgatgcagtgaaggacatggagaagaatctgaaagagctccaccaagtgtttctggacatggcggttctggtccaagctcagggagagcagctggacgatatagagagccacgtggcgagagccaactcgttcgtgaggtcgggagcacagcagttgcagacggacgagaaaacaccagaagaatacccggaaatggacctgttacgccatcattctattgctggtcatcatcttgatcgtgattctcagtttgaagccatggaattggggcggtaatggcggcggcggtcaaccgaatccgcccgctacaccgagtccgcccgctacaccttcacccccctcagtctgattagtcaaccatgcgagtctacgttcctttcatactccgcgttgcatcttagtatattcctcctgccttagacttagtcgtacgtctgttattattgttattattctttttaattattattattattattacgtcacatggtccctttttcttttctcatgtcttttttgtaagtagctcgaattttgggttttttttttgtgtatcattgttacttatcctttatatataaatatctatatgcattcttcggataaattattattattttatttatttgcttcgaattttgtagtgctacggctaaattttgcttaaaatataatttttttaataatagaaattttagaaaatagagatttggaaaaaaaaaataatggataaatgataaatttatataaaaaaaattatcttatgattttaaaatagttgttatcactcaaagtccatgttattattgtatcttacttataataaccactatcattcttaataaatttgttatacataaaacaaattgatcaaacaataaattaaatactcacttttataaaaatgttaaaaattaaagaattcttactaaaaaaaagagatctaacaaaaaaaaaaatatttgataaatctatataaaactattaaaataatacattatgtagtcaccaccatattaaaacgttatcactataatactaagtgttgctccagaattcgcccaaaat

SEQ ID NO: 384423 - DNA, 3761 bp, Cannabis indica
aataattaattattgtacacttgcaaaattatttacatagatacaaaaactgtttgaatacacacctataaaatagtctttttgcgtcgatcaactgccaaaattgatgcaaaaagagcacacaattttatttgtcagtttgggaccaatactacttccgttgatttaaactgacattttaaacatttgtgtcaatttgttggattgacacaaatatttgtggggttcaatgttatgtcactattcttattaaagcgattagacatctctaagccttcgtcgaggtttttaatccaaaagttgttggattgtatggaagcttgtggttattgaaacatcagcttaccatttatttcacgttttacatgacctttatctttcggtgtgattactttcgagttcactattcactaattaaaaaatggcagatgcaacacttagcgccttatttgaagactcagttcaagtttcaactaaggatcttacatgcgatctccatccgagggaagttgaccaaaatgatgaacccagccgaatattacttgggaaactctactgttattccagattgggacgcaaagccattcatggttctcttcgaaatgcatggagttctctgtcaggctggagctggaaggaacgggaggatggcttactacagttcactttccaaactagaatggatgctgaaaatgtgttacttagacgtccttggctgatatgcggtcatctactcgttcttatgccgtggctgtcctggctcacgcctacggaggttgtctttgatcaaactccaatttgggtccgactaaagagtataccaccattctactggaataagactaaccttcaggagttggctggaaaagtttctacaatatatgaacttcccaaacacatcaaaaaaaaatttgaacaaggttcgtttggtatgggcaccctgcattttcgggcaacggtggatgttaataaaccattgttctcagggttctttttgcgcagaaaaggaatcaaggacctttggattcaataccaatatgaaagattgccaaaactctgtcttaaatgtggagccttatcccatgaacaaaaattttgttttaaaacccccactattattcgagatgaaaaaggtacgtttttcctatgtttggcacatggatggatgaagatgcaaaggaaaattccccgtttcatctacctcttcctaaatggtttaatgactggtatcccaacaacaagcgctaaacgatccaaaggtttgaaatcaaatggcaattcagcgaagattgaatgtggcagatgcctcggaatggcgtgaactcagacgacaactaccggggaaacgtaggcaagtggaagtgacggtggaggaaagaccagaaaccggggaaattgtcttaaatcgtttcccggcggtcgacttaccaggaataggggaaatttccccatttgataatacggcggagggggtggtggaaaaggtaatcctgatcagacctctgaaaatgattacgaccgctcctgatgcttcaaccgactctgggaacaatacgaagtctgaattgactgtcgttggtacagaggcgtgttcccaatctgaagagccaaataagacaagagttctgactctggtcttcatccttcttctggtgatgggcgtgaagtagccgttacagagaaagagaacttcacattggggaacaagtttgaagtggggctttcatataacactcttcttgggccacaagcccaacccctggattggccttcaagatcatgttgggccagagcttttgggcctcttacttgatcaatcacagtggataagtttcatagagaacccactatacttaacccaattcttgatatagaggatttcaattgctatgacactgagcatgggcccaggaagagaaaggcggtagatggtttttacatgatgccaggagtgctaacaacacaagattccgatactaatttagaagacactatgcattttaaaagaagcacaagaactcaacaaggaatagaggaggcgaccgaaactactttctccccaggatcaatgaacacaagccgactaagagaaagagaggaagaccaagaaaatatgaagagcccagttccactcccgccacttctgcaatcaaaagaggaagaccatcaaaggccaaagaatatactggagtcatttcaaaaagcctaaagaagagaggggcaacttcttcctctagaggtaaagagaaactctatcgcaacctttggaatgcgaagtgtattgatttggccattgatttagataatcattttgttgttattgagaaaattggagtgtacaaaccaagttgtgtaattgaagaattgggagagaatgcattactaaccccgcccacgaatgtgtgtatgggaaatggaagtcacgagaatgaaggacatgattttcaatttggggctatggagacttgcccagaaaagtctccaaagtccccatgaagctacttgcttggaattgtcgcgggctcgagaattccgcggcagttcgacagttgacgacagtggttcgccggtcaaatcctgatatactaatactctccgaaacaaggttggtattagataaatttcaaaaaataatgcataaactacattttgttgagctctcgtatgtttcaccaatcggtctttcgggtggatttggagtctattggaaatagggtgttctctgtaagattgtggaagtggataaaaatgtgctcattggttcgattgagtcggatcctccgggaatcagttggaaatttctaggtatataccccaatcatgactggaagagaatccttttggaatcgaattggcgacttgatagccaatggaatgtcccccacagttcttattggtgacttgaacggaactcttgtggatcatgaatgcctccactacactaaccataataattcagcaagatattcctttgacttgagaagaatggtggctagaacaggtttgattgatcttggatgccttgggggtaagttcacctggttccaaaaggctacgaactccaatggagggacagcgatcagaagagcgcgcttggacagggctttggcctctactgattggagaattctattccccaatgctatcgtggagctcctcactgttggtacttcagatcataaaccgattctcttgagtattgatggaggtgtgagatgcataaaagctcaatttaagtatgagttgatgtgggggcgcgatcctaggtgcttctgggtggttcgtaatgtctggtgggaaaaattacatcataacccaatggttaatctataccaaaaattaaagaaaaccaaagagcatttgaagagatggaacaagacgcatttcagaagaatacaacagcgggttgctgaagcaaagaatgatctggaaaagattgaaagtaaagatcaggtgcagatgaagaccctgggagatgcgagggccaagttaaatgaggcgcttcgtagggaggaagttttctggaggcagaaatctcgagtagcttggctgcgtgatggtgaccattgcataaaatttttaaatggcttcaacggtgataagacgtcgaaagaactacattcagactctaaagacagaaaatggagattgggtcagcgatcaaaagctcatagcagagttatttgtctcaagattcaatggcatttttgctaagaaccaatcattatctatgccagggagaattatatgtcaaatatgct

SEQ ID NO: 384424 - DNA, 1202 bp, Cannabis indica
gagacctcaataataggattaaaggcagtttagtaattatcttgttaatttgttgttgtatttttttttttatttgtatgttattttttattattatttagatgttgttttcttattatttttatgtagtttttggttgttttcatgcaagttttttttttcgggtagaaaatcgtaaaaaatatatatttttttttaaaaaaattgaacgtaaaaaatatatattttttttacaaaaaaatagtattttatgtaattacctctataaataagttttggatggtaactaaaaatatatcttaatttatatatgatataaaaataaatttttaattttatgaagaaataattaattaattttttattaccctttaaaaaatagtttatcatagcaaaaaaaattacttttgaaaacgattaaaaataaaacactttgggattatttttattttagacatatcaatttagaataaaagtatattttaagatgtggccacatattattataaattataattaagacttttcaagctatttttgtcattcattttgtatttgaggtgtataattgaaaaaaataaaatttaatacaaagtacttaaaatagcattttgtttacattttaagactatattttatttcatttttatagattttgattttttaattacatttttaccaaactccataaaaataatatgacaagcaatgtagtacaaatataaacgaactcaaaacaacatacaatttacaaacaacatagtatgttattgcgaaaacaacataaaaaacaacaatccatatttttgttagaaaagaaagagttcaaattcttaaagatgttgaaaagcctataaatttgtagttttgtaatcttttaccaatgtttgagtatttatgaaagcattcctagaaaaaaaagataattttaaaaaaatacaaaaacaacaaaaaattacaaaaatataattttactaaattttaaatattttcaaggtttttaaaattttattaaaatacggtctttttgatatatttttatgttgtactcttattattttattgttgattttttattatttgtatattaattttttatattatttatcgtcatttatttttctttcacgtaaattttttattaatttttgtgtttttataaaatatcttaaaaatatatatataaaaaattaaacttaaaa

SEQ ID NO: 384425 - DNA, 2397 bp, Cannabis indica
ttaaaaacaaaaaaaaaaatagtaaagaaaatgtgatatttaaaaaaatgtgaaaaaaagtgatcttttctttaattgtaaaaaaagtgaaattatgtgtacttttatgaaaaatgtagagagagagaagagagagttacgaaaaaaaaaaagtagccagcccaacccgaaacctgatcttgtcccaactcgcacttgatccacgcgagcctgacacccaaaaacctagtccctcacacaagcaagtttagttccaataaaatacaaactcaaaatccgaaaaaactcactcaatgtgcactcttattctttattattattggtccttttcttattaagttgttctttttgattaacttcttatcaagttgctcatgaatagtttgcacctcctttggctaaataatattgtaatttctttttattttggataaatttaaccatactaaatacaatatctatctaatatctgaaattctattgaagttaaaatttggtagcaacaattgtccatttatttttctatttcctagaatttaaagggattatttcatagatatactaaaatgacaaaactttatatttttaccgatctattgtttttatatatataaatgcggagtgttaattttccattatttttcaaaaaaaaaaatattgttttagcgttgttgctacgggaaagtaatttttttgtctgaaaaaaaacctaacgaaaacctgtaaaaacaataatcagtaaaaatataattttcgtaaaagtataaataaaaaagtccataaaaatattaaaaaaattattttaaatgtattgtgtgtaaattttctaaatttaaaatgatacaaaaaatactatttgtgctaccactattaagttaagcctagtagtaatagctatgcttcataacaaagtggtgataggtttagttaaaaaatttgacacataatattaaaaattttgcagcataaatacttattttatttaatttgttactaacaaatacttaaaattaaaacttacaaataaaaaatttatgttatttctatcagtatacattttgacactcaattaattgttttaaaaataacacatgtcaataactagttgacttgataatttataattaaaaaaatatattttcttaaacatatttttttttttctttcttcttctttcttgctccaatcgaaagaaagacccatggcctctgggttgaggaaatgagaacatatgctgacaacatgaaaaaatgagagctaaataaaagagagaagatcgcgcaagagggtacaggctccagaggttcttaggttggttaagagttttgatggaagaatccatccaatctaggcataagcgaatatatatcgtcgaaactagtttcttcatttagagactaaaaaagtgaaatagaggataaagttgtggggtattgaatttagagggccatagaatttcgtggtagtactggtttcttcattgccatgtggggaagaaaaaggaagaaaaacaatatattttttctaaaattatcaaactaattagaaatcaacacgtgatatttttaaaataattaatgaatatttaaacatcgacgaaaaataatagtaacttgtgaatttttgctgcacattttcttatattatatttcatcataatcggtatagtgttagacaccttatattaagcgtctaaatacactagttgtgctaaaaatatttatttatgatatctcaaattcccactacaactaatgcttatataatttgagtggttttattttagagtagattctgtcaaatgtctctatgtgtgattatcccactacattataacaaataactatttatgtgtcattgttaatatcattattaaattacttaattttagtggcacttttttattttctttgctgcatattgctatagtgtataaaacacttttataatagaatatcatttatttgatgacattctctaatatcatctaatcaaattatttgagtcatttgtgttattaatctatacaaaatcactatatatatattcaattaagaacatttttttctactaaatttgattatatatggaagtggatatatggatccattttaatccttgatgtgagtttgtgtattagaaaaatgatgatcacattcatggtgccatgtaagggtgtttatggattggtttggtccggatttttatagtttttattaaactaaactagtataacagtttttcgaatattagaaaccaaaccagactaataaatttcttaaaccaaaccaaaccaaactattaaaaacggtttggtttagttcgaaactacggtttaagtagaatttataattatccatatttttttaagtaattgtactatttaattttattttt

SEQ ID NO: 384426 - DNA, 2099 bp, Cannabis indica
tatatatatatatatatatatatataataaaaaaaaaaaattacttttcaaaattcccctgattcctatttataaagttacacagaaatatatatattattaaattatctcatgattaataatgttacatgcaaataccatatgtcctcaatatacaatgtgaacacaactcacatcaacaaatgtcttcaatatataatgtgatcacatcaagatgacacttgttcttccccaaacaaaactttaatttactttcattttattattattactattttacaaaactattactattgagattgaaacctaataaaaacatggtaactttggccaacaattttccccaaaaacttacccaaatcaccatactcttcaagaaccttaacatcagccttgcacctaataagttgaggaaaataaagccaaaaactggtcaacataacaaaccccatagtcaacgctccagacaccacaccaggcaacctccacgtgtcacacaaacctttcttcaaaacaatctcaaccgttaaacataacccatgcaacacaaaaaatgacgtcacttcccacgtgggagtcgcacgtgacacgtagaagtacattagctcatgaaccaaaccggacactacaaaagttgccactatagcaggtagtggggcccacttgtaccctaagaaagttgatgagaatctataagtgggtaaaaatacagtgggacgcagtatacgagttactatgaggttccatcttttaccccaaaaatcttgtagtgaggttgagaggtatggctcgttgaaatgtggctcgagctcaagacccaccatggctcgagccaaggtagccacaatgaccaaagtggtctctagtacaagatatgttataatgaagtaaagaatcaaaaccacaatattatggtaataattttggctatttttattaatgttgttacatatttgaataagaatggccaaaagaagagtttttaaagtgaaactaattgttggttgtttattataattattattagggtttttttgagatgggtttttggtcttttccttaatttctatggggaaagaagcaatcactaaaaattgaccaaatgagagattatttgaagatgataaagggcctttattgtaagctaagagtaagagtttgaaattagctaaccatgagtagcaaaagctagttgcaccaactaaattaactgaatttagtttgagtgggagaaagagaaagagtgatattattggtaggtaaaagatgagtcttttagtaccttttgagattagtttacttataacataacaatatgttaaagaaaccaacactgaaatccataccttgatgaagttgttcatttcaccctccatattttctgagttgatgatatatatatatatatatatatatatatgtatttgatgaagagaagagattgtttaccttgtatatgatcctaatagttgtgtagaaatggtatatatatatatatattggagaaagtggaggagtcgatagaaccaaagtttctttcttcgttttttagggaaagtgtggttgaagtaatgagagaggcagtgtatatagagagcacttttatttcatttattacttataaggaaatatatatatattataacataaattcactcacatggcttgttagatatacatatttatttgtatatacgaagttagtggctttgagtttttgacatatgttgggatacatatgctttattttgcttcatcataaatacttttgatttgtgtctaattagaatttttgttctaaaatttggcatatattaaattatattttttaaactcattaattttcgtaattaaaaaaattattaaaattattaaatttaaaattttttgtacaattttattaacagaaatctgacataaataaaaatttgaaagaattaatttcttatatatcaaaatttgaagagtatttaataaatattaaaattcaaaatagcacagtttagtacatgaacatttattacgttagtgaaattgaaaaaaattaaataaaaattcataaatacaacaatctcaataatttaaataaatttttaacg

SEQ ID NO: 384427 - DNA, 2751 bp, Cannabis indica
ctctttacaagaaaagatacaaaatgaaatcttatgagaaccctttagagaaataagaaggtagccctagtttacccaaaacccaaaagcaagaagaaaacgaaatagctcttcttcttgactcgttgtcttgttgagttgtgacaccactattttttgttacgttccgtacaaatacaaacccctttctctctttctctctctctctctttggcgctaacccagaattttattacgtcaaaataacataaaaacgacacctttttctacgacagtctttgaaattgaaaccccaaattttactgtcgttttgacttttgagtgtcgtttttggtgcttacattagaattagaatagaatagaagcccaaaggtgaaaacttgcagaggaaaaagaaaggaatttgggacgagaataagaagaagatgggttacgttctgagagtacgagctgcgtcattctttgcaggggctgcggcagcgtcgtttttggggatttacattcttcataacgattacaaggttgcccatgaagcaatttctcaacaggtattgctttttaaatatatgaattttggggatttatttcatttagtgtatacatttttgcatctggttgttcttgaaaattgatgggtaattgatctttttgtttggtttgagagattttcttgtattttgtagttttaattttggggaagttataattttttttgagtgtaggatgaaattttaggaaaaatcgaactgtctagatagtgggtgtaatgcttaagctaattgggtttgtagatgattcttatggttgaaaatggaagattggaactttgagtttttattgtggtgttttgtgagtttctggacatggtgcttgttgtgatgagtaatggcttagttaattcggttgagattgaagtgttcacctattgtagagagagaattactaggcataaatttctttaggtcatccattgaagtgatgagaagtgatgatagtgtaattaggtgatatcttcccatggaaaaggttccattttggtccatgataggaataattctatgttatttgaagaaggtcagaggagttagaaaacaaaatgtttgatggggaaattggttagaagattgtgtgctatggttgctactaataattttggtttctcttttgttgagttgggtccatatactgtgcttgcttgctgttaaacattccttaactttgatttcgctactgctctttgtatctttgatattgctcttcattcaacaaaaacaaaatgatgtcttcgaatttgctggcaatgtttttagttgcatattttacttctcttctgcttgactgttgtatataaatgcaatcatgtttgctcatcatattagagatcagggtcagttagtagtttgaaactgggtggttgttttatttatgtataaaaaattccttcttatttcatttcttatggtcaatttcctactttcactatacaactgtaattattctcttataactttgtagttaacataatgtgacttaggatcactaagcaaaggaggagaattaaaatttttagtacacctatggcacttaattatgatttcgtctctctgtttatccagatgaaaggtctgcacgagtcattggatagacgagttttggctctagaaaagttgaaacaaaatgaagctttgcagcctgcagaagcaactgactaggtgccttgacagtgcttctgtttcttgatgttgtgaaactaaaagtccattgtctcaccttttttcgtttagtacccgaataattacaacctttgactgtatgaagacacttgctggattacaaattacttgatatcttcattatctgcattttgtgtcagatcaaattggttcttacatttgaacttgttccaatattgcaaatgtactgtgcatatgcatttgttagtaatttttttgggagaaatgaaatacaaatatgctttcttaattaatttattgccttacacaacatttggagatcaacattccataacctgagacaatgagatgtcatttatggctgaaaataaccttttttttttcttactcttcacaaaagacttgaattttagtatcaaactacacatctgactggttcacttacactttaggatgagaccaacttcattataagcaatgtttaatggttttaaatgtagtgtagaactcatcacaaaagtttttttttataaatttaattacaccaaacataatatttatgcagggagagagtggaggagtacatgaagcacgtgtcgagggttcgagaagtgttgtcggagttgttatcggaggctttggggctaaacaaagagtacttaggaaaaatagagtgtatgaagagtgagattttggtgggtcactattacccgctttgcccggaacccgacttgacccaaggaactaccaaacattcggacccctcggccttgacccttcttcttcaggaccaaatgggtggccttcaagttctccgacgcaaccggtgggttgatgttccgcccttgccctctgttctcgtggccaacgtcggcgacctcatgcaggtacgtacgtataaagttacgtacacgtctacataattaatgtacgtagatatatatatagtaactcataagtggtatcacgtacgtggggtgtatatatatattatatttatatgagaagtgcttaagcgcacacatcactttactactaaattatattgttattgttg

SEQ ID NO: 384428 - DNA, 1590 bp, Cannabis indica
gatctcggattcgggactacacaaactccttgcagatgatatcatcttctctatgctaaaggccagtgctgccatgggatacctggctcctgagtacacaaacaccggtcgcttcactggaaaaagcgatgtatatgcatttggtatgatcatatttcaaattctaactggaaaacagaaaataacccaatcagttcgccaaggcgcagagtcatgcagttttgaagacttcattgatcaaaacctcgctgggaagttttcagaatctgaggcaacgaagcttgctaaactagctctgctttgtacacatgaatctttcaaccacaggccttcaatggaatgtgttgttcaagagttaagcgggttagtaatgtaatgttgttagaaagtttttttggcctgaattaagatgtattattttactaactatgaatagtttgttgctgaagtagggttttatagctcttctgactacttctgtatcatgtatctaaggcttatttacttgtttgttgtaactagtataatcgtattagacaggcagatcaatatttagttcatttagtttgtgggtaagactattaatggtgtgagttttgttcaatgtgcataattacttgtgtctcaagatattgctatgaaagaagtgggcctttttctagcaactagtaatcaaatcccattatattactaggctacttgttctagcaaaacgggtcagacacgataacacagctcgaaaccctcacaagagttaatgggtttgggtttaccttaaatgggttcgggtcgtgttcttgttgacacgactaacacgatattaacctgttaattacttatttaaagttattttagtgtcataaatggattataaacgtgttattggttgacatgtttaaacaaaatatgcttataaacgagttacacgggttgtgtcgtgtcaatccgtttataaacaggttgtgtttggattttattttttgacacgattattaaacggatcgtgttcgggtcaagcatgtacatgctatacgtgagtctctacacgacacgaacacgacttgcgaacacgaatttccacccctaacttgttcgtattgcttacatgaacttgactctggttttgatgttctatactccagtagttaaacaagttttttggtatattaactgaggttttgctttaaaagaaaactaagtttttttgatttatttatttttttttttgaataaatttttcgaaattagtagaagtcatgatcgactttatttaattttcgaataaagtttgtaataaattagtacccaaacttagatcgaacacttactcggaatgttcacacttcacagcttggaataaatctgaaacaatacaaaatcttgaaaaattcaactcttcactttcccctatcatttatgaaacttagggctcgtttggtacgccctatgtttggattaagcaatgtattgtattaattattacgaccaaactttttaatacaatgtatgttgtattatttaatacatactaaatggtccgtattaggttgtattataatatttacaaagaatttagggtcaacaccaatc

SEQ ID NO: 384429 - DNA, 2585 bp, Cannabis indica
cctcaataaactagaaaaaaaaaaaaaaaaaattaattacaactccattgcctcactaagaaactaaacctaaatcgaagaaagttttataattcttacaaaaaataaatgaaaatcgaaacagaaataattgaaacaatggacaattaaatacagaaaccaaacaaacaaaacaaagtaagaaaccttggattgtggcagaatctccttccaatcgaatgatctcaccaatcaggttgtcatgtccaacacgaacaagctcgtacatagcagccccggccatgccatcagcaacgacgaccggtcctgagacctgccaaatcacacgaatcagtccaaattcgaagttaaaaattttcaacccgctgtccgatgcagatttcacaaaagcaataaaaaccagtccaagctcatacgcagatcaccaattggatcaagaaaaaaagccaacagaattcaatccccctttactttaacactcaaatttacttgacgaaaacacaaaaaaaaatgggatcaaaatcaaagtagcgatcgttccactttcagaaaaacacaatgagtggaatgatcacagatccaatagcttcggaacaagcatcgaagaaatgaaatacaatcaaatcaaaataagtcatataagaacgaatataatggaaatttcaaagacgaaccttgcgaacgtaaccatactcgctctccttctccgagtcctcgaacgtggttaaacgggctccatacactgacggcattgttatttgcggatcgaagtgaatcggagttcaaattcctagatctgaggagttcagatcgaccaaaaccctagggttccgatcgaataactgagattcagagggataaattaagagagaaagaacgagagagtgagaagaggagagagattgcgtttcggtgattatggaggacgggctacagtttatgcaaactgtgaaggagagataatgattgggtactcccgagtctatattactcgttaacgtgggtccttcttattgaatggtatgggctacggtgggaccccagaaagaggggctcgatgctgacgtggcaggaggtaatggtgtgtataattcgctgcttcgcaactttgttcagattggtaaagaagccacttgtcgacgaccacgttgttgatttgtgatatttcctggaaagagcacctttcaggtaactgtccaaaaacagtaggtctccactctccacgtctctcttccttgtctttttctgttttttaacaaatacccgaaaaaaaaaaaaaaaacgtttaagcgagagcaattaagtacttctacggagaaagtttagtttgagaatgaaattagagtagtttgagaattaaattagagtagccctctatttatacacatagtactaaaaaaaaaaattgattgaaattagaaaaggtttagaaaaaataatgattgaaaagattacttgtctatttctatttgtaatatagaaacttaaatatttaaacttcaaactgaaacacaaaattaaataataataaaaacaataattgaaatcataaaagatattggatattttccatgaccacaaaatttcaatctgtacattttgaatacgaaaaatccgtattgcactaacaaaattaaagttttaatggataacaatgaccacaatttattttattggacttgttttaaaatttaaaatacaaagataataagaaaattatttaatttaaaatattattaagaaatttagaccgacatgtcccattttatattttataccgacagtaaacaatattggcaaattaaaattaacatatgaatctaattaaattatattatttaggagttttttatttataaattttaaaaaaaaaattgtattcatacggaatatacaatgcaatcacgaagcaatttaaatcgtaatttacattgtaattcacgcagtaattcagatcgcaactaacaaagtaattcaaattgtaaaaattaaaaacaaaacaaaacaaaactaaaatcctaaaaatagaaagaaaaaaattaaaaaaataatatatggagtgatttctctattacttattttaattttatactatatttattaacttttttttatttttgaaatattaaagaaaatgagttttatatttttacacttcaaagaagtttttttttttgtatttttacgaaattccatacaaaaacctttatagtatctaacagagcaacctaaatcgtaatcaaaatctgtatagtaaaatcactagaaaaatcattggagcaacccaaaccgtaaattttaaaaataaaaagttaaaaaaaaaaaatacatgagataaatctcctaaagaatattataaaatttgattaaattgcttgcaaaataattttaatttaaatatacaaaaataattattttaaataaaactaaataagcatatattatttttattagaatatttctaattaaggaaataaaataatattattgattttgataaatgaatattttatattcattgaatctggacagaattaattacgtaatattctatatatggtcagatttctatattcattacctga

SEQ ID NO: 384430 - DNA, 1354 bp, Cannabis indica
ggaaaaaagtggtagaggcttatcctttcggcatctacctaaaatacgaacaagacttagttttttgtttttaccctccataggtctacatctataatattccaaaccaatacaaattggccttctatcgatatccagacagattttgaggaaatataataaaaaattaagagccaatttagcacaactctaatatggaaaaaataattatagttgtgaaaaaactttcactaattgtttgttaaattataaattttaaaatgatgtaagaagttaagattttattataattacaataatgttataatctaattcattatatataatcataaatatataaaaaaatatatgatataattttttttattattattacatatttttaattatttttttataatataaacttatatggatttgatgaaaataatttataatatttttacattatattttttcatttaaaaatatttaagttaaagtgatttgtttataataaaataaaatatttaaaataaaatttaaatatatattttaaatattttatttcttcaaaaaatctataataaataattaaatataattttaatataaaataatttattatagtcttttagcaaaaataagttttttctaactttaatttttaactatattttttctataaattgttcaataaattattttttaactacaattgtcaaacatttttctatcacaacaattatgcaaacgaatcctatgtgtagattaactactacaattttatgatctcttgtttatgtgagattggattggactacaacagtgctacaattcaacaataaaatagagttacatatctaccctcatttatatacataattatatattcgtaggcctcttgtcttggctataaatatgtcgagttctaccccttttactccacactactcattccaatccaaattaaccaattaatatccatggctttcaacaagggttttctcgtgttgctactgttggcacttgtggctgcaacagcacatgctcgtgtggatcttatggggctttttgttaatgatcattctgatcccttttgtccaccacctggtcagtttctttctttttttttttcctccatcaacgaccaaaaggctttacttttgacacaatatcatcatcatatgatttttaacataaattgctcacataataatatacaattgttcaaattacacaatggtagtaacttataaatcaaatgttatcatgatattaaagaatactaactaaaaagataggattatggcaatatagttgaaatcgtggtatttcataaaagcacgatattaaagaacaactaaaataatat

SEQ ID NO: 384431 - DNA, 806 bp, Cannabis indica
ggctacaatctttactccatgaactgcatgtttcatcaccagttatccctttcatctggtgtgatgataatcaaagtacagtactgctcacagctaatccagtcctttatgctcgtacaaggcacatcgaattggacttatatttcatacgagagaaggttctacaacatcagatacaagtaaaacatgtgcctgctcaagctcaattagctgaatgccttaccaagccaatttcaagctctctgtttagtgatattcgatctaaactcagtgttgtttctaagtctacattgagtttgagaggagctgtcaaggagaaccaactgtcaaaggagttagttaattctattattgattatttaggactataacaaattcttgttgttcctataatcggttgtgattgttatataaaagttatgtactgtactattcttttcaatcaataatacacagattgcattttccaattactcttcttctctttctcttgatagcatcttttcatgactgcatcttcacagaaagcataaacgtattattgagacatgttgtgagatttgattatacacacacactaataaagagtgattcaattcattactttatttttctctaatttttttagaattttaatttcttgaataattcttttttgagagtgttgatgtgttaattcggttgtgatggtgctcatgtggggaattatcaaaaggttagttagcagttatatctttatatattaaaagtgcctatctaacggcattttttggtttaacagaatatacttaaaaataaaagaatat

SEQ ID NO: 384432 - DNA, 1812 bp, Cannabis indica
atttttgtaactcccttgggagtaaagtttgaggtcaataactttagaattgcaattgaagtgtgagacatgacttgatagagcagtgaaatagcttcaaaatgcaagttgaattgtgtcaaatcggatcaatatttagtgagttatggcagttttactggaggcaaatcataaatcagtgcccaggttgacatccagtgcccaggttgacatcacatcacccagattgacatatgacgtcttccggttacgcactgcacctctttcctattctttggcgattccatatctatcaaagctttaatcttttcagggttcgcctctatgcccctctcattaaccatgaatcctaggaattttcctgaggacacaccaaatacacatttcaattgatttaacttcatttgatacttttagagagtggtgaatatttgtccaaatatttgatcagatctcctgctttcttggctttaccaacatgtcatcgatgtagacctccatgttgcgatcggtctggttataaaacatcttgttgacaagtctttagtacatttcccatgcatttttgagaccgaaaggcatgacctaatagtaatataggcctcgatctgtaatgaatcaggtatgctcctcatctacgagatttcatgggtatttggttgtaccctgagtatgcatcgataaagcaaagaaattcatgccttgttgttgtgtccactagttgatctatgtgcagtagcaaaaagctatcttttgggcaagtcttattcaaatgagtgaagccaatgcacactctccattttccattgagtttgggaaccaacactaggtttgacacccattctaggtagaatgcttcttggatgaacttgatcatgtcaagtcgatccacttctactttcaaagctgcatacttttaagaatttagagccctccgattttgccttactggctttgcatttggatctatattgagatggtgacacattacgattgggtctattccttccatgtcctcatgcccctaagcgaacacgtttacattattttctagaaacttccttaactccttcttaagggctttgaggagcccttttccaatcttgaggaccttgagaaggttctctaaaattactatttcctctaattcttctactgactccactcgcatttcctcacaaactcgagggtctagttttgatgaagtttccctgacttggttgagtcccccatggatcgtcatcatcgtcggttctcgaggtccagtggtgattctgagtgacatgtcataacattctcttgcttccttctgttatcccttcaaggtggcaatgcctccgagagttagaaattttatagccaaatgacttactgaagtgattgctttcaactggttgagcgatgatcttcctagcattgcattgtaggctactggacagtccactaccaaaaaggtggccatcaccgtggaatgtagaggtcaccttccaacaatcagagctaactctatcattcccccgtggttgaatcgagtcactagggaacccgtatatcagtgaggtgcaagtaggggtgttcattggatcacattaatgtttttagacatatccaaatccgatgcgatcatatattggatgttagattttaccatccgatccgatccaattaattttgtcatccaatcgatccaacatccattggatgttggattggatcggttctatccattggatgtatttcatatatatttatttgtttaatttgggtttatctaatattttagacctagtattttttggattagatcgaatc

SEQ ID NO: 384433 - DNA, 1139 bp, Cannabis indica
atatataaataatctttattccacacgcacagttcgatgcatatttatttatattaaaatactaactcaaatttttaatttgaattttgatgttagcacagcaataaaaaccaacttattatatatattataatagagatacgtcggtcaaataacagaaaatgaagtagttattcaaattattcatagtttattattattattattattattattattattattattattattattattagcctctccggcggccaccgcctgatccgcccctaccgggagaagaagtgcccggaggatcatggccccgattagcacttggttggtcatagtcgttggtgctcaccttcagagacctcatccctggctgcaccctcatcatcggcaaatccatttctactttttctgcaatttaacaaaaattattattatacataacctatatattatgcatgcacacacagatatcacaaatcggtataattggaaaaaaaaataattgaaattatattacgttatttttgtttttatgattatatatagcacaataaaaacaagtaataattaattatatagccaagagcagtagctgcagtaccaacattaataaattttgtcacaaaaatgtgtatatgtaaataaatgttccccactacttacatataaatacatatatttaataacaaaaataaagaaattcattaactataggagctagctgtattcataataataaataataatgtatagtaactatatagttaatggaaaagggaaaacacatatatggatgccactggctctagctcatatccagctgttgatgatgcatgcatatccccactcaatactattaccaccattaactcaactcaattattctaaatctatctaactattctgaaaacttccagaaattaaacacataacaaaacactaaagaatactgggtttcatcagaatctgatccaacatcccatttgaatatataataataccacaattaatatattcactcaacaccaaaactacattattctttgatctttttcatcagttcccacgaattaaccaaatacactactcaatttttcactaatttttctaagtcacagcactgaaaaccatccaattaaaaa

SEQ ID NO: 384434 - DNA, 2115 bp, Cannabis indica
agatgtaaataaattttctccatgtccttaaaaaaaaaaaaaatctgcatgtccggaattaattagttatataatttcctgaaataaaattagagttttaaataacgaaaccatttatatgcaattagtagccttaattaagaaaaaaacactatacagttaatgccactgtgctgtcaactagaatcttaagtactcattagtatattatattaaaaagaaaaataaacaagagtgatataaattaaaaaaaaaaacattatctattttctatgaaaaggtcattataatttataacacaaaaatatattatttttaacaggagtaagaaaatacatatataaaatgtctgcactagtactgaagttactatcgtcgcaagtattatttataaaaacattgatcacgggaactttgacttttcaaattttaattatacgacgtcagattgatcacgttacgtacactttttacctagataattatttcatatatattttttatcgctgcatgtatatattatttataattagtgagcaatgcattaattaatcgtattttcagacctctcagtttgatcatatacttataatataaaaatatgcctgaggatttcccagcagatctcattatggtatatatgtacaaattaatgtctatatttttgtatttgtacacacatgcacatcagcacatacacataatatatatattcataagaataatattggttagacatctaaatacatttataaatatattatattgtatagaaaatatatataacacagagggaaatgggggacaaggggacttgtctattatttttgtttatatataagtgggctccgtttgctagaacaaatcagccaccgttttggtataaatgctttagctagaatgaatgaattaaaatttcttataaaccatggaaatggggaatgtttttcggccatgataccagcttttgtcatgctatcatgtctatccaaatattacttatattaattgtatatatggaaacatgcatcctcttcatatttttttttttaataatatatacatatatataataagaacagtttcgggtgcttgattttattttaccaaattatatctactaaattatttatatgataacgtatattaatagtattattttgtatgttgtttcaagtaatttgaaaatttaaaatgggaaatttatgattcacacatgtcaattgtgtatgcgttgatagttttttttgtatatgtgcaaattgactattttataatttattttggacacattaaattatatgttataactaaaacatgcaaaggtcatataaaaataaggatataatttttttgggtgtcaaaaatagaaaatgtctatacagagaaaatgtgatgctctatagagtaagggcaattgtatttatatagtatagggttttttgatataacacaaaatttggtatgaaattagaggcacaagcacaaccccttatataaaaaaaatatatgaatttaagcatgacactgcatgagaaatatggatttagcgacgcagcacaatattagcccaaagtaggacacatatttacgaacatactatagctcaaatgcgcatcacacgtttaaaaccacactaatttgacactaataataaaaaatattgatttatcaattatatattagataatgatcgataaatatttagaaataatttttttatttatatgattttacataattattatataaaaattatattaaagtaattaaaattataaaaagttatcttattatttttaactaaagtttgaaaatgtagaatatgaagttgagcccgtaagtataggtaaaataataagatagctttttataattttctttgctcaaattatgtacaaatctgagcaatatacaaacggaggcgactccacaacttatatctttttaattatggtcccatacggacacttatttaaacctttgtttatatgcatagttaaattagcaaaataaaaaaacaaattacacatactatattcataatatatacatatttatatatgttggtgttcaatttttcttcttcttttttttttttaggtacttcaatta

SEQ ID NO: 384435 - DNA, 3023 bp, Cannabis indica
tttttttttttttttgacaatgagcagagataaaggttattaacaaggcatacgtctttgacaataaacaattgatcaccctgtctcggtgccaaagcaagcattaacgtggaaacaaccaataatgcagacaatgttaaaaaaacagatatctaaccctaaataataaaaacaatcagcataatcatatttattttattatgaaaggattaacaacctgcatatgggatcttgaacgttcatttgcttcaaaagctttctgtttattttttatctgttcttctcgtgtcctctcaaagatatcataattacccttgtacgcagtcagtttttgtccttgtagatgaagaatatcagtaaccacctgtaaatacaggaaaattgaataagacacaattatttcccatacaaagcttggaaggcataacaaagataattaccgtgttcaaaaattctctagcgtgagaaacaactatgaacgtctttggccatttcaccaggtaagtctccagccacaacacagcatgaagatcaagatggttctgcaggtatataaagagtaaggcaagcagctcaacaagagtacttggtaaataacaatacagattacaaataacaaaatgaatgaagtcagaggtacttataatgcacataacatactgtgggttcatccagtagcaataaatcaggctctatgaaaagggcacgtgcaagggcaattcgcattctccatcctccagaaaatgtttttgttgctttcagctgcatttctggagtaaaactaagaccctgtagaatatttttatagcacgacaccaatcagaaaaagaagccaaaacataatttcttcatggtttttactaattacagatcaaataaagcaaactaaatttcagaaaagagcatgcgcaatacgtcaagagacactaagaagccacaaaattcaaccaccaaaacagaactcacagcgagaatggcagctgcacgagactctgcagaatctgcatcaatgaattcaagccgtttgtatatctgctgaagcctttgtgaaattgcatctttgtccgctcctccattggtttttccatcatccaagtccatgtctctcttaaattaatgaaggatagccaaaaaaaggggcatagaaccatcaattcaactaaaaatatcaaccaaagtaaagtaggataaattaacacaaacaaaacaacaacagaaaatatatattcacctgcagagcactaaggcgagcttcttcttgcaagagttgggttctctctatgtcagagttgagaacacattgcaaagctgatatatcatcaccaacaacttcttgctccacatgcaatatctggcaatttgaaggaatgccgtcaatggcatgcatagccatgtgcctgaggaatgttgtttttcctgttccgtttcttccaacaagacctagaaaaattgcacaaaaacatgtcatcatcatcaaagtcggataacgaattacaatgaatggataaaagattatatcatttacaattgcctttaaatagagaccataagactgatgcaagacttttttttcctttctacaacaagctcaccctccctaaaatgaagatgaaataaagattattacaatgccaacaacatatatcaaacttaccataatgccttccaaacgagagtgtaagttcaccatccacaatgagctcccgaccaccaacagaaacactgaaattctccatacgaatgtccttgacagttgatccaccactgttgtcgtgagtaacacacacaacaggcatcccttccctagctgcttccatctctgccaaatggatttggtattccacctaaataataaaaattagtaaaaatattgattaaaaaaaccttatcaaacaaatattttgatagtgacgcagttcatatgaaacatcaatcaaataatcagcaatgctcaacatatggtttttaattgtatgacacctaatatgttgcaaactactaatttctttcatcttgttgttattttgccataatggttattaaaatttacctctctttggcgctcgtccttcctctttcgcctttctagcttagctttgtcacgttcagtgagcagaggaccatcaaaaacttcaaccttcttttttggagcttgctcttcatccattccatcatccattctaaaaggtgttgcaaggctccgcatagttggtttaggtttaactagtccatgcttcccaaacttttcagataatatactacatacctattacaaacaaaaattaaaatcaataatgaatcacaagttccatgaattcaacctaaaattgttaaattagcaaaataaccacattgaatttacactgtgcaaccatatatacactgtgcaaccatatagtgtaatttttggcaataattttgtctaacaaaaaatttcataatgactatttttacaaaacactccaaaacaaattaactggcatcgaactcaatatcaatatatgaaaatcgaaagcgtaataggatcaattcaatgctgttactgttcagcaaattcaagtaaaatattcaactgtcgaatgattttttagctgataaacaaaaccaaaaaggtaattgaggatatgaaactcacagaacgacattcggtggtgtcatcgacgcaaccagcaccgacgagaagctcaccgatggcttcaaaagcaccttcgccgtcgattccgaaatcgaagtcttcgtcggcgaggacgttgatgatgtagtccataataggttgatccacatccacggcccttcggccaagcacttcttgcaccacagagcccgctacctctgtcattttctcggaaacttttaattttccgggaaaacaatctttcttcgcaccaaagggttttgcggatatttgagagcccccctttgatgaataaaagcccttttaaggagtgagaacttaaacgacagcgttttgatgaaacctcattaaattttttattttttgattttttgagtttttttttttt

SEQ ID NO: 384436 - DNA, 2630 bp, Cannabis indica
attataatttcaaataatttttaaaaattactcttaatatttattattaaaaagaatataaattcaaataatttttaaaaattactcttaatatttttttccacacattattttatgttaatttcaatacttattttaatttcattttcataattttttctaattcgtgtatatatattttttttttattttttcttaataaaatttcatataatttttattttaatttttatgtcataatatttaaattataatttatttttatttgataggtatatttttaagtaatatatgaattggaagaaaaaaaaaaaaaaagtacaattaaagatataatttatataaaaaaaattattaaataggacgtcttagaaatttaaggtgtaaataaaatttcccatcaataattatctatcattgcatcattccattctttataaaactactccatctattccactctccctcattcctaccaaagagagccaaagtgagaacctaggatataggcctagatcctcttctgcccatgattgattctattgttattgatgcaatttaataaattttttgtatgacatgaaatatgtgaggtttgatgatatatgtaatgaggtgttagagatcatactttcaaaaaaaaaaatgaaaatgaaaactcgaatagtacaatccatttatcactccataatgaaaaatgtgatcttgtagttcttggtttgctaagatacgttattaggtgctctattttattttcctattaaggctgatctgatcataaacttgtgctcgaaagatagttatttatatacaaatgtatttgataataaatgtttggattctcgaaagaggagcttagaaaggtatcttggatcttatagaaatattctctaagaaataaactaaagttattgccatcaagcttgactatcaagtttaagtatggtatagtgaatgatgtaaatatttggttacatataactaatagaatttcattagagaatgaagaagaaaaaagagagagataatgaagaaaatttgtagcaaggcaaattaagattgaagactgatattaattaaggatttgggcggcttaaagacctttttaattaatattagttaaagcaaattagagtcaaaacaagagaaaaaaagagtggttaaaactaagtacaaattgccaatcaataatctatatcaaaaaaaaaaaaacaccaacaacactgatttaatctcaggactaaatcaaatcagagagagcaaaaaaattccatccttggacaggaacaaagataatgggaaaatgacaagtgaaatagtaaaattttaataatttttggtacaatgaatagtattgaaatagtaatgattattaacattcctaaccaaacatatccatagcctaaggacaccaaaaaactagacaagtgaggagtcgcacgacagttgcatggcggtgacaacgagatttgttgtgtttagaagacgaggcgatttaagtgactgtgttatgcttatgaggtaggctagaagcaagtgatgatctattacgatcgcttacaatttggtacgggcagatgaaatggtcacgttactataagaccatcgtttcggtttagggaacctacttccaatgtggtagcaattgctttgatggactccttactaaagttgtgtattgaaagagtatctctttaaatttttgcaaggaatagtcaatattttataattataactgtattaagaattgaatggaaatggattccttagattccttcctctacaaccaaacatgacataagaaaaagaaagtttatagacagagatacatagcaagtgggtagggttatacaagctcttgtcaattaaaattgtgaaaaaaccaaaaacaaagttttgacctttcaatagattgatgcaataaccagatttcttgaaaaaaaaaatatccatgaagcatggttttgtagtaaaggttctttggtacattatattacattttacatgtggtattaacttttataagcatgaaatatataatattttagtatataagagtgttgctgtcaacctcttattacaatcttgtagtcaacccccgtgcccaaaaatacctaccgaaatatttttaattttttttttttctatgacagtattagttatgcttacaacatccctataaatttttttaaaatacatttaaatattttttgaatgcgcctggtaaactgagatataaagaactctgttttcgacaccgtgaactatccaaaatatttcaaaaatttacaggaataatattgtaaacataataaacaccaccataaaaaaaattaaaaaagtaattccgttatgtaatttcggatgtagagattaattaagaagttctaatagaaagttataattagcactcctctttagtataaattaaaatttaatataatattatataataattaaaatttaattaatatttttggttatattttaaaatttaagtacaacgtatacggtgtaccaacgagccataaagataatatccacataaagagagatagacaatttcattaaaagctctttttttacgtaggtaaaaaaaaaaaagtacaattttcctaaaaacattaatc

SEQ ID NO: 384437 - DNA, 1191 bp, Cannabis indica
tttttagtttttagatgataatattgcctgaatttcaatatgtttggatctcctttctgcaaggaagtgtcgcttaaaatctattacatatttcagcttggcttttatctttgttgactcaaaattttgtcaattgattgtggaaccttattaattactgattatcgccacgtgtaaataagaatgataaatagtaaaagtgatacatagattgatacaggtctggtccccttttttagctagtaatgacctactctccttttagctgtattcactcatgagataataccatgcataatataagcatagaccttgtactatctagctatcttcagtattacaattgtgagaacaatgttgtatagataaagaactagtaagatcttgtggagaacttaaaaagatactggacttagtttttaggaggtattaatggaatgtgaggatttagagagtgagaggtcttgcatgtgtaagaggctcaatgtagcatgagagaggacttgtggagaccttttagtccatgtagaatgacctagccttgagagagtgatctaatcaactttatatattatcatgcttacaaaaggtcctaactcaaataggtaatgatatccttccaaaatagggatatcaacatctttttatctattatttatactataaaaaaggataactaaatcactagaatataggactcatatctttataaaatatccctatcttcatgggttattggacctatcccgtaatttgttcagttgttcagacttgtgtacataagttggttggccaaccctatttttatggcctgtccaacctgtgacctctcattggctggccaggtatggtctggccagctatttccttgttgttcagcatctttgtacaactttcattataaaggtcaggcctccttagttgaacagtgattcttggctgtcgagcttgttctaaggaattggctggccttcaagcttcccctggccagcttacaagtttcccttgcctggccaaacatggtttgccaaggtcttaatggctttcttgactcctttttcttgttcttgcttcacaattttgcttgaatgctttagaacctttgacaatcaacataccgtataaggtgactttgacctattgttgacaaaccctgttccacatgtccttagttttgactatgtggacatg

SEQ ID NO: 384438 - DNA, 955 bp, Cannabis indica
  modified_base (47)..(47): a, c, t, g, unknown or other
aattatccattttttttgttcatgtttgtataataattaatttgtanagacaactgaacattacattttatttgttatggttatgtacattatagttattcaagatatcgtacaaaattttgagaaattcaaaaaaaatttaatacactggaaatatgatttaagctgtctgttacacgcgtgactcttttattttatatgcgtgtgaaataaattgtttgaaattattttttatattgtaaattattctgaatttttcaaaattttgaaaaatatcataaacaactataacactataagaaaattggagtaaattttttctaaatgtccaaacagataaaaggtggatcaatgtacacattttaaggtaagagtaaacactttgccacaaaatcaattttatttaatgacattatatgtgcacgattttattttactatgaagggtctcataattctattattgtcttcggctcccattttctcccgcactgtcttggttaccatatttcttaaaatatattttcttaaattatgtaagactcgatatatacttaactacattaatagtagtatgatatcgaagaggtgttaagcaccagtgatctcttttagcatttctcattgtaaaagcacatccaatatgacattatccaattttttttactgtttatttttctcttttggtgctgatgtgggcatttaagtcgttgcatgttcacacgttgaccaaagcattggtaaaaaattgtattattataattaattttaagttcacttatactcagttttttccaccacttagaaagcacaatcataaaaattgttcaagcatgttcattacaagaccccttagcttgaagtttgaacactgaactatattgtggaagatattagaatatttctaattaaggaaataaaataatattattgattctgataaatgaatattttat

SEQ ID NO: 384439 - DNA, 2304 bp, Cannabis indica
ttgatctaaatgaaatggattatatattgaagcattaaatcgacaatgaaatgaaataacagaattaaaaaaaaaagataattgaaataacaaacataagttgaaataaagcctaactaaataaccggttttacatgccccttcaagttggagtgtaaattttcttacacccatcttcgatataatgtcgtggaatgggaggggttgagaggtttggtgaggacgtcagccaagttcgttttagaagaaacatgattcatcttgatgctgccattgtttattttttcccaaactatgtgacgatcgatttcaacatattttgttctctcgtggtagacaagattttcaacaatatgaattgctgctatgttgtcacaaaataggagagatggtgtcttattgttaacgtggaagtccttgatgatggtctggagctaagtgagttcacatgtggaatttgccatagccctctaatcagcttcagttgaggatcgtgaaaccgtgggctgtttcttagatttccatgagatgagggactgatcaaggaatacaaaatagcatgtgatcgatcttcttgtgtctgagcaagttccccaatcagcatcagcaaatgcttgtagttgagttggggaagagcaagctttgtaagagaatagacactgtgctggtgatgtttttcggtactatagaatgcgataggtagcaagaaggtgaggttgtcgaggagcttggagaaactggctgagtttgttgactgaaaaattatgttaggtcttgtaatggtgagatagattaatttgcaaattaagcttcgatattgagttgggttttgcagcaaattaccagtttcattatttaattttatgtttggtttcataggtgtggtgacaggtttggaaccaaggtgtcctgtatcttgaaggagctgcagtgtgaatggtctttgagttactgatgtacctttgttgcagtgagtaatttataggccaaggaataagtgtaagtctctgaggtctttaaggttgaagtgagcatcgagagtggagataaaagtagttaatgctgcagcattgttagtagcaatgatgatatcatcaacataaatgagtaaagaaataagcacctgtgattgttgtctagtaaacagggtatggtcgtttttggattggataaatccatgttgaagtaaagtggtgctaagtttagtatacaactgccttgaagcttattttaagccatacaagcttttgtttaatttgcaaacaacatttttaggtctcactccttttggggtgtaaccttggggtagtttcacataaacatcctcatgtaattctccatgaaggaaagcattgtttatgtcaatgtgatgtaggtgccaattgtttatggcagcaagggcaaaaagaagtttaagtgtattaaatttttccacaggggcataggtgtcatagtagtcaatacctagtttttgtatgtagcccttggctaccaatctggctttacatcttttgaccgagccatcgcaattatactattttgtatatccatttgttgtctatggcattctgtccatctggtaaagtaactactatccatgtgtggttttttttctaaggcatctatttcaacatccattgttgtgttccatactttctgtttgcaggcttgagcacgagaagtaaaaactgagatttttactgttgctagaacaacagctctaaacgtgggtgttaacctgctgtaagatagaaagttggtgagaggatgagctgtgctattggttgattaaacgaaatcacagttgtaatctaataaatgtacaagtttttgtattagtctaccagatttggaagccatgggaggctgttgttgttgacaaacatctgaagtattaggattagagatattggtgtctacaacagtagaagaaataggatcagtagtcgcataatattgaaaaaagttattagtgctagttgttgtattttctgcttgagtggaaaaatggtttcataaaaagaaacatctcttgaatgaaagatacgattgatttgcaagtctagtaaggtgtatgctttcatattttcaggatatcctatgaaaatgcaagcccatgctcgaggagcaagtttgtggtcagaggtgacataggatgcatatgccatacaaccaaaatttcttacgtgagtgtaatgtggttttttgagatgcagtaatttatatgatgtcttatctttgagagttacagatggtgtacgattaagtaaataaacattagtagtaaccatgtaactccaataa

SEQ ID NO: 384440 - DNA, 1051 bp, Cannabis indica
acttattaagagaaccaacctgattttttttgtaatacttctttaatttctcttatcgtttttgagctcctaatttgtatttataatttataatagaatcttataaaaattgcaagcaaaattactgatatcagtacaataatatattaatatcattttttttctcaataatatagcaaaaccataaaaaaaaaatgcaaaacatgagtcatataactttaaaaatcaaagggaaccaataaaaagcaatttttttcttttgcaaataaaacaaaatatgtatatagcaatgcaatgttgacatttttttcttatgtgaattgtgaatcaatggtgataaaagaaaaatatgtgtatgaacatacaaaaacatatcattatcatacatggtagccgttgtaggtatactgtatacacaataataagtaaataattttaatttcaataaatatagcaattgataaaagtaataaaatattaactttgaaagcttaccattatagtacaatgaaatagaaattggaaagattattttttttcttttaattttgtatatgatggctgatgagtgatgaggtttcaagaggatagttgataaattgtaaattgtaatgatagttttttttggagagatatttagagtcttagagagaactttagagaaggaagggttagagaaggttaggtaggttcctaggtgggagtgggattgaaatttgagagagaaaaggatgagagaggttgtatagactttttaggatagtttggattgtattgtattatattgaattatatatcatatttttatataatattatattaaactttaatttatattaaaaaatatatatatatttaagtgttcataaaaattaataccaattataattttacatgaaaatattaaataaaatacaatttaatataactagtaaacaatccgcgcttcccggcggttgtttaagaaaattttaaattattatatatataaaataaattaataataattaagtaataataaaaaatattttaatttttttttataatattt

SEQ ID NO: 384441 - DNA, 1490 bp, Cannabis indica
atatataaagtaattccccttaaaaaaaacaatgttatcttatgattttgtatagatttccatcctccacataatatttattaaattattaaaatttttattgggctcaaagtttgctctcataaatcactagtataatatataatattaatgtactaagtcatcattttgttattttgttagaatatctccaattataatttttaaatacagtctttaactaaaatagagagtgatcagacttcaaaaataaactctaatcatataaaaaatagctctttatttttattaaacctttttaatatattttaattgaaaacattattacttttttattattttataaaattaatctatgtttaacaaattcaaattataaaatatattattaaaataattaaataataattaaagtatggaacatgcatgattaaaatataaaatgactctttattttaattttgtaacttaagctaaaaaaaaaataaaaaatatcataagaattgctaaaaaatattactagtgtttagcactctcgtttcttctatgtcataccgctatatcatagtataatcaagtatagaattttatatagagaattgctattgggcaccagtggtgcctagcaccttctaaatgtgtcgtcttgcaattggttagcgatactctataaaaattattatattaaactatgtaggacccgatacttaattgcaccaatagcgatattgacacgtaagaggatgctaggcaccagtagtaccctttagcaattctcttttatatattattaaccaatcacaaaacatcacctattagctagaaacccataagctcaaatatgattgaagatgcccatagaccataaataggtatgtagtacaacattccaagcaaaaatggaataataaggaattaataattcattataatgaggagagagtctgatcagtcagagaccaaattcgattgggtatgtgaccacgtgatcacatcactactatacaatatacatatacacatatagatgccatatatcatcgattaattaatttatttcaatacaattaattagaaaaatagaatttcttaagtataatataattaatatcctattatatgttatttgtatatgcataatgcatgcatgtagccatgtcttttgaaattgataaaagtcaattgaggcatttaaagaatgaatttttattttatttaaataatttattgaacttataaaaaaataaatacatgtacaacacaaatttattatgataattataataaataccatatcactaataatgtatacctcaattatgagtatgccacaccaatacttaatattttggtgtgcatatatattactagatatactataaccttaatactataatgtgtatattgagtagttaaattataaacagctttagtgataagcatgattaagttagggaaatttgaatttatatgcttaaataattaaaaaa

SEQ ID NO: 384442 - DNA, 1645 bp, Cannabis indica
ccactgctgacttcaaagtcactcaaagagctacccaatgagctcttaaaggaagaactagttgaacaatagccttcgtacaaaagaaagagtaaatccttattgatctgattgtcacctccccaatattcgtgtgagttcatctatgcagaaagccaaagagaggtgaacaaccggagatcataaataagtcaaggataaaaacatgggtcaatcggccaagacttgtacgtactagctaggcaatccagaatgtaaagccacgagctggctagcttcttgaaggttcattaagaactagccagcctataggtggttcaccaagaaccgaacaggatagatccagcctgagaagaaccagactgaattttacgaaggaaccaagtactgggcaggggcttttggagaggatcaaacatcgggcaggatctctaacagaccaaaagcaatgagtagagtcctatacagataaaaaaaaaatcctattttctaaattcaaagctatgttcttcgtgctcttcaaaccctgaagatcaaaatctcataacaaagctcaagatttgatctttttcatcaaataatcatacattatgcatcctaaagctattgaacggattataatgcataaaactatcctaagacataagaatcaagaggttcataaaagttcaaacactcatcaatggaaaaagttcagaaaatgaaaaagagagaaagaagctttgaacttacccactgagaagatgcaagcatgctcgagctagtctgcacgacgagtataggtatcagaaacacaaaaatccacgaagaactcggctttatggagtctttgagagaatttcttactcagagaatataaaagaagtaaagaataagaaaagaagaatgaggcacttatatagtttctagaaaaaatttccccctaaaaacgttaatgggaacttagtgccacaaaaatacgcatgcatggaaaagagaaggccaagagttttaacatggtaaaatgtgtatccttcataagattttccacattgattgacgtaaaattaataactttcataaagtcatgtcagtcgaagagaccaatattctgttgggcatacctacacgacaaagggcgttacaataccaggcaaagtgtaagtccctaacccatcagacattcgaatggagatttggggggaaaatgctatctcaatttttgcccgcctgacgtagcacctccatgtggcaaaaagcaaaaaatacattgaagaaacgctaaaactaattggtcaggtctttgtcgtagaacaccgaattgttgggtttgcggtgtagaaacacttgggcaacatgtagtcatgattgtcattgagggtgttggatttcaagtttccaattttcaattgaaatgcgagggtgttaagttttggtcattggggttattatgggtcctattttaaaaatgattggtgacatgtggttgtggtgatattttattgatggactattttgatttgttgtgggtttgtgttcttgtttgggaaatttgatattatatgcttaaaattaatttatccactaaaaatatgctagcatattttgcatcatgcaaaatattatgcaaaaatatatttacactatttttctcatccaattttac

SEQ ID NO: 384443 - DNA, 945 bp, Cannabis indica
atttcggttttttaagcttcactttaacaatcccaagtggccttcccaacccctttaccactaacaacaagattgttaggctgatcattaccagttgaagatggtgtattgggattatcatcaaactcatccaaacctgactcattttccacagttgaaacttctgcttctttaacactactcacactcacagatcccttttttgacttccctttcttgtgcccacgtttgcgtttcatcttcttataatcaaattattatgctaaattacaataaaaccagaatccaaaccaaagttcagtaatttaaattcaaacaagcaatcccaatattgtaacttgaatataatctccaaagcttgaatctttcgcatcagaaatcgaatcaacctaaatgggcaaaagaaagtttgaattttacagaagttaaattacagagtaagcacaaacaagttaattaacttcgaatcacagattatgagtgttagaaccctaaaatttaccccaattgtaaaaatttagagcgatttgtctgttacgaatatgagaatgacagtccgtcaattaattacagaattaaaatgtaaaaataattaatttatttaaaaagataaaacacaatgagagggaagaagatgaatatgtttattgtatgtacctttgtttacggtttcgaagggtacgtttcgtttcgtcgtgtgtttctttttgtttttctttctcagtgacaagtcattataatggtccttttattgggcctgttgagcagcccaatatagtttagtttaagggctatttacaaaaatatgggaaaataaagataagttttgatatatatggcataaaaacttaattacactaaatatggcatttttttaaaaaacttacaaatatgggaaaaagtcttgagtaatgccataaaaaacttaaaatttgtgtttctttt

SEQ ID NO: 384444 - DNA, 1248 bp, Cannabis indica
gctaaattgttctttttcttctatctatccatcacatatgttttgcaaataaattttggacttcaaaactagcatgtagcaatgcctttaattttgagatatgtgtaatatggcatctcatggcctctttaatttcgagccgcaacctcacaaccatacacagatgtataagatttagagctaaaggatagtttctttctagttctccctttgaactgtgcccaagagagatatggcatgagcttattagcttcatgtaacttccatttctccacaaagcaacaaacctttcatcgtattcccatctgagtaattaatgattatataagtatgcattgcttctgaatctttatattttcatttcattagaggtatcttactaatttggtgagactgctttatgaactgaaaacctcatgattagcactacctgcaacttttgagttttagaatatatttacatgaacatatgaatattgcatctgctttggaatttcttttccttatgtttttataggttattccttttaaatgttattcctttgcatttgttctagtattgctggtatgtttaattgattagatttttgtttagagcaatattcatgttttcatgctgttacttaaaatagtcagttgtcctaagtgtacttttgtaacttgtgttgcttactcttggctcttgctgtccatctctacgatatataaattatatcctttaactcttttgatcatattgatcaagagcttctttctctcattactttctaaacatttacacatactagtgtttgtgattttttttctctttttttcctgtatcagctggattttgtttcttaatatgaatactggatatgatctgagatatataaatgtatttatttattctcatttgataaattgttagtagttaatacttaatagggtatatatgatatgttttttctccttttttagtggaaatacacttttccctttttcaaatttattccaacttcttgtgtgcagacccaaaagaagcaagacaaagggttatcttcttgaaccatggctagctttaagtttgtcagggttgttgggagtgaaaactcaaagatgcaactggtaaacattcttatatctatagtttctttcagatttttcctccaactgttttgttatatattaaataaacaagggtaaataccattttggaccctctgttttacaaaagttaccaattagaccctgtgttttgttaaatga

SEQ ID NO: 384445 - DNA, 1391 bp, Cannabis indica
agaacagtgttagttattgggggaccccttacaaatgtagaaattggtaagaaaaaaatgaaagaaaaaaaatgcatgacttgactgaagtgagaaacatactcatgaattcacttttccgaaggctagggaaattctgaacaaattgattcaagcacttcaaaacctgggaattaatgaaaaacaaagcacgaatttcagtgcttattgttaattcaaagagactacatgtcatcatgacagaatttttctcaaactaatctgacctccattctgatactccaatcatcaggatctttaggttccactggttgatttaggataatagcaaattgagccatccaaggtttaatcataggtattaatattgtgctggtttccatctgaatataaacatcttaatctgttaattaattcaatcacccgaatcatatcactgaacatgaccaaaacagaaagaagaaaataccctataaacgccacacattgcacccagcatggagatgcaagaataaataattgaaagagcttttgcacgtaagtatttgtcatacacctgcacaaacaaaccgtacaatatagtgataaagtggaactcagtggaacatggttttccttctagcaaaatttgaacaatgaatacccctagcatgtcaacgctatatgttcaatgacaattgcaaaacaaaaaaaaaaaactttgaccacaactatcaaagctactaaactttatgcaagccaccaaataatagttcattaactctagcacaatctgtgataatcttgaaaaggaaaaaaatcagagagaacaagaaggaaataagcatgcataaactaaatttcgttctatacatagcaaaatcatgcaagtactcatttagaaagttatgattttttttttacatagtaagtcatgatttttttcttcaactgtttgatgagtagcacaaattgctagcatcttttaacaatattaaaatataacattgacaaaaattaaaatcaaatccattgttaatagtcaaattcaagtgttgccccatagcttaatgcttaatctttaaggaaattcagcaatgttagtatgggattacagcaaaagcttgagttcaaacccgtagcctttaaatattttcaaatgcatttacctattgttcagcacacagcctcacaaaagaatagaggttgttgtgctggaggataggcttaactttgctcactttctaatagactacgttttatacgggttatcacgacacaaattacccaccttcagaataagaaataaataagatgcccactgtttgcacagacataaatgcaagatccaattcagtcattcaatttttatttttaattttttttgaaaaagagaaagagaccacttgtct

SEQ ID NO: 384446 - DNA, 1299 bp, Cannabis indica
tttgaaaatcaatcaaatatcataattctattaccattattattcaagttattattattgctagaatgctagctatcccattacattgaaaccaaactccacatcaatctgtctcagcttcaacttgtaaaattaccaaaacgagctacactttttcacagtctgtgatgcgactaatgaagccaagccataaaagtgatagaaagtacgagagagaactagtccccataattacgtctcaagttccacctaccctgcatcacaacgaacgactacaatataccaaccccccaactttggttacgtctttgacaaccaatactcataggctatatatagcttgtagtaccattacatatattcggcccacaaacttaataactcattattaacttgatcaacaaatcaaacatttgccttcaataacccatcatttcctatctctaaaaaaaaaatgaagctcatttttgcaacttttctactcgtttgtcttgttctaagctcctctttttttgaggcatccatggctggttcaggtattgtcttgatttctcttttgcagagctttagtttgaaaaataaaagcaattgatgattaattcatgatgtattcagggagggggtctatcttaaatcttaattgcatgatgattttgttttgattaatgttgagattgttttggaggacagagttttgtgactcgaagtgcaaagtgaggtgttcaaaggcaggagtgcaggacaggtgccttaagtactgcaatatctgttgtgaaaaatgtcactgcgttccgtctgggacgtacggaaacaaggacgaatgcccttgctaccgggatctcaagaactccaagggacatcccaaatgcccttaattaactaatctatcattttaaacttcttattattattactactaccactgcttgtcaatgatattgtatggttagttgtactgtatacctctatctgtgtatgttgttcttaattaattataataaagtggagaggtcttgtatgctttctgctttatgtgatgcgtgtttcattagatcaggtcacctccatctctttctttctctctatagacagcgccatgccataaatgtgtagatggtcggtaaatatggcgtggaatatttgttgagcaacgaataataagcacacgcttttcactctctctccctctttctgaacatgttttattaatgaatatagatttcgctaaaataattcactctttctctttatgtggatttttattttatataaatttatatatgtaattgtactgaattt

SEQ ID NO: 384447 - DNA, 1402 bp, Cannabis indica
ttatagatatatagatatcatgaatcacgataatgtatgtactagttgcaaaatctaattaaaccatttgccaaataggtcatgttttaaaaggtagcacgtgaaagatgagaggttccaagtacttttgttttttttttttttctttgttaaatgatccacttgggagaagtttggtgagaatatatatgtatagatagatttatacatatatatataggaaaagaaaaagagaataaggaaaatattaaggacaaaaaagaaagttcatggagccacggaatgcataaagttgtaaaaggacaacttaaacgttgaaacctcaactacttgaggaaaaactagactaatcataaaggtgaagttgttagggtaataaaatagaaactagttgatggattatatatatttatagccatgtaaatattctaaacacgacaaactaaaaaatgaaatatgaaatgtatggctttataattggaaaaaaaaaaatgcaaccaccacgtacaagttaatacataataacttaacgagttgtataatttggtaaaactgtgtgtgacttttctgcatacaacttgataaaaaaaatcggatgttatttaataggaaaagtattaatagtaatgttttactaaatgtattttatgattctttattttggacaagacttgttaatataattttattttatttatgaattaaatcccaactttttcaattgaattattacgtacatttggtgttttcacataaccaatatcttttaccaacaatgagtacggagagtctacattttcaatatacaagaagactatacctacccaaacgtaagctagctccctctctcatttatgtaaatgtattttattattatttgctctaatattctctctattaagctttctatgaaatttggttcatgagtgcagcaggggagaaaaatatgtagttgcagtagagaaattaaatcttgtaaatcgcaactgtgagtatttcaatgatttgtaagaaaaataaaagaaaacggtttatgaatatttttacattaataatataaaaaggatgcatgaagctatatctatagttatgattgagatagtgcttatattaattaaaatatatggaagtaataatgaaaagatattaatggtgttaaactttgtatccaattccatttatttactaattaactaatgtaaaaattaaattttgacaggctaaaatactttagtggtagattttgttgtgcatctatataattttaacttgaggcctaaggccaggctcgcttattatacccaaggttatttcaaggaaattaaattatatatctcttttaacttatgtttttaatatttatcatattttttaaatttattattgtttatttttttttttt

SEQ ID NO: 384448 - DNA, 1869 bp, Cannabis indica
agtccccgaaagtgatttagcgggtcatttatctgttttacgtaaattgtgacttagggccttaaatcatcaagcaacagtttcgactcaaggctactggcacgcttgcattcaggatcttcaagacagtttaggctgacttttaattggtcgctggacgataacattttgtataaaatatattttgaatatggttgtaaacttttaacaggatctcgaagttatataaattaagattatttatcacagtttacgttaatttaacaagtttaaatattcatgtttttcaacaaactcttttattatcaaaggcatgcacaacaattaagaaacactacagcatgccttacagtagggcattacaatttggtataagagccgtcaggttattttctgaagatcgtcatgatatgtataatcatcatcaaagatgagctcgactcgtggttcagtaagtttttacacattctagtatttttgatttgttatgcatgattagaaaagtatgatagaaagcatgttagtagattgatagctgaatagaaggatattaggatcccatgtaagcgataagtagattacaattttaattgctgcctgaccgatctgactcatgaattcgcgggcttgtcctatagatggatgcctggcagaacataaggagttaggatgatgtagttgacactggtggcgaatggagagaatgagattctcctagttcccaaggccgagttacaggttaagaaaggacttatggaggtggttatgaaaatccaccacaggctccactaaatttggagcaaaggttcgtggagatggaagctaggattcaatagctagatgaggagattaagaggttgaggcaacatggatctcctattgtgccttcacctcaagtaccggttacttgagttctagagttgccaacagaacagtttattgttggtaaccaaatgggaccattgtatgggaaatattggatgcaaggacctttgattatttttggaaatttatatgtgatgaatacctctcaagccgtgagcattacaaagtttgtccaagaatcccgaggaactttagttattggtgaggatactgctcctcttgcttccaatcttgtcaaaagtggttctggttcctggaataattaaaagaggaaagctctatctacaatagtgggcttgagttagaaaaagacaattcataggaaaccaggttacgatggccttggaggtcactatacttattcagagtgttcttgtcgcaagaagcatcatctaggagagtgcaactgtaagccatgtttttaatgcaatctagtagggaattttaagaaagattgcccatagttatagaaggaggaaccaggacaagaggaaaaatccacttcatgtttggggttcttaccactatccaagccaatgctgaagctactccttcagtagtgtcaggtcagcttctagttaactactctatttactctatgttaattgattcttgagatacaaattcatatgtggtggctagggtaattgataacttgagtaggccttgaaatagttatgaaataaggtttgaaactctattacctggtagataattagttatctccaaaaggtggattaggtctactctgattagagttgaggatacagaattaagtgctaattttgtataattgggtataaaagagattgagatattattcagaatgtatttcctatttgagtacgtcgttagtattgattacaaacataaaatggtaaattttcaacctgaagtagaaggtaccgttcgtgttgtggaatcgatttgagtactcaaactcagttgtaaagaccgcttagtctaatttagaaattagcagtt

SEQ ID NO: 384449 - DNA, 1318 bp, Cannabis indica
gtaatttaacataaattctttaaatgtacgatagaattaataatctcttaaaatgggatatgtcttgtcctgtgacatgagtgtgctgtgagttgtgagtgggtgttgtttcagattcattctgttgtgtgtggggctttgttgtgcaagtgtcttcgtggggtcttggttccttatggcgtccactagcagtacggtcaacgatcttgaagactgctatgcgaatattcatctggaagaggaagaggatgaggtgatttcactgcagatgttgggcagccaattgatgatcgctggtgcttggttggaaaatttctaacgagccgggttatagactttttggcaatgcaacatactatggcatctctctggcagccagggaaaggaatgttcgtcaaggagcttcaaaagaatttgtatctgtttcaattctatcacgaggcggatatacaaagagtcatagaagggagtccatggacattcaataagtttcagttgattttcaaacgtgtgaaaaagggggtcgatcctatgtcaattaaactatgtcgtctggatatttgggttcaattgcataatctcaggcctggtttcatgtcggatacagtggtgagaaatgttgccaattacattggcatatatgtcaaatctgatcccaagaactttaatggcatctggaggaattatctgagagttcgaacgagcaaagatatagagaaacctttaaaaaggcgaatgaagttgaaaaggcctgatggggattggttatggacgaattttaagtatgagtttctcccaactttctgcttcatatgtggtatcattggccactctgagaggttttgtcatcgtatatatgatacccctcttgaatcaattagcaaaccatatggtttatgggtgaaagcagatcctccgaggaagaacaaactgattggtgcacggtggcttagaacagggacggatgcagatgcccagttttttgatgtaggtggcaacggtggagataattcatttaatgatgcagttaataccagcacactaaatcagggagtgatcgataataatggcaaggatacagcagttgattctatgcaaacatatcacgtgaatatgggaaatagatataacttgaatgtggagaacaatcagggggagattggtgtggatttggctagaggtaatgattttggtagaaaggatttgaatgatcgtaatgatatggaaaaagtcaatcctcaacaagaatctattgagataattgattctaattaagcgatgagtttgaacaaaagtcagcaccaacaacataagactt

SEQ ID NO: 384450 - DNA, 1567 bp, Cannabis indica
tttttttagaaaaaatctattttagtcacattataaacgtgaaattgtaaaattaagattaatctcgaaggaagaaaatagtaatgctctcttttatgatctaaggtaagcttataagatatgctaacattattttaggtttcatgttaagcatttttgttttgaagtgaaattgcattgaagtgcattgggaacaaatacctcaacaattctgaaacgacaacaaagacaccaacaaggaaaaagacaagatcttaagaaatacgaagaatgaatggttagtttcttgttttctaatcgaaataaactgttgaccatcaactactaaaacagtagtgtactcttatgtattagcactatttaaaaaattagttctctagttaatttcgtgtcaaatataatattgtttgaaatttataatacaataaatttaatttgagatattgaaagtaatacgacttaatttatattttgttatacttaatctcataaattaattttttgaggataaaattctctaaactctacttctattttgatatttactatttcgttcaaaaggctctggtaagtatccaagtggatatgttccagtatatacagatatacatgtggtacatttaaatttgagaattaatttagtaaatatccttttttttttaataaaattgtcaaaaatataataaattaactaataaaatttatgaagataaatttaaggggaatttactccatatataattttttaactttttttttttttaaatttacggtttgggttgctcaggtggtttctatgtgggttactatgttgattttgattgctttgttagttgctatgtggattttacgtaaaaataacaaaaaaaaaaaatagctctaaagtgtaaaaataaaaaaaaaaacccctaaatttttttacatattaattaaaaaaaattatataataattaaattaagttatataaattttttaatattgcatattaatatattgtaacagaaacgaataaatgtattagatcattaaaatatatacaacagtatttaatatatggtatcactaaaaattaatataccgtagtaataaaattgtatacctcaaaaaaattataacaatactaaatttaatatattaatattctaaatatatatttatatatatcatgcttataaaatgatatataccactattaaatatgtatatcatactagaaaatttatataatcattatatataataaaaagaaactaaacataatcttaaacaatgatttacaatacacaacaaaaaaatatataccttactataaaatagataaaaaataaaataaaataatataatataataaaataaaataaaataatattattaataaaattatatataccatattaacaaaattatatacaaccaattatcctatacttacaagttatttaccacctttacatataataaaataaaaactaaacatgcatgatctaaaataaaatgatatactatataataaaatttatatatcatattcttgactcaaaaaatctagactagacttctaagcca

SEQ ID NO: 384451 - DNA, 2423 bp, Cannabis indica
gatggaaacagttatatataaaagtcaataggaaataaacaaaaaaatagataaaaaataattagatgagttctaaaatccattacctgccccactgcacgaagtatgctcttttggattcgaatatccttctcaagttctggccctaatgagaattaaaaggcacaagctaagacacatatcacttaatatcattacagaagaaaaagataagaaatataatgatcagatataacctgttgctatgtagagtaaaaactgttagtgggtccaacccatcagatttacacgtccaggcttcttggctttgtcctttcctccagaagatgcagagtctagaggtccacttataggagtggagcaaagcattgcagttacaactgcatcattgcgtctatgagcagcagccactgcaccaggaggaacatcagaaacaatatcaccactcacaacctgcaacagacaaaaagagccaatagctacagcaaagccaactattgaaaactcaaaacactatagggaacagaatcaaaccaaaatatcatttgctgtcaggtggtgtgaaattgcccgaagtgcaccagctgttccaacatcctctgggactgcagcaacctgcagtatattgaaaaatttctaagctctgtgtttccattaaactaaaaataataatgatacctctatatgtttagtaaagttgattggtggaaaatagcaaatcatcatacaagagccatgttcttataacactgtattagccagctttcaatgaacacggatagcagaggaagaagagaagtcatgaatagtaaccccactctactggaaagagcaagatgggagttttgataccaaccatgagatacaataaaaatcagttctcagtacaggaacaaatcatttgaggccatttgtttggcagaaatatggatgggactggaatgttgtagaccaagcccatgtttggtactcaaagaagatgaaacaaaattaagcagaatttaacatatataaaaatacttcagctggtgacatcaaattaaatgaacactgcaagtaatcttgtgatggattttaaggtctgaagacccaaacaaaacatttcagattgtttaagtggttaagagtttctagatccctatatactacgaaagctaactggtgaaaatgaaataggcacccctgttctaagataaagaagattacagttacagtaactcttgtctacaaagagaataatgatttgcctaaatattggttcaatgaagatgactaggtgagaaaagtttaagtggaaagagctaaataataagttgcaaagatacaactatgaattagataactagttttcttcctatgcactgcaactgtctcaaagagaatgaaagcacagaggacacaagctttcattacacaaaaaaaaaaattagcttctttatcttgataatgcaagattgcaaactcataatctggtggtttcatatttttgggtggctgaaaatgatgttggacttttacgtgggctgtcttgctgggattttcactttttatttttaattaaatttgagtgattgagaatttaagcatgcttgaatacttgagtaacaaagaagaattaaaagctaaggacaaacaagttggtaggagacaagaacatgataatggtgatataaaaatagtctttagagcatttttttttcatgacttaggtgtttggtaggaaggagggaacgtaggatggatggagagttaatgaaagatggagaatataagggagggggaggagagtaataatctttttatgttgtttggtaagaaggatggagtgatggaagaatagaattagataatgttattaatttataaaattacaatatatctccataattatttaataatatttgttgagggttttttgtaatttacgataattgaatacggagagttccaatctttccattaatggaggaatctaaattggaggtttgagtggatttgctatcttctcacctctcctttctctccttcaatctctcttgtcaaacaaaaggatttgtcatctcctcccacctctcatccccatccatccacttctccctcctaccaaacatagaattagctttataattaccatgacctccctactccagatcttagtcagcacaatttcttccacttaaataattaaattgggcctcccatcgaacaatgcaatagactaatatatcctttttcatgatttttagaaactattcacttggcagcaaccatcatttcaacatgcaattaagcaccataaactatcaacaacagtattaaaggaaaaactagacactcttcacattttatcaactacgacaagtaagtgaagatgatttcaaactaatatcatgtgccggccaactataaaagtatcaaaaata

SEQ ID NO: 384452 - DNA, 1854 bp, Cannabis indica
aaaaattctggatccgtcactaaatataattgatatattttcatatttgtgattctaagattcatagttttgtatatgcttgtctatatttgatttcttattttttttcgtttaattttatttatttattctgagctcattaaaatgtatttttggtttgatagctctttctattatttattgttgtgtttgttctttatgtcaaataatctatcataatcataggtaaatggtagagaaatttaattcatcatatgtgagcttctgaatgatgttgagaaattagaagggactattccaatgaggattggcttccctgccttatccatggtatgactctgtgtatacaaatttacttttgttgacattcaagattagattttatatatatagaaactcaacagtagtagcaaagctaaagaaaagagtttttaaagggaaattgagaaaagaatgaaactttggaaaattttacctcttctaattaagagcaactttatataatcaatgttattacacttgcaaataaagaaaagcaagaaagaataaatttttctacaaataaacgcaattaacaactaactcaatagtttaaacaactaattttaactacttttaacagaacaaaaacaaactaatttgttttagttaatgatacaacaatggattagttaagtttgttcactgtattgatttggtttagatcttggaaaggtgcttcttcttcccaactttggagggcttgatcagtgggttgttgtagataaggaataagcatctcaattagttattattattattatctcatgttcgttcatttcattgttgtacttagttttcacctacttctaataattagtagatcataaggtatcatgtttaaagagaccttttcttttttctctttgaaattataagatgttctaaatcaaaatatatcatagataaagcattaaaaagatgattgacttatccttacatctttattataattttcttcctagtgtataatttcatctttattttttgaataaagtcttcctcatgtggttaaattttctcgttggtgtaagttttcttggtggtttagtattattactctgtgatatgttcttttcttcgtaaatggcaacttgtacttgtctcatgtgtgaaaaatttaaatgtgtgatcgttcaatctttacactagtgtttacttgtaaaaatgaatgttggctatttaatgttttgaggtatttgactcgttaatatcactttattgttttgatataacgaatccatgactacattgtgatttttatgtttattactttacagggacagcttgaaaaagatgtgactactgaagacttgtagaaaatcttaccctcatctcgaatgtatcctcccattttacgattcactgcttaattttgacgacctcaaagttgatattgttaactgtaaattatttttaacacatttgagattttagtaatgttttttttttataattttatgaatttaatagtataattattatttatttgatcacttttaattttttatttagttgttgtaatttggattgttaatttatataatagatgttataaattgtattttggtttctaagttttaattatatttatatttataattgaattttgaattaacgctttcttttttaaataaaaaagttctatgtgtacgataaaattataaattattcacaataaactcctgttatatatttgttatttaataaatatataatgaagattaaaatgtggcatattatatattaatatgagattaatatatattatgtgttggaggttgtattatatcatatatagtataataatacaca

SEQ ID NO: 384453 - DNA, 921 bp, Cannabis indica
acaagttattaataactaaagctaataattaacaacctgaatctttgatataatgtatgctttttacatatggatttttaattgctttcttatagtggttaatatttttatatttaatttgttttaattagtatcactactttcttttcctatatatggatccatgactcagaaagctccctaaatgtactttttctttcttttttcttttttttgaatggcatgcatatatatatatatatatataaatataattggactttattattattactattataattttatcatcataaagacttattatagttctgaaattcgaatgtacattcatagattcatatcgagaaaaaaagcttaacctttgcaaagttgtagtcaactatgggatcggtatacttttcttcattgctaagatgtgctttattatttattcttcttctctttttaatataatttttatttttccatgaaatgtagaccaaacaccctttctttctaaattcttactcgaagaaagtagtcctaattttcgtctttgcaaattacattgcttcaaaaaccagtaacaatgttttttttttaatcattattattatattatatatggatctagaagactagctagactaaatcattaatgtatgtcttatgctgtttttacacatgggtatctcacaactcatttaaatttatttatatttatatatatagctcattattttttaatctattacaatcttttgaatcttaaaatcacctttatatgtcttagcttagctcttgggtataatgacacttagcaaagaaatgatataattaaatatttatgttattttatcatcaaaatttaaaggaacctattccttgtacgtagtgattaattaagaataaaatctttttctttttttgatatataca

SEQ ID NO: 384454 - DNA, 2001 bp, Cannabis indica
gagagagagagagatgggggaaacaatgagaggaatatattaggggtagtggaaaaaaattagcacaattttgatagaaacatttagggtgggataattttgttattgtgtttacttttaagtatgaaaagtcaattttgtcttattatttatgaatttatatttgtgtttatagtcttcaattgcaccaaattaacactatgttagcgctatatcaataaattatttaaataaatgagcacatttttattgaatggatacatttacaactattttgatagttagggaaaattttgcaacaaataaataaaatgacaaaactcaagaggatcttagtttcagaggatagattctatttatttctaaaattattacaagttttattgtcataataaaataattagaagtataaggaatttatttttaaaacactcaaaattattgtaagtgaaagttattgttgctaggttttacgcccttataaaactatgtttcttatgttatacttttatttatggattagacaaaataattttttatttgtttagtcaaatttattacttatgtttatttactaactatacacttaatgtgtaaatatttattaaatttaaaacatatagataaggtcaattatagtgagatgattacaatggaatataattgtaattatatattcaaataaataagtcttgttattattcagtgcacatgatttatattgacgtgataatctacgatattgtctatttatagtaggtgagtggtgtatagtgaaatagatgtgatcgaatgtattatattggactatagcaatattggtagtagataagatatataaacacattgttattatctattctaaatccttcttcgatgtatatttatgttgcaaagcatttccaataatattatttattctaagtcatataatatagttgattatatgttaattcaatctcaattatgagcgattaaactctagatgattgtattatttattgagtaagttattttatttgttaccaacttaccatgtagacttactcatacttatattttaggaacttgatagtgcaattgagtaagtctgttaatcataaacactgacatctataacttctgctaaagaagtaaaacaatgttttcctttaacttggttaaatgtactaaatgttagaaatctcatttcagtaattatactagtttatagaaatattatttacaaagaactaagtatttttaagagtaaggtacaatgaggggtaaaataataattttagtcccaatttaatgtagattattcatagaagattgattgataattatgattgaaataatgaataattaataacgtatccatattacttatagctatgaatttaattgtgtaattttaaatttgtgcaattttaaatttatagtgaagtaataataaattaataagttagttaatttatttattaaaattatgataatttattggagcttttcataggtccataattctcatgtaccttggacaaaatcgtctagacaacctcaattaatggatttaagtatcaataagaattgtcaaagttgacttggtcaattttgaaaattttcaataacatgtataaattagagaagaaaagataaattaggcaaatttattaattatgatatattggtgttaattttaagaattgtcaaagttaacttggtcaattttgagaattaattatttttttatataaaattgatataatagtaactagttacctctataattttttactatattagaattagtgatttggtggtaaccggttatcattaaattaaaattttattaataaaatattaattcaacattagtaactagttattttaaaaattgatatggtagtgacctattactactatcaaattctaaatataggttttataaaattataaagggtaaatattattttagaccctttgttttacaaaagttaccaattggaccctgtgttt

SEQ ID NO: 384455 - DNA, 1196 bp, Cannabis indica
taatgtaaaacctagtacatacttaattatatcaataataatatatgacatttcgtggtagtcctgactcctatggttgggtgtgaattaagcttagagacactacaaagaaacttttacttttagttgacaactttttagtgacaacataaattttttgtgactaaatgtgacttttaatcataacaaaaaattaatttgtgattaaaaataatttagtgacaactatttagacacaagtacttgtcactaatttagttttagttcaaaacaagtattgtgactaaaaatatatttaatcacgataaagtaatttttgtgactaatacctttagctacggacctcttagtaacaataagaataataatatataattagtctatcaacttttttttactttttaagtcacaagttttgttaagaataaaagtaagatattttgtagtgatagactttatcaacttctttacttagaagctttaagatagagagcaaatttaaagtatatgatgtaacgtgtttttaattttagttttttttaatattttagaatttttttattttaaaatatacgaagtgagtgctcttattacaatatatttcataataataattacatataaacacattatagggggtgataagaaaaatatacataagtggtaataaatggcatttaacttcaaaggaagaaagtagatatatgcatatgcttagacaccattatttatatttgtcggagatttaaaagtggtagtactttttaactatatagattattcatatatatatatatataaatgtatacattaattaatcatttatattaaaaaataactattgagtaactaagcatgagtagttttggatttttagatactcaaaaggtttattaatggagctatgtagtaggtatagtagaaactaataataactatcttgatctccaccaaatgggaaaattaaagaaactaaaggaaaatggtttagtggaggagattcatgaaaaagtatgtaaattttaatttgattatatgtacatataaaagaaaaaaagtcaaatgggaggaagattggatttgtgggtaggagagtcataataattactctcaactactaatatatatctttttttttttgaaaaaaagttataaagtaattattaattagagtgtgagaacacaaatagtataga

SEQ ID NO: 384456 - DNA, 2426 bp, Cannabis indica
tctctattgtctcggtccagctgcttgaagcttcgcacgcaccagtccataaaagtttcattctgctgcaacaccgtggaaaagccaacgttttcccagcacattttggtcctcggacaggtgactaaggcatgagttatattctcatcatgaagtgaacaaacagggcatagaatatgagttacagcatgtttgattctgagctgaaacatcgtggggaggcagtttgtacacgccctccacaccagatttttcatctttggaggcatttttaaattccaaaaaatcttccagaaccagtttgcttgagactcctccatattcaccaatcctttcatctcttgaatgcgtttgtaagcgcttttgactgagtataaaccagataattccccgttccaaaccagatggtctcgtgtagaagcaatattgactgggatttggagaattaattccttgtcccttggttcaaacaagtcatttagcacatctaagtcccaactgagcccatccattgtgaaaagattggccacttttgcattagcaagtcccggatgtgatgaagaaacccaggcattaagcttatccggcaaccaaggatcaccaagaacattgatatttttgccatctcccacacaccatcttatcccatttgccacaagattttgcgcttcaagaatactacgccacacaaagctaggattagatccaatctcagctgtaaggaacgtaccattcgagtagtatcgggctttaaagatgcgagcgaccaacgagtccggattagtgagaagcctccatccttgtttacccaacatagccaagttaaagtctctcaaatttctaaaacccatacccccttctgacttatgataacaaagcctttcccatgacatccaatgtatccctgaattgctactagcagaggtcctccaccagtatttggacatgagactctccatgtcatgactaatctcaacaggtaacaggatatgagcattcattaagtgagaaccgttcaatttttgaacataatgaaaatggaaagttctatttttaatgtgccaattgtcaaatatttcaagaaacttgtcaagcaaagaaaattgataacaagtgattaagaaaacacaaagagtgaaaagagagtcaaactcaagtatatgactttttactcaatttccaatttggaacaccatgtaaatgttacaacaaaattagaaacaacttaattatttccaattattttagaaatcctatatatgatgcaataataataaagaaaaatgcttcatcaattttgcttatatgtatatagagagagggacggagctaaaattgaaatttagaaaggggccaaaaagaaaaaactaaaattaggaggggcaaattataatttttaaagaaattagaaaaaaaaaaataggggccgcatggccacccttgtgtatagggtcgcttctatataaatattaaaatatacatatacataaaaataaaatagagtttattcacaaatatagattttgtttttagaattattaatttcacactttgatctaattttgataatactttttgggttaaataacctctgatacacgttaattaaaattttcaaaaaattggtcgaaatatttaaatagcttgttgaatttgcatagaattatctatagattaagtgatgaaagtgcaaaataatttgaaaaattaagagagactattttactaacactacaaattaaaaaagattatatttttagtggcaattgtttagtctcaatgtaaattttttgtgactaaaatatgatttttatttacaacaaaaagttacttgtgactaaaacataacatttagatacatattgtcactaatttagttttagtcacaacaaatattgtgactaaaaacacattttagtcacaataaattatgatttttatgactaatatttttagccacgaattttagtcaaaacgtaagaatgataatttataattagtcacaacttttaaactttttatcacaaattttattatgattaaagtaaaaaattttgtaatgtaactatcatcttggggttaaataatattagaattttcatgagaaattaatagtacttgtacttatatttattgggagcattaatagggtatatatgggaagaagttaagttgggcatgagagagtggcttcccatgaaaattgcataatcttttatcctcatctctcctaaatctacatatgagcacatattattgatgggattgggggctacatatccactgacccagctacccacttggtgctcaacaatataaatttatttttatatctttatatattaaaagtgcctatctaacggcatttcttggtttaaattcttggtttaactgaatatacttaaaaataaaagaatattctgtta

SEQ ID NO: 384457 - DNA, 1432 bp, Cannabis indica
taccctagactgtcctcaagtggcaacaatgcaacgattgggaccagcccaaggcacatatagtcagtgatgtgttatcaaaactgtgtacaggggatgctggcaataccaagtaagtcccaattaattccgcaacatattttgaagtttcaatgctctacaatgggtggacattgagggaataaaggactcatctaaactattttgagaagggatgagaaggatatagtgcaatttgctagcgatgttcttcatgtcaaaagaacaaatatttggccacaactccagcaggactcctacaacccgataaattttattgaaggattgcacaagttagatgggagggatttcatcttagtggaggtagataaattgagtaaaaatacccattttattgccataaaacatccctacacaacagcaactttggcagctatattcttatgagaagtaataagactttatggcatcccacaaacaattatctcagatcaggatagaacttttatgagcaagttctggaagtaactcttcaagttacacggacaaccctaaagattaatacaacttatcacccacaaacgatgggcaaagtaaggttgtgaaaagatgtgtcgatacctatttatgttgtttctcataagggaaaccacagcattggatattagttggattgaataattggtatcgcaccaattgtcattcggcagcaaaatgcacacccttcaaaactctatgcggacaagaccaccctaggataatcaagtatgattacggtaaagcacaagtatttgaggcttgttcttagaagacagagataccatcttggatgacttgagaatgcatctgatgagagaacaacagaaatgaagtactatgcggaccagaaaagacaatattaatatgagccagaggatttcgcattcttaaggtaccaaccctgtaggcagaagtctctcgctcaactaaactgtcagcaagatattacagaccatttcaggtagaacaaagactgggcaagattgcttacaagctgaaactacctccaacagcagccatttatcttaccttccatgtatcacagctatgtccagctacaccagaccctagcatcacctcacattccagcccaactcacaaaagttgagagtagagcagtattagaattagtcacacattgctaatatatgaaaataaaataccatatataagatgaatagaatactcctctcattgttaattggtttgagatgtaaccccatgcaccttaccatacaatcctaaattctaacatggtatcatagcaattaaaagtttctgttgtctctacctttaacttccatttcggacctttcagccaatgtgtatcagtttctagtattggtatttttgacctttttcaaaaaattcacaaatttctcgacgtgtacac

SEQ ID NO: 384458 - DNA, 2750 bp, Cannabis indica
agatattgtctaattggacatgtggtgcatagctctgaacttatgaatattttacaacaactttacccaactttgaccattcctaaaatgtaagttaccatttgttgaacactacaacacgtgaaaaatataattactttattaatgaaaagtaattacaccaagacttcaatactttttataagaccacaataccccattcacttgggagctattactcgactccatgcacacactatatactcctcaaggatgtagtggattattgtgctagaatgttgtagcgaattttactttattatagactaaaactttcttaaaacttccttatgaatactaactctatagtattactaaaatgattagaaagttctaaatacttgtaaaggatgtgttaatcttttaacatcatcttgttatacatacaatagcattttaaggctggtttttcatgttgttggttagttttatttcaaattcatgatattctgtgcagatgtgccgatgagaaaccgcaggtaccagctcaccaagtatcaaaggagaaagtcaaaagtttgggggttaaattcactcctttagaagtgagtctaagggacactgttgaattcttcaaagagaagggttttgtgaattattgagtattgtacttttacatttttttttattactactaaattaaataaaaagaatcaatttttttctgtaaccatttgagttcttaggacatggtgttatgcctttgttaaggttgtaggcctcaattaagatgactactttgttctactcctcttacagttcaacattatatcaatatgtaatgaaaagatggctcaaatttactatgataataggctgttggcatcatcatatatcaacattggaacaactaatatttgtactgcagtgaaaaaaaaaggaatacaaatgttatcatattagtttgttgaggctgtatctaccacatatgatgtaaccatgtcaagctagcatgatcttaaattaaataattaagtgactttaataatttaatattagctataacacataattcaaaatattacagctactattagttgagtgtgttactaaaaagagtagtttcttatcagttaagaaatagagatataatttacactctacccaaaaaaacatattaatagaattagtgaaaaccaatagagattgattcacaaagggatatcccaaagacatttccggatttatgtatcattagattatgggtattgtgagaagccgcataagctaaagtctaagatgacatataagtctaagacatgattatgattatgtaagagaattgattatcaaaattcatgttcattacatgaatgtgattcttaatcatcatcttggttattaacaggggagctagcaatagccaaggcattaaagatggattgaaccttattgacatagttggaaatggtaagattacttttttgaatatgagaaattgacctttcagctaaagtcgatgagccttggtttgactcgagaatttaagttcaagacaacaccaaacaatgtaggaagtgtggtaatttgccacaaattacagaataccctctgtcatggaagatcaaattcgagagagtaaaagttgataattttcatttcctttgagaataagagggattgattgcgcttgtgacatgggtttgaggaggaggaacacctgtgaatagaatgtcatcaagatcgtgtcctatgacccttggtgccacttgcaatgtgggtatcaaaagtttagttaatggacgctactcaaaagtgattgttacaaaaatagcagagccaagaacaaaaatttgcatagagacaatcttggtgtgggctaaacttaaagcttagccataaacaatagagctgaactttatttatatgaagaaattttttacaagagtaagcaagaaaacaagaaaatcaacaactcataatagctaactaattaacaaaaaataaataactaatgcttacaatactttatattgcattacaacccaacacaatatggtgtactaaaggagcacgtaataaattaggtgaatctagtacctacaaaatcactcactaggatatattgaaaatatgccatattttttttatttaaatttaaatttgtgtgtcaaatctcaatattttttttttatcatttaaatctgaaaattaaaaaaaaaagtagaatcttttatcttctaattttaaatatttaaattgttaaatatatatatatatatagaaggtttcaatggttacattaaatataatacatttttttagccattagattattattgaatgattgtgattaatttagaaattaaataaaaataaataataattaacttataacttaatagtcacttaataatttatttccttttaaaactttaatgaagattaattatattttaaaattaaattaattataattattaattaattttttataattattattgttgcccctgatttttctcaatatacgtggaccaaccgaataaggacatgtggatcaagcaatgtacaatccaaaatatttgctaagtctttatgttgaaaggtagcttccaggacatagctcccggagaaggcatatggaaccccatatgctcccggaagctcgaagtaacgttaaggcatctccgtgacgtgtcaggtttctcctgagcaatcaattcgcatttaatgccgcatgggaggaagcgtgttgggactgctacacg

SEQ ID NO: 384459 - DNA, 1663 bp, Cannabis indica
tttttatttatttatttattttatacataatctaatataccatttcaaaaaataaaaaaatacataatttaatataataataactgtacacaaatttagataatgattcctgtattcatgcatgaaacgaaacatgaattcatcattgttgttattaataataaaggaaaaatagaaaccgatacactgcatgcaatacatattcgaattaaaaaaataaattatttgttctgcaaatttcagccaatatatatacattaatattatcactattctatttatttatttatttttaactaatataatacttatggaatttactctagtcttcactgatatggtatcccatgctgcaaaatcgcttaaaagtcaattattgaaatattcagattgtccttagtttgaccattgaacccaattattaagtatttacatgcatcaaaattcaaattttgtcattatttcatgttctaattagatcaaaatatatactgaattttaattatttatataacatcttgttaatgctgagctcttcccccaaactgcattgtcacgtggctttgagttttgtaattgtaacaaattttatttaaatgatttttatttttattcttggatggttgaatataatggacggtcatcttggaatatgaagttactttaatcaaacattataatatacgaaaatgtattaaaataatatcaatctagatactagaattaactttattatacactttacggccgtacaataagaataaatactatttttttatcactgtatttttattgggtttttttttctttctgtaaggaaaaaataaataaacaaataaacaagtagaagtagtagactacacgtgataatgaattgtgaatacaaggctatggtctgagaaaatcagttaagaatttttcgagaaaagtaaaaaaaaaacagttaagaattaaatacatgacaatgacattgactaatattagtttatttttaataataataataaacaaatgtttttacttgtctcagtaaaattagttctgatcaaaataaagaaatcatttagttatcgaacctatcaaaaataattaatataaaaagtgaaaaagtaaaataaaaagataaatgctttgaacttttatcccaaaaagaatgggtaaattgaattttaattattaaataattcttaaaaccatgaaaagaaaagctgttaagctgccacgattgcgcacgcgccttgtaatcagacaaaagcaaaaggttggagaatgactggctaagctatacgtgtgcctgactacaccagattctgactctccaaccccgaataaatctcacctcaccactcggccgagtcaaaactcaacgaatgcaatacaagttgggcctggtgttgggagtgggaccaggccgagctcatttacttgttcaaaaagccgaccgttgcaggctcaacgatggtgggccccttagcaaagccacgtggcaatctgattcatgtggggtccaccgtcgaggcagaggctcgagtcccgaagctaaacgaggttccttcggaggagtagtgtagtcctatcctagttggctcaatggggtttggttttagatttctggtcccgaccacgatctccaccgcttaacggtcacgccccaattcaaccc

SEQ ID NO: 384460 - DNA, 1479 bp, Cannabis indica
ggtaaaaataaaagataaaaatgaaggagaaaataaaataaaaaacaatacctatacctaacctaaaaaaagtacaactactacaaacacaaacgaaagtgaaaaaaaaaaattattactataaaaataacataattaaaaattaaaataaattattaaaaacaaataaaatataaaaataaaataaatatataatatataatatataatataaaaataataatacataagtaaaaaaattacaaataagtcattcaaaacaattatataaataagaaaaataacaaaattatttctaatttcaataactttaattaaaataaaaatatgacataaatacaaatttatacaataatatagttaaacaaaacccataaacataagatttttgaagattttttgtacaataaaaatttttaccctagtgcacgacattattactcacatggcttgtatgttttaaaaaattgtttcaaacgttttcttttctcgtaatatacacaatatttttgtttattcataattttttaatataaaaaaaataatattatgtttagtttttctctattcctttagtatttcttcctctattctcatttttttttcatggtttcaaagtctaatgattatctaaatttttttttttttgttaattttggaaaaaataatattttattatttatttaaaaaagattacaaaataaaaaataaaatattggtgtaagggataaaaataatctcacgggtataaaagtaattatacttataacaaatatagaagatctaataaaatgatatgacatgaacagcatgaatgcactgtttctgtaacaccctactagtttaggcgtactacaatactttttttaattacggtgcaacttttattaatcaaagggttttgttaaaaatgtgatgtaatttaaaattttataaataaaaagtaattgtacaagatatttacaaagtttcgggatcccgtttctacaaataattccatgataaattgtgagctcatgttgttctgaaaaattgaacactccatgtctaactgttgagatatgtacaatctttactgaactccagactcacttataaccagttcaagccaagcctttacctacacatcacatagcatctatgagtcgacagactcagtaagaaaaacacaaaacataaatatataaccgacatgcggccagacgcccataaacctatcaacaagtgtaaaccatgtgaaacatgcataactgagtctcgaacgttcttgaccatagtacgattggtcataataccacatgcactcagtactctagtcgtactagtgttggtagcatcaatccatactataagtacaaccagccatactacgacatgcactcagtactctggcgtactagtattggtagcactagggctgtacatcggtcggtttgggcggtttatcctatatattttctaacccaatctaaagttcgg

SEQ ID NO: 384461 - DNA, 1961 bp, Cannabis indica
gtccatctatatatgtaatctgaaatcaaaaatcacacacattaaaagacaattgatagtaaaccgtacttagcaattgcatattatagacttttagaactttaatacactaccaacttgttttatttatatcgtctaatcttaattctcttgtacatccttacaaaattgtatatcttctccatatgaataaggagattttaaatattgaataattatactcttttttttttgaacaaaggaaattttttattcaaaagaaccaaacaaatacaaaacaaaagctggcggcaacagccaaccacataaaaaaatgaaaaactaccagttattcactatatttagagcataacaatcttttttcttagaactaatacaatgaaagccaatttactctagcctttaaccacattttttaatttcttttgctaagaaaagaagctgaaaggtaacagcattaaagagacactcatttctgtttcttcaaattcggtagagggtagctgcaaaaaaaaacattcaatatcaggactgccaagtctggtttggctgggagagtcctctgttgcaggtcacttaagcatttcggccaactcaggataccagcccagttttctacacaagtaattaacttttttgtgaagatgcagtctataaagaactgattatgggactccaaagcttcctcacaaaccttacaaagcgctgaagtaatgggcagaattctactcaacagatcacgggtgagcaactgctcgttaatgatttgcgagaaaatgaacctatgtttggggacaatgaacttatgccaaatagtagtagcataagtagtccttgcagatccaataagctcattataaaacctgctcactttgaatttgctccctttagttacctggttcagcatgtcatagtttgtcacattccttattttcaacagctttttgaaataccaactgaagtcatgattcaaaggacaagaccaaaaatcctgaccctttaagtaaatggaattgatccacttaacccaaaggttgtcttgcttgctcgaaagcgcccaaacatgtttagcaaccatggccaagttccacttctttccttctctgaaaccaatgccgccaaattgtttaggaaggcaaactttcttccaagaggggaagtgaagcttgcttctattaccattagtaccacaaaggaaatcacgacacttcttgtcaatggttgcaactacttttttgggtaaaacgaaaaggctcatccaaaagttctgaattccaagaagaactgcatgaataagttgagctcggcctacaaaggaaagatttctactcacccacccacttagctttaaactaagtttatccaatattactccacaactcgaggtcttccacttagtcggtctaagaaacacacccaaatacttgagaggaaaagacccctcctccatttaaccaactccaagatttttcttttgatctcctcctcaactcccccaaaataagcatgggatttgttcttgtttgaagcaagacctgtagcctgacagaactcttgaaaagcatcattaactaattctactgacttcaaattcactttatagaaaattataaggtcatcagcaaagcaaaggtttgttaatctcatatccttgcaaagaggatggaagccaaatccttttttgctagaataatgagaaagcaatctagacagatattccattatcatcacaaacacaagaggagataaggggtctccttggcgaagccctttctcacctttgaataagcattgtattctaccattaattactttcttttagtgtataaattccaataatttcacatttgcattaaatgtaaatcatgtgaacgagaccctccacataatgtagtaccagatccctgagaaaaccacattatcattagataaatatatagaattagattctagtatattta

SEQ ID NO: 384462 - DNA, 1139 bp, Cannabis indica
atttttttaaaaaaaaacaattaccttaacggaagtaaaggagacataaaatgacttggcaaatttgtcacttgactgaatgagtttattaaattagttaataaaataaatcaatgtgctggctctctgtatttttttaaaacaaatttgttattactgctctttcccgcaattaaaacatgatgtttgttttttaattactgtccaagttggcaagcttgcatctcttcagcatataggacacatcagtcctacagcagtcggcatctaaatgcaggaaaaacgtgcaaaggaataataatcgattaatggagaaccaacattttcgtagcaacattatatatatttttatacacaaacaattgattattttcctctctttttgttgtctataaaacattggaatcttgttagttgtcatggtcatatctttaaagtgttgatgatttaagtacaatataaaatatgtaaagttattaggttattgttattactacaaaatatgttaacaaaaggaaaaggttcatgactttcataaattcttattcttgttcttgaagctccattgacttatttcatttttcactaattatttaaaaaaaaaaaaacatattcactgattcttatttttatatatacttgaccttttaccggtaagaaattgcattttataaacttttcaggttgtaagttaaaaaatttcttaaactactgagattattgtattctacaaaattttgtctaattttattatgttttactcacattcctaatttgtttgacacttgtgcatgtagcaaagcatagctcgtgaacttaggtgcacgtgaagtgccctttagtaaaattgattccaaatttaataaaatacttagatctatcaatctcaataataaaaattttttattttgcttaaaatattcgaagatacaatttaacacatgtcaatgtctgaaaagaaaaatcttaattaacatatcattttagatggaatatatatagaatgcttatcccttaatggttactaaaaatcttttgttacaaatattaattttagaattattaaaacattagagtttaggctaattaggattttcgctccctaaactttgtacatgtactaaatcatgtcccttgaa

SEQ ID NO: 384463 - DNA, 1452 bp, Cannabis indica
gtttgtgttggtattaggtttattagttttgattaaaatttattgtatttagatgtttcattaaattaatgataattgcttcaaattttaagctaccctagtatacgtaattgcacgtgttacttggcttatgaaaatttgtaatttgaggtacttttaggacctcaagtatgcaggtgtataccccattgatggcactattaggtactgttttgaggtccttttatacatcatccataaaaaaaatgatttcaaaacacaaaggcaaatttcaggttatcttgaactgaagtcgttgatatataataagctaaagatctagtgaaaaaaaaacctaagtgcaaaaactatttctagcaaggtggtttgaaccccatgtactctccggaggtatagcttctccaaacatcaagagctccgaagctggtcatcaaaaccgtgctcaaagtcattacaatactgactgagaacacaatgagagatgctcttccatattgctgaatagccttctgaaccactaccaatcccagaagcgatgcaacaaaacagacgcaggagaagattagagcaacatctgtgtgttccatgcccaacatcagatactgaaaggctgacatggaagatgagaagaaaaccatgaatgaacaggttgctgctgttacctgcccaaacgtacagagagtatggaatggaattgagtgattaaatatactcatttaatatcttgtgtttttctccaaaaatatattttgtaatactcatttggtacttaatattttgaaattgtactctaaaatcaaattatgtatgatgatttcaaattcaaaatacgaataaaaattattaaaaatttcaagtaataaatttgtatttaaaaaaatacagagtaccaaatgaatacacacctgaaaataatattcaaagatatggattttgaatttatacctcgggtactattccaacttgtataagaagtggacttattagcattccacctccaattccaaaaacaccacctaacatccctgctaatagtgccatcaatgggaaaaggaattttttggactgttcaactcgagttaggctgtctttgatgtccttcacaattagttttagatttaccaaaacaattaggaagcatataattctagtttttaatatatggaaattaaggctcaaatgggcaactaatattctttcttgtgatttcttaaatgtaccttctgattcaagttttgacgttgggagttctttttcttccatataatccaggcagtgtaaaccatggctaaaggaacttgcaacgaagacagtgtccagtaaccaattccacaaggttctatggttgtaattccctgcatacaggcccattttaaaattattccttttcacttgcttccactcttgccatctgatttggaccacaatctatatagctattgaaaattgata

SEQ ID NO: 384464 - DNA, 1212 bp, Cannabis indica
atgtaattaaaattagtttcttaatgaagaaaccatttacaaataccaaaactcatataaagtttgcttattatgaaactagttttttagcttaagaaattggtttctaaatctccaattgcgacagaatatgttcgattctttggggttttaatggtggagatttcatatccagggtctttgagttgtcgtttgctaatcgttaaatgtgtcgttggtgaacggaagtcagtagctaggtggattgctgaggggtgatgcaggtagggtacttgaatggaagagggaaaataactttgagattttttattttttttaaataatttatctaaatatcaaatatgagctttaaatattaagtttacacatatatgacatagaaaatatcatcaaatattctaaaaattaaatatgtcataaaaagtgatcaaacctaaaagtaccatatttttgtaagaaaattttaaaaaatcatattaagtgtaatttcctcattatcttattcccatcccttaaaatttttttacaattttttaggatatacttggtttggatcagagaattttcttaaacaaactttccccaagcatggttgtcgtagaactcctcatgaacttcagtaagaagtcgcgcagcttcttcctttgttacacatctcaacaaaggtagagagaaactctgtctgtatattactccgtctaatattagatattgtgcagcctttttcattattttccgagcttcatttctgtcacttgcaagctttccaatttcgagataagctactattggggtcatccaggtaggagtatcatctagcattttaatttcttccatgcaaatgatgcttgggtctttcaaaaattgaattgagaccaatttttgttgtcagttacaattttgcttgccaatagtgataaagcatccgcagttgtattttcctctcttagaattcgtctgatggtgtatcctttaaattgagctgggaggtcttcaattttgcttagatatgtcatcattttttctccccgagccagatattccccaaaaatatgactgacaaccagctaacaatcactataaatatccaggtatttagcacgtatgtcctgagcaagttttagtccagcaatgagtgcctcatactctgctacataatttgatgttatgattgttgggttttgtgccctaagtaaaactcatttcaatata

SEQ ID NO: 384465 - DNA, 803 bp, Cannabis indica
ttaccaagaagaatataaatatctatatgtaaccataaatgtctcaaacaatggataaataattatcttattctaccacataacacaacgttgaatgaactagttataccacccatattttaaacagcggcatttcttaacactcacacaaagcaaaacccaagtcccaagtcaattaatatcatttcattatcagctccatctggttaaatttgccaatgcacaaataccaatcaatttataagcctttctactcaaattaaaaatactttttagattaccaattcgtccaagaactaaagcttcgggggaattagtaaactgacacagtatcagaccaagagatttttaaattaaaactactgttctctaatttgatacagcatgttgtctaaggttgtgaatagctatctttttctggtgcaaagctgaaaaacgttaaacaaggtgattggggtaaacctttgcagcagtcagaaccggctgtgtgtcgaagccggagctttgaattgcctcttgggctgtctttgaagcctcagacacaaatggagaagctatcttcaaagcctgttctccagcctgctttgcaattggtaatgccacttcaatgacaggcctcgcagcatttatcaaaacttgaagaacatgtcctgtagtgtcatagacactcgaacccacttgctgaacttggtcaattgtcttctcaaactacacaaaattgacacaatcaacaattcaagaaatgggtatcagctaaaatcaaataaaaaagagaaaaggaaaaaaaattccaagcatttcat

SEQ ID NO: 384466 - DNA, 1865 bp, Cannabis indica
aacgagatgaaaatgctcaaattgggtttgggagataaaaccagctcgagtactgcaactgcgactactgtaagaataaaaatggataatttgagctagaatgggttgaatggaaaaaggaaagatgaattaaaagattcatcaaaagataaagaagaaacaaaagaaacaagataagtttgttcctatgtacactatttatacagctaaatgaaactcgtgagaatatctatctcgtaaatgagaatcgggtcactttttgaaggcccgaacctatgaggcactcaaaaagtaagtaagatctgaacaaatattttcagttccacagagacattggggatattattgaggaaactcaccaattaaaggacgagatcgaaggacttatttcatgaggctatgtaaggcagtatgtaagaaatagggggaataaacaaaaccagtccaacaacctagaatcaaaacaaatgtgtacaacctcccctagttgagggcgaggacatcttggttatttctagagggttgtatctcacgggagccagcaatagtgcctaaaaatggtatatgaatcaagtataaaatcaagaattagctttcgcaccatatccactcaagcgtgtgaagcttgaggaaccaccaataatctttgctaaggaagatgcaacacatgtatgatttgctcactttgatcctctggttatcacagtctatctctttaacaaaagaataaaaagagttctcgtcaataatgagagttctgttaatattctttataaagaaacattgaagaagatgggtctaaaagaggccaaattaagactttgtatggtgaacttatgtggcttcacggcaaatagtgttgtgagccttagcaccattgaactcccacttactatggaagaactgccattgttagcgacccaaataaaagaattcctagtggtggatatcccttcagtttacaacatactaatgggtcatcttgcattaacagggttaggggcaataagctcgataaagcacctatccttgaaattcccaactcattcctgagtcgagatagtgaaaggcgatcagctgacaaccagataatgtaatgatgtagaattaaagaaacgaagggcaaaccaccagttaatggtaattttggtagagttgaacgaggaaggcgagatggaagacttagatcctagaatccaagatgagtacaactaactcaagccaattgaagagttggaagaaatatatttagacctaaatgaaccgaccaaatgtgttaacattggaaaggatttgggggaagaactatagtaattaatcataattctgaaggcaaaccaagaccagttcgcttggagccactcagacatggtcagaattgatccaaatgttattttccaccatctcaacattaatacctcttatccatcgaagtgccagaaaagacgtcctttgtattccaagtgacaaaatgctttgaaaggtgaagttgaaaaattgttaacaaataacttcataagagaagcattttacccctcgtggatctcgaatcccgttctcgttcctaaaccaaatgggacatggagaacctacttagactttctcgacttgaataaagcatgtccaaaagactgatttgtgttgccacgtatcaaccagctggttgacgcaacagtaggacacgagctgatgacctttatggatgcatattctgggtacaactagattaagatgcataatttacgtcaagaacacaaaagcttcattacaaatatggggctgtattattacaaggtcatgacattcaaactcaaaaatgctggagcaatatattgttgggttttatgccctaaataaaactcttt

SEQ ID NO: 384467 - DNA, 2541 bp, Cannabis indica
ataattcttgtttgatgttctttagtaaagtcatgttagaattgggaatatttatgtgatttatttagatgaacatgaacttgaattttgggtcttatttctagattcttgctaacttcagatagggttattggtatattgggtaaagaattgcttagtggtctttgttgagttaagcatgattttcttttggtttttcctttttgaaaatgatggcataaggggtgtgatttgtactcttttagggtgtattttctagcttgtgttctatgagatgcttggaaaacaccttagtttggcatgaattttgtttgctaatgatttggtaagtttggagtatattagcctaagttggttttgggaaaattatgattttctgggctttttttgggtttttaaacccattagtcatgaccaatttatggtggtcgcgacctagcataaaactagagaggatgagcccctgtgtaggttctagtcgcgaccaccacaactgttgtcacaaccatgggattgatagtttaattttttttgctattttgttttgtgcttaacatttgaatccaaattccgttttggacgttctttatattgttagaaagctcgtttcgagctctattatttggtctagtgttggcgtcttaattgtgaatattatgaatgcaatttttagggggttaaccctagttgtaaaactcggggattgtgactaggattaccggtgcttggtcaaatcaccaggggatcgagatttctccacatactttagaaatcaagtaaggtagcaaactaagcacatagagtatagtgcggtggtacagttatatgatatttgattgctaataaatcgtgatctagggttattaccctaagtatgtattgttataatattgcaataatttgttaaatgaatatctgtgtagtgttatgcgggtaaggcatagccaggttagactcagtaattataaccgagagaaaccctagtaaggccttaaatgtaaaagacgtgtgagcgtaacatataggtctatgctacatagaaaattattatagtgacattgttatatagaataatgtaataaagtgcagaggcacaatttatatatacgttgtggcatactgtttaaagtgtaattattattataattatcataatgttttattttctatcttccttgaccttgcctcataagtgctctattgtgcaggcaagggtaaaatagtgtttggtcaaccatgagattgaggactttgaggatgacttgtacatgttatggccaagctagaccatgagggttgggtccaacaggaattgtatggaaattctattttgctacttaggtcggcctgtacaaattaacttataatattttgaaaacaaatttttacgggatcctagatgtataattttaaattattatcgtttatagtaaaacatcaatgtttgttacaagttatttatttatctgagttcaatatttgttttaaatcacttgatttatggacccccgattaacagatttagtagattataatcacgacacgtggcgtagtagattataattatggcacgtcgcattcctctgagtgggacgttacagtaatactcaaaagattttctagcaataataatatttactcatcgactagagatcgttaatactcgaaccacagaaaaatctctagtcttctttattttaatctatttatttacctttaatataattataatcagcttttgaaaatctcgtgaaacaagaaccaacttcatcatcattttggtcgagagacatagatattctcctagaataatctaagtcattacaaggaggaccatcatcttttgacaccaattttgacccaatgatggtgccactctgcccacttttttcattttcaaagggaattgtccaagaatcattagcaattcaaaaatatacactcactaacaagtcgctatcagccctatgcgacgaaggttatcattaatgaacaacatatttcacctctctcccacaaatcaatgttagtcatcctggcatatgctctccgttcatgtcaattagtggagtaggccatttaaatgggatagacttttggaaggtgacatgtctttaaaggatgataggagtctagaaatactctatatggtaagattgctcttagtgatgttgtcaatgtacacactaaattgatggatatggtggaagcctttttctttgtggatggagctccttttcaaatcacatagaaaattaatctcatgtggagttagaacatgccagttccatagacgatagaagatgaatatgtgatccaaatcaaaattacatggactagagtatagtgcatagtaaaccgtactttgtaattcattgttaacaattccttactttaatacactacgacttgttttattcatatagtataatcttaattctcttgtatgaccttattagattataccatttctatatgaataaagaatttttagatatttattaattttttttggagaaaggatcattgttattaaaaatt

SEQ ID NO: 384468 - DNA, 1420 bp, Cannabis indica
taaaataaataaattaaaatttaggcatgcattttaaagaattgtggagaagatgttgagaatgctcttatttttgttctaactaaaaattatttagacttatgtgatgatcgtttcctcactctcaataaataaacaaatagctagataaataatgagatgtattaattatttgttgtgtattagcattcaacatgtacattcacatttttgttttgataaatagtataaagattcttctgtacagctcctgattgtttttgtattttagataactttgtcaacatttttgttgtgattacgtaagatgttatttaagattacataaattttgtaaaatttatagttctaataagatttaataaattgtttatgaagcgcataagaaaaaattgtggcgagtataataaaagaatattcaaatttttatttttagcagagtaattatttatttgggtccttaaatcttgtatttttttgcaaaatttatcgattagaattttattttttaaaatgtataaattaaagtttgcatctttaaattaatagaaaacagtaccctggccggattttttattaaataaaactaaataataatttaatcttgaagagttatgagaagaataattacttttctgtaacttttcatgttagggattattcattttttttaataaaagaaaattgtaaaaaattgagtttgaggttctattattttgtaccattttaaaaaatgtaatttgccattaaattaacaaaacaaaggttcaattaataacttttgtaaaatgcaaaatctaaaatactactaatccttatattaaagaaaatttactgaaaaatcacttatttgaatacaaaaatgaattttataaagggtacattatagatttttccacaatttaatatataatcaaaacaaacatctcgtaacactttatgcatgcactgtattatttaaaatgcattactaaaatttatttatttttcaatattttatgttaaattttacaatataccacatattaatttatttaaaatattccacaaatatgttatattcttcaatttttaagtatatttaatttattttaaatatataatattctattctatataaagtgtgcctataaaactgaaattcttggtttatgagaaattcatgggtgactttattatttttatttaataaaataataaaatattatttatatatcataaaataataataaaacaaattctattaatatttgaactgatatttaacaaatttcaactctatatataatcacaactatagatctatatataatcacaactataactctagaaattaaaaatatatatataaaataaattgaaccttaaaccgcatatacaattagtttgttgagagagatcagaaaaagaacgaattata

SEQ ID NO: 384469 - DNA, 1367 bp, Cannabis indica
aaaaaaaaaaaaaaaacttggttgctaatgcttgggtgtaataccttgttgtctcaataaaataattctagttttgttatttgggtaaagggttaggttaggtcaaaggttaatatatatatgatgactagctagcttggaattttgacccttaatttaaaaacaaataagaacaaaataagcatatataagtgagaggtaccctacagagtcatcaaagtttgttctttaattcttttgtacatatggcaccaccgccacaaattaggattataaactacctaaatatttgtattttttttttcatatacaatttacttaactccttaattaatgtttaggcatcctattatataatctatgatcgataaaaaatatcttattattttaattaaaattagtcaacttaaagtaggagaggcaaggtttacaacttattcatataaatataggtaggaagatgattcctgttaattaatttgtttttcttggttatatatgataaatgttcttaattaaattaattgggtttttgtaaataaattaggaaaaggttaggaaaaaacacttggaatcaacaatgttgggttgcctagttagttaagttattattattttcaaaaagcagtgggcaaaaagaatttttccttttatcggttttgatacctaatttaacatttatataaatttatacaaatacatatttatatatgtggtattatttgaagggacttaccataggagtagcattctatagcattatatattctttgcttttttttctttcttttgaacaaaatatattattctttgttattaagcctcctatgctgaagaacaatatataaattacttgatatttaggggccttttaatattttttgagaagaataattaccctaacttctattgccatttattaaaaaacaatatatgttcacatctcttttaaatttcaattaattactaaaataacaacaattgtgtaaaaattctcaaataataataataataataataataataataatattcaaatctagtaataataaattctctcaaaaaatactttttttttggcgcgtagccttggcgcgtagccctgttttctcattttcatggcaaagaagaagagagtggtttgaaagcttgctccttgaatgtccgatgaaggttcaaggattggttcaactgatgagaaggatgaagctggtgaagctggctcttcctctggattgaatatgattgcagaagtagctaatgcaagggaagatagttgactttatagggcaattcctaacctagaggaaaaacatgacagacaaattgttaattctatttttggcatatttaattgacaaaaatat

SEQ ID NO: 384470 - DNA, 2188 bp, Cannabis indica
caatacaacctaatacaacgtactaaacaaacccatattatattgtgttgtattcatataatagtagccgaatatttcatgagaagagggagtgggaagttagtccaacaatgaccataaatatcacacaaagcccaagtgtgatggtgtcgttcaactgagtgtgggtcgaagtctggagaggaatataactgaaaaaattacttgtataaccactttacttgtttcaatatttactgttattttcatatgtccttattataccacttaggttatgtaaatcatgtgctagacttaaatataagataaggacatattagataatccactcacaaagtaagtacatgttaattaaatataatatgaatgtatttttaattaatagatacagaaagagatattcatcaacttattccaatacaacctgcatatgtctcatgtttcatcacatgatggcagctgatgcttttaggtctttggaattgcaataatgccaacttctatttgcttttgaaatttcattttttagcagtgttattaaatgaatttttcaacaaaatcaatttaatactacacattacaaatgtatcacctcagacatatcaatacaaaattataataagcaagataaataaaattttgaaatttaaagtatattcctcaccaatatccttagaaaaactaaagatatcatttctctagtaattctaaagtgataagggttggaggatattatcaactttcattaaccattagaattcttccatgaattctcagtcattatttacaatcgaataagatgtttaagttatctcatatttattgaaaagagctaagagatctccttcaaggtcatagtattttgaagtagtgggaggatttgcataatacctggttcactgctacttaaaaaatactagcaatgacaaactatagtctaaaggactatggtctaaacatttacatgattagaccttaaggcttaaagattacaagataaaacatatttttccaagataagtcaaatgacttgagaaaattattttaacataaaagactatacaatatgtttgatatttttcataaatgatatttaaaactttgatgcaatattaaattagaatcatcagaaaagagaagagatcaaaacatcctttccatatgcatattactgtgtaaaatgctaaaagagttttaatggtaaaccttaaggaaattgtttgatctctaagattagagttttgtcatcatagaatagtgaaaattatttcaggaatgatgacaaaccataaagataactcttaaaagagatcaacaatcaatggatttttggacacctcgtccaccatccgatcagatccaattgaatttttgagtcattgcatactgtagtgtcagaatagtggtcgtaggacaaaaggatgtttttttttggtggtatgcgcacttgacaagggacaagtaccccctgatacgttgggattcaatgtcaaaggatcgatacgtcagtttcaatttggctttcggggtgtctctttgaaagtccttccggatgtatcccaaatgctcatccgaaaaatcgctatggcttcttctatatttgggcaaggtgcccttttggatccggagacattcaatttcgagcatagatatcctatatcagagatggttttgaggctcatctctccgcgtggtcttgattcgttatcttgtagggcatttgagcaggccttaatcaattaattttagattgaaaatatagcgtgttttctttctacaaacataaaactagaatgagggagagaattgcttaaaatttgtgaagatttttcaattattattttatttatatggttgtgaaggactgttattttttattgtcatctactaaaataacaatttttttttttttaaaaaagattgcttatatatacaggtaacagattagatttttattactcttaaaattgaatgaggtttataaaaaaaaaaaattgaatgagagaattgttggccaaagagaggccgaaagaggaaagagagagtaagacttggtatttatgattaattaatgcaagtaaatgactctatttttaactctatagatagttaatgtctattttttaaaataataaagcaaatgtctttttttttactttttaatacctaaaatacccttcattatata

SEQ ID NO: 384471 - DNA, 1635 bp, Cannabis indica
gcgctctaggccaattatttaggtcttgggttttttctcaggcaagtctgtgtcttacatgcacgtccctctccgtctgaatctcgatctccttagccttcaacttctcctagtgaactctggaagagcccttggctctagcatgagtaaggctaaacttcaacatggcctaagatgaaaagaaaaaccatgttataagtaaaagaaaacctgtccagccaaccccttaatggtgcacatctagctggccagcctcccattgatgcaaccaaagctggccagccctttagtggtgcacaccttgctaggcagcccctgccaatgcaacaatttaagtaaatcaaatatacaacttacatatgatatgtcttggagggctctggatgtcaagcactccagttcctcatcctcaacctcttggagctctccgtcaatgataggcaaagtcctgccaatatagtttcgagcaaactcagcaatcatcggactggtggatgaataggccctccgccagacttttgggcccctttcctaaagttctacgtgggggtaaagatctcctcgaaggagggtccataatcatcgactgatcaggcagagcatgccctggaaagggggaggcaatggggactgagtggcattagaaaacctcgtggtccgggccaccttggcctaaggatgacctgaagaagcactgctagaaggctcccctactagatccctcatcctagaatccatgccttcaaaaagaaagtaacaaagttagaatacaagtttttagtattgaatgcaagaaaaagtaaagttggtactatcaactaccatctgagaggcaatcatcctcggaggaggaatcatttgagctgctatcattaatggctgccttgcccttacctctagaagtaggtggggggcgagcagacctggcaaaactttggcctccaggcctaataaacaaagaggcatcaccaataatacctccgcatgccaaacgctgttggagggccctgtccctcttatccatggtcttggtaagcctggtgacgagagcatcatcatctgaatcaagtgtatgtctttcctccaggcaagtctcctctgctagtagagcatcatctaggcctccaaacaggcccacaactccctcaacaccagacacaggaggatgcaagccatacctctaaaagtttgcttcacaagccaacttgagtatgttactcctctcagcagggagggacaagatgtaattagctttatccctcatctggagagtgggaatagagcgtatgtaacttttcacccttttaaagcggtgatggacttacgggatgtcgcatgcaatgaagtaagtcatggagtatcctccaacctttaacaaagctatgctattagtgttgcccaaccactggtagcctagctagctaaagtagaagtatccaaactggccttgcctcgaaacgtacttcagctgaaagaagtattcgatctcataaggagagggctaaggccagtccaacgctgctgttatcccaaattttgcactctgacaaggcatcacatgatggtgacacgtggaataaactttatatatctgttcgcacgagatatgccaaacagagcatcgcatatagtcgc

SEQ ID NO: 384472 - DNA, 1032 bp, Cannabis indica
aatcaagaagcacttgagcaagcctagaacagagaagtttggatatgcatttgtacatagtagaacagcaggctataggtctataatccactgccttggttggattctcagttttagggataagagataacatggtagcatggaactcaagaggcatattacctgtttaaaagaattcttcaatggctttggtgaactcttttcccaattctgtccatcatcttaaagaacccagctccaaacccatcaggtcttggagacttagagtctggaatattgaagatagccttttttatttccttgctggtgaaagacctaagcaagtttaactgcagctcaaggttgagtctgtttccctgaccaatgcaatcgtcattaattctatttgagggtctactatagctccccatgtatccccgaaagtgagccatgaaatgatgaacaacctcaggaattttgtcaacattttccccttggtcattgatgtaggaaattatcctattttccattctccttttttttttcaacaaagcataaaaataggagttgttttcatcccccttgcaaagccatctcaccttgcttcgttgcttcaagaaactatgatacattttctcttgaatactaaagctagttgctgcctctttttcctgcctttgaaaaactagactatgatcattactttgggcctgtaatttagaagtaataaacctatctttagcctccttgtaagccttccccccatcccctataacctacttgttgaaattcttaaaacaatgctgaagcctcatgagtttaaaatacaatgccatcattccaacacacttcataggcctgttctagtttttcaaagcaacttttttaaactctagctgatcagcccaaatgttgtagtaacgaaaaggtttgacaccaatttcttcactcgttgcaacaaagataacacaggaacaatggtctgaaaaaattgttgggttttatgccctaaataaaactgcatttcaatgtaatccattttattcaacatca

SEQ ID NO: 384473 - DNA, 1249 bp, Cannabis indica
atgtgctttgaaacatgtttctacctcaatttcttttcttttttttaatataatatatataatataacaacaacaattattaatactattaattaacaatattattataatatattaagtacttgttctaatatttggccctcacttcgaaattttgactatatatctacctgactgtataccaacaatttattctcattaaattaatctatacagtttaaattaattaagatctctttttattacttgatttattataatacaaaaataagaatatgttcataattaaagtgcattctagtacactctaatgtaaaatttatgtcaaaattgatttagaaattatacaatattatatttagtcaatttttgtaattattaaattaaaatgtttcccaaaatatttgattttttttattaaaagtatataaaagttataataaaataaacaaatttataaattatattaagtagtaaaaaaatgtaatatttattttaatataaatttagctgaggatatattttatattaactttattttgcatcaatcatattaatatatactccaaattataaactatataatatttaattaattaagattaattgatgtctaactaatcaaaattcaaaattactttcctgtattttaaaacaaaaaaaactggatgcatagatttcagtggagaaattttataactaacattaaaattaattaagaattaattaattaattaataataataattaaaaattaaaagaaatagtcaaactcttaataaacgaaacgaaacgcaagaccaggcaaggcaaggtaaacacgaccaaaaggcccggccatcgaaacggcaacacacgtgctagatcgcacgtgcggcctcgatccaatcaaataaatttatttcttcaccaattgactccattcccacgtgtgtgcctttctctctcatctctctcagtttttttttaaaaaaaaataatatatatttttgtatttattttctcacttgacagcgtggacttaatttgattgggacaattaattatttaaatctaatattattttaagacccattaatagttttaatcttgaatttttatgaagaagaaatgtattaaaaaaaaataatcttattggcaaaagttttactcatttatttaaataaatgagttgtaatttttagttgtaatttgattgattttgttttttttagtttgtaattttttagttctagaacatgattttaat

SEQ ID NO: 384474 - DNA, 696 bp, Cannabis indica
gtatgtggagggcatcctcatgagagaatgttatagtttagtcctccacatggctttgtttgggagcacgatgctcgggtgctagagaagtcttgttcgagtttttttagctcattaatgtaccttttctgagccccgttacttatcctaaagaaatacggtccacccgagatgaccaccatgtcatctccttccagaggtggaaggaagtccgggttatgtcctcattgtggttgtacaagagggttatgagcattatctcctggtgccaaacgaggttgcacattggtacgtgggaccaaaggtggttgtgcattggttctttgaggggtatggcaattccaagatgtgtggagcaaaagactcaggctcctcgccagactcgtatcccacaactttaccgttggtgttcaacaactgctaaatttattgttctagcgttgtgattcgttcatcacaggagcaagaatattacgaccgactggtggaggagcatttatgttaaattgaggcgcatatactccttgagtggaggaatatcatatggcacctgataaggagcctccctttatgcatgcgccctattcaggtggtcttcaaatcaagttatctcctttggttcagatggtcccagagatccaggttccttgtgtcacgtggggtgtgttgaggatgttcatgttgggttttgtgccc

SEQ ID NO: 384475 - DNA, 1260 bp, Cannabis indica
attaattaatgttgtttttttttcattacaacgattgcagtctattcctcgttcagtgttcaaaggggtcaaattgtgcccagaaatcgtgctttgtaatgagaataacaagaagtggcgtgtgaagtgcacattaaggaaagatggtcgagctgctttaactgttggttggtcagagtttcgaaaacagaacaatctgaaaccaaatgacacttgtgtatttgaactacttgtcgttggcaaccaacacaacaaatgcactgaaattaaagtgatgaagccctccaacactaaaccctgtgccaaacttaagatttagtactcacttttgatttcaaaattttgtaggttattgaccgactcgagtacttttactgtaaatcactttacttgttgtagttcagtttacactttagaataaaacaaaagtacaactgcattaaatttaggatcactatatgcatgtctagcgccttaagaataagaattagtcatagtttaacatgaatcacaaatccaaacattcaagagatgaaaaaaaaaactcaagcataatatttgtttaccgaggttttcggcaaccaattaattacagatgtataaagtatttaataaatgttagaagagaatttttacgtagttggagttttagtccacgattcattgtatgtatgagagtatttattatagaatttttcaaccgatccctctttgctatacatcattggaggtatttataggcttacaatggtagtaaaaggccaccattgtcgtgtttgtttgcactattctttgcacaatttctcaaaactaattttaggacataattgcctacttttatgatggattttgcgaaatcagtgaatgatgggttttaacccttaaacacatctgtaagtgtaaggtattagatgctcttccccatgccgcattaaatgcgtgtatagtgtggtgatcttcgggcgacgtgtcatatttttatggtcctcttgtatcattcttcgggtaggagtgagcaacggtcagtttggttagttttttacacaaaagaaatttgaaattcggttttttagttttcatggttataaatcgaaaactgaccgaccattatataaatgtaaaaaaaccaatcgttttaatcaaaccgagcttcttttttgaaaaaataaaattttaaatttcctataattatttggaaattaaaaattaaagtattgtatcaaatatcatataaataaagaacaaaatttttttagttaa

SEQ ID NO: 384476 - DNA, 996 bp, Cannabis indica
ttgaaattcaccaagcttgacatctttagtaattcccaactggttatgttccacgtcaagggggaataccaggctaaggggagtaagatgatggcatatataggtagggtgaaaagttatttggagcagctgcaacattatgctgtaaagcagataccccgagataataatgttaacactgacgcattggcaaagttggcatcaacaagggatatcaataccttagaatcaatacccgtggagtaccccaaaaggtcgaccattaaggaagagcaagtgtgcgtggtgactgatagagactcctggatggccccgtacctcagctacatccatgaagggaagctaccagaagataaaaaggaggccaagaggacagtgtataaggcaacccgttacatggagattgatggggtgttatacaagagacgattttttaccacctcctacgatgcattgacaaaagagaaatacaaaaagtcatatctgccatacacgagggagaatggagcaatcacgtaggatattattggccctccttagagaaggatgtcatggaatccagcaaaagatgtgacaagttctagaaacatgcaaacttcagctggcatccacccgctgaactcaccaacattactaaccccttgccttttgctatgtgggcgatggatctgataggagcactgccaacaggtagggtaggagtgaagtacgcaattgtaactgtggactcctacacaatgttggtggaagcagaactgttggttcatataaccgccaagcaagtagtctccttcgtcaacaagttcattatatgccggtttggagttccttacaaaatcatcacgaataatggtactcagttcagagacttagtaggagcatattgcgaggagacgggatataaagagaattttcagttgtggtgcactgctaggccaatggccatgtggaggccaccaacaaagtaattaagaaaaacctcaagaccaagctgga

SEQ ID NO: 384477 - DNA, 983 bp, Cannabis indica
gtcctcaaggtgaagaacatgaaatcttcaactgcagctcatggacgtcctttgtcgaagaaccaagtcagcaggtggacgttgttcatactgcggaagagaacacaccattcagtaagtcgacctcgctcaaaaaaccagttgagcaaagtcgcgttcttgcctttggtaagacaaacaagtgacagtggaaatgtggccgcaagtcgaacgattgtcaaattgaatcccgaaacccaaacaagaaaacaatagacatctgagtttgccacatgagatattgctccacccctcctagctgttgtcctttcgttgttaacaaaattcaaacacatcaattgggtagctattttcatcacgccatgtcgaagacaagaagttagatctggtgccaaagcagcttcttcatggctcgaccagtgggaaaatccccacagaattattgttctgcccttgtcaataatcttgcttcctcccaaatggaattcatcaagttcaactgccctttgctccctcactaagcgaactaacccttcttctgttttgttgacgaagtttgctgcttgaggaaatgtctccctgccctttataataaaatcttcataagccaagtgaagcttatccctttgctgaaaataatattcagcagccttgataaccctccaattaagaacataaaaccccatcagtgtaggaagagcacccaagattgagattagatgtttaatttccatgacttgtttaaccagcccctgcaagggatagccccagatatcaccaattaaccaaattgcaaacagaagattatcactaggtggcccttttccatacgaaatacctggtaaattgccaatcccgatgggtaaacgagagaaacaggaactactcacccaattgtcatagttgtgcttcacatgtaataccttagcaaatatttctttttgttggtgctcttgcccaaaaccagtaggaaagaaataggg

SEQ ID NO: 384478 - DNA, 1736 bp, Cannabis indica
gacatcattttaggttgagtcttatacgtgtttaagtttattttgtgtggtactgttatacttctttagatgtgttttcaaatttaaatgaatttggggtgacttggagtggaaaacggtgcgaaaatctcaaagaggtggtgaaaatgaggaaaattgaaaaatgttgtttctgtggagttgtgtggtcgtgtagtatttgggaggaaattacattatatattcattttattttatttgttttaatttctactttcattttcatattcattagtatatacatacttttatatatatgatgtctctattaaactccttaagttaatgtaaattagtgctgaacataagtggagggtgatggtatattaagcaactcactcacaaaattaagtatattttaatgaaatataatagaggatatttttagttaatgaatacaaaaaaaaatatttatcaacttatccctagtatttgatgtgattgcgcacatgtgttagaaatgtgtaacgagagaagaatttaatgattatttttgttatttaacatgaggaaaaacgatgcaattaattaggttttaaaaatgatgagacttcttgggccttctgaatcagaaaagagtgcatgggttgcttttagagtttttcttccttttatttttagtttagtggatgttttcaccgtgatgatgaactaaattacttttttagaatttcaatgaagtattttgaaactctaatatagattaatgcaatttctttaattttcttcttcattattgtaatatatgacatttatgtttaatgtttgtgaatgtttgagcactaattttgtgaagacatatagtcaattgtcagctaattaagtgttagttgcgtttgtttagaattagttgggggttagttacaagctacttgagtataacaatttctaactcaagttgttagcttcttgagcttacatatatagctgtacatttttcattaataaactagatgattctttttactcacaaccttttcaatctttctctacctttctctctatcttcttctctctttctttctttctctctctcctgttactctgatcttattactttgtaaaaatggcgaggaatcctcacaactctaatatagtatcagaatcattcactcccttaacggttgctaacatatgtattcgctaacattgctaacatagtgttatttgacttttcagacaccaaccagtgttaaactgacattacaataagataagtggagaaatatattgtaagatgaaatgggagcactaaggagaaatgtaacttggacctatgttcctctaccagaaggaagaacacctattggctacaagtgggtgtacaaaattaacttaatcctgacactattacaaagttcaaagctagattagttgcaaaaggatttcatcaaaaatctggctttgactttactgagacctttagtccagcggtaaagcatgtgattatcaggattgtgctatctttattatctctagcaaatggatggtgcattcaacaacttgatgttaattatactacttttttgaatggggacttaaaagaggaggtctacatgactcaacctccaagttgagttgcctaatgtgttgagttttgtgtcctaaataaaattcatttcaatataatcaaatttactaattaataaaagattaaaaattattttatgttgcatggtttacataatttatttcat

SEQ ID NO: 384479 - DNA, 1823 bp, Cannabis indica
ttcggcgtgttaaactttttcaaatttcttaaaattttgcaggatgtcttaaataactataacatacatgaccatgagaaaaaattttgactaaaaaattatttcggatgctaaaacagataaggatgcatcaatatattcattttaaggaggtgcattgtagaattttcctatattctgtatagaacatgatttttttaaaaatgttaaaatattaccgaaagcacccgttaacatttctctttcatttttcattggtgcttttcgtttctcgaacacaattaataataataataataataataatgtaataataataataataataactaagttaacaaatgtaagctattttctattttatacaacctcaatttccatctttttaagctagactgtataaagtataaacggccggtttacataatttgtattaattttttagattgccaataaaaaaacccttaaaaaaatggtgcttcttactacttttttttgtttctttcttataataaggcctcctaaaaatataacaaaaacaaacaaaattttaagctcaaaaaattacataaagaaagaactcatggtttaaatgtatgttttactctcctctattagattttgaacttgggttctttctcttccttgatttgtttgcaggaaatttttgttcttggattgtctatgcttcttggtctgttgttttggaggcaatgatggttttccatcttcatcttcctcatcagaccggtcatggccatcactcaatgagccatcttcgtccgaactcaggaccaagtcctgtacaatgtcttcatccccagctaactcatcatccacttgctctgtctttctcttcttttttctcttcttttttgattccttaggtttctcattcctgttaatttaataaaacagcacaaattaagaatatatatcatgcaagaagagagagagagagagagagaatcttatttaaccatacttggaatcagttcctggcaaccaggaggaactaaacacaactgtgccttcctcattttgggtatgatcttcttcatcgtcactttctgtcatctttttcccaaagaaggatgagttttcaccaacaacaacgctgcaaattaccaccacattagatttagatgcttatcaaccaaaaaatctttaggaaaaggaaaaaaaaataacctggattccatcaaggaattgtttctttgttgtgctctttggcgtaaaattaagacaaattgtgacagagggctcgcccccgccttcttctcatcctacaacagccaaaaacaagttcttcatttgatcaactataattagttcgtagcttttttttttaaaaaaaaaattaattagttcatagttaacataataaaaaatggaaaatttccaattatattgtgcaggattgattctgttttgatagattttagtaacaaaaatatcaatagaagagaaattcgaatattcctaaatattgagtcaagctttgctagttagaagcaaaatcaaacaatacaaattcataatgtaacactctacacgaaaaatagaacatacctcaagaaaagacgccactgcaggattatttggcatataagagattgacatgcgtttctcatttgtaaatacagagttagcctcaatctgagaaataaaagagtatgaacattagatgcaacctttgtacatgtcaacactcaacaatcatcaattcacagaccactataagacctttgaacaacactaaggcggcatttggttgggaggaatgaaaatataaaaataggaataggaatggaataaaattt

SEQ ID NO: 384480 - DNA, 1449 bp, Cannabis indica
tctaaaacttgtcacaaaggtgctagctcacggttcatcttgccctccttggtattatgaagcccaaagtgtatttttgccgaaccgcttgatcacacataatgtcttggtggcttttgagttagtacatgctatcaaaaataaaatggcaggacgtaatggtgttgcctccttcaagcttaacatgagtaaagccttcgacagggtagagtggatgttcattgaaaaagttatgagaaaaatggggtttgttgaacgatggatctttttaatcatgtgctgtcttactactaataatttctccttcctcattaacgaagaagttatcggagccttgacaccaacccgaggtcttcggcaaggctgtcctttatccccatatttgttcttgattttctctgagggtctctcaagattgctacaacatgaatagaatacccgcaacctaatgggcttcaaactaacacgtcatgatccaccaatcactcatttgtttttttgttgatgacaaccttcttttctgtcaagcaaatgagagatcttgcctcgctattaagagagtgttggaaacttatcacaaagcctctggacaggagctcaacttaaacaaatcagtaatgtccttttctccgaataccactcttgctgcacaagtatttttccatcaacagctttccatgcctatttgtgaatgtcatgaaaagtatatgggtttgccctcttactctggccgagataaaaaggagatgtttagcaacattaaagaaaagatttggaagctgatgaacaattggaatgagaaaaaatttctgtaggaggtagagaggttctcttaaaagctgtggttcaattaatccctacctatgccatgagttgcttccgtttaccaacctacttttgcaagcaagttgaatcaatgatgacaaatttttggtggggtttaattgaaaatggatccaaaatacattggcactcatggaaccttctttgtaaatctaaattggaaggtggtatgcggtttcaatccattcacttcaatcaggcattacttgctaaataagcatggcgtatctttgaaaaacctgactctcttcttagcagaattctaaagagcaagtactacccgaataatagctttcttgaagcttccttgggccattcaccttctctaacatggcaaggaatccattgggctagagagctacttataaagggcttacgctggaaaattggtgatggaagaactataaagtcggggttatgacccctggataccaaggcaaagcactttcttgccttttcactacacatgcccattaaatggtgtagttgctaacttgattattgaggagcgtccaatggaatgtgcctgtcctacaccagttttttgctgccttggatgtggaaagaatcttaactatacctttgagttgttaggttttatgccct

SEQ ID NO: 384481 - DNA, 1039 bp, Cannabis indica
aaacttccgttcttacctaaatctgaaaatctaatcccaggggcgtctgcttttgaggtggttaatattcattttgttaaagtgttggccaaatatcaagttcctaaactacccctgctcataacagaactaactgcctgttatgacagctggtgatcgagccctactcttcagttgcatcattactatataagactcgattgtttcaaacttggggtgccaattttcgagggaaaaatagatagtaagagagagagttgtatgagctgtttagggagagagttgagttgtgttttaagtgctgtaatggtgtgacacattgattgtgatcatcaccactagagagtttcattacagaagtaaagctttcaaaattgtgtaattgtaactgttgtaatctctcattgaagttcagttataaagactctccaaagccattattgtggctgtttctgaccggggagtaaacaaggtgattcaccattatcttgttcgaacctcgttaaaattgtgtgtttttatgcttatttaatgttattgttgctggtttatgtttgttgcattacaatgtttgtattgatttggtttcattgatcatttgctctgtttattgtgttcttgctgaggtgttgtttcacaacacatttattggattgtactggtagaccaaaacgtcatattcggcacaaaattatgttcaaagttcgaattatgtgacactgacatttttgttgtttttggttttcaatggtgtgggcccatgaaaggagaaatatgtgaaatgggcaatgacttttcttttgaacaaaaatgtgaattgattgtgatacttgtaaaattaaggctgaacatttagacccgtaaactcaaaaacctggccacccgccccgacccgttgctaaaaaagccgaaactttgaaaacctgtgtgttcgggtcaggtccaacccgaaaatactccacatgggtgtcgggttcgggttttaaagttagacaaatattaattcgggtgttaactcgaaactcgaaaattaggtaca

SEQ ID NO: 384482 - DNA, 1676 bp, Cannabis indica
tatatacatatatattttatatacaataacatatttactctctttgccatggatgatcaacaaataccgtcactgctatcagaaaacaacaacgaaaacaatcaaaataatgacggtctattattatcgaataataatgataaggtgaaggactctccgtctaattctacggccgtcaagaaacggaggggagcggtgcaactgatcaaggtggcgctgtacatgatccgacgtcgttctggaaaatccaagtcgacggttgacgtggcatcatcaggaggaagcctttggaattgcctagttggctccatgcgccctttgcatctccagagccacggcactccacgtcatcatcacgctgcaacccatgatcataaaaacaacgccgttataacgtcaccgatgtcccctggtgcctccagctcctactccaccgacgatgacacgagccgctacgcctctgcggccaatcttcaagccctcgataccgagagccgctatgcctcagcggagaatcttcgggcgcttgatgatagtgaatgtgaagatgatcatggtcatgatgaaaatggtggagatgagatgattgatgccaaggctgaggagtttattgctcagttttaccaacagataaggcttcagcgcttgaactccatggatcgccgttacaatgagatgattcagaggtcaattggttgagattaattaatggtgatcctaattaatcaagagggacatcattttgaactttacgtcggtttgtttttttctttcctatgcatgcatgcaaaaacatgcgtgcacgtcgagtttattactttattttattatttatatcatatttttggtcatttccttttgtttgtttcaaagatatatatggtaatttattaattgttcattgtgggtcaagagattcttgtcgattgcgtggagaaaaaccgaattcttgtctggggtcatggactgatcatgggctggtgtttgttgtttttgagaggaaaaattgtctttaattattttgtcatctataatcatttgtaatatttatttttctatagtcaattttagtatcagttgggctttgcaatcaatagttgaacattttttgtactgttaaattaataaattcactgtttctagcctcactaatttttattaatttatttgcaatttaagtcattttaatgggggaaataaaatataaaaatgtctacttttatttgttttggttgaaatctcaagatttattattttttttttccgaaaaggttaattttaaaagagttggaagtacctaggccttcatatatagcagaattattagtataggttttttcattatttgggtaatggctatatcttaaaaagtacaataattaataatagaataataggatttgtcttctcaaactataaatcttatgtagttttgtctcttaaaaccattttttgttgcaaaagatttcctaactataaaatcagcctggagtttgcattctacttatttctataataatttgtttttttttttaatcaagaataatctttctattaatcgaaacaagccattttacaactaaatagggattaatgcacccacaaacatcaaaacttaaacttttagcatttataagaaaaatccttcaaaaaactagaaagcttcctatcttgaa

SEQ ID NO: 384483 - DNA, 1131 bp, Cannabis indica
gttactgtacccggttcaagggagccaagcactactttgttggaatgcgtttccaatgcagaggaagcttgtaaattctgtgttcattgattttaaagttcagttcataacatagaatctctctgttaggaattatcaattagaacttgtagtaattaggactttcaaagagtttaataatattattattatcatttgagagaagaagagtattatttccattaaagtagatgaattcattgtaataattatgatgagtagatggatctacacaccgactgattaggcaaatattttgggtaatgaaaggggtttggtagagtaagggatgagttgagttgagtgtcctatatagaaccgtgaaaatgaggacacacacaggctcacatgttacgttgagattctgtacgtgttatatataaaagatcaattcatttgaaatttcaaagtataacacgtggcacaaactcaagctatgtacgtgaatcatcagatcatcgccatgcatgttggctaacaggtaagctgcttaacacccacgtggcccaataggactgttgcatgtctcattaatttacactgaataatgatgatatggatggagtacgttgacttttattacttgagttttaccctgttgctattcaaatcaaacttaataatccccaaccgtaatatctatcgaaagtaacaatcaacaacaaaaaagaacttaattattaaatttattatattaattgtttccttattgatcatgactcttgtgccttcaacaagtatgaagatgaatacgaaaaatcattccaatacagaaaattaatattaaatcttcatattacattctattttatttctatgtacaaaattaattaatcctttccaattccaaaccccatgcaaaaaaagattttataataaagatcaaagtctgatgaacaacatttcctaattcatagaactaagaaaaaactttgaattaactgcaccaaaaaaaatgcttattatattgctctactatatatttcgttttttcgacaataattactctctactaattttattatcgaccctcaaactaaaacttgtatatatagaaatatatatataaaatctaaaaggttaatttattct

SEQ ID NO: 384484 - DNA, 2264 bp, Cannabis indica
atatctcaaatagctataacgtacatgaatatagaaaaaaattagaactaaaaaatttttctagatgccaaaacaagtagagagtgcatcaatacatccattttagggagtgcattgtaaaatcaaccttacttatattaacatatttagtaaaattatactaactttactataagttcgaccccaatctcctaactttggacctcaacctcgaattaagattcaaatccaagattcggggtctgaatccaaattcaagtttagagttcagagttcagaatttgggtccagtgtatggtgttcgggcctgggtctaggtttaagttcagagtcagttctttagggattcgagtccaattttggattcaagtacaattatgaatctaattctgagtccagagtgtctctaactctaaactttttttaaatattataatacaagattatttatatataaaataatatgattcacacataataattaatacattataaaagtttttttttttttttttggttatttatacaataccacatttatactgtctaataaatcaacccaaaattagttgatgagtacggattcttcttcatccaaaattaacttatagtttcaaattttaccacctacaccaaatactggtgagtgcaaatcgatcatttaagtttaagtgggttataaatgttatgattgtttaagattgaagaaaacaacaacgcttgagtactacatatgtatgtacagattacagtatatatatactatatgtacatgtacatgtacaaattaattactactgtctctttttttatatgatatggtatgagagtccccaccaaatgccataaacggagctcaggacaacaatattaagacgagggcaatagagagatttttcatatttatttatttttatataaaatgtaaggttgaatacagcgaagcaatgtttatgcatcagacccacctcccacaaatgtattatatatataattgtaaatataatgtgtgtatatagcagagccagaaagaaagtagtgctgattacagcaaagagaagaagaaaaaaattaataataataataataaaaagaaacattggtctcttctctctctttggtctttgagtttttattggacaaggttgagcctactattgtcgtcgtgggtgcccactaccagctttttttttgtcttctactttttttttttccataataatattatctggtctttggtttattattattgttattagttgtgttacttgtgtataatatatgataataatttatattattattatcttttattttttataagggtgatggtttctttttctctttcttaaaaaacaacaagaacaagaacaagttatagacagaaggtaggaggaggaggagagaactagaagaagacgaatattattattaataatttttatatttatttttattattattcttttctttttatagatatagagttgatcttttattttattttatttttgcaactcttctatgtctcaaccaaggcaatttcagatggttggtaataacaatccgggacaattcagtgacacaactcttaccaaaatctttgttggagggttggcttgggagactcaaagggagaccatgaaaagatattttgaacagtttggagagatcttagaagctgttgttattacagataaaaacactggaagatccaagggctatggctttgtaagcccatttcatgtttcatcattctcataatgtttttgtattatttgtatttgtgattaagaaagatgagtctttcttcttctttttttcatttttttttatttggccttatattttcataggttacttttaaggatccagaggcagccataagagcatgtcaaaacccatctcctgtgattgatggaagaagagcaaactgtaacgttgcctctcttggtgcacagaaaacccgtccaccaactcctcaacatggtctggaatctcttatctttctcttaattaattagatagatcatatgttttaggcctagatccgatccaataattaaatttgttaaccgatctaatccaattaattcgagtcatttgaatattcgattagatttgttttattctttgtatacatttcatatatatttactaaattgtttcggatttatctaatcttttaaacttagtatttttagtatttttttttatcagatccatagatctaatatttattaaattggatttgatccaacccc

SEQ ID NO: 384485 - DNA, 710 bp, Cannabis indica
ctaagaaattgtaattagtattcctctaccttataatatataatatgggaattaatgaattaaagtgatatataagtagggtagggacaaagtactctagtctttatcaaaggaagatgggtcgttattacttggcaagaagagtaaattaaaacacgtgttaattaattaattacatagatagtatatattattattaatctatattttgcttaatttctatggtgtcacattctcattttgccgaccaagttgaaatcctatatataaatgtgattagttaaattataaattattattattattataatttcttttttgaaaggttaatttataaagttttaaccacgtgcatgcaaaactacacctacatttttaaccatttatttacaataattaagtatatagttattacctgcgttgatcgagctgataatttgtactttgtagagattatctatcaataaatattaaaagtcactaatcatatttaatatcatctttattgttatattattattagtgtaataaagtacggatctcaaataacattacaaaaaattaattttttagtaataacataaattttttgtaactaaatataactattagtcataacaaaaatttacttgtgactaaaatatagtatttaaatttaagttgtcactaatttaattttatagtcacaacaagtattgtgactaaaaata

SEQ ID NO: 384486 - DNA, 1367 bp, Cannabis indica
ccttgccacgtggaggagtttaggtacgttcaaggcttgattgatagggaaaaatcctatcaccaccatcacaaccaccaccatcttcatcatgttactgcttgcttttagggtttgaaattaaatttaattcttttttttttttgtaaatttggggaattattgtttttttttattttcctttttctttttccctatttagttggatggtgatgacaaatgtgatgttttcatgacggaaaaaatgttgaaattaaagacattgctttttagcagtttattagtgatttctttcactttttcaaaagaaagaaaggaaagaaacgtttttaatcatcaatgtggccgttttttttctttttttttttaatctttaatgttaatttctttctgctttactattaatattgaatgttatgatgaggaattgactgctttccaataattaacgataaggtgtatgtatcgtttatttttgttttcgttttataaaatggacaaatagcaaagtatggtaggccctaaattggtttgctttgaagccatacatacatcatgtatattataccactttaaatctatgtattaatatatatgaatgaattgataagcattataatcataatttgttatgatatccttttcaagtcaataatattacttacaataattttatatttattttttaaaataactagaggctgttacacctaacccatccattataagaattaagaatactacataaatagttattaacaataaaattatgcatttgtttattatgcttcgtgtaaaccatcaacagaagacatggaattgaataactgtgttggtagtaattacgattcagctggtactagctaataataacttcttatatgtatatatgattttgagagtgtaattaagatagatatatatatatatatatctatatagtcagaataaagtcaaagacatgggagtaggttcatgcatgagctccacgtttggggatcagttcttattgaatatgatcaaccaaacaaacaacgaggtggccaattttgtcagaaataaatatatgaataatatatattcacattaaagaagttaagtcaattcagagtttttacatcttaggattcacaaaggctcacctcactgccaaattttcgaagctttaattgtcatagtaaccagcactaagtacacagtacatgtgggccttaatttttagtttcgactatgtggttctattccacagtcaggctttagatttcttaatatatattacaatatataatttggaatttaaactcacaattttcaatatacccgcattctcttataactatttgagccacttgagctagtctcaagta

SEQ ID NO: 384487 - DNA, 1296 bp, Cannabis indica
agtcaataggtgttccattcatttctactcactatagcctgtgataaataaaattagactaaaaaaaatcagaaaataaaaactttatgcaaaaggataaaatattaattgacaataaccaaactaaaaccataaaaatttaaattcaatatagctaacacagtaacacatcgattggcaattaataaataaaaagggcttctaaagatactacagttaaaaagttatttacaacaaaaaatatgcacaagcaataatcatatgatttgaaagagaaatttctcaaaaaaaatttcccactaatcaaattacttgagtgaacaaaaatctacaatgtaaagtattaccaaattcattttcccactagtcaaagttatttaacagtaatgtaaattattaacaaattgtagattttagaaatacacgatctaacatacaaattttaaatcataaacattgaaaaaaagaaaagtgaaatagacattgacagaggagataatatttttaactcgtgttattaataacatcagaaggttctccagtaatcaaaaaaataactgagaatgtttgtttttaaaaaaaaaataccaacagaagaatgaaacgcttgcagaccaaagcatcaaagggaagacaatggtggttatagcagaagattgcataataatccaatcaaatcattcagagggttaaatccattaccactacaaccacccgccattgacattcaccaaaaccaccataaagagcactccaaacagcttctgtactctattctttaaagcagagattccaatggttaacataaatgctatgtttaatttggtgtaactaaatctaacaaaaaaagaataatggcttacaatgaacatcagttttagtgggagcagaaagataaaaaccaaactgaagactcatgcgtaaaactgtcatcatcagccaaaaaaagttgacaacttacaaagaagcaaaaaagaccaaaaacagaaggatgaaatcaaaacaattgtaaacaagaattccctagtccctaccagctagttcaagttaattgatacaaaatcattaaaaggcatcataaaatggcaaatcaaaactgaaatggtatggtaatacaacagtaaggcataataaaatggagaataacaaaattaaatattcaaaagagttgatgacaaaacaataaaagccctcagatctcataagctaatctgatcattaacagtataacatgagaattttcattataagcctcagagcgaaaaaaattctccacaaatagagagagagagagag

SEQ ID NO: 384488 - DNA, 1195 bp, Cannabis indica
tagcaactagttgtaatagttctttgatgcaatacaatatacaaacttatttaccaaaaaaataaaaaaaaataatcaaagtatgaacaaagcttttggcaactatgaacaaagctttcaatgaattctgctatgtttcgaaccttaaagccaatataattttttttttaaacaaatcaaacatttactttggaggtgtcacaactgagaaagctaatttgcttaaggagagtgattatggggaaagtaaatttccataccttggtattcctataagacctacaaaatagaaagttgagaattgtgggacaatcatctgaaagatcaaacccttgcttcatagttcatacttgggctagtaaacatttatcttttgttagtcagactcaacttattcattcaattcttcttgagttgaggaactactagatgagtgtctttattttgcctcaaatttttacaaaggaagttgacaagctttgctgatagtttttatggggtcataatgaaactcgcagctagatgcatcttttcttgggaataaaagtttgccttccaaaggtgtatgataaaattagttttagagatagctttaagtggaatagatccattttggcaaaattcatctcggctattttagaaaaacaagatcttctttgggtgaagtgagtccataacttgtatttaaaagagcaggatttttgagattaccagctaaagtctaattcgagctggtgttgacgcaagctctgcaatattcgaaagagttttaacagggagatattgtagccgttggttacaagtgaaaattctaggccaagaaggtgtacaattcgtcaagataaggtggtcttagcttgcccaaacctagatttattttggggcaagcaactcgttcttatcttctaagttgagactatcttatcagatgcaatctaaaaattgactcatagggctatactgtttgtgatgggcacgatgagagccaccatcacctctactttgattgccctttatcaaaaagggtggttcgacatcttttaggttgggttttgatgcttggccaatggagtactcgaattggctagtgtgtatagggaacaagaagacaggtctattagctgatatataagtggcgtttggtaatacttttttaatcagtttttctgtttttaaaagtagaaaagtgaaaata

SEQ ID NO: 384489 - DNA, 1474 bp, Cannabis indica
tcggccatattttatataaatctgcataaaaaaatactaccagttaaactgttgtaaaacaacggcaatccaactcatctgagtctttcctagagttgtgtagcaaaaaaaaagtgattatctaactcatcaacagacaacaaaagaacgataattatataataaagatccatgtttttacttctgttccacagagtctcaactccagtcactatcttatgattaaaatataggaatgtccgtgcatattaaattctctaaacttctgtatccaaaacttcatagaaaaatagggaaaaaaattccaatgaaatcccagttaaattatgaaaacaatgaaacggcattctttcgctggaattaagatttacaggtatctaataaagttagatctagaacaagaaaactctcgaactttaaatcgcatcgatttggacaatcggaatatgaaaaacacaacagatccagaaaaatgagggccatatcagaaagctaaacgacccgatctaagtttaacataataaactaaaacaaaaatcaacaaatccatcactgaaagacgccacagatcatgatgttcatgtgagaattagctcaaaaaatttcatacaaaacacagatcagagcacagaaatgaacacgatgcgaactactgaactcacctatcgaacaaatcgaaacaattcaaaccaaaaataaaaggaaaaattgaaaagaagaagatcgagttagatatttgaaacctttagaaaagagaatgcgaaagacgaccgaagacaaagccaacgagctcgagagaacgcgatggggtcgggtcgggtctcgcagtctcgttcggcggaaatggaaatggacgaaaatttacaccaaatttatatatcaaaataaataaataaaattaaaagattaagaattgaataataataattattattattttattttaagaatttggaagaagaggaaatggaatcatttccaccacgactaaagatgggatgacctggttggctgacagccttttttcctttaagttcttctcctgagttagattagattaaatcgtttcattttatcgtttcgcttgtctttcctgattgaatcccgaccgtaggatcaaactactgtaaaaatcggagacagtaattcactgaagccgagtggcttactatttgttgttattcaacttggggtctcgctctgtactctgcagcagtcagtcacgggatgctcttctcttcttctgctaattgttcggctcggctcggctaatacaaagctaagctactttcgcacaaaaactctttcaaaatttcaaaacaatagagtaatcatttataaaacctaaaatttatagggtgattctaatgcaccccttaaaatgcatgtactgatgtacctttgacttgtttagcattcagaaaaaaaaacttatctaattttttttatattcatgtacgttatagctatgtaa

SEQ ID NO: 384490 - DNA, 1245 bp, Cannabis indica
ctatagtcatcaaggaaatgaacacagtatttaaagccatctttggaagggaggtgactggcaccccaaagattagtatgaattagttcaaggggttgtgtggctctgctagtggacatgagaaatggtaatttgtgatttttgcctaactgacatgcattacagaactgaaaattggtgatggaacctgtatggtgcaaattgggaaaggattttttgagagttgaaagggtgggatgatccaatttgcaatgccaagtatttatatcattatttttagtagtattgaaaacttgaggggagaaatctaaatggaaatctttgtttttaattatatctgaatgtgtacaatctgtagatgacattgagtgattgaagttacattcactaatggaactacaataagaatcatactgagtttcagatatagttgcaagattacattcaaaagtagagtgagatagaagagcactttttcctagcatgtacagactatctctaaccttccccttgagtagaacctctcctgttgtcttgcccttgaaaaagcatgcatcagtgtttatgaaattctagaaacacaatattatcttcagttagtttagatacactaataagattctttttaatcgatagaactttcaagattgaatttaactgtaatggataagaagaagaaggaagagtagtgaagccaatatgagattatgagcaattttttaccattgcctacagcgagagtttcttggccattgtagggagttgatgcatcaagattgtttaaccaaaagatacatgattcatagctccagtgtcagaaaatcaggtaccatcatcacaaaaatctggtagagttatggaggaatagacttgagaatcgtattcaaattcttgctcaaaagagctagtcatgatttgggtgtgacctaatttttattgaatctatagtgaaaaatgttagcagtatgcccaatcttcaagtaaacttgacaaataggtcgagcagagttgggacaattgtaaccacaatcaatgccacgactaatagtgtaatgtccccatttcaagttttcattaggtccttacacccacagaataatgacaccaacacgaatatttccaatgtgctttgtcctaacaagcaaccatctcattctatccccattgaacttgcccactggccacttgtactattgtgtcaatcaaattttttaaaattaaaaaaaaaataaagaaaaaaaaaaa

SEQ ID NO: 384491 - DNA, 1240 bp, Cannabis indica
tttttttcaaccgatggaataatttcggtcatataatataaaaataatttttttaaattttatccgttaataccctttaaaaatgcatctatttatatatatgtatatatatattgtcatcaatattcttaagccacacgcatatgttttgtttttacttttgttttaatacaaacatttatgatttataatttgggattcaccttttctaaagcaacacttcactttagtcttttgcttttggtaattttattttatctactatttaacccaaaataattgaaataaacacaatcaaaccttcatttttttaattacaattttgattctcaaatcaatattgatggtaatttatgcaatttaatattaagccttatattttattttaaagggtaaatattatgtaatattattttgtaaaagttatagattgtactttctattttgttaaatgacaaaatagaccatacattttccaaaatagtacaaataagacaataaactaattttttgtcaaaataaaacttaataataattcgacttagagacagaattagttaaattttctgtatctgttcgtgttagaaattatcttcaagtttgttatactaaaaaaaattatcaaaaattgagctcaggattctatttatactatttaaaaaatacaagatccattttatcatttaacaacataaaaaaagtttaatctgtaacttttgcaaaatacaatgtccaaaataatatttaccctattttaaatttgataataaattatattaatcatcatatcatatatatttacattacttaatgtacatgagctttagtgacttacctcaagagactctaaagaattttaatgaccttttattgtaggtcactaattaatgtaggtgattaaaaaaaaatatatttagtgatgctttggtgcataccactaaatttatttaaaaattctcactaagtgtcactatagatttttaaattcccacatatcaaaattcagaattgacatataactattagtgtaaattaatatttagtctcacacattttaatttaataaagtgaaatttcagaagtatcttaattttttttttatatgttttttacaattttacggtctaaagtttatttacaaaatacgttgataaagttttaaagttataaaaatacactttgttcagaaataaaacaactaaaaaacaataagaaatcaacttcacaataactataaata

SEQ ID NO: 384492 - DNA, 611 bp, Cannabis indica
atttgaagtttgctctaaatatatcacattgcaaactgctcgcgaataacatagcacattgcatacagctcatctaaatcaagattatgatgatagaatgcatgtaatccaaaaatatcctaagcaaagtccaaaaaattattttattgtgaattcaaacacaatatataaatattaataactcgaagaaagtaggataaaaggcataaaagtaaatatatataaattagcaatgttggccatccaacaaagcaaaagatttagcgggctcttcttcttcttcaacttattcttctgtggtatcttcatttctcttggtttgttcgtagaaagccaacatctcctcagcgccatcctctaagaaacttaaatcaatatttggattcattaaccaagccttataaatagaacgcttggcaacagaattacatctggcattggcattggcttcggctccttcaagtttatctttggcttcattaagctcttcctagatttccgatgggcctcgagatgatccttggtagctttttgggcgttctcgagctcacaatttagtatgttagtagtttgggacgggttttagacattgggaatatcgggaatggccg

SEQ ID NO: 384493 - DNA, 1371 bp, Cannabis indica
atatgcagcggacaaggactgaaaccaggtattaatttagaatagtcatcttcagaagcttaagatataatgagttttgctactgaatggtatacgttttcatttacagagtacaaaaatactgtccataagaatagaaggtgatcctgagacatctcttttagtccaacaaacaaggcttcagggttggtatcagcccttggaaacttataaagctgagcaaagagaaagctttaagagcagctgaaagagcacgggaaaggattgtaaaacagaagccaatgatggaacagggtccattgaaaccactgccatcagaaacaaaatgtggtccgctgatgaataaacagataaatgttccagattcagcatctggtttaacacctctagtttctaatggtaggcttggaggatcaccaggaaggttttcaagcccaagaaggagattttcttgccccccatctacagtttcttccattttggcatcaccacagcaaaagtacagaagcaattttgacttgaaactgacagatgtgtcgaaggagcttgagacctacatttcgaggcaagttttatgttcagttataaaagaggatggaagtcagccatccccaagatagggattttaaattttgatggtttggattctcagcctttgagaaataaagtcccttgtattgttgtgtgtatactttcttttatatcttaaccagtcaaaacatgatgtaacatttctcgatttgatgctatatttatatacatatatgttgattttttttaagattgatatatgtgtactgttacaaatttgaatgtgtaaattcattgtttccgattctcaaacctttcaatgtacatatagtgttcaagatgcaagaagaaacataatctttgaataacttgaaaagatcaagaaagagaagcataagagaagcatgaactcctttctatttagaaaagcttgatatatcactcaaattatttgtcactgcatgctaagttacaagaaacaatcatatatcagtattatgactagcaaccaaaacttacagctccacaactttatgtcgcctattgttttgtcagctaggccaagtttgcctgtcaagagatggcaagaatcactaatgattttatatatttttatttagaataaataagatttatccttctgaatatcccctgcattgacaatttgttgatataccgccattgacgctgaaaagtgatcaactccgtctgataagcgatagcaactaacaaatgtatgaacataaagtaaaaagagaacacaacaattatagtagttccctcctcttgactcgaaagtaatggagctacgtctacttagaatttttattatctcaaaaa

SEQ ID NO: 384494 - DNA, 1285 bp, Cannabis indica
aattatacatataaaaaaataaggataggaggagaaaaaatattgattataaaaacaaatatgatgtatttgtaatatcaaagttgccaacaaagatttcctacaaaaaaaaaaaaaaagttgccaacaaagatataaaagattactaattaaagactaaaatttttgaattagataatcacaatttcattgtacgcagttcatattttcgttcacttaaataaaaaggatgaagaagatcgaattgaactttgattttcattagatttcatgtacgtgaattttataaaaaggtaagagagaaacaattgaatctaatattattttatggtatatatatattaatgcaattaaaacaaaaaatatatatattcaatcagagtcggttggtagcagaaaggctccattccaaacccgacacgaccacatgaatgcttgattattttataaaacttttacttaccaatctacactaccaatctgcatggttccaaaacaccagccaatcaaaacactggcactgcacacatttatttatttatttattacatatatcatgaaaagatctacctatatattttattataaaattgaacaaaaaaacagtgtagcttgacttattatattatatataaataatagtgtacgacatgtatcatgtatggtacagtcaaaaatatctggggtacttaaactaccaattttaataatttcatacaatattattagttgaaataatggatagcttatttattgatattatatcctatattataatgtaacatgataaggcggtgatttaatggtttttatatctgcaaaaatgatactatataatatattggctctcactagttcttctcagtgtacatacaatgatcgtatagattttactttcaaaagaatgtattcatcacacatgctttggctgaaatattgtccccaatttcttttaatgcaaaatatatactataccacttgtattattaatgaaaaaaataatataaactggagaagcaggtgactgcaaaaggacgttgaacaatatgagaaaacgagtttttacaaatatcaataattattatagatatataacaaaatataagattataatagtctccggtagcagaatataattctgttactgtagaaattttttttgcagaatcaaactagaattagcagaatattaaaaataattgtagaaaattaaattacttgacacaaaacatttgtacgtagtatcagtacttctttcaaacactcctagtccacgggggcccac

SEQ ID NO: 384495 - DNA, 2074 bp, Cannabis indica
cagggggaggttaaagagaagcatagtaagctccatttacttcttacgagcaggtttgtttactcaaacagtttggtgacattgaatttcagagagtatcgaatggaacaatgttatagtagcaaaattcatgtgggatctttttataaagagaaccgtaagctccattttacttcttgggagcagtttgtttacccaagcagtttggtggcattgactttctagagaatacggaatagaaaggtttatattagaaagattcatgtgggatctttctatgaagtaagatcttctttagtaaaatgggtgcacagtatttacttacaagatcaagactattagtcatattcattggagaccgatgttaattggtactggaggaagttggttaaccttcgaaagatgttttctatggtgaatactcataatgtaaggagtaatgggaagtttaaggctagtaagctttatcagagtcttcttcatcatgagcatgtgagttacaataagattgtttggtgtagacttagtgtttaagcgtaagtttattttttgacaaacagtgaatgaacttactaaagataaacttctgctttgcaacatccatttgaatttaattttatccctttttgtaagcatgttctagtcattctcgaattattctttaattgtagtttttttcaaagagtaatacaaggtgtttttcttgattaaaaaaaaaataaaaaacacgaaatttattttttattattatcaaaatagaaagttcaaaaaaatatttagtataaacaaaaaatctacggtacctcacatgaaatttgatacgaatctaaattatttaattaggtttaaacttaaataatttttgctggtatttataaaaatattaatctagtcaaatattatgattcatacaaacatacatgttttcacactaatgcaagatatgcataaatcgatcaatacttatccttatattaattaaaaagtgaggtataaatcttcacgtaatttatattttaaatatatgtttatatgattgattgcatggcgtatatatatgtatatattaacgtttgagtttctataacctaatacaaatttaaataatggctataataattcattaccatttttagtaatttcatcaaaaagtaaatataatataaattaagtgttcaaacattatacattaatttaataaaaagggtacactattgtctcttcttctcaaatattatctcaaattatatatatttatttaattacgtgggccaaattgcatttattaaattctaaaagcgttaaaataataataaattaaattaataattaaaaagaaagtggaatttgtcaaacaaaatacataacacgccaaaattatataaatgagccgtttttccttgagagaaattatgactttttttattatgaaaattatattttaaaacactaacaacaataattaaaataaaaaaacagaatctccaattttaaaaatgtatttttatttttttattgcaatcctaaatctttttgtcttatatgaatgtaagttgtatctttgttttaaacaaagggtcaatttttgtaaagaaaaaattacaaaataggtcataaatttgaaaaaaaattataaaaatattttaatacagaaaatttattatttttactttgaacttttttatttacaaaaatactttttcagtaaaaataataaattatttttttaatgttttataatttatttataattgtattatagttgtcatgagattattttatttttagtttatagtttatttatagttgttttataattgttgtgagattgttgtgaggttggtttttaattgtcatttagttgtttttttatttttttactaaataaaatgtatttttataaataaaaattttaagtcgtaaaattataaataaaaaaaatatcgttaaaaattttcatattctaaaagcacttcctcaaatgataaaagattaatttagtatactatagtaaaaaataatgaatttggatatatcttccaagtcaccgaaaaattgaatcataaattaatct

SEQ ID NO: 384496 - DNA, 2024 bp, Cannabis indica
tttacactttgtgagcactagtattattttagaataatgtagaagtttgtaccaaagaccagtccaaagtttaatgaaatgatggaaccaggctgtgttgatttcaccacaaacaactaggctccataatcatatcatatggtatattgtatattagagcaaattataacctgactttagtttggcttatatattcggcatttagggtcgtccttttcaaaaaattatatatttatatatttttctgtttattctttttttttttaaaaaaaaatatttgtttatctaattggtttgggggttgggaataggacaaagtaaatcctttgtgaaaatgatggtatgttaactcttgcttttgtttaatcttttttgaattaaaggcaaacacaatatacaccatattataaaaatgtgttttactttttattttcatatattgattaaggctaactaatacccaaccatattgtgtacacaaaaatcgaaaattagataaatccacctcatttatttatatactatgaatatgttagaaagccaatcatatattgcaagacagtatagcaatagaatcaataattaatatggagttggtatgtatatctttcaaataatttaatttgatatgtctacatttattgattagatgcctcctatatatagttttataagtggcaaaatcatatcttaatatatgagtctttgtacaaaattacattattaccaaaattgattttttttttcacaacttacgcaatggcaaacatttgcttcaatataaaaatagtggcacataatctcacattgttagaccatttctaaggtatatattattttagtgtaatttttcactaattttagtaccgatcaatttcattactttttttttttcttaacaataaatacaactcgaaaatgacacaaaattaattcagcataaacatatacctgtcaaaataagttaaacactattagagacgattaaattttaaactaaacacaaataaacttattaactctaaaattgacatgcttaacatgattaaacacatattaataatcaaattattgatattaccatcaaattaacaaaatattaatctattaatgaactataataggtaatacaggtaaaaattacaaatttgaacttacttcttttattattattattattattattatttatgtggataaaataggtatgaaatagattaataatgttaatgtttgtgtcgtgtcacatgttttcatgtctataatcatgtctattcgtatttacattttgtgacatgtcatgtttgtgttaagtataattatggtatgtcaaaatcgtgttgacccaaaaatatgaattgccaggtttaattttattggatcatcactttgaagtttgattgttctctcaagtcttatggacaagtggcttaggttgtgttatatctttttaattgtgtgcctttctctctatcccttttccctctatatccttaataggggtgtgtatataaatcaatcttattcaataacaatcgattgttagatatttaatatccagttgtgatcagattgaattggatgttgtttttgaatatctaattggatcaaatcagaaatgaggtatctaaaaatctaatacatctaacattcaatcgaactaattaatattttctatattttcatttagtttaaatgagataggggtgtgcataaatcatccaatccaataacaatcgaccgatccaattacaaccgaccgccaaacatcggatatccaattgtagatcggatcagattggatgttatttttgaatattcaattggatcggatcggatgttagatgaggtgtccaaaaatccaatacatccaacatccaatcgaactaattagtatttcatttagtttggatgagtaattagatttatatagttatacataaaatatatataaaagttaataataaaattttactacttttttatggattaaacagatccaatccaatccaatacatacttga

SEQ ID NO: 384497 - DNA, 930 bp, Cannabis indica
actgtttactaaagatgactactgaaacaccatcaacatacaactaagacaaggagacattagtagtaaaggcagcggtgtcgtctccagagaaattgttgcctttatccaaattttctagtaagaaaaacgaaggagatattggcaaaggtttgcttcatacaagaaaacaagaaaatgagtgaaagggtactgattatgtaactaataagtttatataatggtaaatgtactttcaatttatatgagtcccaagtaaacgttggagaagtctatttgtttttcttaatatttaactgtgggcctttttgttttaatgttggaaatgttgataggtagtccattgtatagtatgaggcttctatttagtttataaatttggcaaagtggtgtgaaacttatgtaaaatcgttttgttgcctcattgaaatagttgaataaggagtccttttagactatatcgattggaaaactaagctcatttatgttttttgttcaaatctttgttggtgctattcttgctttcttgccatgttgtaaattactgctatagtgtttttgtctactgcttcggaaaggctggttggcgtttgctcttaactctttttcatgtactgataaatttaacaatatttattacagaaaaatatgaaaagccgtatagactaactcatatatcgcattataagtgtaaatgtaaattattatggctgaaagcaaaatgaagataatttatactgtcttgataataagatggggctcaaaattagaaatcagtctgaataaagagaacatactcttcttagctgattacataggaaacatacttaggaaggtttagattgttaacactaaatatttagaccatattggtaaatcaccagttatgagtagatgaagaacagtacttcagacactgcctagtgtgaa

SEQ ID NO: 384498 - DNA, 1903 bp, Cannabis indica
ttttcttcatctctctgaactgacattgaattccaagttgaatactttggaacctttacatccactgaagattggtctgaactgagaaagccatagttcctaaaatgtggttcgtaaaaaagaaagccagccgccctcattgcacatggcaagttaaccaactgttgatggcatattgccacagcttcagttgaattaggtttttgcataattattgctcaaaagaaaggataaattcataaaatatgtccatagaagtataagagcaagaataatttcacaaaaagtaggaataacgagacttacgaggcttctaaaaagttgtatgcacataagggtaaagtcctgtcgtctaaaagaactggtctttgaactccttcttgttcggggaggtcgactatgattttatactcatcagaatatttcacgagatagaaaaaacccctagaacaattcttcctcttaggaatcgctttaagagtgtacaagcatgtgatttcgtatggctcgagcccactctatcccatcatatgatataaagatttcaggaaagccaacattctatatccattcataattaattggaacagggatatacccaaatagttacagtaatctttaaaataatcctttaatgggaggatgactccaacatgtatgtcctatacactccaagctccaatcctgaagaaactacttgtactacattcagagtcattattaaaaagaccaggggaaaaataacttttctcgtcgtgttcgacagatcgatatacaaaaccatccccttgttttatgccacacatcaacaagaagagcccaacatacagagaaatagaagttactttagactaaaaaaaatcagcctcgaattgcactgatgggtcatgggataatctaggtttacgagctttaggagcggccatgatttgaaaatcttggatccctggtgaacaagcaacattaacgggaggtaaaaataaaggtttgttcaagggatatttaattaggtgttgtagcgtaggccaagccgcatctcataggtaacgatatttaccctcaataatctcatctataaagctcctagaatgagtgaatatgtcaactcaatttagtctatcgacacattctctggttctttcatcattctcctcaagttttgttttaaaatcatgagttttggctcaaaggatctaaagcaagtaaatagtggatttcttattctaaaaattttgaaattttacattcagactcaaacagaggcattttttctaaaaatattgtataaaatctacaaaatttgaaaactaaagatttagggttacaaagagcataaaaaccacaaatatttacctaacttaacttaaatccttatagtgccataataaacctaaaggtaaaaatgtgtcagagaattcaacaagaaaagaaatttcggttcttaccagttttaaggacggatgacggtttggatgaattgttcactagaagaaaatataggacggataataagggcgtacacaaagtaaaagagagagggggtttttcttttttacacaatgtaatttatgagtaaaaatggcgaaagtggttatgtagagggaaaacaatattttataatcacctcgtgagaactatttggtcgcaatgataattaatcaacgatagttaactcatgagtcagttgaaaagatgaccttaattgcatatagagtttttctcaaaaaaatacgaccactaaaaaatgatccttactcaataagcataaaggacgacttagctccctagtgatgatcaaatatctctttttgagtttaaaaacactttttaggggtaattattatacacatatttcaggtcagtaaataataggtctagttgcatgacacgtgtacaacaaaca

SEQ ID NO: 384499 - DNA, 3017 bp, Cannabis indica
aaaaaaaaataaaaaaagaaaaccatctttttatgcttgaaatgaaattttttgttaaattggatgtttttctatatttttcttttcatactaaatattataatttattttgttttaatttctactgttttttttttcttgcattttttctatttttatcaaaaatcaactgttaaacacagcctaaaacaattacaattttcataaataattaatcgatcctaacaaagataatttatgttaagaattgtaaggactcgtgaattgtttcatttactacattttatatatggtttcgattcaatgtccagccagcgttgatatagccctttctcttgccttgattgcctgcgttatttacaaaataattataataattaaatatggcctacttttcagcctttaaatacgacaatcatactatatcaataatttttcttctcagaatcataagatatcaataatatttttcgatatatattcaatattttaccataaattattatatattagaatcacaatattattaattgtaagttactaagtaaacaataattattccttatatattttatatttatatataaatatatggtacctgttttttccaattggagaaaattgtaactaaaaatagaagagttgattgtacaactgaaccaattactattccaatccaaagacccttcccctttaaatgtacaacaaaaccaagtacaatacccatggggagtccagccacataaaaggcaccaagattaatgtaggctcccatgcgttgccaaccactccctctagcaactcctaaacccaagtcacattattaatgcatctacttaatttattttcaataaccacacaagaaaaacaaaaacaaaaaaatgagagaggagaagaaataatgttattactagtgaagagatggcttatatagtcttttggattatttaaaggtgtaattaaaggaaaaacattcattaaagtgaagtgaatataaatatttaaaaggccttggttcaaagcttttatggattgacatactaacctgaaagaacagcttgtaagctgtccataaacactgagagacatatgagaggagccatgattgcaatataactaacgacctgtttctcattggtgaaagcataacccacaaatgaacggcagaggaagagactaatgctcactgttactgcctctgttgctgctataaacattgctgcccatacggccaatcgcgctgcttctggtttaccagcacctaattcattcgacactcttgtgctgtgtaagtataacatcaataagaaatcaactttgtttcgctcttcaaattttccatccctttaatttctcttcatgtttcaccaataaatgacacttattttgttctacgaattacaagatcaacagggtgtattaaataatatgacagtactatcatatatatgtagtgttgttatacattattagagtttcattcctaatataacgatcgatcacatgaccttttatccttcaaaaacatagtcgctacatgttcatgaaatgtaaggtatatatatgacatgacattttttttttaaggtatatgatattattttaaaattactttactttaaacttttttttctcctgtagtttttttttggtctaagtgtcagcttttgcaagcaatcgttctttgtttttttagttagattaagatggttcaaggttttattttcatttaaaaataaatcacagattatgttttacagaacttttaattagtacattataatagaaatttttatattttattatttacttaatttcacattgatctatctttacttttgtagatgttaggaaggagtgactcctaattctttctccctccttatttttctgttattgtacctaagctatgtagttcttaggacgttagtagtcttagttattagtgtcagttaagttagtcaaaactcactttccaccatacctaacaaaacaagttctagtctatagctatatatagcaatcttgtaaaggtacggaaccaactcttatatagattttgacacaatttcaaatagaaacacttttttttttctcgtttaagttgtttatacttgtttatttcgaattggtgcagtgagttttgatcaagctggagtaattctcattctcaacaaactgatattagagcgaacaggggcaatttcgagttcgtaggtgaaggttgtgatctcctactgctcgagaatcaatcctgggaacaatgaagaattaatgctaagtttgatttggagaagttcatgggatagaacaacttttgtttgtggagagtatagatgcaagctcttatggtacagaatggacttctgggcgccatagaaaatgaaagtcaagaaaaagcagagaaggagatgtttgaaccgctggaaaaggctcacagttatgtcttggatttaagtcataagagaacatatgttaatgacatacatatttagacatagaatttagcaagtaattagcagtttattagtaatttaattattattttataattagtgcattagtagaaaacaagatctattgtcagaaatagcattagtctgataattttaaattacagagattttattaaattctaggtgtgtcatgcatgttatttacaaattatcatatttttatattttatgcccgacaactatataatttgatacgatttggccattagtatcacttttatactgtttagtatcagaaaattagcgtaccaagagttatagatagtttgaatatcggggttacgcagagtaattgattaattatgacaattttaatcctagattaagagattagttaaaggtgaagaaaggggcatcatggtaatttagccataagtttcattttattccactaagtggattaatgtctagataagtcttttatggcgaatgatatttagaataaaacaagggttttagaattagataaacccaaaccaaagtctctctctctctctctct

SEQ ID NO: 384500 - DNA, 6610 bp, Cannabis indica
cttttgtctccttaattcttcccaatttttttattttttattaattaattaatgtcatattttttctaatttttttaataatattattaataatttttttaaaaaaaaaattacataatataacataaaatattcaccacgtttttattttctatttttttaaattaaaaatcttttaaaatatagaaaaaataataataaattagaaaaaaaataacgcttgcatacgtaaatctatatatctatatataaaggaaatgtatgagaaggtggtgtgttagtctaaaattgctttatttaactctatctgatctctctttaattttcacattttttttatttttttatttgataaaattactttatttgtctttatttattctctgcttaattttctcatctttattttttattttttatttagtttaaaatttctctaattttcttttttcttattttttaaattacatatataacatttgtttttaacgtataatcaagttgaagcatttatattttaggtttattaataaaaaaaaggtaaaaaaaaataatatataatatctacatatttgaaagaaaatataatatcaatgtataattttctttttcatgaatgtatttaattacaatatgtattttacttgataagggttgccttaaaaaaatttcagatcacatgatagtatatatatttcttaaatacttatatatatttgatttatagcataaatatatatgtatttgatttatgaaatttattaatatgtatttctttattttttttatgaaaatattttttagtgataagtttgaatttatatttttgatgatgtatgatttaaggactattatagctatttttagattttaaaaatgtgttaataaaaatatttaaaattcaggatataatctgcaattaatattgagatttgtgaaggacaatagtagtgactaagagatatacggtgatgacaacatgtaagatattgtgatgagtacttttaaaagaggacaaaaaatttttggccccaaagctaggtgggccctaggcacaggcatagcccatctatgcccagggtcggacataaatgaggtgataacaacgggagatacaatgataagaacaactttaaaagatcaaaatataaaaagaaaaaaaaaacaaatacattataagaaagaatgtttatataaataatgatattactttaattttttctcacaccactctatttatttatttttaaaaaatacaatttaaaactctattatacgttagtataaatttcaaactttttaagaaataaataataaaacacactaattaactttttaacatatttaataatattaattaataatctaatgaatagatttaagatatttcttcttagagctttatttttaataaataaatttattaataataatatgtaattaaataatataattttaactattatatatgagaattattattttttgtaagttttatatattatgttaataaataattatgttttattataatactaaaaaaattaaaacagccgcgcaaagaattaactagtttacaataataaaaataaaatttacaaaaagtcaactatacacgtaaaaaaaaaaaaatagacacgtataagtgtattatttgaatattgtttttagttatttaacatttttataaaatttattgaatgtcacccgaatgtcacccataatacatcatagggatataaattaaattacaatttctataaatgtcgaataaaaattttcataccaataaattaaaaaattggcctaactaaaagtacatatattttatttcttctaattttacctattcatgttaatacccattcaaaaatacatccatatatatatggaataaattattaagacaaatttcattttcatctttcttgtctacatgggattcttttactcttcctctaggaaaattattataatttttatttttgtaaagtctaactaactatagggaagctgaccagtactttactttcatgcatccaacttggtgttaaacgatgattataataattaaatcacctcttatcaaaacaaaccattactgcccacttatatgtagtttgcttcacttgcactcttttaatattgtaaaagccaaaccaacttttttttccttaccaaaaccatcctaattaatgattttaatagagaaatcaaactattccgtctttcaaatcaatcacggactagccatatgtgttatcaaacacgcattgaaaggcaggagcgttgtgtgtgtgcatatgagtatgacccatatttattccaaatccacatccaaatctaaacttttacttataagttacaagagagcaacttctttgtagtttcttgcttcaaaagggtatgtgtcaacttcacatattgatgtaccctagcaataataatatttcgttaaaaaaataataataattctccatgagagaacaaagcataaatcatctcactagatatttggctagcttagctacacacctacccaataattagagaactagattagagtcccttattcaatgtttcataacatatatatacaaaatgagattcttccctttgtttggtctttgtcgttgtctatgaaaattttggcaattgagctcactatattttataattcccaatcatccactgccaagacaaaaaatacacccaaccaaccccatttgacacatactattatctatttacttacacgtacaacaagtattccaattattatcgcgatgttaaataattatttaacattatgtaaggatattatttaaaagtaattatattaaattaataaatatgacaattaagaaggtattaaatactagtggtattttttaattttttttaaatattattaatggcaacagtaatatctaatacttaaatgagattctataattagttagcgatacatatgtattacaacaagcaatatgcatataacctaggttccatttcatcaaaaaatgagattaaaaacccctagaaagtaaaaacagaaataagaagctccacctctagtagtagcagattccccaccctaaataaatagatacatcatacataggccataagtaatgttggatcattatttgaatctagtaacaacttaaagttaattagttcatgttccatgtattaataaaatgtaaaggatgcatagtgttaccacttgttggcatagctgtaaatactcatgtacggttctgatccatattttttggactttttaaaatagtcgtgttgtgttgggcataaaaaatataggatcgtgtcgtgccataaaataatatgggttgtggcatgacatgcaataattttataaggtaggcctgacattacccacatatcccgtgctttattcgggttgatctgtttatcttaaatagaccaaaccgttataagggttcaaattcatgtttcatatttttacatttttattacaattgatgagctaaatactaaaatatatgtgtattttataattttaattacttttatatcttttttcaataataattacatacagcgatataaaaataattataattattataatttgaatattcttatcattttaattgttaaataattatttatcattgtaattattatcaaattaatgggctttttaatgtataatgtttttgagttaatttattcatgcttatgtgtcgtgtttttgggcttgttgagtcatgtggtgcctaagtccatattttggtgtcatgtcgtacctaagttcatattttttgtgtcaagtcgtgttctgcctaaacacatactttttcgtgtcagaccgtgctcgtgcctctcgagcttgtatcaacctcgtgtcgtgtcaaaaaattcggcccatatttatagcactagctattggtgcgatatggatacgtattagaaaactacaaattgaaaaaaagagagaatagttttcattgatttattaatggtacaaagtgaagagtatatattgtacaaagctaacttgagttacacctaactaatgctataaccgaataactaacttaacatacttaacagtctccctcaagatggagtgtagagatttcttacacccatcttggacagaatatcattgaatggagcaagaaaaagaagtttcgttaggatgttagtaaggttggctttcgatgagacgtgactcaacttcagggtaccatttgtgattttctctctaacaatgtgacaatcgattttaacatgttttgcttcgttcatggaaaattgggttttctgatatatggatcgcaacattgttgtcgcagaataggatcgaagggagactgatgttgatgctgagttctcggagaatggacgtgagccatgtgagttcacatgtaacatttggcaatggtgcaatactctacttcagctgaagatcgaaagacagttggttgcttctttgatttccatgaaatgagtgatttgcctaagaaaataaaatatcttgagattgattgtcttgtgtcgacgcaggctttccaatctacgtcaacaaaagcttgaatctgaagtttaggtggaggggaagcataaaaacagagtccttggcctggtgaatttttcaagtagtgaagtactcttgttgcagcaagcatgtgaggttgtcgaggattttgaaggtattggcttagtttgttcacgacaaagcttatgtcaggtcgtgttatatgtaacttgggatgtttggggcatattcttatgtggtaaaccaacatcagatttacgagtggcaacaatatcatttagttttcgattaccataaccaggtggaaaacctattaagaaatagcatttgtctttgtaatggcctggtttttggcaattggtgcaatggggacaaggccttttatttcttaaagttgtattggtagtcgagacagattgtgatggaatggtggctgtattggttgcaacagcaacaagtggaatggttctattgcctaatgttctttgtctttcttgatgtatgaccatggaaaacactttgtttagtgaagggcatggatcaagaagaagaatttggtgacgaatggcatgagaggattcatttaggccatttgagaattgaagaacttgatcacggttaagatgatcttgtgtctgaattgttgcagcacaagtacaagggattctaggccttaattggttgattccatcccacatagcagtgaactttgtaaagtaggcattgacagaatcatccccttgatgaaggtatgtcaaggtttattcaattcaaaaattcttaaaccgtttccttgattaaattgatcattcaacacggtccacatttcaaatgtagtatcaagatacatgatactactttttagcttaggagagatagagtgtaaaatctaagacataactatttgattacatctaactcaagaactaaacagaggatcattagggagaggttgagggatagtacctttaagaaatggtgttttattcggtgctctaatataaaatttgaatacacgtttccaaggttaaaaattaagacctctgagaacaggggtgaccaatgacaagtcggggtgattagatgagctcaagtaatatggagatctgatatcttcatatgaagatttgtccaccggagttgatcgagaaattggtgcagagtgatctgttcttggacgaatgtcagcggagtttgttgatggtggtagagccatgggagcatcgatcactggaggatctttagtggtggtagcagagcttgtggctcgtgtgcgcaccatgattgtgaaaaaaatactgcaaagatcgatcgatatgcagaggacgatcgagattcgaagatcttgaagcttcaatttgatttcttggagcttcgtgttttatcttttgatatcatattagaaaactacagattgaaaaaagagagaataattttcattgattgattaatggtacaaagtgaagagtatatatagtacaaagctaacttgagttacacctaactaatcctataacagagtaactaacttagcaaacttaacaatacgtgtgtaaccggtcttggtaaattgtaactacaacaataaacaacattcaaaaaaaattagagtaatagactctacaaaaataatagtattttcactatatatcttttgtttaagtaagatcgaatttactagatatattactacatgagtgaaaatagattcgaccccaagttaagataagttaagtccacactcaagattcctacaaatttaagtcccaaattattaatattatatgtcttttttttttttaaaaaaaaaaaaacaatgaaggttaaaataacaaagttaacaaacgttatgtaaaagtgaatgattttcttccatctataaaaatttattgtctattctaaaagcatgcagatataccataagtaaactaaacaataaaacattaatatcataaaaaaaaacctaaaatttagagttataatttctatccactaataaacactacaaataaataatttttattaatattaatattataaatatgctattatatataatat

SEQ ID NO: 384501 - DNA, 849 bp, Cannabis indica
caaagagatgagctgattatgaattaaaataaaaaagaatttacgaaaaagaaattaataaaaaaaaaaaaaaaaaaaacctgctgagctgatttttattgtcataaacatgactttccaaatatattctctacccattaagaaattttgttcttaaatttttaagagtacccaaaaacatcaaggtctttttaacatttgaattggtgaaatggaattaacaactaaatataacacaagagagtaataaaagacatggacatgtaacaagaacatcaagacaaatattagcatagaaatattttcattgtagcacacatagtgagatacacatgtgataataataataataataataaaactttcaagaagcatcagaacatatagagcttcaaatttattttaaaaactaataaataaccatcattccttcctataaatatttgatggagtttaacatattttttaacacataaaacacagaggtggcctagtaagttgtagttctgctccactgaaacttcttatgctccaactttatgaactcatcagcttctttgtccacattttcttcttgagcctgataaccggtgtcattaaaccgaaggcccgagaaattgcgctctgtcggcctaacatcctcataatcactcttgtactgcacatagtgataggttggaggaggaggagggctaactatgtacatctgaggttgaaattgaggttgaggttctactttgtatgtaacatattggtaatcctcattattttttgaggtattccaaccattgtgatgatgcttattatggtgatggttatggtggttggcacttgacattttctttcttt

SEQ ID NO: 384502 - DNA, 1855 bp, Cannabis indica
gagagagagagagtgcacattaaagtgtgttgagtcctcaagaaaattcattgtaagagagttttaggtgttattactaattaaccgtcaagaaaatattaccttgacttcttgtaattgttgttgaataatatcatagtggattcgttggcacaactttgctgtaaaaaaaagcagttgtagttgtgctgtgagaaaaaaatagatatagcagaactgtagaaaaatactcaactgtgtttagtaaattataaaatttaaagtgttgtaagttattacgattatattataataatgataaggggtcaaaaagagcttaattcaaattccaccataggtgcttcgacccttaagcttactcatttgtgctttgcagatgacttccttcttttttgtcatggagatgctcggtctatttttctactgctaaaaagtctcaagaggttttcaatatgttcaggtttagaggctaatacaaggaagactgccatgtactgttttggaatggataaaaatgatgtgaaacaaattgtagatgcctcaggatttatgcaaagtaagttgccatttacatacctcggtatcccaattcgctccaagcaaatctcaagtgcgaaatgtgatatccttacagaaaagatggtggttatgatttggtcttggagctctaaaaaatctttcctacgcagaacggtatatgctgataaattctattcttttgaccatttaaagttgtagggctcagataatgattcttcccaaaaaaagttctaaaaagctttgaacaaatttgtaagaactttttgtggagtggttcagctgatcctaccaagcaaaatttgatagcatggaaatacatttgtaaagacaagaagatcgatgggagggcatggcttcaaaagtctcgaacattggaaccttttagccatataggcgaacatgtctggaatattagtacaaaataatttattatagagtcttaattttttaaaaaaaaattggttgtaccaactttaacttttagttgtaccttctccataaattattcaataagctatttttaactaattaccaaaaacattttattttttttttaaaaaaatatgttatatttttaaaaaatactaaaaaatatatattttttaaaagaaaatattttttattagggtcaatgggctgggtaggccctaggcgcgagtctaattccccttagctcaagcctggccctatctaattctatattaaattaatgattaaagatgttcacaccttttttatgtccttaatttcttttgttcacacaattggtagttatattatatatctatatatatgtatattacaaatttctgtttatttatggtcaaattttaatttgggttttgtttttttattaccagaaaattttggtgttgaattgtagttcaattataaattaaagggacttttttgaaatcatcaatcttcatcaagaacatggcaaatgatgtgattattagtgctgcagtgattccagttttttagttgctctctcacgttgtccttgatttatttgaaactgcacaattagccaaaaggttatgttttagaaaaaaaaaaaaactttactacattctcaacacacttaaaaaaaaaaccatcttgaaagaattttctaaacaaaatcttgaccattcagagaacttaaataatactttggtgattttgaaccgagaattgaaagctgctaagcagctagttgaagattgcaggcatgagctttatcttttatacaattgcaggaaaattgtaaaagcgtttatgagagtactaagggctcgtttggtacgcaggattggactggattgggattgaa

SEQ ID NO: 384503 - DNA, 1010 bp, Cannabis indica
tggttttgactcttgtctttcactaggcctctattatgatagatattgtagagcttcttaagctcaagatgagcgggagagctagttgagggacctaccttatctgcaagaagaaaataaaagatgaatgccaattaattcgaggaaaattactgaaatgaaattcaaaatctacagtcataaaacctcaagtgaattaggtgaccagtctagcttaccggcattcgcacaacttcgtaatattaaatatgaaaactcgtacgtcccactctcccctataatactggctttctaatgtttggataaagtcataataatacaagacaaaccaatacaaaattaattcatttaaagatacctctcgaggttcagcaggatcaccatcagcatcagcatcagaagtgaagtagtacttcaaagattcacaagagcggagcagtcaacacaaccggaacacttcttatcactgaaaattggtgcacaaattgttgactttggtgggttatttatcataagaaccacttgattatcacattaataaagagatttcaccaacattatatatacatacatatataaaaattataccagtattacaagatcagaaagtgacttatggtttttttgaccagaagaatcgccatgagttgtgaattcatgaactacccaaagtaaagatattaaaagtaattactgatcttaaggacccataaaaaagtcacctatgctaaaagggaacaaattataaatggactttgttatagtgagatttctctcacctagaaactcgagacaagactcccatttaaaggacacgtatattcagatttccaatggaagctgaaatgtccataaggggctcctcgaaatttgatcctcgctaggatagagccagcgagatcttgcgagcacgaccaaagtcggatcgcgtaattcgcgttatgcaggaggagagaatggatccaactcgcatgtgtcgggacatatgcgagtatcctctctatacttct

SEQ ID NO: 384504 - DNA, 1175 bp, Cannabis indica
ggtctggcgaagacttgataaagccttacgtcgggaggagtaagcacttggcttcgggagagacttgctaaagccttacttcggaggagtaagcactcacacttcaaagacgaagggagttcgggcttgaaggtgtttcaagaagtcagattcataaagtggattacaaaggattgcggcaatactttagagggagtctaaacttgtttaagtcaattgtctttgtaattttgatactttattaattgatttcattctctgggcgtggccccgtggactaggagtgttcgggagaacactgataccacgtataaatctcttgtgtcaagttatttatttttctgcaaatattttatattctgcctgtttcgttttgctgtagcagaattactttctgctgctgcaaacgcttacagtttttatattttcttatatacaactgacatttgcaaaaacacggtttttcaaatataaaaaccatctatctgactgaatgatacaaagaaattcaaagaattaaaaataatcagaatattagaataagaggttgaacaaactttctgatgaatcatactcagcaaatttctaggtagtttctcatgagaatcgtacaaaaattataaacctcataacaaacacgaaagtattataatactcatctagattcattattaatgtcttacaagctggtttgaaacgtaatattaggtcgtattatattgtattatattataatgaattggattatatattatatttttatataatactatgttaaattttaatttatactaaaatattatatatttaggtatccataaaagttaatactacatatagtttacataaaaatattgcataaaaataattcaatacaatacaatacaatacgacctaatacggtgttccaaacgagccctaattgttttgagcaaagagtgtagatactttttcgctaagaaatccagttagataattctttttttggtgggttcctttttttcagttcttcatgcatgccctttctaggtgaattctttctatttatgtgttacgttcttgtgcatatgtatgagtgaccttgttgggttttatgccctaaaaaaaactcatttcaatataatcagatttgcttattaatatagattagaaataacatttaatgttgcatggtt

SEQ ID NO: 384505 - DNA, 3167 bp, Cannabis indica
ataaattgattgattgagtaatgtaattaaacaataaggtaaagtgaacactagattttaaagagcttcgaccccgtaagtgtggtaatagcctactccccttgtgttgtattaacttaagagaaggaacaaattgttcttcctcttgaaagctcttacaattgatctctgagtaactctcttagatcactattttctctctagagtatatatctgtagcaattctctcgatccctttcatagtgaggctaggtcactatttatagagacttaatgcctgagggatggtttcccttttgctaataatgcaaaaaataagaaaatacaatgattctataattacaatatatgaaataggaaactaggacaggtttccattttcctttgactcaatcccaggattatagggattgtcttcgagtctagacacaacgagattagtctttgaagtcgccatctcttgtatgacattcgacataaacatgttcgtacctagtcggacatcgtctccacaatcctgctcagatacctaactatcacagatgctggttagtcatttatagactgctagggatatcttcctccgcccagatatcagaaatatgggacacgtgtcatctgattctattgccacatcaaggtacaaaaaatatgatagcaaccattgtttagctttcataacattacagtctcccaaaaaggctagaggcgcttgcttacgaaaccgctcatacaagggctccatgcggttaccagcaacaggttattctgctgacaatataggagcaagagcagctgacacttgctgaggaggcatagcatgaggatcctaatgccttagcctctaaattttttcatcttgttgattaattcgggcttatatttcttcaaacctttactcccaatcctgatgaggctgtggtggattttcataaccacctctttgaaatgtaccacggcctttgccgcgtctatgaggatgtggaggattttgaacttcccgccgcttccagtcttaaccatatttccctaacttctcattttcatcaagcatccatattataggacttagcatgcgaacccataagtcaggtaggtcagacatcgatcacatacaatccaattactgcatacatggaattttaggcaatgcaatactcagctaacatattgctaacatgcttcctatcatgcttttctaatcaaataaattattaaaaaagtaaagacttactgaacaatgagttgaccttgtctctgacgatgagtgtacatatcttgacggtcttcggtaaacaacatggtagttctaataccgaatcgtaatgccctacttacttaggcctactacagtgattttctaattaatgtgcatgcctttgctaatcaaagggtttctttgaaaattgtgccaaatttaaacttttaattaaactttaaacttttataaatatatagctttacacaaaagccaggatctcattttaagatttaaagcattatgcaaaatacattttacaaaagtgtcgctcctcgactacaaaataaagacccgtgttatcccgagaccaaatacttcaggtctaaccatcctgatatgtacaatcatcctcaagctctagactcactgatgctcagcttttgcctttcccttacctacacatgtaaacatatcaatgagttgatgactcaaaaagaaaagcataaaacacataacatatcactgacttgtatttaggtgcctatacacctttctataagacttaacaaataatcaagaacattcttaatgcaactaagacctttgtaccacatgctttaagtacgcgtcccgtactagtgtcggtagggctgaatcgcacttggagtataattgagtgttgtaccacatgaactttgtactcatcctatactagcattgctaacgctgtgtcatacccattaacattatatagtgtaccaatgcactccatacaacaaccgtactagtgttggtagtatataaatcacataatacagcatgaatataacatacttacacatatacatatacacattttatactaatcttacatcgtttacagattcaagtgtgtcggtcaacctgaatggaaatgtcacttgctgaatagagaccctaggtcacatttacgtaaaatgggtaaaaaacttgctaaaaccttttcagggacttaaactcaaaattagaagttttcttatcaataaatagtgtggtaataccctaaatatcgagaaaacataaaaattaaggctcccaaaactacccaaactggtaaactggatccccaaaatggtaaaccattttctaggatcctccggggaaagcagttcactgtttctagaaaaatggtggatcatttttctgtatgaatctcaaagagcttcaaatctctctcaattctgccccaaacttcacagcaagctccagaatacctaattacacctcaatagacataaatcaatcaataacaacatccaaaactcacagatttgaaaattaccattgttgagccaagtttgagttcatgaacttaaaatttctcagcaactcaaatagatctcaaaatcacaccaaacaagcttcaaataactcaaatgtaactcaaaaaacaacccaagaacaaataggattcatacagaacctaattccaaaacttgcatgctagaaccaaagaaaaactaccaaaactcaaagagaaatgtactagggctttaccttaggttttctcttccaaaactccttgaattcaagttgaattctatgagaaatcagtgaagaaaaacttggttcttgctggttcttttagaactgaaaaagtgagtgagagagagagagatagagagagagcttgaaggataaatgtgtttattttctattttaagaaaaatgaataaatcttaacattatcttatttccttaattacaatattttagctagaaaatgctaaggttcactactaaacccactaaaagacaaagctacaacttaggtaaaatcaccatttaccgattactttgttgggctttgtgtcctaaataaaactttatttcaatgtaatctttgccattcaattatcaataaagaaatagaattcattacttatttagtatgtcattttgttcatgtgatcatttatatgtttat

SEQ ID NO: 384506 - DNA, 1090 bp, Cannabis indica
aataataaaatattaaaattagtataatgataaatataaaaacataacatttattgtgatacaaattttgcatcatattatgttctgatttaaatttgaatcactttttgttatgtgacatatttacatcataatttaacacaccattggagtagagttttaataaagtgagctatattttgcatttacatcactcatttgcatctccattagagatgctctaaggccaggattgaatagctactagtgggaggacgaaccttcgagacacccttcgtcttctccagcgatcatgccctcctcacaagtatcttcttcctcttctttgaatagcagcggtcatcatgaccacttctaatctttacaattccccaaacacatcttccacccaatgtcgtggtggcgccacctttatggtgattaacactcaacgacctacactcaaggcactgaggtcagatttaccttgctaatgaagacatttggggcaagcgtggagcgacatttatgagcaatttacaggtttgatcttgctccagggtgaatctaaccatgatttctctttatatttaaatttaagagtcctttcaatctctaaattagatttttcctttaattgttctgtctaccaacctgatctgtggatagatttggataatctcccgcctaaaaaggccattcaatgatatagttcctactatcttgggtactcgagtgtacctaggagaatcgcaaccccctgtattcctagtatagcaaccttcttagtttttgcccattaagaactaagatccaggttaaccctcttaccttatttgtttagacttatctatcttacatttcagtgcttactttacctaaaatggaagacttaacccgttctttttctacagccctgaatcttactgatacagagaacattgtacattccctcgttgacagtgttggtattcaagaaggacttccaccagccccacccttattccatcttatggccactttgtacaccacaaaaagctttaattacaatgttttgaagaatttccttaaaaaatactagaaaggaaggtttccagttagtgttaaggaa

SEQ ID NO: 384507 - DNA, 1152 bp, Cannabis indica
gaaagagagaaagtactcacaagaaggaacagatgccttctcaatgatctcctcaagagtatcataaaccaatttgctatccacaaggaacttcagatacccttcaatagtaggttcccacttagccacgggtcgctcctgaggctctttaacttccttttcaccttccttagcttggtccttagtatgcaacttcatggccacaaatctcatctcctccacaaacccttttgcctcacctgggtaccgcttctttggcttctcagccgtagtagccgaaacgacgacgttggcggtcttcatgggcaatcctgtaatcccacgaggattttgaaaccgtacaaaaccagacttggctaagaagtcggaccccaaattgggactgggaagaaacaggggagggagttttctgagacgggtattgttgaaaagggtctgggattgagaaattggaatgaaggaagccatagccaacaaggtagagtttaatagagtgaattttgtgctgttaagagaaagagtgtacgaaacccctcttgaaaattatagaataatgccccaaacagagcgttgaaactccgaagagagatagagacaagtagagaggaagagagagatgggtttggcttaaaatggcggttcacttactcttaaagacaaaggtagggcaaataaaagtaatataaaaagacaagagggatttttagagcaaggagatactgtaatggcggattgaatggcaagagaggtggctcgtgttatgggtctctgtgttttgtgtctatcggtaagaatcctctctccctggaatttggatggatattccaataaataaatgaaataaagaatattagcactactgtcctttttttcaagtataatataaagaatattagcacttttttaaaatggatatattgatacatttttatttgttttagcacttgaaataatttttaaatcaaattttttcttattgttatgtacgataattatttaagacatcatgcaaaattttaagaaatttgaaaaagtttaacacgccgaaaattacgttcaaacagtgtattgcacgcgtgactattttattttatacaagtgtaaaatagactgtttgaacattattttttatattgtaaattattcagaatt

SEQ ID NO: 384508 - DNA, 1799 bp, Cannabis indica
ttgaatttaaggacttttgtctttatctcatcttattatttattgtactggagcaaagatgctcttacaatactccatcatattaaatgtatgtcatatatttgggagtagtgcgttttttctaataaacttttcgcttgtttaattttcaattttaaaaaaaaggagaataattcgtgtaactattattatatatggagaaaaaataaaattaattaattacagctgaacaacttggcaccatatatattcgtacaccaccggagcttttgatgacagtgtacagagtctgcatatagttagctaggtaggttattatatgttattacctgtatatttatttatttatttttatacgttaaaaacgataaaatctatatataaaatataagtcaattaatgatactaatttgttatcctcaccaatatagaaaccatatattttacacacaaaaaaagcatttattcttctgttttggcttttttaatttgacgtttcccgaaacgaagacctaattggaataatcagctgtatgtatattaatatttggtattttcataaaagtgacaagttttttaccaattattatacttgaatattctgtacagttctctgaattaatatttaatacacagtttatcaataatatatattattataattgtatatatatatatattactataaattagaataaaagagaaacaaatttagattgttgggattgtcttttttattttataaaaaatagatcaaattgaagcacgtacgtagatggcgcaataagtaatcaaatctatgcatgttcatgtgtagatttatacatataaatccacacatatatataatattagtatggaaatatgagatgtaagactgcatgtgaaaaaaaatatgtatatattttaattagttacgatatatatttataataaagaataatatttataaatataataattagttttggtataataattatattaaattgcatatacacgtaagatagaggtcaatagtttaaatttcattttgaatactttttatttttttaaaatttatttttgtccttactgagttacgaataaaagttacgccctactcactttaaatttttagtcagccactaaatatagattgacctttaatatttaatcataccacatttgaaaatataaattgagtttttttattatcaatttaacgtaattagagaaaaatatattgaaaacttaaatctatacatttgaatgtgagaagatatatgagagtttcatgtttaaatcaatttaacctttaatatttctatgttttgatgttttgataataatttttgtttggcagataatattagtaagttttgtgtttatttttataagtacacatggtggtagtagaagtttgatgtttcggtaattagcttttgagtaatggaagagctatagctatagcttgggtacttatttatttcttaatttatttattaagtggagcatagtggtattagagtatctttaatgagaatgtttttttggacatcttgtaatagatgcttactattgaagtaaattagaataatgctaaaaaaatagcatccttgatatcctttcttttatttatttatttatttattattttttttgtaattgggaattttatttattattattattttgtgattaaaagtaaaaaaaaaaaattaaatacattatattattttaataattttataagtatgtacttaattactagggattttttaattttactacttctaaaacagttttttttttttttg

SEQ ID NO: 384509 - DNA, 783 bp, Cannabis indica
aaaaagaggaaactttattccaaaaactaaacaaaacacacaaaggcacaaggcccacaagtctcggcaacagccagcaaaaactgctacaacaaacaacacaactctaccagctcttgattacatttagataatacatatgtttcctacaatcaacaaaaggacctttgtttaacaaccttagctgaaccactttctgaacctccatgctcacctttcttggtgctacacaacacagatcatacacacaaccatttctgttcatccaaaccgagtataatgtggctgcaacaacagtgttcaccactctccattgcgactgctggttcaagtttctgcaccagttcagtaactcagcagtcgagctaggccaagtaaagctacccaaccactcgaagataagagaaacaacctgtttagtaaagatacacttgaagaaaaggtggtcatgagtctcaatttctgcctcacacacagggtagagcacacaaggaatggttaagattcgattgaggtaatctcgggtgagtaattgagagttcaaaatctgccaatacacaaacctatgcttcaggagaatgagcttatcccaacttgctttagcataatcagccttctccgcttcagtagaaacattataaaacagtttagctctgaatttacctcctttagcagctagactcagtctcgtttcatccacattgtctcttatattcagaatcttcttgaaataccaactatcatcagtcttcttagggtagttcctgttagaaattattttac

SEQ ID NO: 384510 - DNA, 2237 bp, Cannabis indica
aggagtcctctgtgttggattttgtggtcagagtgtggaagaagccggttgctgtggtggcagtgttggaagttccgaaatcatccaacgtcttcaggtttagctttgacaagggcgaggacaaggactgggcattggttaatggcccatggtgcttccgtgggtacactcttcttctccaagagtggactccgactattacaggtccggtggtgtttaagctcctccgtgtttggatccaacttcataatcttccccaagaatatttttcaaatgcgaacggaaacttgttgggaggtttagtaggaaaggtggtaaaggttgagcttgaggaggacaaaccagcagtgtggggaaatttcttgagagtgcaagtggatatcgatttcagcaagcctctttttgctggatgtttctttgagttggcatcaggatctaagaaatgggttcaagtcaagtttgaaaaaatggaattttctgttacttttgtggttgtttaggtcatcaaagaaagggatgcaagttaacttctccggtaatggttaccaatcatgagggaaaacaatctccgatgtacggcccttggctttctatctcctcctcgtatctggatgttttctcgggacctaattcgactgctactcgtggtttgatctcggaggcactggggaagaatgttgattattgtcctctgctaccggcgccagcggctgagggagtggaagatctgaagggtaaagaaatttctctcaggcgtcgtccgaggcgaccggcgatggggacaactcgggctgttggcaaccccgagaagcctgcgcgcatggagtggcatcccaagatcagtacgaatagctctgtgagagttgtttctacttcgggtgtgggaggtgtctcagaacgtctgggcaaggaaaaggcatctggttgtatgcctattttgatgaatgaagagagagaccggtcaattataaggtcaaaggcggttattaataagaattcaaatgttattaacgttggaaataaggaattggatattgggcctatttctgctgggccggatgtggaattaaaaagtgggccttttggaattgctgacgtggcggtttctgttgttaatgatatggaaaaagggagtgggccgctagctatgagtgggccggggttaattggtcaagactctcccaattttaggctgtcttctcttagaaaagatatatctgggccggctcaccttattatttctgggcctgaggaagtaatgggcatggctaggctaactcaaggtggtgaccgtgggaacacaagaggaaataattcctctctttgtgggcaggaccttaatggtaggcaaggggtcgggctacttgggcgacccaccaacttgcttccttctactccccccgaggatgcttgtgtagcaaaaatacattctgacgaggacttggctctatctcaattttttcaaggccaagaaaatttacttcatgatttgaaacactttgggaagttggacttgtatgaaatccgtaagattggaggagacattggtgtcccgacttcctcggacgtgaatgagaggaccacgccgttcaaaaaaagaaaatttgaagcttctgcctctctctgttctaggccgcacaaacttcaccgaagatatcctggcgtcatccgtgacttcccttgggacactaatcataatgataatgaacccaatatggtgtcggaggagccttctgagaattcttctacctctccgagccggtccggaattatgaagaatccgctgataggttcctttgttattgaagattctggttccagtgtgtctgcgtactctcgaaaccctgtggaggagaatgtcgaatctcctccacaggagccatgagaggcattgcttggaactgcagagggttggggcagacctctacagttctggaactgaagtccctgatagcagcgcggtctccggagtttgttttcctgtctgagttaaaagtggaccccaagcctctggtacgtactctaaagtccctccatttttactttaatatttgtatggcgcctactggttctgctggcggtattattttggcttggaagtcaggttttaattttgaatgtatatcctgctcgagcaatcatatctctggattagtgtattcggaccctcctacccacccgtggttactctcttgtgtttatggccccccttatttgcatgctaagaaaaatttttg

SEQ ID NO: 384511 - DNA, 741 bp, Cannabis indica
ctaagagaagaagaaactgccttagtgataccattaatcaatatgatagggtagaggaatttttccatgaagacaattagtcaaccgtagacctttggaggcgtcatgatgccaaatacgagaaagccaaaggagaaaatacaagacctcgagggaatgatctgaggaaccatctaaatgacaaggttcgtgaacacgaccttccaaatagtgacactaaaagactggaagatcaaattgctgcccttaccaagttagtccgaaagcaatgtggggccctcccaaattaggaagaaaaaaatttgaagttatgcgttagacaaatcattaaagtcccactacatgaaaacttcaaaatgcaacaaaagttgtatgatgggcaaacggattctaggacccacctgtccaaatacaactagatggtgcaagtggtaagagtaagtgatgacactaaatgcctttgtatttcactaacactaaccaagtatgcggaatactggtgaaagaagttgttttctgtatcaattcacaattggaaggacttacaatctaccttccacaaacaatttatcgctgctaaacactatgatatggaagtcgggtccctcacctacctcaaataacagccaggtgaaaggctaaagaacttcatccagaatgatggaaaaagaaataattgggtaaatactattttggaccctatgttttgcaaaagttactgattggaccctgtgttttgtt

SEQ ID NO: 384512 - DNA, 1156 bp, Cannabis indica
tgagtaatcgttattttaacatttagtccctcttacaatcatgaataatgactctcataagcttattaaagatttgaagtaagtgatgtggtagaaaatcgatgtgatgtttacaataaagagtttttttatctttacactctaaacagcaacccatatttcaattaatggagcaacctaaaccgcaactaaaattcagataacaactcatatagaaatcaccggaacaacccaaaccataaatttaaaaaaaaataaaaaatagtatatgagataattctcctaaaagaaccacacacctttgtatgaaacttacacatgagttggattagctgggtgtagagcatcttagtgacccaacctagtaactgcagtttggaaactgtgagccatttatatttctttattatataatccaattctactttctacaagaatataagaattgcgttgagtggggtttattgagttattttattttgatatttttgtatacaaaataataaaatttaattttgaaaagattaaattttaaaaaatattaaattattgataacattactagtatttgtataaatcagcatattatttgataaaaatctattaaaattaaaataattatttatatattatataaattaaaaatataaatataattaacatacattatgggcatgttgggttggattgggccaacaactctcaaccattagccaaccaatataaattcggtttgaacaattattagccttgcagtctaataacccactaacatagtaatccaatatggtcaaactcggtcagggttatctgggtttaatgggttacattaccttttgtgcacccctaattgccataataacccatcagcaaaaaatgacattttcttcctctctaagtatttaccaattaaccagatgtatataaatttttataaatcgctcaatccaaacaatccgtccaaatcaaataatccgacgaaaaatataaatcgaaaaattcgataaaaatataatctgctcaatttttatattaggcggattgaaaataatatcaacccgtccaatcagggacggacccaattgtattaatgtgggggctagccccactaacaaaaatattgtcttttaaaaaattaaatgtaattttttaaatt

SEQ ID NO: 384513 - DNA, 3217 bp, Cannabis indica
tagcccacttgtcctaggttgagcctaaggatttctctcgttattatgagggatttcctgttccctagttcggggctgccttgtgtcttcattcctacgagaaggctctggtacatcattacattcattcccctaattcataaatccttaggatctttgaggaacttctcgacgttgttcttggttattttgatgctcatccattggaacatccttagtacccccaggttgctcatcctagatgttttggggattgccttaattttctttctgcctcctggttcttgaaccccgaaatcagcctcatggccttcttaccccaggacgaggttgattctgtgtattggttccttgagttgcctttgccgcagtagcctctctttccaacttaacgttttgtcggttgatctagttaagcgttgtcgaagttgttgattttccaattccactaatggtacatacctagttggatcataagcatcctcacttctaggtacatgcactgtagaagtataggtttcttcgttccttccttctcggttttgattatcaccacttaagtttcttcttgaacgtattgttccagaagtatggggtctttgagaacccattggttctttcccagggcgatgggtagtttcctcaagatgacttccatcgttctaattgtgatcagccatggatagatttttgtttgtaaggagggatttttttgtgttttatcatgtagtctctcaatgaaagtaccaaactattagtgcatattttcgttaaccaattataagcctttttgtaataaattttaatagagaattaataagaaataaataatgtataagtaacaccagatatttttacatggttttgcagttaaatctggatactccacgagtctatctcatttaagatattttctaaatacaagatacaatatacaattgatcgtatttattcttctctctcgaatcatctgtctctttttctgtgggatctgcccctatgtatagacatatatgtttggaagttatttacattaaattcaaattatattcgttaataaaacgtaattaactctcacgtttcatttaaataacatgttagataacactagataactgcttaactccttcttattctttatcctttcgatggtcaatatcgatttggacaatgacatttcgcttgactcttagataattaatcctgatttggataataatatcttatatatttccaagttgttatccttatctattatgatgtggaaaaaatactaagtgtttgtagtagattcgcctcgtcaagtttttttttttaaaatagcaaggtggttgtctcgctatttgtgacctgggattactttgtataactgtattgtactcctttgaataaacgaattatcttcttgggcatgtgtactttgaggcatgtgtgtgtctcgttgacataggttctaatagtctcttatccttatctcgcttaaaactatgtagtccgcaagttatgaataagtttcactgatcctttattaatgagtcattgtttttctttgcattaaatgatataattttattatatcaggtggttcatattccattgtatgacatgtgttaccctcttcaatgtagctaaattttgagtataacaatactacagtgaagaggttctttagtaaaaaatgcagcatgaatcaatgaaatgagcagttaaaatggcagtatgcacacatgaaaaatacctataaaaattgcataaatttattccccatcccttaaaaatcatagagttgagacaaacatgaagacaaaacagttataatcaattttaactaacgagttccaaacaattcaaataaaaggtacccacatttgtataattcataagtcaaaagagatatttgttaaaagcttgagagtgcattgtaatttgtagagctagttatgtgtagagatgacaatcttattataatgcagagagctcaaaatttagaacaaataataacaccctcttttttaaaatgctaaacaataagaaaaactttagaattctccatgctaactattttttatctcttctaatttttaaagaataaattttttattcatccaaggaatatgataaatagaacgttagaattcaaagaattatgatacaaatcaactcttccatttagactaaacaaaatctagctacaagcatttctctaaaataattcaaagaaccattattatgtaaacaaactcttccaatcccagatgtcatcaattgccaagaaaaaaaatcttttgcacaacatattagaaaaatactcttttagcatctgtgatacatccacattttacatagaaatccgagaaagaactgttcataactacatatccctcaagcctaagtttagtgacccacccataaatatcgagaacaatggacaaagcttttaagtgttgggaaacagagaaaatcttgaacaaaactactaaccgctaacaaattgaaagataatgaacgaaagagagagatgaaggagattagaaaaaaatgaccacatctgatacagatttatgaaatttagagatacattcaattgaccaatttaattttgcatacacacacatatgtacatagagagagatacttggttaagtagaagaaggaagaagaggaagtgaacaatggctagggcttcatccaacgatgcagagagagtgtttcaaagtaagggctgagtttccaagcaaataaaagaacgttttgaagatgttgatattccctctgtgtaaaggcaaggtatccccctataaaatgaaaatcccaaccaaataaataaaaataaaaatacatatcaatcacaagttagacttagtattcccattcctcagtaaggaaacacgtacaccaaaaaaccccttagagtaaattatggctaaactccctaaagtttcgcattatttgcatctaaccccgtaaacaaatttattgacggcaaaacccactcaaactcgtgttccgttaccaattgaccatttgcatctaattttttatattaagtgccatgttgcattgtccatataaactagcatattgtacacatggacatacatgtaacataattttattttttcacgtaattaattattgaaaaataaaatagattttaaaattaattaattcaaagatagaaataaatctaaaaagaattaaaaactaaaaaaaaaat

SEQ ID NO: 384514 - DNA, 2843 bp, Cannabis indica
tttggttgctggtgtggactggttttggggacttaggtgtactctggtgtgaggagaattgttgacttcgagtggcaaaatggagtaagatgaagtggattgaggagaattattttgattgctggcagatgtggattttatagccgactgtgaaggagatggctgggaaattggagaacaaggaggtgtatcaacttcaagagagccttcatcatgtacctgtgaaacaaagggtaaccattgactgtattgaatttgactaggacaggtatttatgtcagaacttttgaaatgatcaacacgaaaacctgaagcaaaaggaaaatcatgttcgttaaatgtgacactttgaacaatatagactcggcgagatgggtgcagacatttgtatcctttatgattgggactatatcccaaaaatacacatttgatggacctaaaggcaagtttgtgttgattgtaggctcgaagatgtgggaagcatgcacacccaaacaccttgagaaagtgaagattgggctgaactttgaagagaacttcagttggtgatttgtgattcaaggtgggtgtggataaatggttaatcagaaaggctgttgtattgaaggattcccaccagtaattaagtggaatggaggcttgtgtgagtaaagttagacccatttcgactatgtgtcgatgttttctttcagattttctattttgaggatgtgtgtgtggacaagggtgtctaaaatggatgcctaaagaagtcaaaaatgggactaggcttctgtattctccaccccaatccgagtggagagcttttatttttgactcaaatttttggaaactaataaaggtatctttgacatcaacctttagtttgagagggtatatccaagtgaaattgctgaattcgtcaacaaagtggacatagtacctataaccatcttttgacagtataggtgagggaccccatacatcggagtgaatgatttcgaggggttgcttggctgttttgagtgatgattggtagtgtttgtgttttgactttccaatatgacaagcatcacaaaaatttggctggtttttaaaagaaactttttcattagttaatatatgtttcattacatttaggcttggatgaccaagcctcatatgccagagattaatatcactggtattaaccgattgaacagacatggactgagcaaggtgatcattctcacttgcttgactcttacaatgagactttgggtcaagactcttcttggaatttaaagactcagaaacaagacatagactcgattttgaactggaacatgacttcgattcttgaagttgatacaacccattgttaagcattccccgagctagctccttcctcgtagccagatccttaataatacagcagtcagaataaaactcaacaaaaacactattatcttttgttagttgagagatagaaaggagatttttggttattttgggcacacaaaacatattattaagcagtaagcaaatttcatttatattcaagatgctatttcctattttggtaacaggaagggattggccattggcaattaacaactgagttgtacctttgttttcggatttgtgctgcaggttgtggctgtcagaggtgatgtggtttgttgctccactgtctatgtaccaggaattatcttggtgaatgtcagtggaggaagcagagtagtaggcttgctgtccttgactaggaggttgctgtcctgatgaaggattagagttggactggtttgatcccgaagcaggtgcctgaaagttgatgtcaaaacgatgaaagcatttggaaacaacatgaccaactctattgcaaagttgacagacgggacgatttcctcttcctcctcctctgccacggccacgacctcgtggagaaaaacctcttccatgagtgttgaatccaggagggccattgttggtgttgacagatcttcgaaattgtgcagcaagattagcactgggaatgtttaagtcaccaggagctggagcgtttagttgttccaggcgcatttcctgactttgcaaaagaaattgcacttcctgcagtgttatagggtcagaacgagaagttagggtgataacaacagggtcataatcatgccctaaacgtccaaggatgtagagaatcagttcttcatccgatataagttgtcctgcagctgaaaggttttcagcaagatttgtcattttcatcatataatcatgtatagataaacttcctttcttcaaagactgaagttgaacgtatttgtagggttctagccttagactgagtggtaaatagcagctccaaagagtgccagacttcaaaagaagtggtacatctaaccacatgaccaaacatggtctcagaaatagagttgagaagccaactcatgatggcttgatctgtcctgcgccatagagcatagccgacgttgagttgccgagtttctcctggtgtagtgcctccgatagtgttgtcaacgaattgtggtggacacacttttgttccgagaacaaaaccttcaaggtcatgagcacgcaaggcaggtaaaacttgagatttccagaaagtataatttcctatgtcaagtttcagagtaagaggagcaagactttgcaagatagaaactgggttagagacgccagtgggttgtactgatggaacaggagcagggggagaagcagagccttctgtggtggcgctggaatcgactggagcggccatggatcgacttgctctgataccaagttaaaaaggaaagaaaaatatggactgaaaaatatttgctctcctcttttactgatattattacttgcttaattgattg

SEQ ID NO: 384515 - DNA, 1830 bp, Cannabis indica
ttaaaaaagtgttattaaacgcacccatagaattcaacttgcacttgtattggggattattagaatgtttgagctctctctagattttggcaacgtatggacattcacaaaaaatcaaatcttttacatgcgaggccataagactatttattggcaacaagagtttgaactttttgtaattttagcaacgtatggatattaacaaaaaaaaaaaatcatacaatttttacatgtgagaccatagtcctcgttaaacctaatttttcgtaaaaataaaataaaatggctatcccccacgagagtccacaagcctcgagtaacttgaaaatactcaagtaaacaaataagactttgaccaagactcgaaaagaccaacgaggttagaacctgaacgatagattacaaggtaccttgagtaccccatgacacaccaagaatgccatgcaagcattaaccattccttggtgtcagtgcttgcatcctagggttttagacctaaggttgacatcttcatgtgttaacttaaaaacttaccctagtgacgtggacatcaatgtttgacacatgacaagaaagaaaataactcggacttgagtagtctagagtcatagcagtcgacttgggaaaggtccctagccctgcacccaggttgactttgggaactccagaatgggtgtttatattccgccaagttgtttctaactcactatcttttaatgttctataccataaagacatggagcattcaagtctatggcttgggagctaaaaatacatgaaacaacaccataaaaatgaaccaaaatatctaggatttcacccagcgcctaggttgacaatctaactagggtttcagttttcagtgtcgtcttagtgtaaatgggtcaaacattatactggggacatgaactagacatgtcatgaacatatttgaagtatcaaaatcagattcgaagaactttcatatttgagtattcggagcactaggtgccccaagtacccagcgcccaggtttacatattgtcaacctaggccactttcaagcatcaaactaaaaatccatcttaggaattttcttcatcttcctcaaaaacggggaaacaattactttcggggaagaaacagactaatttagaggccaaaataaggaaccagtgcccaggtcacctagtgtttgcccagcgcctaggttgacattttgtcaacctgggccaattccgaggagtatttttcaaaaattcttccgggcatattctctgcttttgtcaaagattaagattcaagtattttcggagagcaaatggaactgtctaagggcctaaaagtggatctagcgcccaggttgacacctgtcactgggcccagtgcctaagttgacaatgttgtaaatacgagtcgggtttttcgatatgacatgaaatcggaacgagcctgaaagccacaaacatgataaggcacaaaaaaatacaagcttaggcatgacacgacacgaaaaatatgtctttaagcatgacactacacgagaagcacgaaacacaacacgtaagcacaaatagactaatacagaaagcacgatacacgacatggccgaaaagcatgacacgatatattaaaattttttacaatgtattattaattctaataataagatatgaattttttaattataaatacgttaaaataataatataatttaaatataatatcgaatattataattcgataattaaaactattaaaacatgaaaaactaagattatatactaatttatttatagggcgtgatataaaaattgagtatttataagtaaatattcaaattctaatgat

SEQ ID NO: 384516 - DNA, 1234 bp, Cannabis indica
atttaagtaataattacataaggctacttagtttttagtaaaaaatttatattttacgtttaaagtatttttttttatatatttttactgttttccatagaaacaacaagaaaactatataaaagtaacatcaaaataacatttaaataacatcaaaacaacaataaaaaaaataacatacatataacaaaaataaataataaattaacaagagtacaatataaaaagatcgtattttctgtaaataaaatcaaaaaaatcgtaaaaatatttaaaattccgtaaaattgtatttttgtaaattttttttatgtttttgtatatttctgaataatcccaatattttaactgtaccagtttgatcaagaggaaataacgccatttctgtccaaacattcctaaacaacaaaacattttatgaaaataattttcaaagcgtatatattatgaaggaaaaaattgaatatattctattcaattataaaattaaattagaaaaaaagtatatcaaataaaaaaaaagttgaaaaagtattatgtaaaaaagtaatgaataacatacaagattagattgaaaatatagtgtgaatattagtttatgcaatatgaatgtgttttattactactttaatgtgtctaactactactctaatgtgtcttacacaaagtttctataaataataataaattattatattaataacgactgtagacaaatataaccctatcaaaaaattatattttaaataaaaaaatacaagccggatactacaagtataaatttaattttttaattgtaggtgggtccaaattatgtgacacatgttgaagaaagtacaaataatagaataacttttcagaatatttaacaataaaccccaataaatatatgtttactaatagagcgcaactcaatctgctaccgtacaaagcggattggaatccgacacctaggaaaatttacaaaaatatttgaattttggaaaacttttataaaaatattatcacacagaaaagttttcaaaaataatgtgtttttatataacagtagtaaaacacaaaacagaacaactcaaaacaacagtagaacaactaaaaaacatcagtagaacaccagtgaaaatttaacacagtatactgtgttagacatttatttgtatagactaaaacatacatgattatgaataaagtgcggaattaataaatcatatatgcactataatttaaggatcga

SEQ ID NO: 384517 - DNA, 1477 bp, Cannabis indica
acaaaaaaataaaaacaaaaatcagtttaattaaataaaatttgtatattttgtcaaaaaagaaaattgtatatgtgcaatgataaccgtgttgaacgggaaaaatgtgcattgttttttgtgtaaaatattttttattatgatgacaaaatcatatgaacatatcaaccaaattttgactacttgaaaatattgcatcatacaacaccgtattctttgcctacagtctaagcaccatatgatataatagtcaaacgaacatttttggtctattgtccattcaattatttattttaagttttttttaaaaaaataaaaaaaaatatgttgaagaaagtttaaggttccataaccttattaattaagaagaatattgtgtcaatatgttatagtaatagtattatgaaatagagagtaattttaaataataatatgaataacaatacatcactatgtgataaagtgcttttggaaaataattttaaaataataataataagatagcaccaccgacaaagttccaaatccaaagaggcaaacacataatgtgaaggaatgatggctatttgatatgaatagattccaaatattgacattcctagtttagtgcattctatttcatttttttttttcaaaccagaaatctatattaccactgaaaaaacatttacaagtctaaagcacccaacaagggcctcttataattacatattttcaaaccaagctaaatctatttgtaatacttttttaggaattaccccttaaattctagtctttacatcaaactgactttttttacaattgaatctgtagtataaagtttcaagttccataaaaccatacctggtagtataaacttgtcttggaaacctacttcatttctcctttggtaatttcttcaataaagtatcaattgaattaaccgtggttaccacccatcttttaactttcttcaagcaacaaactcaagtgacacttaaaaattatatgctttcaattttctatacttactacacattatttggaacaatatttttagtctcaatctgtccaaagttgcaagtcagaacacaaacttgtgcttcgatatggaaagtcgattccaaatttctccttgctaatgaatttaatgaatgaatttttgtcatgtattttagtttttattaatcgttctgtgaattttgtaacaaatggtattgttaacgattctaagtcagctaagttggcacctcacggttagagttggttaagattgttagagtagtagacagttagagtgtgttaactcgcaaactttcccttgtgacgtgaacatcaatgttctacacgtggaaggaaggatgacgtcacggagtgttagaatatgctttaccaggacctagatttactaacaagtatatatttaacatcataaatatgaacatctaaaacgatataaaataaacacataaaaggcatgagaaaccttacattggtt

SEQ ID NO: 384518 - DNA, 748 bp, Cannabis indica
gtgatttaaaaaattcaatacttaagttatgattcgtgagcttttttattttatttgtttttctttctttcaattaccttaatatatgtttttctgttacgtaaataataatattaacatttcttgacaaaataaataaataaaaaataaataataatattaacgtggtcgtacaataccccatacgcaactcctgtattacttgttcagcaagttatatctattgtagtccaaagttattgggttgtgattttttcgtttaatattaatacttatattattataaagatagttaaattatacactaatgacataccaagaccaagagtataaaaatattcttgtatataccaaaaatatacatcaggtgtgtactatttcttataatctgctgtcattatagaaatttcttaaaaacaattataaataataataataataataataataataataaatgaataataataatatgagatttttaggtggggtttggtttgagttcaaaacggagtgggccttgacaaaaaaaatgggcttttggaaaaataacatcaatttgaaacatatcaacatttcaaacatagaaacaatataatacattatgtatataattttacatgaaaaaagaaaacaacatatatctatgttaattttcttaagaaaaaaatgttatttttatgtagcagagggaaaacaaccacccatactttgtaagaaaaaaagttaaaatctgtaaaaaaaaaaa

SEQ ID NO: 384519 - DNA, 1172 bp, Cannabis indica
taacaaaattacaacataaaaaagcatcaaaattacatatttgatgcaaattaaatcttaaaaatcataaaaatatttaaaatttcatacagtcatattttgtaattattttatttttgaaataattccaaaaaaatatgcaacgatacattcatttttaatagcttattataaaagcattttatggaaaaaaaaaaaggagaggagacgaggctattattgtggccccgttttttttggcgttaccaaccttgccttggaatgttggcaagacttaatttgtgtggtctctcacttacgaaggggtgtgtcaccagaaccgcaccgataagtaagtgttagatgacataaagatgatcaattagttaagcttgtgtgtttgagggattcaaaatttattaatttgaaaataaattgactttttatatatttatataattaaataaattagttaattaaaattgatttctcctttgacttgatcctttaataaatgataactatcatgcgttcttttctaaacctaactctatatttggtaactaaccaatgcattgaactattgatggtgaaatgttaccaataatcttctatttctcaagatttttaagagctatagaaaataaaatattcataataggaatttggtggccaattggctgattttctttcttttcaatttagtttgatggtaattgaatcgtctcaagaaatgaccaaatgattaatgatttggaaaatttccctttatttcatgaaaattggtcctattattatgataatacaacaacaaagagcagtctatgtgcatctaaaatatatatattaaaatattgataacctaatagttttattgtaaatttttaggggcagtcagttttgtcttatgtttggctcgtaaaataatttagtagcccataatttgaaaaaatgtctttcgattagacgataaactattttagtttgaaattttctgcaacaattattaatgtctatcataaattctcgagtgattcaaatcactatatcaatatatctacatgataatttcttttaagatcaattacatttatattttaaaaataatatcatgttttcttataatatgttggttatcaataatactatgtaagctgattaggattttttttctccctgaactttggcatgta

SEQ ID NO: 384520 - DNA, 1506 bp, Cannabis indica
gttatcctcccgatcgaatgcatacaaaagaaggcatgctaaccttaagtcccaatctgtctgccacaaagaggtccaccaaaatatccaataagtcaagcaatttgtatattagcatatcaaaataaatcaatgtggttaaattttacagataatgaatcaagtagacacatcgagaaacaaaaatatttaaataaatgaatgaagatcttactaaacaatcaaggctactaaggaatatctattacctctggatcggttgagttaataatatcaaatattggatgaccaactggtataatatctgggaaaaacatccatggaatcttatggcttatggttaacatcagttccaatggaatttccattattacctgtgcagtcaagcacaaaaatcccattatcgtcagaaaatagacaatgaatcaaacactaataataatcaataaactcccaaatcaaaaaaaaaaaaagaaaaaaatacaataaactcgattgcaaattagcggcatagggataaaaattaaatatattagactttctttgggtgtaaaattaaccaacttaccctgggtctgcgaagtggttcaacatctttggaagcatagactccaaatccatttggcccttctttaaagtcaataccataagctctcatgctccgaacgtagccaatcttgtagaaatcagggtctgccggttccaacttcgagaatttgggaaaaggatcaaaacaaggaaatttaagaattccatacagaatgtagcttttcttttaagcatagcattagcataatctgaaagaaatctccctaagggtctagatagaccttaaaccaaatgttctccctttcgtttgttaattctctttttacctcagatgaagaatcatcaacttgagcaggctggtataagggatatggagcactctgggtggttgctttgatgggtcgcaccccattgtttgggttatcgctgaaatagtacctgggtcttgctgaacatccatggccgaagccctttaactgcttcagccacagatatacagagaaagtaaataaataaagagaagtccaacaagtatgtacatgtttgtatataaaattatatagacgggaagagaatgtaacctgagagttggagatgaggaaatgagagaagtgatgaagagaaacagaggaggcaatcgccattagagagtaagaaatgagtatgagtaaggctaggacatcactagaggcatgctcacagctaaaagtaccaggtgatgcttcacaacgttatccacttctcactaatctctattttgaagttcaaacactattactactactactactactactactactactactactaataataataataataataataataataataataataggcttagctaaaatagtagtatccataaaaaaaaaaaattaatactattttttttgttaaatttttttaataatattaaaatactattagttagttattattttatta

SEQ ID NO: 384521 - DNA, 926 bp, Cannabis indica
gattagtaattttttatatttttattaaagtaaaataaggggaacttattactgtgagaattgggaaaccaaagccacatggctacgctacatgagtggtaaagccttaccaaaggctcctggtcgaacaatattaatacattttatatgaacaaatatgttttaaggcaaatatttaagtgattcactcgactagaaaatgtgtgaaataatacatttaatattttaattattcaatcttacaatacataataaggaaaaaaatccaaacgaaataattgtagtaaagaatatttacatgcacaacaaccacacctaaataagaggctttattccatatttatggaaagattagtggtaatattgtaagttaaagtttttctctttcttccttctctctacgaacttcaccgacaaccatgcatagcaaagggagaaaataatttggaaaaaactaaggcaaataagactaaaaaaattggcacttttctttgggataggatcaaaaccaaatctatgaatgtggttctggatattaaagaactagaagtgcaggatgagtcgaagaatgatgatgtggtttaagggaagatttactcgatctcctcaggaaacgaaagaggttttgagtaggaaaagtgggattcaataagatatttttgactagttgagtattgctaaaaaagttttgcaagatgtggatgttgggaagaatgactatttcctccaatttttacatctgatcatatcgtggtgaatctaaaaagtagatttgaagttcctctagtctccgaaactaaattgaaacagagcaagaaatcaagtgtgaagatcgagccaactgaggagattagctactagcaaccttcgattgtgtgcttgaaggagggttcatcttcttcgattgtgtctagtttatgaatttt

SEQ ID NO: 384522 - DNA, 2333 bp, Cannabis indica
aaaaaaaaaaaaaattgaatgtagaattagctaaaacgaaaatgaaatatctatgatatctcattatatagttttttttttattaaaaaaataatgattagactttcattaacttgaaatgtccaaaatacaaagattcagcacattagtcaaagcattaaaacatgtataaacacaatatgaggaaaaacaagagtcacttgttaggcaatattgagcaaccttgtttgtgttgtatttggtaaagtcaaatagttttgaagttgctaacatatggttcaataattaaaagatttgaaacttatattgtttgtcacatttgtgaatgaagctatgaaatagctattgacttatgctctttcattaattatatatggtaggaagataagttatctcttatgaattacatatagttgggagatgagctacctcttattaattacatatagttggaagatgagttttttcttctataaatatgaagctcattagcaattagcgtaattggctgcaattggttttgcaatctggtttagtggaaaatctgagagagagagagagaacaattatatagcaaaactttggagagaggaaatactcagtaagtgtgagtattttagtgagtttgggacaaacactttgggaaacacttgagagatattattagtgagaaatttgtatttgtattatgtatattttctactcagattaataatattagctgcctcccgtgaagtaggcaaatttttgaaccatgtaattctgtgtatttaattttatgatatatcatatattgctatttattacttccacgtacaacaaattaaattttatccaaatatagaactattatatattaaatcgaagctcttgacgatatgaatccaatgccgcaagaatcgcatcaatcggaggttcgacacatctctagtagctaccagagtgttgctgccagcaactgagttagctcagtcaaacaatgattttgggatcgattcaacccatttttctactttttttcaacgaagtccgacgtattcctagataattggacctcactaaattcaaacgcgacatccatttttcaaaatacagtattgaatttaaaccataccctatataataggcgatgattttaaaccgtagcatatagctagtatatgccacgatttaaaatcgttgcgtgtagtgttgtaggccacagtttttaaccgtggataattagttaaaatctgaaaaattttcaaataatatgttttccctcgctccaatataacgtgtttttagttctgaaattgttgaaatctatacattttcaaatcgtcagcctctctctctctctctctctctgacctctgctccgtgccatcctctctctttctcttagatggtgatccacgagctcaccacattgcatttgtttgatattcaccaaaaaaattattgtcacttgtcatatgtctagaacaaccacggtcaaaataccatatttgagaaacaacacttttatcagaaaatccagcaagacatttttctttttcaatctacttttattttggagcattatgtttcttttaaaaaatgttccaaataccaaaatattttgatttgaataaattttgcatggtgaaatatttaggtcgaatattccctttaatggcacaaaaatgacaaataggaataaactttcttacttgagaacttacccttttcgtgctttctagagattttgctactgcagaagacggttttgcaccaacagattttgaatttgacgcaagcagccaaatattcacaggaatactagattttacaaattttatttttccaaaattttcagtaccatttgatccaagactagtaatgtctttttgacctctttttagattttcttaaaaataaaagatccagggttaagcctttgaatgtttttcttcaaattttcaagttctttctgtaatagaataatttcttcatcttttaaacaaaaatcagtctcatattgtgtaatttttaattcaagagattcaatttgatgaaacaattgtttgcgtattttagacattgatctattttaaaaagttacatgtatttacttttcatacataaccttgtaagactcggccagtgactcatcatagatttcagattcatctgaatcagaatcttctttttcaacggtatttttcaaacatacaagtttctctttcacctgaaaatcacaaaacaaactaggagaaactgaggttagtgcaatattattagaaattttttcatcactatcagtttcattgtcacttcatgtgacattgaaactttttcttattcttttt

SEQ ID NO: 384523 - DNA, 1113 bp, Cannabis indica
agtgtaaaaagaaatatatatttttcgtatgtttttatagaaaaattaaattaaaatagaaaattgtaattaattagcaacatttattgtgactaaaaaatataattttaccaaatgacaattgttaatgaaatatgtcatttcaagttttaggaaaaaaaaaaaaaaaaaaaaaaaggtaaagtgaatatattacacctcacattatatgacaaatttaatgattaaagtattaaaattcaacctacttaacctactttagaataaatgcatgtgaaacattatactactaatagaacatcatcttaaaacttccataagtgtctgttggtagtagtgaattgacccattgagtatactctatataaatttctatttctaaatcattgaatttgaaattatcaaaaaaaaaataaaaaaatcattgaatttgaacctctctctactaaacacataatgtcatgtattatttttttcctttgattccatataattgaatttcaaacctcatagaagacaaagaaccagacaaaagaaagaaaaggatattctacctaaaagtaaaacctcaataattttttccttttccaaatgaagaaaaagggacttgattttcccaagagtatcttcaaaaaacattcttcattaaaataaattgttttagagcataacgacaactttccattctagtataaaggtaaattccttatccaatttaacaagcatatttcaaaacgacatagtttagtatttgagctcttgtgaattgtgcttcgtatttagtatcattaacattaatggttcattatttatttataaaaatgtattgttattgatactaattgtggctaatacctcctttttttttttgagtaaattgtggctaataccttttaacactaggttattaatatttttaaaattattatattaaattatataaattctaatacttacttgtaccaataataatatgactcacgaaagtattagacatgaatgtattttgtagcattttttttttataaaagtaccacaaataaaagagaaatgctaaaaaatactgggctcgtttggaacgccgtattaagtcgtattgtattgtattgtatt

SEQ ID NO: 384524 - DNA, 1791 bp, Cannabis indica
acatcaaagttctaagtgggaaaactattgggggcgaagagaggagaggacaacatctttgagtgagctatctctttgcatagcagctttaaattcctcaaatgtaacttttccatcattattggcatccatcagatcaaatatctcatccagtttcccaggttcagtaatatctgctggaagacactcttcgggcaaggcctatgtatacaacacaatcaaccagtcattctatgaataattatttatatgaatacaacattattggaccactgaaagagaagaactacatccgaaaaaagtattaagggaaaccaactcaataaaaattgaaattttagccaaatggaaaagtttttactctgagcatggaagcaacttcttccttagtgatgcatcccgatcgatctgtatcatacatctgcagtaaacagaataaagaagagggaatcatcaagtggttgaataatgctatgatttagctagagagaagtaaataacaagccttctatttcataagccttttcacatattttaagtatatttcttttagtaacttggttcatacaaaataataagttacttatatgagtaactagttgagtaacaccagcaatatctcatcaaaatatcatatgtctagtttaggctcataaatatgagtcaaatcaaggtcgtgatggagtttatgtgttgtgttgagattttaaagaaaattagagaagtgattgttcgttggatttacctggaaacataagtgaagagcttcatcaccttcagtttttttgagacttgagaagccacagaggatctctcgcatgtcaaccgtgccatcgcggttgtcatcgaataagtcgaaaatgcgagatgccataggaactagcgaagacatgttcatggcttttaatacctcctcaaattcagacagagtagcattatcaccatttgcacatctgcacattgttttagctaaagttatgaattgaaaaatgcaagttcaaacaaaagaaaaaagttagaggcaagttcatttatgcaatatatgctcttcattaggtaatggttggtacataattatactgttttgtattgtatatttcttttatatatatacaatactctaatgaatccagtgcttagtaactgaaaaactaagaaaaactcatgaaatgttcgaatcaccaacgaatctatatatcatgatcatgtatatctttgattaagacattttgtttatggtttgggcaattactcacattttcttgaaatgaatccggaggttttcaatctcatcttgagaaaggtcatgggatttcaacagggatttgagctgtttagtccttaagaaaatggagctacttaagacactggcaatggcagcagcgcgaaactttcttctggcattgaagctctgtagtcttgttaccacttcaccatccatttgttcctcctttgccaaatcacctctcacccatggatgatccagcagctgctcatatatttaaccaacttaattaattaattagtactttcatatgcagtttttattaaataacaaggaatgaaaaacaaaagttgcaactacttaataagatatgatatacatagcaacaaacaaactgcaaatgatatagttttaactaaaataggatttaaatatgacttatagatatataaatatatatgtatatataaaacaataaactaaaagaaaaacaataataaataatacgcacacaaatattaatatacaaagacatgcatggtacaacttaacatatcttattacaa

SEQ ID NO: 384525 - DNA, 1407 bp, Cannabis indica
atatacatgaacaagtaaaagaaagtgatatcactacaattaatagttggtattaattattataggcttattaagtaagaaatgaaattctcttcttcgagtctttgctattatatgttaatgttactactcatcctcctgcttgtattatttgccaatatcttggtggcccaaaaccacttcgtccgtacaggtatgttgcatgcatgtatatttctacgtaaattttcattagtgtacattaaatttttgttggatatgtatatatactttaaatttagttaatccttaattatttagtgaaaattagctctttactttttttttttgtcaatattattgctactgctttacctagatcatgtttatcaaactaaccacatattttttttagtgattttactgaaataaattaattaaatatgcagataatattgtacacgttagaaaattgggaagaaggattccattttctccccctgctccgttaccggatgtatctcttcgacacaactaaaaaaattctcttttctctatttatttcttaccaataatatgtatgtataaaaaaaaaataatatataagttatatactattattggatgtgagtctctgactatatataggctgttacacctgaaagtcttaatttcaatttctatcttagtcattattgggataatattgtgttaggaaataaatatttacaaataaatcataacagaagtgaaagcttaattatgagagtgcaaagaatttcacgtgagatagaaaatactttttttataagtgtatataaagtataattttggtacttacttagggctctaaagtgggtacttatatttgtgtgaatgagtaagaacacacacttgacctataccatagtactgtcgcatatatcctactacctacgtcacaatacacaaaaaaaaaaaaaattcttctcttcataaaattacaatttttcttaatcggtaaatttattcctattttaatttctggtataacatattgtatttcaaatttttctataagaataattgtcttttctgcataaaaaattggtgagaaaaaatggtgatcatgttcaagcacagcaaaataaatgaatgcaaaattttactcgattaaatatcaaatctgtgaaataaaaaaatatatttattttcactcgtaacttcaaaagtacattcaaattccaattacattaattctcaccctttaagattttgtttaatatataggttgtcatctacaaatttccaagtaataagaaaattaaaacaagtacatatttcaacagtaaaaaaaaggattccatgaattggaagttattacgaaaattataatcactacgcaagtatacgcaatcaagtagtacactcacacaggtgaggtcgaac

SEQ ID NO: 384526 - DNA, 1837 bp, Cannabis indica
aaaataaaataaaataataaatgaagaaacctaaaacataaagagagtatttaatttgttcaaaaaatcagatttttttttcgtacaataaaattaaaataaagcttcacctgaaataaacagaggaggaagctgtttgactgaggagatcccggtcgaagaagacgaagaagaatatatatatataaggttatataggctttgttttagaccgtggaatctgtctcaggctttcctactccaaaaccctaattacaaaacaagttaaatctttttaagggttttacgatgaaatttttcaaataacttagagaggctgactctctttaaatcatttcctctcctcccttttttgtaattttttatttatttatcgatatacattataatatatttttactagttagtagactagatagtagtgagggccatggaagatgaagctagggttccggggaattcggtgcgatcggaggaggtgaagccgccctcgtattggctagacgcttgcgaggacatatcatgtgacctaattggtgacttggttgattttaccgacgcttctgttttgcccgactgttcctcggtccccgatcgccatggcacctccaccaactgcaatcaggaggatttctttggcggaatagaccacattctcgacagtttcaagaacggagatggtctccctctaatctcggatgtaatttctactgatgatgcttctcggagctgtactcctaaagaaagcttattattattacagaacggtggaggagtgacttctccagtttctaaggccgagcttttgggtttgcagaataatattcagaatggtaatggcttggatgcaaacaagttgttggtgaatggcaatggggagcagaatgagaaacgtggtgcggagggcgatgaaagatgcagcaaaaaggctagaattggcagaaatgagaggtatggttccggcagaggacaattccatatcagggatagagagagggaaagatgtccgagcaggaagaggacccgagattgggatgatgtagataaaagagatagggatagggattcttttaggagaaaagagcattacaacaacaacaataataggagagatggtagagagagggatttgagagatagagaagtaaaggggtattgggagagagataaatcaggttctaatgacttggtatttagacatggtgcttatgaagttgatcgtgaggcaaaggttgttatcgacaaaagccaggattctaatgggaaagaggagagtaaatctgaagagactaaagagaagatacccgaggaacaagtccgccaatatcaattagatgttcttgaacaggctaagaagaaaaatactatagcttttcttgagacgggggcggggaagacgctaatagctgttcttctcatcaaaagcctttcatgcgatatgcaaaagcaaaacaagaaaatgcttgctatatttcttgttcctaaagtaccacttgtttatcaggtaatgtgtttattttatgtgctgtaattttttttttctgatgttgtccattcattttcaatgttttcgaagtgtaatgtgttgtggaaatgtcatcttagcaagctgaagccatccgtgagagaaccggttaccaagtgggtcattattgtggtgaaatgggtcaagatttttgggatgctcggcgatggcaacgagagtttgaatctaaacaggtagcttttaaatttcacgttgttttaaaactttttttttcatatgaaatttttcttaggacaaacttacttagttatgaatcacactataagtatagattttagtttattactggat

SEQ ID NO: 384527 - DNA, 1071 bp, Cannabis indica
tttggttgaagagatgggagtgtgatgaggatctgattaggtgcatacaactatcttaggcattctttaagtttatctcatggggaggatttttggttttaggagaaagagactaatagagtctattctgtaaagagtgcttacaggtggtttctgtctccgaaaattgaaaactatagttatgatagcatgggcttttggaagaaattatggcaactcaaggttctccaaaggtgaccatgtgttgtgtgatgtagtggtagagaagttttgactgacatccttctttgcttgggtcaaatgttcgaatctcaccacaactcctcattgagatggattatacttggccttgggaggctagcttgccgtggcgatgccatctttaaggatgagaaccctcatgaagtacataccgatgattcaactaagacaggataaggtataaagcccctatagccggcacatagtcttagaatggccaaaactacctaaggagtggggaagagatttgcatgacatgatcctcttatttttcaacaaaagaaaaaaggttctccaaaagtgaaagatattatttagcgagcggtttcccattgtttgcctcctaagatgaatttttgtgataagaaaatctctattgaccacttgtcctttttgtgatgtttgtagtgaaataacattatattgtttaatgtcgtgtgggttttcatggagcttttgggtcgcagcggggttagatttggtaggccttgaatttcattctttctttgtctgacttggtgcggtgacgagtagggtagatgaggatagattagggagatctgtgatgctttgtagggccatttggaccatgagatagtgtggcatcaaataagaaggagagtggaggatgtgttgtcattttcttcattaactcttcatcaatggattagtgctcaaggtgtaagggatatctcttcacttaacttgttactagcatgtgatggggctgagtgttggactaaacttgtgatgaatttaattaaaattaaggctaattaggatttttttccccctgaactttgacatata

SEQ ID NO: 384528 - DNA, 1161 bp, Cannabis indica
tttttagtcacattgagaatctgatcatttttggaattattctcattgaccatattgatatcctcattttgtgcctttttatttggtgtatccgaaacatgaagtctgccaactaattcccccattaactcctgattaccagggattgcaatgtgattcgaattgattgcttggagattctgatcggcttcctccctagtcaccgcccctgatcgaagccattgtgccccaaaggttgattgccgtcgttgagttgatgccttcagctccaagccgtaaggcttttcttgcaggtgtaatggtttcaagaaaagtctggggcaaaacctttccgaatgcccgatgattccgcagatgaagcagaaagttggtaatctttcatacttgaaattgacccagtaccaagaggagtcgtcattgctgattttcattcttcttttaatcggtttctcaacatttatcgtaactcgaactcgcaagtagtcctccaaacgcccacaaaattgttcggatccgactcgatgaaagaaccaatgagtttcctaaggccttaacaacacttagagtcatatttccagaacgaagatcgtggagttgaacccacatatcaacatgtttaatctcaaccgaccttggattctctccctccttcagccttgtgaagatgaacggcttcctatcatacgtccatggacttccatcgatgaccctctgtatatcgatttcatgatagaattggaaaaggaacaaattaggattaagttctttgacatacatacccatccccggctgccaaaggaaagccatcatgttttgaaatacattgaaatcagagacacgccctgtcaggagttttcctaccaaacaccaccttgtatcaatcgccacatcttcagtactgtgttccatcaccctgagcacttctgcttcctcatcttctagcacaacagcattaccttgaccttccatgtctctgccaatactgctactcgacgccatgggaacaagattaaccaacaacaaaaacttaacaacaaaactctccaaaccagagagacagcccacgtatcaaaggatacgacatatatattaagccaaaaaaataattaaaaaaacaaaatagagaaagaaacaatgctgacttctcttattgttagtttt

SEQ ID NO: 384529 - DNA, 2593 bp, Cannabis indica
aatatagttgctcatattttagccaaacttgctagtagtgagattttgtgcttggtaacccaagttatattcagaaccatgtgattacagatgctattttctaatgaatcatcgccaccacttttttaaaatacttaatgcttttggtgttggtggttgtgatatttttttttgggatttttacctcctgaactttgagatgtaccaatcatacccctaaatttttaaggtcgttaataatccctcttgaactattgagattgttgaatttaaagatttttgtccaattttagtaagaaaaatctaacatggatgaaaattcaggggtatgatttgatacatgtaaaacttcgaggaggatgatttagtagatatgatttagtacataaacaattatcaaattggtaaaattgaatcaaattagacaaatatttttaaatccaacaatcttaatagtttagttaccaaaaaaatttaaagagtataatttgatacatattaaaatttaaggaacaaaaaccctaattaacctaaaattatactatttgtctaacccaatttatatgaaatatatatttaaaaaaaacaatcagggggtgtgccctcccacaaataatggggtaaatatttttataatagacacatttatttttatgtttaattttcaaataaacaagagaacatttaatagatctcttatcccaaaaattaaaaaatgtctcatagcaaataccttctttatgaattataaaaacaacctaattcccgaggtaaaatacaaacatttaaagccctatcaatgtctttcctactaatccccaagtcattaattttatgtcaataaattattagaaacaatacaatattaagggtcagccccgttactataaagaaaactatattatttcttgttgtatatatatatatatataaatatttcctttttgactgcttattattctaaagattatccactgtgaaatgtattaactactattattattaacttgttgaaattgaattataatggtggaccaaattgaatttggtgactatccttagtaactatcactatctgaaatttcttcgtaattaccatgtaacttggatgacacttacatatacaattatatatataaatatatatttacatttgtgtatatcttacacgtatctaatatgtgtttgtagttgaacttttcactcataagttcgtgtgatttagtttgttgttgccttaaaaaaagactttgatatatattaataattaaaagagaagatagatattaccaatatgaacatgggaaattaatggcacttaacctaatgataataatagtaataataaatgattactttatttaattttccaagctagaggatttagataggtgttaatgttacctagctatagtcactttcaattgatccttttccaatgaaacaaaatctaattgctttgcattaatggaacagtgagaaaaaaggaagcagttaaatccatatacatatagacaaaactaattaattatgaaccccacaaggtataaatacatatttatatacaataaaatctagatatatatttatgtgtatgtgtttatatactctcatggcatcgatcatcaactttttcctaacctaaaacgacctaacaattaagtttagtctatgagtagtttctcattcatctctatgtatattgtagttagagcacttaataacctaattcacctaactatataagttaaactccatatatatatttagatatatttggttcattattttttcttgtggataatgagaaacctttttttttttctttttaatttccttttttatgccttatgtgtgagcatttggaattagttcttgaaatacatgaatatatataatggatatccttttttatttaacaagggatatctctagattttagttctagtagaggaaggttggtaaactttttaattttaattaggttggaatttagattattatttttattatggcttttttttttttccatctttgttgcatgggctaacacttgtcatgttatccattgacacacaattttgactcaaactataagtttgtaaacatattaatttcccattttcaaattataggttgactaaactaaaatataaataagatgaacaatatctttagatttggacaattaattataaggatcacgaacttcactaaattataataaatattctaatcatatagaatagattgttcataaaagggattagtatagtctactattttttttaagtgttatattattattattttttgttgtaattaaatatcaagtctcatacaaggtgtcatctttatgtagtgttaaacactactaatgcccaataatgatactctataaaataatatatatatatatatatgtatatattagtgtcattaattgattaggattaatttgtttattgaaaacatgccttaaaccaatactcttgaaatcagtggccaatccaagatttaagttgagggagaacaaactttttttttttaagttagacaatgtgtactttacttttctatatgatataatatg

SEQ ID NO: 384530 - DNA, 1445 bp, Cannabis indica
gagagagagagagaagttaactgttgcatctaatatttccctctttcctagaatattagtatgcgagttaaaagacattagaaagagattaaatagaattagatccttagaagacattagaaaaagattactaacctgccatgcaattcgatcaatgtttaatgtgagaagaagagtttttgcacccaaacgagcagatgcaagggcagcttcgcaaccagcatgtcctcctccaaccacaataacatcgtatttttcatcatgcgtactgtcactgaagtctacaatacatttttttttttagaaaaaaaaacataccattgtaagacaccaatatgtatatagtctatgaatttatagaactcataaacccggaaggattcgagaaagcaggaatcttaaaaaagagttgcacaatttccatcccatatacgctagcactaaaccacactccttttggctgatcatcacaaaaatatatgttggcacgtaaatttttgttgtttcttttaaatggaatgtttatcaaagacaacctttcataagatacagaagataaaacaaacatggttttggagatatgttacttcatgcggcaatgtcaacgcaaataaatttcaactgtgtttaacaaaaaaaactatacatgaaaggattcttagatttaatcttaaatatagaacctaagagtcccaacttgaaaatctaaaaaactcccattcatttcattaaacagctttaacttttctaatacaaaaaagtgcataattcaaaaacttgagatagcctaataaaatgccgaacatgatataatagtcactcaaagagtgtaagttgaagttcgtttctctaaacaattcagttcgcaaataaatatagagcctaaatagacaacgcacacaacctattcgaaaaaattcataacagagataacaaagcaagaacaaaaactactcatacctcgagagttggaagcagtaacggtgaaacaccgagagcaattggagcggaagaaagggcgaacctgatgaagattccggcgaaagaaaacgacgtgatgaaaagaaggagggttgagcgcgatccgagtggagggaaagagaaatggcgctaaggagagacgagagagatgatgggagagggcctgtatggccattgagtagaagcagtaggcgtgggtatggcgtatgggctatgacatcgattctccattcgttcttttatccatttcaattcaactttgttagtaagcgagtactaaactgttattagttatctttctcggttacttaactagtgggaaatctaggtctaggccgcgccaccgaaacaacacatttttgtttattttagatatttgcttccatattactaaaaaaacaaaaaactaaaggggagttatatttgcaccccataaaattataaatacatcccattattaaaaa

SEQ ID NO: 384531 - DNA, 1406 bp, Cannabis indica
aatcaaaatataaaacttaaaagaattctagaaaatcaactaaaaacactaataacactttaggcagaattaccgatttgcccctttcttccaacttaagtaacctttaaaatttaggtgtaaagtggtcaaaactcataatcttgctcaatctcgacattctaaatgtctaaattactttcctcgctaattctaagatactcaaccgtatctatgtaacactaattgtcatactgtcgcggtccactattattaggcacaaaatatgaaaatattaaaattcataattaacatgcatgacacacctaaaatacaataaaatctccataatcaatatattatatcacaaatgcctatttctaacaataggtctcattttattctaatgtgcatatactaatgaactattaattttcatgtctaaatatgcggctattagattaacctcaccttatattccacttccattgagagttcctacatgtcatcttgagtcgactgttccaccaccagcaccacaaaataacttccacacccactgtatccacattaacaccactcattatgtcacaactatctgtttcacttgtagctactgctattaccccaacaccaaggtcaattcccaatcctactcaaccaccaacagtttctgtgtctccaaatgttaatcccccatatcaaccccttccatacatgttccacctcataatccaccatagaacgctcataaaatgactacaaggccaaagcttttataaataagccaaaggcatacatagtgtctaaaacacctaccaatattaaaactgctcttcaataggaaataggtcatgtgagaagagatgtaagcttgagagaaatcagatctagacttgcaagtgggtttatagaataaaagaaaactcagatggtaccattaacaaatataaagtaagattggttgtaaaggatttccaccaacaacatggtttgattatactaaagccttcagcactgtggtaaaaccattaacaataagggtggtcttgactcttattctctctacaggttggattttaaggcaattaaatgtgaataatgccttccaaaatggcactctacgagatgaggtttacatgttgcagccctcagttataaaatttctaatggctttaatttggtatgtaaactgcacaaggcaatatatgggttaagacaggctcctagagcctagtttaagaagctcctcacatgtctactctcatttggattcatgtcatccaagtttgattattcactctttattcatcattcttctacctctatcacactagatctcatatattttaatgacattttggtaattggtagtgattcaacagttaataaattaataaaataaaataaagaagaaggaaagaaaa

SEQ ID NO: 384532 - DNA, 3381 bp, Cannabis indica
atgccaggacaatcacttacaatgatgctgagatagtgattgtgataggtgttgaagagacccatcctgaatatgatgtccatgaccctgctattttcaaaagccaggaaaaaagtcacttaacatatcaaattcgctactattgcatcttcttcagacctcgatcgtgtggtgttccaagatttggtacagagattagacaggattaaggatgagcataacgttctttacgctggtcaggcccagttgaaggaggcatactaggctagccacctagaactgaaggctggtcaaaaccttattatggagcagcttagggtcattttgagtacaatacataataggtcaggagcaaatacacgtccttaattgatctgatggaagatgttgacgtaatattttctgacgactacgatccataagttgatgagaatacttccactctagcggatgccaccaatatttccatagctgagagcaagtcacatggtgaggtactgcccttagagggaccaccaaaagggattcagtttctcaagaggaggaagatccctcctacatggtttagaaactatactgaaatgaagaaaaaactcaagtcttctacgccttttgatccttttatccctccagatgataggttgttggaaagttttcgtaggtggttgtgtgagagtatccccaaccatcgtctttgggacatgaagactggtgattacggtcctgtatgatttacgaatatgttgacacgacaggattagattgaagattttgtaagtaaacatatactattttattgttacaacataattttagtttattattgatttattattctaactgctcagttgtatcattatattcaacacgtagatgtgtgtgtccatatgcataggaggcaacaccacttctttccagagacgtttccacagagagctatcattctttccacctatgtggctgagatatccaacacacaagggtcctagggctgacttcaaatggggagatgatgtcctcgactactgcaaaggtgttaagtaccattatttggttcttgttgtcatttttttttgttatcgattgattctcaatgagtccatgataatatttagcctttgtgggttgctgtcaattttcgttattctcaactgattattgaaagtatctcgataggttcttgataggattaagcatttgttttcttgttgtaatgtttagttgttatggatagattcttgtctgaatcagtggtttgtcattgttttaaaatactttttatacatgaccagttctacccaaaatgggaagaaaatgaatacctctactttgtgttgaatctttcaaaacactcacattgggtagttgttgaggtggatatcgagttgtggaaaataacagtgtatgactgtgattccaccatttttcctaaaaaagacttagcatccatcatgaggacgtgacaagatctactctttacgttgttccatgcatgtggggaattctcaaacaacaaccaaatctttgcggttgaaatgaatgactgcaacaagcttccaaagatgcatttcgatagagttagtcatgaaattgttatgaaggcaaaaatcagataactttgttttatgtagtacctaattacttttattcttacttattttatactaatttcttgatggttgcttgatgtagtagtgattgtggtatttattctattgagtacgtggaacatcgatgatgaaacgttcactaaatgatgttacggataagagcatacatatgtttcgagattagtagtgcatgaacttcaaaaccaaactcaaaacctaaagcccttctaaacctatctacagagtgaggcttaagtcttgtttccatcaaaaagagaatcgtatgcctatgattcttaaccaggagggaaagccgattgaatgctcgaggattccccagaccttgagcattccaactcattagactcatttttctaggcaggcgtgctctgcaacacccgtccgtctaggatcatctgtagaagaatgaggattagaatcaagctctctagccctagcatgcttgagcatagagcgcataaaactgccaacattgacttgggaaggttgaaagcatgattgtttaactccagaggcacaagctagccccttgcccttagcttgggggtccggtcgaggagcctcaaccctaggagtttggttgtcatcagtagtatggcccaagtccagagatggtaaagcttcagcaagtgactgggcagcatggacaagttcagagttattaagagcagggctatcactaacaatgatggagtcagtggagattgaagtgaggcatgaggattgattcacagtatggttggggttaataagggtaggaatcataacactctgggaatttctaggagcacttaagcaagaaatagaggccacatttgagttaagcagaggcgcaaaaccaatagaatgggtcaagaaacgattcatcacctgacctccattggggaaatcagagagatccaaatcagctgtgattatggctggggcataggggtattggaaaggcattggtttctcaaaggacttttgcttgccatgaaggagaagatcatatgggcaaggaggtggaacaagtgattcatcacacttccggaggtatgcatggcaatactttttagtgtggtccagtttaccataataaaagtagaaatcagggagcctttcatacttgaaatctaaccatttggtgaactccctacccattttgagaaaacgaatgtgaatgccacgcctaattggcttattgaaaaaaaaaaaaaccgaaccctcagataaggcctagttccatctctcacagtggtactatccacctgaatcagctcacccacactcatggctataagttaagctaaatcataagactttaggggagctcatagatttgcacccaaaaaggcacatagtgtaactgttctggggttataggaaaggagttatgaggagcagcaaaaatggtgaggctttgggaaaaatgccaaggctgtccatccaagattctgcgcttatccccttcacaaacaaaagtgaccagaaaaaggccatctaagtgtttagaaatagtaactggaaaacgacattgtgaggaccagacttgagatagggttttgatcaaagaggcacgactaaagtgtttaacagtgcaaagcttaaggaggagactaatatcattaggagattcattaggtatttctagagtttttaaaagggtggtggtgactttcaaaatatagtttagttagccttgaaggcactttacatttgtagagccaaaggtttaagtttttgttttttttttctttttaaacaaaaa

SEQ ID NO: 384533 - DNA, 981 bp, Cannabis indica
ttttgaactgtgtacccacaatcagagtcaagtttctcccccagaatctcttccccaccatttccaactctcattcaagcctcacttctccatcatctcaaccgcatctcatgatttttcttctgtttttttttttctatatttctatataatggctatcattcattcgtcatcttttccattctctgctgcaaaaaactctctgttaaacatgctaaaactcaagtgattggtgtcaaatctactaccaaaaaaggaaaaagggagaaagaagttagatgaagataatttctctgatgatgcttttgttaagcccttatctaaacagaggaaggctcctatgaagaagaaatctaaaagcattataaaatggaggaagttgtgaagagtcatatatatttctgatggtaaaaaggagaagaaacaagataatcgtttgattgaggttcgttttacatttgtttttggtttttgtcctaatttgggtttgatcgcctctgggttttgtttgtgtattttgatatatgttgtatcttagggatttttatgtttgttttgttctttcggtagcaacaggttcacttatattggacattagttgattttaggttgtgtttatgttttctaacttaggaagcggtttttgcatgttgagtgtttattggtgctactataaggatttttttgcatattttatatttaatcgctatttgtttgttgtttgtgttgatatttttttggaaaatctttaagtgtagtgtgttatttgttttgggtgtttggcgtgatgacatttatgtatagttgctgttatattttgatataatattttgattgattaaataaatgttacaagtgtgtcacacattttaatctagtgggggattgctatattattttataatataataataaagtagattaaaatgtgataaatatatgtgaataatatattaagtgtatggtaaataaatgtgtaac

SEQ ID NO: 384534 - DNA, 1176 bp, Cannabis indica
atgaaaatagagccatttctaatttttttaaggctcaagtgactattttgcaagaattaattttttttggtgagatggacctccatgcagttccggaaatgggaggagatattggagttaagactacctttaaagtggatgcaagaactactccaattaaaaaaaggaaaagcaactgatggttccacttctgatttgtctcgaccattcaaaatttctttgtaaacattctcgtcttgtgcgtgacttcccttgagacaatgttagcaatggtaggttggaggtcattgtaacattttcctttggttcgtgaaaaggttgaggtcaatccagatatttttctcatctggctaacctgatgcaaggcttgagaattgtggaggatattagctcttgtgtgtctgttcactctggtacccttggaactatagatggttggggcagacttctacagtcatgaaacttaagtccctagttcggtcgcactctccttatttattttttttaacaaaacttaaagttgatgctactccattggtacgtattcttaactagttacatttttattttcacatttttgttcctgctttggggactgtgggagggcattatgggaggacattattttggcttggaaagctggttttgagtttcaatgcttgaagatctctcgtaatcacatctctagtcttgtcttttcagatcctccgtcacatccgtggctcctatcctgtgtgtatggactgttggaatatattagcaggatctagatttactaacaagtatgttaattaacatcctaaatacaaatttctaaaacaattttaatttaaacacatataaagttaagaaaccttacattgattgcagcagaataatatgtctcctcccactcagatctctaacccttgttctttttttttcgcaaaatctgagcccgattctccttcaagttttggattcttcacagttttacacactatgattgagtcctagacttgttatgggtggacatgcactcattcactatagactcgaaatttatgaagaacaataaatgagattttgaaatagaagaataagaaggaatgaaggctctcaaaaactctagttgtctcacagaatgtaaactaggttatatgagttgtattggataatgagaccatcctattcctt

SEQ ID NO: 384535 - DNA, 2735 bp, Cannabis indica
tttacagagatgattttgtaagcataacaaacacctctataaaaaaaaatattccaataagtgttttcaagcgtgaaagttgactaagagattgtaacatttgtattttgctgagaatatatatatatatacatataatatatgtataggccagtagtactgctataccaaaatgaaatagtcaagcatgaaacacgatatttgaactgtattttcggcgtgttaaatttttttgaatttcttaaaattttgtaggatgatttaaataattataacgtacatgaccataagaaaaatttgactaaaacattattttagatatcaaaacagatttaggtacatcgcacggtgcatttcttttaaagagtgcattgtagaattttctaaaaattttcaaaatgccaaaataaatttgggtgcattggtggtgtgcctattttagaattgcattgtaaaaacgcctaagttctaattttaaatatatatttataattatattgacatgccgataatgatgatcatacccaacaaagaagggaccacagtattgtggaaaaaggtttatataagggaaaggaatcacatcatttaagggataagtagtgaagtatataatgaatgggaaccctttcaccatattattccttctaaccttttgtttactttttcattttatatattctccgaaaaaaaaaagtttctgttaatcaaagagacattcaatcacttttaaattttgatcgatactctagactctacttttctctctaaaatgtacatttaaggcacatgagtggagatatatatatatagtagaagtccagtatatacttctttaattagtttttattttgaatatagtagtatatactatatactttaagcataaattttatatatataaggttgattttggcattgaatttaaggtatatccttacatcacatttgttgcgacctaataacaaaggtttgtacataaattgaacacttaattgcatgtagtgctttaatatgttatattaattaattagaatgcaatcgactattgtttattgagtttatttatagaaattttttagtttagtaatactacgtctctccaagaggatgacatcccaaagtacggtccttttattttcataatataatattgaaaaattctagaacatacttctttaaaagaagattatctattttggtattcaaaataattttttagttaaattttttcttgttgtcatgtatgttatagttattttttaaggcatcttacaaattttaagaaatttaaaaaaatttaacacatcaaaaatagagtacaaacagtttgttgcacacatgattattttattttatacccgtataaaataaactatttgtatacttctttctatattgtaaattattctaaattttttaaaattttgtaagatatatttaataactataatgtatatagaatgccaaaacaaataaaaaatatatgaatacatccttttgggtgtatttgtagaagcaacttataacgtaaacacatgcacttagagaaaataacaaacaacttttcaaaagttgatattttttattagaaaaatttgcagatagcagtccaactcaaaataaattaaagaaaattttatttacactccaaaaattttcaaagacattccattttaataatttaactttatataaaatatatatctttagtttaagtttttttaatttttttcttccattatatattcttaaaaaatataggattacaaaaatactttcagctggccaaatagacaatatacagcccaaataaaaaaatttatacaaataccacttacacacactttcaacccaggatccatgcttcctgggaaactatcgctaaaccatcgcgcaaccatacaacaacccaacccaaccgaaacgaaaattcaaccagaaagagaatcaccattaatttcggcgacttcacctgcgaagacaaccagaatcaatccaaacaggggctgtttcgaattcataaaaaaagtgtagaaaaactactacgaaactaaaattcaaccaaaaatctagtttaatttgcataaaactaatgtcccgacttcaatttttagatccatgaaaggcagatctcaaaatgctgaactgaagttcccaaacaatccaactcaagtataatctaaaataattacatcaatattatagtaaaatgtttattctggtgtatttttgttgttttccaaatttttaatggtgaatttgttcatattaaatcataaagagacatgtagataaagttacgtacgtgaaaaaactgttctgatttttaatgtttcacaacaattgcattatagttgcataaacattttgctaagagttatttcgtatgaatgaaacctttgtctgatgcaacattcagccaaccacctaacaaccacccagaaactttcgtctgattgaaaaattcgtctgatgcaaccttcggccaaccaccttgtaactatcgtctaattgaaaccttcttctaatgcaaccatcacacaaccacacaacaaccaccatgcaatgattgtctgattgtgtaagtgattgtgtaagtggtattttggtaattaaaatcacataaaaggtataaatgttgtccttactttatggaggtacgtatttttgtaaataaagtgtcaatttttattttctatgtaataattctaaaaatatacctatcaaacaaa

SEQ ID NO: 384536 - DNA, 1736 bp, Cannabis indica
gtgtctattgcaattgtgtcacaaaaataaccatatgcagccctggacctagcatcagcccagaaaacattcctgaggtgaccgtcatcatcaatgtccatcaagtaaaagaaatttgggttcgtcattttcatgcgacagaagtagttgtacactgcatgagcatctccttcttttagttctaaacatttagagcgatcatcagagctcataccctcactctcgttaaaacttaagtatccattacacccagaatccaacacagccgttttatacaacttaatagtgtgtacttctgtaacaggctgagggggtggttgagtctttttggcagcaacaatcattcttttgtgagacttataaaacctcttaatttgtgggctgacttgatggttatgttcaagttctacttcaacaattctccaccttgtagaatccacgagtttgatgacgatcattgcagggcaaccagttcgtgtttctggtcttggattgttagcttcactctttttcttgaaccctgcactgctgcagcttaatttagctctataccgctcttttctctttgatctgaaccatgaattgctcactctaataccaaaaccctgctgtttaccgtaagcattgtaaaaatcataagctgcatcaaaagaatcaaactccaatcccacagttggaagagggggatcctttctttgtgtttccccagattcttcatcatgttctactattaagaaatgtccatcaacatcatattcatcaccttcatcaaacactggctcgctattgagacaaacttcttccatctgaaacacaatttaagaggcagacaactttaagtccaatgctggtaaagcttgcatcattcatggactgttaaactaagagtttccccagctgcaccattttcgcctatctgaaaatataatcccaacaaataactaaaatacatgccattgctgatgcataagaaataagaagaaaaaaaaaggtacaaataattttaactttgtatacatctccaagaaatatatatatatatatatatatatatactagatatatatttcaataatggaattgaacccatgccagtgaactgctacagtatctatctccacaatatttcaatttataaacataatggataaaagaaaaagaaaaatacgatcattaagcaaacattccacatgatcaagcttgacattcattcggtatggcccataatgtagctaagtggacttttacctacaattggtatggttgtttagatgtccctggcttaccttcgaacttattttgtaataacatgaggtttaactttgctttatttatataaactcactattctcaacaaaaaaaaaagcttgacattcattcaggtcctcaaattttagagtttagaggtatacgaattcaatgaactcctaggttgaatgaaaaattagagtcaaataaaattggcacccttttagtgcttagtacgtaatagaactacaactccacaaaattaattgacacatttttataatttagttggagtatactattttcaatgacagagaaaaactctttcctcttcaaacaaagccaatttatgatcctgaatctaattccataacagagagcataccacagcacaattctcgcataaatttgatttgtggccttaaatgtaattcaattgtagaaagggaaataaaatactttgggtttgactaaccctaatttgtttc

SEQ ID NO: 384537 - DNA, 949 bp, Cannabis indica
aagaacaaaaacttgaaaaaaaatactgctgctgaaaatataaagaaaagaacaaacctacataagtactacattagcagatgttatactgacaaacatgacgaatctatatatataatatatttaggagaattaaaattatgtatgcatggcgtctggcagaaagagaatttgtggaaagttttgaatgtctgcttgcttttattttgagttgtaatacttgcaaggtaaggcaccgaaaaagataataaaaactcaaagaaattatacacgaacacatggatataaatgtaagctttattatgattacacgtgacagttttttgtgcaacattaacttcttttttttagagtaagtagatgagagcaagtgaataggacactcggttaatttcaattttttagtgtaaagaaatgagagcagctcagtgagacatgtggtgttttaacatcaatttaaccagttgtgaaagaagcagctgagaatgatgacattcaaaaatatatatagagagagatatacatataagaggcttttcctgcttaatataaaacaagagacccatagatatatattatagagtattatatactcttccttatgttacatattcgcacattaaagccaaaagaaagtcaaaaaaaagtaaaattcacccatgcctattcgtcacatcaaaaccaaaagaataatatactagatgtgtgactaataaattagcctaaatagttgtttgtctaactcttacacatataccaattaaaaaatatatacagtagaacttctatttaaaaatactctattcaagaataacctctaatttgttataaaaaaatcaagtccaatttgggccagttataaataagaataacctctaaattataattaattatgcattttttaagtcccgtattaacaaagtatacctctatataagaataattacat

SEQ ID NO: 384538 - DNA, 1712 bp, Cannabis indica
aagaacaggacatggaaattggtcaagagaccaattggtaaaaatgttatagtatgcaaatagttgtttaaacacaaggaatgggtcaaaccaagtgatttagataggttcaaagctagactagtggctaaaaggtttagctagaagttaggaatagaatttacagagattttctctcctgtagtaaagtacaaaaccgtcagaactatgctggctattgcaacacaatttgacctaaaagagcaacaaataaaagttacaacaacttttctcaatggaaaattggaagagaaaatgtacatggagcaacctaagggttacataaagaaaggacaagaaggtatagcatgtaagctagaaaggtctatatatggacttaaacagtccccgaagacagtggaacaaaaggtttgatttatttatgactaagctaggattctcaagaaacttttatgatacatgtctatactataagggaactcagattgatacatcaacatatcttttgatgtatgtggatgacatgttgattataagtaaagaaagagctaaggtagaaaatatgaaagacttactgaaagatgaatttgagatgaaggacctagggaatgctaccaaaatatttggagtgaataaagaggaataaagagaaataaaaatgaccctaaagtcaagaaggctacatcaacaaactgattgagaagttctcaatgaaagatgccgaggtgaccaaacatcctattacctatcaacatcagttatcaaaggctcaatgcccaattacacctaaagaagttgatcaaataaaagaggtaccctattctaatgcagtggggatctgtaatgtatctaattgtgtgttcaaggccagatttggctcatgttatgagtatcctaagtaaaaatacatggctaaccctaacaaggaacatttgcaagcaatggactttcaaatatctgcttggaacaactaaagtcgggctatattatttagaagacaaaattccaagctcctaattgaaggttacagtgatgcatattttacaggggacagagacaataggaagtctactactgcctattactttacaattggaggaagctgcattagctagaaagtgcaactttaaccactagttacattatcaaccactgaatcagaatatattactatcgtagaagcaataatataagccatctggcttcaaggtctcctagagaaaattactaagcaaagacagatccctacagtgtatttagaaagtcaaagctgcatagacttatgtaagaatctagtattccatggcaggacaaaacatatagaagtaaagtatcacttcaaaagggataaggtgactaaagaggaagtcagtattcaaaagatccctacagaagaaaatcctactaacatgagcaataaaattgtcaacctgcacaaattcaagctatatatgcatttgttaggggttgacaatggaggataaatctaaggagacaaaagccaggaccctcagagaaagactagaattggaacagatcaacttatgagcaatgaggtagatattgttgaaatttattccccatataagttcacatgtctaatatatacaagaaacaattagaacaaatcctaacaaacataatatactcgcaaatcaagaccaaaaaataggtaaaaattttttaactaactcacttcacaactatatata

SEQ ID NO: 384539 - DNA, 2484 bp, Cannabis indica
gaactctctcatctaggttgaatcactactaaaaaatagggtttttgcgtcggtcaatgcgtctagtcaaacttgttgactgacgcaaaagaaaacatttacttttttgcttcagttgttaagagacgcaaatgataatgaatttgcatcggttggtacttcgacactaatatacatattgtgtcggttagcatttgacgctaaccacctatgcatctactgtgtggcgtctcttgataactgaagctatatgcctttcttatttaaccccaaaataattaactcccctcccatatcgtcttccccaattttcacaaatattaggtttccatcattttgtccatccaaatcgaaggctttagcgattattgccacccgtctttccttctccaccaacctcgtctgaaacccctgacgaacaccgactttaacgaaaaacccccaccgaccttcacttcaaacccacgaccaccatttgagctccacaccttttgaacgacgatgctctcctctgttgaaggctcgaccgccgtaggacattcgaccatctacctcaagagctccactcgccggctcttggtatatatataaatttttttaattataagtatatataaataattaatgtatgaaaatttatttttatatattgtattgtaatttgtattggtggcaacaaaaccaaaaggcccccattagaggagaacagagaagaagaaagaagaagaagagtggagagtgaggagtgaggttagggttagtttgtggtgctactatttcagaatgaatctctaaccgaattactttcacctttgagatagtaaaaccgaaaccccatttccattccatattaaatatttaaattcatttggtaaagtaataaattttttccagtttcctcaactctaattctcttctattggcttttggtttttttctatcaattctaaaattgtgtgtatggagtttggtatagataggtagaagattataataaaactgttagtatagtatggtgtattaccattatcattgccaatgtcagttcttgaaccccatagttgagctgagtagcttttcattgttttgaatttataatgttggattatagtatgcttggatttgaccattttatcagtagcagcaaaaaacttttttgttgtatatttattgtgcatctaaagttgtaaattgcatccaaagatgatggtcgtaagtttgctcaaaatttgatttaacagaggaagttttggttggatgtttggtccttatctctatttgtttcttatttctcttttgttgttagttttatgtgtcactttctgatttgtgataatataatggtcttttgaaaagaattgatacatgtcataattgcttctcttttttttttttgacttgacacaaattttgggatgaaatatctatattgggttcttgtgatttccttatgccaaattgtgatttcttttcctcttttttagggaacatttggtttgggaggagattgcaagaactaagaaaggtattcttcatatttgctttattattttaataggtgttgatgaaatacttgactgcttaatattttaggcaatttgtttgattatactaattattagtatactaagcactttgagagaaatataaaaaaaaaatgatgatgtttttctttgaattgtagattgtaaaaagagatagtcgtgagaacttttgtttactgtatagagatcgtgggtaggtctctattggcctaacttgatcacaaaaattcttaagcctttgtgtctggttttggcagtttaggatagagttcttaatatattatttgagatagtaaaactatataaattctaatgttacccactagttagtgagcttaaagtagtggtcacagttttcgctacttctaagcttataagcatgtgcatattcatatagtataatgagaaattatatctatctgtaatatataaatacatagccatctatctcttttataaattaatattgatttccctttcactgtcgataagtaaaaagaaaatatattagtatgcactatttgtccttaaaatttaaattattatttgaactactagacaatggctgataagtactccatgtcattattgtattgtgtagtggtggatccatctattttcaagtaactctcatagattcttcatactcacaccctaaatccacatagcatgaagcacttttgtactagaataattgcttaaagattaattagtacatactggtctgttttattctcaattttattgtacattaatgtttttgtactttttttataaaatttaaagtgatgttaatgtactaaagctcacaagccatttagtttgtatttattttgaggtaaatactattttggaccctctgttttgcaaaaattatcaattggaccccgtgttttgttaaatgataaaatggaccctgtattttctaaaatagtacaaa

SEQ ID NO: 384540 - DNA, 1676 bp, Cannabis indica
cttggggtccgatgggtccgattggtcggaccccatcggaccccatggtccgaccatcggacctggggtgtgggattcttgggaccggctagatagagagagaaagagagatagttttagtttgggggtatttttggggttttgaaaaaaaaggtatagttttttagggtttaaattattggtttagaaatcaaattttttgattttctaagtatagaaaatcaaatttccctttgataatggatattcttttggttaaatgattatgtgtttatgtctatgtatttacaatatattcttgtcctttggacgtactaggtagaatttttttttttgtctggagacgtactaggtagaattagtaatgtcttttttgattttctttttggttcagattgggcaggtttgccaagtcacctcttagacatagtttttcaaaatttatatactctaaaggactgtttggcattcagtaatacatgttgttcgtggcactctatagcaaaagacaacaaaaatcgagttgtgaaattaagtgagcatcaagtaccattgcttttggttcctaacacagaaagtgataataaagatgaatggagtgtgtatgatgtgttgaataacaaattcttatcatcaaaattaatacttcctccaaatatttgtggttcatctcaaggatagttacttagtcaagatgaaaacttcaatttaacactgtataaaccctttgcacaaagacaaaataaaaaggagaataataataataataatacaacagttattgaacttccaccattgtttgaaactactgcagattcaggtttaagtgatttctttcctcgtgaatatctaattaggaagatggcaatatgtacaccagaccaatccaatccccaaaattttaaagtatcagttatatgtggaacacagagtgattgttgttctactataaatataacaagttgtaaggtttccaaagattctttatggacaggttttgaaatcccacatagtaaggtgccaacaaagtttaaattgaatgatattatgttctacaagaacaaccttaaactccaaccctatgaagaacttgagattgatggaaaacctttttcttattcaaaatatttagttgaatcatttacgggagactattttattgttaagaggtttcgaaaagtcgaggcttttcatttaaccaagtattttatggttttcaaattaagatctgatgaccaaaaatttgagaagatgacaaatttgggtgatgaggccttgtttttaggtgataatacttgtatttctgttcaggcttcacattttcctgggtgccaaaagaattgtatttactttactcatgacaaagatcctagagaaaattataatgggccttacgatttgggtgtttacaatatggaaactagaaagtgcacaaaaattattaatttcgattttgatgcaatcattaaaatggatcgaagaagaccaatttggattttacctactctgtttatatgatttaagtatgttttattattttatttagatagtgatactttttcaattctttttagtgttttataattaggatgtttgtcattcatttatttaggggtaattttttttttttttttgagaaatttacaactcatgactaaaatgtaaagtattttaca

SEQ ID NO: 384541 - DNA, 2008 bp, Cannabis indica
atttatttgacatcaattttactattttttgctcaatctcatcataattaatggttgttttccggctatcatggtgttgctgtagtagttttgtccatgagcgtggaaaatggaagtcttgtttgttttttttttttttggtgtttatagtataaaagaaaaaaaaaaagtgggaggactgtataaatatagtttccatcatgtagtagtaaattaaaaaattttacccaaaatctaatatttttataaaaaaaccctttatattttaaagtaggcttagtaaggttacgaactataagttatatagacctcatcttttgggcctaacttaattgtgtggtccataactagggagaagaagatgtaaaagagaagctactctagttccgtagccaaataaaaataaatattgtggcccaatacagtaatataaaaggggatatttcaaaaatatacaaaatgacaaatttaattttttataaaaaaaaaaacaaatatcggcttgaacacgatacagcacgatgctacaaattggcatgacatagcacgaaaaatctgttcttaagtacagcacgagaagcacgaaagacacgacaggtaagcacgaatagactaacctaaaaagcacgacacacgataagcctaaaaaacactacaggacatattaaaaaatcttataatttattaatagtaataataataagatatgaattttttaattataaataaatttaaatataataaaatttaaatataatgttgaacattataattttataattaaaattgttaaaacatgaacaattaagattatttataagatgtgatacaaaaatttgaagtatttataagtaaatattcaaattctaataatgttaatcattttttttatataattatatgtgaaatattgttcaaaaaatatataaatataattaaaattttgaaatatacatacaatttagtaattgtaaaaaatatatgaaaaagtgaagcacgaatttaagttcagatatgaaaatagattgacctatttaagaaatacagaccactacgagcaaagcacgatacgaatccgagtacaaaaataccaaatcatgttagacctaccctttaaaaatattaacaaaacacgacatgatttataattttatatagcacgatacaagacgacccacttttaaaagaaatataaataaatacgaaccgaactaactcacaaaacatacgcatgaacttacagttctacttacagcttgtatatccacaaaataatttataatttataatatttcgtattttattaattagtgagaagtagttggtgcttaacggatatactataaaatttgtccatgtattttggtcaaacctcgttttgttcaaaaagataggagatatcaaagtcaagtccaaaatttagtattcaatcaaaaaaataaaaaaaaacatccaaaatttagtattaaatattcatatttgtctgatatatcaaatgttgtaccagctagccctaggaaatgataaactttttaaaagaaaaaataaaatgaaagagaggaaatgtacaccacctttctttttgaagacaagacatttttcatattttccatttgacactttatttgttatttaattttcaaaaataacttaataatctaattttaacttttaataacattttgagaatacttttgcattaataacttttaattactatctttatcttttttctcttttttctctttttttttttatattaattttaaaaataatttttaaccacatcgttactcggttgaccctcaaataaattatattgtaatctactcttttatatgaacatttcaaaatgtgagaaacatatatttattttcagaaaaaaagtcatttagttactaatatagtaattaattacattttttatatatatttttttaaatctcagttaatacaataattaattagtttttaaaataataaaaataaatataaaataattagtata

SEQ ID NO: 384542 - DNA, 1353 bp, Cannabis indica
accatgaaattgtacgtaccaatataatagtcaaggattatatcatcatcatatatataaaagttaagtgatgaaactaagttaataattttgcacgtactggtctctggttgcatcgttaaagtcattccatccttctggggctatgatatcagacatggttgtgagagcaaagacactcgagaaaatggcctccaagcacgcccaagccacactcttcctgttcctccaatcttgcaattcacgagaaccccgtgtcttcctccttcaaagctcttccatgcgctgtcacacttccgtctatagatcttgatcctgctgctactggtttcgccattgatatcagttcacaatcctacagtgtcacatttcaaattataattttgtttcaaattcagtgtatcacaagccaatgaaattccaattcataagcataatattaaaataacaaatcacatgagtatttaaggcttaaaaaaaagttgtttgggtgtgtgtgaggagaactgagaagggaaggaattctaatcagatgtggtgataattattgggttttttaaatcaatattatcaagaactacacagaataagcaacatttttgttagaatttgggataaggtgaatgagatttcatctcaaaaccaattgattataacacgagtagctcatccattttatatataacaatttatttttacacattaccaacgtgagactaactctaataattttatatgtacatcaaagaaaaattttaaccagtctggtggtttgttttttttaatcttttttgagaatactttgtatgatttcaaaaaaaaaaaaaaaaaaaagaaaggaagaaaagaaaagtatacattgttgaatttaaagaataatagaaatatatgatttttaaaaggttttttaatatatgttgaattcgcgaaaaatgtaaagatttttctagtaagaattaggtgacaagtgttaatatatgcaagagttttaataaaattgattagaagaaaaaaatcactttataggcttatttggtacgctgtataaaagttgtattgtattaaataataagtaatattatatttggctaaagcaatatattatattaattattacgactaaaatttttaatacaatgtatgttgtattatttaatacataacaaaaatggtccgttttagcttgtattataatatttataaaggattctgggtcaacaccaatctctgacccaaactcgggacccagaccctaacccgaacgcgggactcagaccccagacctggacctcggactcgaatccaaacccagacttgtagttggtgttgggctcgagtgtattgaaaatatat

SEQ ID NO: 384543 - DNA, 2477 bp, Cannabis indica
taacttttcacatttagcaacctttaaatcttctaaattatgcatgtaagatacatcttggagttgatctggccaaattatctctatagaatcatgagattccaaaaaaaatttctccatcgtaggaaatgatatctacaaaagaaactgaagattaaattaaggataccctaaaatataacaaaaaaaaaaagagaagagaaatacagtaaatcatttcaacttatatttcttaccatagtgatgattagttttcctaaaagtttaacccacaatcgttattaaaattaaaaaaaaaaactatagttttaagaaggcccatattttgttacttcattgttttttccattaggcttctaaaacatattttgtgcaaatttttactattctcgaactaggatagcatgttttgtcaaaccatagactgttaaattcttaacgcgaaccacatgagacaaaactgtacacatttaaaatagagatgcataaaatacaaattaaaactaaaatgaaaattgcacctttctattgaacaacggttcatcaggtttttcaatttcattgctgcaacttttttggaatgtcttcattttcgagcaactatcgatatccaacatcttcaaggatggacattcgattgtcaaatgctttccaccactgaatcttttgagatttgaaagaagaagaagtgtaacttcctctagtttaggaaacaaaatggtctcattcatacttccttcctctccttcttcttcttcttcttttgtggctaaaatctcttgcatattcttacaatactctacccttagatttttaagttgagccaagtttcttgccacagtagaagaaaaaagatactttaatttgtggccatggctaatatttatatcttttaaattgtgcaggtaagatacttctcgaggttgatctggccaaatcattcccaaggaaacaagtgaactcaaatctaattgctccaaaataggaaatgctaccacctgaaaaataaaatcataatcaactttataaaaaggaaagaataaaatctagtttttaaggtttaatgttattatttgagttgtttaaatttaattaattttattttatttagtaggtgcggtattattccttaaacccccaactaagattcggttagttagttagttgttcattaactaacttaactatcaaatatgacaacaagtattttgggttccttggtctatataaagaggactactcctctcatataaaagagtacaataacaagaagaataggcacaacacagtagagagagatgttaaagtgagaaattgagagagagagctgggattggaaaattgtattgagtaacattgtcgattacgtttgctcgaattagtgagttaatgagtattgaaggatcacaccatggatgacttactgtgattctttccttatagctcctcaaattgatatttctaattctcattatcaataaagattagtggcagtgctttcaaattggagtatgaccaagttcatattaaacttaggatcgaaaccgtataattctcgtgtgttgttgtgtctagaaattatctagatttatatgtgtttatctgtctagtataatttaacatttgtttatttaagtgtgattttaaagttggaattacaaaaaataattcctatggactaaatttcctacaatatagatattaaacttttaaacatttaaaatgtaaagtgtacctcttcatcgatcaaaggtcgttcaggtttctcaatttcattggtgcagctttggtggaatgtcttcaattctccacattcccatatttccaacatctttaaggatggaaattcgattgctaaatattgtccaacactgaaacttttgaggtttggaagagaataaagtttgagccactctagtttaggaaacaaaatggtctccttcaaacttccttcttttttgactaaaatctcttgcatattctcacagcactctaccttgagatttctaagctgaactaagctttttgccacacaagaagagaaaacatactttaacttttcacactcctcaacagttaaatcctttaaattctgcatgtaagatacttctttaagttgatatggccaaatcatctctatagattcaagtgaactcaaatctaattcctccaaaacaggaaatgctaccacctgcaaaataaaattataattaacttcatatgaagtgaaaataaaaatgattgcatattcaactaactgtatgtttaaaattaaaatttcacaagtatgaagaagctataaaatcctaacacttaattgataaaagaaaaaaagctcatgcatacctcctccataaaaaatgacaatgcactgctatttggtaaggaattcaatgatgatgaagtggtgaaatctggctcccactgaactgtagagaattgaattaattttgataactcacacagatacaattttt

SEQ ID NO: 384544 - DNA, 3535 bp, Cannabis indica
gcaaatatataaaatcaaaaaacttttgaaataaaaaaattcaataattaaatacaaaatatactcaattgatctaataaatcatattaaaaaatagagttttttcatttttatattttaaatagttttttttttttttttgattttttattaaattttacagaaaaatcattatagcaactaacagagcaatttaaattcaactaaaatcgtataacaatccacataaaaactaccgaagcaaactcaaaccgtaaattaaaaaaaaaaaagttaaaaattaaaatcccctaaaaaaaacttacaaaataatagaatgtctcactttcttatttatatgtagggataaagataattgcaatgaaaatctcaacataaataaataaataaatcatttgttgtacttatatcaccatttttttggtagcttttaattcacttaaaacatgtccccgtccaattatttcgtacatttatacaaaattatttttcaaataaataaattattatcaaaaggaaaaaaaaaatagttcttttcttccattttcctttcacagcgcacacctgttcttttttcctacttcctcaacatttcacggtgatgattaacataacggtagttgccttttcttgagtggatatgttttttggttatttttagtaaggctaaacatttatattagaaaactgtttaatccaactgatccgatcgacccaaactcaaaaaactcgaaaaaaaaattaggtttaaatatattggtagttgggtcgggtcatctctgggtgcaggtataactcaaacccattcgatacctagtaaaaacataaaattattaatttattttattttaattattccactcacccaataaatctaaataaaaatagaaaaagccctaacctaattctcccaacccccgaacccgaggccccattcccttctttaggcaaccacatctgcaccatcaagagcattgtagccactgaagaccacaaacccagcacgatctttacgttgggttgaataaaatgtaacgtaaatcgaccaaactaactgacgtacacccctactataaattatttcatattcccactttgccaaatctagggtatctatttacaaatattttaggtaactaagtgcttctatggtcactctttggaagtgggtaaacttcccttacttaatttcaatgctcgaataactataattttataattcttttatatgagtgtatattgtatttatttaagaaattttataaaattttaagaaattcagaataatttacaatacaaaaattaagattcaatcaggcgtataaaataatcgaaacacacatacaactatagttgtgaatacgtgcatgtcgtgccagcccgacccatattttgaaaagccttcagtaatatggtttgtacagtgtcgactcataaaaggatatggcttgtgatgttcatgccaatattttaaaaggtaagcccagcacaacttgtaagctcacattttcatgtcgtgcttagacttgtgctgtactttactcgagccgacccgtttttcgtaaataggtcagttcattatcttatacgagtggaactcaagcttcactttttcactattgttttatataattaatgagttaattactaaattgtatgtattttttttatataattttaattatttttatataacttttcaacaatattttaaacataatcatataaaaaattgattagaatgattaaatttaaatagttaataataaatatatatgtattattattatcgttatcattattaaattattagaatttttaacatgttgtgctttcgggttagtatatttgtgcttacgtgttgtgtcatgcttaagcttattcgttttgtgtcgcgctaggccgtgccaatttgctgtattgtgtcgtttcgtgaccaaatctatatttttttgtgttgggtcgtgctcgtgcctcctagggtcctgacagtttcgtgccgtgtcaaaaagttcaactcatatttacaactctaatactacaaactatttaaattttatttttgggatgttaaattattatgaattttaaaatttttatagaatatcttaaataattataatgtacactatgtcactatcatattaaaaaaattaaaattaaaactatctgaattttgaaaaaaacataaaaaaaaaagcacatatacatctattttgagagtgcaccataaaatttcctataatactcaatatttttttttggtcatgtttttaatatatggatggtgtaatatttttatataataatacatgttgttgttgtagttatttaagatatcgtgtaaaattttaaaaatattagaataatttactatataaaaaatatggttcataaaatctattttacacaaattaaataaaaaaagtaaatactattttggatcatgtgttttgtaaaagttactgtttggattctctgtttgttaaatgacaaaatagattttgtattttccaaaatgataaaaataggaccttgagcttaattttggacaactttttaaatataatctacttgaagacaattcctaacacgaacagagacaaaaaaatgtaaacagttttgtcataacacctttaagttcagggtcctatttgtactattttagaaaatgtaatattcattttatcatttaacaaaacaaatggtctaattaatagcttttataaaatacgggctctagaatagtatttaccaaaaaaaataataataaaaaaacaataaccatgtaaacacaacagacaatttaaaacttgttctgggtggttttaattttttttttttaaaaaaacatttggaaaatttgcatgatagtgcagcataaaatttctctttttttaattaaaaaaatccagaataataataataatatttttttaaaaaaaagagtaataatgataggcgtggcagtatagtaaatataaatgaagaagaagggtaataataagagggagttgacctgacccacttttatcaaatcagaggtcgctttggctcatcgcacactccgccactaaacgacaaaaaatgaccggttcaataacggaacctctacttaacggttacggttgcttttgccacgtggctttttcctggattgccgtgtggataaagctcttaacttaagtcgtctacactcactcctcctctagtaacggtcaaacaacttttgttttttttaaggctaattaggatttttactaaatatgtacaaaatcatgcccctaaatttttaaagctattgaaaatgtcgcctgaactattgagattgttagatttaaggacttttgtctaattttattcaattttactatttcaatgattgtttatgtactaaactatgttccccagactttaatatctaccaaatcatgcctttcgaactttgacatgcattaaattatgcccttgaactttcatccatgttagacttttttactaaaattagaaaaagttcttaaatccaacaatctca

SEQ ID NO: 384545 - DNA, 1099 bp, Cannabis indica
acttcaaggcaaatcatttcaccgtttaatgctctgatcgtttcttttcccattagttcccatctgttcgatctactcttttcatgattgaacgattatcttcttttgggtatatattatgagaatcctttctctttcgcctgcccaccaaacctttgcactcgaacacttgttaaccaccttcttctctaaaagtgcatgccctcactgtctctcaccttctttcttcaaattttatcaaataacacccttcgacttcaagacctagtctctctgaactcagagtttccatcacgaagtcctttgcaacccagaatttttcaaacaaccagtaagtgatgtttccttcttctgacttttttaagttttaaatcttaatttccttatgtgtatgttatttttcattcgcaatttgtttgagtaagctctatatggatgtttgagtaatttaaggcttaaaaaaatttaaggttacctaatttgcaagttctgggttttatttgtgctctatttttctacgaattggggaatttttctctgtaaccacgtcctaatttaacccaaaattcatgctcccaaaatcctcagaatcagaatgtcctcaatttaggccttagtttataaacctcaaacccaaaagcctcaaaccttacttcaaataaacgatataaaaattaaggaccacctcgttaggtttaactaagaagaaacttctaaccactataggcaatttttacaagaagttattgagggtaaacgaagcttcttgcgagaagcaccttagcttgaatcgtcttgcttagttaatattcccttagcgaagctaatatttttaccaccagtcactgttgttttttcaccaggtgacttagaatttaaacatatggctcataaagttcgttaatccaagactccatagaactcttctgtcactttcaaggcagaattgattgaattcaaggtcaggtccattggcccttacgttggggatgtcttaaggtcatgtggtataaggaatgagaaaggtgttgggattattttaccatgatctagatttactaacaagtatgttgaattaacattctaaatatgaatatct

SEQ ID NO: 384546 - DNA, 908 bp, Cannabis indica
agttttcttgggccctagaaaaaatagaatttttttgggggtatattgaaaaatacctcttttatttatcaattaaccaaatctacttctaattttatatttaattgaaacatacctctttttatatgtattgtactcaaaataccctgacacaagggagtcacatggaaagtatattgagattatagggataaaataggtaaagtgtttaaaaaaagaggtaaatatgataggctttaaaaaagagggtaaaaataaaagagaacaatataaaaaaggtatagaatctaatttcctcaattttttggacccctgaatttggttgggtcctaggcgcggtctcgcctgccttaccctaagactggacttgcttgtgtgaagaatgcaagtcattttatagtcatgttatcatgtttgacatgaattatactcctcattttaagaatggttattataatattaagccaccagaaacttttataagtaatttattgtttcgatattctttttctcatttttttttcaaattacgttgattcttttaattaagggtgcattggaaaaccaaaatgaaattgaatttgagtataattgaaggtaaaatttaaataatttatcacgtttgtctgatcggataatcagtaagtagccagtaattgagggatctaattacacttttcaatttttatgtctctccttataattgggtttaattacacttaggtacgtggcgtttggttgggagaaatgaaaatatatgaatgagaatgagaatggatttgagaataggaataaaatgatataaaatttagggatattggcggctaagccacctgaactttacgtacagtttgtaacactaaaccacaaaccgaatttttggcagctaaactacctaaaccctagtt

SEQ ID NO: 384547 - DNA, 4421 bp, Cannabis indica
agagagtaagtcgagagaaaataaacaaaaacagagagaaaataaataattatcaaccaaagatcttggtttgaaatctaaaaggaaacattgtaattacctatatgttcatagtgaaaatgaaacactctaaggtagcttaacgaagacgtagcccactgatttggggtgaactctgaaatcatatcgtggtgttcatattctctcttatttgtgtttgtttcttttcatcaccaactctaatatctattttgaatgtgtctggatgtttcttgatgagtgtgtttggttgcttttagatatcgtgtgtgtgattgatctgtgtaatcgattgtaaaaaaaaccctagattttctatggagaagacgaggaaggtttgagactttggtaccacaagaataatgcacgtggaatcgggagtgatcgtgcattccctaactcttcttgttggactcaaaagttgtgcaagtcaaaaagagatggaggtcttggttttcggtctttaattcacttcaaccaagctcttcttgctaagcaaacttggtaaatccttaaacgtccaaactccatcgtggctagaatcttagcagtcaaataccacccaaactcatctttcttgaactgctcccttggccattccccttcttttgtttggcgtagtattttttggggaaaagaattactgcaaaaaggtctcatctcaaaaattggcaatggtgaaacacttctcccattcatgattattggatccctggcttggccatggctaagatatcccaaataaccctgtccccaatcttgtgacctctttcatctcaaataacatgatgtgggatactaactgtctcaaccagtattactcccctcacatagtccaagacattctaaccattccccttcccccatcctatcgaagataaccttatttggatactcacaaaatctagaacttacttggttaaattgggataccatttaagtttctcaaccacctttcctcctcctttattcccctggtggaaacgcctttggcaccttaatctcccctcaaagattaaacatttttcctatagagcttctaattcaactttatcgacaaacaagaatctgacctataagaagattatccaatttaccttgtcttcccgttgtggtcaagacgttgaatctgtttctcatgccctgttcttttgcaagagagttcgaagaatgtggaaaggtacaattttttacccttacatattttcttcaaatttttttctcttttcataatattatttacactatttttactaatttaagcaaagaagaaatagaattctttctttgtgctgcttggtttgtttggtacaacaggaacaaggaaattagatatcactcgtcggatcaaactcatgctatcctagatatagcgggaaactttttggctgactatagaacttcagttgcggagcacaatgcacccattcttggatcgagacctcctgtcgctactagctggacacctcctccacaaggccttctcaagttgaatactgatgcagctatctcgaagaatcatccttcagctggtttaggtggggtcatttgcaatagcgatggcaaagtggtagcgttgttgcttctcctcacacagttggcggagatgcggccatccttgaagcaatgtctctcctttttttgcttcattggtgcaccgaagataactttcccattcactaggttgaaactaactgcaagaccatcatcgatgctcttgtggcctccaaggaagacatttctctgttcagagatctcttcaggctgctttatctcattttcccaacgtcactatcacgtatgtcaagtgctctactaatacttttgcccacaaattagcaaaattaactttgggattagatgaagcttctatctaaattggaaatgacctttgtaacctcaaaaatcttctcttctcttaagagaatccttccctaaaaaaacaagagagagaaggatatataaaagaaaactatagagggaattaaagagagagggagagtgtgcgaaactgagaaagagagggtttcgaggtggcactgtcaagactggtggtggggttgggtagagtgtgatgagattatgtgattccaaattgaatagagtgatttgagtgaagagaaaaaggagtgagttgttttggaagtaatttgggaagtgtgaaaaaagaattggcatatttttgttcacatttttgcgtaagaaaattaagtgaaaatatgtcgtgggtaaaaaatatatattattcatcatgatagttatatattttaattttttttatccgaaaaatacaaaaaattagataaatgatgccattagcgaaaaactttagttaattaatcaaaagattaatcataatctatgaatagactaattaaatctaacaccctttatcttgacttttgtcttaaccccttaacccacacataataaaacgaacaaaacgacacaacccaaacaaaacacacacacactttaattattaataataagtaatcaattaacttgttattattatttttagtaactcatctcaatatcattatcatattatcgtttttctgatccaacaaaacgactactaaaaagttaccaaactttctgtcactttctctcaattttctcccctcaatttctctcttccaaacacccctctttctttctctctctctagaacaaaaagcttctgcaactctctacagcctttgcctgtttctttcttctcttgatcactttgttttgtccatttctcaccaaaactttcctaccactattgattctctccctctctttctctatcctacgactgatttttgatcatgcttcagagcttagtcactcaatctccattacacagtacttcgaatccaaactccgacccttctaattcctcctcgtccatgaagaccaagcgtgtcgaacgtgaaatttcagcacccggcgaaactgtctccgaagacccttccaccaaaaggccagctaactcagccagaaatttctccgacgacgccactatatccggtgacaaggcggtcaacgatcaagaggaggaactcgttgtcgagggcgagtcaagcggtctgagactcctcgggcttctccttcaatgcgctgagagcgtagctatggataacctcaacaacgccggtgacctactcccggagattgctgagctatcctccccttcggaacgtcgccggagcgcgtgggagcatacttcgcacacgctcttcaagcgcgtgtgatcagctcctacttgggaagatactcaccgcttactaccaaaaccataaaacctaactcagtcccatcggatcttcaatgctttgcagtcttacaactctatcagccccttggtgaaattctcccacttcacggcgaaccaggcgatcttccaggcactggacggcgtggatcgcgtccacgtcatcgatttggatataatgcaaggcctccaatggccaggattgttccacatcctagcttcccggtcgaggaagatcaggtccatgagaatcaccgggttcggatcctccaccgagttactcgagtcgaccgggaggagactcgccgattttgcaagctcactcggtctccctttcgaattccacccgctagaagggaaaatcggaagcatcaccgacccgagccaactggacgtgaggccgaacgaggccacggtcgtccactggatgcaccactgcctgtacgacatcacagggagcgatttaggcacgttgagactgctgagtttgctgagaccgaaactaatcaccatagtggaacaggacctcagccatggcggaagcttcttaggcaggttcgtggaggccttgcattactacagcgcgttgttcgatgcgttaggagacgtatcgggtgcggacagcctagagagacatatggtggagcagcagttgtttggatgtgagattaggaacatcgtggccgtgggtgggccgaagaggactggtgaggttaaggtggataggtggggtgaggagcttaaacgggtcgggtttaaacccatttctcttggcggtaacccggccgcccaggctagcttgttgcttgggatgtacccttggaaaggatacacattggtagaagaaagtgggtgcttgaaattgggttggaaggatttgtctctgttgactgcgtcagcgtggcagccgtccgattgaaatacttttttatttttatcatttttttagatcaaatatatatatagttgatttcttcgatagtaacaactaatcgatcgtatcaattttcttggtggatatgattgagattgtttatcggatttggtgagatgaaattaatatggatcagggccgttgatttatgcatacgatgatggtgatcatgatgatgatgat

SEQ ID NO: 384548 - DNA, 1876 bp, Cannabis indica
gataaacaagatcaatataaagaattacaaattaaaatagaaatagaataatatgtatgaacttttggtgtagtatactaactatctatccaaattttcagaaaccaattaattagaacttaagaaaaataaaaataataaataatagacataattttttacgtggttcatgcattaattatccttaatccacgagtccgttgtattagcattataggcaagtgttgaatattacaagtgtttacagtaagaacatgaactctctattcctttcgttctccttaaagaagttaaaggttccgtaggttaagaaattcttctctttttgtacatgataaataggggtatttataggaggtttcttaatcaacatgccttcaggaccacccctactgcaagagatctgaccatctgcttggtaggtggtcgcttcaccgtgcgatgtgcagagataatgactcgtaccgttcgaacgtataatacttgtcacccaaaggtctttccttttaaaatcactcaatggttgttgggcaataggcaggtacggcggtgcgcatgaatcgtactatggcttgatgtaggggacaaaaactgacattgtaccagaaaaagtatcgccatcaattcagtggtctgacaagtacgaaagatgaccttccacgatattgctcgggagtaaaaatccttcagagtcttttcgctacttacatggacgtacacgaggcgggcctttctgcgactctctccaggtctgggaggagcaccttttgttctgcacctgggagggacagatagcatgcacactcgtgcctccacatgccctctgccttgcgaaggatgtacctttcggaaaagccttttatagaagctagggcagaaggctctaatcagctgaggattaactagaccttcttcattggattccacgtgtcatgttttacaaaaatacagacaacatttattcccaagcttttgggatgcttcgcggtctgggagcttgtagtgtcccttattttctcatgactagttcttggcacgtggtgcgagttgaggtcactttgtgtcacatgaattgttgtaaaccaatgcatcactagttgtatcgttagcacgttaaattggaagcactctaaatacaatttctgatagtacgcgtgaacatggtgcatttcttggaagaagttaaaatgatagcagagtgattaaggtgacccttcacttatcaagcactcttcatgagacatgccataattgacgttaaacgtttggactgatacaatcttttcaactcctcatttgttagattaacatatgctattttggcaaatgatctggaccatttgctttgcatagaagggactcctcatcttctttcaaacttcaaaattttcatcctttgcaccagaggtcttccatttcgattcagcctattcttcactgaacaaaaatttatcagccagaccaatcccgattgtgcattttaccaggcacgacaaagtagtgttacctcacgcgatgtcgttatccaccaatcgtcaccactcaataagtaccttatttcccttgttagttgtattcaacttcatgttcaaggtaggaatactgtgtttgagcttagtatagtgtatcttatatgtttgatcggtaatgttgttcatagtagcatattgttgatgttgatctatgcacaagtctttgcactctgtaagcgttgatcttatcagaacggactgagcatgactattttgccccttcaaagcatttatgcatactgacactgttggattattattttatcaggatctagatttactaccatgtatgttgtttaacatcctaaatgtgaatttctaaaaaaatggaatttaaacacata

SEQ ID NO: 384549 - DNA, 939 bp, Cannabis indica
agttttaaggaaaataaatagagggagttaaagataagataagaaagttagaaatgctggtcgatatcccaaaataaataataataaaaaaattagtttgtgaaacatatataagaactaagatgttctagtacgacatcattctaaatgattgccattgactaactatattagtaccagattatgaatcacgttattttgacagtttttagtttgacttttccttactttatagggctacattttctgtttctgctgaagtttatatacattacataagcacaacaactaccaggcaccagtctagtctaccagaaattaaagtaaattaatttgtaaattactcacaattatgtaatcaaatttcttgaacttgtaatctttactccctaaaaaatattataagatcattttttaataaaatgtaaatagtgttagaatgtatttatgacccttctattacaacggcaaacacaaaattatgcatactacaaagagataagccatttatgatgaatcaatgcacgcactgctcaccatacttgtataggcaaagaagcagttgataacattgaaaaccagagggagtggtagttggtagattcaatttaattctacagactgtaatgaaatatgtaggaaaattttaaggagaccaattttatatctattggtaaggatattttaattttcaatacataaaaattatatttcaaaattattgtgtagtaactataataaagtattatagtagaaaatttagaataatgtagaatactaaaataaaatttaaacatttcagtgaaatgcacgcttattttctttagggtgacacactcttaaaatgtatgtactgatacacccttaatttgtttcggcatttaaaagaattttttagtctaatttttttcatattcatgtacgttataactatttaag

SEQ ID NO: 384550 - DNA, 1036 bp, Cannabis indica
atcaccattgatcttcatttaaattaaattaatagtaataaattttattcatatatattttatacatcaatgaaaaaataaaatatcttaatcattaaattctatgtaaaaatgtaaaacgttatgatactccttaacaaggaaaaaaaaatatcttaatcattaaattctatgtagaatgtaaaacattatgatactccttacaaggaaaaaaatgttacgatactaaatccaaacacttttataataaattgaaatgtataaaataagcttagttttattaatagttacaatttacctaagaacttgtgtaacaatataaatttgaagacatcatatcagatagtaaaggtagaatttacattgcatattgataaattttaagtgtgttttgtaaattttaataaaatatacatgaaatatcaatcgttacttatgacattgaattcaagtgtttctgcaataaattaaagtgtttatctttggaagataactaaacgataatactttattttattaatagttacacattttaaaaactcgtgctacaacataaattcaaaggtacgttacaacactacatttaattaattctacaataaactaaggtgtacatctttaaaaaataactaaaatgagaatataattagttttattaatagttacactttaccttgtaagaactcgtgcaacaatataaactcgtaggcaccacatcatagtaaaagtacaatttaaactaaatattcatataaatgttataggtatataaatttcaataaaatatgggtgaaatatctttgaaagataaatttcaataaatgttacttatgacactaaatttaagtaattctacaataaattaaagtgtatatttttgacagataacaaaaacgaaaatatacttagttttatgggatattggtggctaaaccacttgaactttacgatttgtaacacttaaccacaaaaactgaatttttggcggctaaactacctaaaccctaattccgttttgctctgcacacctccgtcc

SEQ ID NO: 384551 - DNA, 1118 bp, Cannabis indica
gtaattctcatatagactttaagatattacaatataaagcttgaatataattttttaagaataatctaggtcagtttaagtaaactaatttttttttttactttaattaattttttttattaattttaagatttttatcaaatttttaagatttttttattagtttttacaaattaaaagaaaattttaatttttctaataaaaaaggaaaaaattttatgttggtcaaaattcagggggtaaaatactattaacggtaaaaaaagaataattatatatttgttatatttcgagattaattttaacaagaactatatgtaaagcggcacaatctagtagtgccaaaaattaaagaggtaaaaatacttgttattcttgagaaaatgtgagaagccgattaaaaaataaaaggatctattatatcattttattgtggtatcgaatcagggccgtttttaggcataggtaggttaggcccgtgcttaggacccactcattttagaggcccaaataaaaaaatatattttaaaaaatatacatatattttttttaataatttttaaaaatacaataaggactcaaaaatttgtttttacctataatccatttcaactcaagatcgatcctatatcaatttaatgtatgattgttattggcgcaaatctaattattctatttttcatttaagatgggaaaaaattccttttggaatccacttcccaagttttctcaagagatttaggctttgttttgtcataataattattattatgtgttgaacaataattattattttttaaatatatataagtaccgacttttttaaaaataaatgtgtaaatggcggcaaaatctccaatactttcgttttagtttcattaaacccccacaacccaaatttctgcgggtaaacccccaatactcgggttctgttagcaatttaacacttccgtccaaatttagctgttaactgccaggttggattgtccacgtggacacaatatacatgtggcacaattttattggtccacctaaaaaaattattttaaaaaaaaataaaaaaataaaaaaaaaactaatttaaaattaaaaaaaaaattaataaataaaaaattaaa

SEQ ID NO: 384552 - DNA, 1755 bp, Cannabis indica
tatatatcttcgtgaatatgttaatagaggtatataatatgttagcgttaatgttaaaatagacaactatctactagggtatatagttggcaaaaactgctttagttaattttactttagcacataatattaatggcagccaaaccattaatattttcattaatgatcacatgcactacatccaaacattgtgtcttttcttcttttcggattggtattagtcaattaatagatccctatatattcacccacactaaaaaaatacccacaatatatgactataacatgaggtcgattaatagatccctacatagggttattaattataatttagtgaattgttctcaaaataataaagatttgtacttctaatataaccaaaccaatactattcatcaccgcactagatcattaatgtatatatcaaaatccaaaatttacgtacatcgactacgttctacatatataaagaaatattttacaatgtatgaatatatatatatgatcagcattggagatgtacatttaatacttttttaatatattatatatagtggcaatatataaatataatatgggtaatataatccactttttgttattattgtcttgtgtcatggagacagaaattgagagcgtatgtagcagactagcagtacgtacgtaggacaacatatgcatcttcttcatctatccaacacaaattcctagccagaaccctactgccaattcttatatatatgacaattaattataaaaataaatggtcagaagatcaagctgtataagatttatatatatttcttaaaaaaaatcttatatatttcaaatttcatttcgtaatatataattgctgaattcaaccaatatttatttgtattattgacttatataaattaaatgaatgtgcattcaaggcatataaatttaggtggatgtgaaaacgggacatctcgaaagtggatgacatatacaatatatgtatgaatatgatacataacactatctctgaatattattgatatatggtgttagaaagtataattaaacacatttttactggtatatatgagtcatatatgtaatatttagaaagtgtacgtatgtatttattaatataattaatacacacaattacgtacatgtgacctgtccgtcgattgatcgatggtgtataatgagaatttaaagaaactcaccaaccaaccaagctaatgggcttgaaactgaggcaatgcgaattattataacttattttatatcaatttcaattttcaatggtcgtatagaaaattatatatggaaggagaaatgcattcaatttatatatgttaatctcaaagtacttgtcagttctcaatatatatgatacttttgtcaagagtattaaattggcaatgaaaattatataccaactccaagtccaaatgagaaaaactataagtccaaatgaataccaaaaatttggggaaaagagatctcttatacacttcagctttccttaaatacataatttcttagatgcattatttacaaagtaaagatatgtgcacacataaattatctccaacaaattactcaatacaaaaatatctatttatattacctaaagggaggggaggcagtggcagtgtggccagcggaggcacttactacaaaaaattgttacttatttagtgacaaatttttagtcacaacataattttttttgtgactaagtgagacttttagtcacaataaaatgttacttgtgac

SEQ ID NO: 384553 - DNA, 1152 bp, Cannabis indica
  modified_base (1053)..(1053): a, c, t, g, unknown or other
ccattatttggcatgtcttcaatgatgcaaccagagggtaacttccaacaacgagaagaagaggtattatcctttgaaattttataggatacgtcagcaatcacccaaattccaacctcaatttgttggcaaaggcgaaggaaagaaatttctctttgcggcacatgaggcgaaaggacgtgcatttgcgcatacatctgcatatgcatatcttatatttttatcaacatgcatataaaaatttgtacgatatatacatatatatataaatgcaataacttaattatcacacttattattatatgcagactatatttaccagtagcaaagctccatgtctgtttcccaagtctcctttttcaagttcttcaattgtcttagctttcgtaataattgtaggaagtaggtctacgaatttattctgcgaaatatgtataattaataagctcgagtatataaatatgtataattaataagctcgtctttgacaacatatattatacaaaccgacacttacggaatcaagaaagatgtcaaccaattgcgcagcattcatggccacaattccggagtgtttagatgattcaaaacgagcagaggagggatttgggagatgatgattgatattgtctctctgcggaaagatcttataatagttgtcacggtgaagagtacgacggccaccatcgccatgatcagtggtgggcacagaagaggatgatgccgtggtccacaaaggctcatcaatcctgagaagcttaattagttcatccatggcaagtgctgccgtttctaccataactcccctttccatctctgtgatacctttgatttggttcattttttcttgttccatgtttggggtgcttgatgatgggcctgaccttacagcagatggaagtaggtcaaacgaggacccatccgtacttccagggattcgtacttaccagcttctctatttctggtaatcggtttccccatgtacttggccagaaggttcgcaccttttcatgctatcccaaatcaaaataatataaaaatttagttcaaatntaaatatttcaagcaaaaagaactaataataaattgttccaaaaaactatgtactaattctttgtattgtttaaactaaccacacttttatataatgaa

SEQ ID NO: 384554 - DNA, 2892 bp, Cannabis indica
tattgcctattcttcatgatgtgcctgggcttgatataggtaattggtgatactagacttatctcttaccgataatttgatagattatattgtagtcctcaaatgatgcatacatactatatgaggcatcgtaaaattaaagaattatgagtttaaatacttgagcacatctttttagagtaaggagtagaatgtttttccccataccacattaaatgcgtgtatagtaatttatcttggagtagtacgatatgctctgtacatccctctatctcttctcttagttgagttcactccaggagaagagacaaaactactatcctcttgatggatccttctagatgtgactaatcttctaaaactcccaccaagtattaaattccgaatgcaatttaatataacatgtcttgtagtgagggttccatgttatatgacttactcttaaagtgtcacatactttgagagaaattctaagcaagagtaaaattttatataaactataaaatatgatttatattattgttattaattaaaaagagaaacgtttcaacacaaactcccacttcatctcacatctaccattaggtatacaagctgtagatttaccattgtaaaggttaagagtaatgaattttatagtgctaaccactagtgtcttaataaataaataaaaaaataatattaaataaattatcatgtaacatttcataattagtccatgttatgaatttttatttttaaaaaattaattttaatataccaataaaaaaataacacgtaagtaataaattgacatttaactgttacatatctacagagtttctaaaaatataactttattaaatattattaccgctaaaaattaaacttaaatatttataccacaaattactcataaaaaaatataatcaagatcttatagagtttgaattaaaataaatatataattttcttttatgaagataaagttactaacttttaatgactagttacatataaatattcatttattaaaaagttcaattatgcatttataagaataagaaaccttgttatggttaataataacttctctaaaaaataacaagtattatattttctctgtgttacagtaaaattaagctttaagttcatttttttcactgatttttgctaaattcatcaagccttttgtaaagcttgaagagtacttgggtacagatctgagtagatgtgcagggtccacacatgagatataagacattacccaaaggtctcatgtagaggtcgtcttcttccctgagcttcttaagaagtgatcttgcataaatggatgcatacctacacagattcaaatacctctcaaaaatccaatctttggaatgaaggaaaaggtgaccatagcaactaaagtagtgatgactgacgtacccggcattagaaccttctgctcggagttccaaggcgaaaatggttcccaatgcaaccactctctgaactgctggatgtgatgaaagcttatatactagctctttatcccacatctacaaacaattaggacataataaaatatcaggaggctcggcagtgtttcgttaaacatcattaggaaacatgacaagccccgtatttgattttatttttggactcttggctgtatgttcgatcgcttgaagctaacaccactagagtctaaaaagacactatagagcaatgccacatttacacctaacagctaaaacgccggggaaactatggatagctctttatgactagagatgcaacaattcctaagcttctgcctcttggaggcctaatcaaatgattgtgtaactttacatacttataactaaatcaagaaatttaaacaacctgcctcttggagttgtaggcctaatcttatgaattggtaatgtgcatacttatagctaagtcaagagtttaagcaaagaacatgcataacaatacagaaaacaaagttttacatgtacctccttgagcgaacttccttcagaattcaaatttttgtttgtctgaggatctttaaaccatcttatggctttggtagctgctgtacatccaagagcatgtgctgaatacgagtgtccatgcaaaagggctgtcagctgaaacagaaggaaggataaaagtattttagtgaatctagtaaagtttaatgcttatacaccgaactaacagaccaaaatttaagttttctttcatcaataaaccattgttggcaagaaacaacacaaatttatgatctactagtgaaaaaatggttcttttctttcaaaatttgagacagatattgttatgattcttgaaattaaaaatttgaagcttcaaacagtgcactcaaatcatatcttatctcattttgacacgtgagtgagtgtactcaagaaaataacttcaatgctagtcacagacaaagtacccaatgccatcaaaaatataatttaagaatatttatgtgcgtattaactgtttaaagatttgttgaattaagatttcattttaagaaaaaacaaattgttgcaactgccctttcatttaattgatggagagatagagatttcaatgagacttgaaaagtgttttgatggcaataatgtgtaacttgaaataagtcatcactactacaaattaccttagagtcaccgatgaatgactcaaatacagattctgtagccaacgtgacagataacggtataattccacctgtcataagctttccatagcaggcaatatccggtacacaagaaagtaatttggttgcagtctgtcaagagaataacttataaatattccaagaaaatgacaaattaagaaaaaatggaagcaacttagataaaatctaacctctgtacccagacgccagaagccagtaaaaacctcatcaaagataat

SEQ ID NO: 384555 - DNA, 682 bp, Cannabis indica
agctacaacatcttaaaccttagagtgggcattgcattagatttggggaagtgattggtgcgatggcatgagtcacccaaggctcctcccaaattttattctagtatcattcccatcaatcaacaaaaactttatagacattctcatattcctggctttcacaactcctttccaaaaccaataatgagaatctctatagttgcatatcagaaagtgattatctctaaggtatttagctttgaaaacatttttttttttgggtaaggggcttcaaaaaccttaacatatattggttatcagaaactccataattaatgtacatgtaaatttagactgagttagatttaagattacaaacaaaattaagaatcatcttcagcaattttaattttgtaacataatgatttttttaaaataaaaatgtacataattagttggattataggttggtataaaatgtaaatttttaagtttttgtgttgaatttgattgcttagagcatctttaatagtaacattttaaagaatacttgttaaggtagaaagcttaggtggtaaaatatattgatgttatactattggatataaaaaaaatgatatttttgaaattcgcattgatgctatattttttttataataaaaaattaaaagtacaatgtatatataatagtttaataaaaaaa

SEQ ID NO: 384556 - DNA, 1224 bp, Cannabis indica
agagagagagagagaaatggtagaaacataattgagagaaggaagcaaaagcttaaacttcacttctgatgctaaccttttacttataaactagttcacaatataattatagaatctagaatgaaaaactacagttcaatgacaactataactagctagctaatctcttaactaattagctaactaactaattgtcaactaattattcaaaaaaaaacaaaactaattgtcaactaattaatttattagttaacatccctatcaaaagaaaatggggttgaaatcgttttcagtttggagtttagatagagaaacctatctgtggatagagccttcataaggacatttgctacttgatcaatggcaggaacatattgaactgacaactcctttgctaagatttgatcactgacaaagtttaggttaatatcaatgtatttagatctagcatggaacacaagaaaactacaagagtagttgcactttggttatcaacccaaagaattggtagatgttgaagtgagaaatgaatcttacaaagaataaaaactaactaattttactctacaacaacattagaaagagccctaaattcaattccaatgcttgaactagcaaacaccttttgttttttggctgaccaagagataagattatctccaagctaattaacttagcaaccagttgagcttctatcttcaatacaagatgtctatcagaattagagtaccattggagagatattgttgttgtaaaagaaagatgcagaccgtcaaaaacagtgcctttgaggtatttcaacaatttgttatacacttcccactgagtagtggtgggtgttgggttttatgccctaaataaaaccctatttcaatgtaatctccatcatttaaatatcaataaagaaataaaagtattttcatcacttatttattgtgtcgtttggttcatgttacaatttatatgtttattttgatttataaattcatcaaaatccttgtcacatttatgttctcgtttattgtgtcgtcagcacagtgggaagtaatcaagattgtgtgattaaatatatattcctatatttatcagtacacagggtttaactgatatgatcatctacaacatagtttacttgcaccttgtgttgggttttgtgccctaaataaaacacattgcaatctgattagttatcaatttaagagatttgaagtgatttatgttaac

SEQ ID NO: 384557 - DNA, 1277 bp, Cannabis indica
ctgatatatatatatgtcgatcgattgctaaattataaatttataatacaatgtttttcatacaaaatccaacattaaccttcaaagaaattttatacaaatgaaataaccaaagaataaaagaatcctacacactaacaaattaaacaatacaaacagcaatacaaattgatcaaaacattctagctagttaataacaaacttgtatacagctaattaagagcctaactttgatttaggtgtggttgccgcaacagtactggatccttaagaacccgatggagagagctcaccgccggctggcatatcggccagagcagccatgaaacggcgaattgagacagagcgagctggtcggaagctatgtgacctcttcagatcactactcgaaaatacggtcgaagatttcgaaaggatcaaatataccaaagcttgaaccataaagaatattgctatctttatcaccatttccgatcctgaaaagctacttccaataatcgaatccatcatacaattaacagggagttgttcgaagatgttaaatatttctggcctggcttttcaatttgttctttgttttctcttctttctcagatgagtaattgatataatgagtagccaaatgtatggaatggtttatataagggatggagattggagtgttgagatcaaaaattggggagcactcagcagaggaatttcgaggaataaacgttgagatagtctttggttgactcagtcgccatgcattgcacgaattattatttgagctatttaattgattaattcttaatgtgattataacacgtggtgacgtggattgttcttatttcttatccatttacaattaactattaaacacgtttgccaactttgttgggaaagggtaggtgggccccattggagttgctattactgtgcgcttggtcaaatgtaactgcttttcgctctatggcccacgatggcttagccgtcagtcaatgaaattataataatacttacttatagcttgcatctttggtagagaccaaatatattgacccaagcttttcgtttcagtgccttaattttttttcattaatggtatcactaagtttacaatcacaacaagccaaatgctcaatggtcattcagtgctgtagtttagattagaaaatgatctacagtattaattggataataatcttgtattaatgagaatttcttttgcattaccaattattttttcttttgcaaaataaacattttcaatagaaaaagaaaaatacagttccata

SEQ ID NO: 384558 - DNA, 1758 bp, Cannabis indica
gcacagcactcttcaacaatgggtccacatgcggagcctgtttttcaaagtagtgtgtgtaaaattcaagacaatggtgcaaaaaaaatgcagggtcaattagggttacagccacaaacttctgccctccaaactacacaaaaactgttgatgtttggtgcaaccctccacaaaaacactttgatctttcaatgccaatgttcctcaagattgctgagtacaaagctggaattgtcccagtcgcttatcggagagtgttgtgtttcaaaacaggcggcatgagattgagttgaaagggaacccatactggttgcttgtgttggtttacaatgttggtggagttggtcaagttgttgatgtcaaaatcaagggtgggaatggagaccagtggtttcagatgaccagaaattggggacaaaattggcagacttcagagagattacaaggccaaactttgtcttttagggttactgatagtgatggtaaggttgtacagtctgataatgttgctcctgaaaattgggagcttaataaagtgtatgagggcaagaactttaggttgtgatcgaacagaaattcgttttgtaaaaaaataacaataagatttttatccagtaatgggatattatatttaattttagactaattatctacaaaatctttcatacatctggtcatggttaatggaaaacaatttttcaaactaaagatgaaaaatagaaaattttgaaaagagataaaagaaaaaataaaatatcagtttagcaagttgtataaaaaaattattttaatttgaaggaggtattttccacataaacaccattacccaattgttataatatatacctaatttttgatttaataacaaaattaccttaccccaacctacaaaggtatgattctatcactatccattccgttaatcttcgttagtgccaccacaaagaatggttaattagaaaacctaatggtgagcctaaagatgaatccatgagcaattcatgaaggatcagggatacaggccaccaaaagctcagacattttattcctctctatttttgctttttcttagacacaaaaaactccaacacttatacaccccatcaaccgtctcaactattttgttgctctcttttattgacacacatttctctctttttctatcgctaccatgaccactctattcgtgaaaatattttcattgttaactatgatcttcacattttaggtatccttgtagtgtattgatccctctcattttccacatcatcaactaattttgtaatttgttaatttatcgaactataaatagaagctaccatagtctatttttgtcatatgaataagcctattgaattagctttaatttttctccaaattatgcaaaattcctgtaatttgagttaaatataatcaataaagattataatttcatgttcattaagtgtgtattgttgttagctagtaatgtgattgaacaaagctcactaagcttaaactgatcttgattatgagtttgaatcgatcataacaagtggtatcagagctaggctttagataaatcaagattcgagtttaagggttcaagaatcaccaagaaaatctactgcaaagtttaagattgagaagttcaatggagccaatgattttggattatgaaggatcaagatgaaggctttactggttcataatgggattttaaaagccatagatgatgggaagaatctgaaggagattgaaactgttggaaattatttt

SEQ ID NO: 384559 - DNA, 1564 bp, Cannabis indica
aagaaaaaagttaagaaaaaaaagaattacaaacattgtttgtgatattacctaacattatagtcgtaaaatgcggctcacaaaactgaatactgcggttacttagtactaaaatatatggatatacagatatataaaggatccatgttcctgtaatttatgcctatgattctgtaatgagtagtccttgcaactgagccaaatatttaaatttgtacttgtatcatgtctaactattatttttggggatcatagtaagaccaactttttctatctttctttcatcaaaaaaatatacttggatttctatctggaggaaattgatgattaaaataactatacacaactcacacacgtcaatacacaaggtcaacaatatgacctttctttatcaaaaaaaatagaccacgtaatttagatacatttactttcttgaaagttttgattttactctaccaagcttttactctaccaatttatctaatatggtcaatttaaagttaaacaaatccttcgaagacccagcaaaatcaaataaaatgataaagatttaaacacaaatcagtaccaaaaaacatgtacaaaatcaaatgaagttaatggagagaagatgagagaagagaagaacaaatacaaatatttacggaattcttaaaaattgggttacttcctcagtgaggtgccttagagaagatcgagccaaatccactatgattaaccttcgattacaacgatttgagacgattctaatcacaatacgatttagtaatctctccaagacaattaggtaaagatcttgactttctttgttttacagttttaacaaatatctctttcttttcactcttttttttttctttccttacatctgttctttcttttttgagagtcactctctcttagattctcaatctcctcttgtatttggtgtagaggactccttatatagaggttcttgtaagatctcttagctccacttggtgtagaggactccttatatagaggttctggtaagatctcttagctccacgagttctttatttgtttttgttattctgtttgttgtaagtaacggtaagttgattttctagtagttgaaacagttaggttagttggtttgtaactgatgtaattggttgtttgtttgattctttaactaattgttaagtcctattatgacacatcaatttttatggagatttatttcaacactatcaaaagtaatcaaatcatatgtttgttttccccaaatatttttatgattttgcttccaaattaattagaaaaatggttttacatttatgtgtataaaatgttacatattaatatctaattcctaaatatagagttaacagttatttggggaattcaaaaaaatattatttttaattataaaaatatgtttgtaaagttttaaaattacaaaaaatacagtaaaaagtaaaaatacaactaaaaataaagagaaatcaattctacgacaactataaataaattattaaacaattaaaaatgacaaaaaaaaaaataatgtaatgacaactatagtacaactctaaataga

SEQ ID NO: 384560 - DNA, 2093 bp, Cannabis indica
tttttagtttttggcatgtcatatttcttgagtctaggcaattcccaaaaaagattgtgtatatatagcgccggtctatcaataaaggataggcctggatagtctcctagacaggatcacccttataagtgagttcctaggaaagacgtggaaagtcacaggtggactatttaaattccagcctcctagacaaaactaattacaccgtacgtaaccaatgtcgttgcaggaatagagctctgacctcgtggctctgataccagttattgggaataatggacattattccaattccccttcaggatcaaaatttgcggaaaaatacattggagactctgcaattccaaactgatgtgaaagatcagtcacaactgtaatcacagagcatattcagaattttcggatatctttcaatgtaactagtattttacgaataataatcaaagcaccaaatgcacgccaagaaattatctcgtggtaaataaaaatcacggtaaaccttccactataacaataataataggtacacattattacactttcaagttttgacaaatacttgaggaatacacttaaaagtctcacactcactagtatggtaatctcaccatctctctacaaaatatttctcacaattttataggaaccctctttttcttctctcttagatttctctcactaagatgtattttcactatttctctctcaagagcatcactcttcactcttgaaataacttatgatggttgtgatgggatgaaaaaataaaagggatggagctctatttataggcctccttggatgtacgaacaagacacaaaaaatcaatcttgcattaaatgcatagttaaatatgtgcatattcctcaagttaaaaattattattataatttttcaggtagttgaaaaacacaactacatttttacatggttgaaaaacaactattacctatgtgattcgggtttctttttctgccatgtttcagtttacattgagctatactttaactctcaatcccaaatattttgttaatggtaataaaaacaaaaataaaaccaataaaaattatattattttaaaagataattaggaacttataatattataagtggtgataaaatgtttactttcaaatagtacttttctgggctgaaggtcagtgataaaatgtgatgtaatgtgacacattccattggaggtggcgcaacccgccttagagagtcttggcgaacattcctggttgggatcgaagcactctcatgattatgcctatagatagaagagtaaaacttggtagtcccctattttccacaataaataaataaataaaacctggccggtcctattgtaacaatataatttacaagggaatattttccatttgaacaatttaatgttgaattccaagctaaaatcggcagattttatttatttagctaagaaaagactttctggcttagtgacgtctatgattcacgttgatgatgtaatttgggccattaattatgtcggctttaacgtgttttctactatactttcccgcggtttctttcttttcttttttgagaattttaattatatgttgacacatttcaacctcttacttaattaatgaataaaacaatttagaagaaatgtcaccatactgtgtgctgccttcatttcaagtaatagtttgatttcatttgattacagcatatgccagttttgagtcttttggccctccagtaataattatttaattgtattatctttaaatttaatgcaaatgtcgtatattgtaaagtatattttagactgtagactgtagagagattaatgtgaccaagatatttatatataagattgggcactacatgcgaaattccatttgataattgtgccaaatggaatacaacagcattcaattcgtcattagttagttagcggcaagatacgggcggccacaagatatgaccttattattattattatattattattataaatcttctaattttataaataaaataatataaataacctagaatacacttgggactaagtaaattatattctaattaagaacttataactaaatagagttacttta

SEQ ID NO: 384561 - DNA, 1054 bp, Cannabis indica
aataaattgaaataagaatgaattaaaatgaaattacaaaaaaaaaaaaaaaatagcactaatcaccttcaccggagaagaaggtctgggcagtgaagtcattttttccattttagtaacttataattatcctttttaatatttagccaggtggaccaataaaataataattaagggtatatatgaatgcttcttcattgaccaaatcaactaaataataataattcaaatctaattttaattcaatacactacaacctacaataactttctaaaatttttctatgtggaccaattatactacagcatagtggaactattaatgagtctattttatgggtgtctattaaagaatttcccaaaaatatatatccagaattaattaatatgaactacagacaatcgaagatgtatatatatatagccgcaagcacgaattaatattaatactcagtttcaaataagtgattaaattagtgtcataatatatatcgtaatccatgttcacaataattaaccatacaccgtaaacaaaagtgtagtaattaatattgtttgaaagcgagataagtagcattaatttgttggtgtgaaataaaatattttgactcttattttatcttaataagaagacaaatctaatgaagaaaaaaaactcatattgctttttcttcgaaatttctccatatcaatttgaaagaggaaaataaaaaagaaaaacttttattaggaagatttgggaaattaatatataatgacttagtatgacccattcaaaaattaataacctgctccaatgtatccaattaatgtcacacctaccctaacgaccatttcaaattagaatgataaacctacttaatacttatgtataaagatatgaagatattctcgatgttgatggacaactacaaattacaatgtcaactacaattctagattaaaacatcagaatgtcggatgaaattaacaaaggaattctcatacatgtgtgtataaataataatactaagggtgtgtttgtaaagctacaatgtaattggatttgtgtgtaa

SEQ ID NO: 384562 - DNA, 1546 bp, Cannabis indica
aaataattaaatttgatcaactaaacaacaacaatatggagaatcagaaggtgacttagatggatcaagaacacattcaacattaaattcactgtaatttttagctttgcaaggtgccccacattcttttttctctcgacattttcgatcaatatatacacaatctgctcctcttacttcttcaactcctacaaaaccaatataatacacatattaattatatatatatataaataatatatatttattaggacctttaatttaaatatatataaaaactactaaaacatatatatatttttaaaaaaaatattcttttgaaccctgagttggagtgtgccctagaaagcgagcctaattcaccttaactcaagctcggcactaaatagattctgagctcaattttaatatttttttaaaatataactaacttgaaactagtttgtagcaagaacagaataaaaaaaatataatcattattgtcatagcactttcaaattaaagatcaaaatttattttgtaccattttgaaaaatacaaaatttgacttataacttttgtaacacatggtttaaaagaatatttacctatttttatatataataaattggaggaagaaattgttaatgctaatcatataacattatatattttataaataaataaataaataaatagatggtatggttattattacaaaaaatatatataataaaatcaattcataacaagattactactatattggaatgaagagaagtgatgaaaaattgtcataacatataaacatgttataactatatatgtatatatttatagaaaatgataaaaaaaattaacatatataatatgaagaaagatagatgaatatttatgtgtgtatatactatatatatataaatatatatatatgaatagaaattatagttacccaaggagaaaattaagaacaccataagaaggatgatagtcatgttgtgcttggaagacatattgataaaatagaagaagaagaataagtataaaattagattataataataataagcctaattgttattttttgaaatgtgttgtgaaatctcaaaacttagctagtgtaatttataggcaaaatttgatctagctaataatttttaaattttgaaataattaaataggtgatcgcattaattattaattaagattttaaattggttttcagttttaaattgaatcaggaattaattatattaggatatatatatgtttattgcaaatttaatttttattggaaatcctcgctatataaatgataatgatatgttattactatataattatatatgttactaaaatattacagattttaaataaatatgattattgataataaaaaaaattatatatttatataagagtgcttattattacatgagttattttttttttatcttcaaaatatattatatgggcctaggcttaagtaattttttatgtaaatatttctaatgcattttttttttggggtattatgagtttttttttttacttatatatatatata

SEQ ID NO: 384563 - DNA, 1791 bp, Cannabis indica
ttatatttagttaatgtgtaataggaaaagatagttttcaacttatcctcatttttttaatgacacagtacaacataatccatatatttttatgatccgataagatactaccgtattttaaaaagccgaatcaagctaaaacggtacacatatatttatactcatattttgagtaatattttttaactttaaaaaaaaattaacgcccaccttaaaacttaattttgggtctactatgattatttctttcttaatttaattttactttttcacgacataataccaatattataccattattttgttagctagccaaatgaaatgcaacctcactttataagataagaaacaaacaacttttaaaataatgacactttatttgtatatttttttgtacaaattaagctagatggaactgtcgaccaaatataatgaaatcaaataaatgaccttatattatataatgtactagtgacatgtttcgttatattatatattgcatgacatcaattttattaggtcttgtttggttcgtttaagtaattaataataatgccaactcaaataatatctaatccaatttttagggttttcgtatctccatacatgcataaagcatttttaagtatttggtagaactacactaataaaaaggattaatggctttaatgtctccgatttcttttttattattattatatataataaatatggaaattaaagttgccacttataaaagatgataagcaattattactcattttgaaacatattagtgccaaaatttgagtgctaaatggtgattaattattctaataaatcaataagaagatatgtgtttttttttcctttaagattaattaattaatttattaccatagttgaaatacttattatcatgttttattcttcatcttaatttgcccttgttttctgcagattgatctcgtgggaattataaattcttgtgtagccttattcaattaattttaataaaagttactgatattttatattaaatatacgagaattgttaaaaaatattagtgtttagcatcattcttaatattatactgttattgatataattaattgtcgtcccactaagttttaaaaattaatttcatgacataattttgtacagaaaaaaaaatcagcttttgaaactgattttcatcaaaataattttgagtatatgattactaagcgaacttatgtaaaatattttcttcagtgtgcaactgtgcattaactatataaatatagattttgatttaatctactaaaatgatagtacaataatttaaaaatcacccaccatcctcttacaaaaaaataaaaaaaaaaaaaatcacccaccttccttttttaattaaataagatagttatctttatatcatagtgcataaataaacaattaaatttaaacctaaaatattaaagcaattatattttgtaaatcataccccacaaataaattgtggcttcaaactttaatatataccaaataatcatattttctgaattttcattcaggtcggacttctattagtataattagacaaaaaatcttaaattcaataattttaatagttcttttaaaaaaaattaacgaccttaaaagtttagagacataacttaatacatgaaaaaatttaacatataaaaatcttgttgaccgaggttttcggcaactaataaaatatgaatataataatgagctgtaagaaagcgagatgaagactttttacgtggttggggcgttaatgagccttagtccacgagccactg

SEQ ID NO: 384564 - DNA, 1404 bp, Cannabis indica
agagagagagagagagagctacgtgccgagagaatgagagagctaccgagagaaagagagagaggaaggattgtagtggacgacgcaacagagaggggaggtggacaaaaaaataaagagggactgtgggccggtaaggcttttttgaaacgggtaagaaggggaaaacttatggtgcgcggttgtctgctagggtttcaaataggggggggggggagagacgaaatgaaatcctttttgtgaaaattgaggtttttacaaaacttaaatcattttgctccagtagataaccatggaaaattgtttaacctttattttcaatcgaagcaaaaataattagcatcacttttccacctaagaaaaatgtaaaagataatttttagaaaatttcctttttttgtcggttcttcttttagcatcggagtatcagctgacgctaattagtatcttttagctttagttatactctgaagcataaaatttccacttatttttttgtctcgatcaatcattttagtgagacacgttgaccgattgaaattgagtcttttgtagtagtgataattcatgtaaaaaagtaaaacaatctaaagttagtataatttttcaggcttggcacttgaaattcttcaagatgagacatggctagctagtgctcgagataaggataataagactgctttgcatctacttgctttatctccctctgcctttgacaacgggagtcctattgggtggaccaaactcgtgaaatcatgtaaataattttttaattgtattttcttattgtctcactagttataactgtcacaacaaaagagaatatataacctgtaaaatagctacataacattaagatgtattttcttgaaatttttattaggttttaacattggatttgaaagaaacgtgaagcaatctaaagccctcgagctagttaaatgtttgtgggaacatgttttggatcttggggatgtggaagctatgaatcttatcagttttccatcagagttactgtttgatgctacaaaattcggaaattttgaatttctagcagcacttatcagttcttatccagatttgatatgggaaactgataaacaaaatagaagtataattcatattgccgtgttatatcgtcatgcaaatatctacaatctaattcatgagattggttcaattaaagaccttcttgctacttatgaagatacagatgagaataatatattgcatttggctgcgaaattaccccctccagaacgactaaacattgtatcagggccagctctacaaatgcaacaacaattattgtggtttgaggtacgtacaaatatcttgtttattttaattatgtgtgttaatatatttatcttattttaaataataaattatttgaggtacaaa

SEQ ID NO: 384565 - DNA, 3032 bp, Cannabis indica
ggctaagtttgcgttaggggtggatgagacttgttttcggttggagactatccctctgcctatatactctgttattgtaaatgattatcttttaattataatacagtatttctaaaataaatattgttttattctcatttttatttttatgtttttatcttgctaattaaatattattttaatattttagtgattatatgataagatctcttataaaatttaaaacctaaataaattattttttatttaaaagtatgtatttatatttttatgtagaataaacaaaactctcccttgaatttagtttattagtttgttaatttttatttttattttctttgtaagatttttttatgtaatataatatattattttatgaaatatttaaatacatttaatgttattagtaagcccatgtggtatattcttttctttttaactattgtttataatagtatttttttatattaaaaatatatattttttttgtaaattatttatgttgctaagttttttttttgagtgtatatatatattttctagaagagtatatatgtaattcatgaacaataacaaaagcccaaaatattgtgattttaattaagtagattatagatgcctaaaaaatccagtaaacctttataattagagaatttagttagatgagatttttttttcagaaaagaaaaaaattaatgaaaaatcttaacagcttgatataattataagaacctatcagttatatacctttttttttttttaattcagtcatatatttaattaaaaacggtactcaatatatattattttattttatatataatccattttcagaaaggtatattagaaatggacaatacatttgtatttccaggctgtccctctcattcaagatagaaataaaaagacataactaattaagatattatctacttcaaacaaaaccttaattaatttacaaaaaaagaaaattaagagataaaattgtaaaaatactcctctctaattaaacttaataaacccacattaaattaggtcagattacctctcatccttatcatgataagcctccaatatctttttcatcttctccttcggactattatcaatggcttttggctcactggaaatgctgccgagagaacgaaaccgcttcttcttcttgatgatgatcttattcagaggcaattgttcatcaataacaacatcttgatcatcatcatcaataataatatcttcgtcgtctttaccgaaaatctcctcatgaaccttcgccactacccgacttaaaattcttgtattgtcaccactgaatgaaattattttttcatcaataataatacgattattatgaccagtagaatcggccatacaaatctgctgatgaggagagaaaacttgatcaacttcattttcatcatcatcaataatacctgtagtgacagtagtagtagtctccttcacattacaattagtattattataaatcattgagttttcgtcgcttaactgcacaagttgttgagccgccgctatgtccgagtccgagacacaatactcatgagcttcttctcgttgcttcttcaactggaaatattgaatttctcccattaaaaacaaacccccccaaaaaaatagagcgcgttatttgagtacgtgctgtatgaaatcttagagagagaaagaagagagagaaagaggagaaagtgcaaggatggtgctatgaagattgtgagaaagagatgcctttcgtttcgtatttatataaaagttgtttgttttaaatcaaatacttaaacctattatattggatataacttggggttatggatgtccaacgaaattattaaatcaatgatcacgtcaatggactttttgactaaataaacggctacgataatttgttaagtttttttttttaaaaaatatatatttatataagtaggtagttatatatctctaagactaactatctattgaataatataatattttggggggagatctgggttagggtcaaggtcattaagggaccaccccaaccccatcctccccaagttgaccccgaagtcttcgaatcatactttaagattgtactgtgtggaatgttgttgaaaatctagctacctacgtccggcatcgacatctggttttatcgttaatcgatcttcagccgtcggataggtcagcaaacgtattgaagctaaaaaccatcagagatattcagttgtgccgtactaagtgtctatcaaaatttgaggggctccatagaaatttgttaaaattgatcaatgatttatgatatgataagatagctagagagcgattgccagtactgagctttgtcatgttgagagaaattgatgtgtcttgactcggcaaaacataacataggaaaagaaaatatatatatatggggtcatcaagttttgactcagatgttctcgtgaataatgcctttttcatacacaccattaatttttcaaatttactcggcctcacacaattcaagtattgatattatttactgtaagaaaagatgactaaatgtcgaagcagcttaatttgcaggttcttacaccccaatgcatagcacttgatttgctttccttagttactttatatatataacatgcttatataagtagcatttgagaaagacttgcttcttttataaatctccaagagtgagtactgtaggctcaattaacgacctgttcacaagtatagatatataagactggacttgatgatatatatatgggttcataatgcggtggagtcactttgaacaattataagaggtttgaaatctgattttgactttaacacagtacgttatatttaaataaaatattagaggaatattaaatatataaatgtgtaaattataaatttatatcgtacgcgtcgtatactctattggaaattaattattgaaaaataacacaagtttcatgattcagattagctagggaattagaagagagagagagagagagagagagagagagagagagagagagagacaa

SEQ ID NO: 384566 - DNA, 584 bp, Cannabis indica
tttttttttaattatgtaatgtgtagtaatgaattttgctttttacgatgagcaaatttttaagctatgaatcttttaacaagctttttttttttggatgtatttttgtattttctaaaataaaatatgattagtttgtaatctaaatctgaagttttattggttcagttaaggttagtatatatataaattattatattaagtttgttgtgtttatgggttattattttattggatttttagtgtatttttataatgaaaaattatgggaactggattagattattagctgagtaattaaataatgtttgtttttcttgttggaatattatttaatataatctatattaagaaaacatgaaaatgaaaatctccaacattttaggatacatatcacttctgtctttaggagtaagtatatgattatttagtctttctttaatttatttatttttgattttaatttgtaacaatctttttaatttatttataatatattattgggtattttagctttatttaatgctaatttgcaaatatttacaagcaaaaaaatcttttttttttaatttttataatgtgta

SEQ ID NO: 384567 - DNA, 4030 bp, Cannabis indica
acgttaaaaggtaccactagtgactagcactctcatcggtgtcatacttagtagtaattaaatagtcgggtctacatataaacttaagaaaaataatttttagaaatatcgctaacacaccacctatataaggtgttgggcactaatagtggccaatagcaatgctaatatatatatgagctttgttattgagcatcaatagtgtctaacactttttataggtggcgtctcacgattagttagtgatattctctaaaagctatttttaaaattatatgagatctaatatttaattacactaatagtagtattacatcaaaaaagatattagataatgactagtacattttaacaattgtctatataaatatatgatattcattgcattcattgatgatattatgagaaatgctaaaggacacccagtggtgcctagtatcctcctatgtgttaatatcgctattggtccaattaagtatcgggtcccatataatttaatataatagtttttagagagtatcgctagccaatcacaacacgacatgtcgagaaggtgttaggcaccactggtgctttatagcaatgttctgatattattgatgatattgataatggggtttggggacacatttattataacttgtgccaagcaaaaaggaaagcaaaggcgtggtgttgcctactctattattataaattaattagtattagtagtagtttcaataatatgagttaggtaataacaatttattattattattatattttttaataataatttagaaaaataccaacaaaaaagaaaaaacaaaaggagacaaaatgtgattatattttggtttggattgatgttgggaagcatagaatggtgctccaaaatccccttttgtagtgtgtcttcaaaaagccaatgtcaattatgataaggccgtcaatttgtccaccacaccctcctcttctacctcatcttagtgcttttagaaggttaatacaaaatagtatatgtttttgcaaaagttactgatgattcagattttctgttttattaaatgataaagtaaactttgtattttataaaatggtaaaattttaacaatttatttttaacataacaaacttaaaaatgtaaacaatcttattatagcacctctagatgagattattatgatttgacaaaaaatcagttcagggtattattttttatcattttagaaaatacactaattgatttatcatttaacaaaatagatagttcaattagtaacttttatataaaacaagttctaaaattatatttatccaatttatatatatattagattatttattatgtaaagagaaatattaaatgagatggtttaagtattgggctttatataatttaatattaattattaaaaaattattaaccaatcacaatatcattcatagttggctcaagtattaggcagtttggactactatacaagatctcttatactaaaaattttcttgtttttgttatctctttatatatatataatatatataatagatattttttttataatgtatacataataaatattcataacaacaaatatacacttacaaaaataaattaataaaaatttgtgatcctaatacacatgattttaaaaattttgccttttctagaatttatgaatattttttttttaaaaaaaaaacgaacttatgaaatattcagtaataccgttttaaaaaaataaaaaacctaattttaatttttcgccaaaagcccctaaatcatttgggtcggccttaagaatagtgttagatatcacttttatctaataacaatgctcttgtctaagagagctctattgttattaggtactgtcatgttcaacactactgcgaggtaatgtcttaagtagttaataatttttcgtaataattattatattaaaagagaaatactaaaagatacaagtggtattggtacctagcaccctttaacgtgtcatatcgctattactataattaaatatcgagtcgcatatagtttaatatcataaattttataaaatattattaatcaatcgtaaagcatcacctagagatggtactagacactgttgataccttataacaatgctcaataccttaaatgaatattattaatcaatcgtaaaacaccatctcgagatggtactagacacatctactaacaacctctaacactagtgcaacacaactacaccttcctcctaggaccaaaaccctagtgagattcaatgcttaatgcttagtggtgcacttgaatctctttgtttatacataatcaattcagctcggattttcatcatcattgtattttgaatttttattagtttatacatatctttgtactattttgattttggcctttaatttttttttttaaaacttgtaccttatcttagactacccatttaactctagcattgttattgctatatggcactatatgatatccaataccatttgggatagcactaaagtgaattaaattgtgttaatatttagatatttgatattaggtacccatagtgttcaatatcattatgaagtgatgccttactaatatagttaagagtttaatttttctaaaatatttcaaattatagtgactagttagcacattgaatttatacaaaattaaacacgtaatgtctatacattttttaattaatatagtcacaaaaatatacaaagtaaaatgggttgatcattttttcaacaaaatggtaattaaatatgcaaagttaaaaatccaatgaactaagtacaaagagaatatttcatttcattccatgtaccattagtgaaataatccccatataacatattacataatatatttttatatatatatagaagatgggagggaccaaaactcaatttggcttccatgatttagactcatcaaccattcccacttaatgatatgtaatgcatattactaattttctccacaagtacctaaaacaacatcaaaaacatgtttggaataataatcataataattaaaaaaaccacttccaattcttttaaaagaaaaaaattgtattttcatttcatattatatatacacatatataaataattaaaaaatatttagttgaagttttaaaatgacacaccatggtggagaatagtagtggaggaataagaaaaccaatctttggttttgtttttcttttttcttttctaatggaggacactattgagattgattttgactttaggttattatatttatctctagtatttttggttggaaactcatatcccaaaaccaaaaacatttaagtcattgtttgtctatttgagttcttgttttgttgtggttgagtggtaaaggtttgtttggcatgaaaataaattcacaatgtaagattgtgaggattttgggatttcataaaatgtaaaataataaattctttgtagagttttgtagatttatgaatattgacaagagttttgggggtagtgagggcacttgtccttgttcataagatattaaattattctaatatgaacaggatgagtatttattactgagttttttttatccatttctattcttatttattataagagtattcaaaggcttataatagtggtaaaaagactaccattatcgtgtgtgtttgcaccgtaccttgtacaattttctaaacatgattttaggatataattgcctattattatggatgttgggttgtctaagtgtttggagaaatttaatttattctttatttacgatttgacaaagggaaatttcattaattgaccctaataaaataccccatttcaaaatatataccctccactaatttatacaaattaattccactattactcaaatctacccaaaatacccctcaaatttaattttcctattctctctctctctttccgtctttccctctttcactctctctttctctctctgtcgtttgctattccctctctttccctctctctttctctctctgtcgtttacaactttcgaacgctgccc

SEQ ID NO: 384568 - DNA, 1064 bp, Cannabis indica
ccgtaaagggaaaactataaaccctaattcaaaacctatacatccaaaaactcatacaacacaaaatcctaagaagataattaaaccaaaatcctcaaatacataaaaattaaacataccttttggaagcgaagcgtcctctttggacttcccgacgatatccatcgggtccatcattaaccttcaaaaaacgaaaatcgatgtatcaaaatatattcttacatatacatatgtttacatcgatgaaaatacgaacagatcgaaagatgttcctttatttctcaagaaaaaaaaaaaaaaaaagttgaaagggagagaatcggatattcgactcaccgagttacaaaggggaaacgggaaaaaaagaagaggtgccagtatgggaaacgagtcaaccgatcgaagacgatccgagttggaggaagatcatgaagatgaagagggacatggttgatatatgaatttatcagggaaggacattgttgttcaggataagagcgccagttcttgttcgcaggcgattagggcaaagagtgtgagagagtccccccctcacccctacagcgcgttgaactaacatattcccacgcgcttcactaccgcgtcggaaggagcttcgacattagtgggtctgcctccagatgggccccacaatctgtggatctagtggtctcacgtgattcccacgattggatttggcgcttgaataagtctcaaaaattgaagttttttgtttttggggagtaaacgtattggtcttggagctttgagttagttttgtggctctttttaattttttaatttttattccaaatataatatgctcccacgcgctaattctgtacgttcttcccacgttaatttttttttttttataaatatgttgaataaagtactaagtccaaagaacctaaacaaccattttaaacaaagggatattggcggctaaaccacctgaattttacagtttgtaacacttaaccacaaaaactaaaattttggcggctaaactacctaaactcccatttcgttttactctgtacacctccgtccaaaaatcacag

SEQ ID NO: 384569 - DNA, 1115 bp, Cannabis indica
tggttaagggcccatgcagacataaagagtgacccaattcatgaattattatggttctttagcattaatattggattggatttccttaaaggtattgtttgcggattggaattggattaggcccattatcatatcacatctaattttgggtacattcatttcaaattggattaaagctttgatttggagtccttttctttctttaatatttaattaaacccactgacaaaatatgtataatataatggaataattacataagactattttttataaaataattatatttttatgttcaaaagtaattttttttttttttacattttcacaatttttcaaaaaataacacaaaaacaacataaaatcaacaagaaaactacataaaagtaacatgaaaataacaacaaaaaataacatacagataacaaaaatcaacaacaaattaacaagattacaacataaaaagaccgtattttctgtaaataaaataaaaaaaattgtaaaaatgtctaaaattccgtgacaccgtattttgtaattttttattatttttatgtttttgtgaaataatccctaatacaatatattaggctgaaaagaaagagtgagctactgttaattggttaaacaattaatgtgttaattttggttactttttctttttaagcatattttaattaaagttttctatagtagtatagggttaagcatgcatttctataatggtaacaatgttgtttttggttacttaattcttagccattttcaataccgaaaccaacttaattatataaaaactagaaataacacttattaattggttactcattagtaactcttcagtccctaccatgaaaatgcaacttctttttgtattaaatttagctcaaaaagtgagttcatgttaaagtttttggcccaagttttataattgtacatcaatttattaggagtaaaatgaactttattttaatataaagaggaaattacactctatactctttttatattgtcctcttttatttttaccttcttttttaaagtctatcatttttacctttttttaaacattgtaccaattttacccctgtcacttcaagatactctccatgtga

SEQ ID NO: 384570 - DNA, 1979 bp, Cannabis indica
ttaattttttaatttattttaagacctgaattggaaagaaaaatagcgtgggaatttcagaaattatttcccggggaaaaaaataattataaatataaataaaataaacaagttccgtttgaaaaaaaaaaaaaaaaacggagtgttcagtgtcagtagtacttagtatgatatgattatttatttatttatttatttattattatttgaaataatattggaagaaaaacattaaacttaggttggtagatgaggtttaattataaacaacataacacaacaacaagtgtgcatttattaatattaaaaaataaaatagtttcttatataaaaaaaaaaattggcagtgcatgaaattggtgaggcttcttttaggcttttagctttgtttcttttgctcttgaatgtgttgatgacatagatattactcttcatttttagattttagaattttggattattggcctcttgtttaatttctagatcgatcattattgtcaaaaatatggttggtttgctatgatagtttttattttaattgtttgaataatagaattatcattacttaatttttagatgatgaatatgttatttattatatcttcatttgttgaatacatagggagttttgaatcttgaagccgtagcaaattaaaatattaggagtaaaataaggatatttagggtgaaattcttttaatatttataatttgtatacatataactctaattaaaaaaaaataatagtaaaagtatatattattttacaattttattaccgttgtattttttttttgccattaaatattaatttagaaatacgtaacgatatattattagactttgtattaaataagctaaaaattatattgtcatgtgtttttaaactgtcacttaatgagcttaattggcatttactaattaaaaacgggtacgactataataaaatcgtaaaataaaatatttttattgttatttttttttattaaattatatgtataacaattataaatattaaaaaaaaattcgttttaaatatctgcacaaattataaattatttagtttgatatacttgtcaattgtcatcatttgtttttacttaataaaaacaaaatagaattatttaattagtgatattctcacataaatgccaaattaaatatcgcatgccatgaagaatcaacttaattatttaggtattatgtatttggttttttctttttcttttttttttaaaaaaaaaaaaaaaaaatactatagtagaaaacatgttgttagtttcgttattaatttattataactattcttgctaaaaaaattataactattattcattgtacacaactatggatgatccttttattattacttggattacaccctcacatctaatatttattcactcacatgctatgattttataaatatagatttcccaaatattaattaatgaagtgcatatgcaatctttataattattaataataaattttttcttttaaaataaaaattgacttgtttgaagtatcgtggtataaatacatcagtcaatggatattataataattaaatgcatttatttaaattaacatgcttgcttatttaatagcttaataaattgtttctcatgctcttggtactaatactatttagtactcttttcttctttttattttttcaaaaaaaaaaatgaattttattaagaattgataaaatccaacactcgtagcaattcctaaataacaaataataatttgtaaaaaatataaaattaaaataatttattgccataatgtcatatattgcttccataaaacttcaaaaaatacactataattcttctttttttatttactttagttattatattcatattttgttagagattttatagcaatggaagaaaatcaagatttattacaactctattgtaaaataatacaaggactaaaataagagattgattaaatatatgtta

SEQ ID NO: 384571 - DNA, 2158 bp, Cannabis indica
atagaaaaaattaaaaaaaagaaaagtatatcatagattttcaaagctacattcattttacatgagaagcattactaatagtagtggtggttaaattatgaaaataaaaaacttactctattgaagccatatattacgagttctattatattaatatatcaacattttgatataagattattatactattgttattattatacttttttttataagtttatttttctctatttattttttaaaacatatatataaataatccataatttagggcggttgtcatggcatatagggtgatttattcaaaaccacgacaaaatcaatatagttggcagttggcttaattttgttataatataatttattaattaattataatcttatttatccaaactcaccaaattctttgacaatcaagccacgctattcctatttcttatttgcccttttttttttttttaggttaatttgataataatttcatttcaagtagatgagaagaataataagaaagaaaatatatgtaatatactccatagtgcatgtccatgatgattgatcaaaagtcaacatttttttttttagtttttcaacttttttttttggttaataataaaatgtcaaattagcttttgattatataaatagattgttcctatgaaattaatttagtcattatatatatattaatatactttttattatgttcaatggcaacacaaggttgcatccctattctactaaaaaaaaaaaaacaattgcatccttattccctacatttttttagtatattcaattggaaaattttgtagtactgttttggtacactttttatatttttcttggcattcaaaaaagcttttaaatgcaaaaaattaatttatatttggcaaaaaaaaaaaaattgtgttttatttaggtattatgttctaatacacaattgcaaaacacgtaaaatttaatatttttattaaagatttaaaaaaataataaatatattattaattttatcatttttttattatgtaaaataataaaaaaatataaatagttcgacattaatgttatgttaatataataataaaataaaaaaagtgatgtaaaatcaataataaagtcatacatttatgttgatgcaaattttaaatcatagcaaatgttacgataaatttgacaaaatatttgtgtgtatcaaatttgtatcactttttaacatattattggaatataatttttttttctaagtgagctatattttagttttacattatttatttgcattttcattaaagatgcttaaagtctatttttttttcttcataattatgtacgttgtaatttttaggatcatctataaatttgtaaataatttcaaataagttaccatgcttaaataaaagttcaaataattatttaccatactaatgagaaaaaataattatatgtgcaataaactatttaaactttattttcttcattataaactatttaaaaatttattgatagttttaaataattataatataactaaccattgagaaaatgaatttttttttttccttttggatataaagatagataaacaatcaaaaataaataatttttattctatttctttatttaattatattttaattctaatgaaacttttctatcacttcagcgaataactattctattttgaagaaaaatcattctaatttttttttaataattttattattaatttttattatttatacatttaaatttaatttaattctatttttattcttataattttattcctcaccacattattttccacataagaaattagaatgattatcaatggtttccaattcgatataattactatattaaaaaaaaattaattgaagagttgttaaaaaagaaaaattaaaatgaagtgggctaaaaaaaaaggtaaaaattggatttggagtacagccgtatatgaatatgatggtcgaatagacaaaaataccctaacattgattccttctatagctaaatacacaagggcatttatgtcatttagacactccttaattacaccgaatattaggacataaatgtcattatcaaaattatttgccaccaaatcataccctttttccgcgtttttttctccttcttcttcttcctctctctctct

SEQ ID NO: 384572 - DNA, 2719 bp, Cannabis indica
  modified_base (71)..(71): a, c, t, g, unknown or other
aattttttttttttttttgtttttttaaatggtataaaagtggcatttaagataaatatgatatgtattanacttttttttttttaattaatttaatttatttaatttttggtctgaaacgtactgcaaaacctgcgggggtgtgcccaaggaagcagcgacaagaacaacaacctaacaaagtaaaatacaaaattgccataaaacatcatattcatataccatagctctttctaccactaaactaactaactatatactttgccttaccagtcacccaagcttcttccaatatttactctattctcctttcctcatgatctccattttccttcaattctttcttgttttttttttggtttaaaatataatataatatctatatacaataaaatgtaatcgacatataaaaaaaatgtatatgagaaaaataatagtatattatgggaaatgatggattaatctatataaccatatggttcatatcatcgataggataataataatataattgaatacaagagttctcttctatctatatcatcaattgtattataataaaattatttgtacacatgagagttaaaaactaataaaaaatattaaaaaaaaaagaagacatgaagagttcgatatatatggtctttcttttttcctttttatctaattcttcctcttctctatcttcaaccttgattcccaaccccaacaatatatatataaaaacaaacgaaattaaaaaaaaaaaaattattctgaaattaacagcctcaaataataacctttgtatacccaatattcattctgacccattatactgaaaacccacttctcgaattcccttataattgatcagaacccaaaagtagtcttaaaaaggatggaaaataccgaacgatggagaaaaagagatagagagctagatggggtagtggaagtagtactaatagtaggagagtgtgtttggtaaaaaaagaaagaaaaaaaatacatcaaattatatgatttccaagttaccaaaagcctacccaaatttggattctttctcttccaactatatatgtatatatataggaaatttttttttgggtggtggtaataagggtagtagtgagtgaagaagagtactagtcagatgtcaaaattgaaggctttccctttgttgaggaaatcaacagttgaaatccctggaattggggtgccattatagagccttaactggtggccgtgactgagagaattagcattttgagatggtgaagaagaagaagaagaagaatggtgcaaagagtgatgatgaagattattattattattactaatattatgataattatgagatgaaatcaactcacattcttctgattgatcatgatccgatggtgaattagtactaccaccactactacactccatgttaacaccaaacaatcttaatctctttcccccagcagcagcagcagtagcggctacaccagccttattattaccgtgagccacaggtaccgaaccatacaccacagatgggtggtgattctgaaccattccaattgaatattggtcctcggccacaacatttgaagaaagagttgtggccgagaccatattattatgtgggggtctcaggtaaaacactggactcccaccactacccgaataaacagcggaattagacacattcccataaccgttgtaacaacctcctcctcctccataactgtttgttgtgcggtatggatgaagattgaaaatgttaccaccgtaattcatgggaggcgggggccgcattagcgaagggctccacgagaagttgttgctgttgttggaggagcggaaggatgagaaggggatgttaatggttgaagaactgtggtggtggtgatgatctggtagaacaacggcttcgggacggcgtctccagtcgatgaatagccgctctttatcagctaaaccgcgctgaaaagagactatatcgccagcatcgagcttcttctccttaacgaaacggctccagcctttggtcatgacgtaactctggctgctgttccagtaagagtaacggaatcgccatggcttgccgtttcggtcttcgaaattgagaagaagtcctttctcgtttgtggaagagtctaaagggaagtacttctcggcgtgttgttttgggatcacaagtctgttgagctttcccacatcgcttggggttactactttatcgaacatgtgctctctttcaacaactacttctgatctgctgctactcatcgaaacgacgtcgtcatggccgttttccatttcctgttgttgtagtactcgcgggcgaagagttcattaactctagctttgtatctggaccgttcatcatcatcgtcagatgattatgatcgtcgattgaaccttcagctgccgccgccgttgcaggccagctggctccagctactcctactcctcctggagaaatgaaagactttacagctgtagtagtactggtggatttgtacttatgagtatgagaagaagaagaagaagaagaagaagaaaaaccgttaacactagaaatataattaggactgtaattataattacctctgtcctcatgagaaaaaaccatgcgattattattattattattattattatctctcgctgacgacccaaaatccattatcaaaaccaaaacccttactctattttcaactcacagatcttggccagattacaa

SEQ ID NO: 384573 - DNA, 1244 bp, Cannabis indica
actaagtaacttaaaattaaaacttacttagtttacgtcggctcgaccacgtaacttactatctagtatatatatatatatatatatatataccttttataagtatatatccctccatattcctccttctatgccaaagcataaggtaagacacaaattcatgaatttcgaacacatatattaaataataaaagaaatcatttattaaaattaacgtgtttaatgaaagttccataaaacttgatttttggaacaaaaaatactagcaatgatactgactaaaacttaatttttacgacaaaaaaaaaaaaaactttaaacaatagtatcatgaaaatttaattttgacacaaaaaaaataatagtaattgatacttaataatgttttaggaacaataacatcaaaacttttagttttgagggaaaaactatgggtttaagatggtttgtgatgaaatgtgataatagctttggtgagacataatttttcacatttgaagtaatgttttatttatttatttatttgaaatctatacatttagaatatgcattatcttaaatatagagtgaagaacaagaaatttgagttacattatgcctaaagttttttttaatcaaatctcatcataaattatcgcaaaaaaatttcgcatcgttcttgcctcaaaacataattttcattaccatccctaagcattaatttactatattttcacctgaaatatcacttctcatgacaccatcattcagcattgcttttgcataaagaagtcaagttctaactacatcattgttaaagtattagctttaataaaagaaatctctaatttaatggcaccatcgataagcatcgaaatattattgttttgaatatttatgtagttttaagttgtagtttacttttttttttgttatttttttttaaggaagttcgttagttttttttttttttttttttttttgttttaacaatgaactaaatttcattgaaaaaaaattagcgttcagtacatcaaaaaagaaaagaaggaaaatcctccatccaaactagctcaccatccaccctaagtgtatgcacatctaattcacgagcagccatattggccgactgacgaacatgaatcagggacgcctcaggaaaattaaataagtagactagaaatatcatctaaaagagaaccaaggtacattataaagagaagatacttttaggaaaaagtcaataaaaacacagctaggcaatc

SEQ ID NO: 384574 - DNA, 2310 bp, Cannabis indica
gacattcttgtacattggcaaaaataaataaattgtacaatattaatcgaattagaaatttgagcacacatatattttaagggaagattgagagtctaacgtcataacggggagtcccgcccgaaacatgctttacaaattaaataaaaaagaatatctacattgaaatcataattttttttactgaatgatatgtaattttgtttcaatatttgatattaactaatgattcatttgacttttctcaacatttctttcaattgcttatccaatgtagtatatatatatatattcgagcaaaaaaaaaaaaaaaaagaataaagaaaatagtacatacatgtacatatacctcaaacttattaaagaacacgtttactttgattagtcaaatatttatatatgtgttataatatatatttattgtgaatcgagtattctgataaaactgtgagaaactgaatatttaattctgcaaaattaaaatgatgtaagatggcatagactttgcgatactccgaatataccaagaatttgaaaaatagtaacaatttaacaatttctccaatcatatatcctatgttcatgttcatttaccaacagacattgtgcttatgatttggtcaaaattagtggactaatgttgtatagacacctatagtgggctaatttttcttttttatgactagtgtggtttgtttagtaatatggtgttttgtcatgtatggttgtttaagctattttttcagttcatctaaagaatggtataagattgcagtgacatttgagctccaaaattattaaagatatatttttttttttcataaaataatatatcaaaatgttttttagcaattaaataaaaatttctattttaagataatattattattaaagagtgtgttaatttaattttatacattaatctcatataagagtgtttttatttcactcagttctttaggaattcaaggacttcaagaagataagttttattactactttttttttttttttttttttttttttttttaaatttttactatattattaatttatatttaataattttaacattatttattttaacattttcttataaagttactaaaatcatctttttggtagtgttttggtgtagatatataagctttttaagaagttcttgctttgttggtaggattaagatgtgttgaagatgttttatttttagacattaaaattttattatttattcttggggcatctctctcattaattttattgttgcagcccacaaattgattaaacatgcctttagataatgagttttattaaataaaagaaattcttcttcaagaaactctgtgataatagagttttgaacaaaagaagaaaacgaaagagaagaagagaaatggacaagaacaagatgaaaatagactgctcagtccaagactgagattggcttcgatctttatttataatcaattaacaaattacaatgcaaactagctgaagagagaagacaactagatttaacagaaaacagttacaatagaaaaactaacaattgaaaagcctagttgtctaactaactattgtctgcttatattctaacatcctccctcaaattatacatgtctggaccatgtatcaacttgtccttgaaatgtaaaaatgaagcaacaggaagtggcttggtgaagatatcagcaagttgatgtgaggaatcaacatatctaacatctaactgttgagctaatacattgtctctgacaaaatgaagattaacttcaatgtgtttcgtgcgagcataaaacataggattggaagccagagactgctcctaaattatcacaccataatattggaatttgagagaggtgaacattaattccagctaacagggactgaagccagatgatctcagttgtggctaaggccagtgcacgatattctaattctgtacttgatctagtcactactgtttgcttatttgaacaccaactgaccaagtttcctccaaaatacaaccagtagccaaatgttaattttctgccatcatacaaccatgcccattcaacattagtgaatccttgtaagtcaagtctcgaggaagctttgaattgtaaaccagttctttgtgtgccagaaagatatctaagaattcttttacatgcattctagtgttctaaggtaggagtttcttggaatcgactcagacaattgacaatagggttgttcgcgatgcgggtggtgcagttcttgactattttttcaaaccaacctgcacatgcattttttttaatttctcaaactgcacccgcaccg

SEQ ID NO: 384575 - DNA, 2461 bp, Cannabis indica
aaaaaaaaaaaaaacttttctttcacatttctttctacgtttctcatcattccgaaatataccatttttctttggtcaagatgatgttctctttgattgcagcctttttgtggtatcatttagacatatataataaagctatgtatcactacaacaatatttttttttactgtatattaattacagtattattatttatctagtttagtgaaatttaaagttgaaaactagctttttatgtatctgtttcctcaaggagcaaaggcaatgatcgataatacatttttgtggatttcccaagtgtagagcactttaccatataataatacaagtaataataagtaatcataagtggtacatgatggatgaatcatgaagcattagccattatgaagttctaacctaactatagtttttttcttttttctttttttataaaataatataaaacataacattttttttgaaagcaatataaaacatgataacagttgatcgtatgagaatatatcaaacatttgaagcattttgttattattaatgggtaggtttataatgagtagtggaaacaagtttttggccatcaactacctaattggtttgaatatatctctaaacttgattagtggcgcaatgatgagtgtaagtcagttccacgcaagtgctataatatttatttgtgattataaaaaataaaataaaaaagtaatgttcaaattttatacattcaaatttgtaggttcttaaatttaagttggtagcggtatattattataactaataaaataataatacaaataaaagtgtaattaaatcaagtatttatttttccagtcaaaaaaaaaaaatcaagtatttatttgtttaaaatattaaataattatattagaatatataaatctttgtacgttataaatatatttttatatttaaatatttaatttaaattaaatatcagataacaattaagggaatatcgtaattttttttcttgaagaatatatgtcaactacttagaaagaatctctcaatcattttaagaaaaaaaatttgctaaataagactattcccctagttaaagtgttgtggaagaagaaggagctcaagtcgcatatgtagaattaatatcccgaattattcagatacatttcatagacaaaatattcataagaaagaaatagttgtaatatttcaaaaattaaataagaaatataaaataaatagcatatcctatagaatatggcgacttattgtagattatattataatatagtttaatattaaatagaattgttaattaatcttgcttgccatccaaaaagtagaagtttatgccttcaatgcttctcatgagaggaaggttttatggaattaaataaaggtgtttgggaatggtccttggaatgtgttatttcaatgctacatggaaatcaaatgaaaaaattttaaaaaaaggttttacttatatttatttggatttaaaagactacatatggagctggaggatatcaagacttttggaagttctttaatttagaataataaatagaaagcaactgatggggtgtaagcaaagcttgactaagtagttgttaatactgtttggcttcattttctagtgttattagctgtctatccagagcaggaagggggtaagaaatctttttgttatatttagatgtggaagacatacccaggttttgatgcagctgtgatacatagttggaagcagtcttgttggggtactgcaatgtaagtggtgaaaaggaaactaaaaaggttaaaagaggttctaaaaggcataaacatggatgtttttgggaatattcaggccaagaaaaatcaaccttatcacaagtttcttgcttgacagaaggatctttatcttaatcatttaaatgatttgttaattcaagagaaaattttagccagagaagagtacaatagatgtcttaagaactatatctctttctttcaacaaaagtctaagattaactggcttaagaatggagatgtaaatagtaagttttttcatcacactttgaaacaaaggacttagaatatagtttataaaagtcaggatgcttgtggaaaggtagacacgactctgggtgaatgatgctttcttggattttttattgagctgttgggcctgttgtttcgagtgtgattgatcttgggcctgttgtttcatatactcaaagttttaacttgttgaaagagttttcaaaagatgaatgatcgctcttttatctattttaaaaaataaagttgtaggtcctgatggatacaatagtggtgtaacgcccttataattaggtgctacagtaattttctaattaatgtgtcatctttgctaatcaaaaattttcctcaaaaatcgtgctaaattaagtttttgataaactttaaactttataaacttatatatatttatttacataaattgggatctcgtatt

SEQ ID NO: 384576 - DNA, 3189 bp, Cannabis indica
gtagatttaattagatgtgtgagcgcaacacataggtctacgccacgtagacataaatgggcatgatgaaataatgatcaggtctgtgctatacagacatatgtgaatgagcatattatatttgttatgatttatactgtcttgctgggcttggctcacgggtgctctactgtgcaggaaagggtaagtcagtggctgatcaaccatgagtttgaggagcaagatgaagaatgtacatgttcaagccatatcagaccaagcgggttaagggtctatcagtgatgaacttttgaattctattttgccgtttaggtcggctagaaataaatgacttgtaatagcgtttgtaaatatttttgggatcccaactattttaaaagtttaaatatattacaagtttattttcattctgtttaatataaaagtttaaattctgcgctattttgattagtaatcccgtttaggggattagggtttcataagtattttgggtagcgtgcctaattatttagggcgttacattaagggtactagctatcatctgcttctcaatggtagaattcaagctagtttcaaagggaaaaaaaaggtctatttcaaggtgattcgatgtcccctcttctttttgttctgataatggattatcttacaaggttgttaagaacctactcaggtcaaaagggctttggattccatcctttatgtaagcatctccgattgactaacctgtgttttgcagatgacctgattatcttttgtaaaggtaattccaaatcggtgagacttttgagtgaagctttcactaaattctgcaatgatacaggtttgtctactaacacctctaaatcacatatctattttggaggggttagtggtgaggaaaaatccaaaattctggatttggttaaaatagaagagggtagtttccctctgaagtaccttggggtcaaacttagaccaaccaaatggaagtatacagatattggagctattatggataaactgaataagaacctaaattgttgggcaagcagaaatctttcttttgcagggcgagctcaattaattcactcggtgttgctagggataagaaactattggatgagtatattcatttaagacttaatattcaagggccatttgggacaaactttgagtgccaaagcagcgattcatttactggcagatagtgaataaccacctgctcactcgggactcctttagaagtttatggctattcctagccatctctatcctgtgtgtgaaaaatgatatagaaacccatgatcatggcttttttaactgcagtttgtcgacacaggtagcagctgctgttaactcttggtttggtgacttccagtggccaacttcaactgctgaaatcctctagacctgctgcaacatgaaacaaaggatggttcctcgtttgtggaatgcagtcttggctgcctctttgtactatatatggaaaaatagaaatgcttgtatctttgatctttgttgtgctattcctagtaggttgagcatggagataaggaagatagttcaactaagaatcattagcaaaggtccttacaaagattgtatcagaaataagcatgctgtaaatgctgtcatctctgccgtgctctacatgttgtggaagaacataaatgattgcctttttaatgatgtttgtaacaatgtttcttcccttagtaaggaaatcaaatgtattgtaaaggctagagttgttggggctcattgtaaaagccaaaagaagaaagatcaatatttttgagtgttgttaatagcttgtgatagctcggtttctggtgtgttttttcgtggtagttggtttattcctcttgccttgttctttgtatttgttttgtccattttgaataaaaagttccttttgttcaaagaaaaaagtcttggtaggggagtcgggctgggggctgctgctgtttattttagcagctggtgcttgttttgctgtggctttttgccttgtatgtacttgcttgttctttgaataaaaattcctttttgttcaaaaaaaaatcttggatggatgcttatcctatcgctaaggtcttgttcttaaatgaaggtacattcgatcattctcttggactattatccttgcatcctaatttttctactaggaaaaaaccttttaggtatttttggatgtggaaatctcacaaggattatgagaggagaatgagaggagtttgggatcttcaatataatggtaacaagatgtaccagctggtatgtagacttaaagagatgaagcaggtattcaaggaaataaataaagaaggctattctgatgtacttgcaacaacaactcgagccaagaaaatattggaacaatgtcaaaattccctaagaagagaccctctaaacacagagttgcagaaggaagaacatgaaccaaggaagaacttcttgcaaaaacaaaatgattatcattatatgctccaacagaagtctaagatcacttagattaagcatggtgatgataactttgtaatatttcatgccagtatcaaagggagaagaaggcagaatagggtgctatctattgaacaggctgatggcaccagaatacatgatcttggtaagattacagatgctttcttggcttattactctgagcttttgggatccaacatgcagaatagaagacaagtgatggctaaagtcatgaatctggggcctactgtgacaccacatcaagctaaaattctgttaaaaaaattcactagtgaggaagttaagtaggcaatgcttgacatacctagtatcaaagctcctgaagcagatgggtactccagttttttcttttaggataattgggacattgtgggtaaagtagtttgtgatgttgtgctatccttcttggaaactggtcaaattttgaaggagataaactctacattccttatatcggtacctaaggtgaaatgccccaatacagtgaaggatttcagatctatagcttgctgtaatgtgatatacaaggtggccactaaactcatttgtactagtattaagcatatccttcctgatttaattgcacaaaatcaaagagtttgtaaagtaggtacattggccataatataatgatttgtcaagaccttattagacattatgggagaaaagctaataaacctagttgtatgatcaagttggatc

SEQ ID NO: 384577 - DNA, 1666 bp, Cannabis indica
tgtgtgtgtgtgtgtgaagagtgttacctatttatacacatatgtatcaaagatttggcttgacttttttaatctaataggttgaatatgcccatgtcttcttgtggtaataatacagatttggataagttattgtactagtgtttacgtatatgcagtatgtagtggatattgtgtcgagaccgttgaattgttcttggaccgtttgcatggtcagtagtcagctgatcctacggtgggaggtatgggaagattgatgatgtatgacatggctaatacaatggattgtgtttccatttccaacccaaataaaacggaaaaaataaataaaatgttacttaaaagcatgtgagccggcggcggattgttaattaaatacatatatatgcattaatattagagcgttgcaaccggcacaatcacctttataatatgtggtcttataatcaataattagtgattctttatcatttttattacattaaaataagaacttaatattgaattacactaatagtttttaagatgatctttaataaaagatgtaaaagttaaattatatatatttgatacaaaaattaattttgtgacatttttacatcaatttttattaatttttattattgtgttctattgtataattgtaaattttgatgcaaaatttaatatgttatttaattctcacttaataatttattaaaaaatataaaataataataacataaaagtaaatataaaatttaataataataataatataagtcatttatattaattagaatttaaccataaaataataaaaaagtcataataatagatataaaagcataaaacttattatgatacaaattttacattatgttatattatgatttaaatttggaatactttttcttatgtaacatatttacattacaatttgacacactattagagtagatttttacaaaataatatattttgcatttacattacttatttacacgatcttcattagagatgctcaaagaatgctatatattatgattacctttagcattttacttaatattaacattaaggattatttgttttaatatttgagttgcatgggtaagtgtgaaaaaagtttgcttagtgggaaccttattctacaaaaagttttttagctttcttccttcactacaaaaaattttatttttagtcacaacaaaacttgtggttaaagataaaaaaaaattgtgactagttataaattagtattgctatgttgtgactaataaaaagtccgtggccaaaagttttagtcacaaaaattgtaatttgttgtgaccaaatgtatttttagtcacaataattgttgtgactaaaactaaattagagacaacttgtaactaaagactatattttagtcccaagtaatattttgttgtgactaaaagtcacgtttattaaaaaaaattttgttgtgactaaaaaattagtcactaaaagtaacagttttttataatgttaaaactatgtaggacccaccaaaagttaacatttttttctacctttaaatacacatctctccaactataacctaccaactacaccatcactctttaagaagactgtcaatgaagttgttcttttttttttttttttttggtaactaatgaacaaaattttattgagtaaaaaa

SEQ ID NO: 384578 - DNA, 1028 bp, Cannabis indica
tatatatatggtacaattaatgaaacactatcaaatggggaatcaactgtactaaatgcaagcccatgctcttcttctatgtacatctctaatttttctattgtaaacattcttgtcgtttttctttttgggaaaaacaaagttgaggactttttaaaaagctaaataagtatctaacaccttttttttttcttccttttctacgtagtagcatttgaatgtttaaaaatgaaagtgttgtgttaacaaagaaaaaaaaaacattacaataatgatgttttaaggtcaacgtggctctagaaagcatgattttgaacaagtaaggtataaaaataagataatggagttcggatcggatccattcatggatccatttctgacccatatggccacttacttatatctcgactataaaattgtacagctgtcacaattcacgaaatgagcgtggaaacacgcgcgaaatgatcgcgtggagataagatttgaagttgtaacacatttagttcgttattgtatgaagagcgtgactcgctgcctaacctgacttcacacactctctgttattattccaccccactccgctccgctttttgggctaacttgacacacgtgccgggtcacacgtgtgagggtattttggtaaataagcaataagattaggggtttgattgcttgagaaagaagacacagagagagagatatatggtgttttgggataggggtatgtttggtacggtaggtaggtattctttgtggaaatttcagcaacattgtcaaataatgcttttcttcttctttttcttacttctctcaaatcataaatatttggtgtgtctatatatttatgttatgaacttatgtaggaaatgctacagcaattgataatgacttttatccaaaattttctgaaccataattctccttttatttactatattattattaatgtatttaaatattagttttttatatatagtttaatttaataattattaaaaaattactaatattttttttaaaaaaaa

SEQ ID NO: 384579 - DNA, 1238 bp, Cannabis indica
ctccgaccggtctgaggttttccaagccaaatgtgttgttgaaggtttgagaaaactgggcttaaaacgtttctcgctttacggtataagctatggtggttacgtggcttatcagatggcccagatgtgtcctgacgaggttgaaaaggttgtgattgtgagtagtgggattgtttggacagaggatcaaaaacaagagcttctccataagaagcatgggagatatggtttggagattcttttgccacaaaatccttgtgatctacggctgttagtgagtctatcagtctacaaatttaatcctcttaaatgggtacccgagtttgttgttagaaacttcgtaaaggttacaacttttcttggtttttattatttgatacataccattattttgctctgttttttaaattaacttttttttaggcaacaatggtacatcgaaaggaaaagatagaaatggtagaagaattgcgcaccggaacactagattctaattttccagtcctgactcaggtacataattattagcttggttaatattttttcttgttttatcacactgagattgattttgctatttgtttttggttcaaggaaacgctaataatctggggtgacaaagatcatgtcttccctttaaatttggcttatcagttacataggtatgggaaaaaatttaatgtactaaatatttaatagtagtctttttttattgtatgtagttgagttccatactttgattgcagacatttgggacccaagtcgaagttggagattatcaaggacacaggtcatgctgcaaatctcgattcaccagaaatcgtcaatgcactgaccaagtcattcatttcgacccttctctagtccctagctagcaacagtacgtaggcacttaatgctaaattgcactatagcacgtacgctataggagcaatgttattaggccattcaagggatctaatattatatcaatgtcaagcattataatttgttaaaggagtttttatattattcattcaattaaaatatgtaggatctcatattaaattgggtaagtttatcccttcttctagtggttcaccttaaaatgcatcttaacaatgtattttcccttatagaaataacatgatgatatacataaactcatttagtagtgtaaatggatcgggtcgaatttcatctgattatgattttgattattaattaaaaaaaaaagtgaaaataattttataaaacat

SEQ ID NO: 384580 - DNA, 2651 bp, Cannabis indica
cttgtgataactagaactcgcaccttttaaactttgcatacgacttgtgatctctgagttgtagcaaaaccattcagagatgttgtttatgctccgcttctatctcagagtgtacaaggatgtcatcgataaatactataatacagttatcaaagaaatccttgaacaccctattcatgagattcataaaaagccgtcagatcatttttcaatccaaatgacatcaccagaacctcgtaatggccagatcttgttcaaaatgcagtcttcgaaatgtcttcctcctgaattctcaactgatgataacttgaacgcaaataaatcttagagaaaatactcttaccctgaagttgatcaaaaaagtcaccaattataggtaatggatacttgttcttgatggttagctttttcaattcttgataatcaatacacatccgaagggatccatctttctttttcacaaataaaactagagctacccagggtgacacactgggtcgggtaaaccctagatctagcatctcctgaagttgattttttagctccttgaattatgccggagccatcagatatagatcttttgagacaggctttaatctaggtgccaattcaataatgaaatctatttcctattgtggtggtaatcctagtaattcctcgagaaacacatctaagaattctctcacaactctgacatcctcaagcccaaatgttttgggtctgctagggtcaatcaaaacttctaaaattctacacatccattatgtagtaaattcttagcctttaaaactaaaataattggaatttgagaactcaaaacggacctgaaagacacaaatggtacctcaccatctggctgaaaggttaccatcttttgttcgtaatcaatgctggctgaatacttggacaaaaaatttatcccaagtataatttcaaattcggttaagtccaaatccactagattaaaacttaactctcttttctcaattctaattggcatagacctaacccaccatttggagataactaattctctactaggtagtagggtttcaaaccatatctcaataaaatcacagaacctgcccaatttattaattactcttgacaccacatatgaatgtgtagctctagagtcaaacagtacagaatattaggagtcattgacaggaagctgacctattactacggaagagctagctacagaatttgcttgcgtaatggcaaatacccaagctggaacaagtttcgcctcttgttactgttcttcctttttcaaatgtaggcaatctttcttaaagtgcccaaccagcaagtcacactggaaacacgctttccagttacattccctggcaagatacttcttataatgaggacactcatgataggaataagcctgacgtccacctctaccttggttcccacggaacctcttacaatgacccaagccacttgatgtcagaaagtcttcctcttctgatcaattttggaatcaccaccataccctaaataaccaaaagtagggagggtgttggtcccaccagcacttggagtccctcggggctcttacagaaattccactgcaccttctgctcgaagagccttctcattttatctcagcatgggtcgttctatcatttgtagtaataaccaaatcatgtctgatcttggcattcaaatctgccaagtatatttccttcttattaaaatctataggtactatacctaaagctaacttggctagtcaatcaaacttagttgtatactatgtcagtgacatggtttctccctgaacagtgaactccttcatcttagtactatgatctgcttcattataatatttagcattaaacatgtcccaaaactctatgtcattgtagtgacatcctgagtgagggacaccatctaccaccacacgagaggatcttccaagaactgacacgtggcacatgtcacccagccatacttggtgacacccataaaattcaagatcctttcaatcactgttagccactacttggccttcaagacatcggaacctcctagaaagactagaggctcttgtttacagaatcgctcatacagaggctccatgcagttactagcaacaaattactttgttggcaccactggaactagatcggttggcatttggtaaggaggccttgcaggaggaccccgctgtctcagcctttgaatctcttcatcttgctgattgatttgggcttgcatttctgcaagcctttgctcccaatcatgtggagccagtggtggattttcttaaccactttcttggaaccttccatgacctcttctgtgtccacggggattttgaggattttaacctccccagccgcctctggtctcaaccccattaccctgaattcttatgttttgttgagtgttcatattataggaattggcttgcaaacctataagtcaggtaggtcagataacaatcacattaatccaattactgcatacatgtattttaggcaatatattaaacaactaacctgcttttctaatcaaataaatcacttaaacaagtaaaagtttactgtaccgcgagtcaatcttatctcaaaaaacgattgtacatatgttcacagtctttggtaaataaccttgcggctctgataccaaaattg

SEQ ID NO: 384581 - DNA, 2085 bp, Cannabis indica
tttttttttttgctgaagtacatgtaataatatctcatctcatatagacaaaaagaaaaactaaatatacatatatattttcccaagtatatatacataaatgtaaagtaatatacaaaaaatattctttaaataataacagaaaagaatatatatatatatatacatatcagaagtgctaagccatacgtacatgtactatcaaacttacatatatatctataaataaatatatataagaaaatataaagcttattttccagtacaatacaattttatatattaagaaattattagataaaactccattatattccaaaaaaaaaagcttagacttaattaaactaacaaaatctatatatataattaccttgagctggaatattcatagagtttaccagtggaagaaaaaacaatgagagcaagttgagcatcgcatagagtggaaagttcttgagctttcttgaaaagccctcttcttctctttgaaaatgttacttgtcttgctgttatgttatctattttctttatctctattttctgccgagtcattttcctaaaccccaaaaaaaaaatttaatctttttctttccccctaaaaaaaaaaagacatgaaattgttaattttagcaagatccaaaaaaaaaaaaaaaaaaaaaaaaaagaacattgatgaaggaaggaagatgtgatgaaattggatttaaagattttaccttttttgtatttttttgtattttttttttgttgttgttgaagggtttgacaagactagagttgtgagtattgcttttaatatttggaactgacactttgcaaaaacccagattcaaagtcaccaatggtttgagagagagaaagagaaagaggaaagagataagaaaacataggaaaaatacttgtttaagaaaacacttggattcctttttggccaaacaaagttggttgcttgcttcgagttagatattttgttagtccttcaactatactcctctctctaactttactccctaaattctagtttatttcttttttagtccctaaactttacctattacaattttgagatataatttaatgatattaaatctttccccttaaagaaaaaacaaaattaaaggggttttcgcataatttaatttaataattattataaatattagcactaacaattttgtttgaataaagaatttccatttaaaaaaaaatctccctaggatcttaaaacttttatattttaataattagattttgagtaatttgcggcataaataactaagtttaactcccaattataaataaatacataagtttaatttttgacggtaataatacataagttatatttttgtatacaaagattcttatttttagtcacgacaaaatttgtgattaaaagtaaaaaagttgtgactaattataaaacatcatttttatgttatgactaaaatatccgtggctaaaggtattagtcacaaaattataatttattttgttgtgactaaatgtgtgtttagtcacaatacttgttgtgactaaaactaaattagtgacaacttgtaactaaatgatatattttagtcgcaagtaatattttgttgtgattaaaagtcacatttagtcacaaaaatttatattgtgactaaaaggttatcactaaaagtaactattttttgtagtggtaactagaattagtttttgagtttattgaaagaaaatttagaagtaacagatactatatgtttccattcatacctgataacttaaaatttaagtcttacatgtgctttgtttaatatactaacaaagccgccgatatggattgataaaactaaacgaaaattgtaattttattaaaattgggtacttatgtctctagaaaaattattgaatttatataaatcacaaactcaaaatttaaatacttatgtcataaatatctattttaaaagagataatttgcggccaaaatccctttatgttttaatttttatacacttaactcccttttatcttttttttttttagttggtcaaacccccttaagtttacttttctttgtcaatttaaggtgtcagttgaaat

SEQ ID NO: 384582 - DNA, 1507 bp, Cannabis indica
atttattttaaattcttacttttcttgtttcaattttaattttaacattttaaaattaaaaaatgagatgttaatgttgttactctatagcaatagcatatgccaataaattcaatctaatgcaatagctattctttaaagtagcttcacctgacatagcaacccatatatttcatgcgttggagctctaagagcagctccaacctaaatgttaaagttgcatatgaaaaagtattcttatcccatatgagactcttttcactatcacacactaaacacttatcttatttttgtaaaatttatatatattcaaacaacatttgtttccataagattgtgaaaaaacaaaggtatcttttgaattgaacatttgcataatgcatagtgattacaatttaaattttactagagtgacatgtagtcttgaactctatctctaatatcatattacacaacaacctttctagaatgtactcaaaagtttgtgctttaatggtcatgcacatccatccagtatagtgaacgttctagaaagtctgctccaaatttcataggaagtgttctcattttcacattcacataggtgagtctatcaagagtactcttgtatctcggttctcctctctacatagagtattaatctcattaagagtttctattaactcatcctcatatcgcttcaagacttcatccttttattatataaataacatgatcaaactcatatcacctcacaacttctgtcaaaggattgattaagttgtcatcaatgcgtacatgatccactctaatagctcatgttgagaggaactcctctctaacagtgttgtgcttacgacatatttgtcgttacttaccgttgtagtaataattctgaatttttacaatagctgcagtactttgcagtgaattaacacaaatggtattagtcattcccataaaagggattttagttagcagtcttgtcagccaacctgcttcttcactagctaaatctagtgttatcatttcagactccatggtggattaagccaaaataatttgtttctttgacaaagtgttgcttttgagtcatttgctccaccaactatattaaacatatagccacttgtttccttagactcattttacaaagtgtttcagttagcgtcgcggtatccttcaagaagagctagaagcttttgataatataatccaaggctcatgtttttcttaaggtattcccataacccttttaatatcatgccaatgctctatactaggtctactagtaaacgctgccttagggtcggtatcgcacaaaaatatattacttcctcctatcttagtcaagagatcaaccttgaacaatattatagacaaataccttccttaggaggacaaaaatgaagccgcctccaggccagtccatactctttcggtgttgaccaatatggagaccgtaagttacattgacatgtactctttctcccactcactattttaagttaatgtgtttattttatta

SEQ ID NO: 384583 - DNA, 1423 bp, Cannabis indica
ttttaaaaaactaaaaaataagaaacataaaaatattgttttcaattttcaaaaataactttttttttctaacatattaatatatattttacaatttttgttcatatattcgatcctagacctggagccaaacctaaacccggacccgaatgattcatattatagtaaggtgttaaaatattgatttttttagtaagaaaaaatctaaaaatagttttaaaaaatttgtgtcaaacatcattaaatttttaaaataacaaaaaaaatataatctattctcacttttgaaaatacaattctaaaaactaaaaactgaaaacacaaccaaacaaactcttatctcgtctcttttttttttctccatccaaatctctctctccatttatttccctcccttaattacttcattcccttaccaagttttattcttttgagaaattaaagaaaaaatgttaagaaaattttacaagagctacgactaacatatggaatcataacttgttcacacgtgtgtaaactcaagcaatgcactactagacaccataataaaatgttactaatcttattttctctctctatatatagataaaaaaattcaattcagagatcttggactacccactacactccactggtctaattgaagttccaaaaatactagcggatatagttgaatctactattggagctatttttgtggatagtaactgttgtttcgagacggtttggatggtacttaattcactctcaacgatctgtccatatatttccactattcaaaaaactgtattttctaatccatatagtttcatttttttttctacaggttttgaagactttattacagcctttcattagcatagagacactaaaacgacatccggtgactgagctatatgagatgtgtcagaagaaccatttaaaactgaagtttgttgatttatgggtagagacgtatactataaatgtatacatagatgatcaattagtgggaacagcttcatatgctcccaaaaaagagattgcacaaaatagagcagccaaatgtgctctccaaaatattgacacactaattgacataaaatcatcgcaaatttagttcatttttacactgtcacattagtgtaaaaatatttatatgtatcttgctttcatagagataatatattaacctttcgacaaaaagaaaataaacaaaaaaatttcttactattttctgacttttttttcttcttaactttattttcactatagttggaatcatacatgtgtaatgtgtttgaatcccttttcattttcagtgttaaccctttccttatttcctcatgtgtccacatggaagttggattttagtggtgaaagaaaaagataaaaaaatatagaaaaaaataaaaaatataataaataataaattcttatattt

SEQ ID NO: 384584 - DNA, 2279 bp, Cannabis indica
ttttaaagaaaagaagctagctatgagattttttcatacctttgctttcagtcttttcttttatgtacaacaaatgctattacacctaataatattgcaccacttgatagagccacaacacaaagcaattatatattatgatttttgtttgtctcccacgataacctaaaagttcaatgataagtccaaatacaaaaatcaaacattttcatttcttgacaatactattttaaatagtaacagtaactttaattcaaaaataacataaacataacatattatgttaccttgtaattctgatgaggccgcaatgcgaaaatacaaatcatttgcatcatcactttcaagtattctaatatcaataaggggtgtgtttggccacaccatacaccctaccgcatcaataaatgaataagctatacaagaacaattatccatacaccatttatgacatgtatcaaggttgtttgaagcaacttgcacgagtacatacatatcgggaatacgaatattagagatcaactcaaaatagtcatcatttttatcgcaaaataattcactttccctaacacaccctccgctccaatttcctttgttccactcttgttgtgattttggcttaaaccctcttaagcacttgcacaatggagattctgtcctttggcacgccccaaatggtccacatctcccgtaaaaattgcaagcacttggaccctgatagcttattttcccataattagctttatctttcatcacaaccatcaccgttccatttggtgaaagaaataaaaccgagttggtgaactcatcgtttgtcttcaaatatgttgttccttgttctacattttcgactaggttgaatggagtcctataagaagaatatatggttgggttgccattactagtgaacttcaacttattccaaggtccacttctcgagtaaatggtagatgatgatccattattaatcgaaatcacgatttcaggaagtgttttctttatgatttcgaaaatgaaatttccaggcgatggatcgttttcatttttccatgaagttagcttgtaatcctcgccagttttgagattgaaacccagaacggagcctggaaagaatgtatcacatggatttttgaaactctcccacaaattttcacctgaagtgacatctctaaggacgaagtttccattgtctaaaagtagacctaacgtactactactagttctatttgatcgaaggtcaacgttgaccaattgtcgaggagaattttgtagttcttcgtgttgaataagctctagatttccattgttgttgatttgaagaactgctgatgaagtagagcttgtaagagaaagtggatgctctcgattggcaacccatgcaactgaacgaggagaatcatgtcccttataccaaatacctaaatattgatttgtagaagtgttgttgggagtaaagaagcctaattcaaaaacttggttggaggaaacaagagtttggtttaatgagagtggttgtgaagatgttagattagaaatgaatattgagaaacaatttgtggaagaagataaaataacaatgatgatcaaccatagagtagttaaaggaggtgtagtcattttaaagagacaagcttgctataagcacaagaagactattctattaattttctgctctaacattatatgtagataaggataagcttttcgtagttgaatttgttttggccacaaagaaattgatagtggaagagatgaaactacgtggaaatttcttattgtataacattttcaaaatgctcttattataattaaattgatatggacgtttcaactactagctactttgaagacttttacctttttgagtctatctaatgaattactattttctagagctagttactattttccttatgaaatcatgacatcatacataagtttgatattttacaacttgtttggtgggctgtatacatgtcgtattgtattaaataacaaataacattatgtttagataaactattatattacattaattattacgaccataaattttaatgcaatgttattcgtattatttaatacataacaaatgacacgtattagcttgtaatataatatttacaaacgatctcgaagtcaatctcggctccgaccctagccttggaccctagacccgaactcagaccacgaacctgaactcggacctaggctaatatcagagccgatcgtccgttagcccgaaggatactcactgtatacatacagaagactgaaaa

SEQ ID NO: 384585 - DNA, 1013 bp, Cannabis indica
gggcacaaaacccaacatcgagctggacctcagacctaaacttcgtgcccgaccctagacctagacccgatgccgaacccagacccctagccccaaaacccaaccccattcccagaccccagactcagacccgtattcgaacctcgaacctgaacctggacccggacccagacccagagttggaaccaagacttgggacacaagacctagacccagcctcgacctggacttgggactcgggactcgagactaagacctagacccaaggtctaacctcagcccggaccttggccccgaccctggaccccgtccccgacttcagacacagacccaaacctgacaccaaactcggatccagacccagccccaagtctctagggccggggtcgagtttatgataaagataatataatttcatacaatatactaatacaagtcaatattaatgtattaaataacactaatacaatgcatctgttaataaagataatagttatttactcaaccaatttttgggatccaagaaaaagttctattatatcttacaagttcaagtttatatgtatacattctcttaatgtatttagcttttaacttaaacaattaggctaaatatatcttattaattagtctctactaattttcatgttttaaccttaagtatttaaccaattccaacaccttttagagaccttaaatcccattttactattgaccattagataccttagaatccattttatactgaccaatgctcaatttttggatttaaaatgaatctgtttaacatacttaatccataagtacacaccatacaagacatcaaatttcccgcacattaagcatatgggactttacccatatataataacttgccacaattgcaaatacagtacaatcaagaaaatcaagagcttgtttggttgtgttttcagttttcagtttttaaatttgtgtttttaaaagtgagaatagaaaacagttttttgtcattttaaaaatttaatggtgtt

SEQ ID NO: 384586 - DNA, 1768 bp, Cannabis indica
gttagttacaatatatgtttgtaaataaaaataatatttatgatcataatataagctgtggtataataattaagctattttatatacatagcggaggtcataagtttaaattccaataaaagtatttttacttttctatctactttttgaacttctaccataaaaattgtatttagtgtcttaattattgaacttaatatttgtattattattattattattattattttgactttgcactacatttcatttaatactataaaattataaatttgtatcaattttaacatgttattagaaaaaaaattatcacttttactcaacttaaatcttgaatccaccactagcctaacctctagtcaatttcatgaaaagaaagagctaattatacagtaaaagaatcacacaaactctcttaggatataaaaaaagttggccagttagtctccatcttcagcaatggaaaaaaaataataaaaaaagactttcatataattaaatttattattaatgttgtttaaagccgacacgtaccaatttagtgatgtttgattttatttataaaaaaatggtaataccaatcccacttaccttgtttagaactttttaagcaccacttgctttcccatttcttgaagtggtctctatagaaatattaatataaagcttataaacatggacgaatagctcgtcaattataatgatacaataattctacaatggactcgttaaaagggatacacagatacatatataactatctgttttggtatctaaaacaatattttaattaaaaactttttcatgatcgtatatgttataattatttaaaatatttgtaaaattttaagaaaatcaaaaaaaattaacacgttaaaaatagggttcaaacaatgtgttgcacacttgactattttagtttatacatgtgtaaaataaattatttgaatattgttttctatattgtaaattattctaaatttcttaaaattttgttagatattttatataactatgaggtacacgaatattaaaaaaattgcactaaaaaaattactttgtcgaaataagtaaagaatatatcaatacatcttttttaagaggaggtctggtgtgttatttatatgagaatgataatcttcagtacttttatatttgggtatgaaatttttatgttttctgaaaaattgtatgagattaattactctgttggaagataatctttttataaaagttttcaaaataaattggttctaaacaatctcaccaatcataatataatgtattgattccacattctacatattagtaattgagatacatgtgctaacttaagaggaatctaactaaatattcttatgtacaaacacaatttacaaattttaatattttcaaacaattatattctatgtcttaatattttagttaatcataccaattactaaataatgccatgttattggatattgaatcattgatgagggcatttgtcacttaatatatacatgtaacaatgcagatatataaataatatataagttgatatattaatatatatatatatgtgtgacaattcaagcaaaacattcaataatgatctaaacactaattgaatataaatattaagaagaagaagaagataaatgaaatagaatatctcaaatgataataagataagaatgaaatagaaatatatatatatatatatatatatactaggtgattgttacgtgtcaagccacgtagtgttagttttatttaatatttt

SEQ ID NO: 384587 - DNA, 1610 bp, Cannabis indica
atactcataataatactcattatacaagtattatacttaatgtaagttgatacgatatttcctagctagctaatatgaactatgcactatgagatgatggtgtatatatcatttttatataaggggcttatcatggtgattgtcgaataacttttagctacacttcaaatatattctcttaattaatatttcccctcgacaagttttataaggattataaataatataattttagttcattaatgtacaaaatcaatatataaatatatatatatatatatatatttatcaggttttttttacatcatctttcatatatatatatatatatatcatatacttataatttatataattagtttgcatgatcatcattttattccttaattaactagtcatattaattataattatattaattagttttcttaaaaatatatggtttgtcaagtaatttttttttttgaattctcatatttgataagacaaattgtaattacgtatgacaatatattaataatattcagtaaaatttaataaatttatctacttaatgagttattttcacttttatgtaaattaaacatttaatacataatatatagtatcatcaaacacattcataaatgcataaattaaatataaacataaacacatgcaaacatatagattagtgttacagctatatttcgaacatcaaatataaatattacacgtgtccatatgagtaaaagaataaagaaaatgataaatgagaggaatgaataaatgttccgccttgagataaattatgataattaaaagatgtgataacttagcgtggcactatcaatacagtaattcacaaggataacaagattacaagttaaatcctcgatacattcttgagataaataaggttggtgaatagcaagaaagaataagttaagtagaaagggtagataatgagttttttaagaggtgacccatatacttgtgagtatattgaaagagtaagagaaataaaaaaaagtacaacttatctcagaatctcaaaacactagtccaagagttgccataaaaaggctatagcgatgacaaacatcctaactagtatcccgaagaataggggtgtttattggaccacatctaatatttttaggcctatccagatccgatctaattatatattagatattagagtttaccatccgattcgatccaattcatttcagtcatccaatagattagcatccactggatgttggattagatcgatactatccattagatgtattttatgtatatctattacagtaattcagatttatcaagtattttagacctagtatttttttaattatatcggatccatccaatattgtagattcagtatttattggatttgattggatccatccaatctaaaaagaaaattttaatgttaattttcatgtatacatatatatatatttttatgtataacaatataaaatcaaatcactcatccaaactaaatgaaatattaagtagtttgattggatgttggattatttttggacacctcatttaacatccgatccgatccgattggatattaaaaaataacatccaatccgatctgatcacaa

SEQ ID NO: 384588 - DNA, 1712 bp, Cannabis indica
aatataataaaaaaaaaatcaaattggaaaagagaaaatttgaaagaaaagatacatataaaaattatattattaaaataataaataatatataaagaattgatttaactaaactactccttaccattttttttacttttatatatatatatatatatatatatatatatatcgtatagatcatcaatttgtttgtgaataataaacttcaaaattgatgaattagtaattatcataaataaatattaatactacagtgaacaaaattctaactaatatcaattaattaattgtgttaaagtgttaataaactatgtaatattaatcgcctttaaaaaataatgtattactccttttaaagattttttttattaatttaaaaaaaaaaaaaactacaaattcgtacaattgtatgtgatattaattaactctacatgttgattttaagaaaaataaaattctacatgttgaaatttaaatgatcgtataccatgtgagtctcacatatatcaaatcaaaatgaaaatgtataccagatcgagtcctctctctttatatagtctatactatatatactgtacccaccaagaaaaatatccatatatattatccccatattttatatttgtggttgacatcgagtcaaaaaagctatatagtttccatcaaaaccatttaatttaaccccaaaaaaaagaaagaaaaaaagagaagctttctattcacttgtgctgtaagaaatgatcaaaaaccctaaaataaacatccttttattagtaattacattgacttatattattatattgtgtcttgaccaacgaagcatgacataaggggcatgataatgttgtgtagtggtgttatattataaatatatgtatatgtgagatgatgagacacatgccttatatttcaatccttacataatcttaaagcaaatatgattatataaaaacataattaattggttctttttcttttcttttgttgcataagtacttctttttttttttttgaggaaatattttgttgcataagtactagttcaccatggtgtaaaaattaaaatcaaatttttcagaaactttctttaattgattttactttttaatggaaaattaattttattaatcaaataaattcgctacttatgtgccacaacaaattaattggaacatttcccaaagtgaaaagatggacataataaaatagagactctaacaaatttatttgccaccatattatttcactctttaagagtactcttttgttgagttaatagctcaaatttcataatataactcaaaagtgttaaaaaatcatttttatcaagtgcactattttaggttttttgtttaaaaagatgaatagtagcttctttacatctggtatgtttacttaaagggaatgagaataaattgtatggtatggtattgattcccatacaattgtttactaaattttggaaagaagaaaacaaattagggagaaaacaaaggtaaatgttctctctccatttttatggagaatgtctttccctttccttacttaatttattttaattttaattttattaattaaaaatgaaaaagacaaatatactccttaaaaatctataaacagaaaataattacatgttctaataatcgcaattttgtcaaattaaagcattctgattaccttttctagctatgtaaacaaaataatatgat

SEQ ID NO: 384589 - DNA, 772 bp, Cannabis indica
atagtacgaagatcagttggaaccaaaaaaaaaaataattggacgttttatcgtacctcttttaagaaagataatagagatagaatttgaagaaagttgattatgtatagggaagagaaaataagctgaataactaagtactgaaatgggcctgcatttacaaaggccaaacaattgggccttactgatcgaaaaaagatataacaaaaataacaactttatctaactaattctaatattaaggagttaaaattttactagggtgaccaagcccggtcaatggctctctctgtggtgagataacagtaacattataacatcttatgaggttttctggtactagagtctggattgatattgatcaagtgattaaaatattatcctcctattaatgctattagtggaggtggatacaatgaaatggcagatggctgattttgttgatgcactagtggtttaatggatatatatatttacatattttgctcttcacaagttttatttgttgacattgatgatggtcttgggctattgaataactggtttagtttgcccatagaaatatgtagcgtcaaagattatatcaataacgcgtctgagacttgagttgattttgataagcggcttggttcgtagaatcaaacattacaatttattaacaccaccaaccttttttcttttgctttgacgggaggtgtttggttggaggaatgaaaatataggaataggaataggaataggaatgagaatgagaataggaataagaatgaaa

SEQ ID NO: 384590 - DNA, 945 bp, Cannabis indica
gctggtagaacagctaatgctgctatgtttgcgggtaccaccacatctctatgtgcagctggtgcgcttggcgggtttactgcattcatcgtgtcatttttgtttgtaggagggatactttgatcgaccaaagggggatcatggggttcctcttcatcgttgcaattccttggagtttgtgattgagctcataatacttcattgaggcaatctcgtagatcacctctatgagcatgataccttcctcccatccttttaaatactgtccttgacctggtataatcactgggagaacaaatatcagtagaagaagagtgagagtcgtcatcgtttaccttagttcgtggttgtgcacgactttgcgggttgcatcgtttaggatattcctcctacgatctttcctccctttgaccaagttgtcgacctgtattaggagcaccagtgactctgtcacgtgtatagttacgaagaggttgatttagatcgagcccttcctgtccattttggcctacatgttccatgttattatgagtattttcaagatgttcattacgacgtctagtattatcgattacctgagtattatcacgatgtcagtttgggactcgtggcagatgccaggatcaaatcctatctctgcctacaatttttgcttgcaagggccacatttgttcttgcatggccatatactgcgaggttgagagttgaatgatgccctcagaagcaacggtaggtgtgaatggtggaaaatgccccactctggcagttggtgtcaaagtttctcctacaagttcagctgttttagggaatatatttaggggtaacatgagtacatcctactcctcgtacaatagccttaacaggggtcgttcctccttcaggcattgttcctccaccagggttattgtaatacccgatattaagaaaagtgttggaaattatttt

SEQ ID NO: 384591 - DNA, 1249 bp, Cannabis indica
gtaaaaaagtagaaaagatagaaattcaaaatataaaagtactactacaatacctaagaattttttgagtaatatacacctatatgagttaatttttaattgtgcctaatataataacattcaacattagctaaatataattttataattcatctatttatccatttattatttttttggtgtgaactcttaaattatgctagattaacattaagttagtattatatatcaataaattctataaaagaataacaaaatgtttaagatcttcatgtgaagatataaactttagtttattaagaaaaaacatatagatatacaggaacagtactagctagtaataacaacaactgaacaacctctcataacttttttaagctccgaaatttcaatctttccatatcaaaagagggatgaaagaatatatatcggaaattgatcaatctcttctccatattcgaaaaataattcaaattcattatatatatatatttatatttatatatatgtttcaaatgaaaatgaaattaataacttaaaaaaatgcgtacctttgatgcttagacagctgattgttctgaaatctctttaaaacaaacaggtgttcattatatattgtcgagaaattatgtatatagctgaagttaatttatataggagtattgtgcatacaaatgggaatgccacccttgagtttgttgacgaatttaacgtacggctttctcacttattatcattacttcgccagcctggcctgaggtttctacacaccaactactattggatccaatttattatcttgtagtactatattgtattttgtatttactaccctagtactattgcacatgctggtgacctaattcgtagaacagaacagtggattgagtactaactcaaataaatatattttggaaaattttacatgggatactagttattttattagtgctaaataagtgatgcataagtaaaatataggccattttattaacaaattgtgagataaatatctcatataataaaaagtaattataatttggattacaatatggtatgatgttaaaatttacatcataataaatattatatttttatatttaacattatgtaatttttaatattttattattaaattttaattaagatgtccatttacattaaatgattattattattattattaaatgggcaaataccattttggaccctgtgttttgcaaaagttactgattggaccctgtgtttt

SEQ ID NO: 384592 - DNA, 2576 bp, Cannabis indica
tttcttctcaagtcttagtgtcacattggggacaatgcgacaattaagtttgagggtgaacttaaaagttttagtttgtgatttagttgtgtgtcttttaagttttgtgttagtgtcatggtaggccttattgattgaagaaataccatttgctgttatttatttgatttaacttgttaatatcgtgtgcttaatttgattgtttttgtgcttacttttttcccttgttggaaaagttgagtataatttataaatgtgaataattggactttgttataaatgcttgcttggttgggagattgataagttggattggatagaacttgcattaattggcctttgaggcgaaatctttaatgatgatttgtgttttgaaaaataatttttgagccttgacttgttattctttgttttacacataatttgagctaaaaaattgaatccattactatcttcctttgtccttaactataccataagtggattgttagtttgggaggggggtttgtaatggaaaattgtgtgttgttcagtgaaaaataaagatatttgtgagagacattcaatacaaattttttttatgcaacaactcagaaaaaaagaaacattggcaatgttgtgtcataaattggaaaaaaaaggttgttgcaaggttatcaaataaaaggttctctcaagtatttattgagaaaaagggaatattgtaatcatttgtgaaaattgtagggtgatttgattgaagaagcttatggtataggtgagcctacatttttcatctatccttacctaagcctaacgttaaaacccaattaagtccttttaattttaaagcacatatgttattgacattaatagataagactaagtattacaagcttattaataatcgaattgtggatatgttggattgactttgagcatgtatattaagttccatttatttttgacatttatgagttatattttcatttttatgtttgaatgctaaagttaagtaccaggagcaattagattgaaaatagtttacaacaggtgaatcttgtgagtagcagtggtgtggtgtaaattgaagtaaggcttgtttagtgttcgtttgttttcagtttagtgtcgatttttactcgagggtgagtaaatgtcaagtttgggagagtttgttaggactttattagtactatttttaagtagggttttaaagtgttttagttgtattttatgcaattttacgcttttagttaataatgtttttcaagtttagtagtgaagaagaatagaacgaatttgagaaaaaatatgcaaacatgatgaattcaataaagtcttgtcgctagagcaccaggaaaataatccaagaaaaaatctagaagatttggtgcgaaaggttaaagaattagagagtgtggattagcgccatgacatagaaattcaatgtcagggtgctaaaaggcaaaaatttggtagaaaggtcgtgttttggaaatttttaggcgggcctcaacattgtgattcaatgttgagacatggggcttgttgtcgctcattgcctaattttaagcttcaacggccacgacattagatgtgcatgtcacgacccaccttcagtttttggaaatttttggtcgtgttaaaagacgcgccgcgatatccatatccaatgtcgcggcctgcatgcattatttggcgagttttagggttttaaccctaatgaaaagctatataaaggaaccttttggcactttctagggtaacaattgagaggaacgaaaattagaagcaagaagcggctttggagactttcatcaatactttttcgaagagttctttcttttcctttgttttttttatgtttttaatcaattgctgtcagttttttacaatgaatatgagtagctagacttttactagagattatttggtactttattttagtttaatgtgatttaattcttccccaattttctttgtacatatatttcattcgtacttaatttttttttaattttctggccactaattaaatattatgatttcatttcaaaatttgagaagtgagtattgattatgctatagtaaaataggcacagattttcatataagacgagagtacctgtatggtttgtgtggcatttaggagttttatgcttaatgcctcctatgtgtttaaatttatcacgagagtagaaagtttacatataggttgagatttatatgtcctagctcaaatataagtttctttagtaaatccgctatcaaatgaaaattggaatttgagaattagattatactaaaccatatatagtagattcaattgaaattaatttccctaaactttaatcattcttaattgcattttaatctatttgttttatttacagtagaattttaacatcaatataaagaccgcttagctttaatttagaaattagtagataattatggtttaattatgaaacttgcatgttagttatgaattattagcttacggtgatttatttgaattcagaatgcatattatatgttatatatggaacttcattattttgcatgttttgtgtccgacaacattggaacgcggt

SEQ ID NO: 384593 - DNA, 1173 bp, Cannabis indica
ttaagtttgagtgtatcacgtcgcaatggaacaacacatttttgttttttttgtttctttttgaactccatttttattcttttactatacatttcttcatatatttttcttttaataaaaatcaccaataccacatgaaaagtcttgaaataccgtccaaattaaagctagcccttcaaaatctctccatgcaactacggaatcatccaccactatcatcactacatgtactttattagattagataagaagcactttaccattaattaacatatatgatcacattattttaaggtcaacaaaagacaaaaaagtctactaagtaatggcaatatttcttatcaagtagttgatactttcgattatttatacaattaacacgatcataagaggataagataattaaccaactccaactagtttgattgccgatcgatcgatatgaatcatgactgattctttaaatgaagtgaaccgcatataatatctaatatacaacatggaattattaattatatttatacgtttcattatatatatatatatatggacccccaaattaattaacttatatacacttggcgtttggaaattttagttctcgtgcgtttggtttttgtaaccgtacgtacattagcagatgctgcacattgtatagtcaaacgaaaccgcgtgagtgaattgaacttttaatgagttgcagatagggagttagccacattaatgacatgttatatatataaacattaaacaatgtattttgtattataaaaatgtaaatataatgagtaggagagttcattaattattagtagagtattgttattgtatattagtaatgttcaacatgttctataggtggcaacatatgattggttagtgatattttttaaaagttatcactataagaaatgcaaactacaatggtaaactgcctatctcgcaaactgcattggcaaaaaggttaaaattttaccagcacacatttgtagtggcaaaagtttaacttttaccagcgaattatcgtgctaggaaaagttattttttaccagcgtttttctttttgcgccggcaaaaattctaataccaacgctgatttgctaacacatcaatagttagattttcgttttgccagcactaataccaaaacttttgccaacacaaaaatatact

SEQ ID NO: 384594 - DNA, 1485 bp, Cannabis indica
actaacgtgatgagtagatagtgagcatgatcgaattcgatctatctctatttccatactagattttcagtttagtatttttcttttctttttctttttattttagtaaaatatataactcaagaactaatattgattgtaactaattacgaaggtacatgtgaatttgttgtacatgtgaatttcatgtgtccattatatatatgtacatgatatctagttgatatagtgcctaataatattagaatgaaaatattttaattccttaaaatatatttttgtattccactcattttcactatttttaactaaaggctaccttaatatatataaatatgtgactaattactatataaaagtacaaaataaattagtagatatgacagtttgatgaacacatctgatagtactaattactatataaaagtacaaaataaattagtaaatatgaccgtttggtacgcaggattggattggattagacaggttaatttatccaattccgtgtttgggcatgttagaagtctagataactaatccagctaacctcatctgtctaggattatttatcccatctagcagggtgggataaataatccaatccagtcctgcgtaccaaacgggtccttagacaatgttattattaacttttgacattaataaagagaaaaggggatttccaaatggagatataattattatatcatcaagaccaattggtgaattgtcttagatatatatctacaactttttcttattaatcaatccaaattggtacatttggtgtaattattattcgagtagacaaccatataataagggtccccatatcttacattacccttcaactgtacaatatatttactatatatttatacatattcataattatatacataaactatatgtatttttaattgaaataagctagctagttcccatgtattcaccgcgtatacatatatatatatatatatctatatatatcattattatatatatacatatcatcagtcgacaagaccgaaataaataaacatatatattagttaatttacacaaaaaaaaaaacataatagatttatataattatgacatatatatagaaataataaataataatgtagtatgtagagagagatatattatgacttaataattcatgaggcagtaagttacgcggtttgcaccctctgcacaactattctcatcagatctcatgatcattcaaatatatataatataattatctctttaactaatatgtatacatgtatattatatatgtagtacatgtaaatatataatattaaactctcccaatagattggagtatatatatggagatcgatcatgaaattatacatgcatgcatgcatgcatgcatgaacgagaatttaacgtacgtgtatcttaaacgcaaatccacgtgtctcacatacgtatatggttatttgcgtatcttagtattgtaatacgtaatat

SEQ ID NO: 384595 - DNA, 1411 bp, Cannabis indica
gaacgaccaccgatagtacaacaaagatagaaataaagagtggatatatgtgggatttgggccccactccgtgaaattaacaaacgttgacaaaaatacaacagtcaacaagtaggcgaggctagataagaaaattgtggtcataaatatacaaggttgggagtaatcttcctctcctttgtacccagttttaaaaagttggtaactaaagttttttgttttatttgaaaataaataataagaaggcctttgtaattgaacttactctaagagtgtaatcagtaatgagactgttctcaactccttccacagcagttgcctgaaaattacaagaaatatatgggatcaatataaatatgctttcaccaatcaatctaagtttacggttaaataataaaaaagaagtttaataatgtagttaattttggttttataccttcatgaaaaggtctagttcagcctctggaataattttatgatccttttcacgtctagcaagctcagcaagaaggtctacaacaatataataatagttaaataaaaaattaattaattgaagtgttccacttagaatgtgattacgacttaattaagccaagtaattaccataacgagtcccaactccaaggcatctggccgagaaatctaaggtttctttgacagtcatttcacccacatgaacatcattttggctaatgtaggcagaagtcttttgtggtacaaattccttaagcttatagccattgtatgtgatctccccttttacctgtagaacaatattttaatattattattatttggaataatgtgtttaattttaagatttataatataagtatatggatgatatgactaacctttaaggtggggtccaactttccagctaaacccagcaacagggttgttttccctgatgaaggtggccctaatagaagagtcatcctatataaaaataagaggaagaaaaattaataaactttgacaaaatcacttacgtgagtgaattactaattttgttgtaataataagttcaattaagtaaatttaacaatttttctctacttgtgcaagactaaaagtgacttcttttgattttgatttttttttgtttttattgttttgacttttttttaaagataaaacctaccttgatggtttaaccatgccagaagcatctttaagtattgtaagctttgttctcttggccacaccaataccaagtaaaccaatagctgattcagcaatatttaaggcagcgtttgggagagtcggaagagctctgctgcctatgtagcaatccgcttcaactgtcaaatgctcgaacctaacttcaactgttggtaatctcacaccaactctgaaataatcattaaaaaaaatattattaatttattagtcaacttttcaagat

SEQ ID NO: 384596 - DNA, 1217 bp, Cannabis indica
gctgacggctcaatgggcaccccaactgccattgctatttcctctagcatgtcatttgcaaaagcttggtcaagtttgttatccctaagaccctggtcaagcttgtcaacaatttgaagttgagagcttgaagtctcgaattccactctttgcatctcattttgtagcctatggacttgatcagatattctatgaagtacttctgtgtttgcaagggataaagaagctaaagatcttccaatatctcttgtaacatcttgtatctctttaacaatgtgtctgcacttgagaagcaagtagaaccgggctcgctgagtatacttctcaaccaggttattggcccttttaacatctgcttcaagagcttctagagcttgtcttgcagcctgagactcgttcagctcttgaagttgcaattcctttaagacaggttcaatgtcagataagtgctttgacaaaaccctaaagctctctttctcaaaaacaacatccttagcagcactagatgttttggccacctggtttgttagcacagccaagattgtcccaatgggtataaactccattgccagagatataattagccttttgcttaaaatcctctacaagaagcatatgaatataattattaaaacctcaattgctccatcaacactccatattgttctattatttcaatccttttccttagcaccaggcattcagcaagtgaagatatctaaacttcctataaataacacccaccatacaaaatgtttaacacaatttaatagctaaacaagaacataaattgaagatagaatttcatgggcacacacatgatactagaactcttaacacaccttatcctcttcttacataaagacaggaaagcttaagaactaaccttgccttgcttaagttttaatctaaagaagtggaaatagagcatgaatttctatcttcttcactatatacttacaagaatatttgtggggtttctcatttgcagaaagtactgaacaaaatccattaacaacttatacaggtgacttgtgtatgtataaagaaatagaaaatttatgagcagataataaatttccaaatgggtttagaagaacttatcacaattttacaatataattaagagaaaaaaataatttcaatttccataatagagaaacgatgcaggaaaagatatatgcttaagcatatcaaaatgagagagagagagagag

SEQ ID NO: 384597 - DNA, 1292 bp, Cannabis indica
gaaaaagaaaaattaaagaaaatattggagatagtaaaccaattgtgtaaacacaaccaaattccaaggtatattttcttttgacaaaatatttttgatagcacagctaataatgacagctattaataacatctgagttaccaatttatatgaaatttattaaggaccgttgttaaaatttaagtctaaatcatgtatatattgtatttaacggactaaaatatttacatttgatccccctcctccccaataaaaatctcattacatcacaatcgatgatattcatatatatgaatgtaaatatatttacagtagaacagatgcataaaaattttattctacatatgaatattcttatcatcacaagcaatattttttaatattccagctgtaaatgtgtcctgcccattataaaatttgtctccaaaaggagatcataaatgttgttgtaaaagaagaaccaagaaaaagagcaaaaattctaaactctctagtcatgttgttgaatccctaaatgaatgtatatatctaattgtggcctttgtgggggcaagcaagaaagaaataaaatcattaaataaacttaaggaattggttaaaacttcaaatcaaagggtcctcaaatagtttgtcttagagatctcttaggataccaaaaaaaagctaataattatgaaagatgcatgatggatggaatggaattgtaacaaccaaatacatcagtttcagagggaccccattactccttcaattgaccactttgtggtttaagtagtggtttttaggtaagaagctatagacatttttctcaacttgacacgtagcttataattgtaattacccttttcaactagtaatattaatgaggaaaacaaaagaagaaaaaatctaagagggcaggtctttccatattgaaagtgctattaaaagtaagaaaaagcttgatgttagatttctaaaactagttatatatataatattactaagttgtgtacttgatgatatatacatatcattaacaatattattaattatttagtcatgtctgtttgtgtatgttttggggggaagtatccctaaaaagcttttacatcatcaactagtggttataaggcatcaaagggccctacaatatttaacatttggagagaaaagtcaaatgagtttatgtgtggaggaagtagtgcaaaagaagataaaaacacaagacatagcagaagatagtagtacttgcctctctctctctctctctctctctctctctctctctctctctctctctctctctctct

SEQ ID NO: 384598 - DNA, 1783 bp, Cannabis indica
tcaagatttcatcacttttgcaatcccaaattgaagaaaaagcaccatagttggacacctatgatagcttattttgtccattgcttttgaatattctttttttatttttaaaaaaaaattgaatatataataaatatatatttgtttaagtcacaagctcatattggatatcaatcatggcatatgtaagagcctcaatcgtggaagctttcaactttcgaccatacatgtggagtaatatgtatcgatccaccgctatataacaatgtgtggacaaagacattatttcttttctacgctcaccactgactgactcaaccgtctctccaatttatggggtccaagaagggacgaaaataaaaaaaatatattttttataaaataatggtcaaatcaatttccaaattttatataacccaagttgtcatacgtgcaaagaagccaatggacttggtaggtcctacttttgtaagagactttaattctacaccatacaactagagcttcattctttgttaatctataattgactttgtaaccactcaaaaaatgaaaaagatccgcagcctattccatcagtctcttcaagcatctcaccacaatcacaacaaggcttgaaaaacaagctcacaacttataaccatgtgtttggacactctttcctttattataagcgtttatttctcaaccacaaatttgagacagagaaaaaaaaattaaactgtgtgctaaactcaccaaggtgaaaaaagaaaagaaaatgacattattgtcacatagtgacatgagattgtcataatggtgaaattctaggacagaattcatcccatttccaaccccaaacacttcctataaattgcttcttattccaacttgctctgtccaatacaaaaatagaaaaacctctattctccacaacacattgagtcttttgagctttgttaattaaaagaggaagaaagaattaagaatgtgtagagggctagaagagagcaaccgagggagtaattttgtagctcggtcgtcgagcactgacgacgacacatgctcggtggtgtgcgagctgtgtagctcggcggcttcggtgtattgccaggcagacgatgcgtacttgtgtagaaaatgcgacacatgggttcatggggctaatttcttagcccggagacacattaggtgcttcctttgcaatacatgtcataaactcaccaagagatatcttattggagcctcggttgagatggttcttccaactcttgtaactacttcttcaactactacttcatcggatcagcaaagaagccagtgcgattcttctctttccaaaactaattgctctactacactaaaaacgcccttcttgtttttttaagcctttttttgttccaactgatgagataaccaagtttctgggatagtgaaatttgtggaggtttttctatgtagatttgatggaaatgttgggatttaagagtttcaaactctcttaattatacattttctttttcttttatattaatacgtaacagttccgccaaaagaaatgaaattgttttaaaatgaatatacttgatcggttcctaaaattatctaaatatagttgaacatgggcatcgattattatatgcaagaggtatatacgcctctgtcactataatgccgaaagagttaggattaattattgttggttaaaatccacttataaccagtccctttacagtatacatccacatcagcaaaagaaaataagatacaagtaaacaaaaacagtcctagggtggcttcg

SEQ ID NO: 384599 - DNA, 2058 bp, Cannabis indica
tttttttttttttgaaccactaatttttagttagtttctcttaataataataattatttaaatggttaatttttcctaattatttcatttatatacatggcagattctatgttggcaataatatcattttagacaaaataacaaatttaagccgcctgaattaattaaaaatattcatttaaaataaataaaaaaattaatatatatctttagaaaaactatcatcctagcttgtaaccaataaaaaaaactaaaattacataacttcgtactcaaatcaacaccacccctatataatcaaacaaataaaactaaataggtattgtttttatgtaaattgatataatttgtttgtatatataataaattataaaaattaatgaaaaaaaaaggttataactgtatttttgttaagttccaaataaacttatataagatctattttttttctctttttttctcattcatttctttctttctcccattcattctctttttgtcgatttgtgtatctatcaattacacaatgtcagtgtctttatggagtccaatctactggtacggaaactatcttcgtctatgtttcttcgctgcagggctcacttctcaaataactaacctcgacaatggcaaaacgaccattcacttttggggaccgaaattcattaacacgactaagccatcgttggttttgatacacggctttggtcctgtgcccacgtggcaatggcggaatcaagtcacatactttgcccctaaattcaacgtatacgtccctgaattgatattctttggtcagtcaacaactcagttagctgatcgttctgagcaatttcaagcagacactgttgctaaattaatggaaaagattggtgtgaagaagtatagtgtggtgggaacaagctacggagggtttgttgcgtacaatgtggcaaagaggtgggcagatagagttgataaagtggtaattgcaagctctgctacaaatatgagattgagagacagtatggagttgctaaaaagggcaaaagttgagaagattcaagatctttttctcccgaccagtgttgcacgattaaggactctactcactctcacagtgtataatttttctaaatttgtgccatactcgttactagacgacatgctcagagtaatattcttttatattaagcatttaatacttattattttttattaaaaataattaattaggtcctctattttttaaaaataataatttagaccttgtgttttttaaaatggtatacaataaactttaagtttaatttttgtcaaattaaaacttaataataaattgatctaaaactgttatgacaaaaatgattatattgttttactaaatttatatatggttatagatgttgttttccgataatagagaagagaaatcagaactttttgatggagtaactattggacgagataaccaagcacacgttgttcctctaaataaggtataaaaaattattattttttaattatgcagtgagatatatttaaattagaatttaatcccaatatgaaaaagatgtactttgcaaaatataattatattatctcaattttatttacatataaacatattttgcaggaagtgttattagtatggggagatcatgatcaaatatttccgattgaagagactgtggaactcaaacagtatgaaacacttactacatacatttattttttttttaatttttagatcaattaacataatattttatttaggtgtaatataaaatttgttatttttgtatttaaaatggtagttttaaaaaaaaaaaaaaaacaatacgtatagttgggcgtcgaacttttagcttcggtggaatttctttccttatcgccctgtagtaagtttgaaatgccaatgtgaccgtctctctaatatcaggtcgattactcaagtgtgagtttttaggatccatgaaacataaccaataagagtcgggcactaataatatcaacatccaatgctcactatataataaccaaaaaaaaaacaaaaaaagttaattagattgagtatta

SEQ ID NO: 384600 - DNA, 761 bp, Cannabis indica
ccaagtttcacctttctattctatctacggttgacccttcataccaccaacctcttcattatttgtcttttaagccgttttatgttaaccttttccaacattttttttcaacattaattcaagtgttcattaaaaatcatttcataatcaagtaattgaacaaatcttttctatatttatatataatggagaagggaaagggaaagacaaattcaaatattaagatcaatgttttgtttctcattcgtatttgatccttaattttattttattgatataataaaacatactaaaacaacagatggatggcaatacaaatttggactctgccgtctctctttaattaaatttaatcaagtctcacccaatattgtttgacaaagtgggaatatttttaaaacaagtcataccattatctcaaatccaccaaaggaaaaagacaactaaatagaaagtggaacttgtcatattaattgagcttcttaagctttcagggcacgtattgcatggcaattatgatcatatgaccaagttatactttctatatagttctgtttttcctcgagcatcactcgtctcacattcttaaaaagtagtcatatttattagaggtgagatttgttttagtaatatcatatcgttctactatttagtcatattaattgaaattgggctatgatcttgttgtccagaaacgcttttaattatttttaaagaataattacataaaacacaatattttgtaaataaattacattttt

SEQ ID NO: 384601 - DNA, 1782 bp, Cannabis indica
ttattataataagaattgtaatactgctctggtggctgttgaggctttggtgactgttcttgaggcttcgctggtggctgttcttgaggctttggtggcggctgttcttgaggctttggtggctgttcttgaggctgctctggtggttgtgactggggaaaaggctgttgttgaggctgcactggtgattttggttggggaaaatgttgttgttgaggtaataataattgtaataggtgataataattattactgtagggcttaatattaccatcacggatataaatatacacattataggtgatattataggtatgattattcagattttgagtgggagcactagtggcctccgtggtggttgcagtcgtagtcgtaggacaagtggcggctgcggtggcaatagtggtggtggtactagtggtcacaggactgctaatctcaccataaatttcttcataatcttcgctaatacctgattatccaaaattaagttcagatctactaattaattaaactaatacaaatagtactaacaaaattatttacgtacctctacccatattcactactcccatattcaatcgcaattataatattactcaaaactataactatgtagaaagcaaaccatatatatagattactaattttattttactttgaatttaaataatcaaaatatcaatttaaatcatagatttttgtggatgtagttcttctttttctcaaaagtggccgaatgtatcgtttttcttattaactaataatatttaaattttaaattttaaaaagtggttgtcaaattaaggctagctgaaaatttattgtctatctctttcatttatttattttaattttgttgagaaaattgtctcttttccatctctatctttgtaccggtgtttctcttaattataaaaaataccaaatcctacgaatatattatcaaaaatatcaaccttaattattagctatcaatattctttagtacgtaccatatgtgctatacttggccataagtatgttcaattttatttaggaaatttaataagtttttattatatattttataagttatatatataatttaatttggatttgttaatgaaaaatattaattataataatttaatataagtaaaacacacttacaataaaaaatagttgaagctcatgtataattttcatgaataataaaatacaatcacccctaaagatgattttaaataaaattggtgatgtttatatatataaatatatggtggtttgacatcagactataaatgtatagttatttttgtaatgtaataatgtacacaatatttttatctttatatagaaaaagtgtctatctaacgttatttgttggtttaacgatttttaacaaacgtttaatgttaaacgttaaataaacccaataattaaaccaaaaaattaaacaaatcttagccacatatctctctaacaaaccgtatatccccattttgatattttttttttgtttttttttttaaatttacactattcttttgatgaattataattacacgctttaagtttacaattaacttatacattttaatttcaaaatttcaaaatgttaatcgtgtaagatttcaaatttcaaaaaatttaaaaataaaccgaataattaaaccaaaaaattaaaccatcttttttcccatatctctcataattccccaatttttgatatttttttgatattttttttgttatattttttaaattttgtattatttatataatatagaaaccata

SEQ ID NO: 384602 - DNA, 1577 bp, Cannabis indica
accataacattatcatgaatcaaacgtcctggaataaatgcactttgatatcccgagacaattgaatccatatatctcttcattctgttggccataacctttgtaatgatcttataaatgacattgcaaagggcaatgggatggaagtcagacataaattcaggagtcttcttcttaggaattaagaccacattagcatctccatatccatcttcaaaaataccagagtcaaaaaacctttgcaccacctcaaccacatcttgagaaactatcgaccaacctttttggtagaacgccggtgtcatcccatcaggacctgggcttttatccgggtgcatctgaaaaacagtagcttttacttcttcagccgtaacactttgtcttagttcttcatttatctgcatagtgaccgtgccttttacacactaaacaacctcatcacaatgacctccagacttagtgaaaagtttcgaaaaataatccaccactacttctccaagaccggtgtcccaatcaacccaattaccatgattatctttgagtttggtaatttgattgttacgttttcttgaactagcagacacatgaaaaaaacgactgttctgatctccatcctttaaccaaaactgcttcgcatgctgcttccaaaagctttcccgttggtcaagaacagcaaacagagatttttttacttcatcatatcgtttcacagaatattcatccctttttccttgtaacactttaagctcaactttacaagctttgattctttgtttaaagttccttgtaatgctctttccccattcccgaagcttctctgcacaaccttccaacttttggtgaaaattaagactcgccccattctcccaacaatcactaattatttgtcaacacaaaggttctttaagccaggcgttctcaaatttaaatcgatgagaaggagtgaaagaatcttttataatcggttcaagaaacaaagggttgtggtctgatgaagtactttcaaggttgaagagtttagcataaggaaatacctgggtccaagctggattcaccaaagctctatctaaacgagcttcaatccatctttgagtgccacgccccttttcccaagtataacaatgacccaccagatcaatatccattaaagaacaatcggacagggcttgctgaaattcctcaattagccatcggaggtacgaatttcctcctttcttctcttcattgctaacaatattattcatatcccctatcacacaccatgggagggtgtaatcatcggccagagaacggagcaaagtccaagtgtcccgtcggtgtgctctgtttggttcgtcgtatacccctgtgagcctccagcttgtattatctcccatatacacttcaaagtctatgtgatgttgagaatagcccaatacacggcccatatcaccttctttccacattaaagctaacccccctccttgaccatgggcctccactatgaaatttccttcaaagcccaaatgttgacccacccatgtcattctttttttatcacattttgtttcacaaagaaaaataaaattgggtttctt

SEQ ID NO: 384603 - DNA, 910 bp, Cannabis indica
atcgtcgccaccaccggaagccctcccattgaagccctaagttcttatagtgccacctcttcttttcccatctttcttgcatcgaaaccccagaagtcccaaattcaaaagcataaatgccttgtggttctttcgtgttctcctcgtcaacgacccaccgaactaaagccttaaaggtcaagaaccaccgatccttgtttatcgtcaccaccactgagaagacgaaccagaggacgatgatctgcaataatttttttttattattattattacaattgttagagtctcgataataatagcaaaaatatcgaaaaactattgaaaaattattgtgaacacgaaatcttatcgataacctgaattaattcaagctaacttcaaagttatgttttatcagatacttatcgaaaacctatcgaaaaaccattgaaaatgtctgtagaaaaaatgttgagaaaccatcgagaataatctatcaaaaaattgtcgataaactattgtgaaaccatcgaaatatatcatccttaacctttggaaagcacatttaggaatactatcaagaatcaatcaaaaaagcatcgaaaaactatcgaaaaatggctaagcgaccgaaagatgcagaaaaccaaatctacttagttcaaagataaaaaatacacaaaactaccaaaatcatacaaatctgatgcaaacaaactatacaattaaaaatacaataccattcacgattttttcttataaaaaagacttacccattaattatggaggttcggttccaacttagacaatgggatggaggtgcgacgctggctgtcttgcgatctcaaattgtacgacgtcaacaacgacgaagtggctggctaaggggatgtattcttttagtttggttgaggagagagagagagagaga

SEQ ID NO: 384604 - DNA, 1027 bp, Cannabis indica
aagttccatactagtgacggaattgatttttactgccaaaaatacgactttaggatttatctgctactcgacataaactaagtatttatgccgcaaattactctatctaattttatatttttcaataattgcaaaaaaaattcagcctgacttataaaacaagctagtcatatatataagtaagaatatatattcattattattaagatattgaatatattcttactattgaaagtaaataatatctcaccaacaaaacattaccaataatcagaaataacatgtgaggtgtaagaaaaacaaactcatgatattgacattagtgaacataattaattattcattctacataaaacaaaaaactgaatacatttctctcactaaaacaaattgatcaatttttataatataaatattaaattaattaaaattattaattaggaacaacattaacataatatgtgtattatatcattcaaatttaacacttgagtacaataaagaatgaattagttgtaaaaatactgaatacatttctttgtagaatttttactttcaattttgttttgtttgtgacttttatgttatgcttttttggtagtgagtgagtgagtggtttttattaatattaataagtacttcttgcaagaattaatgatattggtgcatgttgtctaaattaaaaccccacgaggggaaaagaaccttttcatttttatcattgtttttttttttatcattaatatatattataaatatagaaagaaaagaattttgtgagcaataaaagttgtaatgggttaaacaagttggcggcttgatagtgaaagttcaatcataaggtgaaacgaacttgaaccaaatctataaacttcataatctatactatatcttatatgaaccccaccaacactagtttttacaacactttttaacatatatatacatcaaaactcttataatatatatttatggaaatattttgcggtataaatatttaagtttaattttcaattgtaaataaata

SEQ ID NO: 384605 - DNA, 1567 bp, Cannabis indica
taaaaatcaaattatgtacatgtatatgtggaatgccattatttaaggtcatcaatacaaaaaattttaattttagtaaaaaaattgtgactaattttaaattataattcttatattgtgattaaaagatccgtgattaaaaatattagtcacaaaatttataatttgttgcaactaaatgtatttttaatcataatacttgttgtgactaaaactaaattagttacaacttgtaactaaatactatattatagtcacatgaaacattttgttgtgattaaaagtaatatttagtcaaaaaaaaaatatattgtgactaaaaattatcactaaaaataacaattttttttgtagtattttaaaatttatttaccattacaaattaagtagggctgtcatatatatacataattttaacaagaatgtggccctgtaatattattacatcatcatcgtatatttaatttagtagttaggttataattaagggtcaaactataatgagagtattagctagtcttaatcgatctcgtcttataatcatgttttttgaaaagtctttttcttgggaataatgtcatttggattcttctattgaaaagatgacatatctaaaaaactagctaacattattaattagataattgaaaaaaaagtattatgagtgttaaagaaaaatttggatattcttcatccaattattggattagttgaaaaaagcttattggtacttaattaacttttccaccagaccacaaacatatggaatggaggttctgattgttagatgaacatattagctatagagacaatattaatattattaagaatttttatattaatatcagtcaaagtcaatatatagtatatattggaatggagattgaggcctaagcttaaacaaaatctaaggccaaacttgaacaagactttgatgcaaattacatgataaaattattaattttatcaatatttattgaagtttgattttcagttaaagatacattaattaattaaattcttattatcaatctttttttatatattatatattcttcacttgttttattaataatcaccattgtttttatttttttattttcatgaatgaattttaattcatttataaaaatctttcataaaaataataatcgaaaagcttgttgttgaacggatactaagcaataagcaacgaaattttgatcttgaggttgaaccaaacgattattgactgtcatcggctctaaaaccatgtcaatgcaagcttaggccttttctttgagcactaaagaaagataaaggtgaagaagatgaattggatgaaatgtgttggaaatgttgtgaatattttaacaaaatatataagtgtcttagtgtgtgtgagttggaaagagtcccacatgggatatgaaccctcatttacaagggtataaagagtgcaactttggcatttgggtttgggccctaaggggtacccagttttgtgcgaatgggtgaggacacacacacttgacccaccacacgcgcgcgctgtctatccgagccgggccgggttgggttggttggt

SEQ ID NO: 384606 - DNA, 956 bp, Cannabis indica
aaaaagtactttttaattaaaaaagactttttaaatatcttcaagggtactattgtattattttcatttaaaatttgtatacttttattttagcggttcaaaacttcgaggtaaattatttatccatttaatgctccaactgttcttttctcgtacagttaccatctgtttgatcaactttcttttaattgaatagttactatcatttaggtataaattttaaaccatcccttatttttgctattttctgcccaagaacctttccaatttcaaaaatctctcaaccaatttcttctttgcatgccttcgttactatctttgcatgcccaggaacccatctgttttaggttttgtttttctaagaattggggcattattctctgtaatcatgtcccaatttaatccataatttataatccagatcccttagaatcagagtatcctcaatttctagccatagcttttaaaccccaaatccaaatacctcaaactatacttgaaataaatgatgcaaaaattagggaccatctcattaggtctgatcaggaagaagcttgtaatcattatagatgattttcgtaagaagtcgtcgaggggaagtatcgttgtttgtgagaagttgcttgggttgagtcgcctagtttagttgatatacccctcagtgaggtcaatgtttttacctctagtcaatattattttttcaccaagtgacttagaatttgaaataatggctcaaaaagttcgcaaatccaagaccccacagaaccctactatcacctttgaggctgaattgatagagtccaaggttaggtccatcggtccttatgtcggggatgttttaaggtcatgcgtgatcaggaacgagaaagaatatcatattaggtctgttgcccagggggaattcaaatgttatcccctgaacgtttggcccaagatgaaggtgttgggttttatgc

SEQ ID NO: 384607 - DNA, 1442 bp, Cannabis indica
caagagcaagtgcaggcggatcccattttgtccaaggtactagctgatcttaagctaggacataacagtggtggttgtacgctcatacacagagtccttcattttagaggccggttagtgctaccatcatcttcacccgtcattcgtctccttcttcaggagtatcacggtagtgctctcgggggccactctggggtgttcaagacatttcagcgggtggcagctgacttgtattggcctggaatgagaaaggatgtgcaacgttttgtggctgagtgtgttgtctgccagcaaaacaagtatctcgctcaaacgccagccgggttgttgcaacctttgcctatcccggagcaggtgtgggacgatatatccatggatttcattgagggcttacccatgtcacatggctttgactctatcatggtcgtggtagaccgtttgagtaaatatgggcactttattcctttgcgccatccctatacagccgctactgtcactgaagtatttgtaagggaagtgatcaaactccatgggattcctcgctcaattgtgtcaaaccgggacaagatcttcctaagcctcttttggaaggaattgttcaagctccaagagaccagcttgaagcatagcacggcgtatcatccccaaacggatggtcaaaccgaagtagtgaaccgctgccttgaaacatacttgaggtgctttgtgggtgtcagacccaacaagtgggttaagtggttggcttgggcagagtattggtacaatacttcctatcatgtgtcggcagggatgactcctttcaaggccttgtacaaccgtgaccctccgccgcttctccgttttgaacatggcagcaccaaagtttcagcagtcgagcagcaacttcaagctcgggatgtcaccttatcactactgaaagaaaacctccagcgagctcaacaaaagatgaaatcccaggctgataagaagcgaagagatgttagctttgccattggcgatttggtctatgtcaaaataagaccttaccgccaacgcactgtggcccgacgtcgcaacgagaagcttggtccccgcttctttggcccttttcctgttctagagcgcattggttcggctgcctatcgtcttcaactccctcctgagtcttccattcaccccgttttccacgtctcactcttacgagcggccttgggaacacaccagcaggcttcaacccttcctccttgtctctttgctgatctagaatggctcctcactcctgaagaagtgttagccatccgccctggtatgcataagacagctccacaggcccttatcaagtggaaaaatctgccaccttttgaagctacttgggaggatttctcagtcatccaggaccaattccctcattttcaccttgaggacaaggtgagactcgtagggggggtattgatagacctcca

SEQ ID NO: 384608 - DNA, 1976 bp, Cannabis indica
tttggtactttcatttagagcaagttaatatcatatctaatgaaacgcatattgggaatattttaccatgatctagatttactaacaagtatattgattaacatcctaaatatgaatatatctaaaataatgaaatcaaacacataaaaatttaaaaaccttaccttgattgcaatgaaatattttacaaaatgcattcattttttttttttttagttaataatgtacacatatcccattatatattgtctaagaaaatctcagtgtgatgggagttgacggaatatatacaaaagataggcaccatcactcgccttttaccaatttttatcaaactatctaaacagttacataatttgaacaaaatcaacccatgtcacttaattgaactactccaattaagaagagcacaaagtgataagccgatttttcactgaaatatattttgttacttatccgaattattgacctaccagacaagtttagatttagaaattgaaatagattgaatgattaaggtcctttaatgaccctacttaatgggtaatgattttgattgatttgtttttttttttttttgattatttgatttgtcattttatcatcttaatcaatcttaatcaggctgattatataaggaactaactcatcaaatttggttaaagctaagtggaatttcctattgccatgtggaagagtaattgtcttctcaatcaaaaaataaagttttttttaaacaaaaaataaagtagtttgattggattcctttgtctttagaaaacacatagtagatttttttttttttcttaactctcattttaacaccaatttaaagttattttatttacaactttaacaattttttttttggttgaaggaaatattattgctaaacgaaggtcacttaaagacaaacatgaaataataaaattaatagccataatttaaaagtactataaagcttatccatattctgtttccggggtggtgatgatttgcatatgggtagtgatctttaacttgcttctcgattatggagctaactatccacttattttggctaatttcattaatattgatgctaaggtcattttgtccattctcacttcagcttttggtagacatgataggctggtctggaattttactggtactgccttgtatgcggtaataagtgggtactagagtactatttttaagattctcgaacatgatagtgggtactagagttctccttggtgaaaatttttgtagtcactttctattcatcctaagaataagaattttatttgaaaagcaaagttgaatattttaccaacctatgtgaattcggctagaggagcagctagaagtgtaggcgctatttttctatttcttttaatcaattcgattatagtcaccgaaatcttttttgattgattgttcctattagcattatgttaacccgaaaattgatcctagtgacatgaacaaacatgtttgactcgtggcaagaaagaaaacatctcagagttgagtagtcttaagtcatagcagtcaacttgggaggggttcctagctctgcgcccaggttgacttcaagaactccagaatgaatgtttggattccgccaagattttttgaaatcactatctttcagtattatgtaccataaagacatgaagcatccaagtctaaggcccggggatctgaaaatacatgaaacaacaccacagaaatcaaccagggcgcctaaggtttcacccagcgcccaggttgtcaacctaggccacttccaagcatcaaactgaaaatccctatctagcattttcttcgtcttcctcaaaaatggagaattaagtactttcgagaaaaaaaacagacaaatctagagaccaaaatgagggaccagcgtagcgcctaggttgacacttggtgttggcaagcgcgcgcccaagttgacattttgtcaacatgggccaattctaaggagtttt

SEQ ID NO: 384609 - DNA, 2113 bp, Cannabis indica
tgacgaggtagagaaatatctaagtttttgaagttctttaatgatggagatgagccatatgatttcgcatgtagtattggccaaggctcggtactctgctttagcagaggaacgagagatagtttgctattttgtaaactttcaggaaatgagggatcaattgaggaaaacacaatattcagagatggatttcctagtgttaggataggcaccccagttcgcatcagcaaatgcttgtaatgtcagaggtgatggagcttcagcatagaaaacaagaccttggccaggggagcctttcaaatgctgtaggatatgataggcaacatctaagtgtggttgtcttggagtttgaatgtatttgctaagcttgttgacaacataattgatttcaggtcgagttattgtgagatatgtgatcttatatgtgtttccaacaagggatacatagattccaaatagaagtcaaggcctatcagttggcccaaatgacatgaactatcaaagcccaacacacacctagccttctgagaaagcaatcacgcttcttgctcaagcgagcttccgccaaggctagttcgtattcagaaggatcctagctcttcatatccggaagaactctttagtgtgtatctagaagccagttttagtttcccgtttactgttacgtgcagactaagaaaatcactttcctcaaatctcggacatagaataaatatcaagttaaaataggaaactatataattgaagatcaaataattgatatcgtattaattatccacaatcaagggacacaatataaatagctatgaccttgatcaacatgcttaagcatacagtcattgcctcatgggttggacttcacttgataagcccgaagtgatgtattatttgtacactccccattagagggaaatggtaactaagtatgacttatattactctataaatacacattgaatccttcatgcaaagggtaaaaatttcttaactcacaagattgagaagagaatagggtgctcatattcattgtaatctgttagacttttttagcctatctcataataatacagactcatagactaagactcattaacacctcaaccacataaaaattatgagtgttctcttcatatttgatatgtttaatcacattttctttagttccaatattaaataattcgttttctgaaaacatcagtaaacacatacataatagtttctttaatttctccgtaagaatctaataaagaatttaagatgatgattgcttagcttttatcacttaacgattcattctctccataattggccaactcaatatgcatccttagtaattcatcaaggttctgttcaagattgttcgatctattcatcttgaattcaaagattctctcattgagaaaaatcttattagttagagacttctactggaatcgctcttccaattttctccaaattcttgatggagtctctttatccaccaatctaatgattacatcacttagattgaaaatgaggattccacttacaatttctacgtattcttcctgttgaatcatagttgtattctcaagccattcaatgggttcctctagcatccttaatagtttatgttgtgctaacaatgacctgatcttcttcctccatattctgtagtcacctaaaccatcaaatttatcaatgtcagttttaatactactcatattgaatctttcaaaattcaaatcagaattagggttctggttgatcattcaatggcacatccaccagattacatagatcaaggccatcttcttgatccaagcttcctagtacttgagtattaacctcgtcttgatcttaagtatcaattgcttcttgttcttgattattgatttcttccagtcttgcttgtcacttaaatcaatttgtatcttaatcttgcgaaaaaccaattctgatacctctgttagaatctacagctcctaagacttttacaaattacttaaaagattgattttatggtgtttttaaaactttgttatgcatatatccactacaaaaaatcttacttttagtcacaacaaaatttgtgaataaaagtaaaagatttgttactaattataaatcatga

SEQ ID NO: 384610 - DNA, 646 bp, Cannabis indica
ttttttttttttttgtaggctttactatgctaaaattgggattggaactcctccaaaggactattatgttcaagtagatactggaagtgatattatgtgggtcaactgtattcaatgcaaagattgccctacaagaagctctcttggtgtacgcctctgtctgttaattttcttctatgtctctgtttatatttatatttgtgtatatatatatatatatttgtatatctgaatatttgtgtttgcctcctaatagatagacctgacactgtatgacatcaaggactcttcaaccgggaaattggtaggttgtgatgaagggttttgtttagaggttaatggtggtccattatctggttgcacagcgaatgtgtcgtgtccttatcttcagatatacgcagatggcagctctactgctggatattttgtgaaagataatgtccagtatgatcgagtttctggagacctccaaactacatcatccaacggaagtgtcatctttgggtgagttatttgcacatgggtatactatctcgttgtttaaatgtttttggtaattttcatgtctatgagtacaactgtaaaagtttctgaaaaaacagatgggaatacttgagtttgcactaattgagaatataatactgtt

SEQ ID NO: 384611 - DNA, 1553 bp, Cannabis indica
aagagtgttatgcactatggtgctttttagcattttactatactaaattatgcctctctaactttttgaattagttaaaaattctttcgatctattgagattgttgaattcaaggagttctgttcaattttattaatttggcgatagtccatatatcaaatcgtatttccgaactttgatatatactaaatcatgctccaaattttgacatgtatcgaattttatcctatgaactttcgatttaagtttctattaataaaataagaaagaagtcttgaattcaattaactatctcaaaaattctagttcaagaggaatttttaattaaaatatttaactagttcaagaggaatttttaattaaaatatttaagtgcacagtaaaaatcaattcaagagtagccaaaattttaatttgcctaacattaatattcttagtgagttgtgcatttaaattagttggagacatgcttacatataacaatgtataaccaatatttgattgggaaattttgatgtgagatttaaagtgactacttaattataaacattgctaccaaaaatattgttgacaattaaatgacaacagctagtttaggatattcaattatttcattaattatagtgtgacaattatattacttgagcaagatcaatgttgcatttttgctgatttcaaaaactaaatatatattatctatatttgatattattattattttttataaatatataaggaagatcgtaaggaattgcatcatcctttatacctattttttgaatatatatttcaagtggtaaatactatatagtttatatcatgttgttattattttaatattgtaaacaaaaaccagcatcatagatcggctctaaaataagtatatattttatgtattttatttgttttattagtgagagagttgatgatcaattatccaaaattgaaatttgaaagcacacaagaagttaaaaatcagggacatattaattaatctattataatattatatttttatatataaataatattgcgattgtgttgtcccaccatatataatttcttttttctttggttagtgaaaactgaaaaggtgtgttaaattaattaataatgcatgagccatattctaacatatatggagtaaatcaatcatatcacatggttaaaaatcataataataataattaagtagtcaatgagtggggagtggttacatcttcatgtaatattctcactcgacccttatctatacatgtccaaccatggaaggttattaatttaattctttttctgatcaccctcataggaaatatcttttagatatcatcacaatattcccccacctcttttttagtgtacacattaatatattatacactttaaagttttccatacatacatagtattttaaattgaaaaaatcctcaaagattattaaaaaaaattagagaagaaataagaaaatattattagaggtgtcaattaaattcatttagcataattcaattaaatacaaattaaatattgattgatatgtaaaagtaaccgat

SEQ ID NO: 384612 - DNA, 1944 bp, Cannabis indica
gcatctttatacattataatttataattgtatatgtattttttgttgaagataaagcgtctatattgataatttataattgtataatttataattgtatatattgatcgtcgtatttgctccccaaaagtgcaagcaaaactaaaaccacaaccgtatattaaaatcacttacaaagtaagctcatgtagtaagttaacaattagcaatgattatatatgtatgagctcatattaacttcaaattattgtacggaattcgttttgtgtatatatggagaatcctcctcaatgatgatttaatcatacagtttgttattcatttcaaacaaatctttacatttggattttgtagtacctgtacatactatttggtgattttcatcgtaccacttttgttctatcgaagctttcctttcttttcttctttttctttatcaatgcttcataaattaggtgtttttatatattgtttaagggtgttcttacaaaaatcatcccaaaaaaagagagggggtcatcttacaaaaattactgtaaatttatataaattatgaaaagaaaaaagccaaaagaaataaggttttacttttattatcctcgtgaaatgtgtaagcagttctgtgagttgtgagaccaggcccacaaggccacaactttacaagtatgaacaatgaaaaataataaataaataaataaataaataaatatgtaataaaataataagctaatctgagacaataaccgggttgaggagaagagagtcaaacaatgccaaatacttaatagcataaaaaaataaaaggacacagagaaaaggacaccacagaaattcgagtacgtgattgagataaaagggaagaagagagttaaataaaaagggaaaaagaaagaaagtgaattgaattttaagggtagggttattaaattgaagaagaaaaagttggatgcaccgcagtacgttgaaagcaaaatgtcaaacactaggttttaatttttgggaactggggtttgacagctccttgtccttcttggttacaacgctgcctaccacctatactgtagtcttgctaatgctaatagccagagtttctcatgtacgtttttcctttttcactcttttttttcttctctcttgtccttctctccatttctctcttctttctacttcttcctcttatatattgatacacaattatgcctatattaataatatatgtatatgcaatatgttaatttatatagatatagatcgatcatcatgtgtgacaatgcatttcaggtgtcatatctcacattttatataatcatgtgtttagttttaggatgccattggttgtgggcaaactgcaaaactggatcgaattcatcgatttgattttaaggaattggtcaaaaagagttgaaaataaagacaagtcttaacccccaaaacacttttctttatcatttaaaacacaatagaaatatgagatacaataacacaatgacaccattaaattttaggtaaaaatgagattgacttactaaatcaaaaattaacataattaaaataatctatatcaaatcaaaaactatataaaaagtgtgaataacttttgagtttttacatattaaattacttatttaacctttttttttcttcattaaaatcttttatgaattaatataaattacattattttaataactatatttttaggcttttacatattaaattacttatttaagttttgtctttttttcattaattttttttttaaattatattattttaataaccattatacttttacatgtgagaaatttcttgagtgatatttttagttttttatcattccctatagataactatatattagctaataattgttggaatttattttagcaggatcttagatctactcacaagtatgtttattaacatcctaaataagaactttcta

SEQ ID NO: 384613 - DNA, 1449 bp, Cannabis indica
agatggtggcagcgcttttgtaacactaggtggcattgatggttcgagccccttgatttgggatgctggggtagagggaagaggcggcagtgcaacttcaggatgtgaaggtgattctgaattatcataccgagaaattaatcagatgagcccatcttgaattagaatttcagtctaaaaagatcataatagttaccaatgggctgcgattctgaacttggtgcattgtcttttgatgtgccatgaggcacaggacctaatgttcttaccccagaatagattgcaggtgatggggatatagtaattcctgaaagaaaaagaaagctcatcaaaccaaagatatgagaagaagaaaaaaaaaatcacagaaatgcattagtatcattcttctgaaaccaattcaaacaaacaataaactcaatactgatccaaagacagaaatttactcagcttaataataaattcaatcaagataaagccaggtctagaaaatggaatgatagattcatatttaccgttcttgagctaataagtgtgctccgacagtaggcttatgaaataatctttactatttattggttcggacagtacagtaaagctatatgttttagttgtaaaagctaagtcatgcaaatttgggtaaacccattcattctaagatagcaatatgtacagatcgaaaaagattccaaggtaacagcatcaatggcagatgtaaaaacattccagattagtgctcaatagatagatagtactaaaaacacgaaaatccaaagatacagatcacaattttgctaaatctcaaaactttctcaaattcatagaaatttgacaaaaaagtgatcaacatttgaaaaaccaaaattaactcaagagtcaaaccaagaaatgaacatatttagattaaggaaagagagagtttacctgtggatccttgtagaagcagagaaaagcaaatgaagctgagaataaccagctggagcatgggtggcattaccattctcatcccatacagcgccaaatctcacaaacagtctctaacttttctcacacaaggcgttcctcgatgaagaagaaattaaaatagaaaagcaataaagaaatgaataaattaatattggaggggaaagcttataacttgaagcaataacaaaagggacgttagattgaacaagggccacaaatagtgagagctaagtaatgagtaggcagtttaacgaaaaacccagaactgggtttggtgagagagaacccaaaaccactaaaacaatctgagtctgatgataactcaagctctgagatatgcagaggagccatgaaatcatcatccccatgaagaaaacaactgtttccactgacatgtggaattcaacacgaccagaacaaactaacccagaaaataaaaattgaaaaccaaaaccatattattatataaaatatatatatata

SEQ ID NO: 384614 - DNA, 1514 bp, Cannabis indica
tttggacgagggcccaggcccaccattatttgaagaaataataataataataataaaagttgaaaataaaaaataaatacgcacacccattaggtacggacatatatatatttatactatatagtataaaaaagtagccaacaagaagaatccatcttttctggagttttgctttaaatgatcacaaaaatcaagtgaaaaacctttaacatgtccacaactattagttatatctctattgattattaattaataaaagatcaaataaaatgaatgaactaaattaaagggcctcttaactttgtttagcaaattagacgttgattttctttctaattaaagagcttaatcgtatactcatcacaacacaaatatatttatatatagaaataattaaggaggtgtttccactaatataagactaaagttttttcccactcccaaagtttcaacctgctcttcactttaagggacaggctgcccccccatcaattgacaccaccatcattctaattttcacaatacaagagtttgcccaccaagagtattttggcttttagattaggattagatttttgttattgtgattagtcttgtttttatgacatagtattattttattttgttttgttttcttgactcgtcataaaatcgttgttagcggctgacattaacaaattctctattaaagtagttgttagtgttctaactgtaaagagttaaatgctcctacaatagtggaaattgaatatagttgttttaaaggttaacttagatatgtaattttttttatttaattttattttagtttcatttgttaaacgattttagaattagacgttttggttgattcctttttttaattctaattttaatcagttttctaataaaggagatattcacattgatttgtaaactattattttaggtggcatttaataaggaggaataaaataataagaacatagaatagaaagaataaaaatagaataaaatttaaaatttataaaaaaaataaaattaataaaatcatgcattagaatattctttcattcagtttactaaaatagtagaaaaaccattctatttcaatactttaatatgcaaccaaacaaaaaaaaatagaaggaaaattgtttctttttcattctattttatttcattaccttcgatcaaacgttaccttaattcattactattaataaaactgtatagtttattaaaaaataaaaaataataataatgaaagtatatatttgtttaaaaataataataaaagtgagagtgggagaaaagagggaaggaacgaggtctctgggtgtgacccggcctgcatgaaccggtcggacaacaccctgaccaagccagttgttatctttctttctgactcacataacaacatgcctgacagctaaaatggatttcgtttgcacgagagaatcttccaacttatctctctcgtccacactcaaatatgtcaactaatttcttttttctttctaatttcttttact

SEQ ID NO: 384615 - DNA, 1568 bp, Cannabis indica
tatatatatatatattatttacacatacagatatttatgttttttttcgcctctacccaaacattatcctaaaactatattgctacaaatgttatcacataacatttatatagtgaaaaaaacaatattaaaagaaggcatactttctaataatttttctaaaaagaacttatatatacgataagaagcaattaattagcatgagagtgaatcaaatgatcacatcaagttaaagtaagtgaactaataaaaattaatccatgttttatgtaactttagttagattttgagatcttctagaatttaatatatttcacacaattcaaggtaattatgatttatgattctaattcatgagtatacgattctagtcattattttttattttcttcaaccaaaaaaattaaaacaaagtatagcaatataaatatgtatacaatagtaattggccaagattctttccatcttctttttcattttgaacaatattaaataactggaatacacaaaagttgtaataaaactataaggcctattctttcaaattaaatagtttatacatatatttatatatattaggaattaaacaaaataacatcacttttaattttgtgcttcgtatgaaatactgtataaaaattgtaaactctcattaattatcatataaatttagtcatctatttattattgaatttgtattggtgtttggatcttggaggacaaatccacatccataaatacttgtatatatatgtccattctttgtagcagctctttaatttttccttgaaactttacatgcattatttattttttattaggggacctactgaagtgtggatttggtgggggcaaactctttaaattccatgatatatacacagccacagactttttatatatttatattttatttggctattgtgttatacagatatagaaccacaaaactttatcccttatacatagcttttcttctctcatcatatttttgtatttatatatacataaatataaatccaagtgggaatcaaggaaaaggtagtttccactagaatatgtaaagctaacatctaatgatatcgaaaaaaaaaaagattttgtcttcaaaaaaaattaaaaataaaataaaatcaagagagagatagagagagaatcatacccctaaaaaccttgtaattaaacatataatatatataccaacctgcaatacatatatacatataaatggtcatacgaatattgtaatgtatagcattttaaatatatatatataaatatataaatacttgcattagagaacatgtgtgtatagaattatgctattttaatacatatcaaagtgcttacgtacatatatgatcaactcatcaccaaggtaagttacgttttaggtctcaattagatctaatttaaaaaaaaaaaaaaaaaaaaaaaaatctaacttagtttggttgtggagggagtgggaaaaagggagaggtcaggggttcgaactcaagacctttaagctattaagctaatatatgattgtaaaaataccattacgctacactacaaaaaaaaaa

SEQ ID NO: 384616 - DNA, 1300 bp, Cannabis indica
gacacgtgtcacccaaaggtttaaccttgcacaattattttctagacaagtcgttggacaggaaaagatcttcagaggcacatacgcacacttccaaggcctgacgcagggcaaaatatctcatttggtgtcagaaggcatgtaactgtcgccctgtgctctgggtaagatatagccaaatatgttgctgaacgatttggccatagccttcttggattacactaacttgctacccttctaaaatacttgtagattcaaatcccccttaatagcagaccaatagtgtgtgcctcacaattttttccatccttgctaatagagagaatcctcaagtaactcctagaatctaacatcttctatgatggagaaaagcgggagatacatgataattgtatatgctctgattgcacctttctgtaatttccacatattggtcatcgtgcaatatagataacattttttccccaagctttccagatccatgattgttgggagcttgtcgattcttttcgaatgattgacttactatcctaacttgctgaccaagtggtggattatggaacatgtcttctatattaccttaggtaaccgaggggttatgcattctgggtactgctgtcaatatgttgaagcatgatgcttgtttagtgagtctgtggggctaacattctgaactcaagtatgtttcacatgggaagaaaatgacaattggacttgaaaagatgccaggtttctggcacgttggtgatgctgccaccaaatgatgagtaataaatctattctctttcttcaagtgcattaaatgtaaaccttttgaatccctagatgttggatggtgtaacttttgattgattcaatctttattgtatatataaaaaatgcttgaactattgccacccatataaataaaagtcttggcaaaagaattcacttttccttcttcatcttaagctacaatcccttgccaagagtagttattaagccaaaaacttaaacccaaaaacttttgcatctactcaccttatggaaccaaaaaaactcatctcctcttttctagcttgccactgtttttctcaacgttcgacacctacccaaacgatggatccactattggagcaggggaagactaggccatcaagcgacccgtggaatttcagatgatgacaattttgttggaaatattttacgaggatctagatttactaccatgtatgtttcatgaaaatcctaatatgaattctaaaacaatgaaataaacacataaggttttaaggaaacattacattggttgcagcagaat

SEQ ID NO: 384617 - DNA, 1515 bp, Cannabis indica
  modified_base (14)..(14): a, c, t, g, unknown or other
aaaaaaaaaaaagntttaaataggaatttatatttgagtaatttgcgatataaatatctaagtttaacttccagttgtaaataaatacttaagttaaatttttgcgttaataatacctaagttataattttaggacttttataggtacctggttaaataaattgtcacgtggcaatccttgattggtcaaagtcattatatttttattatttaaaaaaattagttcaaatataccaataaaaaaatgacacgtggatataatggtttaacatataacatttaggtacttaaagttctaaaaatataatttaattattattactgtcaaaaattaaacttaagtatttatttacaactaagaattaagcttaggtattatactgcaaattactcaatctttatattatagtttttaaatttatttgtaaatactaaatacaacacctgtccactaagtcttcacttgtccacattaaaaaaatgatttgtagatataaaaaatgagccattttatagtaatgtccccaaaaagtttgtcaactctagtcagcctaagaaaaataaaaaataaaaactctagtaaagcctaataaaattaaaataaaataataatatattggtgagtgacatttttaattatttactaaataaattagataaatacattgagaataaaaaataaataatgtagagagacaaagggagcttatctgaaattcggtattgaaaaaattagttcaatatttatttattatcatatatatgttgtaacagatcaaaaaattctgaataatttatgtaccgataaataaattaaaacaaaatagtatgagaaaatatagtcctgtatgtaataaaatatataaattttatttttgacattctaagctacttaaattatttaaaaaattttattattaccgttaaaaattaaatttaaatatttattgttaaataaatatttataatataaattattcttgtctatattgaacaacatttcacattaaattagtctttaaaattaaatcatataatcttagagcattttcaataggaaaactcaaatttagtattaaatcaataccaaaaaactattattcaatacatttttttttttcaattctaaccacaaacaatactaaaaattacactaaattttattttctttatttattattttattaatataataagaatattttaatattaaatatatgtaattatttagttttttttttctttaaagtattatttaattattatttaaaaaaaaaaataagtgtagtctacagtgtcttattaaatttggtggaatagtatagacaaactatttataagtatagcgttagtgttccattagaataaatatagtgtgaaactacactatatttagtgttttagggttcattggagatgatcttaggaaatgtgaagagtatttgtaaaagctgaaaatggaaggaaagaaacataggagtggtgattttaatggattagtgggcaagtggtgtg

SEQ ID NO: 384618 - DNA, 796 bp, Cannabis indica
ggaatgctgattaagaagagcaatcgctcctaaggatagacatcaaatccataggcacacaattaaatggaaacatacgttcaactaagatacgagagttccgggcaataaaatgcgcggctctattcacagaacgcttaacaaaaacaagtgaaacatgagacaaattgttgataattttcttgcattcatccaccaccagcccgaatgcagaaacaagaacagcaaagcttcggatagcctccgcacacacccggttgtcagcttcaatcaccacctgggagtagtcgttcgttttgatccaactcaaggcttctcgaattcccataacctctgctagctccggagaaactctccctattttacagccagcagtcgctgcaataaggtcaccgttagagtttcgcattacacacccgtaaccgaatttatgatcttggtcgaagatggctgcgtctacatttaactttatgcctgaagtcggtttagtccatagctacgcaccatcaccctgttgaatgggtgacaacgagggaatgttcccctttccttgagcttttaaccattgatcaagtgttgaattcgcaaacatcaccacctctctcacacttcggatacgttgcttccagatgatatcgtttcttgctgaccacaaagcccaacagagcatgagcacacggctcccagcatcccattacagagctgcaaggttccgtccaaccaagcataaagagaaggagcctctctaccagccatagcaagaccagaaaattgttggaaatttttaccaggatct

SEQ ID NO: 384619 - DNA, 2113 bp, Cannabis indica
caaagttagtaatatgtgattaaagaaatgtgacatttttagtattttttacttttattttttggttacttacttgtgaacttcttcaactacaagttctgggtctggtactggtgaagaggagctgagaagagttgaggttaggaaagtgaagaagaagaagacaatgtgagtgagtaatgccattttttagtagagagagagggaaagtgtgtaaagtgataaaagagagagagagagagagagagttgagttgagagaatgagtaatgaaaaatggaagaagatgagtatataaagaggtttaaagccgggttaattggcgtgattaaactaaacaagtgggacccatttgggtttgtgatttctgtttttacggggattataattgggtagttttggccgttaagcaagccttcaatattcctatttttacaatttattttaagaaaaaatattctccaaattatgatttgaagttagtgaattattatttagtagatatcaaaatcttgggagtatggtttaacatataaataattactgaaatagtaaaattgaataaaattgaacaaatgtctttaaatacaacaatctcaataattcaggggtatttttaagagcattgctataagacaccagtagtgtatagcacattctcgacatgtcgcgttgcgattggctagcggtactctctaaaagttattatattaaattatatgagaactgatacttagttgcacaaatagggatatagacagaggatgctagacactactggtgccctttagcatttcctgtatttttaacgaccttaaaagttcaaaaaacatgatttagtacatgtcaaagttcagttacaaaattctaattacccaaaaatatttgtatgaaaaaaccaaactcacctcacctcacctacttggcaatgtgagcttaactatatgtattcatttcattgtgtaaggaaagactcagactcagtggggctcatgtcatatttggttctttccttttctttctttgatagaaaagggaaagggaaagagaaatactcgtaaagttttgttagttggataacaactgtttaggtactattcagttacaatggtttgtatttaattatttgtatttttttaatactaaatcgtatattttttttcctttgtttggccgttatgtgataattaattagttatataatatgataaaattaataatacaagtggatggaacgtcttttaaaatgtctaattaaagaaaagccaaaacagacaatctaaggctgaaaatgatatcttctgtttcggaatataattgccttgttgccatgtgaatagtcgttctcctataattatattttcttaaactaaagctttaagtttggttaattacttgtttattcagttgttagcacttaatttatagctgtaatgaaatttgtagcatatggccatatatactaatacaccgccttttttaacatatacagtgaccaaaacatatattgtcccaaatttgtaccatgtagattcctagggtaaggagaataattgtctatattattcccatatttgtgtattatataactagaaatatataacagccttcctaaactaaagaaaccagaaagtttcctctaaaataataaataattaaaattgattcaatctctacgatcgtggcatgggattaattaagagcaaatgagtgtttatttaaggaaattttatatttctcattataattatttttaatattttcaaattaatattgggaaaaaattgtaattaaaggtacagaatcaaatcaattaaattttaaataatcaaataattagcaatgataagattattaaatcatgaataataatcggaggaaaaggaaaccaagaaaacaattaaggcaggaaaatatagaaatcaatatatgatctatggttcaagtctgatagatttatatgatctatgactatacttcaattctggagcaccactaaattctctttattgattgagcaataataggtacaatacagtcgagatcgattatctgatttgttctcttaaattatttcaactctcacactcttttccaagaatcttcttcatcta

SEQ ID NO: 384620 - DNA, 1401 bp, Cannabis indica
ctataataaaagtgaactttattggtagaataaactaatcataataaataaataaataaaatgatagtgacaatatctggcgaggatgaataagcagttgtgttttgtagcaaaaaaaaaaaaagagttcggtgtgtttgggttggcaacttggcgcggaataatggtgactgactctttgagccattatcttcttctttagtatttttttttataatcgtggatgataaacggcttatagtttgacacgtgtacaaaataatacggaaagattctgctaccggccatttctcaaaataaattttaacaatctattctatatatatgattttcttttttggtaatccactcacagaaatgtatactttcccaatttagttgttaagaaaatttagagacttaaaaacgacatgattttcttttctttctttataaataatagtcaaatctgtgtcaattccagcataaattaaataaccaccctctattttaggcataataatttagcacttctcttttaaaaataaataaataaatgaatatttatagtaaataaatactactcaattacattcacaattttaaacacaacctaccactacttaataaaataaatattaataaatgattgaggttatacataagagaggtggatgaaataaatgggaattatttaatgagagggttagaatcaatgtttggttttattagaaactataaacaatggattgattggagaatgggttatggtactaatagcaatagggatggatgagaataaaaattggcaaaggacagcgtgccgtgaggtgccactttccatggaatggagacaacccacttttagttgtataacgcaatttgcttcaactttcattttgtttatttattctctgtggttttatatttctttattaaaaatatttgatgagaacctccttatgttgtttgacccacccaagtgaccaaccatttataaaaataataattattgtttttattttttatgaagggaataaaaaaaacacaaggtttggatgtggggacatcacacggtggttggctggctgagtagactttgtttggataagattgttttgttttgtgattcaatgaaagaggaggagccgaatagaagagaaagagaggaaggccttatctggaagactagctaatgactcctttctcaaccatcccacgtgcataaagttttgttttattattagttttatttctttcattatgcgcgaaattattataagtaataataatcagagatttagttaagcgtaatttttctccttgaattttgacatatactaaattatgtttcttgaatttttttttaccgttaaacattcccatgaactattgagattgttaaatttaaggacttttgtc

SEQ ID NO: 384621 - DNA, 1248 bp, Cannabis indica
tacatggcatatgcagttcgggaatgctactacagtattgaaaaactcctatactctcttattgatggtgaagggagactctggtatgaattttctttcatcctctattatacattcatggattttaatttctagagccccacagatttaccattttttttcacctttatattagggttgaaaggatctaccgtgagataaacaacagtatattggagggctcacttgttataaccttatcacttaagaaacttccagtggtgctaaaaaagtttacagctctaactgggctcctggtacttgatcttattcttcatttaaaccctgtttctgtttctcaagaaaacacatatattcatgagttgactcacaatgttggcagtagtattacgagaacattttttggccttattattctatagtatggtcatttcattctttcattataactcttggtaaaagttatgagaggctactaaaatatgtttggcgagaagaatatttcttgtttaataattcttgatgtctgtcagccttctgaacgtgtatcaaatccttatattaagtggcccttctattgaaactagctctagtttgttgattattttgatttggattattggatttcggtatacttgttgtttcaattaatctatttaaataccttatcactttaatgcaacaaatgtgtgctccagttacggaatgaagatcctgatctttccaaaggagctgcaaaagctgtgtatgaactatatgaagttgtcacacatgaacttctgtcacctgatttaaggtatgtggtttgtacacatcagtttctctttttattaccttcgagatctttatggttttcatctgtttccttgtgtattcaaccacagggagcaacttgatacgtggaacattttagcaagagctagaaatgaagggcgtttattttctaggattgaatggcccaaagataccgaaactgtaagttctcttagtgaaaatgcaaccatgaatatcttgctgttatttcctttgcatttatgctctctcttttctctttgggtggtcacagaaagagctagtgaagcggttgcatcttcttcttactgtgaaagactctgcagctaatattcccaagaaccttgaagcaagaagaagattagagtttttcacaaattcattatttatggacatgccttcagccaagccagttagtgaaatggtccctttctggtacatatgagtttagttgtt

SEQ ID NO: 384622 - DNA, 3983 bp, Cannabis indica
atttttttttattaatcttgttttttataatattcattggcaaaaagtcagaataaaaaacagaagaccaaaatatatacattagctttgcatgcaattgccatatattagctttggaggttattcagtcattggcatgggtttttagagttttgagaaagagtgtgttttattaatttattaccacatgttggatctggattgtaaaacataaaaaataatatgtaaattcaagaaaaataattgttacttttctaaaatgtatttatgaaattgttacttttctcattagtgagaaaaatgtttatgctaatgaaatttagttcacatgttttttaagttttttaaggtttagagaaataatatgtgcatagaacaatcataagtgcatttaaaatagaagaatattgataggcaccactaaatgtccaatattaactatgaggcaaaactttataagtataggatatagttattaaattaaaaaatagaatttaatattaaattaaaccaataataataaatgtataacattttaggtgattttagacacacctgttgcactttcaaatataatgttagagtctcatttaaaaaaaaattatcattgaaaactgacacaatatattaagttttgattctatatttttagaaattttattttacacttaatgtatgttatgcaaaaattttgtaattaaaagtataatagttttgggtaaatactattttgaagcttatatttgcaaaaattattgatcagactcttcttatttaaataacaattcaaatataatattttttaaaattatacaaaataataccctgacctaattgttcatcaaaataaaacttaataataacctaacatggaaatcttattgtcatccaaagtgaagaaactactcagaaaattgtaccacaacgattgtctcgtgagaacaacatccatggtgggaggaatgagcatcctccgtcaaaataatttcaacgagcgaccacccagggtcatgagaatagaaggaagaatgcacctcttcctatgcaacatcagacccgaaggaacatgtaagaagctgctacccctcaaacaacattccaccacctccatgacagaactcccgcgaggaatcgagcacaacacacagtaacacagttccaccttctcaaccattccccactcctaggtatcttggcatagaggaaggaggaatcggatcttggatgaaatcctccatctccaatcaagtttcctccatcaccaaggtatcccgagcctcctcgtgctaacactccgccaccacaacaactagtctagatacagaggtcctaacctagagagaacctccaggtaaccccccaaatcgagacttacctcaacttcctcgagacaggcgagaggactcacgagataactatgctcgccctgggcctcaacctaagggcatggactggaaagaggacgcactgtcacccgtgataactatgtttacccaggatcaacaccaagagagactagaccacaacatgcaccacctactccaccacaagatgatagttacgtatcaaggcctcaaactactgccacgcaatcattcgctcgataggagcatgcgccttgaggttcgcaacagtagaggacaattagcttcatggaggatagtttccattctgactcgaggattcgattagtaagtgttcatgataatgctccacctcagtactacaaggagcacccttaacatctcccctcatgacacaaggaacccaaacctctgggaccatctgaaccaaagaacacagcctgacttaagagaccacatgaacaaggggtatgcataaagggagtccccttatcaagtgccaaatgatgttcctctacagcaaagggcatatgccccttagtttaacacaacgacttctccactagttgatcctaacatcaatgctcccatgatgaacgatccacgcatcacgacactagaacaacaaatccaacattgaatgccaataaaaaagttgggggatacaagtcagacgaggagcttgagccttttgatacgtacatcttgaaattaccatacctcaagggttcaaaattccaactatgaagaatattgtgtaattggtgatggatggtggttacaaaataagttctacttcagatgatgagcccatgcgaaaactttcacttttattggcgctcggtgggagcgagaaatttgggatatgtttagtgtttcttccatcaatcatctgaatttacgtcgtatatcaatagattatgatttcgagggtcatccattatgaaaagaccttcttctaagaagcactgcttaatcaagtaaactaaagttattgttaaaaaaagaaaaaaaaaaaaactgattgagtatagaacaaatccaaacaaagatttgtggagatttaactttgcagtatttgaattttttttctcctttataagattatgattctataataggacatgccttcaaaaaaaaaaaatcctaattatattctgtaaggatatcatttagaaaaaaaaaacacttgtctctataacagtgtatgggttcaagtttacaactatataaatatatttaaattttatacacctaaatatctatctatcatcaatctattcttcaagaagcaattaattaagagatggtttcatctaaggctgttgttgttgttgttgttgtgatgggttttctgacctgcattgctttggtttcggcttcaggttattattatgaacataatttttagaaaattatatcataaatttatttattttatgactatttaattaactaatatgaagaatttaaaagtgaattgtatggtgatgatgacaggagatggaagaaaaataccattgccgtatgattgtttggatgattgttcacaattcaatgactgcaatggggcttgtgttttgaagggctatcctcatgggggacaatgcatcaaaataattggttctcatagttcttgttgttgtaacaaattttgaaatttcaatttcatttctctctatatataaataaaattgctatattttttagaatttttacatttctaattttttattttattgtggggtggaatttttttcaaaaaatagtgtgtaaattttatactgtgtattgcgttaagttttcactgttgttctacggttattttttagttatttttctgttgttttttattgttctgtttggttgttttacggttattttagattgttttataaaaatacagtatttttataaaaaaattcgtgtcgcagtaaaattgtaaatttttatccaaaatctaatatttttgtgaaaatcccatatttttttatatattgtcatgcgccaaaaaaattaattgggcttattagaaaaagattatatttttatatatagtagtaaaaatataaaatatagtattttataaaatggtatttttgaaaataaatttggacttttttattagaaaaaataatgtttcggccagggtgggggcctcaggatagggcccagcccgtcccacccttgggccgccggttcaaatatattagtttttttttttttttttcaatcaaatttaacttgtagatgtagtgttacttacgtgcattttccacattctttttaacaaggctgaaaggaagcaaatcatttaaaaagagatacatgaccaacttatcatgatattagttggtttcttacgtatgtaattttttttttttgaataacttacgtatgtattttaaataagttgttatcttaaagaaaagaaaaaattgattaaaatagtcttcttacacacatatatatatatatatatactaggtgaatgtacgtgccgagccacgtattgctagttttatttaagattttggtctttttaaaattttgaatgtatatactaggtgaatgtggctaagatgattttttttaatttaaaaagagattattaatatt

SEQ ID NO: 384623 - DNA, 2525 bp, Cannabis indica
taagttccactctttgatggatatatattgatatattcagaagatctaagaataagatgatacttattatcctaatttttgtacacttgacgtgacatttacatgtggctaaatttaattgacatttgacataacgtggagtttatggggcaggagcatgccagacaaatcctatatgagggatatctatgaattacatattgccttcgcaaaagtatttggccgagctatcaatatgccgaccaggtgagaagagatcaacgtaccttaaaagattatttcatgggtaatttcatcaataaaaaagataagtcttgaagagggcctgaccggttgtcaacacactgactaggataaacgatctcagaaagtcgaacaaggctacacaagacttgatttcttctttagcaacttccataaatatctttaaccgcatcctacaaatacgaaaccaaatgttatgtccaagattatagagttcactcgttcatgaattgggtgacaatttatggctagtcgatttgtgactagtttgttgattttaaaccttgccgtaaggtaaaatatcgaagtatgaatttgagtttctacaagtaatgcatcctattcacagtggaaaactagccagatgcaagagacggaactaaaatttggacaagtggaaccatgtgcaccaggttaggtgtcgacctagttgcttggagctattctcggaccctccaggtattgttttggtactttgatcatattttagccggatcacgagggctcgtccctcgtttagaaccaaaatatgaagaatgcttggaacgaaattggcatttgaatctcaaaaccatgcgcaccaggttgaatgttaacctgaacattggcttgggtttttggccaccaggtggtcttgtttgttgttcgaaagtatttgtatcttcatgtatgaagaaaatggaggaaattctcagaaaacttctttaaaaaactcgtcaaaagtactttggaaagcttaactctagttgtcgtacgcacatgttgactgagaatgtcaactagggcgccacattcactgacactccaaatcaaaattgtttcaatgttggttttagggcttgtggcatgttaactactactttagacaaaacaataataataacaataaataatcaaaaaataacaacaacaacaacaataataataataataataataataataataataataataataataataataataataataataataataatttgagtagagaacataaaaaaccattaaacgaacaagtctttgttcaaaaaatttcttggacaacaattaaaaattagaattttattttagtaaacaaataacttgtttcgaattataatacatatattattccttcactttacccgtaaaattagaatataagaatttttttaacaaattattttcctttcttagaaacatacatttatttgacagcataactaagagaaaattgcattgtatatctattttattttatttgttttaattttttacttttatttttatattttttaaaatgtacccatttttatagatggtgccccataatactccttaagttaatgtaaatgatatgctacagttaagtagagggcaagggtatatcaggtaactcataaaagtgggtaaattttaatgaaatataatataaagatatttttaattaatagatacgaaaaagaggtattcctcatcttatccccaaactaatgcttattgtggagtgtaatcactattaattatttttaaactcacataatcaaataatacaattttcttcattgagaatacaattctatacaattttatctctcaaaattaaatatcatataaaaacaaaaaaattaaatataattattttctcaacaatactgcagtaaataatttatcaaacttgttatgaaatgtgaaaagtaaaaaattcaacatagagttactataaataaaatttattatttttttttgaatggaaaatccgctttattaatccataacttccgctaccaaacacggtagcaaatcggttggaatatcctccaaaccgaatcgacgatcaggaaataatatagcagccttagcaaagttatgggccactacattagcagatcgtttaaacaaaaaacacagaaacatctttcaaagaaataagtaactccttacagtcattaacaacagaaccaaataaagaagccatatttagaggtctgcgtattgcttgaaccgcacacaagcaatcagtctccaatatcgcctgatgccaatttcgctctttaatccagctgagtgcctctttgatgccaagggcttccgccagaactggttccaccatggatcgggtaaggattgtcctaccctcgagtaagatgctatttgagtctcgagccactagtcccaaaccaaagcttcgcccatcttcaaacaatgccgcatctacgttaatcttgatactattttcctgaggtggtgtccatgttggatatttattttac

SEQ ID NO: 384624 - DNA, 6312 bp, Cannabis indica
atataaagtccacctagaaatatatactttattgtaaaaacctaaatactaaatttttttacaaaggaaaggatgattgattgaaattgtcctgggacaatataaagtcatgaattgaaaaactttttctttaaaagaaaaaaattaaaatagcagttgtaagtgagattttttctcataaaacaacagaaagctaaatgcgagttgagtaagtaacgacttgtattactgtaacatgtattgtaaacgagacacgaatgtgccttgaaaaataatacttaagctaaaaatatgaatatgggattaaactattcatatgagtaatcgaaagatattcaaaatagttcttaaagtgaattatttaaaatatttgaagtttgctcgcgtataacatggaaaattataaactgctcgcgaaaaatatggtagattattaactactcatataactcacaaaagatgacattgaaatgcatgtaacccaaagagtgtcctaagctaaatcgagagaaaaatgttaagattttgaattaaaacgtaataaacaaacatatataactcgaaagggagatgcgaggcataaaaagtaaaaatatataaataagcaatgttggccatccaacaaagtaaaagtttttacaaaatgccacaaggggcaaccattgtctcagcctaatgaccatttttctaaaaataaaaaaaaatgtatctaagtctacatggtaggagacttagttgggtcttcttcttcaacttccttagcctggcctatttcctcttttttggtctgcttgcagaaggccaacatctccctagcctcgtcccccaaaaaactcaaatccatcccgggattggcaaaccaagctcgatagatggatcgccaagcaattgtgttgaccctagctttggcgtcggccttggcctcctcaagctttttgttagcctcggtctttgcctcctttagctttctattagcttcggtcagggtagccttgtttgcttctttgagctcttggatcttttttgggcattctcaaggtcagtcttgacaaccttctactgctcctcagcctccttcttgactctagagatttcagactacgagtcagaccattgcttagctaaaacctcacgatgttgtctagactagcgaagttctgtgtcaagcatttcaaccctttgaagacctctctgttgagcagcaaaagacaagagagatgcatgcgagaagtaaaaccaaaaagagatgtaagggaaagtataaaaagaggaaagatgaaaagataagaagagaaataaaaactaaccaactgcatgaggttatagctcctcttcacaagactttcgaagctgcctttgttaattaactcctagttgcattgttcgaaagtcttgtagtgccgccaattgttggtagcgtgcaatgagcaaatctgtgagccttctgtaccagcatagacaagctaggggcagaaagactctaacaatgccatctctaggtgagaaccagaaaaatttactttgtgaacatacccaagggcttgttcactagtactcacagcaaccggaatggcattgtctggagacttgcctggctcgatgctaagctgatttgaagctcgtttcttattggtgatggttttagttcttttcaaggtctccttggtgtatcccgaagcctcatttttcaaagtcgctcgcttcttagatttcttgactgagagagtgggactacagagcatatcttcaagatcgaggtccatatctgcgagaaaaagaaatatatcaatacttgttcaaaataagcaaaaagaaaatggagaataatctcccactcaaggagatttaccatagctatcagatgaagatgaagaactataatacttactaaactccctagaaccagtgatcatgaagagatcaaaagtatttagaggagacaaatcccaatcttgatggcttgccctatcaaagtgagtaccgtattgttgggaaattccaaaataagaactgctacaacttaattatacgtggtgcttgggttaccaactatcaaacctatgggctatgcgctctacacaattccaaatataaaaattttattgtctatccttaaatttaactagggaagtgcactcggccctaagtactgtgggagaccatccaaaattattacctcgggatgcttcttctttagcttcctgaggtgttgtattcttcaagaaatggatacgagccacataatccttatcctcctcgtcagtagggacaagaacctgctgccacctaaagtatttttggaccttgaagtcacaagtagcttgtttgctgccaaggagattgcaggtcttcaggttgatctcgttcaataaaaaattagcttatcgcaatccaaaaggaagacctaaaaggattttgtgctgtttttccatctggggagttggaataggcctcttttaaccaatgttaatacaataagcaaaataagtaagtgcctacaattagtaaaatgaaaaactcaaaaccaagtttttgagacaaggaaatacttacgtataatgcaaaatgtagttgtatttattggggcgaggccggatgtctagaagaattcgtctttgaattcagtcttgttgggcaacctcatggtgatcctttgatcatttgtgtgggtcctgagataataaaaaccacctgatcctcccttccttgcagggcaggccttcacagagtagaagtataaaattttaagtggggttgggcactcccattataaaatgtgatataaaacttccaaccagccaaaattctgtaagaatttggaatcagttgaaagggggcaatttcgaggtaattacaaaattccttgtaataatccttaagagggagtactgctctagctcttatatgttcgaggctctaagcgccaatcccagatgacccactagtactacaactttcttctcaaatcaccctttcaggggaaaacaactaaattctcttggagcggcagacctaactcgacatcctttttcgtacttgatgccacaagacctcagtactttgccaacgtatgctcctatagatctaaccttggattcaatgagttctacctcgaaagtaattgtgggatcatgaggggtcttggatttttgagcttttgaagtcatgattttagagtttaagtcacctgctgaaaaagcaacagtgactggatgtaaaaacaatggcctcgctaaaggaatagtagataaattttagggttcaggcgaagctgcttctcgcagaaaatgacatttaccttcagttatttattgcaaaaatttcctatatcgacttgaaatttcatcctggttggttttagtaagatgatctctaatttttacatcgtttgtctcaagaatggtttaaggaatgtttgttttgggtctgagtggggtggctaaattttgaggacaattcgtttctaagaactctaggattgtaatttttggaataaattgggttacttgtctcaatttctagaaaaataagatatgattttacctagaaatctatgaactgaataacctaaaagtttccttagccctagaactatccaaacaaccaaaacaaatttacgtaagaataaccaaacaatacagataaaaaaatatcaatcaagaagacaagactaaaaatacataaaagaaaaacattaagaagaaggaagtgaatcagttactgtcttgctgagaatttatgagcaataaagaactttgcaagtgaagatttgaagattgagaagcaaggtccttgcgatttctagaaatggaagatcagtcagatattatacgcaagaaaaatgtaagggacaaagaaggcatggaaggttgagaaagatcaatcaaaaaaattctttgcaggaatatttgaagctcttaaatgcgaaaatggcgaaattaacttccacctaaaattttatacccaattactgatcaccgtccgatcaaaaggaatttgatctaatggatgggagcattgcaaatgagaacagtcagagcactaaatgctaatgatgtgcgttgaagttctaaaccgccaaaaacctaaggcatggaacttttcaaaaataggtttatacaattatacccctataattatttaaaaagttctttttaattaaaaagtattttttagagggcaattgttaaacccaaaattcagctttatactggaggctgacatgtgtcctacggaaggaatatgaatcaactctgataatataataatgatgtgtcactaaatgcaattaaaataactcgtctaaattaattacaagtttaatagataacattcaaactcgttggatgcttagtcttatacatgacgagaataataactattagactgatattaatgagacataaatctgcctcgggataaactcatttacatatgtaagaagaagatactctcctgaacgagcagattaaatgtagtaacacacaatcgccttacgtcacacatagcgagaagatcatctcgcattagtaatgccaataaagggatacgacaagacgaattatcttccaacacttagcattttttcctatcaagttggacaagaagaactcatgtctgacaagacacaacctttgaagtcagcaaaaccgtctaatggataaaaataaagaccggttgggtagttattagatattatcccatgtgtggttaaatgaaacatggggattatccacgtttcatgaacaattatatttgaaccaatcccaaaaaaataattgcctacctatgttcctataaatagggatagaatgtatgggaaaaaggacggaaaattggagagagaaaaatattattatgcaaagattgatattgtattctgtattcaaaaaatatccttaataataaggactcgtggagtatgtagattttaactacaaaaccacgtaaaatatctggtgtttattaattatatatttatttctgtagtatatttattgcaaagaaaagctatttaatttggttagcgaaaatttatattaacaccttgttcaaattttggtgattctcctacttatcacttttgttgtggtattgagattgttttcacatttttttttatatatatgctatttactatattgtgttttgcatgttgcttattgcatatagatgtaattttttttttattatttctattattcaacaatttatgtacatattttatttggtgttgtaatattatttaattttttttattataatcattatattattttgttttgaattgtaatcttgttgatttatattcgtatagatgcacaacttttttacaatcttcaaagagtttataatattcacaatatattattaaaacaaaaatactcataaaattagctattatttataagtttttcatttatcaaaaaaaaaaaggattgctcaaaacttttttttcttttaaatgttaaatttgtgaaagtgataaaaaataagcaaatatattataggtatggaataacaaggaattggttggggaagttggtggtagtgatgcctggtcaacatggagaagttgataaaaagtcgatgaaagcctactcaaattatagattttctttcataatgtaatctaaagtcaacaaaaatgatgaaaccatctttatctttatctttaataaaacatactcacccttttcttttctttaccccaaagttaaggggaaattccttgattgaaagtaattatacacttttacttcttagcaaaaaaaaaaaaaaaagtaactatacacgttcactctaaaatattaaaaaataatatacatatatatattttgataacttttagttgatttacttttgttgttttattaactaaacaaaagaaccattactccctacaataatacgaatataatttcataaattttactaaaggaaaaaaaaaaagtgagattactaagatgtgtttttataaggtaaaatagaatactagactctaattagagtagggaggcagagaatatgaagaagaagagtatgaaattgggtttttgttttttttttgtttgaccagaaataggtatggaatggttatttttttagttgttgactgactgacttccgaaatagtaccaaatctcctcagaatatattccatacacgttttctacctaattttgtttcactatctctaaaacggcatgcaaatttgtaaggaaaatttacatcaattactttataattttcaaataaaaataataatataattacaaaaagctaaaaaatcaagcaagccaaatagtacac

SEQ ID NO: 384625 - DNA, 646 bp, Cannabis indica
gattatttattaaatcattctcatttatattataaaacacctatcataaaactaagtatacgtgcattgcacgtagctttctcctagtacatatatatatgtttattatttaaagttatacattccattgtccaacataaaaaaaatatcatcggaaaaaagaaaaaaagaagaaaaaaaaaaaagaaacgaaatcctccgcacatgaaaaaatttatttaagatagagaattacaataaaggagactattcttaatattgcattattaagttgttactacctaataattgactctagtgaagtgctaaggaaatacaatagtgtaaagatattttacttaaacacttttattaacataaaatttagaaatggtcttattgattttatacacacaaatgactcgcgaaatttagaagattaatttttttttttctttttaagattatagtaaattattttagtatgtttaagtatagagtaattaaccattttgttctcttacattagattaagggtacgacaacaaaactgaaattatcaaatcaaactcttaccgtccactcagataactaaagttgtatacatttatgtaaaaaaaatttgtttcataataggactatgtataggttatatcaattttttttt

SEQ ID NO: 384626 - DNA, 958 bp, Cannabis indica
aataataataataatatacaatacacaaaaactaaaacatacccttttggatttggatcaaaaatctgaagatctgaaaagggaatagcaactaataattagggggaatgaagcctggtccgacgtcattaattataattataattaattaactcaaacaagaaatgttgagattaacaaaatcttatagatcgatcgatttatatattttgttaatgaagaaaaaaaattaaaaattaaaaataatggcctcgagccagacaacattcccctcaaaaaaacgaaaagcttcccaaataattactaaatctatctttgaaactacatcgttttggccccgagatcatgatcgaaaagaaaagaaaagaaagagagattttatatggtttttgtgataatatgagagaagaaaggaagaaaaaaaaatgtgtggggaaaaaatgagaatagaggaatagataaaaaggaggtgaaaaaggacaaagtgataaaaattataattgcagaaatacccttctctctatctatctcattattattctctttctctctctatttgtatctcaacttctacatttgtatcttcttccatatgatgtatcttatatatatacatatagaaatttattataataataataaccctaaaaacttgttaaaaaaaattgaaaaataaaaaatcaaccctagaaaatcccatatatagcgggagatatcatcatgacctaatcaaaccatcactttagaaacaaaaatgaatattaatatcaacttaaaatatatatttagatacaaattgtatttagttttagttacaatatagtcatttaaaatacatttaattatactaaattataacttttgtaactaatatctttagttaattaaaacattttagtcacatgtaggaataataatttataataattaatcacaaatttttttatttttagtcaca

SEQ ID NO: 384627 - DNA, 1713 bp, Cannabis indica
gtactaataactaagttgaagagtttagtattgacttgaactgtgcgatcactaatgattgccaaacttcaagagaatcactcatagatctaattcatttcattgatcgatcaataattcttttgtgtaatagttcttgccaacatttttttgcatatttcccaccaaatgtagggtggagaatatcttagaggaattatttccataaggatttattcatccaaaaaatattaaagattacaaatagtaaacaaaaaaatatgtattatgttaataatttgaagtactaaaaatttataagatcttgttttttttccaaaagcatcaactaatgaaatgtttctttcattattttggataacactcgacaatatgtgattcgaaacttgaaatccgaacacaacacaaattcaataactaattacatgagtttggtatgcaacacatccaaaacacgaaaacctaaagtcgaagcacctaaacacaataagccagtctaatgttcaactctacttaaatcaacatattcacttatcaatttttaattttttataatttttcatcaacttagcaataaaaatgtttattgttatttagattgtagtagaattagagtacaaactagtggagcaattttttctatataaccgtcaaactttattattgagctaattaaatagtatgattagtcaatttacgagccacaatattaaatttttgagttagacatatattttcgagaaaaataaaactccatcaattcactttgataatcataataaaaaaattaagtacaatatattatttatcttaaagaatcaattgttcccatgccaaaaattcaaaagatgacttgtttattttgaacttgtgtccctatttgtcttgtaagtttttgatgatgatcattatgataaatatgaagtataaaaaaaatctcattcacaaacttgtttatatgtgtttggattttgtgattatcttttcatatctcaatataagacaaactagactagagaattgtatattaaattggttattattaaaagctaattataataattatacttttcttttattgttagtcctaaattttgtccaaattgatgattattgttttgacatcaaaagcaagagactaataataataagataagattgtgtttggcacaaaattaaagaaaaaagtgattcattgtcaattgactttacacaatcccacataaagtctatccaaaggagcccaactaagattcctagaaagcaaaatatttatattcatattatcgaagaaattatattatatatctattttactttaaatatttttatttttatttttatattttttaaaatatatccatatagatgatgtcctcattatacctttagattaatacaaattatgtgttagacttaagtagagagtgaaggtataatgaccaatgtactcataaaagtaggtatattttaatgaaatataatttaagagtattttttattaatggatataaaaaaaaatatttctcaacttatccccatattatattcaaattatatagggtaatttgtagttcaaatatttaagtttaatttttgattgtaaataaatatttaaattatatttttagaacttttataagtacttaactattaagtgtcaatttcattacacacgtattatttttttattggtatatttaattaattttt

SEQ ID NO: 384628 - DNA, 623 bp, Cannabis indica
ggtaccagcactggtatgcagtgggataacgctactacacttaatgtccaagaacaacaaagttgtactcaagctatgtcctgcccatgttgcccatatgcgagtcaatgctttatcactccatgcacttcggttcctaattgtttcaagggtggatcatgtgctggtgaaacttgtattgatggatgtggggtagtggatcctaggaagaagttccctcagcaagataaccacgtagttgaagcagcaataggagcggctgaaagagcattatcttccttgaggataaaaaatcctgatgattctaattcaattgaaggtaagcatgatttctacttggtagtaaagattttatatatcaagcaattagcataacttgtttgtcctggtgtatttaaatgttacaaagcatattgccatagaaattctaattctcaagacctgacatgtgaagaggtatcaatattgttttattgtactcaaattctttattgttattataattattatttgaagtttcacgacacttatgcctctcttggataacctcttaatagcactggtgaagagaataattgacttgtattctattgataaaatagtatatatttatacacaattta

SEQ ID NO: 384629 - DNA, 3161 bp, Cannabis indica
aaactattgtagctaatttatgaaaatatgtatttatttaagacattaaataaagagaagaaattaataatgattatttggtagtgtgcttctaaagcgcatgctatttatatagtagggcttttggctttggttttggtttttttaatttttgttttggtatttcatgtttgtagggtattgttttgtgggtaaaccatagttgtcagagaaaagttaagtgggatcgactcatttgtctctcatctttatctaaactcagatgaaaaagttgactgtggcaatcattatgcctctaattagcagcatctccatgtgaataaccataattttacatatctttttcaaccacttattaatcatatatatttagtatgtatagaagaagatcaacactaatccttctctactccatataacactcagttgttgccatcttttgaaatggtgatatataacatgcatttctagatgtgagcttaattaattatgacattattatattttttttgtgtgaaaaccatggttttaaaataattatcaaaagcccctaacaggcaaaaaaaaagaaaaattgatgtgaaagggatcaattatctaagagcactccaatagctcttttaaaataaaaatttaaagaataatataatggaacaaaaataacttttaacaaataatataaatttcttctctctattttaaagcgtctctatttttcttaaatgcttctctagtgaaatactatttatcctttaaatatattttattttatttttatttatttttatttatttttattaatatatattatacatatattaaaatatatattacgtagaaatatacttttagtatgagaaaataactattgaaagtttttttttttttgtaagactcgttggccttctttaggttcaagtacagtttgattggggttatattttctactacatttgatttatgttattgagattagtcttatctctttgacatactttttactgttttactcttgtctctgtgatatagttttgagtattttagtcttgtctgtgacatagttttaagtattttttagtcttgtctatgtgacataattttgttttgttattggttcttctttgtttttcaataactcaccattagagcaactccaaccataaacactataattgtgttggtttaccacaaaagtaaatttagcattatattaatatatttctattccaatcatcgatactaaaagttacacaaaattattttgttaattaaatataatatttttgtattatattattaaaaatggtaataaatatatatatttgaaagctatattaatatatgtgaaagaaaaaagtaattaataaatgaaaattaagttttagtgtgatctatagtgcttcaccgaatttgatggagttttagagttaggttggaatgcatttagtgcaaaatcttcacaaatttaacgttttagagtcccacaggagatgaccttacattgatgttagtggttgggaataataagtctattgcaactgaagggattgttagtagtgcagttacgtactttacacaatagttgagtgctcaagctataaggttgaacctactgcaatttatttctactgatgtatcttttgagcggtagatgaaacataatatagatagtcttaaggataaatgtgatgctgaaatcttcttcatctgattttattttaatttttttgtcaaacgatctaggaattagacgaattattatttggtttgtttttctaattctaatcctgatcgtgtctctaacgggggagatgtcccaatcggattgaagattattatttaagtatattgctattaataaaattccacgatttattcaaatgtatatattattatctaaggttggcaaagaagtgttgttgaagactgtgagtcaggctcttcctacttatgcgatgtttgtccttttattgtcggttgatattggtgacaagttggaatgtatatgatgagaaaatattggtagaaatttgatacttctaagaagcatggagttagctggatgagttggaagaagtcgtgtgctcataagttgtatggtggattaggttgtcaacacttgcgggagattaacgagtttaatctctgtatgttggggaagtaagctgggagattagtctcaaacgagtcttcactggttcggcgtgagtataaagcccattagtatcctcgtagctcttatctctttgcatctttgggagataatctaagttttatttggaggagtatgttagaagtttaatctctagtataaagaggagctcgatgctctgttggggttagggctgttgttaatattcttcatgatccttggctatatatggacattgagaatccgtatgtgacttcctaattgattgatttggatagttttaccgtctaatcttatggttgttagtagtaaggaatggaatgtggatctaattaataatatttttgagtttagggatcgggagttgatcttgagtatttaattgaattcttctgctcaagatgatggttggttatggcatcatgttattactggcttgtatagggtcaaacaagcctcagtctcttcaacaatctcatgtgttagtggtggctaatgtagattttgatgcggggaagattacgcggaacttacatattctccctaaagtgggtcatttatttggagggctcttattggttgtttagctatagtatagccgacgtttgaaaatcgttggtgattttatttcaaaagtgcgaagtttcaatttagtaagtgttttaaaccattgcctatactcaaggactatttaaaaccgatgggaattctcaactgtagacatcgattttaaatattcacttattttattagcgacggtctttaaaaaaatgattttctaactaacgggggtagtgttttaggtagtagtattgtgacagtcagtagtctcgtgatccgtaaggggaaataccgggtaagttgtgtaatcccacatcacctggagaaggtcaagtgggatgattgtgagactgtgtaggtatgggactacatagttaaagagggcttaaatggattgattggtactatctatatcaacaaggtgcatcttatttttcggtagcccatc

SEQ ID NO: 384630 - DNA, 1267 bp, Cannabis indica
aaattttatttttaccttattttcacaatattatactgttatttacacattacaaatacataaaattaagaagatatttacaagaatttatattagacatgtttacctgcatacaagaggcaaatcttctggatttggggtattaggagccattctataagtaaaggtatccctccaatcaacagatggagaagaatacaaactattattgcaattatacacaaatggcttactaaaatctcttgtataaaaagctttcttcacctcactctcttgctcaaaaaatcttctaacaccatctttcatttctttcataacactttccgaaatgctatggttgataatttgaaagaaccctccattttcacaagcttttctcaccttatcaacaacctctactcttctctcaaatgaatttccattgagatttttgaggtctataattggaatactgaattgggattctcttaaaataggactatcatcgcatattgacttgtgaaaaaagcgaggaatttgagtaatcttggcatcaacaagccctttcactccatttttagtctcatcaaaagctttaacttcacttgctctatcatattcagctgaatttgatgagattgttatcaccattttttcttttcttgatcccaattgagctttgataccaacaactttgagttgtatagacttaaaagtaggacttatataattggtcaacaattattttggaatacttaaacttttatgtcacatcactatctttatcatcttcattaatttttggtcacattttaagcattaatcaaatttaactagaaagccttaatggtcaactttgttgtgctgaatagaaaatgaagataagattaagaatcaaacaaagaataataatttgtcataatgaataaatgtagatctaaaacttgaaatgaccccacattttgactttgtcaacaattacttagtgctcattctagtaatattttcccatggttttaaggctccattaacaattagtaagatgtttttaacattttataagacagttattatacaatgttttaaatagagaagtttcaaagtgatgattaaaactatatattaaatagagaagtttcaaagtgatgttattaatgatattgtccatatttgaaattcttttaatattcttttaatagtatattcatgactcattgtgaaaggtttaagaacattattaaatagaatacactacaacatttttactcagtaccggcggaagtaatac

SEQ ID NO: 384631 - DNA, 3021 bp, Cannabis indica
aaaagtaaaactatattttccatctatgttgttgaataatcttcatttgtcattgctcggcaaattatatatagatatgaaatgaacaaaaagaatgctcaaaataatcctttatgcagtctttatcaaacaaaatctactagaaaacaaatgatgggtgggtgaaataaaaaaaaaatgtatagaaaggagcaaaagtctaagcattttatttactttgtgattctcattttggtgaataaattaatattattgggttaggatatcttacaattgaaagaaataagcttattttattaatttagatggtgtttggtaatattttttcaatcagttttttttcttttaaattaaaaaagtgagaatatttttaaaaacatattttataaaacaacctgtttttactttttaattctgacccaaattcaaatccgaccccaggcttagaccagacttaaataaaataaatgaaatgaacttcacagaacacacttttatttttttttaaaaattgaaaaaacaaaagcgattacggaacgcattttttgtttttcaaaaataaaatttttaaaaacaaaaattttactttcatgttgtgattaaaaaattaaaaaataaaaaaatattaccaaacggcactttaagtgccaatatgtgcaaaaatctatcctttattggaagaattacactcatcaacttggtacttatctctatccaccttattggagccaaatcttccttaattcgaaaaaaatcttgaaagagattaacgcaatatgtgagatcttcttgtggaatgagaagtccgggatcgattgtttgggatcatgtttgtaagcctaagaaggcaggtggtctaagctttcgtaatattcttgcctggaataaagcaacaattggaaaatatgtttggactatctcaacaaaaaaatgatgatcttcgggtgaagtaggtcaataatgtatacataaactcataaagggccaaaatggtggaattacacggctccttctcagtatagttgcaactggaaaaaagtagtatcaatgaaggaagaattcgagagaatggtttgttagcttcaattttctactacaaagtattcagccttaggaagacaatttaattggaccaaggaggtttggggaggttggggtaagctaaattccttaaacattgctttatcttttggttaggtgtgaaaaaaaatcgataaatagtggcatttaatataagagaaatataaataaatgataaaattgaaaaacaaaatttaacaaagagatgtagcattgtagcatatatgtatatactttcacacgactttgaagatattcatactttaaaccaaattacatgaacgagtatcaaaattttcctcttttagattaccaaacaaaactcaaattggaatacgtttcattcactagaaaataaaaattgaaaaaggaccattgagcaacgtttacaatagttggtctcgttctagttgagacacgtggaggccaagtcaagctaaactgtcaaaacttggtcgtgcttatcttggctccccattaatttgttgcacccacccacctcaccaactcacatgttaattaggcttcataacctccaatggcctcttccctttggctcctttcgttatctttagtcgagttggccaatcaaattgagtagccccatcgagtttctcatgtaaccacaaattattcaagcttccatgtgaggacacatatgttaagctttagataacagaacaatatctttacctttgtttcggtttcgaattcccaccaaaccaaagtctctcaaagagctccttaatggcaagtttggacccgtttgacagttgctttgtagaccaaacttaaatctccacagcctatgatgtttcaagatttgggatagtactgtgaggctctggttttctgtttcattgggcattaattgtttggaaatagtttgagtaggctagtatattattgttgtgtgtctcgagagctactgcatatggatcaaggaactagaaaacttgtcaagaagattatttgactggtggcaagtgggtataacgttgacaatggaaaaccagtgccaagatataatacccaaattagtatatatagtcaaataataacctcttttattgacaacccaggagtataggaatgtggagcttgtggctgattttctggcagagtacaagagcgttgtatttgtatagatagatgaccatataatataaccttggattttcatcaaagctagagtttgtaaaagtatcaaactggactggtccttgaagatcgatcattggatcgatgcaacactcaaaaatgacaatatatataaatgcagatgcataacttgaagctggaatttcatcactccgatagatcttggagagatcttgaggttgtttggatgtggtttcagaattattttttttaaaagtgagaatagaaaatagtttttgttatttttaaaatttagtagtatttgacacaagttttttaaaattattttaaattttttcttactaattttttttttaatattttacactataccatgacattaacccattctaccctggacctgacccgaacatggaccccaggccgaacgtagacttcgccctagacctgaacttggacccagacccagacctgaacccggaccccgacctcagaccccagaccccagacccgaactcagaaccatatcccaaacggcaacctcggaccctaaccctagaccgagacccaacccgaacccagatcccaaacctagggctaggtcggggtccaagattcgggtcggggtcaagatttggggcctgggtctgggtccgagtcaggggtctcgagtgggattcgagttgggattcggggtctgagtatgggttctgtgtctaggtcaagtgttcagtgttcgagtcaaagtcaggatctgggtctgcagaaatataaaatataatatgttatacaaaaaaaattatttttaaaaattgaaaa

SEQ ID NO: 384632 - DNA, 1165 bp, Cannabis indica
ttttttttaaaaaaaatgttaagatgttgaatttggaaaggtcttttttgaaaaagaaatttatatttggtgttttgttctactaattaatggtaggaccaaattgtgatttttattactttagttgtcttattttgttagtctagaataaaatagacactgatcacgtataatttatacctttcaatattaaggaataatcatctatgaaaattaaaagaaagacaatgaaaaggaataataaaaatagaaataatgaataatttacttgcagaaaaatggaacacattctattggaaatgacatattgatgaaaaagataatctaccaaaaacaggtgacaaatggaataattaaactatacagctgatttttcttttgatttcgatctatatatatatatgaaacaaaaataaaagtagttggagaaagaaaattaagaacatgcatgccaattattataattagatatatatatatatataatttagtatatcatcatgatattattaatttgattgagtatattttcattttcctttaatttaacactactacatatattatcataataaatctagaacaattatatgatattgtatatatctttcaaagtacacaattcttttttgaaacttatttttacgtaatatttttatataaattataggtcttgttgggtaatttataataataataatagtaaatatataagctgtcatgaatgaaatagttaaactataactaagactgaacactttaaaacggaactgagaaaagaagcaataacaaaatgagttctcataataatatttccacaatgataattaaaggtatatatattatatagaaaaatggacttattattctttgtttattaatgattttcttactcaaaacgcttgaaaattattaaaaatatatatatattgtttgtgaaaaaaattagaaactatatatacaaattataatttcacttttaaaaaattaagatttctttgaagttctagcttctccaaattagtacagtagaacctctatccaagaatacacttgggaccaaataaattatattctaattaagaggttataactcaatagagttacactagaaaaaaaaattaaaaaactaaaaaatatcgatgtaataataataacaataaat

SEQ ID NO: 384633 - DNA, 944 bp, Cannabis indica
aactatcatttttataatagttatactatatatataaaggtcccaaaatttaattcgccttaagcttcatataccttaggaccgaccctgtctgcacacataaatgaagaacaagaaagattgggtgtattatactgctcttgtattctctcaacaccatagccacaagtattccaccttaattacctatatacagcacaatccttttgtgaggaattaattatgggccaattgagcttgcatgtccaatgtgagagaatttattatcttggctcaataagttgatcaaaaatattttagagcgtattcttgagacctgaacgtattagtatgttatatccatccctatgactcgatggtaatatcttgtactactaattatatgattatcattatatatgttaatatggacattgaatgaacaacacttaattatattaatccaaataaaatattctaacaagttctatttttagtactgcattttgcattgcatatgcttagttaatttgttagatctctaaaatataatattaatttgttatgtgcattattagtaggaatttaactaagggtgttcgtcaataatttttggtaaagcatttctatttggaatttcaaagtgcctataacatattattaacttgttaccttataattagttatagcagtatttaatattaaaaattaaatttaaatatatgaaatttaatattaataatagtatgtcagcttttatatcgatgtccccttagtattttcctgtttagtattatgatgttttgggaggatcaagatcgatctcaacagtatttgataatttttaattttataaaattattttttaattaactcttagagtcgataaatgaaataaatttttttattctctgttgggatatcaattcaagtcttgcctcggaacacacaaaaaataacacttt

SEQ ID NO: 384634 - DNA, 2383 bp, Cannabis indica
gagacggataacttaacttcaatccaggtacttaatagttcaatacaaatgtcttctccttttggtttacttgttgaagattgtaagctcttattcaactcttttgttaatgttgtttgttcttttgttccgttgtgaacagagttgttcactttattgcttggagctctcgttctttgtcaggttatcagattaatgctagtaatgctccggtattacttcatgatattataatggctgatttagcttgaataaagattacttcttttcaaaaaaataatttatgaaattctatgattactaagtgaaattgacaataatttaattaatgagaaattgttgtaaaattatttgaacataattgaaatttgttctatgaaaaattgaacctaatatattcgaataaaagtacagaaagtaaaattgcataaattaaaatgacacacgatattttctacgtggtatcagtaatccttgcagattactactagtccacgagaccacactcagatataagattcattagtcaaatttcaacaagtacaaagtcataatgacttaaacgaaacatagactccttctaatgattttttcgcaagcatgatgtaatcctatttgctgaatgaatctccttaagacacaaaggtttgaactcccttcaacttacttgatgaatgcttgcttcctcctggtgcaaaacttatagaaattttctccccaagatagcggtgctattgcttcctcccgatacaagacttgtagaaatcttctttcaaagatagcgatgcttgcttcccaatgcaagacttgtagaaatcttctcttgaagataatgatgcttgtttcctttcaatgaaatactttgatgaaccttctcccgaaggctgttctttacattcatcacatcaaaactaaattcattttaacgaatgatacttggacattacgaatttctagttagaaaaattaatgcaaatcatatcaaaagtaaaataaaacatatcaaataaaaaaaattaccatacataaatatattatttaattcataaaaaacgattttattcataaaaaaactattttaacctttccatataaatttataaaataagaatacatattcaattaattttatttaatatatagtactcaatatccttatcaataaaataaaataaatatatgttaattatccctattattttcctactacgtaccaaaaaatgtagagaccttgaaccgaactgtttctataataataacgataaatatagaagttaggcctttaacttaggcaaatgcccaatttcgtcatgatcacctacacttcagctaagtgtcgtttcaataatctcactcttaaaatcaatttgcaaatagctaccctacattgctcctttatagtttatatatatttatagtaataataacttcttttgtatttaactttttacttattaataattatgaaaaatgttaattagtacgtttaaggtggtaagtatcataagatgtaatagattgttattggtataatttaatattgagtcttactcaattttttggagtccgactcattttaactttacaaataatatgataaatcgttaactccttacaacactatatatcagtatgttattaatcattaactagtttgtcataatatatatgctatgtgtgaaggtttcagaataatgatagaaatggaagattattatacatggagtattgttattagacacaagtagtatctagtattttttataggtgatgctttatgattaggtagcgatattacctaaagattattttcttaagttatataggacccaatacttaattacactaatagtagtatgacatacaaaaaaaaaaaaattataggcaccagtactttttaacaattatcttatgtatggatataattatttgatcaatatgacaaacagaccctaattggtccatgcataggtgtgtatggtccatatgtagaataatatagtaacaagatatatgtggataggttatacataatgtgttgtgttataatactattgattttgatgatgagaaatataaactcaaaatgaaaggaagtaggatggactagtatagcattagtagctatttaactagttgagaagaatattggagtagcttcatcataatctgttgagtaaactgctagcaaaataaaagaggaacgatattaccgaatgaagaattctgggttgagtcgcagactaagtcgctctctttaagacgttcgcggcactgcccaggagtgtgcaagcagtcggaaattgccggtcgtccccaggataaaacagcccagtcgttgcactgtatcggaaccccactgcactgtagagcaccgtcgaat

SEQ ID NO: 384635 - DNA, 3380 bp, Cannabis indica
tgatgattgtggggttgctgcctgttatcaatatgtcatcaacatatatgagaatcatagtagttgatgtaggtgtgtgttgaatgattaaagaatgattagactttgatgagataaatcccaagtccaacaggcagtgatgaagtttgtcaaaccatgcacggggtgcttgcttgagcccatacaaagctttgtgtagtttgcacactaagtgaggagcagatggaatctcaaaacctgggggttgtaccatataaacttcctcattgagagtgccatttagaaatgcattgttgacatcaagttgcttgatggtccaaccacgagacaaagcaatgctgagaacaattcgaatagtgataggcttgactacgggactaaaagttttagtaaaatcgaagcccggttgttggtgaaagccttttgcaactagtcgagctttgtacttatgatgagttccgtctgaattttctttctctctgaacacccatttacaacctatgggagttctaccttcgggtaaaggcaccaatgtgtaagttccattcctagttagagccaacatttcatctgtcattgcttgattccattgtttaagttgaagcgcttctttgactgatcttggtatttttgttgcaacataggcctttggtttgcgtatgccagacttagcacgagtcttcatagcatgggaattttgtggtggtgtctgcctaattgcagcagtaggtgctgcagcagattgctgcaattgagcagcaacagtagtatcagtagcagttggtgtagcaccaggagcaggaggacaggcagcaactcgagtattggtgagtggttcagcaacattgttgttgattgcagagcttggttgctgagatgaagtgggtaactcagaaacagaatcctgcatattaacagatgtgcttgccacaggtggcacaaaaggattagtaataacagtgtgagaatgatcattattagaattaggcatgttggctatgggaatttgagctggagtaaagaactctgtgtaggaataggaatcagtggtgagtttgggaatagatgcaaagggaaaggatagttcatcaaaaattacatcgcgagagatgtataatcgacctgaagcatccaaacatttgtatcctttgtgattcaaactatagccaaggaaggtacatggtgaggacctaaattgaagcttgtgtttattataaggtcgaatatttggaaagcatttgcatccaaaaggtttaagctggctataatctggtatgattccaaacagtttggtaatgggagagacattgtgcaacacaggggtgggtaatctattggccaagtatacagaagttcgaaatgcttcatcctaatatttgagaggcatggaagcatgtgcaagaagtgtaaggccattttcaaccacatgtctatgttttcgctcaactaatccattttgttcatgagttgttggacaagggtgtctatgagtgatgccaaattgttttagatgatcactaaaggatctaaattcccctccccaatcggtttgaagacatttaatctttttgcctaattgtaattcagtttcagttttgaattgcaaaaaggtttttaaagcttcaaacttatttttcagcatatagatccatgtaaatctagagaaggcatctacaaaatgaatatagtatttgtaaccattgatagatgtggttttagcaggcccccatagatctgcaacaatcaattgtaagggttcagtgtaggttgtagatgagaatttgggaaatggcagcttatggattttgcctaagcagtaggcagagcaaacacttaagggatttttattacaaacagagatgttacaacattgaagcacagctttgacaactttctcagatgggtgaccaagcctgttgtgccataggtcatagtcagaaatctgaggtttattacagtggttacaaacagaattggaagactctatattggaagacatggaagctgtcaacacccttggagcagcaacagatttggaaggttgcacatgaaactgagaggagttaaaggtataaaggccattctggtgtgtcccactgagaaggatgactcgagtttcctgatccttaacaaagcatttatcagcatgaaactcaaaaaagacattgttatcatgtgcaaaccgagagacacttaataaattctttgtaatttgtggtacatgaagtaaattgtttaagacaaggggatgagaggattgagtttgaatgaaagactgacctatgtgttgaatgggcagtccagaaccatcaccaacatagagttcctcctctccctcatactcgatgctggtgttcagattctgcatattgggagtgcagtggtttgatgcaccagaatttggataccagctggtgtcatccattggtgttgtttgagcaacattagcttgggcatttggagtgttagaacttggaaagactccagtgaagcttttgtcaaagcgatagaagcaatcaagaacggtatgcccaagtttgtgacagagttgacattgaacacgattcgagggggtgggaaatctattgcctctgctactggaattaaaaccaccacgaccattagtgttattaaaagagggcagattagtgttgttacctctagtgtgagctcctcgattggtgaatccactgttagatccacgtgaatatgaagaaggaattctgttttgattatagaatctgttggtgcgatttggataattctggtatgccatgttaacttcagagtattgatccagatccatagcagcaaggttggcactcatctcagtttctggttcaagatcagtcttttctattcgagattctgaggcaagcaaaagtgcttcgatttcagcgactgaatactcttcaatacgagtattggtggagattatgaatgtgtcgtactcaggagacagtcctttaaaaatggcagctatgtggtctctagcactgagaatttctccaactgaagctagcagatcaacatgttgtttgatctttagaagatattcattcagtgacatagaaccttttcgaattttctgcaatttggttcgaaactccaggatcttggaagagacttgaagagtgaagtgtttttcaagggcattccagatctgcctcgctgtgttgcagccaaccatgcgtgttagaaggctttttgtcattgaagatagtaaccaggacactaggagttggtcttgaacctcccagcaagaaaatctaggttgaaggtgttcgatgcttgatcattatcattcaagaatcgaggtggaggagctcgatcttgaataaatttttgcagtctgtttccacgaattgcagcaaggacct

SEQ ID NO: 384636 - DNA, 1781 bp, Cannabis indica
taacatgctagaatgagtatttcattgaagagattctgactgaccttttaaacttccaaccaaattcattctaagttttgatgatatgtatttgaactcttaaattcagtctattcttcaatggatcaatgcatgtactttttttaaagcaaaaaaggaggcttagataaggtgattcaatgtctctccttatctttgtattatgcatggaatatctttctcgtattctagcaaaggtggagaagaaaatagattttaaatatcatgataggtgctcagatttgaaacttaataatctttgctttgcagacgatgttttactcttttgccatggtgattttaaatctatttactatatgttacaaggtcttaaacttttttctctcttctagattatgtccaaatgacatgaaatctgctttgtattgttgcggcatgaaagaagaggaagtgcaacgagtgttggatgtctctggttttgttagaagtgaacttccttttaaatacctggggattctaatttgtgcaaaaaggttgtcggccttagaatgtgaatctatagtagagaaaatagtgcaaagaattcgtagttggggctctaggaatctttcctttgctgcctgaattacgctgatcaactcagttttgataacaatatacattcttactgggcacagattatgattctacccaaagctgtcctggaaaaaaaataatggtatttgcaggtcctttttataaaaaggtttggtagaatccaactgctccggttatgtatcatgggatcatctctgcaagccaaaaatagagggaggccttggtttgagaaatccagtgctatggaatgaagcaaccttagggatatatgtttgtgacataactagcaagcaagataccttgtgagtgagatgggttcatagggtatacttagaaaaatcaaattggtgggattatcgctcaactttagatggaggagacagatagtgaagattaaagaaatacataaaagccactttctattacaacaacaatttatgtgtaaatacaacattcataaagtatacaattttctctctgaagaacatggcagatttgtttggtataggaaagtctggaacaggtataatataccaaagcatagggtcattttgtggttagcggcacagaactgattgcaaaccagaaatcatttgatgaaaaagcaaatatgtcaagatggaaccagtcttctttgtggtattgaactagaaacaattgaacatattatgtttgattctccattcaacaacaggtgtcttcaaggagttaaagaatggttgggatggcaaggagcggacaggtctttaatcgtctctttgagatggatatctcgagcaaaaatgtcaagtttcaagaagaagttatatactgctgatatagctgcactgatatattttggatgaatagaaatgattgttatttgaataacagaatggaaactgtggagagctgcttacaacaagtgaagaagagtgtgaaacaaagaattcaaaatttactaattacaaagatgaatatagaagatagggattggtttattactttataaatgtatctagttattgttcaggcatagatttaaagtgttgtttgatatgtaaatttgatgttttgagagcaatacaacatattctgattaaaaaaaaaaatatatgatatatataagaatatttttatttaaggaaatatatttctatttaaagaaataaatttttatttaaggaaataaataaataattgat

SEQ ID NO: 384637 - DNA, 1801 bp, Cannabis indica
agtgatatagtacacggccagagctactttcgcatagataccctttatgttgcatggaataaaccaataaagatacacttttcagatctcactgtcattttatgagtaatgtagggcctcaaagtatgggaagcaggacatccaaatgcttcaagaaggcataatcgggttgtttagtaaaataaacttttgatatggtgatatgttggccaagacaggtgttgggagtcgattgataacataagtggcatgttgaaaggcataccaccaataagataaatcaagacccgattgagctaggagtgtcattcctatattattaatatgcctatgtttccgttcagcccttccattttgctcatgatcatgagggcagggatgttgaaattgaataccatttttggtcaagaaggttgctagagatctatactctcctccccaatctgattggacagatttaatggggaggttgaattgcttttccaccaatttcttgaactgaagaaaagtagggaaggcttgtgattttagagtaagggggaaaatccaagtgaacctactaaaatcatcgacaaaatgaatgtaataacgaaaaccttccttagataggacatgtgagggaccccatacatcggtatggagtagttccagtggagtagaagccctactattagacagagaatatggtaacttgtgacttttaccaaatttgcaagcatcacaaaattttaagctttttagagtgcctgtgtgattaacatgagacagaactctagcaagagttgcaggaccaggatgtcctaacttagagtgccaaacattaacatcttgagcaacatttatatgaaaggcttcattaacagacacagtagaaggaatggaaatggtatttttattaatatttggagaagtacaagtagtaaggactgttgagacagtcattttattacattcagagttacaaactgaaatagatgcagcagaaggtaaaggggatgaatctttggtagctagatgacattcaagttggagaggggagttggacacagatggttgagctagcatgtacaagccattcttaactctccctttgagcaaaaccttcccggtgctcttgtccttcacaaaacaacaagtggtgtgaaattcaagaaagacatgatttttagttaacttggacacactaactaaatttttggtgatatgaggaactttgagaactgaattttgttttaatggacgaaagtgagaaggtatagaggagttaccaatatgagaaatgggcagctgtttcccattgccaacagctaaggattcttcaccatgataaggggcttcataatcaaggtgctccatgcctttagcaacatgagtattggcccctgtatcagcgtaccaatcttgatcatgagcaaaatcaggggttgagtgggaagagtaaggtggctgatcatcatcttcgatttctgttaaaaacgcctgagattccccaatcttgggagggatgaatgacttatcaaatctgtagtggcacaccgcagcagtgtggccactcttgtgacaaacttgacagacaatgcgagtagtaccatttccacgacccccatatccatttcctcgagcatagggacgattgggatttccagaaccaaatccacggccaccataactagaggagcgatgatttccagaacctgacccaaatcttgaagatccagtagataaatttgcaagttatgccctagatttgcaggacctttcgagattctcgagaagataggtcaagtggcatatcggttag

SEQ ID NO: 384638 - DNA, 3832 bp, Cannabis indica
caatagctcatttccaatttagaattattaccgataaaatgcaatgttcttaattttaagtttgcgatcttgataagctaaaaacctaaaaattctacctaaacagctttcatctcagaagggtcttatcttttatctatgactatctaggcaaaggggatgaactagagtggaacaatttagtgagaaaactggaaaaatgattgccccattatcgaatgctggctaatgcccaattaagtcaagtacaacttaaagaatctgcgacaacaccgctttgaaacgattgaaatacttgagaaaagaaaagaagccatacatgtatatacataatgaacgagtatctcaatgtgttaattcaagctattgcaaaatcagtgtacactaaatgcatactatgaaatggagtcaaactgcatgctgcctgcacctccggtttctacactaccaagtcataacataagaggagaaatctaaataagttcggagtccgaatgtggacagaaagaataagagaactcaatccggttgaggaacaagatagacagatgccatcagattgtaaatgatcaacagttagcaattagcattatttacaagagagctaggcaacacaatctgataggattttcaaacttgaaacctttgacagttttaggttctattgccacccctgaaatagtagacgaatatcaatggagagccagttagaagccagcaagatatttaacttgaagtccctggtaaagagtttgttttgggcaaaagagcaaaaataaatgcttctgcaataaacactggccaccagtttcaagtattagacctgtatgcgaatgtgcgagaaatgatggcaaactcattctgcaatcaagttcattcaatgaattggatgattgagaaggtctgccaattggtgatgccatacaatgtttattgaacctgcagtagaagagagaaaaaagatagcaaactaactctgcaactaaatcataaagaatggatgattgggaaattttacctttaccactattaaagtctaatgaaaactaaagaggtttgttgggtgagacttgaagtaaatatggacagtaattgtaagacctaatgagtccatttggcttagacaagaaattgagttacaatgatctgtagtttatatatagataaagatcccaggagaatagatacaaacaaagtttagaaggtcaatatatccacaatcctaaattatcttggagccaagttagaatacacgtcaatatcaataaatgatgagaaggctaaattgccagtaacaaatgagagtaattccaacatcagaaggaatagcatactctggactctgatggatagatcacagaacaaacaaacaacttttcataccactccggatacacaacgaaaaatactactaggaaaataaaacaggcaagatcaaacacatgggattgacctttcactaacattgggcctcagaaaacattatttatgggacattaaaagtacttcttaactaaatagttgtactgatgctaaccatggtttatctgtcatcatttatcagtgtctctttttcaccgtgagctgttgtttcttcctggaaaacctgcttctcagccatcattggaggactagaaacaggctcctgaatctgttaattaatatcagagaataagcaaaaaacatatgcagaagtcgtacattaaaatcaaaattctactacagaaataaaaaccttaccaaaacatgaggcctaagagatctttcattagaagggactctagctctagatgcatctgaaggtcggtgaaaaagcaagtgtgctattgaccggtctattggattcgtatcagtttcaatgtccataaatccagtggtgcacctggtagacaccattacaattagcaaaagatttcaagaattatatatagagagctaaactattcactaaaacaaataatactatacaactgataaaaacaggaagaagctaataaaaaaaaaacaggaagaaaaaaagggaggaaagaaatcacttgtcaaaacaattcatttatctctggtaacacaagatttcagagcttcaatttcaagtcccagtgtttgtaaatcaaggtatcaaaattataagtggtagaatttgatgttattattggtgggagggagaagtggaagtagaaatagaagtgaaaggattagttaggttgattttgagatgtctggttgtttagttgaaaagcttgtaggtgaatggaagggtaggacatgagcttcaaacaccaattaagtcacatttgcagtctttcaggagtgcaaagactatggaggagaaaattaaatccaacacagatcaaattattattcaactatgatatagatataatgcatacacattattcttatagataaaattgttgtcgtacaataaaatggttcctttccttgcacttatatttagtttttgttaagaaagatgggttgtataataataagagatgatgaggtatcatccaaattacaacctaacaatccaaagaatttccattcattaagcggcattgaaaatggaaaaacattaaaaaacaaaatccttataaccactctatccctcctacatcctcttccacaattttgaatattttattgatttcttataaccaaatagtcaaaagaatggcattaatagttgcattctacaaaatcttcttccttcttcccataactccccgacacccgcctaaaccctccatttgctgcaatatatccggacaaaatgtgctcatcaaactcaatcaactcccatttgttgtaagcccaccccaaaagccagagtgaaagagcaatgcagaaataagtgatcagtagacacaaaacttctattacaaaacacaccaatttagagatacctgaaggaacgactgacatcattgtaatttctcagaagtatttagcttattaaaagctaccaatcaccctcacatcttcacttttgagggaggcaaatatttttatataagggtgcgtttggaaaccaaagccaccttgtaattattacaattgtatttgagtgtaatttgagataatcactcagtttaacgtgtttatctaaccatgttattacacaataactatgtcatttgagataattgaaaggtccaattatactctccaattctcacggccctctatgccaattaggtataattacaaaaaaatattttgttctaatattagttacaaaaaaaattattttttgtgcaattactaattatgttgttaattatcacatcacaaccaaactcatcttattttaaaatatattgtaattactcgactgtgtaattactgccatagtaatttcacaaccctaagggcgcgttaggaaagtcactatgtaattgaaattgacagtaatttggagtaattacaaagtttggcatgtttgtttagccaaccatgtaatcggaggtaattgaggggtctcaattacactctccagttctcatggtccccatgagaatcgggtgtaattacattgtgcaattacaaaatattactagttttagctaattaatgttattaaactatgtaatcaccaactcatttactgaaaataagaattcatatgcaattactacttgacatccaagcacacaatagagtataattactctaatgtataatttccaaggtagtaattacacgattacttccaaacataccctaaataaaatagtgtggagtgatttcatcattcccttgtaaataatctcttaaaattgttttgctagaaaataaatccaagccatttagcttccaaatccttctagca

SEQ ID NO: 384639 - DNA, 2001 bp, Cannabis indica
tgtggatcatccaaggcacattaacatagcgtacattttctatatatttcgtgttgtacttaagcttatctttatttatgtcgtgttgagtttaaatataattttgttatgtcatgctagtgccacttatatttataatgctctaccgaaaatgtgcaactttatctaaactatttgcaatagtatatatatatatataaatatttatataatgtgtgtacacggatctcaaatagaataaaaaaaaacaaaagttcacttcaaaattactttccaatatatatagctattctatataatgtgtgcctatataactgaaattcttggtttatgaaaattcaggggtgactttaattttatttaataaaataataaatattattgtatataataaataataataaaataaatcctattaatatttgaactgatattaaatattcgagaatcacaacccatttaaaaaaaacaaccagggattaatctcaaacctcttcttatttctttcgcaggtaccaattatcttgccactacactactttcgctcccaaaagtggaaaaatttgaagtaataaatgaaaaatctacagttacattttcattcttcataattttatttttgggaaattaatcagtaatttataatattgtctttctcttttttatagctgctattctatgtttgtttaatgagttgatttgataatattgattattgattgttgatttgataagttttatatatatatatttgatttgtttataaaagaaattatatttcaatatggttttgattttttattttgtttcgactatatatatatgtgtatgtttgtaccgatgtatcgatctgaattcaacttgataggttggcaaaataatgacttgatgttcaagtatatggccacatttgatcaaggaatccattaattgctcggcagggaatataataaacacgccacacgcttgaccaaataaaaataatatttttctaactaccttattagtataattaagaattaatcacaacaattcttttaaaacactgtattattcacaacatatataggtggcgtacatggttagtcccaaaaacaattgtttatatgtaattaataaaatatacaattcatgcagacatggacatctgtattcagtgtattgaaatatggtatacacttataggaataatattgtatgcgtaatagtttgacttatcttttgcgtctattcgtaaataaacgagctcattcatgataggcttcgctagattgacagagcttggtgagaataaatggagataatgaaaaaaaaaattctcaaataaaattgagaaaagttaatatttcgcaaattgatataaaggatcttactatcacaaatgacaaaacactattttttttttaactaattcatcttcataaagtagagaaatcactaacatataacagacaatgaatcataaagagtagaatctttcgtaacaacacaatcagctagccattgagagtttcgaactacaaaatatgcacctccattcacagattgattgacaaatttaagaaaactagtgttgtgacataacaatcaataatgttaattttatttttggcatctttaatttaaaaaatttattttataatttattatttaatttcagctgagatatttatattagtttttatattttgtgtatttgacttttatattaattaatttatacttagaaaacaagttgccaagccatttatggaaaataagctataaagggtaagtttgataacttattttttctccatttatctagctgtattaatctaatcttgtgtgagttttctatattatttgatcagatttcttgaggagaaaattgaagcaagactttcctttactgtaaaaaaaaattacacttactgctcacgattcagaaggtacagaaatgaaaattcatggacttattgaagatctaatttaggtaattgtctagtgagttgtggtctt

SEQ ID NO: 384640 - DNA, 2431 bp, Cannabis indica
gtttgtgctacgatgctacagcattctgttgttgtaccatatctatggaaggctcgagagacgattgttgaacaacctctgcggctgttaaagtttctttacctgtctcctgatcactctcgctaattgcatgagaaatttgtgattcgctagcattgttaaaagcatcaggaagttgtgaatccataacttcccttgcatcaattaactgtgagtcgataacctcagctgtatcactcagctgtgagttgacaacctcctcggttgtatcatgaagctgcgagttagggacttccttcgtgggatcattagcctgagaatcagcgaccttaattgcatcagggtgctgcaagacaacctccttaggcggatcacaaaactgcgaatcaacgtccttaggtacacctgttagctgtgaatcaacctcaagagttgcaacggaaaggtgggagtctttgatctcctgcattgcactacaaggctgagtgtcaatgttattttctgtatcattaagaaactctgtttcatcatctttggtcaatgcatggctcatttcagcatcagctacttcatcagtagcatggttcagctctgactgattgatcccaatatcagcatcattacatagctgcatgtggtcaaccacaccttcagcatgtataatccctaaaggatgttcctcgctatctaaagcgcacaagtgcgaatggttctcttctctatctgcttgatgtagtttataatgatcaatagcaacagtgacaccaaaatgagaatggtcatcctcgccaactgtgttatattgcgtcagctcatccttacgaatacgttttgatgtactttttcttcttactctctcctttcctctaaccctttttccggcttcaacttgttgagtagcagtcacgatggctggacctccaacttggtccctaagacattcatgggcaatatatctgattctagaaatcaattcaatttgttgagaatccaacccttttgtggagaatgtgtccgctatgtgtgcaatatccctcaacccggcattctgcaaaattcaacattaaacaaaattgtattagatcaacagatgatacgctttctaacagcagcagatactattcttcaaatttacaattatctcagccttactgttctttgaaactctgatgagagagatataggtctccctacaaatttacgagtaattttcaggtaccactgcaagtagtcattttcatctgtactatcatcaccttccactatatgatatcgacgttctgaccattcattaagttcagattccatcttccctgacaagtcaactccgccgtcaaccccacgactttttctctcccatctctgtacatcttctggaattgactgaagcataccatactgcctaagacaacgattagggagatgcctttctgccttgtcaaaacaaatcaacattgtcgttgaccttcctaaaatcagattattctttatatcttctggaattaatgtactgtccatatttctataaggaagccactccacctacatatgaaaaggcagattatttgtactataatttccataataaccaaaaattgaacattatccaaacagttgaaatataacttacatcacatggcttcagtgaatccaatgctttacggtagaatactacatcacgattagcagtggggccactttgtttccccttccatcgaagcacaaatggaaaccgatcgtgtgttaagtcatgattgagctttggtcgaccaatgttcaagtgaaagtaactccagcactgcaaaaacaatagcagattaacgaagtgttgagagcagattaatcatgcattagaaaaagattttgaatgaaaacccaaaggcagtactaaaaataaggaagtaagagtttgagaccaaatattacctgtaaaagtgttaagcaaccactaatcgtactctgagatctcaatgaggcattacctagggccctatacaaaaatgacaatgcagcagccccccatgcataccttccacactgctcaaaattctcaaataagggaaggtacataacagggactttgtttccagtagtagtggaaaatattgtgctgcctacaaggtataagaggtaagcacgagtatgacgttcaataatctcaagtggcgcatcctcagggcaccgagaaaaaaactctttcaaccagcttagcttcaccattccaccactggtataaccagattctggcgcttttccaagatatttttcacacacaaattggcaggtggtgtaagttgtcccgattactggttctccatctatagctagtccaagcaataatgcaacatccttgagggttacagtcatttctccaacattcaagtggaaggtgtttgtttctctcctccacctctcaactaaggcagaaata

SEQ ID NO: 384641 - DNA, 1557 bp, Cannabis indica
acttttgtctatgttagactttccttgctaaattagacaaaagtccttaaatccaacaatctcaatagttcacggggattttgaacaaaccttaaatgttcagcgggcatgatttagtacatgttaaagtttaagggcaaaaattctaatttagttttttttttttttttttctaaatttttagtttattatgaaaagttttccaaaaaaaaaaattatagtagtttgataaaagaaatgggggtttaatttgacacctttctatcccaactcggggatctaaatcgtctttaacctcctcccagataggctcttcttttggttagttggctatttcgggagcaactttagtttcttctttgaccatggatatcgatcggacagagacattgtaataaatccttgcacttttctgatcacctctgaccactctaacgcttccattatcgcatgaaaacttcatgcataaatatcggatggaagtaactgttccaaagtcaattaagactggtcatcccagtatagcattgtaagcggtgtagcaatccactactacaaacgtgaaatgtttgaaggaattgacattgtgctcgcctttcaaggtgactgggagctggatcttccccatctacatcaaggaatctccactaaatccttgtagctgtatcggacaaggtgacagattcgctttagttaatccaatcgtttgggaagcaaatttgaacaaaatgttgacagagctgccattgactactcgtactttggagactcttttgtttgcaatgtgtgatttaataaccaaagggtcatcgtggagaaagtgcacatatttagcgtcctcctttatgaacgtgatgggaaggttcatcatctttggacattgggtcggtgattgtactaaagcgcaaacttctccttcatcttccaactagttcaaatatctattttgggaattgtgagtgtttacagtgaggtgtgggcctccagagatagtggcgacatggtcgtcaaaaggtggcagagctaatactggcagataatggtttcttggtccccgaagctaggattgcttcgcaccatgcgctggcagagcaggtaaagtcggaacgtgtgttctaggagtttaagggtgacccaccccctagggagaatttacagctccttgctgtcccggaacgacaagttgtccatgaggatttagtgggagttcgtattttgtttactttatgtttgttttaagacatttatgtattttgttagtttctaataaaaataaagttttcagttcattcatctgttttgttatgtttaagtctgacatcattttggtttaaggaggaccagttagaaataggcatgtacagtttacattgcatgtagtttgcatgctacacatccatgattgatctatgtcatttgactatatttgtatatgtgactattgatgggtttagtcatgattgatatgacaaaaactgctttgatcctatatgggtatagttgatggaagagattgttgtgaatacctttacataataacaaattttgagctcataa

SEQ ID NO: 384642 - DNA, 1337 bp, Cannabis indica
tattttatttaagctgggtctaggtcaaaggtcgagtccgagtccaagtcaggggccgagttcggtgccagggctgggaccaggtttgggttcggtccgagtctagtcagagtctaaaatattgattaaaactgtttaaaaaaaatattaaaagtaattttttttgtttttaaaattatgattctcaattaaaaaattataaagtgaaacagttttatagaacatgattttgaaatttttttaaacatttttaaatttaaaaacagaaaactgattaaaaaagtattatcaaatgccacctaaataaatgtatatatttacattactctaagtaaatatattacacaaatattataaaattactctaagtgtttaagagttatttatacatataaaaatttaaaaaattaacagtattatacaagtgttctagtcatcaccgtaaatcacctcaagtaatttttctatccactcttgctgtaacggtaacaaatcattttctgcatcgtatcaagcctttcccccaaactataaaaaagaacaagtaaatgtctccagcccattaccacctgccatcagaatagtacatggtccccatagggactacctacaactcatttataaacaatgccaatagaggccaacaataaccacccctctaatccattagagaggtgttttggaaccttgtaattttaagagaccatttttaaattacaaaggattttacatcttctctcttacccacattctcttatattgttacattaagataactgcaccaattttatcaatcattactcaaggttaccaaccataatattgtgaacgagttcttactgtcaaaaatttcgaacggtctgtgggaaaaaaaaagttcaagctccatttttcctaggaagatcaatcaaccttttgaaattctaagtcattcccggcatctagaagatgccaaactttgtctcgacaactatcgaacagttctcatgagaaaactcagacggagacatccaattgttgggttttatgccttaaataaaactccatttcaatgtaatctttatcttttaaatatcaataaagaaacagaagtatttttcatcactttctgtattatttggttcacgttatcatttatatgtttatttgatttataaattcatccaaacccttatcacatttatgttcttgtttattgtgtcgtcacacagtggaaagtaatcaagattatgtgattaaatatatattcctaaatttatcagtacacagagggtttaactaatatgataatctacaacatagtttacttgcaccttggataagtgctatgttctttc

SEQ ID NO: 384643 - DNA, 633 bp, Cannabis indica
tggattccagctttaacaagcaaggcacatgataagtagtactaagtcattttatgtaaatcaaatttagaaaattgtaattattatttcttaccaaagaaagacagaaatgagttaatatagaaacggtgtcgtttaaaggtgtccccatggtcaataattaaaggaggcaaatggaaatgattacggcgggagtgatggggcacaggaaggaatgatgggaatggaagagaaagagagagtcttctttctccgactttgctttggttggccccttaattctaatataacacaactcagcctcaaattccaccctataaactccaaatttatatataataatattattataatggttttgataatttctcaagtaatcatgcttaaagtttttttttcttttttgcacaaaaagaaaacacaaatagtttcttaaaatattatgcagattctttggctttgaataaatgttcgtgacatgtcggaaataattggtttatttaaatatttgtacaggaaaacttaaaaataatgataatactaaaaaaataatagtgtgagaaaacaaaaataaaacaaatggtttagaacaactcttatcaagctcttctttattttttatttttattattt

SEQ ID NO: 384644 - DNA, 1300 bp, Cannabis indica
tgataggaacaaaattggtacaatatttaaaaaaaagaaaaataataaaatttaaaaaaaataaaaaaaaaataatatgaaaaaggtatataatctaatttcctccattcaaaatagtaggcattgtctttgtctctcttagagagataatatatttttttatttaaactttttttggtaatttgcggttatttttttaaaattttaaaatttggcacagttttagattaaaaaagttgctgaactcttcaatctctacgttttgctttataatacttttggtttacaaaagtaaattgtatatatataaatgtacaatgacaaatttttattaatcaacctaatatgaatgacataaatatcaaaaaataatttaaaataatgaaaatttaaaatttattcttttttctttttttattcctttttttcttcttttccttattctcctcgaagtggaaccatcaatggttcctttttttttttttttttttctctttatactgatctctctctctcccttttggcttggtgcgacaccgaagtcagactaggagcacggtgctccggccatatcgccagtcggacctcaccatctctcaccccgctccctctcttttgttctcggctcaaccacggccaagccactacggtcgccgatggtccaaaaggaccacaaaaacttgatctccaagcccagaaacccaaacccagtgatcctccgagtctctctctctcaattttccgaagcattttgatttcaattttgcatctctagttgtcaacgagctaaaataaccttatttatagcttccttatgttgagagcttctaaatctcgttgttcaattttccatgcaccacctttgatcggagacgaccaccacacacaacaatgctctgggttggggtttgatttctattgtttgttattttgtgcatctatttagttattttaggactccttcaaatgcaatcactgttaaagttatttgtttaaaatttttggcatttacaatggggcattcacttcactattttttgaaacttttttattcttgcattcacaaagagcttactgttatgtcaattggtttgtaggttttgtggatttctgatagtatattacaaagtttcaccaataactacaaaaaactactattttagtgacaacttttaatcacaacataatttttttgtgactaaatgtgacttttagtcgtaacaaaatattacttgtgactaaaatataatctttagttacaacttgtcactaatttagttttagtcacaacaagtattgt

SEQ ID NO: 384645 - DNA, 739 bp, Cannabis indica
attgcacagtagatcatttcaatgtcgttatgttgaccctctcgattggccccgacccttttcaatatggaagaaaattagatgaagaatttattttcttataaagtgtttgtgtcatatacatagtaattaagctacatatatagataattacacatgatttttagagtctttattggagttttcagttttgcctctaaacttcaattataaaaaatgatgttgaataaactggtgttaaagtatatgtattgctccatttttcttcccaatggaaggttttttttagagattattagaaatttattatcttttaatctaggtgtaactttagcttatgtattatgttgttataaaaatattacttatattctagctgatttttcacttacgactaataatgagttaatattactaaaagagagatttcctgactatttttaacattcgggtatggtattattttcagtctctatgactgacacctattcagccgttgcaaaactaggtagaatagtcatcggtggaaaattatcaggtatgcttatgtcccgactcttttaaaccatcgacaataactgacactgtaaccaacagtttagaatggacggcaaaggaattgtcgactgttttacaccgtcagcaatagtaagccactattgccaacaattttaaactgtcacattaaaccccttaaatagtaaaacctgaaagccttatttgagagagagagagagag

SEQ ID NO: 384646 - DNA, 2508 bp, Cannabis indica
tttttactaagaaagtaatcaagaataaaatacgtgagagcttagactcaaaatacatacaataaaataaatatatatttatatattactatatctccacataattactatagaactatatatatatatatatagatctgaaattgtatataacattaactaattaataatatatttatatgccaattaaatgtgtcttatatatgaatccaaaaaataaaaattcttttttgcattagttctaattaattaatgaaattgaagtcattaaaaaaaaagacttaatataaatattagaccaaaaatatctaacaatatatgtctacatggaatatggaaaagttcatcgtgtgttcttattaactgaaaagagaaaaaggaaaaaggaaaaggaaaatgtgggccactttcccatgcaacttgataaactagaatattactaaacaagtaaaataaataaagataaaattacatataaatatatatatatggttacttttacactgtattcttacttacaatacacttttatctattttggcaattttttttagttaatttaattttttttatagtcgtctacattatagttatttaacatatcttacaagatttcgagaaatttaaaaaaatttaacacatcaaaaataaaattcaaacgactcatttattttatatacgtatgaaatagattatttgagctatatttttagtgtgttatcttaaataactataatatcgacgactataaaaaaattaaactaacaaattctcccaaataccaaaatagataaaaatatatcagtagacctcttttaaatataatattataactagtacagctatactcttgccctaatattaaatggcattcttgtcattgtttgaaaagctaaggacactttagctaagaccaccctatatataaatcacacccaccagaccaaaaatttcacatgtacaattcccttctcttctattctattctctctatcttctcatatctatttcatatctatatttatatgggataaaatattattttcatagaaaaataataaaaaaaaaaaggagaaatatattaataatggccaaaattcaaatttctccagtagctctcccaccatcaccactcctcaaattcaagactacctcatctccttatttcaacatcgacgagtctgaaatgacaccattctctgctgttacaccggccaggtttctagccgtctattctagcaaaatccaagtacacgaagtgtccttagacacaatttacgaagaagaaatttacgttactagtacttgcagttctagtagtattagaactacgagtactagtaatcctggtaaaactgacgataatttggtcaaaatgacagcatttaagccatcgccgacatctcatctcttgtcatcatcatcagccacttgcttcttgcaagtgcgccgaagtttctcagctgtgtctacttttagaggtcgtagtaaatttcagtgtgccaattaagtcgccatggtccactagaaaaaaaaaatattattcatttattattattattattatattatgttattatgttatatgtaatattattaattattaataaggtagtcatgatcaggattattagtccaaattatacaaaagatctattatatataaaatctcatcaatgtaatccatggagggggagcttaatatttttagttttaatctttctttcttggtcatgagaccatggttatatgttggaagttttgaaaatatattgtaatggcagtgagaaaagttttaattaataaatattttgtattattattgttattattacttaattaatcatattcatatctatttattattatgttattacgtacgcagcttttggtcactttacttaaattttgatgattttattgttttcacaatatgaatttgaattaatggaattagtgcaaataattaaatattcataattttatatatagattttatataagcagtcgaatgtgactcgtgatcttaatctataatcatatataatatatataaattttatatcatgattatgggaaaatatataaatatataatgtatatcaacacaaaaaatcataaagtaaatatattataatgtatatatacatggatatgtatatatctcactacgtaagtttcaaacaaaaacctacgtagttactacatatgtaaattattttggtttcatagatattttttaaacacaaaattgagttatattattattatatttataatcaccaactattatattagtaattccatcattaattataacaaaacgctagggattacgtatatataatatatatatacatatataatattcacgtgtaaagtatctttattgaagatatggtgtaaagatctgataaatatcatgaaagcatatttaaaggttatccctttatatcatcatcatctttatcaacatacaatatcaattaatggtcggttttataatac

SEQ ID NO: 384647 - DNA, 3309 bp, Cannabis indica
aattaagaaacgagaaaccttaattgtttaatttagtttatatgatatttttaatcattgaaaattattattgtatatatatttatatacctaaacattttattttatatgaataaagaataataaacacttacctagtacactaatttggactgagattgtacgtaataaggagattacttagtatacaatacatgcatgcctacgttatactaattatacctatagtcccgcgtgaaatatcaatttaaaacggccgtactgtagcatatatttatattaatttcttatatttagtgtgtatttatatttgttattaatatatataatactacattaattaaaatccatatattctttacaaattacaactatcaatgcatatactttatatattacattcacaaaaagtaaatttttttgtcttaatatatataatttagttatggaatttgcaatatatatatatataatattaaaatcaaatactagagagtaatgaaaacatacgataccgataatttatcaatgagagtaagaagacaaagtccagttggatctagtactacgcataaatatattattattacttaataaattttcaaattatatatatacatgcaatatattgtacaagaattttgaacagttcttgttctaatttgactttgtaatatgattttagatctgcttgagctaataattaaatccatttgaaatttctttgaaagcgtgaaaaaattattttattatatatatctatacatacatatatttgtatgtatatgccaaagatataaagactttttcgcaaacggcccaattatatgccaaccgaagaagactttttattataacaacataataatatgaagccaaaatcttgagttaaatggtttactataaatggatgcgagggattcaactattttcatcaccaaaaaactcactttatctattttctcttcattttggtctaaaccctcaattatatttgctttgaatatatttaacatggagggtttaagcattatgaaataccaatattattcttttgctttgttgttgttgttattggcgacatgcaaagcacaactctcttcaactttttacgacaatacttgcccgaacgcactttctactatccaaacttcaataaacgccgccatctcacaagaaactcgtatggccgcttctctcattcgtcttcactttcacgattgctttgttcaggtaaatatatatatatatattaggtaccctactagctagaaatataagcacactactcaaaaagtaaaaaaattgtgattaattaattataaattattcttatgttgtaatttaatgtatttttagttacaatacttagcatgactaaaactaaattagtgacttttatcttaatattatgactaaaaatcacattaagtcacaaaaaatttgtgttgtaactaagaggttgttactaaagtaactattttttttactagtgttattctctttgtatttttttttaatggaaaataatttattattattattgttgtagggatgtgatgcatcaattttacttgagagtacagatacaatcacaagtgaaaagtcagctccacaaaatcgtaactcaataagaggtgaaaatgttattgaagatgcaaaaacacaagtggagagcatatgtcctggagttgtatcttgtgctgatattcttgctgttgcagctagagatgcatctgttgctgtaagtactcaccatatatatatatatacatatttatatattattattataaattgaatttattatttattaattattattatttcaggtgggtggtccatcttggacagtgatgttagggagaagagattctactacggcaaacttggccgcagccaatagtgatcttccacgttttacagatacccttcgagaattgattggaaatttttctaacaaaaatctcaatgctagagacatggttgctctttcaggtattactataatttcatccttttataatatttattaaaataaaatattaaattacacaaataataatattataatttctataataattatttggactacttatttaaatgcactatacacagaaatcttatatttatttttaaatttaaaataaaattgcaccaataacaaatatgatatatattatagttttattttggtaattatcaactatttatacaaatatttacttataacaattaaattaaatgcgtacaataataaataaaatttcaccagtgtgaatataaatatatagtttatatattattgttttattatatacatacataagcaaattcactcttaaaaagttaattatttatcgtttcattattatagcaaaaaaaatcttataaatatttattttttaggaatttttacaaaaatattggatttcgagtaaaattttacaatttgactgctacacgaaattttataaaaatactatcttttgtgaaaacttaatatacactgtatttttgaaaaaaaaaattaccccacaataaaaaaaattaaaatttcagtggtgtacaaatttcattttttaaatacaattaagcccaataaaataaattaaatttaatattaaaagtgattataatttttattttattttatgacaggttctcatacaattggacaagctcaatgctttacattccgtgagaggatatacaatgcaactgatattgatgcagcctttgcaagcaatcttagaaatggatgccctcaaacaagtcccaatggaaattcaaatttggcaccacttgatacccttacaccaaattcatttgacaacaattacttcactaatttggttgaccaaaagggtcttctagcttcagaccaaatccttttcagtggtggagaaactgactctattgttactgagtatactaactctgcttccacttttaactctgattttgcatccgctatggttaaaatgggaaatattgaacctactactggctcagctggtcagatcaggaggatttgtagtgctgttaactcatgatcatgattaattaattactatatttgtaagcttatagtaattggtgcatgagccaagtttttattacgtacaaattagttctattatatatagttaattatttgtaataataaaagcacaaacgatgtaacgtttcgtgatcaatgcattattaagatttttaaattaaccatgtttataagtgttcgttattattattattatttttaacaaatcatcacttcattgaaaataatcaaagttaaatata

SEQ ID NO: 384648 - DNA, 1291 bp, Cannabis indica
ggcaaaagagaaagagatgagatgacatacgcttttgtagcagcataaagtgtgaacaaagggtaagaaggaacaatagtagaggaagcagagccaatgttgagaatagctccgttcttctttctcaacataccaggaagaactgagagaaccatccatgtagctgactccatattcaccttaaaaatatcctccattagctccaaatccacatcaagaaagaatcttggataagggtaagctaaaccagcattattgaccaagattccaacgtctaagccctttatttccttgtctataatctcaactatttgtttcccactacacttggccaaatcaaccacaagggttttcacttcaactgatgatgatgatgatatgatctccattgaagtggtttggagtttggatggatttcgacccaccaagactaagttaagaccctttgaggctagctcgaatgccagggctttgcctattccgtctgtggctccagtgaccacggcccatgagccgtattccttgagattctttggggatctcaagaacatgacccacacccatctcaggaatttgacggaggacttcaaaacggatatgaaacctatagctgttactattggtatcgtaaaatcttcaagctccattgtcttcttcttcttcttcttatgtgtgttcaaagattatagtggaaatatatatttgaacaagagtttaataagatatgaagtaaagatatggttcagcaaaacaactgtaattaagacttactaaaattgttgaaaacagatttattacacttcaaacaaatttttcttttacatttctatccaaatatagcaacctaaatctatataataactatagcaatacatataaaagctaccataacaactcaaattataaaaataaaaaaatacatacaaaaataatagggtttttttcaatattatacctaaaaatgattttatttataaaaatacctttaaaaaaattatttgcacaaataccgttgtgccacgtcagcttacataccaaaatttaaaacaattaccgaaaatagaaaaaactggaaaaatctcgtttccaaaattttttcgcctttttgggagttttgaaaaaaaaaaatcatttagttgcttttgatttgaataagatattaattggttacttttctattaaaaaatttatttcagaattgtaacatatataaataataaaataatcattttaatatgtgagaaatataaaagacgattaatattaaaagaaacttttttttttttttttt

SEQ ID NO: 384649 - DNA, 2839 bp, Cannabis indica
aaactgcttctcgttgtctgaaataatcttatgcagaagtttgaagcggcatactatatttttgatgacaaaatctagggcatttttggaggtaaccgtattcatgggctccacttctacccatttggtgaagtattcaacagcgactatggcgtccttgactccccctttgccggtaggaatggatcccactaagctaattccctaaacagcgaaaggccatggacttgctcatgagggttatttctatttgtggtgcatgacgaatcttaacatatctctgacattgtttgcacttccggacgtattctatacaattcttcttcatggtgggccaaagtagccttgccgaaggattttctcagttaaacttggtttggacatgtggtcccatagaagcctccgtggacctcgtgtataatagcacttactttagttctggccacacacctcaggtaaggtaccaacaaccctctgcgataaagatttccatatagcatcacatatcaaggagactgatactagatcttgcgagcggcagctcaatccattggaagctcccctaaatttaataattgatagatgggccatatctaggagttaaagtgaccaacaatggcatttatcccctgtgtcttaatgctcgaagcttctaggtaaggactactccatagtgaatgacttttaaatctgtggcaagcttggccagcatatctataaatgagttctgatattctcatgatatttgatttaccaccatttgggaatcattgtgcactttcatgtgctaagctccaacttctttggccagtcataaacctaccagcatggctttatgctcagattccttgttagaagcacgatacttaaagtagagtgagctttgtagttgatgtccttgcgaggagattaatataactcacgctccagctttcttatcagtagaggcctcgtcgacatataccttctaggtggatagctctgggactaactcatccaggatgcacctaacccggagcattccattacaaagtcagctagggcttgcccttttattgacacttgcggttgatattggatattaaattgactaagtttttttgcccattttaacaacttactggaagcttccagtttctaaagcacttggtagagagggtgatttgttaatacttttatggcatgagcttgaaagtaaggtctaaacttttgtaggcggctagtaagcaaaaggtcagtttttcaatcaacgaatatctagatactgcacctagtaatcttttgctgacgtagtacaccagtagctggacttttccttcttcttgcactagggcgacacttatagcatgttcatacacttccaagtacagatacaaatctttccattccactagctttgacgaaatagggaccttagtcaaaggctcctttagtttctagaaggcctccttacattcttcgatcctttcgaatctcttatttcctcacagcacgttgaaaatgggatgcacttgtttgtgatttcgagatgaacctgctgagggcagctatccttctagtgatactttgcacctccttgtgatttcggggagaaggtgtgttgataaaagcttgaattttttctgggttcgcctcgactccttgggaactaataatgaagcctaaaaacttcccagaggagactaccaaacgtaaatttcctaagattgaacttcatcccataccttcagagaaccaaaatggcttcttcgaggtctgtatagtgttccctagaaacttttttacttttaccagcatgtcatcgacgtacacctccatcgtcctccccaactaattcttgaacatgttatcgaccatgctctagtaagtagctccgatgtttttttagactgaatggcatcaccttatagcaatttacacctttatccgtatggcagttggtgtgttcttcatcagtaacgtgcatcttattctgattgtatccagaataagcatcctgaagctaagaaattggtaacctgacgtggcatcaaccatttggtcgatcaatgggagagggaaacagtctttaagacaagccttgttaagttctgtgaagtcaatacacatcctccatgtgccattgagcttaagtacgagaactgggtttgccaaccattcgggataccgagcttcctggaggaagtcatttgtggtcaacttgtccacttctgcttttacagcctccgctctcaccggatccaatggtcttcacttttggtgaactagctttatatcctagttgatgttcaaggtgtggaaaattgtgttgcgattaattcctatcatattagaatggctccacgccaacatagcctgatttctcttgacagtatctacgatgcttgctttcactgttgagggtaaagtgtaatatcccagaaaatataaaaatatttatttttccatattttattaaatatgtgagtatgtgggtattgaagtaagattataatcttacttaagctaattgtgggttaattagtaaaaatctagtaaataaataaataaagtgtaatttattaattacagaggttttattagattatgggagtattgcaagttcgacgaccatagaaactcgacgaagtggtgaataggggtgtgcaaatccaatccaatcccaaccgactaatccaatagaatcggatatcaaaatcataattggatcggatcggatgcaaattttaaaaatccaattagatcggaatagtggctaaaatagattggattcatccatgagatctattggatagattcaatccaatccaataaaaaccagttaaagcatccaatggat

SEQ ID NO: 384650 - DNA, 2096 bp, Cannabis indica
aaaaaaaactataagataatttcgagtccattaattaattaccatgatatagatttttcctaagctagtatataatgtactacatactaatttggcaacgaatggtttagacctagtttggatgaaatttcatcccatatactaaattatattcaaaaaagtttattcaactagtaatatatgtgttggcaacgaatggtttagaccaagtttggatgagattccattccatttcaattcaatgaatgattatatgtatgttctttaaaatacgtacgtaattgtaaagagaggtgtttcacaattctaatattgctcttttttgacttattttggaagatatgtcatttttttttagttagaatcaataaaaaatttagaatataagctttattaaataactaataactaactagttatataaattttgtaactagtaatcatttattaaataactagtaactatactagttacatgaatttggtaactagttacaattttttttctatgaactttgttaataattagatttatttgtagcttttaaaattaagcatcaaggatcttaattggagagagaaatagataattggctagtgttaattaatttgctagctagctagaggtatacattctctaactttaatttgtttaaattaattatgaataagcatggtagatgagtttattattttaaatattcatctatagtaatgtaaattatgtgaataaatgtactgcggttgaatgagtaaaatatatatatatatatatatatatgcatgttagagaagtatgaatattttaaatagtgatctagggtgaaatagattcgttgaatacatgtactggggtttgatgggtgaaaattatattttattatattcgtgattattatattttttaaattgtatggttcatttttcggcaacgtctgatttatagttgttatgctgctaaaatttttataaaattagaacatttttttatttaagttattttaaacttatttgttaggatttttttaaaatttgttgtatggataatcatggattctgtagaggagagaaacaccataatttaaagatgggtttcaacaaatttttaaagttggccctaaaattttttatagattagtacacctaaaattttaaataaaaaaacactaagttaatttcgagcctatattttttctaaattagtataaaattgactatatgtaaaatatatagatatataaaaatagttattctttcaaatttatttaaatagtcaaaatatatatgtagatgtataaaagtttttatgttgttactaaaatattaaataagtcatcttttcttttgagtcaacacatgaaaagggtaatttcataaaaaattaataagtgttatgttataaataggtcatacgagatcaggtgcacaagatgatgggaatgatagagaatcgaaagaaaatgttgatccaccaagatgatcaacatgagtttggaggggttgaagataattattgaatacctccagcttatcaaccacatccaatgtatactccaacacattctttcatgtagaacttctcatcaactaataacaacaaagttcttttgtgctcagacaactttcataatatagtagcaaaaggtttggtactagaatctgctagacctatgaaagttagtacggtgacgtataaagaaggtattacacttgtcttaattccacaatcacttcaagaggacaccgaaattgcccgccctatccaaaatgtcatatatgtctacgagacaaaggacacattccttcactaatcaaagcattaaattctaaatctaaaaaagatacaaattatttttttaattatcatatatgattaatgcctacttattgtatattgatgttgtaattcatattttgtaggtttctctattcctaaagggaaatttgaattcctatacttacattacccaataatttttcccctaaatgcaaagttattaaaattggtaatatatgaccattttaccaattttcctaaactacccctctcatttgaaaccatcaacctctctcttcctctctcttcgtctctctca

SEQ ID NO: 384651 - DNA, 1056 bp, Cannabis indica
aagagtactcataaatcatcccctacaccagctgctttaaaagccagagtcatttagcagattattaaagtgggctatcgagcttagccaattggacatttattaccaatcacggtgtcgataaagggacgagctcttggtgacttcatttagagtgtactagcttcaatgatcctctagaagaaccaatccctgagttacccacttggagagtctatgtggatggtgcatccaacaaaaaaggcatcgagactggggtgatcttaatctatccacaaggacaccagcttcaaagtgctttgcatttcaaatttcgttcatcaaacaataaagcagaacattaggccatgttagcaggactaaagttagcaaaagaggtaggggcccaaacggtggatatttacagtgattcccaattggtggtgaatcaaatttctggcaaatttcaaacgaaaggggaacagatggccgcttatgtcttgatgtcgcacaagttattgcagggattcaagacttacaatattcgacagattttgagagagcaaaactcatttgccgacatgttggctaagttggccataaatcctgaggtcatcaaacacgaagtagtccctcctggccaatttaagaagtccagtatcaaagtccaaggggtatatgccatactagataactcccactcttggatggcacctatttataaattcctgagtacgggagagcttcccacagatagggctgcttctaggaagattcaatatcaagctccccattatgtgatcatggatgggaagttgtatcacatggggctgttgacgccctatctcatatgcattgttagcaaagaaattagttcagtagttcaccaggtccacgaagggttctgtggagatcacacttattgtaacgccctaaataattaggcacgctacccaagtcacttatcaaaccctaatcctctaaacgggattactaataaaattggcgcggaattttaactttaataacaaaaaataaacttgtaatactttaaacattataaactaaaagttacag

SEQ ID NO: 384652 - DNA, 3287 bp, Cannabis indica
attgaaaccaattctaattaattagtattatgattatttgaagatgaagggtcatcttagcaattacaaaaaaaaaaagatcagagaacatagaaaaagctcaaagattttaaggttgggtcacactatttacccgtagatcaatctctgtattcaacccatgacacgtgtaacacatatagacagggaccgtatacgtacattgattgtcttagcttatagactcccccacttttgtggtttttcctaaatacatttttatctatttttcttcattttttttttttttgaaaaaaaaggcttgttgtcacgtgtgaactttaacttaattaaatgcgtaagctgtacgttaagttttttttttttttttcattcctaaccatctactaatgtggtatatttatatagctatcttaaaaagaagataaaaaataaaaatcaaaactttattattatcatctgatcataattcttagagagagattaaaaagaacaaaaagctaactaggtttggtttagcatatatatgcatttgggtatagtttagtttgtttgtttgtttgtttggagagaaaatttagtgaggtctgagaagagagagagagaaatgggaagagggagagtagagctgaagaggattgagaacaagatcaacaggcaagtgacctttgcaaagcgaagaaacgggcttttgaaaaaggcctatgagctttccgttctatgcgatgctgaggttgctctcatcatcttctccaatagaggaaagctgtacgagttttgcagtagttcaaggtatatatatattttcaccaaaacatctatataatatatatgtatcataagcacaaaaaggtataagatgagctataaagcaaaacttatatgaaagagaaagcttttgttttaatattgaaatatgtgtgagtatatatatatatttatttattttggtgattcctcttttggatctcgaattactagctagtctggtttaagggttttggcaaagctggtgaaatctctttgtataaagagaagttgtgtgcttatatttgtgtttgtggtgtttgtttttttgtaatttgtttggttgaatttcgaaacgttttttccctttattaccgttttagtgaatgtctccgcgtttttagcagggctgagtgtctctgtggtggcattggctgctagatctgcaactggaaacgccataaaacatcattataattatatatatatgactatatatctcttcttcttttattaatttattcataccatattttatattataatacaataataatccatatatatatataactatatgttatgcttttgttttgtgtgaactctttttctttcaaactttttcttccctttccatattatgcgaaaagatccgatctttcaatggaccaagcttggtaggtttttggctacagctctctctctctgatggcaccttggacaacttggcttcattcttccaaaactgtattttttctgtcacatctttttctctacatttattcatattttcccacttctatgatatgagcctgctaattagggttttctttaagctttcattatttactattaaaagtttttccttttttttttattggggagctagggtcagggcacttgggatggtcatcatatcagatcgtaagttgatctgatcggaatctataatatattaattaattttccaggttgggaaatgaaacaagagagagagaggttgcttctgggtatgggttaaaacattttgacggtatgtagctagctttttcagattcaagagtttcattctttcacatatcactggattaaatctctctctctctctctctacatttcaatcaaagtcaagtcgaacgaggatgctttcgatcaatctaagtggatcgatcgatcgatccagacatttgactaatcttaatttctgacattagggtttactgtttccaaagctcactttttttttctttttaccccaaaaagattcaatgattaatcatctgattattgttaatctatttaataactagtattgtaaattaggaggtaacccatttaaaaattaaaatatttgtgttttttgggatttactggctacatattatttattagtttttttttttgaaaggctggctatatattattagtttatattctggtaacaaattaatctattttagggttttttttctttttgaaatggaattattttgggttctagtttgaaataaatattaattaaagctgttaattagttagaaatttggggttttttttgttagaagtgtgctaaaaaaatgatatgtagttaattttattaattgttaattttcatttctagttattgtttgagcatatccaattatatttttattttttaattaaaatagagaattattttattgttgttactagttgtacttcctcctttagttagtatctgattattttaataatattttataatttaaatttatcaaatataaattaattttataaaataataaaaaaattatagtgcttttattaaaatattattaaaaaagtttagctaaaaaataaggagctctctacatttgagagctccttatctattttttattatagaaattgttattttttgtatggttagagcttattttttcaagtctaaagagtgtgtttagagcgtgtttagaaagtatagttagagatgtcttatatagtatatataacatatctacatttgtttattatttgttgtttagttgaagagaaatatgttctttaagaacacatgttgttctttgttgaggcatatatcttcttatatttatatccttatttatttaagcacataaaaggagtcattttttaagaaattgttcattatccagattaaatctcactaaagacgaaagacgaaagggccatttaattgaagagatatatgtatttagttatttgggaataaccaaagatgaaaaggctaattaatcgaagagaaacatctatggttatttgggaataactaaagacgcttctattcaattaaatgagtttttcgtcttcgctttcagattttctaaaatcattttttttttaaaatttttgtctacgatgttttaataaaaccaaagataaaactaaattttgatgagtgctaaagtaaaatcaatgaaacaagcctctttagacttgtatcttctgttttttatttttttttttaccaaaaaataaaaaaataaatgtgttaattgtagtagtaaaactttttttat

SEQ ID NO: 384653 - DNA, 2419 bp, Cannabis indica
tatctaattgtttcattatactgttgtatatcaaataattaaactttgactggcagataaaaaaaaatcaatcatcaagatctcatttatctgtcagtaagtaaaattatattaatttgtttagacattattaagattgttaaggtgtagtgtttcttagttagagttagttagtgagctgttattttcagttaggaagttgttatgtaacaaacttcttatctttggtttagactctgtttttctcgtgtattatactgctctgttcttctgcaatggaggttaatgagatttcattcattttctgtctcaattgttcaatttctgttagacatacatacataatttatgtagatacaaattggtgggtacttacagacttatttcactaaagatcttttttttcttgtttcgttctattaagcaactttaattttaattattgttttatgttgtgcacttgtggtgccccaaacagggttgtgatgcatcgatattgttggacaatacggcaactatagtgagcgagaaagaagctgccccaaacaataactctgttaggggttatgatgttgtggacaatattaagactgcagtcgagaatgtgtgtcccggagttgtttcttgtgctgatattcttaccattgcagctgaacaatctgtcgttttggtatgtatatctataatatatacacacaactctcaaatcttatcatctattatatagatgggttcttatatatgtatcgtatttctatttgataatcatgaaaaagaacgatatatagtacacatgatcatgtactgtacacaagaatctagttactaaataataagtaatgactttgttaataatataaactctctaataagaatattttgttattatgtattttgtggatgcagtcaggggggccctcatggagtgtgccattaggaagaagggacagcttaatagcaaatcgaactctggccaatgaagtcctcccaggtttcagggaaactcttgatcaattaaagagcaaattttctgatcaaaacctggatactactgatcttgttgctctatcaggtgaggcctttttctcaccctctcttcaaattattgttttatttaacctctcaaattaaacaccatatttggtataggaaaatttgccacaaaaatactcaaattattgagtttattgctgataataagtacccaatttttaaaagatagtcaaattatcaattatgttatcttgatagaacccatttgaacaatattgttaattaatgttgacaaaataccataaatattgaggagttttagtgcaaatatacctacacacaattgtagtttttttttattattattattaagttgtaaactaattttgtcaagaacttaactgaattgttaggtgctcacacatttggaagggctcaatgcctaacattcattcacagactatataactttaacaacactggtagtcctgatccatcactcaactcaactttgttagaaaatttaaggcagttatgccctgatggtgggaatgggagcgtcctaaccaatctcgatctttcaacaccaaacactttcgacaataggtatttcacaaatcttcaatctcaaaatgggcttctccaaacagatcaagagttgttttcgacaagcggcgcagatactatttccattgtaaacaactttacaaccaatcaaactgcattctttgagagctttgtggtgtccatgattaaaatggggaacattagggttttgactggcacaaatggagagattaggtcgaactgcagcagacttaatggagatttggctggagtatctgatggtggtttagtttctcagtattaactagttatcaatgtatggggctataattatataatgaaataaaattttctttaagtatattgtttaaaattatacatataatgagcgataataaacacaaacaatgctcataatatccaaaagtacattctatttagagcattaaattaaacaatatacatacatttgttattgagcactcatcctccacgagccacttaaaattgccaactagtccaaggtcaaaagaacacaagagagtgtagagcaagagaggatctattgggattgcaagccctctaccataaactatcttttgaccttatgcctttttatacccaaaaagacattattatgtcatttttgtcctacgaaaaaaaaatggacatgtttggacttaccattagtggtggactataaattaatgtattaatctacagtcattagggtgccacgatgatccttatatgcgatagttaattaaaattgaccatctcattatggtcttaattacataattggcactataccatacatatatttatccttatacttttttttttgaaaataaaatca

SEQ ID NO: 384654 - DNA, 1362 bp, Cannabis indica
ctgcggtgatagggggctaaggtgggtgattttatcgaaggggatggagctgacaaccgagtgattgctaggagaggtttcctgaaactcaaggttgatatcagagttgatctccaacttccgactgggttttatctcagtatcactagggggaggcgtgaatggatacagttcaagtatcgcaaacttcctaaggtatgttttaattgtggatacatgtctcatgacagcagtgggtattctagggatcatgctttcgcctatcccccggtaggagaggttgtcccccctttatggtccttggattaaggccaccgttccggttcggagctgttttgatacgaggggccctactcttatccgtcatctcggcggtcggtcgatgtcaccttctagaaattcgaatatttaggccaagggtacgaatgccagggatttgcatgggtactattgatagtggtgcggcctcaaagggtacgaatgaagaacgcacaaatgcaatgacacctggcaagaatgcgattgagacacctggtaatgtggttggtgggaatagtatggaaaacgtgttacatcccatgaacagtttaggcaggaatccatatgataatagggttattcttagtatgatggccaatgtgggccctgttgcggcccaaatgcttgaaataccccatcaagagatatgcaagtccagaactccccatattcaccctaagcccattatcataacagggctgatagatgatccatctgggaaagatgttatcccatctagtattgatagtgtgggtgctggcaagcccattacaaaggagactaaatggtttcattctagtgatgtttctttgatcaggggatcaagctctatgaaaagaaaggttgtgggaaacgtatcacctattttgatttaggaagctggttctcttaccggcgacaatgaagcttctaaaacaaaggaagtgggaggtagtttttccccgggcttcctcttctcctgctgcccaaagccaacaattcaagaaaatcaggaagccataaaaaacctcatacaaggagcacggggatcatggaggaaatcctgccgagatcacacaaccttctttaggtacggatactaattgcgtttaccgagattggaaatatgttgttcgaagttaaaattgaccaaaattttaaagtgggcaaggaggcggcccttaccaagcccccccacgtccccactaggaatgtcaatttgggccattttcgcgggccgggcccccagcccgacgggccgactgtggcccgaattattcgggctctgatcgggcttcgggctcggcccggcccggcccggtatatattattttgggtcaggcc

SEQ ID NO: 384655 - DNA, 1591 bp, Cannabis indica
tttttgtctcaaaaattatattttagtgggactatcataataattgcctagaaatttaacttttcatggtactatttaatttaatttaatttttttttaaaaaatcaaagcatcattattatctttggctgaaatattaagttttcataacgctatcgttaaacatcatttttgcttaacaatcaagttttcataactaatctttaaaatattttaaaatttgccatttttagagttcaaaatctggaaagaaaaaggcaaataatttttctaaaaaaattatacaagtattcaaaatttatggattactagtgttatgaatattttcttcacttcaagttttgattcattaaaatcacaaagaattttttttttaaaaaaaataataagaaaaatatataatgtactaaggaaggatgagaaggtggaaagtggtgccaatgatgtcaaatggatgattgttttttttaatatgggtggtgtgatttgacgtgggcagagagaaggagaatagagtagagagagaatgagagagaaaatgaagaggatagcattgcctacttatggtgtttagcactataataaagtgttattttataattggttagtaattttttataatatttattaaagtaaaataagtgagacccgatattgagttacacctcacaagagtgctcgacaccataggtgtcttttagtagttttctttgagaaaggaactttgaattagaatggcaatttggcctatttaagtgagaaaatacttacttttgacaaaattatcaagaacattgttatgagatacttatagtgcgtattactataataaattgtcgtcttataattggttagcaattttataatattaagttgcaccaatagcgatctcacacttcacaagagtgttagatatcattggtgttctttaacatttctcaattatcttattggaaatattagtatataatattattattttgactttttatgtaggatgttcatgtttattttgtgtgtgcatatgccattaattttttttttcaaacaaacctttcattttattccaaaattagaatgttttaatagaattttattttcatattaatatttaatgtattattatttttttttttttgagaaaaagacctcaagaaaccacctttcaagcacgaaaggggaggagacgctaactatattaatgaatcttactaacaatgagattgtgaatacaagaaggataaccaaactaccaaatattttttttttgaacaaactgaaatttattaaactaaccaaaccagtacaaaccagcccagccaaaccggctgcacaaaaacacaacacaacagggtcaccacctctctaccatggtccttacataatgccatgccttgttgtcacttctatctataaagcataaaattctatatttaattatttaacactacccacactcatacatttggattcaaacacaaaagatttctattccaccacacaaagtataacattgctgccaaaacagcattctgaagttgatttctcaaattgaaagcagcttttggggtccctttttgcagctctgaga

SEQ ID NO: 384656 - DNA, 1181 bp, Cannabis indica
tcaaatttatacttttgcaaattgagttagtgtttaattagatgcactaagaataaatagtaatagtttgattggatgaacacaatacttaaaaatataaaatatttatgtggaaaataactctattttatatcattgaaaaaaaggttcaaatattatttaagtgactattagttgtctattaaagtaaagaaaaggacaaaagagacataaaaagtagacatttgagctggaaaataaaacttcaaacacattgtactaatactatagctctttatacatttttcttctttaactaattaccaaaaaaattaaaaaagcttcttgcaatagtactttaaatattccataagtttttgtataataccattcagttcaaacaaaatatttgaactttcaagcaaagcaaagaactaaagttcaaacagctatttactataagtatgaaaaaaaatatatatatatcatccgtacaataaaatatttaaaccttatttttgacatagtaaaatattcgaaatttattgaaaatttataagtagccctaaataactacaatgtacgcaatcattcaaaaaatgctaaaaatctctcataaataccgaactaaatgggtccaccaaaacacccttttaacgggtggacacatacgtagacttttaattaatatatataagggtgcacttttaatggctattacccatcaatgcgtattattaaaaaattttgagtttccattcttaattttgcgatctaattataaaatatctcttatttttatattatatgagttgggagtgtttaggtgagagagatgaaaagaaattgagtttgatttcgatatatatatatatatatatattgtagaaacatattttgatagtttttcaaaaaaaaaataagtagtgaaataaagtacataaaatcaaattctcttttattattgactattgaattaaaatctaataatttaatatttcttaaattgatatttatagttattattttttagtaactatcaaattacccattgaaaaacttagctatataatacatacatactatcataaatatagggatatgattttgtcccgttattatactttcacggattgtaatccgtgatgtacggcaagcgtccgatgagggagttatttgatctgacggctgagattgatcta

SEQ ID NO: 384657 - DNA, 1533 bp, Cannabis indica
aacagaaaacaataccaaacattaactttcctagagtttggtagaagtttggatgttctaggagtttcccaacatcatatcttttcataatgaaattaaccttgaagttgaagttggtgtgaagtattagcggatactggtagtatgtaatgaatgcaagaatttgggccatatcgtagtagtgtgtaaaatattccagccacaaaaccaaagaagatatgagtggaaaagaaacaaacatgggagagaataacataaaagaaacaggaggctaaggcggttgatgaagagggctttcaacaagttaagacaaaaaataaaattttcatgcaagggtctcaacaagttgtgatttcaaataatttttaagtgttagcggatgaaggagaatgtttatttgttgctgatgaggagaatatagctaggccaggaggtgaaggtgtacttactcaaggagggggacatcatcctttctccaatagataggctattgagttagaatatccgagggatcaacaaattgaataaacaattagaggttaaacactcttaaaaattaaaataggtttggttggtcttctcgagacgagagtaaagactcctaaagtgggggtcttgtacttgaacttgtttcaaggatagtattttacgtcaaataatgtctggcatctgggagggaggatagtagtaagttggaatccgttaatgtttaatgttgacattaagttttgttcaagtaagttaattcacttaaaggttaaggttggaaatcaaaaaatttcatgttcagtggtctatggaatgaatgaagaagactttatgaataaacttcccaaacttcgggtctttggccaagtgaagagaaatctattgtttattatacaagtatgagtgctactgaagttcaaagaatgctagatgatccatcatcaattattactctagccaccatcatattggctatatgcacctcaacaatgagggggtgattttgagggtagtaaacattttgaattctccgaacgtgactgggtcacactcgaagcgtagagattttggaagccaatctctaacatctctaattttggctcatgttgcaaagatctcacatacctctttaaagcttttcttgaattactagcacatcatgtcagcctgccattaatgcaggctagagaggtgcattacttcttacttgaccctaaaaaatcttgcttgtcccttcacttgtatcttcattatttccaaaaatgaaaaagatgcccaaaacacttttcaagaaagctgactagaaatgacctaggttgacaaaatgtcaacctggacgcagggtcagccccaggtatcaacactactacaaaattggtttttctctacgttttcaaacagtcgtttaaagtattcccgtcaatttctataactgtcgcatatacgaccatcgtaaaacgggcaaaataggcgacggtttaaagtcgtcgctaatgtggacttcccgacggtttaaaaccatcgcctataccctgttataggcga

SEQ ID NO: 384658 - DNA, 1717 bp, Cannabis indica
ttttatttttatattttttattcctcgcaactaaatgacatcttaatgaaatgtgcatacatatagtatagggattctataataaactggccgttgaaattttgtttaattttgtataaatatacctaaatagttattggattttacggatgcaaaagtccccctaaaaaggaaaaagttagattttttttttcttaacgatgaaagattcaaatcacatattaaagaaaggagagaaaaacaaaatcattatctagggttttccatgaataacttgatttttttttttttttggagagaatccatgaataacttgattgacatttaataataaagaaaaacaagacacaagtttttgagtctttttcctttcatgcatgtataaaaaatctaaaccacaaaatgaaagaaaaaatatattatatttaactttattatatatatatctaccctatatggatccactataaataataaccgaaagtcgcaaccatttagtatcattttcgtaccaagaaaagaaaacgcctctaaactattcatcaatactctctaataagatgaggtccctaaaaaatcatatcctcaatagtattcttcttagttgggacaataataatgagtagtaccactactactactgcttcgaaaccaccagcgagtaaaaagcgctactcttctccttaccacaatgacttcgtggatacccacaacgccatccgcgcagaggtgggagttgggcctatgagttggaacgagaccatagcagcttacgcacgcaactacgccaacaacagagtaaaaaacaactgcgagtttgagcactcgggtggaccttacggggagaacttggccgaaggttatggggaaatgagtgggcagcaggctgttaagtattgggccacagagaagcccaattacgactacggctccaactcgtgcgtgggtggcgagtgcggccactacactcagatagtgtggcgcaactccattcaccttggctgtgctagagctaattgcggcagtggcttgattttcgttatttgtagctatgatcctccgggcaattatattggggagcgaccctattaataaatttactaatattttatttactatataatggatatgtaccatataaatgtatgttattgtatggtctaatttgtggaaattatataaaagaactaatttctggttaaatatatatgttgtcatctctcataagattaactattttcctcgttaatctttaaattattatatattttatattactgtaaatgggcaaataattgttccttgtttaatttgttttaaagtgatttgaccaatggatcctccattgtaactataaatacgctaaaataggtaaatgttagggtcggaataataataacttgcctataattagagataatcttgcatataattacgcagtatagagtacgaaaaatactattttgaaattttaaattagaagaaatccttttcgaaaagtttattattattattattattatttattattattattattattattattattatttgacaggatccatttcggaaagttatatgtctaaatgaaattttattcttactaaaaagaaaaaattagctttttaaagtaattatacaagaaaaggttttttattttgatttttaaggctttttattctaatttttactaaaataaaaatcgggatgtatg

SEQ ID NO: 384659 - DNA, 2090 bp, Cannabis indica
tctcacacgtccattgcttctctctacactcgagatgccatccttgattcattctttgtaaccttaagagtgctatatcagatcccacctatagcgatatgaattattaactctcagtatcaatacaactaaaaggggagtaggtcattacccactaattaaggggtcagacctctataaaaattcttgtgttctgttactttctagttctaattgtgtaacatgtggcaagcatcagtgtgaatatgactccgctgtcggttggccaaatctgaggtcaacagtttggtgctttcattaagagcgagttgatatcatatctgatcaaacaccatagttaacacaaagagaactctagttgcaccatctgcatcattgagtcttcctcaagaccctctaattgcaaatccttatgtccatgttccagccacggctagaattcccatgaacattagtgcgctcaatattattagcttcgatcatttggggaaatagtcatcttgaaatataagttaggttgaacttaataataaaagaaacaaaaatatgtatatatatatatgtgaatgtatggatcagaaaattggcttgattctctcagggagaataatagtgctctcagtataatcagcttcaatcatctggggaattccaactaaacaatatacatatatataaatgtaataaaaatgaaagaaaatttgcctgaaatgacgaaaaggagagaggcaatgagttccttgcagccataaaaggcctctacgattcgcagaaacggatcaactatggcgtctgctcatactcagcgctcacagcaaatgcaaacagccctggcaatcagtttcatagacactaacataacataaaatatttcaaaatcagctaagataaaaagaagatctagattatcgaattgcagtgatgtattagcttgaaaaataggacataatagctaaactaatactttttcactaatcataacaaaaacacaggtattaattcataaataaaattacaccatagaaaaaaaaataaataaataaagaaacagagagaaatcaaaaattatgaaatggaaaaattaaatctttgtagaaatggattaaagctacaagaaaccaatattgttcctcaaaatgatacctgtgagtgaagctgaggtgataatgaagccccattggtcttcttcttgggatgagtaggcgttgggggagaagtagaagtattagcaccctcttgtcaaaactaacttctacggttccgctaattcctcttcttcatcatcatcatcatcttcttcttgcgtttttctttctgaaaacccaacgagggttacagcatgaggcattagagaccttctttccatcaagtgttgctttatgaaaaacttaagcagagtatcataagccgaaggcatatccatggactcaacaaaggactcagcgagcaaataaatggtcatatccatttcctctactctaataacccgaacacaaaaaaccccagattccaattcttgagaatacgagaacccatcaaggaatttgagcatatcaagctcttcattggtcaagaaccgacctgtaccaagtgtgtctaagaagtaaggcgaggccggttctgggtctggttctggagctgtagttgaagaaggtgaaggcggagaagatgaagatgaagattttttaagagcttcacagttcccttaaatgctaaattcttctaatccattaaagccccattgctaagaaaccctcgcaattttgagggactatttatgggttctcggtcggggttaggtttctggggttgggtccatcggcgccgcacaaagaagaagaagagagggtatatgaagcagagagagagagagagagcgtatcgagagagagagagagaaggaagagagaggttaatattaggtttcataatatattgtatttatcctttatttttttcattattcttaattttttaaaaaaaaatacctataagtctcgttataaccgagaccaagaacatttagtgttttggtctcggttataaccgagacatatactcattctgtatatattaattttttaaaaaaa

SEQ ID NO: 384660 - DNA, 1068 bp, Cannabis indica
acttttaagaacatgatatttacttttaaaataagtaagaaaaaaatattaccaacttcacactatttttttttttttttgaattgaccaactcacaatttctaaaatgctaaaatgaggtttattttaaagcaatttaatattgctttgttacacttttttctttaaaaaaatccaatcaattaaagaaaaatcaagtcttgtgcttgcttgatgggtagcattttgaatccatcatccacctatattcactaaataaacaaactaaaataatgatttttttttccttcaaaaaaaaataatagttttttttttttttattaaaagttaaaatatttattttctaagttttccaattgggaattcttaaaaaaaaatatagcaacagcccctatgagttctaaaagggagtgttattaaaactcaatttttataatagtgatcacatattcttataactttatttaaagattggcgatgcaagttaaatatttctttaagaacaattcctgtgtggtcttaaataaagtcttgtatatcctagtagcatttttaaggatgaaggctgaaagtccttggagttatatttgtatttttttcaaaaaataaatttatatttgtataaaactaaaattattatattctataatttaatatatatatatataataactaaattaaattttttttaaaaaaagaccatataatcaaatctatttatatctatatataaagaagagatatgaggatataacgtgacactctaaaatcaccccaaacacttttaattatttttttcttaattctctcactttttaatttttaattaagataaaatcatttaaaatatatctattaattttatctttaattttcttcttttttttaatacatttataaatgtttatatacaattcaaaaaattaattattttaatttttttcatttaaaagaaaatacatgttaagtatataaaatattatacatgttaacaagtcttttaaatagtttgagtatttttttctaaaaattaattattctaattttttctatttaaaaaagttacat

SEQ ID NO: 384661 - DNA, 2208 bp, Cannabis indica
taaattgattcactaaaacaagatatcaaatgctaagttggttcaaagactaacaaaatgatataatcccttaaaatgtcatcagctgactcttcaaactttataaatgaatactaaatacaaggcctacaaattcaggtaactgaaattttaaattagaaccgtttcagagataatttaaatagttaagaaccagagtttgaagatagtgtgattagaaaagagggaagtaccttgtaaatccaagtagagttggacaagtttacagtcccattgttgaatcccctaatctcaacgtgagttggtcctgcaccaacccattcatagaaagatcctgcattctacagaatcaaaaacagcaaagaggacttcaaaaggcagagcattaaacacattgttgctaaatggggtttaccaaaacataattaaataatttagtactatttatattgagcattgagcactctcaacatcttctatactttatccttcaaaatacatcatcaaaactccactttcttatttaccttcaaactttacgttaaatcatacaccagctcttaaacatcaccaaaaccacttcttcaatttttaaatatatattcgttcaaatatataacattaattaatttaggtcatttgatgtagtgtgtttttaattagtttctttaaaaatttaactcaatgaattgaggggacaggaatcgggatttagctcaacgaattgagaggacaggaacctgctcgtgacagcaaaccagtccagttataggacatcattgttttttaaaacaccagagaccacagtacccaaacggtactcctttatctgctggcttacagactcagaaattagggtcaagtacgaaaccgtctctgtgttttgctgtgatgagaatgacccaatagactacaagaacagagagctacaggtttggatattttgcttaggggaagacctgcttgagaaagcaactaccatggtggaatgctttctttttttttcccttctttttaagatgaattacttaactacttgttatatggtgaatctcaatattaaaaaatagactagttcacaagatagtacatacaaataaataaataaaaacaagacagttcatcatccatttaaattacccctttctatgtatctatatctatgttcaagttttacaaactggccttaattattatcaaaaagtaattttaatatatcagaaatctttacttttccttcaaaattgttcccatactcgtcatctttcgttttaagatgaattagtgaactacttgttatatggtgaatctcaataatagaaatagactagttaacaagatagtccatacaaataaataaaaaaaacaagacagttcgtcatccatttaaattagccctttctatatatctatatctatgttcaagttttacaaactgatcttaattattatcaaaaagtaattttaatattcagaaatctttactttttcttcaaaattattcccatagttttccctaacacccaaggcattgtataatgtaaatccaagaccatgtgaagactgtttggaacggaagagatatctagatcattcagagtacttaaaattatatatttatatataagccacattttcccgagaagcatagctattacagatgacatctgcatatcaggattctggataagtaaaacattatgactaccaagaacaatcattgccactcaactatgttgtcgctatcgataatatcatcactagtaatgaaaataatagcagtaacaaaaaaattaatagaagtacctgcaggccaactgtcatgcttagtagagcgatatcattcttccctgccttaagagaaacaggcttcttaaatttaaaaggtgaatgtgtgccattaccatatgcagtacctgaaattctaactgagttcatacaaaacttagaaaatttacagagatctgatgacatgaaatgttacacaatcctcatgtgcattaatttcaatgtaataacctatagtatgcaagtgtcaaagagcatagataacatgattgtagtaatataaagcatctacatctgagcagtttttgcagtcaaataacaacatagacatatgatgtcaattaaatttctctaaaatgtacaaaaagttttttctaaggtattctgctagttacagtagacgtcgagcttgtcaaggat

SEQ ID NO: 384662 - DNA, 1359 bp, Cannabis indica
ttggttgtgaattgtattgtataatttttttttccattttgaatacaacaatggataatgataccataacaaatagacaagccttttttttcttttattgcaggcaaaaactgcaaacaatgtactatcacttgatatttttttgctattatagaaattctagacttgaaaaagaaagtaaaaaacaaaactaagaaacacaagtattcatagttgtcttttacagtttatctttaacaaccaacaaaagggaaaaagaaaagcaaacagcatctacaaagccttcgatttattgatcacattgcactcccaactcccaactcccaaacccatttgacaatgaaagagactaaaggaaacaaagaaaaaaaaagttgaaaatgcataactcagcagcagcagcacttctgatcttgattattctaccaaatatccagctgaaagtaacttattgatgctttcttggtccttctctgagctctctcctccaactttcttatcctctggggcaattacacacataaccttctgctttgtggccctcacttgaaagaccactcaacttctcaatcttctatcttccaactagaaactccaggacatcaacataatcctttccttgatagtgtaaacttcaagcttttgagtaatcatgtgttacgtatactgttgaaaaccaggttctctagtaagaggaacacaaagctaagccacagaagcctgcgatcatcgctactatacaaccataaagataacttatagcaaatccaccactaccataagccataccataagaaaagtaaatgttatgtacgcaactctcagaagaactacccacataacaaaactccctatgatcgttttcgataaaatcctaaccaaattttaacaacaaaaactgtatcatcatcacccataacaaaccacctcacatcctttatacccatttcattacaacatttcattccgaagaacgtaaataatttaattcaatcacataattagcaggcatcccagaaaagaaacttactcaaatcatggaataaaaatttgttggcaatgtattaccccaaatcaatttatgaaagtttctaataatttcaagcacccaaatcagatcagacctaaaaaaaacgtgtcaaagtaacttatggtacctgggaacgcacagatgattgtgactgtcgttgaactcaacggcaaaactccaaactcggtcaccgataatgaaggccagccacgatcaggtgtggtagacctcagaaacaacaccccaaatctaagaatgaaggaaagataaaacaaatatgagagagagagaggtgtatttactatttatatatatatatacagagagag

SEQ ID NO: 384663 - DNA, 1025 bp, Cannabis indica
aaaaagaagaagaagagaaatcgccatgaaacctaacaagctttgctgtctttgcgatcaagaagcttttctctactgcgcagccgatcgagcttttcgtttgccggaattgcgacgcagacgttcacactgctaattttctcgtcgctcgtcatattcgacaacctttgtgctccgtttgtgaagagtttgctggaaatttagtatccggtgacgatctacgtcatctctgttctcaatattgtcggagttgttctccgcgaaatatctcctccgttgacgatgacgacgacgatgatgattcatctgttttgtcttcggtttcgtctgtttgtgtttctagtaatgaatcgaagcttagatttgaagatcggcctaagtacgattgagaggatctcttcttcgagctccgttacggatctctccggttccgtcgccgaagtcaagaaggaatcgattatacggcgacgtaagggtttgattagtgtggatacgaagacggagggcattttcgagaaatggtgcagagagattggactaaacggtaatttagccgtggtggtaaggttagcatcggaagcgctagggttttgtgtagcgaggtcgcgacttttaccgttcagagtatctttagcggcgtcgttttggtacggattgagatctatcgataagtcatcgtctgcagaggcggcgcgtacgttacaccgcctcagacggttacagcagttatcaggcgttccaatcaaattgatcgtggccgttgaattgcagcttgatcgcgaattaaaagctcagaagaatcgccgccgtgatgatctgaaggaaggttgggccgagtgctccggctaaacgtacgatctccggtccgtccaaaatctatacacttcttctgtttatatatataatatattattatataatccatggagtttagaattagattagggtttaaccggaattaggttatattaattagtgtaatctcaattatatattattattaattattaattttaattttaatt

SEQ ID NO: 384664 - DNA, 3671 bp, Cannabis indica
acaatggacaggtagtcgtttgatagtagcaatcatgtcaccagtttgttgcccaaacatttccttcaggagctcgatattccattcgttgccattagttgataagtccgccacagttcgcaataagggaaatcgactcctagccccttggagaagactcctaaagtctgcatagctcaaccacgggatccaaggttgtgtccacaagtcaatcgaatccccttttcctggtaaggcaagggaagccgatcttaggattgctctcgattggagaattgctttccacaaggtggaatcgctaccgcggggctctgtactccagaaggaagttttgttacaatattttgcctgtaaacaatgaacccataacttgttgctattacttgcaacattccaagcaagcttagctataagagcccggttggtgtcttcaagtcttctaaaccccaagccacccaagcgctttggtttgcaaattttgtcccagcataaagtagcgttgaatctctccttcgacatattccccgtccaccaatattttcgaatcactgcatcaagttctctgcaggtggatagtggaaccttgcaagtagtcatagtgtatataggcaaacttaaagccaccgattggataagggtggcacaccccgcaaatgataagagcttgagtttccacccttccaagcgcttcatgagactctccttcaacctcttgtactcatctcttttacgccttttaaaaacgaacggatttcccaaatgcatttcatctccagtgcattcctggacttggaaggcttccatcaaagaacttctcctaagcccgtccaagtttggcgaaaaaagaagactagatttgggtttgctacacttttgcccagaccaagtttcataagtatccagacaatccataatagccttggcattgccgacattagctctagcgaacaaaattgtatcatcggcgaacatcaagtgactgatggccggggcagagcgcgagattttaattccctgaattcgaccttccatttgcgctttggccagcagtttcgccaatacttcgtggcaaagaaggaacaggaagggggataggggatccccttgtctgagccctctcttaggaaacaccttcttatgagggaacccgttaatcaaaattgagtaagttaccgatctcacacaattcaaaactaggttgcaaaagtgatcatcaaaaccattcgccttgagaactctatggaggaaactccattccaccctatcgaaagccttatgcatatcaagtttcaaagccatgaggcctcctttccccctcttcctccgaatggtctgtaccagttcttgagtgaggaccgaggattccgcaatccaccttcccggaacaaaggcagattgcactggcgaaattagcttatccataactgttctcaatctagaagcaatgatcttggagataattttgtacccaaagttacacaaactaataggcctaaacttctccacagactccggtttcactactttaggaatcaaacaaatatgagtgaaatttaaggcttcttcaatctctcctgaagagaaaaaacgttgtaccatctcaaccaccgagtcccctacaattcgccaatgcttctgagaacacccgggatccatcgggtcccggcgattttaaaggatgaagattagccactgcgttctctatttcattcctagaaggaactttgccaagttccaagttgtcattcatggtaatggcaggagctaatagttcttcaagcttgtcatcaataatcgggttactagaggagtacaactccgtgaagaagcgatgaaacaccatagccacttccccctcttcgcaaacccacttcccatccttgtctcgaatttcttgaatcttgttcctcctttggcgaatcacagtagacgcgtggaagaattttgagtttcggtcgcccagattcaaccaattctccttagatctttgcttccacatgctttctttcctataccataattccctaatgcgtctccgaagctcatcctcttcaactacaaggctcggtgagatcccttggttttgaatccatgccagtcgagcctcaatagaatttatttctcgatcgcagttgccgaaagtctttgtcttccatgattgcaaagctctccgagtactgttgatacgaagggtgacgcttcccattagccccgaaccagagccccacacatccttaataacttccgcacaggaaggttctctactccacgcatcaaagtatcgaaacggtttgaatctttttctgccgccattcccggtatcaaccaggatatacccatgatccgataccgatatttgatggtttgtaacctccgcttcttgaaactccatgagccaatcatgagaagccacagctctatctaatctctctctcgttagccctccatgaaaccggttattttgccacgtaaaactgcaacctttgaagccaagatccactcccccccacataattgaggaaatttcgcaggtgccttgtatccctctccttaatctttgtacctcctctcttctccaaaggatcagcaagggtgtttagatctccaaagagaagccacggcaaactaaacttccctacttccgtggtaatgaaatcccaaaaggccaccctttcattttcatacggagtaccgtaaacagccaggagaatccaatttaacatcttcctaggatcccaaacagtagccacatacacacctctatccgccacattaacagaaattttaatttcatcattccaaagtaaagcaaaacctcccgcattgccaaccgcagggataatgctacaattaacaaaccccaaagacttcactaatctctccatgtcttccttcttacactttgtttccatgaggaagacacactcaggtttatgcctgcgaacccaagcaaaaagagcttgggatgccggggccctgagaataccccgacaattccaggaaaggaacttcattgaggagggggggggtgataagggccgcctcctcacccattttgaagttttgaatttcgtcgatagcaatttccaccaattgagattcttctcccgaatgcattccatcctttaaatcagtttcagagcataaatcaagtttaattgcgttacctgaaatgagatgctctcttccttttgctctttttcttcccaagcttccacacttccgtttgctttgtttttgtcttgaagtagatccacttccttcacaatatttgctcccagccgagtaggtagcaacctccaaagaaggtagcacagtaatggatggttcaggggaagagcttttaacaattggtattacccattctgaagccttcctctttttttgcccagagatagtaggcccattagaagcaagaatgatttcattacatgctatgacttgttgggccgacttcttactaacttgaatagggtccaccacttcattaaccacatcaactaaacctttattattgggccagtccaccaaagtgggctcaggaaagtgttgctatatttttaaacactacgcaagtatacgcaatcaagtagtaaatctcacacaggtgaggtcgatcccacagggaattggattaagtaccactaaattatacttatgattctattcgg

SEQ ID NO: 384665 - DNA, 502 bp, Cannabis indica
ttttgtttttttgaaaatataatatttttttgtatatattacatgtaatgaatgaaaatggtgggaagatgggtctacagtttcccagcttgagaataaaacttttatgggtccactctccactttttgttacccacacaaacaaaaatggcagtgcataatgcatgattttttaaatttatttcaagtgttattatttatttatttatttttgttgaaaattagggtttttagttttgcatgcatatattttcagattttacatttttttttgaacataaagattttactgtttattaacaagttcttatttcattaagaacttggattaaggccaactccaaccgtatgtcaaaatgtcaaatatttggtggcaccactaaatgtaatttaactgaactgtaaatactaatctaaatataagtatatcgttccactcacgggcggacccacgccccctgaaaaaaaaaatcgagaaaaaaatgtatatgtattttaatta

SEQ ID NO: 384666 - DNA, 1263 bp, Cannabis indica
aaataggattaaatagtataaggtcatttccgtaaataaaaataaaataacgtattctggtgtaaatttttcatattctaaatgactataataaacatcatagtataaaaaagtattagaaatatttctttctgagtccaaacgaagaaaagatgcgtcaatacattacaccattaacaaagaaaataatacatttagcaattgtattatttttgtttagttatcttttactaacaccaaccattgagatatggagttgaagatgaccaactcttcatctcacaatttccacaaaacatctattagtggttttttaatagatattttgtatatttattacataaattttcagcaatgaaaagcaatattttgatatgtatcacatgaattcatttcaactgtataagttttttatatttaattataatattattatcatgtagttaagttgtttttctgattcaacattagaacaaacatataataatgaaaaacaaagccctttttagtttttttattctttctttcttcactttgtggaagattagtggtgtgtggttataactttattgtttaaactaaatatcctactttacaaaatcttaatactcttttagctttgaaaagttgttgtgtagtaagttattaatgttttatgcctgaattggtatttttgttggtccatttctttttatgtttagaacaacaacaaagaggtagtgaaagatgtccttagagcaacttgaagggtgctttttatttttttagctaattcttagctaaaatagctatttggagagttacttttttcaacatcatccaactatactatatatatttagttaccaattagtacaataattttttggttatttggagagtagtttttttttttaacaatttaaaattgataataatattaaaaaaaatcattattcaaattatttaatttttattttagttttattattattattattattacaatccacccatttaaaatgattaatgtttgtgggcccgagagatttgcaatccttagctaacttcatcatcatttgacatttggtgctcttcctccttaccaaataaaaatagtaattagagttttaatctactctactaaacaaagggttaaaatgttgagaagttctatttgcacttcttaaaataattacactttattattaaaaaaagttaaataaattttaaaaattattcttaatattttttttttaatttttccttacattattttatgtt

SEQ ID NO: 384667 - DNA, 875 bp, Cannabis indica
aaaggaaaatcatattagtggaaactctgaataacatccttgagagaatgcctcaaagtttaccatatttaccatcctaatagaggatatataaataatattcacaactttaaagaatcaagaagtttttggtggtgcaatcctgaggtaaaccctagatatctttgtttatatttttaaaggtatttcttaaggttcaagcatgcaaaatctaattttaggttctgttcgaactagggtttgttgagggatgttttctgcagctattttgagttgtgtagtgcttatttgagttgattttagtaagtagttcagttgttgagaaagtttgagttcaagaactcaaacttggctcaataatggcgaaattcatttatatgcatccttgctactgtttttgcttttaaactattattaggtgttattacaaggtgttttagaaagtttgattgagttttggaatgttttgagtgagatatgaggtttttagggttttccatagggaaccagttaaccggttctactaaagctgtagaactggttaaccgatttatcaggcaggaccctaggaactagttttttgtttgaggaattcagtttaccagtttgggaagtttttagagctttagttttgatgtttccttgatatttagggtattgccatgctatttatcaatagagaatcttttggtttggagtttaggtccctgagaattttagcaagttgtttacccattaatgtgattgtgatatagggtctccactcagcgcgtgattttatatttaggtcaactgccacacttaattttgtaaatgaggttgctaattgtgtgattcatatactaccaacactagtacggtagtggtattgagtg

SEQ ID NO: 384668 - DNA, 2592 bp, Cannabis indica
gataaatacataaaatttactgacttcgggcccacggactgaagcccaacctgtggggcagttatgctccgtacgacaggagaccacttgaagttgacaagtgtcgtgtgtgcgacgcctttctgtattgtagtgtcagaacaatggtagtaggataaaaggaatgttctttttggtggtacacacactctcaggctctgacataggaggcaaccccctaattcagtgggattcagtgtcagatgatcgccacgtcagcttcatcctagctttcggggcatctcttggagaacccttccggatgtatcctagaagctcatctagagggtcttgactacttcatttagtagggcgaggcgtccttccggattcggagacatctgattccgagtgcaaattttttatatctcgaatgattgtgaggcccatctctccgtataatctttgtccattatctcgttgggctttcgagcgggccttaatcaattaattttgtattggaaatgccacatgtcttctttccaaaaatacgaataacactaagaatataaaatttatttttaatatcttgatatgcatgtagaaagtaattttttttatttcttttctaactactaaaagtcaatgcatatttgatatcataactaaaaaaatatttttttttcagagcaagagtgtttggtcataagaaaataattagattgaattcatcatatttggttgtaaagggtttgaggagtaatttgttgaagaaatattcaagtagctaatttacaaaagaaaaaaaaaaaagactagtagtcttggtaattggtacttcggccggtgctcttttctcaaactagaacaactcatcttttccttgttataaatacaaggatgtcattattaatacattatagactgatttaagatgaaaaaaattacatttataaactaaattttgtttaaattaaattttagttaatttaatattttgtaaattatttaattaattatattgaattttatttgagtaattttatgttaatgaattatggtatttttgcaaatagttcattattgtggtatattggaataaatcaattggacatactcatatattaacaagttagacctatccaattattttcatatcatacatcattacaagtgacctttttgcaccagttacccatatttttgaattgttttgaatttttctcaacaaataatatttttcttgtgaaaaaaggcatatttgtgtaaacttttccataaaaatgataaaatctatttccgatgggtttagatgcattataaatggcattttttttggtttgttacaagggaatttcataaatataggaattggaggtcaaacgaaaacttctctagcgatcttctctcccaaaattttctttgattttttctctcagaatcacgatattctccagcgatttaatactgtaattcgatttcaaaaactagaaaattcatcttttcacataccaacgattgacgacagactagaaacaaaaatcatcattgccgattgtcttctccagttccggtgagtttgtcaattacttctgatcgtcttcgtcagcaacgtgaacttgaaaatcaatgcatatataattgcttagccaaaaaaaatagaataaaaaagaattatacataacaaatttcgaaaacgactctcaaaatcatcaaatcaggtatatacactcaaaaatcaaagttacatatatgataattatttatgaacataggacatttgaatatatatatatactaggtaatgtagccgcccattgtgcggcgagtttggaatatttgttttttttttgtttttttttttttttttttaatttttagatatttataaataagtgaaatattgtaaatacgaataacaaaatatatatataacaaaatataataactctcaatataagaatatgaattcgtactatctaccaatatctaataatcatctcataaaattatacagagagattaaaagttattaggcactctaattttaccatatatatattgatttttcttttattataaaattttaataataactccctatgaaatagattggtcttttataattataaatatagacttttttctagagcaaaaatataaagaaattaataccgaatgcttaaataaaaatatttatgtgtatatagagatttttttaaaaaaaattcttatcagtttccttgaaaaaaaaaaggttacatatgtaatttgtaaaaagaaatagaaaaatgatataaatttaataaaaataaaaaaaataagaaaattaaggaaatataacaaaaaaaaatattgtatcaactataatgatataatattgtgttatcactaacacgtaaatcaatcaaatttagagttacgtattaaaatttattgattggaatgttaactattttattctagtcttattactgtagttgtagccaaaaataaaattttatagttacgttgtccatactcactcacatgttgttgcagcaatctttaaattttgtacacaaaatccttactcaataagttcttaaacttataaactaaaattttcctttt

SEQ ID NO: 384669 - DNA, 863 bp, Cannabis indica
tattattattattattagggattcgtttggtaagtcgtataagatcgtagcaaataataagtagcactatgtttggaattttttttatattgtattaattattatgactataaattttaatacaatgcaacttgtattatttaatatataacaaatgattcatattagcttgtattataatatttagaaaaggttcgggtttaaggatgggggcctaaacctgaaccccagacctgacctagatcttgacctcagactaggaactagccttggaccagaccgcagactcgtaccaggaccctgccccagacccctgccctagacctaaccctagattcagtaactagacccaaacctcggacttgaacctagaccctggacctcggactcgaaaccttgactaggatcttgaccctaactccggaccacagacccagaccctgaccccgaaccctaatcgggaccccaaacccggattcggaccctgactccaaattcagaccaagactcgggctcaaatcaagactcggacctcagaccttagactcggaccctggacccagtccaggacttggacccaaaatcagaccttgtgacctcggacctagcctcgacttagactcaagcccggggctggtattagtcttgtattatttaatacaacactaatacaaataatcttgtattaaataatagggataattacatataacacaaatttttgtaaaatttttacatttttacgttcattttttttctttacattttaacaatattctataaaaacacaaaataatatcaaaataataacaacacaatataaaaaataatatacaaataacaaaaaattaaataataaaata

SEQ ID NO: 384670 - DNA, 1569 bp, Cannabis indica
gtcacaggtgcatgacataaagcttaattggtgaatggttgagcaaattcatgaggttgaagagggagggtaggcttgcgggtccatgaatgcaagcaaggattcgcaatttgagtctttttctctttggttacctttaaatttggactgctttgggtacgtgtgctgatgtctggtggagacttggacttgtatatggccatgattgttggtgtcgtcatgaatgtggtaacaagggccatcatcactaaaatggcgaacatctcgtcagttaggacctgtagaaaaaagagagaggagagaaaaaaagggaaaaactaattattccactagttattacagattttacgactattctagagttttatatatttattatgtatgtatatttggttatacatatttttggaggattccatctgtaaataaaatttgttaaaatatcaagagcacaacaataccctgatataattggcaccttagagcaccaagttctaaacttgtagtcccgtaatttaatctattgacgaattttggatgttgataccatattgttctaataacttatgatgtctaacagtaattcaaattttttatattactagggcaacaacccaattaataatacttaaaaaataaatgaaaactgtagtacttcactaaataatgtttgtacacccgtcaatatattttgacatttaaaaaaattagtttaaatatatataaatatatatatatatatattttttgcataaccctgtaactttttagaattatttttaaattttttaaaaaaatttgaataatttactgtatccaaattaaaattcaaataattacttactatcaaattaatcacttatatttatatttatagtgattttttttattagaatacttcatatttatagttatacaaataataaggagaaataaggagatggtacaatgtttctattagatatgaatagtacctaggatcatgtgactgcttataaatagttagttaaataaaaatatctcacatctcaatatataatactagattttaattattttttaaggattctcatgataaaatattggtcctcaatattctttaccagccgtgtactacttttagtgtaattaatattataaaatattcttaactatacttgccactctctagtacatttgtagcacatatttgatatttgcatttcacttgtaaatatactctagctactgagtaaatatattttggaaagcgtcattacaatattagtggtgtttaagcacgtttcctacacattaatattggtattcatttaattaaatataaaattttatataatttaataaaaagtattactattaagacaataaacataaaaaaaatattggaaaattctacaatgcaccccttaaaataggtatattgatgtacgttatagttatttaagacatcctgcaaaattttatgaaattcagaaaagtttaacatgccgaaaactacgttcaaacagcgtgttgcacgcgtgactattttattttatacgtgtaaaatagactgtttgaacattgttt

SEQ ID NO: 384671 - DNA, 1451 bp, Cannabis indica
attttttgcacatcatatccctttagaaatttgccactccacatgattagagactttactaaagtcaagactaagtgccataaaaccttctttaccatggctctttctcttttagataatgtatcacctcataagaaatcataatattatcagtaatcaaccttccaagaacaaaagcacttttgtttgttgatatcagttgtggcaagacttctgtaagacgattggcaagcactttagagataatcttgtataacacattacagagagagattggcctaagaacagtcattcaagatggattcctgaatttcgggataagaaccatgttagtatcatttagaccttgtggaagatctcttgttctcatgaagctccttacaagattgatcatgtccgatcttacaatgttccaacaacgctggtcataccatcagggcctggagacttatcaggatgcatttggaaaagggctttacggacctcttcatttgataccggagcaagtagagaatcattttgagcctcagtaaccgtggtgagaatattagcagtgacaagggtagtatgtgtattcgaagtacaaaaaagatcactataataattgacaataacatcagataaactattgttccagtcaatccaattaccgtgagtatctctgagcttggacacagagttgtgcttttttctcgatgtggcataggtatgaatatatttactgttatgatccccttctctaagccacagttgcttcaaccgttgcctccagaacacctctctttgaggatagacttcaaataactgtttttcagcttctttaaatctttcaattgaatcagcatccctcccttttctccatttttgaacttcatctttgagattacaaattctatctttgaaattcccagtgtagtctttaccccaatcggctaaagttgtactgcaatgagatattttatttgtgatactgcttccatgacagaaatcccaggcatctctcacgatttgagtgcagagaggttctcttaaccatgcattctcgaatctgaagttcttcctagctgtgataaaatcatcattacaaggaacaagaaaaagagggcagtgatcggagctagaccattcaagattaaaaagctttgctgaagtaaataaatccatccatctttgattagcaagggctctgtctagaagaacttctatctaattattggtgcctctacctttctcccatgtatacggataaccagtgagttcaaaatcatagaggtggcagtcagaaagtgcacgattaaagcctgtaatgagccattcgggataggcattaccacctttcttatcatcttgccttgtcacattgttcaagtcaccaatgacacaccatggtagtgttggaaatatattttaccaagatctagatttactaccaagtatgtttcattaacatc

SEQ ID NO: 384672 - DNA, 1684 bp, Cannabis indica
ttataaaatttatataaaattatgtattatacaaagcttttcatataagcctgttaaattcagcaactgctgcatgagctgcttcaatagatagcaaatgaaccccaaatcgctttgttattaggaatgtaatcaacttgaaaactttaatatttaaaataaatatcaattagcacacataaatataatgattaattatatgagataggaattaactaatacatacattagtgagtttgagttagttaataacaattaatcattcatctctatcaaaggtatcatcaagtttgggtaaatttgatggtgggagtgtttttttatcccaataagaaaattcatattctcaataaaatcatatttattattattcatatctgccatctgtcaatggaatcacaaataaataaagttagagattaaaagataaaaaatatattattaaaaaaaataatttatagaagaattcaactaatggttgaataggttttgaatcaacgaattaaaacccattgtagccctactatgagggtttggagcataaaatgtgtgagtaatgcgtgagtttgcttttttgcttttgctatcaagaaagagaggataaaacgaagcattaggttgagggaatgtgggacaacctgacgtcacaaaaacacactttttacaaatatacccaaaaaaacttcaaaaacggatttgagaaaagtttatagaagaaaaacttatcaaaaacatcaataaaactaaaaatccgacattaataggaagagttgaggagtctaagaactaatggttgaatgagttattaatcgccagattaaaacccattatagctctaccgagagggtttggagcataaaatgtgagtgagtaatatgtgagttttgcttttgattttgctataaaaaaaagaggataattggacgaataaagcattaggctgagggaatagggtacaacctgaagtcacaaaacacacttttatatatatataaataaatatactttcaaaaatcgatttgagaaaagtttatagaggaattactaatcaaaacgtaaataaaacagttaaaacgacactaataggatgaatgacaatgtgactaaaagcgatataattttttttacgtggcaatcagataagatatttttagatttttagttaattaggaaatatacccacgcttcgtacgatttttgtaataatgaaaatataattttaaattttatgttttgtaaatataatgtatattcctttttttaattatgatattatatgttattttatataatataaaatttaagtgaaatattttataataatttagaaaatattttataatattatagtattatatgattatatttttatatattattttaaaatattttataataatttttaagctctaaatttttataataatataagaatatatgatacaaatcaaaatatatagttagatataaaattataatttctctaaatgttaaacatagagacgatatccaataagggaaaaaagtggtccctactataaaattcttttatattttttatttttaagacgattaaaactttgttcttctaattattatatgttgcaattgaattaaaaatttgtaccgttttaaaaatgaaaaatattataatttttattaacgttatataattaaaaaatat

SEQ ID NO: 384673 - DNA, 1225 bp, Cannabis indica
aggtataacactagatctaatatagaagaatactatttgatgacaatggtaatagattaagagaaattaagacgatgtaaatattcgaaaggcaaaatcagataataataatattttgtgataaagttgtgctatatccatattatttaaaaattaaattaataaaaaaatctaagaaataactttgttattacaatgtgaatcatatatctgggttacctggtagccaaaattagtggcaagctcaatgatgctcttacgtgtaacaccaggcagaatcgttccatctatgattgctggggttgaaactacattatcctaaaacatatgaataaaagagttcagatttggtaaatcttgctcaattaaacatgttttaatatttagatataaagaaattttcataaaacttttaatatttagatataaagaaattttcataaaatttttatcacaatacctttcaaaatctcaagttcttaaatcgtgtttaattcgtttagaatcaagattccttgttaaaaaaataatgttatactgtgtttaattaatttaatttatattaaatattaaaagttttttattataaataaaaaattaattgatgtgtcgaagttaaattaatttaacacaataaagtatgctactttttgacagggatcttaattctcgtgttcaatatttagatagtattttgatttattttttgggttatataattggtatagaaatgttaattttatgtggagaagttagctggagaaggaagctaagagaaaatcaccgaaggcacaaagcaacattggagaaaagtaaattttaaaggcataaaaaaataaaatgggactatttgtctacccatgtataccataatgattacattatttactatcaaattctataaaatgcaactgagcacatgatgcttttgtgcactccattactaagagcatctttaacgtgaataacatgaagttatttgtgacatcttttagagtgaaaaagaatgactaacaatgacatcttttagaacattgatattgtttaagggtgtcaaaaattttcacatgatcacttaaaaaatattaatattttattttatttttcttgcacattattttcgacttttattgttctaattaactaggttactattaagtgtatagcacgtatatttagtaatatttttaaattttaatttttattatgtgtatttttaaaattt

SEQ ID NO: 384674 - DNA, 2023 bp, Cannabis indica
aataaaataataaaaataataatcaaagaggtagcggtatattcttctttctctaatctctctattttgtggcaattttaatttttaatcgtagattatgaataatgttaattaattaatctatttaaaaactaattaattaaaaaattgtatagtaataattgattttaatataattacatattgaaagttcaaataaaaaaattgtgtatattattagtgactattaatttctttttaaaaaatagtatcaatttctaagaaaaaaaatacacctcaacaacctttctcaaaagacattttaataaattaattgctaattattaaaaaaaaatctatatatttaagactaacaatgataagatgaatcatatttttttgcaatgtattttaattattttttgtagaacttctaggtttttttttttttttttttttttttttttttatgatctaactttgtaaaattttcacatttaaaaatattatagttttttatatgtaaattgtaaataaagtttttatttgtttaataattaattattattttttttttttacaaatttaacattcgttaaaaacgtaaacttttttattaatgtatatagtttagaattttttaagaccatgcaacgcccgatttttatttcctagttgattagcaataccgaagaagttcttcattagtatacatgaaaatcaactataaatatataacatatttagaatcaaagatgccatcaatttgtaaaaatataatcttaaactagtgttatcatgataataacacaataattagcctacttgttcttaatttgactgcattcacacacagcatgcgcatttgcataatcaacaggacaatttcttttagaagtagacaataacatttttacaatgagattgaatacagaggagttgtacaatcgaaaaaaacactttaggaatctgaagatgctatatggacacaaattgcattagatgcaatagaattaattgtagcagcaatcttggccgatcagaattcattcttttattaagagcggtacgacctcaagattcaccgatgctcctcctctcatcattaaaatcgaaagaatagcgagatccaaacaatcgaacgatcagtaccaagaaaacttggttcaagattctctccaaaatcgctagagatgcctcaaatgtgatttggttcgagtcgccacaaactttctacttccatctctggaacgcatgggaggtgctggagactgacgaagggagatgaccgacaacatgtttaggccctagtagttatggaggtgatggcttgaggaagaagacgaggggtagagagacgagaaaaacacgagtctattttttttgaaaaaaataattataaatttaagaaaacgttaaaatgtagtatttaaaataaagttctacaagaatatagtataaaaaagtccataaaaatatatataaaaataaaatcaaaatccacaacccaaatgcattaaaaatataaaaaattacattgtctatctattttactttatttgttttaatttttaccttcatcttcatattctttaagataaactcacttttgtagatgatattctcattagacccattaggttaatgtaaattatttaattatatgctacacttaaatagcgagtgagggtatattatgcaaatactcataaaagtaggtatattttaataaaacataatatgaaaatatttttgattaatggatacaaaaaaacaaaaacaagagacattctccactttatccctaaaaaatatgccatatagaataaacacttatcattttggtgtaaattctacttgttaatgggcgggttgccttaccctactcaatcacccatttaatgcagggcaaagctgcccgacccgtttagtgccagtgtaaaccttcccaatgttcaagccactaaggctagcttagtggtgagggagggatgggaaaaagggagagatcatgaattcgaacctaggaccttgaagctattaa

SEQ ID NO: 384675 - DNA, 3401 bp, Cannabis indica
tatagccatggaataatattagcacttatcaacaataattgaacataaccttaaatgtataaacaataaagatatcaatatcaatcttaattatatgtatcttatacatagacaaaaaaaaattaataagtcattacacaacaaaaattgtgcctacgagttatattttcagtggcaacaaaaaactaattttaatttgtcactaaaagatacatagtaatttgatacatattcactacactaatttagttttaggctttttttttttaagaaaatgtgtcaaccatattaaaacactaagaaataagtcctttaaaaaaatgagagtgataatttattcaaaaataggatctgttatcaacagatcctgaatgcaattaggactccctagccagtaaactaaactactacttgtcgtcaaagcaagtttggtaagagcaacaccattacaagacttattataatgaacaatattaagagcatctccaatagagtgccaaaaaaatggtgtattattatattttagcacacttaaagaaaaattactactctaatggtattctaaattgtgttaaattggacccaaaaaaaaaattgtattaaattggcacaagatataacattgtgataaatttagctcacaataaatattacttttttatttactataataccactaattattattcataaacttttactacacttcacattcttaatttatttatcgtattaccattatttaaataataaaaaaataaaaaaaataatttttatatattctcaataaaatattaaatgatcatcaatataatcaattatttttttttttattttacatcttgtgcattggagtacaattataaacaatgtgtcaaatataacacaaactaattttttcagcacaaatttcaaatattccattggagatggtctaacaattttgagcttattacaatgaccaagaatatcatctaacactagacctaaaaaagtaataaaagaaatattatttttaattttcagcacaatactcaaacaattaaattcaataatgatttgtcatacccaaaagagagatgttggaacaaagtttttccaatagctaacgtttcagctacctcgagaatgaaacaaccatccaaacgctaactcatcgaagcataggcaacacccgaatcatctctaataatcatacacaaaccactacaattacttgtagagcttagagttgtgtcagtgttgactttgagactaccaagaggagttatccatttggaagctgcctaagaatttgaaatgtacgtgccccaacggaggtcaacaagaagagccagtcaccgctagtgtgggaggataggtaatagtcttcagaccctgcctattgtgaaacgtccccaaaaaatcacgagtccaataaatagtaagagcacgagacaaaataactttattatgaactatttcattacgcttgaaccaaaccctccacatgatcaccataactaattcaatcatctcattgagagtagattaataaattgatgaataaaatcaagaaaatctacacaatgaacaagagaatctccttcacagattttcctacactaaagcagagaactacaacttcaaagagcatgatgagtagtttcattttccaacccacacaaaggacacaacccatcatataagagaccatgacaagataaattgatcttagtaggaatccaattatcggacacttaccaagcaaaaagtctaacctttggagggagattaagagaccaaatcttttttcacaaactcgacaaaccccagatggagaaactcgaagcactaccaagttgcaaagagctagtcaataaccactcttaactgaaaactatatcatgacttctcaaagttccaaataatcttatttggcacatcgataaaagatcatagaatagaaaggatagcctcagcttcactagccaaaaagctggaacaaatcaagtctttaacaaagagaccttgcttgactcatcaagtcaatggggggacgtcaaaatagacggtgacattaaaataattcaattatctgtgtaaatggcaatgttgtttccatccacaacacgtcagatcacccccgaattaaaaagctcactgccccataaaatattcttccacacaaaagagcctcgcttagacttcttaatttttgcaaaaggcctgtttcggaagtacaaaccttttaatacgcgaccaaccaaagagtcaggaacattgtaaatacgaaaagcttctttagcaagaagaacttgattaaacaactgcagatcccgaaaactcatcccaccatcctccttatgcaggcaaaatttgtcccaagtacaccaatacatcttctttttatcattattatctccccactaaaaatgagtacacatacgacgaacgttttttataaaagtttttggaatcttaaagaggttcataatatatgtaggaatagattgaataactgttttgataagaaactcacgacttgccatggagaacaattttgatttctaccaattgagtttttccaaattctattctgaatgcgttaaacaaacccatcttgcttttttccgcaaaacaaggaagacctaggtaactctcgtgacaatcaaccctcttaacttccaatatgtccaccaatttaactttctcagtactcaaaatgtttggactaaggcaaactacaaacatatcgaatttataatattatttcagctctcatataactaaaaattaatattagttcattcatatctacttccgaattccaattattccaaaacataattttattcattatcaaaaagtttacaataagatggtaaacaagagaaagatattatatataattatatattaatatatttaataggcacacatgtatatttattttcgtttgtacaatacataaataaacacaatatataattaatatatatttgagaaataaattattacatgcatggatcatcatctaaaaattaaaattcattgtactatattttagctgtcataaatatcattgtctctcccatttatatattgatatatataatatttatataaaatatataacaataattaagttaataataaataggcacctcatgtttagttgtagaccacaaatcagagcatgcttcttttatgggtaagaagaagaaaattattgcattaaattcattttgctgaaaaagccaaatacctctttttgccatttcaattaataattactcactttatcaacaacaaatatatatatatatatatatatatatatattataaaaaactaatacaacatatataattgaacgaaaagagaaaataaaaatatatgtatataaatatataagcgta

SEQ ID NO: 384676 - DNA, 1811 bp, Cannabis indica
tcctcatcaaattctgttatgcatatcctctcatccaattatgtaatggtgattttctcattttcaacaggccccctcaagcttggttgtggagagtgagaaacagcaagcttgtttttaagataatgaaactgtgagatgctgagaggttttgtgagtatgtttgcgatttgctcttgtgttggcacataccttacttcgacttctttgctcagcattttttctctaatgaaatctatttcaatatgttttgttctagaatggaatacataattggatgcaagttgtcgtgcaccagtattatcgcaccagagaacagctggttcaaagccttttatgctaatttcagtgagtaacgattgtaaccagaccacatcattacaagcttgggctaagactctatactctactttggtacttgaatgagctacaaccttttgctttcgagagctccaactgactagattattgctaaagtaaatgcaaaaccctatagtggattttctatcgtcccatgagcttgccgaatctgaatcacaatagccttcaatggctagtttgggagctctattgaatgtaattccctctctaattaagccagcaaggtatcttaagattttcttgcaagaacttcaatgtttttgagtagcagcttgtaaaaaatgacttattttattgacagaataagcgatgttaggccagctgagagtgagatattggagagctcctataacactccaaaagatggttggatgcttaaattcagcgctatcttgtaatcttagtttgttgttttggttcattggagtaggacatggtttaacattgatcatattggttttcttgagaaggtcaatggtgtatttggtttgagataagtgcagtttatcatgcccctactaatctcaaaacttagaaagtaatggacggaaccaagagacttaagggcaaaaaggctttgaagtttggcaataatggcagtgacttgagatgcattgtttctagttaagagtatataatttacgtatatcaagacaaaaaggaaggcgtcaccattgtggtagaagaatagagaactgtcagttcaggagttgcaaaaactaaaggcaagaagggagccttttaaattatcgaaccaagcacgagaggcctacttgaggccataaagttattagctaagtttgtaaacagccgtgggattagtagggtcagcgaaccctacaagttattcttactcatgaagactaccataaaggaatacagtatttatgtcaatttattgaatgtcccaattgttagtgatagcaagtgagaggataacacaaatggtgaaggacttaacaacaagactgaatgtttcaaggaaatcgattcccatttgttgaaatcctttagccacaagacaagctttgaagcgactgatggacccaacaacattgtatttgatatgatacacccatttatttgaaatgatatgcatgtgaggttggcgtcgaacaagaatccatgtgttactctttttaagggcagtgttttcatcatccatggcagcaaaccattgaggagaacgaagtgcttgatcaaggaaattgggtatattgtcaacgggtagggaagatgcattggtgagaagagtttgggtttgtaaataccagctttggactgggtgatcatggggtgtcgagaggagttggagggtgtaagaatgggtgaagaagacagagaaggtgagctatgctgggaaattagtgaggtagaaataggtaggacaatttcaagtgggagagtggagtatgagtagggtttttcga

SEQ ID NO: 384677 - DNA, 1733 bp, Cannabis indica
gacggagagtccctatctttgtgggcagtttgaactgtttcgaagtcgtaggaatgctaaaggcgagttggaaggcttgtgtgaacaacacaagcgttggtgtgttcttgtacacttgaccgactagccttgttgaaggttgcccggtgcttggaagctgtcactcctggtcggccagctataggtccggccaggaccttgctggcatggttgtacatctctctttgcttgtggcattgatattaggacaaacttgcttgtgtccatcgtgtaaccatgggatcttgcaggttggaaggctctacgacactaacctgctagattcgaaggttgcacgatactaacctggcaggttggaaggctgcgcggtactaacctagaaggttggaaggctgcgcggtactaacctagaaggttggaaagctacacgacactaacctggcaagttggaaggctgcagtacactaacctggcaggttggaaagctgcacgacactaacctggtaggttagtgctgacctgtcttcaatgtattttcagcttgtgttattcttccttgaaaccttcaggcttggtggttagggagctgtctagaattaggttgtccagccttgtgtaggttgtaagaagtccgaccttgttcatggaggctgcaggctactcgaagcttggtgcactatttggccagccaactttatttgtaggttatttggcacatgctgcaatcattgactggccagttagggtctagccatgttttgaattattttttgtgatcttgacatcttgatggatgaggaaccatacagcactaccttgtccggttagtgatgagttgttctccacgtgtcttttgtatcttaccacgtgaaagtgctatgttaggtggacaaaaattgggataacaaactacaatataactaataaaatgatgtggccacaacaatatggaacacaatgtttcattaaagggaatgcagaggaaatggagcaaagctcaggaagcttagagaacaaaacagagcttgggaagttaaagaatagtttacagagtttgaagagccaaagtagagagaaaagcgcgcacgaggacatgaagagaacaagtcaatgtagaccaatccgaacaagaaaaaggaaaaagatttaatgatcattcccttctataaatagaagactccactattaaaaaaaattatacgaatttttgacaatactaaactagccaaaattttgttagaatatttttaaattattcttagctcgaatagaggaaagaggaggaaaataataataagcaagagaaattgtgtaaactagagaatattgtattcagttaaatcaattttagtataaataattcaaagtcatattataaaattattgttgaactaattttccaaacataagtattaagcatcttaacttaaaggtctaaaataacaatacaacatttatatttgtgtatgtatatcttattaagtgttgaagaggttgaaccatattggttagatatataatgacaatgacattaaataataataataataatatagtagtagtagttcctaactaaacaagccactagtgctcagatgttccatctccatacatacttctcaaacttctcatctaatatcgtgtaagcatatgagtaaaacaaggataaagtttttatctttttttctttcaattatataaataaatattatgtaaataaatatatatatgga

SEQ ID NO: 384678 - DNA, 1694 bp, Cannabis indica
gcatgaaatcgatttcaatatgtttggtaaatccattataaatcatgataaatgggttacgtatatagtaatatatttataagcttgtatacaacctataaaatcattaaattatcttcaagcaacgatgtgtgttaaaataacttattcattactcatggttatgatggtaaagccaataactgtaattaaaaatattatgagacaattattctaaaaaagataagcagaattgttagaataaaatagaaaaataagaagaagatatagcagtaggtgtaggtttttaaaagtgtaactttcattaagataaaatagtaagcccaaaatttacatttgaagagtttttggagccagtctaaactaactcaaagtctagtcttaatgccattctcgctagattatggccaatacacttacaatagttttagaatcaatttcattttcaacatataaaattggaaaggaagtgattaagcaccaattgagaagacattggtatagtttggtttctctacaattccactaaatttaataaccttttccctactagccctaataaaaaaacacacacacaaacatttataaaatgagaagtgaaatattcatcctctcacgtgaaatgctaaaaagtacacatggtgcttagcattattgtaaaatataatattactattggtgcaactcaatatcaggttctacttactttattaataaatattataaaaaatcgctaactataatgctaggcaccatgagtgcatcatggcaatgctctcctctcacatgagcattgctatgaggcactcagggtgcttaacaccacggtaaaatatcgctctataattgattagtgattttccataatatttaataaaataaaataagtggaattcaatgttaaattagatcaataataatattaggcactatgagtacttttttatatttttcactctgttcaattttagggttgttttctaaaatgtaaaagttgtttcttaaatgtttttttccatctttggaattggatcccaatttatattagtttctccaagtcaattaacgtatatcatatatttctataagagaataaaataaaattaacgtatacgatatctaaccaattagagcacgtacacacaatttcacagaattatttgaaatttgaatagttatatttttttaatttattttatatatatttatatgatggtgtatatgacaattatttaatggcttgttagctacaccattctattgtattgtatagtgttgtattgaattgtattgtattataatattagtatttttttttgaaagagatatatcagtaatatttaatattatactgtgtttggtattaatttgtataatatattttcaataatttcgaccccaacactgattccgggtcagattgggggtctggatgcatatgtccggggtccgagagctaggtttggagtccaggtccagtccagggtttgggttggatttgggttagagtcccgagtttcgagtccatgtccaagtcccgggtcggggtctgggatccgagtcagagattgggcttgatcccgaattctttgtaaatattattatacaagttattataaactatttgttatgtattaaataatacaacttatattatattaaattttttatcgcaataattaatacaatacatt

SEQ ID NO: 384679 - DNA, 733 bp, Cannabis indica
aaaaaaaaattaaaaaaaaaaagccttttatttaatttttttctcacgcaaacatttttaacttgaacaacaaaatatatatggacaaattgcactttctagaccagattattttcatcatgtttaaatgggtcttcctttcttacattgcatgcatgtatcagaatcttatttacagtactatattgtctggttctcatcattttctatagttacatctcaattaataaaattcatcattgtaccaaagaaatatatacgtggtggatcatctaaattttgtcccttaagaaaatttaaaaggaaaaaaacacatgtgcagaaatataaaggttgaaaacgtacatgtgtttgtaaatatcatttgctaatatatatatgtaggggctattatgcaaagctcgaaaatttggcataattattagtttcatgacaaattttaaaagtcagcaaaaaagaagaacgacaacttttagaaagtgaaatattggagataaatgagggtcccattcgtttataaaagtttcccattattcttcatttttttaaaaaaagagaaaattgtaaaagacaattggaaattaaattaaatggtaacgattgtactttatcttcattattcataggatgatatacatataaggtacgcagtaaagaaagtgtggggctacagcccccactaaaaaaattagtgttaaaaaaaattaaatatcttctatttaattaaataatt

SEQ ID NO: 384680 - DNA, 1103 bp, Cannabis indica
cacatttacataaaaaattgaaccatatttctagtcattacaaaagagttcagaagggggagagacttagagcatgtttggtattattttctgtttttgttttaaaaaattgttttagaaatgagaacaaaaaatagtttttaaagttttaaaaataagtcatgtttggttagtgtttttaaaacaatattgactaaaagtgaattggttttcaaaacagaaaacaacattttgttgttttcaaaattcttgtttttgtaattttgttttctgaaaactgttttaaaaaacaatgccaaacaagctaaattgttttcaaaaaatagttttctgttttaaaaacaaaaacagtttttagttataataccaaacatatacttaaactcgcctcacccgaaaaacaaatacaattgaaggagagacaactccaagacgggttttgattaagcgagttgtctctcctccacttaatccaactctcttagtgcagtacgtacaatttgagtacataaatatatggtcttgggcaactacacttagagagttagactaagtagaatagcaagcaacatcaaaattgattttaatgtattcttttggaggaggagaccactctttgttggtatttgggcagagtccactctcaaggatttttttggaccttaaaatataatgaaacaataagaaaaagaaaatattttggactgttttaaaaaaaatagatattatttttaaaatgagtaaaaataatatataaattgtgaggaatttttttgaggtcttagattaagtaagttctgattctgaacatatataggtgtaagtaatccactttataggcagattgttgttgtggatgagtgtgtatatattgatagcatattagctcatgcatattgcatatagatatgtatagttcattaatcatgtacgtaatatattgtatatatagacaaataagtacttaattaatattgtcaatttaaatgtcctaacacacacatatatgtatatatataaatatttttagtaaccttaatatattattaacaacattacctatatctttatatattaaaagtgcctatctaacggcatttctt

SEQ ID NO: 384681 - DNA, 1536 bp, Cannabis indica
atataattttttatataagatcaagtccatgtccatccattccaatacttactacaagtaatttaatccaaattaagtataagttctttcagcccaaaaaaaaaatccaaaatagtcatttagtcatgattttttttttttttttggggggggggggggggggggtaggagaaatttactcataattcctaccatattagacaattaaaactttgaacctaaatatggttcaaaatatatgcacatataataacatgttattagattaggagtaaagaataccaaactttcttgtttttatttactaggcttttaaatgtaccatatatataccatcaaatcatggaataaactaaaaagatatgaaaatcatcaaaaatgactggtaaaaatatttggtgcatctagtttgtttttttttttttgtgaaaaacttcattaaaaggaaaacatattggatattgggtgcctgtagtttggaaattaaatcttaaaatttcatagtagatttttttgaataattttaaaattataggctaaatattctaaattgtatagtcatattaaacaattatgtaaaaaagaatctacataaaactctagttgagaaaatgattggtccaataaaaactagaagagtgaaaaagaagaaaaaaaaatggatatatgtgaatgttgaagggtagggtcaatatggtaattaggagtgcatgtgattggattaggcggtggtgagtgggtcagtcacactcacatcaaacccacagaatcttagaccatcgtaatctacggttgaagccaaaatatatttctttttctttttaatttaaaacataataatattttttatactaaaatatttatggatctaattaatttaatgcaaacaagaacttgatggtttattaattgtttcccattacccaattcaagaatttaaaatttaatatcgagagattcagagaacacttactagaaaatgaatacaccatctcaaccacaagaattgaatcctttaacctactcttcttatttttttctcacttagtattacatgtatttttctaattttatttatttgtttggctaattgtttatgttaaccttgaagagtgcatatttatacactcatttttagttaatattaataattaatatatatttttaattttttaattatatttgatgcgttttttctaagatcatctccaataggacactaaaacatcaaatatagtatagtttcacactatatttactctaatgggacactaaatctatcctcataaatagttttgtctcccgtgtctaccaaatttagtgggacattgtagagacacactaatatttttttataaaaaattaataattaaataatactttaaagaagaaaaaataaataattatatatatttagtattaaaatattcttattatattataaaataataaaataatcaagaatataaaatttggcgtaattttagggttgtggttagaattgaaaaaaaaaattagtgttgaaatagtaatttt

SEQ ID NO: 384682 - DNA, 2477 bp, Cannabis indica
ttaagaaccaaataaaatctgaatatccattaattacaagtgattggctagctctggtcctatatatttatatcctgatcacttataaaaatgttacaccgttaagatcggactaatatataattccctaattaactatgtgccaatggatgcttactactatttccaagcatctaaaaaaagaacattgctattagctaggtaccagtggtgtctagcaccttcttgacatgtcgcgttgcaattggctagtgatactctctaaaagttattatattaaatcatataggacccgatacttaattggaccaatagcgatattgacacataagagggtgttaggcactactggtgccctttagcatttctcctaaaaaaaattaggtgtgttttgtgtcagagtaatggctaggtagcacgaattcctgtcttttattatactttataagagaaatatatatgttttggcaaatgtacgaaagggacaatctacaatagaacttatcttttgtagaccacatgtctataggtcatgctggcatgtttggagactctagctcgtcggagatgatccactctacaaaatacaacaaaatggtggaatgtttgtgtttgccaaaggtgatatcgtccagagaaaatagactctaattttggacatactttattataagcccacatatagcatccataagtttggcctaaagaggttcctagtgaactctttaatgctctaacttcacatgagagggtagaatacaacaaaagtaaaaaaaaaacataaatgaaaatattttacaaaaataaagtaatagattttattaaaaattctcttacctaatacatctataaaatatgtcaccacatcacaaatcttactacagatttaataaataaaatacaaaaccataatattttatatatatatatatatatttatacataaacacttaaaaactaacacaaaaatttcaatgacaaaaaaaatgcaatgtataataagcaaaaatcttcaacataatcaacaaaacctataagtaggaatcaaaatactaaactatatgtatatatattaaatatatataccataaaatattccaaaaacaagtgtatcataatattcataacgtccttcacaaacaagtatatatattattaatattaatgatcaataatttgttttatatatattattattagccaccacaaaagtcagtttacaaacaactaatttagcatacattaatgattaatcatttccttttccagccatattgtcttgatgattatttttaacaaatataattatatataataactgcaatcaaagagaactttacttataagccactacaaaaattcaatgaagatcaaatagggtaatcgaacaacctatgaaatgatcacatatcagaaaactttccaaggttaatttgaatttttatgaggaggaaaagtcatatgtgttaatgataatttttttagttaaaatatatattttttatacaaaaaattgtttttcactaaaagctagatagtatatactaattaaaaacatatttaattagtgacaaaaaatgtgactagctaattaatatttttagctacaaattttatagtgctaatatataaataataatgcaattttattcactatttttttttttacatattttacgcttttaatatacgtgggtaggtgttcaaaaaaaaaaaaaaaatatatatacgtgggtagttgtagttgcctccatactataaaagaattagaaatgaaaaaataaaaccaaaatgaatatttgttgcccaaactttaagtcttacaatgaaatgaatgtcatgtaataattaataaatctcatcactatatgtagtactattataagatgagttttatgaaatagcatccttatttttgacaccaaggtgagttcatgataagttgcaaatatatgaaatatttttttgaccttttttttcaccatataaaatgctatactacaaccaaaaagaaaatttagtcttcaaatactaacaatccttttaatcaaaacagtaaaaaaaattcacttttttgatagtggtaccgttttgtaaaatgtggtccggacccatctctcggaatattttttcctactagttacaatgaattcgtactattaggacgtgaatatgaagattggtttcatgttaaatttggttaaactggcatggccccttaatttaaaacttgaaaatgttcttctttccagtgtaattaaattttaacaatttttatattattcttagactcgttagtgttctctaataaaatctcaccttacacatctcgaaaaatcgtaaaatttcacaccaaggaagccaagttgttgcccatcacttttctatttgacacgttgagagaaaacctaattttccatcactaacaatcatttgtatcgaaatagtaaaaatctcacatttctgataatggtacc

SEQ ID NO: 384683 - DNA, 1179 bp, Cannabis indica
ttttttgtagtgccaatatatacttgatcatttatagttgattatcaagaagagcaagagagtgaggtgactaatactgacataataattaaaatcttcatgaaaagactaatattataattgattatcacctctaactaactcttttctctattattagttgattagtgtggattttattagaaagaattaaatataaaaattaaaataaaaatgagaataagaataggaatcaaattatattaaatttaaaatacataaaaaaaattaataaaatattatttaattttttctcgctgtgcattgtattgatttttcttttcattttaaaatataagaatcattccaccaaaataattgaatattattacaatgacatttcaatactttaaaaatcaagcaaacaaataaatagaaaaaaatatatttttttttcattcattacctccaaccaaacactcccaaaattcaattcaaaacttcaaataattaatgaaaaagaaaatgcttaataattcatcacctttgtgttgcttttaattattacagtttacatgtgcaagtactgtattaaaaataatctaaaccaaacaattccaacaaatctatacagcttataaagtcctttatatttagttttttggtttagagataatgtgttattatttcatgatgttcaaataatataatgcatgcatattaattacctgcatatgaagtgaaaacaaatttagtaaaaatgtttataaggagccaaaactatggtactagttaatttctatattgaggtctatccattttcttattattcttattgttattatattagaagatagtaaacaccaaagtaaatatcctaaattggttagacacacaacttataatagtataactataagaaataaatattggcccagtacaactgactcccccaaaaacactatatatagttcaattcaccccttcaatgttaattattgttcttcaacatctcagtaaactataataactaaaacaaacaacctaaaaacttacaaagtgaaaaaaataaatcaataaattatccattagacaaagtgaggtgattgaagttacactagtaatatatattctggatacgattttgtcctgtgatgtattttcacggaatgtatttcgtgatatacggcagccgttaga

SEQ ID NO: 384684 - DNA, 1119 bp, Cannabis indica
tccgggtccaggtccaagtctagggtcaagtcttaaataagtttttttaaataaatttaaatcgggtcgaatcagatccgatccagaaaaaaattaagcgaggcagagcagatctgacccaagatccaataagtatccgaatgttttgaatcagaggtgatccgccggatcggagctccaacccactccaactaaatggatctttttgacatacctaaacaagagaacgattcacagccaagaagaaatgaagagattggtattaccacatttgtaacaatttgtaacatgcctgacaagaagggtctgtattggaatacatgaagcaatttgttaagttactgacaccattaaagattgtagaacccctgtgcaacttagcattttcatgaatggtttactccctcctttaaaagctaaattgtgaatccataggccctgaaacatggacaaggaaatagattttgttcaagacattgaagaaaaaaataaagccttcaagtatcgatatttttcctctaattgtttggtgcaatctaacctatccgcaagagccgtggaagttcactgattcagatattcaactcaaacaacaaaagggattttgtttccactatgatgataagtggtcactgagacattgctgcaagaaaagggagctacaagttatcatggtacccaagaacaatgaagaaaatgagttcattaatcaatcgaaggatgggggttttgatgccaaagagttggacaccattgaagtgcacaaatcagtggaggtattatcacaatccgagctctaggttgtagcagatatgtaatatctataacttgggtggttaaatatcacactttaacccttgttggaaaataatacttacaaatgatcttttaatttgttcaacaaaattatataaaatatatatttaaaataatagactaactataataaataaaaaataattataataaaattagactactcattaatatatatatatatatttatataacaatgatatttccacaattatgtagtgatcagagattgacaatttaggcttagttgttggtttgaaacttcattatataacattgttaggaaaaaaaaaaaaacttcat

SEQ ID NO: 384685 - DNA, 1605 bp, Cannabis indica
aaaaattacatctatttagtttcccaaaacaattaataaatacatggggaagctaatttactttcctaaaacaaagaaaaaaaaaggaaagctaggtaggtttcctcttttttcttgtgagtgcaaatctatcccacaaatttagggatgtgattgaagttaaacgcttgaacatttaaggaaagtatctttggagatattctagcagcatttactctggtaagtacatgcgagctagttgcgagattgatgctggttggatggtacaatgtatcttgttcgaatattttcaaattcttcttctaatcagttgtttataaatgataaattattttggacggtacatcatggagagtattgcccgtccaggtcataaaatgttcctcacgagtcactcagatagatcccacgtcaccttgtgcaaattttggataataatttatttatttgtttttaataaagaaaatctgatacaaataaaagtgtaaatttacatttggaaccctaaatttcacttttaaacttaagttaattttaaaatatcccatttatatctctagaatcaagtttgaaattaattaatattctaattccaaattattttcaccaaaaaaaatcttttaaaaataaacttttctctaatcaaataattatatttccgaataaatttctaaaagttaacatgattttgtattccaattaaaatatatatatatttgtacaaaattaatttgtataaaaaataatttaaattataattattaatttgttttagaaaaagaaaatatttagtgacggctttgtcgtcattgatggccctgaacgatgacttatcagtgacgactctttagtaataaaatgtcacaattaattgttatcactgacgaaaaaatttatccgcactgatggctactttcttgaagtgtatatttgtagttcctaacccttatatataatttttgaaaatgactatagcagcaaccctatttttttatatgacggtctgtattataattgtaggaggcatttcatccatttttaaaaaaatttgaattttaaaaatttgaataatttacaatgtttaaaataaagttcaaacatactttagttgtttctttttcatatgtgcaatttaatatttgaatattattttcgatacaattaatttttttttaaaacaaagaaagtgtgtgctatgatcataatatacacaaccatatcaaaaaattgaattataaatttctctaaatgtaaaaaataaaaatacccctacctaccattataaaaaaaaattgatgtccttattgtagaatttttcactaattttttatatattgtaaatgaaaaggaaagtagaggtccggttcaaagttcaaaagccccacccggtggcccctcaagtagtggaacattttatacaaagccatttagtgatcagtctgtttataccatactttgaccaaaagataacattagcattaaactgaagatattagagcatccaaggatacactaaatttagtgttacactatcactaaatttggcatcaaaaaatactttcactccaaccacaacaccaaaaattacactaaaaaaatattcct

SEQ ID NO: 384686 - DNA, 1755 bp, Cannabis indica
ctgctatttggtgttgatctccttaaggctggtactagtagactaagataattactaacaaagtcaagatcatgatgaggtgattgtatggtttggagaaggcgaacacgacgaattcgtttattcatcatctcaactcccaaaaataaaaaaaaaaaatgaatgaccaaatactaacaagaaaataataacaaagaagtaattaataataatcggaatagttaaaaaactagtacagtctacaagacaaagctacatataatgaaagaagaagaagactatatcaagttaacaaaagaaataagacatattggaaaagcccctagagaaagtatatattataaacgaagagtttggtgacatatatataaggtcgcaaagcgacaaactatctaataactttcacttaataaccaataagagctcctcctgatcattacacccaacatgcacacattgacataatcatatctataatatttgttcagttggatttttgtcttttattataaaaaactcatcaagtatagtactcaaatcttataattacgtaaacttgatacgtaattaaaactactgatatcctaattacattgtgacaaaatcatgatttatttattttttaaaaaaaaaaaatcttatgacgagagaggccaatttggagatatgcacatggcctcacatgctgcatggccttttgttcgtaccaacttattaaaaggaccctcaacccatgtgcactaggttacaaaaaacacctaagccccactataaatgccttcacatgactatatagtgtatttctcttttgggaaggctggctctttcttcctctacctcaacctttctgcccctcatttcaaatcaaacagctcatatatattatatagtacactttccaaaaatcacccctctcaacccctctgaatattcacttttagctcaattaatttgaatacaatttcctgctatatgatttatgcaattaaagaattttttttttgtaagtaagaagacttttattgctcactaaaacaccaattacaacttacaaccaatacaactaactagtcatactcaaactatccaactaattactatcctctatactagttttctctttataaaaattagaaaaaacctcaaacaaatttcttttgtaattttctttacaagaaactttacaatataaacttcatgattaaagaaaatttttgaaaaggaaaatggctcgtctactcagaaatgttcctgtgaattcttcctcccatatcttgaatggcagaacacgttcgatcaatcgcacttagttgtgattcgtatatatattccatctcttgcttttaattatgtttcttttcatttacttatgtatatgtttattttgatctttataattagtcctacttagaaattaagatctcacattaagaaatgataggtaaaactaataaatatataatgatttttaatgaaaaattatattgagatttttttgtggagataatatataagtacgtaaaattcattaataaggttagtaaaaaaagtgcataatcggttgaattgcttcatattgataattaaataaacaacttaaacatatcacaatattcatcactgaaaataatatatgaaccgtggtacagacctaaagtgaaaatattaatgttacgtacaattagtttttaattaagtttaattaagaaatattaagtgttatatttaatttttttaattaaataatatatattt

SEQ ID NO: 384687 - DNA, 901 bp, Cannabis indica
tttgtgcatttgtaaaattaaccattttatcaactatcctacaatatcgaacattcatctctaacttttatattacactactattatgtacatactctatctagtctataacattcacaacaaaaaatttataaagaaccatgcctatttcaccaaaatttcatttttaccaaaaaaaatcaataaagaatacaaaaaaaaaaaatcacggatcgaacatttaaacaattgaatgtaaaaataaaaaatataaaaaaaaatattagtggtcgatttggacggattaacccgaccaaactgaccaattttattaaacggattagtataatgtaccataaactgattaaaacgaccgatgtacaccctactcaatggatctagttgacacattcaaatcataacgtgtctgaatttatccataaacccgattttagtctataaataaaatgttatcccttcatgcaaagagttagaatttaatttcacgaattaagggctaaagattaggggtgttgaagcaagaatactcttgtgcacgaatactccattgcttttgtagcttaagaatattgactcgtagactaagcatcgttaacataaaaatctttgttgcattatctttaatttacttttctttaaccttaatttctttaataatgagtttctaaaaatctctctaaacaatatatatatttttctaacaaactaatcttaataatttagtcacccaatctaatatgttattttatttgggaatagtcataaatttttaataataaaaattaattagttaacaactcccaaatataaatatatcactctctattacagaaaacaagccgaacactcccaacagcttttctactctattctttaaaatatatcaccaaaactctacttt

SEQ ID NO: 384688 - DNA, 931 bp, Cannabis indica
taccatatagtacacttgccataagcttagaaaattaactccttccagatttctctagaaaaaaaaaaatatctgccctttgtcttcaactttaagcttcaagaatttttttataaatattaccaaattttttaataaaaatgtatcttccatatataccaataaacttatatgtttattttatatgttatagtggtgttgagagattttgcattataaacagcaattaaaaatagtttatgtaagctctgaagaaaaaaaatttagaaaaatgaaataacaaattatgtcagtgcaaattgaaaaattaattattacaaaaatttaatacataaattttatttgtactttgatttttggataagaataatttttctttcatccaatatatccacatgctcaaaattagaaagttgacttttctccttttagatctttgtaatttttaattgtcataaaatgggttatattaaaaaaaaaagaagaaaaaaagagctcacaagtagaaaagtgggagcggccgcacaatagcataaccacttcatagttcttactcaacaagtgtgaacacttgagtcaagtacagaagaaacaaagaacacgtaaacaataaaaaaaacaaactcggaacaataattattacgagctagctaaacttaattcgtgcgtatgttagacagaactagaagaaactagttaaacctacgccaaccaacaacctcatcgattcgtgcttataatgttagtcactaaaatgcgccgcttaccgtacaccacttctcagttgtattgtatcattaagcccttttggtgggtggcatcgaatttccgtgcaccaaccacaagacggagaaggaaaataaatgttttttctttttttgaaattaaaaatgtttatgttttttattttagaaattattttaaaattaaa

SEQ ID NO: 384689 - DNA, 1239 bp, Cannabis indica
agagagagagagagagagagagagagagagagaacgttattcgtgtacgccaaaggtatggtaataattcttatcgtattgtttactaaaataaagaatgataaacttggttaagtagggtggattttttccaatctgaatttatgcataaaggaattaacgaaacaaatgttgttctgatacccaaggtttccaaccttaaaaaatgtctcaattcagattgatatttctctcaatgttacttataaagttgttttaaaaaatactgtgaatagaattcgaggggtcctttcaaggcttatctgtcctactcagataatgtttgtcccaggatagaatatccaagataataatattttagtccaagagatcatccactcttttaagcgcaaaaaaggaaaacaaggcctctttgctattaaaattgatctggtcaaaacatatgataaactgagctggcaatttatggatcatgtgctccgtagcttcaaggcttcgacaagttttataattgggtccgccagtacatctttacgacttcgttcaacatttgctttaatgggaggcaatgttagtaaattcacctcaaagtgtggtattagacaaagagattctctatccccttatctttttatcatggcagttaatatcgtctcgcatattttggaaaacaacttagatgcaggtagcattagaggaaacaaattgagcatgaataacccccaactttttcatgtttgtcaatgcaaatttcgtgttgaatttattaaaagaatatttagaagtaaatgtaactacatacttttgtctagaccattatagttttacaaatattggataatgatgtcgctaaaaataaatattaagtttataccgcttacaaacttaaaactttagttacttatactgctatttatcatttcaatttctaacgttaccaccactctcttaaagaagaaatcttaaatttgaaaagtgaattgctcccattgcacgaaggtataatagaatatttataagctaatgttaccgtgtaaactaagcatattattagggtatatacataaaatacataactttaaggctcactataaaattttggatcatcttcatcataaattatttaaggaataattacataaggcaccattttttgtaaaatatttacatttttacgttcaaagaatatttttttacatttttatagtttttcaaaaaataatacgaaaataacataaa

SEQ ID NO: 384690 - DNA, 1415 bp, Cannabis indica
gagctgcttcaaattgtcttccaacaaagaaaggcttcgcgataaacatgtcaagtggatctttgttgtccgttttgtactttctttaatgaagctatagtacattgcttaatttcttgtgactttgcttggggattgttggcagaagatggatttggccatggtacatagagattttgcttccctttgggactggtttgaggctgccatggagttggttgaggtagacaagttggctcaggtgggtactttttgttgggtgatatggcaggctagaaaaagctagtttgggagcaaaaagggcgaacaattgacgaggtggtagagtttgttgttcgaaatagtgatttgtgggaacaagctcaaaataaaggtaatatacctgttttgatccagttttttctggcaatggtattgagccttagagtaaactagcgtttaattgtatcaaaattaacatagatgcactcattttttagacaaattaggtttggggtaggctttgtggtgcgagattgggaggctcaattgtgaggtgcttcaacagttaatagtctgggcaagatggcatcagaagttgtagaggaggttggaattaaagaggtgctgagctgggttaaaatgcacaattttcataggttgttgtggagacaaatagcctagtggtcattcaatctattgacagtgacgttaaaatgttcttagcttttggccttatgattcaagattgtaagaacttgttaggtactttgactaatgttgttatttagtttgttaaacattcaactaatcgagcggcacatgtactttcatgacagtctcgattgtatgatggatgcatgtttacaaatgagaatgctcatccaaaattgttatttgtcattttgagtgattgctcttaagtaacaaagttaatttgaattaaaaaaaaaggaaaaagaagaaaggagataaaaataacttgtcaaataatttcatttctattaaattaaatattttagtcacaaatttccctttatattttaagagataataacaacttttcaagtttatttatttttttaaataaaatcatttctattaattagaaataaaaaaaatctctcatttaatttaatacacatttttattttatttaaatttgattattaattatactttttaatatttaaatcaataaattattttttaattattcttttttctttctatatataattataagagggacttgcataagagttgagactattgtgcataaatgtgtttatttactagtaaaagaatcgaattaaccatcagattcaaataaaaaaaatttatttactttaacttgcaataattaaatcagaataattattattcccattacatgtgtagaactatataaaaaaataattaaataaaaataaata

SEQ ID NO: 384691 - DNA, 771 bp, Cannabis indica
agagagagagagagtgaccttgaagggaagaccaaataggatttagggctagggtttttgagtacagtttgctttgtatttttctgcaatggaagagattacggatggcgtcaacaacatgaatgtcgcagattctcaaaagaggaaccgtattcaggtctccaatacaaagaagcctcttttcttctacgtcaatttggcaaaggtaaaaccctaaacctcaccctggttttttaattctttatatactcatcaagtttgatttgatttagggtttaggattaacaagtgtttcacattttgtttccaattttcagagatacatgcaacaatacaatgaggtcgagctctcagccttaggaatgggtatggatatcttaaaactaattgctctgtatttttctttttatataatttttaccagtgttggaaatattatcgattatgtggctgaatccaaataagctcaccttgccaatctcaggtcattaatttgttggattaaaaaaagttatttgttaacttgaacaacttgtacctacaagctaatgtgacttttgattacttttttaattgatattgtaccaaacttttttgtgtgaagtactatgaaaccttcttaggagctgttaggtaagcctaaaatctgtgatggtcttgactagatattacctgagtacagtccattaaatttgtactagttattactttcaatagaaaggtaaagatggatgggtttttatgacaaataccaagtatggaagatattat

SEQ ID NO: 384692 - DNA, 1829 bp, Cannabis indica
accgcttctttctttctttctctgtttacatccttttaagtttcgcttactagaaaagtcggttacttggaggagttttaggtttctcttataaacaaatttcagaatcgaaaaggtcggaccctggagatgaggagtatttcattcatttctctgctcaatttgtgatttttgacgactatgatgaaaagagtatctgttaattctcgtcaatctcaactccagaaagatgaagctgtaattaaccttagacatcagtgtcttttgcaagattacttggagcttcaaaaggtgaggaggcttttcatgttttaatctaatgaatgtttgtgttttggggtttatcttctctttgtttggatttggctttaatttgttgctacgtgtttgtttagtatttcttttcgtgaagatttagcactcatctgtttgtgattgtggtttgataaacatcaaagtatattatcagtatatgttatgtgcaatcgaagttgatattcaattaagtcaaataaactataatataaggctaaaatcagtacagtcctttaccatatgaattgaaaatctctacttttttctgattataaagggaagaactgtttaaaattgtcttgtattgatttatttcaggaatttgtttcaaaaaagaagaaattgaaagttgtcactgaaaccagagatacccttttagctgaagttcggtatgtatttttttcttatttatttatgtatcaggaaaataaaaagaaatttaaaaaaaccatagaaataccaaaatcagctcaatgaaatgagactggtatggtagtaccatgagaaagtagttcattctagaaggataatattaggaccacacaagagaaatacataaacttaacttgtgtgtgtgttttgttggagtttcagatttttgagacaaaggcttacatatctacagaatgtgcaatctcccaaaataactcaaactgttgagaatcaaaactctcataaactgtctgcaaagaagttgaaatacaatgtcaatgaagctgttcaacaacatagccacacctcaattttggattcaaatcccatttcggtaattacattagaagctctataaaatatagttgaaaatgaacatttttaatacaaacaagtttattatgtgctcatttttatttaacatgacagggtctggtagagaatattgttggaggaatggaaaaagaaaccaactttcaggacctcaaattgaaattactgaagaagccaaaagattggctgatcaacagccaaagggtttgaaagaaagaaaagcctgctgcaagatcagattgctttgaagttctaaattacttttatgattgataataaaatctcattgtctctggaaatttttcattttttaattgcaaactgtatagaaaagaagatttcagtacacatgtgatgttgtgaaaggtctttcattgtttgatcaaataatattagaaagtctcttattgataactctgtgtgtcttgttatctatatatatttcaaataataaaatatttttaggtgttactaactcaaaaattagagaaaacaaagagttgcaaatatgaagtaataacaaatttcattttaaaaaaaataatgtaatagtatataaagataaatcaagttgtcaaaacttattaaaaaataaatttcgtaatatagaaacatattgaagagttaatttttttacgtattgcaatgaggtcaatgctttgttattttttgtagaattgtagttagtgacgggctcagaatttttactttgttgggacttatttatcattcaaaaatatttatactta

SEQ ID NO: 384693 - DNA, 3153 bp, Cannabis indica
atatatatatacataaataatatgtataaaagcaaaatattaaggaaatagtatatgaagaaaatattttacacaaaagaagagagagagagggaagaaaaaaaagtcaatcgtaaatcccaaaaaaacaaaaatatgtctttacattaatcaaggctagctcctgaaaaatacaatgtctgtatatctgatattggcgcttgtatatatatttgtacatatgatatgaattaatatgaatcaagagtaagtagtgtgtaggtgccaaactcaacaaaaggggccccttaatagccagaaaaattaaaatttattgtctattgtgagttacagaccgaccaagtaactaaatagtaatatacatacaatattagtcggtccaaaatctatgaactcttgtacagaaacttcgaatcatagttttatttgatgagaaaccattgacttttttttatttttatttgcagagacacacttaattactatttcattaataataataattccaataaaaatatatatataggggtaacacttggactatactatataggccttaattagatatatcaaaatcatttcctatgaaatatataattaataagtcagtgtctaagttctctgtaatatttgccaatacaaatcatagaccccactagttctgcaaatctggacatgtccacttgtctttttttccctttcgtacgtacgttttccatcacataatacataatccaatttatcctataattactagatcattaatgcatgttatatatcttttaaatactaatcaatcgatcaattcatgacttatatataatattatatacaaaaacgtgcgtaggtgaataactgcaaggggtgctatatatattaagttattaatagatacgtaataattatagtagctagaaaatgaaagattgtgataatcaagttaattgctatagacccttaataataataaaatgttattgtttatagagtttgttagttaacacttgcttttatgggtgttcgatagagtttgagagggatgtgtggtgcttgttgaggtgtgaattgacctttggatgagtgagtgattcaagtaagtgtaagtgaaagctctctctttcttgtgtttcgtatttttgggcctttggacccagcaaccatgtgcctattctgacgctttattttctctctcttaagtcacaacaagacatggacacagtcacgaacacacaggaaaaaatctgtgttgagtacgtcgagagaaagaccctcatatatatatatatgactcgtcaccacaaccccacgcaattttccatacaccttgtaattagacaatcatacccttattcattaatttattatatacatatcagcaatttttattttctttaaattcattcagagtagttagtattattatataactgtatgatgagacatctctcctgcaaattatcattaggcaattaatggttcttctctggccatttcataaccaaccatgcctcttttccgatcctagtaatactatagctacggggaatttatttttgtgaatcaatattagtatataatatgtggagattaaataataataatatataatatgttactgttgattgtggaatttaattgatttcttaattatatagtttctattaactcaagaaagtaatgaaagtaataaaatatgatgtgatgatgtgaatgtaaaagcaattaaattaattatatataagtatatcaatcatatatacatacccctttaatgttaacgttgctatacatttacacaatcaaaaatggataaaaagttgacaatattgtcggcaaaaaaaagcttttaacataacagatttgtccacttctgaggaacgatcaaaaatatttcatcatatgtttatatagataattaaaattatttaaataataaataatcatgttgttctataattagtacctatagaatggaaaactaaaataattaaaacacataattaaccggctggcgtttggactaattcaactttatcttgacatattttatcacataattataacgaggcttaattaattacgtgtgggattagttcacagatcaataaatggatggttaggatctgttaggtatttccaggacattcaagataaaattcagtagcagaaatttgagaaaatgatcaattatatataattcaaatgcaaaactagcctaagatcaattaatcaatctacattttcaattaatatagtcataataatctttgttcaaacccgtcattcatacatatttcccattggcacggagagtcatagacagggccctttatatatatatatatatatatatatatggagttaactatatatataacatgtggctcttatgaaattgataaaaggggatgatgccctgggtggagtggagtgtttaacttgttcaaacttcatatatctacatggtgtacgtctcataaaaattgtaatattttccaaaataaaatgtgttggcactctccttattttaattaaatactatatatatacatataaatgtgacctgtatgtctcaattagaatgtttataattagtgcattctttagttaatattaacgtattaaatattggtactattaacacctcattaaaactacttacatttatttttcagtttaattgatccaaattttctaatttattgtatgaaatatttttaaaaactgaaaagattaatcgtattttactactactaaaaaatagttttagttgccaaaatccctaatcataaaacttcattgtatatgtacgtcccatatttacaatctaatcctaccgccacccttgctcatacattctttttcttatttctttatgaaaattaaaggaaaattgcaaaacttatcagaaaaaaaaaggataattgcaaaaaatacttaatatttaaaataagtaacacttaaatattcatattctttctaaaaagagaatactgaaagttggttaaacataacatataaatatttaatttttaacgaaaatatttttatttatttgcatgtttatatcacccaaataattttaaaaaagtttattttgaattataaaaaccatttgagttatagggaaaaaatcacctagctaatactaaa

SEQ ID NO: 384694 - DNA, 1622 bp, Cannabis indica
ctcttcaccttcttgacttaattttaggttagtctccataggagtgttagcaggtttaattcccaagtaaccaaagtcttcaagaaattgtagagcatatggcctttgtgaaagaaatattttctgatcagttctaacaatctcaattcacaaaaaatatttcaattcaccaaggtcttttaacataaacctgttgttaagtctaacatttaagtaatctatagctttcaaaaatatttccagcaagaatgacatcatccacagacacaagtaaaattaaaatacttgtttcatgctgcctgatgaataaagaatggtctgaagtagagtgttgaaaaccttcctcaatgagagctgtggaaaacttctcaaaccactggcttgaggcttacttgagcccatataaggacttttgaaggttgcctacaacattaggagaaaactcccccttaggactatacccttgaggtatagtcatatacacttcctcatgcaaatccccatgtaaaaatgcattgttgacatcaaatcggtaaagaaatctacctttgatggctgccaaagcatgaatgagtttaactagaaagaagtttagtgactgggaaaaaagtttaagagtaatcaactccctcttcttgcttgtacccttttgccacaagccttgttttgtgtctttcaatgctaccatcaacattgtacttgattttgttaacccatttgcaaccaatggcatgctaatgaggaggtaaagtaacaatgatccaggtatgaatgtcttcaagagctcggatttaagatgacatagctccatcccaaattggtatgccatgtacctgattaaaaaattctggttcatattggctggaaatggctagcacaagggctcaaaactgtgggaacaacatggtatagtcaataattttagaaacaacatggtctgcgatagatttagaggcttgacattgaacattatttgtagaaaaaaaaacaatggtaatcttggagaagatggtttcttagaatgtctaacatgcctactaacagagggaacatcagtattagtagagtgcacaacatcagaaggaaaggtaagatgatgtaattctgttgtggaatcggtatgttgatcaacattgagtgatggaatggtagtagggaaaaaattagagatgtgaggtggcaacaattcatttttcaaaagggaaaattgtgttaataaacacaacatccctagaacaaaacacacgattagtgttgaggtcaagaagcttatatgcctttattccaatacgatatcccagaaagacgcaagcaacaactcttggtgagaatttggatgtagcagcccctagagtagactcataggcaaggcaacgaaaggctttaaggtgactatagtttggcactttggagttaatgatgtgaaaaggtgatttatgtttcaaattgcgtgttggtgttctattaattagagaagcagcaacactcactcactatccccaatagataaaaggtaaatcagattgaaattaaaggactctactctagcaacattcaacaaatgttgatgttttctttccacaatagaattttgttttagtctttgcacacaagaatggtag

SEQ ID NO: 384695 - DNA, 1927 bp, Cannabis indica
cccttaaaaaaaaacaaaagaaagtcatataaatatgtagagaatcatcatcatcaacatcaacatgatcaacctcatcatcatcatcaacatgaaataccatattactacttactacaatacaaatttcatacttgaaaggcagtaaagggaagtgggtcatatagagccagccaccactcctttttctttctttgtttgttgtactatttattattattattatgatcatcatcatcattatctatatcaatatcatatctccaatttctgtagctttgaagttgaaccacaggtgaaaaaaaaaagagagaaaaaaaattaaatatctttagcttttgtaacatcatctattattattatcactgtaattgtaattgtttcccatgaatgaaacaaagaaagatagtctcaaaatctagttctttatcatctcttatgtaaagggttggtttttgtttggcttcaaagaaaatccacacaaagaaaataggcttataatttgggcaaaaatttgttcttgaattgaaatcaaaatctaattttgcttaattggtcactttgttttgtgattttaagtaaagtttgtctctttgctccactacacaacttttttttatatatatatatttttgaattattattatgtggggtatagagagcctgtctttttttgatttttgctaataattaaaaaaaaaaattaaaaaggcaaaaagcagagtggggtccacaaagcacaatatcacatggggtttgctgacactgcatgtgggccctacttctctgtaatttttttatttttgccagattgttggtgggtcctatgtcacaacaaaaacccacccatgtgagttagtgatatcagtgatgttactgtatatgtgtatatatatatgtatgtatgtatatatatgtgtatgatgcatatatatataatagattgatttgtgttgttgtgagtgagtggagaggacgtgcacagatctgaacacacacgtatgacaaaagtgcacggatacagagaatcttttgggctccgtgaaaaaaaattgaccatgtttttgtctctttcccacagttaatttctttgttatttttttttactgttttacattggagtttgtgataaaaagttataatagaaaatgagctgagataaatattaacggagtctggataaaatatgagtttgtgataacatttgtttaatacgacgtcggatttgacatgttggtttgacatgttgttggggtgacaatttatgtttaatggttttgtttgtgtttgtaatgtgttgaagtttatgtattagaagtaaaattaaatttaaatatggtttatatggggattttttttatagcggctcggaacaaaatcgagtattttagaagcagttaaaacgcgtgttagatagtcccacattgctaatgtatggaaagataatagaatatataagaggaatgagctactcctcccattgccaattggttttgagatggaatcccatgattctcaacatggtatcagagccatatccctagcgggctttcgatccacacctgtccagatggttagccaccagccgcacgagatccagatggtgcaaagacgcctgagatccgaacaaaaataagcgagcaaatggcatggcctctgataaggtgattcaagattggtgagcaaaaattgagccatatataagaacatgggctactccactcatagccaattagttttgggatggaacctcattcatcttatcctcaaattctaacatggtatcagagcaaaaacaacaaaaaaaaaaaatctctagcgactatccaactccaaaaaataaaaactgaatcgaagtagagccgaaaaaaaaacgaagaccacaaaaaaatccaaaaataaccgatccgaaaagtagagcaaaaga

SEQ ID NO: 384696 - DNA, 1123 bp, Cannabis indica
tttttttttttttttggacaaaggtcttagaatcttgtttaaaccttgagagttcctcttctcttctttgtgtatatagtcccttcccttgtatatcttatattatttctacatataagacaatcttaaggtggcacatgacactagtatatttttatatatatgataatgtttgactaagcatgcaaattcatatccccattatctttccatatgttattatttgattgtatgttgaaaatgtactcaacaaaaggcgaccttaattcatatttgatatttacccatttttaaatataaataaatagtgagtaattgatattaaatattagaaatattcaacactatcataaagtaatgctttaaaagtagttagtagtttttcatataatattagtaggatggtgcaaggtaagcaaccctttttagcattccaattaattaaacggtgaaaggtaagcaaagcaagcatgcaatgcaataatcatcataaattattatgttcgatcaaaaaggaaaatacattatttgactgccattaagtgcaatgtcgtcatactttgattgcttacatgtctttcggcttagttattactaattagtcttattaatcaaaccaacccagtttaataaaaagtgatatattaattagaccaagttttgtttttgaggtccgtaagtacatgtcatcctattcatcatcagttgctaggtttgctcatttagtactaacttcatttaccaccttatctcgtagttttcgggtaatctttgtgatagtgacgtgaaggaaaagaaatattaaaagatattattggtgtctaacactctcctcgatgttacattgctattagtgtacttaactatcagcttccatataatttaaaaaagtaactgttagagaatgtcatactaattataagacgcaacttataaaaggtgttggacaatacttgttgttgaaggaattttaacaacaccaaagtaaataatataataataattataaggagaatacacgcgagtactcaacttaaagtggcgagtattcaaactaaggacacaaaatactgaaaagaaactggaaatgtaaagaacacaagagagtatagtagttcagtca

SEQ ID NO: 384697 - DNA, 1379 bp, Cannabis indica
aaaaattatatattattattaagatttaaactacctagtaagatgaaaatataaaactttattctataaaagtcactttaacataattaaatatattttattatatttaattttataattcttattaaagttttaaagtcttgacatgatataaaaataaaaatatgtcagcactatataggtgcctcgtagcaatgttcttctcggtatgagtccgacaaatgtttaattcgatttaaatagttcttgaagattgtaagacccattgggagttggcttcttactccatgtttgctcaataaattgttgatataccctttcagttgaatgagaagagtcaaagaacacatgatcactaacattaccacataaaaagtactcttttcctctctttcctccacagttgaaaaccccctggtacggaccactcccacaacaacccaccatcccttccttgaaccctaacaaatttgcacccaaataaggaatgagaaaaatacattattatataattttgctatgatatatatataacaaaatggtggtgtagcataccatatttagaagggtggtctattctttgttgcagaaatgtataatagtcattaagtgagtatttgaatcctttgagttgagtattaagcttttttaggagcttggagagttgtatattgtgtaatagtacaaatggtgtaccctgatccaagcaggacttgttatatttttcttctgcaataactcttgagtttggtacacaagcaatgggccttacggtttgaaacccaaattttcttcctcccatctcatatatttcctatcatatgaaaattgaacaagtcacatttagaaagtgagataattgacttaaaattaatataagaaaaaacaaaaataagttgatgattttttggatacataaattgtatatagtgatgaaattatttacaaaaatttgtttgttgaattaatttttccaataatttcataataaaagaacaatctattcttatttgatcccatctttctctctaaaaccaaaatatggtaagaaactactaattgaggaaggttttatttttaaaattatacctcaatcactgagcttaagttacctatcaccatgcccacatatttattggttgagaaggattgaaaggttgtagagttcgagtcgaaaagagacatgtaatcgttgactcctacattgaacaagtaaacagctcttgacaacagacttatggcctcttcatcccctaatttctgcctcagcaacttgctaacgttcttgaaataatcaacttgaattttaaggcttaatgcctgaaaaaaggaaagagagaaactgttagagattttataacaatggaagaaaatcaaga

SEQ ID NO: 384698 - DNA, 1904 bp, Cannabis indica
attgttatatgatgattgtcacaattttgtaaaattatactaggtttaaatattgaaaaataaaatctcaactttttatttgaataatctagacataaaaataccattcaaattcaaataaagggtaacattgtatggagttacataaattttaatcataatttactgtggtgagagataaatgcagctatagttccaccttaatttttgttcacaaataaaaagttttggctttgtttggatcttagatttttaataaatttttctaataaaatagaaagaaaaattagaaaagaaaaataaagaaaatgcatcaaaatcgattattggatttagatttgtaatttgattatatggcaacattcaaattattaagcattgctataaaatattacagtgtctaatgtcactttacaacataatatattattatcgatacaatttactacgtagtgaatcctacatgagtaacaatatgtatatatatgtaaattacgtaccaacttatgtgataaaaaaaattcaacttagtgtattaattaatgatatttaaactaaccaaattcaagtttattttttaaaaaaaagaattaaattaaccaaccaaaataagtcaaaaataaagtatatgtggaagtagccaaaccattaaatctatatagccaaaattaaattacatttttgctaatttttaattaatgaaaaatggtaaaaagatatggtgcttagtatttttttcgatgtcattatatctcaagtattaaatctcatataacttaatataatgacttttagagaatattgctaataaattatagaatgtcacttttaggtggagctatacaccactagtgtctaacaatataatgtttttttttttaatataatataatataaacacttataaaaaaattatataatataaactggccaactcctaactaattacgataaacttaatattaaagtttgagtaatttactctataaatattcaagtttaaatctagttgcaaataaatatttaaatttaatttttaacggtaaaaatacttaaatttatatttctagaacttctataggtacctaatcattaaatgttaagtttatggccacgtgacaatccctaattgattcaggccattaaatttttattttttaacttaaaaattcattcaaatatgcgtaaatgacacgtgaataataacttgacacttaacaaacaattacttaaaaagttctagaaatataacttaagtgcatgaaaaattaaacttaagtattaatctgcaaccgaaagttaaacttaagtatttataacgtaaattactcttaaattttttattatttattggcctttttggcgccaatctatatatactaaagttaaatatatatctattttcagaagtaaattttttccttaatacgttatataattaatagatacaatcaagctttggaatatgttaatggtttatgactattatttagattcctcaacttgatatggtcctcaaaatatattcattggcaaacctagaaaattttgctaaaaaaaaaaaaaaacctaaaatttttttgttagcaaagtaaaattttaaatacaattatttaacttgtgcttcttaacgtataaaatctttagcacagtacagaatttctctacatctatttttaaggacaatgtttaaatttttgacagtacaaatttttttcttaaaaaaaattaaaatacaaatgtaaacggtaatagtcgaaattttattcacattttaaaaaatgattaaggtggcgtttggtaacactttttttaattagttttctgtttttaaaagtagaaaagtgaattttttttttcaaaaacatgttctataaaactgtttttacttttcaattttataa

SEQ ID NO: 384699 - DNA, 2427 bp, Cannabis indica
tagcagctatcaacaaaggaaaaatgtttttaatgagttgagagtgctgtttgttgatattatagttttattgtttaaattttcgagggcaattttatctcatatgacttgcaataagaattttgcagtacataatttggcaaatcatgccctttaattaagctatcctaatttaaggaggttcggtctccaactataaaatgctcgaatataatttcatcaccacatacaaaaaaaaaaaaattactgccataaatttcgttctgaaaaagatattaggaatgtgttttggagcacgaaaatgactaaaaaattataattgaaaattgaccgtgactcttcaaataaaaatagagaattatttcttaaaacccttttgttaaaaaaaaaaggaagagccgtgacacagtccacggttccaggaattttgaaaagtagtatcgaatcgatttggggagaagatcggaaaaaatgggagacgaagaggcgaaaaagaatgaggccttgcggatcatcgctcagtacacaccacttcctcgtttggtcgtcttcgatctcgattacactctttggcccctttactgtgagttctacgacgacgatgacaagcctcgtttgtatgcagaatcttcctccgtattgaatgctctcaaggaaaagggaatcgacctcgccgttgcttctagaacacccactcctaaagtcgcttctgcatttcttaaaacattggccattgactccatctttctagcaaaggttactttttttttaatagcacaattattctatggagttcaagttcaattcttcttaatttaagatttatattgcaggagatttacccgagttctactcacaagacaaaacatttccaggaaattcataataagactggcgtaccctttcttcaatgctgttttttgatgatgaggacaggaatattcgagcggtaaattcatatccatctctccctcttttcattctgctcttttttttcctcagtttactctatagttgagcttgagtgatatccttctttgtattttatttgcttaggtatcgaaaatgggtgtgacatgcattttggttgagaatggggtgaaccttggagctttgaggcaaggtttgatggaattttctcagaagtcgggttaaatctcacacaattatcaatttatatactgaaggatcattgtgattatcattctttcaaaaaacaccatagtatatatgtatatggtacactttaagcaatgtgatatcgatgtatgtatcaatgcatctttgtaagaaatattgaataaatattgactaaaattgaaattgcattagttgaactgaaatatgaacttacaactcttatcttttgttaaaagaacatgaaaacatgagattggagttgcttggccggcagaatcctcatgtcagattgtttaaaagaataaagaccatccctaagtagtgttcctcttagcaagacatccttggtaatttgatccttgacagaaatcagattgaaattcaaaggttacaccattatcaaggttaaactttgaaaacactaatcgaattcttagttatagattgcacatgtaacatgttctacaggatctagaatgaataggaggtttgatattagactgtttggctccaccttcatccccttgtaaatctgatcagtgccatagtactcaccagagtccagatagcaacactgatctcgaacactcttgggtgttgctatgagcccagaaacttgatcactactggccaccattgcagcataatgtgctgacatagattttgacatttgagagctagcaccgtcagttgctggagcacagccttggaaggaaggtggtgtttgatttactaatcctaatggtaataggaatagtaatgagaacactattaccattatttggtttattttgtaaggaatattattagaattgaattgacaaaaatattcttgctttatttatttatttgtattttcaaagtgggaaagagaaagagtaaaattgtttttttattatttagttatcattgtaattctcattaatgaggtgtaagagtatagaattcataaaattggtgtaatgcccattacaaatgttagaaacacaaaccaaacattgtaatagtgacttattcactttgattccattacaatcttgattccaatcaaccaaacatacttctaccggagttttatttgcaccaatacaatattattaaaacatataaacttggctaattttaaaattacttttaatagttttttaaatttttctcacattatttataatattatttttataattttttttaattcatatatatatactagcaaaaactacgtgcgaagcacgtatactaaattttatgctagttttttttctatgttatttgaaagtgatacaa

SEQ ID NO: 384700 - DNA, 2262 bp, Cannabis indica
tattgttttcgttttgtttttatagaacactgaaaaaatatacatttgaatatacaagtgtaaaatttttactaaaaatagtattttgtgtaaatttctcgttagctatataagtgagaggagtgtcttgggatagaaactaagtatcaagtacagagttttgttatatttttgttgttgggttctgctctgctgctattgtacttaacctttgatcgataaaagtgttcggcgttggctgttcttttggactgagggtcaagaagagctgaaacacaagattgctgtgtttgtgtttactttgttactgcattagttttgatccattcgtttgtgtaagatagattatttgttttaagtgttcatagacaccacaaatctgaatgtttttgtggcaatgattgatgagaatagatatttatatgagtgacattttgattttgagttgtaatgctagaagctcatttaatgtggtgtttgtttatgtttatgtttacatttcaagcttttgtttttgctttgcttatgcaatatgccttaatcaagtattcctcctatagctggttcattctttcggtttgaccatctgtctgcggatggttaaccgagaaaacttctcgagtctgatcactgatgatgtcaactgagctacatcagctgggcatgcatgaggctcaggaataaaaacaccctactttgagaaccgatcaatcacaaccgaaattgatctcatcccatcaacctcaggaaaccccacaatgaaatccattgccattttctggagagagatttcatgaacatcatagttctaatttgaatgtcaaacttgctttgctggaattatcttttctagtcttaaattagcagctacaccaataaatacatgttagatataaattagaaaaattgaacctacttacttcttgaatggggaatgaaccagatatttgtatattcaaatccataacctgatcttttacatcttaaactaagcaaatacattcgaaatccacccactgatctttctcttatcagcttatctcaatctgattactttctctgcacatgctgtcattgctatgtattttgtttttcaatatagtccgttggaagccccgaacaacttttgaatcgaaatgaaaacgagatataacttcacttccttcagttgaaactaattttggttgtaatgaagtttctatttactggtttggaatcagaattgcttactcaaaactaagattttgttctaattattctctgtttttctttttctggtatagattcttatgtatgacctggttatcgaatattcgagtataattcataataggagtatatgggttgtttcagaagcattgttattaggtaccagtattgtccaacatgaaatgatgccttacaagtagttatcgggtttctataatagttattaaataacaactctaatatagtgagaggtagtaaatgagcgggattatgatagtaactgttatgttgattctaatgaattcgagcagtggctcttccgaaatctgccaaagttgtattcattgtcacttactctcgatttctctacaggagccagttgctttcatgggagggttgtttgccggattgttacgacttgatttgaacgacgatccgctcaaagaatgggtttctagaactgtggaagcctctggaataacggaagaagaaatcgatgcagacgggttgaaaccagaggaagaagaagtcccaacacagatagagattgaatgacattctctactatgtttgaaccttgtaaatttgatgttttattgaatatcttttccattgtctaaaataggttaaatatatttatattacaaatatgaaacttcttatagaaattagatcggacaagcaataaatttgtaatgagttttggtaaattttgaaagaaatggttatgaattatggagttctaaagcttcacttgttttcaatgaaattgttaaattgtaaagctttacttatggatttgcataatgtttctgttatggttgtgaaacggtacgctaacgtggttgttgctcgtaactttgttagagcttttattttttacatcttgatagtgtttttgttattttctttgctaacacaatttgatggttaataaattgggaaatttacatggtatactaacttctgttatttttttacaaaaatactgctaggcggtatttttactttttactgtatttttttataagtttcatactgcagtatattgtg

SEQ ID NO: 384701 - DNA, 1453 bp, Cannabis indica
aaaatctactcgaattatatcaaaactattgtaattttgcaaatatttgtgtgctccatatgtcaatctttaacttaaattagttaaataataaaactttaacaaaacaatacataattaaataaataaataagcaaattacgattaaaggattagttacctgtgaggactcgaatattttgaggaagatattggtactgattgatcaacaagtctctcatctccttcacatcattcacagttcctttgagcatgaatttacgcttatgactatacgtaacgccgcacagaacagccctcttattattattattattccctctaacatgataatttgatgatgatgatgaatattgcttagtagtataattgagagactcatacgacgacccgtaacccattttttcctgttgatcccttctaaacagccaacacaattcactcaataattctctgaaaaaactttgctgtcgattttcttcacacgcactatgaggttcttttgttgttgttgttgttgttgttgttgtcttgttgatattcatatcgatggcttgagtgctttttatatgccaaagggaaaggtattattagtgaattcgtataatctagctagctatagctggttgagagggtgaccaattaaaagattatgagaaaaaggagatgattttatgatagtattttaatgatatataatagatgcatggaattgaaaccaacggcaaggagaagagctgactatatgagatatatacctataattatagctttaattagcagcctttttttgaacctttaattctttatatatatgcatgtatgatgtatgtactagcaagagtagtatagtgctatatctttattttaagaaagagttggaataacacaatgaaaaaactcaaacgcggccgtgttttgaatagtgcggtatatatttatatatatggtgaatttctttctcaggtttttgggatttataatcactaaagatgaggaatagttctgatttatcattcaaggaatatagtagcttccttgtgttgttagagttcacataattattatataaggtatattgagaatatatatgtgattgattgtcagtaaggaataggtagtattctatgcaatttatcttttttttttttttgtatggatgtaatttaccaatttaatgaaattaataaatatttattaattcaattttacaattttttttagtatatactgcatagaatagaatagaatagatagaaatcttgtaattgatatttgtcacatctttttgtgagcttccttcctttaaaggtcaaagctgtaataagtattgaggatggctggataaggcatctcttttatgaatggaaatgagtcagataattgttagagattttataacaatggaagaaaatcaagatttattacaactctattgtaaaataatacaagg

SEQ ID NO: 384702 - DNA, 1287 bp, Cannabis indica
tggtatgtacattttattattatttattgaaatgactatatgcattgtttggtggatattgaatcttaaatgaaaactttgtcatttattaattggggatttcaataataaattgctatggtttttttattttggcatgagtattccaatttggacctagtcattgatttttttaatttctttttttttttaaaaaaaaaaagtttcaaaacaaacaattagaaaataaaattacttaatgttatactattaaaaatttataatgatttattcacttaaataaaagaaaaaaatttaagcaaataatgttctcaaacatgattacaagttaaatttacattcctatttacatcttttaaacaaaaaatacatccctatttacattacaagtacttaaaatattttatgtatatgtaaaatatttttattgggacaatgttattcaatatccttaagataatggttatttttttcaatatccttaagataatgattatttttacatttaatctaattaagacattgttattcaatagagagagttgggtatgcaatctctttaaaatatatgttaaaattcactacaatttttcattcaaatgtctcttcctttctaatttaatccaattcaatcaatattgacttaattttttttgataattaatcaatggacttaattatatcctacttttatgcatgaaattttaggtcttcaatcccacaaccataataactatataggttcgtctttttgggtctataacaaaaaatgccagaatttcatggtaatcaatatacaataattatatatatcaagtagttattatatgagaattgatataagttaagtataaaccctagtactcaataataataatcttactatattatagatatataatgtaatatatgtggcgggttgtgaataattaatggtttttatattatttattaaattaaaatacacaatattcaatattaaatatcactcaatattaaattaaactaattcctttcaaaaaaaaaattaaactaattaaagtatgccactcaatgggccctaaaattcaatggaccctaaaaaaatagggctatttacaaaaatatgggaaaataaagataagttttgatatatatggcataaaaacttaattacactaaatatggcatttttttaaaaaacttacaaatatgggaaaaagccttgagaaatgccataaaaaacttaaaatttgtgtttctttttatttattttttcttttttaaaaaaataaaatactaaaataa

SEQ ID NO: 384703 - DNA, 1302 bp, Cannabis indica
ttggatgagaagattgagatagataaggaaaaaaattaattaatagtttcacaaacccaagtccagaataataatgatgatcaagatcttgatgggtttgatcaagatgattatttttattttcctccactattaatgccactgccccacctctgcttccgtcaatgactcaacattacggatcactcaagtatgaggattatccttataaagaaatggagtgcttgcttaatgcataaagtgagtttgatgatggtcaaattcaagaattttatgatggaacaaaattttctttagatgaatgttgtggaatcaataataatgatttgggaaattcttgtttgtcaatttattttaatgaattaatcattaattttgtttaaatatatcataactaataaattaatattttttgtgaccagttgcattaccctgcttctgcttctggatattatgctagagatcatcatcttcaaagcatgtctacagtctccagtccccttcagtattgcaacaacttccactatcaacatttatgtacaatcatatggaagttaattaacatcccacaatttatatataattggttttcattcagtttcgctatatactattgtatattcatatatacagaattttttggttttcaagttgccagataataatgtttggaaaattctgattattaatcatgattcttaattaggaatatatgtttgatgttttcaaattgctattatattatatgaaaatattgatatagtttatgattcttcaattgaagacaaaaagtggttgatatatactatgtttgatgttttcaatttgccattaaatattgatatgtttaaattttaatgtaagaaaacaattagatcatggtagatcataaagggaagcacctaagataatcatattaacagtaatgttggaagctacatcactaacaaaattgagtcataataaattgagccatctccacagcaacatgatcatccccatctttgtataatgctacacagaataataatgagtaattacatttggttggcatccataatctgatgcaagaagaaacagatcacatcttaggaacaaaagaaaaaaagcatagaattgttattgaacctggatttacatatttctaaatagatccatcaaaccttaaaacattccacagaataacaaaatgactggccaatttcgatataaatcaaccagagattcaattctaagacctttgttaattacttatatattttatggttgattctataatgcacccccttaaagaaatgtact

SEQ ID NO: 384704 - DNA, 2330 bp, Cannabis indica
tatgtggggcatatatttgtagctaaattaggattttcccctctatataaatagtcacgaagcttttatgttttttttgcccataagtgataatcaatggctttgttaattgtaataaaatgagaagaagggtctcatcttgttgtgtcccatactagccaaacttcctatttagtacttacccaccaaattaatagaaaagcttaatgaaaataaaaactcatttaattgattagtgggtctcatcccatcaaaggcgttttttttggctaagtattgacttcacaacatggccagcctgtggtatggtctattgaaaaagcaaacattgaagttagggtacctttggtgctataggtgtttttagaaacaagctccattgataaacagatagttggcttcagagttttttggccttttgcactatattcattaatggatgaaaaagtttggttccttttacttttttttttttggtctctctcttcttggaatatgagaaagtgcataataatgacaaacagaatagaaaaggcacaaactaaatcacaccaaaaaaagaaagaaactttatactaaaatgaccccagaaaattaaactttttttaaaatgtctttttttttttcagtatataaataactaatgttcattaagatttggtgaaaaagcagagaactttactctttaattttgagttaaatcttctagtttgctccgtctctctcaatccacaccaccacgtattggttataatcctcaaccaaatttctctctctttctgtccactgggttttcacggatcaaaagattctcaaattatctttctctttctaatgtttttggcatttgtttcttaactttttctccaccatatatatatatatatagcaatatataattatgtatattatcttacaaaaatcttccattccactccaaaagcctcgtcctttcttcactatagatcatacattctattctattgtaactttctttatttctttctacaacaacccatctttccctcctttctctctatctataattgagcttcatatatgactctctctcctcctcaaactccttatctcttcatctcaacatggtctctaatgggtcttctttaacttttcctacaatcatcaaaagcctcagctttatgccttgattcccatattcttcattaatatattttctctctttattttcccgggaaagtttttcaaggagaaatatgccacctgataactttcctctgagatgggagagcaccagagaccagtggtggtacgcttcaccaattgattgggctgcagccaatggtttatatgatctggttagagagcttctccatttagacacaaaccttctcattaagctcacctctcttcgccgtattaggcgtcttgaaacggtttgggatgatgaatctcagttcgatgatgtagccaaatgtcggtgtcaagtggccaagaaactcctcttggcatgtgaagtaaagggtggtcatcataacactctcataagggctggctatggtggatggctactctacacagcagcctcagctggtgatgtggggttcgttaaagtgttgttagaagagaccctcttcttgtttatggagaaggagagtatggtgttactgatttgctttatgctgcagctaggagtaagaattctaacgttttcaagttgcttctggattttgctatgtctccaaggtgttccctaaaaagtggaggagagttggaagagcaattgggctgtgtaagtgctgagtttaagtgggaaatgaagaacagggctgttcatgctttggctagaggaggaaatttggagatgttgagagagattcttggtgatggttctgatgttttgactttcagggatgctcagggttataccatcttgcattctgcttctggcagaggacagattgaggtgaggactgagattcttagcttaatacttttaaaatatgtcaattcattaactgggcattgtattaagaatgttcttatgtagtgatgttaatttctatatgcttagtatataattagagaaattgaggaagatagactattttttaataccattttgacttctgagacttttttgcaaaatgtctctaaatagtgtggcgtgtttagataggtgttgagtgtgagtgtctagaaagtcattttacaaaaaattatgaaagagaaattattgtgcaaaatgattataatggaaagactatcttactgtctgttctaatagaatgtccttatggggttgaggctaattagtaatttttcttccgaactttgacatgtactaaatc

SEQ ID NO: 384705 - DNA, 1205 bp, Cannabis indica
gtacaactcaccaacgagaaggctaagtcaacacttaagcaaacggggaccccaactctcaaacgggcatcaaatgatataccaacttcctcccagaagctggttgaccaaactctggatagcaccatggctggctagcctacttctcacaaggtctctctacgcaggaaaaggcttgcagggttctttgtgcattcctactcctgtataggatgactgggctacaaattaggccctaaaagcccaatagaatagttggataatatctatgttcaagggcactttggtcttttttaattaatttattaaatatacaaatatttagagtttcaaattgtaaattagggttttaggcttcctatataaaggccttaactgtaatctagaaacctaagtctaatataagtaagaaataagccactaagaccaactcaagtctgataactctcttcttcactctctctcacacgcccgtactctcaacacttgagatttgccaatcccaattcctactttgtatccttaaaggtgttatatcatatcccacctatagtgatctgaatagtattaactctcggtattaatacaactgaaaggagagtaggtcattacccgctatcaaagggggccgaacctctataacaattttgtgtgttctttactttttattttgtttgtgtaacatgtggtaagggttagatccatatgatcctgctgtcgattgataacttttcgaggtcaacaggaggaaatgaaggttggtggcggcattctcatttagagaaacatggagaagaaagaagaaaaggagagtcttacatctgaaagtagggtattatagacctatgtctttggttattttaaaataactgatgacataggccatcacgtgtatctaatattatgttagggtagttgagacctatgtcttcggttatttcaaaataacctaagacataagcctccatgtgtgttaggatagtggagaaaataatcgaagacataggccttttgtagtagagacctatgtgttctgcaatttcaaaataatcgaagagatatctatgtcttcgattattttgaaataacttatgacataggtacgcgaattttttctttccttttctccttacttttatctttgaattttatattttgtgttatcccaatttttgcacactaacgtggcatcacatgaatggtga

SEQ ID NO: 384706 - DNA, 987 bp, Cannabis indica
accctcttacttttctattttgaggttcccaatcaatcacaaatccaacttttaaaactcaaagacacaaaattacactacaactaatcacatttttggaaacaatttttcacatacaaattcaaatttttgttccaaaacactctttgggttttccatgctatatagctagctaactcctattattatatatatataaaaatatatttatatactttatagactagataatagagcattgagttaattgatcttaataatcacatacataattaactcatgattttagcttaaaataaattaaaatgtttttataacagttttttatagcattcatgttcttgcttttgaaataatgttatatggtactacattatatttttagtcgatcatgcactaaatctagctacttcttctacgtactatacatattttttttttacaatttttttttttaatttttagtgaatctaattaatcttaattattaggatttgtaaattaaagatgtataaaaaacaagctggtatgaataagagaataagacaatgcataattgcaaaaattattacctcatttatttacagtaataataatgaaataattattatttttacttgagatttgtagtacttttcactcttcattaacatgcatttaattacaaattttcgttttttttaatttttataacaagtttttttttcttattatatgactgtatttttacaacacattatattatcgtgacacttgatattgataaacactacaagaaatattatttttaccagcacatttttgtgctgacaaaagttggtattgcgctggtaaaatataatttacttgtgatgtgttggcaaatcaatgttggtattagaacttttgccagcataaaatgaaaagcgttagcaaaaatactattccctgcgcgtaaatgcgctagtaaaagttagattttagccactgcaaatgtacgttggtaaa

SEQ ID NO: 384707 - DNA, 2580 bp, Cannabis indica
caaatagtgtacacttctttgagtttcaagtcttgccagaatggacttataaagtcatgctgccattgccatgactttggaatctttgttaagtacccttgtctgaatggatgcctctaagaattgttgtaggtaattctttaaatgttcatccgcctcttgcttgatgtagaccaaatcattaggctcgattggtttgtgccttgatggtgataattgttcataaaatgcctttgcaagcacctcccaagaatcaataaatcttggagaaagctcgagataccaatactgaatttttcttgcagcatggctagaaagatctggcatcaaaaaatgtctcaaatatcttgccgattgatctacaatttgaaactatgtatgtgagagaaagggtctccctttcttgtatacatactccattttggcatcctaaattttgatgggatggcaaaggccattacccttattgagagtgaagatagtctgtctttgttgagactattgtcaacgacacctcgaagtagcaaggtccttcaccaatttgcataagttatctaactccacttgtgtggccatttcaaaaacctctatgggttgctccacctgagcaagtcgtttgtcttcatcaccttcaattggtttctccacttgagtaagtggttggtcttcatttcctccattaagactatcttctctgagaaattttaacgagtgaatcaaagaaactaatgacatgagcatgagttcatgattttcaggttttgggctgatctactattgatcatctttatgatatgaattaagtctttatagtaaaagacatgtttgatatagaaagcttaattacatatcgattctggtcatgtataatctctattatatacaacaacttcacttagatgtcatactacatcatcaatccaaattatgattgcttgcaccaaataacatgcatcagtgaatcgcactagcaatcgttgattaaatattccataactttaatatgttgttgactgttttattcatggcaaagtgatcttaattctttgtacaatacaagtcacaacctaaatttttttgatatttatatataaattatacaatattaaatattaataatttaacattcaagtatatgtaaaaatgttcaactcttatttataaatcccaaaatttttttcactttccctaaaagaaaatttggcatctccctaagtcccatattagttatatgacctataaaagattttgctatgagcgtctttgtgaatggatcttccaagttatgttctgatgcaatcttcaagaccgtcacataacctctttctactatatctcttagtagatggtacttcctcttaatatgatttcctctcttgtggcttcttggttccctcgagttggccactgctccactattgtgatagtagagtactaatggtttttctacttttcgaactacttccaaatcagtgtagaatttcttcaaccaaactacttccttagctacttcacaagctggtatatatttagcttccatggttgaatatgcaatactggtttgcttaatgcttctccagactacacctccaccacaaagagtgaatactgatcctgatgtctactttcgactatctttgtctgattaaaaatcataatcagtatatctaattggatttaactctcctccaatatatacaagcatgagatctctcgttctctaaagagacttgataatgtgcttcacaactatctagtgtcccaaacaaagattcgattgtaacctctaacaatccctaaaacatagcatatgctagggcttgtacagaatattatacatattaagctcccaactgttgatgcataatgatactttctcatgtcctccatttcttggggagtctttggacattgatcattgcattgagaagttccatgtcttgacagtaactgcctttcttagagttccccattgagaatctttctagtaccttatctatataagttgcttgagaaagtgctaatgttctcctctttctatctattatcctatttcaggcaagggacacatggaatctaagtcagcaccaaaggcccaccagtgggtcccaaagaacacaatttgggccaagccagagtagcttcgcaccttagctctatggcaaaatggtctttctccactggtggtccgtatccgaaaggagcttcagtaccttgatgctagaaggtcagatagtgtgttcctggaagatcagtctagtttccctttttatttaagcacccaaaataatgaagtaaaggctcctcagatctcgacaaaagatcgtatcaagctaaaagggcaaactacctaaaatggaaattaggaaattaataattgcccacaatttaggacatggtttgactaattcaatggtatccaatttgcctagtcagcaaatcgactcttttgtcggttggacttcacgagaacaacccaaattatgtaattaaatgtaaactctctattagagggaaagcgggaaactaagtatatttctcttaacaatataaatatccaatgaatatttcaaattaagg

SEQ ID NO: 384708 - DNA, 1896 bp, Cannabis indica
aatatcataaaaaataaaaaaaattcacattgataatggaaataatttaacctcgaaatgcaaaacaattagtatttaacctcatatatataaaataaaaaacaatttaatatcaaaatagaaactattgtttgtaaaatgaaaacaactagcacttaatctcaaaaaataaaaacaattaaacctcgaaataaaaaagtatagtttatgaaacaaaaacagctaatatttaacttcatagatgtgaaatgcaaatatttacaaaatggaagctaagagaataaattccatagaagttatttacaagtattatctcgatgagattagaaactctgagggacaatacttgcattatattcctcttcaaattcttctttgcacttttcatgcttactctacatgttattcatttacatacaaattcacagtaatctaaacacacaaaataaacatataagtataactaactcaaatttaatatttagaatttggaaaaaaaaaaacacaaaacacgagaagaccactcatacttcaaacaaacttaccaaaatctttaactataaaacaaagaaagctgtacactttaaaatgtaaaccaattatttacacaaaaaacactaaaaattggcatatgttaataaatattgattgaaaacaatgtaaatttaggcatttggacaactttagaggataggatcagggccatggtaagcaataggctacccttctgtcgagtttagatccaattcaagcatcttttttatttattttttttgagtaaacatctttttgattttaatacaagttgatcttgtctttctttttcttttctttttgtcgtttttttttttttttttttaaatttactatttatataaacttgggctaagacttaagaatacatttatcatagatataatggattggtagtccatactccatagtaagattaggtctaatctatgagtgaaccatatattaaaaaacaatgaatctaaaacattttgaaaataactaaaaatatagtgacttagttaaggatcagtttctaataaacttctactcaaatgacataaagacataaagatatctgtaaactcagtaattataacaaacaaaataaatttggtttaaacaaaagtgtatagcagaacaaaatttgaagcttctccataatcctcataagcatgtcaactttgagatgaaagaaaaagtattacccttgtcagatacgcaataacgatcgtccacaatcaaagtaggtgattcttttgctttgtcagcttcacatttggctgagaaaacatattaaagatatgttattgcagagcaaaaacagacaggtacttagattctttatgaatcaaacacctgctactacagagtttagatgagtcgattactgaatggcgagctcgaaggcaaactcaaaacggaagtcgaaacagaggacagttgaagcagacgaaagtcgaaccagaggacagtcgaagcagacggaagtcctaccagaggtcagccgtagtcggagaggaaatcaacagaggtgaagaagaggagaatcgtgaacaaatatattagttaaatcatattctatagatattattattaataagtttttgaaaaaagaaaaacataaataactctcttaaaataaaaattagaaaagtataatggtatattcataatatctctaaagtatttatcgttgaaaaaggaaaaagatagataattatttttaaaataaaaattaaatgattataatcctaatagtaatatgaatttaaaaaaaaatcctaaccgatatatataccgtactgatagctttttttttttttattgaacgtacttgttaagttgagaaaactacttcttatatatatatatatataccgt

SEQ ID NO: 384709 - DNA, 1204 bp, Cannabis indica
cattaatagttaattaaaatatatgtaatcctttgattagtatatatttgtatattaatgtattacaattgtatcacaaaacaaaagaaacaaacatatacaacttttgaattcatctatataatataaatacgtatatcttcttcttcttcttctctttctttttttttcagtaaaacagagaaattagtgaagaaaaaaaaaatactacgtaccccattccttactaacctcttacataaatatttatatttatagatcttgaaaatcagtcttcaaggatgatgatgatgatgtggtttgatctgatactgatgacgaagaagatcagaagaatgaaaataatcttttgatggtgccatagtcaagcaatattgagacccagtaattttgggtttattagcagttgggagtgaaactcttcttattatagtttcattattattattattattagtacctttgaacttgtgaagagcacaaccacaatatctatggtaaggccttcgatcaatctccatatcatgtaatgatatgcttccagcttcaaatacacaacataataacatttcagccatcgacatatttattaatatatatgtatcaataaacaattttattgtctacatatatatatatatatatagctatatgatatcaaagagagaggattacgtggaggttgaatagaggagtttgttcaatagtaggcaactgaaaaaatgagagagagggtttaacaatcaacaaaggagattgagagtaggttggtttggattggcttgactatatatattatgccactattttatacaataatataaattataatatatatatttgttttgtacacatggatgactatcatgtcatggtatataaaaatttacttaattgttattttattttgatatatagggtttgttcaggaatcaggaatagcgaaaggaatttctttgaatccaaattacgtatatgtctaaaatataattaaggatgctcattttattgtttaatatctcttgttaacacctttttgtggggccctgtatgtgtgtgtggtgtatttatatacgtatgtactatacaatagtaatacaaggggaggagggacctacatatgtttgctacaacagaaaattacttttacgtgacactttttttagtcacaatataatttttttgtgattaaatatgactttta

SEQ ID NO: 384710 - DNA, 1294 bp, Cannabis indica
gtgacagaatgtcatcgacatatacaaggacaatggtaatggactactgagtatgaaaaatgaatagtgactggtttgcttttgatgaggtgaatccaaattgcagcaaactttgatgcaacttatcaaacgatgcccttggggcctgcttcaacccatagagagccttgtgcaacttgcacactaaatcaggtgcagtagagacttcaaagcctggtggttgtgtcatatacacttcttcctgtaattcaccatttagaaaggcattattgacatccaattgcctcactatccatccttgagctaaggccatagtgagcacaactcgaatagtaataggtttgacacagggctgaaagtttcagtaaagtcaaagcctggtttttggtgaaatcccttagccacaagccgagccttgtacttgtacacactgccatccatgttctatttttctcgataaacccacttgcaaccaattgcttttctactaaggggaagcctaacaagagtccaagtggcattcctagcaagggcaagaacttcatctgacattgttgagttccagcgagggttagcaagggcttcagcaagagtggtagggactctagatgccatgaaaaccttaggttttgaaatgccagatttccccctggtttgcattggatgagtgttgactgttttgggtgcagaagcattgcttgaactcattgtagcaccattaagaggaacaccaccagtaacctgggataatatttcaataggaacgggtagagtatcagtagcatgagtgttgttgaagttctgttgaacttcaacattggtgaaatcagtatccgaagcacctgcactattataaatattctctgcacctgcattgttagaaacattctctgcctgggttgtgtgcgtggggctactgccgataacattaatggtattagtggagtcattagaaacatgttagtttgagctttcagaaataggagaggactgagaggactcagattgaggagaaggaaaagtgaaattgtccagaccaggattagtgtggtgattacgatgtgatgaggcagtgggaatgatatttgacactaaagaatcagatgtgtaattaactggagtattgggcactgaagataatttggccaaaggaaatgaattttcatcaaaaataacatctcgagagatgtagatccttccattagaattaaggcatttataacatttgtgatttaactataccccagaaagtacatggagaggatctgaattctaatttgtgtctattgtatgg

SEQ ID NO: 384711 - DNA, 1263 bp, Cannabis indica
agtatatatatatatatatatatagtagttactaaaacattaccaatataataacttaacacctctaaaatattaagttaaagttaatttatttagggaatattactatgttaattaattattggagagaaaagaaataattatataactgataaaaaaaaaaagtagaaagtataataaaacaacggattaaattggaatggtctaagaaagataagatatgggatataagacaaaaccattaattatccactgataataaagtaaagtagaattggagatggaagatacacatttttcttttctctttcctttttaataacagaaagatacacaattttataattgtacattgtaataattacagcctccaaagtctaaagtgggtcactacagtggcacctcagcctgttgttaaaatggcaatatcctagaaagtcttacttccactcctcgtctccattcccattccctagatagaccgacctttctattggcaataatcctattccattccgcaatgtcagcttccaccacccattcttggactctcacttcctctttttctttcctctgttttctcacccttctctccggaatcaaatcagacgacctccaaattcttcttagattcaaatccgcattccaaaagtccaattcccagttattcaactcatgggattcccacaacactttatgcactttcgctggaattatctgcaacaacaaaagttttgtcactggaatcgaattatcgaatcagaacttatctgggattcttccattggattcgatatgccagctcaaatcacttgaaaagctctctctggggttcaattccttgtacggtaatgtaatggaggacttgaggaactgcacgagactgaagtacttggatttgggtaacaacgttttcaccggacccgtccctgatttgagcccattgaccgatttacagtacctgtatttgaataagagtggattctctggtacttttccgtggaaatcgcttggaaaattgaacggtctggtccaccttagtcttggggataattcattcgaaccaactgctgagtttcccaacgagctgttgagcctcaccaatttgaaacttctttacctctcgaattgcagcctcggaggggaaatacccgctggaattggaaatcttgtggagcttcaaaacttggagctttcagataataatatgaccggcgagctaccgaaggaaattggaaaactcaccaagctatggcagcttga

SEQ ID NO: 384712 - DNA, 1024 bp, Cannabis indica
actacaccaggtggtggatcgatggagtagctgtgttttgctcatttttcattagtgtgattatgttatgctatcatgttgttggatcatctgtttggacaaaataagaccaaaatgggaaatggaaaaagaaaaagaagctcgattcaaaacagggcttctattgtaatgacaatggttaatgatattattatgattattagttgatgggattcttggtttgggaaatactatcttatcttatttttaaataaatttaaccttggtgcttgtgatttgatccgactttatatcattataatcatttgtaatcactttatactattgaacttgttcattcatgtaaatatagccaaatgctaaatgtaatatcattttgtgttgaatgtgaaaattgtcaacttagttaaagggcagaagagatcaaagtaaagatctaacaaagatgttttcattcagtaaaaaaattcttaaatagatcactttcctagatgcctatcttgttgtcttgtcctctctattgtaataattagagtttttagcggttaagctctctcaattattattttacttgcatttaatcttccataaattttagtaaaactttctgaattactgaactgttaacaaatttaaggtgtcatccagttaattgtcattattgactgtttatgtgtacaagagagtatatataagtagtccatgatagcagttaattgtaaaaaatagatgatactttaaatttgctaacagttcattagcttggagggctttacaaagggtattcacatattggtttgattcgaatttttaatttttttcaaaccaaaccagtattacatttatttaaaaatttaaaaccaaaccagaccagttaaatgatcaaaccaaaccaaaccacttaaaaacagattgcttggttcgaaccatggtttgtatttcatagtatcatagttcttctattttttttttactaataattgtttattttttcggtatttttttacttttaattaagtttata

SEQ ID NO: 384713 - DNA, 1708 bp, Cannabis indica
aggatctaaaaatgtcacattcatttacatgactagtattaatgacatttagaaaaagaaaaaaaaaaaacaatggtgatgatattcccttttacaacaaaagacccatatctttgtgaataggaactctttccccactcctattaaaatcgcttatcctatgagaatatcatctaaatataaaaggttacaaaatcaaaagaaaaagaaaaaggaaaaagatttctatttctttttttagctaatgatgtttttgaagctaatttggattctttacgaaattagatctctctggggtcaacaaaaatggacaggccaggaggtgatttggtccagtcaccgacagacccgtcactataatcttccccaagtctcttaatgcaccacaaatcctcggcgcacgatagtcttttccagtgcggaatacctaacctaagcggttcgtggctcgaaacctccgtcgcaactacaccacacccacgctccttcgccaaattatgcgcgtgagcacaaagcgctttcacaaacttaaccgcgcgtgggccttctcctcccaaaccatacaagaaatgcagcccaaaaggcttgaagacctcgggcaccgaagggagccggagccatgggagggcccgatctaggacacgagtagtcttggcgagcgtgcgcttcactcgcgacacgccacggacttcgagcgtgaacacgtccttggcgttccacacgctcagcaacgcccacgactcgggcgggctagacaagaaccggttcgacccgggccacgtctgcgccgtgtaagtgccacgtggaactgctagaaacgtccccaacgtgagcttgttgttgagaaccgagtcgatgtcgcgggggaagaactcagtggtggcgtaacgcttccggtataggaactcggcgtcggaaggcggaagtttgatcacggtgacccgagaagagacccggacccggtgagcgaataccgggttgacgagtattgaaggtgtacggaactttgagtatccacatttgtcggtaaagagattaacggaagcttgattgtcgttatcggttgctaagtaagaatattcagcaccgttttttctgaaccactcttccatatcacgaaccagtttcaacccaatacccatcctcctattattaaaataaaaataaaaaaaaaatcatcatcaaaaacagaaataaacaaaacggtattttaataaagacataataattggtgggcatttttttcttttttcagaactcgagaaaagaaaagaataataataataataataactacaataatgggatctttattatttaagttacataatgacaagaatgagaaaacagagccaaactaaagaaaagaaaacacaatgatttgtgataatcttttgttaatacttttctgagaaaggatcattaaaggtttatagtacttagtagtacctatgggaaggagaaacgcggagaccaagtacataagcgactttggtataaacaggcacaggtttaggagtagcttcgttattatttttgccatttctggaaagttttttcccacaagtaacagttttgatgcatcccctgatcattcccactatctctttctcttccccaattatcgactcagctacctgttgtaattattggaaaataaacatgttccaaccatattagatgttgtttttaatatatatttatatat

SEQ ID NO: 384714 - DNA, 2590 bp, Cannabis indica
tctctctctctctcgatctcctcctttctctcctccacaagccttcattcaaccaagcggagtcacttccattcacgtttcgctctctccttcgacgtggaagcccacactgctgccccaactgccgtcgctccctcatcctctatccacccccacgccaatgaggtatatatatatatatatttgcaaattggatttttttgattttcgatttaagtttctgtcttttgattatgggttagtaattcttgttcttgtttgaactttaacatagcttaaaggaaaagaaatggttccaaatcatcttgtgtttcctttagttttgttaggtgatggtaataatggattttttttaaatcaaattgatatcgaaagaatttggtgcactataactgagaagacaattttgattttaaaccataggctatattatagcctatggtttgaaactatcgactataacactatatagcctatagtttaaaaccgttagctatatcgtatagccgatagttttaaaccgtaggctatactacaaccaatagttttaaaccgtaggcaatagttttcactattttcgacggttttaactccttagtaaattttttcgctgacagttttctagtgttgcctattctactcaatattgcaacagttgactaggtgacagttatagcatcgacgacaatacattagctgactgtttaaaacagttgaaaaaacccaattttttagtattgcacccatggcacgagaaggtcacttggtgcataaaaggtctcttaaggtgccaaagaagtatttttaggccaaaagctcccttagcacaaaaagttgagccaaagcgcatcgtgaggaggctcaaggacacgccttccatctcgcaccgtgcgcaagaaatatccctaattaatcgtgcaccaccagtaggatcctaggctcgagacgagagcctcccatcttgcatagtaagaaggcccccaatggcacaccacgaggggacttcaaggctcggggacaacttttccatcgcaccgtgaaaggactccaaggcacagggataagccttaatctcacaccacaaggtcactccaatagcgcgggaccaagtttcctttatctctcccacacacatgctcttctcatcctctctatcacaaatatatttaattgtccattcgattaaagctcttttaaaataggttcgagtcccttagcaaaaggagttggaaaatcttgcaatagtacttgataccaaatatattaaaattaaaagtcctcattgagagtcaaaccaactcgaattcagtttcagccaattaaagttaatcaaatcagccaattaagaatgccatctcagataagggattaaagaatctaactaactatcatcgacgaatcctaaattactctaatgtaaaataggaaaagacaatcttataaatattatgcattgtaataggaaaagcaagggctcagatttagattccaagtaagaaaatctagaaaataaaaactttctattgtgaaacaggaaaagacaatcttataaatatcatgaaattcccatttgaaacctatataattctaaaacttttgaaaagtttaaagacttcaaagttatggctgaatagcaattaggtaaattattaaagacactttgataagatcatagtggaaagtgtttggatttcaaattcaaagattaattgttggaagaagggatattatcccaacttacaacacctggaacacctcagcagaacagtgtttcagagagaagaaaccgacccttgtttgacatggtcagatcaatgttgtgttactcatcactatcattgtacttctgatgatacacacttcaagcggctacttacattttgaatgtagtaccctcaaagagaagaagcaacactctaatagaatgagaataaatcccatttgaaatatttttgtatttagggtggccctgctcatgttcttaaattgaagagtgcgaaacttgctcccaagtttgaagaatgtatgtttgtgtgggttattcagaggaaactcgagttggatacttttatagtcatgaggacaataaaatatttgtatcgacaaatgttatatttctagaacatgactatatgaaagatcacaaaccacacagtcaagtggttatggaggaaataaaaaatgatccaattttgaaaccatcaatttcagtaccatcagttgaatgaccaacaaagatcaccactattctggaaaaggaaaccctgatacatcatcgtagtgggagggttgtgagatagcctatctgctatgaatatgtggcacatgttcttgaatctgacacaaacaaggacgatctattgacttacaaagaagcaatggaaggccctgactcaaataagtggaataataccatggatcaagaaattgattccatgcgcaccaacaaagtcttggaatataaaaccccacctgaggatattacaccctgtaagtaaattttcaagaagaaaagaaatgctaaagggaaggtaaagacccttaaaactaggcttgtagccaaaggctacacacagtgagaaggcgtcga

SEQ ID NO: 384715 - DNA, 1716 bp, Cannabis indica
tttgatgagtttatggttcatacgttatgtgttattgaagaaatcaggaaagagagaaatagaaggtctaatgggaaaaaggaggacgatatggtgcgtattactgatctaattacccttaagattaaggatcatgtgatggtctcttcgaagagtcttccggttgttctgagttggaacccgccaccttcttcgtggaaatgttgcaattctgatattgcgatttccaattctgagagtgtgctgtctgttgtgcttcgtgatgaatggggcaatgttgtggcgattaaaacagctttgactcctgtgacaaatcccatgctggctgaggcgcttgctgtttgttcagcggcagacttggctgtttctatgggggtgactcatattttgttccaaagcgacaacctcagtgtagttaaatagtttgaagtgttgatctccccagttgcgaatttcagacttcagtttgcgaaggaaagattcacgcatttgtgttctaagttcattgattgggggatcactcatatctcaagaaagtgtaattacatggtgcataacgttgcttagatgggcgactatgcataaggcgattggaagaatttgccttgatgtgctacctgcagctgttcttgatgatttaatggagtgggatccaagctctgcttctcctccgcacattcatttgttttagtttggttttcttgtttgtttgagctttgactcttgctttagtttgttgctttagttgtttgtttctgcttttggtttgttgttttggtgcttctgcacccccgccggttatataaaaaaaactaattcaatgtcgagataactaataacataatagaaaataataacaaaattttgtattaaagaattttcaaccaaatattataaaaaattttactttagtcacaacaaaatttgtgactaatagtaaaaaaaatagttatcaattataaattatcaaatgaaaaaaagaacacaatcgattacacatttaatgaaaaaatgtcattaaatttattattgaatttgattatttagtaatagtacaagctcttaaaattttaaatattttgtcatctacttttagtgttgttgttgaggattgtaaataacttttctattttttcaatgatgtttctttacattttgtgaaaaaaataaattgttcaccttatgactagagtgtctcatttatatgatgattatattttgtaaagtctaatctcctttgaatgttgctgacattgttcaggccaaattagtatatttaaatgaaatttccagctaaaaaaagttatgaatattaaatatttaaattttaaattatatatacaattttataaaaataataaatatttattatattagttattttcaacactaataaaatttatcaatttcaaatacataaaatgaaatggaaaaaagatttaattaatatatctatattttcctattgaatcaaataaaaaaaatatactaaatatttaatttattaatttgatagactacataaaagagtattgataagaatacattgttttaaatatatatgatataaattaaaaattaaatatgtataattatattattaattaaatataagtctaaaagtgaaaattcataataaattaaatatatgataaataatggcataagtactcaaagttttaagtttgtaagttgcataaatttatgtttattttt

SEQ ID NO: 384716 - DNA, 719 bp, Cannabis indica
aacacaattctaaaaattaaaaatagagccaaccattagatttttttattttttttattttttaaatgatattgtaaaaaattgtatctgttacatcttgttaatatatatacaatcaataaatatatttaagttttattttttttaaatagcattcattcattcacaaacaattatgtaggatttggcaaatcaagttgtaaaacttcgcttagacaataaggattaatcccaattcatatatatcactaattttgttaaagtttgattagttaaactacgagctacttagctccacgttatatacaaatgacagaccaacaaattatcatgtaacaataaccttcgaatatgctttaacattccattaatttccgtacactttcctcttttctagattgattggacaacttttagataatctaattcaatacttaaacgtaaatatagttaagtaagttctaaaattataacaaataattagagagttaaataataaatacatatattatttgttatgatttttggatatatacattgtgtacgatctataaatacggttaagtaattagttataaaatcttaacaaataatatcaatcgtatcaacctaatttaaccgttttcattatccactagtcaaatttggcaaatttttcgttaactaactaagaaattgttaaatgtaaatcaagttaagtaaatttatatatttttttt

SEQ ID NO: 384717 - DNA, 1955 bp, Cannabis indica
taaaaaagaaaaagaaagaaaaagaagataaaataatagtatctaaacgtattaccatttttgttagttaaaaacaataaaataaaagtaaatagatcagatgttttgttttacttttttattttaaaaactaatatatatatatatatatatataaaaaaaaaacatatcatttgtttcctttcaaagatgcaagttttttagttaaattagtagattctagttatgatttgtttaattcttgtcattatatataatatattatttcaaatttttttctattaatatgtgttgtatatatgtcaattttaataaatcatttattaccgagatcattattctggaatgtgagaattagagcgattgtttttttttttggatggacttggattggaaagaggagagtcgtgcactgtggtctatgatgagagtgtttccttggatagggatttgtttctcaagaagaatatacactattagatattactttacccccaatttattagaaatgtgaatcatattaatgtgtgtacatattataaaccttaaattttatttaatttaattaattgaaccatttgttgtacttaaattttatgaatctaatataaaaattaataatattttattataaagaaaaataaattgttaccaaattaagtacctaattatatatatcattatattacataattatcttttctaactatgctaccaacaaatggtagtaaaatagttctattaaacattataatttattgttttgcactagaatgaatatgttttgctaccaattttgtattggatattaaaatataagttttgctaccaaaagattggtcgccaaaataattgtgacaactaccaaaaatttggtagctaaaaacttttagcaaccataattaactaccaacttggtaccaataaatttggtagcaaaaaatatattagctaccaaaaaaaatatattagctactaaatttacattatttgctaccaactttttagtaactaaaagctatatttcttcacggtatggctgacatcttattttaaacttaataatggtataaaataaaattaaataacaaaaggtcatttttataaataaaaacaaattaacgtctggtgtaaatttttctaaaatataactgcaagaaaagcgcgatttctctcctaatttaaatatgagtaagagaaaaacacaaataaatatttgttaaaaaaattcttcaaataattatgtataaattgttcactcaacaaatacataatatttttttaaaaaaaatactttatattatgtcacatgaaaggatttaaaattacagttagtgtggattttttgaactttttacataaatttatgtgactgtgttagaaaaaaaatcctcatgtttaatgaaattatttttttgataaaatatatgataattatttttcatatacatatcatatcatggacgaatatatgtcatacattttataaaaatttagtattaatctggttagattatttttaaaattatttatagtcattttatatcctatatatattaggaatatttacataagatactatttcttaaaaaaaaaattacatttttacgtttaaagaattttttacatatttacagttttctataaaaataacacgaaaataacaagaaaattacataaaaataacatgaaaataacatcaaaacaacaacaaaaaataacatacaaataacaaaaaatcaacaacaaattaacatgagtacaacatataaaaagactgtattttctgtaaataaaataaaaaaaaattgtaaaaatgtttaaaattccgtaaaattgtatttttgtaatttttttgttgtttttatgtatttgtgaaataatccctatatattattgttacttccttcattatggagaaaatataagagatggtctcgcagttaaagtaataa

SEQ ID NO: 384718 - DNA, 979 bp, Cannabis indica
tatatatattttacttttttaaatactaaaaaagaaatagaaaaataattacaacatatttcacaataagaaaatcttaaaattggtataaaaactgttgaattttttaaacttgtttaacatgaaattttaaaatagtgatgtgtgtagtagtgtagtgtacttgtaagtacgacaaactctttgcactagctaactaatctctttgtattataaattaattataatatataacaattaaatattaattatatgtgagacatgttcgacccaaatggaccaaacttaattaattaggttctctccttacaccacacataataattaataacaataagataaatcgtgatttgtagcctaattgtttgtatatataaattttgtaatattactaatagtaataaactttcacttttcacttttcccttttcccttttcagtttaatgaataacacaggttaattataaaagagaaaaacattcaaaaaaaaaataataaattacaattatttaatgttgcatatatataaaagaaaaacattataataaaaagggatccctaataaaaacttgcacgcacttggcactcatcagctaatccaaggcattaattattatcacgaacacctactgctccacatatataccaacattaataaacctaattaaagccaattcaattttttttcaagtattttttctttctatatagatatatatatatactagcaaaaaactacgtgcgaggcacgtatattaaattttatgctaggttttttctatgttatttgaaagtgagattattattgaatactgaatggaatacataagaaagcttaataatgatttaaatatattcttaagttaatccaaaaataaactaaaaattgatgttccaatatttaaagaaacattacttaaatgaggtaagataaaatgaaaattaaaaattaatctctaaattgttgataattgaaga

SEQ ID NO: 384719 - DNA, 1286 bp, Cannabis indica
agacatgtatagaagtgaatggtggtattggcagggtcagtgttggttcttatctgagacaaggcctcaaattatattgggctttgaagggacaagaagatggagaggtaaaagggtatgagaattggaccagaaagttgcttgaagatggtgttttcagggtgtttgagaatatccagaggacttacacatcggcggatgatcttttgactcttgatttcgctgcggagagcgagtaccgtatgtgttggggagaagaaatcaccatagctaaagggtacttaagcataattgagtctcttgcttctgttcttccacctggtttggttcaacttggccgaaaggtgagacaaatcgagtggctgccggtgactactgctagagaaaaatcagatatgtcaaatggttatggcaatactagctctacgcctgtgaagcttcacttctgtgatgggacaactatggtggctgaccatgttattgttacagtttcattgggtgtgctcaaagctggagttcaggatgatggttcaggtatgtttaatcctcctttgccttgtttcaagactgaggcaatatcaaggcttggttttggggttgttaacaagcttttcctccaactgagccaaagttatgatcgaaaatgccaagatttccaaagttttccatttctccaaatggttttccatcgtggggactctgaacttaggcaagaaaaggtgccatggtggatgaggaagactgcttctatgttcccaatctatgaaaattcaaatgtcctgctttcctggtttgctggaaaagaggctctcgagcttgaatccttaaaagaagagcaaatcataagtggggtttcatctgctatttctagttttttgcctaaaccattttacaagaagggaaatcccacttctcctcctgaattattattattatcaaatgggaatgtgagttctgcagacaagtttgaagtgaaagttacaaaggtattgaagactcaatggggtaacgatcctctgtttatggggtcttatagttatgttgcagttggatcaagcggagacgatttggacagaatggctgagccattgcctagcatcagtagtcaagagtcaactgtttcccctccacttcagattttgtttgcaggggaagcaactcacagaacccactactccaccactcatggtgcctactttagtggtattagagaagctaataggcttctccaacattatcactgtgctggggtttagagaatttagtttctttttttcttttttttt

SEQ ID NO: 384720 - DNA, 4817 bp, Cannabis indica
aaaccaagtgaatggatgaggtgttgggtgtagaaccaatggaatttttagaagaagaagaggatcgattaacaagtgctcctaaggtgaattctaacttgcaggattgctttcaggaacctctctcacctaggtcttccctgaattggatactgcaacatgaataagtaaaacgagatttcaacttcttcctggaagctagtctggcatgttcgaaagagatttcgaaaggtatcaatggatgacaatggatgatctggaacttaaatattgggaggaaaagtctctattcaaaattatagggcaggttggggaaccaataatggtggatgcagtgacaaagggacgagataagtttagttaccctagggtgctaatcgaggtatctattcaccaggattttccttataccatttattttgagaatgaatatggctctaatgtacctgttaaggtctcttatgaatggaaaccaatcctttgtaaaaattgcaaaggaatgggacatgagacaagtgattgtaggaagaaagaggggaagcttcatgggtgggtgataaaaaaagaacaaaaaaacaagcaagcaacatagatgttgggaaacaaaatactgaggcattccaaccggttattaaaggctggaaaattaaggagaaggagcctatcaaattgccctaaacatcaaattctttccaagctttggtgcaaacaggggaaggtcaaaaggacaaggcaattgaaggggaaactcaatctgagatacaagaggggaatacaagaggggggagatccctctcttgtaaataaataaaataatttgttagaacgtctgagaaatcaacaagcagcataagcaacacagtgtaaagcaatttattgtgtctcaaaaagctgatttggttggtctcctcgagatgagggttaagcctccaaaacttggagacttataccaaagaatgtttataggctggtgtttcacgtcaaattcaacatggtataaaggttgtagaataataattgcttggaatcctctcttattcaatactagtatccttaaatgtactagtcaattgatacatcttcatgttgagactgtaaacaaaaggtataatttctttatctcttttgtttatggttttaatgatgaacatgggaggaaagttctatggaatgatcttcgaagcatagcaagacaagatccttggatagtttttagggattttaatgatatcatttataaagaagagagaattggtgaaagacctaaggttggcacatctactgcttttttagattgtgtaaatgattgccaaattttagatatcaaaagcagtggctgtttcttcatgtggtgcaacaagcagcaagcaagggatagaattttctccaagattaatcaagtattggctaatcaatcgtggttggacatgtttacgatggctgaagctatatttctcaatgaaggcacttttgatcatactccagctatgttaaacatttatcctgatttccatagtggaaaaaaaccctttaaatacttttgaatgtggacttcgcacccaagatatcatcaggaagtaaagagaatttgggagcaacaagttgttggaataaaaatgcatcaagtcgtcttgaaattgaaggccttgaaatctttctttagagaattgaataaagactcttattctgatattcaggcagcagagatgaatgctaagaaagaattagtggagattcaagggttgcttcaccaaaaccctttagacattaaaatgcaaaataaggaactggaggccaaggagctgtatgttaaagtccataaagactcctgttcgtttctacaacagaagtctaggatcaattggttaaaggatggggatgaaaatacagttttgttccattctagaatcagagagaggcagtgtcaaaacagaattttatccatttcagatgcagatggaaaaagattagaagatcctgagggtataacaaaggcgttccttgggtttttatcaaaacatactgagtactaagatggttaataggagaactgtagaccccaaattaattagaagaggcccatgtattacagagcaacatgttcggctgcttacggctacttatgcactggaataagttaaaacagccgtatttacatcccagcaggcaaggcaccatgaccggacgggtatcacagctcattttatcaagacaattgggatttgattgggaacgatgtgtttgaagctatcatcacattcctctgcataggccatctgctcaaggaaagaaactcgacaatcatcacacttgtgcccaagagaaagttcccaaatgtagtaagtgattacagacccatgggttgttgcaatgtcttataccaagttgcaactaaactgataggcggtagattgaagctcatacttccaaatattgtagctcaaaatcagggggattcatagcccaaaatattatgatttgccaagacttgattaggcattatgggaggaagaatgctaaggctaattgcatgattaaattagacctacaaaaggcatatggttacgcattatggagtggagatttttagaagaaattttatatgcttttcagttcccagttcatttcattaagaaaattatgatctacatcactactcctaaattttctctgcttttcaatggatccttgcatggattcttcgaggctaagaggggcctcaggcagggagatcatatgtcaccccttctatttgtgttgggtatggaatacctcagtagaattatgaagacaataggtgataaagaagaatttcattttcatgaaatgtgtgggggattaaagattaaccactttagttttgcagacgatgtccttatcttttgtaaaggtaattttaagagcatctatttgttactaaagagcctcaagttattctcaatgacctcgggtcttcaccctaataaacataaaaatgcaatttattgcagtggaatgggagaagaggaaataagaaggataatggatgcttcaggttttccaagaagcaacattacatttaaatacctcggagtacctatttgtgccaaaaaaatatcatccactgaatgtttaatcctagtagagaagatgaaaactagaattagggtgtggagcacaaggaatttgtccgttgctggaagaacaatgctaattcagtcggtactattgataattcacacttattggagccagattcttatccttccaaaaaaagtaataaaagaattagaaagtatatgcagaagcttcttatggacagggaaaaacaacatgaatgggccaaataatattgcttgggagaagctatgcaagactaaaaaagctggaggaattgggtttctagacattggaaagtggaatcaagctattgtgccgaaacatgtttgggcagtagctacaaagaaggacaacctataggtgaagtgggtacatagtgtgtatattgatcatgaagattggtggggcataaggcccctactcaaagatgctggtactagagaagaatagtgagcatcaaagaggttgttaagctaattatgtcacttgatcagtttgcagctaaggattttaaaattgcttctgcctacaagctgcttaatcatgaataaagagatttccatgttggtaatcagctctggagtaggcttaatgttccaaaacacagttttgtactttggattgcagtacacaacaagctgagaataagagataggctcctgtactttcacatcacaaatgaagctgcctatttgctatgcaataatgcagaggaatttatccaacatttaatttttgtgtgcaaattttcacagccatgcttacaaagataaaagattggctaggttggagagtcagatctaacaacctgcagggtattctaagatggatcaattgagctaaaatgagtaaattcaaaaaagagttgctacactgttgtggttgcaccttggtttataaagtatggcaggctcaaaatactttattctagagcaaggaatgcactgatctcaaggtgctagtccaagaagcaaaatggctagtgaaaaatataattacttgtataatgccaaagtgtatagatcaaagagatatagaatggtttagattgttataaggtgatatatgtatagaaaaatatgctccatggagagtcgtagcttgtataaaagatgtttgtatgcaatgaaatttttgattcatcaaaaaaaaaattaatattaaatatgtaagcataattgtaattttcaatcatataaatgatatttaaattaatttcttatctaattattagttttttagctaaacaatattactattatttattatatactaatctaattaatattcttgatattttgtttattatataaatattttaaaaaatattaataatataatatttttattaaaacacataataaacaattcttgaaattaattaaataaataataaatagttttataaaaataaataaattaaatatctttttttattaaagagtattatctatttgtatggattattataatttaagaatttttttagtaaaatacaatatccaaattataaataataatgtatataaattttaaaagtgtgtttattaaaaattaaataacatacaaataaataaaatataaatatatgtttattatattattataaatcaatgtttacaattttaaaggaatttatagtagtcgtttataattatgaatattttttaataaactactagatgttatcaatattataaacattaatatatataaat

SEQ ID NO: 384721 - DNA, 1967 bp, Cannabis indica
agagagagagagatgaacttgagaaagggaaaatgagagatgaacagagagaatggagagaagcagctagtggggtctcgtatatatatactgaagagagagaagttttttcagtagtgactttggaaacgtctgtatgggaatgtgtagtaggaataagaaggcaactactagtgctcccagatttttctaaacagctaacgtccagctaaatcacctttgttatgtcagaagaagaaaacgttgaatgcatgaaatgacaataaaaaaaacttccaattattaattcttccttaagtaagaggaagaaaaaagaaaaaaaagcccctgaatctgattttttttttttgacaaacaacaaatctgacttgaatggtaagattttgcaaaaatatttatttatatttaaaaacagtatccagtttagcaatttcagagtttagcttatagcttaccaaccatctggctatgagtcaagaagtctcatatggctataagtatcttagaagctctcagtcaatggcagtatttttttggctacagtagtagtacactccttatggaaaatgaactaagagagagatatagacaatgagtaaatttatttattttaatttttttttaaaggagaagaaccaaaccaaaccaggaattaagattctagataatataaataaactacggacttattagcatctatcttcaaaagtactcaaaatctaatttttttttattttgcatgagggtatgtataggtaccaatcttgtagtttgtccttttatattttttactccttccgtcatatatttgtatattattaattatttatattaaaataagcaaatgcaaattaaacgtgattgagcgggacccactttgtgaccgtagagacgactacagtagagtctagcctagcatgaattccataccatattgtctatatatacgtatttcttaaaaaggcattatataaacaaatgtaattttcacgtgagttagaaatttatccgttgaaatgagtactgtattgaccaccaaccaagtatagaaattaacaagctatcacaacatgaattcctttttttttttttattttgaaaggaatcacaacgtgaatttgacgcaccgatttaattacatttgataaatttttagatgctaactttttttttattatctcccactactaactttactattattatataatttatttctacaatatatatggaatactataaataaatttaattataaatattaattttaaaaatattaaaccattagattttagtccgataacgaataataaaagagaaatttatacttaatttagttacttaattaaaaaaatatcaaaaaatatatatttctacactatatcaaaaatatatttatatgataaaatatttaagtcaaattcaacttttttttttatcacttttttgccaaaaaatgttttttattattttttttttcagctgatggatcaatctccgtccacataatgtaaaattgagaaatttttctaattaaatagaaaaattaatcataaaaacttaaaattttctaatattacccattcatgagtaatagccattaagagtgcaaccatatatataaacatataaacatatattttgtgtttacccatttgataaattacattatttgttttcttcttttggctggttttagatagtatcaatgtgtctgactggtatatgtgttatgaattttatcatcttataccatgcatataatatattaggaagccatattttacatctcacacatatactattattatgacagaatcataaccattttataagtgtgaaataataatgcctctatttatttgttattacttattattagtatacctggttataatcgaatttaatagtaatatttttttaattagttttttttttaattttataattaaaaagtaaaatatttt

SEQ ID NO: 384722 - DNA, 668 bp, Cannabis indica
gtagtcttaaataactacgaacaatcattataacagataagtttctactacaaaaactttcaataatatatttctatagtaatagtctttactaaaatatttgaatattataaataataaagtgttaaatacataaatattataaataaatagaaggtatggggttgggattgagaggtagcgtttgagtgtgcaatattatgttattgaaagcaactaaaaattaaaaattacttatataattttttattactcatttacttatgtcatatggaaaatgaaatataccttttctttcaattaattattattattattattttacatagtaaaatctaattaaagagattattaattatgtacgtaataaaataaaatatctttttgtttggtctaatatgggctagtttgactgaatttatagcactgttttagtgtgagaataaatgaaatattcttttaaaaaaaatgatatgtagtttgaatttgttgctaagtatattactatgtcctttttaataataatagtaacaaaaaattaaccaaagttgaagctaataaagacaagaacaagggatttcaaatatatataattagaaatttataatacatattttcaaacttaaaacctttaaacttaaaaaataaaataaaataaaaaaaaatga

SEQ ID NO: 384723 - DNA, 1531 bp, Cannabis indica
gtaacagttttttgtagtgtaactcaagttccattgtagaaaagaatcacaattctaatattcatattcttgtgtggtttatatagtaaacgttagtttattcatgttatgtgtagtatacagaaaaaattgttcatagtatacgacaagtttgatatattgtaagtattagtttattgatgttgtttatagtttattgttaaggaagataacatgaaatcgtgtaactcatgataacaataaacatgtaataagaataaaccaaaataataaacagtattgataataataaacatgtaacaagaataggagtagcatgcaatttgaactataatatgggcatgattacaataatagtggtttatagtttattataaatgttaagtgtaattattgtagatgttttttaggttagttgtttagttggaaaaatagtgttcaataaaataagcaaacatcatattcgtttagttactaataacattaacaaagtatacatgttttccatatagtgatttcatattaatatgttacattttaattgtatacagtatacgaattgtataatgagttatagtatatgatttttacaaagttagagaacgaatttgaagcagttgttcgtaatcgtatatatagtatacgaatcatgattatgtttatgctacctgctcaataatgttacgatccaaattagaatgtggaagatacaatcgtagatttccctctgcgatttttacaattgttaatttaaagtagttattcgtaatcgtatatatagtatacaaatcatgattatgtttatgctacctattcaataatattacgatccagattagaatgtgaaagatacaaatgtataatagaatgtagaaggtgggtgctctatttttttttttttttttggtgagatgataggtgtattgattaattgagtgggatgatgattcatttgttgtataaaacaatgaatctgtatccaattttcttctcaagtactaagatggatcgatttatttggtctgtatggttttaagctcttttttttttagtctaatggagttctcttatgttcgatctccttatggttttgaattttttatttcgtttactagaactgagaaaatatataagtttcctttttaattttgaaagcacgcattgagaaggttgagaatcatggatggttagcgcgtcctgattcctcatttgatgatggaaactaattccggcagccacgatatgaatggctaatgttgcacggtgtataaactcatttgttgaaccaccatttttgatgtaattgtaatgtctataatgtatatttgtaaaaaatttccaaactattaagcacacttatgtaatactatattattaaatttgtacgtgatttgctaagtaatatacaatttacgccactaaattgtaattctataaagtatatatataggagaagattatggcaggacttagcataagttccccaccggtagggaagtattttttatcgttgattttagatcatgtggtt

SEQ ID NO: 384724 - DNA, 762 bp, Cannabis indica
aaaaaaaatataaagaaaagatagtttaactatcctttaatgatggttttgcgatagtttacgaaaacaaacataactttcacttgattgtcattttggcgtgattttatttatttgaatttcagtctttttttttccttgtgagatttaagagtttaaatgaggaaaatcttagatttggagagcgtagaacaacaaattttgattatctaagtcttaatcttttatggcctaaaaaaaagatattaaaacttgttctacacaatctaaatgtgttggtcacgaaaaacatatcattttcttttattaaaaaaaaaaaatcatctcaaaccaatgaccacttgtcttacaatttttttatgaaattccattgcaaaactagtgttaaacatcaatttaccattggttttcacttgaaaatagagcaggaccattgttaagaacatttttgtctaaaatttaaacttggaccattgttaagcatcatttttcacccaaaaaattaacttttaatggaacttcatttaactattggtatgaattaaatttaatcgaaaattgtaagtttcagggaaaaaaaatccaaaaaatattacatataagtttgaaatttatgaattcgtgtcttaaatgaatattttctttgtttcaaagtttgatcttgattttcacttattaaaaaataaaaataagagggagcatgattatggtttggcagtgagtttcgttttcttttacaatcattatatatatatatatata

SEQ ID NO: 384725 - DNA, 1452 bp, Cannabis indica
gcaacaattgtcactcattattaattagattgaattagattttaaggtctaaattgaaataaatttgatgatgattttctaaattaaattactaattgaattggattagatgagaaaaaacatgttgaattgagtcgaatgtccacccataatgtcgcccaaaacatgcccccatcgaatcaaccgtcgttgcaaatcacaccaccaataccaatgaaggaattcccacttatcaccatggagttttaaaaatatgtattaaaatgtcagccttcaagtttattatttctctttttgataaatctaaaattattcatttgcttttaataagaaaaatatattatttattatttggagtgttacatgacataaggaactaaacaaatatttattatttggagagataatttatttaatctaacaaacctcttgatatttccataaaaaagaaaaatctttatattgtagtggttcataaaattaaaattatccaaaaatagcactaaacaaaaagcataattattaattagataatgtttaataaatcaaccattatcattacttgtatttatttattataacacataaaaataaaaataataataataataaaaataaagagtaaccaaataaggaggaacattgtggatcccgcaggttctcattttcccactagatccaggacaagccttcctcaatcacgaggcctattatccggcgctttttattcacttgaaatgtctaatatacccttctgcattacgctttggcgtactcaaaaacagtccataattagtccttttggacgtgccgatatgggtgggtcccactaataatggtctgtttggtaggtgacattagactattctccaagtgcttgcctaacccgtattaagggaatctatattcgagtcttccactcatcaaattaaaaacattaatatatttatacagcatatggtaaacaataaatttttctgatagctttcggttatgataattactaattagggtacgtattaatatctatattggctgttcattcattgtcggtttcaatttagttggtttgctataaattctattactatatacatctgccttggtttggcaaattatttccttcacagccacattatgttttagtgtatcacatgtactcttcccttcttgtaataaaaataatgcttaatatctctatatgctaaattactttattttgtagagcatatttttaaatattttatactaggaaataatagatccgcgcttcgcgcagttttaataattttctaaaattttacattaaaaaaattaatttctagttatgaatgaaattttaagtctaatattttttaattattttttatgaataatataaaattatataatatattatgtaattttttttttacataattagcatacttattaatcataatataataaaaa

SEQ ID NO: 384726 - DNA, 793 bp, Cannabis indica
ccatctgaaccatacatggataccttgtcttgcctatatatatataatataataggaagtagagagagtgattacaacttaatcatactctctgtatgtataagcacgaaacaataagtatagtagaaaatgaaattctgttcaatccttattattattattagttatatgttactctttctcctccttctatttgtatcatcgcccagtatcttcgtggcacaaaaatgtttcagccgtccaggtgcgtaagcatttaatttatattacaactagcactgtaaatttggtacaatattgatttgttgatatattaaattatatttttcttatatataaccactaacattataattgtagtagacactttgatttttttttttatttgaataatgtacaatattaaaaataatactaaatggtcagttctacgtccgtgcatcaaatttattttatatggttaaaatttactgatttcaacttattttttatactataaagtagttataatttttctaaaacctggtaaatatgattataagtactatgcataatatacaaaattatgtatgtaagaaaaattgagatataatttctctagctaccaaaaaaaaaaacacccagagtaataatctattacaaattcattttaatgggtatttttacatttatacttcaaaatagtttcttttatagttttacagaaatacacgttaaaatccacataataattaatagagtaacctaaatcgtgactataatcaacatagcaactcacatagaaattacggag

SEQ ID NO: 384727 - DNA, 1301 bp, Cannabis indica
tttttttttttgtttttattataacatctttttttcatacatcttgtttgggaaaattatttgtgcaatatcatttcttgattcaagatcttataaaataaaaacataaaaagcacattaattgtaagggcaatgatatattccatatgccataagttgtaccccagtgaccctgcacttacaaatgtatgtttctagttaaatatttattttgatttttataattaaataaaataaagggatccataagcaagggcaatgatgattaatgatactcaacacgagagagcataaacaaaaagagagaatagaggagaggcctggttggaaaagtcatcatagtctgtctttctatctgtttattcatggtgggtccgcaacaaaaccattaattgttcacttttctttaattatgtttaattgaaaattaagaagaggtgctaattgatctaagataatccggcaccgccacaaccgtcctacaacaatgcttataaaacgcaccttcaattgttcatcctaattttactttcttctctagtttagctaaaaatatgcattaaactatctctaatgatgatggtgtaaaatttgtactaaatttaacttaaaaataaattaatattatatttggcacatttaataattgtgctctaataatgtattaggggtaaaataaattttatttataaaaatataaaaaattattaactacaataataagtttcaaaaaaagtaatatgtattgtacggtaaaatttaatttatttatgttatattttgtactacatttacttcattttagtatgtgctaaatttatgagaaaattacacttattataggattttaaaagttcttatgttaaatatgacacttttaagtttgaccaatttataaggtatttttttttattattatttttaggtctttttatggtatttaatatgccatatatataaattaggttttcaaataccatatttgatgttagctaattaggatttttacctcctaaactttaacgtgtaccaaataattatgtcccttgaatttttctggccgttaaaaatttcccctgaactattgagattgttagatgtaaggacttttatttaatttcattcaattttactatttcagtgattatttatgtactgaaccatactccccagactttgatatctaccaaatcatgtccctcgaactttgacatatactaaatgatgccccatgaactttcatccatgttaaattttttttactaaaattagacaaaagtccttaaatccaacaatcttaa

SEQ ID NO: 384728 - DNA, 1294 bp, Cannabis indica
aaaaaaaaaaaatagtataaaaataattcctcttacttttttttgtcaatatttttcttatcacttttttaactttaaaatatatttaatgcaataaaaatataaatttataccaattttaaatatattatgtcatgtaaaaaataaagtatgcctcctataattaaaaaaaaatatcccttattctctcaacttaaattttagctccgccattatatatattggatttttttacccttaaaaattaacaatactttatgtagtttatactggtttatttataatagcatagcaagtctcagttatttattgatttattaattataagaaataaaataaaaattaaaaaacagcttaaaattgcattttaataagatttgacactctatctatggctcctatataaaccctacttttgacagacaaagtttcatcctttggtatttcattttttaccccatatttacgctcccaaacaaaactaggtaagaagaaaaaatggccaaacgtttcaacttcaagcttcgaatttccaaaatcattttttctatcaatccttgtggtggttccaattccaaagacccctcttccaataataatccactactcccatctttcttccgattctctacggtcaaccccacagtactacttccaaaccaccgctcatcacacaccatcacaacctcgaccacaactaccactacccaccgttctttcctgaaacgccacgtgtcttccgcattcctttccgcgggatgctgtcgcagcagatcaaattcgcaacccactcactccgaccacgacgaagaagaggacaatatcggtattacaacgacaaaaaaatcgtcacgtgaacaagacaacaactggcacgtgatagaaaatgtgttcgaaaacgacgtcgtattcgaaacccctgctcgccgaaaagtctacacttcctctgtttcagggcgttccgaaaccgaaaacgacgacgttttccttcctcctcctcctccgcctccttcttcagccgaaactaaatttagaaagaagaagaaaaaacgacgatccaaaaggaaaacgacatcatcagtagctagatctatactattcagaatcagcacttcttcagccgagagtggaattttcagcaacgacgaaataataaactacaataacgaattaaacgacgaagaagaaacagagactttagtctcatcttctagaagcttctccaccacaactgattattcctcttcagaattattcaacacacagttagaaaccatacgcgagaccacactgg

SEQ ID NO: 384729 - DNA, 2642 bp, Cannabis indica
tattatattttagtaacaactaacattttattataactaaaaattacatttaatatcaaaaaatttatattgtaactaaaagattctcattaaatatatatatttttagtatatatagagtaaatgtatacacaattgatataaatatataaacatacattataatttacaatatatatgacacataagtgtttagcaaaatctttctctttggctttagtttttcaacatgttgaaatttttcattagcttgggaatattaactcctttggcaataattataaactttattgacttggtaatagccctatatttatatataataagctactaaaaaagataaaaatgctatatataaatatattaatcattagtcaaaagaaaaattaatcattggggccacttgtagcatctaggattatccgaatataatttatatgattgttatcctaataataataattaataatttatataatacatatatatatggattggactcataataattttttaatttaatttccattccaaaattttattcacatatacatatatatacaaaaattcaaatcaaccttggttgtatattaaggatatgtaattaatgatattaattattaactcagtccaatttcttttgtatcataataattgaggtgcatgaactatactttctttttctcttaggtttttgctaagaaccaattttctcttattaaaaattatatcttttctccaaacatactaggttttttttttttggttttattctgtcacaatatgattggttcaattcaataaattattatatataaacaaaattcaaaatatatatgaatatacaattttatcatatatttaacatatttcccactatacatttctcaaagatctcatattttggattatattatataattaagttaataagtccaaaattttggtgtatgtacatatatgggtggtttacagaatcttggacttattaatgatcacttttttaattgggattaattaatttagttcatatgtcttatctctctaaatatttatattatatatatttttgctaagaattaatatattatatattaattaaggattatcttcaagtgtatataaacagaacaatatcacatgcatttctgacccaaatgaactacaaataaatatataatatataggtcgaattcgttcacaccaatatgtatatatttgttagttttttttttcttttgagaaatagaatataaatatctagaattatttaaggtctttcttagttgaacattatatataattaatttagtaactagtaataaaaaataattaagtatttgtcaaaaagataaaaaaataaataataaaaaaaacgtgagaggcataagagagagatgagtgtatatgtatacatgtggtggtggttgacatatataataagagttaaagagtgttactgctacaaactacaaactctactgatcattcacatgcatatatataaatatcatatatacatacatatatatatatatatataacaatttgacttattattaggtttaggtataaagccccacgtatcatgtatgatcatatatatatatataacagatgtaagaatagtggtatattggtgtgggaagtttgtctatttgtcaatttgtcatgatcattatttcacaaaatgatatgcaaaatttgcatgtcatgatttcacaattatttcataaaataattgaaagtatttacttacacaatctccaatcacaatttgtgattaattaatatttaatattacactaattaattttaaaatatgtgatctgaaattttatttttaacactataaataatttatttttttttgaaaatttataacagtactacaaaatgacgaattacaagtaattaatagtttctagatagcaaataaaactcattcaatgggttcgtaaggatcagttacgcagctgccccatcaaaaatggacaaatgcatatacattaacaaatattagagaaataataataaacaacactaacattggagagaaattaaagaatatttttttttatacattaacaatgtatatacgcgctgggaaaagtcatttttgctagtactttttattttatgatggtaaaagttctaatacgaacattgatttgtcaatcctcttttaccaacacatcacaagtaaattttattttactagcgcaatactaattttttgtgcgggcaaaaatgacatttcttgtagtgtgatccatttaagtattgggttacatatagtttgtaataacttttagagagtatcactagtcaatatttaaagtagatatattagacaccagtggtacctagtttaaatatttatgtactctcatttttattatggcatatgcacacttatttggtttgcattaatgctattaatcttctctcattaaattcgtgataataaatttacaaatcgataaaaattattagttgttatttaccaaagatatttaattgaccacgagctagagcaagaatgcattgaatcattgaaaaatgacacatcacggccatgagagagttctcataaataagaggagaattactattcatataccattttttaattttttttt

SEQ ID NO: 384730 - DNA, 1315 bp, Cannabis indica
tttctaaattacaatgtatatagctttttattctttcaatttttttaatagtacgtgtgaggttgagctttttatccaaaaaccctacttaattattagttaatagtcaaaaaaagtcaaaacattcatattatatttggtattttaaagtggcgaatatttataattagttaaataacagtttctcgaataatttattaaattaaaatgtgtgagtctcgatattatatgtcacttcttgtggtgcttgtaatttttagggacagctctaaaagtaggcaagctcggcatgccccttaggcccttgaatactcaagccccaaaattatttagtgtagtagtaaagtgtcttatttgaagctaggtcaaagatcaattcccaacttttattttttattttttttttaaaaaaatatttaatgcatgtgtagctaataaggccttaaaatttaaaaccttagacccaatatactttaagacgatccaaaatactcattagtactacaagtctacaatacatgtgtaaataaaacataaaataatagataattagtgaaatagtttattttttaaatcattaatttgtgtttttaatttttacattttttttacgaaatggtctcagtctaataatttactaactaataactatttaagcgtttcgatcactacttgtcggaaattttcaaccagttatatatatctagagtgtcaaagtctattttgccaaaataaaatattaaaatgagaaaaaaaaattataaaaataaaggataggttcaccttagcatttaagttatgtagtatatatgtgtatcccatctgaacttttatttttatttatatattttttaaataaataaataaataaaatgaaaaactaattttgtaaagcaatattaaagtaaaagtaaaagtaacttttggaaaagaatgagcaatggatatgtatttccaaaattagacaagaacaaacagtgagtcatatatttgtattttgtaaggattgtggtcagatatatataattctctgtaaatattattcttagtgaaatccaacaacaaggaaaggactactattgtatatattgttcagtctcatacaaacattttctcaactttgttttttttttctttaatttacctgaatatagagtctaggaccactcagacttaacttccaagattgccaaaaaaaccctaataacatatgaatattatgaaatgcattactatagtttttttctttattaataatgaatgaatcctatgatttggctttatatatatatatatatatatatatatatatata

SEQ ID NO: 384731 - DNA, 1670 bp, Cannabis indica
atagtttttttattactcggtaataaatattatgaattattacatcaaaacaatataataaattattttataaatataaaaaaaaattagaatttacaattttttaattctttttgagaagattattgctttttatataaaaaaaaaagctggcctttatattattttttaaaaataatactttaaatcaaattacgaaaatataatataatattacagtaataatttaaaaaaaaaaatgtaaaaatattaaaagaagtgccatttaaaatattttatgcaaattgccatatatctatttacctaaaaaaaaaattattatatatctatttatgttcaaacattaacattatattgattgggtaggtaggtgaggtgtgtatcacattgtatttttcgtaattttctttatggtggtaaaatgtactataggccggttcaatattccaggagatttaatttaataaataattaaggaaagggttgatatttatataattaatcacatggtaaacttacttaatttaatcattaatacgaccatgtgataatgcaacggcttacataccatgcatgtgaataatataataatagtaattattttatattttttatttttttttgctgcagaattttataataatgttcgatctccatcaacgaaagtctccgtgcaatcaattattagttcccttgaaatcaaggaagatatgtatatataaagactagtatttctttcatacgtaccattctatttatttattaagatattttgtattaagtcgtattgtattatattaaattaaattatatatattatatttttatataatattatgttaaattttaatttatactaaaatattatatatttaagtatttataaaaattaatactacatataattttacataaaaataatatataaaatataattcaatataatattatacaatacaatataatgtaatacgacttaccaaaatgaatcctaaattaattagtcaattctttacaattgcatgaaccgtatataattatttatatgtattttcatacaaattagttagtgttattcatcacacatttacatgaatactaaagtcaactaactaattattacaatcattataataaggaagattatgatggtagatatatatatagggttattctatagtaggtcctttagctttttcctcatagcatagggtaataaattagaccaatcacaaactaaagaacataaactgtactgaaattatggtggagtgtctgtatgttatttatatatttaatactttaatcaattaaatatgcagtactatttagcacttgttttcatagaaggaaattaatatccagaaattcatactatttcaataaaaagttagatgaagaaacaagaatctcataattaataaatttatataaatctcattcaaaaaaaaaattatataaatcttttattaaatacactaaaatctactcaattaaaatacaccctacgtctatatttccattaaatataaaagcaaatggccaaaaaaatttccctatgagtagagaatttatactaagttctactataaatttaccctatatatagggattatttatagtggggctcgggtagcttgtttttaccctattgtataaggaaatttttt

SEQ ID NO: 384732 - DNA, 749 bp, Cannabis indica
aaaaataatttccaatttgttcaaatactttatattaccttccaaagttgagaccaaaaataacattatgagaagaccctcttaactagtaaccccacatcttgagtccaacacaaacctaccaataaagctgctgtttccacctaaaaaactgaaaacaaacctgcaatagaaaaatataatacctgcaataaataactcatcttcaaaaaccttataccactatatagtatatttataatagagtctctaaccaaagaaaaaccggtttgattagactctttacctaaacttctcgatggtgacatttataattgaaagttatttaattataaaacttttataaattccatcaataggaaaagattgaaaatcaaacacaatttttgcataataagtaacaatttccattatatttttttattaataaagttaagataaaacatttccaaataattgttgagtagaaacaaaactaaacattaaagaatccaatgttcaaaattgtattctaatattatacttagttaagagcaaaacatacataaggtagcatccctaaaatccatctaaatgaacatcaaatttataatgtgtttttggcactagttaatcaatatgattgaccattacgttaaaactctcaatctaaactatattctagcttacaaatattaataattttgatcattgagtcctttcatagaattctatataagaaaaaaagtaaaaacacttacttttgaggg

SEQ ID NO: 384733 - DNA, 1317 bp, Cannabis indica
gaaatatatatatatatatatattacatgcttcataaattaggtaaaaattcagtattttttaattgtttaatagttgtcttacaaaatatgtactatcaaaacttttgctaatcctgtactcaaagaattgtaaatatgtagaacttgtacataagttgaatcaagtcctggaatgcaaccacgaaaatactcaactgtaactaaaataccaagtgattcaaggttaccaatcattaagaataaaggacgatgccaacctatttttctatatataactgaaactgaaagaacctgatttccctagttatccattgtgtgtgaacatgatcagtaacacaccagtaactaacaacacttcaatatttgcaatgagagtctcattaaaaacataagacccaataacagtaccaatgattaataatggactaagaatagaagagtcaactactcaacaaccatctatgaaagaaacaatgtgttggaagatggcgaaataatgttcaacttcattgactaccgcaaaatatcggtggcagaagaaatggtagagcaactggaaaataataagaacaaagagccacaaattactgattatgatgaactactaatcgcagatccttaacatttgaatatttaagaagtacagatttacaaaaacaaggaaactctatagagtatgtcaacttttatgcaattagaaacagtttccaatacaaggttaaaaagtcttgcgcaagagtataaaatatgttgcttggatctaggatgtaagtagacactaatggcatcaagaaataaaccattcaaagcttcaataattcgtaaatatgataaaaatatcatgcacacttgtcatctcaatataaaatttgtagacaagtaacatgatataataaaattgattggaaactacatcaagttcaagttcatcaacataaaaataactcaaatgccacaggatattagaggagacctgaatcataagtatgtataaaaatgaactacaagaaggcatggagaagtggagaacacatgcagaaagaataacgtggaaaagaaaatgtagtctactgctaagatttttgcacatgttgaagaaaacaaatcaaggaaccatagtacatattcaagttgcaaaagagaatagcttcatgttcttgttcatggcactagatacttcaataaaaggacggaataagtgtagactagtcatagttattgatggaactttcctaaaagctacatttagaaggacatttctctcagctgttggaatttattttaccaggatcttatatctactcacaagtatgtt

SEQ ID NO: 384734 - DNA, 937 bp, Cannabis indica
atataatagtctttctctaaaaataaaattgtatatggcgctaataatgacacatcagtattttgtcgtattttgttttttggaggataaaacttaataaaagttatatattataacagataaaaaaaaattaaagagacataattgtaacttaggagtaaaaattttaaatagtataaaaaaaataatttatcatttccgaaaaaaaaaatacacttttttattagttgtggtaacatattaagttatacttgcttaagaataatatgataatgcagaaaaaatacaataaccaaaaggcgtatgaagggtgcaacgaatggggcctacgcctaaggtccctttttggtgtattttgtttgtgggttttttgtttttttaaaaaaaaactagagcaaaatatcataaatattatcgctaaagttgttggagtagttatcgttgcttgaaaagttattaaaatttttcattattgtcaaaaaagttatcggagttgttatcaccactgaaaaaatggtcggagaaattgtcaaaattattatcgtcatcagaaaatcacttgagctagatgtcgcagttagacgttagaatacgacaaaaaatcaattgttaaaaatctgagactagaaaataacttgtaaaaaaaagtcaacagctgaaaacaaaaactaattacttaaactgaaaaattgaaataaagaaataagacacataaataatgaaaagataaattgaaacaaaaaaaaaacagttaattaaaaaaaaacacagaaattaattatgtgtattagcttagctaaataaaaagctgtcatattttttgtaaaacacaaaagaatcccatatgtaaaaaacggttaattaaaaaaacatataggtggcgtttggtaatacttttttaattaattttttgtttttaaaagtaaaaaagtgaaaa

SEQ ID NO: 384735 - DNA, 1258 bp, Cannabis indica
ccaatattaccctttaatatttttcctatctattaaattccatcactactaaatatatagtttatacatatcaccttcagtttctgataattatactaatacttaaactgttgtgggttgaaggtgatgtttgggatggtgaatctgttggagctgcaatcctctcaaagcagctccaccggatcttctcttccacaaactctccgaatcaccttcttgatctcccaccagccgtttaactaccggcaacggcggatctatcgccaaaatatcgatctcagagacacaattattctcactcttagcttcacttctgcacaacccatttcctccattgatgaactgacctcgtctccggcaaagggctcggccacgactgcggtcggaagtgacggaggggttgataacggtggcaggggcagcggcggcggtgaggtttttgctggagaaaaacttcttgagcttggagtacttgaggaggtgggttttggtgtcgttttgtctgattagtgttgtttggtgagtgagtaatgatctagttggaaagccgattatcttgttgttccgcttgacctgaccgatgcaactgattcttggggataaagggtcgtctccggaagaggaggccggcgacggtgagcggcggttgacgcatctgatgggatgaggaagggcgacgtctttgatagaaggtttggagcataacattggtaagaatattgtgttcttgtgaggatggaaacggtgacattctggatccatttactcctttattgaagatttaaatgaaccccaaaagagattggttttattgaagaagaagaagttagttgatataaaatattggagagagagagagagatttgcctgctataagagatgtaatataattacatttcaagaaaaaaaaaaaaaaaacgacatgaaataattgtaattggtattaaataatttaatattttatttattatgctatcttccatcattatgtgagctctttatttcttcagttggtttttttggactgggaagtttgatagggtacgttctatgttctacatatcgtacttgtattattagtgaagtatttggtaagtaattaatttaggaaaaaaaatttagtacacttcctaaacacctgtttctgtacattctatttgggaaatttatatggtatactaacttttgtcatttttttacagaaatactgccaggcggtattttttacttttttactgtgtttttttataagtttcat

SEQ ID NO: 384736 - DNA, 1659 bp, Cannabis indica
catcttggaatttacccatgttcaagttgatttcacaaccgggacaactatactaacagacacagaaacaacgaggtagtccttgctacgacaactttatttatttcatgcagaatctgttccttgttagattgaaactcgcaaaccaaatcgaactttccatttcttgatttttcaatttctgtattccattatggaactcaatttagtaataaatccaatgttgtcacccttcttagaagtttctcttcaatcaatgctcttataaagttttcatgtttcaaacctcaatagattcaagttgcccaaagactcaaatagtttgatatcatgataatgtggaactctatataggaaccctgttgtgaagttttctctgacaagaacaacattgggacaagaaatatccccagaagtggcatttttctcttctagaggaccaagttcaatctctccttctgttttgaaggtatttttcattcatacacttacacaaaacttatgtatacacttccaagtttaaagcttttaatttacattatattgaaatcttctatgcagcctgacattgctgctcctggtcatcttagcctcctggtctcctactgcttcaccattgcagctcgatgcctctggtcgaaaactcccacttcagttcaagatcgaatctgggacatccatgtcctgtccacatgttactgctgttgtagcccttctcagaagcacctatccaaattggagcccggctgcaataaaatctgcactagtcacaacagcctctttggagcatgactatggccaaagtattgtagccgagggagctccttataaattcgccgacccttttgactatggaggcggtcatgtcaaccccaacaaagccatctatcccagtcttatatttgacttagtaacctcagattatgttcatttcctttgcacaatgggctacaccaacactgccattaatcttgtaactagaactgttacaaatgtaggtccagtgaattcgatttacatagctcgtgttcaaactccattcggggtttctgtgaaagttaatcggtcggttttggtgttcaattcttctgtgaagaagcttaaacttaaggaagatacttctttggaaacttgttctgggaagatggttggttctcatgtagtgagaatacctttggtagttaaaactgtcattagtcatattttttcagagacatgatgataaacttggttggaatgtattaaatattgttagtaatatgtggacccaagtctcatgttcctttcagaaatcaattatgaaatgtacataagttggtaattttcatagcaaggggggttatagtagggtataccttacaaataaggtacattttaactattaaatcaatgaataatgattagactatagatgcacttagtagttagtacccatatttattctgtatttaattatactttggtatttaaataaaaaatttagtataagttaggtattttcggcacaaatataaatatgtatttaaactattatgtaatgttagcatttaataataacaatgacaacagatttatatatagataattacataaggtacaatttttttggtaaaaaaattacatttttatgtgaatatttttttacatttttatggtttt

SEQ ID NO: 384737 - DNA, 1398 bp, Cannabis indica
taatgaaaaaaataaaaaaaaaaaaaaaaaaaaaaaaaaaaaaaaattacaatagaacaagtcaaaacatttagaaattcagcctaaatatgtatgaagaataatgtcatacacatatatataataacaaatcctatataaccttttcttcttagatagtatgccctaaattcaatgttaccttaccaatactttctaaatttccatgaattaatgaagatcaacgattgttactgaaaaatctgtctaacaagtcttcattatcataagcagccttcttggaactcaatctatcatcttcactaacaacatctcgagttttcgcttgaaaatcattatgcaactcactcaactcgtttttgacaccgtgtctatcagaaagctcctccattttagaagaacttaatttgttagagagctgttggaaaagagaggactcagttgtagtgtttgccattttcttttaacttttttctttggttcaaaaaaaatataatgacacaaatgaaaaatgaaatgtgaagttattggctcattggagtgatcaatataaatagtggtaaggtccaagttattgacatggtcaagggtgaacaaggaaccatacaagaaacatcttccacaccaaaataaataaattaaataaataaaattgttaagaagcttcatataattataacaacatttctttgattacttgactcacaagtcatttaatttagtgttttgacttgttcttttctattggattttttttttcttcccaatattaggtagtagtagtacttgtttttctaactttaaaaacaacaaaatcttaaaggtattttcaggctaattgatcagaaaattcatagaggtttctgttatttgataaaagaaaagaaatgaattaactaagtcttaattagttttattttctttcactaaatttcgggtcaagtgaaattactaagaaaaaagccaaagtaaagtttaattttcagaagagaaaaagaattatgattaaagaatcccaattaacctattcatacccatgttatatatttgttagatacaaatatataatgaagattaaaatgtggcacgttatatattaatatgagattaatatagattatgtgttggaggttatattatatcatatatagtataataatacacataaaattgtaacatatgaggagttacaaatctgaaaatagattgtaacctaaggatcaaaattgataaatatgtaattatatgagttgttacatatatgagttatgaaattaatgggataagtttctagctgcttaaaactgttacaatactcaagtatatcatttaaatgggtattgggacgttgggaaaagatttaactcagaaaggagttacattttgagttctctggaa

SEQ ID NO: 384738 - DNA, 2351 bp, Cannabis indica
attaattaaaaattataatttacgagttttaaaataatttgtaagatatttattttcttttgtattattaagattgaaaaataataaattagttacttatattattaaaatatatataaaaaatatcaaaatttaaaatttgatatatatttatgactcaatcatcattaaacaatatataaccgcacacaaaacgtgggtggtttactagtttattattaattgcaacactttaggtggattaattttatttaggtttaactaactacatggatgttgaccctttatgtggtaacatctaataatttgttattttttttatttaaaaaataaagtcacctaataatttttcataaacaaaaaattctgttatatacccacattttatatagaataaatatatatattatcaactattaatataggaacgtgaataataaggatattttagatttgttagtacattttttttcttctatatttggacttattcttctatagctaatggcatatataagagaatagaaaagtaaaaatataagggaatgttgtaaagtataattttatatgctataaaaaaattaataatataaaaatatatggaaataaaaaataattaaaatttaaaatatgaaaagttaaacaaaaaaccataaataaagttaataaaacttctaaaaaatatattgccggaaaagtcatcggagaagatatagtcaccgaaaaattgtgagaaaagttattctcaccggaaatttattagagttgtcattgttgtcgaaaaaattactggagttagatgtcttaggtataaattaaaataaaacggattctataacataatgaataaaaataaataacacacaataactcaaattgattataattaaaaaaaaaatacagttcctaaaataatgaaatataaattaaaattaaaactaccacaataaaatgagtaaaaaaacgaataacacaagatatcccataaaacgaataaacttaaaaataaagtggggatcaattctaaaaatactaatctaaacagatcgggttccatagcaaaataagtaaaaatacataatagacaataaatcaaatataagataaaaaaactgattatatatatcaactagttaaaaatatgagacaaagaatctgattccgtaaaacaactaagataaaaatttacacacaaaaactagttaaataaaataaataaaataaaatccggttccttaaattaactaaaacaaaaaaaaatttccgaaataactaaattatgtttcttaaattaattaaatcaaatatcgatttcaaaaataaatgatttaagaaccgttttctgaaatgactaaataaaaaactagctgttacataaattaaaataaaactgcttccacaacagaatgacttaaaagaaatactacaaaataacttagaattcagttatgataaaaaaaacaagagggaatcagttccaaatatactgatacttaaaataaaagaaaatcgattcttaaacaaaatgagtaaagaaaacaagcaataactcaaaaacgtattctaattaaaagataagagaggattaatttctaataacattgagatataaattaaatagaaccgtttcaacaacaaaatgagtaaaaacatacaacatagaataactcagaaactaattataattaaaaaagtataatatatattatgttggtgaaactatgtacccaggattaaaaaaatacgttcattacaattttgtcactccaataacactctaagagttattacccaattagacaacatgaggcaatgaaggaataaaatgatatagatgtattttttttttcattatggttaatcatcgaacacaagcatattaagaaaactacttttgtaatatcttgaaaatctaattatgaataattaaagcatattatataaaatatggaataataagtgtgttaggggtataaataggtaagattataatcttacaaatctaattatgtgataattagattttagtgaaaatggataaataagcttactttatacattacggaaattttattggaatatgtcagcatcaaacatgctatttatgaaataaaaatattttttaggttcggaaattatgaagacccgattggtggctaaaaatgtcacaggaaattatagtaaatgacctcaaatcataggactacgttagtaaatgtcctaattttcaaacttgtactaaaatgatccttattttagattatttattatttatattgtcttttgctacataaaaaaatcaatatttttttttagaattagaaacgtattacttaaaaattatggtatat

SEQ ID NO: 384739 - DNA, 2793 bp, Cannabis indica
caaccaattcttacatttttatgaaaaactgaaactgtatatgctgaaaggcccagttacagtctatggtttccctttccaccagagaagtagaatttatggctactacaaaagcattcaagcaaacattatggctttggggaatcctatttgaattgaaacaattgagaggaggagtgattgtgtactcggatagccagtcatccatccatctttccaagaatctagtttatcatgaaaagaaaaacatattgatataagaccctactgggttagagaggagataaaggatggatttattgaattagagaaggtcaaaaaagaagagaatcctattgatgttggaactaaggtcttaacagtaaacaagttcaaacattgcttggacttgatcaatctcagaattagtatactgagatatctggaacaccaaccatgatggttgcattccttcttcatcattgtaaatattttaatttgaagaaactaggaggaatgtttggtagagttcctccaaatgaaaaggtctccaatagttgttcttgttatggaaagttagacttcttccataagggtgttcctagaagtctatcttgatcatctgaaagaaatctcgtggaatgatagatgtcatccggaagggcgttccaagatgtctatcatgtccacctggaaggagtcttcaggaaagatagtcttcctctggaaaagtgttccagatggctagttgttccttcttggaagggagtcccaaatagtcgactccaattgtctctattcctatccgagaagaccctttagcgtattcttcagttcttaatcccagaagtgtatgcttcatctgggaacactttaacttgtgctgacgtggagattctattacgaggagtttgttaagtcattgctaacttcacaaattagaacttgcagtcatcgactttaggatctatatattatggacctataaataccaccaacacttatcatttcaaagaagaacgagatcagacaagtttcaagaggtgatcttgagagagaaggattgagaggtacagagagagaggtagagagaaaagagagtgactaggtttgagttttgtatgaagaatatcttctgtagatgaagaagattcttaggtaagagtgtgacaaataaacacttcttgaggatccaacagagaatcgatcttaactgtattgtaccatgttcatgcccaatcaataaagaagattttggtagtattccagaattggagtagagccatagatcacatctatctataggacttgaactagtatgtatccttgtgttgattttattgctttatcatttctggttttaatactatgttcatctctgttaaatcttcgattattgtgtgtgaattgttaatcttgtcattactaattgtttgtcgattaagttttagttgatttgattatacacattagttgtaattttcctacattttaagtgagatataacaagcccaaagacacatgcatgttagcacgaattgaagcacaacgaaaaaaattcaataataatatcaatgatattgattattaaaattctaatagttataatatttttatatatataattatgtttggaactatagttttaaaactttttattaaaaaactataattttaaaacttaatataaaataattgaaactattaaaaaaaccatatataatctagttgttgttttattaagtgtaataaaaaagtaaaattgtggagcatgaattcgaacttgtataaaaaaaatgggctgatatatttttaaaaaatgaatcagctcaaataaaatacggcacgaataaattagcaaaaaaaaaagtacggcatgaatacaaacatggcataaaaatactaggccttatgttagatattaaaattctgttagtttgttaatttatattgcattttttctatgctctgataacacttctattaacattttatttttgtactcttcctatatatagtaatactctaaacatagttctacccttcctataaacagtttcacacagctcccctcaccattctcttttctttaagaacaactcgagtgtattccttgctttgttaatttacgttgatgatatacttgttgcgaataataatgaatttttgttctttctttcaaacaatttctagacagtaaattcaaacttaaagatctaggtcctcttcgtttttttccttagtctagaaattgctcaaaataaaagcaaaatatgtgtatctcaacatccttttgctttataacttttatctgatacaggatacttaggttccaaagtgtcttcaacacctatgaaacttaactttaagctaaacaaggatgttggtgacttattacatgaagcaacctcttatcgtagtctcattggtaaatttttgtaaggagattgaggtccatttaatctccttatccaaggttaaattactcatatttgcttacgatgtttttgttattaatattaatatatattataataaattgtatttaaaaataccacacttaacaaaaataacaaaaattggagttaggaatcactcaaaataaaattataaagataatcaaattatagaagacaaatgaatattgagattatatatgaaaaatgttaaaggtgagaaatgaatgttgggataaagaggagtgttagagaaactctcttttacacagtcttcttaattaagtgacacgtgtaaccttctaaattatatttaaaaatagttgcaattatgtcctcatttaatttttattaatga

SEQ ID NO: 384740 - DNA, 1648 bp, Cannabis indica
attttgttgtgctcacaactatttttcttacacgtatggtaatatttgtaacaattattaattttttttaaaaaatacgaataattttaaataattataacatatatttaattcttttttataaataccaaaataataaagaagtcttccaaaatacttttttaagaaagtatatgagataaatttttaagataagaaatatttaacttttttcaaataaactaataaatatttactttcctaaaataaaattaaaaaacaattaaagaaaataaattactgttttgtatttcccaatgtattgatatttattgatttttgacttaaaaattcttaaactaacataaatttttaacatgtaataaataaaatggacaaatgttaatttttgattgttgggacaggaaagggatagggagtttgggtcaggtgaattttattcatagagtttgaccgtaaattaacgctgaatttaatatttttatagaaatcacccgtctaattaatcctcccttgtttaaatgcacaacggtgactgactttaatattgagtacagaagaaaattcccaaattaccccaaaacctgtttatgaaataaatacacagctcaactctcaacaaataaactaattaacaaactaaaaacaagaaaaataattgaagaaatgaggtccaaagttgagggatgggcaggatcagaaaggcttcaaaccttagcgaaccacttccgtccctccaaaccgcctcaactaactaacttccccaagagagcggcggttctggtatgtatttttcaaggcgacggcggcgatctgcgagtcattttgaccaaacgatcctctaacctctcaactcactcaggtaccgtacaacaatccttattttcttccatctgaattgtatcgatatatatatgtattgtatatgggtatggatgcaggggatgttgcgctgcccggcgggaaagctgacgagggggatgccaatgatgtggagacggccttgcgtgaagctcatgaggagattggtttggacccttccctcgtcaatgttgttaccgttcttcatccttttttcactaaggtaattcatttcccccttattattaccataaatgtcttagactgcactttgctgggtgggatatagattcgttttcttatttttgagaagagaaagggatatatagatttctattccagtaatttcattaatcttattcatagatttgctagatcatgtgaggtaaaaaatgaaagtggactttttctcaaaataaataaataatatagtgaacaatttattttttttctgtttttatttttttttttgagagaaaaccggtttatagttaacaatttttttttattggaatgtaatattttgtattttaaaattacattaattttattttatttatactttttttttatttgaaagtacctattctaaacgcataataatacttatttaaaaatattaattttttattttttttaaaaaaagttgtttaatgagaattttttctaaaaaagcttacaaaatatggaaaaaacttgttatctcttggttagtctaaggtacttgatttttctatatttttttctgaaattttttctataaagtaatatattttttttttgaaaa

SEQ ID NO: 384741 - DNA, 1079 bp, Cannabis indica
agtggcaaaatgttttctgcaacaacatggttataattttacagagactttcagtccactattcgagtcatcttaacagttgttttatctagttgctttactgcaatcagattcaatcacaaaatttctcagcctaagatcccaaagaaaatgtaacttacccttctcgtattgcacaataactcagcccttaacactaaacaacttgacagaaagaaagagcaagcaacatcaagtagcttattgtaatcccaagcagctaagccaatatcaatcgattcagccacctcaaatccaaactaaaaaatggctcaaattctttttcgtttgaggggggatattaacactattcctactgttacctaaaattaattagttttgttaagtttgttacactttgtaatgtactgatcaattgtctatataaaatggcccctcactaatattgaattaagctttcttatattattagatttctctcaatttgggtttgccggcctgttttactttctctacaatttatatatatttatatatattgaagtaggttcatatatatacccccataaactaattaaaggatataccctgtaaaagtaagatttaatttaaaagttagtattcaacacatgagaatggaagtgattaattgaattaataatgaggagaggttacagtgtcgttgtcgtggtacccaaaatctcaaggcgcagccctttaaaaagcttttctacacgtcttaatttccttcacactataaactatctactaattaagctgattaaatatctacattcatttcattattatatataaaattatggtttatgggaccccatccccatctcatgataccaccacccataatctataacttgacaacagcaaatattacatcaaataaatctctttcagtttatatattttgaaataaagtttaagagtttgagttatgctcaataggtgtcttttataatttatatgtatgtgtgagtataactgtttttttttttactcaaattaactcaagcctacactagaaaaaacaaagaaagaaagaagaaaaagaaaaaaataaa

SEQ ID NO: 384742 - DNA, 1194 bp, Cannabis indica
aattgtgctataaattcgtatttgtcgtgttggtttgattcattagttttttttcgtgaattttttaaaatatgagtagtactgtaccgtgttttagaaattatgagtcatatcgctactatttttaaaagtagttcgattttttcatatcatgtgtcgatttatttttatattcaggttcgaatttttgaaattaaaatatttaaattttgtttaaatactataaattatttgtaattttttaaaaaattttataaatatcttaaataactacataatacaatacaataattattaataaaaaatatgctaaaatacttttttttttaatattagaataggcaacaatgaatgtaagaaaatgattattgcgtttggttagagataataaaaaatagaatataaagaaaataatttttattttatttttttattattctaaattttatttttacaacaatagttaaatttggatccaatctaatttataaaaatttgatgaaaaaataaatttgtctaactaacactcttaagaaagaaaatagttattaattttttcattaaatcaaaatatgtgagtagtaattaataaattttaacatttctctaccaaagtttcagaatgacatgactaatttgttctgtctttttatttcaagaactataataatgaataatgaatggatgtatgtatgtatggaaatatattaatttcaaaatgcataatttatgagctttttgtaacatttattacattctgcatgataataagtacaattgtttggggtatacacatataaatatatatatatatatatatttatatatttatatatagaagaatgaaaagaatggtggatatttgtgttaagaatcatgtgttagagaagattttaactggatatttcacacgaaaaaaaagagagtagaaagtgccatcccctccttaacttttcttttgttctcatacctacataaagtagaaatatatatttatatatctatcatatatagagatgcatttttaatgagtattaatagaaataagtaatattaaaacaatttaagtttttatatttaattaaaaaaaaattcattttatattgtacgagttgatattatttcatcaaaaaaataataaaaaaaagtttttttaactaaaaaaatataaaaaaaattaagtttacttaaata

SEQ ID NO: 384743 - DNA, 1229 bp, Cannabis indica
ttttccggcgatgatgactttctggcgacgataattttccggttgacttttccagtgtcacttactttttccggcgaaacttattattgttttacaaatatgaaatttctatctttttttacaaaaatatagcataaaaaattccatataaatatataataaaaaaaaaaaaaaacacataaccccatagtattatttattcaaaccataaaaaataaacccttataatttgacttgtataatttctactaatcataatcagtaaataagaaaaatatttgttctattaaaattaaaactatgtgaaatttacttttgtttcataaggtagtgacaatggctatggatgcaaatgtgtttccatgattcatgtctaaaaccctcctaaccttaacttagaccaggactatgaccttcaatcaaaattatatttgactctcatatcctacaagatcttacatacaacggtataaatagacaattagtctaaaatattcttagtttcaaatttcattatctacctagtacctacctagtaagggaaagaaattaataaaattatatatacatacatagaaataaaatattaaaaaaaaaaacagaaagaaagattgaaaatgacaccagccgaccaatgtggccgtgggttaagaagaaaaagaacacatctttttatataaaaaataaagacaattgaatgtgattcccattagggcttgatgcctagaagatagtttatgtttgatttgatatcatactcatctaatcaaatggaaaagtacaatacaaatattactaaactacattagatatgaaaatcacatcttctttctcatttgttattttgacaattatatccgcgagttcgggcacccgcaggtacccacccctaataggacgggggcgagggtcgaatttcaaggataaaggcgggtatgagtttaaatgtccatacccaaattgagttcggaaagagaacggatgatacccaactcaatatgatatgtatatatttaaattttaaaatattaactattacatttaaaataatttcatgctttaagtttttttattaattacattaataaaacatttcaatttttatgaaaatacttgtagtgatgcatattaataaacaaacttaactgctttaaaaaaaaatgacactggaccacttatttttgattgtcaatattgtatttactaactccatttattatacacactat

SEQ ID NO: 384744 - DNA, 790 bp, Cannabis indica
aaacatcacttatttggtgttaagcactcctagtgtcctatataggaatgctttattttataatatggacgattgtttgattgatttcaaacgtttaatatactaattaattatatatatgatccaacattgacagtaataatatttacagtggtgtcttgtgaataattaataatttttttcttttttttgattgaataaatatataaaacttgacacaataacaatagataaaacttcatgatattattatagcaccattactgccgtttaagagaagtgatattttttttctcatgttaattaattaattaattgctacaactaactacagaacagtccctacaatacttcccatcaatcattccagtctttttctttcttttctctttcgaagttgggttgggctgggcccatcaatggcatgtgcggggccctggaagcgtgcatgactagtttgtctacatatatatatagatacaactttatcaataattattagttcatctacatttatatacaactttatcaataattattgatttgttggactattataccctataatttcctcaatccttggtgacaggttatttgaagtcacaaaagttttatattcaaaatgctctttcatttatgtccacctcacgtaagtgtccagaattttatgatccatgttcatcttcgagagatcaacagataataacgtgtcagccattatcactttaaatactgtgtatatacagagaaatggtatgtataattgtaaatacatatatatataaatata

SEQ ID NO: 384745 - DNA, 1251 bp, Cannabis indica
gtattaaggcaaggcaagtgaggccccaactctatatatttttatggtatatatacgtatttataaacatttgtccaattaatcataaagaatttctgcatataccattgtgatatagaatagataccatctttttagttatagaaatgtaaagataattaagcctgctttgttcttgtttatatatataaccttatataagagtcttaacaactcttgggggggtttcatttaaagttgtacattccttcattgaaagaggatatcccctgttctttattacatggtccttcaaagaaggcatcattatatccagacgtgcaagttgtaacaaacagctattagcttaatacattttggccttcctcacaaatactttctgctccggcggtcggcctagctagccacacgcaagagtaataagatcccctagctaatagtctagtgtggggttctatatcatatatgcataaatatttgactaattattataattgcatgcaggcagatcataatctctcttccacttaatcagaaagaatattaatatacctataaccttttttcattcaaaaaaggccggttaggtatctaataatgatcgcctatttagtatttaaccaacaacatgagtctattaacaacatgaattaatatctacatatatttatgtacgtggtatttatcaggaccattggtagttaacctgccccagcccaccactataaatatataaatagctaccatctcatttagaaaacaatatgagttaatttttgctgagattaaatccgttgtgcttatcatactttataactttggtagtcttcatgtacttagacgtgagagacgaaaacattcatcaaatcgaaccaagtcaccatataatgcatggggatatggatatagacgtcatcaaataatatatatatatatttatatacacgataaaattaaaatatatatatgtgattttgttttgagcttcatttagcttttggactaagattctttttgcaatctttctatccaaatccaatatgaataaccataacatttatcgtcccaattcattcacttttgacatatatattattcaacaatcgatcatgttggaaatattgtgaatattttaacaaaatatataagtgtcttagtgtgtgtgagttggaaagagtcccacatgggatatgaaccctcattgacaagggtataaagagtgcaactttggcatttgggtttgggccccaa

SEQ ID NO: 384746 - DNA, 2532 bp, Cannabis indica
gcagtagcatgtgcataacgccttgcaggcggaagctgtggctctaatactaaagtgttggaattcgtaaagaatttaatagagttgggcatgatattacgaattgggctaaccatttgtatccatcacaggcccattgttttaagtttctatataaagtttggtggttaatggttaccagaaaaaaattatgttatttacaaagaagaattactttacataattattttttaactttttttttttttgttaaatttacggttaaaattgttctagtaattttgatgtgggttattatgtagattttagttgcaatttaagttactcatttagttgctgtgtgagttttaatgtgaatttttataaaaatataaaaaaaaattattttaaaatgtaaaaataaaaaaattcttaattaatataaatgattaattctacatccagatattcaagataaataaaattaatcaatataatattataaaaaaaaaattacaaaattaattgaaatcttaaataaaaaaaaatacctattaatcacaccatatatattttgttggttgtatattattataaatttattataagtttatatattatatagtatactaaaagagttgcacatgtgacctttccctagtatagatatttttagaaaattccctagtgtaaatttatgtatagaatttatatatctagcacttacaaatataaataaaatatctaagtagacaaataattattatatgatatctgtctctgaccataaaatcttattacagtatataaaatcagtgccttgatgttttctttttaatatatttaatgacttaataacaaataattattagcatatattcttgtgaagctgactcacaatcacttgcttaggattatagatacatgtgttgaatttaaagcttattataaaccccacaaaatcaaatgtcattaataagttcagtaattgacggttcacctttgaggcctctccgatttcagaatgtattgtatattaattgatactcactataagacacgtatccacaacttcaacggtggtcattcaaactcattcccttaactgtctttacccattttttattttattttattttattatggattaaaatatctaacaagattgtagatattttattttaatagttttttatatttttttttgaacttgaattaacagaagaagaacaaaactacaagctagagcaaagaaggtaaaaaagtattccaaattaacgctttatctaatctttagcctaattttactaaattatgggcagagatattcaaatctctaattacataagcaatctgaacactaggactaaaagaaaaagagtttttaatacttacaagcaaatcatcaatatactattgttccaattacaattattaagcttatcaactatgcttctacaatctatcttgagcacttgaaccggcagtctaaccaattgaatccaattaaccgccaagaggacaacctttgcttttgcaattgcaggagtaacaacaccaatagaaggtttaactcccccaacaatctggttagaatcattaagcacaacaccacttaaactataaacccttctttcagaatctaaagctgcatccgtgaagacttgataccatcctgtagggaaagccaacgaaactgatgaatcctgggcaagtgggtcattagaaggaagtcacttttgttgtgcatctaagtactgaagtaaaaaactattacaccatacaaacatttcattaggagcaagagcaaaaacgattgtaaaaagcattattcctttgattccatatagtccacaggaaacataacaaaacatatgcagaacccttgtccaaactagcaaaaatattagaaataaaatgcagaatatcaaactgtttatttaaaagataaaaatgagcaaagtctgagttcttccaagctttcctggctctagggcactctagcaaggcatgcttaatagtttcagggtatatgttacacaggggacacaaaggtgaagggataatatgtctttgaaaaggtgaagcagccacaacgatagagtttgtgagaattctccacacaaaatgcttaaccttggaggaacattagcatgccaaactttagtccaaaaggtttttgaagtttgaaaggaagaagtggaggggatatctctacttgcaagggctaagtgatatgcagatttaacagtgaaaagacaagaattttccctgccccaaattttctcttctttaccattgattcccaaaaaaagaacatccaaaatatcgttgacagtagcggtatcaaaataagtgtgaagtttatccagattctatgaaccagaatgatcagtaaaatatgataatttggtctgatttggctcccgattgcaaatagaatgcttgaacttagtggaagggagccaatgatcatcgagggttctaatgctctctccatctccccactttccaaattaaactagaactaatagatcccttccccaaagaata

SEQ ID NO: 384747 - DNA, 652 bp, Cannabis indica
ttacgatattgtaccttgttcttactttttctttactttaaaggtagaataaatataataaaaggtttagtagtcatctatattactaagaaataaaataatatacttaattcaaccaaaaagatcacaagagaatcaaaatcaaccattgatattatagtacttgcctaataatttatctttaatttttcattaaataattttggaaattatattctcattacactagtttctcattgagtgaaccaaaagaagaaggtggcaatgcttatccttagctttttcactttaattgtttactttaaatagtatcatatgaaaagtcttttttctttgaataatttcactcttaacaattataatgatttttgtttcaaaattgcttcaagtcacttattcattattaaaagcacacattttaatttatttgtcatcctcccattatcatagtttcaatatcaaacggctccaagcttgcatacaaagacaaaaaataaaataattttgaaaacatgataatttgattaaattaaaatattttaataatttttcttaatcatataagggtaaatactattttggatcttgtgttttgtaaaaattatcaattagactttttttttgttaaatgataaaataaactctatatttt

SEQ ID NO: 384748 - DNA, 1776 bp, Cannabis indica
gattttctaccatttttaccattttttttctaaatctttagttttatcgaccgataaacacctctacatactaattttttttaaggttttcacattgaaaaataaaattttatgaggcggttttagggtttggtgcgatcgaaaaatcgcgattgcaagcggtatggtggtcttgaatagcttgcattgaggtaggactcaatcttatttatgtattttaaagttacatcattgcattatttctatattttaattctttgtttgggtgtttgatttagggttttttgataactatggtggtagtcagagtaaattggcagcatcaattttaacggacattcgtgactattgtatgtatataatctttcattattgtagttttaggttgtatttttaagagtagtgatgagattgtttgtttataaacaatgatcaatagcttagaacattttgcaaagaaagaaagaaagaaaaaactagatttaattttataacttattaagtttcaatctctagaggtcaaaagtaaagtttcttattctattcttattcattaccaaaaatctatttgatcaaattggtggaataataataatctatatcattctctatagtgtccttctcacttttattaagatccaattttcatatatttgatatacatgtatatatttttttgtttagtgtatatgaattggatatatatctgtacgtagtgtgtatattaaaatatattactcatagttattggatatatatgcagtgtatattaaaatatattattcacacttatgcataatcaattaattataattgattgatttgttaattacctaatttaatttcgtaattgattgttaaaatattctaacaattaattatgacaaatactttaatggaatgtcttacttatataaatataggatctcggtccttgaactcactactcattatgtgaaacacaataaatccatctaaagagagtaaagagagctttaaagcctaattacccacactaatcaattctcttttcttttgaaagctcgtgtgggatatcctttattcacagtgtatatatattctatttaattctgcacttcatatcattcatataattacctaacaatatatatatatatatacatatatatatatatattactcaaaaacagacttatatatatcattactcatttatttttaaaaaacgaaacacacatgatcataattcacgagtttaagcatacatacatgcaaatatatacgtacatatcactataaaaaatctcttttagtcacaataaaatttgtaactaaagataaaaaattgtgactaattataattacattattgtgttgtgactaaaaggtctgtggctaaaagtattagtcataaaaattaaaatttgttgtgactaaacgtatttttagtcacaatatttgtgtgactaaaattcaattagtgataacttataactaaatactatattttagtcacaagtaactttttgttgtgattaaaagtcacatttagtcacagaaaatctatgttgtgactaaaaggttgtcactaaaggtagcaattttttatagtgtatgtatagtccctagattgtgtttagaattgatgaaatttatttaatgagctaattaaatataagagagattcaagcattgttattaggtactagtaagattgatattccgctggtaaaataaaatttacttgtgatgtgttgggaaaagggaattggcaaattaatgttgatattaaaa

SEQ ID NO: 384749 - DNA, 1999 bp, Cannabis indica
gtgactctatgtatatgtaatcaaagccaaaaggtgcaaggaaccatatatactaaatgagccttagtatgttgactctgaccggtgaaaaggtcgaccaatccaattaaagggtagttagttactagttttaaatattttattttattaagagcattgctattggacactagtagtacttagcacttttaagacgtgtcgttttacgatttgttagcgatacttcctaaaaagttattatattaataaactatatgtgacccgatactaaattacaccaatagatatattgacatgtaagaaggtgtttcgcaccactggtaccttttagtgtttttcttttattaaaggctggaacatggaaggtctcttcaagcttcaaggccacactggtggccccttacagttgaaaacacatttatagttccttgaacctttaaaactctctggttctaaagctggtgagctcattaattggccggttcctaatctactcatttctcatttaagaatttttttttgctattattattcattttcattttctttagagaagaaaaaaaaacagccaatgaaaatgaatagttaacatcatgatatataaatatagatatagatatactagtgatagtgagtagagattgttggatttgtgttatattatttagataatactgtataatgttagattcattagtacaaattacttttggtatcaattttaaattaaaacttatactatatagtgttagctcatagttacgacatttattttactaacataaaatcagaattttggtgctggttttgaatcgacactaatgagttttagtgtcgttcaccaatacttaaagtacacattctatttttatgtttagtattagtttagaaatgacactagtgggttggttgtcttcattagtgttggttaggaatcgacgcttcagaagtgtttttagattatattttttttcattactttataattgacgcttaaaatatttttagggatttttagtgtcggttctgaatatgacacagtattattgtcagtgagaaaattgtaattatttatcaatttctccacctccattataagatttcaagattagcataaaatgtaacatacatgtttctataacaattctcattttataaaaaataaacaaaaattaaataacaacaatatcctaactataacaagaagtatataagtagtatacttagtaacaagaatataacaaaatactatacttatagataccgaaactaattaaaataacaaaagtttatcctactcaaaaaagtttcaatgtttcaatgcgatgttgtctttactgagttcgtcatgaacaagttttgctcattcatcccaaactatactgatttcgttaggtgtgtacagttcaaatttatacaataatgagaaaaattattagttggttataaataaagagtatttaaaataataagttgccaaatgattatgtatatatatatatatataccttagtgtccaaagtgttggatttaccacattcatgagctcttaaataaatttcatgaagtaatatccacatttgaataaaattaggctgcttccgacacttgtagttagtgaaactcggtcctctatttgcctttttactattctaataattgtattttccaaaatgaagttaattaattagcataaattaatttataataaattgttaatctactaagttaggaattaataaaatactcacgttgtgacgattagctcaatgttttcacgcattagatcattgagggtccgtgcacttttgaaaaaactaaaagctgctttttgaaaaagctgtaataataatgtgtttgtccaacagttaaaaaacagttttttgaagaacttttgaagaagctacagctaaaagctgaagctgctccaacccaacttttagaaaaagttgttttgattaaaagattataatcacttttttgtactaaaaccatattt

SEQ ID NO: 384750 - DNA, 2112 bp, Cannabis indica
tactctatgtgtgcacattattatatttacaatttagtatatatatataaaaatagttaggcatgatttataataaactaaatgttaacaccaatatcaatatgcatactgtaaatctgtaaatctattataggtacgtagtcaaaatgtgcatgcatgcatgggctccgtcaatatatcatatatttatgatttcactatctactatatatcaatacatattttaattaaagccaatactaattaagtactcacatcagaaattaacttgtttatttgaacttatagtataattaactagttaatggtgctgatgccttggcacataccactgttgtaaatatttatatatataaatataataattatataatttacaaaaatatgaatgatatacaattattactacataattcactatttatataaaatgaaactatcactacatattatttacaattattatataagatgggatctggcccctgtggtatcagtatatgaacacatttcatcatgcctgtacagtgtggcctagcttatacataaacatttatatatttatgtatatatatatttagaattaatagtgattaaatattaaattattgaagattgaagtagtagttcatgtgagtatcacgtgcatatatagctcgaatatataacatacgatttgtctcggataagatacgaatctcatcagcctctgaatatactcctgtgttatatatatatcttctctttgtggtgtgttgtgtagagatgaagaatccgtatcttatcaagatatatatatatatacatacgatttacatatatgtatataaataaaaattaattataaatattaattttaaaaatcttaaatcatcaaattttaatgtaataaatgataaagaaaaaatttgagtttaatacaaaacatggctctttttaaactatataaaaaaatatttatatataaatatctaagttaaattcaatatttttttatctggaattccacaatgcatacagtcggctctttgatgcagcagatcaaatggatcttaaaacacagaataccaaatgtaatgctaaaaaaaatagctgagagagatagagtttggtttagtaatctttaagtaccatatgtcatatcacaaaattgtatagattatacaaaagaccttgattaaggtactgttagtttgtaatgtttggttgtttgtgcaatgaaatcgctgattacataaaaaaaaaaaatattttttatcttatcttttttgttgaataactatatttaatttttaaaaaaattcagccaaacatcttcaactctgtaaaagtgtatttttttttttaattaggtaaaagaaattaattaaacatggagcactacttattgtgaggatgctttattgtattcaacacgtttagaaattataactaaaatatattttatatgtttatgatagcatatatattacaaaatataatttaagagtataccaattaacttgtgtagttgatggttttgaattgtatttttagtctggtcaattattgaaaaaaaaaagggaaaactaatagaatataatattatgtaaaatatatgcacatatacattatcgacattatagatgtatgggcaaataagttatgggtagatagacaaatatagataaatcaaaaagttcatgtctcattgtcagtcatgtgaaatcaatatgtgcaactcaactttataaagcaaccaagtaggagccatatgaatcatgatgaccagaatatcccaccacaccaataacaatatatatttggcaatcaatatctatatctatacacaatatataccattttttttttatctgtgttattatttattaattttttcaagggattttttttattatttttagactttatagtttttatttttacatttttataaaattccacttagaaatctctatagcaattaacggagcaacttaaatcgcaactagaatccatatagcaacccacatagaaaccaccgaaaaaattactggagcaacccataccataaatttgaaaaaaaaaaagttaaaaaatagtatatggagtaattttcctactgtacttata

SEQ ID NO: 384751 - DNA, 2445 bp, Cannabis indica
tctaacatggatgaaaattcaggctaattagcaaacatgataatttataggctaattagcaatttttccccccaaactttgacatatactaaatcatcccccctgaacttttttggccgttaaaaattcccctgaactattaagatggttagatttaaggacttttgtctaattttagtaaaaaaattctaacatggatgaaaattcaggggacataatttagtacatattaaagtttgaggggtatgatttggtagatatcaaagtccggggagcatgatttagtatataaacaatcactgaaacagtaaaattgaatgaaatttagaataatttacaatataaaaagtagtactcaaccagtctatttcacacgtacataaaataaaagagttacctgtctaacacactctttcaatcttatttttgacatattaaattttttttaaatactaaaataaataaaaatgtatcaagctattgtacaattttcctaaaataacagtaattcaatacaaccattttctcaaaattcatccacaaaccatttccaatccccattcactttttattatttatttagttaattattattttttccacaaacacataattgctttaatcacaaacagcactcgtttacaacgtgtccctacaaaaatcgaattaatttataataaggtcaaaaaagtagagaatatatcgcgagaaattaaaaaaagagatattgataaaataaaggtgtcgcataagagaggacaattatataagatgttacagctggcaaagatagtcgcgctagatccgagctagcgggtcccacttcacgtgactgcatacccccaatcttcaattatatgaagccacgtgtcccatatgtgtggactggggacacgtgtcgaaaatcatcgatcgtctaaataggaccactttgtcctcttttctagaaccgaggtcaggtgagtacccccttagcttggcttggcttggcttgacttgactcacttggctaccttacttcttcgagtcgcgacaaattacttttttgtgactgccattccccacaaatccaattctggtcagaacccttcttttatctttttattttaatttcccaaattacccctcatccctcactttcctttttttgtcgtgtagctggtcaagagttttctacgtggcgttcttttaatggttttgatcaagatcccacggttgtggcgaagcggtccttttttttgtactgtgaatttctttactctttttcagtgcattttcttaataattatttataattcaagactatttaataattgttaatttttttttatgtaattttgagtgattttataatacaatattaaagaaatatattgatgtactttttatttatttgaaaatttaaaaagaaaattaatttattttttttataatcgtaaacgttataattatttaagatatttaataaaattttaaataatttaatatgccaaaaacattataattttttgtatgattgtctacataataattatttacgacacgttataatattttaaaaaattcaaaaaaatttaacacgatgaaagtaaagttcaaacagtctattttcatgcgtataaaataaaaatctcgcttgcaataaagaataaactattgtaattctatttttgacatgttaattttttttttaattttttaaaattttgcagaatatcttaaataattacagtatatcttttttaagtacagtaaattttttagaatttttttaaaactttttccataattttaaattactaaaatgtatatgattataaaaaaaatttaactaaaaattatttttaatgctaaaacaaataaaatatataccaaaataattatttaaggaagtgtgttaaaaaattcagtaggactagttagatttgtttttatttactttttctacataattttttgttgacattacttaaattttaaaaatttatgttataaagttttgagtaatgatgatgaaagatactaattgattaagtacatgttattataaattgtttaaaggcttatttatattttcttttgattaaaagtagtgccacttcgattagtgtataaagttatacaaaaatattatttaatttgtaattgatagccgaaaagaaaaacattatttagaaaagaagtacttttgtttcagtaacaaaaagataaagaaaaagacgttagtttgtcgatttcatacttaggaaaaaaaattaaaaaattatagttaatttcattactcttacaataaaacttgaaaaataattaaaaaaaagattttataagttaatttcatttagggctcgtttggaacgctgtattaggtcgtattgtattgtattgtattatattgaattggattatatattatatttttatataatactatgttaaactttaatt

SEQ ID NO: 384752 - DNA, 2894 bp, Cannabis indica
tgtgatgaagtatgaaactgaaacatttggaggacctatgtagctcactggtttgaagttgttgtggcctggtaaccacttatcgacaccagccagtacattatgaccatttcctattttgtatcgcaaaccctcaactagtagatcacgtccccaatgtattccttgccaggtaagtgaaggtgagtgtccaagtcgtgcttccaaaaaagtgttgttagagaagtatctatgcttgagtagtaggctgagaagagagtttggcatttcaaagattctccaagcttgctttgcaaggagagcttgattgaagtgtacaaaggagcgaaaacccattccaccttcaaatttcgacttacaaagcaatttccaacttctccaatgaatcttagtaccgtccttgttagaaccccaccaaaagttagccatcatagattctaattgactacaaaaagtaggcggtaaacagaaacaactcattgcataagttggaatagattggaccacgactttcaatagcattcctttccaccaactgaaaaaagcctttcattccaagcatgtagcttttgccatatccgttctttaacatcactaaacatttccttcttgtcacgttctgaaaaagcaggtaacccaaggtaacgctcatgacattcgcttattggcattcccagagtatgattgaaaaagtccattgctgcttgtgaagtattaggtgagaaggacataactgacttggttgtgttcaattactgacccgacgcttggtggtaaatgtctaaaacttttttgatgacaattgcagaactgtttgtagcttcacaaaaaggagactatcatccgcaaagagcagatgtgagattgaaggagcatggcacgtcaactgtaagcctcgaaggttctgagctgattcttcactttgtagtagtctaaataagccttctattcagattaagaacaagtatggggataatggatctccttgacgaagccccctagtaggcttgacatgaccaacttcttcaccattgagcatgaatgagaaactagtagagtttaagcaattcatgatcaatgagacccaattttggtgaaaacccatcttccgcatgacctcttgaatatagaaccactcaaccctatcaaatgctttgctcgtgtctaatttaagtgctgaatagccctttcgtccccttgttctatgtttcaagtgatgtatcagttcaaatgccacaaggatattgtcagtgattagtcgattggagagaaaagcgctttgagtttcagaaatcacagtgggaaggatatccttaaatcggagagcaagatcttggagatgattttgtagatgacattgcagagacttataggccgaaaatcacccatgccacgaggagtctttgtctttggaattagagtaatgagggattgagtaatggtgtccatactacaaccatcatttaaaattcctaagacaactttggtaactacatctccaacaatggaccagtaattgtggtaaaacattaccgacatcccatcacaacctggacttttatctggattaattattttaagagcattgtagacctcatcacatgtaaaaggcttaatgagagactcattcatatctggtgtaatcgttgttggattggttgcaagaatgtgactcaaagcttcagaatcgactgctgatgtagaaaacaaatcaccaaaataggatgtgatgatatcagtcataccttgttttgagcagacaacattaccattactatcaactaaagatttgatggtgttatgttgtttttatgaagaagcataggcatgaaagaatttagtattttgatcaccgttttgcatccaatccacacgtgaacgctgctgccagtacttctcttcttgagccaacaagtcatctagaacattttcatgatgctttagttcttccatagcagccggagttctagtagtagtgttatttagatttgatatttgtttctgcaccttcgagatctgtttaaaaattaccaaatttttgtcgatgccactgttgtagcgaatcagtacagcatttgatatattcactgaaagttgcagccgcattttctgtagtagcctgcttccaatgctgctgaatcaagtttgctgcttcttcttcttgtaaccataatttttcgaacctgaatcttgttttttgatgatgttgctggtgtgttgaagagggttgcaaaacttgtactgagatcaccctatggtcagagccatagtagtcaaggtgctgagttgttagtggttggaaagtgtcacagcagatggtgttaacgaaacaccaatcaagccaaatttttattgtgtctgccgtgagccttcctttgatccaggtgaatggatcaccatcatagggttgctcaataaggttacaatgatcaagaacacttctaaatttgtccatttgtgcctcattacgcaaagccccccccccccccaaatttattttgatttgacaacatttcgttaaaatctccaattaccagccatggtaggagtggagcaacatcctttaatctttctaaaagtgtccatgttaagtgacgattttgaacagccggtgcaccatgaaatgccgtaaagtgccaagtcggaccatttccacaagccatatagcagtcaaacatatttatattataatttaaaagagttacaattacatcatctttccaaagcaacattaatccaccactaagaccaacatgagggacttcaagtccattattaaaatgtaaaacattacaaaaacgagtaatagaattaggacctaacttagtttccatgagaaattaaacacttggggattgctctttgacaagcaatttgagatgacggaaagcact

SEQ ID NO: 384753 - DNA, 1553 bp, Cannabis indica
cttcttcttcttctattagcatcagaattcaggccccaaaatagcccaaaaccatatctccatgtgaaccaccccgatcccctcgcaccaagccccccacaaatcatagagacacccgcacgcatcttcaccagagcacctcgataatgccaatttcgtccctcgagacattgtcgattttctccctccacctcaacaacactgatttcgattttgtccctctaccaatctagtacaaatctctctctttattcattttgttctttttgtaggtgttggtttcgttaattgggtttaaagtttccctaggtcccccaggcatcatttttgtttttttttatttggctgtgaagaaaataagactttttggtttgtgagaaatgggtgtctgagaaagaaaatttggggaaagaggtggttggatctgatatttggatcttggttttattttgatctattttgtttcattttgagaaagaagattctagatttatttgtgattttggagttagattttctttttgagatttgtgatattgcttatgatttggatttagtttacttatagttggctaagtggtatgtcttttctaaggtattagtaaagtaaataaggatcatatgtaaaggtttacattcgactagaccgatattaagagagaaaaaaatatcatacgtattgttatatctttttcaattcaatatcacttatttgaccatagatcaattaatcatctcaatcttgagatgattaagctttaagctaattttattattagagttttttgatttttttgttaccaacttacctatcagactagcttatacttatagattgggaactcggtagtttaattgagtgtgagcgttaatcatagatatggacatctatagattgcatgattatttagaagtgaaattatggttttctttaagcttggctaaatgagattaaattgtgaagtactcattttagtaattatattagtttactggaatattatttacaagtatctaagtatttgacggataaaatgcattgaagggtaaaaagataattttgtccctactcgatgtaaactatctatagaagatcattgattgttttgattgtaataatggataactcatagtgtgtctatattggagatatagagtgttccatgtaatcaagactgtagtttcaagtctatagtagaatcatgaggaattaataagttaggaaatttacgggagtaaatttcagatcaacttattggaaacttgaatacatatagcccatgatccctgtagtgcttggaataatatcatcttaagtagaactcaataaattaatttagtcaataaattaaaattagtcaactgagtatatcatgtttaagaactccatatgctttaacagtaagaagtctaatgtacactatgtagtgcaatagacttagtcttaacttaaagtttcagactaatacaaaagtcacaactaggtaactctctaaacaatcagaggttaaaagtattatttaaccagacatctgctattgagtgggagctat

SEQ ID NO: 384754 - DNA, 1301 bp, Cannabis indica
aaaaaaacaaaaaatgaagaacagtcatcaatagaaagccatgccaaattccatttcaaaatactactgattccatagagggacctaatataatatccaatctcacgttcaaaatcagaaaattacaatatctaacaaaatattaatcaattctctatccaaaatacaactctcaattctcttaccaaaatagttctaaattacttactatttgaaatacaatactatcataactaatactacacaaatgatgacaacaggctttttgtagcttggaatgctcttatgaattgactcattctttgatgaagcccaggtatggttttttcattgagctcttacgacttgattcttcttcattctctgtaatggatgatatctcactctctaactgcttaatcttcctaagaagaccaggtatcacttgtcttgatcgatcacacatcttaggatccaaccaacgccagaaattacatgaccttggaccctgactaaaacccatcatctccatttatattagcagtagagctaaaaaaaaattatagtagtagatatataaatgtatataaaaaaataaaaattcacaggatacttccagaaagttataaatctccttcctggatttgaagttgtccaagaggtcttcaccaccactgattttgggggcttacatcgacattcgaaatgccctaaattctccattaaaaccgatggaaggagcttccctatcgagtttctcaaatctctctccaacgaaagttgctgggtgaaatttcaaccatctgttgcattcccttcttcttactaatggaatggagcttccctctccaattcttattagatttgcacgataggtttttttttgtggatctgattaagggtttttttttccttttgaatgattaatgttttatttatttaatattaattgatacaaataatttaatttaacatgtggcatttttttttgctgagttggatataacacttagcacataacgggattaaaccaagtgaacagtaatattgtaaacggaataaaactaaaaggggtattgccaccaaaaaaaaacaaaagggggttaactgtacacaaaataaaacataagggggttttgccgcaaattacccttaaattaaagcacaaatattaaacaatagcacctttttttaggaaaaacaatagtacttttagttttaaggaatacataatgataaatgcatggttggtttataggccccttattcccccagggctcgtttggaacgccgtattagaccgtattgtattgtattgtatt

SEQ ID NO: 384755 - DNA, 2332 bp, Cannabis indica
tcagttaccaaacttggtaacaactcaacaaggacattgtccagattgaaaaggcgatcagggtgcgatataaagctctagcgaaagaatgagctgctatatttgttgatcgctttacaagtgaaaaaaaaaaaaaaaaaacaattacgtaaagcacatactaaggtcttacagtcattaatcactttgccaaaatataaatcatgacaatagtactacggatggcttgaaccattgaaaggtagtccatttcaaaggtcacatgtggccaccgatggtctttgatccagctcaatgcttcacgaatcccaatagcttcagccacttcaggtgataccgaaccttggaagagttttgtaccaccctccacgaaaacaccatttgagtctcttgccacaaattcaaattctatagttagaggtctcgctaaacaccgccgcatcaacgttaatcttaatactattaacacttggagcaactcattcctcaaccccgtcccctggtatgtacccagtgaacaacaaataattgcttgattttttagcaatacgccattgattaagatagttcattaccaaagtaacaactctcaacccccactatcttattctgccatactctatcattccttgcattccaaatggcccaacacaaggccaccaccaagctggaatgatccgtgtccaacaccaggaatcgctcgatgcaccagtccaggaagaggtgacttgatgcattactgtgcctattcccgcgcgattccaaacaacaacagtagcagggcatgtgagaagcgcatgaaaaatggtttcagcatcaatattgcaagtaggacaaagaatattaatctccacccgtttcaaatgcagttgagacatggttgggagacaactttttgcaacacgccacaacaagtttttcatcttcggtgggatttttaattgccataactttctctaaaactgatcttcagcagaggcatcaaggttatattcaccattaagctgttcaagaagcttgtacgcactcttaacggggtacaaccctgacaagtccttggactaacacaacacatctcttactggtcgtgtctgaactgggatcgcctgcaccagttgtctatcttgaggcaccagcaggtcctcaaggatttcagcttcccaccccaagccatccactgtcaggaggttacagaatttagcattatagaggcttgggtgagtagacataatcaaaggattttcctcatctggtaaccacggttctccaataataggtatacttttaccatctctaacaacccatcgggtacctttcttcactagagattgcgcttctaatatactccgccaaataaagcttggattcgaacagatggtagctgttagaaatgtactgcgtgggtaatatctggctttgaacattcgagaaacaaggattcaggattgaccatgagccgccacccttgcttacccaaaagagaaagattaaagtcacggaggttttgaaagcccataccttccttagttctatggctacaaagtcgtttctaagacatccaatgaatgttagaggatgaattatttgaagattgccaccaatacttagccatcatactttccatgtctttagtaatctcagagggagcaaaaagatgctcatagcatagctagggagagcttgagctacagtttttattagtatctccttgcccgcccgagagagaaactttgtaccccatgcttgaagccgcttctgtaatttttctttcaaatagcccaaagccacatcttattacgactcatagaacttgggagaccaagatacaagctaccctccgttgcaatacacatacccaacagctctgcgaggctctcttttatttctgcactagagttggaactaaagaagattaatgaggactttgcaaagttaactttctaacccgaagccaatttaaatttttgaagaatttttttgatccgaatcgcttcctcataagttgctgtcatccgcaaagagcatatgagatatacggggagccccattagccactttacatccatgcaaccaccgacagttctcatattttcgaaggagagctgagaaaccctcctcgcaaagaataaataaatatggtggcaaagggtcaccctggtgaatacctctaaacagaataatagggcctatctcgtgattccatgaataacatggtatctagccgatgatacacacctcactatcaagtgaacccaatattagtgaaccctagttttcgcaacatagcttcgaggaagctccattcaactcggtcatacgccttgctcatatc

SEQ ID NO: 384756 - DNA, 1971 bp, Cannabis indica
aatataagagaaatactatattctttaaagttaggattttagtgttttgttaaaaaaaaaatgttaagccaaaatcttactattaatatgttgtgatagtgtaattcttaattccatttttttattttttaaaataagaattaaaaacaaaaataaactatataaatacctttttttaatcatagtttttttgtactctctttcatcaatttatgttattgaattttgtaataaaaaattgtatttttcaaaggaggatattctttttctttttttcctttggaaaaaaatgatcatttaaacaactttttgaaaagaggatttttttttaagaaatcttttttgaaaaagaggatttaatattacaaggaagcacatgcaataataatcataataataataaaagactttaactttgtagatttttttttccatgttttatatggtgtagcttatcttttatgtctagaaaagtatgatacattattctaaagatgattctttcataataatcatagtttggttcccaattttgaggcatatcaaagtgtcaacaatcattaaacttctatcattaatttttgaaattccaaatgttttaattgtttttttttcaagaaaaattaaatcatcttagtagtatttttttggctcctttcttatcttttgcatcacttaatttctagaagataaaattttcatatggccatggttctttccctctttaaaaattaaaaggaaaaaaaaaacatagttatttcagttcttaaaagttttaaaggtttcaaattaattgcattatattgacattcaatcatttataaaggcatccaactttgatttagaaacaaaaaacacacacacaaacaatatgataccttgtagtttattattaaaactaatttcctcgcgagtgttctactgtaaaagtatttaatcgttatttataaggtatataaatcattttactaattactaattaattttttaaaaatatccaatgtgattagttaggttatcattttactcatcactaattagttttttaaaaatatccaacgtgattagttaggtttcaaaataatcactttgaatctaattgtaaaagaattgttatctatcttaataatcatgtttctatagatttctactttctagttcctacttgtattgactttcatgtctttaaattcttttgttgttctaagataattaatattgtagcttatactcaggcctgatcctcggtataagcatactaggtttatgcctaagaccacttagtccatgagctaaaaaaattattttataaaaatacacatatttttttattgattttaaaaaatattatatttttgttataaaggctcaaattttgctttttcctatggccaattagagtttagagccggccatgctcatactttagctaaatatgctttgaacactactgcattttgtttatagtttagtggcttggttattcaaattgtatttggtgacatattttggcaaatgcaaattttcaatgaaagttgctttagcctttgctccttcttgagttatttgctctaaaggtaactttcttgagactattttctctataaaaaaaaaggttttaaaatagaatcatatgtgattcttgatatagtattatgaccttataactctcaacacacattattaatcaaaagtgtgttttggacctatgaaatatcacatgtgagcatcttacattaataaagaagagattgttgatcattttacaagactaataagaagttactctttcattatcatatagttttgaggtaagaaatctccttggacttgtgaaatggactctttctcgataatgggcccagcccaagcccgtatttagcaaaaaaattatattgtatactcactttactttatatgttttaatttttacttttatttttatattttttaaaatatacctacttttat

SEQ ID NO: 384757 - DNA, 1944 bp, Cannabis indica
tggaggcgaaaggaaaacgatcttcgaataatgccgaaagctcggaagaaaaactcaacaaatatacagagcaaagatgtagctgttgctagccctgataaagaagcaccaatgacaacccctaagcgaaaatcacctactcagggatcagcttctcgacaggtaaattcaaatcaatgctacttctgtcttcttcttcttcttcagaattatgcaaacagatatgcgaatttgaacctttttatttatatatttattattattgtaattttggcagaggagaagaaaaggatctgcaaatagtactccgaagaaaaattcacagacggaaggtgtagctgttgttatgcctgatttgcggttagaggcaagactcactgcccaggttagtcaatgtgatatcttcactttgtaactaactagtctcttaatcagttttttttagtcaatgttgttcctttgtttacttgctcatgcttctcaaatttaatgtctggtacagtgatattggtttgaagattgcataatttttacttgacttattagctttgattttggcagtacctattgatgttgtggagctgagttttccttcattcactttgaacaggaaaattcacggatgtttgcaggaaaaaaattacatccttttttcatcagggaaggaagaagaaaaatcgagaggtgattgatgttgagggcaataagtttgtagttggtaggcaaataaagagaagacttgtgccccgattcatgtatttgaaagaaaccaggtaaaagcttatactcagttaggctagctcaaaataaagatagtaatttttgagttgcaggaattgagactgcagttattgattgttctgagttctgctaaaactttctgctacaggacactgacatgccccttgactggggaacctggaaattttctgaggagaccgttatgaaaagcctttgtgacccagaaagcacatgccaatttatttttgaaggctccaccgagtccttaagttttcaaaagtttcctgttattttacaccccaacaacgcatcaagttttcaggctaaggtttcgtcagactgtgttatccaagaagattgcatctatgaaacattgccaacagataatgaaatagaggtatgctaggatgctggtgctctaagtgatttttttttggtaattgtcatcctctgattctcaatacaaattaattattggcaggatagtgagatgaataatgttcattcctttggtggacctactggagcggtaagaaatccaaacactagggagggaagtagatttgttgaggacagttcaaatggtcaggcatttggtttgctcccacaaggtttgaggtttgagtccctccttggtacctatataacaattgtcatagtttcttggtccccaaagattgtagaattaggcggggaggctagtttcccaaaaaaaaataaaaaaattttctatagctgtaatttttacattgtttttagtagactcattataaatatgtttcaattaattttttcaaccattatctttcaatcatatgatatcgttatgtgtgtacttttttatctttagttagcttccaatattgttgaactgatcgtataatgcgtttgaatatttatgcattaatcgtagtttctaattttttagtctatcgatagattttattaagtctatagctgtattttattgcaaattgaagtcatactgttttgggtgttgcagtcaaccaggaatagcttatggacttacagttaccagtccaaaaaactgccacggaggttagatatcttggactatttcttcctttgagttagtactttttagaagttccttcagtcctcttaaactggagaaaaaaaatattttactgtaaaaaaaaccctgcaggtatgtggtaatgttgaatctgtgaagtttttgag

SEQ ID NO: 384758 - DNA, 2062 bp, Cannabis indica
agttttaacagtgaatcttgattcacctttgaggaggataatgttaaaaaaatagtgagattaaattatttgcgtctattatattattaattttaatagcatttttaaattaataaataaatttaaatacttttaatattataatttattataaccaaaatataacgatatatatatttagtctgtcatgagatcattttttagtgagttttttttaatgtgcaataatatatagttatatatatatgcattatacataaattttatgtaaatatatagtgtacataaatgacataacgacaaaaataaataacataatgataaaatatatataaatattcattttaattaataaaatataataaattaatattaactaattaataaatatatttctttatatgaaaaattattttattttttatgtataattaacattaaatgtatctaataaaaaattatttataattttattttttaaaataatatataaagtttttgtacttaaacaaacagtataattcaattagcgggaatatgattacatattaccctatacagtcaacacaatttacactttttcttacaattatattctcctacacaatatttcttacaatttacacattttcttacaattatatatattctcctacataatatttcttatagtcaaataattaattttgaacaccttgtagcaaagttcatttttctttattttttacgtattaattatgaatatataaatcaataagaaggatgatatataaatcaataagaaaaaataaattatactcaccttctctttctctttgctcagctagaacacaaaactcaaccctatctcgacgaaattctaaaccatagtctctctttgagttataagagttaaagtttagagtttgggtgtttttgttttgtatagattgctataggtgagattgtgttttaaagcttaaatttgagttgtagagagttgcttaaggtactttgttgcaggtttaattgagagctttaagtttgagctctaatggtgaatcttgatagttgatgtttttgagttgtgtgagctgtgttatttgatgtattgatgatattggattattctgggaagtttggtaggtttcggttgagtttgaaaatgttggagatcatgtgtgaaactcggagtttttgcttcttgcaaaaaaatggtagaccatttttgagaaaatgatctactgtttttcctagcaaggaattcagaaaaatggcttgtcgtttttccaaatgatctaatgttttgggtgaagcttggaaatctcgatgttcgtatcttctcaatatttagggtattgtcacgctatttattaatagagaaactttcagttatcaatttaagaccttatacaggttaggtcaagttgttgatcgatttaccgttgttgtggcatagagtcgagatcttcaggcgtttctccactcaagttggccgacatgcatgaatttcgattaaaggtaaaaaaaaaagtacaatcgtactacatagcatgtcatgttaagatacaattattatcatttataagatatgattattatcgtttataagatacgattattattgattataagacacggtcattaccgttatgtgagaaaaaagtcatgactgtaattgaaatcgttgttagattttttacttgtcaattatctcgttaggtaacaacagtgacatttggatgtcaaaataggtattaaggttgtcttatgataaaacgacaataatatttggatttcagattaggtatcaggtttatcttatttaactacaatgagattgattactttatgaagtaacaaatatgacttattacatgtgtattaccaaatgtttatataccagtaattatctgattgtgataatttgagtttagatgatgatatttttgtattgatttatgatattatgttatcgctttttttttacaaagtttttgtgactcacaagtgctatgtggtgcaagcgggggtgttaggctatttttagcctatgttttggatccaatttatgtgcattctt

SEQ ID NO: 384759 - DNA, 1234 bp, Cannabis indica
atagataattttggaaatacccctttgctggaagccctcaagaatggacatgatcgagtgtcttctttgcttgtacaagaaggggcctctttgatgatagacaatgccggtagttttctgtgtacagctgtctcaaggggggattcagactttcttaaaagggtattgtcaaatggagttgatccaaactctaaagattatgatcaccgaagcccacttcatgtagcagcctctgaaggattatacctgatggcaaagttgctgatagaagctggggctaatgttttttccaaggacaggtattgcatcatacaaatttatatgtttgatattgtcaaaaattttacagataattttactcatttattttagatcacaactggctgtgttatttgtggagttcagaaagttaagtctaatgaaggctagaaactctaaattttaaataatctggctgaaatttcacagatttttacttgggactaattttccatggctattatcaataaattaggtttccaattacttgtctgtttgattcattcattagcttagatagctaccaaaacgaagcatatgatcatatctatattgttatatgttgattctactgttttcctatccttgtttctgtgtatttgtttctttaggttctgtaacaaaataaaggagctacatactaagttaattaataatgttctcttatcctcacttctcatgtttggtgatcccacaggtggggaaataccccactcgatgaaggtcggatgtgtggaaataagaacctgatcaaactattagaagatgcaaagactgctcaattgttggatttccccaatagtggtcgagaaattacaggtatagaaaaatgattaaatcatgttgattagaaaacttgtcatacaggccagctaatagtttatctttctacaaattaaacaacgaaatgaaaggacaatatttgttctggtatgagtatgtgctccgagcaaaatttggactgagcaaaacttgtcgacttcctttttcttgtcatacaattgaaagagagtttggactgagcaaaattttcggtttcaagaatgattacatttttttggtaacttttagcaatatggattatgatggaaaaatatctttggaatagtatgtctagtcacttaggctacatttggttagaggtaataaagtgaaatggaatggaaatgaattaatttttatttcattcttgttt

SEQ ID NO: 384760 - DNA, 1690 bp, Cannabis indica
ctcccgatgggatccagtaacggaccgagacaactaaggccataatcaattgtacccatctagtatgaaagcccattttcaaaaggagcgtctccaagaaaggccattcaacgcggtcatacgctttgctcatgtcgagctttaatgccatttgcccaacctttcctttacttttccttttgagataatacattatttcaaaagacaccaaaatattgtctgttattagtctaccagggacaaaagcactttgggtctcagagacaatgtcttccagaaataacttgagtctgttggccataactttcgaaatgaccttgtacacaacgttacaaagagcaataggtcgaagatcgcccatattttctggatttttcttttttgggatgagcaccaggtttgtattgtttaagtcctcgggaatagtggctgaacaaaaaatcttgaacaagtttaaccacatcagaactcaccactccccaacacttctgaaagaaacccggagtcataccatcagggcccggagacttgtcaggatgcatctagaaaagagcttttctcacttcttcagaagaaacaggagccagtaattcaacgttcatctcatgagtaatggtgggagagatattatcaaaaacatcattagcaagaccacccgaagtaaaaaaaagataccgtataaaaccgaaccatatgatcagctaaacccgactcccaatcaagccaaaccccattaccatcttgcaatttatgtatcatgttctggcgtttacgagcacttgctgaagcatggaagtacttactatttctatctccctctttgagccaaagttgcttggaacgttgcttccaaaaaacttctcttttagttagcacttcaaaaagattcttctcagcattgcgatgggcttcaacagacacaagatcattcttccctttcaaacgccgaatatcagccttataagtagatatttgatgtttgaaattaccagtgatgtccttaccccaagctgcaagggattcgccacacatagagatcttcaattgaataggaagtgtgtcatcatcataccaacagtcacgaacaagttgaagacaataaggttctctcaaccaagcattttcaaatcggaattgcttcacaccattgaacacattttgaattataggatccaagaaaataggacaatgatccgacgaggaagcatgtaaattaaataattttgcagttaaaaaattgtcaagccaagaaagagatgccaaagctctatcaagtcttacctcagtccaatttgcggtgcctcttcctctctctcacgtgaaagggtgaccatggagttccatgtcgatgagatgacaatcggcaaggactttggaaaagcccttaataagcctctcagggtatggtcgacctccttgcttatcactatgactagtgatattattaagatctcctatgaacaagcaaggccaacgaacatcatgtgaaagttgacgaataaggccccatgtattttctctctggcttctatttgcttcaccatatattccaatgagtctccacgtaggcatattagatacatgagtgaggatattaatgtgcttgtcagaaaaattaataatctcaccttcttcactattcttccaaatcattgcaagcccaccactatgaccacgggcctccaccaca

SEQ ID NO: 384761 - DNA, 1889 bp, Cannabis indica
tataattttttaaaaggactataaccccctatatataagaattattgaagtttcaaagctaaaaagaaaaactaacatttttatgatttttaggttttaaaaatcaataaatccaaaaattctttaaatattttcttattttttattttaaaattccaaactagtcaacaatttaattttttaaagttctaaaaaatataaatccacattaaaacaatcacatttttagaataatttttacataggaaattaaatatttcatttttaaaagatccttttaaatatcaaaatagataaaaagtgtggatataccatatactttttctaatttcttttgtatgtgttttaatgttttagtcttgtttctcacttgggtagctaattctacctattttatacaaattttgttgtaaaaatgaataaagaaagaaaagacctttttttttcttttgtccttttgtcaaaatcattcaaaacttttctcataaattgacttcatttatttataaggtaaattttaaacactttctttttaataagtaaaaaaaataaacaaacacttttttacttttttttctttatagagaagtatacttataattatttgaggtaaattagtgatatgaagtgatgttttagatttgtttttagaaattatatcttcaatagtactaaaagtttgtgtcactataatttcatattattttaacataattaaatgtctttatttttaactacatatttaaattagttaagtagcaatagcatattactatgagatggcttcataagtagttagttaattgtgtatattgtaattactcaaaacatctataaaaatttcaaaaaaattccaaaaaaaaaaacacattgaaaatagaattttaaacagtacgctcatgtaaatctttaattttatatgcatatataatagattgtttgaacactaatttttaaattctttaaaattttataaaatattttaaataactataacgttaataattagaaaaaataaactaaaaacttttttaaatattaaaataattgaggatgtattaatgtgcctttttttgagttgcattgtagaactatattattttttatcttatgataaagaaataagaattttgtacctcataatatttatttttggttacatcataacctatgtcataaatagatatatgtatcaattggttttatttttaccttttaaaacaaaattcattaaatcaaattcttagtgttggctgtcaattttgacttttgttttgtataacaatgagaaaagaagaaacaccattcccatttagacattagtacgaggtgacaaatatgttttgaatttattaaaaagaaattgacaaataattgatattatatgtttttgttccatttaaaattgaagcctaaattatagttttataaatttaaagtatgttgagaaaattacacaaattttcttataaattaaattagtaagaataaaataacagtggaaataacaaattttggtatgtctctaaatctgctataaatcttttactgaatttgagaaacaaaaatacacaacattttacaacactcctcacaatctatactctaattatactcaagaattcttctcacaaaaattctctcaaaaactttttttctctctctaagcttttaataaaagttatacttccttttgttctgggatacatataaatgaaacttatgtgtgtctatatactataggctacaaataaaataagttgtagaaattagcctattgttatgcaccttccattactaatttgctaacttaagcttcttaaaaataacaatgaatgtgatctattttttttttaattttaactaagaaaggataatgttatttcttt

SEQ ID NO: 384762 - DNA, 2510 bp, Cannabis indica
ctttctacccttcccaactcaccttctcttctgggtgtcctgaataatacaagaattatcatgaaacacaaaggagcgaattagactgaagacatcaaggctgtagcagacagcaagctatacttgaaaatttggtacatatagaacattaaacaagaacaattttagaaaggaaatcttaatagagccactgcaagaaatcttgctctttggaccatcaggaagagtaacagtagacaatataagtttatgacagatgtttgtgaataaatcaagataaggagaaacatgatgagttgcacctgtatcaataattcatttgtttttatgactaaaatcagtcttaccagaaaaatttgatactaaaggtcaagttgaaggtcctgtgttttcagtgtggaacttttgggcaatcatggccataatttcctgacattgactgagtgaaagacaagccaaaggatcttgattagctccaatattcctttcattattatcattatgtgtctaaaaaaatagttgttggtttgccttgtgtggttccgtcctaaggagtgtcaccacatttgcttggaaatctagcatgcaatctaagcgccgatggatatccatgaattttggtagcatctagacatggtgtgtccactaattccacaatgattgcaggtcaatttagatctctgagattgcactcctccaacaaattctccagtaagatcagaatcagagttctgagattctgtttgaagggtagtaattcctctttggttttcttcttagatgattgaagcataagctttgttgatccatggaagaggatcttgcatcaaaacttgagacctttcaagatgattcattcaaaccaacaaaaaaattaaaaactttgtcctcttctaaatacttgtgtataattctcatagctccacaagtacacacaggtggtggtctatgcacctgaattaaatcccataaggtttttagcttagaaaagtatgaagtaacactattcgaaccttgactgaggagactcatcgcacgtttagcttcaaaaacacgaggggcattcttttgattaaatctttcttgcaattctgacaagattgtagaagcattatcatgatacatgatgctatctcctatctcgttggagacagctctcaatatccaggatatgatcaagctattacatttgcaccaagaatcatgatcttcattgtcttcatcaggttcaggtaatcttccatcaacaaatttcattttgtttctcgcagaaagagccaccatcatcgatctcttccaagatccatagttctcacctctagtgagaagttttgcaataagcatggcactaggatggtctccgtgcgacaaataatacagacttcgtggatcatcataacgagtagtttgatctaatgcaaaaaaaatgattgttataaccgggatcattgtcacgatttgaagtattgcgagtctgagctcctcctcctcttgccatggcagttgagacaaaatagatgcagagatgggaagagaagaacagagaagaaacagagaaggagctcaagaatttcttggctctgataccattttagttttaggagataaaagaatgaaatctttattattattgaatgaattacaaaacagctcaacatagcttttatacaacagtttccatcgacacatttttacaacaactaaaccagcacaactgtcataacaaactcacacattacagctcatgttacaactcaattacaacaacttttctaactaacttctcatccaattctacaaagccattgttaacaaagcttaacaagacgctcaattgatggcggtaacccttcaacttttgttccaaataaacaaagattttcaagattctcgataggctccaaaatttctggaaagcatttcaattgtgaacaatatgaaatggataggctagtgagatagttcaacttacaaatatttgtccgaataaacacaagacttttgcatctatccaagtaaagcctttcaacaacaacaagtttctctattgacgattgttagtactaaaaatggtacattttacatttatcaactcgcaagtgcacgaatcttcattgtagtgtaaagattgtgaagaacgaggtcaaacccatgagaattgcgtgagaataaaaaatacatttttaatttaagctattataactctaatctagttaccaaaatgatgagattttcagtgcaaaataaaataaagtgtttaacaataaaagtgacagtaactaatatttttagtggtatttgggggaactattaaggtttcagaatcaatttaattaataatcaaactaattattttttaacaaaaatagattttctttcgctttagaattatagtttctaaccattaaatttaaatgtgaaacaatttaatgtaaatagataaaattaaataatattatttttaataaaatgtaaaaccaaacattaataatttctaactatggaaaata

SEQ ID NO: 384763 - DNA, 1769 bp, Cannabis indica
gaagaacctaccaagccattttatttttgaccaacccaatttttttgttttaagtaaaacatgtttatttccaaggtaattaaatttaaacatgttttgcatagtgatgcatttaggtcgaatgtgacctttttctcccacaaaaatggcaaatagggatgaaacgtcttccattccctttggaattgtcaaacttaccgtggtgcttcttttctgtaacagcagagtgctttgctgtagagacagaaacctgcgaggtagaaacagttcttccagaaacaaaactattagttttaacaaaagtggtattagaattaggttgattagaaacataacccagaccagcatgattggtttggccagatttttgaattttttcaaagatggtggaacctggatttagcattttcacattctttttaatgttatcaagttccataaataggaaagctagacaactttccttacaagtttagatacacacaaataaggaaaccgtattaatacataccagccgaaaatacattaaataataaaatatttttgtcaattaaatatgccaaaaatgaaattaacaaattattctaaattttttaaaaattgataatataagtctaatataattacaatataaataaattacataaaaaattctaattttttatatactaaaaataataatgaaaaaacatctctgccaaaaaaaaggtgaaaataacacttttttcctaaacttaaaataagcaacaattatatatatataatattttttatatatatatttacatttcaaaacataatatatttttataaatatttttacgaaaattcacgtagcaactaatataacaacttaaatcataatccaaatccacataacaactaccagagtaactatcgaagcaacccaaactataaaaataaaaaatagccccttgtatatatacacttattagttaggtggaaattcttagagtcgtacttaaatttgacctatttattaactgtgttgaaaactaaaactcaaactaactcaacctatttattgatcatgtcgaaaattaaaactcaaatctgacttatttacaaagaataattgaattgaacaagttaatttaacctatttatgtagaaattcatacttatttatagttaacttataaactcattaatatatttataataagtgtaacatgtttataaatttttcgtaacacatttgtgagcaatattttaatatgtttatgtccttaattaagttaatacaatacatacatgtaataaatataagaatgcatgacctatctaataagcgggtttgttgtattaatccaaaaattattcaaaatctgtttatttcgtgtaaatttcaaatcatgttatcgtatttaattcattttactatccctaattatgaattagttggacatttttagtaagccgtgactcaaacacttgaattagaatattattgcttataaatatataataaagtatagagagttactgcctccactatttggttacgtgttagatgttaattcattttatagaaagaaagaaaagaaagaagctttgaaattttggttgaattcacaaagatcggaataatgatagtcacccttttattaatttgtacacaaatattaccaattatattgttttcacctaaaattattaagcgttaatatttatgtcacagcgccgtctctaagaggctaggacaaaatttaaaaaatgaaccttttgtttggaaaataaaatgaaaa

SEQ ID NO: 384764 - DNA, 551 bp, Cannabis indica
agttaatttagtttatactatactaataactaactaaaaacaaaaaaaaaaaaaactaactttttaaaaaatcatttaaagttgcctagttcgattttatttaattttaagaattattatgtgtaaaaattgaataaaaactctatttttctagtagtgtaatggttattgatatcaattagggggtatatttaatttttatccaagctgtaactaaataaaaatctcgagtctatatatcactaccaatagtgctattgtcgttgaaagccagtcaaggtcgattttttaatgaataattagaaggttaattaatttgatcatcatccattaaaaagttaattttgtgagttagggattacagaagattaataggaatatcaatttggctcacaatgcaaaaaagaggggtcttttagatgcttacgacatcatcaacaaccacgtttcaaattattacaaggttatatttaattaagggtaaatactattttggaccctctgttttataaaagttaccaattggactttgtgttttgttaaatgacaaa

SEQ ID NO: 384765 - DNA, 1485 bp, Cannabis indica
tctcttatttttatattatatggactcagattgttctatcgactgaaaaataattaaaaaaataataatttcggcataaataataaaaaaaaagttgagtttaacttaaatatttttcatataagcatatttttaatatagtgtaaaaaaaaattctaatattttctttaattaagtagctaaattaaatataaaaattcaaatttctcttttattttatgttatcgtattaaaatttaatggttaaatttgtttggtatccatcctcattgaaaagtattccatgaatatcaaaatattattatacggaagcaaaattttatgtgtataaatttatatacatgtgatatttcctataatatatcttataaagtaactttatatataagtattcttcttaaccataagtaactttgcgaacaaggactctttgacacttgatttgttctctttattttatgagagccttttatgttcttcggggtttaaacgaaacccttatcggtttgcaataaaataatatcaattttgaaataccgcttttataattatccaaattaattaattaaatatgatactcttattgagatgtttaaacaaacataaaggctatttgagaagaacagaactatgtttaaacagataactaacatagagtaaaaattaacataaagtaaaaaacacacaagattatatgtggtataaacaatccttttgaattcctactaatccataagaccatacctaaagaataagatttatactactaatgtcaaagtgattacaaaatcgaattactttataaataaagataccttctttgaaattaccgcaactaccgtaatttatactcctaataaattttttgaagttctgagattttgaactccattcaaattgttgcacttacactcttttctcccaaaaagtgtctcacaaatagtcttctcccgaagcttgatgaatgatatccaagtgtgttcaacctccacaacttcaacaagaaacaatacagagataaacagtaattgtaaagaccgtttaattttaatttgggaattagcagataaatagggttcaactttgaaacttggatactacttatgaattatcattttagagagatttatgtgaattcagaatgcattatatatgtcatatagaaaattttatatttttgtatgttttgtgcccggcaacatcggaacgatgcgtttggctattagaacattttagtatttttagtatagcggggcaatatagataaacattgggaatgtcaggttttacccaagggttggaaataaccattttacccctagaccattttgttaattaagcttgtggggaagggtatttttgtcattttaccttggcagtgctggctaatttttagagtggtagctggccacaaatggtttaattatgttaagtgtttatttgatttttagaaaattaaagaaattagaaagaaaaggaaaattt

SEQ ID NO: 384766 - DNA, 1263 bp, Cannabis indica
acacacacacacacacaccccttcttgtagtcacattcatttggtcaatctccttataattttgtactttactacaggagaaaaatctcagtgtactccacaccttctttttgtgtgtaccccttagccactaatctagctttgtaccttactagttcacccttggattttccttcgttatgtctaaacaatcacttacatgaaacaatactcttcttttaaggtcaagagaatagtatccaagtcttgtttttattaaaaagtgcatctcctcattcatatcattgttcaatttcttaggatccttgcctttgatgactttctcataggtctctggctcaatcttttgtctatccaacatgcatagaagagcatatgcagtatcctcattccagatattgaagttgtatttaggattaagtttaggtgttcttttaactctatcgttgtctagctggtaatcttcaaggttctcaatttatgtcaacgaagaaaatgcttgggatagttctttagcattttttttgttaatgccctaggttgacaatatgtcaacttgggcgctaagtgccttgggcacctggtgttccgggtgctcaaaattaaaagtgctccgattctaattttgtttcttcatatatgttcgagataggtctaattcattttctcgtaaagtttgacctatttcactagatgggtttggaaactaaaccatagtagagttgtcaacttaggcactgggcacctaggttgatttctgggttgttgtttcatgtatttttagctttcaaccttggatttggattcttcatgttttcatggtatagaatactgaaaggtagtgaattggaaacaactagcgggatccaaacacccattccagagtttctggagtaaattggggtgcagggctagggatcctttcaagtcgactgccatgactcgggactactcaactccaggatgttttatttcttgacacgtgtcaaatattgatatttgcgtcatcagggtcagtttctgggtaaacgctttatctttgcacaataggtgacattcactcattaattgcaaacctctttcactgatgtgtgctagccttttgtgttatagggtatcgttaaaatcttcaggtgagtttgatattgtattgtggcaatttaaacacggttccccttttaagtagtaaagacttccttctttgtagctgttgaacgataaaaaaaaaagaggaataaataaatttattattatttcattatt

SEQ ID NO: 384767 - DNA, 602 bp, Cannabis indica
agagagagagagaggtgtaatatccagttgtattgaagaaattataggtgttacagacggtgtaatttatatgactaagaaatatgtaaaaataaatagaaaatacattgtttgatgaacatggaaaatgagctaatttacaagtttggcatcctcttctttggtaaagctttgcacttttagagtgttgcctgttcttgcagttgttcctgatcaagaaccattaaattcatatgagtccaatcatttatattattaaatcataaaaaaaattgaaaaaaaaaactcgataattgtctttcctgattattgttcttcgtatcacaagaaattcaattgaaattctcgtataaatgcagtcatgtcatatttgagaatttgcttcatgcatcctaagttggttttgaagtttaactgtttaatcttaagaacattttcataaaatttaatattgaaacatttttgaataatttctcttttcgaataagcttaagaaaagttctagatttaagaaaaagttactaaattcaattttattttctttcaaattcacatatttttttgttcaagtaaataataataataaaaagaatccaatatat

SEQ ID NO: 384768 - DNA, 1120 bp, Cannabis indica
  modified_base (1114)..(1114): a, c, t, g, unknown or other
atcaaaaattaagctacaatacaaatcacaaccccaaatacatcaaatggaaattggaacttgggaaacacttcttattcaacgtcaattatttaaccactcatcaccttgtcttctcaggtgaaatagtatggctacctgtattgattcaagtaaaagggaaaagttctagtcatccttgagaagacaccagatcatcatctcttacggcaccaggctgttggtccctgtctttgttgacagattcaggcttaggttcacccaaagtggcctcttcagctccatcaaatgtcttatcatcaaacactgaatggtcagcctttcggagcctctcctcagccatcttttctattacctctgctgttgaaggtgctctttcttctgtaccactttcatgcctatcctcgtaccctttgcttccttggctgtatttctgtaccaacaccaacgcgtatatattttacttacacacttttataatttctaatttgtgcaataaaaggcatctttatatacccttaaactttcacaagatctatcacacacagacacccaaccaaaaaaaaaagacaagactttataaggttggctcatacactaatactactaaactagtttatagttaattctaaaagataatatgcagaagaaacgacttaactcctaatcacactataaagggtactttttagttattgtcggtatatgttcgtctgtggtatactgatcatattctacaatttggctcgtaaacaatgtcacatatcataaactcattctaggttcagagaactgatttgtttagctactgatatatactgatttctaattctaaacaacaacaacaacaacaatgaccaaataatgttgcggcttattagttattaaatatcagtttatatagttaatgacattagaagtaccttgaagatgggattatagagacatggggttaagggcctggttagggacacttttgttttcgataaggtcgtatttagaataaagatatagccagctgctcccatcgtttgtatatgaacaagtttctagcaaaaaaaacaacaaacactagaatttttttgcttttagtagcactagtattttttttttntttttt

SEQ ID NO: 384769 - DNA, 1982 bp, Cannabis indica
gtagtcgatgcatctttccttggccttccacgttttcttttccctttacttccttcctccaagccaggagagaaactgctcttgcttgtgcttccattaggttcgccatcaatagcaaaattagggaccccatcacagccagtagtcgataatggagttgagtctcccccagggagcatgaagaagccatccgttgacttacgttttctgggccctgactcagtctcataacatttaaaatcatcaatgcttagtattggattaaataaagtgggctctctgtggtatttatcgatagtgttgcttcctgttaataagttgaaggcccgattccagcattcattggaaggccaaagcagaggttgggcctgtgagcccataagagtgttggtttgttgatccatctccaacatgggctttttggaagtggttgtctttatatgggccttgctggagccccccttactctcactggttgtgtttgaattttgtccttcttgcccttcaacgtgtggaattgtcatggccaccttcggtaagggttcaatagtggtattcacgttgagaccattagtagctacttcgggtaaagtttcagggatacaggtacccttgagtgattcaggcctgcatccgttgttgttttcctcttccactgccttgctactctcccctttgtttgtccctgcctggctaggcggttgtgtcactgtcgccaaaggagggggtcaggaagaaccttttcgacaaccccagtggcagtattttcaaatggggtaacttctccaatccccggtagcaggaccgccgggtatcggttaataccatttctttagtctccggtctgagctcaaccacctcctccaccagtctccgcttacctgcgtattgaatcctcaactctcgacattccgacgactcagctcgttggatgattcttcggtttaaaagttgattcctgaccttcgggtccttcaatgcttgttgattcagaatccaatcattaaaccatttgggaagtggtgattggaacggagaactctccctcgactcctcatccatccacgtcccgaacataggaaaaaacgctccctcttcattcttgatgagcgttgggttcttgaagcagaacttgtgctcatgggtgagtaggccacatttgaaacatatctttgggaggcgttcatattggtattgtatccataagtccttaaggccagttcttcgcaggtaaaatccagagaatagcggtttcttgagatccacagtagccctgaaacgaaccgtacccatgccaaaagaacctctcgcaaagttcttctcaatgtgtttcggcagctcatatacattggagactttagcagcgaactcttgtaggttagttttgttccaatagaacggtgggatgctctttagtctgacccagatgggagtatgatccaacctgacttccgagggtgttaaccaagacggccatggcataagaactaacaggtagccacacaccaaccacggccgtcttagcaatacattgtctgcatcagtactcgactggaaagagaattgaagaatcccatctccacgatcttcccaactccattttttgacactactccaggcattctttagagatccttggatggccttccttcccaacctggtattgcacatcagcttccttaggaggacgcgactatgctcctggggtaaatcgatctcccctgggtggcagggtacgatgtgagttcatcggtagagacttggactgaatcctggaaaagaattacttaacgtcgggtcagccattgtgattgttccagcacgcaagacagaggtgttgcaaacacttagtaacaaaggtgaatacaatggtaggctatgagtgattcataaagcttccatacatattcgaactcttttttttgttatgatagaattttaattgtctatatttttttaattttgatttaaaatgagttaaa

SEQ ID NO: 384770 - DNA, 1467 bp, Cannabis indica
atctgccatatattattctagtaaacggtatgtctctaaacgtattaggtttttttttctactcttttttagaaagattttaaaaataagtattgagtcgtgggttaggggtttgcttataaaatataatgaataaaaaagattaaagacattctattttggtcattttataaaaggtcaattaagtacttatatttttggggtgtagttataatttgatggggtgtaaatataactctccaaagttttaaattaataaaattatgaaaagacggttagatactacatttgaccaagctaaagtaataaaatataagaaataatgtatttttttattgttatttctcaattaaatagttatttttgtctcttattattattatttgataatatattttttagagtggtgcacataattaaatttaaaaaaattacccaataatatatatgaaatacttttcaatgggtattactaaatatatgtatatatgtggtgtaaatatatgtatacataaatcaaatatatgatatgtaatatatagtgtaagataagtatagtcgacatgtaaacacaataagttgatacatgaatacaatataccaaattagagttgatattttttgatgcaaattagatatatgagtcgcgttaaaattgaccaattaaacatgttaacctatacttgtattttctttcaattttttcttctttttttttttgtttttttttatgggaatgtatgttttcagtattatgttgtaatatttcttcatcttctacatctcctatttatttgcagtttaactttatgtccaattattgtaacattaatttgttctaccataatctttgtatttttctgtagttattttttttgttagataatagaactttgctattgttcatcaagagttgacttttttttttaacaatccacatattttcatgttaaattggcttttcaaacttttataagttaattaaagtcaactcaatttattctttagattcaacaagttaaataataagttactatgttaattatattgttcttcttccattggttgttttgaatatgaaacttggttgccaaatgtatccaattcgttagcttctctatcctgctcaatggggggcctttgaagcaatttaagccctctcatgaactgcgtcaaggagatctgctttccctttttcttttcattcttggcagcgaagtgttagcacgtcttctgttttgaaaagaaattgatgggcagcttcatggttttaaggtgtgtcaccaaagcccctctgtttctcattttatgtttgtggatactttccttttttgtaaagctactgtgggagaggtagaaactcttcgtgattgtttggatctctattgctcctgttctggccagattattaatccctcaaaatcagctgttaattccatttttggcatatttaattgacaaaaatat

SEQ ID NO: 384771 - DNA, 1607 bp, Cannabis indica
tttttgtgttcatataggattcggattcgtttgttagcgtcttattgtattataccttatatcatatttctatataatattatattaaatttaaatttatattaaaattttatatatgtaaatattataaaaattcatactatatataattttacataaaaatactatataaaatacatataatttaatataatattataaatataataggatataaaaaaaattaacaaagaaaccattatatctatatttataatcgtttagtaatgatgtttatatatattttaaaactagaaatatttcatattttcgaaatatatttatcacatttaaaaaaatgaacatatttaagtacatacatgacaactggaataattttggctctttcagaaaatgaataaatagtgaagaaaaaaaggaagaaagaatgattattttggctcgttcctgggaataattgtgtatatgtttcctgtgatccttccacagacttatcctttattcaatatttaaaaatctattttagatttctccttttattttacatattatatagatatatatgtttcaccgtcagaaaattatatttaaaaattgaatttactcacgattttcttaaaattatattattctacgttaaagtaattatattattttaaattttctcaaatttttttgttattattttagaaaagggaaagtggactgaaattttccttattctctgctttcgtttcaacaaaagattagttttataactttattataaaaggtgaaggtcgttaacttgattttttgctgattaagttggcaggtaaaatcaaagtagtatttttgaagagatcgactatttaatttgatgaattaattactcaaaacctctgactattcaaatctctcgtcgttgccaaaataaaatactttaatttttttggaccaaataaataaaatattacttgaataaagggagacttctcaaaaacaaaaaaaaagaaataaaaaaaattatggcgtcactatttccaacaatagctaagtttatttaactttgagaaatgtaggacagtgctaaaactcttgtcatgtgtaatattataattggtccaatttaatattaatttctacttattttattttaataaatattataaaaaattactaatcaaaaattactaatcaattataaaatattatcccatgattttaggcaccctatattaatgctcttttaattttagtcggggaagagattttcttcttgagtcctaaccaagaatttcaaacatgtcaaaatcattgaagttttgggaagcggaaaatgattgttagtgatctttgaaagattagaaaaaccttgcctagtttcttctatctttggttagcgcctttaaatcaaaatttgttctctgtttaaattactaccatttaatatgataagcccttccataatcaatctaatccacaaaaattacaagaggaataaaatgaagtttcaatcttgagttcaagcttttaatccacaaaaataccattttggaccctgtgttttgcaaaagttatagattagaccctgtattttgttaaatgacaaaataaaccctgtattt

SEQ ID NO: 384772 - DNA, 1377 bp, Cannabis indica
aaattctttttgtttatataatatgttggggggaggcttaaagtcattgttctaactaaagtaaatttaattcacatagatgaaaatgaaaagaaaaaagtaaatatggttctcaggtacctttgctccagttatagctataaactgctgcactttgtcacggtggcccctacccagtttgtgctgtaaaaataatggtacataaatatatataagtgtatagaaaacccattaaaataatctctctatattaagctacatagaaaatttttacaataagtgaaaaatatggaatagaaatgtactcggttcaagtcattgtacagttatccttctcaaactaaataacagttttatcgaaaaacccaaaaaaaaaaaaataaaacacagaaaacagaacgagggtaaataatcacttcaaaccttctcattagaaaataaaataaataattatgtttatttattcgtgaactaaacctatttgaaggtggaaaaaattaataataaaaaaaagtggaatttgtgtcattctcagtttctcatacctaaaataacaaaatctacaacagtctcatcaatcaagaaaagtagtaacaacgggagcaagcaaatattggaagaagaacgcagtgatgatgaattaggtatgaaatcataggttagaaaacaagaacaagaaatagaaatcttaaatggggagaatggaaaggactaaccatttcggaggtggtggaagtagaggagggtggtgagagagagagagagaaagctagggtttctgtcgttttctttctttctttctttctttctttctctctcgctctcagaaacacttcctttctctctcagcgactcagcccctgtgtatctatctcactattaccgtattattattattattattaataaataatattatttggaagagaatactattattttgagaaaatgcacttattattattaacaaatattcttgttggtttatttttagtttttaaaattaaacataaacaattagtaggatttcacatctgttattgtattcctgtattattgtatatcaggttgttaatttttattttcttttaaaagtaagttttttatagataacatataattataacttcatcgttattacataaaatgttattatatataattccctctcatcatatatgcatatatgatatatgcctagtgctttcttttggcccaattacaaaaaggaaaaagaggaaattacattcaataccctttttatattgtcctcttttatttttaccctcttttttaaattctatcatttttacctatttttttaaacaatgtaccaattttgcccctgtcacttcaaggtactctccatgtgattct

SEQ ID NO: 384773 - DNA, 2472 bp, Cannabis indica
tcagtacatttcaattaatcctaaattctgacggtgcttttcgaatgaagttactgccaagactttggtgaatggatcagccaagttatcctgcgtatccactttctccaccagtacatcccctcttgccacatattctctgataatatgatactttctttctatgtgcttacttctcttgtggctccgaggttccttactgttggctatagctccagtgttatcacaaagcaggactagaggcctttccattccaggaactacaccaagactggtgaagaacttcctaagccagacaacctctttagctgcttcagccgcagctatgtattctgcctccatggtagaatccgaaatcgcagtttgtttagcacttctccaaaccactgctccacccccaagagtaaacaccatcccagatgtagagtactgaaaaaggcatggatttgtccacaattttctccttgccccttaaaagaatggtataaggacaaggaggatcagactggctttcatcacatttttgaagataaaagtgacaatatcttttggtatgatcaagtttaccacagaaaaagcaaaaatcagggagcctttcatacttaaagtctatccacttaatgaattccctacccatacaaatgaacctaatgttcatacctcttcgaatgggaagattaacatccagaagaattctcaaccttaagtaagggctagtaccctccttaacagtatccttgtcaacctctatgaggtcaccaatttcagaagcaatgaatcgagctaagtcatatgatttatacataaatggtataccataggcttggatccagaagtggacataatggagattttcagaagtaacagggaaggaactctcaggggcagcaaagatggtaatgctttgggcaaaatgccaaggctggccttctaagattctgcccttatcaccatcacagccaaacgtaataaggaataagccatctgcatgctttgtgacagacacagggaatcgacactgtgatgaccaaatgctagagagggttttcatgagagacagatgattatagggtcggattgtatggagtttgaggagaaggctgatggtggcaggagaggatgtggaggaactagcatcgtaagtgaagatggtattttcatcaggtggaaaaactaaagcacttgaaacggtattaagaaactcatccatttttagaaaaaaagaacccaaacatacatagagaaggttacaagaaagcaaggagaaggataagaaaacaatacctcaaccgcactatatagatgtagaaccagagccctactaagatgccttcttgatgaatccctagtcacatccctagcttccaccatggtagcatcaatgatgatgaaggacttattaacttcgggaacccagacgttcgcctccatttttactatctccaagggtgaaatgatggtgggagatttgggaaattagtaataaatgacaaaagaaaacaaaaataaagaagttaaaagaaaaggaaattagagagaaagaacataaggatatatgaatagctttgcaataataaatgagatgggattgtttaaaatgataataaagctcagagcaataaatgctctcattaatgaaaatagaagccaagattcgacttcaacaaggaaaagaaaaagacaaaccaccacttgaccggtaagggtggacgaaaacttccattgacgggaccaagaatgaacaggaattacggtatcgcatgcttactaaaaaactccaaagagagagaaaactttaacaaaaatatgtgtatactgtatttgcgatattggacagacagagggtttctaagatataattattgttaacgtgtagatatttaaaacaaattaatttataatctctatttaaatcatctaaaatttctcttttcaaatatgtatatatatgtaagttaattatttataaccaaacaaaatatgtatctaatttatcatctatttaatattattctctcaaccatataatatagtatggttgttgagattttatgccctaaataaaactcatttcaatctaatctgatttgttctcaataaagattagaagtcatttatgtttacatgtagttttcatgtttatgatttaatgtgtacaaaatctgttacgtccagaacatatagttattcacaattacagggatgtcaacacattgaaatacaattgtgattatatgcttcaaaagacaatgtccctcattcatcaatgaactggatttacactgatgacttttattatcaattacttgcttgacggacaacttccagctgacaaaaacgaggcgcgaaaactattgtattagtgcctcgctacacaataattgaaggcaaactgtatagaagagggtactcggagccgctgcttcgatgtgttctccctacagaagcgaacgaaatcatcaaagaaattca

SEQ ID NO: 384774 - DNA, 2160 bp, Cannabis indica
caaaaaaaaaaaaaaacacttaccctcaacacttatttttctgatacaaatttaactttagtgaaaaatatagatagatgcccctttgttggccttttaaaaacccactagattcaaattgtagaagaggtaggttgggaggtgtgattgatgaggatggtgtaggaatgattttaaggatggggctggtgaggtgatagcttcttggctggatttcaagttggaaatagggttgagagtgatgctacattgctggtgtgtacgtcttgcctttataagtcatgtgcctctcatccttttactgctggttcttgccatgttatggaagcattcactttagctagtaaggaatatgggtattcgcaatgcggacggtgtagtttttagctctttttttaacttaaattgtgcatacactttttgtaattgtgtaattttctaaattacaatggcactacaagatcacaaaccacaaaaatcaaataactacaataaatacagtataatacatgagcagtttactctatcacaaaataattcaattcttaatagtagttaaaaagaaagaataactaatatatattaaattaaaattcatttttgttgcagtagtcaaattaattctagtattacaatcagttgttgacgcatcattgtatagcatataataattatatagataagactgactagaatagagtaaataactcgaagatggatttttcatatacaaaataaaaaggctactacatacaagtatataacactgaaaccaattaaaattacaccagaatatataggctaaatataaatacgtacattactccacacggacaacgatatatatgtcaagaatacattgttatatatatatatgtgtgagaaatgctttactaaatgaagatgatatatttatgtttcaaatcttttgaattttctctttaatcaaataacaaaacaacgttacaaaagaaaaaaaaataaataaataacaaaacaccaaatgtaacactaaaagtgttcagcaaaatacagtgggttgagcttttatatataaatagatggaatattcatatataataaaattaaaattatatttaaaaaattagtatttttctaacaatattgtgcgatgcgatttaactcgcaattattaaattcatccgtaaacagcaccgcataatttggcataaatatacaaattgcaactgcaccgtgaagggtttgaaattgtatttttgtacagtgtaggtagtttgatgaacagtgaacacttatattagctagtgttgtaaatcatgtcataataatccgtattatactatactataaaaaatcaaaaatttacataattgactaaaattataaaaattacaaaatacattaacacgatttttcttcatttttactatttaaacttttttatttacaaaaatgcatcttcagtaaaaataataaaccgttttttagttgttttatagtttatttatagttgtattatagttgtcatgagattatttttctagttgttttatagttgtcgtgaggttagttaatagctgttgtgaggttgatttctcgtttatttttttttagtttttttttttttttttttttcatcttttgctaaataaagtttatttttgtaattttaaaattttaaaagcatatttttgtaattgaaaattttagatcgtaaaattataaacaaaatataaaagaataatatttttaaaaatttccctcaaatgtgtcgtaccgtgccttaaaaaatacaagttgtatcgtactgttctttattcggggcaatctgtttttttgtatgcgttcaaatttatgctctactatcttttcatattttatttttacaataataagataattattaaaacataaaacatgtcctttttataattttaattatttttgcattaaaaaaacttcaattatttctatacaacttttcaacaatattaaaaaattattagaattattaaatttttaatataaactaaatactcaaatcattattatcactataaccaaattataaggtttttaacatggaataattacataagacaccatcttttgtaaaatatttatatttttacgttcgaagaatgttttttttacatttttacggttttccaaaaaata

SEQ ID NO: 384775 - DNA, 1600 bp, Cannabis indica
agagagagagagagaaaattatctaattaactactgtataaaagagaatgaataccggatcgctgcggccacctatagatgtcgtgaatatattagatgttccatcatccagcaagattcgaacttgaacattggctgaagaagcggcagaagcagcagctgcagcggcttgtgctgcagccgcagcagcttctttcgcttttcttgagctgccttttggaattacaggaattctaggaggcaatgaagactccaatatggcatacctatcacggcaggtatcccatgctaggagccttgcacttcctgaatcaactatggaccaatcacttacttatagatagagaagtaaggaatatcaggccacacaattagcaatatacctgcaacaagataatttacagaataacagcattactaagactactccaactttatataccacaaaagattgcaataaaaaatattatgatgtacaatggaactcaatcttctatcctttttttcctgtctcactaatcaagaaataacaactcagctaaaaggactattcatacacttgtgagaaaatgaatataaataaaaatatatgttattttaaattagttctcataatttttgcaggtgagacatagagagaacatgatatttgaattcagtaaaatgaacaagcatggaaaaattccagacactacaaccaaagtacacatccatacataaacaggaattagtacaaacctaactactacacaagaaaaacttttctcaaaagtagtacaattagaaaacgggtaaataccattttggaccctattggttatattaaaaaaaatcatcgaaaattgagctcagggtactattttgtaccattttggaaaataaagggtccaatttgtcatttaataaaaaagatggtccgatcagtaacttttgcaaaacacggggtctaaaatggtattaatccttaagaaaaatgaagatggagatcaattaatcaaagctacataattaactaaaggtaacttactttcctgaactgcttacagagagcactgaatatgaatcatgtggaacaggagtactgatgtgtttttttatctgcttaacatgtaattgttcaggagagtctcccctaagccttcctgtttctgacaaggagccattgttcccaagggaaggatttgccgtctgggacagctgaaaatttagtagcttaagttccctttcaactacatagacagcagagtgctctcggctccctgagggtgttggcagtgaagcaactgctggaagagatttagggtcaaactcactgatgataacaccaacattgcttccagtagcaacaaggtgaggctgtaaaggatgtgctgtcatacaataaacctgcaatggaactgatatttcaaattcatatattgaggaaaaatgaacaaatatgcgtgatacaaagacataatttgacagtgttcaagtgttaagaatccacgtcaattccccacgctgtaagggtggtttttctttctgatctccctccaccacaattgacgttctcaatgatatatgatataaacagggggggggggggggtggggggggg

SEQ ID NO: 384776 - DNA, 1404 bp, Cannabis indica
cccaagttctggtcccggtcctgttccatggtccgggtctggttctggttcaagttccgtttttaggtccttgatccttgttagggtgtggtctgggtctcggttcaggttcgagtcttggtccgagtcctagatctagacactgaatacgggtcatatcgaagcctcggggcccgaatcctcgttcgaaatcctaatcagagttcaagtctagacaaccgagctgggtcctaggtctaggtccaggtcgagtcatgggtcccgagtctcgatcccaattctagggcctaggtctcggtcccagttgcaaggccctattcctgggtccgggtccaccatccatgtctgggtcctatgtctcggtctggcttaaggttcgggtgggttcaggtcgtggtctgcgtctgggtcccaattcgggtttgggtcttggtcagggtccgggtccttgacccagtgcacgtttggtctcagtctggttcgttgtctgggtcctggtctgggtccccagtctcgggtccaggtctatggtcttggtctgggtttgggttcgagtccaagttccagtttggatttaggtctaagtcctggttcaggttccaggtcccaggtcccagtttgggtccgagttctggtctaggtttgtgttcgaatttgggttcggtttcgaaccaaggtccaagtccatgtctcggtcctagtctaattcttgtttcaattctgaatcggagtctgggtctcgagtttcgaacctagtttttatacaggttcaagtccgggtcctggtccgtgtttgggtgttgggctgagtttgggtttggtttcgatttcgggtataggtcaaagttggggtctggtttaaggtttagggtttagggtttaaggttagagtttaagggtttaggatttagggtttagggttttttgggggtttaatgtttagtgtttagggttttaggtttagggtttcgggtttagcgtttagggtttagggcttagagtttagggtgggatttagggtttagcatttagcctttagggtttaggatttaggattgagagggtttagggctgagggtttagggattagggtttagggtttaagttatagtgtataggctttagcgtttagggtataaagtttagagtttaaggtttagggtttacggtttagggtttaggttttaaggtttcgggtccgggtttaggtctcgagttttgatcctagtcttggtctgggtttgggttcggtcgggtctgggttcatgtccaggtctgggaaagggtctttgtctggatccgagttgagtctcaagtttgttgggtttttatgccctaaataaaactcatttcaatagaatcagatttacttattaatatagatcagaaataacatttaatgtt

SEQ ID NO: 384777 - DNA, 1352 bp, Cannabis indica
aaagtcaaatatactcatataattgaataaatatttggattaattatgtatatgtattataatttataaaattattttgactaaacaaacatgccaagtggcacgtacatggctctagtaataagagagagacatagatttatatgtgctcaaaaaatcaaatgaactggctccactgttggcctacctagtaacaatagttgggcctgcactagtggctctaatatatagtggcttttatattaattaagttgaatggaggaagaaaaaaaagttccattcatttttagcgaacttagaaacaaactatttctcctcaatattgcactgatctttcatataaaactaaatctttagaaggaataattgttggaaaacttattgttgtgactagcaaatttctggttcttctcgtgatcttatatatatattaactcatgtaactcaacatttaacatatatatatatatatatagtacactacaatatcttaccaataatactatgcaataattttgctcattttctaaggcttaaaacaaagaagctgtctttatccgaaagtatgagaaagaaagtggacaatatatctaaaatcctccaactttttatagacactaatataatgtgttcacatatctagataatagactatcatattgtgattcatatgaaactcgatcatgtggagtgcttgcttaatgtccaacactcccacgtggattaattatatatattgttctttgggtcttcaaggatatatatcccatggaatttagatattgcttttgacttaattcttagccagttcaaacatatgtctactagctagagaaagaggtcgatcaagaaaacggtatctaatatataaatatatatagttatttatatttatgtgtaaattcttatggtcaccccctttgctagggttagtattttatggctccccatgtctggattgtgatggaacctaatcgtttcttcggataccgtagaaacaaaaatttgtatttctccttttttttttctttgaacaatgatcatttgtccatttcgaacattactcattttgtggtaattcaacgccatattatatgtctagataatgttacgaattattcctaaatatatatatatctttttgttcatgagaaattatttggtgaatttttttttaaataatttagatgttgtcccgtaaaagaggtagttagttaaacctaaatataattaatacacctaaagtgttgcaattaataatagattaaatttgaatgttttgataatttaaccagagtatttttattaattccgaaaataaatttaggaagaataataattttttaattact

SEQ ID NO: 384778 - DNA, 1436 bp, Cannabis indica
ggagattgttcttttttttttcgttgttattttagagagaaagaaatgtaaaaaaaaattagaagataaaaataaaaaaaattttgaaagtaaaacaaccttgttctcgaggtcgttaatggattttccctcctcttcctctcttcttcttgttcttggtctcgggaataagggtttttaatggaggttttttaagggaaaaaaaatgtgaaagggaagagaatgggtcggggaagaaggggattcgggtttaaaagcaaaactattaggggtgaccaggtggcagggtatcaaaggcgacttttgttgcccctaatagtttgactgtgtcaggtggcatggtattaggggcgacgaaatagcataaacgggataattcccacctttgggcaacatatatttttcaatttattaggggcgatttttgtcgcccctaatagtaacttgtcgtgtctaatacttttagagacaacttttgtcgcccctaatagtaacttgtcgtgtctaatacttttagagacaatatttgtcacccataatgcatgttgtaccgataaaaaaatcaaatttctttaggggtgacgctctttttccgcccctaatacttgtactattaggggtatttttttgtcgcccttaaatatgtgtcgcccctaatatcccaaagtgttgtagtaataagatcgaagaaattattgttatcatactcccataaatagccgtaacaacaatgtgcaagcgaccactaaatttctaacttataaaaattatactaaattttatcttaaaaaaaatttaaaaataatactaactcatagaatatataaaattaactacaaattacataaataaatctttattttctttcattatttagtattttaattcattgtatttattttccttccaaaaaaaaattcattgtatttatttagcaattttcttacatggtactaattatcaaggctcaattaatctcaacgaattttaggattaacatatataataaattttaaattttatgtaatttatcttgtttatctatgaatggatcttttttcgataaataagtcctcgtgggttattatcctccactttccgccctgataaagaaattttagggctggaggtggagagacgtattaaaataatgaacggaaggggacgagggagagaactccttacttattattgttctattatttttaatataataatatgtagattaaaatgtggtaatatataatattatgtgaataatatatattaagtgtatggtaaataaatgtgtaacctataatttaacctacacttttgtaacctacatagtaacttggagaggagttacaatttgttgtcatttgtaactcttgtgttgatcacacattattagtgtaataaaagagatgttacacaatttgatgataggattcaaa

SEQ ID NO: 384779 - DNA, 2179 bp, Cannabis indica
gagcaaaactttaacccaaattgaagggccacaagcttcatatcattgctaaccttggccttggccgctgcttcaatcatttttcggatgaaggccttaaggctctcccctgcatgttgcttgagattggtcaaagatcctacttccatatcgtagtctctcgcagcaataactttcttcctaaatgtggattatacgtcttttcagcagcaaatcaatccaagagggagccttttccaccattctttcgcaaacttagattgtgttaatgaaaattagaggaatttggtatcatcactggcctttgccacttgcatgagtcttttacatttggaaaaatgggccctgggatctgtcctactcatacaaatctatttggggaattttgaagttctcaggtagtgcggcctctatgatatgcccgacgcatggtttcagagatggctcagctttacttctacataagtttagtcaatgcggctatctattcttccaagtgtttattatcactgtttgggagcttaagcccatggatcatgtcattaatgtggtttttaagatcaactctgcgaggcctcgcccatttgcctttggattttttgcattttgtgtttaggcaattacagagatctgtagtggaccaattttcttcaggaaaaactaaatgtacttccctgccttggttgaaagaattgctagggtcaattttcaatccctgtaaagtaggccttggtgctagagcaatggacctatcattctgcccacctttgccttacgaattagaaaggcatcagagttgttgggcatagctgttggcagcgttctagatgttcctaggagtggttggggcagcatttttggaaggttcatccataatgcctttccctttgtctattactggagtagaggctcaaacattagtaggatttgtgtgcttgtaggactatttgccttaaggatgagctcttctagggcattttcctcaaaatttcttccctggccccaaacttggcctatagtttcactaatgtttttttttttcatttgatgggaaatatcttataccaatagtatttgttgggtcggtgaaaattctttacccatctgatgtaccttgggatcttactcataataatatccatctttaatttcaccactgtcctccccgtcctcttcgtcatcaccccgaccttcaagattttcttctcaatcattcatctcatcctcttcgatggggttctcatggaaaaatttctcttgatgcagggatctcttggctggacggccacaaacttcagatgcctccccatctctcacagtgtttggctgagcgtggaccataggaggcgagttaacattgtccattatggcatcttgaccacgggagtggtctttatgatgttatttctagaagccactattgttatagataccacttggcttaaattctttccgcaactctaaataaaagcaccaaaatatttactgagatttttagaaactcaatataataaaataagtacaaagaaaatcaattgagcaaatgacatggagatggatatttttatgtggttcgagtattaatgaaccctagtccacgtgttagttgtattaggctgagtagccttgaataattacaccagtgttcttgacaagctcaaaaaccctagctctttgctatagtgtatacatgatgaattttaaattctttccatgagggtatgatgcagtatttataggttgtgattcaggtatggacatacccgtgacctgctagggtttgcatgtaaacctagcccataaatgaggaaaatatataaaatacactgactttgggcccacgcgctaaagtcgagcccgtacggggctgttacattttgtaccacaggggaccacttgaggtcgaccggtgtgatgtgtgcgttgcctttgcatactatagtgtcagagtagtggccgtaggacaaaagagatgttccctatggtggtacacgcactctcaaggtctaactcaggggaaaccccctgattttgtgataaatccaacatgcaagttgttaacgcagattttcgttaactaaatatgagccaattagtgataatctcacgcaaaaaaatacaaatattaaaagaaaaagtatgaacacaaaggattttttacgtggtttttcagttaaaa

SEQ ID NO: 384780 - DNA, 983 bp, Cannabis indica
aagtgttaacgtttttttttttgaaacaggaaggaagtgtactttagtaacctatatatacttcgttgtgttcatatttaatttctaaaactgtgtcctaagtcaaataacaagtgaaagtgttggccttagagtaatactttcaaactaaaattccacacggcatatcttctataatatatgcatatattgatatatttgtttgttgccatcaatcaatgcttgcttgactacaaagaaaccaccacttaattatatataatcacgttgggtcattcaccggcttttaaaaatgttttctcatccatccatatatataatatatacagataaagcattaatttcttttttatatattatacgttcttttttttctttatcaatattatacgtatagtacaataaaaatatatacggagatatcattaatgatttgtggaccaaagtatataaaagataatgaaaaagcaaaattttctaccattttaatcataccatatattcatcacaatctttatttttgtgtcctgaagacaaagtgcttgattatgatgagaatatatatttaacattagacaaaattaacaaggttaataattagtgaaaacatcgatgagtatttgaaaccgattaacacttagtacgaaatacactaataataataataaaaaattaagaaagaaacaataagtaattaatgctagaaaagaagagtagcactcatgggagttgggccagttgaggcatggctatgctcctgtttatgggacatggcctaacttggagtgggctagggtttcccatatgttccttccacatctcaacttgatttagtttctagaacaaactataatatatatttgacttttaaaatatgtgggtactaaggtgcttagcactaatataaaataatgtcttataattagttaccgatttttaataatttttattaaaataaaataaattatgacctgtaatttcat

SEQ ID NO: 384781 - DNA, 1229 bp, Cannabis indica
aatttttaaactaaaaataaaaaaagcaaaaagggagaaacctcaactccatgttgtgggaaacagtggctaaagggtatgaggaaaatttcagcctttggtatgaaacctttttatctatggtggggtctcctccaaccatgtttttcggaagaacttcaatctttttcaccgtatagtggaccccacattttgaatgcttcttcccaagttccaacggccaaattttgggttaatttgaaaatttttaaaaaaagacactttttttatgaaagaaaatgttgttattgccataaataatattacaggttgggtagaagtactacaattattgtgtatttgaagaatgaggactcactaaattattgtgtatttgaagttgaataaacctacttttaagatgtgaaaggtaaggtggtggactaagttaagcaattgaatttgtttttattttttttaatctgatgagaaattgtttcaagagagacaaatttggccttaattaagattaactgatcgaagaagaaacaacaaagttgtttgttggtggttagaatgtatggaagtaagtagagagggtgaagatgtaataagctgaacaaccagtggttgcaacattaccttaacaagtctaaaatgtgtgtgttttgtggaagtagaacttaagaattagatggtttggtaattcatgtttaacatttttgttaagaatcaaacttggtttactattttcagtgacattgaggtttttgaattatatattttattgaagaggattaagaaactataaactatagaagtaattactgatagacccaacatataactatagaagtaatcacaatttagtctcttttttaaatattctacatttatactttaattttgtaaaaacttttatgtttatgtatgctctttgttttgtatttttcaacttactttttttttttttttgtaaattaatttacaacatgttttaactttgacatagtgttttagactaaattaatttgtacattatgttttagtctctgcatatttttacattatgctctctggtttatatttttatttgtacaattatttttattttaattttttacaatatgccccttcaattttcttacttccattgttcgcgtcaataactctctcattactaataaaaaaaattaaattttgaatctctcatctctaatatctaaaaataaaattaaagtaatttatat

SEQ ID NO: 384782 - DNA, 2039 bp, Cannabis indica
cgaaaaataccccatcaacacctctatctctgttgtctcttttgctttgctttctttccaattagctccttattagtttccttttacactttcacacttctcatctccacactcatttacctccaaactcctctgtttgtacctgtttttttttttcacacctgttcttcaatccagctaaacaatagttgtaacttgtaatatattttgttttttgagcttttttgtcacagctatctggatactgttttagatattaattaccataattgagttttttttgttgtgatttgattttaagcttcccttattaagttggtcagtttagtaacattattagttcttaaaaaccaaatctaatagatgtattcttaggtaatagatttcatttcaatggggtctttaggaagcccaaaaacatgggtaccataccttaacaacaaagattgttcacaaggcttctgtagcttatactgtccacaatggtgttacatgatcagtccacctccaccaccattagatttcccagaagacaatcattcatctccaaatttctcccctcttgtggtagcaatcattggaattttggtcagtgctttccttcttgtaagctattacaccttaatttccaagtactgtggaaacatggatcaaggaagaagattcagagaagacaataataacaacaaccaagatgatgattttgaagaagatcattacccatctgatcatgagccatggcatgtggtcactaatgggttagatgaagctctgataaaatcaatcacagtttgtaagtacaataaaggtgatggctttattgatggaacagattgttcagtttgtctaaatgaatttcaagaagaagaaagcgttagattattacccaaatgcaatcacgcttttcatattcaatgtattgatacttggctcagatcacattcgaattgccctttgtgtcgcgcacaagttgtttgtgtaaatgcctcaacgaatccgacccagctcccacctccaatggcggaaacctcgtccagcaacgaaacaattgaagagaacccatttcgggaaatcgaaaatggcgttctgggtcgtgatcagaactcggaaagatcatctagggctgaagaattagagatcggtaataatggcggtaacgttcgaaagacgagttcgctccgtgctttcagtgatttggaagagagacatacagtaattgaaatcagagatgagatcagacggtcgatatcgatggatcatccaggtcggaatcgagtgtccatagctgatattcttaaccatggcaacgaagaagatgaagaagaagaagaagaagaggaatgttcaattgagaaaaatgagagaagaaaaggggtttcgattagtgtaagaaatccagttgtaatgaagaggtcgttttcgagtggtagatttttccatggaagaggacgaaactcatctgttattcccatctgaaaaaattattatcattatttggaagaagaagaaagcatattttggttttgagattaaaaaatatagttttatttttatttgatagtgaatttattttctttttaatttcacttattacttgttagtgattgatatatattgtgtagtgatttattatctttaactccaagagaatgagaatagaattcctttgtacaattttcaccaaggataattcaatgtttgaacccttttaatttctatattcaaaactaggttttttttggttaaaattttgtgtgtaaatgtaacaatctatggagtttatacatcatacaagtaatgttaaagttaattgtatatgataaatttgtctcaaaaaaatattagcgcacttttaataatgagtgtttcctagttaatattgggaaatttcaatttttggccttaataataccagtcatatcaaaatttataccctcccttaatttgtacaaatttagtccattaattacatgaacttcccatttacccttttttttaaaaataaaaataaaatagctaaaatctgaaattgatctttc

SEQ ID NO: 384783 - DNA, 1767 bp, Cannabis indica
tatatataaaaaaaattatatgtatgtgatgaaagtgatattgcaaacgtgtaaggcgggtcctttattttaaaaaaagaaacaacaacaacttggtattgtgtcaaagtcaagccaccgaatcaatgcttgtcgtgagtcaaagttaggtgtggactaatataagaatgatttagtcaactcatcttccggaattgaattttgttagaaaatgactaaacccaactaataaatataataagatcactttgaacatataattatgctactgtatacagggtccactttacatttttattttttaaaatatatttaatgtgtaactagtgaggatttggaactgaaattcatattgtttggtatgtttgtttgatttaatgggaataagtttaatatttttttagagagtgatgaagggaataataaacttaagaaagtaacattaccgcgtgttgatattggaatacaatgtgataattttttttacaataataattattttttttataaaatattaataatttaatatattttttctttctaagcgtgcaaaataatttttaattattatctttatataattttatacaaaaaattaacaataataaataatcataaagagtaaatttatatacaaattgataatatattctatcaaataaaatatataaaaaattaaggaaaatatttcatattttaaatatttttatatactttagtattcatatatttaaaaaaaaaaaaaaaacagttttaaaatacagaagtttgtgtttgccaatagcattggaaagtgaaaactacattttcattggtttttcttgctagccaaactaaaaccatttttacttagctaatattaaaatattaaaaacctaaccaaacataagaaactttcaaattctcattttcacttttctcattactgcataccaaacaaccccttaggccacataatttactctcattgtatacattaatttatgcatgtaatgataacaaaacttatctaccatgcaaacatctagaataatataaaaagcaaaacattaccatattaaaaaaaaaaaaattggtgttcgcaagtcttggccaagtggaatttatttatgttcacatatagaaaaacaaaccaagacttttgctcttgttaaatcaattttcaaagttgataaaactgatgacgttaatttttaattttcaaatcataaaattctcaatttaaccgaattaatttatttttcaatgttagtaaagtagcatgttaattaaaaagacgataataattaatatttttgtctgtgaacttctgacactatctactcctatcctctaaaatatacggctaacaattacaaaattatgtctagttctgttttaaaagtaaatattttttaaaattataatgttctattaatgttaaaatagttaataaaaattattaaaaaatcctgatatatattcccttctcccccccccccccccccccaaaaaaaaaaaaagaaaaaaaaaactgataaaatattaagtttaacttaaaaaaaatttaattattcttacaaaaaaaaaattaaaactttattttatttataaacacgtatcttaaaaaatcaaggggtttttcatttttacacttcaaaataattttttttgcattttacggaattccacatagaaactcatattgcaactaatagacctaaattgtaaccaaaattagtataacaactcatatagaaaccaccttagaaaccaaaccataaattt

SEQ ID NO: 384784 - DNA, 2303 bp, Cannabis indica
agtgagagggacaataagtaaactaaatattaaaaataaagatttttttgtttagaattagaatctttgacctatatcatatgtaaagctaatattatgtttatatttatgacttttaattacaaatatttgtaactaattaaaatacataaatattttttcttaatttttttaaagggacaactgtcctctctcctctacgtgagtcccccccgatatttcttaagaatataacatatgaaatcggcaaaagaaatacactttatattttactattataagagaatggttattccatttttctttcccgtgtaaaagttaaaaaaaatatataaatatacagttaaatcctatttaaaaatacacttagtacgaagtaaattatattctaattgagagattataactaaatagaattatactaggaaaaaaaaatcaaaaaaaaatatcaatataacaacaataacaataaacaatttttaatactacattataataaaattatttctgaataaatataatatttatacatgtattacaatttagaataaaattattaaatctacataaataaataatttataaaatttatatatatttttaagagatataattatttttatataaaagtatattttgttaataagagacctaaaaaattcataactaattacaatttagagattattcttattatctaaaaaaaaaaaggattattcttatttataacttaattttttataataaattaaaggttattcttaaatacaatattcttaaataaaagttttttatacttcttaattattccaatgggtctaaaaaaagtctaaccaccaagatcaagattaagtgggactatgaatctaatctaacagcccaccaacattttgactgggaaactgaagctaccacagctacgtaggactagtgtgttgttctcatgtgaaggtaagctatattattacatatgaaaacgcgtttgcttatgcactaaaccagaaagaaagattaaactatagtagttgggcatcactttattcttctttttttattttcccatagatttcaatcacgctttttccatttactaattaaaactacatatattattgttcaactctctctatatatactctataaaaaggttacaaatatatcttcaaaactactctacttgtcatagcacgtaagtaattaactatattaatcatttaattaatcttaaaatcaacaaagaaagaactacatagactgggtcattcactttaagggatggattaggtaggttcctctaataagcctatataagacaccagaatatatcaaattatcaatataattgtgacaataatcttattatttaataagaactaagaagtaataattatcatcatcaccaaaataatataattaagttgtggcttcatggagattaattaacaaacacgtacaaattaataagtgcgtcatataatatataacacagctaattataaactttttttttccctttcttaatagtaaataatatcaaaataagaagaagaagaagtaactttggaatttacgctatgctataaattcaatcaatcttcataagtacggcactcatcagtttctgggttgtccttacagtactcctccaaggggtcagaagtcttcttcttgtccctggcgtggctagccgcggcgctcagctcctccacttcgtcccacgccgccacgcactcgccgctagccgggttgtcagagcaagcgctttcggcgctcttgatgctctcggctaccttctcagatatctgatctggcgccgcgaacaagggacgtacggaagccaagcggccgctagtactcctcttccatggctggttcagccacgtggcgggcttgaagggctggaccttcactgagtctactcctgctacgattcttggggccgagaggctcatgccagccattgtggttgccattttgatattgtttttttgggggggatgcttaagcgaaatgtgaaatgtgaaatgtagttgattgaagagaaagttgtgatgataatatgggttataatttggggtttgagtgctttacgagcacacaattcttatcagatcttaaccaaccatatgcctccacgtcagcatttgtggcagatatttcttgaaacaaaaaatctctcttttcaatatgttcgctttactccacctgtcactggctattgcatgggcttacaggatattcatataataataaattattccaaaaaaaaaaaaaatacttttcttatttttatatttttattt

SEQ ID NO: 384785 - DNA, 2022 bp, Cannabis indica
taaaacaaaattagactaaaaaagtttatcgcgtgccgaaacaaataggagtacatcagtacaacacttttagaaaagtggatttaaatttctcaaaattaaattcttaatacataatataaatattaattatatatattaaaaaaaaacaaatgtcatatttacagtgcacgccatatatgccgtgcactgtaacattaacctcaaaataatgtgtcagggtgtatatcagtcagtttggtcgggttatagcatatttttacaaactcaatataaatatcgggttacaaatatttaattgtagcccactcaattaaaaattaaaaaaagtttaacccacccaataattttatctgttcggtcgggttaatccttccaaatcgatcttcattattcttttaataattgttattgttagtttctagtattcaaataatgagattttaaaaaataaaaatacattatttatattttaggctaaaaaatactatattctacactaattttaagaacttttaacataaaataaatataattgagtgaacatagaataattaaaaaaataaaaataaaaaagtaataatatagtgtagattttaaatttcaattttaatatcaaaatataataaaaattattaactataaaatctaaatttcatattaaacactataaaagctaaattttaaacatataatagtttaactaataaatgtaatttatgtaatatattatatatacttttattaaaatatataaatttatttaattcgatttattcaagttaattgaacagtttaaaataatttgcaaaccaactaatatatttactggatagttttaatttttattgtattattttagattatatttttttatcagtttactctttaatttgaaatttattgaaattgggcagtttataaactttttgaacacccctaagtatatgtatctctttggagaaaagcccactctatatatacaaagtctctttagagttggccttaaccaaagaaaaggatcaacagatgaagccaatccaaccccgtaatctaagggtcaaaaatgccccaattgatgaagatgcggactctgacagtcaatcattttggctcttttcttttctattttttctctccttttctttttttagaaactacaaaaaagtcagcatctaataactaaaattatcatcatcatattaattttcttcttatatccctaaaattacgttcgttgaaatggtataactagattaaatgatattaatcgctcaaaatattctttcacaattttaataattttcaatttcatagcacttgattgtcaagattttacaacatataaaaatataacttattagatggtataaagccacatattctaatgttaataattaatatataaatagaacaatttatgtatgcttgtttgttaaaccttttaaatgaacattatttccttaaattgttatataatattcctaaacaaaatagttggtgtattactcaatggagaaaggacaataaagacaataatattggattgaatctttggtgtgaaaatgagctggaaatatatcttgaaaagcatatattggtatcaatttatataagactcaaggaaggaagtggtaacttggttttggaaatttggggtgaagtgaggcgattacatatttttatattatattgttattttaatatcttaataagaattatagaataaaagtgaattttatagaatgacatttatattttcaaacagtgttaaataactaaacacttacttaatattattttaccagaaaaatatttgtataaaggtccgaaaaatttatttagacttaagctcataatattttcagctaaggcaaccgcctcacttagtctacatttcccttgatttaatcactaattatatattagttagagcatcttcaaagagacacaaaatttagtgttgcactatcaccaaatttggtgtcaaaaattatttctactccaaccacaacaccaaaa

SEQ ID NO: 384786 - DNA, 1064 bp, Cannabis indica
gataacgacaacgctgtctttgattaaaatttgaaggaaacttaacaatatggtgttggtcatcatgagctaatattgtatcagcattgttattgaagacattaaaagaaataattttagaaatacaatcgttatatgtgagtagaaaatataaggtgtcgttgtaagaaataggagaaaaaaagtttggggagtcaattcgaggaattgaaaacaagtagggtttatcagtggtccatttttcagtatcagaagaaaatgttatagcacaacaatttgcaatactagtaataacattgtaagtatgcgtccatactaccataactttgtatctgatcatttggtgaggacgatgatcgattattaatccacaacttaaattccataaatctagggcttgagtttgtattggagggagtttaatccactgttttgtaagtggattacatattaataaacacttgaatgtaagacctgaaattaataacaaatcatcacatgtggctaatatacgaaaatatctatgtggtaaaaagtggagataatggtgatcacttagtatgtgattattgtgatggagaattcgtgattcattggacatatactcatagaatggttcttttatttgtctgagggtatcgcttttaaatatgaaattaaagggagtattatcaatagattcataatcatgaagtagctttttgtgttgatagtaaattgaatccaagacggagaaccaaatcttacacacgcatctgcatcgaattattgatttaatatcacccaccttgatgaatatttcaactagtatatctttgttggtaacaacttcatcgaccgacatcttcttcttcttctacttttcaacaattattaactaattaggggtttctgatttttccatcttcttcttgatatttatacaaagactagttatctatttagaattagaattagaattataattcaaaacgaattatatatatctatttatctatttatcgtattatgatttttatttattataattaaaaaatctacgcttaatttaaaatatgaagaac

SEQ ID NO: 384787 - DNA, 766 bp, Cannabis indica
aaaaaatagaaagaaaagaaaagagttagcataagtataaatataaaaaatttattatcaaagtataataaatgtaaaatttgaaaatattttgttgaaattttttaataaatgtatatgatagtgatttccacaacttagtgaaataataaatcaagttagtttaaattgaggaatgagtctttggttttaattagataataattggctgagaccgaaagtactctttttacctaacccaaatctaaaacgtaaatagtgtttttcttttacaatgatcatttcggtatgaatatggatacatcccatgtgtcaaaaatatatgtcaatttattattttgatttgacatgttgggtatgaattcatatgtatatgtgaaaaataattgagtaattgacttgctcaaatttggggaacaacccaaacattgctgttacaattcaatggtggacattagaaacagctatttattgatcagggattggcttgtgcaatttgatgtataattgtagatataaacagaactttgaatgagtatcttttgcataaagactttggaacacaaatataattggaatatagtttggtttcaatccctttccgtagtgaaatcagatagtgctccatttagggtgttataatttgacactgattgtttaaaactatatatctatatatacaatatagaagaagaaagaaattttaagctaagaagagaatattccatgttaccgactataaataaaaaaaaaaggaaaaagaaaa

SEQ ID NO: 384788 - DNA, 2333 bp, Cannabis indica
tttacagcttgatagctgttacaatctcactcggagactcaaaaaaaaaaaaactgtcgagaaagaagaaaaatcatgctgaaaattcccaatgtttatcaaactcacaaggttgccaagaatgaaaccaaagtgaatgcatcacccattataagccataccgaattaaataaagaacagaagacacgaatcgcaaccagtaaccacagcccaaatgaatatgagagaaaaacaatatacgcaattggcaactgaaataagtaccaattaccctccagagtgggagacaggagtagtctcaaagtgaccatccttaaatatatgaacaaactgttgtggcaacgagtgttctccctgcaagagcagaaaatgataagccacatgatagaaactggtgcatgaataagatttagcattaccataaatgcattccggttcctggaaaaaaaatgtatatatgtatgtgtgtttggccatttaaagcatgaagaagagtatttcatgaatgttaagaaacataaaagcatcagggtcatatattctagaatcaaagaaaatattccaattagactataggataccgctacaaaatccatcaagtagtcaaaaacaagatattagaatgtcacacaaaacaagaaacatacccaatcaccatccggctcagaaccaggaaccaatacattgatctcactcgacttcgcagttgttattgataccccaagagattctttgcttagatataattggcagcctgctgtattgtcaactgaaattgttggagctgatccctacagagcataaatatatatataagaaaattcatttattaacatttttagaatatacttgcaactgattctcaacatagcataaatgaatacctgacattgcacctccaccccattgcagtttacaatctcaaaagcagctacaacatcctgtatttataggaaaaaaagcatttgataagaatatattccacatcacaacagattgtttcttgcacaaatgatattctacttaccctaaacacaactcccatcttagtacatttgtcaacagtgatgttatttactttacctgcacaataagaaatcgtgataaactaaatgtgacttcttatgaaagatagaaactataaaaccgtgcaaaatacacatacattaccttgaacctgcaaaacagagtctttgcatccaaaaatatatacagattgttttgcatcacagtcatcgatcactaagcttttctttccaatttgattctcaacaacccacctgcaaaataaacatccatttgaaaacatcacaaactggcatcatccctatacaaattaaatccccatgcagatgtaataatactcacttacgacccatttgaagttctagctttgggggccctgccttagaaaatgaaggtgcactggtacgagtctctttttcactagaaccaacaactccagttctctctgcacgattcttcgtcttcatatcatcagtaacctttctcaaacctacaaacaaatagcaatcaggccaatacctacctaaagcaaacttaataaataaaaagaaggcaaaaaaacgtaacaaaaaagaaaaaataccagacgtcacaggcttcccagaattaatttcttggaagacagcagacatcccatgcttgtaacctgttgatgatgatggctgagaagattcagatgtaaaaagagatgctggtggaggaggaggaggggcaggagcactgggtctaggagcttttggtggagcagcagtgactgctttcccagtagaactccaaactggacccaaaggataattactcttaacatagtccctcaaaccaggcaaatagagctccttcagggctttggcccattctacatggtttgggtctttacttttgtactctacaagaatctgaattagaaatgccatgttaatgtatagtcacataaatattgtcgatgatgaagcactactacacatttattttctttttcttttgaagagtttagtacacagatggtaccattactactcaaataatggagaggtcccaggtccaaacatgagacctctaccttacccctaccgttactcatcaccgagctagccttagtggcatgatgaagactatacattaaaaatgtcacgtgtcacaaatgctcaaagtgcttctgcatttactttgggataggacctttttgttttaattcacctctaaaacattaccaaagatcaggtagatgtgcagtttcagactgaacaaacaactagtaaagagctatgataacccacaagcttcacatgtgtgagactaagatggcc

SEQ ID NO: 384789 - DNA, 1376 bp, Cannabis indica
tatatataatatatagactagccattcaaaatatatatatatatagactagtattaattaatttgatgattttggtattttaaataaatgattattctttacctataattaaggagaatatgatgaagggtgaatccaatgactactttggctagttcggaccctggacaaagccttggtccaccaccaaatggtgtcaccttctttctcatctccttattattatcctgttattaataatatatatatatatatcatgtatacatatatatacataattaatgatatataaatataatggtatatatatacgtacagtactagtccatctccaaggattgaagtcgtggggtttgtcatgaagtgattcatcaaaatgcacgcctgtgaatattggaaacactttccatcctgatgggatcacaatatctgaaatttgatgataatgagttttattatcttaataagttactaatatagctagctaattaatacttatataacatatatgatagatatatacctttatattttacatcttgaagagctttcctatgaacgaatttgactacatttccacacctcatcgcttcacatgtgacctgatcacatcattattttaattaacattatatatattatatatacactaattgaagatttgcattaatataataagtaattaaattgtgttcttaattaatatattacatgggaagtaaagtccattttcttgtaatcctcccaattcaagggctccccatcttttttgttttcccttatggcttggtgctcttcctgtgtatatataattataatatagttaataatttttttagctatgtatatataaacacattatatcattaatgtttataattattattatgaaaagctagacaaaataatatttgtacctttaattgttggaagacatgaggttgattggaaataaagtagagaagtaaggacataagagttgcggttgtctcatatccacctaataagatatccaatacaatgctcaatttctcttcttcacttagattctcttccttttcaattatcatatctaagaataattcttcttcacccacttcgttcctagtagtttttcctagtactctttcttttattattcctttaacaattgaagaaagcctctctcttgcctgaaaaaaaaaaaaaaagaaagaaaattcatatttatacattaataacttattactaatagtaggttaagcttaattatggtaaaatatattaaggtcttctttgaacctaacttggatttgattaatcaatatattaactaaagagttttattttagaaaaaaaaaaatttgagtataatatatcattttatgaaatttaca

SEQ ID NO: 384790 - DNA, 1438 bp, Cannabis indica
ttttgtttttttttttaatttatcccttttattaaaggttatttatttaattttatctcttatcccctaatatataataataatcataaaactatagatcaaagtaatatatatatagggaactctttttggtggggcaatatttttgctctcattttataaccattcttttttaatttgatgatagtaattttttgttatatttttaattatcataaagcatcatacatagaataatttttttcattactcatattctatccacgtaatatgtagttattattttcttttatatttccaccattttctaaaagaaaaaaactcatatacctttattttataaaaaataatcaaaatatttaaatgttaatttgatcaaaccaaaaagaaataaaggaggaatgttacgtagtttaaccaaatattatatatagatagaatgattttaaattcaattataattcaattatacatacgtattgtgttttacatgaaataaatgatagagtattaaatcatatataagaatatagattactctgtcaccaccaattaattttaaaatagaattatatgattcttaatattacgtataatgtacatacttttacctctatatatttatatatatatcatatatattttttaaattataaaattcctacaattattgtatagatcatatagagaacataaaaatacctgtacaaatttacctttttaatatataattatcgacacacattgatgattatataaatatacaaattttgagagatcaataatgttattattatgtagtttacaagaatatattgctctttttcaatgaatttaagtatcaaacttaataagaaaaaattacaatattgtgggtttctcattacgcaagggcctcaacccctacgccgaagctatggctttgcatatcgcattttcttggtgcataactgtgaacttcccattagagatagtggaattggattgtcaaattttggttaacaagatcaagaataagtggaaggacatatcttctctctcaaatcttgttcaaattgtgcaaatctctttgtttttatttcctaatgtttccctaaatcacatttcctgaaatgataatgtgtcagcacacaacttgactaggaaattattaggcttagatagatagatcatttagaatggcctattttcaaattggttatattgtaattgtaacttggattttcttgcttatcaatggaagttaggttacatttccaaaaaaaataatattttttttcttttcatctatattatatatacacactcgatgtcttcataatatatgttaatatataaatttatttgtaccgcaggtccctaaattatacatgttttggcaagttggtcttcaaaatttattttttgacaaattagtcttcaaactatataagttttg

SEQ ID NO: 384791 - DNA, 911 bp, Cannabis indica
agtgacatttcttgtagtgagacttttggcggtatcaagttaaagttgatgctagttggtattagcgtaaattgtaccgcataagggactactttctctcgagaaaatatttataatgcgagttaccaaggcaaatttagtgttggtttgttatatagaagcttgattcaaatatcatcattttgttagaatatagattgagtgttcttaaaaacaaatttatattgtggcaggtgtttaatgtcaagttgctcacccaattcctctgaattgcaccctttgttcggtttgagggatagaaaattaggaggaccatgatcacctgttttttcgctgcttgttctctcaacaggttcttgaacaagtttagaggttgattggttgtggttggtctcgaagtttttaccgagtgagatcagttggcttgaagaagaagggtttcaaagcaggggtgattgtgttatggttgctctcatttattatgcatagaaaaatagaaatacatgtattgttattactctcatagtgtaaagtatattgttgatatgataaagggatgtacaatataggagctatactcttttacaaaagaaactgaaaaagagggagaggatgtaattactgtccaatgtttgtgagatgcaaatgagggttttctagccttgttttgtttaattgtaattggttgtgattaatgaagatttattttgataagaaaatcttctaattcatttatagtcttttttttgtttgttttttttaaaatttattattctatttatttatttatttttttgataaattgttttatggggaattaccctatatattattttttttaactttttttttaaaaaatttttacagtttgagtttctaaagtggttgcagcgctagttgcaataaggatt

SEQ ID NO: 384792 - DNA, 1182 bp, Cannabis indica
tatatataatagaataaatctgaaacgatcgagtttggacatgcgtaaatatcttaagcataaaaatattaaacaaaagaaaggagagagatcgataacatgtggaaaaggagtaggatattctttgtggtgtttaaacagtccacataattaatagaacccaatatagagtcaagtggaggtttggaatgacaatggggatagattctcctttctagaggggctgaacatgttatgttaatatacatatctaaatatattttcttttacttaaaaatcttttagaaatggatttagggagactaatctggaaatctggtcttaaacaagcctcgtaattaagcatcttaaaattgttattattattattcttgaaatctatatcaaactttatgaatagagaccaaaacgactaatttatggatgagaaaaatgcacgccttacatccgtaattaaatatacttatatactcgaaatttcaagaaaaattagccaaatttgtgcttgtcttaatcataaacagaagacccaataatactgttgagtttgtacacgtaaactaccaaagcattggagaaagaaagtagtatccactcaactactcttttattacaaacgaattttcaggattatatttgctcagctagctatgttatttaaaatcaatcacgatctactagttatttttcattaataatctaacactacgattatatttccagacaaagacccacgtgtcaaactttggaacatttcttataaggttcgcatctgttcttgattgtcacatataaataattattcttttgaaaaatttgacaattacaaagttatgcacttttactttttttttttaccaagtttgaatgttgcaagatgcatttcaccgcttttattgtactaacaaactctttattgtactactcgtaggaaattttctaattataaacatattcacgctaatgatatgtgcgtaatataagtaaattcttttggtggtctacctaccccatttctatcaaaactttattattactgatagattaatctaactttcagtccctttagattttctgctctttagatggtcttatgagactattcttctaaataaataaaagaaaaaaaaaattacatgtgcctagttagtttggaaaaattatggggtgcaatttgtagat

SEQ ID NO: 384793 - DNA, 1373 bp, Cannabis indica
aaacaataccaaacacgcttactcccaacgacgtactttgatttgaatacactatatcatcatctacggacgaaaattacatcaaagtcgaacttagaagacctagtaattttcttacgtacagtttatgttttgtcttcttgctcctattacttaccttatttattttcctcaaccgtgcttattctatttatatttactataaccaaattaatctaacgtcgattgagacataagtaaagattatatatcatataagcaaagtttcatactttttattgtatgtgctcatagccatatatcccaaatatatatttatatattttcattgttgtctaaaatgttagcgtcaagagagattgagagagaaagagagggaaaaagaggacagtgaaaatggattaggatgaggaaggagaggtgggtatagattgcaagtctcgtccttgtcccttgtttaaatctcaatggtcatttgtatatccatttaaaataaataaataaatgagcattttatttttattggataacatctacacgacatccaaccatactgatacacgtctcacccccaaatcttctcgtttcttacacctcttctctcactctaatccttcctctgcttgcactcaaagttttattctcactccagtttttttttttttggaagtctgtctttagtagttatcaacacaccaattagcagtcttctttttacaccaactattatataaacaataaccaaaatgacaatgatgcttccattatgcatacccctgcaatgataaatgaacaagagagagagagaaattggaactatcataatgcaatacaatacaagtagttatactatgtggcaactgccaattttaagtacatagctccaaaccattaaccaaaaggcatagccaaactccatattaaggctcaagtcccagctcaggctctgcttggtacttggtactcagtcttggttggatcggaccacacaaagaaatatcatttcatctgacatcttatataatcccacaatttcaaatgtctggaaggaaaggaggccataaaatgaggtgggtttgattgaatgaaggtctctctatctctatagtagtagtagtagtaataggaatgacagatctgaagaaataaaccgggactgattgataaccaattactttacaaaacaaatctctgtttgtagcaatatgaagatcatcacaacaaagagtaccagaattccaattacacaaaacagctcgcactcgaactggataacaaacactcagtccccagaaacaataggaaagagggaaaccaataaacaacaagcaacacatagacataccgaacaaaatttacagggatctcagttg

SEQ ID NO: 384794 - DNA, 1415 bp, Cannabis indica
gtttactagttttttttgtttttttttttttagaaaaagcgtttatattaataaagtttactaaggccatacctaccatcaccaaatccaaaatttcagggataaaagattcaccaataaggtaattagccaaaataatacgaatgaatataaatagaatattctcccaaggcaagagtcattagtcaaggtttttaagagtggaaattaggttggctttagcttagcttagcttaccccaaaatccaaacattatctaataaccccgtaatgtaatctactacagaatttaaaacgttatccaaatgtaattaataatggtcggttcaatcaacattatccttgatttaattattgtgtacaaaatcactacaaaataataaataatctctcccttttagccaaaccaactaacattaactaaaaaacgaaaaaagtgaaaaagtccaaaaaggccctacacagttaatcacctcaccaggtatggttccaggaaattccatttttgccacgtggcgcattttggttctcttaattgcatgggacacatggcttaacacaagtgagaaacacagtaattgacacgccaacgatagtgggccagagtagtaaatatagagttgccacgaggtttgttccagtgggttttacgtggcccatctaagattgggccgtggggcccatttctttttctacttagcaaaaaaggccaacaactgccgcggatatatttaaaatgacggacgtctcagatagcgccacgcgtcctgaatatgcatacgtgaccgtagttctcgttgatttcgtgtctgagcatcagaggagctaaagtgtgggacctggtctgagggtgtttggcggtggtggtttagctgtaaaaataatattatacaaatataaataatttttaattaattttgatgataaaaagaactccctaattataggggatttttcttatttctattaatttacattattatttttattatgatatgaagtttgatgggtttttagtattattatattacaaaaaagagtagtcaagatttcgtgcaaagaaaaggaactggtaaaagatcgttggtttggttcagcaatttcacaagccaaaattagacacgattattattattattataatcatctttctttttttaattttcataaattacttggtagtaattaaaggctaactagtaattttttcttttaaactttgacatgtactaaatcgtgcctctgaacttttttggccgttaaaaattctccctgaactattgagattgttaaatttaaggatttttgtctaattttagtaaacaaattctaacatagatgaaagtttaaggagcatgatttagtacatatcaaaatttgaggggcatgatttgctagatatcaaagtctgagga

SEQ ID NO: 384795 - DNA, 685 bp, Cannabis indica
atgactagaataatttgtcttgttcttaagaacatttatataatctctataagaaaatttcaataattgaatatgctatttcaagaattttcatctaactcaacatcttttgacaaagtaaagaactctcactcaaaaattcttaaacataaagactaattgtttttattgttgcgggtattaatttttttttattgaatggaagtgtgcattaattttgatattatacattttcagtataaaataattgagaaaatattaaatggaggaaataatttttatgcaacttctcttcaataaaaatcagatcaattctcaccaataattttctcttaaataactttttggtgattataagcttctgtaataaacctcttctaccatcatatttatcatctttgtcttctctttttcaaaaatttcgtctctatctgcataaaacatacaatatataatcaaagaaaagaaagttcaagagataaaaatcagtacgtgaataaacttaattctttatcatatggagatagccaatatatattaatactaaaagcaataattgatattcctatacaaattttagtatgcaactaaactaataaaataaaatgaatgaaacggtaataaataattgcagaaacaaaatctcattcactcattaattttttttgaacaatgaacaaaattt

SEQ ID NO: 384796 - DNA, 1777 bp, Cannabis indica
cgtggagtcaagcaagtattctctttgacccagatggtaaggcttttcttcctttatcaattgatttttcattcatttggccttgtttggattcattccagaaatatcaactttctgatgccaaattcacatttcttgttaatttacagggaatggtttggaggttgctagtctcccaccacagcaataaacttagtcaagaaaatttaatgaagatgaggacattatcactgtcctagttctgatgttgatgcagtatagtctatagctttctatggtctgtgtttagcttactcttacatagggttgctttttcattgttatgtaactattctgtaaagaagtaaacttcaaatatgtcttggtttcttaaggttttttcatataacaatcgatcatgctttttgtattgagcttgtcttttttttttatgtctttaatgggagataattatatgaactgttttctggtgtgatgataactctcaactggagtgtaatctgcttctaaatgttctgatgggacgaatgaattgatatcatacttctgatttgatataatgtcttggaagtaaatgataaatttgatgaaattgacttgtatgcagtttttagctttctctgttctgttcatagtgatagattttgtgatgtgaatattttgtacaagggctgtctacctatatgactccaactgctatttactcgtttaactgtacaatcatattctaatcaacttttttagatgaaacctccacaacgacaggtctctatgtgtacacaaaaaagggaaaggagggtcatggagcagaggccaaactaaaaagaaaagctttattcttgacacaaaatttaatagaataattattatttttacacttattttttacactattaaattgtgccccaatagtatgtggcttgttaataataccccttgaaatataatttttacaataacgtggtgtttctatcatattctattgaattttataatgaaacgagtgagcgatagatggtagttgataaatagatgaaaattaaatacatttcactttttcttttttactttaatgattaaaaaattaaaactaaaaatattaattaacaaaaaaagtcttttattctattatttattaatataaaaagggtgaaataaatttaatttgcatctatttatcaactatcattcatcatatcactcgtttcataataaaattaaattaaatgtgatggaaagaaggactaggttaatgtaaatattgtatgtactttttttatcaaaataggtggtcattcaagagtgagccacgtgtacggtggacccacgataaaagaggtaaaatattaatatcaacctctaagatcatgaaagcgtctaggaggcaccctagtatccaagagcgaacattcgcccttaaggagatcccaaagctaagccatagactaatcctttgagaggataatgacctcccgaagcttcaaagattcacaagctagtcctaatcttggtacattttctaagacaaaaatattgtagatggcactctcgttgcaaacaacaaaatagaaatgctatcagaaaggtgttttagggatctaacctatacttttctaatattgcgtgtccccataaacaactattgacaactttcttttgcattgtcccatcagccgcaaactcgtcaggtcttatctcaccaaattcctacttcgaatcctaccgaagcttccattatcaaaagtcattccctatccctaggaaaaaggccacatag

SEQ ID NO: 384797 - DNA, 681 bp, Cannabis indica
aaacataaatgaaacttatttttataagctattgtcatcattatctttttaatgtaaaagagagataatagaatgggtgctttcatctcatggcgtagatttaaaggatttaatagcattaaataacatgttgtggaggacatacttgtcttcgacattaagctaacatcattgcatttctagctattgttagtacgaatttaatgggttctaagaaattgcttttgtaacttatattatatatagtgagagagaaaacagtccaaacaaatttagcaagatgtaaacatgatgatgaatggacgcacccaactttgtcatattatttatttgagattggactattggacattcacagctcacaactaactagtgcggtaaatacttgtcgtaccataaatatggggcgtactgtatcgtaaaagatataagtcataccgtgccataaaaaatatgactcgtgtcatgatgtgccataaaaaaatatagccatgttgtgccgttctataaaaaattataggccatgtcgtactatgccatgctcaaattcgtatcatactttacttagaccagcccatttcttatagaaaaattgccacatatttaaacataatgtttattgttatgattagggtaattagaatttttatcccttaaactttgacaaataccaaattatgt

SEQ ID NO: 384798 - DNA, 1260 bp, Cannabis indica
agtggttgtttaatgtatagttttttcatataacatttattgaatctacatttcattgtgcagaaaactgctcaaaatggtcttcattttcttcttggaggcatttgtgctcttacggtagtagtgttctttcgctttgtaagtaccttggacatttttcatttgctctgctctgtagggttcctgtttgcgttgagcattatttagtttaggttgttcaagatttaatagataattgggcttttctatgccaatcctctaacatgattgagtgacaagaaaaccaacaaccttgtttaactaacaagcctaaattgccacagttaatgcaaaatagaatgcttgtactgtatttacgtggttctttgggagtgaagttggcttaccttatatataacactgtagtatcttgtatcaaaactacaatttatatatataaatatatatttcccttcgtttttagacttaatactttgcatatatcccaagagagactattttttccacataatgcatgagaaatcttctctttttagaaagatgtaacttgtccaatctttttttcgttgtttgttttgctatgatctttgttttctcttccaataacaatcaaagcttctcaaaatcgtttgtgctttatcttttgttcgcagtttgcactagaagtcggttaacataatttttttttgttctcctttgcgctccattgattactatcgtaaagttgcaactgttaactcaaatgggatgtaattgaatatggttttgaatgttgcagtttgtacttaccagaatcaagtatggacctgctcgctattgggcaattttgtttgtgttttggtttcttgtctttggtatttgggcttctcggacacatggtacacattctacttgattctatttgttagtgttatttattatgctacttaatttagtgttttcctctcttccttcttttattctgtctttgtaaatcattgggaattcagtctgtaagtgaagacatcaatattttatggtggattgtggttaattgttaattaagctgttcatatagcacagatctcagtgcattgtaaagggaaattactgtataagtatctcgttaattgccacatttcttttctttttgggcggagttgtacaaatagttttgttttggacttaaatattattatattgctaaatatatgtcatcattattataagggtaaatagcggcataagtatccaaagttttgagtttgtaagcggtataaa

SEQ ID NO: 384799 - DNA, 1114 bp, Cannabis indica
gaagctttctacccagtttgggtatccaaccttgttcttgtgcctaaactgaatggtaagtggagaacttgcatcgacttcactgacctaaataaagcatgccctaaagactgtgtccctctaccacgaattaatcaacttgtggacatgacaaccatccatgagctccaaacattcatggacgcctattctggctactaccaaataatcatgcacacacttgatgaagagcatactagtttccaaactaacatcgggctttactgctacaaagtaatgccatctggactcaagaattcaagtgctacttatcacagacaagtcagctgtatgttccatgacttaatcgggaataatatggaagtctacatcgatgacatgctggtcaggtcaatgaaatttgaggaccacatcaaagatttagacgaatgctttaacatactacgagaatatcgaatgaaactcagtcctctgaaatgtgccttcggtgtctaattagataaatttctcatattcattgtaaagtcaagagtaattaaagaaagaaaagatcaaggccttgaaagacatgaagtcaacgtcacggataaaagacgtgcaaagcctaacatgataaattgttgcagttagtaggttttccacaaagtcaaccaacaagggtgttcccttctttaatttataaggaagcaaaaagaggtttgaatgaaatgatgaatgtgagcaagccttccaagctcttaaacatcacctagccaggcctcccatcctatccaaactaatatatggtgaagaattgttcaattatttggctatcactaagcatgcagccaatgctgctctggtgcatggggaacatccagtatactacattagaaagcatcttattggggtcgagttaaggtattcccccattgagaagctagcctactgcttggattggcctccaaaaaactaaggccatacttccaagctcacacgattaaggtgctaactgaccaaccacttaggcaagttttaatgaagcaaagcatcagggcacctactcaagtgggcagttaaactaggacagtttgagatcacctaccagcctcgcacaacaatcaaaagtcaaaca

SEQ ID NO: 384800 - DNA, 3889 bp, Cannabis indica
aaatagagttgatgagagagttgctttagtgaatagtgtgtctaagagttgtcaaatctcacgtccaatcaatcactctaataaaacaaaaaaatttaaaatttgatgtgaggagacacaactactattatttcctattttattattattattattataaaatgatgaaaacataaatatgacaacaatgtatgatacatattttatataagactaccaagaagaacagtataaacatgtcaaagtaagaatgaaagacattgtaaaaataattgacacagtgaaaaaaaaaacagtataaaagtaataataagcgtgtgacagtagaaaagtaataaaataagaaaagttagtaatgtatgtaaattttcttttttttttttttttttgtgaattaaattacttaaataccaaataaatatataggcccaaattgatacggttgattggaaaacatgatatataacttaaagaaaacgctaacagttggttatatatatctcatcatcaacgctttcctagttgaatattagaagaaatccactcggtgacttccccaacaagtaacctctgtttgtttacttcttaatttctcatctccttccattcattctaggctatcaacaaatatatcctctctttgtttattcaatttttattatttgttttctgtgtagaatattcttgttctcacatgaaagtcgttttttttttgtttcagttaataaaatttgggatatgagaggaatgaagtgtggtgatgatgatgatacaattggtgggactgaaaatgataataataataatacttttgaggaaagtctaactacttgtgatgactttcataccaattcaatggttcaatcgaattgtggcaaggtacgttttcatatcgaaaccatatatatattttttggttgtaagtactttccattttttttttttggtttggaagcagttgaatattatttgttgtggcttgatctgttttgatatttgattcatattacgcagactgatctaagtgaaattcgttaaattaacgatatgaaatgttaaaatttgtaaaataatctcacttaatgccatgattgtcgcataatattaatctataatttataatttatgattgtttttgctaataaaaaattttaaaaaactatttttataaaacactccaaataactttggttgtatataatgttttgagtattttgtaggtgatatttgatttgaaaacttagtatattttatattgtttttttatgcttcttagttctttttttttttttgaatgaaattcatatgctttttgttggtggcttattcaacttttttattctaatttattgtaaacgggttggttaacttatttttatttttgttaagaattttgtttgatctcaaaaaaagaaaagtgtctattgattttatgaaaatttttaaatagtgaattaatccttataaaaataaatttatttagtgaaaaattaatgtagttattttacatattgttagtttgacaaattctcctaactagaagttgatggattcatgcatgctttaaagaaaagttttaagatgtacattttctttgtgcactcactcatttgattcacttcttttgtgcaattttcatggtaacagttacatccagacaaagaagttggccaaaattcagttgataataaggaggaaatgactttacaaaatgctgtaaaacaacatgttctttgctttctcccagcaaaatcactatgcaggttcagattagtatgcaaagactggaatcactggatcactcaaccttttctagctcacttacactcttacaattaccaagacatctctggaattttttgtcaaactctttcagaaaggccctttttcatctccttagaccattcggcttgtggggttcagagttccaccctcagtttcttacccgaatctgttttcatcagagccgcttcccacggcttgctctgttgccaaagcatcttcacacacaatcctcgctactacatttgcaaccccgcaaccaaggaatggaaaaagcttccaaaaccgaagttttaccattggcaaaactcagccgcggtagctctcaatttccacccttcggttttcaatttcaaggcgaattttgagcttgtgtgtgctgtggctgtacccgaaaaccatgttgtttgtttcgagatttactcttcgagatcaggctcttggagaatttcgggtactgaatgttatgaagaagatgctttgaagcttaaaggagatggattttgcttaaatggggtggcattttgggaaacttgttgtggtacaattttggcattttatttgagtgatgaggaatatggtatgttaataacacctcccaccactggatcatcatccttatcatcatcatcacaaggctttttgacacaaatgaatggggagttgtgttactttgtggttcatgaaaatatagatggattaagaattgacatccatggaggatgggatatgagtttcaagtacagaatatctctggattcttcaactccaagccaaaccaatggcgagttgagggttctgccttgtgttaatggagaggttgtgatggttatttctaaaagaggatttttgggtgcttataaagtgaaagataggaagatgaaattgagtggcattagttatggtcatgataatagcataacgagtgatgaatatgttaagtgtttgccttatgtgaatagtcttgtatctgttggtagtcagattgttgagagtcaagacttttatcactgaactatctcgtactgattttccaattttggcaaaaattcttttccaagtgttaaactgtgtttctttcacccaaaggaaagcaggctagtattttatatctatttttgtttgtaataacaaatgttagagtttccttatttttaaatttgactgataattgcactttaagaaactattatttatattgtgattatttgtgactgtaaatgatcagtattcttttctttgcacaaataattagaaggtaatatattttattatgtttttctttgcacaaatatgaatgtaatatataatatatggtctttctattagattattatagccatttctaaaaaaattgatcattaggaagtttcatctgaataaactcgttttgttatgggaattttctcaataataccagagaatttgatattgaatttctaccaaaaaaaaaaaaagaaagtaaatatatggtgttgttacagattcacctaaaattgtataacactaatcacaggtttcaaaatgacaaatataaatcaaaagttgtagattttagtttaaaaattccaacatatggtattaaaccaaatctcttcttatccaactcaaatcttttcagttcatgacaaacacatgcacatttgtttggagggtcatcaaattacttgtttaaggaaaacacaatattttattgcctattgtcatttttttattgtttgtaatttagtaatattttattttatgttagttatgttagttctttttccttccaatttaagataattgtggatataaattctataattctattaaactaaactaaattgcacattatgtgaatgaagatttgcatttaaaaagaaattattattcaatatctgtaaaaaaaaaaaaaaagtttaatagccgattctacactacactatggggctgtttggaataggttaatcttagtaagggaatggtaatgtgaaacattaccttgtttgtttggaaagtttagccttggaatgttattcctctagtaatataactaccctttagaagataccttaaaaagagtaggattgaattattaccttccatcatattaatttgaataata

SEQ ID NO: 384801 - DNA, 1857 bp, Cannabis indica
ttttaatttgttttagaaaatatatgtatattatttaattagttgaaagttaatatatacttattaattatatcataaattagttactacataatataaattatgagatattttaaacaaattatttttatataaggtaatatttagtacggaaattaggacataaacatcaaatttgaaatttattaggaattaaaataaaaccttaatttgtcaatagtattttctttatggtaccaatatttgtcaataatttagagatcaatataattataaatacattcaacgaatacttctatatattaatttgttgcaatagtagttagtgacagagaaaaacgtcaaacaaaaaaacaaaacaaaaagatcaatcgttccgaaagtacagctgtatactttttgaactaaagagaattcatttatatacgtataataagtacgtggatcgaaacattcgttattgaccacgtacgtacgtaactgcgtatagtcccacacatgaaatcattcaactcatttgtgcaccaaggtccaaaatatatatatcataaattaatatacatgagtcagctggtcctttaatttccagctccacggtaatacacatatacttatacatataaatataaataaatagaaaaatagtatagatataagttcagggttattagctcatgcatgcatgttatatcacataataattgagcgacaaaatgagtggcaaagtaaagatatatagatcatgatgaaattaattaaatgcgatcgataagccttaaattagagacaacgagacaaagaatatatatatatgataagaagtagacatttcaatattcaacgaatcaacatgtcgcgattatatatcactagacatttcatattatataattagaggccaacattgtttatatatataaattaattaatatatataattagtaatacgttatactacgtaaaaatacgaacctatatattgctttttgtttttttgtcgcttcactgcgatattcattagtaagatgatgtgtttgatgatccattgttatagggaatctggaaacatttttagaagattgattatgaactaaaaaaccatcaaaatttctaagaatataacaatggatcatcaacacatcatcttataggtagtaaaatttcaatatattgtgattgatttaactaagtatatataatatagttgtttcaaaaaaaaatatatattatacaaatatggtaagatattcttctactatatatagatcaaaacgtgatcttataaatactaatttataaattcgaaacgatcttttttgtgaaagaaataaataataagaaaaccaaagattttatgtaagaaactagccgtggaaaataatttgatggtattactagtacagagtcagaattcaataaatgttttgcttattctagtgtagtttactctgttttttcttgattattaaactataacaagtaaaaacattcaattaatactaacgaatcacctatcttattcatatcaccatcaatttttttcttctcctataaatgcaaacaaactttcagcagcttttttccacttcatttgagaagcctccttcaaattaaacaatctttcatgaactctgattttacagaatgaccacaatactgctcacatttctccaaacacctcttcaactcgtctatcttttgttttaatattgttgggatttcatcttcaagtctttttgcttgattacctaggccttgcgcgcgttttacaaagacgagtggaaatcaatttcaaagataaatcttagttatgtctctgcttttagttttttttttttttaaaaaaaaacgtaaaaa

SEQ ID NO: 384802 - DNA, 1312 bp, Cannabis indica
gaggttgatgatatattattcaagtcatcaattcaaatcctataacactcatatttttttttaatatattttagaattttagtgtaccaccacatatatgctatgaatttatatttaattaaaaagtttaagttaactcattattgagatgatctagctagaatctattattttttttgtttgttttaaaaagtattcgttcacgattcatttattgttttatattatttatttaattattttcttggtatatatatagatttgatttatttgatttttaattaagtattaagatatatagtttttcatgaaagtgagaaatgaatgaaataattaccttgtaaaaatcacgttgaactctatctgattcgatgttatcgccatcatctaaatacctcaattgcaaagctttctcatattccccctataaatatatataaatatatatatatatataatttatactacaattaaaaatcagtattttatgtatataatataatttttgttgtaagaatacatatgtgcaattcaattaaatgttctacaattattattctaaattaaaatataacttaagacacataaattaattaaagatatatatacatggagggatagataataaattcctaatgttcttataataataaaataaaatcaattaaaaaacaaaagtaataattattatattgagtaagaaaataattaataataaaaaagacaatattctaagcaaaagataattaaatatttattgtacgtaataactaatatgtaatatattttataaagttttaattataatttgttagtaaatatacaattaaaatatacactttttcttataaaattttgaattaattttagttcattaattatggaaattaaaaccaataattttagttatatatagagggagagatgttaccagaataataagaacttctattattgccatttcgataaagtatttttctgtgatagtttgtctcttataatatcttcacgtttcttgctcagtaaattcaaggcttcttctctttttccaactttaattagctcaattgcttttttctgaaatattacatttgtaattattaaatattatattatatatgtattgtataaatataaatatagttgatattaaaactgtattttagttaattaggacatatgtaataaaaaataatattcatagatataatatttaattttaatataataattaagctagatttcatataatacagatcaagattaaaattccacaaaaagtatttttgcccccctcacttacaaaaaaaaa

SEQ ID NO: 384803 - DNA, 1427 bp, Cannabis indica
tctctctctctctcctttttttagactcaaagaacccagcaaacccaaggggaaaactcagctcaattcagcaatctcttgtctatttcttcagcccttagacttatctatcttgaggtaagttgttcttggtactcttgatagtttttggagatttaaagttaggatttgaggaagtttttggttaaattgggttctatgtatgttgtttggttagatcttgcttttagatgtttaattaggattttttaagctttaatttgatgattttaggtctgttgtgataagagttgggtgagttgagttcaagaactcaaaaaactcactcaacaatggtgaattttgtaattttagtgtaattctgagttttgaatgtttggttatgttgattttgtggtattaagctgttctggaaagtttcaacatgtttggtggagctttggtttggttttgatgcaaaaccagggttttccaatttctgcagtaggaaccggttctacagaatactgtggaaccggtcaaccagttgaccagtaggggaatcctaatttttctgaaaccggttatccgtttggggtatttttccaaaacttagttttgggtgttttatcgatgttaggctatttctaagtcagtattgattaggttttgtccggttttaagttgagggccaatttcgggatttgattaagttatttatcaagtttttgttgtcgtgacataggacctgaaatcgtcaagcgttattccactcaggtcggcccgcacacctaattttggatttgaggtaagaaaagtcatttacacttcttagcatgacaaataagatacgattattatcgtttgtgactcgattatgatcgaagtaaagatacgataattatcgttgtaaagaatgagttattactcacttctgaaactgttgataagtttcttacttattggttgcttaattaagcaatgatcataagaaactcgttggtaacgagtttcttagttacttaataaaaacataataatataactaaaataatcaaaagataatttaagcacaaaaattagttacttaataaaataagaaatactctatatgaattcttaacaaatgacctacggaattaaatcataaaaaccaattacgtttgttagctacttaaatatctaacacaaaaaagactagttaaataaagcaatcaaattaaaaattaacacacaaaaccagttacataaaatagataaatcaaaaactagctagcaacacaaaaaaaatacactgatattaaaaataaaaaaatagttactattaaggttgtacaaaaaaatttgtaaaccgcgcaaaccgaataatctgcccaaaccgaaccgaaaaaaccgataaaaattacaaaccgaaataacccaaaaaaattacaaaccgcccaatctgt

SEQ ID NO: 384804 - DNA, 1300 bp, Cannabis indica
ccagtgaaaatcctgtctatcatgaacgcacaaagcatgtggaaattgactgccatttcatacgagagaaggtccaacaaggctcaatcaagctacttcatgtctcctcacaaaacaacctcgctgacattttcactaaggcgctcttaccaactcacttctccaacattgtatccaagatgggcttacttaacatctacactccatcttgaggggggctcttaggattagtcttggattaagttgttaagccttagattaggttagttaaaggttgttttgtttgttacaaatccttgtcaacagctgtacatttcagttacagttttagttagtttctactaaccatttcttgattttatttggctatataaagccctctatcctttactgtaaaatcagttcaaacatatcaataaaagctctgattttctctgcttcttctctctatttctcataatagagaagaatatagttttttttttttttttttacaaaaaaagttgttttacaacaaaatttttagaaaatatggagaaaataatataaaataactggttacctctaattattctaaggtaactttgttactctaaacaattttttttaatatttattattattattattttatataaattttcccataaatttttctccaatgatctacttggcgacttattactcaattaaattgcttggaagaattttttagcaatgcctctttcaattgctcataatctcatatgactcgtgtaagtactaataatctcttttttacattgttgatttaccaataattattcaattatcaatacatagtttgaactttgagattcaattttctttactattttctcctgtgattgtgtgatgagccttcaacattggatctctagttttatttttgtgctattcaaattggctaattaattgctctttttatacaccatttattctctcttccttattagccttgtttggtacttatcatttacaagctttgttcatgcaatgtaaatatatttcctttagggcccgtttggtacgcaggattggactagattggactgaaaaagattggactggactggacaagattggattatgctgaaagtaatcatgtgtttggtttaagaatggactggacttttatttatttgcttttagaaaaaaaaacttaaaattaaataaaaatatataataataaattaaaattaaaatatataataataaataaatataaataaataattcgtcgcaaaaaaaaataatatatcatatataattaagaatatat

SEQ ID NO: 384805 - DNA, 3449 bp, Cannabis indica
cttttgaccagacaacaaaaatgtgcgtgacaaaagtgacatttcttgtagtgtcttgtaccctttaaataagtattaataatttatccacttgatccaaagaaagtattgcttattgcttattgccctaacatatttggcaatcatataactttgttccacttggctctttctccatagccaaacctcccaaaatctttaggaaaggaaaaccttatcctacgaagtgaggtgtaacttactcctcgatcattgtgaccccaaaggaaccaaatatacaatttattcacctccttattaattatgctctgaggcagcaaaaaaatattcatccaaaaatttcttagtcttaaaagagtcaaattgatgagttgagatctaccttacataagagaggtgatgtcttgcccaagtgtgaagcctcaatttgatcttcttgaggatgccacaattctctgttttccaattagttggcatcaaaggaagcccaaggtacttaagcggaaacaaaccctcttcaaatttaattttacaataaatgttgttttttcgaaggagaaacttctctaaagtaaacttgggatttgtttttattatccccaagactagtgttaccacaaaactctttgaacacatccttgacacattgcactaagccctacttagctttgcaggagataatttttggtttagggtttatattagagacgcggcgaaagtgaaaataggattcaggttttaaaaaaaaatattttgttgaatacgatatgaaccttaaactccagttctcaacacaaaattacataaagtaaatctaactagttagattaggaaattacctcttgttgtgtactaaggtttctttgaatctttccgtattatatatcaatcatccaatccagtaatgagcttgatgaagaatccacactagatcttccagatcagcctcaacactcagaataagagtgggcttacaaattttacaggatgaacaaattttctcatcacaatgtattctcaactcatgagacactatgatggaaaatggaaaaaatacaaattcttcttggagagagagaggcgtgaggtagaagagagagattaaaattcgatttcaactatgttctatttcttagttacgaaaccgtactatattctatttatcaatatatataaatattattttaaaattataaatattataatatttaaaattcttttaatcttttaaaataatatcatataactgaataacgagattcagttatatctttttatttatactatcttttaatttaaatacattatctgacaatatatttcatcaaaataatataaggtaattatcaattttaatttaatttatttataaataatataatataacaaaacttaaatgggactttacatgtcacctacagccatattttaaagcccaaaattaatatatcaattttgctacaaataagatttattatttatttttaccaatttataataattgagtattctctttaatcttttatttcattaggattaaaatacatatatttacactaaaataatattttctctctctctctctctctttaatattatctaagaataatattatatttaattaattagtatagtttcatcaaataaaattaaatagttaaataccactttaattattcaattcataatttatataattatttaaaataataatttatattgaatttctattttgcccttaaaaattattttcataaaaattaattctttctcaatttattcatcaagtcaaacatttgcctgtacaatgttgtatagagatgatttggggaccatgaccctatagtttgaagctccaataaacacttgattattatcgaactcttcaatagaataatctagttcattaattctattattactctactataaatatgaaatcgcactatttaacaacatagaattatatttacagaattcttacttatctctttattagttcataattagagttggtaaaaatatcattttacccttctaattatctctttattccttatgtaccattaactcgatatgaacaattaatctataatctaattattgatttggatccaactgctagcacttccagaattaacactataaaagaactaatattcgatcttttttagaaagtttagattccattattatataacatgttctcagctactcatgttattaagctccgaaaataaaaattgtaagaattatcttctctgagaaactttaatgagttaatcaaaaaactcaatgttcatgtatactaaggatttagatttctctactaatgattatcgttgtgatatgaataactcttttatggtaaacaatatgttgatgagagatgtttttacatattaattcagtcatgtgtgatcaaattatatataatatattcactacatgtctatctacatatgtgatctgaatcaaaatcacgcgcactagagtatagtgcataataaattgtacttggtaaggccatattaaaaatttcttactttaatacactaccgacttgttttattcatattttataatcttaattctcttgtacaaccttacaagattataccatctttctatgaagaaagaatttttagatatttattaattatacttctataattaatgtattcacttatcttataattgtatttcatatattttataaaattttatttgttaaatactttctttttgtacataaatcctaacaataattagatcatctgcaaagtacaagttaattattttcaaacttttgcacattggtggaatttgaagctatagtctcttagttttgtactgtaacaacctcgtaaaatactccatgataaggacaaaaagtaggggagacatagggtgaccttatcttaaccctttagcgccaccaccttgcaatcttccattcatcaccatcgtgtaagaggtacctttgagacagatcatgatctattgaatgaatcgagttggaaatattagacagttcaacagcctttctagaaaaaattaatcaacaacagtattatatgctttgctcaaatcgatcttcacggaatacctagaggaaacatttcttctattgtagttcttgataagatcttgaaaaataaagatattacgaactagggatttattttttataaaagctctttaaatctgattaataagatgaggtagaacctataactctgttacaaattagcttaactccatcttaaatatgttagttgtacaaagcgttacaacacgtgctattgcttgtaatcaattgtcggagaaagcatgtcattcattttttatactctcatgatgatttatattttgctatagctttatattatgtctatgctaaaatatatatgggttaattaaggtacgcttccgctatttgagttttt

SEQ ID NO: 384806 - DNA, 1252 bp, Cannabis indica
tttgaacttcttgtactatactcacatttttggaacctattagcactattttattcgctcactcacaccacatcaacatccaacttggcaaatatgcatatatgccgaagcatttttatagctacaagaaaatataatttgttgccaccacctaaacacacttcaatcaattaaaaccaggtacactcctaacataattgtatgtaaatttaatttaatttttaatattgctttttaacgaaaaattaggatctctaaatttgtacaaaaaaagaaaagaaaaaaaaaaagatatcttaatttgttaaaaaaaaaaaaatattaggatctcctaaaaaaaaagagatgcttaacccaaattaggccacgttttatgcaaatccttgtctaaaactaaatggcgttttataaacaaaaatatattaatttaagacgccttctcctggttcctggctgcacaagaaagtgggctttcgaaaccttcaaaaggtaacaaacccactcatttaaaatggtatatctttttaattgttcaaaacaaaatatggtatattttaaattggcatcgaccacctggccaaaatgcccattccttcaaccacttgtagcaaattaggtattcataattaataaatttattaattttgattaagtccattttttgtgttataacttataattttcttccttcaaattccaatttgaattagtttcttaatttatcaaattcaaaatttcttaatattggcgttattttgttgagaatattccctggaaagggtccgcatgaccaatgccaatgaagtttcttattggtcctctctcttcttttcagcgcttgacctgaaaaattcagaaaattaaaacaaacgtcattcaataattccaaaaataaaaatcacacaactcgcattacttgaccaaacaattgattatatatacttacatttattttttcaattatataaatataaatatatatattaataacttacattcctgacatgaaacggaagttttaaggagtaagttgtagaaaagttattttttagagtaaaccttcgtttaggtaaaattaatcattaattaagctcactgttatttcataaaaatgaaataaaaaaaaatcctttaatattcacagttcaatctaaaatccactctgtatttactttgaatggaaaaaaagaaagaaaagaacaaaattgttattttgaatggttttttttttttttttaatttttttgtctgt

SEQ ID NO: 384807 - DNA, 1676 bp, Cannabis indica
catatgttttactttgaaaagtcaacatcatcatttatgagggtttctcgattgagaatatttttggtgtagaaatagaaaattttaaattcaggatctacttaattaacgacgtcataaagagagggaaagttgtggtgtggtttgaattgggccgaagatacaacatggactagtatcaatgggctttcgagcacttaaaggcccaccaaggtgtatgtgctttaagttgaaacttcagtgggcttcagaatccacgggccagtgttaatgggctttcgaaaactagcaaaaggtgggaaggtaagttgaggaataccactttttttatcaattaatcaaaaataccctcatattatatttttatgagtgagttatctaatataccctttccctccacttaagtgtagcacgtgatttatattaatctaagaggtatagtgggaatatcatttataaaagtgagtatgttttaaagaatatgaaaatgaaggtaaaaataagaacaattaaagtaaagtgggtatacaatgcaatttctacaaagaaggtgggcttggaaaagaggcccaccattctgcctttacaatccataggcttttcaacatataaaaattgcattgtatacccactagacttgttttaacttctacttctattttcatattttataacatatacttatttttatatatgattttcccattagaccccttaggttaaatgtaaattatttgctagatttaaatagggaaatttacattgtatactaacttttaccattttttacaaaaatactgctagacaatatttttactttcttactcagtttttttataagtttcatactgtagtatattgtgttaagttttcactggtgttctacttttattttttagttgttctactgttgttttaagttgttctgttttgtgttcttctggtattttataaaaacatagcatttttgaaaactttttcgtgtgaccgtatttttgtaaaagttaacctaaattccagtatttttttaagtttccctttaaataaagagtgccattatattaggcaactcatacaaaaaagtaggtatatttttataaaatataacgtaaaggtgtttatgattaatgaatacaaaaaaacaaatatttttttaacgaattaatctttgaaattttgttttatacggcatatgtagcataaaatacaaaaatacagcatttgttgaccatatatattgagaaacattaatttttagaattttttcgtaaatatttacttacttatcttttatttggagttttatgatttaaatttttattaacagttttataaaattttaaaatttaagattataaaaatctaattttctcattagaaaaattagttcgagaaaataatggaaaaacaagatgatatcaaataaaatatgcaaatcaactagatatgtaaactacaaataaaattcaaaacaaccaagaaaataatattgaaaagcaaagatagaatcacaagatatcaaaccccattgtaatgtacgaataaatcaatgaaagaaagactcaaactaaattacaagaatatcagcaaataacatcactacgagaatattgaccagaatattatcctatactcggtactctagttgtaccgatgtgatagtgtcaatcagtact

SEQ ID NO: 384808 - DNA, 549 bp, Cannabis indica
attgggttggaggatcatatagagtgttatggtggtgtcaaccaccctagattagtcaagggagacaaaagtcacagggattatagagcatgacaatgtagagggggtgtgccctacatgtacaaaacacataaatatgttactctgcaccaaacattgttttttttaagtcatgctatagtatttttataacattatattctttgcatataactatacatcatagctgttttcttatttattttgaacaggcaaacacacattatgctctatcatcattgtattgatggaattggaaggtaatcaataattgtgatacttcttcaatttaaaataatgttaaatgattttatatattgtaacatttttcttcgtgttttctttaggctatgcacattttaaagaaaaaaaatcaacaattacaaattttaatgaatgataaatttgcttgttatatctaaacttgtcaaagaacaaatataaatttctcaaagatggccacttagcagtcatttaaaaaatcattagcttctaactctaaggacaaaa

SEQ ID NO: 384809 - DNA, 1187 bp, Cannabis indica
tatatatatatatatacaaaagtcattattctaacataattactaatgctgtatacaagtcaggctttttataatacagtttgaaattggtacgagtgagcacgatactacagattatcacatgacacgaaaaatataacacacaacactatattaatataatgggtaaatactattttggactctatattttacaaagttatcaattggatcatctattatgttaaatgataaaatggaccctctgttttgttaaatggtaaaaataaaaccctgagttcaattttcaacaaattctttttttttttaatataataaactttaaaacaatttctaagagaagcagatacagaaaatgtaactagttttgtcataacatttctagatcggaatattattaagttttattttgacaaaaaatcaattcatggtcctatttgtacaattttgaaaaatacatggtccattttatcatttaacaaaatagatggtccaaataataacttttacagaacacatataattggtgttgtatatatttttggtgccttataatactaggtttctcatttctgtgtagtgactaacatataataatgtccactcattatagaatttcgatattttgtataataactacacataaggattaattaatgttataactaacaaaatctaaattgaagaaaagagtaatgtataaaaatttaacaagtagattgggtaatgtaaaattcttattggcatatttgataaatttgccaaaattaatttatgattatatttttgaaatatccctaattatgtatgatatttttaaaattggttgttacttattttggggtgaaatgtttataaaaggagaatattttattcatgaaagtaaataaattaatttttctatacaaagtatataatatggagaaattttatttcaattaattctttttattattgatttgtacttattcaaatacataagaattctataatacaagaaaaaaagactaatagatcgaccatactatagtttaaaagaaaataaaataacaaagaatttcattacatgacactactacaaaaaccccctttagaggcggtttttaagccctttcagcgtcggttttcgtgaaattcgctaccgacgctgatcagggcgacgctaaagggtttatatgaaccgacgc

SEQ ID NO: 384810 - DNA, 1629 bp, Cannabis indica
gtcattagatatattcataccttatagtgtctatacaggttacatgggtgactctaagttcaacctgacccgtaagtatataaatgggtagacccaaaacctagcctgtgtaatgaacgagttcaacctgacttgcccgtgaataaagggatttttctttgttttgggtttcacgggtcaagtctgggcgtgttgaccggatcgggccctaacctagtacaaatattcaaccataataatcatgtcgatatcaagattgaaaaaaaaggtgaacagtcgggtgggggcggatccgacccgaaacaatgaggggcgggtcatacacccgaaaattggcccgattgattcgggttagaaccaaaccctccatgattatatgggctttttttacacccctagcctcagtactaggttgagccttggatcgaaacgaaacacgacctcgaacccgattgcagacccaaaacttggacctgattgttagagccaaactttgaccaggtctagggcctacaaccctagtttcggagcctgccccaaatcctaatgcggtccaaactaattgctcctaagaatttagtcgaccctcatatacgtaatctagtatctaagaatgaacatatctttacaatgttgtctatatttttcaaccttgtaacaaatgtataacaaatgagctatatagtcactatttagagtttttccactctcatcatttaaactggaatgagtgtcacaaatcccttgactgttgggaataatgattaattgagggttcgtagacttaattgggtgagttataggagctattggaaccaaacaaaacactccaaaaactttcaaaaactatgtgctgaaaaagggcttaactgtagatgacatgttatctaaggtggctgccaacaatttttgagcattttgtttttctacttcaaacgctccaaatcttttttagtagactttctaccatgtacaaccacaccctattaatgagtaaattaagtcaccaacaactaattagtgactcatttactaagatgatgaaagttacaaatttaattattcattaatttaaagcatttgcaacttcatttatgatcatcatcgacatattttttgtaattttatattgtaatgttacaattggacaaaaatattattttgtgacactcaattctttgtcatataattatttaatctaacattatattataactaataaaacataacttatacacacataaatgagtaaaaaaaattaaaaacaatatttaaacatttataaacattatataaatagcattaagaatttcaaattcatgttaagtacatttcttttttcacacacttactgttagtgaccatttgggagttacaaatatataactaaattatttatacacccaaaaatgatagtacaaaattgataaattatttttttcactcaaattattaaatttaatttatgtattattttgtattcatgttgtggagtgtaattcttctgttatatctaggcttgggtttctaaggctcgtcttagtagtaacgattgtgaattgatttacgtgtctttttgttgtgttcatttgtaagttacacttattaatatattttgtcaatatacat

SEQ ID NO: 384811 - DNA, 1425 bp, Cannabis indica
ctagccatccagaattcctttccgaataagactagctttcctaaatactagttttccttaagactccttctcaagtgaacaagatagacttccaagaacactcttccggatgacatctaactttccataacaagaacaactattgaagatttttttatttggaagaactataccatatacattatttaattcaattatgatatatattcatatatgatgtattaatatatatatttttaacaaaaaaaaaatatattattttaatatttagattttaaatttttttattataattgtttattattaaactaaatttcaaatttaattggtgttaatttatttctgtatacccattctaaaattaaatacataattatattcaccataattcaatccagcatgccaaaccatcaaagaattaatccaattaattaagataaaacatattctatatcccacaatgtatgaaagctattttggtaactataacatatatggaaaatgatcataatccactctttctctctctccctctgtatataaatatacacaccaaactgatcagtagtattattataataataatatacatgcgtgcatgtatgcagtagtactatagtggtggatcgtacggtctctctctaatggctttcaaactccattattatttaccactcactttgttcttggtctcttttatcgctcatgtagctgtagtccagtctgcttcttcttcaccttcaaaatggagctcaaagcaaagagaagcagcagactacgacaagtggttgtcttggaacttagaaaattatcgaacgcaaactacgatggtttccgaattaagaagcagccggaatagatcaggcggttccggcggggcgagggaatcaaccaaggagggagtgagcggagtagtagatgaagctttaaagaaggctgagatgaacaaaatgaatataagcgtgggccaagatggaaccgctgatttcactactatcaccgaagccctcaactccattccccctcccaacaccaggagagtcattttgactatcaaaccaggtgtttataggtacgttgttaaggctcgtcaggaccgtgtaatttctatatttcttactaatcaatattatttctctagttaaaatataggctaattaggattattactctagaattttgacatataccaaaccatgcctttaaacttttaaggtcgttaaaaatgtttcctgaactattgacattgttggatttaaggacttttgttaaattttagtaaaaaaaatctaatatgataaaagttcacgggacatgatttagtacatgtaaaagtttgaggaacatgatttggtaaatatcaaagtctgagagcatgatttagtacataaacagttactaaaataataaaattgaatgaaatta

SEQ ID NO: 384812 - DNA, 2003 bp, Cannabis indica
cgacaaattcaacatatatagtaaagtatatatacgtgcatttaaaatatgtaatatagttttttttttcttctaattgacaataataaaataccacatatcaatttttatcagtccaaattataattttaactgaacataatttaaaataaaataaaaaactaaaatgggaagaaccctaattttatcagcccacactctctctctgccttatctcgtgtggcgctggcttagtcgatcgggggcaagacatctccgcggcggtggtccaagcaaaccataaatttggaatcttcgagtcctgaaacgcaaaacccagtcctccctcttgcacccgatctctcaagctttctctctctctctcagccacgaccatactcgacgccaaccttccttggtagtccaagctcgagatgaataaccttagaaaacttgaaacccaaaccccaaccttccaccctcgagcccccttgttgtcactgcaaaccaaaatggagtccactctaagtctcgagatccctagtcccgtgacccgtgtccttgtttgttgttgtcgaaacaatgaccacaacttgtggtggtgctctggtagagctctcgtggctaggagaagaagatgaagaagaaaaaaaaaagaaaaaataattttatgattttaaaatattgttttaattttttagtaattctaaatagtttttaattaaaattataatttggaacaataaaaagttaacatgttgcattttattagtatctaacatattaattagaaaaaggactaacagacttacaaaaaacgtaatcttgtaaattattactgctaatttttgaaattgataacttatctgcatcaaacataaatatttagaaactatacatcaattttctcttaaaaagtttaaaattggggaggtctgcttactacaacacactctcctcataaactttgagatttttttaatggtactatttatagtagtgatgtcattttttacgtcaattttaaaagttttcaaataatttataatactgaaaataaaatttaaaataattaattttatatatgtataaaagaataattgtacaataaattatttaaattttattttcagtataaattatttaaaaattttccaaacatgtgttttatcccccaacattattgttttagaaagtaatatcatatcattatgtatactatttaagtagctcaataatcatatataaaagttcttccgagatggattactttgtgcatatgtagtgtataatttctaggactatatacatgtataatatattcacatgcttctcaacatttaaaatacagataggaataataaatatttgagagcttaggtgtacccaatttaggtgtgtgcaaatatagttaaaaagaaagttataagtgtcacgttcgatctgtcttgtaaaatttatatcttattacttataaatactatatagtaaattacaattaaggactatatctatagatatattctatatgaaacaccatatgtcaaaacttatgtatccaattcaagttattgaacaatatgggtgaaaccatatacataacacatcctatatatgacaaattacaatagatatgattaattatattatgatgtatgggcacatatacaacaaataatataaaaaatcacaaatacatctaggatattattataaattttaaaggtgagaaatgcgtgcagtaatattataaattagagctgaaaattaagagtacatatatgtcggtcaatttgttcgagttataggatattaatttttactaatttaatataatatcgaattgtaaatatttaattgtaatctgcttaattaataattttgaaaaagttaacccattcaataatttcatcgatttggtctggttaacccgtccaaatcgtttttcacctttttgtatattattattgttagtttctaatattcaaataattagattttaaaaaatacattatttatatttt

SEQ ID NO: 384813 - DNA, 1165 bp, Cannabis indica
tgattttgcagagaaaggtaaggcatttgtttggaaatttctaagtcctgaaagtctaaattctaaaagctttattttggtccaagtctttgtcaatgaaacttggtcacaggctttgttttctaaagatatttggtcaaatgaaattagctactacgtttgaagactttcaatagttttttttttttttaatatttgttcaagtcataaaaaagataaaagataagaagtaaatttaaaaagaacaatattatgttgcttattgaaattacacgaacacttttaataaattttgaagtcaattgtggagcaatagatgtcatgtttcaaaagagaagttctagtctatagcattactttcagaaaatgagaaatcataagatgcacagcctaagaccatctaaaaattttaacattgttattgctctacttaattataatatcctacatatttaatttattaattattattaaatatcgttaactatttataaaatgtcacatttaaataatagtaggtataaaaaatgtagcataattagattaatggcttgatgttaactaatataggagtagaatttgaatttaacttttacttataatatacaaattgtcatcctttcaactaagtttaaattcttaaaactaagtgaaatttttttaaatgtgtctattttttgaaaatcttcataattattcgcaataaaccatgacagatgacataaattgataattattattaaagtaattggtaaaaagaaatctgattcatatctaccaggaccaccactttatatggaaagttggactttttggacttgtcttactaaattctcatttgtcagattatgctttagcattatttttagcaaaaatgatattttagtcttcctcaaatcgagagcttcccaagtcagtttgaatacctttcacattaattagaaaaaattaactatatatttacaatttattaatattaacactttacaaactttaaaattaaaaatcacaaaaggcaaagataaatttaactctagattaaaataaagactaaattcatcaccattcttatccgattcaagccctttcaccaaatttacttctccggttggaacaatttttccttggagaacatataaaccattgatctttttacctttcatta

SEQ ID NO: 384814 - DNA, 3113 bp, Cannabis indica
gatctgaacggaaggagtcattatatttcgctgcacccaatgtaaggtttcctaaactttatatgtgtttatttcattattttagaattcatattaggatgttaatgaaacatacatgatagtaaatctagatcctggtaaaatatttccaacataacgtccatatcttgcattcttgtttccactatgaatatgcttggacagatgaggaagattgtgtgaaaattattggccaaattggaagttcaaagatttagatcccatttgcaatgtccaactcaatgttcttgaagtgggaggtaaactgaatggctggaataaataagagacacgcatttctataaataaaaagctcaagaatttttctattttggatgctaatcttgacaatgttagctgtgaggagcttcgaaaaaatgagaaagaactggatgttctttaagaaaaagaagagaagtattgggcttctcgagctaaaaaagactagctcaaattaggagacaagaattcagcttatttccagaagtgtagtttgggtagacaggctaataataaaattttgaagattcaaaataggaatgacattgaggtctcaagtcaaggtgaaattggagcagactttgaagattattttgctactctttttactttggttttccactcggagtatgcttttgccatagtcattaattcggttcctagaaaaatctctaaggattttaatgctcgtctaatttggaattttgtgccaaggatattagagaagcactgtttcaactggacccatctaaaagcccaggagaggatgggttcacagctggttttatcaaaaaaaattggaatacggtgcgacttgacattatatccgcagcattgacttttctacatggggtttctagcttaaaaggtatcaataaaactcttatcttcttgattctgaagatttattatcctattagtgtcgttgattttcgtcctattagtctttgtaatatcttttacaagattattactaagactgacaaaccgtatgtgtggcgtcttaggacatatcatatctgatgagcaaagtgcattcccttcctggacgtcttatcactgacaatgcacttattgggttttaatcatcaatgcgttaaagaaaaagaagagaggagatggtttctgtgctcttaagttggactgtccaaagctcatgatcgagttgagtggtgtttcttggagaaaattatgggaaaacttgattttcatacttagtggattagaaaaattcttgattggatctcttctgtggagtactctatgttgctgaatagtgaggtccctggctctattactcctcaacggggtcttagacaaggttaccatgcatatgtctccttactcttttcttttttgcgccgagggtctttcaagcttggtgaaaatggattgtgataataaattgttgtatggtctcccttgtgctcgtggtggtcttgttatctctcatcttttgtttgttgatgatagcttgtttttctttaaggcctcagatgtgtgttgtgtaagattcaagcaactgttacactagtatgtagctacctcaggacagttggttgactttgaaaagtctgcagtttgttttagccccaatattttgagttctaagacaaacaaatttgtggatgttttgggtgttaaaggggtcgattgccacgagaattatttgggccttccttgttctgcggggcatagcaagaatggtttgtttgataccattcgagatagaatcgaaagaagcttaataggtggaaatcaaaacttttttcaaggatcggtcgtgagatcctcatcaaagcagttattcagtctatccttgcttatacaatgaatcgttttaagctttcaaaagcttttgtcaaaaatattcatcgtatgtgtgcttgtttttggtagggtggcaatgatgttattaaaaagatgcattggtgtacttgggagaagctttgcttacataaggaagatggtggtatgtgcttccaatatcttcatatgtttaaacaagcccttttggcaaaacaagcttctcgcattgacaattttcttaattctttggctggttgtgtgctaaaagggttatatttcagaaagaggctttttgttgaaatcactaagtccaagcagggttcttctgtctaaaataatttactttgcggtaagaaactctttgatttggggcggtttggcgtgtaaggaatggcatagatatcactatatactctgatagttggatcccttcggtgccatcaggccgtttatctgcacctcatttgcttgatgatttagctaaggactctttgcattgtgatgattcgagagagtggaatatagaactagttcagaccagttttttagctgctgaagttgatgctattctctttatcctgtggtcaacaaacgatgtttcaaacaaatgtatttagaattttgagaattcatgttggttttctattaagagtggatacttgcttgctctttgtaacttagctttgcctcgttcttcaccagctactagtttgtcaagatggtggaaaaggatttggtctcttaacctcccccttaaagtaagactttttgtatggcaagcttcccatattggaattcctacgaaagctaatttggctcgtcatggtcttttatgtgacaaattatgttctttgtgtggggtgaaagatgaagctactcatcatgccctttggggttgtaattctttggcacaatgcacgaaaatctgtgagtttatgttgggagatttgcggacacgttgtgtggattttattgactttattcatagatttatcaatccccttgaaaaagagatgattgaattggttatggttattctttggagagtttagttttgtcttaacaagaaagtccataacaatgttaacttgactcttgagcttattgttaactaggctcgtgtcaaccttgggacttttcacaactaaacagcaggtgtgaaaagtgtatagtagatatgtgttgggttttgtgccctaaataaaacccatttcaacataatcagatttacttattaataaagatcagaaataacattttatgtt

SEQ ID NO: 384815 - DNA, 727 bp, Cannabis indica
gagagagagagagagagctggtttagtttaaaagctttggtacgcgttacacgcgccagaatgagcgagtgggtcaggtggagggagtctgatggctgaataaaatagtctgacagtcaattcctattgggtgattgaggctgtgtaaagagcataatgtgacagacacggtgactgtaacaaatatagaaacggtgtgtgtgtgtgtgatgcgcacgtgaggctccacttagaaaaaaattaaaattccgtaattaaacatttattctgacattttctccgtaatccgtacctctctgagttttgttttgtttgattattattttcattataagatccgtacacacctgtaaatacacactaaaatttctgtctatattttaattatttttaatacactcctacaaaattttggttcaataataattagtttataaattttggttcaagaaaaatccaatgcttaaatatataaaataagaaaactataaaaaattagttgagagttgggataccaatatgtaaaataaataaataaagaacagacattcttttattaatcaaaatcaaaactacaataataactaatacaaagggatatttccctataaattaaaaatgtttacattagggtggagtttgttaatatttttttaatcatttttttatttttaaaattagaaaaataaaatattgttcaaaatcattttctataaaattgttttta

SEQ ID NO: 384816 - DNA, 1780 bp, Cannabis indica
atttttttttaagaaaataatgtgtttctataattatttagaatttaaaaaaaaaattataattttaatttataactataatatacaattgacaaaaaatatctagaaatatgttttgagacattaaaattgagaaaaaaaaaattgcaataagatcttaattagaactcctgctacctacctatatacaagaaattaaatatcatctgtcttacaacatagacactctacactagtctgtactttctttttttgtaccattttgactttctgtactgggttgtttccagcaatgcagtgattaaatgcatccagttgagacatcatttcaaggttcagtaagtattcccataacccaaaaattggtgtaaattggtgtaaattggaaagtgattgaagatgatgataaatgattctttctattaatctaatccaaaccaatgacaacttctaaagttcccatgatgtttatattatatatttacccttttgatccaaacatctaattagtaaagtagacacattaatttttgctttaaaatctctgtaaatcaatatctctgtcttgtctctaaataacccattaaacaaaagttcagttctttaattgtgtcataacataaagcactaaacttttatttcattataagtaaagaaagagaaagaaaaaaaaacaactagtaaaagggacttgaaagcagtagaacttgaagtagaaaaaacatggaaaaacaaaacagaaaaaccaatggaacagacaacaaagatttgggtaataggatttaattttcctttctacaagtcctcatcttgaagagaatccctaaacctctttgacctgaagagaagccacagctcctccattgacatccttagtgctctccttgacatctttgttgtcctttgcttctttcttgggttcttcttcaacctgaaaagcagagacaggaaaactcctagaaaggcctgaaggggtcttgaaagtgatcttctcagttggagggttatccacatagatatcactgagtgtaatccaaaccaaaagctctttggttttgaccccagttagctttttgatcctgtgtggctcagcaatggctgtaacttcattagcataagaaaccaatttcccaatcttgtcaaatttatgggtaacactctttttctgctttaaccaaacaaaaccagtctctctcacataaccacactcctcaatgtccttcaatggcaacaacccatttggaaggaatatctcatttagcaattcctttgatttttcttgacagatttcatctccacggtatacctcagctttggctctgatctcttctgttactagtgacatttttctttctttgaatataaaatctcaacaaaggattttgatggtggtggtggtgatggcctatagaggtgtgtaagtggggttcatatatagttgtgatgccaaatatttgcccttctatttcctcaaaaatttccaaacttgcctttcaaaactacccttgtttttcatcaaaatttcacaaatgccattgtaattcattgtgtctttttctttttttcagctcactgttcaactaactatctttctcacacctgtatttattgttattattattattattatttatgtttaaaataaataaaatttttgtccttactataatttatcaaaaagtgtataatcatcaaatagtctgtacaaaatgaaagaactaaaaatgccagtttttttttaggctaattagcaatttttttttccaaactttgacatgta

SEQ ID NO: 384817 - DNA, 1455 bp, Cannabis indica
gtgagtatgagtaatggtgttttagcaagattattagaggaagaaagtttaccagatgaagctgttgctgatttcattatcaatcttctctttgctggcaatgaaaccactgctaaaactatgctttttgctatctattttctcactcattctccacaagctttgaaacagttactggtaactaattcttttacttgttacataaatatgcaaaatggaccttttgatagagcctctattcgtttcagtatacagaaattgtgattctaaataactataacgtacatgataagaattagattaaaatactttttttgatgtcgtaatagatagagtgatttatcgaaaaattcctttaagggtggtgtcttgcaaattttttctataattaataatgatactaataataataatttggaaaatttgatgattaataggatgaacaagagagcttgaaaagttgtacttctggtgatgatgatgaagaaatgcttacatggcaagactacaaagcaatgtcttttactcaatgtgtaagtcaaatattttgggtattattgcaaatattttgttgaatagtgccatttttttataaattttttttaaaatagttttttattacaatcttgatacttaatagaaaaattcttgatactctattgggagattctcaacaccttatctagtagactaaagagttattaaaactaatgtcacttattttacaaaacagcattatttaaaatagtttatagtttttaccaagggaatatacttagtattttatcattttctgaaaatatatttagtatcttatatttttaataatacttatttagtattttatattttaaaattgtatatatttaacactaaaataaaacttaattaatataattttattaatttgtccaatcagttttcagttatatgtaattaaataattaaatttgaatttaaaatttgtaaaattgaagacagtttgattgtactaaaataaaattttatcaaaaaattttgagtttaaaatattaaatatgtatgttattaaaatacagagtatcaaataaatattattgaaaatttaagacatcaaatctatatttaaataaaatataaggtagtaaatgtgtatacatccttttaccaattatttataaatatgcattattttttattttatggttatgcatatgtgtaggttattgatgaaactcttagattaggtgggatagctatatggttgatgagagaggccaaagaagatgtcaagtaccaaggtatatctacttacattttttgtacaactagttttgaattatactaattaacaccttctaagtttattatatattattccataaaaaaaagtttattatatattaatatgtagaaatgatgggaaaaaattgttaggataagaacctcaaaaatatttacaagttatactaattt

SEQ ID NO: 384818 - DNA, 2554 bp, Cannabis indica
ccttttagcagaacaagtttatcatcaaccacaccttgattcttcatttcctgcaagagttcaagttcaaaaaatttaagcctttattcattgtgatcatactcatttttgaaaactactaagaactattatttgcttattgcatacctgtggcatatccactgagtaaacaacatcatcgaaagaaatggaatgcggctcaaatggaagaatcattcctttctttgcaacttgattttcaccaatgtttgaactattttgctgcccatcttggatatcattctcagtatcttcagcctttacagactgtgatttctcaaaagctgcacgatgaattatatggcattagttcaaaatctttttgagaatttcattagtattatttgtatatcccaaaataaaatactcacggttgaggtaagtgagagccaaagtgtataaaatattcagtataataatgaatccaatcaatgctcccaaaccaagccaataccaatatcctctagtaaagaaccctcttgattccaagacttgaattccaagaggttgtgttgagtttggtccagtctattaagaacaaacaattcaatcaactgtttgacaaagaaaaattccaaaactttgaaaccaataagttgcaagaaagaaacttacatgtctccatttttgcccaaggaactcattaacaagaacagcagtttggccatacattagaggtgagatccaagtaaccccatatccaccaacccttaatgtcatctgttgtcatatataataataagatttaaacacataaacaatatgcatttcaattacaaaaaacaaagtgtttgaaatttgaaatttaagtcaactatacctctagacagaacaaaaccacccaaagtcacaagcataaccaacacaaatgacccaaatgtgttagctatgatcatgttcctaccggtagctgcagtagctcggaataacgctgacgccatctgattaatgaatatcaacacaagatattgtcgaaacaatctgaaaccatgtacaaaaccaaaaagatttaagtgttgagaagaaaaattaagcataaaatcagttttttcttttttcttctcttgagtaccttccaacatttgggtctaatccaatggaatagtatgttatggccacccatactcctacttctagaaaagttattgggatcttgagaatccaagatggaagagcatatgcccaagcaggatagaattgcaagtccctttgtttgtaaaacactggaagtttagcaatggtcattggaagctctgacattccattgaacataatcataacagcagtgaagaacaatgaaccaaggtaaattgaaccatcatccactgtattacgatgcatctcagttcttaagaaaagagttgtagcaaccagagccatgaatgtaagctagaagcaaggaaataataacaagtatgagagtattattcatataatataaccaaaggaaagattttctttaaagaagttgatgaaaaagcctacttgtataagcttgaagatgtagacaaatgagtttctgtgcatgagcaaatattctcttgagaagcaagctttgaggaactctttcttgctgacaccatagtttttggttgtcaaagcagcaggatgattcttgctcttgtcatatggagttaaaaggtaatcatctattctctgcccaacatggaatgatttgaatgcctcagcaaattccttgactgtcacatacctgtaaggttgctctcttcttgcccaatactgagcttgatctttccttgatgttacctatcattacaaaaataataataattttaacgattttgattttatggtactaaatatgtacaatttcaaaatacaagtaccaatgtgtatattccacccaaaaaagttacatgatgaatatatgtggagtttagttacctcttgaagaaagtctgctacaccttttctctcaggacatttgaagcccatagattcaaagaaagaaagcacattttcacgaggaccctgatacacaatctgaccatcagatagaagaatgatatcatcaaaaagatcatatgtctctggtgctggttggagtaatgagatgacattagttccattgaagatgtgaacatattgcttcagtgagttcacaatctgaaatgtagttgaactgtctaaaccagttgaaatctcatccatgagcaatactcctgctggcccaacaagcatctcccctgtaattcaattgtccaaatcaaagattaagtttgagtaatactatgtgtattggtactttcactttcagtattttcagtttgaaattctattttattacatgacaatattagacttagtcccacatttattaatgtatggaaataaaatataacgtataagataaatggactacattagttttgagatgaaactcgtgcattttataaaattctaacaattttataaaaatctcatattctactaaatagatatttttgctataatccatctactaaattcttaaaaaaaattagaatagaattaa

SEQ ID NO: 384819 - DNA, 1780 bp, Cannabis indica
ccccgccaactggagaactcaaactgaatgtagatgcaacattgaatgcttgtcgaaacgccattggagttggagcagtgatccgtgatgataaaggccaggtagttgccgcccttgcaaaactggtaattgaaaatttcacatcatatgagattgaggctaaagtaatgtttcataatttgacttgggcccttaatatgcaaattgttatttctcatgttgagacagatgctttgttggttgccaatgcctttgaataccccttcaacatcaatttcttcattcaaaaaattaattgttgatatatcttgtttgatctattcttttttcttggagttaatattactcatgccaagtgtacagttaatataactgctcacgatttggttaaatttgttcttcgatgaagctatatagcttttagtgttggagacattacttccacttatttattctattattgtaaatgatttgttttaatttatgataacatagtatttaccccaaaaaaaaaggtataaattgtaacgagaaattattattttttttattattattattttagaaataacttgcagtacataaactattcataaaaaaattattcatctaaaataaaaggggggaccataaaaaataaattgtttttttttcttctttaatttatgagggggtcaatattattttattttatttcaaaatacatttgtccaaaagaaaaaaagttaaatgagggtcatgagtataccaccccatgctaatccccccccttcatttggctctttatacaaatcgaacaaagatacttacaaccatccaattaaatatatatatatatatatatgtgtgtgtgttcatatatatacacatggtagatcgatggtcaattaattagggcataatatataaaatttgctatatgtacttctattattattgatattatatatttatatattaatgaagcaagtttttgtctaatattattttgttttctatgataatatcatgattttatttagagagagaatagaaagcagatcatatatatggatcgacctagtatatattatacactgatctggtagactgggtactagtgaattaataatcataaatttaattaattgtgtggaaattaattaataagagaatattattaattaatttccacatataattaataaacaaataataataattatatatagctatattaaaaaccaaatatatataataattatttttacgaagccaaatacatattaataagttaataattttttttcctttttattttgagtccaaaaattaagtaagaaaaagagaaaagtaaaagtatacatgtgcatgtgcctttgaatgttgaatatgtatatattgatctaatgtacttttgtgtagaatttcaaaccattatttggaccgtcaaataagtcacagtatgtcacaatattatgtgtgtcaattattcaatagtaatgatactatagatatagagagaccaatattaatgatatatatatatatataataataataattagggcacacacaaatcgttttcagttttggccaaatagtcatcatgattttacatctccttccttaatttattgactcatgggaattaattaattaggaagaagatatcctgatcatgatatttttattttgtaagatatatatatatatatatatatatatatttgtgtagtttctatatatattattattggtctcctatagagactcgactatatatatatatagtatatat

SEQ ID NO: 384820 - DNA, 538 bp, Cannabis indica
ttgcagggactggcatgggagctgcggctgtgttggaaagaggagactcagttgatgagctatgcaatgctagagcagctcatagttgaatatggattcattttgttatggtgtgtcttactataatattgttcctaatatttatcagagtgaacaaataatcttacatatctattttttatgtttttagaaatagaaaaactgttttttctgttactttgccaaagatgtggttaaagttttttgctcatagtaccaatttaatattaatgaatgatgatatacctagatggaagatgggttatatttacacccaaaagattattaagtacacccaaaatttctgtttcctaaaatgtgtcttatttgaaaaatagtacacccaaaaattttgaattcattatgaatacaaagttacatttaatctataaaaaaaattctataatgcaccaacataaaaatggtacactgatgtattctttatttgttttgacattcaaaatttttagtctaatttttttaataatcttgtaagttg

SEQ ID NO: 384821 - DNA, 4611 bp, Cannabis indica
aattaaaatagaaaaaaattacacataatttttacaaattaatcaaatacaagaaaaaaaaacaaatgaaataataacacgaaaaaaaaatacaaaaattcaacaaactttttagatctgctcatggagatttttcaaagaggctgatcggctcgtaaactcgcagctccgacgagcttctgcacggaggcaaaacaacggcggtggcttcgtggctcaagggagttgggttttagaactcggtgaggccacccgtggcctccattttcgcctacggtgaccggagtaggacaatcgtgcattgcaaacagagaacgagagaaagggttggtttatttcatcatttattattatcaattatattaaaagttacaggttaccatttgatgcaggcgttcaccatcccgatgctgcgattgctatgagggtgagagacacgagagagaccggaacttagacaatagggtggagagatagtggcgagattcatggggtttgtcttgggcttggacggtgaaagggtggtctgttgaagccctgccgccggggtggccattgggaccttcatctttcctttcgtctgaaccgagatagagtggaacaaagaggagaggagggaggcggctagaaaagaaatagggtctgatatctttatttttttttttgagttatggatattttttcaaaaaaaaagttaatgtattaaataggatattaaatgtgagcttcgggaatgcaaaagtctctttattacagaatttaaatttataaataaaaataaaaatctattacttataaagcttttacttaataatttatttaatttattatgatatggttacacgctacgcgtgtgagcaaatttatttaccaatgcgttatgcgcgtcgctaaaacgtggctttagggacgcgcacaatgcgttggtaaataaatttgctcacacgcgtgacacgtctctatatgccatggtttttatatttttataaaattataaattttaggttttaatatttagtgacactccatatttttagtgactcgcattttgggtgataaacaccgaatatttagagtctaatggtttgtgtcactaaaacctactcttgattttttagtgacccacacttttatgcgtgtcactatatagtgtcactaaaagcctaatttgtagtagtgaatgtggttgaatgatgaagaatgtggtgaagttatttcagattgttggcagtatgctgatgggctgactaccttagttgactatttagatcaatgtgttgtaaatctacagaagtggtacaatggtaagttttgtcagctaaagagagatatatcccaagctcaagacagagttaaaactctgcattctactgttgctttgactttggatcaccctcaagctatcctagatgttgagactctcttgaatgaatttttagctaatgaagaacaatattggcagcaacgttctaggatcaattggttatagtttggagattaaaacaccaaattctttcatgccaaagcctctgctcgaaactctaagataaaattcgttccctcttggataatggagctaatattgttacttcaaaagatggcatttcatgtattgttgctgattacttctaaaatctttttactgcctctgaggatgatcattgggcacattcccatgttctatccaccctttccactaccattactcaagatcacaatgactttttgctttgtgaatttacatcaaatgaagtcagtgatggcttgaaaagtatgagtgctaataaaagtcttggtctcgatggtatatcagctatgttttatcactataattggaatattgttggtcctttggtaacaaaggtggttttatatgtgctgaatgaaggaggtatcctgctgcttttaacaaaacacatattacgttgattccaaagattaataagcctaaaaccatgaacaactttcatcccataagtctgtgtaatgtcatctacaagttaatctgtaagatgctagttgctcgcttcaaaatagttttccatcatgtcatctccgagactcaaagagcttttttcccaattaggcttatcattgataatgttcttattgctttcgaacttgtccacagtttgaaacatagaacacgaggtcaaaagggatttggtacacttaaattagatatgagtaaagcatttgatcgggttaaatggtctttcttagcagatgtgatgggtaaaatgggtttcaatgtgcactagatgactcttattatgacatgtttgcgtaccaaccatttcttatatcttataaacggtgctatctcaggatcaatcattcctcattgaggattacgtcaaggataccctcttttcccttacttatttctcatatgctttgagggattatctagattattgaaatatgaagaagctattgggagactcaaaggcatggctattatctcgtcatgctcccaccatctcacatttactacttgtagatgatagtcttttatttttccaggctaattgtcgatcgtgtggtgcaacaaagtgttcattggatatatatcaaagagcctcttgtcaatagctcaataatgacaattttgtcatgtccttttctccaaacacaacggaggctgttaagctttctttccaataaattttggggatgccaatctgtgagtgccatgagaaatatcttggccttcctgcttactccgagtgtgataaaaatagttgtttaacaacattaaggaacgcatttggaagttaatgcatgcttggtctgataagcttttttcaattagtggtaagtaggttcttttaaaaggagttattttgtaacaccctactagtttaggcatgttatcgtgattttatactaattgtgagctcgttgctaatcaacgggtttattgacaatcgtgattaattaaaacttttttaaaatacttaaaaataccaaaataacatatatatataactgagatcccgtgtacaaaaaatttacaacccttacaaagtatgtactacggaagttgtcacctagtgactatgaaaaatatgtccagctgtcccaaagaccgtacgctccaggcctaaccgctccgacatgtacaatcttcatccgctcgctctcgcgggtgctcagccttacccttgcccttacctaaacatccaaacagtatctgtgagtcgacagactcagtaagaaaagcataatcaataacataactacaacctggattataatcaggcgcccagacacccaaccataaccctatccccgtgtcccacacggtactgagtccagaacgttcaaacgatagtactattgaccataatatcagcctatatgcagtacgctagtcatactctagtcgtaccgatgtgatacttcaaatagtgcttaagacaacatatatttatcaatatccaatataatactaaatatagtgatactgttattctcatgtaatctaacaagcttaacaaacatgtagctaaacatgtaaacatatatgcatatcattatactaatcttacctcactttaaaattcaagtgtgccgtccaacctaataggaacaattgctcgacgatttataggcccctaaatcacattaatcggaaaactgatgagtgacacgctaaataaattttaggggacttaaaattgaaactaaaggtttccctatctatggataacatggtaataccctaaatacttcaaaaatgggaaaaaactaaggttcttaaaagagtaatttgcggcataaatacctaagtttaactcccagttacaaataaatacctaagtttaatttttggcagtaataatacctaagttatatttttggaactctgtaggtactttgttgttgggcccaaaacatgaaaaacgtaaactttcataaatagcataaataatacaccctgatttcaaataattctccataaatttttaaatcacaaataatagtcttaaactcataattcagccctaattatctgctaatttatcataatataattaagcgatctttacatgtttaattaattccaacatatgctatgagttgtttcaaactactggccaacttttcaagcaacttgagtctaagatggctagatttttgaggggtacttcaacttataagaaaaagattcattgaaaaaatttgaagtttcattataagtctaaattggaagaggtatgggtttctgtgattttattcattttaatcaagaaatacttgcagaacaagcatggtgtgttggaatatgttttaccaggatctagatttactaccatgtatgttgtttaacatcttagatatgaatttccaaacaatgtaatttaaacacatataaagtttgagaaatcttacattggttgccgcggaattaaatgaaggcaagtaaattattaagcttcaaattttgagactatcactatctatttataggaatctaactaggtttatgtttgaattatttaactattaaaaaaaattgataaaataaaatggtaaaaatacacccaagtagccggccatggatgtgggccataccactttgcaattttgccatttttcaactat

SEQ ID NO: 384822 - DNA, 2497 bp, Cannabis indica
taatgagagtagtatgagtagggaaaaaaaaataaagaaaaaatgtacttgatatatgttgtccaattataagcttgacacgtggacttaaatccaggaagcctagatggtaatcagccggtagtatccttaatcctaactcccgtcaaggatctgcttaagctcctgaaaagagcctatatgaagaatatgtcccatgcaaggcaagggcgcagggagcatccatgatcagtaatctctctcagtctcgaggagtgaagctgaatgctccgcgaaggataaggccttcccagaggatgccaatacaggtcacggaagaagtcaggatgagctgtaactccattcagtgtcacaggggagctttgcccatacatgttaggctgcaaacgtgacaaccatactttttcaggtacaacgccaggacttttcccccacgttatgccgtagtatagagcatgcgcgcccagttgtacctgcccaagtgatccaacggtcattggcaagggaaattcaacaaggaagaccctgaggtgacacgtgtgaggtgattagacagtacaagccgacacccttaagtgtcatgtgatgaatcagccacctaccaaattaacggttagattcatcctagcaagaccagcccaaaacgtgaaggaaaaaatggcctataaatacccctgcattccatgagattgaggtaactcttggaagtcaaaagaaaaaacattgtattctacttataaaaactctaccaaaattcctatgaagcttcttcttctttgagaggaacgagaggaatatcgatttcgagtccatagtgtaatgacttgtaatgttcaccacacgccaacatggctaataaaatagactcgtggactaaggatagttaacatctgaaccacgtacaaatttcgtgtatattatttattattttatttctttcttaagctctaaatattcggtttccaaaaatctcgataaatattttggtgctttcattaagagctgaggaaagatcaaaacatgcacgatgtttgtcaaggtgaatctcaagttacaaaaaggaaagcctgtccaagaaaaggaaaaaagacacaacttaactacctaccaagatcgggttagaagtcgaaggcttgttggccaagggcgtcgtcaaagatgaaggcctacacccctgtccaagcaaggaaagtggagaaggtggaagcaaacagtcttgaaggcctcgtagcccccgtgcatatttggaaaaactggaatctgaccagtcaaccctttgtagcacgaaaagccagcagtgttctcgagcttgggcccccccgcggctcacaaaggcacgaccatgcagaaacgacgagatatgagaaatatgtgggtctagagggaaagctaagactagttgcaccggcagcaagtacctacgaggaactactagatataatggacttgtcaagctaagcatttcgtcactactccgaggcctcaactgtcgatgcctgtgccggtgttgatgctggtgccaggtctgttgccgtcgactacttccactgccttttcactgagctgtgaagttgatcagaaactgacattacaggcccctgcggtggtgacgattatgatttttctccgacatcatcgaagtctgctaggtctctagtcaggcttggttatggtactgttggtaggaagtgtgtagttaaggcaaatcacttctagtgaaggtatctgactgagatttttgacatcacgatgtaactatacctcatgaggttacatcgaagaaagtaactcgagacattataaaccaattgagaaatctctactggaggaacgtttacgatgttggaagttcaagttattatctcgccctgagttcttatcttgagtgttggatcggaaggtcaagcctagaaggatcccaattcccaaacaacggggtaccctgagatcaccttgaagaataagttgatcttgagctcccagagcgcgtttcttagcactcccagatttgctggtttagggcagaactatgccaaattatacgtgttccttgaagttgtggagcacgtggaatggccagttacgaggactattttttagctttgccaaacctttggttgaaagatcattgggggttcgatacgtctttaatcctatttcctagaagaaaaggactgcttaaagtttgtcacacgcccagtgatgttatcgcttgaattttagtgcaacttcagcctttggtcttttaaagcgaagtcatcgcttgaatgttagtgcaacttcagcctttcctcgcggaagccgaagtctgccacataaaattcaatatgactctcgcaggcacgtagtttttttgtgcatgaaagatcactgggggttcgatacgtcttcacccctcattcccgaaagagaaagactgcttgaagtctatcacacgcccagtgatgtttcacaccctttggtctttaaggcaagtcattgcttgaattttagtgca

SEQ ID NO: 384823 - DNA, 2291 bp, Cannabis indica
atcttgttttctgatactgctggattggatgtttgttgacaacttggaatgtaattaccatgaagactgcatatccatttcgtttttctggttgcccaatcctctttgatgttggtgtctgtctttgagttatctgttttgtatttgttagttggtttttttttttttttttcctgtttctggtttgtgtgtggatttcctttattttgttgtgtgggatttgtaaccagggtattcttccgccacaagtgaagttattcaataaattcgggaagagatcacccatagacatgtgatcctctcctcttcttattttgctatatagcagtttttgaggtctaagctaatactatgatcttcttctatatctatattcactcaaattactctgttcagtttcaacttttcatgagttaaatactaaaaattcagaacgtgtgctttgtccttgaattagtgttagatttgtatggtggtactcaccattgataagcaaagcaaagaaaagaaagaacagagagaaagaagaaagagattgagaaagatgaacaaagagagcacttgtcattaatgaatgaaggaattacaatccttatatatatatacaatctaagccaacacagagcacttctatctttatgttcaatactattattacaaacttcatgaataattggacggatcatattgcaaaattgtttgatcaacttggtacaatatatttctaactaacaaattatgttcatttccaacttgcctaatgatatgatgtctttgttccaactctctcttttactcaaagtctcttttatgttgctaaatattcttcttagcctaataatgtctttgttgtgtattttgttgtttctacaattgcttgggttggtttctataaaagggttgaaatagcagtttttacatcacatattaaaattttaatctttttttcctttttttttttactttagggcgggggcggaatttttttcaaaaacattgtgtattttttatactatgtactctgttaagttttcacttattttttagttgtttcactgttgtttttaattgttttattttgttgttttatggttatttataaaaagatagtatttttgtaacaattcttgtgtggcagtaaaattgtaaattttgctcaaatccagtatttttataaaaacccattaaaattatcaacagtacatatcaaagtgtttggaggctgccatggagctagcaaggacctcaatttgttgaatttcggtttccattgcttcgattttctactcgagttttcgtccatggcatgttttaacttcctaagagtttcaataaattcggaactgagtacaactcttttctataagtttacttattcagcaaaattcaggttgtgtaattactcttagagtagcattttccaaaattttgtgcactcacaaaagagaatagagataatttgttgatttcttgaaaaggtaacagtgcatttggagtttgacagttacacgaagagtacgtcccgataaaattgatattgtatcaatgatccatccatattgcttggttttattcttgcttctaaggcaatattttttatttgtttaatgtgtttttggtccgtataatatacatgtattttggttagaaattagccttagtccacccacatgaagagaaaccaatcaaagtatttttgcttacattaattaatcaaatcaaatgatcttttcaggtgacctacttttgtctgtgttggtgtctttatttccttatttattttttatagctaatactttaagctttattagtttgtgctgtagtgactcataaaaaatatgatagactgaagactcctaacaaaactttacttggcaacttcttggaaccatcaccaatggtggccattatttacaaggaaaaattgattaaattatctccctaattaattaggtaaatgtctttatcataatataactaatatctcatatattactaatactcctgttttgttctaaaatctgctttaccatacgctgcttctctctttttcttaagcactgaaaaccatggctgagttaatggtgggaggagctcttctctctggcttcatcaatgtcctctttgataggcttgcttcaaaagacgtccttcacttctttcatggagacaagctcaatcaaaagctgctcaaaaagttgaagactgtgctgctttcggctaatgtgctgctgaatgatgccgaggagaaacaacttggagacaacaatgtgaggaattggcttgacgag

SEQ ID NO: 384824 - DNA, 681 bp, Cannabis indica
tcacctgactcaatctggtcgaaggttgaaaccatggcttcttcggcttgtttctgaggtaacattttttgtttctccaatcaaactagatctgaaaagcacttcaaaggaggacttttaaatatatgcaaataaaaatacaagtatggcaacccaaaaaaaaggaaagaagtaaatataatagttgccaaaatatggatttcggttaccttttgtagggaaaggtttaatggtaaaaatatattgaaaaataaatagcaatgaagaaatatcggacaaatgtaagaatctccggaaatcagctgactttcctaataactccacttgagagaagagagacaaaaaagaagggaaggaagatggttgtggtgagtgagtgagtgccttgaatcgttttcaagtgggagtgtttgtccttgtgacataaattgtgggagttacaattttgcaaaaaagagaatactactaaacaaaaaggtttgaaagcttagaattccaagactgcctctggcacactgctactgtcttgatggtaataaatttcggttacatacgaaggaattgacagaaattgatagtctcaaagacgatactaggtgtaacccagcaagtaaaaaaaggtaactctgctcacttttggtggtttcaacactctaaagagagaaagtgagagagagagag

SEQ ID NO: 384825 - DNA, 940 bp, Cannabis indica
ttaataattaaatatatatatacatctatattttttgtgcatgctattcataataaagccaatatatatatatatacggtgattaattaaattaatgaatctaaacttttattgtttgatttatgtaatgtatatcatttaataagtttgttaaacgatctacaaacctattttcttaaaaaataataaaataaaaattatacatttaatttatataagtatgtggccaattaattaattaatatagtacgtttaataattattccttacatagaatctcttgtcaaggctagggacacatctatttttacgtacggtacttcttgtagtgccagctaagtgtactgacctgactgatcaattaattgtaattagagctttaattatatataattaattaggtaaaaaatgagcccacaatattggccccaaagttacgtaacgttttataattaatattatttatgtgttgcatgaatacaaaggtttttgttgttgttaagattaattaaaaccattgattgaaaaagtaattcttttattaagcaaaccaacacttgtggctcttatacattaattctcaatcgagagcaagagcaacttagctttaaattaagttattatgaaaatgactatgctttttatagaaacatatattatatatatataataatgaatgtatttatatgtatatgtgtttgtgtggatacgtattttgtatatttacgtttgtcccatttttaattggattgccatgattaggtgtctaattagagtttcaaatccactaatatatatatatggtcaattacgtatgtcctagaagtactattaactttttagaaataatgcatgattgtatgtacaggtaataagagagttgaaagttgatctaaaggccttcaaagtttcaaaggaagtttatattgtcaatagtact

SEQ ID NO: 384826 - DNA, 1369 bp, Cannabis indica
aagacactgaattggtgggacctgatgtgggttagggatgggaggagtgatcggcgccggaatattcgttttgacaggagttgaagccaaggaatcagctggccccgccatcgtcttatcctacgtcgtttcgggtctctccgccttgctttctgttttttgttacactgagtttgccgttgaaataccagtcgcaggtacgtgtacgaatttatgtttatctcatctcaatcttattttttttttaaaatattattattactttattaaaattattaaagatggggcaagtattttttttaattcttcttaggaatatatattttgggatactaaaatcttactgaaatttacacacaaaaccttcaaatataactctaaatattatcttgtgagtttacagtgtctcactgggacactataaagcaaaaatttattctatcataaacaccaattataaaatccagtaacatttatgaaagaatctgaaccgtatactactgaaaaaaaaaaggtaataatacttacaaaaataatttcttcaaccaatatatatcatttttatttatcttctttgtattcaaaaaattaatgctattgcaaacattaatcttaatatttcgaataacatgaggaattagagggagcttaagatttcaaaaaacataatatttaacactaaatttaaggtgaatttatgtctaatgacaattaaataataatatttgaactgtgttaaacaaaatgagttgtataaatcaatggaaaactttatagttgcacctttaaaatgatgatgcactctctatttattttagtattaagacaaatttgttcacactctctttattttatatacgtgtaaaataaattatttgaataatattactttttatattgtatattattttaattttttttttaattttttttttaattttataaaatattttaaataactataccatatgtactgtcataaaataattaaattaaataactataaacacatctctcacaaattaaatttagttttagaagtaaatactttgtttaattacacaaatgttagattgaaaatatatgacggaaaaatttaataatagaaaaattaaactaaataatatcaacataactataaacatatctctcaaattaaatttagttttagaagtaaatactttgtttaattacacaaattttaaattaaaaatacatgacggaaaaatttaataatacaagtttaattagtattttgtttataaaaaacactaaataagtcacatttatgtgatatttcagagtttattacaaactaatttatatttatatttgtttttatttaattttgttttttgtttttttcttt

SEQ ID NO: 384827 - DNA, 1890 bp, Cannabis indica
tctgatcaaaagtcatcgataatatgtttataaagaggaaattacactctataccctttttatattgtcctcttttatttttaccatcttttttaaagtctatcattttttacttttttttttaaacattgtaccaattttgcccctgtcacttcaagatactctccatgtgactctcttatgtcagggtattttgggtacaatacatataaaaagaggtatgtttcaaataaatataaaattagaggtaaatttgattaattgattaataaaagtggtatttttcaacttaccccatgtttaaattctattctatttttttttaatcttttcaagaaagaatcatttgcccaatgagattataaaattgtttattttacctaaattactatatagtataaataaacataattttgatactttacttccacatgtgataatttcagattttttgtggacgatacaccaattagggtgttcaagaacaacacaaaaaaaggagtaaattacccaacaaagcccatgaaaatccaagtgagtttatggaatggagaagattgggccacagatggaggcaagaccaagactaattgggcctatgccccattcaaagcccattttcaggggctccacgtagattgagatgttcaagtgttaattcagattgtaattctgaaaataagtatttttggaacacgaaaaaatatcagagtttggattcgaatcaaattagagcttatgaaaaagtgagaaagaattatatgaactatgattattgctctgataggtctagatatcccactcctccacctgagtgccttgataaaccatagtttaatctctttgtttattcaataactatattttacaacatatgaaaagaaaatccaatttaaatattagtggaaataaacttacttatcctaatatttgtattgatggattatcttcttttgcttattttattatcaagatatcttatgaggaaagttgaaaataatcataaaatttatacaaggtcattatttgtaattaacaatgtgacatattattatatgatgactaaagtagatcattatttgaattaaccctattaacatctcaatctagtaagtaataaatccttcaaactataaaagaatgagcatatttaaaaagtgattaattttgttaaattttcgtcaattctaacagttttttttttttttacttctaacaattctaacagtaatttatttgtaaataatgatatatacttaatactttttaacaatttgattaaaaatgtaatttgagagcaatttttatatattgaaagtgtttatctaacggcaattcttggtttaacatatttttttttcttttcagttaactttaactattcacgttaatttagacgttaagttggggaaattatataataataggtattaataaaaatactaataacaaaatataatttacactaaaataggtaaatctaaccgtaggattttttaacaatcccttcttcaaaatcctaacaaataacaatccatacgattttttctctagaataaacgaatccatacgattttctctgaagattacttgttaatatcgtgcttaccgaagattgggtttcgactccaccaaatccatcttctttttcggaccacgacaagggcttcgagaccgccaacaatggtgagtttggaggtagcgatgatgcgaccaccagggccgtctcaaatattttagaggccatgttctaaaattaaaaaagtaggccctaacaaaaaaaaatatataatttgtaaaataatattttaaaatattattatattacaaaaatatattttacataattaaacacctaaaaactcaaccaattttactaaaatttgtata

SEQ ID NO: 384828 - DNA, 1539 bp, Cannabis indica
cttttgattccagtttgtgtttttgcctctagcaaaggagggatcaccatggcttgttgggttttgtgctgaagtgttttgtcctctaccagtatttaggccaccacgattgttctggttttgcacattgcctcctggatatcctaaaccaccatattgattaggaccacttcgaccaccaccataattttgatgctgacaaccaaatgaattgttgcgcgtgtaaggattatacctaggatatctggcatgagagagataagcttcccctttgctgatgtcaaggttcttggcattcatttcaattcttgcagactgagccatgagcaaggcctcaatctcaataatagagtaggcatctttccttgtggtaatagatgtgacaaacacatcgaactctggtggaagatcattgaaaatggcctcaatgagatcttaagcattctatttatgcccgattatagctaaaaaatcaacaatgttcttgattttaagcaaatattcattgagagagccaagcatcttggtgttgcgaagctgtgttttgtacaaactgatattagctacattaagagctgtatagtattcatgcagggcttcccattgtgtcataaccaatcattcgattggtagttttctcagacataaaagaaagaagccaagaaacaagcaggttatcttgttgttcccggtcctcgaagacatggttgacattggtagcacattcatcatcatgtgttagaaatttaagaggaatttgactagaatcaagaaatttagacagacgactaccttcaatggatgcaagaacttgatgttgccatggcaaaaagttgtgttcatcaagctttattgacaacaagtgtgtgaaggtgacatggtaggactttggcagaagagcttggggattgtggagttgagcagtgttcaatcttgttgctgctccattggaagaatctataaactccatgaacaatgcaaagttctgataccatgtaagattcgaatgaaagaaagaaagagaactggattgaaagagagaaagagctgttgtgtattgattgtcagttaggaattacaagaggttatatatacaagtggtagccaacaactaactactcctaaccaacaacctaactgtcaagacaaacagtgctcaacagaattaacaaacttaaccaactcagctctcttaacaatattattatttaaaaattatttttaaaattcattttaaaattaaataaaataataaaaagcaaaaataaaatatttttttaaaaattaaatatattataaatttttgagataatttgtatattttttaaataataatattaagtataccagtataaatttaacacatgtacaaaagtacatattaatagtctatattgcccgtgaaaaatgaatgacactttaaatttactaccaattcagtaatttggagattttaccatcaaaatttgagcttaaaaaaaggtatatacaattttagaccatgtgttttgtaaaagttactaattggaccctctattt

SEQ ID NO: 384829 - DNA, 2050 bp, Cannabis indica
ctctctctctctctctctacaacaatagctcacagaagaaaaatggcttcaggtatgaaattccagctcttatttgaaatttcatagggtataagaatagattaggtagttagagtgtttgttgccgatcatctttcttcttgatgtaatctgttattcgagtaaaaaattttaactaatttctattttgagtctttgtatttatagtcctttttatttagtccgaagggcatgtattttctattttgtatataacttaatttcagatttatttaacactctccttacgtaagtcggattatccagttaaacttgtcttatcttatgtaatatttacttataaatcaatgctgtttcaaaatatataaatatatataatgttaatattttgaaaagaaattatttgaaaataatctttggatagatccaaaggatactttcttgaaattattatatatttggactttcaatatatatatttcttccattagtgtcacttcacaacaacaacaacaacaataaaaaagtcaatcaaatacacacatacatacatgtatatagagagaaatgttaatgtctaatacatttttacgtgctaatattgttattagttcaatcaaatattcggtcctaaataacttaatacaataatttttaaagaatactgtaagtctattgtaagacgatacatctagaacgtattcaacactattagtacctactaacaatactcatatatatatatatatataatattttagtattattatattctgttatatattatatatatgtataggtgcagtaattattaataagaagctgagtgtagcccaactcattggtacttgtggccaatacaaatttagagcacgagcaaaatgggctcatattattattattatttttcatttttgataagtgtacaaggttataatgctccattaatttgtgctcagaatggccaacattacacttagattatcttttgtcttatgttattatattatttctttcaatcaactacatccaaaaattattaataatataactaatggatcgaaacatagttaattagtttatataatattgaatgtaaaaacctatatagcatgattatttattggtataatttttacacaaaaacatgttggataagaagtaacaatattataaaaattgtttattaggcatctgtagtatttaacactttttaggtagcacttcaagattaattagtgatatttcctaaaaattattttttaaagttatatgagactcaaaacttaactacattaataacagtatgatactgaaaaaaatactaaacaccaattatatattttagtaattctaaatatcatacatatatatgtgtatgtacgtattagtatacttttccaatcaactttccactcaaatcactctttgcttcgtaatgtgcatgcttagtagaaaatcatttatatgtatacatatataaacatgtgtagttatatgactaatcaaaccttaaattttccatggctttttattttatgtcattatacttcccatgattgtttaatatatgatcacctaaatattatgatccacatcatcattacaattagtggtatatcactatattttaataattggttgattataagaattaagaagttaaatatattaattgttagtgtctttcaattgagtcggcaatcccctcttctactcgtacgagagaatctatataaatatatatatagtagaacctctattcaaaaatacacttgagaccaagcaaattatattctaattgagaaattataactaaatagagttacactagaaaaaaaattaaaataccaaaaaatatcaatgtaataataataacaataaataattattaatactatattataatagaattattttagagtaaatataatgttaatacatatattacaatttggaataaaattattaaatttatgtaaataaatttacaaaacatatgtatatattttattaagatgtaattattcttatacagagatataatttg

SEQ ID NO: 384830 - DNA, 1054 bp, Cannabis indica
tcttggctcaacaccatgcctctcgggactactctaccctaggagaagcctagcaaacattaagtagggagaaactgaaaaagctacatccaatgtttcaatgttgaagcggccaaagttgggaggttaaccaaggatgagcacaagatggtcatagccgcatgagtccatccaaaaagtaagttgtggaataacatgctgaagagagagttagaggacttggaagaattttacgaaagagccaagaaatacatttgagttgagggcggacatgagaatttaacagaaggaaaaagtggctaagacagattaacgaacttccacttatatgatgagccttaaaagaaaagagaatttgatggtggaaggaatgatcgaaatacgagggttagaagggaagaagatctgtggcctagagaattcaattactacattagacttacatgttcaagggagcacatcttcttgacaaatgagcatcgagggcctttcaaaaagctaactcctatgagaaaggatagatcgaagagggatccaaataagttttgtaagttccatagagatattggtcacacaaccgaagaatgttctcatcttaaaatggaaatcgagaacctgatgcaaagtggatttcaaagaagatactgccaagaggattgacgtctcgaagaatggagagaggaggataagaggaaaaaaactccaaacagagctccaagggtaataagaggcataaggacaatttttaggggaccaaaagtgggagttgatacccataatggaagggataggtatgcttgggaggcaagacaacccccaatggtcttgagcttggagcgaaggccaccaaagaacttcaaagggtaaaatgactccataacattcattgaggaagatgcccaaggatttgttggaattattttaccaggatcttagatctaatcacaagtatgttgatttaacaacctaaatatgaacttctaaaacgatagaaaattaaacacataaaagtatgagaaatcttacattgagtgcagcggaatatatgtctcct

SEQ ID NO: 384831 - DNA, 1335 bp, Cannabis indica
tacatgaagcaaacaaaacaacttgacaaagcatgcatccaaaaaggtcttacaatcagatgttcagctaaagacacctactcgtgctcaaaatagaaggacgaaaaaagaaaaagcttcaagtatagatctccaaaaaatagaactccttggaagttcatttagaaaaagaaacatcttgaaagatcctcaaatcgatattttttgtgtggaaggaagggaaactttgcaaagcaatgccctaaagggaagactgccaagatgataacacacatagaagatggcaatgggatatctctctctcaaacaacgacgttgactcaatttttcaatcaaagacaaaatatccccacacactttatgtgcattacaaccggtgtccaatttagacaatgaaagctatgccaaagtcttcaatatggatacagtcagcactagataacccatcccaatagcaaaaatgcatgtaatcccaacaaaatactcaaggccaatcaaagtagttgcatattttgatattatgaacccgacatcctgctgctagaactatggaagaaaagaaataatatttccaagtttcaaataactaagtactctacaccgaattaatcactaagccaataaaattacaattcttcctaagatgttttgttgtccacagagtcattgggttaaggctcccatgaaaatacctcatagtgggttttgagctttgcacaaaaaagaacaggctatgaataatccattaaagagtggcatacaaatagttcttcactcacgggagaaaattccaaattactttcacaaggcacaagatgggtttttcacggtaaaaaaagctactttaaaagtcatgtgcaaattatcattccgaattctcaaagaagtgtggacacccattatggaagaatgaagaattcttcatctcccttccatttaaacaaaatgaagatattaatcctactaaagctagccatctcgaaatgaatcctgaacatcaacaaatggcaagcaaataatgtcaccaaatcaaatcacaagggctaaatcgaagacactgaatcaccataggcatgtcacacattttatattaacaacaggacaaaacaagctagaggaaaataacagttagtgattaattatcaaccacttaactatttcttgacggacgataaatttcttctaccaaatagaattcacttttctctagcatctcaaaagaaaaaatatttctcaaattttgacctaaaagctgactttttgaaattgggcatcaaagaagaagacaagccaaagacaacgttttgcatcctgaatcaccatttctaatggaca

SEQ ID NO: 384832 - DNA, 1290 bp, Cannabis indica
ctttggaaaaaaatgtgaagaaaaccagattgggaagttgtgttaggtcttgcactgcggcggttaaaggttgaagttcaaatgaatggagggagagttagcaatagtcttgctcaagcgacccatttggttatcttctttgtcccaggctgttccctagacgttgaagatttattgaaaaggtaatttgtcatttgatttcatactttattgtgattcagtaaattcaaggtcacgtataatttattcagtagatgcatgaaagaacaatatgtatatgttggtgagtaaaaatctcctaacaacaaatgtgattacagactacaatttctcttcgctataataattcttgtcgataatactccatggatttctgcaatcaagtttgtgttggggtcttgggaaggaggttctctagtggttaggtgaacggcgagccttgagtccaacaaatcttcgactagctagcaacctatcctttccttgtgatcattctatgggctatttatagggaaaggtggcaaactcggggactttagagtgtgttcctattggaccatgtgtcaccgctttcctattttattctttgtattttactgagcttcccttctaggtagctttcctttctgacccttactcctgcctcggctgatttaagacaacaaatctccttttctttaatgaaacaaagtgtcttaagtctttaggtgccaaggagggctttcttgcttatatttaattaagtaacgaatacagttgaataaatatcatattaaattaagaaggggaaattcccctaacgatttcccctcagtttaaaagctttcgggtttgaatgctttaaaactaattacttattcataaccgtcttatttttagatccactcattgcttttacggggaagataagattgcgtttctcatgtaatagcgtcttaaaaatgtcccatcttcctttccttgtctcactttttgaaattttatctttttccccatttcatcttagaaacactcaatctataatgcttcgtcttggtgctcattttaagtagcacaaaatttgctctaacgctatccaatgataaattgttagagatggcataaattgattaatactgagaatgcaaattctggtcacagtaagataactcaattttccaaccaacctgcaatatttctcaaggtattcaaatggttctccatgttggaaaatcaactttcctaaattattattattattattcagtatagttgtataataataattctgtttttattgtaccatatttt

SEQ ID NO: 384833 - DNA, 1182 bp, Cannabis indica
atgaactcgtcggggtgggggttaaaccaaactacattgtagcctagtttaatattgttttaaattctatatttgtaaaaattatcaatgttatctattttgttaaatgatcatagaataaattttatattttgaaaatagtacaaataaattttaaattcaatttttgataattttgtttttaaatataactaatttgaaaataatttataccacgaacaaatggaagaaacgtcaataattttgtcataacatttttatattgagttattattcaattttatttttttaaaaaaaattaaatttagagtcctatttagtattattattttagaaaatacaaggttaattttattattttggtatttttttttttataaaacgcaagtctaaaatagtattaatctttgtacaattagtataggacaaatcgaatttagtgagctaattaagcatggcttactctactaaaaaaactaaagaaacaatttggtgcacacaaaaataatataaaacccaaatagaatgtgatagtgtacactcattaagttataatgagaattaatgtagttacatttaattaatcttaagatttaataaaagaatagtatttcttatttctttctttcaattatatcaatatccgatttatatgatttttactcatgaaaaacctttgttgttgcagcactcatctaagtgaaaaataaattttatactatactatttatttgtatttgttctaactaatgttatattaaacaccattatacttaatttttaattattgtattgtaattgagcgaaatgtaattgagtgacatatttattataattactatataattcatgagagattttttataagatcaaaaaaacaaaaaaaaaaaaaaaaagagtgaaaaaaattctatttctaaaataataataataaaaaaaaattaaaactcaacaacaagtttccatgttataatatttatgagtagagaaggattgaataaaataaataaataaataaatggacccatgaatagttgtaaaagcaatgaatatatatctgccatattattttattttatggattattaggttattggtcccctataggtattgatattgagaaccaaaaccccccaaaaaactaaatataaataaaaaataaaaagaaaaataaaatgaaaa

SEQ ID NO: 384834 - DNA, 1595 bp, Cannabis indica
ctctctctctctctctcatattgttgtctttttgaaatgataagtattgatgatatatataagcttaggatcaagatcttaaagttggtggctgcaagaattaaggttgttaagttagttaggcaataactaacttaaccaactctcctttgagcgaggtctccacgtcagcctaagtaagagtacatccaggagcgagtatgaaggctttcggagtcacggtccaaggcactcactgaaggactttcacggataaaaaagagccagttagagtcgcctatccaagactaccttccaggaggaacaactagccatccgaaaatcctttttggaggaggactagctttccttaagacccttttcgaaaggacaagaaagccttccaagacctgcttccacaagtcaacaactttttaggaaagataataactttttggagacattttcatttggaggaaataccacaattattattattattagggtaaatattgtccaaagtttggatttataaacgatataaatttaatgattgtcttttagcggtataaatattcaatgttagtataaaattgtaatcttcatctagtttcttcaatattttgtgctttatctacggctcattagaatttttgtgccctaaatttttaaatgtaccaaattatatttttctgaccgttaaaaattctccatgaactattgagattgttaaatttaaggagttttgtccaattttatttaattttactaattcagtgattgtttatgtactaaatcatgctcccagactttgatatctaccaaatccaatctcaatagttcaaggaaaatttttaacggccttaaaagttcagggggcatgatttggtacatattaaaatttgggggataaaaatcctaattagccttatctaaatatagatttgatagtttgtatttttgaccatgcttatttagtatctgtattttgaaattatacatatgtggtactttgaaattaaatttaattgataaaattttataaatatgatcaaattgctattaattttatgagttcttaattcaaattttaatatttaatgatatataactaagaattattaaattaaattgataaaattatattgattaaatttgatttcaaaattttaaatatgtacaattttaaaataaaaaaaaaagattattgaataaacatatttttgagtatattcccttattattactatgtgctctacccacaatgtttcttgtaagtcccatattaattccttctactataccatatctcttgcaattttttcacttgtttgtaaaatggggtaggtttttagtgtgtaataggaatagcaacgagtaagatatagataatgggtatgtatataagaaagttacatttcacaattcaaataaaataggttaattagtaatttttttcctgaactttcacatgtagtaaatcgtgccccctgaatttttttggccgttaaaaattctccccgaattattgagattgttaaatttaaggacttttctctaatttcattcaattttactgtttcatgtactaaaccatgctccccagactttgatat

SEQ ID NO: 384835 - DNA, 1161 bp, Cannabis indica
agagagagagagagtcaacaagtaaccaagcacacaaagatatgatgagatataataataagtaataacacacatatatatacatatacacatatacaaaaggtttgaagtttgaattttcaaagttggtgagtctctcaaccaaagagtaaattcccattaactgaatatggcgggtagtaaactaacttcaaggaaggtgctttaaagaaattaatgaaagttttttttgtggaaaaagaacacttttttaattttgttttgcaaaaatatcactaaaaaacatgaaagtgtggggttttgcttttttgtttcttttaactcgttgggtcatattcaaaaacaagtgactcggttggtagtactagtctttaattactctttaggctgagtcattgataatgacttgtgctacttttttatgtttttcttttgagtaagtagtttgttaattttattgagaaagtaataattgttgagtctttttctaaggatatgtgatatttttaaaaattactaaaaaaaaataagagaaatgttaaaagatattggtgatatctagcagtatcttatgtgttaatattgatattggtgtgctattaactactacttattattacaacattatttagtgacactacttaatcagtacgtaggtaagaccatactacctatttgatattttataaattaatatattaactactacccataaatatatatatatatatttattatttggtgtgataggagagatattttttatttagataatgttttcaagcaacctcctaccatagtttcttatacattcaatgcagtgtggtgaagtttgaaaattttactcaaattatatgtgcaatgcaaaagttactaaaattaaattcggttagaagaattttttagatttcgaagctaaaatttactaattatttaaatacaaataaaaatatttttggagtttgagaagccaaaaaaacaatttttaaaagcttaggcaactagagtctaagtaataaaaattaataaaaggcatacttgtgatgttgactgcttaatatcattataaagtataatattactattagagcattgttattgggcaccagtggtgcctagcaccttctaaatgtgtcgacttgcaattagctagcgatactc

SEQ ID NO: 384836 - DNA, 1987 bp, Cannabis indica
aattttaaaaaaataatataaaagcggctagcattacatctcgtgagagcgagtcttgactaacaaaaatgtgatccatcaacggtgacggggcaaatgcattaacaaataattaaagtgggtcataaaatataagatattaacatttttttcgtatgataattacattttaagcaaaattcaggtgcggcgtagcctatactcctagtccctgtgtgccttgtctatgactattatcatacgtaattgattaattgtcactataaattaaagaagagtaaaaaaaattatacaacaacaataattataagcgtaacctaatggtagattggtagttaataatctgagtcctaaatttatttccacctcattgactaattgactagtactacactacgactacaagttattattaatattttcaatattctactagttttgctgttaaataggatcatttttatagaattaaaaatatcccactcttccaaggcaccaacccataattaaaatattaattaagggacataaatagttaggtccacaggaaaatgcgtgagaaatgaggcaagttttaaagtttcaaacctctaatccaatggatgtcagattcgggtatctcgtcaattatctggttagccttttagtatcattttattattattattactattattacattgattttaaataaattaatctttttaacttcgaatgaaacaaactcatactccaattccatttttgagtttgactagtggagtggtgactcccattttctctttttccttttcatggacctggtctattaaaataagttgtaatgaatggagttttgatagaacgctatatggtccaagaatgtaattaagcgacaaatgtgttctaccttatctaccaaactaagaaaaaaaacacataaatatcaaattttatcatcataaactagtaccactataagagtagtatctttttaatatatattcataacataatttaatatttatatttatttttgtatggtaattcgttttttttttattattattttttggattctattttttttttttacaatagcttaaaagtaatatatatgaataattgtttatgtcatttcttttctttcttaagcataacaatatatcagttctcacatgaagacgatttgttattcaacgtgttctattaaaaaggaatcatttgtttttataattctttttctaagtacaagtatttcaagagaaaatgatcttaattataacactattttatatatatatataaagagtattattgttcaatactaatagtcgatgtgggcaaataattagtaatttttttacaattatttgttgaattaaaatatgttaaattaatgaatgaataaagaaacaggaagacaaccctgtcattatgaatgattccattaattaatatttgaaacttatacctaattacatatgtatattggtataataacaaatgaaatgataaattaattgattctttcttgctttttatagtagagcaaaatactcgtttactttaagaagagactaagaaaaacgtctaaaggaaaattagttattgtaatattacacaaaataagtaaaagaaagaaaaataaaatgaaaagacaatgatcactatcgtagtagtaacaaataacaatgataaccatgaaaatccactaaagtgtaaaaaagaatataattccttctaatgttaattattattgatatttaataaaccgccgaacagtatcaaatgaggttaatcattattattaagcatcaatgtaggaaaataaaagaaagaaaaggttttgaagattttgacaaaaggacacgggaatcagggttaaccgaggtgtgaaaggacacgtgtacggtgatgggcgttgcaataacacagatatgggaaactcaaagctattgttggaggaatatgtgctactactactactatactctctctctctttt

SEQ ID NO: 384837 - DNA, 4638 bp, Cannabis indica
aaaataaaaaaatcccaaaaatattctatgtgagcataagaaatttttaagtaaaacaattctctcctcataattgtttatattattaataataattcttttaaaatttattatatttttttattaaaaaaaatatactgtgtgagcataaatattaaatacttttcatttagctatcattccccccgcccccccttgtttcaataaataaactattttagaataaattgtgaaaaaaaactttaacagtctaactttgcgagcaattaatcttcaaaatttaaattttagcggcaaaactctcaaaatcacaatattgtaagcattttatagtaaaatcacaatactgtgtgtgttgtgtgttgtgtgtgtgtgtgtgtaaggactctcatgcgagcccccatgcaccatgggtacgctaagcacccgaccaagggtacgctgcagccaccacctctgcgacctggaccacctgacaacagacaggagtacgaggcacaagacctgcacatgtagtttgtagcctaaaagcgatagattatctctttgagaccatcatgtaacttaggccattaaagcctgtaaatactctattcacaagtgtgagagggggttagaaaattaattgtgtaactcacatactgaatgtaataaaaaaaaatattatcttacgtacacaagaaatctcttagccacttaaacttgtattttacttcatcttcatcttattttcgagttttgctttagattttgattttacgaccacagagttggttgacgagttcttatcatcaacaatattcaagtcataaaattatttgataaactgtggatatttttgataatataattatgttagtgaataagtaattatatgtctatgtatttacctatcgtgagtctaagcatgtcaattttgttaatcataaaatagtgagaattgtgacaaatttattgttattaatttaatctcatacaaggtcatttttcatttgattatcatcctataattttgttatatatatgcctttggtgattttgagaatttttatgtgaatttcattgttattattattacaaattttttcggggcatatattatggaaaatgtgtaaaaaaatattgatcatgatttgcgcatttattataaaaaagttattgtcaatatttaattgatattttcggtaatagaatttgctaaaaattcaaaaatacacaattggccttattagataattatgagattaaaattattcattgaatgtgttatacttacctgttctaagttattacatgtcaattatcaaaaattgtgattcatgttaatatttttctcccgtatcaatcacaattaatactaaaatctatacatgcaatttagtcatcctatcgatgattttattgttagttaggatgcttagatggtgaaggaaacttattagttgtcatgaaccactgaatcttttctaccctattggtagtagatcaactaaattttggttatgacatttgaagtagttgtccttacctacgtaagagtcctatattttatttgaacgactttagcatgacataatagtttatgttgatagattattgagaaagctaagaaaatgagcgaattgcataatctttattttcacatagtggctctgctctaatatattttcttttagctttaagcgattctaaaacctctaacgcttagttattggatgggactataatatgttttctcatatcgatccctcattagaaaattagattaggtctcgaaattgataaatcttgaaatcacatttgaatataaaatatgccaagttactgcatgctcagtgagagttttgcgatgggtgtcaggtatatatctgtccatcaatccttatatgataaattttatgaagatgatttgcttaggaacttcccagggtatttgaagtaaaattcttatgtttgttccataatgatgagttcaggagactagtgtgttttattttgtgccttgaaatagtttcagtggaactattgaaatattaccattagtcaatactatgtgagagattaatgggagcaatgatacatttattttattacttgatataatacatttctcagttattatgataatgatctattctggagacgtgtaaattgttatttgataatctctgtcagatgaagaatccttgataaaccttatatggtctaaataattagatttttcatgatgaggttaatggtagactgagttctctcatagtttgttttgactaactattgttgtgattaatgttttgagaaactttaaaaagtctaaagtttgatgtattgtgacctcaagtccatgtgtatagatgataacaagaaatcatttttgaaattttcccatatatatgcatattgaatgaagcctataatttactcaagtatatacattcctatcatagtatttgttgcaaacatactagattggtacttgagttgtcatccttatggtacgaaggatgtgttagcaatcgacaaactaacatcatgacatatagtagttggttttagtgatatcaattggattggctgcatggatgataaaatctacttataagcattcatgattctaggaggagttattttataattaagtgtcaaatcaaaatgaacacctacaacttcctctctcgtacatgtaatataatggtaagaggagttatactgtagttaggtgttgtttagacacttagagcttcctcatttgtaaacgtatagtgtggtgtgttacaaggacattaattgcagattacaattgtaatattcatttcaattttaagagtagactctattgtgaacttactgaacttatatgataaatatgatgttccatgtgtagtgagaaagttgtggggtcttctattagtatcataacacgcacttacagacaacatgtcaatgactacactgacataatttacctgaatgtgtctactaagaaatcatttcttgtttggattgctggaagtcaaatgtgtatttggtcagtgggagtcatattatggataactctttgatgttgtttgtgtacatttgttgatgtaagccagtggcttagtctcggtgctatgttcaagtggatcccgatcaatatttatcattatgatttatgaatctcatatgtctcattatgtattatatttgtgtcttatcgatacaatatggtgcatagttaatcttatagacattagtgtttcttgagatttatgtgtgttgacacaattgcttagtgagtacacattgtgtaattatgtaggttagaatattttatatggacttgcctaattaagcgttgctcacagtgtcaatattagcacatgtggatgactatatgtatagtataatgccgattatgcaattaggattataataggattgtcggttttattaaatgcatctgaagcacatggtagcactctaaccactataggttgacatactcctcttgtattacgagcccaatatatttgtccacgtaccttttaaggtattactatttagacataaaatgagaaattcaagtgtgttaagtaatagaatgattatgtggtaaggttttagttaagaaatgctcttcataaactctcatacactcatacttcgatatttagatgggttcatggaaatttaaagtaactcacaataaaacaatgctcaatattaaaatatgtttttgtattatttaatattctaaataaaatgtgatttgataaatgcatctaacgcttgggacatcaaaatccaataaagaggcagtaaaataagggagcagataaaagaaaagtagacacaacaccacaaacacagccatagaaaagtgaagctcaagaatcacaaacatccccacctatgtttgatattggtccttcgtttgttttatcattattttatttaagattttatggcaaaaagtttctaatccataaataaataaaataaatacaagaaaacaaatgtaaaagcttgcatgttcttggtagctgattggctaagagatgggtccaatgctctcatgcctgcacatgtagtcaagtttgtcactttgtgtttgcatttaaatactttgaaataggtcatttttttgacttgaagcggaatgaaatgaattaacttgctatgaaggagaatcatcatcgtagccaaacttatctataggatatgaaatatcaatctcctataagctatatttataataataataataataataataataataataataataataataataataataataataataatacgtggggagtagatagagaagagtagcaatggcactgccccctgtcaagttctcatacctcttcaaatgtccaatacaatacacaatactgataacttctaaacaagactaattaagaaagagtcaaaaaaaaaagaaggaaatattgctatagcaatgtaatgaaacatgtattaggttttgacacataaagtagttttgtaataatttacggtataaatacatgcattaataatatttaatttatatttttagaatttctataagtatttgaattttgtattaagtatattactacgtgttaattttttattggttcaagttattaaatttttatt

SEQ ID NO: 384838 - DNA, 3764 bp, Cannabis indica
tttttttattttgccccttttagcttaagatttggtttaaatttagattaagagactaaattttcagggaatattgtttctaggctgctgttttgggtatatgtagagaataattagttcgttaatggataaattattctctgaaatattcggaatttatttattttttcagatgatgtgtgtgtaatttgtcgtttcttagctatgtttaaagcactcgtgtatgtgttcatatatacatatatgtatatgtataattataaatataaatatatattttaccgtacctactttttgaaccttttatagaagatgtgaaaataaaatatcaatacagatgatagatttttactttgttttctagacgataatggttctctcgtaagtaatatatacctttgcaattttgattttatatacattgcagatagagtctttatcagttacttttcatgggcatgatctcattgtggattctgaattggagctcaattatggcaggtaagcccatacattttaatttcactcatggtctgtcatgattttcttgctggattattaacttatatagtgctgatgttttttttaccgtttttcaaattgtctcagacgttatggtttgcttggattaaatgggtgcggtaagtctactcttctcaatgcaattgggcacagagagcttcccatacctgaccacatggatatatatcacctgtctcgagaaattgaagcttctgacatgtcttcgcttgaggctgtcataagctgtgatgaggagaagataagattggagaaagaagttgagctcttgtcagcgcaggtgtgttcactgttgcaatggcttagtgtagtaaagcttcttgcatgagtgaatgtttgtggttgcttatgacttttttctcttttttaaaggatgatggaggcggggaacagcttgaaagaatttatgaacgtctggaggccatggatgcagctacagcagagaaacgtgctgctgagatattgtacggtcttggatttgacaaagagatgcaggcaaagaaaaccagagatttctctggtggctggaggatgaggatagcattggccagggcactattcattaacccaaccattttgttgctcgatgagccaaccaatcatcttggtaagtaatacctgctgcgccattttgataatgtaattgttattaagctagttttgctgggcacaaccctaagataatacccaaaagaagaataacatgtacacttccatgtacttacatattttgatttgttacagacttggaagcctgtgtgtggttggaggagaccttgaagaaatttgagcgcattctggttgtaatatcacattctcaggattttctgaatggagtgtgcacaaacatcatccacatgcaaagcaagaaactgaagatttacagtggaaattatgatcagtatgttcagacacgttctgaactggaggagaatcaaatgaaacagtacaagtgggagcaggaacagattgctggaatgaaggagtatattgcacggtttgggcatggatctgcaaaactagctcgccaagcacaaagtaaggagaaaacccttgcgaaaatggagcgtggtggacttactgagaaggttgccagagacaaggttttggtcttccgtttgttgatgttggaagcttcctccaccagtgcttcagtttgttgaagtaacatttggttacacacctgataacctaatttacaagaacattgattttggagttgatctggactcacgaattgccttggttggacccaatggagctgggaagagtacgcttctgaagctgatgacgggggaattatttcctctagatggcatggtccgacgacacaatcaccttagaattgctcagttccatcagcacttgactgagaagcttgacatggagatgtcggccttgcagtatatgatcaaagagtatcctggaaatgaggaggaaaagatgaggggttcaattggaaagtttggcctaacaggtaaggctcaggttatggctatgaagaatctgtcagatggccaacggagccgtgttatctttgcttggttggcttttaggcaaccccatatgcttctccttgatgagccaactaaccatttggatatcgagacaatcgattccctagctgaggcattgaacgagtgggatggtggtttggttcttgttagtcacgatttcaggctcatcaaccaggttgcccaggagatttgggtttgtgaaaatcaagctgtgaccagatgggagggtggtattatggactttaaggcgcatttgaagaagaaagctggtttatctgactgagactacatataacagttcttcccgtctgtaaagattggcttcattctgtgtgttgatgatatgacttcttggcattattgcctttcagctatgggttaattggaaagccaatagagtataacgagttatgatcagcttggttattgtttcaagccgacatgctcggttagtagttggtattttttattaaattgtctttagttttttgccccctattttaaattttgtgttgctatagtgagtcgtgctttcacacgaactcgagctttttgccaaacgacataatgctgtattgagatcatacttattattagctttctattaaagacttgaagaagttccataataattatgttaaaattaattgattccagttgtagtttggcctacgcagtactatgttcttataaacgagtaatttctcaaatgaaaaaaaaacggaaaactttttctccactctgcgactgtgggtaccctgcatctcttaccgtcgattgatatttgatactgtatgggaaatttgaatttccatacttacaaaaccccattatttatatgacaattttactaatttttcaaaactaaccctcccatttgaattcatactctcagccgactctctctctctcaactcaccaacacccaatgccacccatcaaccccaaacggtcactcacgaaacgcttacccacgctcaaccccaaccccaaacggtcaccgacgctcaacccacggaactcgaagaaaaccccaaccccaaccaccctcaccgacgatcaaccgacgctcaacccacagaaaatgtcgaaggtattagtttttctttttgttttttttagaatgggtataatgatttattttgtttgattgtttgtgaaatattattggttagatttaagatttttgttgtgaaaatgggattcggatccgtgaaaatcggattcccactgtgaaaatggtgaaaatggccattcggatctggggaagaagctcggtccgatgggtgcaggtcggtccgatggtccgattatgggtccgatggtcccttttgctcgggtctgatggtccgattacaggggtctgatgggtccctttggcttggtccgatgtgtgttctgtatgggcgattgtgtgatggtccgatgggtccgatgggtaccctatcgggccaatcggacccatcgaacccttaactttttttttttttttaaatattaatgatttagtaattgttttatgtattattttatttgtattgatttattaagtattgtttaattaattattgtcttattattaataattaattattgtatttttttattattaattaattattgtattattttttattgttttattaattattgtttttttattaattattaattaatgttttaatattaattattaatttttgtatt

SEQ ID NO: 384839 - DNA, 1097 bp, Cannabis indica
gacttggcacgtaacatctgtctagtatacatatatatatttacaccatatattaactttttcttttaaatttacatttatactttgacatgagaataacactttgttaacaaacttccctgaaaaaaatttaatagagaagcattagtaaaaagtgcttaataaaattaatttagagatttagtgagaatgcttactcaaaaagtttgatgacaaagagaataagctaagaagattggatcttggctagcttctacaacccacttgtctgcattgagttgggagtaagtatcagttgtttgctccaacagatcagctacaaatggagccaagtcactgccaaccctgggtcgaagcctctctaaagccactgggcggtcgacaactagaagactagacatggtgtttgagcctttatctgacaactcctctttacatcgagaagcaagcacgttagccctctgtcagattttagcagtttctgcgttgaaccgcttccgaaagatctgagcagtttcctcgagttggatgcaatccacttccgtctgctcgatcggccatactgggaaggacagactggttggaggaagagttgtggggaaagccatccccttagatgacggcggagcattggactcgaagttagacctagagtcccaagacttaggatcaatgatttctttattgttctgggaactcctcctattccttccaatgttacctagctctacctttttctttttagcttccctcatcttggtatcattccttatggcctcctccctttcagccttctgatgctgattcaaatcttggacgacctctaccttggcttttttcccttccctataaatattggaaacatgatttttttggcgaagaccattccttcaccctcttcatcatcatcttcaacgatggggataaattatgtccccaaaagtggaacctgctataatggcaccacctaaagagcgagagatgcagaggcttcttggacactaacttctaaaacagtctttgacacctttgctgtgggagatgtttctttggtccgtagctaggaagatatgttgggaattattttaccaggatct

SEQ ID NO: 384840 - DNA, 1153 bp, Cannabis indica
ttcaactttttattggatatttttccaaaggctaatgacttttattcacatatacgtcacttttggctgcttgtttatataggtagtaccaattaataaatttaaactatcttcaactatagtcctatatatacttaacttaaaaatttaaaattattacacttcatcttcctcatacgctaataagattgcataacttaatatttcctcataggaattatgaaactactaaatgtgacataattatttagtaaattttgcttggagtgaaatgagttatataacatacaatataatatatgtatagactagatcttacattgtttcttcgttattatataacttctaattaattattaggttttgttttaattagttagggacgtgaattagactacaattatatatatatatatgtatatatatatatatttatatagcttgctcgatctatatatatacattctcttgctaacgtgttctaggaaaatatgtataatattttggaattgaaaagtcaagaataactgtagcttgtaggagaattaaatggcaaaaagaaaatgttaagagaaacataaataccacacgtttatataaatttgacatgtatatatattttttaatgtatagatatatattcctttatcctttttgtttacccacagaattatcaattatgatatatatagccattttgtttggtctaccataccaatcgttgccttctgaaatttaaatacaatattaatattactcaattaataacattcgagaaaatcttgtaaaggtcaatcaccattatatattttatatatatgatcaattaattgatagagcaatgagtaattgtttcttaaagttttaatattagagttagctagttggaatttaatcaggtgcacccgtatatgtgcatgattttaatgtcacgtacacacacatgcatatatatatgtatgtgaaatgcatgcatgaatttatgtcaagtactagatgtgagcatgaatttatatagtttcctatataataacatttttattatataatatataatagcatgtatgttgttattataccaacaagatcgatctatgttgtaacgcccttacttacgtaaaataagatgccataaataaactggcgttaagat

SEQ ID NO: 384841 - DNA, 2224 bp, Cannabis indica
aaataaaaacatgcaaaagaaaacaaactcaagaatccaccaattactgccccactaattctcacatttcaccatcctttacttttatttttcttttcctttaactattggttcccaactctctacaactctttctttcattacccttgtttttcaattctatacataatagagaaatggcatcaattgttttcgtaatgctcctcatttagctgtgtagtatatatgtgtatcactttatattactttcctgaatattcatcttacaaataattaacatgcatctttttatcgtgctttgtttttattaacacactttttaagaaatatgtttaattttagagttcttaaataatagactaccaaaaaaaatatctattaatcaatttaagttatttttgactgtatagtcaacctatatttatacagttttagaatcatcacatttgatattccccaagccatgtgagattgcacaacttactcggtcgaaacccttaatggatcacaagactctgactgtcacaatcatcccccttatagaatccgacaccctcgtcaattatacttccggttgggtctaaactctgataccatttatctctatattatcattattttttttttattattttttttttgtctttaaaattacactgtgcttttatttttttttatttttttttttctattattatttaaaatttgacaatttattaaggatatagcttgtgtgagacaaggcacaaaagttagtttgttaccttatttaatgatgattgaataaataaatataataaaaattagattgctaaagattgctttcctttccatttttaattaagagaaatgtttttttttttttgaataatttctttttattcaaattgataaaattttattaatgaattttaaatttaattattaaatatgtaaaatttgaaaatataaattagtcgataagcattaaatattaatatgtttcatttatatattttaatcttattctaacgcgtatagctaaatatttttaaatgttgctatttggccttttaaattgtatttttgggtttctaagagcatcttgaatagtagaattttttaagagtgtcaaaaatttccacatcacttaaaaatatattattttattttatctctctttcacattattttttacactttttattttaaaataatctaatgataagtatctctgaaaattattaaaattatattacattattatttaatatattaaataaacaaattttcttactttatgataaaataataataaaaaaataagaaagagaagatataatgctatagcatgacattcttttgtggcattctttttcattttaatgataagcattaattaaaaaatactaaaaatgtatctatatcatcaagcatttttcatagcatctctattgaagatgctctaattaatactccaaaattatttaaaaggtagttttaagtatgtttttcaagaaaaaattcttgagaaactaaaaataaaaagcataagctcagcaaggaccttctcttcaaattcaaattcccgactttgaataaaaaaaaaaagattatttagaatttttatctcctgaactatgaaatatacattattgtgtgtctcttgaattttttcagcctgttataaatggtccttaaactatttagtatttacaatattgtaaactggtcattttgtcaatttttttacacgtgacaaacaaaatgatgacatgactgcttaaccaattgccacattaataccacgcatataattgaacattaaaaaattaaaaattatatattttaaaaaatcattaaagtaaaaattaattgataattatatcaaaaattataaaaactaaaataaaaaaattaaattattttttcaaattaattacacacgtggcattgatatggcactaatgtgacaactaactaagtagccatgttatcattttgtttaccatgtgtgacaaaacttgacataatgaccaatttacaacaccaaatagtttagggaccatttttaacagactgaaaaattcaagaaacacaataatacatgtcatagttcgtggataaaaaacctaaatcgtctaaaaaatagtaaaattttatttgcactaccccataaaattataagactaattaacttacattagtttttaaaaagggaaatttgattttctatacttagaaa

SEQ ID NO: 384842 - DNA, 2411 bp, Cannabis indica
cttgccacctcttctttgtcactatctatcggttgtccctcatcatcagtccttcttcttttagaatcagcaacaattaatgtgggaagatccacagtatctacattctctgtcatcataggctgtccattgtaaatggtaacctttccattaatatgctccaaatcattgaccctagtttgtaggcaaataattcttccatgatcccctccgtaggaattgcgattagcaaaatccccttgatttgctgcattgaattcggcatcatcaactccggcactcactgatgcatcggaaaactgatcgtccgcctctgttccagtccgtagccagcgagctccaaacctctgtttccttctaatcggatcagctttcatccataggccaaaaggtttctcgatctcatccagtggtgtatcaaataagcgttggcaaaatcgctctgagtggccaataataccacatatgaaacagaaggtagggactgattcatacttaaattgacaccataaccattcaccattagtccgcttcagcttaattcttcgtttcaatggtttctctatgttcactgtgactctgatgcgtagataatctctccatatccccaagaaatttttaggatcagatttgataaaagatcctatataattaccaacatttctggcatttgtctcagtcatgaatcccgttttgagattatgaagttgaacccacatatcaagccgatgtagagagactcctcttggatcttcacccctcttcaatctctcaaaaaccaattgaaatatgttaaacgtccaagggctaccatccataaccctttgaatatcaagttcatgataaaattggaatacatagagattaagatccaattctttcacaaacattcctttccccggttgccatagagacgccaaagtgttctgcatagcatcgaaatcgatcaaccttcttgttaagaactttccaaccagacaccatctatcatcaatgggttggccaatgtcttcaacaatgtcacagagtaatcctccatcttcttcctcttccagttggatttgatcatactggtcattaatattttgcatattgtggctactagaggccatgcttaccaaataaactaaaaaaactcgaagacaaaacagacaaacttttagacaaaaacttggattcggacaaaactttcacaacaaactctcacaactaactcatgtcagaagacaagacaatatatatattattggtgtttagtatccatagtttgctaaatttttaagtgccctatttgaagaagatttttgtcactctcctactgaccatttctttgttcatattattattatttaattagatgggtgaggagggtttctatttatagatggattttaataatatgacttttattattattattattattattattggtttattttattgagaaaattccactttattacccatttaattcaacgaggttgtagtttaaaaatagaacattgacttgttgagtaatactaataaaactttcttataataataatgaaaaataaagaaataagacacatagacatataataagttataaattatgatgcaacctaactagtagagatgtacattttttcaataggatggggcgtgcaggaattcctcatttaaataaggaaattatttatatttgtataaggaaaattatatattatataattggaaaaaaacaatagtaactaatttgaagttataaagcaaatgttagtttagtagtgggggagggatgagaaaaaaaaaaggaatgagttcgaactcaagactcttaattaattattaattcattgtaatactataaggctatactaaaaaaaattcttttaaaaaatactttttttgtcatgatttatttgtcaaataaaactactaatatatttttaattatcaaataaatattaaaaaaaacttatcaaataaatacgaaaagtgtcaaaaaaatatcgtatctaatactactacaaatgtcatattgatattgacttaattaagtatcagattctatatattttaatttgataattattataaaaaatcgataactatttagacgtgacttcttagtatttttgaacaggatgaatgtgattcaacagtggttgtaattgggttaacagtgctcaaggtaatattgtgtttaattctttgattcttgatgttatttctttattaacgggtgttggtggtggttcttgtaatgctatttcataatttgcgaatggtattactcatgcaccaactacttttgttgttagtttggtatgaaaatttatttgggcaaaagcttgtcctttgtaatatctatattaaaatagtatttaatttttttttctctccttgggatattaattgtgtga

SEQ ID NO: 384843 - DNA, 1240 bp, Cannabis indica
aagtcggattcaggtctgaactgaaactgagactgaagtctgggtgaccaaaatccaaatttgacaattagaatctaaaataataattaagtaaaaaattgtaaaagttaattttttttaattttcaaaattttttaagatttcaattctcaattaaaaatcaaaaagtgaaaataattttataaattatgtttttaggaaaaatatttttatacttactaaattaaaaaaaaaaaatattaattaaaaaaagtattaccaaacacactattaattgattcatatttttaaatcgacatttgtgctcacaacaaattacaagagcctcttttaactcatttttttggcctgttattaaatttggatctaatactcattaaagtttaatttaactttgatatcgtgttaaaatttaagattaatgtgcaattaagatgcataaaattttattaataatagaatgaataacccatttatcttatatataaaatttaattccatatatattttgtaagaatatcttcttcatatcttaagtaacctgatgtgaatttgaaacgaatcgcccagttcttcttgtgttttttgtttcttttttgaagtgcaatttattgataatattgaggttgaattggcacagcttaatgtagatctagaaaaacttttgatggggacttggtagttggtagctttaaaggcttcagggtctgtcattaacattattgagcacccaaaattaagtaacaataaatttttgtatgtaaagggattctttctttttatttttaatatatataaaccctcttaattttagagaggtgctaccgtcaacatcatattacaatcttttagtcaacttctacattcaaaaacacatgctgaaatatttttattttatttttttttaagatggtgttcgttataatttcaacatcatcctgtaattttattaaaaaattcgaataatttacaatgcctaaaacgggtttgaagcttttgaacacatgtggcaaactgaaatattaggaactctgttttcagtactgtaaactattcaaaaaatttcaaaatttacagggataatattgtaactataatgaacaccactataaaaaaatttgaaaaaaaatattttggatatgtgatttcgagtgttgagattgactaaaaaattataatagctaggaagttataattaacacttatcgagagtgtaattatagttacctaagtaaaaaat

SEQ ID NO: 384844 - DNA, 939 bp, Cannabis indica
tcaccaaaactccgcaacgtagcattctggttgtttggtcatttaaaatagttttttagtatatttttttgtaattttgtacgttgtaattatttagaaacgcatattattttttcaaagcaattgtaaatttacccgatcttttatcaaatcactcaaaataattcctaattttgaatgaattttttcattttaggcaagtctccaatacacccttatttattttgccattcttaaaagaaagttagtccaattctttttataattgtgtatgttgtagttttttaggactatttatagattttcaaaaacatttaaaaaaaattctagtgccgaaaataaaatctaaacacttatttatcacactcataagaaggaataattacaagtacaataaaaaaaatatttgaattttatttttaatactatataacgtaaaacaatggaggaaagattactaaaacgaggagaaagactatcagtcgtgtcaatctttattagtgaaccttactctaccatgttgtgtagaaacaagtattttctcacatttattgatgttttttctcgatatggatacatgaaaaaccactttgcctgcacaattttgccccgcacaaaagttaacagattgcgtcgttcaaactttatcggtgctttttctcgtcgactcgacaaatactactgccaatctttaattagtaaaaccacttttcagcccaactcatacatcattggcaaaattggttttttctagcaacggtatcggtgaaagctatattttacaaactctttatcggcataactaaacacccgtaaagaattcccaccaaaatctttttcctatgtaaattttcgagagtcccacatcaataaattaattatgcttgagaacttaatacatctattctatataaaatgtgtctatataacagaattctt

SEQ ID NO: 384845 - DNA, 2479 bp, Cannabis indica
aaaaaaaatgaaaaaaaaaagaggtttgaaagttctctatcagtttttgtctgccaactcctctggatctggactctctcactaatgaatttaatggacagtgggtctcgtgactttaacaagaagagagagaaacagagagagtatataggcatatgatatatatatataataatattatattatagataaatgttaaagggtattggttgctagtacttttatatatataataatattatattatagataaatgttaaagggtattggttgctagtacttttttatatgtcaatattgttattggtctaaataaatatcggatcttatatagtttaatataatagcttttaagaagaatcgctaaccaattaaggtaacatatctagaggtgttagagaccactagtgcctaatagtaatgttctatatgtattgaataaataagggtaaatagcggcataaatacacaaagttttaaatttgtaagtggcataatcccaatgtttatttttagcggtataagtacccaatgtttgtaaaactgtaatttttctctaatttcgtccgtacaaaccctgttattttcttaaacagaccacatataaggtctagattcttgatcattgggtctagacagaaacaggtaatatcagttacttccaaatgttcctttaataaatttaaaacggagtctgtactgacaaaactgaagaaaaattaaagttttacaaacattgggtacttatgccactaaaaataaacattgagtttatgccgcttacaaacttaaaacttaaacattgagtttatgccgcttacaaacttaaaactttaggtacttatgccgctatttacccaataaatattaaggcattattagtgccaagcaccttaaggtggtatcgaggagcaaaccaatatgaaaaaaaaaatcgaaaaaaaaaggtaagtattttaattagttacgacaaatatgtgtaatagaagataatatttatatgcataatattaattttaatataatgattagttaaattatatatataatagaagtaatggttcaaatcttaccaaaaagctcttcttttatgtttatttttgtctgctattttacaaaaaaagaatattatgcaccctttattttaaattttggatccactagtggtggtactttatgatcggttatcgatattctttaaaagtttgttgcatcaaattatataaaacttaatacttaattacactaatagtgcagtatgatatctaagaattgtaatatataaggatctgtggtgcctttgtaaagaattgttatttaatactaatagtatccttgtcgttaatttagctattgattaataatattttataaaaataattataccaataataatattaaagtatattaaacaccttctctaaaatttgtgtgagtgtgtgttgtgaaattggtttggtttgagatgaattaaggggactaggaatgagggagacattaccttaatgagttttggcattagtaaaggacaaatataaatatataaatataatttggtttggtttggtttgtattgggtgagaagtaggagtaagagtagtagtaaataatcaattattatgtatatgtagtcatgattcattatatatcagttttcttccaaatatagttataagattgctaccaactttttaccatatttatatatgcaaacacactttacaacctcaaaacactattgtcttcttcttattgtatttgtatatatatatcatcatgcgtaactatatataattcttttaattcatttttttttctttatagctataccctatacctagctacctagctagtactatataggactgctactccaaccatatttactgtgaaaatttactaaaacattactatataaatatttaaataaaaaagttgtattttttaaagaatattgttattaagtattaataagggtgatattttgtagttagttagaatatagttgttagattaagttacctccaatttgatatttatttgtatagttatatatataacacttctataattataaaaaagagtttttgcgtcaattaataagtttgatcaaactcgttaattgacgcaaaaattgattcttattttttattttgattgttaaccaatgtaaataataattaatttacattgattgttactttgataattaactctaaaatgaaaatcgacattaaagataaacttttaaaaaaaatgacacaaatgagggttcgaattttgtgtcaattttactcacacactatttaatgttagtttacagattttttgtgtcaattgtacaccaacgctaaattaattagaatacattacaaaaaacctaatctgcttcgggcctatataaaagatcctacctaatatattatctctccagccacacatcaaatgatcaaagcttctactctctctctctctctct

SEQ ID NO: 384846 - DNA, 2703 bp, Cannabis indica
ttgtaataccctaagattaaggagccagattagcaaaccctaaccagttacatgtgtattaatatggaattatattattatataatttaatatatatatatataaattatactgataaatgacatgttaagaccccgttggtgagtcaggggtatttttgtaattttgactaaagaagagtaaaactgtaattttaatgttatagcgtgcttatggactataatattatatagtatatttgttctgtccttctgtaggtattttttgacaagtcaacgcggtaaagtcacaatcgggtattttgggccaaactgggttcggggcccgaaatacatttgcaggattttattttgacattttataaataattgaataatctaaaatttatttaagtttggtgtgtgatgaaatgataatctttcccttgttgtatgcatatgtggtttattggcccaagaggcattttggtcatttgaccatttattttcaacaaagtggatttttagaaaaatgaaaaacacattttctgacttttgcaagcctagccgacccccctttccccttcccatttcaccatcttcaaatttgctataatctttgagatcttacttggattggagttgaattttggtgttggaagcttgagtgttgtggtaagcttctaattttgctatacccatgtttaagttttgagtttgttgctgaatttttatgttaactttcatggatattggatgttcatagcttgttggtgcatgtatgtgaggatttgatgaattgtgtgtattatgaatgattatgttggtagaatagtgtgtattgctcttgctatgcttggaagagattttagagatgtgatttgtgcttgaatttgaatttgattctgtttaatattgtttccaagcttgaaaagtggaattttgatgttggttttggtttaggattgctactagtaatgacacttcatgagttgtgtaaattgcatatattaatcttgatcaaagtttgatttttgtgttctaatctactgttattgatggctatagttagtaaattattaagttgagctttaggcatgtttcacttgagtttaagatgttattggcttgatttatgagttgtttaaaattggtattttctgggtttggaacccaggtgtcgcggcccgctctatgagcatcgcagcccccccacttgaaatcctgggtttttcaacctaggtgacgcggcatgcctagggagtgtcgcggcccgcctagggatttccggatagtttgaatgttaattttgtttcgttcataacttttcgatccggactctgtttggggtgttccatatatcgtttaaaagctcattctgagctttatatgtttatttgtatttgaatgccaattgtatgattatgtggaagtgaatttagggattaaccctatttgtaaatctcgagaattgtgactaggattaccagcactagttcaggagcactcgaggatttggaatctccacgtactaggtgacagtagttagcacatagagttaagtgtggtggcgctcatgtttaatattatagttatgattaattgagaaccaaaattagggttattaccctaaagtgaatggttatatggcctagggttattaccctagtgattaaataatttaaaatgttatgccatgctatatatgtcgaagtaaagaataatgcgttcaaggcataatttggttaggctcggtaattagaacagagataaaccattctaaggctttattgtaaatagacgtgtgagcgtaacacgtgagtctatgctacatatacataaataggcgagtgagcgtaacacgcatgtctatgccaaatagacaataagtgtaatggcattaatatatatgtgatatgttttattgtgtatattgttatttatactattttactgggctagcctcacgagtgctctactgtgcaggaaagggtaaatctatttgtaatcagacatgagtttgagagcttggcgaaggattgtacatgttcaggccatactagaccaagcgagttgggtctaccagcgaaagtatattttataatctcgaattttgccgcttaggtcggtacgtaaattaacttgtaatattttacgaaaagttttgtgggatcccgaaacatgttgtttttttggattttttggattgtttgtaaagtttaaattattacaagttatatttttattccattgtaatcaaaagtttaaagaatcctgctcttttcttttctagtaatctcggtttagcgggattaggttatattactggttgtcgtagtgtgcctaaatgttagggaattacagttaggttctagcacaattgtattatttgtgttcttcaatctgttcgttaaagtcgaccaatggttcttctcgtgacatatagattaaggatgtggtagtacaattgagtgggagcgctaatcatagatacagaatctatagcttctatctaaacatagaattgaaacgagaatttcctttgagtttggcttaatagagataaatgatagagtgatcatttcagtgattacattagttcactgaaatatcatttataggtagctaagtgttttaaggataaaatacatcaaacggtgtaacggtaaatttatccctactcaatgtaaattatttatagaggatctttgattattaagattat

SEQ ID NO: 384847 - DNA, 1062 bp, Cannabis indica
gtgtgtttagctttgttatggttttaattaactaagagtagaaataattactaattaaagaagttaagttgtaatgatcttgagacatgtaaagaaagtcttgttttacttttctagtatatatttgccattatgtgtaatgtgattgggttaattaattttaatttgagccctaatgttttataggaaaatattaatttaactcctttgtttagtgtaaatagctaatatatctagttaaataacaatttatattttatatgcattttattagacgaaacgaaataatgctttacacttattttagttaaataatttttaatacaattaaattcaaaattattatttgacttgaacatgaacgaaatcactgttaaaaaatgaaattaaaatttcaattttattattatattatgtctaaaattaaactggaagtgtgaaagtgagtttaactttaaattgtcatttaataaaattgtgagaagttaatattgtttttggtttcacaatcaaactgcataaccattaatgtgaaaggaaattaagaaaaatgattaaaaattagaaagaaattttaagaaaaataataaaaaaattatatatggatattgaaaatctggtgagttctcacatggatttagtggtagtcgcaaacataaactggaaaagaacaaagtaaagaaactaaagtttgttgaagctactcttttatttttaactctcacaatttgaaatttattatttttgacataagattcttattgtgtgatttccacgtatgattgattgtgacaattaattattcacaataaataaaaattgagaattttcaaaaatacaattttttatgttatttttattttacgatttaaaatttttattttacaaaaataaatttataaaattacaaaaatatactttttttttaacaaaaagtaagaatataactaagaaaataattaaaaattaacctcacgaaaactataaataaactatataaaataactaaaaataactacaactataaaacaatccgaaaaatagttttttattttcgctaaa

SEQ ID NO: 384848 - DNA, 1118 bp, Cannabis indica
ttcgtaggtgctcggagaattagcgtaccgctgcttttcctcgacaggctggccaaagaactctctccacgtgttcctagcttgtttcatcagctcggggctcacgccgtggttcactaactgaaaaaaaccccactcatggcaagcgctcgaaatcgcagccatagtagcctctctaagggccttgtctgaggagaacgcatcctccagactaatcacagggatgttaatatcggtcttgtcatcatcatctgagtcaaaaccaagatgatgacgacgatcaccatcatcacaatccaattgtgatgatgatgatgaagagttattagccctagtaggcctttgggagggtggttttatgtaacgttgtgggagtttcttgattccactttcggatagggattggacacggactattggttcgggccaagaatgtaggcagttcattcttcttgtgtgttcttgaattttgggtttcaaaagggggagaatgtgtgtatatatatatatgatagtacttatataactaggtagctagtagtgtttattactagctcaaagtggtattttttttattttttttttatttttgggtatatatgttgagttttgtagtggtagaagtgggctctttatatagggattgggagacactgctttcaatatatttacggcgccgtgaacaacttgagttgtaaacattttatttaaattattcttttttgagggtaggttcaagttgataaattatgctattttattgtataccacaagtgataaagtatatgtttatatattttatatataacactatatatatcatttaatacatgtgatgatatatttcgtacatatagtatttgtgtccaacggataatgtcatttaatttataaaataatgttaattaaaattatcaagttatgagatattaaaaaattatagtattgtgactaaacttagagcaatatacaaccagcctcggttgaacatcaaggcaccaaactaaattctattcttcttactagttttcttccttttaaagtaagaaaacctgaaatattaacctccttttttaatgggatttttttaaaaatatacataaaatgtaatctaatta

SEQ ID NO: 384849 - DNA, 1091 bp, Cannabis indica
tagtggtctctaatttcaaaatgttaacatatttggtcaattgagttttgctttcattcctgactcaatgtctaaagatcatatacaaatgaacagtgtagatcgtgttagaacagatcccgaagaaacaaaaactgacaaatatatggcattgggagcttctctaacattctgtaattgttataaaaaactgaaattgtaaacatccatttcaggtgccagaagcacactttttgcagccactgatcctcaaattcccgagtactgtgagctgttgaaatccgacgactggcctgtatgcgctttcatatctcacgattgtcatcccacaaatccttccgaggaagcacacagcactggaactgctcataaagtgtgggaaaagacactagaattgatcggtctaccttccgacgctgttgagaggctcatcgaaggggaagacattgagtgcaaatatggaactaaacaggagtaagtttcttcatcatttgtccaaaatttgcccaccaattgttcaatgtagattatgtatcgagttgcccatgtagtttggttggcttgagtttaaggatctgtggtcattcattttctaacataaataggaaagtgaattgccatgatcatagcttagctgtgaagatcagttagatctattttgctataacacacttttttttattagttcatcttttttctctttggttggaaaatgaatcttgggattgctagtatgttacttgctgcaccaaagtgattttcatgggcaatattaattcaaaggaacttggagaaattcaggttttagttagaaatgatttgacttgtctctagtggttaattttgattaacttacttatgttatgttttttttaatgaaaaatcttcattttattaaccattaaattcagctatcaaaaaaggtagcaaatcaactaagatagaccccaaattgaaaatgcaatcatgatagaataaagaagctctagcaaagttatgaaccatcttattagctgatcgcctaataaaaaagatagaaatatttttaagttcttttaataacgccttacaatcattaaccacttgaccaa

SEQ ID NO: 384850 - DNA, 2441 bp, Cannabis indica
aagagttgcaggagaggagagacttttaccacctacttcaaagaaacaaccaactagaaaaagtgtaacaactgccatgaatttggcgacaatggcaagtcatgtaagaaaccaacaccatgcccatctcaaccacaagcacaaccaacaaaagataagagcaaaagcaaagacaagaagaaagagaacaccacttgccaaggctgagaaaatgtagaacaaaacacaactatgttaaggaccatatcaaccataagtatcatcaacaagaggcaaagaaagaggaaaagggaaaggcagaggcaagtcaacatcctttgaggtaataaaacaaaatcttaaatgtttttttttaagaaaatcctaatgtaccttacctaagtttgtattcaactaaattgcattatttttagggttccaatggcttattttgaacaaaaacctgttaaagaaatgcacattattacaatactagtaaacctattctaagtacaagatactcaatagaaccagccatgataccttttcaatacaagtcaaatacattttacactttttttttttgaaaaggtaatcaaactttattaacctttaaactccgctaccaaacaaggtattgaaacgaatgagccacatactgaatttacgatcaggatataaactaacaactcttgcaaacgaatgagccactaagtttggtgaaagtttgacaaaagaaatagaaacatactttaaatccacaagaaaaagtttacactttaataacctgaccaaataaagagttcatctcaaaggagtttcgtatttctggaaccaccacaaggcagtcggtttcgaggatcacatgctaccaccgattttgctttatccaactaagcgcctctctaacgccaataacttctgctagctccggcctaacgacttcattacaaagcctaatggtgccctccaacataaaaccatgctcatttctggccaccaaaccaaaaccaaagccttggtttcctccaaaaatagaagcatcaacattcacattgacttcattcacatttggcacacaccaccgctcaccaccctctcctggtaataaaccagtccaaaattcttcttgatctgaagattgagcaaccttccattgtgcaaggtaacttcccgccaatgcatacaaaaacagagcatttgtggacttgttttgccatacttttttatttcttgcactccatattgcccagcacaaagttgcaatgatgcagcatttctcgtcattaacagcttgaaatgttgcaatacaccagtcaaaaaagacatgttgacagttatcaaagtggtaatccctaccctttcccaacattgtgtcgccaaaggacaaattaccaagatgtgtaatattatttcatcatgcagagcataaattgtacatagactattgacagccactttttttgtaatgagcatgatcataatgggtagacaattatttcatcatctccacatcaagctcttcactttcggtggaattttcaacccccatagctcgttccaaaatttagaggctgctatggtaatccaagatcctttaaatttctgcagcaggttataagctcttcacagtataagagccactcacatcatgaaaccagtaaaaataatcagcacccgaattttgcagaagtggaataccaataatagccattttatctctatcattaaaaagatcatctaacagctccaaatcccatccgaaaccatctgttaacatcaaattactcacaaaagttgtatcaagagcaggatgggttgagattacatacggattgctttcaagaggaagccatgactcgcccttgacagagatgttaggcccatcacctacacgccatcgtgcacccatttttataatattttacactatgtttttgatgtgctagttggcaaatttcgttttgagaataattaaaaaatgaatgctggataaattttgtattttgacaaataataaaattgcttatgcatcttttttaatagcttattgttcaccatatatatttagaactaaactataaagcccttcaacgaaaattattaagaaaaccataaatattataattatcttgtaagttcttaaaatatgagtaatagttaaaatgaatggtatcattattattattgacatatatattaaattgcttatgcatcttttttaatagcttattgttcaacatatcaatatatatatatatatatagggtgagactatgttacaacatgccattatgtccctatgagtaaggaaggtttttgaacctttgattgtgcatctgacgatcataatgggctagggtatatattagtattatgaatgttagggcactagataatttgctaatttttttttcttttatatatatattgataaaatttatttatctttgattattttt

SEQ ID NO: 384851 - DNA, 4016 bp, Cannabis indica
ttttttttttttggaaaatcttcttcaggtatcctactataaatatccaatgaagattgagaagtgagtaaacattttaatcttatttcgtataaatatatgttcactaatctttgttgatgatagtttcggtttgattctttgcttgtaggaagattaagatgtttgaagaaagctaatatactaaaagacttatcgaaacaagaactctttgagttatcattttaattctttttttttttaataaaagcgtaatcatcataaattaaccaagctattagacctcacggtcattacaaaataagttctccggtggagaaaatcgaaatagagtcgtacaactggtgggtaaaagcccacttagccacattatgggcaacataattacaggacctactaacattagaaaaattacagctaataaaagagggagaagacttaatacaaaatgagacatagttctcaagtgcccaatgggtctccttcccattgagagcattgataactagcctcgagtcactctccacaattacaaacttggatcctagttccaatgccaccaatacagccaaacagcaggccgcagcttctccatataatgcatccaagaaatccaactgagccgagtggactcgaatcactccaccaaggtgattccttgcaacatctgcagaacacataatgtgtaggcccactctaacatcacaatttagtttaatccagtcctgaggaggagcccaaggctcccgcaagattggtgtaggacaaggaaagaaagtagcatgtaaatctgcaaaagaattacaaacaaagtcaatacatttcttcacatcaggcggacagttattgtgtaccatatcattgtgcgtcctccagatggtgtcaacaacaatcgaagcataaagaaaaacatcctcaactcggatacccctatctttaagattccatatgaatttaacccaatcccaaatacgaataccagtatcacaaatagggtaaaggccccaaggtcaagatctccatagatgaaacaccacatcacatgattgaaataagtgttcaatagattcctccctcagccctcacatcagacaacttgtatcttcaatctgaaaccttctttcgatcaccgctctaacagggagcgcattggataggatataccaccaaagaatcttatgatactccaatattttgctattccaaagcttattccaaagtgacggagcaacctcacagtgaggtgctattttcaaagcttgggtcaagtaagcaaatttacacgagaaccgcccattacttttcatagtccaaatccatctatccttgccctgactagaaggattgccccaattaaaattgcagaaacactctcatgattataaaggttgtttgacttatgaacatcccatttaccacaagttaacaggaaatctgccactttgttgtgacttgtagtaacatcaccaatcggtttcagaatgaaaccttgaaaatgaggaatccatggatccctccaaatactagtatcccttccatcaactaccaatttacaggccccttttcttaagattgcattggctttcacaacatttttccaaaatcaggaatgagagtctttatatctgcaactgagaaaatccttcccttttagatacttggcctccaataactggcaacacatagattgacagccattcaaaagtttccaccctcattttgccagagagcttggttcatttctctagtttcagaaaaccaagtccaccaagagacataggaagacaaagtttgtcccaagctcttagatgaagaccatgattccctttctcgaagccccaccaaaagtcccgcaccaaacaaccaatcctattgacaaggcgattagagagtttggtggtttgcatggtatagataggcaaagacaaatccacagatttgataatggtagcacgacccgccttggacaacgtctttgccttccagccctgtaacttagaagtaagattgtaaaggatgaagttgaagttagcatccttttttcttgatctgaacaggagcaggcccaaatacttgataacaccttccggagattcaatctttaaagcttccttgatacctcttcttataccattaggggtatttttgctaaaaaagattgaggttttgagcttattaacttgttggccaggccaatagcagaacctctgaaggcagtcccaataaatattgacttcattcaaattggcctcagcaactagaataaggtcattcacaaagaaaatatgggagagaatcggaccacccctactcagcctaataccctgtatagtgcccataccaagagcctcttccaagagccttgataaaactttagcagcataaatgaagagataagggaaagtgggtcgccctgacaatgtccacaggatggattaatcttgcctacatgacccccattaaggaagatgttgagagtagtggtggatatgcactgagagacccaattgcagaacttttgaggaatcccataacaagcaagaacatgatcaataaatttctagcttagtctatcataggctcttacaagatcaaattttatggcaaagaacccctttttgcctcttttcctgttaaatgagtgtatgatctcttggacgatcacattattatcttgtatattcctacccaggacaaacgcagcttgagtgggacaaatgagggagggtaagataggtttaattctattagcaactattttggaaatgaccttgtacaacacattgcaaagagatattggcctaaagtgattaggtcttttcgggttcttgattttagggataagcaaaacatttgtagcatttacacccttgtgcatattgccattcacaaagaaatcagaaactgcttcacagaaatagccgtcaatagactcccagtaatgcttgaagaaaagaactgacatcccatccggccccgccgccttatggttgctcattgcaaaaagagtacttctaatttcatcacaagacgggcacaggataagctcctcctggtccgcctgtgaggtcctttcttggaacaactaactgcaattaatagcatgtccatattcagaccccaaaaaaatagttttgaagaagtcaatgaattcaagaccaattaactctcggctaataatctagacattatttttattcaagatactctcaatggcatttcttcttcatctaatagcaaccgagagaaaaaaaaaaattagaacacttatcaccttccttgagccaagagatcctggcccgttgtttccaataaatctcttttcttgccagagtttcattcaaggagctatgaatatcacgttccatgttccaatcacgggctcccgcatgtaatctctacatatggtcaagtttttgttccaactctttaatgatcaagtcaatcttactaaattgagttcgattccagcaaaggagagcaacacgagtcgctccaagtttcttgaagatgcgagctggggcccaagaatgatcaagcaaacgccaagcgttggcaaccaccaacttgctcttttcatctctcgtccatccttcttcaaatttgaaacatcttttaaatttgggatccaatccactagaaagaagacataaaggtctatggtctgaattacacgtctgggaatacgaaaggataactctagaaaataggtcaagccaagctccattaattaatcctttgtcgagagcagatttcacatggctccttccagatcggtgattatcccaatcttgtcaccttgaataggcatattaataagaccatgagaatcaacaaggttagatatgtaagggataaaagggtcccttcccgacgacccttcacgttccgagtcacttagaacaaaattggtatcacctaaaataaaccagggaccaccaaacctatccccaatttccattagctcagcctaaaaaattttcttagcatgaaggtaaggagggccatacacacac

SEQ ID NO: 384852 - DNA, 1835 bp, Cannabis indica
agaagatcaagaaaacaaaacaatagtaatgatgtggaaactacttcaatatgattatgtatatatatatatatacttgtttggaaatataagtgaaagtattgtttaaacaaaacaactttaagtattgtttctatagagtatttgataaataaattatataatgtatgatttatttaagtgtaattcttctttggttgattagaatttaagtgtaataaaagagttattacggaaataattgtttttggaatttacatctatgttatggttgttaagaatttgattaatactaattcatatgagagaaatgagttagaaatgtttggatttagtttgggccaagtgggagttacaaaactccaaaaataagcttgctgaaaattgcaccaggtgacatgttaatcatgcatcatgtcacctgaagtagtctcttgtacaaaaacattattgaaagtttggtttttggtcctagcttttgtgtaacccccaaaccacctcctttaattcattttacatctaattaagagcctataatagccatgggtggatggtatttgattttcaagtgtgatcaacctaaatactatataaagaggtctaaagtgctcatttgaatgatgaattttctatcaacaaaagtactatactagaaacactaagccttgataatttctaaaattatttcttagagaattctcttagtgcttagagataggagaaataagcttttagacaaaggtatttatacccggttcaattcatagttatcattagtattctacactcaaggttgtgagtgagagttgttttcatctctttcttgttcttatatataatatattgtattgtactcttcatctttttttttatctcttttttatgtacatataatatatgttgtgcactcaaacatagacatggacacaaatgcaagatgaacaataggtctgaaacatgaaccaatgaaatagtaaaccaaaaaactaaaatgacagcaagattagcgaggttcagtcacaagtcttggataaaacttggacctaatccccaggtagaaacaactctgttggctatgatgttttgattaatgaatgggaagaattacaacttacaaacaattagaacaagtacataaagaaaactagtggtgattcacaccaattacaaacataatctcacttgaggcagtccaatcaaacacatggaaataccttttacaaccctcaaactcaatgagaattcatctcaataacacactgtttttctttgtgtagcacccttactaacttgatctctctcacttagtttgttgcaaaactttctatatatagcactcggttagttaggacaacactaaccgatttaacttcaaactgtcaaggcagttagttgagttgtttaagtgctctaaatcccacaatttccacttggtttagtacactttaacaacatagtaatccaagccatgaaagtaaccaacagaactgaatctaaagtccaatgagtatgaatctcagttgagactctagtttgagttgatgttaagcaagtctagacaaagtctaaacttgtctttagtcaaactctttgtaaaaacattagcatggttttcttgagtgttgatcttcctcacagagacaattttggattgaatcacatctctaataaagtgcatcttgatgtcaatatgtttggtcatctcatgaaacatgagatttttcatgagatgtagtgtactttcattatcacagtgcacaatgacatcgtttgagttgatgttgagctcacatgtcaatcccttgagccaaattgcttctttaatagcctctgta

SEQ ID NO: 384853 - DNA, 1690 bp, Cannabis indica
aattcactagtggaattataatttagacctcatctaaatttgtgcacaacttccagctccaaaattatcacttaaagggaaccaacattcgatctattaggaaagtcagaattttataattgtagatcatgtttatagccatccacattattagattcccatagaaagttgtaagaatcatcttctctgagaaactttaacgagtgaatcaaaaaaactaataacatgaacagaagttcatgattactcaagatttaagttgatctactattgatcatcgttctgatatgaattagatctttatagtaaataaaatgtgagataaagacaacatttttcatatctttctcttttcattttcttcttcttatttgtattatattattcataattattttataacaattttatcattaattttcttttatgaataaaaaaaaatataagtagtttatactttaatatcatagttaaatataatataataaaataacaaaaataatataaaagtaaataatttttttttttaatttaagcgtttatatattacaatcatgttttacctgggactcgaacccaggacctctaacacacacatccacttatggctacttgagtaagtaaataaaaaataataagtgcaacttttgcatcgtgataaatgttctgttaaatttcgtataatatttattgtattttaaatttgaattattttttatcacactattaaatatttgtttttattaggttatgttttagttttgtataataaaaatgtgtatataattcaaacaacatataacataaaagtaaatgaataaacttagcaagtagatagtacatacatactcaataagactaaataattgacttcaaatgacagtgattagtgtttggtaattggtttattttaatttttatttatatatatagtgtaagtggcatagtactttagagacattaagctactaagttttcaatataaaatgaaaataaacatcatggtggcaagacttttagagtccttttgtgaccatttaataaggtttgaaagtagaaaaggagtataataattgtaaattagagtagagttgggaatcgtgattggaagaaacctcgatggattagaataaaactgattctccacgagtttatgtctcccaaagcaatcatacatcataatgtgaagttgtgaaacgctccctttctaatttctatcataataaatacaacaattaatatttttatcataaatttttggaagtacttaattttgtcatttaaatatacgacttgttaaaaaaaaaatttaaattataaaattacataattgagtaaatggcggcaaaaccccaaaacttttattttagtttcacttaactccaaaatccaaatttgggcggtaaaacccccaatactcatgttctgttagcaatttaacacttccgtctaaatttaactgttaactgccatgttgaattgtccacgtaaacacaatatacacgtggcacaattttattggcccacgtaaataattacattaaaaaaataaaaaaaaaagatatttctttttctttaaaattattaaaaaaaactatttttttattttttctttttctctttttctctttttttttttcctttgttttctttttcatttttacaaatacccacttttctctctctctct

SEQ ID NO: 384854 - DNA, 4187 bp, Cannabis indica
atatgaatttgtatttgaattggtcaattatactatatggagatgagctctactgactttggagaggttaccaaggcgtttcgtctcgaaaacttccatcatcacgcagccaccatcgtgttattatagttgctattactctcttacatataacagagtgtgacagatgaagattaaaggaattactcttacatatacggcaattaaatatagaatctgaataactaacaatttatgtactactaattaatatttttgccctttaaatttttaacactacttaattttatcttttaaaatataagatttgttaaaaattcccctaaaatgtaatagttatataatgacgtatttttgttagattttattttttttgctattaagaattagtattttttttttatcattttgatcaatataaaattttgcttctttttattaaaaaattaaattttaaaaattgtaatgttttattaattctaaaaaaattattaagaaatttaataaaaatattaaattaattaaaaaatattaagtttacttaaaaaaatttaaattattgttaaaaaaatattttcaaactttattatatttataaatttgtattttaaaaaatcaaactaaaattattgaaagtccaataaataatttaaacaaactatttctttttttttttttgaagaaaaaaatcaagcttatttatatttataaactcatatcttaaaaaaaaaaataattaaaaattcaataaaagtataaaattattttgaaaaaaattagaaattaaaataaaaaagttatgcttacttaaaataaatttaaatttttagaggaaaaatataaactcaaacttgttcttataaaatttagattttacaaatattgaatttaaaaatattttttatatctaaataggtcttgtaataaaaaataaataatattttaaatttttattcaaaaaacaaaaatattttaaatttattagttagttaaaaaattttaattttttttaaaatttttttaattatttaaaatgatattatttttaaatctaagttaatttgttaagatttactaaaaaattgttgaattttttgagcaaaattgttaatttataaaattacgttaatattttaatggaataataaaaaggacaccaatggtgtatagcactctcttatgtgtcaatatcgctattggttaaactaagtatggggttccatataatttaatatagtagtttttagggaggatcgctagccaatcgcagcgcggcatgtcgagaaggtactaggcaccattagtgcctaataacaatgctctttaaatttgtgtaaatgtaaaagttgagacatgatttttagtttctcgaggccaaataaaccctaaatatagatactactcaactggcaattcctctcttcacagaggatttttcgaatcctccactcccaatataaataaacaattagctaaattgcactttttaaaaccaatttttttccattcgacccacttatacaagaaaatattacaactttgtaaaattaaatcagaatatacaaaacaatttaatttgagtacgtaacaaataaatgaaatcaataaaacagctttacataatcatgttcaatgctcatccacaaccgccacctccaccgccaccgccaccacctccaccaccaccgccaccaccacagtcaccacctccacctccaccaccgccaccacctccaaaatctccaccgccaccagcccaaccgccgccagcccaaccaccactactagatataatgccaccttcgattcctccattggtagtactcattctaccatgaaatccagttgctcctgtggcttctccattttgacctctacaacatatagaaactaaaatcgaaataataacaaagcaggagaatactacgggtgttatgataaaggctgaatctaccatttttttcttttattataaaatatgtaaatatacaaggaacttctcttcttttatagtcctactttaagacttcggtaaaactatataataatgtttgaatattctgttttaggctggtaagtctttgacttcaatattttaaaaacgagttgaccttatcaaagttttcataaaaatttgtatagctttcttatctccaatgtataggtgggcttgggcattatatctaaggaagcttccacttctcggaaatttcaatctcaaaatgattgctctcaatctctcatatttcttttgggtaattgttgttcatgttttaatgagtcaaatcaacagaaagtactgtgatagcagattattaaatgaagaagagagagaacacgaaatgaaaaagaaacttggagagaaaagtcgtgacaaattaataacagcttgcttttgctgaattcatagaatatttcacgtacggttaattaattgatttaacatatgacaaattattaaatattaatggttactattgacttgttgcccaattttggtttttaattaattgttaaaatattccgataattaattgtagtaagatcccgtgtcacgacgagttctaatttagctggtcaaaatcatactttgacccttgttaaaagataacacttataaataattctttaatgtatattacaaaataattatttaaaaataatagattaatccctatatcgataaaaaatattagtgataaatcacgaccattaatatatatataaaaaaataataatatccctataggatcaccgaataaatagatttaataagttaataaaatactaaaataatatctaccatccatcatttctcatttctaactaatacataccaaatttaagtcatctagaccatccattccaacttaaatacaaaatcaatttcattggaatagggctgtgcctgggttgggttggtcgggttggaggcatttgttgggctttgtgcccaaaataaaattttatttcaaaattttttctattcaattatcaataaagaaatagatttattttcattacttatttaatgtgttatttagttcatgtgatcatttatttgtttatttgatttataaatttatccaaatctttatcacactgatattcttatttattgtgtcgtcaacacagtggaaagtaattaagattgtgttattaaatgtattcctatgatttatcactacacatggtttaattgataggataatctatactgtaatttacttgtaccttggataagtgttatgtcctttctaaggcattggttaaagtaagtttgggttggattaatggagtatgcatcggaagggaccaatattgaacttggatcagatataataaacttaccgtatacgtaatatttataaattcaatatcacctagttgatcttagatcaaatgatctcaatcctgagaaggttaggttccagtacaattgtattatttgtgcttcaatctgttcgttaaagtcaaccaatagttcttctcgtgacgtataaattaaggacatggtagttcaattgagtggaaacgctaattatggatgaatctataacttttatctagacataaaagtgaaacgatgatttccttcgagcttggctaaatagagataaatgattgagctatcatttgagtgattatattagttcactgaaatatcataggtagctaagtgttttaaggacaaaatacattgaagggtgtaacgataaatttgtcccaactcaatataaatcatctataaaggatcattgattattaaaattattacaaatagatataatttatagcgtatctatatcgtggaacatatagagcgttcgatataattgagagtgcaattccaaagctatagtgttgcaaggaagaatgggaaatttgcggcaaaagtctccaaaaagttcacgttgatgctgattagtccccaaggtccaaaaatagcggcaatagtcctcaaggtcacactttttatttgtccgttggtctccaagttaacagatctgttaaacccaattcaaatgccacgtgtcgaaatattattggtgggtattattatttaattttaattttaaaaaataaaaataaataattttaaaaaaaattacctttttttttctttttcttttttttttctttttcttttctttcttctatcttcttcgtattcttcttcttcttct

SEQ ID NO: 384855 - DNA, 2132 bp, Cannabis indica
ctcatacagggtcggccttgagtaataatgtgtcaaaaaatttgttaaatatatgtttatttaaagtaaaatgtgagtatattggaacctctttttaacaaaaattttaaaagtattatttttttccaatgtaaactatataaaaattttgagcattggatttaagtgggccttagacacatgcctagcctaccttaacctaaagtcgggcctgctcccatataacatttattgtgaataaataaatgtacttttaataagtataaccaataaattaatgagtattattaagaaaatttaaattttcataattttgcgatctaattataaaaaaatattttctttttattttataagagctgatgtttttccaaggtgagatgtttttccaaggtgagaaatatatataaaaaaaaagttgactgaattattatttgatattttttgaacaatatataaaacatattttgatatagtgtgaaaagaaagatttttttaaattaattagcaaaattaaatatagaaactcaaatttttcttttattattagtcattagatgaaatttaatgattcaacatttttaaatatggaagtttatatatatagatgcactcttaataagtgtttaccgagttttctgaaactagatattaagtaaggttaagctaaagaaaattgtttaaaagaagaaaataacacgatttaatacgtggttcaagtattaattagtcatagtctacgaaacaattttataaacttttatcaatagagtttttacagctctagtatttctttcaaagtcgtgaaccctttgtatggaggtgataataccttatttataggtagtcctccttaatgggacggacgaggagggttttttttaatgaaatattagcctatagatggggtaaaatacattttttaaataatattttgagttattgggttaggtaggtgaggtccaattcttaaaagcaatctgtacagagtgtagtactgttgacaatgacaggtgcagacgtgcgcattcgttggaaaaaaaaatgtcagaatggaggtggacccctcaataaggtgatcttttttgttgtgtcatttttctaagactgatagaaggggcaaatccacagatttctcgagatcctatcagaggtgtaccacggaagcaaccaatgactgtcccgcacactctttcagcttccagtcccaaacgacccttgagggtactcttgtacactttaagattcttataagtttaagttaccatttgtggtatagctatcgtgtctgagaagtttatgaatttagaaaatcatatgggtttcgaacgctttctctaggattatctttattgatgagatcgactgttgttggtcttcttgggtggggtgatgggcctaaaaccggttgggccttagctagaggccaccggtcgccttccgaaaacgcagataacaatgaatattacccatatatgggtattattggaaaaaaaaattctatgcctttgttgttatcaaattacaaaaaaaaaataataatttttacattatatgggtttgagttgttccatcggttgagagagatagaagaagttgagtttgcgttagatacttttgatatagtataaaaagagaatttttttttttaattaattagctaaattgagcatagaaactcaattattttttggcgaattttcaaaaatactatttttatgttttatttacagttttacaacttaaaatttttaattacaaaaataaatttgtaaagttttaaaattataaaaatatgttttgctcagcaaaaaataaacatataactaaaaaataatgagaaatcaacctcacgacaactacaaataaattataaaacaacaaaaaataattaccataaaacaatctcataataactataatacaattataaataaattatataaaataaaaaaacaatttattattcttagtgaaaaagtatttttgtaaatataaaaatttaaagagtaaaaatgaaattttttctatgttgatgtatttttgtattttttttttcaaatttttggtttattgtgtaaattttttgttatcgactattgaatcaaaatctaataatttaatatttttaa

SEQ ID NO: 384856 - DNA, 1014 bp, Cannabis indica
tttttttttaaaattttttttatatgtactcaattttcaaggtgggttattgatttgtatctagaaatgtctcttctcaagggtctttggggcaagtgtgggggctttgtgatatggaaattctttttttagttttgggaaatgggatttgggatttgggaattgggatggtgttggtttacctcaaaaggttgggtgttttcttggaaagctggtcttatctaataaataattaaaaatttgtaagaaagttggtcttggtttatattccacacaaaaagaaaaattgataatttcaagttaaaattttaaacaattcagaaaattaagtcataatttcataataagattttagtaattatataaatattatgagtgattgaaatttttttaaaaaaaacattagataataaaaaattagaaatgctagagagtaaccttgatgtttaatattaatatatcctattattataagatatcttattattattgttagtgtaatgaatctcaaatttttttatttaataatgattataaagaatgttaattaaccatatgataatattttagagactgaattatagattatactctattctcgtggtaggttgaaattggaagtcaaacttgtgtgtatttatttagggactaatttaggaagcatatggttacgacactatgacaatacttgaaaatgatacgaaataagtaggtttggtaatatatttaataaccaatgttgtgtttgtatttgaatttgagtttttgacatttaataattatgtcatgttcatgtttactttaagggctcatttgatatgcaagactgaattgtattagatatactaatttgtccaatccagtatttggacatgttaaaactctagataactaattcagttaatcccatatgtctaggattattttttttatcagatgcgataaataatccatgggaattttgattttatatacttaaaaaataaaaaaatttattattaaacctaaaactta

SEQ ID NO: 384857 - DNA, 1562 bp, Cannabis indica
tttttctaattagaatcttgctatgtaacaaaagtacatacaacatcaaattaattatcatataataaacccaatgtgggtggatttttacgagttcaattctgctgagcaaattttgataaaataattaattatgttctaacaaattattgtaaaacctagaaaattaataagcaattatttgtaaacagaggatattgagcaaagatttgttttgtaaacagagcaaccgcccatctttagacattccatttttttttatatcacgtgttaaatgttactttttttatttaaatattattttggaatttgtattttgcaaaaattatccctaagacttttatttgttactaaatttcttaaaccacaatagtacataacaatttttgtcaattttatttattattttcataaaaaaaaaacttgaatataagcaattagttctattatcaaatattaaacgaatgaccatgtttaaacataggtgtttgttagagattttgtgccaagtgcattggcgtttctgatgaatggagaggaagaagtagtgagaaattttcttctaaagacactaaggctccaatcatgggagaaaatagtggaccagttcaagttaggagaaggagtaatgccagcaagtttcaaagtgttacatgatcctgtaagaaactctgagactatatttgctgattttggtgagagtgcaataggaagagtggccccaattgattctggattttggtggattatattacttcgtgcttacacaaaatccacaggagactcctccttggctgatatgccacagtgccaaaatggtattcgccttattctaagcatatgcttatcagaaggcttcgacacttttccaactctcttatgcgcggatggatgttgtatgattgatcgcagaatggtacgtatataagttatatcatatatggcggtattcattataattagagtacgcttgctttttatacgtcttcaaaaaatttgcaataagtttggattttgttttcaacaccacaaactattccattttttgtaaaaatatatattgtatatatatgtttgctagctacaacaaacactatcatcacttaaaaaactttttaaataggagctagcgtacagtcgcacagtagattcacacaaaaaaatacatattttttatcgtgggcctattatgaatttagaaaatttctaaaacacatcaatagtgcttattgaacaatattgtccacattaattgaatgtaaaaatattaaactattaattattttatttattactcatttattttgagttggaatctataatttttgtgatggaattagagtgatacttgattcaagtactagtaaaatatatattgggcttttttcataaatgtacaacaaaaaaaaataattacaaaaaatatgcaaaaaaaaattattttaaaaatttatacattttgaaaacttattacatgaaaccatacatttttaatatgtttattaaacctcaaaataaacaatttcgtaaaattaattaaacagatttataaaaataaacaa

SEQ ID NO: 384858 - DNA, 4758 bp, Cannabis indica
actctagctgaaatagcccaaaattgtatttcaacctggccccaagaagatttaattcttgggaagaattcttctaagagttctatattcggttctctgcttcaagacaaataccttcacaattggaggatcttgtcaaaaaaaagcaaagataagataaacttctgaaggactacattcaatagttcatgggcaaggccaccaaggttaaaggcctgacagaaaaaggccgatatacagccataccgagaggcatactactgttgagtgacttctagaaagatatcagaaagatctcaatgagaaacatgaaggagttccttgagcgagctgatggcttcataaagttagaagatgctgtctgggaagcccaaacaagagggcaaattagagtcaaacaggcacagggcatcatagtgccccaagcattatctgacatactgaccagcacaaataatctctgccaattctctaacaatgagaatggtggaggcaagcgcaacaatgatggctctgaccaacataatggtaaaagagggaagttcaatgattcccttacgccatgaagtctaagggagaaggaggagcagtgtgcatgcttcactctccttctaaaactcccaaagcaatgcatgccaaccgaccactatgattggtgttaccaaaacctatagcaccttgccaaccactcaaatggaacaccaaaactcagccaatacaaggccacctgtcaactaagcatggccaataaaggctaagctcttgcaaaattcatggctaaacttagaagaatatctccccaaatctctcaatatttgagagaaaagaaggagccagagaagaagcgagagcaagagcagaattgctaaacctaggaggtgcattgaccagttgcccaatgcaggcgtggccctcaggatacctgggggaatgactgtacgaggcaacaaaggttagtttcaaatcttctaataatgaggctgaacatgaagctctaaattctggcctcaggctaccacacgaagcgcgggctgaatatctaaacatacaccacgactctcaactagtcgtaggtcatatcctaggtaaatatacagctcaatacaagaggatgacgacctatttaagctaattttaagacttgataagtcaactcaaagactataaggtatgtccacaaagacaacacaacaactgacgcactcactcgactagccagctgtgccttgacaaccaaggaaaacttggtacatgctcagttcttcaaagaactaagcctccctatttcaaaagaaatagacttgtaggacagccaacatgggtacacctatgacaacatacgtgtaaacaaaaactttgccagaaagtagggattagggggatggctgcatggtgtccaattttgcacaacataatgcacggaccagtaccacctccaagaagtgttaccaagaaagaagttgaatagctattgatgggagtgcacaaaggctttacgacaatcatgccatggggcaaaggcaaccgagtgcagaagggaccaaactgtagcatcgattgggcctctagagggctggccaaccatgaccacagcaggcaggctagccatagaattaacaatctggccaatcgctacctccacaggctggccgaccatagcttccttcaaccagccaggcaatgctccctcaatatggctggccacctagtctataccctggctggcccgatctgccaatagtctgctctcatacttcttgtgtatggtgataaagaggtaaactacatcctactagtaggatcccttgataacgtgaaagaagagaagaccaggccaagtcaaagtagaatggctgcccacaaagagttatcaggcccttcaacaaacagattgaggaaagaagttcttcgtaagagacttactccctgaagaatattccttgacaaaaaagatcttacagcaagcgtgtttggacaaaactgaaaaggttcgcaccatgttataaaataacaataaaggtgcatacaactttggtgagtacaatgagaacttggagttggtacttctaccgaaacactgaaatagagaacatctcggtaagtaatctcactatccaacttgtcaaatagttcctctaacgtttcaccgtgcagggacctataaaagagctagtatccattgcttttcaacatggcctcccatcaccttttagtgatggccgttgcgaggtaagccacataggggtagccactatgtgatattacaaaagtggacactaagctgcaagattttgttacacgtaagaccaactgtatctaaactacttagtaacaaagataacttcttaaagttattcatttccagttttgcatgcgtacacccagtagcaccccaagaaaattcacaagaaacgtctataaaacttggtgaattgtaagtgaccaagagactgtaagtctgggtgctcacttggggggcaattacattgtacaaagcataaaactagcatgtagaacttatacagagaaatttaaaggcttagaataagctactaaacctgcctctaagtcaagtgcatgcatactttggcttgacataaagaaaagtaaagccgtatacttacatgtcaaggccataaaaagatagccaggacgatcatatgtccatgataaaaggctttaaggctaaataatagtagtgttcgaaaacagagggtcgataggccaaaggcaagaatatgaatgctataaggccgaatatgaaattggttcacatgcatagggccaaggccttgcaagaaccgtatagccaaaaaagtaccagatatagttcatataggaaccacacaccaggataaggctaaggtagagttcttggtaggtttcaagcaaaaagggaagttccttgcaggttccaagccatagaaaaaattttggatagccgtactcaagggtgcttgccagataatgttattgtacaaggctgggtaatagcgaagtacaagtatcaagtgtaacaacttggacaaatgttgagtcttaagttgagtatttgacaataatatagactcaccattaaatttcatacagagtttctaagggaaccacgtatgagactaaagttgtatatgcctacaatgctgtaaaaagattgttgccaaagccaaattggacagaaagctggccacccgcttggaatcaaggcctaggccagccagggttcccaagccttcaaagggtcgaccaaggtcccatgacttagccaagaactggctagggtcaccaaacccaggcatgaacatgctagctttatagggtgaaaccttagagctggccaagtcccatgattaaatcctagggctggccaggtctcaagacagacttcccaggccggccaaggatcgttttgattctaaatgtgtgtttttctttcaaaactcaaatatgtgcctcaaattctttatggctcaaagagtcaagaatcccaacaaaggccaaaatcaaatttgctccatcaaaaagtcacacattatacattccaaaaatgtcatgtggatcaaaataccaaaaagattaaaagcgaacatgagaatcataaagtttccaacaacttgaaacttgtcaatggtaggtacaaaggagagatatccaagaagagaagatgagacgtatatatagagagagaaaagatcaaagatctaaaatcaaaccatgcaaaaagccaacacttggctagacaaggctactcaacgaagactacttcaaacaagacaagagctagaaagtccctatccgacaagatgtttgaataaggacttggagggaaaatgttatcccaaattttgtccacctgaggtggcatgtccacgtaagtcaagatagagtacatgtggaacacaaccttaccaatagcaagataaggtctccatgtaaggtatgataaaatcgtaaagcagcaaccgaaaggagtgaagcaagccgtcaaagagctataccaacatgtctggccatccaagagaatcctataggacgactagggtgagcttgcatggctggctaggatttgggcacaagctggctgaccaaaaggtgactttcagaccaagggagcttccattcgaccaagggaacctgacctctacaaggaaaaggtgtacaaagctgacttccatttgccaaaggctggcctccacctccaaaggctgaccttatcttggtaaggctaacaggaacatgacccacatgattctggtaggcatatgacctgctagatcctggcaagagcatggccggtaagacctcaacctgtagaacctgcatagccagccagcctcatgctgtaggtgcatggttggccagcttctccgtggcaggacattgatgcccagtcttcacccgtgaacagcaagccaagctatgaattaggccttgacagcccattaacatgcgacgaaaatatctacttttgaggaaatattgggttatttgtattattaatttaatatgtaaatatctaagattttatttgctaattagggtttatgctctcctatataaagggcattaactcaaccctagaacctaatgttggaattattttaccaggatctagatttactaacaaatatgttgttaacatcctaaatatgaacttctaaaatgatatgaaataaacacatataaagtataagaaaccttacagtggtttcagcggaatataatgtctccttacaatctgatctctaacccttgtatcct

SEQ ID NO: 384859 - DNA, 1053 bp, Cannabis indica
aggtgggtacccagtttttgacgagatagagtgggaagttttatctgtcaaactccaatcatagccatccagtctttgatttgatgtttgtccagcccaattatgagacactctacgggtcccctcttgataatctactttcaccgtttcattatctttaatccaacggtgatgataagctcaggtgtatttcgggacccaccacatgaatgcttaagattctatttgatttgcttaactttttcctcatggggtgaaatttgatttttatttttttaggtcattctttaatgagattctcagtttgaggaactgccatttattgtgtggttagtacgtataatattaattattatattaaattttgtttaaatcattactgccatgcattacctcttttttaagttcttaagctttatggtgcttccctatatggttgcatgtatgcaaattttgcccgtaattaatgatattaatataattatttacatatttaacacatattagaaaattgttcacaaagttattaaagtaaatgtggttggaaaaaaaaatgctaagatgttcccttttttttattatttatttatttgtaaaatgaagtgaatatgcgattaagttagagagtttctgaatttctaacaacattttcaaaaataaaaaaaattaaataaaaatttaatatataagttaaatttctttaccaaaaggaccaaatacatacttatttttatttttttgacaaagacataattaactcattagatgtcggtacgtgtccccttatatttattttctatctcatatattagagaaagttacctaaaattaaatcaaaaaaaattatgaataaaaatacattagacataattattttctttttggattccttttctaaagacattagattattataacaaaacattttccgaaacatatgcttagaatttatattacaaataaaaatactattggcaaaaatgattaattgtagtaattattatttataatagctagatatatacttttaggtgattctacaatgcactccct

SEQ ID NO: 384860 - DNA, 1883 bp, Cannabis indica
ctagtttcttattattaataaaaataaaaaccatgcatgttgcattaatggcatgaatgtctattatcgatcagttactagtattgttgttgaattgagattgatgaatgaaacaaaaaagatggattccgtaaaagtcgtgcacaaaaaattctccttgaatgagatgttgggtatccaactttgagactctgttttctcttagctacgttcttgaagcgtgattcaatacggctatcttgtgtggtttccaagtatgggtgattctagttctgaacagaatattgaaggtgatatggaggagctccggctacagttcatagaagaagcatctctggagttggaggccgactttgagatcaataccgagattgcgaagactggggtactggccaaaatccttggttcccgtccactgaccaaaggaaggattaaacaaattctttcgggggtgtggaatctgaaaggaaaatggagaatgaaaactatggaacaaggcacttggggcattttcttcgacaagctggaggataaggaagaggttctgaaacggcgaccttggattttagctgggcaattgctaaatattagggagtggcctcttgatggcaactggtatggggttccgatgaataaagctgtcttttgggtggagatacatggccttccaacaccttaccttgcgtttcaaaattccagcgtgattggagccaaggttggcgagttcttggcttcagatggggttgacaatcggactattgcaaggcggggttttctcaaactcaaggtggatattcatttagaccaacgtcttccggcggggttctacctgagtatatcccgaggaaggaaagagtggatacagtttaaatatcgtaaattgcccaaaatctgttttaactgtggatatttggcccatgattctagtgtttgtaccagggagcgggcgtttgcctttcctcccattggaaatgcagtccctctgtatgggccgtggattaaggcaaatgttcccatccgtaattgttttgatacgaagaggccggtgcttctccgggatggggaagatcggacggcgaatatccaagccattcgaagagtccaggtgtcgaatgaggggcccagtaccagaaatggtacgagaattggtgttgaggccactaccacgattgatacagacaattgtacgaaaggtacgaaggaggtgggcaaaaacaattcgaataattcttctgaaggtgggacagctggaatgacatctggcacacccaattttgaagtcaaggagcatcctatgaataaactgggcccaaatcctgaagatgcaaatgttatagtttgtatgatggcccataatgggcctgatgctgcccaagttattgaaaagcctcatcacgaagtatgtaagtcacgcacaccccatcatcatccagagcccatcttcattaatggacctacagaaacgttggaagagattactgataaaatctctgggcccattttggatgaaaggaaaagcccaaatgaaagtggaactaaatggtttcacgatccgattctatctcctatctctgggtcacaatctaagaaaaggaaggcggcagggaatgtatccccagttattaatttggcgatccaatcagttccgaagactccctcacccttggggcaggggttaaattctgagaatggtggtttgattcctttttcacttggcaaagattctaccaagaaggggtcttcgagttcaagaacattgagaggaaggaaaaagtccctcagcaacaatggtgcgtcaggtactaagatttcttctcctaattctgagtttggtaatttacttgtggaagttcagatcgatcaaaattttcaagtgggcgagg

SEQ ID NO: 384861 - DNA, 2405 bp, Cannabis indica
aaaaaaatcgctctgccgctcgtcctatccttgcctggttctcccattgagtgtgtatgtagatatacatattttaatcagaataatattttcacttatgagtgagtattctttaactggaagggtattttgatttttatcttattttatttttttattagagggctttactgctatggacaatggaacctgctgaacgtgatgcgtatttggcctatgaatccacaaaaaggttcacctctaaccaatgggttctggtcgaaattgccactactaggactactcatgaactttttctcgtgaggaaggcatatcatgatcgttacaagagatccattgaagaggatgtcgctcatcatacacatggagacatccgaaaggtacagtccttaagactaattttgaagtttatttattggtatcatcaaaatatccataaatttgatatgtactgagagatgatgaaatcgaattgagcatacagaggtacttgaagatactcaagtggaatttctcaaataaagtgtgaattctccagccaattcagttaaacgtgttggctataaaatttgcaggggaaagttctcaagtgtgccactttgataaagtgatatttaaaaacgtttatcttcatcaattatttgtatttgatttattatgtttttggagtacagcttcttctgcctctcgtgagttcattgagatatgagggagatgaggtgaacacaacactggcgaaggcagaggctaagattctccgtgaaaaggtcacagataaggcctgtaatgacgatgatttcatcaggattctctgtaccaggagtaaggcacaactcaatgcaactctcaaccactacaacaattcatatggaaactccatcaacaaggtatgacagatttttcagttctcacattggtcatttataggggcatatgtattagttttatattttaacttactaataattgaacacatgcatttgcaggatttgaaggctgatggttcaaaagatgaattcctcaaattacttagagcagtaattacttgcttgaccatccctgagaagtactttgagaaggttctgcggcaagccatcaataaggttgggacagacgaatgggcccttactagggttatcactaccagagcagaggttgatctgtgtcgcatcaaagaggaataccaccgaaggaacagcgttccattggcaactgcaattgccaaagacaccggtggagactatgagaagcttcttattgagctcactggacacggcaatgcttaaaacccattttctatatgagctctagactctagtagagtgagttatgagtgagtgcagattgcatgcgttttcctgccctgttggtttgatttgattataagtttcttcctatcgtttccttttccataattatctgtcttgtgatgagattgtggaccttttgtttaataatggcagttctatttaagttaatagtttgagaaattatggtatatccttgactatttgacgtgatgatattttacttggcaaaacgattactcctcataagataaacagtaaacgatctttgctatttgaatgttattaaaccgctatatcaatggtgggggtgggatatacagagtgaatgctttggtagaatttattttggattgaattcaaaagcttttatgataacttcaacctaaaaaaacagacttttgtttgagagtagattgaacaaacaagcttaggtgtggctactacatgttataagtttttgaggacagtaaattgaacaaacaagctcattggaggtgatgtgccttggtcattatgagtaatgtaaaacacaatacagatacagagtgcaaactttaataaaataaccaacaaagtacatcatatatggtacctgtatacattctttgcaaaaaaaaaaaaaatacaccgtgtatacatcagccatgtgggttctatttttctaagaaactagttttggaaagtaaaaggtcaacaggtcacgttttgctaaagttatttgaaatgctacgagtaatatataattaagtaggggtgttcataaaatattcgatctaatccaatccgtacgatccaatccgcaaagtgcggatatctgcacttgtgcgattagattggattagaaaatttaaaatccgtacttgtgcggattggatgttgattgacatgtaaaagtaaccgatccaatccaatccacacatatttataacaaaattaaaaaaattatatatacaaataacattttaatgtaaagaaaatagtaatttaaaagtctaatacatataatacaatcatattgcaaaacttaacagataaaatgtatattctatcctatatatattttttaacatataatttaaaataaattaaatattt

SEQ ID NO: 384862 - DNA, 762 bp, Cannabis indica
gagagagagagagagagtcaaaagctgtgtagggaacgtttgtcttgtaatctctgtgaaaatttaaatgattcttttaactttgtaagaaaatatcaacatagatatatatggctacgatagttttaactgagatgtagaacatttcacatggctagaacttgttaaatcactactacaaaaatgatttgttgcatcgatcaatgcgtcttgtcaaagtcattgaccgacgcaaaattaacagtcttttttacatcggttcttcaccgacacaaattattatgaattgtgtcaattgtatctctgacactaaaatgaaaatcaacagtggattcaaataagaaattataaatatgaatttagcgtcagttagcatttgatgcaaaatttattacattctatttcttactgacactaaagtggttaccttctattactaactgatgctaaaggcgtcttcttttataaagtcccaatttaaaattgggttcacccatgatttctctccatttcgaaccagatccatgtgccattctccattttgatccagacccattgttctttctctccgttcgtcgtccaccacctccacctgaaaaacccctaggtttctctttccatatcttaatcatggatgacgaccctgttgggttttatgccctaaataaaactccatttcaatgtaatccattttattcaatttcaataaagaaacagaagtatttttcattcatttgtatgttttggttcatcttatcaatt

SEQ ID NO: 384863 - DNA, 1967 bp, Cannabis indica
acgaacaaaataaagatccaattagatgtgtttggttcatgagtgaaggacagggttagcagacatgaaaactgtactttgattatcacaccatattgtaggaacaggtagtttagccaagacaatttctgcaagtaatgactgtaaccaaacaacctcggtagtggcattggcaaggttttgatctttagcctccgtgctaattcttgatactgttttctgttacttagagctccaagatatcaaatttgagcctaagtagatgcaaaagcagaatgtggacctcctatcttcaagattcgaggcccaatctgcatcacaaaaccctataagggacaatgcaggacaggattttaataggaggccatagtcaagagtcccttttagatactgaaatatctttttcaccacctttaaatgagactcaagagggttatgcatatactgagagaccttgttcaaagcatatgaaattttaggcctagttatgacaacatattgtaatgctccaacaatgcttctatattacttagggtcagcaatggggtcactgttgaatgtagacagtttttctcctccaatcataggtgttggcaaataattttcattgcatatcttggcttttcacaacagatctgtgatgtacttcttttgacacaaatgtaatccagtggagagttgatgtacttgaatgccaaagaagtagtcaagagaaccaaggtcttttagggtgaattgagcatgtaaatctttaataagtgaatttataactgttattgactacctgtgatgatgatatcatccacataaaccaagagaaatgtggtatgacaatctgtaactctggtaaataaagagtgatctgcccttgcagaagtaaagcaaaatattttagagcacttttgagtttatcaaactagacccttggtgcctgtttgagtccatagatggctttattaagtttacacacaagatcaggaaaatctttgtcaattaaattagggggttgagtcatataaacctctttagctaattccccattcaagaaagcactattgatatccaattgcttgattgaccatccttcagatagagaatttgttagtatgactcagatagtggtaggcttaatgacaggactgaaagtttcagtaaagtcatggccatattgttgcgaaaaaccttttgcaactaaccttactttgaactgagttgttgaaccatatgtgttttctttttccctgaacacccacttacaaccaatggcttgtttccctggggaaagaggaaccataacccaagtcttgtttctttttaaagcatgtatttcaatgttcatgatagcattccattgaggagactctgaagccacagtgaaaggagttatggaagccatcagggctttgggtttgtatgtgccaaccttagcacgagtgaccataggatgcttgttgttgactaaggatggttaagcctgatgtacatttgcagggatttcttgcacttgagcagcagtggagatggctggtggagaaacctgatcattctcagttgcagtaggatgttgtgtgggcacaagagcaacattttgaggaatagtatactgctgttgtgagtgaattggagtaggaggctgctattggataacactttgagtgtcagcatgttgctgttgttgttgtgttgatggatgagaaatagacaatttctgttgtggtgctggttgagaaaaaccatgctgctattagtgtctggatgtagaagcagcatttgtggtgttgattggtgtaggaggtggctgatgagttggtgctggtataggtgggtgagatgcttacccagcaagaggtatcacagaggtggtatcattggggacataaacacaaggaacaaatgtttatgtttattgtagggtctagtgtttgggttgttgggttttgtgccctaaaaaaacccatttcaatata

SEQ ID NO: 384864 - DNA, 1439 bp, Cannabis indica
ataatagtaataaagtaaataaaatttagtaaaagccaataaatcataataattagtggcattatagtaaataaaaaagtagtacagtatttattgtgagctaaatttgacacaatgatatatcttgtaccaaatttggcacaacttttagcatttgccaaatttaacacactttttataacaccattagaatatagcttttttaggtgtgctaaaatatagcaatacaccattttttttggcactccattagagatgctcttaggcacggggcagtcaattacccagaaataaacttgaggagcttaattttgaaaataaaataatttttaaaaaataaataaattattattaaaatcttgtacatataaaatagtaaatggaattaccccggtaaccgtggttcgttactcaaataacaattctgtctcggtcataattcttatttttcttccaaaacacggtgtaggatttctattcagaagaattcatcctcaagatactagtttagccccaagcaccacctgacatcagtaataagcgcctaggttgacatccaacctagagcacatagtttcgtccatccaaatgcagttttgttctagaaatcattcttattttgtctaaaaaataaggtgttgttgtcatggcaagccagaatctcatgttggtatgtcacttacatccatgatgacacacatgtgcctaggtgacacccgattgtcactcggtgcacaccggagctcaatcaccaagagacggtgaccagcatcaccataatctaaaaactatcttagagatgctctcacataaccttggcatctaaaggtatgatgggaatacaattttttcagagtagtgggtgcccacgttgacgtcatatgtcaacctggtcgcctattgctgaacactttacaacattcggtcatatctcactcgttgaagctcgagttaatgcgattcaaagttcattggaaagctctttcaaagatacttctacgcatgcttaatagccatatcacaattttgacttttttctatcaaaaattggatcacaagttgaaatttaatttattggtatcaatagtccagatccgatctcctgaaatcatagatcaccatcaaaaatcaagatgatcaatcttaaccgcaggcaaggcgtggagcgggcgcgggcgaggagtgggcgcgggcgaggcgcgggcgcgggcacgggcaaggcgcgagcgtggcacatacgtggcatgggcgcgggcgagcaggggcgagcatggtccgcaggcgtggatgctttccaagagataatttgatttgactaaaggagattcacgaacaaaggaggcggggccgctttttatcctttttgttttttttttttgaaaataaagaaagctttattaataaacttctttcatgattacatcacgaatatcaggagt

SEQ ID NO: 384865 - DNA, 827 bp, Cannabis indica
tgtataacgattctttatatccatttcaaagaaaagaaaaaagataccaaagacttctttatataagtagttttcttcatgtgtggcttaatgtgatgttacagtgatccacgtgcgaatagaaagagacatataactaaaaaggtaaaagcactttttagaaaatctagcagttaaagtgtttagtaaaatttaaaaaagagcttttaaaagaatttaattaaaaatttcaatactctaagaaaaaagacttagctactaattttcacaaattctaaatctccccatcaaaacaacactcgttggtagtagtagtaaatggaacacttttgaaacagaacaaatagaaagctacaaaataaaattatgtataagatgttcaatcttcatagacaattaaattacttatgcatagttatccacattagacttttcaaaattcaccaccttatggttaaaaacatgaagcaactgatcacaaacttgtctggacgtgggcctttcctggggactggtttttgtgcactgcattgctatttcaagtacctggaacactgcatactcttctcctggcaagagtggtttcaaagctgggtcaatcaggtcctcacggcagctaccttgcattgccattcgactttccacccatctcaccatgtccatttccaccccgaaagcttcatcagtcggcatctttccactaacaagctccattagaacaattcccatgctgtaacaatcactcttctctgtcgccttcaaggaatatgcatactctgccaacataaaatgtctagtaagaatcacatataaagtagtgtaatata

SEQ ID NO: 384866 - DNA, 2231 bp, Cannabis indica
atatatgtgtaaaaattttaaaataaattttttaatgaaaaagtaaccaattaaatcttatttccattaaaagcaactaaatggtttcttttttcaaaactctcaaaacgtgaaaatacttgaaaacgagattttttaattttttttcctattttcggtatttgttttgaattctggtatagatgctgatgtggcacatcggtatttgtgcaaaataatttccttaaaggtattttcataaataaaatcaatttttagtatattattaaaaaaacccctatttagggggtgcactatagaattttctattataaattctatataatattaaaaaaaattagttacgatccagttgtacatctgagctgccccattaaaaaaaaattaatgatcaaccaaaaaattaaaaatattacaaaattacggacgcatggttattttaaatatttttaaggactaaaagtttcgtttacaaaataaaaactgttattttcataagatatttataatatgttgtttgtctacatttatttttatattgtgtaagttgttttcatcgatatgaatctaatctattaaattgtaataaaaactttgaattatagaagattaaagtaaaaagaagaattcaaaatttaccagttcgtaagacatttcgaacggctattctttactttttatacaagatccatcgtgtacaccaacttaaattcccttaagctaaccacaaatctgataagcgatacataactataaaaaagagttaatagtaagataaacacatgttataatagttcactctccgtataaactggtaaaggaactacatctacttgagcttttattaatcacaaaaaaatttatagttttacaagagaaagatttaggaagccttataatcaaatcaaagcttatacagagaaatcgtactgaatctagagagagaatctttgaagtaacaaagtgtgagtatgtgaaaagtaaactggaagagccttttatttataggaatggaagtctcttaaaataacaataaaatattacaagtatcaggaatatgttgtgaatattctttctgagcatatttgagaccattggtagatttcatgtcattattgaagggttgagattgttcatcttgaccttagatgatgatcatcaatttcgggagatcggatatagactatcaaattattttctgatgttctgatccaaaaatcgtactttgacttgggagtcaattttcaatatgaaattatcgaaattttgatatgactatcatacatgtgtagaaagatctttgaaatacttagaatcacatcaagatatgattgaaacactgcgatgtgtttagcaaccaacaatcaagttgactctcaacagtcaggttgactgcaagagttaacctgtgtgctagaaacaccaaaaaccatgttcttagcatattgtaggatgttaaggtaatggtagtacatcaataagctaatttcatgattttggtgaagttggtcactgtcttatggtgattgagctcagccatgcatcaagtgatgactgatggccacctgagcacaagtatgtcaacttaggctcagggtgacgtaccaaagtgaaaatttgacttccacaagcgctataccttgttcgtggtggaaaactagcacaattcccaaaacataactacatttggatgaatgaaaccacatgcaccagtgctaacagtgaacatgggcattagtgcagtgttcaggtgtcacctggatgtcattcaggtatttcaatgatgaatttgtatgaatacgagtactctcccttcattcggtgctaaaatacaaggaatgcccaagacaaaattattatttgagtgacaaaaccgcacgttccaagttgatagtcaacttgggtgtttttttgaaaatatcaacttgggtgttgataactagtgtcacaattaacttgggcgttaattaggtgttttttttcctaaatagattcgtttgttgcccaaaaatacttgtatctttttatttgatgaaaacgaagaaaattcactagaaatatcttcataaaacatgttggaagtgtctcgggtcaacatacgtcaacttgggcattggtgattgtgcaacaattaacttgggcctagagtataagttgaaataggaggaaattacattctatacctactttactttatttgttttaatttttacctttatttctatattctt

SEQ ID NO: 384867 - DNA, 1095 bp, Cannabis indica
tatatatatatatatacatggcagctcttttggaatttcccacttatggggttattgtgggaaagaaaggccaacaagcaaaaatgagattattattattaagtcaaattacgtctctgtctcaagacttgaccctgtcttaaggcctagctataattttttaaaagatatatattattgttcgtccagatgtcatttcactggtaagttagaaaaacacacttttctatatttaaatggggaaaatatatggatccacctctcctttcatggaaacttttttgataacttcttttcatggaaacttaaggccaaaaccattttttgccttatgagttggataaattccattggcttgaaactattattaagaagatcaattaagatattgtcgtatatctcagcagaataaaatattagttgacctttattttgtcgtttaattatagtaaatgaacgaagcattaaggccaaatgctactcataattagaaataaaattaaaaaataaaacccccaatttcacgacactgctctatatatgcattataaaactaagttctggactgttctctctagttattattattttctgaaatttattctttattttattatgatttatattgttggataggtagacacacatgcatctagcataataaattaaatcgccgcaattgttttttttttaatctaagtgtattttgtaatattttttgttttttaattttttaatcaataaaataaaaataaatattatgtttttaaaattttatttttagatgataataatgtgttcaataattaattttttattttttaattataaaaacagaaaataaaagtgtgttttgtaacttttatttttatttgttgattttatttaagttggatccaaatcagtgtggggccggagccgtggtgtgagtccaatattggggccggtgtcgtagttttctgtcccaaggttcaggttgggattagagtccaaaatattaattaagaaaaaaaaattattcaaaaaaattttgaaggtagtttttttttttatttttaaaattttgattcttaattaaaaattcaaaaataaaaa

SEQ ID NO: 384868 - DNA, 1968 bp, Cannabis indica
ttccaagttttgaagccttgactgttgtctcaaggagaccaacaggacccacactttgagaatgaatcaattgcttaatcaaactttgcttgtgggagttattggctcctcggacattccaagctaatattctatccatttagagtgggaggcactccccctcctcttgtattagcttgcagtgcatctggtgtatctataagttttgtctccactagtatattatgatcctgtaatagctcgaatgaattcaaagtacttgtatttccttgctactttttccctttatttttccagcctttagaaactggctggaacccatcaacacttgtaatatcttcactaacagtccctccaacacaagcattagtattccccaactgcattagttacaccagcaactgttgcagaacctgacactacatttttttgacccaaaatatggctgacccctcattcatatctgcattaggccctgaggttgcaacaccagtttgcagctccccgattttgcctttgacaacccattgtttaccttgagaagtcggtttcttcttacattcatcagtattatgtctcaaaccattgcaattcttgcaaatagttggcttccactcatacttgatccccactgatgcaatgtaaccatgttcattttcaaacttaatggttgctggcagctcttgttccaaagagacttcaatgagaactctagggaaattgagcttttgcctttgcttggtaatttcatcaaccattataggttcaccaattttccccactatctcaaacaaagtcttttgtccccaatatttcagttccaaatcctcaatttgaatccagatgggaaccctacgaatatcccctttcctgaaattagtatctagatcccatgctttcataatcacaggtctcttgttgaagaaggtgtaacttccattaagaatgttatccctaatttcaacagaagaaaacctaatcatgaatatgccatatgaaatgagtccaaccttatccactttctccttccaaatttgcctagcaaatccctcaaggacttccaatggtggattggcacccaaaacataacaaacaatggctgaattccaataagaaatctcttcctcaatatcatccattgtaatcttcacatttatttcatcattaccagttttcccaacagtctgaaaagtattatccaaacaacgaaccacagaacctgatcgtagtataaggggtacaggggagttacctttccagatagctctgctgcaagagtgatttgcttccaggaaatgagcgaagtcacttcgaacatcatcttggcgcttcagctcaagcagggatgctcgaggggagagggtctggaaagcttcaggttctggttcatgattatcctcctcatcagtgaaaacaatgggttcaattcccagaatttcgtccatcgttttggttttctttgcatttccagacgaagacggacctcgtttcttcgaaggcttggtgaccttagctgcagaaggctgcttcccatgattctaggaccttgtttttgccatggcgccagctcaagagttgagagagcaagaactagaggaaatagagttttaatcttatgctaattaatatattatgtatgttactatcaacatctcatgtgtaacatacacataatatattaattattacacaactattatgttacatatctcacacatatataaactttaatatgcatgcatgatatatattatatacacataatatatattatatatgcatgtctcatataaatacatagaatataagtatttttacatatttaatctcgcaatatatatatgtatattatattatatctcatatatatacatgtaataacatcataataattcaaatatcatattatatactactatatatattaatatgatataatcatatgatcacatatatataactcatata

SEQ ID NO: 384869 - DNA, 1384 bp, Cannabis indica
ataccaatattatacatatagacaaaataaataaataaaaataatcattaataataataataatataccataaaataaaataaaattatactatactatacaataaaatttaggagctttttatatttacacttcttaaacatttttcttttttttttttgttcattttacggtaattttacataggaaccctattgcaacttatagagtaacctaaatcgcaaccaaaaattgtatagcaacctacatagaaatcataggagaaaccactttagaaacccaaaccgtaaatttagaaaaaaggttaaaaaaaaaaaaaagtatatgaggtagtttctctaaaatctatatactaataacttacaacaactaataaaaaattaaaaaaatcgttacaattttaaaataaaaatattttaacaaaattaatatagtcttctaattctaaaaaaatatgaaaaaaattaacaaaagataatatgaaaataaatagtatgaaagagttattttttttttataagctttgaaataagaacatttatttacatagtgttatagtgttttaattggatgttatttgctataattttctccttatggtgactgtggtcccatatattggctcatattttttttgagccttttcccaaaaattatggtctaatactcatgaaacgtaatattaattttatctttttattaattaatgcatacggtcaattttatatgtatgaaccttgaattgttgtgattgtatataagaagaacatcctaatgtaaggcagtcatgtgcgtagatttatccattctgttaatccgattatttatttatttatttttatttataaatatttttatatagaagaagataagataaataaatgtacatctatgacagggtgcaatgttattcaatcaagtttggttgcacattttggtaactgcagaaatttttggctgttggacgttcgtgcttgacacatgtatattccatgaatcttagctaaaataaagtacacataataaattatagtttagttctattagaaagggttagttaaattaagaataaaaactataatagtaataatacagttggttattcgatccggttagccttccccactatctgccaaacatgctacatttttcacatgtgtttgtatattaattatcttcttcattattttcttctttttctttacataaaaggtgtacttcgattgatgactagggtttaacatatataagaaagtttcttcaacacattatatttaggacttatttagaagtaattaatattatgtagtgtagagtgtttaagattttaatatacaatagaataaatggaaatttacatggtatactaatttttgttattttt

SEQ ID NO: 384870 - DNA, 2306 bp, Cannabis indica
ttctggaaatagtaggtcaggtagcgtatcagctagcctaaccccttactttatccaaagttcacaatgtgttccacatctcgatgcttcagaagtatgtgtctgatacgaccccatatcctaagctatgaggatattgaacttcagacagatctgtcatcaaggaacaaacggtttatatcctggataggaaggaaaaagtgttgctgaacaagactattccgctagtcaaagttctatggaggaacagaaagattgaagaggcgacttgggaattagagtcgcaaatgcgggagcagtatcctgagatattcaagtaaattttgagtacacaatttctatgaaaaggggatagttgtaatatcctggaaattatgattatgttaatttgagcatattttattaaatatgtgattaaattaataattaagtgtaatttattaatgacgaagattatatcaaattatgtgagtattgtaaataccatttttaaaataaaaatattttcgggttcggcgtccgtgaaaactcaacggagaggttagaaatatcacgacgataaaagttgtgatatattgggagtataccggacttgtttagaattctaagttgtcggtttagcaggaataattagaaatgaccaaaatactcctagatttgattttaggcttaagtgattaaggaggggcaaaatagtcttttcattaagttgggattttttcttttatgttattgatatatgttgaaatgaattaatagaaggtttagattattttatttcattatagatattggtagataaacctagaaatttaggaatcacacacatcaatctcttccttcctttatccccttcgaacctagagccagcagctacaagggaggttttcttcatcaagttcttcaattcctagctaaattagctaatcctaagtgttattcaacgctttgaggtaattttttttcttttcttatggatttcttatggaggagtgaatgtgttgaagatgtactgttggagtttgtggcctctaatggcagaaagaacctgaggtttccacaataggtaattgtcatgatcgagtttggtggccaacttgtgcgagaagacaacaggagtgaacgaagaaccaccagaaccagtgtctattctagctggttgtagaggaagagttggtgaggaatccatggaagttcaacaaagatggagacaaatgattattcaacaatgagatttgaatgatgaatgagaaccatgttgtgctctgataccatgttaaacgaaatgaattgacaagaattaattctcaataattacgaaagaggatgatacaatttatatagttacaaggttaggcagaaaatgaaaaagacaaaattaacctcgtgactaacttaactaacaaaacagaattaacaaccaactaaatgtaaaagacaataactaacagcaaactatccaatactctataatactggaaatatttctatgactcaatatgcatcaataaagttaaatataaacatagaatattgaacctcaatacaaaccaacaaaattaaattagattacatatttcttttcacatacttatattatataaaagagagaatttttatttattaaaataaacattacaaatagccagagttgtatgctagaatagattgtaatggtttgagaataaatttgtattggtttagatttgtatgggatggatattaggtggtgtagtatgatgatgttgataagttgataagttggatgattggtgggacaaggaagagttatgtagtgttttaatttttatgtgtgtagtaagagaggagacaaggtagtaggctagtagtaaaagacttgctttggctactcaagcttggttacaatttggaagcttgatggggtatttatagttgtttacccctacatttaatttcatctagattattctagttctacatgatttacaatttttctagacttttctaattacattcttctacaatcttcttgattggttacttctagttttctaaatattctaggtttctctagttttctctaattttcttagttttgtgtagttaatactagaattttctagataagaaaagtgtagaaatgtgtagcacttttcatcactcctccttggtacacatttcggtaactccgatcatgtctcgcaatagctcgaactttcctcttggtagtgcctttgtgaatatgtcggctacctgctcttcagtcttgcagtgtttgagctcaatttctttatttgcttctgcttccctgatgaaatggtact

SEQ ID NO: 384871 - DNA, 1298 bp, Cannabis indica
aagcccaaaataaaagtctaacagaagaatcatttttttgttcagataataatattttaagctctgtaaaaatcaatacgtagttcactcatcattataaaccaacctatttttaagaataagatattgtacatgtaattttaaacaattttaatagttatatatggtcatgtaaaaaatttcttaaaatgaaagatatttcattaataaattaataatcaaaactttagaataatataaatactttgaaaaagtaaaagggaagtggggcttacctattttttcttagtattcttattttttttacgtgacctttgtattcttattaaatgtgcatccctcttcaaaatctgcttataatcgatacatatatacaaaatatatattgagttacaaacaaatcatgaaaatagataattttttttaaaaaaattataattgggaataaagtaaaattacttactgttggtataggaaaatgacaaaaaaagaataagtaatattaaattgtgtgtactatgttctctgtaggaataatagaagaaaaagagcaaagaaagaggacgaaactcaatagtcacttttagaattgcaatatttttttttgctagagtttagaattacaatagttagttgtgggcagagaaaaaagcgcttgacttacaagaagtggtgggatcttacaacatttaataaataaaaaactttaattaaataatgtaaaagaaataacatatatgtaagccacgtagggaggtgtccgacaccagaagtgctgaacaataatactctttaaccttttaccacttatttgtttctccattagctctaaaataaaaaaaacataatagcaaaaacaataaatgatggagcggagagaaagaggaaagagttaaatgcgggtaggtaatgtgattcaattgttgtttgaaagaaggaaattgaccttttcaaaaaaaggaaattgagtgaaaagaagagaagagattaaacatcacaacggataaatcaatagctaaaaatgagagaagataaacgagatccacaccctactagaaagttgatattatcaagatctgagcccaatactccttcaggttgttggattcttcagtcttacacactatgattgaaactagacttgctatgagtgggcatgcacttactcactatagactcgaaatttaatgaagaataatgaaggagattcaaaataaaagaaggaagaaggaggtctcaaaactctctagttgtctgcgatgttaggtcattttttttggcaatttagttgtcaaaat

SEQ ID NO: 384872 - DNA, 2203 bp, Cannabis indica
tttttatttatgcaattcttacatataccattattttaaaaattctagttttaacagtaaaattatttttacaaaatatagtaaaaatttaaatgttagaaatgagaaatgaaaacccaactccctccccaaaccccaccaaaaaaaaataaagaatcaatcattggatacaaaaaataaaaataaatcaccgctctgttataccatcattttagtcgacaaagtaatgctattaacgttgacaaatgtaatcactcggtaacgttattattattactattatttaaagtaaaattcataaggaactttttattactttccactctccagctcatgagagataaatattgcagataaattaaacacagcgaaaaggattaagaaaaaaaaaatagagaaagaaagtataatggcactaataaagactgaaattaattatttttaagcttattaggtgatcatttatttgaaagaaaaaaaaaagtttaatatctcagtaattaactgccggccggtagccttttggaaaatttatgaacagagcatagagaaattaaggagagtgagtgtgtaaaaataaagcatagtttttacttcgattacttcgtggacatttccatagagaaaaaaacataagcaagaaacttttaaaattcatttaaaccgcaaaaagagaaaattaacaatatgcagatcgtcgtggtcgagacgttgacatcgtcaatatcttatatagatatacatatatataaaaatttattaaaaagttacgtactaattaagatcgtcctcatcatcaacagtagcagtagtagtagttctggtagtcttccctttgcgaacccttctacggctgagggtccttgcttcgtgtggaagatttccatcgttgaagatcaagggcaagtcgttggcatcgtcaccgtcgtctacagtggctatgcggatacaagaacacctctctaaggaggcaaagaaagcggtggtaacactgttgaagagccacatggccaccccatcaagctttccgtggctcgatgatgatgaggacctggtccgcaccttattgggctgctgctggttcgttgatgatgatcgtaggttcaagaagctggtgcaactggtggatgttgcggctgccataggtagaatacctagatacaagtaattaattcttcttcttcttattattattatttttttggtgggatattattaatttaactttgccagttgccactcctagaaaagtgatcgagtgttaggagagaaaaagctttcttaaaggtcctctaaattatggctttctccccgcttgctcatgaatcttcatgcctataatctgaaattccaatgttgcccttttgtactgtgaaatttattaaatcctaattaagctttgttaatcattctttaattttctaacttatccatttagttaaaaatatctaaaatatatatatttaattacaatagtataaccgaatttctttaatatgattacacactgtgtcacgaccggagcgctaggctgtgccacatatgtaatattcataatttgggtgatcaaatgtcacactttgacccttgtaagaaaataacgcttataaatgattttttgatttatatcacaaaatacttattgaaaaataatagtttgattcctatatatgtatcgataagaaaatattagtaataaaatcaagaccactcattaatatataaaaggagaataatatcctcacagttatgtagtcaccgaatagataaatttgataagtcaataaaataccaaaataatatctagcatccatcattcctcatttctaactagtacataactaatttaagtcattcagaccattccattctagcttaaatataaaatcagtttcattggcagtttaataagtagaataagactaaattaataacgactttcttcttcaacagtactatcctcatccactagcatcaaattgagttcctggaatgggagaaaatgagctcataaagcccagtaggaaaacaactaataacaaaggacccttggtttaatataaattcatgcataattagcttttagaaataaaatatctcatcaccattatcaaaatgtataaacaaagtagagagaccacaaataatcacaaaatcaagcgtcaaatgcatatcacacaatccactagacccctagctctca

SEQ ID NO: 384873 - DNA, 3106 bp, Cannabis indica
aggtaatactgtaataattatgagtaaaatccttaacaggagagaaggggaagggggggtcaagctgccaagtttcagtttgcaccttacaatttttatcgtcaccaaaatgcgctgggacacttgatgatttttaaaatatggtacagcaatacagaattcgctcgtcgcccacataactacaattaccaatatccatatccagatccactgccttaacacaatctacaatagttattattacttgcagtttccatatggatgttggttctttcaggatacgttgacgggaaatttaaccctggaccacgcacacataaccatccaaccgttttgtttgatctagccttaagtgaccatttctttagaaatgtttttaatttgatgaatgggaaaagtttgacaaaagtaacaccataccaaaattagcacaaagccagcctcaaaagttcagacaggaaaattttagaatcaagtgctttatcttcaagtgaaaaagttaatacctcttattaatggtaccatagtggaacttaaatcttccagtcttagcatcctcaacatactgcagccagaagaaatagaacatcatcacctaatatgtattattattcaaaataactaatgaatctctagattttagaactaaaaacaatctcataccaatttcaaggtaaccaacattgaagaaaatgccaaggaattaaaaggtatatcatccaatgcaaaaagctcgacttctgatgattctggacctggtgcaaagtggggtttcttcaactttgccaagaagattaagtaagtctgctcaaaggacagacataaataataaagatacacataaataatttgagcaaatgaaatgaatcacataaataaaacatgtaacttttccacacctggcctattcgagggatgtccaattgagcaaaaggtgatacaatttccacatcagcagttgcctcctcccaggtttccctaattgctccttctgctgccgattcccctatttccatgtaaccggccggaagtgtcctatttgacaacagcaaacaattaaaatcataaaactgtcacaattaacagaagctgcattgtacaaaacaaagctactaccctacatttcatacttgataattcacttcactattcccaaaagagaaactttattcatgttcaaacataccaaaggccgtatgacggttggatgttcctcttgcaaagtaggaccttattatcgtgctcaacgagacaacccacaacctatatgtatcggacaaaatattgactacgtgattgtcagcacagatcagaataaaggcaaaaatacagattacaattgactagtaagcctacaatcaaaatgaaaatcgtaagcataagactccttttcgcccccccttctttcgttactcaccaaccaataataatcttttctttatcaaaccataattcgaaacacatatttaacaattacataattcttttagacacgaaataatgggttgtaaaccaaaaagtgaacgggcataatagtattcaaaaatataaatccttgaagaggagaatcacaaaggaagtgcagagaaaggagaacaagacctacatttacaaaaacaaatttgggcacatccagaattctcatcagttactcttactttaaatgcagtctatgttttggttaaaaaatgatcatttcaatcagtctgattagtaaggttgcaatcaaattaacatgatccagaactattcatttttactccctatacctaacatatcttcctacactgtacatgattatcaattacttgaacaactattaaaaaagcagtatattaagctcaaaacaacctcatcagtcggtcttggtacaaaacaacctctaaactgtttgacactatcttctgagatttgaaagccttaatgagtgctagttcacacatgaaggtctgtacgaatcaatataaaatttgccaaaaacgagcagcacctacttatggattattacatgcattcattaagcaacaaaagatttcacaacaaaagtgttttgtaccatttttgggttctgatatgtaattttctcgcaaactgtacaaatagctctaatattctcctccccttcaggtatttcatgttttgtttttccaccacaccattggcaaaaattgaccttaagagcagcaccaccctgcaaatgcaattaaagttaaaaatattgtgtcaatgaatagtaataaccgcaccatgacaaaagaattctaacactaaaataccaatagagatttaaaagaaaagggcattcagaaaatgctcacagttgattgagctgcgaccgaagatgatgatgaagaagaagcgccaactgggtttgactcagagttggctgcgcgtgcacgaaacgctccgaatccgctactcgagcgcgttgaagacatagtcaagaaagaagaattggagggcaatcttctcaaagaagaggataagggattgacggagacggaaatgaaggaaagcccagaactggtatggggtctccagatatgcgaacaacccagaacttgaatagctttaagcatattctataatggagaaaaataaaaagaaagaaaagggaagggccccaatatatgataaagtagaaagaggacaaagattcttatgggtgggtgttgagaaaatggatttcgaattttgatgacttaccctgtacagcacaaaacggtcatcgtcccgagttaactaggccgagtcgcgggaacacccctgattctgggttggtaaggcaaaaacgttgccgccgatatttttcttctcatttgttttttggtttaatggtaaggcatcctcctccctatgtcttgaatatgaatgcagtcactacgtttatacgtgtgtaaaaaaaaaaaaaaaagacagctaaataaattatttaaattttatttttgataatttaatttttggctaattagtaatttttttccctactttgacatgtaccaaatcgtcctcttgaattttttggtcattaaaaattttccacaaactattgagattgataaatttaagaatttttgctaatttcattcaattttaccgtttcagt

SEQ ID NO: 384874 - DNA, 1428 bp, Cannabis indica
tttaaattttaaattttaaattcttatggccttttttttttctctcattacagtcacatcatcacaagttgggtagacaagatatttctgcttaattatattgtattgtaccaaagttttttaactatcaagaaaataaaataatagaaaaagacagaagaaaagtgctagaaagtggaacccacttccccctcaacctatggacctaattcatcatctttgacaatcattttgtcctattagtcttaagaggagagagaagaagaaatataaataaataagaattgatcaactaacagaaaccaatgtgactataggcttcaccaaagggccaaatatatatataaatatttgtatatgtgactctccactctccaagcctcctcacccaccctattagccgcccccagttgagcttaacttttatgaccctttttactagctaaagctttggttgcttccttccttattgacccccctctctctctctctctctctgaggttcacagaaaaatatatagtacagcgccccatgtttttggtcacttggccattggaggctccgatgcgccacttcacaagggcactgtactgcactatatgattttttcaatagcctttggttttctcttcactctttcgtcatctctctctctctcccaattaatcaatactaaaagaatacgaaatttcttttatattccaactacaatgtttacacaaaaacttacattctttattatttttatatatatataaataataaagaaaaattaattatttaactagtatttaattattagaaactaaaaataataaaaaaacaattttaatgtgacctacaacgtctcactaattaataatagtgaaatactgtaaacaattatatatataggatcacttttactgttgagtttgattaattttaatgagaaataaaactaattttaaatttttagtttctcctaaaagatgactttaatatataatatttggttatttagagtgattattatttaatatctttattaatttattaagcggcaatgaggccaatttgtgggaatctttccgtatatatcaaatgtagagattaattaagttataattagtcaattaattagcaaagaataatggttgtgcatggcagcaacaagctaattaaaattaattagtggacaaagcacttgtattaatatttatcttgccaaattatctaatttcaacattgacatttggatatttttgtatatctagctaaatatttatataaaaatacgggtataaatggaaaattatttgatgtattttttttatttttacaatttgagttgcaatttataatattcggttgattattatgtgaatttctgtaaaaataataaaaaaaaatctcaaaatgtaaaaataaaagagaaaataaaaaaa

SEQ ID NO: 384875 - DNA, 1486 bp, Cannabis indica
aaattatacttaaaagtcttaaatttgttacctttccgagctatttgacttggcgatttgagcaaaaaccacattttcagctgagccatcagtgtctgctccaatagaagtaccattatcagaagtgtcacttaatctctcatcataatcaccatgatgatcttcgtgatcatgatcatcaccatgatcatgatcgcgattgtgctcatctacagacacgctttgaggtctctcatcatgctccatcgagtgttgggaatcactataatccgacgagttgtcatgatcagaagaagttgttttctcagttagtcctcctaaggattttccacttgaagagtttcgaatgctttttttcgggacattattcccattcttttcggattctctatttaaagatggagaagtgtactttagtagtgagcctgttcctggatgaactttgagcaattgaagcctctcaatctcttcatcttttttagctattgtgttcctcaaagaagctacctatagaagaccaacaaaatcgagttcataatcaatcaatgatgtcgtttcaatttacaactttctttcgaaatttgaaaacatcaatttatgtttaaggttgtgtttggttagaggtaatgaaatagaatattgtttggttacaatttgaagtgttattctaatggaacgaattttctcctgaattagtagaatgattattctatttcaaaatagaagaaaatttattcttttttattctaattctaattcatattcctattctcattcttattcatcaaagtattattatggtgcctaatacgacttaactagggttgatatactgtaattattaatgtaatttaatatcggtttagttagttctaagaggcaaatattgtaatggtaccaaaaataatagaaacataaaagtggaacctgctcaactaactccctcacatctcttccttctttgttacttcttgcagcgccgagctcaactccagacaccctttcggcgaattttaaagtactcatagtttcggaatatgaaatcacatctggattaagctgcacaaacatgagtgtttttgcttgtcctcctatcattcaaaaaacaatcataagcaaaagtattatgcaactcaagaaaaattttaagtaaaataaaatacctaatgagctttgaagaacttgagtgagcttgctatttcgatatggaacatgagaacttttttgtgccaaagcaaaaataacatctccaagagctgataatgatttatttatgtgttgtgcttccttaagtctatctccagttacttctgatcgatctactctttcgcttcctgcaagatctactaagtgaagattaccgtgcaaagtggcgccggtctttgaatcaaggccgcgaacatgaatggtaacacagctgcagtagaaaagaaaatacttaattttgttaccacattaagcaaatatgcaatacaagtttaatttt

SEQ ID NO: 384876 - DNA, 1048 bp, Cannabis indica
tcttatttttgttaaatatatatgtaaaaaaaagtgagatacacaacaaaataacttaagtgagattttcaaaagaaatcattcttaaatgtggtttgtttcttatacatgtcatactagtagtctaatgttacggactcatgctttttaacatgagttcaaaagtttaatctcaatctaagattacagttgtatattaatataataatttgtactcttttttaagtgaaattgtatataattagatcgaatttaaatgaacttaaaaatattaaatgtgatttaataaatatttgtttttttatagaaacacttcttaaaaataattgtcttctttacaaaagatttgaaataagcataagtgcaatgattaatttaatgtattttttcaattatagaaaccaaattagtagaaagaaataacaaactcaaagaaaaaaaaaacatgccccattttgaagtgatgtaaaaagggtaaaaaagtaatttggatggacgacccacaaatatttgtcgtttaagtaaagtttgtcgtatgtatgaatgagttttgaaaatggtcttctgatttagctttaaccaaagtttttgtttgtttatggaggcaaggataagatctatcacatgaatgaagcagtaatacaaagcccaaaaaagttattccaattaagaataattatattccaaaatcccatttttatatttcaacattttaatttaaataatagttttagcattatgggtgttcattactttttaatggttattaattatataatatatagtacaatgttatttttctctttattcagttaatattttattatatgtcataaaaataagttttggattaaacaatcattttggcttattcaatctctaaaaataatattgttttaacaagttactttctccgaatctcatcgggccgtgagttgcagactatcttcagcctatcatttgtgttgagaatcatgaggctccacctcaaaaccaattgtctatgagtggagtagctcatgttcttatatatggctcaattctctac

SEQ ID NO: 384877 - DNA, 1736 bp, Cannabis indica
tctcgagctggggctatggccaaaacgagatctaaagggcaggggaagcaagttacaactatcaagaagaagaaaaagggaccgaattcatgttctgatgtgaggaaaaccaaatctctggatgctattctcggagtagaaccagtgattttatcggatgaagatgaagatggggaatcagggctaatcaaagtagagcacggaattcaaattccataatgccaggatctcttccaggagccattgtcgcctaggtcatctcttcgatcgatcaggcaacaagaagaaatcaagaaagattttggcattctgctggaaactactcatggaacaaatcgaggagcctctgttcaattgcaaggtaataatgctactcctattgatttgcgatctagtagtgttcaaaaaatacatgaggaagtagaattttgagagccatcaattgtttgttatgttcttggggctaatcttcctttgcaagtcttagaagggtttgctaggaggatgtggaaggagaaagtggaaagagtaggaatggtctcgtatgggattttcttgatctgatttaacacaatggaagatagggatgagattcttaaatggggatacattttctttaacaagaggccggttgtcatgaagctgtgggatccagaggtgaattttaagagggaagacattcgaatggtgccaatttgggtatatttggaggatctagaactggagtactgggggaaaatccttgttcaagattattggacaaatagggaaacctattatggtggatgaagctactaaaaggagagataagctgagttttcctagagtgcttatagaagtctcattgcagcaagaatatccaaagattattgaatttgaagatgagaaaggttgcaaaacttctgtggcagtcacctatgatggaagctgttagtgtgcaaccattgctctggaatggggcaccttgttatggattgtcaaaagaaaatagaacaaaagcatgaatggattgctaagaatactcagaaacaaggcaaagaagatgtgaagatagatgctgaaggtttttagccagtagttaaatgctagaaacctaaggaaaagggaggggaattagcagcaggcaccagcaatcctttccaagtactgcagaaactggacagagaaatggacaatgcacatacggatgagatgcaggaacaagagaatgaggcagttaacacgggaggggggagcaccctctcttggaaatggataaaataatggcatggaatgtccggggagtaaacaaccaacaaaaacaaatgtcagtcaagcaattgattgagcaacaaaatatagggttgcttggtctcctcgagacaagagttaaggctcaaaaactaggagccttatatgtacgaatgttcttagggtggtgttttacatcaaattgtgcttggcacaaggtgttgtgcattgtgccctaaataaaactctatttcaatgtaatctttatcatttaattatcaataaagagacagaagtattttcatcacttatttagtgtgtcatttggttcatgttatcatttatatgtttatttgatttataaattcatccaaacccttatcacattgatattcttgtttattgtgtcgtcagcacagtggaagtaatcaagattgtgtgattgatatatattcctagatttatcagtacacagggtttaactgatatgataatctacaacatag

SEQ ID NO: 384878 - DNA, 2744 bp, Cannabis indica
agtggtaattacactaaggtaaagttcaactcgaaagacattttacctaatggacctaagcaagatgtaacgccttaatacttaggcatgctacaataattttttcaattacagtgcaacctttactaatcaaaggatttttcttgaaaatcatgtcaaacattagatttaattgctaaactatataaacttttgagtaatttgtggcataaatacttaagtttaacttccagtttctaacaaatacataagtttaatttttagcagtaataatacctaagttataattttggaacttctataggtacctggttaagtgaattgccacgtggcaatccctgattggtccaagttcttaaatttttattattttaaaaaaacttagttcaaatatacctataagaaaataacacgtggatttaatggcttaatatttaatggttaggtatccacttagttctagtaatagaacttaagtattattactgccaaaaattaagctgaggtatttatttacaactgaaatgaggtattgatgatacaaattactctaaacttttatacatttatttacgaaagtcggaatctcgtatttaaactttaacaacattatcaaaatatatttagtctggtcgcacatcgactacaaaataaaatcccaaatgtttcgagaccgaacactccaggtcgtgccaccatgatatgtacaaacaccaccgtatctcaaagtttactcatattcagccttcgcctttccttaacctacaaatggaaataacaattgtgagtcgacatactcaataagaaaagcatataacaaataatataatatcgacttgtctctaggcgcccatacacctatttataaggcttaataaatgagtaataacgttctttactagggtacaaccactgtatcacatacactacgtaccaatagtgtacgagtgttggtagagattatcttgtaccccgagtacctctaagtgttgtaccacacacaccctgtacttttccgtacatatgctagtaacaccgtaacgtactctttaaatattgtacactataccaatccactctgtaccacatccgtacaagtgttggtagtgtactaactataaaaagcatgcatatatatcatacatacataattcgcatatatatatatatatcatatgttctgcgctatttgtaatgaccgcatttttaatttggattagtaaaggcaaattatatttgtaattttatgattacttatgaatttaattatttgtgggtcccatttttagaaatgggcattagagttataatttctcaattatggatattttattaaactctaagtttattatttgaattatatgtgaaatattttatttttgtaatttttgctcggcgacaacggaaaacgcgatggctggctagtttgatcacatgggtacatttagaaccttaattcttagtgggatatattttggagaaaataaataccaagattgtgcgcggttatggtttttgaccattttacccctaggcttataattgtttaacttttgaggctaaagggcatttttggtatttccctaatttaagaataggtggctaattagttaggtgacacctagccacttttgagttcagccttaattagtaagttatcctttttgaagattaaagaattaaaagaaaagaaagaaaatcaatttagagaaaacatcatttctttctctctctttgtcttcggccctctcaaactagaaggaaaacttagcccaagcttcctttttctagagatttagcaaggattcaaggtttttgcaagttaggtaaaccttagaaacgtttatctgatgagtttataagtttttagttgagttttggttggtaatttctgatttcaggggttgtacgaattagggtgttgattgttagttttctgttgtttaatgatgatgttttatgtttgaatttactgtttttcaagcttaattcgtaggttgagcaagtttgagttctaatggcatattgagtaattgagtattttacttgttgttagtgcttggaatctattctttgaggttatcataggtgttctggaaggtacgctggaaattggggttgaattggggaagtttcaaagtttggggtttttctgcagggaaaatcgatttaccggttttgggatttcggtctgtcagtttttgcagggtcagaaccttagttttcatatttttatcggggtttagtgcagtattaggttattggtctttaagactactccttattataagtttagggttttggggaaaggtttactcaaagttatttacccagttatgtgaatgtggcttagggcatccatccagcacaaggtttttcgttcaggtcagccaactcatttgaattcggaaacaaggtaagaactgtatataatgtgtgatatgaatatctgaatgtatgtatatgtttagtgtatatgcatacttatatgttgtgattcatacactaccaacacttgtacggttgcagtacagagtgcattggtaaagtgtatgatggctgaaagtacatcgtggtgctaccagcacttgtacgaaaaggtacaaggtgtctatggtacaacacttaacagtactcaaggtacggtccataccctacctaaactagtacggaggtatactgagtgcatgtggtacatggttgtatcctaagtagaacgctcttactcatctgttaagccttgt

SEQ ID NO: 384879 - DNA, 725 bp, Cannabis indica
tttttttttaattttacctattaatgagtaatacccgacccttagacatatatttatgagtttatctatgcttactcaatttataggtttagtggagttcacttctagcaaaacgaaaagttaaaacttttattcaagtgttagtttaataatcaaaaccacactaacctctgaaggcttttgattggcttctttagaaatagatagataaaatcagattttaaagacaaaatgtgtataaatgaagagattaattagagggaattagcttttggattagtaagacaaaacaatttgagcttgcattttaaatttgttctccttttgtctggtgttagtgttagtgttagtgttagtgtgttttgttgcagctttgatttttcctgctgcagtttgccttgtacgtctttttttattttaatgaatcagagtgtcttaatttatagtcaccctccttttcaacaattttgttattattattataatgtgattttttaacctctttcttattatttttacttctatgattttttttgtataaacttataatggttgtttcaaaataagtgaacttttccaatctctaattactaaattaataaacgtttatcaatcaattttcttctatatttttttgatttaagcatttatatattacaatatgttttatctgggactcgaactcaggatctccaacactcacacacccacctatggtcacttga

SEQ ID NO: 384880 - DNA, 2115 bp, Cannabis indica
tttttttttaatttgaatttattgtggttgtaacttgtaacaaaataagaaaaatccaatacgagcttccctgtaaataagcgagcctaaatgtaaaacgctttcaatatacaaaatttctgctgaaaagtgagagagatcgataaaagacacagtagaagtagataattctttgttgacaagaaatcatgtcaacagagcggctatcgaattcaaccaggagtcattgtttcttctcaactattctatttcagatttctaatgacactcattctcagattttcttctcactttccctagtcttaaagttattttctattctaatatttggtgagaaagttcaccatctatttgggtcctatcaatttggtaccagaaacttttcttccaaagagaaatggcaattagcttactctgagcaaaccatggcagacctcaatagcaagctggaaatggtgctttaagagcccaagcaagattatcaagaaatgaagaaagaactctctggtttgcatgaacccatcaagttccttcccaagcttgaacaaagcctctttgcaatcaaaatatactgtcctactcctactcctatcataatgctatgattaaatataagttgccatcactactgtagtactgtgtagctgttcatgtataggggtggaaagaacagcatatgaaatatactggttagactaacaccaaaggggtcagcactactaaatcaaatgaatgtcaacaacccattttgtaaaatcataattaacactgccctaggacaaaggtatattcatttttctaatcacatacatatacgagaacttgaagaacacaaccctcacgtacacacacccaacacaatccaaagtgtaaattattagaaaaacacatttcccacgtctaattcttcccaataaatcaaacaagaaaagaggcactcatgcagacatttcatcaaacatattaaacgcataaactcaatagttacacaaacagccttgcatttccagggcttttctagttaagataataggtgtaagaaagaacaataataatggcaatacaagtttaaacacagtacctagttagattatagcaaaagtctgaaagaattaaggaatggatttcacttctgaggcattcgcttcgtccccaatctggttcgcttctctgtgaccttcttctatctggtcgccgattgcatcaacggtcgtggtagtcaagtttgatggatgaattagattaagatgaaaaagaattcgagtggtttggtactgaagaggtgaacagaagaagtgtctctacatattcttaagcaggaagaaagagtgtttaatttaatgataaataggatttttgtcacccaattttaacacataccacaatccttgaatttttatgagaattattaaattaaaaatttttatttaattttaatataaattataatttggtatatatcaaaatttgaaaggtatgatttggtagatattaatttttaagaaacataatttaataaatgaataattactaaattaataaaatataatgaaattggataaaaattcttaaatctaccaattgaaatgattcttttaatagccaaaaaaatcaaatacataatttaatacatatcaaagttttaagaataaaaatcttaattagtcttaatttaatacttcttccaacgaggtgttgttgtagagtttcaaaaaaaaaaaacaaagtgttgttgtggtattggaagagaacccctattaatctttttttaggaaatatattagtttattattagctattaataatattatttttgttgagaaatgttaaaattactaaaaaaaaatcattcaattttattaatagtagtctacaatttaatcttccccgttaaaaacaaaacagaatttgaatcagaaaaataatccaactaatcggtcatttgattctcgaatctatttttaaaagtatgaaaaagtttattaaggttataataaatatggcataaaaagtaaatgtcactaaatatggcattatataaccaatcaaactattaaaaagaaatctgaatttaagatttataaaaaataaaaacttaattaaattaccataaaa

SEQ ID NO: 384881 - DNA, 2228 bp, Cannabis indica
gtaaaataaatttccaacattctccaggtacattgtggtatctcagatttcacttgaaacagatcgcaaaatccatgagatgattaggttgttacatgacaccaagaatcgtattctttgtcatcctcatcaggttgtggcaaccttccatccataaatttgactttatttcttgcaaccagtgcaacaagcatggatctcttccataaactgtaatttttagatcatgtacgaattttagcaataagcatggcgctcgggtgatctccatgtgagagatagtagggacttcttggagcatcgaatcgaggattctaatcatgagcatgaaattgattggcattatcagaattgtcttcaagacctaaagtattgtgagtctgtactccttctcttgccatttccaatcgaacaccaccagaaaaaaaaaatagagatgtgaagaaggagaagagaagaacagaggatttgcggaagaaggaagagagagctgaagattttcttgactttgataccattttacaaaagagaaagtagagagaaagaatgattcattgattgagaagattactgttacattgaggaaaacaactatttatacatggagctagcaatacaagtttagttataagaatctgtcatatataactaaaaatttaattaactcactaacaaacctaactaacattcaagtgtacaatacaaaatataataagttatattatataaacccttcttacaaccatatttattgcatcatcaaaagataaaagtgcgcatacaaagaactgagacaaattaaatacaaaagtacaacataataaattaagcaataaaaacatatttcttcgacatagttagacatactaaaacacgtaaattcttcatatataatcatcaattctaaatgctcactcatttttcttacgctaattcatatttattaaaaccctaataatatatttttacttctacacaagaacctccttgttaaaaatccaactaaacttgacactaagaggctccatcttttgtgcacgctcatcagctcgctcttgaagcttcctaattctcggcgcaaggccacaaacaaagtcttgcgccctttgagcctcgggattcaacccttccatcttctctaacctccaccttttgattaagaactccaagatgtcagcgtagtcatcggctgtgtagatgccgaggcgctgagccacagccgagaagtggtggaataacatggggtcgcatccatcgtacataagggcggccggcattgtgatctttctcctcatcatttcctcgattgcgagcatgacattatttgggtcaacttctaagagcttctcggtcatttttacgtaagcaatctcatgtcgcttctcatcggctgcaatagttccgcaaatgcgcgccaagagtggatctccgctctttttcgctaagtgagctgtgttgccatgcgacacaaacgttgctcgctcttgaaatgatgtgtacacataacccaagtatggattgttgttgaaatttccattctgtgaatttcaatccaacattcccaataatatataaggaaacgacattcaaactctagaaatgacaaccaaaaaaaaagactaggtggtttggctcttcgagagagaattgattggagaagaaagtttgtagtggaagaacagtaaaggaaaaaagaatatggaatgagttaattaataagagtgagaaaatattgaatgaacaattaagagactagtaaaaatcaaccgtactctgatcaaagcaggagaattaattgatcatgaaggagagaaaatgcatgaaaatctttgaggtatgtgcatgggaatgatcactgtgtgtaattactcacaaagtgtgtttagatataagataataattattgtttggtaaaatagttagtcactacacaaaaatgatattatagtagttaatatttaatatttaacttgttgaaaagtttttcttaattacgtaattatgcctaatttttatggggaattatgagaattagaaagtataattgaaatcaattatctccaattacgccgttaacactaaattgtgtaattatcttgaattacaccaaaattccaccatgaattttcaaatgcaccctcaaaaaaagtatttacttattaatggaatttactgtaaatctatttcagtactttaattaagaatgattagcattttttttttttttt

SEQ ID NO: 384882 - DNA, 1647 bp, Cannabis indica
tgttaagaaaccattagcagagtaatacaggggattagctttaattatgttgttagctatagaaggtcattagaagtttccttattctgttattctcttttttcctatctttgacctcttgtactttgacagctgtccttgtaaccgttacaatgattttgtattgattgcctataaatgagagaatcctctgccagcaatgattgagctgagcatttacttttcacctacaatcatatcttggtatcagagcattcattggcccgcgccatgtctgcagtcagccaaactccacacggaggtaatcaagatgatggagatggtgcagaccagccgactcctgtacgactcagctcccctcaggttattaatggaggttctcaacaaggcacttacactggatctggaggattcaacaactcaccgtttggtaataccctcactcaacccttttctatcaaacttgatagaaacaattttactctttggagaaatctagtctctactataatcaggggacaccgtcttgagggatacatcaatggaacaagggtctgcccacctgaactcataccggttccaggtgcaacaaccgaagacatatcaaatccaacactcatggtaaattctgagtttgagagatggataatctgtgaccaaatcttaatgggttggctctatgggtccatgactgaagccatagctacggaggtaatgggctgtaactcagcaagaaatttgtggacagctctcgaaagtctctatggggcacactctcgcgcaaaaaatggatgatacacgaacgaagattcagacaatacgcaaaggaagcaccaccatggttgagtatcttagacataaaagaagctggtccgacagtcttgcactagcaggagatccctatccccgaagctcacctcatttcaaatgtgctaagtggtcttgatgctgaatatataaccattgtttgtaaacttgaagcacaggcaaagatagggctaacttggcaggaattgcaggaaacactcttaagcttcgacagtaagcttgaacgcttgaacttacttggttctagtgggaagaatgcatctggtgcaggaccatctgctgcagtagcaaacaaacagccccaaccacactatcctgcaggccgtggcaattttaacagcaactatggtcgaggaggcagaggatcgaactatcacagcaataatagcaacaacagaggtggtggttcaaatcgtggtcgaggcaggggtgatagaaacccaaaaccaacctgtcaagtatgcggtcgatacgggcactctgctgccatatgttataacatgtatgatgagtcttttatgggtttcactcctagcaacaacaacagcaacaacaacaccaatgagaagaaggatcctagtgcatatgttgctacaccagaagtagttgaccatgaaaattggtatgctgactctggggccagcaaccatctcactgccaaccaagacaacatgtccaacaaatctgtctacaatggtaaggatcgtttgactgttggtgatggtaatcagctacatatctctcatgttggttcaagcactttgcaatctaacagtggtaatgtaacaccctaactaacttaggcgtattacgtgattt

SEQ ID NO: 384883 - DNA, 1616 bp, Cannabis indica
aaactaaattagtgaaatttgtaactaaatactatatattttatttcaaaaaagatactatacatattttagtcacaagtaatattttgttgtgattaaaagtcacatttagtcataaaaaatttatatattgtgactaattaaattaaaagtaagcacatgcttaatgccctggtcatgacacgaataattgatgactgaagaaagtgattttgacctctgatttcttaccttaatcactaatttgccaaatatgcaaaagctcataaatttttaaattaattaagtacatcatgaaattatgatcgacatatataaaatatatattacatggcaaagtaagttaattaagtaacacgaaaacatgttttcataacattaaagtaggtctaattcaccatgcgctcgatcctacatcttaaaaaactaaattaaactataattttaactaatcatcatcatcattcatacttgtccattatccacatgaacatttgacctctcatttcttacttaatcacttttttatgaccttcaacaatgttatccttgtacacaaaaccactagagatccaaatataaagacccaaatttaaggcactcaatgcagccaacacccaatagaaatagtgtagatgagaacggtttaaattgtccccaagccaactctgctcatgatcatcatcatcaccatatctagagctaatcacttgaacaagagatattatccaaccactcatgaaatttccaactcccaaaatactaatatgagctgcagcccccaagcttctcattccttcaggcatttcggcataaaacaattcttggagtcccaccaccgcaaatgcatcggacactccacaaatcatgtattgtggcaataaccaccaaaccctaattggtacaacagccttagggctatccaagagcccgtgtctcgaggcgatatcaactcgtttcgattccactaaacccgaaacaaccatgttgagtatggaaaggaagaggccaaagccgatccgttgcaacacggttatgccagaagggtgtccggtgaattttcgggctaagggaatgaaaacccggtcatagattgggaccgcgatgagaatagtgatgccgacgaggctttgaagtgatgctggtggaagtaggaagtgtgatgatccaatggaacggaccattgtgctgccttgtttggtgaagaaggtgtggagttgagcttggactacgttgaacataagacagcttaaccatatgggaatgagacgaaggacaagcttcacttcttctacttgagtcactgagcacaatctccatggatttttaccttcacttaagtcttggctgtcgatgatggttgctttgttcaagaatctgtgatgggtttttcattattaattcattagtttacgttaaatattgttcactactaatatgatagaaatttattggggttatttgttcaacatattataatttattgatgaatatatagcaatgaatatattaattagagttataataaatataattacctcgtggcaccaaaagcaataaattagagaaaaatataagggaaatttgattttctatacttagaaaatcaaaaattt

SEQ ID NO: 384884 - DNA, 1602 bp, Cannabis indica
taaaaaataatacaaaaattaaatccgatgcaaataattgtgcactttttaataccaaattgcgttgattttttagtgaggcaattatttgtgtcatcatttatatgttttaaaaatcattttctagagtacattcaagattatgaaaaaatatttaacacatcactaaaaaaaatataatcgtattattacatcacttcagttattacattgaatagatctctactttttgataatatataaaatatatatatatatccatattataagtagtatacggctcatcaagatgaccttttgcatttattctaatgcccaaaaactaccaaatattttccaattattgattatattagagaacaaagtttcaagcgaaactacccataaaaatgagttacttagaaagaaacactaaagtgacctaacctatgttataagcaaactaagtaccaagtaaaaaaaaagatggtatcaaagttcatcaaagattgcagtggctagtaggcatgctaatggagtaacagattgagtaaattgagcaaaaatacgcaattgaaactcatgctttggtggtggttcaagctattaatagcgctattcttatgccttctcagtttggattttcagcttgggattgtcgtgtgttgctttcttctctttctaatgtttctttgatttttgttaatcgatctgctaataaggccactcattgtgttgctagagggtcatgttatttgtcagattgtgagtttagtgagcatgatgctcctagcgctctaaagaatattgtatcttctgagtgtttttgaataaattccatctttgattcaaaaaaaaaaaaagattctataaccgataaggaattcattatcttttaggagtaaatgaacacttgtcattggtctgtggtctaatactctaataatagaaaattttagggaatataatgaataaaaccatggttataacttctatatctctaatcaagagtcaccaacctctcacaagtacttttttttttctccaacttcaaaataagagaagtttacctgaaataagaaaaagtaaggtaaaagaaagataagataaaacgattgtacatgggcctaacaagttccataattgtcataagacaaaaagtattgtaggaagaactacttccataaaattgataatgacaaacaaattaaaaggttaaacaaaaccagaaaaatctaatgaataaagataaattgataattatgttcttccattcgatcttggatcaaaggcagctcttgatcttcgggtacgttgactgtggctggtttagcaggctttgaaatgattctcttcttctttgccattggaagagagagaacgcaccataggcttcgatccctgcgaagagcttgaaccagaaattttagtaatggagaaatcagcgagcagtcctttattgcataactgggcagatgagatggagcaagcggtctttcagtctaatgctaaggatatgtggagcgaattcaaaacaaaccagattagaactctttctactagacttgaatttacagaacctatgagagttggggatcaggttattgcaaaattggatatgga

SEQ ID NO: 384885 - DNA, 3662 bp, Cannabis indica
ggtaaaatatatccaacaagaactactacataacatttgcatgcttaaaaaaaaccaaaaactctcaaaaactaaaaaggaagaagctagggttataccttgaattacaccatttgaatcttgctaaataacctctgaattactgatcacaagctgggtttttcccctgatttggttgagccgaagcaagagagagggagagcaagacttaggtttctaattttgtcttttcctttgattatctcataattttctaaaataaagataattctaaattttcttatttcccttagtggccagctgccaactagagaacaaaccacctatccacaaaaccaaaatacttaaaatggcctcccttaagagcttaaatgataagatggcttaggagtaaaatggtccaataccataaccctgccaaattccgatattttaaatatcaatttatgaataccccactaaataaaaaaattctaaactaacccatgtgactaaattggccattcgtcgcattttctatcgtcatcgagcaaaaatcattaaaactataaattttacatataacataaataatacatttagagtttaataaaacctccaaaattaaaaaactacaactctaatgcctaattctgaagatgggacccataataaatataaactcatatataattattaaatattaataattaatgttaatttccttactaatctataatctaattatgcggtcattacaatctaagtctgatcctaagacaacctcagaataatgtaatggtcatatacttagtgtataccattaatagatctagggatgccctaattatgaacttaagaaaagctaaaactgttaattgaggtttgaattattgatagctattttaaaatgattatgggatgaccatcctatggtcattaagataacaaagtttttgtttcaacaaatactactttttaagaacatgactaaatctgaaaaacaaagttacaaagaagagaatatattatttgattcaaacccaaagtgttttatcatcttatactatataagatggtcccactacctctattgtattaacgtaagtcgtcacaactaaagaagacaacaccactgatatttctagacaaaaagtcatagtacctcgtcgtagtgagagagtttctaagaatccaccctgttatgacttagataacactaatgatggcagatcattgttagtttaaataagtaattaatattccttatatgaaactaagacttgaagccaagataactattatttaaccaatcacatggatcaatcaaaagtttttcaaatacaaggacaagaagggaaactatgctcagtttattcaatgaacttaagcaaacttcccgttcctagtattatgggtttgatgagatcatcaaaacctatgacttttggtatacctggtaatttacttactccttcgcaagaaacttactttagaagtgttattcaatggctcactctaaaagaggtcattagacttccagatatagggttttttttaatcttgggaatagtttcaactattctacaaaatataaaggcaaaggaaataattcttaagcatcaacagtgagaggtctcatgtatgctccggtatacactacaccaaaaatctactattgagtgggagttatgagtaggtatcaaatttaattcaggataagaacattggaagacaatcgtataagtcttaagattaaaagaggaactatatgttaatatataaaggtggtgctttggaccttttaggctacactaactcaaatttctagacttgcatcaacgctagaacgtctacttgtaagatggtgattactctggggtgggacagtactttttggagaagtgtaaaatcctttctagggtctctaactcttccagtgagattggatattaaagtgggtccaaaatctactagacaattattcagcttaaggaaagttttatacagtttttggtgttattctagttgtgggttaactactaacattactttacaataacatagatgtagttgtcaaatagtgaagaatctagaactctaagagaagtaaacatatagatagaaatttcacaatatcaatgattttgtgactaagaaggatgtgatggtggagaaggttgatactaaatataacctatcaaattctattataaagataatactacatatgacacttgatatggacagcaagaagatgaaaataattgaaatgaacttttagttttatattagtgcaagtgggagtttgttaggattttatgccctaataaaactcatttcaatataattttatttactaattaataaaatatcaaaaatcatttcaagttgtttggtttacatgttattttcatgattatatgtttaatatatacaaattctaataaatctcaaacatatagttactcatgattatagtattatcaacacagtaaaaaataatcatgattatatgcttaactatttaatcccaagatttatcagtgcactagatttatactgatgtgataatcagcgatgtagtttgcttacacttgtataagtggaatatcttttctagggcattaacaaagtaaacttgtattaaatgcatcggctatacattgaaataaactgatattgacagtggaaaagatattatcacttaccactattttttctaagtcaatgtcacttagttgatcttaagtcaatcctgagatggtgaagttgtagcttaattataatatatacgggttattttttcgttaccagcttacccgtcggactagcccatacttacatcttgagaatttagtagtgcaattgagtgggagtattaatcatagatatcgaatctaaagcttttataactatttagaagtgaaacgatagtttccttagagcttggctaaaacaatataaatgaaagagttcttatttcggcaattatattagtaactgaaatatcattaaaaaagctaagtgtttcggtaattatggttttttctacagcataagagctttcttgaatcaaaatttggatcccatttcaaagaaataagccactatttataggctttacaagttaataaattatattaattataaaatactcaattaatgtctttaggcaatcttaatgacctgatcttcagagatttagggactgatttcgtggatctagaataagtcagctccatctgcagtctgggtaatcagtcaatccccttgtgactttcttgtggaaaatcaagtatgttcatgggttagtttattgcaggttgtttttggtcatctagctagacactattcggtcaccatgttaggatgttctaattgattcaacaattctaacatagtacattatacttcctattacgttgtccagtgtgaatgactttaaatgagctaacaaccgtccaattactcatttaccaagccatgtgtcacctctttctatgccatgtcatttggatgatttttgggataacagggacagtaaaggagtttcttgtagtattgcctatcaattgaaaacaaaataaaattaatacagaaaaaacttcttcaaaggtatatatcgaacagttatcgacgagtattgaacaatataataaaataattttattctaaaatat

SEQ ID NO: 384886 - DNA, 1660 bp, Cannabis indica
ctaaacaaaaaataaaaaaaaaaacttacctttgagttaatttccactatataaatctttatctgctatttaatcagtttactttataaattaaaatgtgtaatttgatttccacttattttttttaatataagtttagactatcttattacactatttaaatatttcaccaagataaaaatattaattttaaatatgcaaatttaaaaaagtattaatgtcacattatattttcaattagaattttgcttttgcttttgcttttttcatgatgatattaattatttaaaactcattgttcatcatcaccaccaaggaaaaagattgtaggcttagaaggttgagtgatctcaaccgttccttccaacatcttagcaaccttccccatggacggtcggatttcggggcgactctgtaaacaccacaaagcagtctgaaccatccgattaaccatatcatagtgggccctactatcgtacgattgtttgatctgattgtccaaaatatcctcaacattcacttctctataaactttatcaaaggcccaagctggaaaataccaaacctcactcccttccttaacagacccttcttcttcttgtatctcactattcctacgcccagtaactaactccaacaacaccattccaaaactgtacacgtcagctttagccgtgatcgtatccgatttgacccattctggtgccatgtacccgcgggtcccacgaatctttgataagctcaccatatcttctttctttcttaatttcgataacccgaaatccgaaatcttcgggcaaaaatcatcgcccaatagaatgttttcgggttttatatcgcaatgtaggacccactctaaacattcctcgtgtaaataagcgatggatcgggctacaccgagtgcgatccgataccgtatgttccaatctaatacgggtttggactggtccgacccggcccgttttgaggagaagaggtatctatctagtgacccgtttggtacgaactcgtagacgagaattcgttgacctttttcagcgcagaaaccccataaccgaaccaggttaaggtggtgcattctagcaatgatggtgacctcagcccagaaatctggttcaccaccggcgacattctttaagcatttaacggcgacgactctgtgatctgttaattcgcctttgtatacatcgccgaaagctccttgcccgattcggtcagagaagtctttggtggcggttttgagctctgcgtaggaaaaacgtttgggtccgccggcgggaagaagctcgagaccgagtgttctagccatatctctgtatttgatatactttttgagaaaagcgtagaagaacaaagcaccggaaattagttcggcggcgaagagagtacagattattacgatgtttcttgtggttgtgttggaatcgtctggaggaagaggaagctcgattttgatcggacatgtcgtttcgagaatctccgtcatgcctttgaaattgctctgatcagtttcggattcgtcaacgcggaggaacatggcgctttctgttcccggcgaccaaaacccattcacaagccgattatccgaatcgttcttgttcttcaatacacaagagcctctaccatcgtatttaaacataaaccctaaacaatcacgatt

SEQ ID NO: 384887 - DNA, 1121 bp, Cannabis indica
tccttttttacgcccccacgtcgtatttgaagcctttaattatgttttcaaatcttatgtactataacttgtcaacacatactatagacaagaatgtacttatgatgagcataagtttaacaaaaatgtaatctccaaacatgttaacataaaaggatacgcaaacaaaaaaaattatgaatacttagatctacacacttgtaaccgcagaaccttgtatatatgtaaatatatttaggctatattttctgtaacagttaatggtaaccttttatatataataagcaatattctacagattggatccatgaagtaataataatatgttttacctattactctactctattgtcataagaaaaaattagaaactaaaaattcaaatgaaactaagaaacaaatggggtttctaacagatttattattggtacatatactaaatctaaagaaaggtttttcaactgcgaaagtattcaagttttgtgaaatacctatatacacacaagggtgcaacttttaaccaaactaaaccaattgacttgcacgagttggtaactaatatattgaagggtctaaaatttaatagttcataaacgagttgcaaactaatatattctattatcttgcacccaaatcatgtaaaaaaaacttaaaaacagttccaacatttacacaaacaatttggaagtattttcttgcaattcaaaataggtacaattatattgatgcgaaatagtaactataattaaactttcgttatcaatatacaagttaattaagtgttgactaagaaagagaaggacaacaagatatgcgctatttgttagaatggacaacagctttaataatagtcttttaaatatagatttaagttgggtatttgtgaaataagtcaaaagaaatactatctaatggtcatgaaaactttgcacctcacactacaacaaccgttaattactttggaaagtaaaataggttgagaacagagaacaatctgctacatatgtgctacgtatcaataatatatgcaatgaaaggatcgatatacctccagccattgatctttgagcttcaatccctgcgatagctttggtattggagttcgggcttcctcgctctct

SEQ ID NO: 384888 - DNA, 1053 bp, Cannabis indica
ttgtagctaatgattaatgataacatgtagtttagataagccccacaacctgtaataccatacattaagtaaacacaaacaaaagaagaaatgttgcttttttatatttgtataggtaaataagaagaaaaaacaaataataataaagaagaagataagaatagaggtgaggaaggaagatcaataatgcaatgtctaagctgactggctatccacttatcgtgtatatgggagtcttgcttcttcctaggtagagtggtaatttgggttagatgcaataagacgactcaaaattcgcacaaaataaataagtttaagtttactttaaatgagttttggtcattttcaaattaattacggttacctgtttattaaacgagtcatttttaaattgatacatacgtttaatttagaaataacacgataatatataaagagtatacatttttaaattatatttattacacataaattatatattttttaattaaataaaacataaacatattaaattacgtataaatgtataagattttaaacatgttaaacttgttataaatatgttaatgtattataaattaactaaaattaaacatgcttttttatataaataggtttaacaaattgatcagtttgtgttttaatttttaatatgaataataaataaatcaaatttagatttgacatttgctcataaacaagaacgtatagtcctaaaaacccataatgtatagtagccttaaacatagatgagttaagcctgtaccaaatgtttacttagtttaagggtctaaaaatttgtttttcctttcaaatttatatttttttttacaaattttaaaaaatactatattttcttctcaataaaagtccaataatttatttatatatatttatagggaaattctatctaaaatacacctccttaaaatagatatattgatacacccctctgttttagcacccgaaataattttttagtcaaactttttctcatggtcatgtatgttatagttatttaaaacaacctgcaaaattttaagaaatttggaa

SEQ ID NO: 384889 - DNA, 2821 bp, Cannabis indica
gtcatctcgccaacccaaagtgcgtttattcccggtaggctcgtctctaataatataatgattgcctttgaaattatgcactatcttaagcggaagaccaaggggaagaaggagttcatggctatgaagcttgatatgagtaaggcctatgaccgtgtggaatgggattatttgcgtgtggttatgcatcgaatggggtttgctggaaaatggatcaatcttattatgaaatgtgttaactctgttcaatactccatcattcacaatggccatatcatgggtccgattactcgttcctgtggaatccgtcaaggtgatctattatcaacttatctgtttattatttgttctgaaggtttcttttctttgatcagaaactttgaagatgaacatattattcatggttgccgtgtggccaagggggcaccttctattacacacatgctctttgctgacgatagctatctcttttttttttttttttttttttttttttgtagaaatcagcattgcttttcattactccaatatactttttacaacctatacaacacttttttaaaaacaaggcctgattttcttttctactgtttacaattcactgaaccagaatgtatcttctattgacactttgctaggccatacactttgaatctcagttttacgtacatttttaattgtctgtacaataaccttcggttcttcatttgattgttgccaaaattttgtattcctagctctccaaatctggtatatgtatatcaatgctgcccaagcagcagacaacacttgtcttcgaaaagctgttatcttcttcttctctataagctgaaccaactcagccaaggtggttgcactagtctgccactccagccaattctttacctgctgtaagcatttgctggaaaatgaacattgaaagaacaaatgctcacaattttttgcttctctagtacatagtaaacattaagaatcagtgactactttaaatctaagtaatcgatcttttgtcttcagcctattttgaatggcaagccaaaatacaaaactatgtttgggagtgtttaaacgactccaaacttctttactccagctgaccgagtaagcgtggggcaaagaagcttgtaaccttctgccactttgtatcttgattgggtgaagatagtagggtcaagtaaattcataagcataccttttagtgccacattcttcctccaataccagcttccattttgaggggtcgaataactccaccaatccgcttctttgatgtatacactatgtatccatttaacccaccaattgtcttctttagttgcaatttgccaagcaacttcaagcacggctgccgaagtgaatcaaatgcttcactcctttgaacttgcattcgggcaaaaagtgaatgcaacaaagtcttccattttctttagccccaacaccgaagcaacccaacgacaccaaatctgcacaactcttggcatgactgaagctaatgatagttttctttatctgggttcgccaaacataatttgtaggaggaaaactgttatactaggcttcctcaaaaacaaaatcataaaccgtatcaatagttggaatggcaagtttctttcccgtgctggcaaagaaattcttttaaaaaccgttattcagtctctacaaacttatgcgatgagtgtctttcttatccctttagaaacctatcatgaaattgagaagatcatggaaaacttttggtggaaaacaacaaatgctaaggggcaaggcattatatggatgtcttgggatcgcatggctacacacaagtattcaggtggtatgggatttcgtcacctacatgactttaatcttgcagtgttggctaaacaagggtggaacttgttatgctctccttcctctcttgccagccggttatataaggccaaatattatccccagaccgactaccttaatgcaaagcttggacacaatcctagcttcgtctggcatagcatttggagtgcctaaaacctggtcaaacttggagctagaagagcaattggtatagggaattcaaccaacatcatgaagcatccacggcttcccgatcccaccaatccaaatgtcacttcctccgacattggccttgttaatcaaatggtgagctctctccttgatactcattgtaaaacctgggacatctcactcgtttatgatatgctcaacacacgtgatgtagtgttgatccttggcatccctttaagctctacaatggccgatgattgatggtcttggattggtgagagatcaggtgactttatggttaggagtgcttatgacatgttgcagaaccagaaacatgggcagatggtgtgaacaactcaggtttttggtataagttatggcatcttaaaattccccctaaggtaaagaatttcatttggagggccgtcacaactcaagtgcatccagaattgagaatccactccctgctcattgaagattctgagaaggagaccaattctccatctgttgagcagtcatcactatcctttgcgatcacagcagaatccttcccatagggatgatgccggttgtccttcctatccccactgtgagatttgttgaaggcttgttgcaccttctacttattgtagaatctttgcaagtgtccagaccttccacagatttaacacttacgagtttccttctctctggacttcgatcttgattgagagtgatggtgcttactcttcaaacttactttcttgggtaatctccctctttccaaatacacttcttccttcttggattccttctccaattgtaattcaaaatcttt

SEQ ID NO: 384890 - DNA, 1715 bp, Cannabis indica
cattttggcttgcctgataagtttgttcaatggatcaagctattacttaatggggctacggtgggacaattcaaacctgaaagaggccttagacaaggagaccccttgcgccctccctctttattatggcagccgaaaccctctctcgcctcatccttctcaaagaacagctgaggttaatcaaggggttcaagatgggtcgaagagggatatctttaagtcaccttatgttcgttgatgatctagttctgtttggtcaagcctcccttcgtgaggccaaagagttcctagaatgtctaaacacctactgcctatgctcgggacaatctgtcaacatccagaaatcttcaatctacttctccaaaggagtcactagcagagacgcacaagccattactcaatgtttggggatgaaaagaatgtctagacaggccacctaccttggcctccgcctgtttagatcgctgaagcgcactaatgatactcagtatttggttgaccgcgtttctagaagggtgcaaggttggaaatccaaactcctgtccagtgccggtaaagcctgccttatcaagtctgtgggatcgacaatctcaaactatgtggctgcctctgatgtaatcccaaccacgatttccaataaaattgaccgaattttgagagacttctggtggggagattcggagctaaaacgaaggatgcacacggttgcttgggaaacgctctgcaagccaaaagtctcaggtggtctaggatttcgaactacagaggctaccaataaggcttttctcatgaagtgggcttggaagctcttaactagcgatgaatgcctctggtacaaaacaatggaggcaaagtacttctccaatgatcaatttttagatatcgagacaaaatcgtcggactctctattatggaaagctatccttaaagctcgagttcatctctcgaagggcctttgccgtaggattgggaacgggaatgctacgtccatttggtttgatccgtgggtgccagggacgaacccccttcccactcctggggtggaggatgcaggtggagtgagtttggttagcaactttatcaacaataatgcttgggatgagaaccttatcaataggtggttccatgaagacgatgcaaggagaattatcaacattactctttcgagtaggcctgttcaagactcttggctctggatgcctgaatcaaatggcaatttctccattaagtcggcctacagaacgatcaagaacttcaactcgaccgatgatggttctaggaaatggaaagccatttggggtgctaagatacacaatagactcaaaatgttctggtggaaaattctctctgacatcctactgactagaggaaaactagggcctatgctctcgctcccagatacaagctgtccattgtgtggttcgacggttgaactctcttttcatctattttgggactgccccctatgctcgtgtagtctggttcgggtgcagctggcaggtttgaaccggtgacctcaatattcatgattgggaaaactggttgaattggtttgtcaccgaggttcatagtgttggaattaattttaccaggatcttagatctacttacaagtatgttgatttaacaacctaaatatgaacttctaaaacgataaacaaaacacataaaagttaagaataacttacggtgatggcagcggaattaagtgtctcc

SEQ ID NO: 384891 - DNA, 1690 bp, Cannabis indica
tccaatgcatgtgtcgaaaaaacttttgggtctgacgggtccgatgggggtctgatgcatgtgttgggtaaaaaaaaatttgggtccgacggatcctatggggaccccgattggggtttgatgggtatgaagaaagagagaagaagagaggggataggagataatgtaaatgggagtattttagggatattgtaaaatgtgtcatatcccacaaatattacatgttatgtatttagggggaaaatattagatatttgtaagcataaaattcaaatttcccttgttatatttagtttataatattattttgatgctctctctattagttgttgctgttttatactgttttttgtgtggaattagttgttttacaagttttctacatttttttggtttctggttttttttttttttagtccggtgggagtgtgatggtggcctgatggttagtttagattggaggttagggaagatgtctatataggttcgatggtatgtctgatataggcctgataggttaaggtggtccaatatatataagacctatggttggttcgatgtacaataagaatgtggtttagtggtcaggtttgatggtgtccgattgttatttgttgaaattgatcatatgtggttcgatgttggtctgatgtggtccgacgttgtccaatgcttgactgatttatggcttttatagagaacttttttttatcaattttctcttaaatttttgttctaaaattttaattgtgttttttaatgtccgtggatgataagttcaactatttttgcattcattatgtataatggtgtttgggatcttgagggtagaaattgggtttataatcgagctataaatttgacattcgagattgatatgaatgtaagctactcacgtttgattgatcttttgtacgaaaaactcgatgttgacaaagggtagtatgacttgaaattgaaagtgaattataagtacatgaaaggcttaatgtatcaccttgaagttattgaaaatgataaacgtctaaggttatttttggctatgcttgtgtagaagctagatgaatttactctcctgtttgtgactttggtgaagaagaatatatgtatcggtcctagtcccacgccaaatactattaaagatactcatagcgaggttgggacttttgttccaaaaaaatttagaggtgttggtggccgatgtgttgcctgaattaaatactatgatgtcgacagctaacattgtagcacgaatgatgagtttggtgatggtctagaccctgaatagaattttgaaggcaatgatgatgtaagagacaaccaaaatataaaagtctctgatgctgtagctttgaacctactccactattgtaccaaagacccaagcaacaaactcatagaagaccccgtagagaagatcgtcaaatacctagtactagtagtattcatctagacaaaaccagtaacgctagaagaactactaatgctagaaggaccactgatagtagaagtcctactgatgctagaggaacctgttgacggtaagaacttatcaacaaaataacaaaaacttaaaatgatatttaaatagtgaactaaatatataacacaaacttaatttttgtgtcaaatttaacacaaaatttacatttggtctaaaatattagtaaattgtattaccttacactaa

SEQ ID NO: 384892 - DNA, 2192 bp, Cannabis indica
gaaatctgtgtcctgcgttgattactgtttatggttacattgcttattcatttatgcatttccgccatgcagcaatggcctcagggataggcgacgaagcagaagttgaaggttgcgtatgtattaacttttggctttcttaagtggtacttccattgagtgtatgtagtgtatttggcttcgcacaactctgtttaaattggggaacgccctcagcatctactgtctgatttggttaagttccttcctttcttattttgagctggtttaatttttcaaatgcaaaatagtttgtaggtaaaagaattttaaggtaattaccataactttgtttgagagattgttttgaagaatactgctaaaagtctatgctttttcttttttctgtgttgaggtgtcgtctggttctgctcttcattgctttattgcttctgcacttccctgtgggttcgttcttcactgcccagctttgggatcttcaatttagaatggttgggggtcccagccggatactacatctcttgatgcttcttctcttttgattgaagggtctccctcaaactatagtggcatatcttaatttagttaaaaggattgaggagctgcatcaaacacttctggcaggtactcatatctgttccacagaagttgaggtttttcgggtgcatggttctttagtaacaaaatatatgccccgctcaatagagtatttacaggaaaattaaattgaatatatcctagaaatcaacgacaacatatcaaaaacgtttctttggttaggtgggatttgtgagtcaaaacaagttccaagtattttcattcatctgcattacacctcagtttcttctttctttgatccatttcaataatgacacgccttgttgtactagcggggtgcatctacacatgtagcattcattggtttactttagtggtttttaatatgtttgtttggcattttgggcaactatactacttctactgtgcactcatagcaaaggtatggcctaattttgcttcttgagttggtttgtgtttcactctggcaagtctgcaacaagaggttgtcgcttagaacttaccttgtagaattggttttggttaatagtattgggtgacaaaggatgttgttggagcttactgttactgctaaaatggctacgagttatccaaaaaaaatgttacattttggttacattttaatatatattcttgcaaagggtttatttgatatgatatggatgtatagtatttttgtttacttaattggacagtaattggttgttttctaggagacagctaatgttgttgagagcatcgatgttgtaactattgatgggaagttgcaaagatttgaaagagctgatctcatgtttggctaccgttcatctccctttcaaaggatgccaaacttggcagccattgtcgctgtcacatttcggctgcagagctcaacaatatcaaggacaaagcttcaacaatacttagagaggtacgcactcacaaagactgaaaaaaaaaaaaaaaagactcaaaaatatgcattcatacaatagactatactatccgaatggtttccacgttgacggtcttaaaagccagcacactcctttaatgagggtagcacttgaacctcaagaactatcttgaaacatgtacctaatattattccattttgagagaattgaaaagcactatcagatttgggataaaaataataaaaattatatgataaaaaatataaggattttacttagtgtgtgaagggggaaaagtgagaaatggttcaaagtttcggaaataatatttgtgttttacatattgactagtttcaactagcttaagattgtcactggtttttatgaacagaagaagagcatctcaaccaatcggagaaagaagtgccggatcagtgtttaggaatccatcagatttgggtattggagctggagagttgattgaaaaagctggacttaaaggctttagagtgggaggggcaatgatatcaaaacttcatgcaaattttttcattaatgctaatggctcaacatctcaagatatgcttgacctcattgctgttgctaaggacaaggtttatcagaaatttggtgtagagctcaaggaagaagttttatatgttaatcccagtaaagctgcttcataataataaactggttgtgtagaaaaaaaaa

SEQ ID NO: 384893 - DNA, 1957 bp, Cannabis indica
ttttgatctactcttttcttcctcctctcccagatgccacacccgcacccacccactcactccttcttctttttcctttcttcatctccttcgtcttcttgcaaaatcaatgggggtttgggaaagaatgtggttaaccgtaaagttgagattgtttagccgccaatattccttgtgaatatgactaaaatattttgttagatttgaatttgttcgatttttttcttcaacaaaggaggtgttgtttaacctagccatagtcaaaaattgtgtttaagagtttaacctttctacaaattaaacataaggtttcaaaattaattttataaaacacagaatctaaacaaataattatacaaacctttaaaccaactatgagtgattaatattaaattcatctttaactcccttcgtttttttccattatatataatagtggctgatcatgatcaacatatttgtgagttttttttgtaataaaattaagagaaatttatataagtaagcatgtaaaatgaaattcttacttaattaataaactagaaatttagacacagtgcagactgtcacatcgaacttttggagtactcattcatccaccattgcccataaatttctctaaggcaatcgattaagcttggatttcaagttacggtacttcaaaagttaggtaaattaaaaatatgtaaacgacattttttaaaaacttgtcaaaataataattacatttcatattcaaaaagttatattgttgtatcattaatgtataaatacgtactcgaaaatattgatggatcatgggaaggaaagcagacaatattgaccaaaattatttgatgtttttttttcgaatgatgaaagaaatattcatgaatgggacgattcattacataagcataacatttacagaaaaaataatcaattataatatgaaagaaactctagaatattcattggccactaatcaataaattattacacttatattactatttactatatatatgtcaattatgttatttttagttcgaagtgacagtgtagtaaattgggtgtgttttgtttttgtatgcaaattaatagagaagtctaacgttttagtggaaataacagtgcgctcctaaccgaaaggagttctggttagacctcagcacctctaaatgtcaagtttatatcacctttttaaagtaatttgacaagtgtttttttttggtgtaagcaaaaatcagatataccatattatgtctgggtggaacagaaagttagaggtatctttttcaaatactaaagttttattatttagcaatttttagagtatttctttgtcgtgttagtcacaattcttttattccggttaatggattgtttttaagatagatggtgaactttcttaaatggaaaaaacccctttaacttattgcctgattaacattattttttttaatctaaaacttttcatagttaaccaataattagaccaaaatgaaaaaaaaaaaaactgacactagagatcaatctacacaattttatcacgttctagaacaagatcaatcataaaaaactgacactagagatcaatcataaagaacaagatcttgttctttatgattttcaatcatgtatttattatttatttttttgaataagttgaattttattacatataataacaattatcttaaataatagtctgcaatcaaatcaagaaattttctgttaaaaacacgtttaggattagaattagaaaaacgagcaaaatagtcacccgcctaatttctagatcatttgacaaaaagactaaaataaaatccaaaaagattgaaccatcacaataataactttaaaaacacttatattaggttttatacactacaacacttttaacatttaattacattcagcaataacgtttttaaaaaaacgttatctaatagttattgggtcttattaattattg

SEQ ID NO: 384894 - DNA, 2190 bp, Cannabis indica
ttttttgagcctcactctcattaacaatcagctcttcattgagtaaatcacccttaaggggttcctactaattaactgtcgatgttctagttaattgccttccttgtttcgataatcaattactttatgttctaaccctttatagtgagcataattaacaggaacccattcataattcacactgaccgagacattgcatcccatttcattttgaaagcagaataattctagaaattctttaatagtggtgactttaattaagaccctagcgaaattcaatttattccagttcttagtaattgaatccaccatcaaaggtgtgccaaattgactaacaatcttgaagagtggtcgatctgcccaatatttaagcttcaaatatgtcaattgaatacatgttggaacttagagacattctcttttgtgaaatttgtctaagcatttcatggcttaaggatcaccgatttcttgtcaaagaaaacatatatcccgaccttatctactccctcgttagaccacacacgcctagcagaaccctccaatacagataaataggtgttattagtgtttttggagaaaggacacatggcaatatattgaaggtggcgatccaggtaataacaaattaagtactgttaatgggagaaagttgtggaaggactaaacgaacctaagaaaggtcctaatctaggttaagcttgaagactcacccgaaggaaaatcaccatctgagacccgaaagtcttgtcattccttcggaacccagagaagaccaaatcaactaagtttatagggagatacttgggagccgtatgaagaatctaaggcggatgctaattgcacaagaaaaactggaagcctgttgttaacgcagattttcgttaaccaataataagcctttttcgtaataaatttaatacaaaaattataagaaatcaataaagtataataagtataataataacaccagatattttacgtggtattgcagttaaatctgcatactctacgagtctatctttttcaagatatttctgagtatttaatacaatatacaattgatagtatttctgtatttctctcaaacatgttctgtctctttttatagtgggatctgcacctatttataggaataaaggttggtagttatttacattttaaattcaaattataaccgcttcatgaaacatggaaattgatcacgtttcatttaaacatgtgtagataataattggtaagtgcataactgcttattattcttatcttcaaatatggtagatgctgatttggacaatcgcacctcgcttaactcgtagatggtcaaatggtgatttggacaatcttatgcattccaacaatgtcatgagcaccagtgtactaagaaaacttaagaactgctctttgaccataaggcctcgcagactggacaatcatgtcttgcatattttcaagttattacacttagttattgtaatgtggaaaatacgctaagtgtttaacaaatgattcgcctcgtcaatatttcttatgaatagcgaggtgggcacctcgctatacgtagtccgaagctgctctgggtaactttacttattcctttataataaacgaatcttctctttggatctgtgtatttcgaggtaggctggtgtcttatcaatataggtattaatagttttgtatccttgtctcgcttaaaactatacagccaacgagttatgaatatgctctattaattctatatttaatgagttattcctctttgcattagatgatataacattgttatattaagtggttcatattccactaattgacacgtgtcaccctctaaaatgtagccaaattttaggtataacaattgtcccttaaaaagttgttccttttaataaaaagagctttttaaatgattacaagtgtatttttttcttaacccaatttgaaaaattgtatgcttttcaattttggccgttcataatttcgaggtgcatcattagcattaaatgcctatcttttccaattctcttttgttcccatccattagatcaattttcttttaatctaacggtgatcatccttaaagtataaaacttgagagaaagtcataatttcaccatttctgcttttcaaaatgagaaatgtaagtaaatagccctatttttaactttagtgatagttaatgtccctttttta

SEQ ID NO: 384895 - DNA, 653 bp, Cannabis indica
agagtaattgactcttattagttcttagtctctctaatacccatacgttagtacaaaaattgttggggtaattttattcaaggttagctttttaatttaaaaaaaaatttactactttaaatgtttatgatataacttataaaaataattaatataaagagaagtgatatgaaaaaagtaactgtatgtgcaattattaaaccattatatgatagatttcgcatcacaatttaaaataatatgcaattatgctaatattataaattagctattgttacatagtttacactacatattataaattatattaataaaaaaaaaatatagaaatagtaattaacttaaaaaaatcacaaattagagaagttgtaacattacaaataaagagcaccactacacatactctaacaaaaaaaattatataaatatatagattattacaatattacacagtttgccatcagttaaagttctttaactaagttataataatcaagatgaatcacatgtaaatatgatacaagtccattttcttcacttttattttcctaacagatttgatttttccattgctcttcaaattctaaagaaaaattaaaacaaaatgcaagtgagaaacttaaagataatagcatgtcatttagaatattgaa

SEQ ID NO: 384896 - DNA, 2840 bp, Cannabis indica
ttttaaaattttgatttttttttagagttaacgtgcttaatttttaaggttaaagttaaacgaaataacaatcttaaacttaaaattgtagttaattaataactttttttatttttttatttttttgaatataagttaaactttcattaacaaacacaatcttccaatacaatagaaataaactcaggagtgaaatctaactcccggataactcgacctggcgagaaacaagaccccctagcaatatcataggcagctttgtttgcagatcgctgaacaaaagaaacgacaacgttttgacaattgagcaaaatagctctacaatcttgaaccaataggccaaactcaaaaggcatagaaacattacaataaagagcttgaacacacacaagactatcaatttctataacaacatttgaccactcattcctattaacccaacttaatgtttccttgacaccaaagattttagcaattaaaggatcaactctcccagtccagccacgaaaaaatgcctctaggacctttccgttgctatctcgaactaccaaccccatcccaaactgaccctctgcagcaaatagagccccgtccacattgattttccccttgtttaatgctggttttttccagtgctcatctcttagagcaacaagaaaggcatcatgcctttttgactagcatgtttccattgttcaagtgaaattctagcagataacactacagttgctgcattagatgatttatcattccataccaactcatttcgtgcactccaaattgctgaagcaatcacatcagcttcttcaatcacaccagaacttgattgagacatcaagttggcccaccaatctccaaaacttgaagtaacacttccacagaaatagaagatctaggccaacatgatcttgcaaaagtgcagccaacaagaacatgaaagttagattgagcaaaggcattacacattgggcacacattaacaagctcaacatgtttagtgcaaagttgagttcgtgtaggaaggcaattagaaatggcacgaaacagaaagtttcgagcttttgggggaattttcaaattccactgtttgcgccaaaagcctgcattattgtctaaagaccacgatccttttaactcttgaagaaaacgatatgcactcctcacagaatagacagtcgaggtttcttttttccaataccactcatcatgtgtagcagtagaactcagctggatgttcaaaataacctcacgatctctggtgtcaaacagatcctgtagtattttagcatcccaagcacgatcattaaattgaaacaaactagagacaaccttgttaattaatccaggatgattagagatcacatacgggtgctcattatctggccaccaagtctcattcaaaatgaaagcttcactacccccaccaatggatctacgaataccagcttgaagaggttgttgtgactcaaagatacttctccacacgaagctcgggttatcaccaagtgtagctaaaaggaacgaactctgtggataatatctagccttaaacaccttaccagctagagaattactttgagtcaataattgccagccttgtttgcctaaaagggctaaattaaaatcatgtagattacaaaaacccaaccctccaacatgtttatgacgactcaagcgcgaccaactcatccaatgaatgcctttttgtttagaagaatcagattgccacccaaatcttgccatgagtcgttccagttctttacatgtgtccaatggtaaaagaaaaattctcatagcataatttggaagtgattgggcaatcgtctttagaaggacttctttattggcccgaaaaagaatcttaccctcccacccttgtattcgctttttcaatcgatcactaagaaagcccaaggtagtagtcttcttacgacctatagtattagggagacccaaataagaactattttcaccaacctcctcaatccccaataaaccacatatcctagttcggaaacttgcctccgtgttagagctgaaaaaactaaaagactttgcaaaattgacctgttgactagaggcgccttcaaacaccctaagaagactaaggacattcgaagcttcttgtttagtagctttgcaatacacatagctgtcatcaacaaataacatgtgagaaaccaccggagctcccctagccactttacaaccccgaatagagccattcatctcatatctatgtaaaagggaggaaagcccctctgcacaaataataaacaaataaggcaacaaaggatcaccttgtcgaatatcccgagaaggtatcaaaggaccaatttcccttccaccacgtacaaacttgtaaaagactgtcgacacacaagtcattagaagtttaatccaagtatcactgaaggctatccgttgcaaaactgctcttaagaaggaccattctagacggtcgtaagccttgctcatatcaagttttaaggccatagagctgtttttgccattctgctttcactttagataatgcataatctcaaaagagaccataacattgtcaaagatcaatcttctaggaaagaacgcacttcgactatttgaaatagcggtagacaggacacctttaagacaattagcaacaactttagaaatcacattgtaaaggacattgcaaagagcaatgggtcttaaatcgcccatggttgtaggatgcttctttttgggaataagaacaacattagtatcattcaaccccataggcaaatagcccacgacaaagaactttcaaacttgattgatcacatctgtaacgccctaatgctaaggcacgctac

SEQ ID NO: 384897 - DNA, 1434 bp, Cannabis indica
aaaaacgcaacaaaccattgcacgagtgagacaaaccccacctcgcaagggcatgcgtagcagtactgtaaacacgagaaacccaactaactgcgcataatccctcaactgaagagtaagagcaaaagcatgaaacgagagatgcagattccaaaaaggagaggaacccacacccaaagcttgcaccagatgaagattatcagtgtagagattaatccctcccagatggagatttgaggctaaatccactccaaacctcagagcctccaattccccatgttaaacagaggagaccaccactttcttcgcgccaaacgccattacagaatcaaagaaaacagcagctgcagcaccaacgtccttagatttagtaaaatttacatagcatctaatccttccaggtctcataagaccccaaggaacctcctccactcctccatgatctttcccagagacagagttaatagctagccgcctatgcacaagaaagttgtctttcacctgcctttgcactttagtcagacctaagggagtaccacgacgatacatctcatttcgcatcattcacaatttatgatacaataaggtaccataaagaaaaaaattccaaagcttccaccttagacagaagatgctcaaaggagggattggagagccaagagaccaattccctaccagagaaaaggagagaatctggtcttatactccactgagaagcgaaccaaagatgctgagtgactgaacaagctgaaatgaagtgacagatatcatccccctcattctctcattattagtttagtgttgtaagttatgttacattttcaaaaggtcaatttgtcatttcatttaaaaagttcactccacatgttatcatcccgactttttgtatcaaacaagtgtaaaacaccttcgtaaagacgtagaatagtaaagttgttcatcgcgagaattcctactacctcgatccatgtggttaatgaggattggtcaacaaatctgccgaccaatcctcatttgccatgtggatgggggtggtaggaatccctgaggtgaagggcaggttctgacgtagaatgaactaattcaaaataattcttctgacacattttatttttaaagactgtaaatgtatttgctacaataataatatatccacctaaaatatacacgaaatattacaaataataacataatatttctttaaattatctaaaataatacattttaagaaacaacatcacctcatcttattatatataatattttaatatacaaatcattactcatcttttaattaccatttttttttatataatatataacagtcctaaaattcgaattcaatacacctgaaacccaaatcccaacccggtgtaaactattaacttatttgtttttaaaattttgatttctaattataaaattgaaaagtaa

SEQ ID NO: 384898 - DNA, 675 bp, Cannabis indica
cccaaccgtataaataacgtctgtttatttaaactataaacaaactatatttaatcaaattaggacacattatttaatatgatatcacaaatatcataatttgtttggttgatacgctcttaaattgaagatgaagaattagtttttcatgtgcaagaaaaattaaacatttatttaagtatattaaaaaaacaattttatttttatttttatttttaatttttattttttatgtcacacataccaaaataaggagagagaaagaaagtaattaagtggtttgatctgaggcgcgagattggatttggttttgagttttgactttttgagaagagttaaatataatatatgatatgttatgaggtagcagtagcagttctttcttgtacgttgctaccttttatggtgctgacccacaatcgttactactgtaggaccttttacatgcctctctgtccccacaatgccaactcaccttttcacctctccttattccttaatttagaagctcctaaggttgatatacaatttgttaatttttgaaaaaaaaaatacattctatcttaaaagatgatgtagaaataagtccacttagaaagattatatatttaagattaattaggatttttttcacttagaattttgacatgtactaaatcatgtctcttgaacttt

SEQ ID NO: 384899 - DNA, 1108 bp, Cannabis indica
aaaaaaaaaacaatgttgttatgaagtcaattttcattaccaccaaaaataactagtcaaaaactataaaagcatgtgcatagacatccatatatacctctggaaaatggagcaagagaagatctgtttggaagtagcggaattaaatgagacgattttgctgtgaaacttttggtagagttggtcaaaaggtaagggaagatcttggtagctcttattctctgcattaagcccacctattatttatgtatcaggattcaatctctttatcaccgcgtgtgtgattgttttttttttttgggtactttgataagtgagttaaagaaacaaggttcttaaaagctagaatttatagtgtgattgaacctttaatgcagtttgagttattcttttggtctcagtcgctcaccaatttccaggaaaattaaaaataaaaataaaaaagaaaaatgctgaaactgttatctcatcatagtataacaatgttcaaaagaaaaacataacatttggaactaggaaaatacgtaacaaacgtaatagtgtacaaattactaggaaagtaaataacacgttaattaatatagaaatgtatctgttacttcctccatatttcccatgattttatctttcctctaggctagtttatcatacttaataattttgatttaaacccttgacaataataacgaaaatgtttgaatgtttccattttatttacctatagagaatttttcaaagttatggaaattttacactatttgtataaggaaggccttcatacaaattattatattaaattatatgaacgtaatacttaattatattaataataatataatatttttagatgtgttagacgttgttggtatcttttaacattttttatttcaacatgctacatgtaagggtcattattttgacagattatattaatagtgagtccagccgtatctgtagttttaatctgttataactgcatactagctttctgttaaagtctgtgtgggtctgttatgttttaactgttgatattatttgttcttaggtcggttgaactattgtctataaatagctaatttcgttctgtaaatgagttagctagctaatt

SEQ ID NO: 384900 - DNA, 821 bp, Cannabis indica
acatatataattgattatttgttcaatcaaaagtaaatttgtctcattaaatgattaagataggtgaccctagtattagagatacaaaattcaacaacttataatcttttatgataacttaggtattaaatcaattaatgtatcaatttgaatatataacacatcttctcaaattaataatcaagtagttggcaagttttattcttttgaatattagtggttaatctttaagttttgttggtttgtatgttatttttggtacttttttcttaatttatgtttaatattaatttgcaattagtttaaacttagactatatagctaactcgtcgacaagtacaccaaaaaaaattagtaatacttaatgccttttctcttttggtaaaattccagcttgagttaaggtgagttaggtccgttcttagggcacacttagcctgaaggcctaaaaaatattttacattcaaaattatacataatttttaaataaatggctcaatattttttttttctaaggctcaccaaatcttaagaacatgcaacttgtttttcatgacaagttttgtttgatgtcaataaaaaatatggcatcattctcaaatatttaatatttgaaggctagcaaaataaacataaatatctaatatgaataatactttaaatattggggaaaattttgaaatttaagttttgtttatttgttgaacaaaagattcataacttatgtatcatagatttatatatgctatcggggttttttttttcttcataaatatgtaatttttatgttttatttacagttttacaacttaaatttttta

SEQ ID NO: 384901 - DNA, 601 bp, Cannabis indica
tttttagaaaaaaaaaaaaacaaaaatcaactcgaaatttttttattaaatttcattttataaaatccgagttccaaacaaagttttgacatatgaactatcatcatcgttgtgatcataatgttttaatgtcaatttgcagttaaagatgacaggattactactcgcggttattgccatatttgcagttgtagtttttgttagtatacgagtacttgacaacagtgctaggcaaacctttgtagggtttctgagcgttgcttcacttatttcgatgtttgcttcaccattatttatcattgtaagtattttaatttttacacacaaaataagttgtacaagtgtttcgattttgattttgatttgtttgtttgttttgttgttgcagaaattagtgatcaaaacaaagagtgttgaattcatgccattttatctctctttatcaactttcttgatgagtctctctttctcagcttacggattttccaaatatgatcctttcatatatgtaagtatggtcggaccagaaatgggcttaagaaaaaaaataattttttaggttttactataaaaataaatagtatttttaaaaaattattaa

SEQ ID NO: 384902 - DNA, 1564 bp, Cannabis indica
aaaaaaaaattatcttattctgatttttctttaaaaatagaataaaagaaagaaaggtaaaatattttcatcactatatatttaatacaaagatggtaccggaatactaattctttgtaaacattcagcttgtacacaagacatcaaaagaccttactcagttttggaatcatgttaggacacgaaagaatgttgttgatgattttgttatgctgtattattccgtcgaattaatattctgcactctgtggtcctgtgatctcatatactttgttttatgatcttcatctactgattttatttgtctaattattacttatacatgcagttgcaagagctgaagcagcgggcttcaggcaatgtagacgagtcttttgtcaatcctggaataaatgacaagcagcccttgcatgtagtgatggtaaaatttgacccacaatgtgtgattttggtgctgtctatgtttcccttcatgtattactattgtctcatttgcattgttgcttggtttcagttacctttttattttctgatttcattgtttgttggtttatctgttaggttgaaccaaaagtttcaaacaaatcacgttttgctcaagaactaatctcaacaattttattcactgttgctgtcggattagtatggtatgggaatattttttttctttctgtaacatctctatcttttccccctcacattctctctcacacatgcagaggcgcttgcacacacacacacacaaactatggttagttctaattagagatcttttgaaaatctttcttttattaacttctgttgattgtctttaggtttatgggtgcttctgcacttcaaaagtacatagggagcttaggtggtattggaacctcaggtgttggctcaagctcctcctatgccccaaaagaattaaacaaggaaattattccagaaaaggtagaaatatttaattttatctggaatacattgggattattaatagaacacttgtggcagtttgtattctcaaaatagcttaatttttttcttgtttttataataaatttctttaattatttgggttgtactaaatttggtagggtttgagttatgtgctcaaaattatgtcttaaatttagatttggggagtattgattaacaaaacaattgaagagtaactgatttatgaaatatatactgctgaaagcttagcagctaatgttaatcaaagtatcaattgaacagttaatcctttcaaaattatgcaactatttgtgggaataactgaataattagataatgtgaagaaggatattttatggtatttggtaaagtgttagtgtcagatggctttgtattagttagttggtgttgaaaaaattaagaatttgttggtttctaacttcttaaggatttagaatttgcttgcattactcaagagaggtaagctcaaatggtcaggcatgtgtttgcctccacaagatccgaagttcgagtccttcctgggtacctacatacatagcaattgctataggttttcttggtccccaaatattgcagggttaggtgggaatcacagttg

SEQ ID NO: 384903 - DNA, 1897 bp, Cannabis indica
gaattttccaatccaatccgatctgcacaagtccaaatatccactctttgtagattgaattggattgaatcatatagattggattgcattgattattttatgaatacccctagatattgacgaaaaaaatctaaattaacggggtgtttgttaagtgagttgaacttgaagtagagatatatattcataaatttaattatacaaaataaatatttatctaattattaaaactctaagattacgtcttggtaacttttaagagcgtagttggaaagccatagtatgattagaggtaattacacaatttaagatatttgtttgactatggaattaaagtgtaacaagtataattggaggtaattgaggggttctaattatactctcggggtcatgagaattgagtgtaattactaaaagttttctatttaaacattaactactaaaaaatattattacctgtgtaattactaactattttgtcaaacaagatattagaaattcatatctaattaacactttgtattttaaattattttcaaatacaagctaagtataatataaactccacaaataacactcacatgaatgattgtaaaacagaacaaacacaattattttttgatgatgaagagatcccattggagcatttccaccaaaatagaatcacctaaaaaaatgataaatgcgaaaagacacaaatagtgcctaacactctactatgtattaatattgctattagtccaactaagtattgagttctatatattttaatataataacttttaaagagtattattagttaatcgcaaaacgacatatttagagatactaaatactactagtatccaataataatgctccacttagtacacaaaagactcactatcaaaaagctaggccgcctagaaagttgatattttatttattactaattattattttaagttaataaagaagataatgtagtagaagtactataaataggagcaatatctcattcttttctttagtacacacacaacacaacaacatctcatctcatctcattatttttccttaggaaattaatgactacaaatatgcattcctctcaagctccatggtccactggtctctgtgactgcttttccaatttcaacacctgtaagtcatctttcctcttctcactactaattaattactaagataaataagtgttttgtaaaaattattgattagatactatattttgtcaaataacaaattgaaccctatatatatattcatcttgttagaaattatcaaaaattgagttcagggtactatttgtacagttttagaaaatatatgttcaatctgtcacttcggtaacttttacaaaatacaaaatccaaaaacgtattaaccctaattatgaacttgaaaaatatctaattaatggcttaactatttctatttactaggttgcttaacttgttggtgcccttgtgttacctttggccgagttgctgagatcatagacaaaggatccatatgtaagtaacaattaatgaattatttgttagtattaatcatatatatatatatatatattactaattgagattataaattcattaattacacagcatgtgcagcaagtgggagtttgtacacattgatatcattagtgacaggattgggttgcatatattcatgtatctatagatcaaggatgagagaccaattgggtctcaaaggagactcttgccaagattgtttgacaaatagcttttgtggaccctgtggtttgtgtcaaatgtacactgagcttcaaaaccgtggttacaacatgaaacgtggtactaattattaattcatcatcatcatttatcataatttaatacattaagggctcgtttggaacgctgtattaagt

SEQ ID NO: 384904 - DNA, 1864 bp, Cannabis indica
cagcagctaccgacataatctagaaaaattaaccacataaatcacatagctaatatcaaattttttgggagaatcgcattgaccgctagaattaacaccaaaaacagatagaataatccaaactttgactccacaagaacaatacgcccctcaccttttcgagagggctcaagatatgatcaaaaacttctttcactcaccggcaactcagatccaagacaaaataagtatttagaaaaaaaaaacaaattacaaattcatgaagtgaaaactcacttcctcagaatgaccaatcagatctaaccagtacaaagcgatcagctttaaaattaatcacacaaaagaaaaaggaagtttgtaaagactaaccccattatcggaatcgtgacgaatccgaacgagctcattcctcgtgtgagacccggcaaccaatccggcattggcttccatgactcttcaacttgattcctcagccttcagtggctgatcgcagagtgttttcctggtattcagataataaggtgcgtagtgaagagagaagaagacagtgaattcttcgccccttcaatacgccattgccgtactatctttgtctccctaacggctgcagtgggtcattttatcgctttgttttgaggattattttagtattctaatcggttaaaccggtagccggtgcctaccgacagcttaaggttctatagcggcttacatggctagctccaagatagcttccaccactaatcagtaatctataactcaatcagtatattgcaagtcgtagccgtagccgtagctggtcattgagccgtatctagagctgaaatcacctacttctcagctatgacatacttccaacagcaggtctacaactctgcaataaaatactgccacgtgtactttgcggtgttagtatgtctctttcgttcttttttttctttgtaagggttagtgtgtctctttcgagtcaataactaatactaattaattatattttagaaaaaaaaaaaaagaaaaactaatactaattataaaattattttgatcaataatttggtaattgctacggacagtctggcttagttacgaatccaccggtggcaatttctacttctcttatgggtgtaaggatctcccgaccattttccacgtgtttttattttttttaataagtaatttataatataaatatttaagtttgttagtagataaatagttaattttatatagcataaataaatcatgtaaaaagatatgatattaaaaaataattaaagtttaaaatatgtgaaacaaaaagaaagaagataaataaatttgataaaacctctaataataaatattgtcgaaaagtcgttggagaagatatcggtactgaaaaagttgtcgaaaaagttatcaggatctaaatttactaacaagtatgtttttaacattctaaatatgaatttctaaaacgatgaaaataaacacataaaaggtatgagaaaccttacattggttgcagcagaattaaatgactcattccgctcaaatctctaacccttgtatcatttctgtcgcagagtatcaccaagatctgaggtcgaaattacttctgctgtttggattcttcagagtcttacacactatgattgaggactcacttgctatgggtgggcatgcactcaatcattaatggcagaatttatttttgtgaagaacattatagaattcgaaaataagagaagaaaagaaaaagaagaagtctcataaacctagagagaaagaaaactaggtttattacctttgaaacattagttggataatgagactttcttttctttttattctacttctcttagggttagagttgatttatttg

SEQ ID NO: 384905 - DNA, 1909 bp, Cannabis indica
gtgactacataatattgaggaagaagatcaaagctttacttactcaatagaaacttttgagggttctaaatgaacctattgagtgggcaattgatgtatctcaaactcagcaggagaattgcttgaaacaactgttggtatcatcattttcaatctaacaaatgcaattatcatattggtggacaatgaagatactcttgccaagatttggaggaagttggaaggacatttccaacataaagtcactcactaccaaaatattcttgaaagaaagaatatttgggttcaagatgtctcactccaatacacttgagtagaacttgcatacattcttgagaatgcatattgagttagccaaattaggagagaacaaagccctaagtgatgaaaatcaggccattatcatacttaattcattgtcagagtcttatagagaagttaagacaacaataaagtatggaaggaaatccataacttcagaagaagtattatttgctctgaagtctaaagatctagaaatgaagaatgaaatgcttggaagttcaagtggataattgaacttgagtagtggaaagatgaatcaaaagaaaccatggaaaaacaaaggtatccaagtgtagaggacaccataaaaaccatcataaccataacaatagaggaaattacaacaacaataataatggaaatcatagaggaagatttaattcgagaggacctaatgatcctcaaggttgttttcattgtgtaaagccatgccacatgaaaagagaatgttatctttagaaaaggaaatccaacataaagacacacaataatcacaatgactcatagaaatctgaaagcaacttcactagacaaaaattagaatattagaatgcaaactataatgatggatatgatagtggagaagtttactttgctgctaatactattaatgatgattgcatacttgacttagggtgagctttgctttctgattttggggaaactaatggtgggaaggtgatcttgaggaacaatcaaacatgtgaaataactagatctggactagtcaacttcaagatgtttgatggcattacaagatcactcaccaatgttaggtatgttcctaatctaaaaatttaatttctctaagtgttatggatgatttgcagatataatgcaagataaagaatgggaaaatcgagctatgcaaagggtcaatggtgatactaaaaggacagaaaaatgaagggttgtattacctagttggagagcctatagctaagtgtaatgcaatcgtttcagccacatcataagacaacaaagaaaccctatggcatagaagattaggatacatcagtgaaaaaggattccagattatcagtgagcaacagttactgggtaaggataaagttaccaaagttgatttctgtgaatattatattttggggaaataccataagctgaaatttagaacaagcacacttaggtctaaggggattctagactatgttcattcaaatttatgagggcatgagaaagtaagaactcaatgagtgtgttcctatttcctatctatattagatgattattctagaaaggttttggtttacttactaaaatataacaatgatgcttttcaaaattttgttcaatggaaaaccctaggggtgtacatcaaaccgctcaaaccgcccgcaccgcaaaagaaatgcggtttgaaattctttgcggtgcggttgcggtttgaatttctcccaaactgcgcggtgcggtgcggtttgcggtttggaattattaaaccgcgattcaaaccgcaccgcactgcatgttttaaaattttaatttttatatttatttaattaagcccatacatatgagcccaacccaagcccataaatcttaggacaaaatccataactcttca

SEQ ID NO: 384906 - DNA, 2352 bp, Cannabis indica
ggaacgtatgagtccatcttgtcaaaattgagaacaataaggaatcttgaaattaataaacatggcttcactttctaaatttgtaatatgttcttgatcccactcaaaattttcttcaaagagcttttatcataagatagcaaatgtcccgcgcagacttgggggcaaatgttttactatttttttcatcataagatagcatgttctatttatatttatttttatttaagttttcatatgaatttgtgtttagtatgtaataaaataataagaaaggaaaagtgaaaacaagtttcaatacaagaatcagatggagagaatttatcttttcccataaaaaatggctatttagtttaacaaagttatgatacaagaacatgggatgtctgaaaactatgctagctattctacacttctttcttgggatctcaacaacaaaatggtcggaaacaacagaagcatgataaccatttgctatgctgatcaaaaactcctttagccccacctgccataaatgatgttgatttaggtgtctctacccccgattttggcgtttgtttttcttctcctcctcctttctttagtgatgcagtttctcctgtcaatcttcatttatcaagaaataggttcagttatttagatcatgtaaaaatatgcacattcatatgttgtcaatcaaacttgttaacaatattatgctcatattattatatgcatttcaaaatttgttggctcattttagcaaagggtaatatgaaacttcctacgtcattaagtctcttacaatattaggcaacaatgagaaagaaatgaaaagcttaccttggaaatgcaaaagattgggtgccttcattttgttggtgagagatcttggctgatttcttgttaggagaagatgcaccaccatccttatcccaattctctgcactttcccttatgacttctctcattatttcagcagcttttgcttcagtggcttgagaattgttttgagcactttgaacaggtctgttattggttaactcaccagttttcccaagctcttctgatttacttacccatgacatttggtctttattaaaactcatgttccccatgtgaatgctgaagagggattcattggatgcagtactccactccattggagctgtggattttgtcctggcaaagacatagtctggaatcctataaccaggtgagttgttatcaccaccaacaggtctctccatcacttgagttggaggaaactgtgttgttgagctatttctactctctggcttcaaaggggatcctattgaatcataactcaattgcttacttccaggcctagagttggctcgcatctcttcttcactacgatttttcagcgccattgcataatcttcaagttggcttgcagagatcttgaatgcaactttaggagaacattcaatagaagatctagtgttattagtcctgaaagaatcacaactgcttctgctcacatgttcatttccatgtcctgtgtttacaattgtctgaattggtgttacgtcattgtcctcatcttctgtttgggagacaaaagagactaagggaaatgtttcactttcagtgagttgaaagcaatactcagaggacgattcagatgatgaagtggagtgatttagcttttgggatgttgtagcagaaccctcatctccttctccaagtattgaggtggaaggctttgttctcaagttcccgttagttttagtatcatgtccagatttcatagctaaagatatgacttgcttgatttagactctagttttcatgctgcaaaatcatatcatgtatatatacataaatatatatatatataaatatatttataataaaaaatgagtcaaagctgtgataaaagtgaataacgttggctcttcactggatatcttagaatttgagttcacaaatctatgacattaggaattagaattcaataacaatcatcacaatcaattgaaattaaaagaagaatgaaatgggggtgcaaattcattttaatgtgtgtatcaattcaaaatcaaaatatatttcgtttaacaaaattctaaattctcccatgctcatatataattatgaatgtatataaagtaatgctcatatactcacatattcagaataaaaaatacatcaaccttccttttaaaataaaaataaatgacaatgtctaaaacttgccttgagaaaaatgtatgatcacctattttgttttgcattgaagcaccatgcaagtgaaagagaaatcccagtaaaagtaactctcgtttttatttttttccttctccttttccttttctttctctctctctcttttcttcttcttagttt

SEQ ID NO: 384907 - DNA, 3782 bp, Cannabis indica
gtgtttgatatgtcaaaaaaacttgccaattttctttatttagttatgaatcgcgcgctttgtgtgtgcctcgtcatttttatatatattatatatcttctaagtaaaacgatgcgtttttggtttgtaataattaagtaagcatatatatcttttcatattaattaaaagagtatgtatgtgcttcgtaatttgatgtgaaattaaaataactataatcaaaaagtaattaatctatattatatcattcatattcataatataaatatactactacgtagtacgtacgtacacctaatttgcagcgcatatatgatcttatccacaggggccagccaactcttttattataattacttaaaaattaattagatcaattataaagtttactaattatatatcatgtactgtcagatccacaaatatatatatatcgtaattattaattacgtctaaactactacacatcttaatacatcgatcttcaccttcatttaatcatcattaactaattaagagtagtatattaatttaataatatataaagtaaacggcaggtgtacttttttttttttcttaagtttttcttatatcaatgttatcactacccctaaaattaatttattaattaaaatggttttattataggagctagctagctaataaagtttattattttataaaatatttagtaattaattaatatttaagagaggagcaatcatgtgctctccaacaatactatatatgtatgaaaatatatatttgttctcatcatgtggcatcgtgataaaatatatattaataatgcacgagtgatgaaactcatcttgatacatgtaattaattaattatttgctaagaaagaattaattaatagcatatactactaccacgcacataaaaatgtgtgtatatatagtgaaaatattgtaccaaattctaataaatacaaaatattactcgagacacaagagaactataatatggtgttgtaaattagtgacgtaattaagtttttttattttttattttttataaatcaatgagttgtattgcacaaataaatttacaaactaaaagcacttacacaagggcctcaatctattgcatcttcttttctttactctttgtctatatctacaaagcaaatacaccaatctttatctacacttgttattttttttggtaagaatacattgatccgagtccttagactccatttaatctcctcaacaattcggttgctgttcacctgtcctccttgccatatcacaacatttcttgttttctagacattacaccaacagctgcagagtagaccagtttttggaattttgatacatttgccttcccaatccatcgaactagctgctgcatagttatagcttgagctttccactccaaccaacttttgatctccaccaaacattggctagttacactacactcaaagaataaatgttgagcattctctttgaagtcatcacataggttgcacttctcttgaatctgaattccaaatttaaccaaccaatcctttgtcttcaacctgttaagcatggcaagccataaaatcacactgtgttttggtgtattcaactgagaacaaacctctttactccaagccatttttagttgaggagttctaaacatcttgtaccctgctgcaatggtgtatttgttcctctcaaattcagcaaaatcagttaaggagatgatctggtttttgagagaaacaagcttcttccagtaccaactggagtgaatagaagcattgtaactccaccagggatggtctttgatatatacactgtgcacccatctaagccatgcataagctttcttggttatttgagatagcccaaatgtacttggacatggctgccttgttccaaattttaagctttttgatccctaatccccatgtagacttatattggcaaacattatcccaagaaacagtccgtgctccatggaaaacagtctgccctttccataagaatgctctacagatggcttcgatggacttcaaaattctttttggcatgatcacaatttagctccagtatgcttgtatagcaatgagaactgagttgattagtactgtggttcttccagcaaaggagagattccttgagctccaagttctaattctggatgtcattctttcaaccaacaactcacatattctttcccagaaatctttttagcacaaattgaaatccccaagtatgtgaatggaaccttttcaaaaaaaaaaaaagtatgtgaatggaagctcttgccttataaatccagatagttgtaggatcttattcatactcccctgttgcatattactgcaatatatagcagttttactagcattaggctgcaaacccgaggttagggagaaaagctttagtgcctataacatgtacaacacacttgtgaagtctccatgtctgaaaaagtaacacatcatcagctaaagccagatgatttagtttgagacccgagcacctgtcatgaaagtgaaagtcttccttctctccaatcttctccattagcctagagaagtattccatacccaatacaaacaataaaagggacatagggtccacctaagccctctcctagatttaaagaaaccatgtacagttccgtgaacataaaagggaacttcagagtagaaattaagtttttttaataaaagttatttataaattaaaatcaaaagaattagaactcacaatcattatcaagattggacgtaagtgtatagctggggtggctctaaccccctcaaaatttctaaaaataaatttattatttatgtgtttttcttaatgaacaaaaataatatatatacatcaattcatagttcatcactataaagaaaaagaaaaaaaagtatcaagctattctttatttttataataatttatatagtaatatattatttataaattaataatagcttgttactataaaaaaaataataataattagagtgaaaaacaaaattaagtgtatttacttttaaattttgctacaaataatagaagtatgttatttgacaaaaattatagtacatgatcaaaatattgtttaagtatatttttttatctctttctagaagaattttttaatctaattttttttataatcatgtatattataattatttaaaataactagtaaatttttagaatagttcacattgctaaaattaagatttaaatattttgttacacaagtgactattttttcttctttggcgtaaaataactaattgtttaaatcttattttttggcactacaagatctatttgcacttttttaaaaatttacaagtgatcctaaataattataatatacataatcatgaaaataaataaattaaaagctctcataaatatcgaaataaataggaaggtgtcaaaacaccccttttaaagagatttacgtattattagtttattctattattttaattaattaattaagtgtcttaagtagaatatccctaataaaaactttgaccttaatatttctaattttcccttaaaattttgatcacgtgttattttttaaatatttttgatcatggttgattatactgctttcaaaacttttttttttttatttatgtgatatatttttattctataagtattaacttttattgttgaaataaatattattttttattcgatatttatcttttaattaattgtcccccaacgaactttattctaactccggtcctgggcgataggcgggcgtaggcctgtgcc

SEQ ID NO: 384908 - DNA, 1761 bp, Cannabis indica
tcatttatcaactatgcaataccactcatcttgtatgtcataataattaaacaaaatataaaatctttttttttggttatttaataaaataaaaaatctaataactcttattatagagcactactataaggtggcaccctaggttcagggtcggccttgagcataggcaagctaggcctgtccctagggcccacctagctcaagggtaaaaaaaaaattatcccttttaaaattacatatttttttattttttatcaattttgaaaatatcattattttttttttctaaatgagggtccaaaaatattctttttcctatggcctattaaatttcagggccgacccttcctaggtcctataattatttagcggtatctatgatcttcattaaaataaaataaattagatattaaattacactaataataatattacaattgttaagtacctatggtgccatttaatatttctcatctttttaaggtagagaaatgtaataaaaataccaataatattaagttgcataaaatttaatttaataactattataatgagaaatgttaaaaggcaatggtgctcactcttcagagtgtaatatcgttattggtgtaattaagtatcaaatctcatataatttaatataataatttttatagagtatcattagtgaatcgcaaggcgtcacttctaagtggtgcctaatagcgatgctcttataaaatatcgctagtcattgataaggcgctatttcataatggtgttaaatactaccagtgccaaataagtaataataatgctcttttagaaagacattactcaattgtagaataattaacaaatttttataataattattatattaaaatatatgagatgtgatatttaattattttattgtgacgcttgttatttataagtatagacacagtttatggttgcgacagatagtggaacctcctcaaaagaaataaagcaagcaatattactagttgcaacacaagcaacgacactatgagcaatcttagttagagattagggatcaaattatgattaacctaataagtattttaacttaatatacaatgaagtattaataaatatcatagaaaattgttgaggttactcattcctaagtttctcataacaagtctctttgtatctaccaaactcatctttgcttattaatacatctttttcttgaaaaaaaaaagtgtgtgaaatgggattagccctgtcaattacacttttatcattattaataatttattattattgttgttgttattgtcagggccggccagagggtggggcagccggggcataggccccaggccccataatttttgaagccccgaaaaaaaaattaaaattagtatatattcatatataaaagtttataatatattaatacttaatttaataaattattggaagctcttgttgcgccagcggtaaacagagtgttatttgtaccttgagatcaaggttcgatacttcacacatgcatatgtgttttgtttttttataagaaatatattaaatattttaaagtaaatttataacaatactatattttaaatatttgtattaaagtgtgtaatttttaaaaaatctatatgtatgtaaaaaaattatatatttttttattattatttaaaaaaaaatgctaaaatatataatacaaaatgttcactgtaattaaatattactttattgagttagcttgtacgaaaaaaatttatttattacatagagataaaa

SEQ ID NO: 384909 - DNA, 2348 bp, Cannabis indica
aaaaaaaaatgaatttgatatctaactaatgaatacaataagaaatttgcatacatggaatgtactacaagggaacagcaatatgaacttatggcataattaccttgcatgttctccaatgcactcactttatctggacgactgagcaccccatgccggttcccaccaagaatacaagcttctccattacctgcttaatatatatctcagactaaacttcaaaaggcacacaactctcacaagagaaattaaagaaataaacagatgaatgtacaaaccagttaacagaagtgcatgattccatccaagagtggctttggtactgcagaatgatgtggttaaatgctccggatagtaagcatcagacttaccctgaaatcctcttccccaagtgtataacttcccatcatctatttaggtggacaacgaaaaatataacgacgcagtattagggatgatgatgaggattacaccaaatgaaagtgactattgatacaagatcttgaaatgttcctttttttaacattggccactaatagatgaaaaaaaaactaaaaccatagtcaactggaagattcaaaattctaggcaaggtctacaaagttatcaaagatttgagggactcactggataatgctgcactatggtctccattcgcagctatgcttacaatattgataccgtctaatccacaagtaacttcaggaagactaactgacttgactttgtccttcgaaataccaagttgaccacgtttcccagacccaaatgcataaatctgatctccagaatgacctgtatcagaatgattttcgttgtcaacggtagagtggacaaataccatcaaaaaaacatgcttgacagttgacacacatccaaaacatgcaaattttccaatccaaacaaaactgctctttcattaggaggaaactcaactaaattaacaagtacgtttttaagtgaaaactaattccactttcgactatacaaaagaaaaattacatgttagaatgatttgccctcaaaattaacaatgcacattagagggtttaagcatttcagaagagcaaaagcatatttgatatcaataacaaaaagggtttaatcatatcaaagaaactaagacgttgtgattagcagcacataacacaaaagcatcagtttcctaataccttgttgaaatttcaataagacaagtgaatggcgcatgccacatgccatctgttcaacatggttattaacaaaataggaaagtttaatcggtgagcaatatgatttataatcaccatgtccaagctgaccaaacgaaccatccccacatgtaaaaacagacccacaatctgaaaacaagagtgcaaattcaatatccatgttaaacctcaaagtaaaaatctttctagaaaaagtctaaaacttgagtttgatcagatagttttgcaacatactaatacaattttttaagagtgtatgacctgaaacgaaaccagagtggttccacccagcagaaacatgggttatacaatatgattccaatatattaacaagcttgggatttgggttattcaacttatctccatggcctaactgaccagatgctcctcttccccacgtcaatacctttccctctgcaaagtaattggaaaaagaaaacaaaaagttaccccaaaagaagaaaaatgaataattaattaaagcatataatcaatcattactagatcaccggaggtcaaagcgatgacatgagcgccgccgcaggcgagatgagagatgggtcgagcggagaagagagaagggagtttaagtagttgaggggatagctcatcttggagattgcccgtgcccagttggccatctgttccagccccccaactccatatttcttgtttttcttgttcctcttctctgcaacttagtttggcttcgtcatcatcagtctctttcatcttctaaactgtgctatacaagtctgagtcttctgcttttccacttgagcattgctcttagcaccggctttaccagtttttatttttaaatcgctttgtgatacagttccttaaactatatagcttttgttaagttttttattttaatttttagtaaattaatttccaaactatataagttttaacaagttagtaaaaataaaaaataagcagttaatatagggaaatttaaaattccatgcttataatatcttaaaatttttttcctaaattcataattaatataattggtcagatatgaccacattattattttcccacaaatacccctcccatttaaaaaactaaaatcaaaagacttagttctctctctccctctcgcacggtacacccacacaccacatc

SEQ ID NO: 384910 - DNA, 1173 bp, Cannabis indica
aggagagaagaaaaatagttttaactcattcctctcttttatatatatatattgattattagaaatttgtatttattcaattattgggaatccttaactaattaaagggtaatggcacgtcgggctccttaaaatgttatcaatgctttcctaactaatgattgagaattgttaaaaaactatcagcttaatcagtagtcatgatcatatctcactattaatttaataactatattaggaatataattagccattttgcgagggatgatctcgtggagcattgtatacgtacgatcgattccaagtaattaccactcaaaagcacgacattgctaaggcattattcttacgtacgtacggtgtgttccgtcaaacaaggcatgcaatcgttgaattagttatacacacacacacacactatatatataggtagaaagccgaagatatattatcatataaccaaacttatatatagcaatagctagcaccaaataaactcatcatatatacaatataatacattatatattattattaagtgataatataatggcttccaaaatctcattattgggagcgattttcctagtattagcagttacgctatcttatatagaaagagctgaatcaaaacacacagccttcgaattcatcggccacttgaagggatgtcacaagggccaaaacgtcactggggtccaccaactcaagcagtacctacacaagtttggttacttggatactaatactacgaaaagaaatcatctgtccccaatttcctatcccattcctgtccctccaataattatctgccacctattttttttttccacatcatttgcttacttttttttaaacgtttgctctcttagttagttccgtttatttcttaatcttcccacccacaaccttttcttcattaattacaatattttatggttttaaaaaaaaatatttacaatatatcttcacaaaattcaaaatcgtttcaacttcccttatttatatcctacactcttaagaaaccatcaatatataataactaatatttaacacataattatataattatgcaaaactcaattgtttgagctacccaaattaatatgcaacattcttaaaaaaaaaaaaaaactaatcaacataattatataagaattaatattaaaaata

SEQ ID NO: 384911 - DNA, 851 bp, Cannabis indica
aaacaagattatttttttaggaaaattgaaagttgtatatgagtactaatttttttttttgcgagtagattggaataaagaagttccaaaaaaaaaaaaatcctttttttcattttcagttattcccccaacccaatagcattttttctcaacaaaatatgaataagtaacagattttggctaataaaattaccagggaacgagaaaaagttggattttgtgtattgagagagatggaatgtgtgatgtatataatgttagaatgacaattaggtgggacttttagcgtattttggagcttaagtttcttaggcttctgatctgatcaatgtgcaattttgttttttttcctttgttgccaacaagtcttaggaaacaagcctgcatgtttagtaactgggtagataatcttgttgaataaaatgtatagcttccaatctttgatcaaattgtgatctattgcggttcctattatctattatggtagtaaggctccagtctacactttacatttgagatgctgaggcttagcatacctcaatcttttttaagggttttgggccatcctataatattttaaaggaacaagaaattatagttattgctatgtaggtactaaggatggattcaaaccgcagacctcgtggaagcaaaccacgaatctgataatttgatctacccttttaggccctatgcacaagaatgaaatagtcgaaacttgtgtactaattttgttatgaacatgtagataaatttctatacgagcttaagatttcaatcacatttatttcattgatcttttttgtgtaggagcttaagatttcaatcacatttatttcattgatcttttt

SEQ ID NO: 384912 - DNA, 1217 bp, Cannabis indica
aaaaagaaaaaagggaggctgtagctttagatgctacctgtagtgactttttttttcctttgcagaaatgaaatttacaaaagcgacatcctgtttttgcttatctatattgagatgattaagataattttactatcttataagtacctttattcaccttactggcaaaatatcttatgctgacctagacattttcctaatgttgaatcacatagttacaactctcttggcatgttgataaaaaaaaaaaaatactcccttggcatttgttgcctatttttttttttagaactcaatgtgccaaattgatcagaggcaactaggcaagccaatgcaaggcgctattattcgttaatattctatgttaaagcctgtcacactactgctttagtttatttccttggtctttaggacttatttatcctatatgatactatatcttttcctatcttaaagtttccactatataaatcatccaatagtccaagtatttttaaccaaaagcagaccttaactttttggggaatgttgggtatacctatggaccttaatttctttccaatagaagcaaaaagtatagttattagtcaatagtggccagctaattcattgctttgatccaccaatatagcgtgcttactagtttgtgatctgtaattagctgtttaaaagacatgtattaaaagaaaaatgaagatgtagtatcattcatcaaagtgtcctaggaatcattttgatgatataatttgaggaccccaaaggataataactaacaacttggtcataaagagaaatcttcttcttggtgttgtcaatgtatatttcaatattagctataaaataagagaaaagaagttgtgcattaacttctgtccgcacgcaggagcccaacctgtctcctatggaatttgttgccatcactcgtcactaatgacgccttttcaaaatacttgatttttttattttattttttcctttttctagtttattaatctttttgtttcatacaattccatgtcttggcatgccattttaagatttgtttattttttatcaaaaacaaaaagagattagtttacttcatttatataaggctaattagatttttttccccgaattttgacatgactgaactttttttgctgttaaaaattttccttgaactattgagatggttagatttaaagacttttatctaattttagtaaacaaattct

SEQ ID NO: 384913 - DNA, 1749 bp, Cannabis indica
aagttccctagaagcagataaaccttaacgatcccttcaaaactctaatgattgttgaaggtatttgtgggatgtctagaaagggcaccacttctaaagagcagacgcttcaatttggcccaaaagacgtccaccgattggataggtgagaagttgaaatggtgccgcatctcccaatatatgtctcccatcattgcatgcattgtaaggaacactcagaaaatgagaagattgcctaagtccaatcgtcactgttttgagcttcccagaaaacacgcgcccaacacgagcacaaaaatccaaaaatcagcttttagaaccctaacaagaaaataagggaaatcataccttctacataatgacactttggtttggcagctgatcacgtaatgcatcaaatgacttgtcataagtcccatgtccgcaaagatttcttagaagatggcactgcaagttccaggaccatggtatgtcctgagaccttgggggtaaatattatccacatatttggaagcatgacaaatggaaattaatcgaagaaggccaagaggacaccaagccacctaagcacctctcttagtgctctagaagaataaaagcaccaacctcgcgtgaaaggtctctgtaaaagaagtctccctgagtgttggccacgcgaaaggaattcgtgagctagtgcctcactcctctctgaaagacttaacctttttgatctcgtaaaaagtatggatcttctctaaccaagatacgccagtccagaggacgcttttgacccataaaagatcagcccacacatggtaggttacggacctaatgacaagactttttatgtacgatgttagaggttgtctcccacgccaagctaccatgtagagcatgtgtgtccttgtgtactctgccaaacaatccaacggctagggatgagggaaatttaaatgagaatggctctgaggtgcacgcatccaaagtcctgccagtatagccagtacaatctgacatcgggaccacatagaaaatctggcacctaccaatccaaaggtcgggattcatccctacaaagatccatccaaggtagcccatgcaatggagttggcctataaatactccaatgaaagcacaagaaaacgaatctagaccttttccttagagcttcacctttggagaaaagactcattcaccatcactcaagcatacacgctttagtaaccctaccattaagtccagaatattcctactaagattcttcttcttcaagagaaacacagggggaaggactaactatccatcgttcttgtatttgaataaacaaacatcggcctaagagcctaataaaatggactcgtggactaaggatagttaacacttgaccacgtaaaaatatcttatttgttattacgttatttataccttcactactttcttaagctctaagattatttggttgccgaaaaactaaataaacactgagcaatagaatcaaaagtaaaggggtattaccctgtagtttttaacaattgaaatatacggggggtttgatagaaaatttatctttcttatattattcttcaatttataattaatgtaccaattttaatgtgaaactttttttgtaaataaaatttgtgtccccacaagataatcatatttttatggactatgatgagtacgaaatgtcaaaaagtttgtgtggctggcgggccatgttggattttgtgccttaaataaaacccattacaatctgattagtta

SEQ ID NO: 384914 - DNA, 841 bp, Cannabis indica
aaatcctaattaacctttatttaaatcacactttgttataaataatagatatttgtagaagtctaaatcttttcaaatttatggattttgtataaatagagatcaccccattaatgagcatgtgtctttaaccaagatatactcatttgactgaaatacattcgagctaattactttttttttattttttattttgttatgagtaattatttatacaagataaagtttgtacattattgattttgtaattctcagctcaaaaggaggctgagggcaacatgttctatctatattctgatagggtattacaaacaccaatgataaagtgacaagtgactctaatgttggtgctaagggaactgacactagcagaaaagaataacactgaaaagaaagaaattaaccacataatgaccacaccaatacaaagagattagtactaaacagagtattcgactttcttaacaccacccctcaaatgagagggtgagttcttcacactgagtttgcaaattaagtagtgaaatctagaatgagagaggctttgtcatacagtttgcaatttgatctactaatggagtgtacctgacttccagtgtcttgtttaaaactttatctcgaacaaaatgtatgtccagcacaatatgtttagtgtgtacatcatgttgggtttggtgccctaaataaaactcattacaatctgattagttatcaatctaagaaatttgaagtgatttatgtttgcataaattcttcatgcttatggtttaatatgtttaatgcagaaaatatgttaagtccagaacatatattcacaattacagtattgtcaacacagtgg

SEQ ID NO: 384915 - DNA, 1747 bp, Cannabis indica
cataccctgtatatatatatatatatatatttatatataacccactttgtacattcaaattttacctaaattattatacacatgatttccagggtgcaaagtgcattgctcgtagcttaaaagtggtcaatgaagcattaacttcgctagatcttggattcaatgagataagggtactactttctgtttgtattctaaactagcatagcatctttgcaatatttaatccatggttagtattttgacgttttttttttttttttttttaaggtatgatggggcctttgccattgctcaagcattaaaggctaatgaagatgtgcgaatcacgtatctgaatctttctcgtaacctgatgaccaaatttggacacgttagttttcatttcattcattggactctttttgtatgcagtcagtatgtttggacatgttttcttaacctaatttccgcatcatgcagagtgctctttcggatgctagagatcatgtatatgagatgaccgaaaaggaagtagaagttgttttctaaaaggtgggttgacataactgagttgtggataacatggtttaggtttattcgtttgccagaaggtgttgataattaatggtattggtgaggacaacaaaatacttttttgatccaaattttggagttcttaccaatatcctcttagaatgagagaaagattgaaattttgacgctgagttcgtagttagtctgtcacatcatctaattattttctttaatccgattgttagtaaccaagccaggttacaacgacatgattataaatttgtcgtttgtcctgtctcattttttgggggtattttaagggatatcttaaaacttatttttccatgtgataaatcataaaacggtatttagtatgggtaaccagaatattcgcttaaggtggttaattttattttagtgtggttatagatttttttttttcactacacactgcagtgtggttgaacttttatatacacatttttttttctaaataatttttttttattaattcattttaatttagttcctttgttgtaccatttacgtatttatctttaactagaaaacaaacgccactttcttttgtttagtactaatatttatgtaaggtgattaatgataattaagttataaaattatatcaaattttaaattttttaatattttctatatatatgtatatatttttatgagcaacaaacttattaaatttgtattttttttaaaatcttaataacacacaatagaaaaagaattattacattacaacagacttatatatattttttaattattttaaacttatataaattttaatttatttagttaattgttgtcattttcgtatttcactgacactaaatttaaagttgttgttgttatacctgaaattcggttaccattttagtggaggacacttgttaatataaaaggaatatggatcaatgaaatcacttttatttgaataactcattaattgcgtaagtaacagagtattcttgcaactcgttgactataaagtcatatgcgaggaaaagatatacaaactgttgtttagtatattaacgagaaattatacgtcattggatgaataaagtgagacatcaactctgtaacatttgggaagatgataacgatacatatcgactgtgaaaacacttagcgtatactgtacaaactaagtaaaacagtcgggtggacccaagacctaataagcgaggcgcctatc

SEQ ID NO: 384916 - DNA, 1344 bp, Cannabis indica
ttgatgtattttaatgttgcactcttattattttgaggttaattttttgttatttgtatattattatttttttatgttatttggttgttgttttacttttatttgcatgtagctttcttattttgtttagtgttattttaatgaacaccctaaaaatataaaataaatctataaatgtgtaaaaattataccaaaaataataatttatataaaattcctaatcctctctacgtacgagacctttgcttctaaacgacaaggcagctccttaaacgacatgagccacatggcatatcaaatattcagctttcgtatgatgctcatcaattgaattttcgtgcgaatgcctataccaatattattaattgattatttatgaataaatgtaactaatttgataatagctagttgaaattgattgaagcattttatttgtatagattagaatagagtcaaaatagaacaaacacttggaaaattataataatacccgattattagtttaacgaaataaatttttgtcaatccaggccagccgcctaagtttcatcattcatatatatgagtcatgactcaagagtttattttatttgttttacttgtcaattatgactttcctcctccataccaatccttagttattatattgtattgtaattgtacaatatttgtccttgaccaaaagcttttgatgttatctgttctctcaaaatagaaatagccaatgtcttcatgaaaactaattttataaataattgtataggaaatacagtcaaaatgggtaaatccacatgatatgcatatattatatacgaagaagaagaagaagtatacatcacgaaacttgtttgtaatttggcttgattattggtgtaaacttaaagctcggatagagtccgtgtctacaatggaagaagcttccttcatttttatttccctcgagctataatataactaaaagcggtgtatatatggattgtcgaatatggcgcatgtgattaattttctgttatttcaagtcgaaacgacttggttgcttggctagctattttattgttttcatatttgctttgcttgttgatgtttctcagtttttgtcatttatttcttatatctcattaggagtgatgccaataaattaatagtagcccataaattaaacaaatttgtttttatttccaaaattatgtttggtttgctttttcatatagtttaatataataaattttaaggagaatatctctaactaatctcaagacaatatatttagaggtgcgtaatggtatttttaccatgagcattgctattaggcaccagtggtgcctagcatcttctcgacatgtc

SEQ ID NO: 384917 - DNA, 1410 bp, Cannabis indica
aaaaaaaaaaaaaaaccaattactcttattgcatcattcatgagtaaccaattaaagaataagtttcaagagtaacgtgcttccactatacatctttggaaaatgaagtatgaaattcttacaaaccccaataccaatacgtgaattcctcaaaaatcagccatgagttatttggaacagatctcaccctctaataccaaaactaattttgccttagagtattgtcttcatatcaatcttcaaaggcgtgagactcttagggtttgctcgacgccattttaacagggagttacgcaagggaaaatcaccccttgtattgaattccacatataaactcacccaacaactaggggcgagggggagctcatttttctgtcgaacattattttgatacaaattttgacataagtaatgtatttttgtgtatgtgaaaagatgatgaacctcaactaatcagaatggctactaataacttaactctgttggaagctgagtaaaaaaattcttacgatattcattgtgatcgatctgtatagttgttaccactcttcgcatgctgtcaaaaaatgagtagaaaaattgtgtgaacacaataaacatgttgcctcataccaccagacaaacgtgcttgtgtaatttaagatgacagtaaatattgttgtagtaaacaaagtataacattaagctaacatgtttatttcatatcatcaccaattattattaaagagaatttgattgaagttagcaagtatttaaatcttctgtatatactgcccccaacaagtgaaatgaacaaaaagatggattatatgccataatgaatggaaggaacagacttacatatctatgtaaacctcaatgagaaacctcactttgccaatagaaacctgtaatgtacaaaatttaaatttgattatactaggattttttcttaaagctaactttaatgtgtcatggagtcagattttataacaatagtttaaatatttaagcaatgtacctagtctaactatttcaatatttatagcccagttgcagcaacaaatgacgatagctgcgacctcgtgctagtcgttgccaccggtaccgaaccatcttctgataactcatttgaatccgctctaggacaagcctgtgatcaatcagtagggatgcatttaatacttccgaaataactctattcaaaaaataaaaaaatatttccgcaataacttcaatacttaaaagttcaaacaaaagaagacttaccatctaacaagacacctctcaattcctcttgatacagggcgaatgaaagatggatctcgttggctatagagcaaaccaaccttcaaaaataaaagggaaaaaatactcattcttctggaaaaagaccatagagaactagctaattgcttggtttagaagaat

SEQ ID NO: 384918 - DNA, 940 bp, Cannabis indica
ttttttttttttttatggatagtttattgtgtattgttctttttgcaagctctctcttttgggagccggataaaagctcgaatagttcgggccaaagtcgccccatcgggctggaggcccgactcggcctgcgaaaatggccctaattgtcatccctatcaggtgcccttggtcgacggaagctctcttggtctgaaagtcaccttttggccagtcagcttgtgcccagatcctagccgaccatacaagctcttccaagctggcctatagacttcccttggccggtcagacatgttggtacagctccttaacgactcgctcaactccttttgcttgttgcttggtggttttgccataccttgtaaggagacattgtcttgctattggcaagactctattctacctgtactctgtcttggcttacatggacatgccacgttaggtggaaaaaatttaggataacatctagcaaaaatttctacaaactctcagtgacgtcctgatggtgctgacgattttcatcttgatcgtgttcacacctttcttcatatgcattgccctttccgaaatttttcctttgcaaagcaccttaactcttcattgtgcttgtctcacgcattcattctttggtttatctcttttatttctgctgccagagcaacggtaggatcaataatccaacttgatgtatctccttcattcgccaccacagtttctgcgcattctccgatacttccttggatcccatattaggctgtagcctagtcctcaactttttgttctagtgtttcacataaacaacgataactgttgatgttgaaaattatctcaacaaaaaatttatattttcacttagaattccttgcactaggattgatccaatcaaaagattgcaattctgcaaaatacacaatttttcctaaatcggtcatgattctct

SEQ ID NO: 384919 - DNA, 1621 bp, Cannabis indica
gtataatttcttttttaagcctttcatttggtaacgttaacacttttcggtttatgtcatgttaggttaccaggctttacaaggacaaagaacatgctgaagttgaattcactgtgagttacaaacaaacaaaccaaattttgagactttatagacttaagtgtgtgtagttctctaacaactctttatttttgaaagattggtccaatccccacagatgatggtgttgggaaagaggtcattactcgattgacagcgaatatggaaactaacaaagtgttctacactgattcgaacggaagggattttctaaaacgagtaagaatttcttacatatccacaagattaactaacttaactaacttattctttacttgggaaagttagttgaaacagttaggcagttatgttagttggttatgcaacagttccaatgctttcatttgtaacttgtgatattcgatctagagagatagagaacacgacatgagagctagtgagagagagagtaaagttctttcgagactaagaactttgggtgtactcgggtcaaggggagtgagctgagatttgatagtgggccaaaattttcagtaaattcttgcgtttcactttaaatgttcatttgatttaatttctatttccgacatgattcataattcattgacaatattttctcaggttcgagatcatcgagaagactggcctcttacggttactcagcctgaagcaggaaactattaccctgtaattttcttaaccactaatcgatatgaattttcttggaacacaaacttaaatgaatcttctaatcattcctcagcttaatcttggaattttcaccgcggataagaaatctgaattatcggtattagttgatcgtgccactgggggagccagcattgcagatggacaactagagttgatgctgcacaggtataaaatttcacacattttcttattctcagcaatataagtcatcacaaatcttgtctatggagttgcccttttcaaaaaagattaaaaatttcgtcgattcttaaatgaaaaggcgcatgctcaaagatgattctagaggagttggcgaagcccttgatgagagagtctgtgttgaagatacatgtgaaggactaactgtaagttagttatttcatagcacatcacatagattattatagcacatttgtttagtcttctaatcaaaatcactttgttcgtaggttcgaggaaattattacgtgagcatcaaccagcccggtgctggggcaagttggcgtcgaacgataggccaagaagtttactcgccacttctcttagctttcacacatgaggtattcacttcataatatacacacatactatatggattctcttttgttattgttttgatctcgaagcctgaattaatcctcatcataaaaccctatcacggggttagcgagtggtgtcacgatagaatataaataccttaagaaatgcatagacacactggatttctaagacaaacacacgggacaaggggaccccaattcgttctgtaaataatgttactttggggtgttcataaagtaatcaatccaatccaatctacaaagtgcaaattgaatcagatgcactatga

SEQ ID NO: 384920 - DNA, 1175 bp, Cannabis indica
tggtatatatatatattagcctttttatttattttatttaattttcaattttttttatattaaaaaattaattaattaattaattaattaattaaaaaaaatgtgaaaaatggaattgtagggtgggtgcaatggctgaatggcttgtgctatataatcttgctaaggacaagagaggattgcttacaaaggacacaattagagatgtttatgatggaagcttatttgaaagattggaaaaagaacattcttcttcaaaaaagaaacagtaatcatcatatatatcttcatagtattattaatatgtaataataatttttatatatatataaaaaatcatcagaattataatgtaatgttttaatttcttttatgtagttcttctgcttaacgaaaaggatgcatagattgattggtctggttctggtgatgatgctatttatcttctagctaattaagctattgcatttatttatttgtggattatggtgtgtgttttgatgatttgttttaattataatgcatgtaatttgatcttcatcataaatatatgagtgttgaatatttcgtgaagccgatcaagtggttcacttattagccaattaataaagttagtactatgtggattgtggtgtcttccctttgtacccgtgacgccattttaagtgtgacattaattaatgattttttttatttttgaaaaaataattaaattttattatttacatgtatataattagtccttattattcaaggcattattgtattatattaattaatttcatagtatgattgtatattaaaagtgttgctaaatatcaattgatatcagaatagataattgaaaaatgtgatatgattaatttagtatttttttttaatgaaaaatatgatacgttttctgaaaatatattttagatttaattagatagaatatacttagggaaatttacatggtatactaagttttgttattttttcacaaaaatactgtcaggcggtattttttacttttttactgtgtttttttataagtttcatactgcagtatactgtgttaagttttcattggtgttctactagggttttattggtgttctactgttgttttgagttgttctgctttgtgttttattggtgttttataaaacacagtattttgaaaaaatttccgt

SEQ ID NO: 384921 - DNA, 2705 bp, Cannabis indica
aagaaaaccctgttaccaagaaataaaacgtacaatcatatttcatatgtatttcattatcatttctacaacatgaattattcagtaaaacaaaatgtagactaatcatgcaacagagcaaacaaaaggtactgtgctttaaaacaaaagggcaataaacatttgagacttctaattaaaatcaaatatgtaacaatgagaatgtccttagtgtgaaatgaattaggaataaaaacatcttaagagccaaaatgttttggtctagactctagagtggaaaataaaagacatatcgatatcagttgatgtgaaaactagaaaaactaaacacggccactagagtcttgagatgtaggtgtaagctgtagaaggataccaaaccaatcaattcaaaatggtacacatgtaactgtaattatctaacattttctcttcaacttgtctgggaagaattttataacagctggtgcctggtggatattaatccacaacctaattttctcttgcttgtaagattcatactacacatttcaagtgggccaccatgacagagatttgaaaagaaaagaaaaagagaaaataatcaccacttctttctttctgaatatttatttttttgtgccaactacttctttcgtattgaaatttaagaaataaacaaataataatcttcaaaatttccaaacatatccatgatcattttttttagtctttcactatcattaaaaaagaaaagaaaaaaaaaggaacaactacttggaaagaacatttagttgtaataaatataatttaataacaaaacctatatctataggggatggatgaagaccaggccgagttataaatttaccttcattataccgacgatggtgccactatagccagaaaaattgtgggctccagtgacgacattagtggtgttgaagaatgtttgaccatgggccccaaagaacatgaacaaacacataacgatgaccggaggtcgggaaatgaggccggcgacggcggcccacatgaagaagtaacccacgaagaattgggcagctccagtcgccaggaccacccaaggcccgctgaaccacctgccgaggaacgaggaacgccatcgttgcgtggtaacggcatcgtagaggagaccggataagatacccgcgttagcaccgatgtccttgaaaacagagacggtgtcgagagttgattggttataaccctggctggacttgagagcggaggagtagattccgaaggtgtacgatgcacccacgatacactggatccatatgctggccgctgttgtcacccacttgttgttgaaactgagacgcctcacctccaccatttcattctattttttcttttctttctttcttttatttgcaaataattgcaatgaaaaggggcttttattccccattcctacgataaagaataataattataatatattatacttatttttttcatagaatattttattttattttatttttgaattattcaaaaacagaacaaatacaaggcaaagacgagttacaaaagctaaccacaaaaacaaactaccaattactgactaaactttatacataattatctttctttgaaataagtcttgtagattcccaaactctcaacttttatcacattttcaatctccatattaagaacaacactacatcacaaacaacattaaatattgttaaaatttgagataagataatgaagtttcatctcaaaattaattggtaatagaggagtagttcattcattttatatttgacaatttatttctgtacattaacaatgtaggactaactctaatataccctcatcacgtttggacctaaaaagtgtgagtattacgaacgacttttaagagaccacaggaccgaacgtgacatttgaaagaatctcacaaggccaaatgtcgggaaatttatgggtgtacacgtcaagaaatttatggattttgaaacaggtcaaagatcacaacactggaaactggcacacattggtcgaaaggtcccaaatggaggttaaaggggagacagcgaaagtatctttttggaccggaagcactttggctcacaacagatcacaaacggctttttgtaccggtagtattgggctcacaacagatcataagtggctctcataccatgttagaatttgggataagatgaatgaggttccatctcaaaaccaattgacaatgggaggagtagctcatttatcttatatggcaatttattttcacacattagcaatgtgggattaactctaataaatatacaatcattcctgttcttccaaatcaaataacatgcagtagcaatgaccgcatttacaatagttgaactcatatcaaccttgggggacagattcctttgttgaagctcgtagaggccctttggccagtttagactccccacccaactctctaaaatcccaattagctttttagtaaagaagcaatccataaataaatgattgtgagactgagaaaagtctactcaaatgatctcgagtaagaagttgatcattaaagatttgccaataactaaatctatcttttgggacaataagcttatgcaaaacagtaacataataagaaactttagtagccccaatcaaagcattatagaacatgttaaccttgaatttacctcccttaacagcttgcttcaacatgttctcatttgtcaaat

SEQ ID NO: 384922 - DNA, 1968 bp, Cannabis indica
acacatgaattcgctgcacaaaacctttggagggttgaaagcttaacaagctcaagagattctaattttacgggaacaaaaatcctttccatatgagttttcttcttctccaagtttcactcctactatgtcttccatttcctcacaatcgtcaacttctaatgttgttaggcttacaaagttttgagcaagagagaaagagaatagatattttaaattattgcaccttcccactcttaagcttgttaaggtttgcatgtaagaacttgatgatgatacaagtcgttcaggccataaagtttttatagtactcatgctgctcacactccattcttccaagttggaaaaagaaagctgcaaatattttaataaataggtgactctaaaactaaattaccataatgcaacctagctacattaaaagaaatgatgtagcacatatcaagatagagagatggagttgtaccgtttcactgaataaaggctttgagtgatctattagtagtgatgacgatgatgatgactcgtcggttggtgtttgtttggagcaacaaaattggacaatgtttggtaaagaatacagatgcaaggagcgttagttgcaaagtgatctcctcaatcttatgatcatcttctctgccgtggctgactattatctcttctatcatctcacaattatatactgtaatgttatgaagtagtttggcgacagacaggggaaacaaattctttaatctatcgcaattcctcacatttacatttctcaattcattgaaggagcctcttgggagttgattaccatgacatataatcctttccaaacttgttaaaaattcaatgtttagtgactccaacatggaaaggcttcatgaacatggaaaggcttcatgttgaatgacatccctggaattaaagatatatttgaccccatcattactactaagattcaattgctttaatctacgaaaaccatcttcaccaagatcgtgaaaagcattgttgacccacacaaatccatgtagtgataaatattcagaccctttcatgaccgattcaagtccagaaacatatatctgatccaattgagagagatctaggttcaaccacctgcttgaataagcttcatatgctaaatattcacagccatttatatttttacaccaaccaatagatattctgtatctctccaacttttctgtaagcaacccctctggcaagacatgtacatttggtacagataaatataaagttgtgagtcgttgcaaactctttatctcaacaagactaacatgtcttctttcatttgttattttgccttcttcactagtctgatcccatccttgaaagttatcaggaagatagagctcttccatctgtgtcaaatttgaaatgacattcgcctctatcactcttaaatgagaacagtctcgtagatccagcacttgcaaacgccgcaattctcctatttcttttggcaaccgcttgatgcaatgacacccggatagatcaagagcttttaaattctttagctcaccaatcacctctatgtcttcaacataagagtcgcgcagacataatgtttggagattttgaagcaaatgaaaagacaaaggtagtgatgttaagggtgtagcaattatacccaaggctttaagcttcccagtttgttcaaaaaagtcattcgggatcaatttcaaagattgagtagatagaagaagtaattctaaactaggacattccaaatttcgaggaagattgccaaaatcatcataatcaacaaaggaaattgccttagatgctttatgtctttcatacatagcagcactagtaatgttattcatcatcctatgctcatcatcttcttttccaatagttaggcaaacatcacgaatgacatcgtgcatcttcacttcatcatgtttgcttgaaccatctaacaacagagaatgagatttcaatttaacaacc

SEQ ID NO: 384923 - DNA, 1164 bp, Cannabis indica
aaaaaaaaataaataaattaagacaaatagtagttaaattttctggaagttctttttagtacatcttgttctgctctttgcagaaaatgcaattatgaaaactaaaaaccatgaactgattacactttttaggaatgtgtggattgtcatataatgacttagtttgaatggtcatggttttcctatatttatgaaataaaaactaatgtggcttatttaatttcaggacttcctgtcgcctttttagctttctacatctacgagaagaaggaacaagagattgattccatttttctagaggttctgtcctgtggaagcaaactgaaatctgatatagttaaaaaactaaggaggtccaagaggacagaatgaataccattccaaataattttatggcatcaatccatactgtttttgcccaaagatttgtgtgcagtatagcttgatggtttggaagtgcaggtattgacattttggtgttggctctgttggttcagtttgtcaatctaagaattctatacatttactcaatataattgttcaatcctacttttactttagtgtaggataatgttcatatttttatatgttcatatctttttgtgtcttgaaacctcctggtttcttggattttgactgggttttatttaattcattttgtcatcaaatttcatgtactgtggggtccaaatttattatggacggctgatattcagatttttttttttgaaaagaaaacgttgattgatagcagaatttagacctctcggtcattacaaaggatagcgttagggatggccgaggcctccacgatatcggaaatagtttgagcataagcccatctagcgacattgtgagccgcaaagttacagtttctggaaataaaagaaaaattacaagataaaaacttcttagagagttgattacaagcatacaaataattggcaatgttccagttgtcctggatacctttaagagcatttataaccacttcagaatcactctcgaccataataaaatcatgcttcctggtagtaacagcttccaaagcaagatgacacgcagctgcctcgccgatcaaaggatctgtgaaattgagtaagttggccacaccccataaaacggttcccgaatgatctctagccaaggccgcaatacacatgg

SEQ ID NO: 384924 - DNA, 1752 bp, Cannabis indica
ccgaatgctaataaggtgtacggaataatctaaaagctagaaaaactcctcttttgtttcttctttcagaaaaaatgttggattaaaaatcgccactgatacgtgtattcactagacttgtccatcagcgtttccataatttggagtgtgatcgatcttgaaaacagaataatgcctttgtattaataacaaaattaggtaatcacaaagggatacaagtatggccaggcacaaacagacatacacattagacccctaaagaaaagtaaaagaaaaaaacacacaccaaaactcccataactagacacttaacattgacccatgactcataactcaaaatttactctgacaggctattcagtcgacttcctccattttgctctcctcgtttccatcctcctccaatggtggcatctcaacttcatcaccctccacttcttcctcatcaatgctcagaccaagcttcagcattctatggattcttgcagcaaatgtgttcggatcgtcgaggctgaaaccagatgttagcagagcagtctcgaagagtaggagcaccaagtccttcacagacttgtcattcttatcagcctcggccctctttctcagctcctccatgataccattgtcggggttaatctccattgttttcttgctcgacatgtaagagctcatgctgctatcccttaaagcctgagccttcatgattctttccatgttggctgtccaaccatattcacctgtcaccaaacaacaaggtgaatccacaatcctgtctgatacaacaactttctccaccttgtcacccaaaatgtccttgattgttttgcaaaggttctcaaaagatttcttcttctcctcccttttcttcttctcttcctcagtttcatcatccaatttaagcccctcctttgtcgctgacacaagcttttttccatcatattccttcaattgcccaactgcatactcatcgatggcatcaaccatgtagagaacctcataacctctcttcttaagtctctccaagaatggtgaattctccaccgctttcttgctttcaccagtgatgtagaagatatctttctgcccttccttcatccttgtgacgtagtccttcaagctcgtcatctcatctccactcttagttgagtggtaccttagcaaatcagccagcttagccctgttctgactgtcctcatggatacccaacttaaggttcttcgaaaaagcatcgtagaacttggcatagtcctctttgttctcagcaatctcattaaacatctcaatacatttcttaacaaggttctttcttatcaccttgagaatcttgttttgttgaagcatttcacgggagatgttgagaggcagatcgtcggagtcaacaacgcccttaatgaatccaaggtactcgggaatgagctcttcacagttgtccatgatgaacactctgcggacataaagcttgatgttgttcatcttcttcctggtgtcaaaaagatcaaaaggcgctctcttggggacaaaaaggatggccttgaattcaagctgcccttcaacggagaagtgcttaacggcaagatggtcctcccaatcattggtgatgctcttgtaaaacgatgcatactcatccttagtgatttcctcaggctttctcaaccaaattggtttctgcttattgatgagttgccactcatggctaacctccttaactttcttcttctttttcgtatccttctctttctcttcgtcaacttc

SEQ ID NO: 384925 - DNA, 990 bp, Cannabis indica
atagacatattaaccaaattattctaatttattctacaccaaagatttgttatacatatttagttatactatttcgggatacaatattttatagcatatataatcctattatgatgcactcccgttgccatataaagatatctccttaatttttattcctaaatctctcataaccataaacataaataattgtttgtctctattattaactctttttattgtctcttttcttctaaacatttccacacttgattagaaaagagacaataataatggaggagttcaagttcaaccatagcataatcctcttaatcgccgcatctctagtattactcttctcatcaccactagtccaatgccacgtgacatcatcgccatcgccatcaccatcaccaaccccacaaccatatgaatcacaaagcaataatcataatagtggatacgtccattcaacacaccccaaaagaagatcaaatcccacttcaaacgacgaattcaacctcttagaaaatataaataaaatatgtagtgtcactgcagaccccaagatatgcgttgaggcaatcctaccccacgtgaagggtcacgtggaccctgttttggctctccaaacagagatcaaatccttcattacgttattgggaaaagccaatatagtgatgaaagccaccctaaagcactcaacaagttcaacaacagcagattgcctaagattatgcgtggacatgtacagcaccgctcgtatggacctgaaacaagcattgcaggctattaaatcccatgatattggattgttgaatagccttctaagtggtgttattacaggtatagggacttgtgatgatactgtctctgaggctggtgaagagttgcctcttgatactaatttagttaacactattcataagttggctgataactgtatggatatttctgcagtacttcttacttaatatgatgaatgtatatgtatataaatatatattattt

SEQ ID NO: 384926 - DNA, 2927 bp, Cannabis indica
ttgaggtggagccactgcagcatgcaagtttagacttacaaaatcaaggtggagttggtcaggacattgaggaagacagccaatatgatgatctcgagaattaccaactggctagagacaagacaagaagagaaataagaccccctgccagatatggagaagcagacatcattgcttatgcccttgcagtagctaaagaatcaaaggaagttgtgcctaagaactatcaagaagctatcaacaacaaacactccaagagatggaattcaacaatgaatggagaaatcacttctctgaagaataaaacctggatagtagtattgaaactagaaggatagaaagttataggatgcaaatggatttttagagtgaaagatggatgatgaacctaaggtacacaaggccagattagttacaaaatgattcacacaagttgaaggagtagactacctagaaattttctctcaagttgttaaaatgaagacaataagaatgattgattgctatagctattcaacttgactgggacatacaacaaatggatgtaaaaacaacatttttaaatggaaagcttgaagaaactatatacatggagcagcctgaagggttcaaggtggaatttaaagaaggagaattggttttctactaaaaaggtcgctatatggtctgaagcaatctccaaggcaatggtacaagaagatagattcagtggttactaatgttggttacatcagatctaaatttgacacatgtttgtacttcacaaatctaaattcacaagtagcaactttcctactgatctattttgatgacttgcttattatgggaaaagatcagaaccaaataagaaaactaaagtatgtcctaaacaatgagtttgagatgaaatacatgggagttgctaggaaaatgctaggtactgaaattaagagagacaaaaaagagaagaagctgctacttacacaacagtcatacattgaaaaggttattaagaggttcaatatggaggatggaaaagagactcaagttcctttagctggtcattttgtgttcacaattgatcaatccccaaaagataacaaatcaaagaaaaagatggaagaaattccttatgcaaaagccattggaagtgttatgtatgcaatgataagcacaaggccatacattacctatactgtcagcactttgagcagatttatgcccaatcctcgtgaagatcattggacaggattaaaatggcttctaaggtacctaaagataacctcaaactatggtctgaagtttgaaaaaactggcaacacactgaagttggaaggttttgttgatgttgattacgcatccaacaaggacaccagaaaatcgattactagctattgcttccaattgaattcctgctgcataaactagaaatcacagctacaacatgtggttgctttatcctctacataagttgagttcatggccatcacagaagctttctaagaagcaacatggatcaaaggtattctataagaaatcagcatgttgaagggaaaggtctctgtattttcagatagtcaatcagcaatacatttgagcaagaaccttgtatatcatgaaagatccaaacacattgatataagaatgttttggattagggacaagatagaatttagagagattgaattggagaaggtaccctcagatgagaatcctgctgatgcaggaacaaaggtgttgccagtgagtaagttcagttatttcatggacttgctcaatcttggacttgtttagacttttaggttcactccccgaagcttatgttttcactaattttctatgaattaaggtggagtttgtgatcagtaattcacagaaaaccagcttttaaaactaactttctattcttggcaagctggttaggaagttagttattattgttaaagttagttagacttctcctagtggttagtagctcggttttgtgagcagataactagcctatattaaaaccattgtaatcttattttaagatcaagagagttcaagagagcgagagaaagaattgagtgaatgagagtcaaagtatgaaactcttgaaggtgaagaatcatggtactaatggtgtcttaagctgctcgatcacggtggtttgagagcttatatctcttggtgtgtgtctcgacaactctcaattggtgtgtgtaaacaatatttcatagtgaagaaactccttgggggagagctggagtaggactttgagatccgaaccaggataaattccttgtctcacgcttttaatttttctctgtttttatgctttaattatgccttttacttgtctggttttgatcttagtttgatatctgggttatatgcaattgttatgcatgtttgtctgtgttgagtttgtgttgtaggaatttataacacacactatcggacccacatcaaaccatacattatttttatcgggccttacaaaaagcatataacttaaacacaatatcgggcccctacatcgaacctacatcgagctatcaccttcaacctttagctctttccaacaacaaaatatgtcgggcttgcatcgaggcaggacaaaaacccaggttcttctccaaaacacatatccgtctattccaaccctaaatctaatccaaactcaaaaatcacagatgtttaactctatatataaataaagatattaataatttcatacatttaaccttaaaatcatttaaaaaaaaggtatatttaaatgaatagacagtgggagaaggattcttacctttgacgacattgctgatggagaagctgagtcgttgttgtcgttgtttttacttttttttatcaatactaggttatttaaacttttatacaagttttatgtaaagcccgcttagttaatttggaaattagcaaatgtttatgattaattatgaaat

SEQ ID NO: 384927 - DNA, 2826 bp, Cannabis indica
atatatatatatatatagttcaaaccttttatatatatgtattgagagtactatagctttgttgatctgatcagagagaaacttttttgtttgggtttttttggtttgagaagagaagaattatatggttttttggaacaagaacaaaagtgtcaaatatatactacataactactacctctagctgactatatacacttatatatattatataatataatgcatgaaaatattagttaataatatttgagttagagagaatcgttatccccactaattgtttttgcaaatgttatcttcaagattaattcttattaattaattattttggtgacatgtaataatgccaatcacatggatataagaatttgttgattttgtgtgtgtatatatatataagacattagtagtggacaaatccacacacatacacatcataaagtcaaatgtacatgtatatataagatatttggcagtagtgatgtttagttagtggctccgctttaagtttttattcggtccttacactaacggaacgatagctcttatacacgagtacgctactctggctgcttcctggactgacgagtgaccctataaatcaacacaagtgtttctagcatgctttgtcctcactcgcacagtttctggaaaaactcctagaaggtcacctatcctgaaattatcacagatcaagcacgcttaactgtgaagttctttcataatgggctaccagaaaacaagatgcaccttgttgatataggtagtaccaatcaatttatttaagcccattgtgtagtcacatacctacatagtctcagaatcatcccactcgatctttcccaggcgatgtgggattgcacaacctaattagtatttctccttacggatcacgagactactgactgtcacaattagtactatttagaagtgacgctttatgattagttagctatattttataaaaattattacataaaattatataagactcgatatttaattgcactaataattagagttacccttgagaatgtataaataacctaaaattatacacttcaattaactaaactatcaccaattaatatttatttatttacaatacatttgattttacttaaataaaatcttaatgaaactttttatttttattttgagctcaaaaaaatgtagattcttagtacggacctatctcatagctaagtcgactgttgatataacactttgaaagcggcttgaaagataaatatgggccatgatataaatacaataaattactcctttttacgagctagggtttatatatttacttaaaaataaaatataataattaaatgtgcaattatatgcttcgtattatagctaataagtactatatatgtatgtatatattatatgtatatttatttatatatgcagaaattatgtttataaatgaatatatatatatatatatatgtatatttatctaatggtttaagaaagtattttagaatataaaaaatattttgttcaatttaacggtattagaaaaattaattttataaataaatataaatattaatattaattgttttaagttaattgaacttttacaccaattaattatttagattaatttaaatatataaatattaatatattatttataatattattattttttatttgttacttttaatattaagaatgtgtttaatttaatagttttaaattttatatttatttttttttaatttttaaaactttgaatattatttttttaaaaaaaataaaaaattaataagcattttcttttaatttataaattttcaaaatacacataacaaaataaaactaaaaatataattaaatatacgtgcaatacacaataatatatacatatatttatacatgtactttcaacaataatatatatacatatctattcatttcctataacaaattttttaaatctaaaaaaaaaatcacctttaattcaattattaatgactcttgattgatgaagagtggccagacaatataagtaccaaaaaccaaaatactattaatttatttgtttaaagtttaaacacactaattaattaactaattatagtacattaaatattaattattaatagctaggtttgctttaatattatatagtactaattgtgtagctttattttttttttccttttttttttcagaaaaaaaaacattggagtttcaaattattgagtaccctatagctcataattaataaaaacctaattaagtattgaagtgaactgatcatcaattgtggacccctcttttaaagcttaattattggtgctctccctataaattaattaacaaaagaattttaaattgaagataaaaaaaacacattaatatatttatatgtacaaatcaattttttttttatttattttccaaaaaaatgtataattttttactattaattataaattaggttatgttggactgttggttgcttaaccgacaaagttacgtttgttttagaaatagaaaaaaaaacaaaacaaaacaaaacaaaaatacttgtgttcatcagtttatatatatttatttttttttaaaaaaaaaattagttaatgtgtgtttttgtctttaattaattagagtacgtgtgatcgatgatgctatagaatatcattataaatatatgtaaatattaattagccaactgaattatattattattattattattattattattattattattattattattattattattattattacaaattataataaaactgtttaattatcactgaacttgctcctttgactaatcaagac

SEQ ID NO: 384928 - DNA, 1393 bp, Cannabis indica
catggcatatttgcactccagatatatatcgaagtcatatatagcttaggtgtgtgagtgtccccattgcttactgaataatttttcatatatatatttattgtacatatatatgtccatttggtgagagacatttttttcattttttgtatttttttataatttttcagccgtacgagtcacaatccacgggtggctacagttaattattacatgatttttctttaattatttattattaaagcttgaaaagatgaaagaaaagctgtcgacattgaagcactaattttggtctttaaatatataagtattagtgatccacgtaccctacttgatatatattcaacatattcggtccatatataatatcaaaattttcaattatattgtttggtgcacatgtgcatatgcacccaattggttggttccctattaaaatattaaataaataaaaatagagagaccttataatcttatattcctcaaattgtgtatgcctataaattaagctgatgatcaataacttatcatcataaatattcaattgtgtgctaaaacatctaaagtaaaattattctctccaactctttaagtgcttctcaaagacttaaaattccttcaataaatagtataaaatattatatattatattaccaaaaatgagtacttctcttgcagtaccttctgacaaaaactgggcttgcatcaacggtggtgatgatgatgtcaacacaatcaacggtgcctttctcatgtcgttgatggaagaattacaagataatcatgactttgtagaggagaaggacgaggaaagattgaatagtgtgattcgatctcttgaggcagagatcaaatattcatgctcagctcatggtgatcatgatgatcaacaccgttcaatatctatggatcacgatcatgatcaatcctctagcgacggagaagatcatagccaaatggacggtcacgatgatttctcgatcatttcatttgatcatggtgatcttgatcagataaacggatgggatttcaatatggaagtagaccatgaggcttgctccccaagtagttcaagtggtaatgatgatgtgaatgtttatgggtaccaatgtggagacgagatcataagtagtaactatggcgatcataattattatggagttgttatagatcatcaggataatattgcttacaattctttctggcaggacactgtatatgactcatctattattaataataatacattattattgtaaatctttcctaatatatatatatatactagcaaaaattacctgcgaggcacgtatactaaactttatgctagttttttctatgttatttgtaaagtgatactaattaaaaattaaagaaaaaatattattagtta

SEQ ID NO: 384929 - DNA, 2122 bp, Cannabis indica
agtacacagggatgcaatttttaggtaatagttttgattataagcttagtctgatcattcatgacagaaatggtgaggttttgtgatttgccaagtgaagttgtggagaaaatcatgttgttggtgcctgcagattctctcgtagaatgtaaatctgtgaacaagttctggtattcttgtatttccactttcatcaaagatccaaaatttgtagctaagcacctcctcgtttccaaaaccgaatctttcatgtccttactttgtttcaaagacccttccccccatgaagaccattgcttgatcacatacccattgctcactataaatcatgttgatggtgatggtgatggtgatgatgatgatgatgttgatgatgatgatgttactataatccatgatggtgatgatgatgatgatgaagatggtggtagtgattatgatgatgtcactataatccctgatgatgatggtgataatgatgatgatggtggtggtggtggtggtgatgatgatggtaagaaggatcattttacaattgtcacagcatatctcactataccacttttggatatgaatcgatgggatagaatatatcactgtaatggactccttttgctagtaaattatagttacaagaagactataactatggtgttatgtaatccagttttgaaagaatctatgattctcacaaaaccaaagaatgttacatttatggctcatcatcatcactacataggatttgaacacgattctagaaacaacaaatacaaatgtgtttccatttggctcggtgatgaagaagattgtaaagttgaggtatacacattgggttctgattcttggagagagatcaacatgtctcaagacgtaatggattatatagcgcatgctgaagtaactgaactatgcaatggtgtatgttttggaggtgtttgttactggtgtattagccaacttggaattgaaaagatcctcatttttgatatgagtagtgaggaatttcgtatgatagacttgccacgagattctctttttgacattgaagattggtctgataattatatactatgccttgcagtgtggaatgattctgttgtgatgtctttgacccccaatttcacatggaagcatgatgacccctatcatgatgagagcatcctcttgatcttcaccatggataaaggtgtagcaggtggttggaccaaatatgagcaggttggaccactagagaagtattacaataacttactaccgttttggaagaatgatgagattctaatggaagtctttgaagatggtagtgtagaacacttggcttcttgcaacattcccaaaagttaagaaatgttgtttttgatcgagttagaaaaataaatttacgttatggttgggtttgtttatatgaaaagagtctaatttctattaggagggagtgaggtaggttcactttcaaacacacctctggtttttaggtttgattttgtgaaccaagctgtttcttattaaatactatcaatgtagtttgtcattggtgtcgtttggtacacttacagttagtgtactgtatagtattctgttaaattatattgtattgtattagtattatttaatacaatattatatttgctattggcttgtactaataggttatgtaaaattataaattctttataataaactcaatcccaatcctaaccacggcatcgactcggactctagattttgacccaaatctcagaccccgaacatgtcccggacccgaactcggaccttggaccgagatcgggattcggactccgaaccttggaccccagaccggacctagacccgaacaaggacttggaccccagatccgaacctgagtttggggttggatcagggttcggggtgcgagtctgggttcggattcaagtctagtcctggtcttggtcaaagttctggtacgagttttgaggttgggtttgctatccgggtttggattcatatatgggattcggattcgggtcctttgtctaggattaaggttgagattgagattgaacttaaatccttgataaatattataatacaagttgatacagatcatttgtattaaaatttatagtcgtaataattaata

SEQ ID NO: 384930 - DNA, 1056 bp, Cannabis indica
gtcgaaacaaccctacccccaacccccccccccccccccccccccaaacacctactatgaccaaacccatgtgcatgatgcccattcaggtcacacatgtgtgggccccacatttgccaaaatattcattcaccgcgtaattatcaataatgcaagtgccactttctccaaactcttaaaataaaaataaatataattgtaaattaattgtgtaattgacatctttgtgtgtatatatatacacatacattacatatatcccttggctatatccacttgtcctattgtttgtcacaggtgaaccaatatcaaattttggcttaatcttacttgtacatggaatgttactcttttctataaggaccattttaagaatctgattataatattattgaccatattaatcagtcggtttaacatttgggctataatacataagaggtcaacttatattcgaaatttagattttggtggaaatgtatatatatattttctataaattaatgattgtggtaggtattggcctcaagctcatccctagaaagagcccaaaaaaaaaggactgttcttgtttattccctccctagaagtagaacagtgttttaagaagtaaatttcgttttgataatcattatgagattgcatgatgatatttcgggtcgggttcggtcggatcgggtcatttgcttgcatatataggcgtaggtggggttgaatttgatagggacttaacttctccctaaaataattgatttgaattgaattgtttttggaaatcaaaattaattcatttacagcctgctatatattactaaaaataaaattctattacttttaatttttacgaaagacaaaatatgttcaacaaatattatatgaagttttttgtcaaattaattgatgaagtttcctagtaaatcaaaaacaacacttttgtttttcatcataggaacaaacacttatttacaactatatatatatatatatacgggtaaatagcgacataaatacccaaagttttatgtttgtaagtggcataaattcaatgtttatttt

SEQ ID NO: 384931 - DNA, 1991 bp, Cannabis indica
ttttttttttttgtattttcatcttaattatgccttgtttcttgtaacattgttttggtgggtatcttgcccatcagcatgtttttatcttcttgtttatggcccaatccttgggtgttgatgccattctttctgtaatgactattaaaactttgttgaacaaatgggtgggaaagacaaatgaagaaagatttagcaatgttttttttacccttttgtatatttgtcagtagtactgcatctcattctggtgcagtgttgaaattttggatgcacttcaggcatgtttaaaagatggtagttcttggtctcgatttaacttttgcttgaactggttaataatgataattcttcctcgtgaaatttacatggtacatttccttgtgaatttgaagaatatttacctttaactttttgtcctgctagatattgttctaatggattttaatctcgtggaacaactatttgaagagtggtgatttgaagcactaccagctactaatacatatataattatatatatatgggatatataatctttatgtatatatcatacgcaatttgcccaacacgtacaagaacaaaaggcaattagagcattttgaaggttgcaattagctaaaacaaaggtcattagagcattttaaggttttttaatttttaaaaatattttagttaatcacttttgcaagaacatttctaattttcattacacgaatagcgtcaacagaaattgtggttatagagctagaagttactataggcctgcaacgatatgttgcaacgacatgtcgttgaaaagttatcacaataagttgttgttgcttcttactatgataacatttgcgtgttatcgctacaagtcaacatacgcaaatgttatcatagtaagaaaactaaatttcacttttacaatgatgacgttgtcattgccaaatttctttctagaattaatgaattttaaaataaatttccttacttttttagctatgtttatgaatagagcataaattatgaaacttatatgaattgcattcctcgaactccaacaataagaacttgcagtactcaattatcatgctaaaataagattgacatctaaattgggactccacacatattgaacaaccactaaggatggctaaacaaaacgtgtcatcgtgtcgtatttctgtcatattttatttggtctgcttctatattttgtgccagttgtgtcaacctatttttgactcgtgtctaattttctcaatcttaacccgtaaaaaatcatgttgtgttcgtgttgactcactttgacccattttgctattactaaacctggagttgtagaaaaaaaataataaacgtaagttccattagaaaatttttataaatctatgtatattatatagtattttttatatattatataataaaaattaaaattttataatattttcaatttcattttaaagaaattaaatttaaaattgtttaactcaacattaaattactaaatatatatttttacatagttatattattattaatctgtttttattttaaaaaaatcttatcaaacgtgtcaattcgtgtttagcgggtcattttgtgtttaacatgtttttatttcctgtcaagtcgcgtcgacctgttttcgacatgcgtctaattttctcgacccaaattcataaaattcatatcgtgttcgtgtgtcgtgtcaaagtctgttttgccacccctactaagcagtctgtttcgatatcaacatcatcctttgtccgacttccttcacatctaaggcctcaacaaactcaacttctacatgtcccataccgcaactagtaatagccgaaagcaacctcccatcaaagttacgagccacacaactaaagctataacaactcaatggataaattagaaggtataaatattattttggaccttgtgtgttgtagaagttaccaattggaccttctgttttgttaaataacaaaatggaccctgta

SEQ ID NO: 384932 - DNA, 1730 bp, Cannabis indica
ctcaaaaaatttctgttttttgaaaggagtagttctctcatttgtttctgacgaaggcttgataccaatgtctcctcccaataatttgatctcatataattcaaaattctcaaactgtttaagctcacgcaacaaagtctcctgagcttgaaagaaagaagtaagagctttcttttcatccaatcccgacatcacatcttggccctcaaccaattccttagaaagaccatcgggtcccaaagcctcaagagacacgtggcccacttgggtgtaattaggaaacccacttatcctattaaaattacctcccatttgaataggcccacggtcaggaatttgttgcccaccaatgatcatcacactccttcttaaatcataatttgagagagtaggccccactgaagtaaaattgttaatgtttgtactctctagcccacaactaatcagcccagtagagacgtgagaagggccatctccataaacttcaagtgacatcagcccaattctcttttgatttgagcagttcggcccaagcagagaattaatcgacccaataccatttcgcacgtgctgcgtctcgtgcaacgactcgttgaccgcctcaaggattggagcttgatttgaatttgaattttttgaacattagtaagctatatatgttgacatgtgatttcagacataaaaattaattaagagattataattagcactactcgaatactaattatacaaaattctatggtgcactctcttaaaatgaatgtattcactttcagattcagtagaattttttagtctattcttttatgtttgttaacgttttttttttcaggaaaaaatactattatattaaacaaagaattataatacaatagatattagaggaagtggtaattcgtccaaccataagcaatcagcgtctacccaaagagtatacttagttagcacgtgagcaactgtattcgtagatctataaacatgagaaatttgtactctaaggaaattggacactataagagagatatttactaacaaacaatgaaagtcggagacagatgcttgatttaactgcaatcctttaacaaccacaagagaatcagactttatgtagtgaactggtaaatgcagatatttaagccattgcagactatgcatcaaagtcaccttccatcaattctgatcgaaaacaacatcgaaaatgtttaaacattgcagcgatagtatcacccctacagttttgtaatatcacaccaaaactagaagtttgagtcattgtgttaacaaccacatctgtatttaattttagcctccccaaaggtgggtttaaccattgcagagttgatggaacttttgtgaaagatacttggtgttgagaagaaaccaaacctgtaggattttgggctaaatggaattcatcaagataaaaatttataaaaatgtaagacgtcgtgtgatttttttattttatacgcgaacattattttcaatattgtaaattattataaatttctcaatgagaacttttaagtaaaattataaacaaatcctccacaccgcactatctatctaaaattattttttattctcaattatttgatccttacaaagcttttatacctacactttcctcaatcaaggagccacaaacatagcaagaagtcattcaatttgaacaatggctgaaggtaatgcaatatgtgttgggttttatgccctaaataaaactcttt

SEQ ID NO: 384933 - DNA, 1850 bp, Cannabis indica
aaaaggcaggtggtcttggatttcgaaacatcatggcatggaacactgctgctttggggaaatttgtttgggccatagcattaaaaaaggatttatgggtcaaatagttcatagtgtttacttacaagatattgattggcgaaagtactctgcaccattgcaaagtaggttgtactagaggaaaatagtggctataaaagatgtatttcgacagttgatttcccaacatcactttcagttggaacattttcacatcaagaaagcttaccaacttctttgtccacaagatggaagagttagatggaacaatgagatatggaatagatttaatagtcctaaacattctgtgattgcttggttggctattcaaaataggctgaaaactcgagataagctactcaatttcaatattttgcaagatttgacttgtctcttatgtggtttggatgagaaaaatgttaaccatcttttttttaatttccatgtgagtttgaaatgcataagggcagctatggattggatgaactgacacactagtgctagctctcttgtctctttatataggtggataccttggactaagatgagccagtttaggagatgttgtttttcagctctcttggcttctctaatataccatttgtggagagctaagaatgaagttttgtggtcacaaaagttgacaagattgcatataattgtaaaaggagtgatagaaagtatcaaaagtagagttttgctaatttggcctaaacatgttagtagagaagatgtctttttgtttgagagtcttatgtcaagtaaggtaaatgatgtatagctttttcaggcttatttaaatcagatgatagttggaaaggatttcacacaaatagggagagtactaaagacttcgtcaatgaggtggtaaaaatagaccttctaattagtgtcattttggttatttcatgttcaatagattatccatagttgccttattgataacattttcattttcagtacaacaagatatgatgtataatgagcttcaatcacacaaccaatgactatcactggcaaccttcggtgaatcacaagtgtggtggatataagagtgatcctatatatgaagagaaactaggttataacataacatgtcataagcgagaagtgggcccataatgaaggggaaggaagggtgcctctggcaatcgcactcttaatcttagactgaaggatttgttcaacagaccatgtgtatgcaaggtggatggctaacatgactaggagttactgagaggatattgaacacgtatgttagcacatgcatcccaaacaccgtcatccacctaacttaatgagattccttaaaatggtccaatggtgagagatgtatatgaaaatgatctttcaaacgtcccaccatcgatcacctccatttatttttagatgttcattatctcaaccaaggacgaaggttaattgtcataaatttttttgtaacaatttcaatcattagcacgccatgacactactacaatattaggctttagctttggtttttttaaaatcattaaaaaaaagcaaaaccatagccttccaatagcatctcccatcacatttatttagttgttcatatataacttcaattataataagaaaattgaagctaaaaagaaaaaataccgtggaagcctttaggcttccagtattcggaaataaccgaaaccatatatagggtactgcatgtaccttatttttttaaataactgaagcctaagggttttcaaacttctaaatgggcttcaacccataataaaacgggtcaagatgcaaaatagccctaaatctaacaattaagttaataaatg

SEQ ID NO: 384934 - DNA, 1300 bp, Cannabis indica
agtatacaatgagaaatataaaaatgactgactcatgttttatgtaacaaccaaacaaaggatgaaatgaaaatggatttattttcactccactaactttttcctttttcctggtgaaacaaaaccccaagcttgtattagattgatgaataaaaaaaaaaagtagggttaagaaaaaacccgcaagaaaacaaaattcaaacatggctaattttttttacataaaatattgctgttccctatatagatcagagaacggaatcacatagaattccttaacaaagccaaatgggcagccaatgtcttattatattgataactatgtggacacttagacattcaaaattgtagctatccacttgcaactacatcaacactactcatgtaaatctcattattccgtaatatgtctgttgtggttgttatcaatgagccgaaaaaataaacatatatactactaatcttttccatacaaaagaattgaatagaaaaaaaaaaaatcaaaggacaatatacaagaccagtgaagtaaccagtacctgtaatagaagcattattagaggcatcgaggtccagagaggaaaaacagttcaaatatcctccagggcattcttgaaacagaagatgattatcatgaagaagttctagtgaggccttttcggatggttgtaccacagacataaatggaaaaccaaggataccacaagctacacatgccaatgcccctgagtcaacttgaagatcacatgacaaatcatcgctacccaaatataaatcattcaaattctccatatacaaattcatctcatcaagaagattgttttgctcattgtcatgttttctataatcgaggggagtgttttctgttgctgttgaacttgtactaacaatggcacctgcagtgggtgcaagagtctctttgcttggatatgttagtatatcaggattccataatacagcacgatatcttgaatctttttgaagaacaatagataaggtattgttttcattcaatatgtcttcaataaatgccttctttactaaaaactctcttccttctttcaggcgatccttcagacgagaactccgcacaccaggaagcaaggatctcggcactctggatacaaacaattcaattaaataataaataggtattagatgggcagttgagttcttttctaaagagaatatgcaaatatatcgagtacacaaaaatcaagaagactatgagaatatcctgaaattgatatttatatggccattataaaacatataagttttgattccaaatttagagcat

SEQ ID NO: 384935 - DNA, 535 bp, Cannabis indica
aaaaaaatcataataatatacacattatttttcttcataatataaattttaaaagaaattagtaattacaaagtgtgataatttgaatactgaatacatgttgaaatgattcaagaaacacaactaaaaagaataaactagaaaattgaaatatattacacactaatcattcaaataatttagaacacaaaatatgtatacaaaacctaaaataaatacaacacattttgaatcaaaaaagcctaaaccaaaaagatcatcagattcttgtataaaccattctcaaccataaaaatcagatcatacaccaccatacaccacgaacatcaagccatcctcaaccataaatcccaatgcctctgtgttcgaaaatgaagcccgccaaaccacgaattccacgccccagaaccacgaaccaagaacaattcgaacaccaagcccatctaacccaaaccagtcgaacacttagctcgtcgaacccagaaaatcatcaaacacgaacgccacccatctgcacagaagagagagagagaga

SEQ ID NO: 384936 - DNA, 882 bp, Cannabis indica
ctacatgttggtccgtcccactatacatgttagttacatcactgcaactcccctatttagaaaacttgatgagctatcccatcatatttgatataatctataaatcaacacatgatgcatctgatgacagcctgttggtttcacttgtgaatcaatagaagaaccctaataaattcctaatttaattaaaaacatcacacacacacacatctatgtatatatgaaaaaggaaaaagaggaagaagtggttgtggaatggacccagctgaagtccatttgtgaaattttggttattttttcttaaattgtttttttttcttccaactatcaagacttggtctccatcaaggtcagtaagtctatctatatatacacgtataaatattaaacaaattaattaaaagtccaaaataaaattgtatataaaatatatatggcaaaaaacgacagagattcattggcataaaatgaagcccacgcccgtgcggtggggccacgcccactattgggttggcgtccgaaattcaaatcgaccgacatccacacgtatgatgtcactgacacgtaccaacgtagtccctactccctcccatgatggcgacgtactctctggggaggcccatgccttaccgtgtagtccatcactatagcatcactactcaggctttactgggcccaactgtcacaatagtacaggccgtattgggcccatataaactatggacttcacctatatttagaaacatatttacatttagtactcgttatattttcctttatacatatatatattacgttttacacaagattttgatttatacgataatttgaaatttaagtaaagtttttgtataactacttttagggttttttttttttttt

SEQ ID NO: 384937 - DNA, 1126 bp, Cannabis indica
aaaaaaaataaaaataaatatatgaagtaattttccatcatatatactctatacatattctcgtataattgtgggtgtattaaaactttagaatatgggatgacatacatggaaccacatggaatgttggtgtagacaagcacgcataattggaaaggtagaatgatgattcggaaaatctcgcactttctctttcccactttctagttttcttttcgatttttagttcacgattgtcaatattgacagtcacaaggaacttcatgatcataatcaattgatgatacatatatatagccaccgaaagtacatgtatatatatgattcggatcagtacaccaatttattaatcaaatatattttatataaatcaaatcgaatgagaataatcaatctcttctaatataattcaaatttatgcatcattagtaaatttggaattaatttggcagattttactgttagcattataatgatttgtgaacaattttttattttttatttttaaaaaaagtcttcagagtgatgcatatatttatatataaagcggggattttcttatcacttctttaataaaacaaacaaacaaattgagtggaggtgaacaaaataccaacaaaaattacccaaaattgaaaaaggaatgctatattaaaggagaaagaaatcttgatcacacactcatcacatcgatacactgactatgctattaaataagactagctgatcaagtaaggtagtggggcgagtacataataagtttaattaataaataatttagtgatcagcattataattttgttttaggcgtgatatgcatccgaatcatcaataaaaaaaatagcggcaatctatctcggcggtctaaactggagattgaatatgggtctatctcaggattattgattatgcaatttcaccaatcgtagcctgtcgaaatagatatatttatgacaccattttatcatttggagacacctatctcggtgggccccacccctgagatcggtcaatctcaatcatcttcatgcagcccgccgtgataccttataatatgaaataattatataaggtactatttttttggtaaaatatttatatttttacgttcaaagaatattttttt

SEQ ID NO: 384938 - DNA, 1281 bp, Cannabis indica
cgactttctgggactttatttcaaggtttttgattataagcagagctgcttcttttagctgttttttggaggtcggttttggcttctctcccatgccttcaagttagtctttctataccctttcacatatatacaaaatatatatatgtacacatatatttttagacattttttaccttaaataagagagattgattatttacgaaaatgaatgtattagtagactaataaccatttagcttgagcatttttggatgaatgaacatgcttactgagtccttctgggacctgaatcatgaaaacagtgacacaaaatgtaaagaacaaaaggaaaaaaaatggttgaatgtcactcttagaccacaaatttatatacaaaaataaattatttatttaagaactgctggtgacaaataaactttacacttatcaacaatgacgattactcaaatgacattttcaaacaagacaacaaaaatcaacccagatcatttgtttcttcattttttttgttccttgtactgtttgcatataaggaaagggaagcataccccaaaagttcaactatactcaacttagtaacttcataatttacttcattaggtacatatcataagatattgtcagaattaatctccaaagaaaaagtaaaagcaaaagcataattttttggtttctatttttcttcttcgattttattattattattccaacaaacaattatgtttttctaaaaaaaaagaataagaagacacatttatgataaaagaagaaacacggaaataaagaaaaaaaaaatagaaaaattatatataacatgaatgttatggcatttgactaaataaaataatataaacactgatcatctgcttgtagatagatagacctgagaggtaatatcaaagtggaaaagatcgctggcgagggcagagaggccgccggccgaaacaccatggggagggaaggagtcatcatctgcggttgtgggtttgcagcagttccggtacaggaatctcagtgcatttcccattctttacacacactctcaacagcaaagtaaagtagtgttttgtcaacagaaagaagacgctttaactaatgaatggacaaatatataattgtttaattgaagaccattcttaattgagtttttgggaataaaactacgagttcacttagaataattaaatatttttgttctttaaacttttgacactatttcattttaccccctaaaatataaaacttattaaaaaatttccctaaaatataacagttata

SEQ ID NO: 384939 - DNA, 2215 bp, Cannabis indica
gtatctttatcttgcataagacttttcagtcggtaagttctaaatatactctatcaattccaaattaatgagttattctatttttaaatataattactgctacgttcattgattcatattcttccaaatttggcatgtcgtccacctttcaaatgatagcagaatttcgggtaataacaataggaccaaaaacaaaaataatacaaacatatatatatacatacttatagactagattttattttttttataaaaccataaaaaattaatataatagtttattctaatcaatatcaattaataaaatcagagtttaaaaatcaaaaatatatacaaacatatataattcaaatatatctaatgtatacgaatgtatgaatatgaatgaatatatatttatgcgtatatatatttaaaatttatttggttgcataagaaaatattaaaattgatgtatttaataattctaacaactatatgaatcaaaatgattaaaattaaaaatttatttagatcggtcatgaacaaacaatactaatatatttatatatatatgcatatacctatataaactcaaataaaacaagacagagatataaatttgctctgataccaactgataaaaattgaatatgtatagatgaatcgtatgaatgtgtacataaaatgcgaaattaaacgaatatatacactatataattataggattgaaatatcttcagccattgaatctttgagcttcaatcccacacaagctttgattctgcaaaagaaaaggaaactgattagtatgggtaatcggacttcctagctctctttactcactatagatagatttattgtgtttcacggaaggagtagtgagctcggggacaaagaccctatatttatataggtgagactttacatcaaggtctctgccataattaattgtcagaatattttgacaattaattctgcaaatgaaatcgagtaactgaaacattttgtaattaaatctgaccataattagaatattttaattaattagtaaataattaattatattttataaataaaacaaataaaatatttaatttgttaccatataaaattgttctaatacttatcacatgtgttcgagttaagagtcattttttgattataattcagttgatggagttaattttctaatgggtaatgatcattattcgagatgcattacattaacacattaattctattaaacttggtaatctacttatttttggattcttatacacgtgtcatgaccatatttatggaagagatgattgtgactttgaatttccatgatcaatttgtaaagctcatcatgaagtgttgttagtaccctaaatatctctctaatgctaaatggtttgctacatgggttctttcaggctgaaagagggctctgtcagggggaccatttatctcgtctcatgtttattttaggcatggaatgtatgtttagaattcttcaaaaagtggccatgatcccagacttttagtttcatcaccgttgtaaattatagttgactcacttgtgttctgcaaatgacttgatctttttctgtcatgttgattataagtccgtcttcttcttgtaagaggttttaaaagaatttctcaaactttggggttacatcctaatgaatctaaacctacagtatactgccatgtcatggaggaaggtgaggtgcaacggattgtgcatatcttaggctttgtcaaaatttagctcccttttaaatatttgatagtggttgtttgctctaagaagatttcaatggctgattttaatctttctttgtgagaagagtatttcatttgtaaaaacctagagtgttcaactaggttttggttttcttattatgatctcatactattcatagaataggttgaagagaagctttgaacaagcgtgggtcttcgggagaagacttttccaagtctcatttcgggaggaagtgagcatatatcttcaggagaagacttttcaaagtctcatttcaggaggaagtgagcatatatcttcgggagaagatttgtttaagccttacttcgggaggaagtaagcacacatcaatagctgaagggagctcactactttgtgtatttcagagattagattagcaaggtggattacaaagggctgcggcaaatcactagagggagtcttaatttgtttgagtcaattgcttttgtaatcttt

SEQ ID NO: 384940 - DNA, 2411 bp, Cannabis indica
gacatggattgttatgaacattttatggactactatggattgtcatggactttatgaattgttatgaactttttatgtgacttttacttattattgttaacttgtgagtttatgtatgatgagcaaatatgttacaaattttttgtttgaatttttttcttttgacaatatacttagaaaattttgatttttttagcaacccaacctgcccaaaaaattgcatatagccgccctttaaaaaacctcccaacctagacacttgctgggcaggtatggattgcaattttaaaaaaatgccaaataacaaaaccgcccaacccgtccgctgtggaaccctaatttttctacccaactgaattccaattagttttttttttttttttttgtcttgaagaattcaattagttcaattgtataaattggatttcaagaactagattatgaataaaggctagaggaagttgcatcttggttggggtttaagattctaaattctgccacttccatatttcactgctttctttcttgtcatttctaattctatttgaaatgattatttttgaaatcaggtagttcattgcaaatggctagatgggatgagattctatcactccctgtacagaatcctccgaccttggagttttctgctaatgatatcgtgtggtcaaaggtggagggatggcgtgataatatagatagagtggctctaatcccctttgccagagtggatgattttgtaaggggtgaatcctcaaacagtgattgcccaacaagatttcatgttgaggcaaggcgaagacgacgcccaacaacaccttataaaccaaaggttgatggagttcttgaatatattttgtaagttccatcgttgtgcctctagttgttttttaaatgttatttatgttcctgttatcttaggccaccttgttcatgtgtagatattggtgttcatttggtcctgacgaccatcgaaagggtggcattgtaagacctagtcggaacacatatgtccccaagaaaaaaaatgctggtcggccaaataccaaaagaggatgcacctgccactttattgtgaaacggttaattgctgaaccttcagtagcactcatcatatataatgaggataagcatgttgataagaaaggaataccatgtcatggtccgcaggataagaaggctgctggaacacgtgctgtttttgctccttacatctcagaagatcttcgacttcgtgtgttatctctgctacatgtgggggtctctgtggaaaccataatgcagagacacaatgaatcagtggaaaagcagggtggtccatgtaatcgcgatgaccttttaactcatcggtatgttcgtagacaggagagaagcatccgacgttctacgtatgaattggacattgatgattctgtcagcattagcatgtgggtggaaggtcaccagggtaatgttttcttttttgaagatttctctgattctgaccctttcactctgggcatccaaacagagtggcagttgcaacaaatgattcgctttggtaatcgcagccttttagtatctgattcaaagtttggaacaaacaaattgaaggtgctttttttcttcatatttgtaaactttctgtttgttttcttttattttgagaattgtagaagagaaagtttcatttttggtaagtttgtttgtgatgtttattatttgcaatctatctagtatccagttcacagtcttcttgtattcaaccctgacaacaaggccatcccagtcgcatggataatatcaccaagatttgcaagttccgacacagataagtggttgcgagccctacataatagagttcaaacgaaagatcctacatggaagttggctgggtttattattgatgatcctctggctgatgtccatgctataaggttggttgctttagtcattctttcaaacttcaaaaagaattatgtaatctcagtagcttttgctcaagtaatgagctggatagtgagtcgagtcctacaaggatacggggcatctatgcttccaaggttttgctccttaatagggagtgattcttgttcctactttataaagttctttgtattttattaatgaacttaaacgggaacttaataaagtgattcaggtgactcatatctataaatatatatatatttatatatttataaatatggaactcttcttcatagttactaaaaaaaataactatagatatcaattttagaaatattaaaccattagattttgatccaatgaccaataatagaaaagaaatttgagtttccatacttaatttagttacttaattaataaaaatctctatttttacattatatcaaaaaatatgtttatattaaaaatatctaactcaaattcatttttttttatctttttttagt

SEQ ID NO: 384941 - DNA, 2209 bp, Cannabis indica
gatcgtaaatgtatggcccctcattgtattgatactctagcaaaagagagtattaagactagggtgttctttgttaatgagaggacattgtctaaattggataaggtaattttaaaatttgtaaagagctagtaggaatggtgtgagttggaaagggtatgccccggttaaagttgtaaatttgttagtattgattaatgaagtttctctcttgaataaaaaaaataaaaagtaataatgcttttgattaaaatacaatttaaaaaaattgccgaaaaattaagaagctccttatttattctctattatagaaattcatttttttataggtggaactcatttttttttaaggttcactccctattttaagtaaagagtgtttatagagtatggttggagatgctctaattattaaccaaccagtatcccatgtaaatataataaaatggaaatacttgcctcactttcatcatgattgtaccgaaccagaaagatacatctgcagcctctaatgtcatgcatcctcctttggatttctaatacatgagcatcgtaatgcctggcttggtcatccttctcctggtgtaggagcatggatagtaaggccttatgaggtgtggtgaggtgaggtgactggagattttcgaattcatgtgaaggagaaaaaggtgctaaaatttacaataatcacctggaagcagaggacaggatctccaacctctactttgtgacactctgaatgttcaagaggaacagaacgttctcgtactcccttttttatattgatccactcatcctcttctgctccatatccaacaaatctgacacgaacttcctttaacaaattacaatatttcatcaattaaaaaagaaaaatagtaaaaaaatcagtacgtttcttcctagtttaccaaactctgaaagttgtgtagcaataacaaagcttttaactctgaaagcatagcctaaagatctgccttgatctacataaccccgagtatatttttagatgatagaactgtatattgagaaaaataaataaatacttacagtttcaccagtaattagttctctgtgtgcaacaaacatatcaacgtcatacctgcggagccaaagttctcttagttgataaatggtaattgactcttttaaacatgaatgtcatttattaagattcaaaagaaggggaaatatcattccactttttcctctttttcagttcatctttaaactgtttttgctcccataggtaaggagtttagcataaaaaataaagaaaaatgaataaattaagagatcaaccaaaagtattgattgttcatgagataaaatactatcaatatctacccaaagaaactccaatattttacaggaggaatatgaggactcataccatgccccatcttttgatgaccttgcctcaaattccaactcggataagtcttggttcttctcttctgctttagaatgaaaggacagaaacattatttacaatctagtgtattcaacttattcagtggcagactgaactcacagagataagaatatttgtaatctataaattgtacttactaactagtatgcaaagttcttccaaaaaaaaaactaacatgcaaagtattgcagacaggggaagaaaaagctgaatgggaaaaccagaacataatttttttttaggagaaatacctgttggctttacagaacttttaacaggaagagaagctcctgctagttcaagcacatttttggaggcttttgctgattcctgttttgcattatggaaccaattgtgcacctaatatgtaatccaacaaaacaagagtatcagaagcaaaacaatcagagatcagtgacaacaatgagaaagagaaaatgaaaatgcaacaacctcagtccattttacaacaggcttcccagcccgatcagaatagcgactgcacagacaaatataaggtgtcaaacgattaattagggaacatcagcatatatgttggtctataatctacaccaaattatgcaaaataagcatgaagttaaaccttcacctaaaagctcttgcaacgtattgacaaaactccttatctaatacagtttccctggacacttccaacattttctccatcttttctatctgtttgcaagagcaggagttttaacagaaaattgaatatatatatatatatatatatatatatatatatatgactag

SEQ ID NO: 384942 - DNA, 1550 bp, Cannabis indica
tgaaaacataaaaaaccagaaaaaactacaatgataagctataagtagaaactatagacaaaaactacaacgagaaacgcaacccaaataaacgataaaactaacaatgcaaagaaaagataaagaaaaaactagtcaaagggataaccctttggctagtgaaaaaaaccataaaacacaatacaaacattttactgaaagctttgtttcattattgttcttcgaaaattcgaagtagaaagaaaagaaatttcatcaatatgagaaatatctaggagtacttacatcatttggtccttttctttttactagtcaagtaattaattttggcctaattttctggtcataagcaataaaagaggtttccatacttgtatcacttagatatctcctatttatcaaaaaagagatacgttattcgttcataaatgctaaaagacactaatagtactcaatattctcttaaaaattgtatgaacgaagcttttacaataatttgaagctgaagctaaaagctttgttcgttgttgttctttagaaattttggagtagaagaaggataattttttcaatatgagaaatatataagaatatttaccttatttggtacttttcttttttaccagtcaagtaattaattttggcccaattttttgtcataagcaataaaagaggtctttttacttgtataacttaaatatctcctatttatcgaaaaagatatatcattagtgtctagcatctttttcagaattatacaaacgaagcttttacagtgatttgaagctgaagctgaaagctttgttttgttgttgttcttcaaaaatttagagtagaagaagggtaattttgtcaatatgataaatatataaggatatttatgtcatttggtccttttcttttttactagtcaagtaattaattatggtataatttttggtcataagtaataaaaaatgttatgtttattcgctcgaaaatgctaaaagcactagtggtgtttaacactatttttggagtcatattgttatcagttctattaagtattatgtcttatataactatcgttaactaatcatagagcatcacttttaggtggtattaagcactactgatgcccaataacaatactcacattctttactaaattatagtttgtattttgatataatgtggtgattatttatgactttttaatatattatttgacaaaatagttaatagttatacatataataataatttattgatacataatatttaaaatgagattttttaataattacagtgaattctcgcaaggtatgataattataaagtataattgagatctctttattatctccaattatacaattatattgtaatttcatttaattccaattctcttttaactttccaaaggagttctaaatattcttgtaatattaatgctcaattattgtactaaaatttcactcatttgtattgaactcatgtggtgttaagcatcacacaccaatttgaagttgttttgctttttttttttcttgtctatggaggtggagatg

SEQ ID NO: 384943 - DNA, 2611 bp, Cannabis indica
actctgtctgttatggtagttaccagttttctgttgtaacagatttctctttttctcacgtgctgtgctttatcacagtcagttgtaacaacttattccaacattggtttgtatataaatagctgctcttttcctcagttgaggcagagccattttacataattccacttcttcatctttacatttccacactctcatttctcacatggtatcagaccagtaatggcgtcgacaggagcacattcatccaacaatggaggacagatcgatggcgaaggagctcctccgaacgctgctcaaccgatccaccgtgcgcaagaagcacatcatgctgttcttcctaacaacaaccttcttcctcttaatctccgattagaaagatccaactataccttctggaggtctctggttctagcagcagtcagagcttacaatcttgaaggatatatccttggaaacatccctcctcctccccagcacctcgaaggtaatctccctaatccagaattcattcaatggcaaagatttgatcaattcttgatgcattggttgatgaattctgtgtctgaacaaatgcttggccatatcatacactgtcaatcttcatctgagatatggaccacatttgctcaactctttgcatcaagatcccgtgctagaattctgcaaattcgtggccttcttcaagctaccaagaaaggatcatcatccattgaagagtacttcttgaagatgaaaagctatgctgatgccttagctgctgctggacaacaactaacagatgatgatctgatcttgtacatattgggaggcttgggtcaagaatatgaggctgtcattgtaaatctgacatctcgagaaaaccccctcactctgcctgaagtccaatttatgctgcatagtcatgaacttcgaatcaatcaacacacctctgaaactctctccaatgtgcaagccaatcttgcaaatatgtcggttaatcacaacaccagaggcggctacaatggtcgtggtcacagatccaattcaagaggtggccgaggatattcaagcaacagagggggcagaggcaatagacccatttgtcagctgtgtggaagggctggacatacagcacaaaaatgttatcacaggttcgatataacattcacaggcaccacaccagcaggcaactcgaacaatgaatccacttcagacaatccccaagcaaatcttgctgaaactcccactacaagtgacatctctagagcttggtttcttgacacgggggccacacatcacatgacaaccgactctcaaaacctgcagaatcaaatggagtacaaaggaaaggccaaagttgttgttggaaatggtaattctatgcccatttctcaaattggttccaattccatatcctcaaatattcctaatcaatttttgattttaaaagatatcttacatgtcccaagtcttaccaaaaatttgcttagcatttcccaattcacaaaagataatcatgtcattcttgagtttaatgatgtttgttgtcttatcaaggacaagacaacgaggcaagtacttctcaagggtactctcaataatggcctttacaagctacaagtgcagccctcaaagtcctctcccctgcctcaaaatcctattcagtcaagtcccaatccgaacagtaatgcccctgctgtattcaactgttcaaccacaagcaaccctgttgcagataaatccaagtctgtttctatctggcattgtaggcttggacatccatccaaaccaattttagccaaagttttagcccatgtaactcctaatgttcaatgtaaacatgtaaatttttgtgatgcttgtcaagtaggtaaaatgcatcagtttactttcaaacctacagctaataaaactacagcaccctttcaattggttcatcttgatgtgtggggtccctcatttcatgtttccatggatggatataaatattacctaagtcttgttgatgattttagcaaatttgtttggatatttcctatgaaaaccaaagctgaatcctcattaatattcaagcaatttttctgcctttgttgagagacaattcaccaccaaaatcaaaaccatacaaactgatttaggtaaagaattttctcccctcaaagattacttgttggctaatggtttaatgctcagaaattcctgtccccacacacaccaacagcaaggtcgggttgagaacatcgacatgttgttgatgttggcctcactctccttgctcaagctgagatgcctcttgaattttggtgggaagcctttgtttcagcttcctatctaataaatcggcttccaacaccagtaaataattacctctcaccctttgaaaaattatttaacactgcccccgattacaacctcatgaaaatatttggttgtgcttgttttccattgctaagaccctatcaaaatcacaaggtctcttttagatcatccaagtgtttatttatagggtatagcatgacacacaaagggtataggtgtcttgagaaaattattatgagaactaattttttttggaaacaagtagcatttagtttatgatattatgaatattaagttttaaaataaaata

SEQ ID NO: 384944 - DNA, 2095 bp, Cannabis indica
attaccaatgtcgagcatacaattacttcaaaaaaaaaaaggggaggggggggggctaaaattatcaatctggattctagaaatctactttggtactttatgtacactaacttttccgattacaaatttaaaggagttagttttataaagccaggatgatagttcatgtgatatcccactgaagtgtccttgatcaagtctttcttgcgtgtcagtttacatatgcaacatgcattatatggaataaatttgagcctagcttgcatataaattttgtatatatggttcaaatactaactagatctttgatggtaactaagattgaagaagaagagagacagctcgaagcagctattgaagaaatagagaaacaaaatgcagaagtaaattgtcaactgaaggaacttgatttaaaatcaagcaaatttaaggagctggaggagcggtaattctcttttcctactttttttatttgtctgaatgagcattttgtaaaggtaccatccattattctgttcaaaaggacatggttttttttcccaatgctgagcacttattatatacattacagaattgttaataacattaagtattgcaggtactggcacgagttcaataatttccaataccaattaatatctcaccaggttggttttctctttactacctatatttatttattttgtttccctcccttcactgctttggaacactatttgtctgtcacaatgtcttcagttttgttagtttgtgcgctttctatgattgtgggtaagcaaatttgtgaactcagatgaacttgatagtagaaagtcaaaaatggttaatcttgccttgtaatattattagtgaggaatgtattctaatgtcctatagaattcaattactttatgcagtagtactatgcactcttatggtgtaggttgtagtcttttgttatctttccatgaatatattgaagtctctgtatacctttcttggaaatttttttagcaagctggaagaaacctagttcttctcacatcatttgtgatttgattaaatttcaatctgagcatcataattctgtttataggaagagagagacgcaattctggccaagatagaagtttcacaagcacatctggaattgttgaaaaaaactaatgttttaaatgatgcctttccaattggacatgatggagaattcggaacaattaacaatttccgacttggacgacttcctaaaattccggtgagaaagctaagcgtgttttgattctctaagaattgtgaagaaccagtttcttggatcttttctgcatctacagtaatttgcatatcacaagtctctcggtttctcttctttatttttgcttctgcaaatgcaaatgcaaaagaaagagattgtgttttcgtgtcaatttaacaaataatagtgagtttctagattgaacttagtatgctaaattatcagcgtcagtgattacttatcggggcatacaaattttttatgtctagtatacttggttctgcttgttgcataagtttatactgaactttttaagctagaatgtgacaggcattgcctcttctcttttctccttttcttttcttaataaatattgtgacaaagaactgatatgatgtttaccttctcgtccaaacattaaggttgagtgggatgaaataaatgcagcctgggggcaagcttgtctcctccttcataccatgtgccaatatttccggccaagatttcagtatccttttcaatctagagttatcttttacttattgtgctctttgctctttaaatttgtttatttatcttttttgtttaaatggccttaatttacattacgtttagatctcgaataaagataattcctatgggcagctatcctcgaattgtcgacagtaacaacaacacttatgatttgtaagtgtataaattatatgtgtacacaataaatatatatataatatatatataaatatcccgcaaatatgtagtggtgactgttgtggttagacatgcattataaaacttttttctacatttggcttgaataaatagtggatttatttttttctcattcgattaaaagaaatagtt

SEQ ID NO: 384945 - DNA, 1655 bp, Cannabis indica
ctaacatttatcatgagtcttgaatatgctgtttctgttcttgaattctctgatagtgttgtgttttttactacttgtctaagcggttgttttggtctaaacatttttcctattggtttatgcattgtatggaactatttgagtttttggttgttgcgaattcatttatttgaattcccctgcacacttgcaatgaattcacagagcctagtggtagtttacttagggttgaataacgaagttacctaagttttttttttttttttttttttttttttttttaattttaataattactcaaataaggttttacactgtccaaaatacttcaggagaaattagccttttgttttcatttctcgtgttttagatacaatatcctttttgtggttttgacacatttgcaatacgacacaggcagtcatcaacagctatttgatgattatcttttgaagataaacaaggcactctcttatgcccagcttgagttgcgggcttgcagacatcaatatgatggtgaaatttactatggagtaatcaataatgtctctgatgaacagtccaagttaggaacaagatattcacatcctcagattgctttctacaaagctattgtgagtatctctatgctatttccttactttgtaccccaacctgttttgttctggggatatttttcttgttagaaaacgtaagagtaagaccataattataaactttattgtgtgaaaaacttatttctccagagtccagagcaatgttatgatagtatccatgacatcccttggctcctgacattttttttaataaatatagggtgctggaaccaatgtttgaaaagtccaattcgcgatttgtggtgtgtttgcttaagaaaagcgatgcataagcctcaacacgtacataaaatattaggataatagaaaatcattattgaaaccagtctaacttttactggaaggaatacaactgtgcccctatattagcaagaatttgaagttgtcatcttactataacttaggcgtaaaattcgtaaagtggttcctgttgtatgatattgatttggtttccggctgtgattgccggttacatgaggatgaccaccttatgaatgaaagattaggatttaactaaggtagaattgatgaattgattatgttgggttgatagaaagtactgtaaatcaagatttccacgggtaatcttctcccaagattctctccagttctgcaagaattgctcacttgtgaagttgtgagtcatcaacatgtctatggtcgttacaagatatattatagtcatccaaaattgtacacagtacacaaaacccactgtcatttggacaacatctgaaggataatgcaatttatatgctcttcattaagcagtcttactagtaatcagtgtgatttatcaattcaactctctaatatttttatagcagcatgaatgataatttcatcccagtattctttaacttagaaccaaagcattgaagcaaaaatactatcccaggttatgcaagagcaaataatggttgtacaattgaattttgctattgtcttccttaatcatcttagtctccaggcatcctcatttctgctaggaaattttttataattttttttgtacatgtaaagttttttttttttttt

SEQ ID NO: 384946 - DNA, 658 bp, Cannabis indica
aaaaatcctaattagtctatcttattttatgatgattcatcatttaagaactctaaaattaagtaatctcttgaaaaattttcaagaccttacaatattttttatgtgtaatattcatctctttatctataagatgataagtatgtttgactatttaattattcaactattgcataggtaattttctacatttgttaaatataatgttaagacttgacttggtatgaatttatctattttattgatggaattcttttgtgataacccaacaaagcactttatgtgtcatggttaaaaaaatattatcctaatattcctataatatgaatgaatgttagtacgagcaacaagtaccatgaattgattgctttaaaaaaaaattggaggaaaaaatacttatacaattggcgcatgctaatctttatctataaaatatgtgtagaattagttgtatagaattagttcctactagtctcatttattttttattagttcattatatagatatttcattccacttgtaacataagattaaaaagagaagaactaaggagaaattttatctagtcaaaacttaaaaagtacattttgcaacaatcaaaactatgagagaaggagagtggctttagtgttatataaattaataataaaccccaag

SEQ ID NO: 384947 - DNA, 3932 bp, Cannabis indica
aatctaagtatcctaggaatgaaaaagtgtacagatctaaagaggaaaaaaagaaaaagggataggaaagaggaaaagataaataccttcttgtctaaagatatttttactaatcgttacagtaataaagtgatactaggagacgaccctatttctatggctaagtcatgagatagggatataaggaaatactttaaataactaaagaattaaaaacgaacgagagaggagagaaaaggtttgatgatctaaagggaagggatagatcaattcaagagagactactctgggataatttaggggagaagctcaatggtattggtatatatagagccccatcacttagaaaaaggagacagtgagagagaagagagagggtagggcaatatcgtattgaataagagagagagaagacagggattagttggtgggtgaagagagagaggagaaaattgtcagaagaaagagatagagaaagagaaatcagttatcaatcataatcctaggtactaaattagccaaaaactttaatctccctcacccaatctttcttccacatatgtcaagtggtgaacaaaaatatataaaataggaacaatctctctcataatattaattggaaaatgtaaacttaccagttggccagtaatattgacgagataataattttaattatcataatatatatatagagatagagatttggaggatatatatatgtatcttatagatacacacacatgtatgtttgcgtcctccacaagcataattttgttcaaaatgggggcgatatataaaccagaattgacaggccctgatcctgacccacccatatatttcaaagggcccgaagcttgtgaaattgtgaaagcttctctctctcccacccttctctagagttttgaggttccttttcatttgccacttttggatttttaatatcagactataagtttcaggcatgctggttgataaccctttaaggttattactccaaacaatatttactttaccttattatgactataaatttacttaatgtatgttattagaaatagttttcacaattaattagtgatatatatatttgagtagtgatcagcacatatatcataatactttttacaacaattttttcaaacaaaaataagtcagttacaatagtatacatgtactccactatgtcagtataccatgtaaaaagaattagtattgtccctttagaagaatatgccacagtgtttataccacctttcatctgatgacagttctttaagggttatggtggagttacttttcttattatattctatataattatatatagtatcttgcttacaggccactagctaacagttagcttatttgagtatcactcctaacacggtattaatgtgacgtattataagaagttagtaattttttattttatttttaaattaaaatatttaaaattaaatattaagttttaccaataataatgtatcaccttttatacatcttaaaggtagaattatacatgttatagtaagaattttttgtttagaaactcgagaccaagctcccataagagtgatatgtggactcacattccttaaggattgatgagctgtcaagaaggaactcctcaagaataaacctcgcctgaactaaacttgcgagatgatttgaccgtgacaaagtctagtcgcattattacgctttgcgtattgtgaaataagtaggatcaagaagggtttatacaagttgcgcatatccctaggtatatgcaatgattaagtagtcatcacttgtgacctagtaaagatcgtttcttcacataacaaattggtccaaatgacccagcgtactcgatgactcgataattcgataaggactcacatgttctatgttatcaacgctgataaggtgtccatttatgtgactccaccagaacgcagataccttaatacgaggcccattagcccactttagaatgataaaacgcatctcaagcctgtgagcttgtgcaagaatataaacaagcaactcgcaccatagaagtcacatacgttgttgtatttagtgaaatagattttaactgttcttcatttattcttttacgtttattataatttaatgataatatttaatgtaaaacaatttcataactgattgagttctgtgtaactaaaatgacacttgctttgtatataaagggatgatccaacatgaataaactaagacaaaaatcctttgcaacagtggactaagcagaccgtgatctgactaaaccactatacatctttgtcttcattatttttactgcttttctattatctgggcagtctcgttcaaatactttgtattttaagttgagtactcgctactattttattaaatatatattgtttattttctatttagtgttgtctaaattcctccgacaacatttgacaccgtctgtggaaagtctcttttgattttggatggctgcaaaccaaataaacggaaacaacaacactggatctttcaatgttaaaatggtgaatgtcccactcccaggtgatggaactaatccaactaacacaatcagcggaggtgtgggacgaaccactgtcaccgctctcaatatgttcctagaaattgctggtcacattggggaaacattgacaccagcagccatcgtggcccacttcctgcctatcacgccagtcgtagcctctaaaggcagcatccagcttacgacagcttaatacacagccatgcaggagaaaatatgcgcatcacagaccgaagtcgatggaagagtcagaacctaacgtccacctcgggtcccaaatacgcgttcaggcaatcgtcaggtaaccaccacaattagacaccaaaatgagcgtcctaacaataatcatatttgcaaggaacgtgtgattgaacaaagtctcgatctgaatcaacccacacataactccactcgaaatagggagccagttgcacttgaggatagtcgtggaaatgctggaatagaagacagaccgcagaaggaagaccctgaacggcaaaacccacaaaatcgtgcccagacgcgagtagaggtaaatgaattcgaatctcatattttttttctactaatagtcgctctcctagcatttataccaggtcagggtccgtagagactcgaggaggaggtaggtagcatgtgtatagaggcgatctccgcggtcatctcaatgagatttttagagcgcgatcccgaacactaaggaatcgcgatgatgacgagtcccgtgatccccaaatgggtgatcaagccacgcagaatccactgatcgtaccagctgcgaccattgaagtaatgatccctgccaacatagctgcaattgctgctataccagcggtaacacagaccaatcccatcttaccaagaggtattgaccaagagaacctcttgcgagtactaagtgttatccgcatttttgcaagtatgacatgtggattttaattaaggaaagatgaggagtcattagctgactagtttcctcaattgatgctttagaaagataaaggcaccaacttcgcgggaagagtttctgtgataaggagttccctaactgctagcgtcatggagggtatccgtgagcctaggtttccctccgtttcaggaaccaaagttatctactcccgagaagagtatgaattttcccagaagggtcaaggcaatttgagactcgctacactgggctatgcctttagcccacagaagcctcgcctattcctgtcagactacgaacccagtaactaggctttttcatgtacggcatcagaggttgtttccccacaacatgttgtcgtacagagcatgcatgtcattgtgtacctgaccaaatgatccaacgactagggataagggaaattcaaaaaggagaagccatgggatgacacgtgtatgaggc

SEQ ID NO: 384948 - DNA, 1085 bp, Cannabis indica
caatcaaattcagtatatagtaccttatttttgttaaccattacacatctatctataactttcatcacaaaaagctaacagttccacacaattctactaaatgaacactgccaagccaatgtaaaaataagatcattgttcgcaaaatattataaaagtcatataagaattaaaagaaaccaacctgccagtaaaaccaaatcccaagggctttatagggcttaaaatgcttcaatcctatcttctgttctttacctaaaatctgcaaataattatcagaattacataactaattatggtagaaaagagatgttttgagttaatgaaaagccactatatcaaatagtatatctataatcaagtttggttaattacaaatcaatcatatttaagtgtgtgtaaataatccaattaacaacaataaaatagtattttgaatggtgtagccatagatctttagatttctgcaattgagtgtaaactacttaaaactctttaccctttgaacattttagtagaaaatgataaactaaagagactttagaagaagctatgagaagaaaaaatctaaaaaaaagagtgaattatagagatattaaattagtcaataattaataataatgatctataataattaaacaaactaagtttgagtgggaaaaaagcctttacaatgggattatcagggagccttggattagtaatgacgaagtttttctcaatatgttcaatggtggtaaatttataaaggtacaattaagataatgtttcaataggatacataaataataacatattactgtaattactaataaaaataacaaagatatgtgatgcatactcgaattgcctcaaatttagattaaaatgaataatgtaacttataatgtaaaagaccactaatcaaaagttgttacacaaaagaaattatattataactaatccaaatctaatgaccaacagaatacaagtgataaaaaccagggagagttttatactaatgatacacatatacatagaccaaattggttaatgaaatctaaaaattcatctactaaagagaaagcaattaagcagtgtaaact

SEQ ID NO: 384949 - DNA, 1268 bp, Cannabis indica
aatgagaattgaagagtttatgaatgcaaataattatagaactctatagcttaattaatttacctttaattagccatatatagatatatttttggaacaatttacgcatggcttacagttatttatataatatattagccaattattaaatatgtttttttaaaaaataataacagttcaatactaattgatcatgtattaataattttggctgtaatatatagtaacacaaattattaggacattggtaaatgaaatggttaaaatcaactagtttacatagttttgtttaacttaggtttgtgcctgttattaattaaagagctttcaaaagacccttctattaagtcaaatttaagttggtgtaattaaatattcatttagaaatattagaaggcagcactcatttagaaatgttatattattattgatataattaagcatcgagttatagataatttaatttaatataattattattgagtattgttattcatttataatgtgctacacctctaagcggtgctaaacattgctagtgtcttatgagacatttggtatgaagtttagactagaatgtgaatgtaaaatttaaattaaattaaataacaagggatttatatttctaagtaagcttcacttttttaattagaatagtggtaatgttaatcccctcaaacatataggtttcatattttctccatgtttattccctctaattcagacttacataacaaacagtagtgtttgattggaaggaataaaaacataactaaaataaaaataatatttaaatactttaaaatacaactaaataaaaaaaattgataaaaaaaaatccttcttattctatactattttatttcctctaaccaaacactctaatatagcaatcctcatattcattatatcattttcatgaaaaggattttgtggtgatgaaatcccttccgttccaaccaataatacattgtataaaattaatgtttgtgtcattgaaaacaccaaagttgtagaagagaacgacatttgacccaattaccactatcttttaagcaagaaaacaaattatgatgttaactactacaagagattattattattaggctcttttttgttcgtccaacgattttttttaactataataggcaacccaaatatatatacttctggtaaggaaaataaagtgaaaattcggttacttatgtataagtagggcattttacaaaaatattggatttggggtaattgttttcaattttactgcc

SEQ ID NO: 384950 - DNA, 3291 bp, Cannabis indica
aattttaataatatattaaaagggcatagttaaaatctctaacaattgaagatggcggataaatccttccattaacggaaggattttaaatttagaaattttgaaggatttgcactccatacaactatcccttcccttttaatcttttttgccaaacaagcagatttgttatcttcttcactaagatttcgaatagctgtgccgaattcaagttgattatgtttcacctttagccactctaccatgaaaatcaaaaaggggtaaagtgcccagagatgttttttatttgcattcacgccttttggaaagagctgttaaatcaagttctagtttaggtgaaggaagtatgactgctttaccaatagttgagacccaatcaagagatgtttcagcttatattcctagtaatgtaattttaattactaattttatataacttaaaaataaataaataaaaacacagcagcagacatagaatatgaagggacataaaacaacatcttatcattaaacatatatatcatctaataatatatagtaaaaacaaattatgggtttcttctattctgtcaagagaatgaagagaatgaataatataataaatagttctttccattgagagattagaaagtgatgataagcacatgattttcttattattatcttggcacatgcatgcatcaataattgtttttctttcttttttcaataaggcttatacaaacatatattataatagaaagttgatatatgtcaaagaataataattatggagggaatcttctcttcaaaattatattgagcattgctattaggtactaatggtgcttagtactttctcgacatatcgcgatgcgattgctagcgatactctttaaaagctattatattaaattatatgggacccgatacttaattacaccaataacaatattgatacataagaaggtgctaagcaccactaatgccttttaacatttctcaattatattaaggtggtttgacagccaagtagtttatattggctgcacgaagctctcacgttccaaaacacagagactcaaactcataattaaaacatataatattttatttattaaatatgagacttttacgataatattttggatttattttattttaattttttttaaacgttaaaatattctaagagtttcaaaaaaaaatattattaatttgttaaaatttaacttattaataaaatcacttataattataatttatattaattatttaataaaatataaaactaactaattaaaacgtatttcattaataaataaaatatatacacaactatacacactataggatttatttatttgttatgtggataaataaaaacttgtcacacacattaaagtgaatggaatagtgaaaaacaaaatagaaccaaaatttagaggtttactaaactttaaaattcaaatagtttgtcgctaattatccttttttatattgtaaaacatttttttttagaaactttacaaaatagaccaaaattttgaagaaaaaaaattacaaaaatacgtcaatacgaaaaaaaacttatttttatgttttaaatttttttatttacaaaaattctcattagtaaaacaatatagtttatttatagttgtaataagattgtttccttataatttatttataattattatgagattgatttcttgttgtttttttttactatttgctgagaaaagtatattttcataattttaaaaatttaaaagagtatttttgtgaataaaaaatttaagtcataaaattataaataaaatattaaaaaatgttttttttgacaattcattttttgtaagtatagtttaaaagataaaacaaaaaccaaaaaacattgtttttgaaaatttaggaccatggcccctctcctacatgtattagctatgtgttgacgcggtttttcgtgaactgatctaagaagatcgtaaaatagaaaaggactataatgaattaatctgactaataaaacaataataaattcaatggacactagggatttatagtagttcactccccatgtcgcgatggtaatgggactacgtctacttgtagttttattgattagatccgacacaccagagttatgttctcaagagtgtgcagataaaatacaggaaatgatttctaggtgaaattttaatcgagatttatgaatataagactaatgcttttgacatattattgatgaaaatgcattgttggcaaagaatctcacttcccttcttcttggtcgacctctgccactccacaatggcagtggtctccaatactggggagcactgccatctccttatggcaatggtcacttagggcgattcctaggtaggaaataatttttctcacttgttttttactccttgatgtcaagggaactcgtttgaatattttttcttccatggtttgcgaggagagaccactgccatctccttgaggcagtggtcacccaaactagagagcactgccatttccttgtgacagtggtcatttatccctcttttcttatggtttttagggcccttttgactttatgtataacccaagtcattttcatgccaacaaaccttgttggtttccttggcagattgaggtttctagggtgaaaatgctcacgtgggcccatgaaccctaatttgggtacacttaggtgtgtgagtcctgacgccacatggttggttggcatttttgagtcctctagaactgtcatagggccctcatgaaggatgtcttgccttatttgacatttttataagtcttggtcaaagtcgtcaggttgactttagtgtcttcaaggtactcttggcatgtgggcacttgtgcaagagtagctattttatttttttacgaaaaattgtatttgcttgcaagccttcaagtaatgcttttgcacttttcccaagtcttccgcaaaaaaatacttctttgtaaagtgcatgaatgtaacttctcttctgaagatgtgtaaatgggcacgaccaatgtccttaattgctgtgaagaggtgtgcatgggcacgaccaatgcccgtaattgttgtgaagaggtgtgcatgggcacgacaaatgttcttggacttgtatgtgtggagttttaaaacacgttccttctccttagaatgtgagttgagttatatctcatatctcatgtggtattcgagtaaagttatttctcttgctcaattttgggactttttctaggtttaaaactttttgcttaagttttttaattcagagtagagttatatctctt

SEQ ID NO: 384951 - DNA, 2144 bp, Cannabis indica
tttaaaagtttttaaaatttatttttatcaatattatgtagatcactaaaaacgtgtcacgtgtactatgtacacgtagtcagtcactttgacagttaattgagacttttggacgaaaggataatgaatcaaaaatagaagtacaattcaggtagttttactgtcaaaaaattaattttgtagttatgtattaaaaaaatataaaattcaaattgttttgccgccaatatatatattttttaaaacaactttctttttcgctacatgtagcttagctattttaaatgggaaatttcacaatcaagacataataatacatcccttatcaaatttgactccccctactaatttttattaaataattcctttgattacatgtactttctatttatatttgtcgacaatttatcgagtgaatgtcgatagattatcgacattaatacaaaaagattaaaaaattttaaatagtaaatacgaaataagtgaaaatttttaatcataaataaagactaagaaaactttaaaactaaccactaagcaatcataacaatttaaaagtctccactgtgtgagcgatgtttgcaatatgagcacaacgatttaggtttgaccggttcgccattaaaataacctaatttgcaacgacgacatccttcgagaaagcctggtggtggatatggataagcgaaccactcatcatttttttgattgcgtaggaacctttattcattcaccagcctttcatttccaaaacatttaaaaaattcaatatattcttgcatttttggagtaactttgtccctaggttccagtttgatctcttcactagatagaagtttctgtttgatctctttactaaacatttagaactttcatgagaagaacactgtagggttaaagaataagaaacatatgtaacttatgatgtagaaatttacttttatagagcagaatagttgttgggaaagtaggaaaaatacattagcattaaatgtccaattgtacatgtggatggcatgcaatgtgaatttatcgatattatgtcgatatgttgttgatagtttatggatagaaataaattgaggccacacattatcgacctaatatcgatgatatgtcgacagcttgtcgactgcctcgacagttttataaagcagaatttggaaaggtaggaaaaaataattagcttaaatgtccaattgtacatgttcatgtcatgcaatgtagatttatcaatattatgtcgatacattgtcgatagtttgtcgagaggcataatttttattcacacctttgtctatatgatatcgatgatatgtcgacagtttgtcgacgatctcgtcaattttataaagtagaagtttggaaggtgggaaaaattaattaacattaaatgtccaattgtacatgtgtatatcatgcaatgtgtatttatcgatattatgtcaacacgttgtcgattgtttgtcgataggaatgatacaagcttaatttgaggtcactctttatcaatatgatattgatgatatgtcgatactctgtcgatgatgccactgctcgaaatcatgacacttcttatcgatggtatatcgatgggatgttgacagattatcgatcatgttaaatttctgtcatttttagttttttataatttttttgtatttttccctaactatccttattttgtttaaatttgtaggattgactgtgtttcttgttgtattgtataatggtgtttggtgtgttgagagttttaattgggtttataaagctgaaggcagtttgacgttgacagttagaactgacacaaccatacaacaattgcgcctgattttatatgaagagttggaggttgatcctttagcgtacaatttgaaactggagatttgttccttgtacatgaagggaaaattgttctaccagaggttattaagaaagaacgccaactaagaacgctcttagagatgagggcaataatgtcaaacatatattttatgccattatttgtgactaaggtgagaaaagtttggaatttggagcctaccccgcctgctaatcctctccctcaaagtgtggtagggtctttcattcctgaaagaagatgtttggattagtgtgaatgaggaggttcctaccaatgtaga

SEQ ID NO: 384952 - DNA, 1106 bp, Cannabis indica
ctctacatcagagtgttctatgcttgtggagaaaatggtagccaaaatttgaacttggagcactagaaatttgacttttgcatgaagagtggtacttatcaattcgatttcgatggctattcactcttattggagtcaaataatggtgctgccaaagaaaattatttcagaaatagaggccatttgcaggagcttgttatggagtggcagccatcaacttaaaggtgttgctgctgtagcatggaggaccatttgcaaggaataatcagcaggtagtttgggcttaaaacaggtaactggatggaatattgctgctatgtttaagtatgtttgggcgcgctatagctaaaaaagaagataatatgttggtgaaatgggtatattgtgtatacataaaagatcagtctttgtgggattgtaaagccaaaagtaatgatagttagtattgaaaaaagattgttgcaataaaggagaaagtgaaagaactttatgatctagatgagagggagaatattagcaacaaatatgtgattactcagggctatcaaaggcttatccctgcagagataaaagaacattggctgaatatagtatggagtaggctaaactacctaaagcatagcttcagtatgtggatggccatgcttaattgactcaagaccaaggataggatagcaaattaccaacctgaaattgataaagcttgtctgttttgcagcagtgaagatgatcgatgtagcaattattttttaactgaagttttggacaggtttgcttaaaccaagtgaagttgtggctgaaatcgaacatgagcaatagaccactgtcaggagtgatcagatggcttggaaaggcgatattagcaagtttagaaggggaactctgtctgctgcattggcagagctggtgtatgcattgtggtgttcccgaaactcaattttttgggaaaataaagttgtaaatagtgacatgatcatagcacaagttaaaaatgttataaagagttgaagttcttgtatttggcctaaaaaagtgtctaatagtgatagaatatggtttgaaaccttgtaaatattagagattatttagatcctctagatggaggg

SEQ ID NO: 384953 - DNA, 1966 bp, Cannabis indica
aaccacatgtagttgaagctctgtgaattaaagaagcgttaagttgtattatgaatcatgaatggtctaatgtgattctaaaatttgatagtcttaccgtggttgaagatttgaagaataacaaacacatggtctttccatatggctgtgtgatttcttattgtaaggttattattaataatagtttatgttctttttctttgaattttgtcaagcaatctcctaataaagtggcgcatatgttggcacaatcttctcgttatggggcaatcgtaattatttgaataatcttcctgtttttgtttcatctttagttttggatgatagtttttaatgaagcgattgttttactcaaaaaaaaaaaaaatatatattcaaaattaattattaaaaaaatatatattaattatggtatagtttttaagaattaatttgcactattaaattaaatgaaagcaaattatattatatataccaagtccatattatcaaaaaaaaaagaaagcaaaatacaactcttgctctacattctacacattatgacactaatataaattttcccatttaaacaagaaaaatacagaaaagagggacgtatatagttgaaagagcatagttggattttagcatactacgtgtgattgtgaatttaacgaattgaaaaactaatgacccttatataatcttcagctcaacatttatataaccaattttaactagtgactaggctaaaagcacgacccatttgtcttctgtctcttgtttggatggatcccttctctaaaaaataataataattaataattaaaaaaaaattacataagggaacaagaggagggttggtcgtggtggtaggagacgtatccaggatcaggcatctggtaatacgacgctgtggtcacgtaaggatgccaaatcagttgaccaacaacttcattattattcttcatttcttcctttttcttatcaatgggactcacgctcaccacttccgcatatttcaggctctttcgtagcagagtggtcagcaaaaccacatcgatatcttctcccgttacttctatttggttcttctcattctgaagtgttgcctgtgttactcctgatcattccatcaaaatcaattactaatttctttcttgttagtaataattataaattgattgatcttgtattattaattaccatcaattccgactgcagtcttaatggctttggtgcgggacttcttgtcgtccagggccaccttgatcaccacatttagctgcacgaaattgataatgaacaataaaaatcagaattacatgcgacacataaaaaatacaaattggaatttcgatactaaggtttatttgtaccttcatgtcgatggtgattggttttcttgttatttataggaaatgaaacttgattggttgtttggaacaaagagagagagagagagagagagatttattttgttatagatatattgaatttgctagttctggttttgtgagttatattgtggtagctagtagtgtatttatagtgaagagagtagaaaagatggagagtaaagagtcaagagtcaagggggtcttcgcgtcaacttaaagtggggccagtatctatagtgtccaagttatctcctctctcgaaactaccaagaatattgtattatattttttatatagaatctctatttaagaatactcaagaataacctctaatttgttataatataatcaagtcctaatttaggccagttataaataagaataacctctaaattgtaattagttatacattttctaaggcccgtattaacaaagtatacctctatataaaaataattacatcttaataaaatatatacatgtattttgtaaatttatctatgtaaaattaataattttattttaaattataatacatgtatgaaattatatttactttaaaatatttctattatgatatagtatta

SEQ ID NO: 384954 - DNA, 1504 bp, Cannabis indica
aaaaaataaaaaatattgtaaaagtaactgatctaattaaattcatatatatattaaaaattacatatacaagtgatattttaatgtagaaaataaaaattttaaaatttattatatatgatacaaatatattataaaacttagtagattaaataaattaaatatatatttcattcttatttgtaagaaaaatatatttaagaaaagatcatatttttgcaaacttatattttaactataaaaataaaaatttccccacattaatttacctccccaaaaagtaaatcgcttgattaatgattaaaagtctaaaatagagggtcaaaactagtatttagctaaaaacataggaaagattttaaatttcttttctttcccatatttaacacaatgggaaatatcatggttttttgatcaagtgaagtgagtagctatcattggtttggtgaagtgctatggcccctttttactatctgaatggagattccactaccatcctatttctaaaactaacattttttttcaaataataataataataaaaaaaaatcatgggaaagaaagacttaatataaagtgcttcacaactagactcaaacatggaaaaccatagaagaaatctcaaagagaagaacatggtttctctccaattctacaactcccttctaattattggccttttatatttcggttgcagcacgactcgggtcgtgttgttagccgaatgctacactacttacatgccctgcaatggctccatagcagagtgccatgaagaaggtgagatgtttatggagtccgacataagtagacggattctagaagagaagagatacatctcacccggggctttaagacgagatcaaccggtttgtagaggcggtcaaggaggagaatcttatagcagagcaggaaattgtcttcctcagcaatctaatcctccaggaagagggtgtgaaaagtattataagtgtagaaaagattaatgaatgatctaagctttcaatggattctgtaaacatctacacacacacacaccgagtttacgattagctttgcttaatactaatctatctttgttctctatacttctgtgattcatgctactactgtcatcagttctaaaaaaattcaatgttttcaacagattttgaagaattgtgcatttatgtatgtaatcatctatgtctaataatgcctttcaacctattaactttccatgtcgaaatcacaaaagttagaagcttgatcaaagcaacaaactagctcacttcctcctatcattagtctcggttgaaagtttctgagtttttgtttgctatttagttttgcattattattagaaagttgaagtatgtttctcaccgtggttcaccttcataattcttttcgtgttctatatcataccgagcaagttttagatttgcccggtgtcctcctattattaatttcggttgatagtttctgagtttttgttagtaggtttgaaacaccgggcaaatct

SEQ ID NO: 384955 - DNA, 2646 bp, Cannabis indica
gaagcatctagagcattttattcatctcaatccgattatagaatcaagtgctttttggagagaaaaagatcgaatagaggctaaaatgaggaccaagcgccatggttgatacatgggccatttccaacagtagttcaaatgaagtctcctagccatattcttgttttcatcataattagatttgagtgctttcagggaacaaacagagtcatttgagagctagaactgggagcaagcagctaggttgacactggtgctgggcccaacaccaaggttgacattttgtcaatctaggccatttcaaatcactttttctaaaaaagaattgggcacgttcataaatttcaaaaataactgagatacaagtgtttttgggaatcaaatggaaacatctgatggaaaaatctagacctagcgtctaacatgacattgtgcttggccaagtgcacaggtagagattttgtcaacatgagtatttctagtcatttttcccaaaaattgttcaaggcatatcttccatctttggaaataaggaagatacaagcgatcttaggcagcaaataagattttctaggggttaaaatagggacccaatgttattgttgacatgcaacatggtggtcatgtttctactcctctaacgcaaattctactctaggcattctacttattttgataaaaaatggggtaggagacatcgtttgcaatctcaattcccttagaagcgttgaccttagaaattggccaactgacagtagagtcatattaaactgatgcttgccacgtgttaaacaattagaactcgaaagtaaagaacacaaggatttttatagaggttcggcccccttagttagcgggtaatgatcttatccccttattgttgtattgatacttagagataacactattcagataactatgggtgggagctgatctagctctcttaagattacaaagtagcaattaaagattgaaaatcttaaatgttgaaagaagctaaagtgggcgtgtgagagagagagagatgaagtgagttatcagacttagagatttacggattaaatgagacttagttgtgacttagagttttaaggatgagttaaggctctttatataggagggcttcaaccctaattagcagttaaaataagaagtatttacatattaaatgggtaaaatacaaaagaataaaatgccctttcaaaataggtatattctatctactttcgtgggctattaaggcccaatttgtagtctagttttcaatccacgtgtaaggttatgtaccaaagtcattccatgtctaattctagccagccatgcaactcatagatgcaaactagtcagccttgtgttgtctagaagttggccaaccatcgggccagccacatgcctctttgaggtggctggtctgtaagttttcgtcttgtttgtttaccgagaccccctgttggctagggtgctaagtagattacttgacctttgtatcagtgagttatagtacaacatgacactgatattggcaacatagacatggcatatcaagtggaactgttttagccttaattaaataaatgttgcagcaattttattttttgaaataccctctcttgactttcttatcttatttggtgcagtaaattaactgcattgtacttttacatgtcctttggttgagtattgtgtggcaagtgaaggagtggcccaaataatctatttaagccttttgtgggaaacttctcttccctttacacttttcattctctcattagaaatagaaactttgaagaagctcctcattctctctagaggtcgaacccacgttgctccatctttgaggatttttgtgccactttgacgatcaaagcttcccattttcttcatcaacgatctcttgttgtgggtagggtttctattcctactattctctagatttagttgatttttccatgaatgcatgaacttgttctttgcttttaatgtctttagatttccacattagattgtaatgtttttagtattttgatttgcatggtagttttagaatgagtaatgtgtagtttctggacaaaagaatatctgattctgacctttgttgtgattcttggctctttaaatcacgaagaacacaaagaacatgtttgagttacctaaaaaaacacatgcttggatccttcgtacaccctggccagccaaggaggtctcattcaagacctttttgatcatgggtggtcaccatggggtatgctggccaaggggggtataccctataggcttgtcggcctaatacctaaaagtggtaattcttggccggaccctaggctgggtcatgagacctagctgaccttttaaggcctaggaaccctggccggtcaaggccaaggtttcaagcaggtaaactagtttttggtcctctgttgacctcagctagggtcttgtgacggccttggaggcatatacaactataatgtcatgcgtggtcccccttgggaactctgcatgagacttggcagtgagtctatgattagtggtcaaaaatatcattttattgatgttaaagttgaaattaaattaagttttgattaatattttcatgaaattaatatgatatattatataattgaaaatattattttaaatttagtt

SEQ ID NO: 384956 - DNA, 1141 bp, Cannabis indica
aagcattgtcagcattggacaagaaatacagacttcgtgaatcgttggaaggaaatttgttgtgttcatcaagaacttcaaatcgattcaaattttcaccagcttcattgttcctggtacgagtctgagttcttcctccccgtgccatggaagaatggaagaacaacaatcaagaagaaaagaagagaaagggaagagaagcggaagtagaggagctcaacaaatagttggctttaataccattttacttttagaagagaaaaaatagaggaccaaaaatgagaaatgaaaatgaaattcattcattcaaggagttcattacagtacatgctttatatacagtttatacacacataacaaacataacaacctctaactaacttcctaagcaattaaccgaatacacaacaccttacaataactaactttaataaaaaggggagatgaaattggacaatacaaaaatctcaacctatttagcaattatcttgtagctcataagtaagtcagtagtaactaaagcatctagccaaattcctctttaagtattagcaccaagaaagtactattaatttctctaacttactagtattgaagaattatttcactaaattagaaacttgacttcccactatatgccaatattgtttatagaacatcactagaaactcatccgatcttggagacttcgaaatggttaaagcccacaccatcctttaaatctcctcatcattggaaaccataggcaacagagagaaaaattcttcatcaataataaggtaagtcaacttcgaaatacgaataaaattttctcctaaatattgaacaaatgttctctcttcctttaatctaattttcatcatcttcataacttgttatgttgcaagaaattaattcaattatctctatttaaaatgagtctcacaaattcaaaataaattatcacataaatttatgtcaagtttgcatataatttatgtgtgagcatataaacactcttttcataccgatatcacatacattttctaaactcaataaccctatattacaataaagtaatttatttattattacaaacagaacaagaacagagagaaaaaaaattgagagaggaaaagtgtttcagtattatataatgaaa

SEQ ID NO: 384957 - DNA, 1146 bp, Cannabis indica
aaaaaaaatagaaggcctttttttggagcccgcacaaggcctcaaaatggctagagatgaccctcaatcggtcatgtcagctatggtggcatgaaaatactaggcaagaaaggtgttctcagacatattcaagtaaaacctataaggctctgcgagcagtggttcttggcaaaacaaccaagctgaaatttggggtaggtaatcacaaatccaaatctgttatgggctacctacactcaaatttatgggggccatccaagacactttcaagaggtggagctaggtattttctcaccttctttgatgatttttctaggctggtgtggctttacattttaaagaataagaatgataccttcaataaagtcaaagaattaaaaaccatgcttgaaactcaaactgaaaaaaagattaaaaagatgagaacagataatggatctgagttttgtgtagaacaatttaatgatttccgtaggaaagttggaattggtaggcataaatttcttcctagaaatgctcagtaaaatggtttttttgaaaggttgaacatgacaatactagaaataataaggtgcatgctcatctactcagagctaccaaattaagctattttggacaaaagttgttgtggcagcttgctatctaattaatagatgcccttcaccagtcattgattttaaaacttcaatggaggcctgtacatgaaactaatctagctatgatcatttgaggatctttggttgtcttgcctatgcccacacaaggcaagacaagcttgaactaagggccaaaaactgtatctttctggggtaccccgagaaggttaaaggttacaagctgtagagcattgaagattagaaaaatgtcatcaataaagatgtgacttatgatgagatgacattgtaaagggatcttaatgctcgaggtggagttagacaaagaaaataaggaaaaatgcaagtactgatgctgaaccaaaaatggaatttgatcgaagaggagaatgaagttgatgaaattcaagctgaagatgatgacactcaagactatcttcttgttgggctttgcgccctaaataaaactctatttcaatgtaatcttttctattcaattatcaataaaaaaacagctttaatttcattactt

SEQ ID NO: 384958 - DNA, 1029 bp, Cannabis indica
tattttacttgtaaatattgagtatttattcaagtttttagtgggttttatgaataaatatttgttcaaatgtttggtgggattttggtaaagcttagtatttgtttaagtatttagtgtgttttggataaagggataatatttatttaagtttttagtggagcttgggtaaatacttagtagtacttgaaaagtgcttcagtaaggttaatattttgcttagggattgtttcatttactttacttgatattatatatgtatataaatctatacatgtccatatatattgattgttttgtttgtatatttaaatgaagaatattttaagacacactttttttttaatctccacattgggtttgggctatatttttttgtcacatgagacacattcaatttaagtatagatattaatatttgacttttttgaacggtcaggattggattcttctcaatttacttttgctattcattataaaaggggatgtgtagatcattttgatggttgtaaactagattgctttggcaaggctaacttggaaagattggttagtgagcttggatatgtgcttcccattgggttttggttgagaccgaaaggagagacattgaaacatggcaagagactgctcacagaacaagatgtggctgatatgttacatgatatgcttattaggaattacaggtttgttgatgtgtacctcattatgccagagaagatctatgaatttgaaaatgagattgttaatgctctagatgaaatactcgaagaggaaccagctggcagtcaacttacaaagcaaagtcaggcccaatttaagcttggtttgggccaaacttcaagccataaaaatagtgaagcccaatttgaacattatttggaccaaacttcaagctatagtgaagcacattatggcattagtgcacttgaagcccaagctgagactgatttgattcaaaccaatgatgaggcaaagcttgaggatgatgatgaatttgttgaagaagagtatgttgggttttatgcc

SEQ ID NO: 384959 - DNA, 858 bp, Cannabis indica
gacattatgagattgactttgcatatatagtgtgtggggttattagattagtctggcaatggtggaaatccaagtcattttcaagtggctttgtccatactctgtcctttggatccatattcatcattgcataatttcttatatataattaattatgaaaaattaatcctaaaattcactaatatattatattattattaatataattaaatattaaattttacttatcttaatttaataattattataaaaaattgctacaaattatcactttgctttcgtgttaattagtactactagtatatctcatgctcgtataattttttttttattatttgattgattattttaaactttattttttttacttcatataaattattctaaaaataacaaaagaaatgataaaatatttatagtgacaaacatgtcaattaaggttgtcgaataaagttaaatgcaaatttaattaccaagaaaataatatataatcaacaatatacattatgaatatgatttagaatgacatagttttaaaaaaacaaatcatggaaatcttttagttatagagaaccacaacaatatatgtaccaactatatacacatatctcacttcttcatcaccacaaatacatatataatccatactattagaaacatcaacaaaatatttcccattacaacatacattaggtctcaaatatatgcttttttttaatgaggaaatgatactctataccatttttatattgtcctcttttatttttatccttttttttaaagtctatcatttttacctctttttttcaaaaattatactaattttgcccctatcacttcaagatactctccatgtga

SEQ ID NO: 384960 - DNA, 3775 bp, Cannabis indica
ctagtccttgtgatacaactttgaacttgtcaactccagttattgaagacatctgaggactttgtttgttttatccttttattttgcatacttcatcttttgtccttgtatgacctttaggcccttcactttcaaacatatgatatttttattcatgtatggccttagggccctttacttttgaataatgttcgtgtatggccttttattttcaaataagtgaccgtccatgtgctctttaatcatgactttaacttattttttctagacatgcagctatctaggcagcttatgtctaaactgaagtatgccattcacacttacttagctttcaattttttttgtaccaaagctttaaattttgcctaagtttagctgttcttgttcgatgttgtatggtgagggttccccccaagtgatcaagcagacttatggtctcttggtcatttgcaattcaccaagtattatagagctttgcctgtgtattttcttggagggacctatttgtacgcatgtggaactaataataaagattaactttaagaagttatcttgttagcaagctgtctgacacaatattaaaccgaaacaccatttttattcattaattgatcttaaatatgtgttgttgctgttcgacgtacattttttgtgtaacaaaagcttacaaattagagtctacttttgaaaccacattttggctacccctacgcagcatgccttggaagggtcatcacgaaagagtgatggtcatatagctctttaatttttggctacctctgcatgacatacagtgcaaaggccatcactgaagagtgatggaaacatagctcttttctaaattcctacacagtgaagagttacaggaacaactactgaagagtagtgttctgtacaagtgggatactggtagtacttgccaagatgtttttcattccactatcttggtagaagaactaactccatgttcttattatactcgccaagcttgtatgcaccttttcttattatcttgtaacttggtgcagaccctttcagtttgttccaaacatacttactgcaggatctttggtattaaggattattcttcaaagtactaagtctcctatgaagaattttctcaccttgacttgtttgttgaagtaactggcaaccttctactaataggcatgcaacttgaggttggcttggtctcttcctctttcttcaattttgtcaagagattttgctagcaaggtgaggtttacttcatggtccaaatagaccaaaagtgccttgagtatctttttgacaaagactaacttagttggctttgccctcggcatgattgtcgtagagtcttcatgcactcttgtcaatagttgttcaatttctttcttggtaacacatcttagaggtggcactaagataccacgtctatacataaccttgtccaggattagatcccggtagctttcctccttatttttcttgcttcattcttgttttctagtaagatttttgtttggaggtatgctactttgggtgtcatccatgttggattgttatccagcatgtctatttcttctgaaatagtgatgccagattcttttaagaactgtacacgtaccaattttaggacttgccttttagtgtagcctttgagctaactttataagtcttgaatttggctcaaatagggtaacacctttttgcgttgggcagtatattcacctaggacataattaacgactattcaagagtcgttgtgtgtgtctaggtgatcagctcgcactctgtgtgctagcctgaggccaacaattagtgcttcatattaagcctcaatgttggatgctttgaaactgatctttgttgccctgtgcaactgttgcccccatgtaacgagggcaatgcctacaccagacaagttgtcattaaaactttcgggatgaatttttacgctcttgcttccgctcttgctcttgcttcttctctggctctttcttttctcccaaatcttaagacatttcaagagatatgcctgtacattcagccataaattccacaagagattagcctttttatggccatttttggttgaaaagtgaccttatattggctgagcttgatggcccacttgagtggttagccaggtgcttcaagtttcggcaacacctgtcgcaatagttggttggtgtacattgttttgggagtttatgtaagagagtgaagcatgtctacttcttctacttctccttttgattttatggcataaggaaattattgaattttcccttttcgccattattttggccaaggccattattttgtgtttacctctattatttttcttgttggagggctgacagatactgcctgtgctggttagcatgttggacagtacttggggtagtatgacgcccttggtttgttcaacattggcttgtcggacaacttcttccaactttatgaaaccattagctccctcgaggaactctttcatgttgtttgttgagatccttctaatattttttcagaattcactcaataatgcctccaagtatggtcgtatatcagtctttttctgtcagccctttcaccttggtggccaaggtcatgaacctttgaatgtagtacttcaaaggctaacattatctttgctttattttgacaagatcctctaattgtgaaagtatttgtcttgaggcagagaattgagtatagaattcttgagagaaatttttccaagaattaaatcttcttggggccatcttaaaataccactattgggctgtttgagataggcttcctagaaaaatccaacatcgcacatctccagttactttttagagatctatttggatctcaaagtattttgtgtgtgcaatgggatcttctttctccgtgtacatcttcttagttgacattttgaacttgggtaggggcaatgcattaatgtatgcagagaatggtgacaaccttgacttatcatgttctaggcctgacagctttgggctagataggcatttgatcatgtcttccaattggatcaattgtgcttgtacatatatgtctattctagtgggctcttgcccaggcagccttttctggctcgatgattaaggctcaaatttatacattttaattccttatttatgcacatataataaatataaattaaatattctttatttttaacactaaaatttatttaagtaaaaatatctaatttactttaatttttgtgtaatttttcaaatttaggcaaagtggtcgaaagaaaaatacaaaagtccaatttagaaaagcccaataaaaaataaaaaatccttctcttttctttttctctttctctttctttcttttcaagcaacatcagctgactagcacgcactcccatgaacctttcagccgttagctcagccgccagtcgccaggtgtcacctcaaccaccagttgtgtaaagaccgcttagattagttttggaaattaacaaataattagggtttaattatgaaattagaatatttgttatgaattatcattatttggagatttatttgaattcagaatgtattatatatgtcatatatggaattttatatttttttgcatgttttgtgcccggcaacatcggaacgtggcgtttgtgttggcctttgtgccctaaataaaactctacttcaatgtaatctttttcatttaattatcaataaagagacagaagtattttatcacttatttagtgtgtcatttgattcatgttatcatttatatgtttatttgatttacaaat

SEQ ID NO: 384961 - DNA, 1955 bp, Cannabis indica
catcaaagattctcggcccaagtgacactgcgccaaatatacgaagctcgttttgtgcatttagcattaagaaaagagcctttgggaaaatagaagcccttcaagtgattgaggagctttataaatacgagatgcttatttagccaagaggaattgattagaaatgcaaaaacttttaaacctcataccaccatctgacttatgccaacaaaaattttgccaattacaccaatacagcttatcatgatccttattcccccacccccaccaccaccaccaccaccaccaccaacaccaaaagcaggtacaaagacgatgtatttctttcacaaaattcacaagtagccgaaataaactcatgacatagtttaatatagcttgaatgacccatttgagaaagaacctttctcccctagcttaaaaaaattaaatttccaatcaaaaagtttatttcaaatcttatctaaaataaattaaaagaacattatatcgatgtgacgcattataggtggttagcgtttccacgggcagacccacatagtagtgtaaatagatcgagtcggatctgatctagctatgatcccacctgatccagatcatgcaacgatttgtcccgcctcgccctactagatcagatacttagatcaacttagatccgacccgacttattcggatcgaatctcatctgactcatcttttttttttaaaagaattttaattttatatctaaacttataattttatatccattttaattttgcactagtattatttaatacaatactatgtttgggtccgggtccaaatctcaagcccggatttgagtttgggtctcgagtctaatttgggttagagtcccaggtcctagtctcgggtccaggtctaggtcctaggtccacgtctaggtttgggtctgcatctcgggtcttggatccgagtttgagtctgtgttcgagtttggatttcggtccgggtctcgggtatggtcccaggtctgggttcatgtcctgatcctggtcccgggttcgtgttcgggtcaggatcctgagtctaaatcttggataagggttcgggtttgagtttgggtcccaagtcccaatcctggtctggttttgggtccgggtttgggtcttaggtgggggtccgggtccgggtctaggtctgggtccgagtcttgtactaagttttttttaatatattgaaacggatttgatccaaaaaaaaaatcagatagggcgaagcgaatctaatctgaaattcaataagtatacgaatgtttcgaatcagaagtgatctgtcgaatcggagctccaacctgatccaactaaaaggatctttttgatatgcctagacccacatactgcccctaaaaaaatcaagaaaaaatgtatatattttttaaattatttataacatatattaataattaaaagtgatatttatgagtataatataaactttggtataatggttgttattttgcacacataataaaagttatgagttcaactctcaacaaaaacatgtctactttttaatattcaaagttatatttttgaaaacctttaccaaaaatttgtatttaataccttactcaatattttattgtcacttttttttttaaactataaacttttttttttgagatgtactttaaactatttaatactataaaatacaataaaagtttgtattaattttcaacatgttatattatttaaaaaaaatattacactccatcccttaaaaaaagtacacccctcctcaacttaaatcttgtgtgaattgccaaccatgaatgatatggggcacttggaggtagctattgaaaaatatgtataattttgaataaaaaatattttatttgggttcttaagttgggtggccctacatgtgagcctaatccgtcttaaactagatccggccatgtacgaaagttgcagaaatataattta

SEQ ID NO: 384962 - DNA, 1012 bp, Cannabis indica
gaaactactttaaaacaaccaaaaaacaacataaaaataacaaaataaatacacatatatacaacaaaaaaattatctagaataaactaaaaatatatactataaaaaattcacataaattaaacaacaactgaaaaaacacataaaaataacagaaaaacacctaaacaacaaatttgtagctctctccagcttccatggtgaagaagaagcgagttggtcgaaagccagccattagagtgcagattttggattccccttcaatctaagaaggtgtggaaggtgagaatttgagtgagcaattcattgactgtttagatcacgaggaagaccctcaaatagatgagatctctgcttggagcaattcgaaagtggcaagaagtcatgggctaaggaagcagagtaggatgatttccaacagacgtctcagcaacagtagaagcaatttacaatagggatgagaatgcttatcttgttgatcccaatcgtcatactcatgactaaatttttgaggtgcacgatcctcatcagagagatacatcggtggggtgagacgaggatcaagaatctttgtaactgactgcctttaatgacagtaaaaacttgatgcttctagggaaagataattgtgttcgtcaagtcttacagataaagaatgagagaaagaaatcggagagagtttaggaggaatttttggagtagatgtggacaaattgggacgaagagagccgccattgacaacccctgaagcttgctccatagctctcaaaaaagaaagagctctgaaaccatattaagaaaaagattttgaaagaaattgaattgtgattttcattaatctcaaaaattaatacaaggttttatatatagagagaagctaacgagagttagtagagaacaaaagaaaggttgttgagcaacaacttctaagggctcgtttggaacgccgtattaggtcttattgtattgtattatattatattgaattgtattttatgcaatatttttatgt

SEQ ID NO: 384963 - DNA, 1347 bp, Cannabis indica
aaattcaagcacatacaaacttgaccggtataataagatcatagaattgattttgttaccaagatattggaatgaagaacatcacagattgtattatcaataaggtagattgtaaaaaatactattcttaagtaatggttgttgggcagtatgtcgcacatgaattcgtaaataaaatatcacttttaaatgatggcttctacacgatatgtcgtgcaaaagtgtgtgaatacttatgattttaaaagcagccttgaggcatttaagtttttatttttaatgtatgtatgttgccccagtaacaacacatttgtaaaacatatgaatgaataaagtgatcttttcactcagaatgtcaaataatttgctaataattgacttattaaagttaatattttgtctaacatgtacgcaaataggtccgcccaagaaattagacagacaaaggttcatacacttggttaattataagtgaccaagacaccataagtctacttaatcacttcggggcacctacaatgcacaacatatgataagcacagtgaatagcaaaatatttaaagcaaggttaatgcaaaaaatttgaaagctaagtatgtgcaaatatgactttgttaaacataaaaggaaagattgtctgggcaaccatatatcttgaaaaaaaaaataaagctaggattaaaagtcgcctggccatctatatgtctcaaatgtaatggccttcttggttgtgcaacaaataaagagaaaaaaaaataaagagatttaaagctctggcacgtcaaaaggggtcgacgggttcaggttattgctggcctattcctgggcggcaaattaagaagttgtctcgccaggagggtctaagggagtagcaagctagttggcagcatgagtaagctgcccgacaacatcactagattggtcgagaagatcctgcgcggaagttttctctcctggtggcttggatacctccatttcctaaccctgagctatcgaccctttaagcaagtcaggcttcatgtaactgtagtcacccttgggattccatttccaaaactcgtagaaggttttgatggctaggttgccatactcttccttctccgcagcccgggtctgctctgattttgcaatttttcctccaaattggccttctcatcttccaatgttgtcttgttagctttagactcctcctttagtctaatgatctcttcattccgggcaaccatcggttgacccaaggcctcctcctttagttgttaacaacctccttggccttttctgcccaggctggagtaggggtgttcaataaaatttacaaaccgctcaacccgaataaaccgcccaaac

SEQ ID NO: 384964 - DNA, 1747 bp, Cannabis indica
cttaaatacataaatagtaattaataattaagaattacagtatcttacctttattatttttaagaaaaaataagcaactagtatatttaagaaaaaaaaaaaaagttattttttaacctatgcatttgaaggtcatattataaatataacgttaaataatgaacaatataaatttagctaataatttatgttttattttttaaagagtataaatacttaggtttattttttcgattgcaaataaataattaaatttaatttttggtcataataatatctaagttatatttctgaaactctgtacgtacctaaccaatgttaaggcacgtgttattttttttttttggtatactttaactaattttttttaaaaaaattaaaaatttaatgacctggaacaatcagattactacgtgggtaatttaattaacacttaatagttagatacttacagaagttataatataacttaagtaatattaccaccaaaaattaaacttatatttgcaattaagaatttaacttaagtatttatactgtaaattactttttttaaaaaaaaatttattaagagaaaaatcaacattctcacaaaaatgaaagctcaagtgcttggcgacttttatttaaggggaaaaatatattgtaaaaaaagttaatagaaaattaaaatgtttaatatttattgatatcattttaaaatgtagattaaaatttttcaagaaaaaatgttaattaaggataattcgtgtatatcagagtatattgaatttaaataaagatttagatatttttttgtaataattatattgtattaattatataaactttgatataactagtagctttttgttgagaattatagggttccatttcaaaaccaattgacaatgagtggagtagctcatgttcttatatatatggttcaatacttttacatttaatccatgttggacgatggtggctatttttgctcaccaatcttgaatggccgctagggatatggctctgataccatgttgagaatcatggggttccattttaaaactaattgccaatgagtggagtagcccatgttcttatatatgtgggacaatgttctccaatactaatttattttctttttcatctcaaaaaagtaaaattttaagataataattaacaatatatcattttttttttaagaaatatacatgtttataatttttggtactatgggagtatatgacggacacactcataatggtgtgggggctatagcccagtaaaaaaaaaatttaaatatttttctttttattaataattatagtacaaaaaattttaaaaaaaataccacaaaaataaataaattaaataaaataaacctaatttcttttaataacaattaaactcccacataataaaatttttgtatccgtcactaaatatatttaatggtaagtttcattttattttatcagtttttgttttgtatgaaagaaaatcttttcggtgaaaaagaatttaaatcaaggtgttgtaagagtattatttagaaacaatgtgtcattttttttttttgaaaagatacaatgtgtcattaacttatacgttagacagagaatgtggtaggctttttggacacaggatccgagtccaatttcagattgcacagtaatataatagaattatttcacaaatacacaaaataaacaaaaaaaaaaaaattacaaaaaaatgattttaattttaaacatttttataattt

SEQ ID NO: 384965 - DNA, 1961 bp, Cannabis indica
aaaaaaaaaaatacaatttatctcttctcttcatctctttctctattcgacccaagaagaaccacagaaaaaactcatcaattatattaatttttttgtccaatccttgtcaagtgatcaaccctacgagcagctcaaggttgggggcctcggattgtcgagcaatttctactcaagtttactgacacacttaaatttggacttgaggttaaaaaaagtacaattgtaccacatagtatttgtcaatatataatttggtaataaccgtcgataaacaagagttattactcatggtatagtaaaagttatttgattacatgctaaatgtaattatttgagaagcatgagttaagttatgtttgcagcataccatgactatacgttagtagtgttgtttattgagtaaatataaagaaaattcttattagcattaatgtttgttcgggaattctattcgttttgaatcaatgtttggtgaaatattgatcttctaagatttttttttttttctatctttaatttcatgtttcgaattaattttatcaattgttcacaatgacaatgagtagctaaatttttaattagggttgtgaatggatattaattgacacttttctatagttttaatataatttagttcttccctaattttttatgtgtatttatttcattcgtttttaattgtcttatcactaattaattgtttatgatttcaatacaaaatcaaaaaatgagtgttgattatgctatagtgaaataaacataggttttgatattaaatgaaagtatctttatggcttgtgtaataattaggatttctatatttaatgcaagttatatgtgtaatttaccacaaaagtgtaggattttaccatataatgtaggactttaccatataatttagattctatatatcttaaccaaaatataaattgaattagttaactcgctatcacataaaaattagaattagaattaaattatattaagccatgataagtagattcaattgaaattaattacccttaactttgatcattgttatttttttactatttatttattttcttcttagtagaatttaaacattttcaattattatagttattagatagaattagaaatttaatttacttaactgcagtttttgtgggaatgatactttacttttactattattacttacaaacaatacgtgcacttgcatattaaaatattcacaacacaaagattacaataaatagcttgaatatctatttcatgataaaattgaaatatataaaaattactatccaattcctttaagtgttactaattccttctcgagcttctataagaaagccatctatatgttgcatgacatctataccaatgatttcattattcaaaaaaacttctcaccaaacaccagcgcacatcaaagccatccactacaccaaaaatacgaattagtaccattttaattggtgacatttatataaaaatgttacaataatagtaatttaataacatttaatcaaaaatgtcactttaataagaatatattacattttaattagtaacatttttaaaaaatgtcacttaatgtattttaatgatatttgataaaaaaatgttactaatttgtgaatatttactgttaatatataatgatatttgataaaaaaaaaatattactaatttgtgaatatttactgttagtagttacatctgtgaaaatgatactaacattaacattgaatataataacattttgaaagtgttactacagtaatagtaagtatatttttgaaaaaaaaaaatatatttttatataaaataacaattgtcaaaaataatataataaaacagaaattaagggccaagaataattatcttttttactccatgtacttatgacactatactattatgccccttaatctattcagcttattacaaatagtccttgtataatttta

SEQ ID NO: 384966 - DNA, 1021 bp, Cannabis indica
ttttgttttttttttctcatatttatttctttttttttttttgtgaaaaaactttttttgctaaaaaaaactataaaaataaaaattcttcacaccttaacaaaaaaaaaaaagaaaaaatccttcattttgagcctcggtcaaagaactcaattacatcaaatatgaaaataaaataaatattacaaatggggagccccctcccaatattatatatattgggcaaaattttctttaaatacgtatattttctttgaaaatacattgtacttgcatatattctacataactttctttcaaataatgataacataaggttgctttgttctctttcttttatcataaccaattttgttgaccaatatataaaaatgaaatgaaatcttccttcctttattttgttttggctatttctcatttgtctatgagcgttgttaccctacacttttagggtagggcaacatacatatcaaatcaaaacagtgaatcgagggactgcactcacgtgtacatacatgtcaatactagctttagttttcttagatgacccacactgaacaactcttcgtgcatatatatatggtcctcatcaatttgactaaaacaactggatttcaatatctcatatatccataagaatatcatttagttcttgcatataaataaataaaaaggccgacaaactttttcatacattttattttatataccagaaaatatatatagactttaatcttaataaattaaattaatggaaacaaaattttgggctgcaaactggggttcaacaaatccctatattcctggtctgcagcagctgtatagcagcttcaacttggaccacttccctcattttaaagaatttagtcccctcttaccacatatgttttataatataatatgactatctattattattattattagagaaatttgaaaaactatactttaaaaattctaatattttattcttaaatcaatacatttcaaaataaaacatatatgacacttttataaaaaa

SEQ ID NO: 384967 - DNA, 950 bp, Cannabis indica
ttgtcggcggtgacatttcaacttaatccaatccttatagatcgcaatcaactcctactcgttctatgtcgatgatggtagatcgtagagcaccgaagtcgaagaagacactcttagcttcatcaggtgtggtggatcgtaaatctgcgacaacaaatggaaaaaatggagctagaggaacaccgaaggcagagaagattggcgtggattcatcgaacgttgtggatcctagatttgcggtcatgaatggagttcaaggaacaccaacgccggagggaatgatcttagctccaatgaacgatgttatcttcgtcattcgtgattctaactggatttggcacggatcgggtagaactcactattcgcaacgtcaaaatagctataacggtcacgatcgaaggatatgggagcaaagaaagctggcgttcaccagtgccataagtgacggcgatggaaggtacagactggtcactagtggaaggagggaggcctggtcgcgacggatagctgaacacggagcaatggacgtcgacttcggctttgtgactactggttgtagcaaatatatatatacatatatatctacctagttactgctaagaagaatatatagttatgttgtggtcgattgaggactatgaagaagaattgagggaaattttactaactattcatggcttcgaaaaaaaaaggggggggggggggggtggggggacgtgcaaggttgaagacgacagggtatcctaagttttactattgatttccctagcacacaaataggttaagagagctattatcatttgggctaaaagtaattttgggtctgaaattaattttttatctcttatattttgtgcttacttttgtatctaattttaattttaccaccttgaggacaaggtgattttgaagggttgggagtattacatgaaaagttatagggactaatt

SEQ ID NO: 384968 - DNA, 1032 bp, Cannabis indica
ctagtcagtagtcaaagggttgattaattaatatatacaagtaataactaactgataacaagtatgtttgttcaataataattaactatatatagaattgttaaaaagtactacgggtgtttagtatttttttcggtatcatataattattggtgtaattaagtatcgggtttaatataacttaagaaaataactttaaaaaaatatcagtaaccatagagcgctacttatgtggtcaccactagtgcccaataacaaaactttatataatatgggttcttttagtaaatattactaggaaaataataagttttatgcttaattttattatccatttaaaaaattaataaaaaaatctcttatttttaagttatataggctgatgttgggttcagagaaattaaaaatgttgagttttaagctagattttcttaaaataatttttttttgagtgaaaatataaatataaaagtgatatcttttaattaattaagtaattaaattaagtataaaaatttaaatttatcttttatcatatatcaaaatttaatagttcatattttttaaattgatatttatagttatgttttttaataaacttttaaattgttgtataaatatttaaaatattatattatttaaacgatttgattaaaaagttgtaatatttaactcttgaaactaacatgaagaaagcatctattgacgttaattgctaactgtactgcatagaaatactaaaattatcaacacatgagaattcagtattgtcttttatatatagagagaattcagtacttgtatatatacatagttatactaatatttatttagcaagtacttgatatataaaatatgttagattgtaacatttaatattattatactataatattatacattatatttaatattattacaggaccgaccttgagggtagacgagctagacgtgcgcctcgggctcttaaacgctcatagtctgaaattgtgaaaaaaaaaagttattaatatatatattgggattaaactc

SEQ ID NO: 384969 - DNA, 2487 bp, Cannabis indica
aaaaaaaaaaaagaaacgtaacctgtagtcagatatttgcatttggtttgaattttagcttatcaattaattgaaatgatatctttcaaataaataattgaaatgttgagtagatcgattcgtcttgtttttaaaatcacaaaagcgaatctttctgatacgattgtttattgattcaaattatgatcgattaatatatttactcaacgacaaacacttatttaaatacaatatactgataatttttaattacatatcgtcatgtggaaaaaatgttacattgatttctttattctcccagctcattttttctttttgctttggattactttctatgctgctcccgctgatcgactacgtttagatacagtattaaaatagcaaggagaagtattggactccgaatatatataattttaatctacaataataccatatgcaaccactttgtctaaaagagtgaaactaataattcatcgtggatcatattctaatcaaagaatttgttcttgacaaatatgtataattaatatatgtctttcatacactctggttataataatgtagacattgatatattttacacgtattacaaatattacaactatctagcaatgtagtatatacactacagtctacagtagctaacaaatatatattaatcaagaatattacacactctcaaaataagcataacgacgaaatacaaagttacgagggatattaattattcaaagattcattaaatttaatacataaagtactatattccaaatatttaaattaatccaagcattaacgtgcacaaacgtgattaaaagtgaagcttcatagaaatgacaagtgtatatgtgggtgtgcctttgcaataatatattattattaattaatattactaggggtatatataaaatgagtaaggaagaaacataataataatcccaacccatgcaactatcagacgtacattcctgcttcgatcacatcctacagtttctaattaagcttagagtaaaaagaaatcaaactttttatagctcacagtcaatggctaacaatgaggtcattataagtacttttgaatcagaatttaatgtttatctagagtccattcgtcaacatcttctagaagatgaattcgacactgattatagttatggccctaatttatcctcagcccctcatgatcatatcgttaccaagctacaatataataattatcaaagtagtcaaagtcatgaactacatcatcagcaatgtgatgacgtcggagccgtcgtgtggcctagttcgacagctgaagataatcaaactcgggaagcggacgcggcgatgggcgcagcagctgattggagaatggagacagttgagcgtgcggctgacccgccaataagaggatgggcgcgttttaggggagtgaggcggcggccatgggggaagttcgcggcagagataagggacccgaagaagaatggaacgagggtgtggcttggaacgtacgagaaacctgaggatgccgccttggcttatgacaaagccgccttcaagatgcgtggctcgaaagccaagttgaattttccgcacctcattggctcgggtgggcccgagccagtgagggtgctaccgaagcgccggttgcgggaggatttgatgaagtctggttctgcttcttctatgatggatgacggcttgttgaagccaaagcaagggcgagatggtggctcagtggctcaagccgaatcaaaagtggaagctccgtttgaggtttttcagttgggcccaccgagtgaccattggagaaatgattgtaatccggtgttctctggtgcacctaaaaatttttctacttcttatttcgattaccaaaacttagtgtaatcaattttttatcattgaaagataaactgtttgaaaattttatagtgcacttcctaaatataaatggttgattctacaatacacttcccttaaaagagatgtattgatgcacctttaacttatttcggcattcaaaaaaatatcgaaaacaatgttcaaacagccgattttacacgcgtataaaataaaatagtcactcgtgcaatacactgtttgaacatagttttcagcgtgttaaacttttctaaatttcttaaaattttacaggatgtcttaaataactataacgtacatgaccatgagaaaaaatttgactaaaaaattatttcggatcctaaaacagataagggtgcatcaatatatccattttaagggggtgtattgtaaaattttccaatataattttgatatattttaagttgatctttttattaatatttataatgattgcgtgccgtaggttttttttattaagatcacaaagaaatcttcaaaaaaaattaaaaaatttgtagtgcttaaaataatattcaaataataatatgtgcaacaaaatatttaaaatttattttaggtacttcaaattatttattaatttatataaaaaaa

SEQ ID NO: 384970 - DNA, 811 bp, Cannabis indica
tatactaattattatacaaaaaccacaacttaataaattataaaaatgacattaatatactaaaaaaattataaatacgtattataaaatataaaatattaataaaatgataattaataaattaaacgagcgaattcccgttctgtttaatattcgagaataaaaataatactccgcccccctatctcatttctcattttaggcagaaaatctctcgctccattaaaggcgagtctcgagaccctttcccatgaaaaaaatatacatccctatttttcactaattataggacttgattctcatctacatattaattaatataattcaaaattatagtatttgtatcaacaataaacactagaataggggacaacaataaaaaaatcaaaacaatcacttaatagttagtaattagtatggaaatttaaatgttgagaagtgaagctatatatagatatagatataggtagctataacaattgaataataaggtggtgaagtagtgaatgaaagagacatagaattttgtcttaaacggccatgattagccattcatttgggtaaatgtgtggttatgatatgattgaccctactatataagattttcattgtttttagtgacaaaacgttttcataaattcattcaatataattggcaataattgtaaatggtgttgtggccttgtaccatttcacccatatgtgtatatattttgccgacaattaactaagttattatattaattatgaatcaatttagtttataattactctctttcttttttttttttaaataaaatagaataaaaaa

SEQ ID NO: 384971 - DNA, 3834 bp, Cannabis indica
tggtggaatttaggttcaacatgcaaatttttgatgtagttgttgtaggggttggaagaactttagtatatttaatgcttgttggatgtgaatttgaggtttgtgtgtggtgttgaccaagtttgagttcaagaactcaaacttggttcaaccatggtgatttttgtattactgtgttttctgggggtttattgctcggaaatgattaattataacatgtttaggtgttcaggagcttattggaagattaggggtagttttggtttgttatggaggtctttcatttttctgcagtgaaaaatggcaggttgtttctgtagaaacaacctaccgtttttcctggtgtagaacccagaaaaatggcctgccattttttagaaaatagcctattgttttttgggcaagttccccgtttagggtttttctcgtgttttctcgatgcttaggactttgtcttgttagatatcgatggggaaacatttagttttgagtttaaagtccccagaaaataatttagcgtaccacttatcagttttacaaatattgtgacttaggagcttgtaagctgtcgagcagcagttccactcaggttgaccgacacacctgaatttggaatcgaggtaagactagtataatgatatgcgtatctaaatacatgtttagtatgcatgtttatgattgcttgttagattacattgaaatagcagtagcagtatatacagaattatattggttaccgataaatgtatatttggcttaagtactgattgatgctatcacatcggtacgactagagtaccgagtataggctgatattatggtcaatagtactgtcatacaaacattctagactcagtatcacatgagacgcggggatagggttatgattgggtgtatgggcgcctaattgtttatgattatgtttttcttattgagtccgtcgactcaccattactatttgcatgtgtaggtaaggacaaagctaaggctgaacaacattgagtgtgagtagatgaagattatacatgccgcggcggttaggcctggaacatacgatttttgggacaacatgctataaatggtagctaggcgacaacttttataattaacatgttgtatcttgattgtaacttttgaaaatacaggattctggcttttgtaaattttattttattttaagtaaatgttaattaagaaaagttttaattaaacacgatttccaataaacctgttgattagcaatgacttgcacaataaattttaaatcacgataacacgcctaagctagtagagtgtgacaatctaggtcctggtaaaacaacatctagcatctaaaatctcattatagatttggatccaactgttagtactcctagaattaacactataagggaactaatattcgatcctttcgaaaagcttggattccattattgtataggatgttcccaactacttatgttattaagttcccaaaatagaagttgtaagaatcatcttctctgagaaattttaatgagcaaatcaaagaacttaatgaacacaaacaggagttcatgaataattataagattcagacagatctactaataatcatcgttgtgatatgaataactcttttatgataaatgatacgttgataaaatatgttagtttatatcagtccaatcatgtgtaatcaaattatacacaatacatttactaaatgtttatctacatatgtgatccgaattaaaattaaacgcactagagtatagcgcttagtaaattgtagttggtaagtctatattaaagatttcatactttaatacactaccgacttattttattcatattgtatgatcttaattctcttgtatttccttacaagattatacctactctatatgtatatggaattaatagatatttattaattatatttctataattaacatatttatttgtcttatcttgtatttcatatgttctctaatatattatctattaaatatttgtcttagtccatgatacagttttataagctcttggctatggaattttttagttctttaatgtattctctggttatgaaccaggaaatctaagccctttgcatagagacataatgccatatttataggtacatgtgcttaatgggtcgggcatatccatgcctcattagtgttttgtataataaaattcactcatggggtaaaatacattatttaatattataatttgagctattaggcttggtaggtgagacccaattctaaagattttccttccatacgatgcaacattgttgacagtgatataatgaggtgtgtgcagttgttgataaataggaattttagagtagtggaccctccaaaaaggtgattttcttttcgtcgtgtgcatttctaagatctagcagaggggacaagctgccagattctcaggattgtgtgagagatgtaccacgtaggctacctctcaggtggtggatgatcctggataccctttagactcccgttctcggatgacccctaggagcattcttcttatgttccaatattacttatgtcttgaacgctttattggggttgaaccattttttcgggagctcaggagatccagaggacttatatcatatttggaaaacatgtccgattttgtacccacttaaaagttgggctcttctattcgtttagaccaaatgataggcccaggcttaactggcttcaacgagaaatcacgtgtcacccatccaaaaattcaaataacaatattttacgtctataaattaaatatacatataaatatctttttgtaagaatatattaaatgaagttcattagaatgttaaaaatatttatgggatataactttgtctttttgtctctttttaattagttattgaactacagtttttgcctttccattgcttctagttggtaatcaaatacaaaaatatacatatatttataaataaattataaaataaacacattattgataaaatatttgtcaaattaacaatataaaatactaaagtttataaaataatcatatttaatttactttatgcaatcataatgatcgtacagtataaatctataatcattttgtgatcataatagtcgttatagccgtagaagactgtaatttataatcatttatagttgcatagtataattcataattgcgtctatgatcatacaaaattatttattaataaaaatttaaataaagattagtttttacaaaatattattgtttcttacaattttcttttattaaagaattggtataaatgttaggttaggcggcctctattaaaaaaaagcactttcttgaaacggaaagtctgaaaataaaaggaatgtcacaccattttcattaaatgccatatgcgctgccagttgggctgatgtaattttgtattataatattcaaccattacatatatattttccaaaaaaatatatatttatataaatttatgtgtatttattttattatacatatgttagatatttcctggtcataaatatttgtgtttggccttcccatcccaacatgccatcgcaattttcaactgaaatttataacaaaacctgctctagatagtatttgattgactacactacacttcatttctaattttaaaatcgttacagataataaatagagaaaaactaaaaagaccgtggtgccagtacatctttattgtgataatgctactattataattagggatattggcggctaaaccacctgaactttacggtttgtaacacttaaccaccaaaactgaatttttggcggctaaactacctaaactcccattccgttttgctctgcaca

SEQ ID NO: 384972 - DNA, 2642 bp, Cannabis indica
gtattgttatcgttgtttgaataatttttattatttttgttatgtagtgattgtggtgcttttgttgctatatttgtagagttcttcattcaaatgatataattgtgctttagttgtttataaattttattatcgttatttgaatcattttactattttttgttatgcattgattgtgatagttttgttgatgcatttggtgaagagaaagattttcttatagaaatatttgaattgtacattagttgattttaagtcgagtattcatttttcaaaagatatagcaatttattgatcgtagattattgagtactgttactatttttttaagttcctattttatgtttaattagtattgtttgttggttttgttgcaatttttggagcaatttttaggtgttatgcattgtgttgtttctatatagttgcaatgtggtttgcttaccggtaatatgatattaataggtatattatgtgaatgttatatttattagtttaagtatagtttcaagatagttttattatagtttttatttttttttatcatgtttatttttgtttatttatatatgtaggattggaaacgtaagttttacttgtgtaactatttcatgaggtccaagtgttattttacttgcgcttacagtgttattgaaaatattaagacaagcaaaggatgtgatgataatattttgtgccactcaattcggtcatttattttggtatttcagatagccttttgttgactatagtaggacaatcccaaggaagcgattgttgcagtgtcttggcagttattttttagcttttgctttgtttatttatttttttttttggttattgtggacgaagatgttaagacttgtgttcattttatggtcttattatttattcttgtttaagaatatgttgttggaaaaaaagataatgtaacaacaaactatttagaactttgcattaatatgttaaataagatgttgataatgctttacgattctgtttatatttatcatatgtgatacaactttaaataaactgttgtgcaacactattgaaaaaaataataactaacaaactatttggaactttacattaatgtgtcacatatgacgtctcatatgcattactattaagaaaaagtttatgtctaactgctttttcatggcatgtatttcggttgtgactattttggccacatttgttacatctatgcatgtcttcaatcatcgcaagagcataagcacatgacattttttctttttgaattatgttgcaactgcatattttatttttcaggttcaccattcatgaccttctttgatgtaccatttatttataggtttcacctacatgtttaagtataataataagatattaaacgtaaatgaaaccgaaaaacaatgataacaaaatttatagcaactaagatgttagtacgataattattggacaacacataaacaaggtactggcaactatgtatgaaccatgcatttagatattgttaagaaaatatttaatcaattaattttaaactcataaacatcgacttgtagtttgaggctattttgcaaacaataaaccgtaagaacgttgtaaatcaacgtcaactcaaccaacgttaaaatatgaacaagcgttctacattaaaattgtatttatgagagccttgtgttagattgtctatatgaaatacctattaatagcaactaaaaacattgtagcgtgatcaaggtgtaagtatttctacatcaattgtttgagcatccataaaactaatattgaattgtacgacaattatattgcaacaaaaatatcaaaattacataaccagatctatgacccaagatgaatacaaatttagtttattgtcgttattggaatcaaataattctaagattgaaattctaaaaaaaaacaacgttgatgcaccaaataccttaaagactaaaacaaaagaagaaagaaatatcataattaattggtaccctcaactaatacttgatacatataatacatatatatagatagagaaagtgaagatactaatccagagagagacatccagtgagagagcgagatccaactgagaaaaagtagggtatatgggggatttagtttaacgttgcaaaccttttttttctgtattttttatcgattgctttgggttgattttttgtttgtgatatccttttcctttggttgatttgccgacattaatggtgatttgtagttgccctcatcatttgtgaacctgcatatacgttgtatgggtttgcattgaagttttgtttttggtgttgcggctaagaatgaaaagataggtatttctataattaattatgtttgggctgaaaattaaaatggtcaacccaaaatatttgtgtaattttgttgcctatatattaattaaattatatatatatatatctattctatataaaatatataaagtgtgtctatataactgaattcttggtttatgagaaatttataggtgactttttatttactagtatactgttacgtgcgatgcacgtatgctatgttttatattaagtattatattatgagttcggaaggaaataaatgaatcaaaaataaataatatttaatttagagagatttgaataataaattta

SEQ ID NO: 384973 - DNA, 1552 bp, Cannabis indica
ttttttttaaaaaaaaaaaaaaaaaaagaatcaaataaacaaaaaatactgcaattgcatgagttgtttacaataacataaattattttaatattttgtgtaactaaataatgagacaatctgatctaatttaaaaacgtaagtagtacacagtcaacaacgacgttagtaataataaataaataattaagatcaagcaaagcacgtacgaattaattctccaactataaataaagggtctcttccactctcattttccactctccaaaactctcattaaacattctctctgtctctccaaatttaatttcattattaaaacaaataaagctgtttctctctcctcttggttcgtacggatccacatggcagccatgaataaccatgcttctcaactccaatacatagaacaaattcttcttggtgatctctctcctattacaaacatcaaccaacaaaacaaatggcctgtaatttctgttgattcgaacatcaacattgaaatttcaacttacttgaaagaatccacagataatttcttcgacttattcagttctgatcatgaacaaatccaagtcttacccaacgctaacacgaacgatttcgaagaagccaaaccaccacctccgcctccgctgttcaatttcacaactcaattgggtaataataatattggttccttcgaatttgaattcgaatccaaaccccaaatactcggcagcgggagctctcaatggagccggaaaccatcgctttcgatttctctcccttcgaaaacaacgcagtggattcaattcggagatccgaacccgagagaatctgaagaggagaaagctagcgaggaagaccagactcactacagaggggttcggagacggccgtggggaaagtacgcggcggagatccgagacccgaaccggaaaggctctcgggtttggctcggaacttacgacacagccattgatgctgctaaagcttacgaccgagccgcttttaggcttcgtggctcaaaagccatactcaactttccgttagaagccggtaactataaatgcagtagttccgttgtccatatgaaacgacgtcgtgaagaggaagaagcagctgaacgcaatgcggtagaggaagtgaagaaggagaagttaacggagtttgatgatgagacaatcagttacataaacgacatgccgttgacgccgtcagattggacggaagggaagggggctctttggccgttatctccacatcctatgttgggttattcttattcagagttactaattgcataaaggatctcttttttaacacgtacaatggcattgaattatttcattaattattctgatattggtttaattgtagcattggaaataaatttggttgttttgtgtgtacgtataagttctaactgtacatgatctattgttaatttctctgctaattaaccttccaaaattggaatgtgtgggattttttaaaatattattttgaagattgcataatatcttcttttttttttgagaaagtttcactgttattataatcaacaatc

SEQ ID NO: 384974 - DNA, 2889 bp, Cannabis indica
aaaatcacccaaagtttcaaaaaactggaagatcactcaaaaaacctcagcatttacaggactgcatctgctctgtgaaaaccacggcaaaccccacttctcaccctatccagcaatacatttcctatcataaactatctccacaattccttactgctatcttatctgcctataaaattactgaaccaacaaactattctgctgcttccaaagacctgagatggaacaaggcaatgaatactgaaactcaagccttggaagataaaaacacctgtattgtcatctctcttctccctggatacacacccataggatgcaaatgggtctataaaataaaataccttcccaatggtgaggtagacagactcaaagcacgattagtagccaaaggctacaaacaaaaatatggtattgattaccttgatacctatcacctgttgctaagttcaacactcttaaaatactacttgcacttgctgtaatatacaattgggaattgcatcaaatggacataaataacgccttccttcatggtgatttacatgaagatatatacatgaaacttcccccggttacaaaccagctgggaaactcccccccaaatgcagtttgcaaacttcaaaagagcatttatggccttaaacaggcctcaagacaatggtatgcaaaattaagtaccacgcttctctctcatggctttgttcagtctcaatctgaccattccctattcattaaattaaacaacaacctcttcatggccattctcatctatgtagatgatatagtaattgctagcaacaatgctacaacaattaatgtttttaaaacatttctcaacaacaaattcaaattaaaagaccttggtcccctcatgttttttctatgcattgaaatcagtagatctccacaaggaatctacatttcttaacgaacttttgctctccagttgctcaatgaaaccggttatcttggtgcaaaatcagtttcaacaccaatggagcccaatctcaaattgagttctactgatggccaactcttatccaatcccacttcctatggtagcctaattgggaagcttttgtatctcacaatcacacggcctaacctttcttatgtcgtcaatagattgagtcaatacttagcttcccctagaaaaccacatcttactgctgcccaaagaatacttcagtaccttaaaaccacaccaggtcagggcctctttttttccagcaaagttgaactcaaatctctgcttatgcagaaaccagtctcagcatcaaaattttttctgatgtggactggggtagttgcattgacaccagaagatccatttctggttattgtttgtttattggcaactctctagtatcctggaaataaaaaagcaggctactatttctcgctcctcaacagaagctgaatatcgagcaatggaacatgccacttgtgaaataacttggatacttgccatactcaaagacttcaatatttctcactctacacttgctgtcctttattgtgacaatgatgctgcaatccatatctatgagaatccagtatttcatgagcacactaaacatgttgacattgattgtcatattgttcgggaaaaagttcaacaagggaagcttaagatgctacacgtcttctccaacaacaatctcgctgacatcttcaccaaggctctatttcttgttgccttcaaggatattatcttcaagatgggtgtcaaagatttatacactccatcttgaggggggctattagactccatagagtttgttagtagttagattagttgggcacgtgttggttagagttagttatactttctattatactgttgtaacaactctttccttactttcttcccatgtatgtaagagctctgctctataaatattgtactgagatattcattcatttcttaatgagaataatacgctttcatataagaattctctcaactaatatagctttacaaaaaaaaaaaagtaagggaatataacttacaaccgattgattttttttctattacactacatttcttttattttgctaaattttattgtactatatttgtattatattaatcttgtaaaataattggtaaaagcaataatttggtacatgtccaagttcagggaacaaaatcataattagcctaattaataatataattattaactattttttacaaatttgagttacttatttaacaataattacccacaatcatgtagaaaaaatgaattataattattaatttaaataattattatcattttgattgatttatagttgatagataaatatttttatattattattattattattaaattattgaattttttaatgtgtcatgctttcgagctaatctgctcgtgcttatatgccatgcctttaggcatatcatgtcatgtcgtgcctaatatcgtattatttgagctagtttgtgcttgggccttttgggctcatgctagttttgtactgtgttgaaaggcttgacctgtatttatagcattaggtccatttatgtaccttgtcacgaatataggatatctgaagagatcataccaatgggtgtgattaggtctaaatacagttggtgaaagtgtgttgtctaaatctcataaaattaaaacttttttcaaagtagtctttgttaactcaaacttttaggtctccttattttgatgattaacaaatatttgattattatttgttactaatgatttgttgattttgtagcaaaattaaaagagaaaataaatcttttaagataaattggtatttttaccaaacttttcaaagcaactcaaaatggattcaacaagcttatcaagagcaaaaagattcatcaagggatcaacaactcaagaccct

SEQ ID NO: 384975 - DNA, 1370 bp, Cannabis indica
aagtctaaggtctgggctcgagctaggctcagggtccatggtccgggtctagattcagggtctgggtctgtagccggggttagggttaggagttggatttgggaggtccgggtctacgttcatatacatattgcacttgtcccctctccaccacaccatgacctttaaatttaagaagttgagcctttgactggctggagaacctctgttcgagagcgcgtcaaatagagtgcgaggtgggaaagctagcaattgaggaaagaacaccctcagtcatggaagaacgcaatccaagatagtaagagttgatccttgcgattccattgattgtaggcagggtgtttgccattgaccaaggtggacggtggaggaattctgattagcaagatctcatcaagatcatgactgattacagtgggaaccacctgcgatttctatgacaagaaattagtgcgatcaagcttgaccgttaaagtagaggtaagagagctggagaatagattataggttgagttcaatggaatcgacattgttgcagtagcctaaagaaggaactgcttgagtggacggagctttggtcggatcggtggaagaaaattccattaataatgtaagtcaagagaatataataccatgtagagattcagagtatgaattttagaaaagaggaaaatttagagagaattttagcaaaaatcaaagctcaaactttattgaatgaacacgttatggtatttcaaccaatacacataacaaaaaattaagaaagcaaacagaattctattacaatgtaaacagaaatagttaaagaaagtcgtttaacttatttcaataactctattgtatgacaaatatttttatgttatgtaaattaatgtccaggtaaagctagtttttaaaatctgagttcaggcttgtcattttagacatatgactaacagagaaaaagaagttatgaacaagttaaacactatgtaaggggtcctccttgcaacttgtgagcagtttggtggttgtcttttaataaaatttgtttttcctttgcttcaaaaaaaaaaaaatgagaattaattaactatcttacgatatctcattagaatgaaattattaacataaataatccaagtcacactaaactaaaccgaaaaggctagcaattatcaagaggtcttgatcatactaatagtaccaaataaatatgcttagtgattttaattggaaactttgataagttcccaaattatagaacatgactaatgaacttttactttaaatagtaatggatctaattagcagtagaaacattgaaaaaaaaaatgatattatttctgtgatacacagaccagtgatcacagccttgattttgtaca

SEQ ID NO: 384976 - DNA, 1867 bp, Cannabis indica
  modified_base (215)..(215): a, c, t, g, unknown or other
actgtagcaaaatctcatggaagaattcatagttcacacccatggtgcgcactacgtggaaatccaccaagtgcacaacaacgacccgagcaaaactatgaatttctccgtgagatttgcacagtgcttatggagataaagtaaagctattggagtgaaattagaatatcatatcacctattctatacttctccccactatatatatatatatanatatatatatatattaacggagcaactatatatatttgatcgttttacaaatttaacaacatattctttttttcgcaacgagtattcttggagcacaaacacacaaagaaaaggattctatcttttttagttttttgttgaatacataacagatcgacactattggtttatgcttcaaattaaaaaatgatgacaaataatattaataaggtttcggataaagttagaaaagccaccatggaaagagcgaaagaactaacatcagggtccgaacttgattttcccacattcttgaaatcaatgaacccttctaatatcactgagggattctggctggtacataatcttttgattattacttttgatataaattaattagtgtattatgcatgcatgaaattatatatattatatataattataatcaattattgttttaattaatttgtttttaatcctcattaacaggcacttccgaatgatttttgtacaaagaacttgtctaagaaagatgagattattacattaaaagataaaagaggaaatgaatatgaagctaagtacttagctgagagtagaacactgagtaatgggtggaaatcatttgcacgtgatcattatttgaacgatggggatgttctctgctttcgattaatacagcctttagttttcgaggttagtgtaatttaatatcgagtagtattatttattttaaaatgtgtaattaaaagtactcggaaattaattaaatatacttgcttgcaggtattgattattagggtggatttttttaaacggtggggttacgactagatttattaattcaattcgatcgtagtttatagttaagaggtaatttaatttctctctttgtaataattcataatttgttctatttttttttttctattataataagatttgtaataaatcattattatcttttatatacacattgttgcatgtttttcagggtaagaataatgaaatgttttgcaataaattaatcacattattccatagagcttgaaacttattttgtgtaatgtacatgaacatcagatgacaatatacataattttgctaaattttcatgaaaatttgatgtgaatttaacgtttttgattttttttcaatgataaaaatctagtaacacgctatatttaatgacttttcttttggtgcagataaatgaaggattgtcatagaggaagaagaagaagagcagaagtcaagagtatcttacattataggaacatccttttatatactcctatttgaaataaatatgtgtgtaaacttagtcacctgtatatatagacacacatacattcatcattttctacttctttcttcttattttttagtgaataataaatttataaattgttaagagattcatgaagcaaattcatggtgttatttggaatgtaataaacattgacaaaatgaactaattctaattttatatatgttaatttgctatatgtcaaaattcttgttctataattttcattcaattcttttattaattggttgtgtatttaaagtattgaaaaagtgtaataaaatgatttttccctatgttaactgttttttgacagctcaacatgtggttatgcttgtccctaactgtcataactataaatacc

SEQ ID NO: 384977 - DNA, 1903 bp, Cannabis indica
acaaaattataaaatgccattttttcaatatataaaatttaatctagttttaatttttttttttttggttcaagagaaacttttattgaaaacaaactaagcaaacatagtgactacaaagggggccacttcccttaaacaaccagaagaacagagtttctctagtctagcccaacgggcgagggcatcagccacaagattcgcagatcttgggatagccacgacacacacaaacctaaactccttaaaacagttaacacaatcttggaacaaatgatatgatccccactcaaacggaacacagcctacttcaaagcctcttgtcgccaaggcagagtccgattcaataaccacatctacagagtcgttcacctttgcaactcggaaagccaatttagtggccttcaattcaccttgcaagacattgcaaactacagaatactccatcgccatgacagcatcaccattagtctgccagttcttttggacagcagccaaaccagcatgagaaccagacactgatgcatcaacttgaattgtaaacttttccatcgagttgcactcagtatcagtcctaatatctgcaccaacaggggtctccatctccttcgtaccatttatgtcaagagcatttccaaattcattagccagtctgcagcattcctcaaaaatggcaagaacgtcatggcccttgcgaccatgcacaatatcattttgccatttccaaatgatttccaggacacgagcaccaaagagtataatgtctttttgaacaatcaattccccatgtctcttacattattccaactgttcccatcgacctgcataccccatttactcataaaccagatgctacagatcagctagcatcttccgaatatatgtaaagtgctttctagctcagcatggaaaaaacacacacaaacgttcatcatcatcaagaaagcctaacctgtcctttgttgggatacaatttgcaaagattcgccataagtagaaaagttgtttctggtgtaaattctgcttccagagttttgtctagccaaggctaggcgcataaaatctcttttgttggtcaatctagtaggaacttttaactgaaaatacactagactttgaagctttccaaaacagaatatcgtcaccctccagcagtagcttgatactcaggattgtcgtggaaatatcttccacaaaacactcttgaataagatccacatcccactctcttataccttcaataaaaagataagccactttggaaaaagcatgagttcgattgtaattaaatcctgctatgatgaacccagcccctttcatacacacttgccggacctccaacaaactcttccaacctcgaaaatcgaagctttgtttatccacctgccaaggatccaatttagagtaatatttgtctaacaatgccttcatccacagtttgttcctttgctgtaagattagccaaaaaagtttaaccagtaatgcaatattcatgtctttaaatcttcttaaacctaacccaccacatcgctttggttggcaaatctcatcctaattcttaagtgcccagtaccttgtcttgtcagtattttccttccaccaaaattaattgagcatgtttccagctctcttgtctaacatttttatcccattaaacacaaattaatgtgttggtaatagccatgtgatgaaagaatttgattttcaaatgtgatcctcaaaacactataaatagaggtctttggttcacttgtagacagcaacaattttctatcttctaaacactaacctagaaaatattgagaggcttgtttattcccaaaagcatttccattctattccctgttggaaatattttaccaggatctagatttactaccatgtatgtttcattaacatccta

SEQ ID NO: 384978 - DNA, 1543 bp, Cannabis indica
agttttttagtaatgttgagctaatgatatggttgtgtgttaaattttgagtttaaattttgagtttgtttattaattttattttgaatattgtcattctaatattactgtattttttggtttgggttgtgatttttttcagtttgtctaaattttcgaagacagttttgtttcatgtggctcgcaataagaattctgcagctcatgatttggcaaaacatgctcttcggttagatgatgagctatcctggttcgagaagattccactaacgattatagtttgctgctttgttaatcatgtatgattctcttcacctcgtcaaaaaaaaatacaatatatattattataaatatatattggggtttttattttattttctatacctttattatatttcttttattcaataatactatttcttattatttcattcacttttatataatcttcatcattcgacttcttcatccttctcctattctacttcccattcgatgacagtggaacatttggtttcaatttaaaattgtttcaattatagtgcatgttgactaatatgaatgcccaattcattcttaatactggccatttttttcttcacaatgatgtcattttcccaatcgagctccgacgaccttcactcagcatagaaattcttttgtcaatgaaaaatataaagcaacaattctcatcttttatatataagaactctcaaccattattattttggaattagcttcaatacctaaattggacttggaataaaattatgtcacccacaatcgaaatttggttgaatctttgccgcaataagttttggggacataaattttggtgttttttgttcttaaaattctcagttaattattgagttatgcaaagtcataggtatgcgaagacaaagacaatgtctcattcgtttaaagaaaaaaaatgaagagaggttgaggttccttccatgatgagcttgattcccttaatgttgataccatgctcagaaagtttaaagctagattgaagaacattcatgttgtagataatgttataatctaatttcgaatcaaaaaccaatctttcttaatttctcattcccttatattctccctttgtcaatcttctttatttttttagattgtataatctttttctctcaaaccaaactattcaatgataaatcactataattagtacaaatgaaatacagagcttagcatgcaaatattttactctttttctaggtgggtaagttatataagtggatcatcaagactattccataaaaaaaagagttgtaagaatattaataaaatgcattgcctatcattgctacttttgtaagaactgttctattttatattttgttactttcacattaagtgctactccatttggttctttgttgtttttgcatagagttgttataaggattgctctatttaacttttgttacttttatataggattgctctattttattctttgttatttttaggatgtaagggttacttttaacgttgttgtaagggtttttttttttttttt

SEQ ID NO: 384979 - DNA, 2529 bp, Cannabis indica
ttaattataaattatcattcgtacgttataattaaaaagtccgtggctaaaagtattagtcacaaaaatcactatttattgtgattaaatgtatttttattcacaatacttattgtgactaaaattaaattaataataattagtatctaaatattatattttagttacaagtttatttttattgaaactaaaaattacttttaatcacaaaaaaaattgtattgtgactaaattattatcactaaaaatagctttttggtagtgtaaaccaactcttaaaagctattacaaatcaaatcaaaccaatctttatatgctaattttattttcttaggaattacacaaaaaatttggtatttaatgagtaagaatttgttgagaagtatgaataaactgccacacttctagagaccaaaaaccattattcctcgttcttcataaacgagaaactaaagctaccaaatcagcattcaaaaattgtctcttaaaacgacgaattccttagtccattgaagaaaaccatcaagcctatgtgaatgagcattccatccaagccatgttttaatgctactgagacatttgcacacactcttctctatcaccacaaaacaagcacatcttaccaatattatgattaaatatggataacaaggttagtgggaagtttttcaaggaatgccaatcaaagaataaatttatgctttggcatactcaacctactccacacttcattgccccaagaaactttatcaggttgagaatactataatcatttgctacaaatgtgttgagagccatcttgtgtttaaaaagatccttgacaactatgatcttcttccaataccagctactatcaagtggagcaacatagctccaccaatcctcattatagagatacacactatggatccacctaacccataaattatcttttttgtagcaatttttcaaacatattctcccataaccaccacattccaattcaaaatatttcaaaaacctaagccaccagaagctttagaactatatacctaattccaagccgcttgtccaagaccaacacctttctaaagaaaggaacgacaaattgagtccacttctttcaacactttctttggaaagatcaaaatttgagccaattaggagtgaaaggcaagaatattagtggcaaaatctttagctgctaatgttatatgtgtttccagaagaaggacacgtagcatattcaagtcaaagatagtcaattgaagcccaaacacgggtccatttgatgtaatgacatgggtccacataaagagatgagtcgcaggtctatgcgagatacaagccgcttacaccccaactcagatctttttaggttcgggaaagcatcaaatctagaaaagaagaaatatcatataccctctagataagccattgggatgctttcgaaagggattttgaagagatgccccaaaagcctaggctgatgtggcaatcttctgccgaagaatcccaaaatgtcagggctttgtcccctacgtcaagccatcaaagtgagcgcaccaccaaagggaagatactctttgtctgatggccactactctgacagctacagtacacaaagacaacaaacgcatgccacctgttagcattaaatggtcccctgccgtacgaaatatcacaacgccacgggttgtgcctgaatttgtgggtctaaagtcaatgtattatatgtatttaatccattagcgggctatgtttacacgtaaaccttagtgggtctcgggtatacccatacctgaatcctagcctatatatactacattatcccttcatgcaaagggttggaaattcattactcaaatactatagccaaaagctagggttcttaagcttgtcaagaacaccggtgtaatacttcaaggctacttagcccaatataattgattcgtagactagggttcattaatacccaaatcatgtaagaatctccatctctattttatctatttgatttattttcttagttctcatttaattatattgagtttttgaaaatctcgataaatattttggtgctttcattaagatctaaggaaaattttgaagcaaattatatctgtaacaatggtggctactagaaacatcgtcacaaagcctatcgtcacaaagcttcctgtacacactcaactgggcacactacaagaaatgtcacttttgccagcacatttttgtgctggcaaaagttggtattgcgctggtaaaatagaatttacctatgatgtgttggcaaaagggggttggcaaatcaatgttggtattagaacttttgccagcataaaatgaaaagcgctggcaaaaaagacttttcccaacgcataaatgtgctggtaaaagttaaattttagccactgcaaatgtacgctggtaaaactttgatctctttgccagcgcagtttgcgaaatgcgctggtaaaagttacttttaccagcgcaatagcgaactgtgctggtaaaagtgacattttttgtagtggcgccgtaagg

SEQ ID NO: 384980 - DNA, 1852 bp, Cannabis indica
actctctctctctctctctctctctctctctctctctctctctattttgcttccgagacatatttttattaatcaatctctacttgccaagcaagcaacacagttgtctaattctcctgattctttggctgctaagattatgaaatgattttactatagcaatggttctttgctgagtgttgaagtgactaagtgcgtgtcgtttctttagcaaagtatggaagatggaactcctctttagttgaggagtttgtttgatggtaggtttaaggtagtcgcctattttgtctactcccgcgttccttgtttgatcgttaggataggcttatttggtacttttcaaataacgaatcttatttggtgaagagtggttattggagcacagtgtcgtagtttggggtggggacaagttttaggatcctaaaggacttctcgttggttgaagctgctttggcaacttaatcttccgctaaagatcaaaaattttgtttggaaggcaagtctgaatttcattttgtcatatgccaatttaactcgccatggtatgaaagcagctacgatttgtctagtttgtttttagaataataggactactattcatgctctttggttttgtccttctcttaagtctatccgtttggattggattctgcgaggtcttgaatctttgaaggatgcctccttctattatgaattgttgtcgggatgtgtggatattttgagtagacaggaacttgaggagttcattacccttagctggcgcatttgacataggcaaaatacctttgttcatgatcataagctcctccccaacaatatggttagtccttgggctattaactatctttggaggtaccaagatgttaatattggtaggtcatcatctatgggtcagtcttcttgtaatgtggacaatgaagagtcttctaccgaggtagatctggctcttagcgaggtcaacttatttatggatgttgggattcgttatgaagatcggaagataggaatggggactttggcttacaatcctaatggtcatgtcttcttttctagtgcagctccgtgcatgagatcttttgagcctcatgttgctaaagctaaagctttacttcaagggctttctcgttgcctacagttagggtatacgtccgttactgccttctctgattgccagcggttagttcttcatgtcaataacaaggatcacaacaaattaattattgacctttgtctaaaaaaagctggcatgaacgtaccatatttgtaaaacaaattggacacatggatatattaaatttgtaattgtacaagtacgtactataaatatgatacatatataagaacaaaattacgtaccatatatacttatgtgtatattatgaagtatgattaattaattatatgaataaaaaacagatactttagtaacaattgttttgttataatataattttttttattaaatatgaattttaatcataataaaaaattatttaaattaaaaacataatatttaaatataagttgtcactatataatttacttttagccataacaaatattttgaataaaataaatataatcataacataaaaatattaatttataattaatcacaatatttttttaattttaaatacaaattttattattactataaaaataatattttttgtattgtgggaaactttgttagttgggatttaaattgaacatgcaaaaggaaaagaaggattattattttaagatggaatgtaatatattgtaggccgcccgtggtcatgcatatatatatatatatatgcccagtcctgtgcataggcgggctaggcctgtgcctagggcccaccta

SEQ ID NO: 384981 - DNA, 3783 bp, Cannabis indica
ttttgtcttaaccaaattttgaaaaattgcatcctttaagttttggtgattcatgattttgaggcacataattagcattaattggccattttttccaattctctcttattcccattggttagatctttattcttttaatctaacggtgatcattatccttaaagtataaaactcaagagaaaattaccatttcaccatttttgcctttcaaacgttcaagctctccttaaaaaatcattcccgatttctcaaaaccttgcatgccctctttatcatttgatgattatggtaactttctttaaatgagagtttattccccatttttctattatttctttttgagcaagtgtttgatgtatctcttttgcctcgcatatattgatcttgacttagaaaatatgctcaacaacccccctctcgtcgacaaaagagccaaaaaaacgagttgccctggaaaatgaagcctcaggttctatcaaagaacccaaaagaacaaaaccaactgccaacaagaagaaaacttcaagccaactcactatcgagcctgtgaaatctccagagaaggttgttcctgcttcgtcgagcgctagtgaatagccccttgggtctattcactaggtgaagttctctggttctcgcccaaagatggtcttcctcgaaccctcttgccccttgcccattgaagcgggcatagaaggtccgcaactctgctcgctacacgctaccaataactggcaacgttatcagacctttgagtctagcgattggcaattacttaacaaaggcaattttgaaagtttggtgtagagaagctatgatcttatgcagcaggtcagtccttttcctgttcttttttcctttttcccttctcgtctttatacttctttcatatcgcttattctcattccttgcaagcatctcttttgtccattgctgctcaacaccgagggttcaacgagtcgagatgctagagactgaacctcgtaagaccagagatcatcgcgatgttagggccaagaagtggaacgactcagatctaaactttctcgggtaaaggaagaggttgagaagcaacaatgagctgacaagaagaaaatcaaagagctcgaggatgccattaagaccatccaggctgaggctgacaaaaaacttaaagatgccaaggtttacaccaaaaaaaagggtcaacagaattgcctggaggtccatctatcaagtctggttagtcaatcccaagatggacttcagctttctgggccaaggggctgtagatatggttgcataccgcgagaagaccaaaaaagaggaggtcgacaatgaagaagaagttgaggcagactaaggagatcgaaccaagtctcatactatgtaggcttattttctttaatttatttagaaaaaaggctctttggccgagacaatggctgcccctttatctttacttttaatgcctcataccttacatttgaattaaatatatatgttcattgcattttaattcacaatctaaacatttaaattttgatccaacttaagatacttttagaaagcatttccattgctctcgttttttctttcatacttttaagtagttgttcatctactatgtaaaagtgcgagcagctataattctacgtataatttcaatttacgagcagttcttatctactttattttatgcgagcagttataatctggcttgttttatacgagtagtttataatctaccaaacattgtgtaaacagatttaatttgtcgtataaaacatatttttatttatagcaaacttaaaaaacactttgaataattcactccatgaattattttgtatttttttattactcatataaatagttaggtcttctattcatattttaggttaagtattatttttgaaggcattttaagtgcctcatacattaagcttcgcatgtagctttttgttgttttatgagttggtctcatttacaactactactttttgtctttttgaaaggtttttcgattccatgactttatattggtcatagacaattttaatcaattatcatttctttagtggaaaaaattttaaaatgcgtttgcaatatcatatgtacttctagatgaattctagttaacctacatatacatatatgccactcaagtaattttaaagaaaactttgtaaatacttgaaaaaactttaactttattaataataagaattcacatattacagagatgagtacatcatttacatcttaactttactggtaataaggtcgcaaatgttcactattccagtggttctttattagcgagccattaagctaagcaaatttataaaccctgattcccactagtgacttgatatcatagggaccttcccaatttaggttaattactgcagcaaacggatctcgtgtgtttgtaaatactcattttaacaccaaatctcacatattaaagagtcttttcttaactcttttattaaagtacctcgtgattctatgtttataagatgcattagaagtttgcgactcggtacgtttttcttcaagtaaatccatggacaacttaaggagttcatagttttcttcttgattgtagaattcatgtctatgggtcgcaatattaatttctactggtaccattgctttcgagccaaatgttaatgagaatggagtgtgccatgatgttgttttttctattgttctataagcccaaagtacttgcgatagttcatcaacccatctcccttttgcagcatccaacttcttctttatagtatcatttaaggttttattaacagcttctaaatgtccatttgcttggggtcttgaaaccgacgacaagctcttaataattttattccttttacagaactcagtgaacaactcaccatcaaactgagttccattctcagatactatttcagtgggtattccaaatctgcaaactatgttcttgacgacaaaattgagaacttttttgcaagttgtggaaactaaaggttcagcctctgtccacattgtaaagaagtcaactgctactactgcgtactttgctcctcctcgccctgtgggtaatgccccaatcaagttaattccccatattgcaaatgggtatggcgaggtcatcattcttagttctgttggtggtacatgaggtatttgtgaaaatctctggcatttatctcatctcttgaaaaattcatgtgtgtatttgtttattgttggccaatattatccttgatggataatcttctttgataaactttgccaccctatgtgatctccacaaaaacctttgtgaatttctttgattatttcgttagcttctgttggcagtacacaccgtaagagaggcatttaataatccctcctatataatttgtcctcgacttttgtatagtgaggtactaaatacaagagtttgcgtgccctagttttttttgtaagaagttctccgctgagtagatatttgagtatgggtgtcatccatgtaggcgaggcatctatcatttaaacttcttccttttcacatatacttgggtcgctcaaaacttttactggtaccagatttaacttattaagcttattttgcgataccagctttgccagtgcatcggcatttgagttatgttctcttggaatttgttcaatcttgaaataatcaaacttctccaagttcttctgaactttctacaaatattttgccatctttaaacctttttcctggtacttgcctagaacttgattcacaatgaattgcaagtcactatagcatataagattttt

SEQ ID NO: 384982 - DNA, 2075 bp, Cannabis indica
taaattaaatttcttgatttatattaggttttggacaaaaaaaatattattaatgatttggggattgttttaaggcctaccacatccgttatgctggcatataacgtcagtttttttgtatataattgatgttgtatgtacagtatggcgtaggttctttgataataaccgacgccatagggtaatatctagcgttggttgatttcaatcctacaaaatcgtttggatcagcatcggtagcaaagtttgcaaaaactaatgcagaaaaaacctcctctaaagaccatatttgtagtatattgttaactcttccttctgataagaaaatgttttttatttattgtgattgcctcaagaaagcatcaaggttgtgtacttatgcaaactgaaaagggaataacttatccttctcagcaattaaaagagtacaaacagaggtaccctactcatgatatagagctcccagcagtagtctttgcgctaaaaatttggtagcattacttatatggcaaaaattgtgagatttacactaatcataaaagtttgaaatacttcttcacccagaaagacctgaacatgagacaaagacgttagctcaagttggtaaaggattattattgtgaagtcatttatcttcctcggaaggccaatgttgtagttgatgccctatgttggaagggtcaaaactagatgaataaaattaaacaagatctccaagaatttggctcatgaaatgacccgagctaatattgagattattgtgggaggattagctaacattactctacagttcactctcttggaaagaattaaagaagcgcaatatcaagacccagacttagtgaactcttgagacaagattttagcagggaagaccaatgactttatagttgatagtaatggtgtgttacagcttatgaaccgtgtttgtgttgttatggatgaaattattaggagagaaattcttaatgagtctcacaaagatccttactctgttcattcggggacgataaaaatgtatcaagaccttaagtctatgtactggtggtctggaatgaagaacgatatagtagagtgcattgtaaagtgtttaacctgtcagcaagtaaaagatgaacaccaaaggcctgtaagtttgctatagccattgaaccttccagaatggaaatgggaagatattgccatggacttcgtagttggattacctagaactatgggaagtactactctgtctgggtcataattgataggtttacaaagtcaatacactttttacctatttggatgaacttctccattcatcagtatgcaaaactaggaccattcagattttagaatacatgctacaggcatgtgtgttagactttaaagaatcttggtaaagtactttcctctaatcgacttctcgtataataacaactattaggcaacaattgggatggctccttatgaactgctctatggccgaaagtgcatatcacatattcactgagatgaagtaagtgagaaatgttcttgggtcccaaagctttgtagagaacaagtgaggcagttgacgagattagagtgcggatgctcgctgctcaaagtagataaaatagttatgcatatccaaagcgatgagatattaaaattcatgtcagagatatggtatttctttgattatctcctatgaaaagtattaaacgctttggtaagagaggaaaacttagaccgagattcattggatcctttgaaatcctagaaaggatagggtaagtagcgtacagaagggctatgcctccagtagtggcagctgtccatgatgtgtttcatgttttgattcttcagaaatatgtgttagacccatttcatattatgagttatgaagcattggaacttcatctagatctctcatacgagaagcaacaaatgcaagtacaagacaaaggagcaaaagtttcgagaaacaaaaaaattgcactaattaaagtattatggaggaataataaagttgaagagggaacctaggaactagagacagatttgcagtagaaatatccggagttgttcaggaaaatttcgggacaaaattt

SEQ ID NO: 384983 - DNA, 3202 bp, Cannabis indica
gtttggataaaaagtagacaccggtaagacaaattagcttcaaccatgttggaaaaggcagcacaaagctcattatcgacaatgatggaattccagaatgggagcagaggagaaacaattgaaaaggaacctggaagagaaagacggtggaaccagcccctgagataaatactacaatcggaaaaggaaaagggaaaactactcaggcggacaaaccggtggctccgggaaagagaagtgcctacgtggcaaaaaaggtacaaggtgctacgcccactactatgtaccagatcgatcgtggcagtacgagcggtacgaaggaatttgaaaaaggagggaatgttggtgatgaaggcataacagacaatacaaacgtgctaaatgaggtgtttaatgaggttcgtttgaactttgggcctgaggtcttggctcttcctaggcctgattttgctgcagttgatgataataatgaaatgattccagatatagggcccactattggccaaagtttaaaagttcctcacaactgggtttgcctttcctaaaaacctcgttgttttcctgagcccactcctatagcttggcccaacctagacccagaagcccaacaaactttcctaaagctttatgaacctgaatttatcaatttatataaagcccaacaatctttactatccaaccctcctaatctatctgagttgattatgcactatctgggcaataataggaaacgaaaagctcacacttggtttcaaccgtacccatccttgcctatccctgattttaatccaaaaccagttgtggagcttgaggttaccccgttaaatgaagaagatcttgatggaaagaaattcgttattggctccggggaagatgctgctcatgcgactggggggatcgtggaaaacgctcctaccgtaagaatcgaagaggagtgcccaggaactcttcaggagttaaaactcgtagcggaaggaaaaaaggaattgaagcaaatcatgaagcaggggaaaatacgggaaatatcaatgaattgctggagaatcgtattgaagtcagattggaattcaaccaaaattttggcagtggcgaggaggtggccgtatccatgcccccaccgtcaccatgaggtgtcttgcctggaactgccgtgggttacacagacccactgcagaaaggacccttcggggcctcatccgtaattgtaatgcggatttcttattcctctcggaaactaaagtgaatgaggagacaatgacttcaattactaatcgtctgggttttatcaattgtagctgtattcttgcttctggtcttgcgggaggattttgtatagcgtggagaagggggatcatctgctctgtcaaggaaatttatgaggctggttttcatgtctcggttagtgctagtttgggagtgtctcagtggagtttattttgtgtgtatggcactccttaccataattaaaaaagagcttattagaactggattactgagaaagtcgcggactgcaacgacccttggactctaatgggcgatcttaatgttatcctagatgaatcggagaaggaaggaggaagaaactttaatagacaagaaagtgagttcctaagagattttatgttgaactcaggaggcattgatctcggttacgatggagggtctaaaacttggcagaattcgagaattgtgaataaaagaatccggaaaaggctagatagggtggttgttgattcaatttggtgtactatctttcctcgtgcctgcgttaaaaatatgcctatcttcggatcggatcatgcccctattttccttaacccgtggggtcaggaaccaaaacttcactaccctttcaaatttcttgaagtttggacgtccagtcctgagtgcggggaagttgttgatggagcttggaggaaaactcatcccagttcaaatgaaccttgtctgcagaggaaactaaaagtgactaaatcggatctcaagaaatggaaccaagaaaagtttggcttctgtgataggcaacttgagtctttgcgaaggcaattggaacagattcaacaaaaaccaatctctggttcctctgttcaacaagaagatcgtatccaactggaaatcatgactcttgaaggacagatggacaagatttggaggcaaaagtctcgggcaaactggattcgatttggagacgccaattcaaaattcttccatgtgtctactatcgttcgagaagcgtaacttcattggaagtatcatgaccccgtagggagtgtggctgagacagagagatgctattggagatcatttttaagatcaattcagaggtctattcaccagctctggggtgactattgacgcggagatggaaactctgtatcatgacagggttacaaatgcagaaacgatcttatcagccgtgtccccgacgacaatgagatcaaagatgtggcgtttaaactccatcctctgaaatctccgggcccagacggtttctcaggtatattctacagaaaatattggcatattgtggaaaaggaagtttgtcatctagttaaagattttttcttgaatggggtgataaacaaacatcttaaccatacttacatatatcttattccaaaaatcttcaatgctgactgtgttgaactcttcagacctattagtctatgcaatttctcttataaattatctctcgacttttgactgatcgtttgaagagtattttggatagactagcgtccccttcccaatctgcttttattccaggaagatggattgctgaatgctctctaattgcccaagaaactctccatgctatgaaaaagaagaaggggaaaatggggttatggcgatcaagacggacatgagtaaggcttatgatcgccttgaatggaatttcctcctccgagtcttaaaagaaaatggtttcaatgacaaggtctgtacattgattatgcaatgtgttactacggtcagctactcaattctcctcaatggagctcctttggctcccttcaatcctaattgtggcctaagacagggtgacccgctgtccccattcttattcatcctctgcagcgaagtgttatcaaagctaatccttaagccggaaaaagaaaaggctatctcgggaattaggattgctcataatgcttgtcctatatctcaccttttttatgccgatgatgcaatctttttctgt

SEQ ID NO: 384984 - DNA, 1263 bp, Cannabis indica
atcaagtgagatttaactaaaccggagtttaataataaatcataacaaacaattagcccttgacattgttaaataatttttctcgttagtttttcatctcttctaaattattgaatttatatttcaagcagattctccccgtagatcgctaagttatattaaatatatagaactgcgtttgacatataagatgcgattagcatatcactccttatatttaaaattattattgttattaattgcatagaccaactgacatgagtaacaataatgtgaaggctcatttattgttaaatactattaaattattgtcaaatagtattaaattgcacccgtcaacatatttttattattcaaaaaagtgtttggattaaattaagaaaagtagaatacttgagaagacagatcaatataacaatacaagttgttataaaatatgaaagaactttgtgtgttaataataaaaaaatgattggaaacataagtatcaaagaatctaaaagaagaatgttctgtttcgcgtgtcctcaacgagcttggttctgtggctttcagccttttaggatcagccagcggtgtgtgctacccacatgcttgacggaccatgccacgtgcatctaagtgtagtgcttacttaatacttgtgcacaccacacgaaatttgcacttccatgctcttacaatattatttatattcacacgtggcatcactcttccaaataaattccacttaggatgatctatcatctttttaaaacaatatttgcactaagaaccaaatcatatgtggtggatttattatattttgatatgactagtacttttaatattattagggatcataatgttccaattattaattatgttttatagtttataagttagaaattgtgtcatatgagcatataattgaaaatacgtaattattagggactttttatttatattttattttcaaatatacgaaacgtcaacccacgtcctatatttatatatatatatacttatatatatatactagtaaaaaattacgtgcaacacacgtatactaaattttatattaagtttttttttatgttatttaaagtgagattattattgaatactgaatgcaatatattagtgtttaaggaagcttaatgatttaaatatgttcttaagttaatccaaaaataaactaaaaattaatattccaatacttaaaaaaaaacattacttaaatgagagtaagataaaaagaaaattaaaaatcaatctctaaat

SEQ ID NO: 384985 - DNA, 1463 bp, Cannabis indica
  modified_base (42)..(42): a, c, t, g, unknown or other
atattttaactatttatataggttttctctagtctcatttanaattttgagctcaacctaaccctctcctaattattagtgttaagagtaccttttcttagaattttgactttaattataacaataagacctaaacactaattgtgacattaaattccaatatatataacttgtaaggaaattatatatatatatatatatatatataagtttctattgaattgaacatactttaaatcatatataaatgttcacactgcttaaagtatttattaaacatgtacaaattatataaatatgtttaattaaaaataaagataacagtggctaaacaagtttcatttgttgtatttaagtactgttaaaaataaatctacttgataggtatttttgttaccaattttttagtaattaataaacgagaaattcaaaaagacgtacgtctaatggtgtttagcactacctaaaatgttatattcttagtattataattaagtatcggattctatacaatttaatttaataatttttatagaatattgctaactatttgtaaggatcacttttatggcaaattgtggatatagtagttaggaaccctcgtaaatgccaatgacattaacacaatgaagaataattgcaacttttttttttttggatgaatcagctctatgtattttgttaacaaaatatgtacaagctatgcaatattctgttaagtaattgagatattctgctaaagttaatataaaaaataaaaaaaaatacaatacatagccatattttataaaatttgtggataaaaagttaggaacccttgtaaacattgaaacaacaaagaataaatgcaacattgatatgtgaaatgcaataaatgtagcataatataattgatgcaataatgtcaaatgcatgcaaaaataaattcttttttcttgtttgtatctcttcaattttcacaaatattggaattgaaacttatccaagcgaaaagaaagtgtttataataaccaaagttgaagcataatatatggcatgttaaaatcctttctagcaaaaacttgatgagcatctccaaaagaaaatgttcaaataatctcaaaatataatatatattattttctctgtttatagcaatctttattctgaaaatgctctaataataagcatatttaaatattattaaaataatttatatattattatttaatatatattaaattattacagttttttattttatgaaacggataatcaaataataagcattgatgctggatgttctagtacatattctaaacattttgctttgaaattgattagcgatactttttaaaaactaatatgtctaccttattaagtatttttaaaggttcactagtagtgtaaaaagcttaataaagatgtgtactatacatatttttagtatgacaaattttaattaatgtttatatatatatata

SEQ ID NO: 384986 - DNA, 1736 bp, Cannabis indica
agagagagagagagattaaaggtcatgtagtagttagattactatagtagtgtgttagtgttagtgtgagtggttatatttttttggaaacagctgtagggttttgctaatcaacactttctctctctatctttcacttaaatatttataaacaaattaattatttggatcattatgactaatatatatagttattaattatcatgattaattttgctattgtttgtataattaagtaattatcaatatataagtttgaagtgaatgtgagactaataatcatgccaaatctctatatgcatattaactagctagttatgtaatagtaatattttttctacttttatttttttattataagaaatgtcacttttgcagcacaatttattactatattggtaaaagtaacttttactagcacatctcgcaaactgcgctggtgaaaatgtcaaagttttaccagtacatttacgtgttggaaaaagtcgattttgccaacgcttttcattttgcgcttgcaaaatttctaataccagcgttaattcatttgccaacacatcaaaagtaaattctgttttaccagcgcaataccaaacttttacaagagtaaaaatgtactggcaaaagtaacatttcttgtagttttaattgttttacaataataattacaaactaatagggtgcacattcgggtgagttttcaggtttcgagtttgaatttggattttgggtatagcaaattcaatactaaatttgtctatttgtagacaagatttgattgagttcgtgtttaggtttgaccaggtgggtaagacagggttttggcgagtatctggtgcgaatcgagtttgagccttccaatataacattcacaataagccaatttatgttgggttttgggcgggtccaagtgacaccctgtaccgaaattgttatttttcccaaacccgaatctaacccaatttgtaatcgagtgtcacttgaacccggccaataatttttcaatctcatttttttagggttttttgagtttgggtggggcaggttttggggtagaaatgtttagccctaaaaactctcatttttatttaggggtattaatttgttgaatgtaactataaattaagagacttggtttataattattgcattggtcaaaaagcaataaactaaagttttcacctcagagtcaaaactcttgacctattgactattgtgtgatattataacacttctggtgggtcaaacaacccgtcaaagggttaattgatttaccagcacaactctttttaataaaataaaataaataaattaataattttgttccacttttatataacttatcagtcaccaacccacttatattttaatttttattaattattctataatgatttaactaggaaaaggggtatatattcaatcataaatgtatgaatacaagaatttagtatataagaaaaataaatggtatttatgaaaataaaatccaatttgttggtgcttgtttaattagtcatatatatgccaagcttttgatattgacggcccaaggccccaaatctaacaggctgatttcatgggccaagtttcggctggaatagcatagtccaatatatgtgttattcttttttagtttaattatccaaacactaaaaggggtaagtttgaaaaataacccttttattaatcaattaatcaaatttacctctaattttatatttatttgaaatata

SEQ ID NO: 384987 - DNA, 1173 bp, Cannabis indica
tgagatgctgctgtggtttgtgagttgtgaccatatatatataaatataatcgacttgtttttattttaagagttagagaaatgaaccctttccattccaccatcaccatgactcgtgaccatatatatgacccggcctcggccccggtcctggcccatgttttatttagttttttttttgacatattgtttattttagttttttctttagcttgggatttggaattttctaagtgtcacctttttaaaatgtccaaatcaaagtaaaattatataaatagatataagaagtgatcgtctttaatggctgccaatggaaggaaatggacatgaataagatttttttttttttttttataattgggttttaaaatttaacatttaggggtattgaagaagagcattaaacattgggaatggggatggagattgttgtaggagatacgaattaatcaatttaatatcagtgttaatatattggggttataatgggttgggatcggcaagaatggtactgtgtgttctttgtgcgattttggtatgtttactactgtttattgatgtaattttttttaagtttattttagtcaatttcaaccttactgagtctatttttacttattgtttgttgattagcaatgataaagggaggatgaataaaagattgtgttgtgtgttttgagtttttatgaatttttgtttcgagcaccaccaagtgtttgattatatgtattttttttattgaaaaattacaactttcattaaaaggaacctaaagagtacaagttacaatcataaagagtgttaaaatcagcattccacacaatttctttatcaagccttaaaagctcttctagctactctattaacatctacattgcaacccctaggaataaatctaacagtaactttagagaatttcgataaagaaatacaaatattatcaaagaagtccgataacactcagaattcatgctctattacacataatcttagagacaagcaacttcgaatttgactccacaatagatatagaaaacttgacagctatacaccaatttgaagcatgtttaagggctaaagcttcagcataagttgagtcggatgatcctgggattagaatggccaaaccaacaacaatgttctcattcgtaaaatctttttttttggcaa

SEQ ID NO: 384988 - DNA, 2206 bp, Cannabis indica
aagtaggcacagtcacactgacagcccgtgtatcagagcccaaacaagaccctattctcttgaccttgttggggggagcactagaagaaataaatgaagaagaaccccccttcttctggtaagtttcatgtctcaacacactgctcatatttgcaaaacacacaaaagacaattactaaaagagtaatggcctgcgagttaataaaacaatatgatacaaaagatgaataacaattatcaccaggagagtcattcccaccaataggccttttctttgaaggcccagatttagtaccatccgccactacgacatccacattctcctttcgagattttgaaggttgcggtcttcctttttttcctaaccccaacagaggggataatgacaaagttaaaattgaaattgtctacagcatgggtagtggtcaagattgtgatatccttctaagagacaggtagttgagttatcgcaaaagctctcttgtacatggccacggtaggcaagggtctagaaaactagtccacctgttggaaactagtgtaactagacccaatgtctttcacaagaaattaataggccttggagtcaccttctttcgacaccttatctacacctctcagaaacttaacacctttgtgtgcgtgctagaagccatagtagccagactactgatgagtatggtttggcctcaaatcgaaaagttagtatatttcgtggcctgtaggccatttccatctcatcaatgtgtacaggacaaaaatcactatatgaatctgcatggccattgggcagaactgcctaggactaattccaaagtaatcagtcacgtctttgaaaaaattatggagagggagtttcccccataagtgatatgacgacgagaccaagcgcacaatgccttttcgaggttatgtgtttattggtccttggatgggagtaccatgtgacagtccttgtcattcacggtcatttcttccaagtgttggaattgaacatcagagaggctataaggaggggccacaaaaggagtttgaggtgttgaatagtgtcgtgtaggagccttttcgataacctttagagcaaactcttttgcttttagagtaactgagccagaggtattaactggatccttggtgtcatctttggcgaagttgttttttacttcatttttggcccatttctcaaatattttgatgatttcatccataatctcttcatcaggtgacccagtctcatggtcatcaaagactttccttctagagatcacccccactgcactgaggtcactaaaagtcttggctcgggtgcgtttcttggtccaagccattgcaggcaaccagtctgacgatcgagcaatggtcacagtagcctcagcaaagatatactccccagatggctcaatgggtacccccaccggagtggtacactcactaggagaaggaatatatgtccactctttgggtagataagagcgtattccccttcttagttcccaaatgtgtctaatgtacgcttcaccgcctatcgtctcccggtagagatgggcggaggtctcaaactcactactagaatgctcatctttagacaagttaaacgaaggcaacttggaacaatcttcaaacaaagagttacaagaaaggtctttgtctacttggtggccacctccctaatagtcgccatagtgcatctataaaaaaggaagaccaaggaggtgagtacactgagtaatgctagtaggatatctaagaaggactcacctactagtcaaaaaaagaatgagaaggaaaagaaacaatacatacatgacaaacaaaatatttaaaacgaaaggacaatattcatgtaactaaatgaaagaagtaacaacgataattacacacttcaaaattttaaaagtgagtaagaaaaaaatatacatgaaattgtatatatataagtctccaagaagtagacaaaaggcaatcatcatcaaaccctgtagcccccatctcagcagtggcggaaccagacgacgaaataaggaggggccaaataaaatgtattttcacctaatttttttagcatgtagtattttataaattaatataagaagttaattagctttatacaacacaacgtatataaaataataagaaataataaagggcacattatagtgccaagtactataaaaagcgacatatcgttattggtgtaaaataatat

SEQ ID NO: 384989 - DNA, 1811 bp, Cannabis indica
caaaacatctccattattacctactatgtactttcttctctcactttctctctctaaaatcttataatagctagatcaatgggtgcactgaatgatgatgatctgaagtacaagctctatatatatattctttatataattattgtattattaaatataatggttgctcagatcagatgatcatcttcgaatttgctgagcagtcatttttatagtcggcaggttggccgataaaagcataacattaatttgtaattaactgaggaattaattcatcctcactagacgtcgtttatacttaataaatatatatcatgtataagctggcatgtgttttggccagaacacgagaaacttgtttcaatttctttccttgcgtatcacacaaaaatagtcccaatcatataaatatatatattatattgatccgtcaaacaaagcatggcacttttttaagctaagctaagctataattaagcactccaaagtgattccagcgaatccagccttgatgtcgttttctgcgaatgatactaaccgatttggtcaattggtcttaggcggtgagtgaccagctctctttggtgtttggtgcaactactaatataccaataacaaataggggtttttacaagtataataaccatatgaattttagaaatttaaaaaaatactataacaaggaaataaaaatatttatagtacctaatgtacaaaagtactatatttaaaattttatatcgctatcgagaaaaaaatctaggccatcataaatctaatgaggtaattgtaggtttggcaagaaagaagaagtgtatttggaaagagaaagatcacccaagaatgtaagttagaagagtaaataccatcactctcaatcaagatcaaagttaagagagaaagaaacaagaaagtgttgcttctgtagaaggtctggacacttgtaatggttttgcaagaagtacaaggagcaacaaggattcaaaaaatctcacaatggcgataggaaggacttctggcaccatcaccacgaaaaggattttgctgcagtcgcaaaagatagtgatgactactccacggatggagagttgttctctatcttggagtcatctatgaacagggagtggattcttgactttggatgcacttatcacatgtgttcgagtcaagagtcattttttgattacaagttagttgatggaggtaaagttctattgggtaatgatcattcatgcagggttattggaaccggaaaggtggccatcaaacagtatgatagctgaatcaaggtgctgatgaacgtaagacacatccttgaccttagatgaaacctcatatcccgaggtgcgcttgaagatgaaggatacggatacaagtccatgcatgaaaacctaaggatcaccaaaggtttttttcatagcaatgaaatgtgaaaagataaatggtttgtacgttctccaaggagaaattgttccagcagaagaagtaagtatggtgaaagggatagaattgaatatgaagttgtggcatcacagacttggacatattagtgaacaaggtcttaaagaactgcaaaaacaatgtatcattgaaaatttaaattcttgtgccttaccattttgtgaagcatgtgttttagggaaacaacataagctaaaattcactctaacaaggcacacaacctaaaaagatactcaaatatgtgtacactgatccttggggaccatacaaatcactccggtaagcaatattttcattcaatagttgatgattatagtcgatgtgttaagacctacttgttaactccaaaa

SEQ ID NO: 384990 - DNA, 2027 bp, Cannabis indica
ttttttaatttttaataggtttaaaaatcacatatcttatatcaaacatatataattatcatttaactattaattaacttcaaacaaaacgaataaaaaatactctaaatgtaactcgccacaggtatttaatcatatacaacatacatatctctttcacttatatacatttaattattgttttctttctattatactattaaaaaagctaaaatctctaataacatacatatcatttaatcatctctaccgattataaatgacgtatatatattttaaacaacattaatactaaatctaattatttttacgagatctcccttctcatcctttttctactctattcttttttttcttttatgattattatttctagcaaatagcaagatgcattgttggttaaaatattagacaattgaagcttaaactacaaatttaatatagcatctatcttttatttttttatattattattggacattttatgagaaattgccttaattttattcttttcatagttctttaaaaaattcatcattattttcataatcaaaataatagctcccacatatataatatatataattatttaatgcaatgtgtaataaattataaatattatatatttattatatgtaatgctaaaccaacaattgtttagacttctctttttatgctaaacccaatcaatgaaaaaactggtcaattcgttacagatttgacattgtatagtaagtttctataagaaatctctttttatgaattggttataaagttctcattttttaataaaagttatgttatatccctttctcttttgtagatctaacattgtgtagtgattatttattttgtttttcttttatgaatttcacattattggccttttcatggcaagttttttttagacttctctttttgtgagtttctttacaaagtttttaattttcagtgtattcatccttatattgtacgttactatatctcataaccccatgataatctcttaatctcattataggatttttataattggacaaatactatgcttagtgtgatttttttaaaaaaatattattatatatatgataatgtattgtggtagcaacaataaatgaaggttttattaatttttttattctataaatttcaataacatttggttaaattttgatacgatgatcacataatttcgaatatagtgaccactacaagtaaaatacagtaatgacaataactttgaatgttaaggtgactacaagtgagatatgatgataattaacaagggctttgaatgtagcggcatgatgactacgagttagatacattgatgacaataactttgaactttttttcatctttacatatacataattaaaatatagttttcttcttaattgtactgtagaattttaaattttgtagttttgtagcttattttaaaagattgattttcatgatgtattttcttaggacatcaaagcatttgtagaggtaacctatatgcccttagccttctttgatttgacgagcatgtcatccacatatacttccatattttgtctgatctagtctttgaacattttgtttaccaatcttttgtatggggctctagcgttctttagaccaaatggcatgaccttataacagtatagacccatatctattcacaaacttgtatgttcttggtccagtggatgcattctaatttgattataccccgaataggcgtcgatgaagcttaatatcttgtgttcggctgttgcatccacgagctgatctattcttggaagtggaaaatagtctttggggcacgccttgttgaggtcggtgacgtcaatacatactcgccattttttgttgggcttgggtacaagtacgtggttagctacccaagccgggttgaaagcctcgatgatgaagttgttgttacgcagcttttctacctcttctttcaatgcttgtgcatgttctttgtccaacagtcttttttgctaaacggaccagaagttttgactgatgtttag

SEQ ID NO: 384991 - DNA, 1476 bp, Cannabis indica
agattttccaccagtacagcacacaagatacagaccccccaaaaaaaaaaaaaaacaatacaaaaaccctcaacaaacagaaatacataaaaattaacaaaacaaaaattctgaaaagaaaaacatatacataagtgtatgatttagatttaccaaaaaataaaattgtgagctgtttcgcccgagcagaagtctgataaaagaattattaagtctgataaaaatttggtagatttatgagagtatggggttttgggatccgatgaggaggacgacgatgataaggtcgtgtttgtttgaagccgacaccaccccttctctgcctttattttttcccttaattttttacttttctttttttgttttcatacaaacatacactgtctttctctctctatatatatgtcttatttttatatatttatttataaaaataaaaagtttgcatatttaatttttacagatattttattaataaacaataaattctttttaatatacatagatagagtttagactggcccaaaaaaattattaaattattaattattttatcagatactgaatagggagataagggggcgtaatacgcactcacttaactttcgctctaaatgtagggagagaaagtcagaagaggaacagcgttccattgagtaccctgaaatccctacaagtttctcttttctgtcccattttccacgctcaaagaatccatttttttctcattttaattaatattatttttaaaataattagaattaagtgtatcaattacaattttattatttgttaattgggtttgccctctgtctgactgactgtcccatgtttaagtatttttttaatgataatattaaagtaataaagataagattgtaattattggttgttaggtggaattactgattaaccctgtccttttcttttattgtatcaaaggttgtaccgtatgaacttgggtgacccaaccccacacattctaagcactgtatccctatcctatgacacctatgagctgtgtgactgtgtacatgagattcacaaggaggtatttgactttttatttaaataaataaataaataaaataatctcattaaaacttttagtaaactcaaaaacaaaaaaaacaaaaaagtaaaaaaaaaaaaagtgtcaaatacattaattgttaactcagaaaaataatttttattttattttattatttagttacatttaaaaaaacaaattgaaaaaactagcaatcaaagataaataaagagaaaggttacagaaactaagaacttggaacacagttgttccaaagcacctcttcatcggttcctaacgcctgctgatcaatgttatgagccagagtgttatggcgtcgaggtatgaactggatggtagcgtcaggaaaattagattaattttaattccatttttagcatatttaattgacgaaaatattttattattcattgtatattttc

SEQ ID NO: 384992 - DNA, 1941 bp, Cannabis indica
caaaaatttaaaagaaattggaccgaaaaatcaaaaagaaagagttttagtgcatgattccgtggtggcaaaggggaatcaacaagggacagggtatcaggaggagcattagttatttttttcttttcatgtttctgggtagagaagaaccatgatgagagaaaaataattttcattatttataatttatgtttaattaaacaaattaaatatttttcattatttaattacaatttatgtttaatattttttcttatttctaattacaatttacttgattataatttatgattttttgaaaataaattatgacatggactaagacaattaaatgacttgtctaactcgtacttgttgttttttcatgttaatgcacacattgcgttcaaagggtatttcaccttaatttacttgaatatgatgacaccactcaatttaccaatcaacatttaaatgtgttggtagtgacacaagtaaaataatggaaatcttagataattaattagccagaaaaaatacatataaatatatgaaactaaaaacatttattaattatgttgcaaatacacctggctcttctcgatattggaactctatatgcttgcctcttgataggggtgggcttaatttcaagaagtttgaggatgtcaatctcgctattggctccaagcttgggtggaaacttgcaacagaggagaactccttgtggtgcaaagtcttcaaagataaatactggggtaatagggatcagtccttttggtcctttaatgatccaaaaaatatttctttcggagctaaaggcattatggcaataagagacttgattaggaacgaaacttgctggcttatagcaagtgggagcagggctgatttgtggcactccccatggatcccatggatttattggaacaagtctagagctgcctttaatctattgctagtgccaagtttggtcaaggtttcttctttaatttttgcggatggtgagtggttaacttgaccagttaacaggtggtttgtcccaagtattgctagctctttgaatctaactaagtggctgggacctgctggtgtggaaagatataaccgatggtatgtactgccctagcgtggcatataagtctattattaagtgtcgctgggtgaactagatacgttttggacccgcatttggaagcttaagaatacggagaggctgaaattgttcctttagaaattatgcagagatatcatcctgttgggtagtcacctccaaaggatctttggtaacaatatcagctgtggaatatgtggtgaggttgatgattcagctcagtatttgttctataagtgtccccttgcaaaggctgtgttgtttgctagccgttggttgttgtatttgttgcgtccttgtaatatacacagttaaggtagttaggccataactttcttgacatttatgatcatttgtttcttatccatattggacacctattaatatattgtatagttagtaattcaagttagtcgttgagtagacattgtaagcttcctgtaaaaaagcaataaagaataaacattttgtctctcttttttttttctctctaagtttgtgacattatgagtgcaatgccttctaatggttaattggaattctggtattggtgatgatcggagctatatgtttccaacaggtggtatcagagctaagggagttcttgaagatcttgaatcagttcagagaagaagttcttagctaatgggaaacatgaagtttgatttagaaaggtttagatgtaggaatgatttcgggttatggagagccaagatgcgagctttgttggttcaacaaggactgcaagatgctttactaggagaagctaaactccctgcgactgtgtctgagaaagagaaaatagagattcttcaaaaagcaaacagtacgtgttgggttttatgccc

SEQ ID NO: 384993 - DNA, 1980 bp, Cannabis indica
gtcacccatatatatatatatgttgtcttaactaagaaaaaaaaaaacaggtcaatgcataataagctaaaagtagtgtaacgggtagggtctttcggtgtcgagtgttttgtaaaaatagtcttgtaaaaaattttattagtaaaataattttataaaaaaaaaatagcaaaataatattttatagtcacgataacaactataaattacactgtgcgatcataaacgaccattatggctgcaaaacgacatagatttacattagggataagttgaaaactacccgtttttatcacacattaactaaatataactcaaaaataattttaattgataaataccctcttttgtaatcaaagttccaaatgtaacctcacataacttatcaaaattagagtttttaatgcacaggatgggaatatgacgtatgacctataaaattgagtataaattaaaaaaaataataaaatgaaggtaaaaattaaaataagaaataaaaatgggtatagagtgtaattttctctttacattgagcaactatcatggtcgcatggagtaaattaagtgaggttattttgtaaattttagtatttcacattgtttggcaaatttcacactcgggggctaatcctatagaaactcatatattctcaatctaaaatatgagttttattaagcgaaaaaatggaaaatacgaggatggaaatagtactccttactctgatcgagactcgtttaataatttataaagaaatttttacaaaatagactaatttttttaaaaaaaaaatacaaaatatgttaatatagaaaaaaaattcattttcaccctttgaactttttctttacaaaagtacttctttaataaaaataataaatcatttattattgttttatagtttatttaaagttatattatagttgttatgaggttgttttataattattcataatatagtgaggttgatttttttttttttttgtttactttttgttgggaaagttttgtacttttataactttaaaagaatatttttataaataaaaattttatgtagtaaaattataaataaaatataaaaaaaataatattcttgaaaatttccaatatttttttttatagtgttacttattttatttagggaatgtgttctatagtatattcgtaactttatattgtatagattttaaatatatttggaagataattagcattttgaatcatgaataatgtgtggtaattaaatttttatgtaatttacttttgttaaataactttatttttcaatgcatatcgcaagggtctggccctttcaaaagaaattaaatgaaaataaaaaaatatacattcgtcttaccttcattaaagatgcacatcttcttatggggatagcctccttgaaaattctccgtctaaataggaaactagataaggacaaaaataattttttgtctccgaatattaaagggggtggggacgggaatggcattccctaccttgtcggggacccacttaatatattagttatttttttattaatattttgtattttttaatatattagtgtcttttttataatttttaagttgtgttttaatttttatataataagtagtatattgagtaataaataatgtgtaatatcttaacttttatacatttaaatttttaaaataaatttcatttttatattagggaattacctgtcccgttttcgatagaaaataagcgaagatgaaaattaaaatcctaaacggaaatgaggacgagagaacactcccttccaattaacattaaagtgtagtaaagatttgagaaatgatatatgtgcactcaaatattataataaaaaattttagaaaacattaaccaaaagtttcttgtactttgaaaactacaaaaattattggaaatttacacccattactgttttttccatttttttttcgtttgtactgtgacacggtggattttacttt

SEQ ID NO: 384994 - DNA, 1330 bp, Cannabis indica
taacatggtaattattgattaaatgttggagaaatatgtagtttagtaatattaattattttgttaccaatcaattagcacaaaggttatatataagtctatataagaaataaggtaaaggggggaattatatattgaatgtaaaatagtttttttttattattattttttgttggaatttctccttagtttgtcatgaatttaattagtttaaattttctaattcaatcgaattataaactgtcaaaatatggtacattatcttaacatttaatcacatcaagttaattagataaacctttctttggtttggatcctaacattctaaatatatgtattatgttttggtatatagattgatttcatatatggaggttggattcaccgcaagctaccaaatggaggagcattgaacataacaagtctctcggcctatctaaatgcatcaacaaactcaccaaacttcttattggagataatccgtagtagtcccgaaaccctagtactcattctcgacctaccacctcgaaaagaccttgctctctatccagattacctacaaaaattctatgaagacaccgaattagatgctcaaagacaaattctcgagaaaattcctgaagttaagccttacttctcttcatctctttactttcgaagaatcgtgtctcctactgctattgtagtcaaaattgagtcagaggctggagagcgaatagatgagattatacaagaacatgtcgatcttattgcaaagcgagtgctccgaatttggttagaaaaatgtattgttgagaacaatgaaaaagttgatgagattgagagaatgtaccttctaaagagagataagatggtgaggagtaaaacaattgagatcgaattttcttcaagtttgccctatttgtttggacctgaaattgcaaatcgagtatggggtactgtacaaaagtatttttctacatcatgatatatttatttgtacaaggttatacaacttttgggggagaaattagatgaaatatgcttctagtaaccctttattgaaaaatgtatatagttttatttcaatgcatttgtaaactctattatatttaatagaaaaatgttaaatgatatcagaagttatactaatctcacatgtttaaatttaataattattataaaattttgttaatcattcgttagagtcgacccgaaaattgagtaggggcccgtacccaaggcctctaaccctggtccgaagaatccctttatataaggggttatttttagaaatatggaaaaaattattaatgttatgataaatatggcataaaaagtacatgcatta

SEQ ID NO: 384995 - DNA, 2551 bp, Cannabis indica
aaatccagttggagaaaattcaaaatcacaaacaaataaaccaaaacgagaagaaaatcgttatgatatgatttgatttgatttgatttacccaatattaatagaatgagcataccatattcaaaacaaaaatagaatgagcatacccaagctagattcctaccatctattaaccatgctagaatatacctaatattcaatctcaactaaatagatatagtatagaggatcttaacattttatgccatacatatatatcctatgtatttagtttagattgaaaattatactctaatacattttcctccatttaaggcaagagatatatctcatattacaacacaaattttcacttaatataatttgaaaatatcaatacaaatgataattaactacatgctcttttaagagaaaatgattagatttcattttgaaacatgtttgtttgatatgcttatataagtgttcttttttcagcttagtaaacctacaaatccaagcttagctacctaaagtcccacttgaaaaatcaaagctaaagcaagattaaataaataattatatataatggcagcacttcaaaagtttcttatgctttttctcattgctactgctttggtttccattcaacttcacagctctagtaatatctcttttctttaattctcacactcactttctcttgttaattatatatttggttaattgaataataaaaatgattatacataatatgcagatggtgaagatgtgcatccaaaagggccagttgacccattttgctatgtaccatgttcagtgatatttggggataaagaatgctcatcatattgcatcaaaaagaagttcagaactggcatatgtatgcatcaagatctatttctatctacaccaaatgctgatttaatgtgttgttgtagtccttaatttttaattaagaaattctaataatattattattgcattatctttaatttatatgtctactcaagcatgaccaatgaaactaggaagtattatgttttttttttaatatgaaataacaactatattgaaatattatcattcaaagtataagaaagattttaaattaacctaaacattatgctcaaaaatattacgaccaaagagaaatttagagtgtcttgccacaacatgagtaactcgatttgatgatcgtctgataaaataaagtttaacattacgtagagaagatagtaaaagttggcaatcttgaataataagtcgaggtgttattaattattttataattatatgtaagagcatctataatggtacaccatttcactaaattggtgtagaattttcatattattttacttcaatgacatactaaattatagacttaattggtgtataccaaattctacatcattaatggtgttctacaccaatttagtgtactaacttttttttttttattctaacccttatttaattttattttaaaatataatcttacattttagtctttaaattaaaatttatcacaaaaataataattaattaaaaacactaacatatttgcaaatacaaaataacaataaaaataaataaatactaatactaataaaataaaaatgaacataacactaagttataaaactaaaacaataacattaagtaaaataataatttaatagttaaattgatcacttgtggatcttatctttagagaatatcaaaaatattggctatatggattttaaatatttttgagaatcttaatattcttgatatacttgatattattggtgagctcttttttgcataattatttttcgttcattttaaaaatagtcgcgtatattaggatcaactatagagcttcaataagatttttttaaaaaaattatttaatgtttaattgatttaataaatattattttactaaattattttgagattttaaaattttcactagaagtcatgatataattcttactcattatttcataaattaactatttttagttattaatgaaaataatataaaatatgagatattttaagtaaaatatatttatttagcagaatatttagtgtgaattattggagttgttgcaccaagaagtaaaacattttacactaaattggtgtgaattttataccaaattagtataaccattggagatgatctaataaattatttctaataaaaatcacttaagactagctcaagcgaccataaaaaatattaagaaatgtatgtgaggggtcatagaatctaggggtgttcatcaaaccgcccaaactgctcaaaccgcccgcaccgcaaaaaaaatgcggtttgaaattctttacggtgcggtcgcggtttgaatttttcttaaaccgcgcggtgcagtacgatttgcggttttgaattgttaatatgcggttcaaaccgcaccgcaccacatattataaaaataccaatttttatatttatttaggtccaatatatgaatgttcaacttaaagtctactattctttcaaaaaaaaaaacttaaagtctactaattactgtattgttgacacttaatttat

SEQ ID NO: 384996 - DNA, 1048 bp, Cannabis indica
tattatatagcgtagcacttttttgtttttttttttttttgagaaaacgtaacagttacttaagtaaaggaaaaataaatgaaaaaatttcatcccctaaaaataagagcagaacaatagaaaagaaaatgcttaatttttatatatagtaaaaaaatgcttaagtttaaaaccttcattaattatcggttaatttttactaaatgtacatcaaacaaaagcacggcgtcgtttcgcaggttttgctttcagttactgcaaaacacaatccctcacaggcgcgtgagtcagccaaatcgaaccgtggctgtggtctcacgcgccaaatttaatttctgcaacaacaactccctgtaaaacctctgaataaactcctccgctgccttgtcgactgggaactcatcgtcactgccgttagtgctaccgcctcctcctcctctgagggacgacttaacggagctaacaaccgaaacgacatcgtcttgtttagtattaccactcccgtagtactgcttgtagtaaccgacgtcaacgtgtttcttataattattattattattaatattattactagcattagcattaacataacggtgacggcctcctccgtttctgcgcttattatttctggaaacacggtcagcggagtagattcgatgcggtggggtgctgctgcagctgaactcgtagtccctcggggacacgaacgacattcgaacgtcgtgggagctacagcctaaggccgtgttgtggcgaatcatgaggtcgttgaatgatttgccgagtaccttcccacgttccatcatatcaggaatcaagatcatcaggcgctttcgcttgatcgacatccccttttggatcatgaacatgatcagacgaaccgcgttgcttaattttctggggattagcggtgttgatgttgatgatgatggtggtggtggtgggttagtttcccatggttgggtttggtagcttgagagatatatatatatatatatatagagagtagagagagagagagagagagagagagagagagagagagaga

SEQ ID NO: 384997 - DNA, 2072 bp, Cannabis indica
tgaccccaataaattctaacaaattttatcagtggaaaacaaaattttaaaattttatcaatggaggaatgaatataaaagtaaatttattatatattctttcaaacaggggtctttattttacagttaatatacaaatttatatatgtgcttttttattaatcatacaatgagaaatcttggctcaaacggggatgtgaatttggttaacgcaaaatggtgcaaagtcctttaattcttgagttttttattttttttatttatttattttttttaaatgaaattaaaataaaaggaaaaatttatagaagttttgaagtatactaaattatagtcttttggtaaatacatgttgggattataaaaaatatttaattagggtagtaataggatttttagaataagttgaagaatatatttttttgtattcattaatttgaaaatactttcatattatattttattaaaaaatattcattattactcaatatatttttactttctacttaagtctaactcataattcacattaatttaatgagtataataaaaatatcatctataaaaatacatgtatctataaaataaaaataaaaataaataaaatgaaatagagataaaatttaatttcctccaaaataatccctatggaaaggaacatatgggcagcccattaatgcgtgtgcttgcccagttgccctgccatcgggtttgtcctactctcctaaaactctatccaaccatcacattccatgtcccaagaacttctccacgtgtcgctttctaatttccagacaatgtgaaatgctgaaagggcaaaagagggatttccctcgattcaaagttccgttaagactcacgagttagcgctataactataatttcatccactcacgtcactcatcaaaccctttatttccttctctcaaaataattataattattatttacattaaaaatcattcgtaaaataaataacaaaaaaataaatatctaaccgccatttttgtgtgaagaagctgatccacaccacatcctaagctcccaccagctttggtatgtatacttactgatctctcttcccatgttgcataatattaacaaatacatgtatataaattattcagttagtacacaaaactgtttcatccaaaatttcaatattgcaagaagatgatcgtatatgatatgtgttgattagccttaatcgtgaagatgaactgatgatttattattattatatagtatatatttcagggatatatatatatatagagagagagagaggaagatcaatacgatgtcgtcgacgatgaaaggaatggtgatgagtggaactgctatggaggtgagtaagcaaagattgataaagtcatggtcaaagtcaaagtatgtggatcagtaccacttgtttgatctaatgaggagcaaaatccgaccttcttctcaacttctccggcgagcacgcgcggtttccgtgactggagtcgcaacaccgtacccaaatagaagtcagcttcgcggccacacccgagctcaagctattctttcccctgtttctgatccaactacaccaactaccgataaggtatatatattcatatatacacacgcatattttagtgataaattagggaaaatcatgttcttatggttacaatatacagcgagtgtttactttcggaaaaggaaggagtgaaggaaacaagggaatgaagtcactggtatgtaagctacatgtttgtgtaattgtctttattaggatttctatttgctttttctatttggattcaatgcaagagttagcttattatgcaaattcggctctgtagttgggagggaaaggagcaaacctggcggaaatggcgagcattggcttatctgtgccgcctggacttacaatctcaacagaagcatgccaagaataccaacagaatggcaagaagttgccagaaggtctttgggaagagataatggaagggttgcaggctgtgcaaaacgacatgggttctgttcttggtgatcccgtcaatcctcttctgctctctgttcgctctggagctgcggtgagc

SEQ ID NO: 384998 - DNA, 3015 bp, Cannabis indica
ttttcaatatattggtttggtaaattaggttcaacaactaatgataattttcaaattaataaattagttcagtataattgatgttgatcttccctgatttaatcatcaactcaagtttaaacaaattcaattagctgaatgatgtacagcttaatttcaaagctggaaccacgaccagcgacttatacatttccaaaatgaacatacaaacttttaaagaatttaaaaaatattatatatagaaaaagatttcttaacaaatcatggaaagcgatgtttgtcctcaaactatcaacaaaagaatctaaaattatattattataaattatgagacagaaataagagaaagctaattagtatactaaaatcatcgtggggtgcaactgttcataaaagaactaatgaatatatttataatataaataattcctccctagctaagtcatatatataaatggtatctaaatatagaactagtctaattcaaaactagcactataagaaactactaataattaaaatagaggcttcatttcaaaggctgtatatctatcatcataattcgtaaaggctttaattttgtgttttcatcgtcatcattacgaaaacttggtctaagcataagcaaatgagattttatataaagtcatcttgcatatagtgtagtacatttaattagttttcttcccgaaaaaataaataaaagggaaatatgatgtatgattctattcttgctagaagctttagccgtcatgagcaaaaaaggctgagatatggagctatcatttgctgctttattctagtaatattgttcttttgctccttcttccagccttatttgggagtacctctaccagctgcttgtaagttctctatattttattacaacctatttttttgcttcttttattaactttaaatatatgtaaatgtaattatctctttctttatttcccttatagatatcaatatatctaataattttttttttggttttgacagtgaatttgcaagtgtcaatgggtagtgttagtgtcaacaaaatgctatcaattaaagcatttacaaacagctccgatcaccaaaatgtgaaaagcatgcacgagattaaaacagatcatcatcaaccatcaataaattccagtcatcatccccaaacaaacaactctacttcacagaatcttaatcaatatgattcgaaaaacgcgagtactaatattactcatgatcttcgagacgcaaacgcattagagaagaatattaatagctcaaaagattctaccaataatattattactcaacatcatgaagatatgggtaccatcatcaccaaaaacgggtctacaacattaattaaggcgacaaactcaactatttcagcaggtgattacaatagtactgctgatcataaactaagtacgccattttcaattaatgcatgtctatttatataaataaatactacgtttcgtttcaatgataatgttgaattaatgatgatattttctttcagttagagaagtaatgatcactaagaaaactcagccaacaatcatatgcaaccctgagaaatcgagatcagaatactgcgaactcgaaactgatgtgggaatcgtgggaaaaacatattccgtcttctttgttaaaccatcttctcaggtagctgagacggacaccaatattaactccacttcatcattatggagtgtaaggccttatgctaggaaagatgacgccacggccatgggctcagtgaagaaatggtcaatttcggcagtagaaaatcaagaagacgtgccggaatgtactatacaacacagcgttccagccttgctgttctctctaggaggctacgtgggtaacaacttccatgagttcaccgacgtggtgattccattgttcataacatcaagaaagttcaatggtgaagttcagtttcttgtgtccgataaacgactttactttatcgaaaagtacaagaaagtactgagagctttgtccaattacgatgtcatcgacataaacgaggtagaaagtagccaacaagtgcattgttttcctagtgcaatcattggcttaaaaagacacgaaaaggagatgcgtattgaccccgaacgacacacttattcaatgaaagacttcagagattttctaagggaaacatactcgttgaagaaagaaaaagctattcaaataataaacgataataacaatagtagtagtctccagaaaagaccacgacttctactcgtaactagaagaagaacgagagctttcacaaacgagggagacattttgaaaacggctaagagtttagggtacgaagttattgtggcagaagccatttcgaacttgcagaagtttgctgagttggtcaactcttgtgatgtgttaatgggagtccatggagctggtcttactaacatagttttcctccctgaaaatgctgttttcattcagattcttccaatcggagggtttgaatggatagccacaaatgattttggagtgcccgccaagactatgaatctcaagtacttggagtataagatcaagaatgaggaaagcactttgatcaaggattacccacttcaacatgcagtatttactgatcctttttccattggaaagcaaggttggaatgctttcaagtccatatatttagaaagacaaagtgttaatctcgatgttaataggttcaaagccactttggttgaggctctccatcttttgcgcgcataatatatacatgagggtgaataaattataatgtaattaaacctagcttgtcaatattattattattattattattattactattattattattataattattattattattattattactcatccatattttcgttaacgattatgagcctattttgtaataaatcaagcacagatataaagaaaataataacgatgacaccaaaatttttatgtagttttgcagttaactctgcatagtccatgagtctatcttattcagatatttctggatac

SEQ ID NO: 384999 - DNA, 1667 bp, Cannabis indica
tagaaaacaagtgtaattctacaaaaattaatataatcaattgagacacaactctacaacacttaataaaatgcacctaaaaatagcctatcagtagttcgtgatatttttgaagtatggatgcacaggcaagatcacaccttgtccagtgtggggttcagaccacacttagagaccttctctgaggttagtggccagttgtccggggtaggcttgaaaggcctccactctgccaagaagaccttttacatgaagattcttaatcctcttgcaggtaagaatggataaaggagaaacccactgaggcacatttttctccttattccttaggggacgagcttcttgtagtccactttgatgtaatcttggtccagaacaaagacatccccagactcaaaaacaagctctctagcctcattgtaccctcccaatggaagaaattgaggacccctttcttcttcttcttccaatacttcttctctttcaccattaggagaagaggttgcacagacctctccgtagtcctcaacgtcttggacatcaacatccataacagccatttcaatatcctccgtagtaggtccaacataaacttcactggccatttcaaaaagttaggaaaagtgtgggttcttattcgaagctttccagcaagtttgtgtggctttttccatcaccttacattttggtggaggatctggtttggttttatacttcgctataaagacaatgatttttactagtatcgagtttttcttcaaaggctctgttcaaccttttggtagtgtgtctaggatgttagcttagactttgtacgtccaagcagtaggtaagataatgcctacagcctctgttcaattcccaaatgaactgattgtatccttatccactgatttggttagggtaatggtggtgctataccacgggctctgaggactctaatgagtcactcatgacttcccactcgtcaaagctcgaattagatgagttttcactcgaaaaatctgaagtaggtcattatttattcggtagttacctctattgcgttttgtgccctaaataatacctatttcaatataataagatttactatttaataaaagatcaaaaattattttatgttgcatggttcacatgattttttcgtgattatagttttgtccacacagtggaatataatcatgactatatgtatcaaagtttatgtcccatgatttatcagtacactggatttagactaacatgataattagcgatagagcttacctaaacctttgataagtgttatgtcctttctagggtactgaaaaagtatactaggatcggttgtatggagtatacattgaatggatcgacattgacaagggataagatatcataaacttactattatatctatttaagtcgatatcagtttgttgatcttaggtcaatggatcttaatcttgatatggttatgttcgatctcaactgtgttatttatgttcttagtgttgtttgttaaagctcaattgacctaatacttacatcttaggaacatggtagtgtaattgagtgggagcgctaatcatagatatggaatctatagcttctataagtatttatgaaacgattatttccttcgagcttagcttaatagagataaatgattgaggcctcatttcagt

SEQ ID NO: 385000 - DNA, 1101 bp, Cannabis indica
agaataactacgaaacacaaaccatggttcgaaccgaaccactccgtttttgagtggtttgatttgtttggtttgatcatttaattggtctagtttggctttaaattttttaaaaatcgtaatattggtttggtttaaaaaaaattgaaaattcagactaaacgaatccgtaaacacccctacacatcaccaagacttccactaccaccaccacaccacgacatcatagtacaagaaaaccaacttttgtctgcacatttgtgcgtcgacaagtttactaaaatgaccaattaacttttgctgacgagtgaattcgtcgacaaagttgccggtgttaaatggtcgggaaagtggtttttgctggtgaatacagttatttcacagatgaaggtcacttttaccagggagttaagtcgccgacgtaaatgaggctttcgacattgaggcgacgactgagccttgtcaaggaagtcttgctggcgacaaaagtcgacaacaaaacatttcccacgtatttcctaataccaagcaaagttttgccagcacatttaacttcgtcggcaagacttttttaatgtatttttaaaattattttaataattttactagtgatataatgctttggtaaaacatatttttaattaatttatttaatatcttagtatatataattctaatttaaatttaaattataacttaacattcactaataataatgcaaaaacataatcctgattgcatattatatttatactaaattcaagtaaacactaagaataattataaagttgttttcataatttatagaaaatagtaatatttacaataaaaatggtaaaataaaaatgaaactaccaatcaacaacatcatcatcactctgactgggaggggtggcttgtgactaagatccaacgcgaggaggacgcactggtaaaatcaaagacatcccgggcatgttgaagacatgaatgatgccagaaaaatacatgaattgctcatggaacgtatgttgggattttatgccctaaataaaactcatttcaatacaatctgattttttatcaatagaagattagaaatcatttatgtttacatgtagt

SEQ ID NO: 385001 - DNA, 2763 bp, Cannabis indica
aaacggatcaatatggtgtgcttaagatgtgtggaatgcctataatgagtattgaaaattgattttctaagaattattgaattccttgcttgataaatgtgtctctaagatgatccttaatagttgtaccattttggtgtattttgtgtgaagaggacaaggaacctagacccaattttggacttagacaccggactccggacttggatctaaattcggactcgagaatcggaccaaactcggacctggacctcgaaccctggatctgaatcgaactcgaattttgatctaggactcgggacttggacccaaactcgggaaccgaattggtacctggacctatgacccggggcgccgaacctggacccgaactaggactcaaaaacccaaataaaattaaaattctatgtgatccgaataagtcgagttagatctgatctgattcgagtatttgataaagtggagcggggcgtagcggatcattgcatgatttggatcaggtcaattcatagccggatcagatccaactcgatctaaatacactcctaattattatggaatattactaaccatttataaagcgttacctctaagtggtactaccaactgccacctcatagcaatgacttttacaaacatataaaaaattaggggtgttcattaaatagtcgttccaatccaatccgcacgatctaatcaaatctaatttgcaaagtgcgaatatccgcacttgtgtgtattggattggattgaattgaaaaattcaaaatctgcacttgtgcatattggatgttaattgacatataaaagtaatcgatccatatttattacaaaaatttaaaaattatatatacaattaacattttaatgtaaagaaaataatacatataataaaattatattttaaaacttaatagatcaaatgtatattctgttcttatataaaattttttttgttctacatacaatttaaaacaaaatttaataattttttatacatacaatttttttcttcctttaaatttgttatttgttaatttatttattttaatttgttgttggagacataaataacaataattattttattttattgctagttatgtgaaaaaaaaaattgtttttcataaataataaataatttagtttaaaaagtaaccaatctaaaagaactgatccaatccacactgttgtggattgaattaaatttgagatattgtgcggattggattgaatccaaaatataaaatctgtacttaggtggtgtttggtttggtggaatggaatgataattgtaatggtaatagtaatgtaatggaataaaaattgtaatttgaattgattgttgtgtttggtttgttgttggaattaatatttgaatagataataaattgacaaaattatttctactttagtaagaaaaaatataaagtaagagtaagatagtcattttaagtaactgtaatgaggattcatgaggtataggagtgtaatcactttttatacaagtgatataatagtgattacaatagaatgtcattacaagactttaaaggcaaactaaatattagaatcgtaatcatgattccattacaatgttgattacaaacagtgatgtgatactgcaaatcgaatacactatgagcaaaataatgtaaatttgattggatgaacccctctatacaaatgtttgatgtaagcaaatgggattacctatatcagtctagatacttaactcaatgagcttatcttactaataggtaaagcaccttaatgattaatgaatttttaacaatcaagataattaggactttgaaggagttatgttttaaatatagataattatatatcacacatcatttcaaataaagattgacatttcaaataaaccaacaacggatcaattttatcaatttattgtgttgatttttgattaaattcggtgatctcttccagagggagcgattatggtaagaaatacccctacacacacataaggtacaatcctgatcattcaagatcatgtattacagtaaaatatttaatcattaataaatctttaaagttcgtatgcgaatgtatctttataaaactctggttgatatattggcccaacagagacaaaaaaattacacaaagcatctcaatataaatgatcaccagaaacgccccaaatgaaataatggttaaaaggcaataaataatggttttgagagactatttaatggtatttgaaaatcataaatttgaacgcaccaaatgaaaaatcagactcgaggcacaaaaatcagcatgatgcctcataatacagatcatattcaatgatgaagagtataaaaatcattatgaaagtacataaacctctttatctttgcctcctaaatcatcccaaacaagagcaatgtaaactatttcatttgtgttgccgcatattaaacagccagaataagctttctactataaacttttcatttaaataataattgtactttatttaaaagaaaaaaaaaatcaaaatgaaaacaacacacaggatgtcagcaagtagcaactatgaactaacagagaaatgaaaattgccataacggcaaaatcacatatttgatattcttttttattctttcctattggcttagctcatttccgaaacatagtaaaaaaaaacattacatctttatggaaaacgtccacaaccaaaacaacaatcaaaaacccaacaatttttttaacagtcagagctgttactttagttttttttttttt

SEQ ID NO: 385002 - DNA, 2199 bp, Cannabis indica
aagaaaatcctagtaaaaatgaatataaatctccttctcctttagtggtaatgtgataaatataatgtctacagattgctaaagagcatggtgggattgtaagatttctccaagtttcttgtttggggtcatctgcttcatcaccgtcaagactgctaagagctaaggctgctgcagaagaggctgtaatgagagaaatgcctgaggtggagattcatgataaacttgttttttcatgatcgatacgtatgtattcaaatttgtgatttttggtcaataatatctttcctaatttttgtaacaggctacaattctgaaatctgctgcattggttggcacagaggatagacttttaaaccggtgggcagaatttgctaagaagtatagctttcttcccctcattggaggtggatctaccaggtacgtgtttaatgtaacaatatggatatacttactacttttaaagtacatatccattatgacttggatacttatgtgtgtatttttcaatgaattattttcagaattcaacctgtatatgtcgttgacgttgctgctgcaattattgctgccttgaaagacgatggtgccagtatgggaaaagtttacgaacttggtggcccagagatctttacagtgcgcgaattggtaattactcatcttcttctctaccatatgttgcattccattattggttttttcttttttactcagttaatgaaatgcaggcagagcttatgtttgagacgattcgtgaatatcctcgctacgtaacacttcctgttcctattgcaaaggtaaacaaacacataacctgttgataaatatcaaacataacttcatattttaccaccacaagaaaatacaatatagatttttctcattatatgactattttctttgttttataatcacaggccatggcaatgccacgagatatattggttaacaaggttcccttcccgttacccaatccggagatcttcaacctagatcagatcattgctcaaacctcagatacactagtgtctgaaaacggtaatagcaataatatttagtttttttttgctctttaatctcagctgattttcccaaattccaattatgatattgttgttctgcagctttgactttcaatgaccttggactcatgccacataagttgaagggataccctattgaatttcttgcctgctatcgtaagggcggtccacaattcggttctacaatcagtgaaaaagtgtctgcagattggccatgatatcccaaaggtcattttcttgtttgttgaagagtgttaccgagttggaaacgttgaatcaggttcgggtgcaagaattttgtttcattctctctaatcttttgagccaattagaggagagaataatactatctaatactataatgaaaatcataattttgtgtcttttaatttgctaacaattttgtcattggcgaaacaggttttcaacaagggggcattttagaaaagtaggaaagcaataaagagataaggttcatatggaaaatggttcttcagttatttttctgacttgtataatttgtgaagtactgcctatttgtaattttttttctttctaaaaagtgctaaattttcatttttggctcgatcgttcataagccccgagtaatggagggaaccttgaaattgttttctcattttccttaaattttagcatctgttatcatgtttggaattcaactcttcatttctgttcttcagcttcagtcattttattttcaggtcttcactctcatatccctctttgaaactttaaacttgaataaagcaaagaaaaccagcttagaacttatatttatatcaaatggttagtttcaaattatcttatatttttcacatatttaggcagtcgttcttgacatcttgtgtcctcttcaagtgattggtgtacaattttcaaggattacgagcaacatcacgagttatgtgtgcctacgaactagggagagcgaccgaaccagctcgggataccttacccaaaattttaatcttctaaatttaggaataggaatagctaactttgtaagtaaaatagcagattctaagagggcttcagtgttttcagacctataattataattattccaataaaaaccgtgtaaaaaggtaatggaattgatccaaaaaaaaagaagaatttcagtcaatgtaagagt

SEQ ID NO: 385003 - DNA, 1402 bp, Cannabis indica
atttcgtggatgttccgatacgctaattaaagaacaagagcttttatcatacgacacctcaatctttgacaaattttttacagtccaacatttacgaatcttgcctacctaaagacgaccctttaattgtgttaaccacgttaccagattgtcaacccaactaattcaagatagatgttggaagaacatacatcacccaaagacttgcatggagccatgcaaaaagagttgcccttcgatgacaacgaaccaaaaggaagagaaaagtaaagagtccttttatcatgcacatagtttgcacatggctcattcctgtgacacttttaagtgattcagttactttcataaagcattgacaatagataaaaattctttattaaaatcctttccaatcaacttactcaattctttttcgattttctataattggtatacaattaatattaaagtccccacgcatttggcttttccttttccacctaaatgatccgcacaaaatctagcattgatggcacgtttctcatccgatttgaacaccatgccagacgaacgagaaccaccgtctttgtaaacgaacacaaagagttatcatacttagtcccacgagaccctaactccccttgacgagccaacttctaagccaccaccttcctcaatagtgatagctttaatacatttttttttcaaaaccacttgctggccacactcacgtaatgggtatcccaagatccctcaattaacatacatatccagcagtcggtcatacggaatcgtcatgaacaaatctgcttccccattgatgagagtttcctttgttaagaaatgaagtggtaactagtgacaagttaccaattccatttagtagcttttatccaagtcagcttctcacaggtcattattgagaaattacctacaattccagaattataggaggcatcttttttgttttacctttttagggaatattctcttttattgtaacacattgtaatcagttaatgaggtgtacctcttctagaatattcttgtatttcattatataagttaatgaaattgtcaaggatcttggagctgaattttcttattacctattttgtgtaaatcttcacttggtatcaaagcccttttcggctatgtcgactggtgaacaaactcctcgtggtgttgcttagagagactgtttagctccaatggctagcaatcaacaagcctctgctcaaattgtagcaagcttcactcagggacaatcatctggtgtagttatcccttagtttgggagtacattgataactctaggaattagagttattttcacatttttttttaacaaaaattggcttagctcttaagtttttaattaatttagtaagtttttaattatttttgaatttattagctttat

SEQ ID NO: 385004 - DNA, 814 bp, Cannabis indica
cataggatttaaatgccaattactaccctccactaactctactctagtctactgtacctaccacaaatttgaggactaaattgtcatttgcttaacttgtgataagaaactcaaacaccacaatcacacagcacgtatgtattgatatttgggtagcggaggattctatcctctttctcttcaacttcaacctctatctttctttctctcaaaatctctacttagacaaacatacataccactctgtaatctcttctctttttttttttctctttttctcagaggacattctttttctggcttttacaaatatacccaggtatgatctatccctttctaaaagtttctttcattttcatggaccatagttttttctgattttctcacacgtacgcaaattttgcgtctctggcagtgtttatatagactaggttgatttatgagtttcttagaaattatgctagctgttacatgagttatcactgatatttgttgtgtttgtaattcgaagtctcgacaccaacatgtttttctaagattgtgtttggtttccaattttctaaaagtattcctcactatgacatctcacggtttagtttgtttacaatattcaacgtggattataaatttataaacttgactagctagatggattcttttctattattgctgtacttgtggatcttatattttaatgaaatttatgttcattaaaacaaattaattgtgtgttattagtaatgaaatctaattctatattttgttgtattttgaaaagtggaatgaccttccagaagaaggttagattatttgc

SEQ ID NO: 385005 - DNA, 1620 bp, Cannabis indica
attctttaaaaactattatattatactatatagaacacgataattaattagatcaatagtaatattgacacgtaggagggtacttgacaccgctaatggcttttaattagcatttctctttttgttttgatcatatgcaaatggcgtgctcttttaattattattttttatttaagcgtttacatattatattgtataagctggggctcgaatccaggacctccaacacatacacacctcctatagacgcgctcttttaattagaaccatacgtaaccaatcaaaattgaaaacagaagaactagacatacatatatgtagtcaaaaatcaagtagtgcggtgtcttttattaacaatttcttttgtgttgattgttaatcacaaaatcaatatcagtacctttcaagcatgccaatctttcgagtggtaagtaaaaatgcgattatatatattaatatacaaaaaatatctaaaagcatatatatgtgtttatatatatatataaactgtacaaaaattattgtgggcacataaaaaaacgcaacgacctaccggtgtagccaaaagtcagtgactgaaatttgcataatcgaagccgttttgtgatcgagagttcttttcattgccctctaaaggccaaattggagagatagcgatataaaaattccagtgtacagaattatatgcaatgtcattctttcgttcttaacccctaaaatgaactataaaaatatattatatttataataatccattagtattaataataatggctttttcatcaaccaaaagccactgataaagagagattaattcagtcgttgaccgatccatatgccatgtaaaaggaaaaaaatacatttactggcctttaaatttaagatttttatgttttacatacacacattataactttgaaaaaaaaaaacatgatgtgaatacatagtaatgttactatcattatttttttctttgaaacaaagtaagaagataaaactattaattgtttggataagtattaagagtagtactggtagaagtgtatagaaccataataaaaagatcgaagatgaaaagtacacggaaccaacagtaggagtagtacaataagttaactacttttagtttcgagtcaaaattacatttaatttgaatgacatttgtatttattgtaaaagtaacatttacttgtttcgttttgtgccagcttacacatgtaagtgttagaaactgattatcagttattctgtttaggctttagtttagttagttaattcctagctaattctggtttagcttctttggtctttgtataaaagggctttcttgccctctttcattttgcaacaatttcatttttacggtaataaaataaatagattgctttaaaataacaattaaatgttagatttttatttgtgattatacactaatttttattgattttaataaaatatgagttaattggataaaaaattttttgttgtgttagtcataattaattagcttagtatctatatatataaagtctaattaaaacaaaagtatgagagtttctagtgatgagctttccaatttaactttataaatacatattatcatttcatcacaactgtaca

SEQ ID NO: 385006 - DNA, 3027 bp, Cannabis indica
gattcattgcattacctcaagttcaagttcatcattgacatcttcttcttcttcttactttgattagtcaagagtagtgaaaaacgagcaaatccaaacttctttctcttacaagaaaattgcttgttacaattttctttctcaggtctcaaagaagatggtatatcaccattttgtttaccaagcatttgacccaatgaaacctttggttttccagaaccttttccagacaatcccatttcaagctcttcgggcagcagcagcttcctgcttagaatttgtccaattgacaatgttggcttcaaaacaggttttgacccatcagtcaccatgtgtagtccattcacatcgaggagacgtgaatctcttcggtggtgagacgggtgagagttcttaaaatttggttgagttatgaaccgaagagcgtcttctttgaccatgttcggatctccatctgcgtagagcttcttcaactgctagtttccctctgtttgctgcttccactctgctcagagcttcttccagtgtcttttgctggttctgacttcttcagttgcctcttctacctttttcaaaatatccattttcgaaatgtttgcatcatcaacttgattcatagcatccactactctcttcttggacagttcttcagcctctcgagctttgcagatcagtgacgaatactcctcgtatgtaagagtaattccttgattttgagaaaaatctccacctccagacaagccatcaggatatgacatagctttaatctctgcaagagcaacagcttcagctgctctagcagcctccttcattttcctggctgcaatcaacctaatttcagctgtttttatcttagttttcgtctgttcaatctcctgtgttgctctcaaaacctctgatctagcagcttctcccatttgcttgaactgatcaacctcaaaactcaacctttgaagctccttcgaaatatctgatgggctatcagaaacacatctactttcagcatccttcaccaattgcaacttcactttcgtttggttaagctcttcttcaagcgataatatcttcgaagaattctgagttaatctctcacgcgttttctcaagcgaaagtctttctttctccaacttcttgttgaaaacatcaacagaaaatcgaatatcagcaagatcagttgtagtccgagtaagattcagctttgcctgtttcaattccattaagatcaaacccggggctgatgaagggcaggtggtgtttatgctttccacaggagcacaaaaatttccctcatccccacgattttccttatctgcttcattcacattcttgtcagctgcattagcctgaagagctagattgacttcagcagcttctttctgtagcttttgcttcaactcttccatattcattctagtcttctccaaatctttcaaaacatccaaggtttccctttctttgatgattaaatctttctccaaatgcaatgcctgctcctctaattttgttatatcaagctcttccaccacctcatactgacattaacagaacacaaaaaagtcaagtaatgttaaacaacaaacatagtttcactccaaaatttatacatataaactgaatttacttagtactacacatttataggaaccccactttcatcaatggtggaaatgaagctcaaaattcataaagttcataaatttaaactcaaagaaacaatcccatttgatcatttctcacattaaaggtatcattcattactttaaattctttattaaaaaacagagagaaagtgaaagagaaagagaacctcatgatgttgttgagaaagcttagaagaatgagagggtttccagtaaccaattccaccaaaacgacttacggcttctttcaccgattcaaacggagccgaagtatcgatctccgctctcttcctcaaacccttatcggtctcagaactgttcttcctgtctaacctcattttcgaacccgaatcattcaaaacattactctgatcaagctccattacattcgaattcatctccactatttcacccaacacccctcgagatccagaatctagggtttccgtcattgtagccaaaaataaaaacttcacctttacactgtcacgaccctaaacaaaaaaacaccaagatacgcctagttctgtagctctacaatggagatttacactaacaaaaacaccattaacgattcacaaagctaaaatgaagtacaacactaccacaatgtagagagacacaaacccatttttgagaattttctaacagagcgagcttcagctatggagtgttggtgataataaggcttgtatttattaaaatcccgaaactacccctaatcaacggtcgaaatatgccgagggtaaagtggtaaattaagggttttaagtactgagtctgagcccaaaatgggaaaattaataaaaaaagaaagaaggctctgtttgtttgttttggcttagcttagtactttggagtttggattattgtttaatataataattaaaaattaattaattataattttgggtttcaacggaaacatttgaatgggccttaaagggcccagtaatgatgaaaaagttgggggtgttgtggtccactagtgggtttgggccgttgggacttgggaattgggaacctaacacaactgaaaaagttactctttgaataggacaatttttatatatttttattattttattatttttttatttttttttactgtgtttatgtactatattgaattttgaaaaggaaatcttctcttctcgtactaataaatgtgcagttttaatgtttataaatggtaaacttagtaatcatgattggtcactcatgatcatcaacagagaaaaacaaatggaccatatgatatgagagagtaggttttttttaggtaaaaataataattgaataatttgcggtataaatcttaaatttaatttttggttgtaaataattaattatgtttaatttttaacggtaataatacttaagttat

SEQ ID NO: 385007 - DNA, 2296 bp, Cannabis indica
agttgattagaatttttttttgaattttgaaatatagtaaattatattcttaaattttttaagttgttaaaattactagattgatcaataacttatagttatccttgtttaattttacaaatgtatcgatttttcatatattaaattgtgtcttttaaactttaataggtactactctttttgaactttcatcaacatcagatttctgttagaaaatttagacagcgtttttaaattcaacaatctcaatagtttaagaataaattttttaaaaaaattaaaagcataatttaataaatattaaaatttaaaagaaaaatctaattaagttaataatattgatgagaagagtcccttaatatttacatgaaaaatgaactgtaatatgtataaatgtaggtccaaattaacaagtatatatatcaattaatattgaagatatatatataattcagtacccaacaattagtgggacatatgaatttttattattgattgactaggaaacatatgtactaattcacactactctttcacttatttatttatgttttattatttttccaaattttctagagcttactaagagacagcaagataaaaataataaaatgttatttatattttatatatatatatgttaataaataatcccttttattccaagaacaatctctatctaggaattcaaaaaaaaaaagaacaatccctatctattatttacttcaaacttcaaagttgacaacacattctaaatttctaagtatatagtattataacttttaggaaaaaagaatagcattgtgtaaatacaaatcaattataattataacttaataattatatatactctgaattgtgtttggtggcctaatttaattgagcattgctattaagtaccagtaatgcttaatactttctcgacatgtcgcattgcaattagatagcgatacttcttaaaagttattatattaaattatatgggacccgatacttaattggaccaatagcgatattaacatataagaaggtgctaacccttagcatttctcaatttaatttccctatttctattttcaacaatatctagatgttagtaaactgcaacgatattaattactagttcttaattagttttttttacatgttaactttcattaattaattgtgaaatgagtagtgaacaggagttacaaggaaggtaaaaatttgctcatcatctaatccaatgtctaatctagcataattagagaataataattaaccattctttttagatatgttactatgaattacattcaattattttaaatttcaactagagagtttttctacgttgggtaataataaacatagcacgtgtttatgatagggattattgttttgtccttatagtatggaagtttttatagcaataaataataaaattagtgtaagataatagttaatatttaacttgtattggattatttattatattattttaataatatttaataaataaatatttatttataaaatacaattaaatattatttttctctcttcttctctcttttctcttgattatctctatttacactcttttttaaggagtcattgactgactatatttttttttttttttttttttttagtaaaatgactatatgttaatattaatgttaatcccaacatactgttcaataaacttaataaaattaatacgtgaaaaaaaaaaaatatttattttatctctctgcattaaaaataagttattaagactagtaaaaaaaaatagttttttatctaattgcatttcatactattcagcactcttaataacattaacacaatctaaaatcaatagttttaaagagtaaacgtaagaaagcaaaagcttcaatcatctatttgttctatgaaatgcaattagaaaaagaagctatttttttataaaactttaatgactttttttttttataatggggagataaaataaagagagataacagattaaggtgcatttaattaattgaaattatttgtcctatttctctatcccacaaataaaattggagaaaatggaaaatgagggagatggtgatgtgatatgggataatgtagaaactttatcgaggcaaaaaccagaaaagaaagaaacagagcaaatgcagagcaagaaaataacattgtcaagaaaagcttaacccaaaatggttagctttgatgtttatttatatgcctttacaaacagttacaagccgaagaaaaaacaaactaatgctaacaaataacggtcataacagaatgaagc

SEQ ID NO: 385008 - DNA, 2260 bp, Cannabis indica
atatggagttgtgattatgcttcagcagtctggttcgtagctgctggggaatcagacaaactcagcatgccgaaattgtgaggatggatggactggtttggatgcaataggaaaagacctgttgatctcagttttgatgactttatgacgggtgctttgtgcatttttgaggttatttggaaggcgtggaatgaagttattcatggcggccaaataatgcagatatctatggcaattcaaaatgctcgtgtgcgcttcaatgatcacttggattaccaagtaagaaactatcttacaccattgccaggatggatgacctgctacactgatgtgtccattggatctgatcactcttttggagcagcagtttttaaagactcaaaaaatcaaatctgtagcgtagttatagaccgattttctgttacggattcagctttggccgaggcattgatgctggtgtgtgcaaccaagcatgcagtgtgtttggaattcacttccgtgaattttttttgtgataatgaatgtgctgtggcagacatcttggaagcccacggagtacatcataacacaaatttagatggagtttctactcagtttagaatcatctttgcccagcttgtgaattgggaggtcaaaaatatcaataggaaggagaattttatggctcataatgctggaaagtgggcaaaactcaattcggctgttggggatattaatgtgaactccatggatccgaaggtgtttgaagactataaggagtggtgtcccgatgcagggtaggtgtcgactgatgtttcttctcaagttgcctggaagtttgctgtccttctgtggcgaattgggtgcttgggaatcctctttttattatgggtgtgttctttgtttgctgttttagtttgccagttcttagttgttagtttgtttgtgtttggttgttttggggggctgagccctcgagattacttgtgttgctttatgttaacttgtgtacttgcttgttttcttttcaatgaatgggtgctttgcactccactttcaacaaaaaaaaaaaaaatgaattaataaatatgattatttgattgatgagactcaataaataatctaatttattggagctcaatgttataggttcatggttcttgagttacctttataccatactattaagggtatgtatgtcacaaaataaaaaagaaagagaatttagtttacaagtgcgaaatagtaatatttattttataataaataattaaacacttttgtctggacaagataaggtgaagccactttgtctattaaaggtggtgcaccacaagtgtcttgctaggacaataggtggcgccacctacactgtgtaataacattgtaggctaccataaaaggtggctcaattgggtttgattttggaataatttattgattgaaaagttaaatatttatttaaatttaaatttaaaaggttgttatagatatttaatattgttgagatattctctcaatgtgattgagagattctctctattcggttgagatattctctcatatgattgagagattgtctcattcggttaggacaattatttaaatataaacatcttaattaattaaaatccaaataatagatctattggtcataattaattatagtggtataatcctaaatctatatgtatgatatatttaagaaatttaaaaaaaagttagttgtataattttctctccttctctattactgttcttgctcatgagttgagactaaaagcaaaaccaagttattttgggaatcctattagccctcactaatttttgagggagatccttgggatcagtacaataataattacataaatacataatttagtactgaaaaaccaacaaaactatgatcacactttcaactcatcaaaatgtgatctttgagtgatatttaagaacataattgttgtgttcttcaagagaggggtgacacacaaggaagggaagagaagtgagaatattagttttctaaattgacaacaatttgttatggaaatcagggttacccaaaacaagtctaccaaaggtcctatttatagaaaccaatagagtagagagcaagcaagacaattgcttccttcgtattggcctaggcgcctaacacaattcaaggactgtgtttgggcatcgccccactacaatccatggattgtggtgggctattttttttagggctcgtttgaaaagagctcgtttagaatgtcgtattaggtcgtattgtatt

SEQ ID NO: 385009 - DNA, 3931 bp, Cannabis indica
ataatatgcttatctctttttcttagcataatttaattattattaatttggtttcctagtctcggtaagtccttcatttcgtttgttttactaatgtgcttatctcttttccttagcaatttccgaaatcttaacagcccaaattaagcatatcattttatccaatccattatgccattttgtgcttaacaaacccactcactgattttcggtctactataccagaactcaatgcttccttttcccacaaacccctactccattctctctggaaattcactatggaactgagaaactgttgttaatctctgtacccttttctctcacttgaacacacatcaatggctgcttcattatcactaacaaaatctccattgccatcaaaatcctatcttggaaagatccttttgagattttcacccattcaaaaccgtcccaccattatccatgctagaaaacccttacccaactcaaatggactcttaaagttccattcttttggccgtttcagaccccttcttgcaaattctcattctccaagagtttcttcagaagggtttcttgatacagcagaggagaatgagaatatgccgtcgtttgaggaacggccactcaaatttgctttttgggtattgttttgggcttctttgtccttagtttggtttgcaacttctaaggatgcaaatgctgcagctgattcaattaaagcctcgagttttggcctgaaaattgctaataagcttagaagctcgggttggccagatgaggctgtggttttttcacttgcaactcttcctcttcttgagcttcgtggggctattcctgttggttactggttgcagcttcagcctgtggtgttaaccatattagcagttcttgggtgagtatgtgtgtaatgtattataagcattagtactattaggcacattaaagtgtcaacactataccaattgacatgttgtgaatggttatattatttattaaatcgaaatgtgtgtgatccgaaattgaattacagtgatgtcacctcttgaggtccttaaggtgcctgtactaatatgcttcttttcaagagcccattaataattttccccaagggatagtctagaaatctggtttaagacattattgatcattgccttctgtaattgcaaatgtatctttttgaagagagttttgtgcttataatttctgcataggagttagaacaatgctcataatctacattgtcttatatattgggacctttttcaatgaggcctttactgaaaggactaattgaaattttgttatgtccaaggctattttgtttagattatgatgtttgtggtgttggttttagcctctcaagccttaacctttgctggtgtgacatacacatactagctttaagatagtttagttaacattcttgtgaactagctgttagttaaaagattctgatagaagttagttatccttctcagccgagttctataaatactcaatctcattttatgtcaatgcattgattttgtaattcagaaaaacaatgagagtttgatcatgatttctctggtttgttttcatttgatttcttatctctgttcttgagagtgttatattatatgcactacaatgttgatgtttttcatttgtttattacattgtacattgacaaatgagttatctgatgagataaaacttaacaaatttgttgctgtaactgtaggaacatggtgcctgttcccttcattatgctttacctaaagaagttggcttcttttgctgcttcaagaaataagaccgtggctcgatttgtcaacattcttttcgagaatgctaaagcaaaggctggccctgtagaggagtttcaatggcttggacttatgctctttgtagctgtgccttttcctggaacaggagcttggactggagccttcatagcctctatccttgacatgccattctggtcagctctatctgcaaattttgttggtgttgtttttgctgggcttttggtaaatttgttggtgaatcttggtcttaaatatgcaattattactggtatcattctcttcttagtttccacattcatgtggactatccttagaagcattagaaagtccttaagttcttcaaattgacattgaattagcattgttatattagtgtagctcaacttctgaaacttgaattttgattatttcttatcttatttcagtgcagtgttttggtagaacccctagttttttagtatattttttttcatgattgtatacgttataataactatttaagaccacatgtaaatttttagaaaatttcgaataatttataatgccgtaaataagatttacttattttactgtacaccttactatttttttatacgtgtagtaagtaatcgtttaaacttattttagggactgtaaactattcggaattttttataaatgtacaagtggtcttaaatagctacaatatatgttatcatgaaaaaaaaaattagacttaaaagctctcttagataccgaaacagatataaagtctaccagaacgactatatagagatctattacagaaatttcctataattttaacttgtatattgttgttttttctctttctagtttatgttgtaattattttttacaatatttgatttttattattattatgttttattctaatattttgttgtaggtgtctcaaaaacttgagccacagagttttttggagtatctctatttatttatatgggtcaaaatatgatcaaactccataatgaaataataataattattgtgaaacacaactcagcaagaacaaatcacaatcaagaaaagcaatgtgacaagttaaacacagtcgataagaactaataaaacagagtaataaggaatcaaaataagagggaaacttacaaaaatactggaatttgggttaatttttacaaaaatactgtcacacggaaattttttcaaaaatactgtatttttataaaacaccagtaaaacacaaagcagaacaactcaaaacaacagtagaacactagtaaaacactattagaacaccagtgaaaacttaacacagtatagtgcagtatgaaacttataaaaaaatacagtaaaaaagtaaaaaatacagcctaacagtatttttataaaaaaatagcaaaacttagtatattatataaatttttcaaataagaacttgaacacagagattacgaggttcgaacaagagtgataatgagtcaacttgcctattccttgggccagaacagtcataagggcttgaagcctttattgagatgataacaatgaagattcacaaagtacaatccgtattccgtacacaatgagttgtacagtctatcgagaagcacaactttatttttgaactcactcgagacaatggtgatcaagtgaattcaatttaaattgtgttacttgaattaatcattgtcttaagtaagttgaacctacattgtgttacctgaattataaagtttaggccttttatataggcattaatggttccaacttggtcatcaactattgtaagagaccattggtttagttaggtttttacaaaaataataaattttaggcaaaaaattacaattatactatcacacggaattttttacaaaaatactgtctttttataaaataatcgtaaaataacaaaacagaacaattaaaataatagtggaacaactaaaaaacaacagtaaaaatttaacacagtacatagtataaaatttacacaatatttttgaaaaaaattccccctcacagtttaaaagtaaaaaatttataaatttcaatatgtggtgtaaaacctcctaaaaaggaacttacaaaagtaatggaatttaggttaacttttacaaaaataatatcacgtagatttttttaaaaaaatacagtgtttttataaaaca

SEQ ID NO: 385010 - DNA, 1107 bp, Cannabis indica
catagaaatatgtatggagatgaagatagtaattttacctcgtatagggtaatgggcaaaatataatagtataatcagcggaggcgcacgtgtaagtgctggttttgtcatcgtacgcgtagctatacgagcgtgggcaagcgtgtttgaagtagagcgaataaggagaaggtccacacgtgtcaggtgtagagtacgcctcactacaacagaagcggggatccccgaacgcttcacacgcgctcctacacgctacgctccctttgccattagcacgcgccactcgcaacgccgtcggacaagccccgtttaagtcgacgagacaaccggtggcgccgcatccacctcttgtacctcccttggggacgatcaacatcgggatgttgtacccgtcgactaagctgacgtcgtagaagtccaagccgtctgcgccgttaagagtgaactcagctagtgtagctggcggcttggccccggctccttcacactccagcttgcctgagccgcagtccccggcgatgcaagtgaatttcccggttgagtcgtggccgcaatgggtccgagcccatagacgacccgaccacgctctgggtatgcgtaaggtccgggattcgccgctgtggagaacgaagccggtggtggggagtggagctgagttggcaccagatagcaagccgggccatatggtgttccggcatttgtttactaatttgaacgtcgttgactctatctctgcaaccacaaaaagaacaaagtaagaattgggttagcgggtaatcgtagaacagaaaattaaagtgataatcttggtgggtaattacctaagacgaaagagaaagtgaggagtgtgagaagtgacccggtaagaatgatccgatccataattgaaggaagagtaaggttgtaagagttcagagaaagagtttaagagtaggagaagaagtggaagaagaagaaaagagaaatattttaaagttgaattagaatcgaaagaactttacttttcttttgtccagagaggagtgtatttgagctccgattacctttccgaaataatttttattcaattattgtttgttataataaattatttaatatttataaaaa

SEQ ID NO: 385011 - DNA, 1320 bp, Cannabis indica
agccattatgaaggcctgtacgaggttgtccaacaaagctggagcccttttctgcagtccatgcaaggtcattcaaattacaagattatatgtatatgtactaattcataatagatggtaactatatagatcgtcaacacaattttaattttaggggttaaaaataaggaaaagagcaaattatttatacaaaatttcctaaaacctcaattcatctaaataaaacctctcaacgttttgtaacaaacactgctgtgggtagtctctcaaaaagttcacattattcattggaaatataaaaagtttgttacctcaaacacgccgtggccaataaactggcctatccaacacacaatttgagtaatcagaacaacctaaaagaaacaaatccacattattcatatcaaactctgattataatactttataagaatagcgaatccaaaattgaaaagtatttttatataccttccaagtgagagaaaatccaagaacttgagcgagaaaactgcttaaaatccaagcagtcatacaaagaagagcagccaaagagccagatttgacttccaaagctatgtaaaacagcgaataaataatagctataagaaacccaaaatttagaatcagaaaacaatgaatctcaaaaatggacaactcgatttgaggtaggttaaagaaagagggagtgaaatagaggattaagagagccgtaaagaagataggccacacaagtaacatgtgaatggctatgttgattgggttgtggtggtaagctccatagaaagaaaattgcttttccagatccaatatacccatctttactattatgatttttccttaaaagaaaaaagaaaatgggaatgatttgatttccccaccaaatcgggtgcttttttcggaaactggttctggggatggaaaaaaaaaatgggtgtttcagttagactgcgtgagaaacaaagaagaaacatgtggacgaacttattaaaattgtaataatattaattatttcttcaattatttagtcaactcattaattattttattaacctgaaatatatatgtttaacttatatttaattattttctactgctcggtattttgatctcctagctgcctttactatggtttctctctaggctttcttcctacctctgctaaggttgggtcttctctccaactaaggctcgccgaccattcttggggctttgttgtggccatggtcgggggatattgatggtgctctctggtggtgagagtttatgaaggaccggtcgtttccttatttgtctaagttcttggtgttggaaattatttta

SEQ ID NO: 385012 - DNA, 1288 bp, Cannabis indica
tgatttaaagtgaggtgctcgggagtagaatcatcgagtacacatctgctgattctaacataaaaaacttttaagtcgagccacggtaatgataccttgtgtttataagggtgatgactatcaggcaagaatccattatcagatggtctgtgtccatctgaactttcatgtgaattttccataatctcaacaacttccttccacctcaatcaagttgatgacataaattatataccataccattacaatagggctcaatcctacatcaaagtcaatgaaatcaaattgcatctagatacaatgcaatttagacactaaataacaaagaggtccatgaggtaggaatcgtctccaaatattcaacatatatagggagcttttcaggtgagtacatcacttttgctcctattgtaggtgcgttttctattttttcatactttatatcccaatttttttacatgacgttgtatattgtagttgtaatgctaattctctctgttttcgagaaattctaatactttacagtgttgaaaataaaatttaaaatagtctatgacacacacataaaaccaaataagcatacaagcaactgaatgtttgaaccctattttcgacactctaaattattcagaattttccaaaaacaaattggaaatcataacgtacaccatcatataaaaaaattaatttataatttctctaagcaaaattgatgttctcaccaaagaattatcatataaatatatgtatataaattctaatactatccttaccaccacccattggacaatgtcacaacaaagaagttcttaattctcaaattctctcctactaataataaccccttaattaggttgaactcagcaaatatttgataattatcatataattaaaataatggtaatacaaatttgaatttaaatctaattctctaataaaaaaatatcccaactgaaatcaattgaattaaattcaactaaaaaagaaaaactcacaaatcgatgaaaagaattaggcagtcggggaaaccagttgtttccagcgtccaaacgaatcttcgaaactgaaaattaacataaatcaatgagctttccatggataaaaagcccccaaaggtaacctaaactcttagaacaaacaaaggagtgagagagaaaggggaatgaagaagaagaaaaaaacaacctttgatttaggaattgaggttagatgattccgtggtttagagaggcagagctagagagagagagagagagagagagagagagagagagagagagtagtagta

SEQ ID NO: 385013 - DNA, 1619 bp, Cannabis indica
aagttttgagcttgtgttttatgtttgatgttcttgtgttggtttagatagatgttggtaggaattgaagtgaaaatagttggtttttatggtgattaagcttgtagatttttgagttatgcatatctagacttcttttttgagaattttagagtcaaaattgtgatttaatttctgaatatatactttgaattttctgcatgttttatgctgtctttaagctttgtgctcatgcttgtgaaatggaagattatgttggttttggctcaaagtttgttgctagttttgattcttgtagaacttgtgtaatttgcataatttgatgtggttaagagcttttttggtgttcttaaaattttgttattgatggatgtggttagagaaatatgtatgtgaatagtgcatgccttgttggggttttgttttgagttaggtgcaaattcgagttaaatgaaattggtattttctgggtgttcaacccaggtgccgcggcatgggctgtgagtgccgcagcccgcctattggtgtttttgggtttccaacccagatgccacgacatgggctttgcatgttgcggcccgcttggggttttcaggtcagtttggatgtaaaacttgttttgtttatatctttttagttcgaactccgttttggacgttccaattatcattggaaagctcgttttgagctctatatgtttatgcataattaaaatgccaattatatgattatgtgaaagtagatttgggggttaatcctatttgtgaaatctcgagaatttgtgactaggactaccgaaacttgctcaggagcacctagggatttggaatctccatatacttgggataccaggtaagacagtagttagcacgtagggttaagcgcagtggtgctcatatttgatattatgattgtaactaaatgtggaaccttggattatgtttattaccctaaagtgagcggttatatagcctagggttattaccctagtatttaagtagttttgtgtataatgccatactttatatgttgaaatgaagaattatgtgttcaaggcataattaggttacactcagtaattagaactgagataaactattctaaggccttattgtaaatagacgtgtgagcgtaacacgtgggtctatgccatatggacataaataggtgtgtgagctaacacgcatgtctatgtcaaatagacaataagtgcagtggcatcaatgattatgtgatatttatttattgtgtattttggtatttttactgtctccttgggcttggctctcaggtgctctattgtacaggaaaggataaatatgtttgtaatcagccatgagttcgagggcttggcggtagatgatacatgttcgggccatactaagaccaagcgggttgggtctactagtggatgtattttgttctcttggattttgccgcctaggtcggcatgtaaagaaacttgtaatattttacaaaaattttatgggatatcgaaacacattatctttctagaatggtagtaaagtttaaataattacaagttatattttacactgtactggatttaaagtttaaaaaaatttcccgctcttatttctagtaatcctggtttagcg

SEQ ID NO: 385014 - DNA, 1279 bp, Cannabis indica
atcatcaaggcttatgtgaaaagattgccagcagtttgattcagaaaatcaaggttgaaattttgtggtatttagtcctctaaatcaaactaatactaactcacctacacttaactaagttatgttacctagttagttggtgttgttattgcacctagtttcaagttgtgagttgtgtctatttatagctcgttcttttcacttctaaggtagagattacagagagagtttatgagattaagtgcttaggtttctgagatgtgaaatcatgttcttgaagggtcaagaattgagggtgtactcgggtagtggttgagaaactgtgattgtttctctggtgtgtttctcaagtgtagaagagcattgttgctctgatattagtgcttgtatctactctcttattctccatattaatgaaagcaagatggtgtttctttactggagtatggccagggatcaaccttgatctctaggacaggaaccaggataaaacttgttgtcttctcccttgttcaattctgttatattacattgtgtttgttttgttattgttgttcttgttaacagtttagtgcaagttttgaagttacattcttagtgttattgttgccaattttacaacatatggtataacaccaaatatagtattatgattggagatagtttcaacatttctttttgaagaaaatgcttcattaaaatttaaaatgcaattctaataaattctctccataatttgtaacagacttaattagtgcatgggttacactattaacacgaaattgcaactaataaattaaaaacatcactaataattgaactaaataaataattagaatttggattgttaacccaaagtatcataattgttgaatcacactccactctaattaatgaacctcacgacctactaaagatcccaacctcacttgaagcaacttagtagcagccactgaaaacccacctcgaattcccccggcccacaaagcccacactatcccttccgatcccgaataacacctctcagcctgacactcacgactagcaactaccgaggcaacgaaccaccgatggcggccttcatcgctccccaccttatactccaagaattaatacttttgctgacactattttgtgtcagcaaaagtcttctgtttgcactgggaaagctttgtcaacacaatttggtgctggtaatacctctttggctataattaatggtgttacttgatgtaattcttttgtttaatttaatgagaatacttctcctttcaaaaaa

SEQ ID NO: 385015 - DNA, 1550 bp, Cannabis indica
tgatagatgagttgtttgatcaatttgaaggttcaaatttcttttgaaagaatgacttgaggttacgctatcgtcacttaaggattagagaataagatatcccaaagactgctttcaaaacacgttatggacactttgagttttttgtgatgacatttgaattaacgaatgcacctactgtatttatgaatctcgtgaatagagtctttagacttactggataagtttgtagtgatattcattgatgatatcttggtgtattctaaaatacgtaagtattatgctgaacacttacacaccttgagggatcatcattcatatgctaaaaaagagaagtgtgacttttggatgactgagatcaaattcttaagacatgtaatctctcacgatggtatcactgcaaattctacaaaagtagactctattatatactatagaatgtaccaaaaaatgttactaacgtttcaagtttctttgggttagtagggtactattgtcgctatgtggagaatttatttctgattgtgaatattgaaataataaataattgtgtgcttctaccatggtcataattgatcaagaaatatttaactgatatagtaatgtcaatttttgatatatatatacttttgtatatacttaattgatgtacatatacattaatgtccacaattttatgacttactctcacttaagttttaacttttttaagactctatatacattaatgtctatagtttctacataaaaatttaaggtctattatactacaagatactcttattagaaaaactaagtttataaattatatgatatagtccaaaaataaaacataatttataaaaaatctcaagattcacaacttccacaaaataataataatagcctctatactgtgaaataagttaaaaataattgtaaattgatgaatagaagtacaccggcgcaaagagcgacaacaataatatagtatttccaaactcttgttatttgatgttcagtgtccacccatgaaaacaaagatactttttgctgtgagtatatttcgctgcaaataatttcactacatttttatagtgacaattgacaatattctttaaaataattccgttatattcttgttgtgacaacaaatattgatctccaagtagtcaattaacactctaaaattatataatgacatactatttaacattcaatttttatccttcaaaacaaaaagtgtaatttatatatgtatgtttatatatacaaatataattatacgattcttcttaaaagaaattacaaagagaaatatatacaatccataatacactaaaaataacatgatagaaaaacctttctttcaattatagatttagattaataaaatttgtttaaatacgtggggacttgataacatttttttatgtagcatagtttaaaatattttgttttaaaaatagttaaaagtatggatttgaattttataatagatagattttttttttaaaaaaacgtcatatataaatttagagtgatatttcatctattaatttttttttttt

SEQ ID NO: 385016 - DNA, 4367 bp, Cannabis indica
ttgagactggagagcattgatggtggtatgtatttgagttgaatcatcccctgtaatcagaatatcgtcaacgtacactaataacaagagaagagaattttggtgttgcaaaataaacttgtgtctgacttggaattgtgaaatccccacttaagagagcatctttgagggtgtcaaaccaggcacgaggggcctgtttgagaccgtagatcgctttattaagcttacacacatgattagggaattgtgggttgatgaaccccgggggttgagtcatgtacaccgtttcttgaagatcgccatgcaagaaagcattattgatatccacttgttggatatcccagttgtgtgtggctgccagtgtaaacatgatgcgaatagtacatggtttaatgacaggactgtaggtctcaaagaagtcaataccgggagtttgctgaaaacctttggcaaccaacctggatttgtgtcgttcgactgagccatcagagttgtatttaattctgtgtatccatttgcagctgactattggggtgtctggtggctttggaactaatacccaagtgttgtttcgggtgagagcttgcatctcaagttgcatagatgggttccatataggactggccaaggcagctttgatgttagttggttcagattcaggggtggacgtggtgagatatatttttggtttaaaaataccaacctttgatcgagtcaccatgagtgtaggttgcggggttgtgtaacagggggagggattggattactggactgaggagatgcagtagatgcagaaatggactcagtgatggagtgagtactggtgtgggtagtttgaggagactgttgtgtgatattatgggtagaatgggaatcctgggagtggtttgggggtgtagtgaatgtagggacacgatatgcattgatgtctaggaatgtggagggaggaggagttgtttcagattgggagggaaataattgattataggggaatttattttcgttaaaagtgacactcctagccatgtagatacggccactgctatgaagacacctataaccttttgaagatggacaatagcctaagaagagacatttggatgacctaaaggcaactttgtggttttcatatggtcggagtaatgggaagcaggagcagccaaataccttgagaagattgtagtcaggggcatgtttaaacaacttctcataaggtgtttggtagttaagattggggacaggcagcctattgatcaaataggctgctgagctgtaagcttcccaccaaaagtgaaggggcatgttggcttgggcaagaagggtgagacctatgtccactacatgtctatgttttctctcaacacgcccttgttgttgatgagtgtgaggacatgaatttctcttgacaattccaagaatggtgaacatcttgtacagtggttcatattctttgccaaggtcaatttgcacacttttaattttgtgttggaacactctttcaacataagtattaaagtgagtgaacaacatggtggcttcggatttatttttcatgggaaagagccacacatatctaatgaaatcatccacaaagctaagataatacttatatccatcacgagaaggataaaaagaagggccccatacatctgaaaaaattaattcgaaaggcatagaagttttgttttctgtttgtttaaaagaaaattgatgcagcttgccaatttggcatgcctcacagaaaggtacattgttacacttagtgtttggagacacttttgacagcactttagctaaaatgttactcgaaggatgtcctaatcgacagtgccaaacagaagctgtcttggacttgtcttggacaggattactcgaagtggtatggttgtatgctgagggattgactggtgcaagattgggctgttgttgagactttgaagtggggacttgaagtctgtatagaccttcagttagggtaccccgaagaacagcttgcttcgttgtcttgtccttgataagacatgaaacatcatcaaattcaatggttacatgattatgcttggtgaattgagaaatactaagcagatttttagtgagacttgggacatgtaaaatgtcttttaaaactaatgactgatggggaaaatgggtgggaattgaagtgctgccaattttattgatagaaaggttagaaccattaccaactacaactttagccttgcctttatagtctgttgaggtgttcatattgtctgttgtgttggttatgtggtgagttgccccactgtccaagaaccaagctctagatgtatcttgtgcagtgactgtttcagacagattggcttgtggtgtttcagatggagaaaaagatgaagaggatgatccttgaggttgtgtagggccagtaaacgttatgtctaatctgtgataacacttcagtccagtgtgtccagctctgccacataattggcaaattggcctgttgcctcttccccctcgatttccttgatttcctcgacctcctctgcaaccacgatgaccacgccctgaatttccttggtagccgcctcgattgtaaggattcatattggtgttggcaagattggcttgtacatgaattgaacctcttgaagagtaggattgtctgtgcgagaggtgagattgaccactacagcttcatactcagatccaagacctccaagtatgtaaagaatcaaatcttcattagacaggggttggtttgcagcaactaaagcatctgcatattgcttcattttcaagaagtattcatcgatcgacattgatcctttctttgtggattgcaagaggccacgaatttgaagtagtcttgctctggatcttgttgcaaacagttgattcaagattgtccagatctcggccgatgtttggcaatttatcacatgagcaagaatagcctcagatattgaattcattaaccaatgcataaggaattgatcaaggcgaagccattgattgaaggtgggattaggagcattacctgcaagtgttcttggtggttggggaattgttccaagcaggtgaccatccagattataggctcgaactgcagcaagaactagagacctccatagagtgtagtttgatctgtcgagtcttaagttcagtgggagaaaattgttgtttggtagtgcgactggtgcaacttcttgagcttcattgggttgtgtattttcaggcacttctggtcgaccggaggccatggctctgataccatacaagaactctttgagcagaggacttgaccagaagacagagagaaatgaagatgaaagtgaaaagggagaaagtgaacaatggagaatgaaaagctcaacttgactcagttgaggaaagaccttgatatttataatatggtttggtcagagaccttacaacaaacttgtgtaacagaaaatgacagctgtacaagaacttaacagaacaacagtaaaactgttttgtgatgatacaactgagcccgaatgcccgacattagttgctcttgatgataacaaaggcttaagcaatcaaactaatgaaagaagaccatccaagagatcaacatactttgggaaaattttggtgtacaccaaaaaacaatgggagaagaaaatgaagtgcatgtaatcttcagttagattcagataaagtagtctcagaatcttttttggtggtgatcaatgatcaattgtgagagcttgagagctctgttctaaaatggaaggaagattaatagtaatgcgcctcgtctattttcattgttgttattatttattatatgtatttttatcttttaggagtgccaatttatcatcaatcataattcatggatatgaaaaatgtatagttttgtagtatttgatgtatctcagcactaaatagtggactcttggattgatttgcatgcatatatataattttgtacagtttgattttgttgcaagttgaatggttatagttaaaatatgtttacaaatttaagaatatgtcgttagttaaattaatttcatatatttaatgttcaggtttgaatgtctacaccaaatcaagaagagaaaacattaacaacaacaagaagaataaaattaaaacaaaaacaatattaaaaaactgaaatgcaaaccagaaatgcttagtttcaacagacaaaatagaaagctttgttgagtgatccaaagagaagaacaaccatattaattgcttagaactcttcattgatcatgaatctccaaaaaagtgataaaaattcaaaatacaagagccttagtgcatgtttgacatcataactaaaaaactgttttttgtttttaaaaacaaaaaattttttttgaaaacaatttggtttg

SEQ ID NO: 385017 - DNA, 1065 bp, Cannabis indica
ttttttttttagaaaaaaaacaatcttcttgaattgtggaaatgattacaaatatctctccacacaaaggcggacccacatagaagcgaaggagggcagttgcctcataaaataatattataaatatatatattagttagttacattgtaattaaaaataatataaaaattcataatataaactttggtataaagattaaactattttacacacatagtagttatgggttcaaatctcaacaagtgcatgattatttttttaatattttaagtatttatcattaaaatgaatattttaattattgttaatttttttaatttaaatttacaaagtgcaagtttatatcaatttttaacatgttatatcatataaaaaaagtacggctccttacaaaaaaaaattacgtcctctcattttaaatcttgggtccacgactgcctccatagttctatgtcgcttcttttttagaataatttatttatgtgaccacacactatacatataattgtaatatgaatatctatttaacttacataaattagttgaaatcatgtataataactttaaatatttatacattaactttaaaattacggatatatagtctcaaattttataattaaagtactatttatataattattttttgtctagactcttaaattacagtagattgacattggattagtcttacattaggaaactgattgtaaaaatgaatgaaatgcaattgaattgaaaattttgaaaatgtttctaaagtttgaggtgaattttgtacaaaaacataattcaaagaaaaaatcctataaatatcataatgtaaggtaccatctaaaaatcttaatatttgtaaatgtaactaattctaagggatagtaatcctaagatgatgatgaagtaaaatacaagagttaagttgctactagccaaagggtttccctttggctagttatagtattttatatggagatctagtttttcagtttttgagttttgagtgttttgatcggattgataattttctaataatttttttggttttctgatttgttttcagttta

SEQ ID NO: 385018 - DNA, 834 bp, Cannabis indica
atagtctattacatgttaagtttttagttttttttttttttgtgcttatatttaagttaaaataataagtatatggtaattagaatcaaaatatatgaaagccactacctcttcaaggtcagagtacttgaaagaaaagtatggtatcagaaatgattaaagcatatatacggagtactttttcgtcttctttagagtattggaactgatcatcatagcttttctttttgactgtgaaaagtaacaaatagattatgtacagtatagatttattagattatgaatgtttgcacataataaaccacaaactatagcgtgtaccgtgccttttcttttattacccggcaaaaaacgaaatcagttacttttttaatataaagtttgatttatgtatcaattaatatatatagatatataatatatagtgacaaaataaagagattacggcttccaaaggaggacgcatgcgcattaagcgaacataataaataaaacacaattctcgtactagcatgagttcaatcaattacttcaaaaaacacgagttcaatcattcacaggggaaataaattaacaaatgattgtacgcaattcttcattttccacgcaatgcaaatttttcatgagtccatcttgataaaccaaaattctctcagaaatagaaataactcatgactgtaaaacaagaaatttaactaacaaatgagcaagagcaagtatagttttgattattgtaatatggttagttttaatttttttttggctaattagtaatttttccccccgaactttgacatgtactaaatcgtgtcccctgaacttttttgaccgtta

SEQ ID NO: 385019 - DNA, 2672 bp, Cannabis indica
aagaagaagaaagcttgtaggagcttttacagaggttcgacaagtatataatttgttcaccccatgtacataaaaagtgggagttttttataggtacatgtgggtaagggcattcctgttactcacctagggttttgtaccataacccgttacaagggtaggagaatacaacttttgatctgaccatctggccttggagaaccttcttgatcatgcggtgtacaagggtagtgactagtactgtctgaattagggacacgtattgctcaaaggtttctcctttatgaattactctcgagacaagtcgttgggcgaaaggcatgtcctgaggtacgtacgcgcactgccatggcctgtcacgggggacaagatctgatcatgtataaaaaaaaaagtatatccatctgtaggttgatttctatataaagctgacgtggccattcgcatttgtgcagtagtcatcgtccgcgaccaatccatagaactcctcacccgaaagttaggcaggcaaatcaggttccagagcttctttcggtgtggggattaatatggtcctttcgcatcctggagatgctacttaggcaagaaatagctctccgcataaagtatccataaaactcctcctggattggcaaggcatctctgcgaggaaccttgatggtcatctttgttaatccaataggttaataaatctttgtctctggttatgccacgtgtctcctgcttaaaaacacagataacagacattttatataatatgattatatatgacaaggaatgatatgaatcaaagtcttcatacaaaagctatttaatataaaatattagtattcatatcataatagatgatcatttatagatcaatctaaattttgagtgtacatgaactcctattcatgttagttgaatttttttaattcatttgttcccccaccattaacatgccccctttaaacaaccaaagttgtttatccaacacattcaatctctcttgtcgagtcagaaaattcagtcaacaaagttgttattcccttcatccgcttcaacttgttaggagtgtgtcctaaaagcatgtaaagaaattattattttaacttgaataaataaatacaatattttattaatattattatatttgaattgttaaattattatttgaataatttatgtagatattagaaaattctatattcattattgagaatgtgatcttatattagtacgagagagttaagatcacatgaatgaataaaatagtcaacaactaataaaaattttagaattctttaattaggggttttaagtgtgatttactgagtatcatgttgtacaagtaatttagattcagattattgatgtagttagtcatctcgataaagacattttatataatatgattatatatttcaaggatcaatatgaatttaagtctttatacaaaagccatttaataataaaaattagtattcatatcataatagatgatcgtttatagatcaacctaaatcatgagtattcatgaacacctattcatgttaattgattttttttaaattcatttgttaaggtctctccacagaatgaggctaatgacttttgttttgaaatttaattacatgaatagttgggaacattaaataacaaaagagaatctaatccttcttaacagaatgtatattggttcccttaaggattaattcttgtatagaataattttgagctcaattctataatcatagtatatattaattatttaccagtgaattaacagtacttaaggaataagaagtaaattagaagggtaaactggtaattcttctattctaatttatgaaccaaattattggagagttaaactattgtgagatgattatatagatggacaacttaaaaaaatatttctttaaaagtatatttataacataaagagttcacatctgaattcatagtgaaaaaatatcaaaactaataaattaactaatataattaaagagttcaattatttatctttaatttattgaagcttaatgttataggtcaatgaccaccgagatagcttaatcaaaaactgataaaagtaaatacaaacaatgggtaaaaagacttatatgacagtaaaatattttattattgaataattatggatatttaattaattcaaattaattgaaatatataaatataagggaaaaaaaataggaaaatacaaaaaagggaaaaaaattacaaaattactatgggtcggcccattcaacatttatatagtctagaatcaaaaaattacaaaaataccacctgctctatacattaagccgcacggaatgaacgaagaagatgaacatacctccatcgatcaaattagcaacacaaccagaatgaaaccaaaacgagagtaatacaaccatcaattccagcaaaatttaattggaaaagaagaactgcaatgatctaaacagaaaattacgaaaaaaaaaccagaaaaattgggaagaaacgaaaattaaacatttgatttcggttttaatcgttcaaaataactccctctaaaatcaaaaatccagattcatgcaatgtagatctgaattaaacagatctggagctcccctccgaatcaaaaacaaggtatgatatgaaaaaaaatttaaatactaaatctacgttatatacagttg

SEQ ID NO: 385020 - DNA, 2301 bp, Cannabis indica
aaaaaaaaaaaacaaattacattataatatggtatcagccttcatagctgagatgaggaataccaaatgctatgccaagtactaatagctacaaatgatacattaaatggtccttacaataaattaaattgataagaaaatacttacgagtaggtcttcacattaggctgcaaacgtttgtggtcttcaaccatcatgccaagtaactcagcaacgtcttgcactctacatgtcattataacaccagtcaccaggataatgagcagttcacaaacatatacaaattaatgtaggaatatagacttggattatattttgatactgaaagtaagagctcactaacaatccattatacatagtgatctctatgaaggcaactacacaaaaacagtcattgatgtacaagagaaactacctgtcatatgactcagctctggtatatgcttggatcacccaattgtatgtttccgtatcaggtttcatgggttctgaaatttgaaagagattgtaagaaagaagcccaaaacataagaaataaatattcctcaaaagtagtagaatactccatagaagacgatacgaatttctcactgtaaaaagaaaaacgtttaagcagccctaacatccataatatccacattggtatctgacattactacaaatgctgtatcataaacaagattgccattggtaacacaaaaggaaaataaactaaacatacataaaaacataaatgtgaaccttctccatattgcatgttctcaaatgtggcgaaagcgatttcagggattccacaggtagcctaagttattcaaaaagaaaaactatcatcagtcttggacaaactccattgacatgtaatgaagttaaaccataaccaattcatacctgcacactaaggaggcaattgaagtgaaaagtggtggccatccgccctgcagactccatttcataagcaatatctaaagcattggaatggtctccaattttgcagtcctcaactattaaaaggtcatagacctcatcagtagctctcaagccacctttggcacccctcaagaaaaccctattggcatcctccaaatgattactacgaaccaattcctctgccacaacgaaccagaaaaaagaaatataatcaagacaaagagcgtataaacacgcaagacttagctcggaaacgaccaaagtaccataccaacaagtataatccaagccccacgaatgtcgtattgtaatttctccattgcagcaagaatttctaacccattcgtagcacgacctttcgatccaaacagccgaattagagcgacgaatgtttcgtggagaggacgaagacctgcgctaagctccctcctgagcgattgcatctgtatttccagcataatgtaacaatctaatccttcaatttcgtccaaaattttaatttctttatttaaaagaaaaaaaaatgcaaagtttaccgcgctctctgtatcgccattgaaggcatgagcaacaatcaagccatggaaggagcgggggccggggctgaggccagcggcaatcatgtcatagatgacgtcagaaacgccgatggcgtcgtgattcctggcgcggtccatgagctcctccatgaaggtgaagcgaaggcctttctcggcggcagagtcatcgtccttgggctgcctcttcttccttcgggtacgcttctcgggggcggaggtgggtgcagctcggacgagcagaagggcgttgtatttgggtttggaggagagaaaggggagagtgttgaggcgggtgacgaagaaggtgtgagagctgagaaggagggtagacattaggcagtggataagatgtctggcataggcatttgctactgtatcgcgggaaccggggttttagccgttttcacaaggttttggaatctttccactcaatttttctttctttgtggaacctttccactcacggaaatttgatatggtgtgcatggattagccaacaaaacacttaagtgataagaataattcaaaataattacaaataatttagtaataagaagacatagatttataaaagtttggccctctaattatagtaatagttttttttttctttattattgttttgaagaagtgtgtacatctaatctaatccaattcaattataaaaaattagatattcaattacaattgaattgaattaaatgctaaaagttaaaatctaattagaattgactgattattggatgtcaatctcaaagtttaattaaaaacgaatctaatttaattatagggaaaacaacaaaaaatacaaaaa

SEQ ID NO: 385021 - DNA, 1609 bp, Cannabis indica
ttttttatttgaagaatataattgtgaaaaaaaaaaattacacatacgacatcagtgtgggaagtgagaacccgaccttcggatccgttgtacagagcgctgtcgttttaggagttagggttgttgtacactgatcataactttgaacggctgagattgaatctggaaagagatcgtacattgccaattgtcatgtcacccaacccaacattttagagtgtcctttcctgtttgggatgcgtgactctctttctgacacacacaacaagtctacagaaactcgttcgcgtgcggactttacaatttttaatttactaactacaaattaacattaattaaatcgaaattccacatttctccctcctcaattattttcatttctaattaatttataatagtttttggtatttaaaattcaacttgtatttttcgaatttaaaatgggatagaaagagagagagaacaaactctaaaaagttaataaataaataatatgaaattgtttgcgagatgagactatatgagctgagtctgagtttagagattccccggttcattttcccagtaaaatatgtataatatttttcaaagtgtacacattattaatattattttgaagaaataaaaaaatagtgggagagagagactagttcttaaagcttcaacaaacgattaaacataacaatccaaaaactgatttttgtttttgagtaaaataccatatttttggagccaaaaaatatagacttttttctgctgctactactacctagtgcctaagagaaagaaaaagagaggctagtttctgaagctgcccagagcagaagccaagctactgtacctttgttcttgccggtaagatttttgcagtaactactagactatgatcattgttattagttgtttcaattacggaatggtaatcggaaatgaattttgatcattttaaacaatgggtttgtgtaaagttggttactttttccttctcaagctccaagttttaatctttctttattgtaatggctggtctggttcctttgtacattttttgaatgtgggtttttcttctacttcggtatttgaggtttttttattaaaaaatatatgtaatagtaattcaaataatggtgaatctgctaattatttaatgtttttttttaagtacttgcttagtaccactaagaatcctgttcgtttttctttaaaccaggtgctgtttctacgccgggaatctcggttttctttgggctcctttcatggatgctatgcttgtgcttgagcccacttgtatagtatattcttagtttttttttatgttttaatattctggtggaagacagtatagtttgtctatttgatatttcagatctgtctgtattattagtttaggtttcaggatttttgatcccattagaaaatggaagttgtagccgctaaacccttcaaaacctcttcaaacatatctgaatttgtttcaaaatttgccaaggtctgtaaattaaggtccattggtgtgtttgcctctgaaaacaatgcctcacttgttgttgatgataatagccgtgatttgacaaaagagactggatttgagggtcaaaaagttcatccc

SEQ ID NO: 385022 - DNA, 1020 bp, Cannabis indica
ttccttattcaagaacaagattatgaggataagtttaagtccaagttggaaaagctacttatgaacatgtcagttcattcaatttctacataataaattctcacctgtagtctccgaatctgctcattgatttcacagttgcctcatctttccataatccaagtcctaagataagcatccgtataatgttcaatcctggaatagttgctgctaaccatgctccacgagacccaggactgtaatgattccattatgttagagaaacatttattgaagttaaagagaataatataaacgaagagatggttacctgaaaagtggccagcagagcatgaaagctatgccaatgcttatatgcacaagcttcctgttaagtttctacacaaattaaacagtagaaataagaatcatctagaatggaaccagtaaaaacaaccacttagaactacaaactgctggcaagatcattatgttcaaactttgaaggtagagctcgcgaaaacaaatattaaatttttttcccgataagtgggcccttgtgcctagcacacctatgccgccgagcctggtagagctttctcttccatctccagataacaaatttaccacaatacttactaatcaatgcacagctaaaaccaaaaggaagatttatcattaaaccagcaaaactttcttgaacagatgaagaaaaaaaaatagacatgggccatcacaaaatcttttttcttctccacttgtctcatataacttacgattctcggtagctttcctttttacttgtcctctcgatcaacctacagttcatggtatgcatgaaattctacattactaggaaagtctcataatgaagccccaaaacttatggcagatttagcaaaccctctcaatctgatcctcttggatcgagctcaataacatatactgaaacgagacatgattttgtcatctttcttttccttaatagagagaaagacacagctttaaattatattttggagctacaaatgtacttataca

SEQ ID NO: 385023 - DNA, 2902 bp, Cannabis indica
aaaaaaaagtagaaaaaagaaaagcaaattgacatacctgccaaagcataaaaaacccccaattcagtagaccaaccaagtcacccaaacaaccctacacgtatcagatcaaaagtaacaaaacaatcctagcgaaagcccaaacttgggttgacaaatgaccacaaaaaacacataattcaacaaacccagcaaccaaaatagctaaaaacataaacccaattgaatctccccctacaaaataacaacatatattcagataagtaaagattaaattttttttcctttcatttttaaacctgagctaactctggtgacatggtggtgagactgagtagttgagccctctttaactgaatccttcttcacttctttcacaaccttcccctctttatttgacgatccaaagcagggaaaacacccacccatatcaaaatccaagcaaatcaacaccaccccaccaagcccaattcagagaaactcatataactcaaccccaaaaagctcttccaatcactctcttatcatattctctcaaactccccccaatcgaaattatctctttctctctctacctcactctttctctctctgcttaagatcctcagtgcccattaaagagaaagatcgagaccaacatgtccccaaagcagatcaacaaatcgaagaaactgatgtggtttgaagagaaggtaaagaaaaaaaaaacaaagaaaaaaaggttaagacagaaataaccaattaatatatattttttaattaaatattattttgtggtttacttattaaaaataataacttttttctttctcttttttcttacaaaaactttattctattatatttaattaatttccttaattaatcaaaatttaaataagctaatttttcatttacacgtaatctccctcaattttgaaactatatatataggaataataccaatatattccataaatactttttttttcactttttacccctcgatttgagaaataattacgggtaagggacagtaataatgatcatcacggtcggataattatagtaaaatataaataaaatgggtcccactacaaagggatgtgcttccacactagtgatggacattctaaaacacatgtttttatactatttttatttattttatttatttatataaataaataaataaatattagtgggatgggaataataataaggacatggggattgtaatctcctacgggagagactattttaatttcctacgattgaggggttgagagccgttggatttgtttgtgtgtttgtgacctaaaaaggtttgacgtcacgttgtttgatccaaccttacgggaaactcactaaaatccagtaattgaaacaaaaatcttaatacataatttattatacttgaccaattattatttttttttttcatttttttctgaacaaatgtgatagatttattcttacttaaccttttattgtcagaaaataaattattataattatatttccaaggtggtgtagtgttgttacttgttgtaattaaaagaattgcatatatttaattatttattatttgggtgcgtaaacgggtaagtactaagtactatacataaactttcatttctgacatagcacactaccatttatgtgataaatacaataaataggttaaaataagaggaaaaaaaataattactcaaggtggtaaaacgggatttgatagcggcactatacaaatataacacaaattttacgaattagggtcagattaatgaggtatgtgtcgaatcgactcatataaatgagtatgttgaaagatacttcttttattaatcaatcaattaaatttatctgtaatttttatttaattgaaacatacctctttttatatgtaatactctaatataatggagtcacatagagaatatcttgaagtaatagggacaaaattagtacaatgtgtaaaaaaagagataaaaaagatagactttaaaaaagagagtaaaaataaaaaagatcaatataaaaatggtataaagtctaatttcctcttcatatgaatgtaaggtcggcccttactattaacgggcccacaaattttatgagtaaaaattacagaaaattaggtgtgggtcgaaagtagatcgacacgactcatatttccataaaaccggtagctgagtgagagagacctgcagttcattcaaaaggaaagtaatccaacaaagttcaacagctgcattttctagagcctaaaattctctttcaatgcttgaacaagcaacaacttgttgctttctggcagaacaagagacaagattgttgcctaaaaacatcacatatccccctatagatcttttatcattatacaactggcccagtcatcatcactgtagccttgtaaattcatagtatttgatgctcaaagcttcaaaccatcagataaggtacccttgagatatctaagcaatctcttgcaagcctcccaatgtgttgtggttggagaatgaatgaagtaacttagtttattgataatgaaaataacattaggtcttgtgagactcaaatactataatgcttcgagtgtgcttttgtaaagagcaacatcttcaaaaggttctccatcttgctaacttaatttggatgttgagctagtaggattaggataactcttagctccttccacatatgcagcttagtgagaaggtcagtaatgtatttactttgacttaaatacattcatgtggcatctctgtatacttccatttccaaaaaaataattgtaatatcccagaaaataaataatatttaaatagacatattttattaaatatgtaattacttgagaaatgaagtaggattatgatcttacttaggtaaattgttgagaaattatttaatgaaatac

SEQ ID NO: 385024 - DNA, 887 bp, Cannabis indica
aaaaaaacagcataagatacctaattactttttatggtaattggatacccattttgttaccataaaattacatagttacccttacttaatttttcatatatttttttttctaactttttctttaattttctcaaaaaaataatatttttaaaacaaaatactatattttttgcacaaaaaatatcaaaaattataaattttataattttctcatatttataatcccagcccatagtcactatattagagttaagctaaactagattgtgttacaataataacaaatgttttgagactaatattgctctattttcttaacaaaaaattcggatcttttctacgtgcaatggtctgtattaacttaggtatgtgtgttgttcgaattttgatatttattgtgctttagggcagttttaatgctgttgctctttccactgcttgtcagatagtgggtccctgttagggtcggccctaggcataggcgagctaggccaatgcctagggtccacacttttcgggagcaaaataaaaaatataaaattcattaggttttatttaactaaaattaagtgtattgtaaacaacaaatattcatagcttaattggttgaggtgtatgacatattatacaatgtcatggatttgaatcccataacattcttttttaatatttcttttttatatattttcgaaggccccaaatctaattcgccttaggcccatacagggtcagccttagtccttgtgtatataaaaatattgacttttcaacataaatttaaaagtcgtagcttttgctgggctgcgttgccatctctattttttagctattaagtaaaataaattaagggaaacttacaaaaatactgaaatttggattaactttta

SEQ ID NO: 385025 - DNA, 1347 bp, Cannabis indica
gagtttctgagcttgattaccaccttggagaatccttcgaaccttgaaacaatcttcaacaaaagagattcctcaaaatagattaaaattttaaaaaggttttcaaagttttagagagaaaagtttcaatgaaaactgaaaaatgagcagaaaaatgaaatgaatcctttcgtatcaaaggggtttaaatatagatcattctcatcagttaagatcatgacatgtgacatttgtaaaccaaaggtaattcaatccaacaattgtctcaaatcacacctacataaaccctgaagggttcgatgatgtggcatctggggaagataaagtaatgaataactatcattttgaaacccctgacaagacaatcaaaggtcactgccatgtgacagagcaacgtgcctgtccctcatgaatagtacttttgctatttgacaaacagttatcattacaaaactaggggcatgcgttatagtataaattttttgcctaaaaatacgagtaaagtctcataaaaaattgtcatgtggagccactcttcatagaaaaagatgatttgtcggaagtgtacggttgtctccactcatgtgctattaattgaagaaagtgttgttaatcacagaagtactattgaccgtaaaaagtgttgtaaactacataatgaagaagtgtggacacaacaaccaatgtgatcagagaacgaatgatcgattcacctcgcatgatgtgaacttacaagaagatgggaccaagatagagtctagtcgcatactatgctccacatagtcaaaggataaacaagactaacagaagttaatattagttgtatatatactgattatatgcaatgactaagtatgtctctcctgcgacgagtgaagatcgtttctctcataggtttggtccgaatgactaatgtgttcgacgactccttagggccttgcatgttccaagttatcaacgcatagaatgtccaactatatgcgatcaagggtgacatagacatttaacaaaataggtccaaaggcccatcctgcaagtacaacactgcagagcccacgagctcatgtatttggaatatgaatggacaagctatgacttatcaagtcacatatgttgttgcaataaagtcaagaatggacaaaactattctccatttattctttaaatatttatcttgatttaattctatcagttattgtgaaaatagtctaatctgactgattatataatcctaaaggacatttggtttcttataaaggggtgatcgaaatcaaatgaacgaagatgaaacaattgcctaaagtggactaagtagaccaagctccaacttgaaattccgtattttaa

SEQ ID NO: 385026 - DNA, 1361 bp, Cannabis indica
tttttttttttttgtcttttgactgtgtttttcggatttactgctacatgttatagttgcatgttttgttctgaatgaaattgggatttcttgattttgcaattaatattgttgttagatttaggcattgtaaatagtattgtctttagatttccatgttagacatttctaggattagtcgttttgcagcataagtgttgaaatttttttcatgtgcacaaaatccttctgattttgggtaccctatcaatttctttttcattcttcctcttgacatttttgactttccatctagaacgaataaccccgaaggtttaggccatctcaaataagcaagagagtttaaggttaaggtgggtgcatagtgtttatatcaaaaagcaggaatggtggagctactctacttctgtcaattcgagctggtattggaagaagatggtagctcgcagaatttcagaggcaaaaatacaccattacagctggatacagcaaatatacttacaaataacagccttgttccactcctctagcttcttaactcccaagccacctgcaattttaggctggcaaacactctcccaagctacagctccagcaccatgaaataaaacttgtcttttccataaaaaagttctacatatagcttctatggatttaagaattttctttggtataatcatcatctgactccgaaaagtctggatagcaattaaaactgagttgattagtgtaattcttccttcagaagaaaggttccttgagctccaactcttgatcttggctgtcattctttcagccaacaattcacattctttactaaaattttaatattatggttatattcgttatagttttacttataaatttttttaaataatttaatgtgttgataataaaatttaaatatttttatagtcatatatgctataattttatctataaataattatttaaattttattttttcataatataaattattgagagttttttataaaagtttgtatgagaacttaaacaagtacaacatatacctgaaaacaaaaattaaacaaagggtgaaagaaactttatgaatgaaacgtatgtattataaacttgtaaaagatttttagtaaggttattttgagagaagacagtagagaagctgatctagatgaaggaacgaaagggttaaatatctgtaccataacagcaggtgtcagcaggatgtagcgagtttaaagcaaggtagcaaaagtagagtgcgcataaaactcttcacaacagacagaaaaaataaaaacgtctcctagttaaggtctcaatttgtagagatagagagatagagacacacgtatatataataatattataatatt

SEQ ID NO: 385027 - DNA, 4763 bp, Cannabis indica
ttcctttctctataatgcgaactataggcacttcataactcaagtcctgctttagctctattcttttttagttcagcacgtgtgatggattcgacacgtatttccatagtacagaaatatggaacacattatgcgtctcagctaatactggtggtaatgccagtcaataagctacctatctccctctgtccaatatctcaaaaggacctataaatcttgaacatagctttcctcactttccaaaacacataacccctttcatgggtgacacttgaaggaatattttgtgacccactgcaaattccacattatgtcgctttatattggcataacttttctggcggctttgtgtagtaaccattctattttgaatcttttctaccacttcagtggcttctcttactagatctgggcctaagtatttcttttcaccaacctcatcccagggtagtagtgattgacacttcttcccatacaacatttcgtagggtgtcatctctattgtaaactgatagctattgttgtacgagaactccattagtggcaaatagttctccagttactttggaaatccaacgcacaagcttgtagcatgtcttctagtatttgaatagttcattctgattgtccatcagtttgatgatggaatgatgtactcaactttagttttgagcccaaagtgctttgcacacttttccaaaacttagaggtgaaattgaacctctatcagatacaatggtctttggaactccatgtagctttacaattacttttacaagcagttcaacatattgttgtgcattgtagttagtacgcactagcagaaaatgtgttgatttacactatacatcatatgtcctccaggggttgtcatcactactccagctcctaatacgccatcatttaacgctccatccacgtataactcccatgtaacttcctcttcctcgacttccttaacctcttcacttgcgtcttgcacttgcccttcctcacttaggcggtaagtgaactcagccatgaagttggtcattacttgactgttacttgacacccttggggtgtaggtcatgtcaaattgacttaactctatggaacatttgagtaggtgcaccgaggttgttggcttgtggataacttggtgcaaaaggtggtctgtcaataccacaatggtgtgagcatggaaatatggcctccacttcttggatgccatgacgagtgtgtatgccaatttctctatttttgggtagtgagtcttagcatcaacgaagcacttgcttttccttctcctttcaccaaggtggcatttaatgcatgctcagagactgccaagtaaaaatagagatttttgcatttctcgggttttttcaacagagggggttgtcgtaggtgttcttttaacttgacaaaggcttcttcacactcactatcccaagaaaactttttgtttccttataggatgttgaagaatgggaggcccttatcagtggaccgtgatatgaacttgttaaatgcgaccacccttcttgtcaaacattgcacctccttcctattcctcagtgattccatgtctatcaaggccttgattttctcaagatttacctctatgcccctctcattaatcatgaattttaagaactttctaaacgacacgccaaacacacacatagatggatttagcttcatttagtatttttggggagtggtgaacatctcttccaggtcactgataaaatcttttgctttcttagtttttaccaacatgtcgtcaacatagacctccatgttgtgaccaacttggttggcaaacatcttattacaagcctctggtatatttcccctacattcttgagaccaaatggcataactcaatagcagtacaagcctcaatcgtgatgaatgaagtgtgctccttattcgctgggttcatggtatttgattgtaccccgagtgtgcatccataaaacacaacagctcatgtctggttgtggtgtcaatcaattggtctatgtgcggtagggggaaactatctttaaggcatgctttatttagatgattgaagtcgatgcataccttccacattctattgggttttaggaccaacacggggttagatacccagactgggttgaaggcttctcggatgaatttcatgtcaagccaacccacttcccctttcaagcccgcatactttttagaatccaaagcccttcatttttgccttaccgactttgcattcagatctatgttaagacgaaggcacgtggcagctaaatttattcgctccatgtattcatgtccctaagcgaacacatctacatttctttctagaaagcttttcaattcactcttaagggctccaaggaaccctttcctaatcttgaggacttttggtgggttctctgaaataatgatttcctccaacttcttgacgtgacttgcatgaacttcttcactaactctgggatccaattcagatgggctttctcttacgtgttgatgtttgccatgtattgtcatcatcatggttcttaaggcttggcgacaatgcaaatggaggtgttataacactcacgtggctcttttttctctcctttcatggtggcgactcctcatagtgttgagaatttcatagtcagatgatattttgaggtaacggcctatagtcaattgagggatggcctccccaacaccgcattaaatgtagcagggcaatccactactatgaaagaaaccatgatagtagtgtgtcgcggttgttctcccgcagtgagggcaagcctattatcccgagcggaagccatataatggcgagatacatggtttcaggtcctttactcccagtctcatctcctgcagtggcaagaggtatgagatatctacaaaacttatattgtcaaccaagactcggtgtactcttgtgttaagcaatttaattgttagcaccagggggtcattatgggagaaatacacacccctttcatcctcctcggtaaatgtgatagagtcattatctcccttgaaactttttggcagtctttactctaagctcaagactagtggctctcgtcgggctttgcgagcgtacttatctctgcctttacaagtgtctcccctattctcggtcttcctatgatggttcttatgtcccttagcacttctagtgcctcataaggggtctcccattgatgtccatcctctagcctttggtcttctggcattcaattttctctacagtaccctcccccttgttgtatcaactcttcaatttaagttttgaggtgtttacactcctctgtgagaagtctgatgtccttgtagaacctgccatacttgtttagatttctcttggacctatcttttctcataggaggtggtttcttgaaagggacacaatgctcatgagtcaagaaaagatgttccctgagttactcaactccacgtagtgtgtatactcgtggtattccgaatccacttctctattgacccttttgtctgatcatcccctttatgtttgaactccctcttcttctatggtttgttgacaagggcattcttacatcgactgtctttcacatattcaggttctcatgcccatcttccaccttgatgtacttcttggctcactcatagaagtattctatgttttttgattccctcttaagcatattgttccatagcatgatctttgggcaaactcctacagctatggccattttgtgttcgtctttggttaacttcccgattttggctactttagcattaaaatgttgcgtgtagctttttcaggctatcagcctctccctgcttgatgtttgctaaactcatcctagggacagtgtagtctcaggaggtgtgttgttaggccaataatttatcggtgaactgcttccataaggtaattgatccaatttttaattgcttaaaccacttgtatgttgtgcccctgagcgtcactgcaaagcattggtatctttccttggtagtgaccttcttcatcttcattatttctttgaaggtgtccaagtggtacttcaagtcggtaatcccctcgtaaggtggcatggtgggttctttgaaatttttaggcagtggttcgacgtgaatttcccttgagaaaggcgattcatcatcaaaattgtcttcatcctagttgcactcttcagaagcggctgacgctatccttcaccaaagatcttccatttccatatcaagctcctgcctcctcttagttatcttttcctggaggtctggcggcgtgggtcttggtccctccttattgcgaggagagatcagcgacgatgcctgcttctcggcggtggccttttgacggagtctttctctccaatcaccatgtatttctttagactcagtcttttttaagtcatgaagagggatctggatctttgcagaatgaagctttttcgtggataggattctgacgtgttacttgttgagtacttggacatccctttaccttctagcacattatctcccctttttcttgcctcctgctcttttctcttgaccaaaggtgcttcaaagggtccttttaagattttttcaagcacttcttgcatgtttgcgatggtttcttccaaccataggttttttaaccttaacttgtccatctcttcattgtgagtgcggtttgggagcttgaactcacctagaaaacagttgggttttgtgccctatataaaaatcatttcaatataatcagatttactagttaataaagatcagaaataacattttatgtt

SEQ ID NO: 385028 - DNA, 1164 bp, Cannabis indica
tatttaatttattaaataatattaaaacaattactttttatgtcaagttgcatcttaattttttattatattgaaacacaattacaaaaaaatttgttaaatatagtatttacaaatttttctgccaattttaacacattttttacgtcatacataggagatggttttagttggtgtcctaactagctaactaaatcagtatgtaagactctctattttactttgtacagaattattcattgtattctttcaattgtaaaaagagagagttgtgatgacttttgcttactgtaaagagattcttggaccaattctccatttgcgtaacttgatcaaataaaagtttcctaagcctttgtggctggttttggcagtggaataggatagaatattcttaattatctgaaccaatatatgtgagtgtgtgctcatgttgttacgcattttatgttctttgattattcagttttagatgctagttggttagatcaccataaataatctggtgtatttatgttgctctgttcttgttgaggggttactggttgcaacataatgttttacataataactcaatccaaacttataagctaacaaaaagccatatataatatatataaatttcaaaattaagaaaaaagtgttattctattcttatattatttgggatagtggaattatataacttgtaatgttacccactagctagtgatcatcttaaggtagtggtcacagttttcgccacttctaagcttataatcatgtccatactcatatagtataatgggaaatcgtatctatccgtaatatatacatagccatctcttttatgtaagattagtaatgatttgaaccatcgtttctttttcactgtcggtaggtaaaaagaaactacgttagtgtgcacaatttgtcctcataattttgtatgtaagtacctagatacttgatagtgcaatatgatctggagaaacaataacttttttgggggggacgttttgaatatcactcattagagaaaaagcccactaaaatatcccctccattagtggcccttaattatatatgcatgtacactattaacagcatctcaatgtactataaacatggtgcatatatattttgtaatatatgttaaaagttatatcaaatttaatataaaat

SEQ ID NO: 385029 - DNA, 2396 bp, Cannabis indica
aaataaatatcttatttaattaatctataatattattttattagatatgagaccccaaagagaagttttcaaggaacctacatctcccttaagttcaaaacatcaaaaaaggtcaagaaggttgaaggaaccaacatctcatataagtttgaaaaattaaaagaggtcgagaaggttaaaggaaccaatgtctcccttaagttttaaaaatcaaaagaagtcaataaatattaacatttaaagactccatcatacaacaaaaaacatagcatagctccaaacacaagcaccacaccaacgagcatacaaaatcaatattttggagagacaaaatgttgaggtaggatttttgggtagatttagacattttcacctcaagatttgtattgcgtaaggataaaaaaatattttccttcgctttcaaaaggctcttaaatcattaaaaacagagtaagattgaaaaagttgtgcttaaaattcagacaaagtacatagaaagtgtgaccatcttggcctaaaggagggcagcacatctcagccatgtttccaagtgtatcttgccctttcgacatttttgttatctttctaaaacatcttcaatcatccaaatagtatatattgagctagttatgctaaaaatacgaacaaagcacatggcaggtgtcaccatctcgcctaaagaagaagggagagctgctcctcacccaatggagtctctcctttcccaaaagatgtctctttacacccatggggaccaaggtgccacatctcatccaagataataccacctccccgagtgaccatcaccaactcaacataagttgtcaccaatcaagtgccatcaagcatggaaggcataatcaattactctttctagtctacaagaacacttgagataattcttgaaaactaggggcaagtgttaaccctaatatttcacaaggtaccttgtaatatcgaagttatacaaagtggactggactctaattataaaataaccaattgacaattatatttggagactaattacaagattaaattcattttaagtgtctttgacacttaattataaaaagagaaacgggtgcaactcggaaggctatgaaattatatctctccaagcaccaaggttcctgacattgccatctgatgtcgtcgctgcccgatgtcgtcgcctaatacctctagtctcaagcctcaagaattgagcctcatggcaagcatcaagcctcaaggttcctggcatcactgccacccgacgcctcatgtattgagcctcaagcctcaagcctcaaggtgaccagctcgacaagtgcatgcaagaaccatcttccccaagggcatgcaagaaccatatccgccaagtgcatgcaagctccactcagccaagggcatgcaagcttcatcttcgctaagtgcatgcaagtaccatctcgattaagtacatgcaagaaccaacacttcttcacattgaatacgtcagccatgatctccccaagagcatctcaacgatgctcttcctcaaggagccaactcaaccaagcatgcaactcgacgaatataacatcaacatcaagcccttatgtctttcaacaatgcaaccaacacttggtgaattttcttaagtgttggaaaggaaactattggaggaagagtcaaaacgacaaggcaagcacgcgatcaagcacatgttagggtatagctatgctatctccaagacctgaaaagagaggacgacctggagtggaaatacgagtagtggaggcacctcacctgcatgctctaacatcccgaccaagagtacgctacaaacactacccttgcctactgggaccacctgttacctaacaaggattaactgcaaccactacctccttcaacatgtgatctacaagagtacaacgtccatcgtacttgttttattggggactgcttatgtatctcagaccattagagcctaaatattctattttaagatttgaaaatgttgaaaaatatttataataaaggcatttcgagagcaatacaaatttctacttctttttcattaacttttgcaacttgcttgaaggttttaagtccttaaatctttttctttcaatttgtcttaaatctttgatttttcggccaacttcgttaaccaaaattagtagcataaagtgataatgtttattaggtagtgaactttttgttgttagagccacatttaactatagaaactcaaatttctcatttgaaatatatgtcctggccatggctaaatttggttacatggtacaacttgcatagggtaagaacgagaacgattcagatctacgacaagacaggaaaactgtgagacatgggatcaaaattgagttcacattatttatttttcttcaaaaagagaaaaaaaa

SEQ ID NO: 385030 - DNA, 2478 bp, Cannabis indica
tctctctctctctctcttacattcaatctctgtattctcttctgatcaatcattctccctttgtttctgatttcgatctgttgctggtaaggaccttactgtttatttcggtttgttttcgattagcattcgtaattggctctgaaatttatttgtagtcatatatttaaaatgattcattatagatcttgcgttcttttgcttcaattaggtttttaaccaaatttcaggttatatgtagttcactgatttgcaatatgtatgtattttaatcaatttagctttctttcgttgggatgaaaaatcgatggttcgtggattttttattgtttaatatagtaatttatttgttcagtttatccaattatgatttattctcaagatgaatgctggtgaaatgttgctatagctgtttaaaatccaagttttttttttgttttttgctttaaaaaggtttttattgtattgaacatattttgaatataacatagaaaatagataattggtttaacaaaacttgtgaaagaaataataaagggaaaagaaaacaacaacaacataagcgattggagattggaatttttgaacgtaaaagtactccccagaaaataagaaaaccctcattagagttacttttttccccttaacaaacagcagctataataaagaaaagtagctgtgatttaacttcaaactctcgaatctactatctatgaacatgttggcaataatttatggagctacaacgctagtagatatctaatatatatgaactgtcaggaaattcaaatgaaaaggaagttatggtgttgacatgttattgctagatatacagagctaaagaaagttatgccttttggcataaacaagatatgaatacttggatttgtttgagtgtttatatatgtttttcaaatgtttaggctgttactgttattttgtttgcttcttggggaatatgaaaaatagtggtttgagggtattctgttctaaagctggaagattgaactaatgagttatgcccatcttcttatgttaggcccatcttcttatctttttactctattctcacatttttgatacttgaactaatactactgttgaattatgtctttagctttttatacttcattgtcaactgtggttacaaaagcatgtcacatcaagttgtagatgggatttataagtttatcattcattttgttcttttttttatgtttaaatgagatccatgaaagaaggtagttgcatccatggaatactgatcatttctttaattttgaagctgcttgcttttgtggcacaaagacattatgtcaggagaagatgatacaaaaatgcagcaacaagaagagtctgaaaaagtcatgccatcaccaaaagaagaggttgggttcatatttgagattcttttgaacgattaaattggaaactaccactagtgaaatacatgctgaaattatattgttatggtgctgctataaatttctcaaagtttgcatttaactctaacttcttacttcttgtaggaggcagctgtaaagaaaaagtatggtggaattatgcccaagaaaccaccactcatctcaaaggtgatttttgaactctggtattaatggattaaaacagtttctcttattatttttgcttcatctaagactttggaatggtgtcaggaccatgaacgtgcgtactttgattctgctgattgggcacttggaaaggtatcattcttgtatcaccaacatcatatagggacttgatttttttgcagaatcaaagaacctagtaggttaattaccctgtattttctatgataacagcaaggtgttgagaagccaaaaggaccactggaagcccttaggccaaaattgcaggtattcttccattcccttgtcaaaataacagtcctctgagctgttttatatcatgttgcaaatatatttatttattgctatttataagctttcatgctacatttcacaaggcatggtagtttactttcttagagtagtttcaaatttgtagcatctactgagcatggcttatagaaaaaaaaattacaaactctgtaatgctaacctagacagctgtgaactaattagttgttttagatagcaaacaagagtcttgatcagatttatgtttgcctgaatatagttaattcagagtattaaggggaatagttgattttgtgccatccagtcatcctaaggtgctgcagtaaatcttattctttaacatatcagagcaaaccgtgttggaagttaggttctgataaacaactgtatatttcagttataaaacagaacaacatgaccttagtttcacaattattccttaagtgaaaagaatgactcattgctcgatgcaaatctaatccgttgccagcagtgtgtcttcctaccttcctggttaggataggaaaaagatgaagtgcttgctttttgtggtttcatgtctatttgattcactaaa

SEQ ID NO: 385031 - DNA, 1509 bp, Cannabis indica
taaaaaaaaaataaataattaacttatggaagagtaagagtttattaattaattattcaaaatagatttttcacaataattatatcaaaagaagaactttaaagctacatttaaagaagaaaaatataataaaaaactaattaaataatatgaaatattgagagagctaagattaggaaaaaaaatcatatagattgccacctcaactccttaatgctttcctttatatatatatatttgatttgagttttgagatgaatctcgtaatatggtatcaaaatctaaattaaattaaaagtgattaaaataaagtaaaataataaaagaagaatatttatttgtcggaatgaatcttatggtaataaaattatattcgatttagaaaattattcatttatcgtaatgaattattatatggtatcagaatcttgtttgatttagaaaataataaaaatataatgtttaacgtcaaaatttagatccatttacaaaaacatagattattcttattactcaattaattttgagtaagtttaatgatttgatttatgaaagttaaaaaataataatttatttttgttttaaatgaaataactgagttttattccgtactaaattaaatagaacacttcagataatatatatttacacttattttttttctcttttttgttaatattaatttatttctcttttttgatattataaatatcacataacgtaaaattcaatattcattatctcgttaaatttaatttatccaactctaattaataaatgtaacaaaataagtcatataacatttttgttcaaatgaggtggtgaaacactcctctcttgagaaacttaacctttgatataaatcttgaaaaattcttaagttaaataatttatattatgtttataataattaaattggtgttaagtattatttttttaattattattcactcattgccaacaattagggattcaatattcaaactatttgaatacatattgtgtttaagaaaaattaaaaatatttaaatagggttggtgttgcaaaatctaagaataaatctattacaatattggaataataatttgattaaaaaaaataaagagattagataagggcattttagacattacaaaccgtacaaaagaaaaaaaaagcattttattagagaaatcaccaaggggtataatggtaatttcaaattccaactcaattttcaacgaagagcgcctcgattgaagtgacatcccagtcaaactttggaaaattattattattatttatttaatttgtttattatataatttaattttaatttatttaataaaataaaagtatgttcccaagtgtggtcaaagagacctctcgagataggtctttgactcccatttatttatctttataagtttggacatagcaaaatctaattgtctatttattaaaaaaatttaattaattttgttgaagtaaaccccatattagctatacactgtaaaaccagatttttt

SEQ ID NO: 385032 - DNA, 1524 bp, Cannabis indica
tatattttaataaaatataatacgaaggtatttttagattaatggatacaaaaaaatagtatttttcaacttatcccaactaatttcacaatacaaacaaaatttaatgtgcgaaccaagttcacggttactaaaatttaagcaatattaaggtaccacaatgtgactttaaaataattaattgatcattagttcatatgtctaaaattttttctaataagttatgtgatttattttattttattgtaacacgttagtttctcaaaatagattgaaagtaacattgttacagaaaagaaaagaaaaacataaaactatatcttaaacaatataatataaactaaaaataatgatatagttttaaaagtaactaatctaaaataaatttaaaggttattcaaatatattaatataaccataaaataactaattaattatcaacatgtatataattaaaatttagaagtaatcaaaatgtatctcaaattatataatacataaatgatacttttataaaaaaaataacttattggtttcttatcagtatcataagttactgaaaaattgcttttgaaatgtaggaaaataagaaaacaaaaagaattttggaattatttctatttcacgcatattagtttggaattaaggtattgtggcaaggtactattataattgagtttattaaagtatttttgtaattatttacattttacgaatattttaaaaaaaaatccaaaaaaactctcattaataaacttaaataccaaaacatatttaaattttgagaaatgccaaatgagtataagatagattaaaaattactactatgttttaaatactaattagtatacataaaaactcattaaaaaaataagaagaagaaataagcattaaaatgtatctaatcctacaacatatcaatgtagagaattgaaaagcatgggtcatctcttctaggaaattctattcaatcgtgtcatatgccttgtgcaagtcaaggcaagtcaagtttgatcatataattggcccttgtagcttttcttccatagtgtctaacaagatcttgacataccattatattatgagcaatcaatctacctttaacaaaacctcattgattttgagccccaatatttgaaagaataattttgagcctcgagcaaatgagtttagttgcagccttatacaagacattacaacaggcaatatgtcgatattcacctattgtattagggcatttacatttcggcacaagagttaaaactgtatattaagttattttggtgtagtattttttgaggtttttgtcttataatttttttttatttgcataatatgataaactttaattgatttatatgtcatagttgaattgttttctagttgtttttgtatttgttgtttagttattttgcgctgagaaaagaagccctgcatgttgaaacccacttcgtctgaatatgccacgtggcaactactgttgcgttctgatgctacagtttgtgagtgtcaggcaactctgaa

SEQ ID NO: 385033 - DNA, 2637 bp, Cannabis indica
aaagaaaaagaaaaatctgtagttcatatctccatcacttatttctgcgttataagctctcattgaacttttggttaagagagttcatattgaaatggtgcatgccacaatatcgtataaaattattggcttttgtagtagtgggaatcggatgtaaaaccaaacaacttttatggatggtagcattaatggcagcatgtatagccatatggttggaaagcaacaaaggggttttcacagtagtttagtttaatggggaagattatgggaaaaaaatcatatacagagtggtgacttggtcattcatataatcttaaatatcttaagagcattttgttctctgacccaatttgggactgaaattattcttcgtaattttctttgttgttggtgtgttttctctcacactatctttgtaatacaagtttttagttctacatgaaaagaagaagtttaggttgtatagtgttttgccctgtttagtcacaactatttctaacttcacctttttggacacttgttggctcattctgagtttcaatgtctagtctacattttattatttatttgtccatattctgatagagatgtgaagaagtaagtaacaattttcttatcgtttttctttgtttgcatgctttgaattttcatgataggccatgtacttggagcttgaatgaatttgttcgaagaaagaagttatcttttcttgatgagttaccacaatttgttctttctccggcggctgagaatcgtcgtgataaaactgaatggggtatatttttgagacatattaaagataataacaaggtaagcaatgatccaagtgtttatgcgttgcataagagttcaaaactcccaaaatgctttagttggttcctacaattactttttaaatgatcaagtatttaaaaagtttagggatattgtaacaaagatgataaaaagatagaaaaacttgtgttgttttacaataatgaggataagtttgtggttgaagtacgatctttggttgctaatttcttagcttttgattattggtgataatcagataatgttgaaataattttataccattaaactctattgacaagtaattctctagttatgccattgttagtcaaaatgcaatgaatgcacactcaaaatccgtttcttttagaaaataacttttggatgtttaattcacaaatgatagtttccttttgttgagtgacaaagtgaagtaattcattacacaaaatattttctctctccatttattccattttttttaatttcttctaatatttattgttgaaggaaaagctggtttatctagattggctctaggtttgatttattaaacctaaataggctaggtttggcttagaatctagaaacattttatttctttttgttttctcactgatgttgtttgtaatgggtttttttaacttctctgtagagatatttgataagccaccaaattaaaccaaactttagtcttagttcttaactctcgttgttgtaattaatagttggtgtgtattagtggctgagttgtataagtttcaggggctgaagtggtaattattttagggcaccgtaaagtatataaggggagggcgtctcttagaaaggtatggagaaaattggtaagagttgagactcattgtggagagctttaatcctctgggtggaacctttacttttcgagaatttgcttcatagggaaatgaaaaacttactagaattgttgcacattcttgaacacaaaccagtttttaattttattgttagaatattagttgtatattagttgtaaaagaattagggtaactgatatttagtagtttcctattttgttattggtagttttccatttagtctcctagctttgtatataaatatatactattctatgaaatatatacacaattcgattcactattttctacatggtatcagagctttgtgattcgaaattaggtttcataaaaaaaaaagagagattaggatttgagtttagggttctttttcgaaaatcttttttggagtgcgaatttattctcatcgcccactcagcagtgttgcccagccgccgatctacgaaaccccgaagtccggttgccggattccttgcatgtggggctcacgcgccgcctgaagcttctgcacgtcttcccacgcaccggcgcgtggaggcgcgtgtgacggtgtcttcgacaacgttcttttgccggttttttactttgttcttctaagtccactcgcatctgtttaaggttgtaattcggtattttcttgccttctttgtgtttgggtgttcattctttggtgttcgttttgttcgttttgtttctgatgtggttcccgtgatgtctaaaatcacggaccataaattgattgtttcgaattatttggaattgagtaagacaattcgactgtatttgaggagtattgacaaagatgatcacttgactgacgatcctcccaaagaaacaaacgattcaaggaaaatatggctccgtgaggatgctcgcttgttccttcaaattcgaaattctatcgataatgaggtaattggtttgattaatcattgcgaattggttaaagacctaatggattacttggagtctttgtattctggcaaag

SEQ ID NO: 385034 - DNA, 1796 bp, Cannabis indica
atttaaaccaaataaaatgttctttttggactaagaagagttattttgttttcttactcacttcatactgatagcaaattaacattagttgtatgatcttgtgcacaaccgttgaagataattctgcggcttcatgaatcgtcaactccaacattcttatctatttaatgtttatgacacgtttgcactttgcagaggccaatgtcatgaattttttatcagcatctaattccaatatctaaaagccttttatttcacttaacaacttattatacttaacagttgcaaggaactctaaatgtcctaattatattaaaaaaatactcaaactgtattggcaaataaattatataagaaaatagagacatggggtatgaagatcacagtgtcctaattagttgaagttccaaagccaaaaaactgttccttttcacataagaactcaagttactcaacagttagctcctcttttgattatgtaattgcttagcctcaccctcaccaacaagaggggattttgttatctccttgtcttcaagtgctttacaatttctcatgttgaatttggatcatcaatcttccttgtttatgatttcaaaactgggtgtttatcgatcaagtcgaaaagttcatcaccaattccaaatccaagcatccttgccatgtcactagttttcaatctaggctttggtacatcatgttgctttaaccatgagtacactatgaaaactttattcaagatgaacaattccaatgcctcaggattgaacaccactcccattttcatactcatctgtgtcaaaacaccaaaaccatatcatcaccaattcatcatagattcacattctcaacattgtaaataatggaaccaaccaacaaaagaagtatatagttttcattacctggtgtggaaccaacatggcagcatagcgagcaagctcgccggctcgccagtccaacaagaccggtagccaaggataagtagcatcaagtctcaagaaccaaagccttatctcagggaattctgagagttctctaaggtcatttggatcttctcttgtgtaatttattgtaaacccaattgttcgttcaagaaactctcttggctccgctaattaaaacaacatggttaagttatcattgtgaaaaaagaacaaaaacattaagaccttatcaacataatgaagatatatacctgaagaaggagatgtaatcccagttacagtttgaaatggagataagtcaagcttggttatagcatcattatcaataactatttcaaatctccctttagttggtggcattggaggatcaacttttggtgagtctgtcaatcaaaaatatatataaacttttaaaattgggttattcatacattaagagaacaagggaaaaggcttaccatcttcatcatcaaacatagagaggtcataattcccagaaggattaaaggcaacagagactgaaacttgtggtctctgtcgctttaaggggaaagaaggcattgaatctgacatgggtttggaagaaatagatggagtaagagaagaaatggcctgttttagagaaggtgaaagtggaattaagtattggaaagtagcagccattgaagcacttaattcgtctctctcactacagctctgagctctggttggatagagtgagtggtattgtgttgagggacggttaatacagttttattatctcctttttcttctgtcctcacgttttaacaatcaccatatctcttgctgtttataatctatttttatttaaaataaaaaatataataggat

SEQ ID NO: 385035 - DNA, 793 bp, Cannabis indica
ttttttgattttctaaaaaaaaaatactaaactagtactttttagtaatttccaatattaacaaatatatatgaacactcaaatgcagtcttctccaatttctctcaattacataagaaagttctctcaaaacaacattgctttactcttttcgtatctcaccaaaaactcgttcactaaaatgaatgaagtctttatattgtataatataatacaccagctccaaagctgacttggaataactaacaaaactgatttttaacttgtgatgaccaccaacacaacaaccagtcaccaaggtaaagagtaaccagtaacttgtaactaaacaccacaataggagtgatgaaaaaaggaaaagtagaattaattgtttagctggtgatgattaaatgaaatgaaatgatacataaaattcatgaaacaaactaccaaaataatgaacaagaggtaactaactaaaatggggtgatttaaaaaaaaaaaaaaaaattaaaatgggattctaagaaaagatgcgaatatactagtatcctatcctattaatatttagtcacaatctctcaatcttgagtttgactctccaaaaatcagctctatttgctccaaattaaattcaaaactctccaactaaacaagcatcggataatgtaaaggatccaaccgaccaaatcattttaagaagaaaagtaacaaaataataataataaaaaaatcattcttaataaaaattaaatatttttttttcattttttttatgatggtatttgttataattataaaatttacaaaa

SEQ ID NO: 385036 - DNA, 652 bp, Cannabis indica
ggctatttgcgagagggctctatattcagcttctgtttataatttagcgacaactttttatttctttgagcactaggtgatgtgattgcctcccaaataaacacagtaactaattgtcgattttttgtcatcaacatatccatcccaatcggcatccttgaagcattcaacattgaattctttggattgtttgaacataatgccatgtccaattgtcccgtttaagtaccgtaacaccggtttgcatacattccagtgatgttgagtaggattatgcatgaattgactcaacttattgacagtaaaagcaatgtcagagcggctaaggctcaagtattggagcccccccaaaacacttctaaagaatgtaggctaatcaaaccatttgctatcattgatgctgattttgtcaccaactgagagttggggtgttgtgagaatgcagcatgtgtgtcttggtgagtaaattagtagtgtatttaccctgtgagaggtgaatgccatacgtgttgggattttatgccctaaataaaacccatttcaatctaatctgatttgttatcaatgaaagattagaagtcatttatgtttacatgtagtttccatgtttatggtttaatatatgcaaaatctggtaagtccagaacatata

SEQ ID NO: 385037 - DNA, 4622 bp, Cannabis indica
ttttactaaaatacaagaatcagaatctttatatctacattttaacggaactccttccttttaagatatttaacttctagaatctggcaacacaaagattggtagccattcagaagtttccaccccaatttctagaaaagcctagtttatttctctagttttccgaaagccaaggcccctaagacattggggaaggcataacttgtcccaaactttaaggtgaagcccatggttacctttttcaaaaccccactaaaaatcacgcaccaaaccatcaattttgtgaacaaggcgatttgagagcttggtggattgcatagtatacataggcaaagacaggctcacatatttaatcagggtagcacgaccagccttcgacaaagtttttggcttccagccctacaacttagtagtgagattatctaaaaatgaagttgaaatcagcatccttttgtcttgatttgaagaggggaagacccaagtacttaatataaccctttggagaaccaatccccaaagcttccctgatccctctctttatgctgttggaggtattcttattgaaaaagattgaagttttgagcttattaaatttctagccagaccaagagcagaatctctcaagacaatgctagtaacttttagcttcattcaaattggccctaccaaccataattaagtcatctgtgaagaaaaaatgggatagaatcggaccacccctgctaagccttatacccttaatagtacccttacaaagagcatcctcaagaagccttgataacacttcaacagcccaaataaagagataaggatcaccctgacgtaagcagtatgagggtttaatcttaccaacttgccccccattgatgcagatattgagagtggttgtggagatacactgggagacccaattgcgaaagctgaggaatcccataacaagcaagaacatggtcaatgaatctcctgctcagtctatcgtaagctttcataaggtcaattttaatggcaaagtaatcctcttttccttttttctggttgaacaagtggataatctcttgcacaatcacattgttatcttgaatattcctacccggcacaaaagcagcttgggttgggcagatgagagtaggtaagataggcttaattctattcgtagttatcttggaaattaccttgtacatcacattgcaaagagaaataggcctaaaatggttggttctttttgggttctggaccttgggaataagaactatattcgtagcattaatgcccttgtgcatatttccagacacaaaaaagtcagtaactgcatcgcaaaatttttcacccactgattccgaatagtgtttaaagaaaagaactgacatcccatcaggaccaggagccttatggttgcccatggcaaagagagttcttcgaacttcatcatgtgtagggcacttgagtaactcctcctggtccgctaaagagatcctctcatggaaaaattgactgcaattaagagcatgtccatcatcagacccagagaaaattcctttaaagaaatcaatgaattcatacccaattgactctcgattagtaacccagacattatctttgttcaagatactctcaatggcatttgtccttcctctaatagcagccgagagaaacaaaaacttagaacatttatcccctttcttaagcatagagattctggcccgttgtttccagtataatgcttttctttctaaagattcatttagtgaccgccgaatgctacactgagtatcccaatcacgggatcccgcaagtaagctatgaattaagttaagttattgctccagctccgtgtcaagcttaccatattgagatctattcaatgaagaatagcaacccatgtagctcctacttttttaaacacgcgggcgggagcccaagagtgaccaactgaattccaggcatgggcaaccaccaacttacttctgtcatccagcgtccaaccttcttcgaatttaaaacatcttttaaactttgcctccatcccaccagtaataaggcatagaggtatatgatcagagttactcgtctaagatgagcaaataataactctctaaaataatctgagccaggccccattaaccaagcctttgtcgagagtagatttaacatggttctttccagatcggtgattatctcaagtcatattgtcaccctgaataggtatattaataagtccccgtgaatcaaccaggttagagatgaaagggataaactggtcccttcctgtagatccttcacgttccgaatcttgagcacaaaattagtatcacccaaaataaaccaaggaccaccaaaccaagggtgggaggaaggatccgagtaaacgaggccaaagatatatattgttgcgagaacaagagatacactcaaaaataaaaccatccttccaggccaaaataatacctccagcatcaccaaaaggcaacaaataaatgttaaagtaaaagtgaagggatttaagagtacgtaacagaggagtggcatcgactttgagctcggtcagaaagacaaaatcaagagagcacgatctgatcagggacttcaactcacgaactgtagaggtctaccacaaccctctacagttccaagcaacgcctctcatggctcctgttgaggagatttgacattctcatccacagtggtatgagagtgaacagacacactagagccaaaatcttaaattagaaaagagccaactagagggttcttcaaaattccatccatgcgacttgaggaattcgagttatcatcagaaggttcttcaacgaccaccttggactcaagatcttgctccttagtgtcccacgggaagtcacggatgacattggggtgctttcaaaaaaatttcttaggtctggagcataaagaggaagagacttcatttaatttccttttcttaaaaggagtagttctttcatttgtttcagaagtaggcttgacaccaatatcgcctcctaaggcccgaatctcatacaagtccaactgccaaaattgtttaagttcttgcaacattgtttcttgggtttggaaaaaattagacaaagccctatcctcatcttattgaaaagggacctcttgcccataaactaaattaattaaagggcccattttactggttgacccattctgccctttactagcttgggtgttatcaacaaaaggcccatacgccacatttggaccttctcttgaccgaattaggcccaactcaccaccatcttgattatttatcaccaattttactccctcgggcccaccagcattatttaagagagacccatgcccacaaggaaaagccttcgtaccttggcccacagcacacaacatattcaaactatttggcacatttgaggaatggttcaaatctgatatcgctatttcaggtataataccaggcaacttttcactctgcagaatgtcgttctccccacctttaccagataaagcaatatccaacacacgactatcaggcctgggcttgggaaactacaccgcctgcttcatattaccaacggtagcaggcacatgagacgtcgccatcaatgcacgcctagatcgacgaataggtttggagatagggcccttcaagccactgattgcaggatcaacgacgatcggtgacgaagtaaggttccatttgtgtttcaccggtacagaggcaaagtaccacgagccgttacaaatttggcacccgagaaaacatcctggtacacggatgaagttgacaactatggtccgtataaagggaagggaataccttcactgctcaccaatgtaaccggagaagacatggcattaccccaggattggtggcctaagcatccatacttatagcaaaaaattctgactttcttgaatataaattgaacccattattttacaccagcaaccaagtcgaaaaagcaccccgagacaagaggtttggcaaaatcgataacaatgagaactttgaggaacttactccaagtagaaggtttatctttctccaaatcaaccttcacaaccttcccaacaaggcttcccaatagctgaccattagcaatggagaagtaatcgtgggggaggttatggatatgcacccacaaacgcataattttgaacataacagggccagcattactcggagtccaagcctggagtacaagagagtaacctctaatgcaccagggaccgttctccagtgcccagttcctatcctctgccaactcaaaaccaaactcaaaacagtttgagtgcttggaatcatctgccaaagcaaccacagagacaggttttttccagcttttagccacaaaatcaataatctcaataatcgtagcttcatccactggcataggagccaccacttttccaatcaaacaaaaaatggaaagagccttgagagaagaagcacatggagataaagagacattggccttagtgcaagaaaagaacttgcctttaagaggggagttggtgacattaatggggttgctccatttttatgatattattgtatattttttagtttgtataaaaccatttttattattgtatgatatttgaacaacaatttttattttattttaattaatcatttt

SEQ ID NO: 385038 - DNA, 1063 bp, Cannabis indica
aaaaatggagagaattaagagtacgtaccagagaagtagcttcaactttgagcttggtcagaaaaataaagtctggagagcgcgatcgaattagggacttcaactcgcatactgtaaaggtctgccctaaccctctacagttcaacgtcatacctctcatgactcctgtagaggagatataacattctcctccacatgggtatgagattgcgtcgaaccaagagagtctgtgtcatcaaacagacaaggcccatccaccggtcgagacaagagagcctctttccattggaaatcccctcattcggatcatcagaacaacttatagagttcaagttgtcatttgaggattcttccaccaccacaatgggagcttgaacatgaatgtttgtatcccaaggaaagtcacgaactacatcggggtgttggcaaagaagcttggaaggtctagagaaaactgaagatgacatatcattaagctttcttttttttgaatggagtagttctagcattgatttccgacgtaggcttaaccctgatgtcacctccaatttcacgaatctcatataaatctaaactcctaaattgtttgagctcttgcaacgaagtatcttgagcttggaaaatattagaaagggctttttcttcatcatgttgaaaattgacctcttgcccacaaactgaactactcttagaattagtcaccatcaaaattgtcattttttccaagttgtcttgacccaaagaacccctcggcccacaccctttagggccctcaccatcaacatcattaattactatagggctcctcacgtggtcctggacaccaatcactaaaggcccaacatcacattgcaaattaatgcttggcccaatagaagacacaagcgacccattagccaaatcaaaagacaaaaatccttggcccacatttttcttattaaatatattcaaatgcttttccttctcagtaatcaatacacggtcaacttttaaattattattcaaatccaatataggcatatcgtcaggccccttttgttggaattttattttaccaggatct

SEQ ID NO: 385039 - DNA, 1188 bp, Cannabis indica
caacctaaagctttaataatttcttggcaatgaaagttggtgccttgttttgattcgggtcgttagttggttcttaaaagtttagacaaagataggtggtttttacctgaaaaacctttgtggcagatgggcattggtcttgtctggtgtcagatcttccaatgcgatttttgttttgtttgcatgaaaactttattatgtagaaaaaataaagaagagctaaaaaatggagtcattctttgttagaattagagctatttcctttagtgattccagcgtggaccatctggtgtgattcacaaacggttgtttattccgtttgatggatggagcaaaaatcaggtcttttgaaaggctatttttcttttttagttgatggaatcatttgtttggtgttgtgtctcttgacctttgaaatatctgtgattgcttttcattaaaacgggaagaggaaaaagaaatatctttcatgccacgtgtacatattaaacaaaaatttgaaatgaaagtttctttatgatgggttgatgaagttaggtagataaagagaaggaaacgtttggaaaaggagggagtattcattattcaatacaacggtaagattgggtaaaggcgaacaatgtataatatgaaaaagtaaaagctaaggtagtgtagtgtagtgtagtgtagtagtgtcatagtgtgctaacatgttgctttgtttatctcaaaagaatagaaagaaaagttaacttttctagtttttgcccattcacgttttgggtatcttatctttttatatgttctcatttttgttagtcaaagtttcagactcactccttctgttctgttcttaatcagcctctccaatgttttgaagtaagaaatattggaccattctttgtcactattaacatttctcttgaatggaaagaaatgacaaaagggagactcatattgaaattttctttgccttctttctctttaactattaattaggaaaagtgacttttgagaaaccaaaataatttacatgatatttggtatcattaagcaaacatctttattgaaaatataaattaaaatgattactattaacagaagtagtagaaacttagctaaacatgactatcatttactacctcttaccatagttagttgtaatgtggattcttaacaaccattaagctcattgtgtatcatgtc

SEQ ID NO: 385040 - DNA, 4680 bp, Cannabis indica
agatgtgatcggaatcgggattaggattaggataaggattgggatcaggatcgtgatcttggagaaaaaggaagctttttatttttttttctatatatttttagggaactgagagatatggatggagtatgtagtagagaaagagaatgtagtggtgggtggtgggttttggtggtcgattatttgacctcgacttttctagttcaaagtttacttaacaaatttttttctctttagagcggcccctcttgctaatggaaatcgaaaagtttggttagagcaaattagggatggtcaggttaggctgggattgaagaagaagaagaagaagaagaaagaaagaaaaaaaatatagaaaagataaaaaaatgataaaattaattaattagttttgaatattatttattcattcatttattaattttaaattattttaaactaaaattatgatggtgtataagtgtaaaaacgtccaaggggtatcttttgagatgcctaagtgataatttgacatcacctagtccatttatatattttggtgatgctggtcacatgttctcggagatgttattattttatgaaaacaaaaaactcaaaactttcaatttccgagtgagtcaatttgtcgaaaattgaagttatgaatttgattgatctgacttcatggatcattacacttgtgaaaaacttgacaggcgatcaaaacaacatcagatttggataggcagtacctaaggaactaggtcatttattgacctgggcgctgggccctttaaaccgagctattgggattctatttttgaaacttccaaggcttctaaacttgaggatgggtctcctccctcatttttgaccatgccagatttaatggtcatatcagatttggtatttgagtaattgaaggtggcgtcccaagttgattgtcaacctgggcgctgagccctgttcttagggactcgggttggtggttttctccctgagtttactagaatctttattatttatgatgatggtgaaaattcttggagcactttttgctgatctgaattggaaacaacccaggttggcaaaatgtcaacttgggcattaggcccgaccccaagtgtcaacctgggcattaggacctagttttgccccttcaaaagttccttttggtcctcaaaaatagttcattttcaatattttctgaagacggagatgatgctcgaaagaattcttaaaaaactccatttttgtggcctaagttggcaaattgtcaacctgggcaatgggccctattttttatgcccattatttttccttcagaaggacctatttcctcattttttgtgaagaatgattcaatgaaaaagttggatctttgatcagacacttggaaggcaccagattgacagattgtcaacttgggcattgggtgttcggggccctggggcctcaagtgctaaaaaatttaacttgctctgaatttgattctaatgcctcaaatatgtcgtggtatgtctagttgatgtctcaatgaaagttttggccacttttcaaaaagacgatcctagaaactgaaatcctagttgaggaatgtcaacttgggcgtcaagtgaaaccctagttgcccaggttggcttccgagtagtaggtttgtgtaattttagctccctggccctggattaggttattacatgtctaaatggtactaaatactaaaacatagtgagttggattcaagttattaaagtctgaacttccatcctagagatcctagagttaacctgggcgtgaggctagggtcccctcctaggttgactgctatgactcgagtctactcaactccgtcctgtcatccttcatgccacgtgtcaaacattgatgtctatgtcgttagggctaatcttggtgtaaacaactaaataaaaattattgacactaaaaagtggccaacatcaacttgctagattggcgagatgaataatgaattaagtaaatattatagagagacacacataatttatagtagctcactccctatgtcttgatggtaatggagctacatctactttgagtttttatttcttacaacaattacaagagaattggctaaagtaagagcttagatttctagagagagaaagtagagagatatgctctgaccttgtaggggcttttttgaatgtctaaaaaggagctagtggagctcttattttatgcgcaatgagatacattaaaataatacaaaaaatatgaaaaaaataattatgagcaaatcatgaccgtttatgatgatctaatggctaaaagtgacttaagataataatctttaatttttggagcttgaatcgggtccattggatcatttttgggtaatctataaaaattatcacacttgacttagggataaaattttgaccttaaatctttgacattgtgatatgagtacgaggcatttcttgaaaaagctttcaaactcaattggaatggcattaattagataaatattgagtgagttatgattgtttactaaaggaaattcagcaactagcgcccaagttgacatctaacgcctgggttgacattctgacgtcaacctaaacgctttatgagtgggaaaatgtgttgaacttgtaattttttgatattttagtgatatattgagattacttagtcaatttcttagtcctggtgaagttgtttaccagttctcaaagatatcactttttcacaaaattgggtagacttgaaacttttcaatttgcggctaatttgttgattcaacttaggccctgagtgctcttcgaggagcttctcgaggcttgttttgatatttatatggcattcaagattacaagtgagatctcttacctctttttgaccaaaataagaattcatggagaaaaaattatgtttgtggagcggaaacatgcgaactaggttgtaagttaacctgggtgtagggctcagcacccatgtcaacctgagcgttggggccctattttagcccttagatgatctcatttatttctcgagaacacatgtatcttcattatttctgaaaacaaaaaaaaatccaaaacactttttagaaaaaatacttggaactggcccaagttgacaatatgctcgtaaaatctcaacgtacagaagactatgtcactcacctagattccatgttcggaatcctacgactttataaaatgcgacttaatcccttgaagtgcaattttggagtgggcttaagaaaattcctcagttttatggtgaataaacgaggaatcgaggctaatccagcaaagataaaggcattggtggagatgcgatctcccaccaaactgaaagaggtccaaagcctagaaggtaaagttgccgcactaaatcgctttatattgcgttcctctaacaaatgtaaagaattttttcagattttaaaaggtaacaaaaagttttagtggactgatgaatgcgaaaaagcttttcaggcactgaaaatgcacttggggcaacccccgacactatccaagccgatgcctggagaagttttatcgatctacctagtagtgtccgaatacgcgattagctcagtgttaatatgtgaagaccaaagtaggcagcatccggtgtactatgtgagtaaacgcctattggacgctgaaactcgttatccataaaaggaatgactagcatttgcacttgtggttgcttctcgaaagttgcgaccatattttcaatcacacagtattaaagtactaacaaactatcctttgcgacaagtgttagcaaaactagaagcatcaggaaggttacttgaatggtcagtagagctaagccaatttgacattaaatataagccacgatcggcaatcaagggacagaccctcgctaatttcattctcgaatttccaaacgataaagtagcaattattatagaagagcgagtcgaccctgaagtgccaacgggggaagagaggactttgtatgttgatggggcatccaacaatgaaggatcaggtggtggaataatactaataagccctaacaaattcaaagtgcatgttgtcttaagattcgaattccttgcctcgaataatgaagccgagtacgaagcattaatcatgagactaaagcttgctcttaaaatgaaggtcgaataccttgaggcatttagcgattcgcaatttgtggtttgtcaggtcaatggagaatatctggctagaggaggacgcttagccaagtacctttcctattcttgtgagttgttacataaattttttttcgtgcttataattctcatgcagaagctttagcctgtttggcctcaataagagaatcagaattactcgatgtaatacctgttgatgtattagcccatctgactatcaatcgcgaggagatgatgcaagtcgatgcaactgagcaaatcacttggatgactccaattgttacatatttaacaatgagaaaactccctgatgacaaagtcgaggctgaaaatttgcaatagcgagctgctcgatacgtcatttatgacaacaagctatatcataggagttttagccaactgttgcttaaatgcatcgatggggatgatgcgattatatatgttgacctcgcttttagccaacgataatgagtcttaattgtaagcgacaagtgatataatataaatgtaatatagtaaaaaaaataaagaca

SEQ ID NO: 385041 - DNA, 1651 bp, Cannabis indica
tatatgtagaatgaattggtggacggaagatattgtcaaagatccaattacaatccatttcttcctaaatccaactttttgacagccaaggaatctagttttaatttgcgattcacttttcactaattagtttcaaatgggtctggttcggttatatcacacaattataatccttgtcgttttcattgcttatttactgtatcttttgacacatttcaattaaaagcagatattatatggctggtactggttccaaagaggagattagatggatagaaagtgtgaagtcaggtggagctgttccatttcttgatccagaaaaatgtactaatggttgggccactccacctggggacaagttcatggttagaggtccagagtactttaaaaccaaggttaaaattcctgctggcgaatatcttctaaagcctcttggatttgattggatcaaaagtccttcaaagattggagatgtcttaaacaatccaaacagccgtgtcagaaggatcatagaagatgagttttcaacaggtgtcaagcctttcatttgggctttcaatttacaagtcccaagcaaggataattatagtgcggtagcttactttgcaagcacagatcctattcctgaaggttctttgatggaccagttcttgaaaggtgatgatggatttaggaattctaggctaaaattaattgccaacattgtcaagggcccttggattgttaggaaagcagttggggagcaagctatttgcataattgggcgtgccctcacctgtaagtattgtgtgacagataattttatagaagtagatgtggatattggatcttccatggttgcaagtgcaatagttcatctggcatttggttacataacaacattaacggttgacattgcattcctcattgagagccaaattgaatccgagcttccagagcgactgttgggtgctgtaagattctctgagttgaatcctgcttcagctaggtcacttgaaccatcctctgatacaattagtggtaatatgccgtcatctctgcctactcgactatggaagtcaattgggcagggtttttctcacattcttcatcaaggtgtccaagaaagtggctcttcctctgggtcaactcacactaatgggactgtcactcatgaagatgctagcgaacgcactaataaatggtacgacttttgaactatgattgcatttacatttgccaagaactgcctatctcgtttaagacttatgtttattgctatgcaagatgctgataacaatgctgtgaatttcaggtatgatgttaaagcatatagatactaatgcagacataattatccatgcttaattcttgactttatttgcctaaatttccccgttactttgtcaaatatggttgtctcacttcacttacctaattctatatttaataaggagatttgtcttaggattataactgtcagttcagattcagatcatagtatagcatggcatagcatagcctgcagtgcagatatatctcatacattctcattataatgtcacttggcggtttttgcttttcacacgaattatattatgaatatcaaattgttacatactcatattttattctttggtaatcttgaaattggtacatacaaatatatata

SEQ ID NO: 385042 - DNA, 1326 bp, Cannabis indica
cgaatatcccattaagataacacagaagaataacgtgtcatcatatgaccaagttatccaattcaacttctatctaatctaatatcaccttccacggttctgatttttctgactccaatccaataataattctaaattagtcaaacatttcacacattagtaattaattatagcattttatttttttttggaaagtaattataacaatttagaaggtatgttttccatacgtgacaacctcaaacatctcattctttcactccaaatccaaaaatgataaccttgaatctttgatcagtttcctactcttctccctctatactcaatatcccaaaaatcttcaaactataaaagcaccgaacctcttacctctcagttattgagttgagtttctaaatggagacactaaatctattcacccccacattagccatattcttcaccatttttctactcatatatctaattgcttactttgtcctttgccacaactggggtccaaaaaatattgcagaagcaacaagctgtgtaatctctctggctcatggaacaccagttgttttattagctctaaatgcactaaccaaatcccatatgccactttcttcttttgcctctccaaacaccaattcacaaaacattgtgcttgactatagcatagcttacttcttagttgaccttattcactacatagtcttcttcccaactgatattctcttcataagtcatcacttggccaccctttatgtgttcatgacatgtcgtttcgtggttcaccatggtgcctcagctcttctggtactccttgttcttgctgaggccaccagtctttgccaaaatgtgtggagcctggcttgtttaaagaaggcctatgcacctgcagctttaaaactgtacgagtttctttctcctcgtttttatgttttctatactgttttcagggtagttcttggacctttgtttgtgttgaagatggtggttttttatctaagcggggctgctgatacttcaactccaaaatgggcatggatttcttggatggttgttataagcactgctatttttgtaagcatattatggattttgaatcattggattgagtggtttagagaaagaagactagttcagaagaaggtgaaatagaagtaggattgcattattttatttcatttattaatgaagagattcctgtaattaatcaaagctaattaggattttcgcccctaaattttgacatgtattaaatcatgccccctacacttttaaggtcgttaaaaatgcctctgaactatttagattgttgaatttaaggatttttatctaatt

SEQ ID NO: 385043 - DNA, 1931 bp, Cannabis indica
ctctctctctctctctttccaaccgaaagaccactaaaaaataatcgtccaaaggctctcaccaacccacagacgaccgttgaatggagccgaccacccatagaccgtcgtcccaacccaacctgattggattggacccattacccatacggagcccctttgaacaaatcaatgtcaaaggtaagtttttgaatctcgttttgattttgttgtatttttggttgataaggtttatgtgttcattgatttaggctagaaatttgttgtatatgtgttgatctatgatatgtgatttagggttagagttgggtgtgatttatgttcttgaaagaaatttaatttttaagctaggtctgttgcaggtccaatgtaggtctcatgcttgtccaatatgtgtttgttaaaaactggatagaggttgaagatgaatgctcgataggggcatgatggttgtacgtaaaggtccgatagtcccttattagtgaaattaattacaactttagaggcacgatagagtacgatgcaagtacgatatgggtatgatggttctaagttgaaaatgatattttaggttgaagaaactagtccgatatatggtacgatgtgggatgatagtgggtacgatagagttttatttttttactttttttgttggtatgacttggtacaatagggcacggagttgtgtttgatggtcttattttctttaatttattaggtacgatgcaggtctgatgttggtccgatagttttggcaagttttattaatttgatcattgagtctttcttggatgggggtacgatattggtatgatgcttgcccggtgcctttatacagaatgtctaacttgcattttgttgtattttttctatagaatttaagacctccaaagcttttagttcctatttcaaaccattacacatgacatattacttggcacggtggcagtttactattcgaagataaaacaaagatttaatgactacaaatcaatagaaagagtgaaggaatcccctttcaaatagttctttgagagagagagaaattcaatttctcgggtgtactaatccatcagatgttcttgcacaagaacaaatctgaaaagcttgatgaagtccacttttacattgtgaagaataaatgtagattcagtcgagttgagtttgctttagtgactgtgttgaacttgttactgttgggattttatgcccttaataaaacacatttcaatataattttatttgctatcaatagaagattagaaatcagttaagttaacatgttattttcatgattatgatttaatatacaatttttgataaattcagaatatatagttattcactattacagtgatgtcatcataatataaagtaattgtgagtatatgcttccaagtttaagtcccatgatttatcattagtacactagatttacactgacgtgataatcaacgataaagtttatatacacttggataagtggcaagtccttccagggcattggtaaagtatactagtatcggatgtatggagtatacatcggactggaccgatattaaacttggataagtggcatgtccttccagggcattggtaaagtatactagtatcagatgtctggagtatacatcgcactggaccgatattaaacttggataagatgtcataaacttacccttatatctttctaacttaatatcacttagttgatctaagatcaatagatcttaatcttgagatgcttagatttgcgcttaattgtgttatttgtattctttgacgtgttcgttaaagctgaccaagtagattagcccaatacttacatcttggaaacatggtagtataattttgtgggagcgctaatcatagatacggaacctatagcttctataatgacatagaagtaaaatgataatttcctttgagct

SEQ ID NO: 385044 - DNA, 1309 bp, Cannabis indica
tttgctcccacaaagtctgatgttcgagtttttactggttatttacatagcaattgttaataattctggtccccaaatattatagggctaggttgaaaagggaaattgtatagtttttacacctaaaaaaagtagctcaaatggtcaagtaaggggtttgttagcttaaattttgaggtttgagtccttaccaaaactatcttttcttgatttcatctaacaagacacaagtcttcttgtcttgtaggaattttatattcgacatgttgatgggctaccaataagttcagaagcagaacgagagcgtgtcatgcagtgcctcgaagcagccattgaaagacgagcatccgaggtaagaaagcacttaaactacacatcaaaaggaaacacctttcactttacttcccctcttatttcaaatcatttacaaaattgaacatgttttggtgttgttatgcattgcagggtctagaactacagttgtgcacagatgatagaacagggctcctctctgatatcactagaatttttagagagaacagtttgtgtatcaaaagagctgagatttcaactaaagacaagaaagttaaagacactttttgtgtcactgatgtagctggcaaccctgctgaccccaatttaatcgattcaattcgcagccaaattggtcctagtgtgctgcaagtgaaatataatgctgctaccgttgcaccaaagcctcctcaagagacaacaatgaagtttctctttggaagtttctttagtgctaggacttttcagagcttcaaactgattagatcctactcttgagatttcttcttcttcttgtatattcattctcagtacataaacatgatagttatggtataatatagtataatatatataggtgttcagaccctctaaatattaggtctcagtgaccagtatcttgtgttgatactgtacatagaagaaacccagaaaccattaatgtagaaaagcaaaagagaaagtaaaaaaacaaaaattactggttgggtttgtacctttgtgtatatatatagattcaagtcatgcaagcatacctacttgtaagtttgtatagtgtagtgtgtacataacaatattgtacagaagatacataagattgtacagatacttaagctttaatcagaacttgtatgtttatatgtatggttggtttttctatatatttgtttttagttcttaggtagttagaaagagtttttggcggttaaactctttcaactatcgatttacttgcatttaatcatttaaatttaaatttttttggcggtaaaacttt

SEQ ID NO: 385045 - DNA, 1251 bp, Cannabis indica
cattacctccaaccaaacgctaaaaagaaagaattgaaatactaaccagaaagaagtgaagccgaatatgcagaatcaacattctaccaaccaagaaaaacatatactttagtaactaacactacatagcttcctattttctcaggaaagaattgtttttctctgcaaaagaataatttcttggactaaaaatctacgtaacatcacagaaagaaaaagaagaagaatatgcatagaaaagtacctcactcaaacactgatcttcatctttatcactccccaaatagcagctatattctgaagacccatttgacttcagcttctgcccaacgagggtttcatctttattttcaaatccttcaaacccattcaaattttcttcctgttcttggctaaatttcttgtactcaatttcactttttccagaaatagaatccccaaattcacaattggtgtctagtaagggtgattcatacttatagcttgggaaccagtgttctagctcaggaggctctgtaaaaccccaaatcaaaataaatcactgcagttagctaactttatgaacaaaagacaattcaaaatttatgctttgtttgacaagtgagaaaattgtagcttacgaaccagagagaagggaaagcgaaaatgaagaagagcccaaaatctggaagaataaagcgaaacttaagaaacgttgaaatctaaaacaaaacccattaactctacctaaagatcttcaagggtcgaaggtagcagatttccattactttctcaggaaccaaacagaactccaaaaagaaaaatacccacaacaaagaaaatcagtacctgacaatccgaagaattggagatagacaaatcagagcttcggaggtgtgatttggaaagctccatcaaatttctcagagcaaaggagcttgcttgagtttttgctttagtatttgttgccgggtgaatgaaattggcgccaattttatgaaatatttaaacattggatttggggaacatatttggctccctttttttaaaaaaattaaattaaattaaattaaaaattgcttaattaataatttgttttatttttggctaattaggatttttacccctgaactttgacatgtactaaatcatatcccctgaacttataaggtcgttaaaaatgctccctgaactattgagattgttgaatttaagtacttttatccaattttagtaaaaaaagtctaacatggatgaaagttcaaggagcat

SEQ ID NO: 385046 - DNA, 1282 bp, Cannabis indica
attatatgaaattattcattaatatgtgtgttgtaactgttgttatgtattatatatgtcttgttctttatttactaaagttacctctgttgtaataatgtatttctactacttcaatttggttcttttaattttaaggtttttttttcttctctctctcttttttttttaattattattattattcaattaactttaatcattttttttccaaaaattgttatatatgttggacacatgtgaatctttgtgctcatcaactacgtacatttagatgttatcatcattttgagactttggtaccatagacttatcaacatctcagtaggggaccgattcatataaatgtatatatttttttcttatagaatatttgtgaattttgtttttattacttggtttaaaaaatttgtgtgtgagctccaatgacatgtgatatgataaccatattcttaatttctcctcaattggtaattttttgagctcatgtttctttataattattattattaagttagtctttataatcataaaaattggttagtattgataatagttccattactttttttaaaaaataacacttgtaaataatcatgatatcatagaaggatatctaatttaatgaattctttacaaatacgccaaatcccaatagtgtcaaaattctgcggcagaaattggtgaaattcattacaaatttattgatatacttgatagttgattcacatttcaaagtttattttcatactaataaataagttgttgaaaagttagctactctttcaatactatatcaagaaaatcacataagtgttattagactaatttaatgttgacaaactagtatttttgcaatttattactcatgtgtccatgagccttaagacacaaataccagcccaataactcttgatccaataacaaccctaacaaaacaatcaatctcagtttctaaggttcgaaataattcgagaaatcctgagaaacttcacacttgctagggttagagattcacacacgattcacacaagaaaatcacacaaaatcaaaatagagagattagggttaagactcaggctcagactcggacctgagacctagacgcagactcggatccggacccagacccggggtcgggacccaaacccgaatcaggactcggattcgggacctgtacctgaacacggacccgtgactcggattcaagactgttgagaatcatggggtttcatctcaaaaccaattggcaatgagtagagtagcccatgttcttatatat

SEQ ID NO: 385047 - DNA, 1677 bp, Cannabis indica
tacatataatgtagttcaatagacaaatatatagataataaataaaaaccatgaaagttgatcaaattcgtttattattttcttttattattgcagcaatttgattttgctttggctgataactataatttatattttattttattattttctatatacatattggtcaattattaggtaggaccgaataataatatataatatataaaaaagaattaataattaatgcatgcattaattttatctgcttaaattaatgcaccacacctatacttatgatgaagaagtcattttcaaatctcccttaataacattcattcaactatatacaattaattcactaatattatatatatttatttattattttgttatatagagatggactgtttggacccggaatttacataatttaatttccatatatggataaataataataataataataataataataataataatagacatgtgtagaagtacaacacgttaggtagtgttgaattattgcttggatttatatatatgattttgctgccaataaagtatattatattgtagtatatagctcactatatattttcaattttgacgaaaataatatcatttaatttcctcactattattattatagttatactttgtcatattttgaccaaattagttatattttgtttcattctaacaatatgtatgtttctaaaacattcatatggcattattcttatttccttgatatgattataatgaggatcctttcaacacatatatagattatgtatatataatgaggatatgagaatataattatagtcaaattgaaactatatatatttgaccttaaagtatcggagaccacatatatattggttatatattaggctttaacttatttagatggtgtctattaagttaaaacactatatattttatgtgaaatttattataaatgaactcaattgtttaaaaacaattgctatattacactaattctcttaattttatattttttttaagaaagaattagcctcattaaaatccaaggccaaccctaaaattaatgggtgttaagaaaataaaaattattggaccctctgtttaaaatatatatatagtatttttgaaaactaatattttttttaaaggaaaaatatgttttgggtctttgaactgagtaggtcctaagcgcagacctaattcatcttagctcaaatttgaccctgttaaaacctctaataaactcattaggggaatcctcaaaaagaaaactaataaaaaaaagtgccaagaaatattattcatcaataaccagaacactaaatataataattattcaaaaaagaaaaaaaaataaacctctagccaatgagtgagtcacacaattctcttaaaattttgaatgtatttttatctacaaagtttattaaattaagggaaatcactgtatatgttttaaatatttttgtccacttttgatggtttttacttttatttttatttttacagtttgtgttttttaattttacactaccattagtttttttaattcatttataattgccatttctctgcagtaaacttccatcaattaatattcaacaaaccatatttttgtaaactttgtccatttttttttagggattattacataaggtaccatttttttttggaaaa

SEQ ID NO: 385048 - DNA, 1575 bp, Cannabis indica
acgaagtacgtttcgtttttttttttttttgtatttttcttcttgtgggtttttgtgttttgtggctgctattttcttacattttctgtgaatggttgttaaatctatggaatgtggtgcatctgcgtttatttttagatctaagtctttttgtgctgtattttgatggaaatgcaagtgatcttcttgatctgaatgatttcgactgtgttcgagtaaaaaaagtttggactttataggaatctgattagtgctatgactagggttgaaaatattgatttacaaaacctttgaaaatgataggtacaatttcaaattggaattgggaaaccactaaatgggtggcaaaactgaggagctgattgaatcttgtaaatctttgctttcattttcagtatgaattgaattctgtgtcaaaattctcaattagaaattatctcaaacctctgagcaatccaaaaaaaaaaacaatttggaaaggaaaatagaatttattgacagaaagacaatgatttgtgtctaaatttgagttggttgcttgctattattaaattatcttacacattcaagtagaatatgcacttaactggtttgttctgaaaataggtgccaaggttaaaatagaatgtaaagacaggacctcaaacaagcctgtgtacagtaaggaggccacaacagacaaaagtggatgctacaagatggtcattcctgaggaccatggtgatcaaatctgtgatgcaatggtagtcagcagtcctctgcccgagtgtgccattccatccaaaggccgggactctgctcgtgtcatcctcaccgataacaatggcattgcttctaagcaacgattcgtcaatgcaatggcattcactaggactcagaaactggctgtctgcgaaaacgttctcaagcagtatgagttgactgatgatcaatactagagattggtttgagtgaagttattatgatgatgatataacttggcttggcttatcgttttatatgtatctttttacttactttttcttcttcttcttatggatttgtttgtctgaaattgaaagacctttaatcttatttgttaattgaatctactaagagattatttcagtctctagttgtccctatcttattatttaataaatttattgtattcaattaatctttgctatgagtcttggattccaagtttcatagtaagaaactattgacgtttcttttatataataatgctggagtttatcatggtaggcattttttggttttgaatgatttttagttaaggatatagtctctcgatttagccttcttagttcttaggtggcgtttggttggaggtaacgaaatggaatagaatggaaaggaaacaatttttattccattcctttatttggttgcattttaaagtattggactagcattccaatggaatgctctttccatcattttggtggaatggctatttcattttaaaaagaaaggaatgaccattccaatgcaataaggaaaaaaatttaatgatttttttatcaatttttttttatgcattttaaattttattccattcctattcctatt

SEQ ID NO: 385049 - DNA, 2396 bp, Cannabis indica
taaacatgtaaaagtataagaaatcttatattagttgcagcaaaatataatgtctccttccattctgtatattctaaatctcattcctttctgttgtaaagtaataacaattactaaaccttgattctccttcgttaacctgaaaagcgacaatttttcataatttctacgaaggtctgagtatcactttaagtagtttgggataatacttaagtcacatttagaacatattttcacaaagagaaatatctatagcaattcaaaactcaaggagaaagaaaggagagcttttcctatgtcatatctaggaattaggttagaatggaatcactaagctctctctcatcacttcctttatataggcatcacttagagtttagtttatgagatggacttaaaataaagataattggactttaaatctactgtagggctgaaaccactaataggctatagagttagacttttaccactttattttatgtaatgaaactaatgtgtctttttccaattgtatcatttatctcatctaattatttgaatgccaattttttattttaataatgatcaaataaaaatacactttaaatatatttattaattagacccacaaagtgtcttaattaacaaataaacccctacttctcttttattctcaaaattgctaaaactttgtgaatattctcaaataagacaatctatatttttgaattctaatcgacttattaaatcaattaatgaagtctacaagatgatattatcctagacaatgtggggaccatgggcttatgtaactaagctcccaataagtagatttaaaatttattaagtaaatttcctagcttattaatttctcctgactacactatagatttgaaataacactcttgattatatagaatactctatataccaaataaagatacgctataaattatcgattattttaatctaaacaattaatgatcatatatagacggtttatatcgagtaaggacaaatttattattttacccttcattatattttatccttaaaatacttaggtacttgtaaatgatatatcagtaaactaatgtaattactgaaatgagtgctctttcatttatcatgtttagccaaactcgaagaaaactgtcgttttacttctaaataattatagaagttatagatttcatatatatgattaacgctcccactcatgcactatagagttccaaagatgtaagtatgggctagtcctacaggtaagctggtaatgaacaagttaaagaattcatatagtataattaagctagagcttaaccatctcaaaattgagttgacctaagatcaactaagtgacattgacttagaaaagacataacatctgatacatacgatacaactttgctaatgccatccaagtgtaagtaaactacatcgttgattgtcacgttagtgtatttagtacactgataaatcgtgggactaaatagtttgaagcatataatcatgattactttctactaggtatacaacactatcatcgtcaataactatatgttcggaatttaataaaatttatatattaaacatataatcataaaagtaatcatgtgaatcatgcaacgtaaaataatttataatattttattaattaataataaaaatagattttatttagggcataaaatctcaacacttggaccattctcaaaagtcatctaacagttaaacatatttgtattaaaattaagaagagttacatcgacgtcatttttgaataaaaatattaaaccaccacctaatcctactctaaggacttcaagtccattatttaatttaaaacttggcaaaaataaaaaattacattagatcctagttccataaaaaaaaaaaaaaacatgaggggagtgctctttaacaagcaacttcaaatgacggaaaacactcgggttccccaaattctgagtattacagcttacaattttcatggttggttgtagggctgaatctcagcctccgcatacttgtcattgaaaccagattgatccatatcaacatcagaaatagtatggttttgtccttcttcaagcagcaaatttgaagtgagcattcctgaagtcatatatacctttgcatctctttaacatttgtctcagcgacgcactatcttgttgtcttttaatcattcaatttggtgaaactttctccttattgttatgcgcagtgtcacgggctcaccttttcaggcagcggaacacccgtgcggcaccttgacttctctaaaccaaggtcagccttccaaccatccgagtaacaatggggtcatttttcgcgcgaccgtgtgcctcgtgcacacttccgtctcttgaacaactcccgtcgagtcatgctcgcaagcatccatgagt

SEQ ID NO: 385050 - DNA, 2689 bp, Cannabis indica
ctaagtagcaaacacagctagtatgctctttaattaatctctcttcttcctcttgaatcttcacaatgatcctaggtgacaaaactacattattatcatcaaactcaaaatcacagcttctaaattcaatagacgtgtctacaaactcatgcatgtccaaactatgagaattagttccactagtactacaattagtagtattaatagtacggtctccaaatgagaacattatagaaacaatatcatgatcattgttactagcagagacccctaaactcgaagacaacaaacccatcgaaggatctgacaactcaagatccttaagctctgacggccacagattgataatctcatgatcactattattatgatgatgatgatgatccaaggaaagtttgttatgatgatcatctgataaactagatgtgtcattagtagtaatactactactaagaattggcttgacttcttcaagaatggtagtactagtgatcacattcatgagattattatcaaggtctgaatctttgattatcatttgagggggtttaagaatgtttttgcatgtgtgttcaccgatgtatgtagtttgatacagtttaggattgtcttgtatttgttggacttgtcttgtggctcggcaaccttgatcatacttgcgtgtgcacctaaagtaagccctgcatgtgttcacaccattcactaaaattaatttgtaagctaattaattatttaacaccaaaagtaaaccacatttttcttaatgatatatatcattaattacacacaaataaagtttattagttacagtgtgtgataattatgattaattctattccttttccattatgttttcttgatcaataatgggtttcttttcagtatccctttgttttttttccaaaagatggggcctgccattttatctttatattacttgggtttttctaaattccattttgcttctacataacgtcaaaaaagatatcttagaattatatggtaacatgattatgcaatactattcttttcttacatatacatatatatacatatttccatctccacacaataaagcattgctattggacaccaatagtaactagcacctctaaatatttcgtcttataattgactagcgatacttcctcaaagttattacattaaactttatatggtctaataattagttaaaccaatagcaatactaatacataaaaagattagcaccggtacttttagcatttctcctaaataatacatatagagtagtctactctagtggtcaggggcggacccaccttatagcgagggggggcagtcgccccccctgaaaaaaaaatcgagataaaaatgtatatgtattttaattagttacaacatatatttgtattaaaagatgatatttatagacataatagtaaccttggtgtaatggttaaggtagttggtaaataggttagaaggtaaaggttcaaaccccactaactactatactagtggtcctaaaatgaaaatcttaaaacaatacatatgtatcctatcctataaatatatacctaaataaaagtataaaattaattaagatatagagatataattaaccttgggtattcagcattaaggatctccttttggccatactttctccaagcctggccatcttctagtgttgatacagtggtggtccatgattgagagttcttcctgctaccacatatataaaaataaaaataagactgtatatatagatagtgtcatatatatctcagttcccaataatacaaaacaataaaaattaaaagtaacacacatgtctctttttatatacccatgtgtgatttcattcatatctcccaacccaagtggggtttcttattatcatatatgtttttatttttatccatgaaatgaccacaaaaacaaaaggactagctagtactgactcatataatgaacgatccacatttacacacatagggctttttaattcatcaattataatattattgagataaaaaaagaaaaaaaaattaaaaactatatcatcatgatcatcatgttaattaacaatattaaaataataattaatttacaataatacatatatgtatatgtatataccttcttttataacagcctctgcgatctttgataccatgtgatgatctctttattttactctcagcaccataatcatcagagctgggatcatcacaatgtgaggcctggtcatgagggttgacctgagaagtctgatctgaagaattactatgaataatattattaatagtattatcattattgtagccagtcaccacagaaagagtctggctaaaagaatttaaaatctttgaagcaagttcttcagcagatgatggtgatgatgatgagactgacccaaaaccaatattttcttcaacaagaggcttattatgatcatgaagcataagctgaagcttggttgccatctccttgccttgaatcagctccttaatcaatctcttagacaaattttgaggtagaatacaagtacccatttggccactaactactatgtactctctctcacgaattataaacaaagttttgttgtatatatataagatcaactatcactcaatctgtcattttaccttttttgtgtgttttttttattgagtggggggtattattttttttttttttt

SEQ ID NO: 385051 - DNA, 2057 bp, Cannabis indica
ttatttttataatcatagttggttatatactatttgcactaaataaaatacatctatgatctaccattgaactttgacatagttaggtataaaattcatattttaactatttgcactaaataaaatacatctatgatctatcattgaactttgacatactaatgatagtgagatcttctaagtctcacttttctgtttgaaaattccctattttcacacttccattctcatttttttttcctgtttttcaaaaaaaaaattaagagaaatgctaaaaggcattagtggtgcctagcgccctcttatgtgtcaatattaagtatcaggtcccatataatttaatataatagctttttaagtattatcgctagccaatcgcaacgcgccatgttaagaaagtgctagacaccactggtgtctaatagcaatgctcaaaaattaaataaataacacaatagaacttaagcagcccatgtggtggcggctattggggcgcatgcgggatataccatggtctatatgcttaatatatttatatgagaatggctaaaaggcaccatgcccaataggaatgctcataaaacagttaattttatatttcctttccaaacgaactatggactcggaaatctggtgaggtcctttcaaagaaaaattaaatatttggggtggaggaccctacatacattaatgtaggggccatcactattaactgttacgactttttttctctcttgacttaacattagatacagagcacgaactattataataaataaatcatggttgagacattaaatattaattttatgttttcacctttcactttctcttcaacaatgcgtataatctaatacatctctttctatccgacaaagctagttctaattcttaccacacacattcaaaacaaataatcaattaaaacaaaaagttgtttacttgtccaagaatagatttaatttttaaggacccagacccagaatccaacttcaaatgaagtaaaccaaaacaaatttgtgcaaagtgggttctcgaagataaactctctcacctaatttcttaaaaacattggtaatgggtttataacttgcacagaaattaagagaattaaatacaaacccagatttgaaatatgctgattttgggaaagatgaatgaaactcaccttcagaagggtcagtagtggcgttttgagctatggagttctgaggtgataatgagaagaagaagatgatgattaaccaaccatagtttgtacccctcatcttcagctatacatgtatgaaagaggaagaagatctattacggtgtagtttaaaacttcagagatagttctaacttcgaccaaaacgaagttgtagaactttcttatatatattgcgactgttgtccattcataaaaatgaagtgctatcttcttttcttttcttttattctagagcaatgctattttgcattcgcacgtgcctagaagtgacacctcgattggttatccaaattttataaaaattataacaaggagaattactaaaaggaattaatgttgttgtttggcattctgttggatgttatagtgttagaccaatagatataaaaattgtgttatatttaacacacacaaaaaaaagtagttttacagtaaattacattaaattttaattttatactccaatgtacaattgcaaaattttgatgtaaaacttaatatctaattaatatttttattaaaaaaaaaatttaataactttataattaattttattatgtaaaataataaaaaaatatataaatatttcataatttaatgtgatagtactaataaaataatagaaatgacataaatgtaaatgaaaaaatagtgtatttattgtggtgtaaattttacatcatagtaaatattgtgccaaatttgacacaaaatttactatgtgccaaatttacatcatctttttgcacaccattagaacatactttttgttaaatgagctatattttattttttcaccacttatttacacctccattgacgatgctcttgttggaaattattttac

SEQ ID NO: 385052 - DNA, 3660 bp, Cannabis indica
ttaaaaataaataatatatatataaaaaaaataagttttaacaatataataattagtgggttttgagttgaacattcagatctaaataaatataaatattgaatttttgtaatgtgcggtgcggtttgaattgtatattaacaattcaaaatcacaaaccgcactgcactacaccgtttagggaaaatatttaaattgcgatcgcatcgtaagaaatttcaaatcgtattttttttaggggtgcagtacggtaagcagtacggtacgggcagtttaatgtgaactcatgatttgtagttttctttctttcaagtttcaatagagtatcttttagtttctttctccctagttttttccgttcgagatgacttaaaagcaagaatagtgaagcccaatttgagtttgaccataatcacgtcgtaacctataccactagaacaattcatctatttctttaaatataataaaacgtacgagtccatgaacaacctcaatgtgtaaatatgtacacatgtcaaatttcgttgatttcgacagatccaacagtttgattaagattatgaataagttcataaaataaatttgtaaatgtaagctaagatttgataaacaatagttagagcaatagccactatgagttgttgattaagagaaatagtcttctcgtcgaccgtggttgatctcaagtttgaggtgattgtgggaggagagtacaggaaagccattgagatataatcttctttctcttctttaaagattggccttccaattacatgcttatactgtccaccactccaagtctgcaataagagaaaataagaaaaaaggaaaagcaagacaaggtaatgagtttcctgttggcatgttacataacataattatattagtgcaaaagtgtcatcattttctactgggaagcttagccagcattctacataggtggcatcaactataaaaaaggtaatggaatcatgattccgggtacaaatttaaggataacttattaccataattgcatctgtggtttcagaaatgtaaagagtcctttttaactttcctcatgaagtgttggtaattattgttaactaggcaatcaagacgattttagtcattagcacgtgctgtttgtaattatatgtgcacttaattactcaaacaaaaactgagtcgttccaaaatattatatatccacagtgaaaagaagtttcttctagctataccaaagttttattattgctaaacaagaatggcttaacagcttgtttatgaaactaaaattgaatttgaactaataatcttgtaaaatagtataatgtaggcataggaaagaaaaataagagattttacctgtaattgatctccaattgtgatgactaaagcatctttgtgaggaatgaaagaaagccatcctttcttggagtagacgtgaaactcggaagtgccaccacaaaaatgcaaagtaagagcatgagaatggtcatttctccttagaagcattctaataacttcatgcctcacagactcagcactactatcatcattaccatagctttgactatttttataaagacaacaaagtgttcctgtaatttcgtgcccttgccaaacaatatcattcccaatcccaaacatcaaattttttctttgaggattcttggtaattattattgaaaatactttctccgcaaccattgaaattttggataataggatttccattcttttgctgtcagtcacagtcacacacaaaataattatatcaatgtttataatacattcaactaaaattaagttgcttaacactgttaattatttgataaataaaatatttatttaccaaaatttggaatatccacttggccgaattccctccataagcagcttcaaaccttcatccgtactccaaacaaactcttcactgaaatcactttcactctcattctcactctcttccccatgaacttcctcaaacccatacggcatctccggagacctcgtcaccaacgttctcttctccgtcggaaccgcaaaaatcccggcggcatcggcctgcaccgacctaacgaactcgctggaaattccgtgattcaccacctgaaagtagccaaaatcggctactaattcgacgatcctcgaaacggtgtcgcattcatcggaaacgagagattcgaaatcgatgatcggaggagcttggacgcacctctgcttggggaaaatcttgtccggcaatataaggtccggaacgcggagcgagtgctcgagaaaattagtgagaacagcatcgttcgtaacggatgatcgacggccggagtggatcggagacggcggcggtgctcggaagttgatatggttatcggccgctaaagattcaggggaattattagctggcgccattttgagtgagtggccaagctcatcaactcagtctttatataattaagcttacatggttggtattggattcgatatattatggaaaaaggaagaaaagagtggaaaaagtgtaaggaagcattagcaatgatggcatgttaaggaggttggggacattataagaaatatgacaatgaagaggttttgcttttctagctaatttactttaattaattttgctggtttaataaaaatcaaaagagagaatcaaaatggttttaaggcataaacttttggtgaagagtgtcccactcttaacctttcgaattaagggaatgggttgtcaagcttttgctatgtcaagtcttagcttagctaatacagagaattattgatcaaagcttcaattacaattaataaagaaaaaggatacatgggtttctcttctgttttgtttgaacatggattcttttctatgttcattttgtcggcccattagatatatgtgaatagtacaactattttattattatgcaatgggggacattagtatagtctctggcaatttgagaaattctttttatctatataaataaactaaactttgccatgtggatagagtaaatattttgaaaaattcaacaacgtatagcgacctttataggatataaaaagcatagcttgggctcatgtttgtgtgaagaagtggcaatcatcatagatcttatatccgtccgtacatatagagatgtagaaatatatacattatatggaattccttagatggaaaattctctatgttgaaagtgatagatcatgcatccgtctttttttatcctcggcccgttcaaatagttgagaaaatgttcaaaaaacttcaaaactaagtttggaatgcatgggatttgttagttggataagattggattggaattaaaaaatgagcaaacaaaattataaccattgaaataaatggagatgagaaataattattgtaaatttaggttattatgttaattattttatactaggggattaattaggttaatttccgtattagtttttgggcattttacaattttgtatatattattttaattaattacaaaatatgtgcaaaaaaacttattatcattttctcatacacttttatatataattaaaaactttttttcaatttttattataatatatatatggtaataattattgattaatatatatatggtaatattggttatgtttatttttatgtttacaattataataaacatactaataatataa

SEQ ID NO: 385053 - DNA, 3500 bp, Cannabis indica
tgaaccattatttccatttcttttgagactgtttcatcccattttgtgaccgccatatggaaaccatagtccatgcaggaattcctggacttcttttcataagattcaaatccgaccatcaaacttccatcaacaggtaaaacaaagtcaatatgcatagttgttccacctgctagtgctgctgcctgaccactgaaaaaatcatcaatgctttgggtacccatgaagtccatcgcaaggtgcacatgaggatcgatgcctcatgttaatgttagaacatattactactcatgaaagaagcaccattttactaattgttgttgcagaaaaaacaaacgccttcagttaattttccaaaagttagaaatcaaaacgccaatgtagtgacaataactgtatatttatgtcttatgatctaagttcatgataccacataagacaagagacttgtgaaactattccaattaacaactgaaacaaactaagacaacacttagtggagatgaaatgaccaagatcgggctgcaacacttaaataaaaatgtgtgggagtttgtttagcatggaactatttactcagtgcttgcattattctccccctgctctaaaaaatacaactacgttgtatgcactctaaaaagaatctaacctggcataacaaactttccagcagcatcaatcacagtgacatcatcaccaacctgcatatggcataaacaaattaggttgcacattaaatcataaagattcaaaaaaaaaaaagaccatattaataggaatcccaaggaaaacaaaatattacaaacttttaagttttaacattctacagatggctacgcagacaaacaaagtttaactcagtttagctattgtaataaatttgacgcacatgataaaaaaaagaaaaatagaaacaatttagaagtactgaaaaaccaaactatattaacagtttgacatatacagaaattggatacataaatatcatgcagaattgaaaagaaaagaactgtgtaagcattccaagaaaaaagttgcacctaatgtatgatgtaacaataaaatcaaaattaatgagcaaagttataaactttaataaacatacatctttcacagtcacttagtttaatattaatttaccaattaatagacaatgaataataataataacaaaaggcatgaaaccaatcaaaaaaaaataaaggcatagttaaaaacaatcattgctaagtcaacaaccaaagctagcacagaaaactataatattcaatttcaaaatcattcaggaaaagagaatagaaagaatgaattgaacatcgaatgctcaaaacatacgttaatatgaggctttacggccacaatgatgtcatcctcaacataaacatcagcaacctcctcgtgatgagcgttcacaacggtacctcccttgatcagaattttcgacaaagatttagtcgaaaacccgcaggtggagtgaccatctccaattccaacatcacaaaactgaaagaaataacatattcaattcagtcaaaacaaatctgccacatacaaagcatgcaatttttttctttcttgttttttctatcttgttttctcgtgaaccaaatagaagactgacctggtttgattctgatacggaaggataggagaggaaaaagatcaggagtgagagattgaaggtgaggagtgtgcaaccgaagtccatgggaagcaagctattctatttctaactcagatcgatgacttggcatttgttttgtcctgtcatttatagttgtgagaaatgctaaaaaatactcatgctcactttctgctctatcttttcaaatacatcactacaattttcctttttatatttaataacatacttttacattatacttttgtcatctaaagagtgatttacttacctctgtgaaaaatttctaaatatttgcttttgaaatgccctttgttaatggtacaagttacctaatccttataattctaggcaatactattatcatttcaatacacaatgcatataattagcgtaacatgtattgatgctttcaatgagaaataatatctatcaaaagattgaaccaatgactatatatatactgcatatactaattgtagaaaatctaactcttcatactagaagatcaatgatagtaaaaactaattctctatacataatgaatttgatcaactctcaaaaattgaagcattatatatatagacgtacccctttaattaaaaactataaactaataaaatgaaaataagcttaatcttatcatacaactacagaataaagaactcaactttcacagaaaaaattattcattggttttatttttctttcaaactcatatgaaaaatcaaaactttacataaagaactcaactttcccagaaaaaattcagatgggttttgtttttcagtaattaaatgcttcaacctcaaattcaaatgaaaatctaaagggcatacagagaagtcaaatacagagatgagagttgagaaaacataccattaggatctgaatttattgattatgaatgagccagccacatctcaagttatgaaaagaacacaaaaagatcactaaatgcaaacataaaaagtcaagtaatcatctctgaacaaattagtatctgcaaaacttgactatatacatatgtaatacaatctggtacttctactacacaaaactaaagattatggttgcagagaatgagccattgattccgagaaccaaaatcagttactgctaattggtacaaaaataataccagtactagagaggcaaatcaagaagatccgtacctttgtcgtttccatctgcgagtgagggagctgcgtcttcgtcgtcgactcgtttgtgagtgaggagtctgccgttatctatgagtgagggaggaagatttgggctgttgggcggagccggagatgggcgtggctgttggctggcaccggcggcgacaatgagatgaaagagaggaagacgagactatagtttaggtgtctcaaaaatgaaataacaaaagtggtttgactttgggttttccttttcaatgttccataataaaataataatatattttaaaattatatataaatattaattataattagatgatattggatgcttattggattggatccttcggttggattcattagattcacatgtcatccaacaaccggtagatccaatattgaattttcaaaaatattgtccgattcgatcatgattgaatatctaattctttgtggtcggttgttattggatcggtaggttgtcactggattggataatttatgcacagccttatctatatcattaaattaatattatttttattttctactctattaaaataataacttttgcacatatttacattattcataaatatcatgaaaataaatttaaagaatgcactatttattctctacatgtaagttgcattaatttaagtacctctattattattacaaaacagaga

SEQ ID NO: 385054 - DNA, 1701 bp, Cannabis indica
gtaattaaatatttgttgagattgaggggggccatggccactccaacccaagcaatacctcagcccttggacacattagtatggtgttggtagcaatgctattgaaaattatgaggaaaaggttaagaaattcacgtggaagaagttgcatgtatgatgtcatatgctaacatgcataagaacataggagagatacaatcatgattatcaacataggaaaatgttaataaccgacatccaaaacaatgactttaatcccaaaaataagctgaaaaacagcattttatgttcattgagatactacaacgccgtacgttacaaattaagtgtcgtaacatacattaagtcatcacataattattaatatataattaccaccatatatatagtatatgagcaactactgtataggttatatttatatttagaaatagtgtagaagtaattatatgtatgaaatgaaaataatatcgtggttatggttattggtgggtgttcatggcatacttataataatggctacggttgtttcgtgtgcagacacagtaaaagttcctgcaatgtttgtttttggggattctttagttgacaacggcaacaacaacttccttagctctttggccaaagctaattattatccttacggatgcgattttaatggaggccgccccactggaagattcactaatggcagaactattgctgatatgcttggtaattaattaactataaaattgaatatacatatatataacatataatataacaatttatattgatatgtaggagctcttctgggtcttccttatgtacctccgtttgcaaatccaactacggtgggaactaggatacttggaggagttaattatgcatcggcagccggtggcatcttggatgaaacaggccagattttggtaattaattatatacaccatcttatattattattatagaaaatcagaatatgtatattcacaataaaaacgtatacaacatacaaaaatgcaaagtctaacaaattatctttatctttatctttcacccaatcaatctttatctttcttattgaacttactcaaattcatgaattgaaatctaacttaaatcataatggcaatatttttacaagaacaataatcataggaagttaagtttcgactatgctaaataccgtaaagaaatgatacttacaaagatcctccttattcttttcgaaagcttctttttcaacagataataatcaacttcttaatctcggatcctttataggaaagaccacaccaaatgataatttcctccaaaaactttctcgctataggagtaattaaagaagagatcaaccagacagtaaacaagtagattcttagattataccaaaattgaataaccgatcccttgtagggagtcttttccgaaggggtagccacataatcactctagatttaggcataataaatttgtcttaaatcagattatattttcagttctccatattagtttgttacattttgtcacataaacctcaaaatggagaaataaaacttttgaaactcaatttttatagaagaaagctttagagcatatttggtattattttctgttttttgttttcaaaaatttatttttagaaatgagaacaaaaaatagtttttgaagtttttaaaaataagtcatgcttggttagtgttttttaaaaacaat

SEQ ID NO: 385055 - DNA, 1644 bp, Cannabis indica
atcaattcataatatttctttgaattaatattgtaacttgattctgtctattctattaatccctctttgcttttgagtggttttgcttacgtttcttgctcacgtttttttctaataaaataaattaaatctaccgttatattatactatactaccttgtattaaaatattattttactttaataaaaataatatgtaaagatgagacaataataaaaaaacattatttccaatttattgtttataactgaagtcttacaatatacaaacaagcatgaataatattgatatatattatatataaaacaaattatttaattgaggtcaaacaccaactcatttcattgatttgcagcaacaccacttataaccacatatataatgtttatatattgtatttcgttttaattttttgtaactaattaaagtatgttaaggttggattagttatttaaaaacaaatgatgtaatgtataaatatgtaagtgagtgcatatatacatgacataaaaaattcactcgtatgaattatttttatattttcttggaccatatatttatgtctaaaattggaaaccaatttttttaattaccaaaattcattaaaaagaaccaatttcttaacttgttacttgtgacactatgtagttggtataggacaacacattaatcaattataatggaattaggaagaaaaaaataagtcaaaagtcaaaaatcataaatgataaatttccttaattttcttataattttatgaaaggaaaattgggttacaattacaaccaagaaaagatgtaataagatataacattgcatgtgccaagaagacatatatgtattacataagaataggtttacaaacaatatgctatatatctttgaaatacaaaatattcttttgtatatattttgcacaatcaaacaaatgtatagtgaagcttgcgattcctaaggatgtttgaaaaaagttaaatgattctaaaattctataagtatgagactatagagttaaaagaagacttaaatagagtaattagtactacttatattaatcatatacatgttattttctggtaatctatcatgcaagaaactccgaagtaatttttgaatgagtgatatgtgagaaatgtataaataaagataaaattgaaaatatttgtgttgttctataaaactagtgaacaaaaatattataatatatatttttcttatgaaaactattttttatgaaagctatactacatggattgggttgaataatatataatataaaacctttttctcatatatatatggtttgatagttgaattgttataaaattaaatcaaacatatccaagagtttaggaaaaatatttttaatttgtgataaaaaagaagaatagtactaatgccatttatgttgaaacgtgttagtgttatgtatgtaattcccaaagccatattattattattattattatttttgatggtgatgaactgttaggctatttttagcctatgctatggatccgatttatgtgcattcttagctgtgttgggacggaattacgcttgttttctatgttttcaggttctttggagtaaaagaggtctcgggtgcagaaattcattgaaagacgtgctgagccgaagaaa

SEQ ID NO: 385056 - DNA, 1099 bp, Cannabis indica
atttttttttttttttctaaaagaaaagtagatgagttataaaagagtgaaggaaatctcaaagtagacaacgtagtggtacagccttacaggtgtaattttcgttgttgaaatggctcaccaactaacaactgtcgtttgatggtgctcttaatcccactcactccaagtgttgtttgttcttaaaccttgggttaatatatataccaactaaattaaacaatttagcacgaaataaaaaagcttagaaagtatagaaaacgacatacaccaccacctacgccacttatatgaaatgaagaaatggaaaaaatagggatgaagatatttaatactaaataaatcattaattgttagaatttggaggtgtgtaaatgtatatgttaaactttgtgaatcatattggaccaatttgatacaccaaatcgaaatgatgggtaaattagatttgatctattttgttttatttctccattaaaaagccatatccacatacgtcaaagaaaaaaaaaagccatacccatttgttgtgctttgattccttttaacttaataatcttcttcaatagtacacttataatagttattttttaaaatatagttttggattgaaatctcttccaaatattacatcattctaactgtattcatatacaaaatattaaaacataataactaaagttagtaattaaattataatattaatatatagcattttataatatagctgaaaacaaatatataattacactatttaaatatcatattcaataaatagtgattatataattatttccataaaatataattatttttaaattacttaccaaaacattgtaacaataacaccataaataaactggactagtttaagtaaaacaggtcactaacactatgtttgttagataaactgaattcttaacaatgttctgcaatgctttgggttagcagatcaatttagaaaacttattgctcagtgtgtttcatttgttagctactcagttgtgacaatcagtagtcccatgatccgtaaggggaaatatcgggtaagctgtacaatctcacattgtttggggaaggtcaagtgagatgattctga

SEQ ID NO: 385057 - DNA, 1447 bp, Cannabis indica
aaccttaatacacctaatttgtattccttgtcaattgtaacaagtttattacatgaagaaaaatttaaagaagagaaataaaacaagtacatataccataaatgattaacaaaaatgtagtaaaaggaaaaaaggcatacctccaccaccatttatgatcttcagctagaaattggcgacatgtgagacaagcattgactaaagcaatgaaaaacagaacaagaacaaaggtgataaacaacaccttgtaagagatggaagttccatgaccccacacagtactaattgcaaagaaaagctccaagtacatgaccgaaaaaggcaaagccccagcgagcgctatctgaggcagcgcgcgcctaaaccatggaagtgttggaatttctcgagctacactcgaggttgttagaggatgagctagcaatttaaccttgttactcgggcaaatcggttgcaactcggccttgttgttgcgctttccaaacatcccaccaagtagaagcaatgggaatgaaattaatgaccaaagaagagatattttcatgattgtgttaaagggtagtgctgatgcagttgccttataagctgtggctattgagttaagaaggcagagtgtgatgaacaatggtccagaaaaaaggcattctgtaaggaggagatttcccaactgtcataacagatttggatgaagttatattataatgttatatagagaattttcaatggagtgtcaatttttgtaaaaaaattcctcttcaatgactgctataatttatacaaaatttagtattaatgggtgactttaatacattttttttaagtactgtcattattttttaaaaaagtattatttaatcaaacataacacacacgacaagttactttttataagagactcatcttaaataaagatgattggttgaatgtaaatatgtgttaaatttgtgtgtaaattatgtgtaatttattgtgaaaagtgcactattaattcttttggtcacatttaacatatttgacatcataataagttgaaaagtaagagttgtgtaaagagagaacaatatgattacttacccagtttgtacctccaaaatgacaatacaaggaagttgatatgtaaccagaaatagtagaagttgttgtgtatatgacaaataatgcagttgataggccaccgcggttgtgtggataaaatacaccagagattccaagtaccagaatgagcatggtactaaaaatgcattcaattgttataatctcattttacatataacataacataatattagggtcgtctcaattaatttggcagctctttataaaaattataaattggactctttttatgaaaaaaaaaaactatatttttctgtaaatatctaaaatatcatatttttatcaaataattagattttttttttcaaaaaatataaaatatggtattttt

SEQ ID NO: 385058 - DNA, 4173 bp, Cannabis indica
ccaaaatattaactcaaaaatttagacataaaattttaggtcacactctctcactagattaacgagaatatgagatatatgtttagtataaatagagagacacaataaacgatagtagttcactccctatatcacgaatctaatggagttacgtctacttcaagtttttattctcacaagatggattacagaaaaatgctctgaccttatggctacttttttgaaagtgaaaaatgagctagaggacctctctccttttataagtgaataaggtcctattaaacgcgaataaaataatccaaaaaatatgaaaaaatacagtttgtgtatttttaactgtaaatgatgatctcgtggtgtaaatcaacttctaaggtttatagtcaatttttggagtctggctcgcgacagaaggacccacttcgggtaagttatagcttaaatttgtaactcccttgggggtaaaatttagagttgacagattcataatttttattaaagtgtgagacatgacttaataaaatcattgaatagtttcaaaatacaatttgaattgcaccaatcaaatcaatattgagtgagttatgaccattttactgaaggctattctaggcccagcgcccaagttgacattctagagcccatgttgacatgtgatatcaacttggatgctgggtgagttggaaaacatactggggatgtattttttgatgcctaagtaatattttgacatcacttagtacatttctatgctctggtgaagctggtaaccagttctcagagatgttgttgtattagtagaaacaggagactcgaaactacctaatttttgagtaaatcaccttgtcaaaaatgtgaaaatataaagttatgaatttgacttttttgactttattgctctatgttattatgaaaaactagatggatggtcaagacggaattagaattggatgagcaaaatccaacgcaccaggccatttatcaacttgggtgttgcgtacttatttcagggcttccaaaatgtcgttttgatacttccaaggaactagaacttgaggaagagatctactaccccctttttgaccattctagagagaatgctcacattagaattggcatttgattgatcgaaactagcacaccaagtttattttcaactgtggtgctggacccacaccaggtcaacctgggtgctaggctcaatttctaggcctttaggttcgtggttttctctcgagttttcttgtatcttcgttcattttgatcacaaaaaaaaatgcccaaaacacttttttaagaaaatgattaaaaaggaccgaggttgacaatatgtcaacgtgggcactaggtccattttgatggcatctagaagtttcgtgtggtctccaaaaatagttaagtacgtcttaatctttgctgaaaatagagaatatgcccaaaaaacttctaagaaaaaaatccttggaaatggcataggttgacaaaatgtcaacttgggcgatgggcccttattttggtacctacgttggactgtttcttcctcgaaagtacctatttccctatttttgattaagacaaagaatatttatgagtcaaatttttgatatgatgcttggaagtttcctagattgacagattgtcaatttgggcgccagggcgcctaggcaccgagtgtttggttgctaaaaaatgaacattctctgaatctaattctgatgcctcaaatatgtttgtggttctagttcatgtcccaatacaaaaattgacccattttcattaagacagtcctcgaaaactaaatcctaggcgctaggtgaaaccctaggtacccaggttgactttcgaggtattggtttgtgtgttttcagctcacggagcttggacatggttgctccatgtcatcatggtacaaaatactaaaagatagtgagttggaaatgatttatcaaagtttgaacttccattttagagttaccagagttgacttgggcacagggctcgggacccctccaaggttgagtgctatgacttgggactactcaactccaagatatcatctttcttgccacatgtcaaacattgatgtccacgtcaccaagaaagtttccgagttaacagagagatagcagaagaagtggtgaaaggaatataagtctcgttgaaatgtacatcatgagtgataaaaataccattagaggaaggatgaagacataaaaaaaacctttttgtttacttgtaaccaagaaaattgcaaagggaagattgaaactctagtttgtgactatttatagggtgattaaaaggaaaacattgacagccaaacacccaatggagagaatagttgggatacttgtgatagagaagttgatatgggcgggaatagtatagaatgtgattagaaagtcgatcaataatgaaaatggtagtatagaaagcataaggccaaaagtgaagagacatttgagcatgggccaaaagagtgagatcagttttaactacatgataatttttgcactcatgcatgaccattttttttgtggagtgtgatggcatgagaggtcatggagaatgtcatgtagggtgaaaatgtggaaagggtgcaggactcaccgccctaatcaaagtgaacaatttgaattgtgctttgaaattgagtagagactaaatttttaaacataacaaaagcttggactggttcatctttagttgtaagaaaatagaaccaagaaaaaaaagtaaaattatcaacaaacaatagaaaatattcaacaccagcgatcaccgtgattgggcctagaccccaaatatcaaaatgtatcaatttaaaaggcttggaaggcgcaaatataaattaggaaaaataactctatgagatttgcctaattgacaagcagtaaaaaagatgtggccaactcttttaggaaaaaaattacaaacagaggaaaaacgagtaacatcttgagaagaatatggatggtgggggttttaagaggattaatgatttgagcgagttgcattagaataatttgggttggaaagggttttgttgggatatcttagagaaaattgagattgcggggatggagcttttaggcactattttggaaagggtaagttgacaaagtttgcttgaaagaagtcgatggaggaagttgtcgtttgtctttcaagaaagcttcatagctcaaaaggagagcttcaacttcctcaagcactggtttgacaggacgggctaaaattagggttacaaacacataatactctggtcctaaataattaatcaaatacactaaatgatcttgatgtaaaattagttcacccacagaagcaagagtgttataaagggacttcaatttctacaaaggttgtgagtccttcctttttaatgttttgcaacattgttcaaaaatttgagcttcgagcaaaagagacagttgtgttggtgctttccagagagaccaaaatctttattacagtggagaagctcactatctttcccagcatggaatcagagagagagacataaatcaaactcatgagaagcctgttgtatcgatgccatgccatgaaattgggattaatttgggtggagttcgaatcgacaaactgaggaggatagagaattgtgtccttgatttatccttcaacccattagcaacaataatattatgcatttgcattctccaaacaagatactttgattcaacatgcactacaagaaaacctagttttaccggcgcaattggtcaattgcaccggcaaaagttgtcagaataaatgaaatgctgaactttcaattcgattcagcaataacttttatcggcgcaattttgcgccggcgaaaggtattcagtaccggcgtattattacatatgcgccggtgaaagatcaacaatgaaccgccaaatggcgcgaacacgttggtgggaatcttgaccgcccacgtgaaattttaggtggaaaaaatctcgcgtggaaagtggtggtaagtgggattacttttacggtaaaagtgtttaacgaaacggtgcgttcgcgtttagggttatatgaccacttttattggcgcaattcaatgtgccggtaaaagtgttcatatatgccccttcgagcagcaaaccccatttccctttttttttctgaacatttttttcctctctaattctccttcag

SEQ ID NO: 385059 - DNA, 1250 bp, Cannabis indica
ttttcagtaatgtcattcggattaataattgctatagcggcctctaccaatctcatgaatagagtattcaaggatttcctcgataaccgtgttatagtcgtatgacatccttgtatactcttaaacggaggaggagcatgagcaatatctctgaatgatattacaatgactcaggaattgcaagccatatgtaaaatttaaaaagtgtgaattttggttatcagaggtgtcttctctagagcacattatcagaaaagatggaatcatggttgacctgtggaagattgagtcagtgaaaagttggccgaggccaagacagtgatgaaagtgtgaaattttctcggtttaacaaggtattattaacatcttgttgaaagattttctaaaatctctatgttactaatcgagttaactaagatgaaccaacagttcatatggtgtgacaagtgtgaagcgagttttagaagttgaacatcgattaattacagcaccgctgttagctttgttatcagattaagaaaggttcattgtttagtgtgatgtatccaaatagggtttaggttgcgttctgatgcaagcttactaggttatagtttttacctcccatcaatagatggaatataaacaatgttactcaattcatgaattagagcttgctgccatagatcttgctctaaaattatggttacattatctggggaaaatgcaggatttacacagattataagagcctcaagtatttcaccatttaaaaaagatttaattatgaggctaagacagtggtcggaataggttaaggtttatgattctgggtatttgtatcatcccgagaaagccaatgtggtggtggatgcctagagtagacaaggtctcggacaggtttttaacaccgtagcttcagaaatggttaagattgaaattaaatttgtggttaggaagttacacaacctgacactttaatcatatttgttagaaagaattagaagggcgcagttggaagatcctaagctagttaaaatttgggatgaggtactggtcggtcagcctagggacttatcaatctcgaataatggaacgttacttttcaaagtttaattttgtgttccagatgctggtgagcttaaaaagaaaattcttgatgaagctcatgcaatactttattttttacacccaagaactactaagatgtatcaggatttaaaaccctattattggtggtatagaatagagaaagatgtagtggattatgt

SEQ ID NO: 385060 - DNA, 1936 bp, Cannabis indica
tttttttttttttttttatggattgtgatgcttttaattagtcgtgagtaaatttgactataagcagaaactagacaataagaaaaagactagaagagaaagagaatatatgagttaatcaaaacaaaaaataggtttaattagagttattgggattgaaaaatgttccatatatatttgaacaaagaataattgtgaatattgaatatatgagttatcaaaacaaaatagatagaattgatattttgagtttttatggttttatggattgataattttcttttattatttttaattaattaattaataaataaattttataatactaaataaaaaatttaaaaatgagaaaattaaaaaaaagaataaataaaagtaattgaaaattttttaaagtgacacatcttatactttttcttttacaaaatatcttaaataactataacatataacatactaaaatatatataaaagaaaaaaaaaagataaaaattctcttatgtcaaaatagaaaatgcattaccccaccgcctaaattttccaaaaacgtattgctcaaagaaacttcattaaaaaaaattaatgagtaaataaaatcaactggaaatatttaacagtagtttagtcaacgttgactaaactacgaatatttaacagtagttagatgaagctaaaagagaaaagttagaaaggggaaatagtaaaagttgtggggttattaatatatgattttgagcctcggcacttgcaccaaacgacaaccaaggaaaaggggttagtaatactaatagtactatagtacaagtaagtattgcagtagtagggcatactccttttcattattttcttcttcttcttcttcttcttctgttattcttttcagtacatcagattacaagtggtgacagacacaagttcaggtccccccataccctcttaataaatacactctcttcacattcatatcagagaggctcaaaaagtgaggatcccatttaacccccagcattcatactgtgcccaacatataatgcattgtaaatagttaacacagttttctatattatttattaaattaaaatatattaatattctttttttcttttaaagaattaaaatatattaataagttgtagtgtttgacgctttaatttgtagagaattactaaagaacattactaccctctttagtattaccattaaatagggaattttatataacttaataaaataatttgtagcgaatatcgctaaccaattataagactacacttataaaaagtgttaggcgccactggtgcgcaataggctccaaaaccccaagttactcctcaactcacaattctctcactatagtaaactctctttcatgaaatgatctttttgagataaagagagagagggtctggtctctgtcaaagaagaggacattaatgtccccaaactctcttaacgtctatttaacactattattcatattcaatatttgctgagatttctgtattgggaagaacaaaactttgggcatttttgtcatactcttttataatttacttcttttccattcctttagcaatagctgcagtgcaggtgcaggtggaggtgcaggtgcagtgttcggcctttctccttctccacatttcttcattctcaatatctgatgtccctgacccacactgccaaaaatgtttcaaattttatcccttttcatgaaaatggcacaaaaatgggtttgagtgtcaccattgggaatttgggatacctcactttttccctccattttcccttttattaattaattatatacataattatatgaaattaatataaatattttcaaatataattatcattataaaccttatctttagcttacctctgaataaatatttttttagcaaaattaaaattgtattgctgcaaaaaaaaaaaaaaa

SEQ ID NO: 385061 - DNA, 2192 bp, Cannabis indica
gagcgacattcgacacttaaaagttattttcttaaattatataggactcgatactaattatactattgcagtatgacaccaaagaatgtactaaacatcagtggtgcttgataccaataataccttttcaacattttttcgttataaaaataagattacaaacaagttgttaattatattatttttccaaatgtttgtacaaatataggtttaaattcatgcgtagctatagagacgtctttttcgtaggttctgagatgactttttgtgatcaagagttcatgacttatttaaatggaggttcaagaggacagttacaaattgagctacacatactagtttttattttcttttgaaagtttaacttgatagtatatatatgttggtttaaactaatttaaaattaacatgttatttgctattacaattaacatacactacaatatatttaaatatttattattattaagttaatattacgtacaatatatatttaattatattttaatttttaatttaattatgtactttaattttaaatgaataacactttcggttgtgttaagagtccatactttttgatgtttttgataaaatagaaaatgtacagaacctaccgttatgtgtaaaagagtatggcaaacaagaaaaattggaaatctttatgttataattactttccattgtttttctaaaaggataatacactttttctttttaaaaaataataataaaaatatatattttttgtaattaattgcaataagtaatggcgtcacaatatagtgattctttaaaaaacataaacacttattctattttattattgaatagaaacatattttgttagatggattgaataaaaaaagataatagaatttttgtttaaatatgtaatttaaatttaaattgcaatgttatgttaaaaatatgtatagtgatatataaataggtctatgaaagttcatccacaggatatatttcttatgggaaatctatatcctcctctaagcaaattatataaggttttgacttttgatcatataaataattatataattataaattttataaataatttatctcactgtatattaggactttcaatcccaatgaacaattcattaggactaagcgagaaatctgggaataggattcaaataattgttgaatcggttatatatattttaggatgcaattttttgacctcaacaattggtttgatagatttctcataaagaaaaagtccaccaattaatatgcgcaattatataatttaaatatgtaatttattaatttttttttataaaaaaatgaatctatgcctatatttgttccttacaagcacttgccatattcaataaatatggttttaatgaagtgggaataatccaaattggggaaaacagtgatccatgcagtcacgtcatgtttcgctgtggtgttttcttggtttacttctaggataaccttggcattctcaattggtatattattttattaaatgaagatgtcataaataatgaaagtgacataaattgatcaataccttttcttaaggtttctagtcaatatgtaattattggattattaatttgattatgagctgtaatgatttatagtagttgcatatgttgtatgataatgataactatttttttttttttttgtatgatcaagtgagtgaatgggagatttgagcctttgaggccattttgcagttactaaccaaagctggaaaaagttgctggtggctaagctgaacgtacgactacacttcttgctcactgtgtagcattttttttttttgaacattaagtaattttccaagtaactcccacattttaaccctttataattaatttcatataaaacacacaacttaagtttttgtcaaaacaagaaggttggtggaactggaatttgaaaattaaatgataattcaaactctataatggagatcagttagagaccaaatacttacatatttaacaagagatttttttatccataagcacttgactaaaataattcatatatgcttgataattctacagattttttttttcataaatttgagtctcttactttatgttaaaaaagtgaaaaaaaaaaatagaaaataataaataataaattcttatatttagcatggaaagacaaattgtatagaaatatttgattcaataaaa

SEQ ID NO: 385062 - DNA, 1308 bp, Cannabis indica
aaaccagagaaaaataatagcagtaaagaatagagtcttaccagttgatcttgtagctggaagctccaccaaatcgtgtattggatcttgattgaatagtgcaagggctgtgctcattttctgaggcgagctcaagaggagtaccccatcaactcagggggaacctctataaattctctgtgtttgcttctcttcttcttcattttcttttctgcatcattagtactaaatcatttgaacattgcatgctcatctttgaaactaaccctagaaactaagctgagaaaacctgatcaattttctctgcctactgttttagtaaagttgaatgttttaagcaaagtaatgtgtcaaaattgtatgtgatacgtggacagtttgtgtccacttgctgaagtgtgaaaggtcaagattgaccttgtgtttatgtgtgtgagttgactttgtgtagggataggactggaaaatcccaacacttacattagtaggtttattactgaaccaacaaaggtcaaatgattaaccgaagaaggaaggctggccgcaatcctgagaacccctaggagaactatggaaagacataaatagattaactatgggatccatggtagaattcttagaccgagcagatcaatttataaagctcgaaaaagcaatccggcgtgtggagacaattggataaaagaaaactcaataacacactactacaccaatacatccatccagctaaacaaggattcacaaaatcacagtagttcaaaccaagttggaaagaggccaaacaatagcaacagacagggtaatgggaagaaaagcaggttggcaaatcaggtaggtttgtagtggattcaacgaagtttactcactgccacatcagctacaaactaaccctatgtggcatgaacttagttattttggttggtgttttaatcaagctcaaatcagctccaaccaacaccttaaatagcagccatgcctctcattttagggatcattttagagattcattttgtatagaaattcaattgtaattcttagaaagaaacttagtgagatttgagggatgtaaagctattgtcatgtatttaattgagagaactcaagtgagatttttatgtaattttctttcgtttgctttgtaatttatacgaattttcctctatgtatatgctgatcaatattgaataaagggctcttcattttcgtcattgacttgtgttcatatgtgttaatcaagtattctagtccaaaggttcatttttttggtttttcaacttgttgcgatattttgcacacgcaagtgtacgt

SEQ ID NO: 385063 - DNA, 467 bp, Cannabis indica
ttactttttctttttataatttatttttaacaacaatttttttcagttaaaaaaaaacagattatacttcagacatgatcatatattggttttcatatttttaaacatggtaggtccatacattttaatttattaaagtatataaacaacggctaaccaataataatgaaatgtcccatcagtagtactctgagcccaattacctctctcaacgtttacttcaatttatttatcaaaaaaaaaaaaacgtttattacttcaatttttgtttatttaattgttttttcatctctccatttatttattttccacgttactttctccttattgttatttgtttgctattttatatacattttacaaatattttcctcaatatcatcatttccttttagatgggtcctaattttcgtttaattgcttatcatctttctttttttttatttcttcattcttcaatttttatt

SEQ ID NO: 385064 - DNA, 774 bp, Cannabis indica
ttttgttcttgaacagttgggccactataacccaactcttgaaatttgttccaaaaagccatatttcgggtcctaaaaaataatacaccagcattggaacaacaatcacaaaaatattccttcaagcattagcttcacgggttttccaccccaaccaagctaaaggtatatatattgaaatatgtttaggataattaaaaatgtaaaagaaaatatatataaatatattaatgtgaaacaataaaataggaagaaaagaaaaagaaaaaaaaaacaatggtgatcttcaagtacaatatatgcgaagagttttgtgttaataagaagaagagatataaggtggaatgaagttgttgtgtaacatttggattcttctatatatttgtaggaataatctttcaagtccaatacaagtgtggtctcatatgtcactatattttcctcacaactcccaaaactgaattccttgaatatgaaaatcaaatatattttgttgactattataagtgaattgaatcatttctagcttattatcaaaaaaaaaaaatctgaatttagtcaatatatataagtttttgataggaaccatataaattctatattcattatgtacatgaaaatgtttactaaaccatttgataattctagattattaaacctaaatatttcaattgttaaatatataggtgtcgttttttttagtgaaaaacaaaaatgtgttctgtaaccagttttgttttttaatttaaaaaatagaaaataaaagtgtgtttt

SEQ ID NO: 385065 - DNA, 2475 bp, Cannabis indica
aaaatccaataaagcttcatctttcttaccaaccttgaaaagagaactaataaaagtagttagtaaacagttaaacccaatgctattttctctcttcccatctcatccttaactccaaaagccaaatcaaatttaccaatcttacataaccattttataaagatgcataacctgatttattcattctcattcctattactatttctatatctatttctatatttttatttctcctaaccaaacgctaagagtactagtcaaacactccacagcagcataggaatgtacataaaagctttttgtaaactgcctaactcaaataactcgcacaaactaaactaaaataacccgacaaaatatacaaatttaaaaagctaaggaatctatccaaaatgcagtatggtctctgtccaaattactattgcattgtatatatgtcaactcgcattgattatttcacttaaattcaatgattcatactcaaatctcacctactcaactttaacttcattcccacttagttttctagctgttttaccaaaacttgtgatatttttaactaggatctcatggtaattaacttttaattttcgtaaaccattgagtccaatattctaaaattgtttcttaataagagcccacttagtatccatgattcaaccattagagacatccgagatatggaagatataaaaattgtattatattaagtcattttcaatacatctattgaagcattatccaataatgttatgatgtatttttattaatttttaatattacacttcaatatacatttacaaaatttaatgcaaaatttaatattttttaccaaggaaaaaaaaaaaaaaatagcagctttatctttaattttgttattattttaatatataaaatataaaatatttataattcaatccaataaataaatttaatataaaatattaaaaatgatataaaaataaatataaaaataatatatttattgtgatgtaaattttttaaatttaaattaatttttgctaacaaatttggtttaacttttgacacattaaaataaatttttgtacacgaagaattataatttaacaataaatcaccaatttagatgctctaacaatactctttatttcactatcttctctttcacactctccattttaaaatgtacgtggaataaagtttacatgtaacaatttgagcattaatttataaaaataaatgaataagaagtgtacatgtaattatggtctttcaatagttgcttactaaaaaggtcaccattcttcctcaaaaaaaaaaaaaaaaaaaaaggtacaccattcttttactttcagtcatcctctcaatgtcccaccatgtgagcaggtccagcacataacccatcatcatttatgagctttaattaaacaccatgttggaggactagactaggcttctctattctcttttatgataagagtattgttattagatactaatcgtgtttagtattttttagactttgtaattggtcaaaaatatttcgttaaagttattacataaaattatatagaaattgatatttaattgtaccaataacaacataatatcgatgaaggtgttggccactattagtgggtccaatattattatatgtgttaatatcattattggtacaattaattatcggaacctatatacataatttttgaggaatatcactagctaattataaaatgtcaccttaagtggtatcaatgacactgctctttccttataataaaaatgaacattattattaagcatcaatggtacctaacactataataagatggtgatccatataaaacccgataaatactactgatgtattttaatattagaagatgctaagcaccactaccactagcattactaatatattttaatatttccatactaaattttatcaaaattaaaaaccattgatttgattgaaaaataaatatgatcaattcccaacttccatttatttaagattctaatttattaaaatctcaattcccaacttccttttgtttaagattctaattattaaaaatctcaattctcaacttcctttagttcaagattctaatttattaaaatctcattctcaacttccttttgtttaagattctaattaattagtgcaatcatctaaggaaggaaggagggaagtttggttggggagattttgattttctttcaagtattgaaaaaaaagtcaacaatgattctgagttgttagctacaaacccattttcattacaaattttcaaacccaatcagtaggatgaaacatttgttggttataaattcacaattgtataatattgtttgattttcttaattttttcaactagtttattagattgtgtaataattttgtaccaacatcatctttacaagtttaccattgtttttaggctctagctttggtttaataaaacaattatatatatatatatatat

SEQ ID NO: 385066 - DNA, 1185 bp, Cannabis indica
agaacagtagcgcttttccaatcagcactccatcttgttaggctaagtttggttctgagaaagagtgcaaagtagaacagtcaatacatcaaagtaatggcatttcttttaagaaagataaaaatagtaacatgctaggcagaaaatcgttttaaacattacttaaatacatttagctcacacattttgacaatggacaagtttttcacatacatttgaataaagaaaatccacacatactagcagtttttatccataaccacccacatagaaagcagttccaattcacgtttttttcttcgaattaagatgaaaccggaaaaaaaaaaaaaaaaaaaaaaaaaaaaaaaactactaatatgcatccaccaattgtcctaatattctaatccaaagaaaaacaaaaatgtaatcaaaagatgtgttatgaaatatttcagtttcttaagtctcattcaacaacatgtaaatcaacagagttcgccaaaatcctcaaatctaatcaatcacacaatgtacagtaaaaaattgtcctgaaaaccaatcacatggttttcccaactcgagatgaaaaagttaacaatacatcaacacgaacagtttcagatcttccaaaccgcatcaaaattgacagaacaatccaaatttagaacagttaaggaaatatatacgagcggaaaaatcatctaaagcaacaaaagcggattgattacagaaagaaataaagaatcgaaaacaagaataagaaacatagttacagtttatcggccttggcgatcattttatcgggatcggagcctccggccatggcaaagctggtccagtctgtacagtgaatgaggtttttgggttgctgttagttgagtttgcgttttttttctttagagaggtcgttgcaacttgcactaggcaatttccaatctaagctctctgatttatcgctgcgtggcccattgaaaaaaataaataaaaggaatatttatatgtaaaataaaaattggaagacgtatatttcgtcacagcgaatatttatttcagacagaaaaatatacttttgttttgacaacatttgaaatataattatgacataaagttaggacaccgtagtgtaattttgattgcctactgcatcacatttttgttctgtaaatttatttattcttggagttctattggttttttttt

SEQ ID NO: 385067 - DNA, 1645 bp, Cannabis indica
cgatattgttgaatgatctcttcctcctcctcctccagggcatgacccagctggacaacccatgattgatgaccctctagccaggagggaatgaccattaggcaggggtgccccgcttgaccaggctcaaccatggggtagagagccatggaggtagctcgcaagcttttagaaagagcctttccttttgtgcatgatgcgcttcaggatattgatgatagcgatctagacaggctctatcctactggccttcgagatttatttttggtgagttgcactcttaactttgctcattttttggtattcttgcaggctggccggcctcagtgagtgttgcatggagttggccagccaatgctgtgtcttgaggggttggccagccttagtagcttcgtggaaggccaggcctgccagtgttgtcgtttgacactggctttggaccttgatttgcttttaggcctttgtgaagccgagcttttcacatgacatctcttgggggtcctcgagtgctctttgtgagcaagtaaagaccttggatgttgcccttttggtgaaggaccaggctttatctaagatggaggctcttagcatgcataaccaaagtatgatttatggtttggaggccatgcttggcaccaggaattaggagaaatccgtgcaagctgctagcatctccaggttggagactgaccttatgaggtgtgaggagaagttgatgaaaaccgttgatggccagtaggccataagggacgagtacatcgacttgtctttagaactcatttttgagttcaatttgcataactccaatgctgatctttcatacatgggggatgcggcttcctggagagcaaattggcccaagggaaagcggtgttcgagagaaggttggaagcggactagacccccgtccagccagagaggtcatcctcggggcactatgatgtggtgattgctggtccacctacaaaggaggtgtcggccagcgctttgaccaggtggccagccagcctatagagactatggccggcccacactttggggatctagactttgtagcttccagttctgccccacctgcacctacacacatgtagattcagtttattagttttcaacattatggttttagtatagatagtgttttcatgttctgtatggcctatgggcctcttactttttgaagacaacttattttcagccccagggccttcatgttcgtactcttggcctataagcactttgtttttgaacattactattgtttggcattgttgctttatatcatggattgtacgactaaccaggcagtctttaattctagctatcttgttatggccttgagatataagtatcaagatttacttttctttatatcaagctgaagtatgcatgcacctgacttagaggtaggtttagtagcttattctaagctttaaaatttctctacataagttcattgtgctagttatatgcattgtacagtgtgggtgccccaaagtgagcacgtagacttacggtctcttgattacttgcaattcaccaagtttcatagaccttgcctaggaattttattggggtgctacctagtgtacgtatgtggaactgaaaaaataataactttaagaagttaatcttgttagcaagt

SEQ ID NO: 385068 - DNA, 2331 bp, Cannabis indica
atatgtgtccaaattaactccaaactctaaaaaaatctcatttaaaacaaaacgacagaaaataaaaataacaataacagagttagattggaccgaagtttccaataatggaaagaagaagtggtggtggtgataggtttgaaaataggactacgtaaggattagacttgtagttgcaatgcaagggtcatgaaattaatttcctctactttgtgactttgtcatgtttttcagttctttaattttgtttgttaaaaaaagtaacacactattgtcataaatgtctctgtgtgtggcttaaaataaatggtaaaatataaattatatttccatgacttgttcaacaagtcattgattgactgaatttctcttccctcctttattataagtagatagtacttagaaagttggtgtcactgtatccaggcattgtatatatctctgtatcttcttttgtgcagccatggataccatggctaactccatatttagccttcttgtcaccatattatgcttgtttcttaacacccatatctcccttggaactgacaccatctctgcaagccaatctctctccggtgaccaaaccattgtctcagctggtggagtctttgtattgggattctttcatccaggtaactcttccaactactatataggtatgtggtacaaacaagtaactgcacaaactgtagtttgggtggcaaatagagaaaagccagtcttagatagatttgcttctgaattgagaatcttagatggtaatttagttctctttgatgagtcaaactctccaatttggtccacaaatgtgaatgccactatgtttagtggtggctctgtacatgttgttctattggatagtggaaacttggtcttaaaggatgaatccaataataattcaaaacctttatggcaaagttttgattatccaactgatacatggctgcccggtaataaatttgggtataacaagagaactaagacgaaacaagttctcttttcatggaagaattctgaagatccagctccaggcctcttctcattccaaatagaccctagtgacacctcctatgtaacactctggaacaggtctaggatctattggaataccggtccttggactggaagattcaccttggccccagagaaaaggccaaatataatcttgtattttgaaatcgtttcaaatgacaacgaaacctccttcatgatgcatgcaactaactcaacagtcatatcttttcttgcaatggatcttactgggcagatgaagcaactaatgtggcagcctgcgaatggatggaatgtccttcgtacatttccaagacaacaatgccaagtctatgcttcttgtggatcctatggaagttgcaatgagaactccatcccttttgtcattgtttgacagggtttgagcccaaatctttaagagagtgggatttgaagcattactcaggtggctgctcaagaaaaactgaattgcagtgtgggaacgatagtagttttggtagtgacaagtttctagccattaatagtatgtctcttcctgaaaatcaaatgtttgtaaaagcagggagttttgctgaatgcgagtcaagttgtttaactaactgctcttgcactgcttatgcttataacaacagtggttgttcaatttggaaagaagatctcttgaatttggagcaacttggagaacatgacaacagtggaaggacactatttattcgattggcagcttctgagtttcgtagttctaaagataataagggagctataattggtgctgtgttgggctcaactgcagggttcgtaattttaattggtcttgctttgattatatttttaaaaagaagaaagaaaatagttggtgctgggacatcggtgggaggctcgttgatggtgtttggctatagagatttgcaaaatgcaacaaaaaacttttcagagatattgggcaaaggaggctttggttcagtatttaagggtgtcttgcctgactctactgtaatagcagtgaagaagcttgaaggtgttggccaaggagagaaggagtttcgagcagaagtaagcataattgggacaattcaacatgtgaatttagttcgacttcttggattctgctctcaaggtactaaaaagttgttagtctatgattacttgtcgaatggttcattagcttcccaccttttcaacatagaaagatctaacattttggattggaaaacaagataccaaattgctcttgggacagctaaagggttggtttatcttcatgaaaagtgtagagactgcatcatacattgtgacattaagccagagaacattctt

SEQ ID NO: 385069 - DNA, 2007 bp, Cannabis indica
acctttagtgacaacataatttttgttgactatatgtgacttttagtcacaataacaagtcacttgtgattaaaataaagtatttaaatacaagttgtcactaatttagttttactcacaacaagtattgtgattaaaaatacatttagttataacaaattgttatttttgtgactaatacttttagtcacagatattttagttacaacaacatagaaataatgatttataattagttataatttttttacttttaatcacaagttttattgtgactaaaagtaagatttcttttgtagtgttactttatttatacttatttttataattattattttaacaaagcaatttaaaattatatatatatatacaccttagtaaaaacttaaatttttttaataaatatgtaaataatagaacacactaataaattttttaacaatcctccaaataataataattaatattattgtgaatagacataatttattttctcttatttaattgagttttattttaataaataaaataattaataataatatgtaattaggcgttataattttaatattattatatattaaaataacttttatttatttatttattatattaataaatagttatattttattataatagtaaataattaaattaaccggcctaagagtgcctatattttctagttaatcataagacattatatttaagtagtattaaacactactgatgcttaatagcaataattttttatttatttataatttgataatagttacttcagtatactagttttttcacccaattaaaagtaattaactgggtatcattttccatcattattattaaattattgccatccatttcacaaaaaagaaaataaaaaaaatcatcaccatccacgccgaacttattttatgagaaatttacactatacattctattttataaaattgattaatcataagacaattttttaatgcgtatgtagattttctaaccgtgcattcaataggttttctgtgtctttttaattctaattaattaatatcgttttctaagtatagtgctattagaccacttccattcctctttctttaatttcttcaaagttgtattacttattcaaagctgaagatacgttctcttttatctttctatagttattttccctcatgatatacattttaatttttaatttttgtttctagaaagaaaaaatcagtttgttaattgttttggtcaaagtggagaaataaaatattgtaaaatattaatatttgtatgatttcagttgaaattatgtaatgatttggttgttccaaaaaaaaaaaaaaaaactctaatgttttggtataaagttactagaatattacagcttccaaaaaatactaggaaagaaaagttgctacattacttacaacgtgttaaaggcagatgtcaacggtggggttactagaaaattgctggtatatataactactactgcttcaattatttttcttctaattattaagtactttcataaaattgctactagtcactattttagaggtgacactctataattaactgataatattcattaaaaattactatattatatgagacaacaataatataacaccttaaaaaaggctaagtaccaataatattttttaatttttcttaaaattttattcataaataacacagattaagtctaacacacaatgctctctcataaagccttaatgacaacggatggccaagtaaaagaaacaaataacaacaaaaacacaagacaaacacatgaaaagagaaaccattacaatagaactaggaaccaaagcaagcaaaataaagaaaagctaattagcaatttttccccctcaattttgacatatattaaatcatacctcatgaacttttttggtcgttaaaaattctccctgaactattgagattattagattgaggacttttgtctaatttcattcaattttactgtttcagtgattgtttatg

SEQ ID NO: 385070 - DNA, 2476 bp, Cannabis indica
atatatacatatatatagcgaaaaggagttaaaaaaccgtgaacaacattaccatgggcgacatgaattccaagagaatgtaatatatgcgaaccatgcgatccacagcacaaagccaccaaagtccaagcaaaagccacacgattccgactccgaacaagcatttcatccttcttcttcaacatctccttccacttcctcacattctccgccactccccttcccgattctctcctcttcgacgagaatccacactccgtcaacctcctcgccaagctctccgccacactcccagtatcatccaccgcaacctccgatttcaacttgatcgccgccgtctcagtcaacatattgaccgcaacagaatcaactcgttcgtcagacgaaagcaacgatctaactcgagaaacacaaccaccgcacatcattcccgatacatctaacagaaccgaagtatcaccagacggttcttgtacggacacggcagtagtagtctgagcttggagcgagctagaggtaacaaatgcaggcttggaagtcgccggaggaaaacaacgccgtcgattgatgctaaactctttgcgtcgccgttgaataccgaagctgaagaatcgatcgacattggcgagtttgttactattactgtgaggaaagctcaaggaaaggtttggcggaggcaaagaatgaagtgtcagcaaattcgaagccatggaaagagagattcggacatggaagtttcaggtagagagagagagttagggatattttagagagagaaaggataaaacggtcaaggaatttttggggagatgaagctaatcggagaagaagaggttaattaattaattaaaaattaaaaagaataaaatatagacacgaaaaacatgtggcaggtagagttagcagttgactgttatttaactatcctcaccgacagttcacgttagagtcaaaatgatagcacaggagtgttcatcaaaccgctggcattgtaccctaccgcataaaaaatacaatttgaaatcttttgtggggtagttatggtttgcattttcgccaaactgtgcattactttgcggtttgcaattttaaatttaataattacagttcaaacaacactatatattataaaattactaattcttacaatatgatttttatttttcagataaagataaagttttttattattgttaaaactttattggatttgtgacaatcaacgcccagtgattcgaaggagaaagatcgagagctgtactcgcgtggagaaggtcatgtgtgatgattatagttgaagagggactaaatggattgattggtactatttatatcaataaaaattacatatgcggtttggtttgaaaaaaattattacaatacgcactatccacaccgcgaatacccctacaacactcttatcaaactccaaaacttcttatttttaaaaaaaaaaaaaaagaattgctaaaaggcaccactgattattggaatttgaactgtgaatctcttaattattaagctaatcaaattactactaggctacagcacatatttagtattaagagtattattatttattttataactaattatattttattttattttttttttttgaaataggggcctaagcggtagggggcctaaggcgaccgccttcttcgtctcacctcagggctggctctgtactacaggtgtctaataataatgctctttaaaaaaacataataagataaatagaaaagataaagaatttattgtatggtgcaatataaaagttagatgtaaattaagaaaattaaattttagtagatatattttaaaagatagagttgagaaatattaagcgtcactcttattttattcattatttatttgtaaaatgatattatgtatttatatattgctattagacatagtaatataagatttaataattaattatattaatagtaaaataatacgtcggatgatgaaagacattcctatgctgtcttaaatttattgttgaattctgtaaatgaaagaatagtgtaaagttggtagtgactttgatgacggcagttgaatttagcaatgctatgggaaagtagatgaatgtgcttattaattattgagcttgcaagtgtgtggtgtggttacgtagttcaaatcaactctatgattatcaaatttggtggctcacataaaaaccaatctatactatatttatttatttattcaatatttggatttgagaatgattaattcactgtgaatattaaacccaaacaattaaacaatattcttttaaataaaactatcctttattaatcgtgtaagacttcaaatttcaaaatttaaaatatcaaataattctttttttaaatttgaaaaaattctcttagctgcatatctctttaacaaaccgcatattttcaaattttgacatttttttgttatttttttaaaaattttgtattatttatataat

SEQ ID NO: 385071 - DNA, 2222 bp, Cannabis indica
tattatattccaacacattagactcgctaacaacgccccgcctaattgccccaatcatttttttaaataaggtatgtggtttatgctccattaataactttgatttgtgatttaattttggttatataatcacaatgcaggaaagtttatcaaatggatgctgttggtccgattccagaagagctgtggactctgacctttctctcctatctgtatgtgtttattggacctctcatggttatcataacacctcttcccaaatttaagttattgtcactttgttagtatatttagtttaatctctctattgtaggaatttgggttacaatttcttgacaggttctgtttccccatcaattggaaccctcattaacatgaaatacttgtaagcattactaaaacttaagctttgaataaacaagatttaatataattattttaaaaatatttctcatcttttctcactttttttggggatattacactagatctttagctggaaatgcactgtcaggagagttaccaaaagaattgggattacttactcagctactaagtttgtaagttataggcatctttatgaagtttccattgatagttaattatggtaatattgaccttaattattccaaataattttgtgtgtaggctcttttcagagaacaatttctctggtacactgcctccggaactagggaatttaaaaaaattacaatatttgtaagttggtaacatgaatttcattgagatttttctattcaaacttaatgtttgtgattgcagttgtgcattggtccaattatgatttgtttttggttttcattatttttaatttgataggattattgcgagttctggaattagtgggaagattccttcaacatttgcaaatctccaaagcatgcaaatattgtaaactatttcttctacctcatgatcatagggatactattatatgagaagaaagaagtaagaaaatataagtttctttgtctaattggcatctttaacttgtaggtgggctcaagataatgaactcataggcaagatacctgatttcataggaagttggtcaaatcttactaacttgtaagacaagttgaacatatatctatacatttataacattgcaacatctatattttgtataggataagtctataggacacccttttaaagagatgtttcaatgcattttctatctgtttcggcatgtagtagagttttttagtctaatttttattatgattgtgtaagttgtagttgtttagaactatctgtaaatttttaaaaaatttcgaataattaacaatgctgaagataactacaatagtacatacacaatcatgtaaaaaagttaaactaaaaagctctcttaaataaattctttacaaggacctatcccatcaacttttgcaaatctaacttctttaacagaattgtgagtaacatgctcaataaatagaagtctatttacaaatatttaagctaagttaataatcttaagctatataaacacatgtaggcgattgagtgaaatatctaatgcaagttcaactcttgcatttgtcaccaatatgaagtctctatcattcttgtaagtaacaagttttcaacacataatcatatagcctagacataatcttttggactgtaatcaaataataactcataataaaacttgcagagaactgaggaatagcgaaatcattggctcaattccatcgaatattaacaaattcacaaagttgacacatttgtaagctcattaaggtactcaaaaaactacccaactttgcactatcttctaactatgaaattgcacttttttatttatagggatttgagcttcaacaagttaaatggacagatcccagactctcttttcaacatgagttcactttctgctttgtaataatatattattatctcactttaattgcatgatcatatcataatagctactattatatagtaaatattaaagcaagtaattctgtttaattaaccaggtttcttggaaacaatagcctaaatggtacattgcctcagcagaagatcagtgcatcacttctcattgtgtaagttaatagaaaaaggtccaattgtaactttttgctcaaggctcacaattggctttggtctgcctgatgttaataactatgaaattaatgctatatatattgtatattatgattgcagagatctatcatacaataatt

SEQ ID NO: 385072 - DNA, 1402 bp, Cannabis indica
ccaaggctttggggaatatcattagtgaatatgtagatgttcatgaggagtcccttgatgagggatggggcccctttcttcgaatccgtgttaagctcttggttaacaaaccgctccctagaggacgaatgattagtttgccccgtattaaggatgatttttggattgattttagatacgagcgtctaccggaattttgctttgagtgtggagtaattggacatccttttgaaaaatgtgttgctttcatggaaaggatggacaatggtaatgatgatgatttggagtacggtccatggatgaagggtgctaggcttccaacaacgggtaatgataagtaccaaactgatttttctaaagctaatgcatggccttttgttacccgactttcacgcaaggccctagtctcatccattcctaatttggtttcaagatctcagccccatccgtctacccttttccaaggtgaatcttctaatgctgctcctaatcctagaagtgttgcaagtaatagtgcttttaccaccctgcctttgcttacttcccccacacaccctcctcacctttatcactcctcccaaattaaccacacggctgccactactggtttctccagtattaacactaccagttctgaactcctccttcacattccaactattaccaactctcattccacaccacttacagaggcttacactcatcaatcccctgaacaactttacctgtaaccggcctccactttcatccccaacatctttctgcaactcaccaaatccacaagctacctaaacaacagccttttctccacaaatcatgctaatcctgatattaataatcattccataagtcagcccctttctccaatttatgatataaaaggcaaacaaaaaatccttgagggtaatccaaaatcacttctttccaacccactcactgcctctaaatcacttacctctgcaactccatcagtcattgacctttctcatatctatgtgcccgacattcactcttctacctttgcaactgttaggctatttttagcctatgttttggatctaatttatgtgcgtttttagctgtgttgggacggaattacgcttgttttctatgttttcaggttctttggaataaaagaggtctcgggtgcagaaattcgttaaaagatgtgctgagccgaagaaaacacaatttctgagtaattgtgcacatctggccgcggctaaacacaacctggccgcggctagatttcgaaaatctagaggcttcagtcgccgcggcgatgaagaggctcgccgcggccatttaaaagatacagagagaccccttattttcaattatctcgccgcggcgagaggaagcttagccgcggcgagatcccgtacggaccaggggcattttc

SEQ ID NO: 385073 - DNA, 1271 bp, Cannabis indica
aaaaaaaaataacaataatggctccaaagatggatttttgtatttgagagttgtaaaaacaagatcatcactcactagtcctagtcctcctaccaacccaatttgggccatttttgggtttttcaaaacatagtgtacatgggcctaatagtgctaattatgccactacaaatgaattttccttattgggctcttaggttttcttgatgagccaaaatgggcctttttataaagaaaataactatttacatatataccattttcttagcacaatacttgcaaataacacaagcttgtcaaaatgtgcagtcattttgcatatttttattttcataattctttacaaaaatagtatttccaacacactcgatattttattaaatttacttgacaccctttgtcaaaaaataaataaataaaaatttacttgactccttaaatagaatactagagataaaattactataaaaaattgcaaaataacaaataaaaatatcttttttcccaatgaccttttcattttatatatttgtatatttatattattgatgaaatgattgggaaaaagtgtgaggtaataaacttaaacttaataagagagaagaagaagtggaagaaaagaaaaatcacatgtgaagaaactcaataaaggtttcaatagtcaatagtttcaatcaacaaagacaaaagttgtggggttttctttcttatgacagatggaatacacctaagtccgtacatgaacctctttttttatttttaattattttttttcataccaataatgtcttcaaaaatagaaataacaaataaaataattattcattaatatgtatagtagagtaggcaaaaaaaatatatagaattggtaaaaagataaaacaagattgaaaagataaaccttccctttcccttttttatttatttatttagttttctaatttaaattgggaaaaagaattgagatggggaccatatgtaagtagtaagtatgtggtgtggttccttagagataaggagcccatccctaaagagatgcttttgcagaagatatatatgtatataagtaatgatatttttatttataatatttacttaaatattacacaaaataacatgataatatctttaaaccaatcatatttatttatatgagatttacatttccaaaaaatagtcttacattattgtgtgtcatcctataattttacatatccacaacaaatatcttatttttaatcataataaaatatataattaaaaataaaaaa

SEQ ID NO: 385074 - DNA, 2003 bp, Cannabis indica
atgtggaggtctctctcattcaaactatatctgttgcgcttgtcttcttcaggatttcagcaattcaatctcactcgacaatctgacgaacaagttattattcgttttctgtacaatttcatcattttcagctgctgctgctgcttctgagatctttctagggttagggtttttgcttctgtgaatcacaaaattgtgttgtattttattcgattgtaggtttagggcttggaatattactattattatctttttcggatgttatgttatttttcttttgtaggtctgggagtccagccaatactgttataattgacatttatttttattgtttattttatttgattcagatttgataaaatttttataaaaaaaaaaaaaggaaaaaaaaaacgaaaagagtaccctaaaatattgtctacaaaaatttgttccataacaatatcaatctgtgaaaaagaaaaagaaatttaaaaaagaagaaaaggaaaaagaaaaaaaaaaaaaaacttgggacaatatatttctaaatggcgaacccgggattaagcaacaagaataacgggcagcgtttaggcattacagatcccatatctttgggtgggccaacagagtatgatgtgatgaaaacgaaggagcttgaaaaggtttaattttacagcttatcatactttgaactcttatgtgaagttatgctgaaattgatttgtggatgtttcagtatttgcaagatgctggattgtatgagagtcaagaggaggctgtgggtagggaggaggtgcttggcagactagaccaggtggaagttttctctgtttgactgctaagtaaatgatctttaagaaacaatatataatcattattttgaattttgattaacacttgtttctattgtaagagtatcttagtttttgcttcttgtgaaatggaacagattgtgaaagtatgggtcaaaactattagtcgtgctaagggtttgaatgagcaactggtgcaagatgccaatgcaaagattttcactttcggctcctatcgactgggggtagggcttttctttttacaatcataatgtatattcacacatttgaataatattaaattgttttcttgataggtaaatgacaatttctcttaattcttgttttagagtttagtgtaaaagatgtaataattgaagttctttgcctgattaatttgcttcctaagatacctaaataagtaaggttatttgttcataactttatgtgaatgtcattatttgagtatgatagaattttcttcagtttaaagattctatcagcaatcaagacacaaataacggaaacccataatgaaattatttatgaattgctgaaacagtacactaatcaagcattcgagaggctcgtctcacctattccaatctttcaattatttatgaattgctgaaacagtacacaaatcaagcattggagaggctcatctctcctattccagtctttcaagaggattggtctcttcacaagagtctactctttctctaagctctccttacaaaatgaccccttaccctattcatagacaatagctagaactatctaagccaactaggatctactttgaacaagacgactcaggactcagcccaagcttaataacttctagctagatgaaaagaatgaattaacaaaaagactacaaaacacaatgtactctatttacttgagcagcctcctgttatataccgaacatataggaggcttattagagtgatatataatttgctgtaaaatagaaactgtacggactgagagtatcgattttctattgcgttccagcatcaccatcatgctttaaccttacattttttcacctaatttgaaatgtctttgatgtctaatattaaagttccatagtcatttcatttaacagtaacacacttagggctcgtttggaacgccgtattaggtcgtattatattgtattgtattatattgaattgtattttatgcaatattttatgt

SEQ ID NO: 385075 - DNA, 600 bp, Cannabis indica
taaaataaaaaaaaaaaaaaaaaaaaaaaacaagtaaccattgcatagttgggtgagttaataaatgatatttaaatttgggttggttaataaataccaggtttggtatgatatatcaaaaataaataaatgacattttttaagggaaataaatgacatttgaatgcgcattaaaactcttttttatatatagaacattaaaactcatttttaaatgagaataaattagattatgaggttgatggttatgtgccccttttaatttgtatcatatttactgctttatgcttttagttgatttttaaaaaaataaaatgaaaaattcccatgatttatattttaattattcaattcaaaattgtcttctttttaaaattaataaataaattaattggtggttataaatttaatttagtagttccacacttaggtcaaacgttcaaatcatatccaatataaaaaaaatgtatgaattaactaaattatatgctacatatggctttctgttttcagttgatttatacaatttttcaattatataaattcatcggattgactaaacaaattattttgattcactctttcaaaaaaaaaaaaaaa

SEQ ID NO: 385076 - DNA, 2531 bp, Cannabis indica
agataataacagagaaaatcagatgaacttacattttaaaccgatgacctcaccttcaacaagtgaacctataccacacttatgtccttatttaaacataatttttaataattatttaatacaattgattgatgaatgtaagagataattatactagtactcccttactagtataaatatataaatgggtagttgcaaggatcagagtagagaatgtcggccgggcggtattgatcattacaaaaaatgcattattcttgttatatcgcttcagatataagggcccactttttactgttctatactcatcatacactaatccaaaacatgggatcagaaatgcgaattggattggaattgagacattttattttatcctttgtttgattgtttcttgtttttatgtctttcttatatttcttttcttgctttagggaccactcgccctctaaatctatatatgcttctcaatgaaatacataaatgcatgcagcctttgtgatgtgattaaataagatagaatttttccattaggttgctcatttaatgcatgtaaattagaattttttatatgaaaaaagttttaatagttatatcaaataatcattagatcattatttaatggttgtaattaatttcaaaattaaaataaaaaaataattttttttacaaattaaaaagagaaaaattcattcaaactaaacaaaatacaaagcaaatgcagttgctaatgagagcagccctgaacacaaaaaaccaaaccgaggttacataaaagcagctttattacagattagcctatttctattgtttagtaaagcgacatttaagcatctaattttaactttgatgactaacctgattgctaagctaataacttggccaaattacaaacaaattcaaatacacatttgtctatattgcaccaaaaaaaataaaataaataaacatagctgaaattagtgcattagaaacatagttcaagagattaggcttgaaatctgcacaccaagaatgccactcgaccaaagacaggggccaattaaatggaccaaaccagaagtaacttcctctcgaacttttctagcaaagatacagtcaaagaaggtgttggtgtgattccacatcatcttcacaaaccgggcaagagctggatgtaagcgccaaaaatttaccaagttgatcacgagtcaagagatggtgttcaacgcttgccaagcaataaactgatgtttcgggacgctcaatctatgccaaatcgcaacagaataatccactttactagttgaaatcaaagaagagtagaactttttaactataaacttccctttcaaaacagaattgaccaacttatcaaaaaaaaaaacagaattgaccatagcatctctatcaatggagcttctcaatttcataagcttcttaaaataccaacgcgaatcagttttcacaaacgctagccaaaaattttgacctataagataaatggaatcaatccatctaacccaaagattatcttgtttctcagaggccgcccaaatttatttcaccatcaatgcaatattctgttttcaaccttcataaaaaataaccccatcatacttcttgggtaagcaaactttttctcaagaagtaagatgaagtttacttctattcccatttgcaccctaaaggaagtctctacaacatttatcaatcgcaacaacaattttttgagggagaataaatatactcatgagtggataagttgcgccctccctacaaaagacaggttcctactagcccaactattaagccttcacttaatttttctctaagatcaccctacaatcaactgatctccattgagtaggtctcaagtgcacacctagataattaagaggaaaagaaccctttttcatattcactatgttcagaatctgatttttaacctcacccatgacaccactgttgggctttgtaccctaaataaaactcaattttaatgtaatctttttctattcaattatcaataaagaaacagatttaacttcattacttgtttaatgtgttatttagttcatgtgatcatttatttacttatttgattaataaattcacccaaatccttatcacactgatattcttgtttaagtcaacacagtggaaagtaatcaagattgtgtaattgaatgtattcctagatttatcagtacacagggtttaactgatatgataatctacaacgtagtttacttgcaccttggataactgctatgtcctttccagggtattggttaaagtaagcttgggttggatgtatggagtatgcatcagaagggaccgatattgaactttaactagatatgataaatttaccgtaatatcaactcaattcaatatcacatagttgatcctagatcaaatgatcttaatcctggcatggttaggttctatctaaagagtgttatttgtgttctttgatttgttagttaagcctacctttcagtctgggtgatacgtacattttgagagcatgatagtacaattgagtg

SEQ ID NO: 385077 - DNA, 1210 bp, Cannabis indica
taatattaatacatacacatatacgtgtgaaaaatatatttattatatatatgtaatatatgaagatcaccatcactaccaaaccaaactaatcagttgggaaacaactcattggagcattaagatgagagaggccccccccatcccatgcatgaaccctccttttttcttgtctacatatatagatatatattaatattacttactatagtatgatttataataaataataatagtaatgtatgatatgatatgatgtatatatgtaagtatataaatattcaataattttccatcaaatcaacactaacgttttagtgtatatttttccagcaacggcatgtgattgccatgctctcgtacccattcttaagctaaacttcatgtgatgataagattggtgttatcatacaaagcaaaaattatatatttgtttcatggttggggataggttttctttcttttcctacacttttggccactttcttttctaattaagtttttttgttttttttttcacactactactagtcaatgtttttgtctttgtgggggccataatcacatatgaaatttgttttgacaaattaaacattgccatatactaaacatttatatatatataaatattatatatcatcataacaacgatatttcaatatatatatggcaaatagtttaaatcatgttggtggatgatgatgttgtgtacttgctcataattatagagcaaggtcggttatggataattcctatttttctttttggtaaaatcaatttaatgtatatttcaaacgtgtggttattacatataatgtattaattctagagatgagataagaatcctccaggtgtggaatattaaatgtcattaattagattagattagacaaatatagaaagactagtcattagtacatgaaaaattgtatagaggttctttacttcttttccttttcccatctttctgaaagaattatttagaatattctatttagttaggaataataacaccttttttgtctattattattattattattattattattattattattattattattattggtggtgatccattgggatgcatatcttttattttgtaaaaatagttctttcataatttttagaaatttttacatgaaaaatcctttttactctctttattactattattaccctcacacggctattactacattta

SEQ ID NO: 385078 - DNA, 2385 bp, Cannabis indica
tacaactttgcctctcttttcaccatgaaacattcatcaaaccgctcacactgcaccgacaaaaaaaaaaaaaaaatgcagtttgaaattttttgtggtacggttgcggtttgaatttttccaaatcgcgcggtgcggtttgcggttttgaattgtaatatgcagttcaaaccgcactgcaccgcacattataaaaatgctaacttttatatttatttagtccaatatgtgaatatgtgaatgtccaatttaaaacccactaattattgcattgttaaaacttaattattgtattgtgataattaaattatttggtgatagcccaaaccacagaaattgtaaaaactgcaccgtaccatattttgcgatgtgatttttgtgattttttagtctcgtggtgcggttgcggtttggaaaattagaaaaaccacatgtacaaataaaaacagtaatacccgtaccgccaacaccaacatatcaaatgtctatggcaatctttaatggatacatgaaattcactctttctgcaacataataaacaatcacccaacccacacacatgacacaattatacgtacaagaaacgaagctgaatttattgtctctgtgttctgtctcggaatttttgttagaacttgtgaaaagttaaaacctttcttccacaaatatttctatgggttttgtttggcgtgccactttttctttttcttagaaaattaagatttctcttactcttgctgcggatctgtagtgattgtatttgttgaagtttactaattgcaatgaaaataatacattatttcagtaataaaagtccaagaggttccatttgaaaaaaaggagaatggggacacactaatgtaataatagaaacaaaaaagaaaaccttcttgaaaataataatggaaaatttcactaatgtaataatagaaacaaaaaagaaaatccttcacaaaaataataatgaaagctttgtccctgcaaatgaaaatcaccaattgagtttcaatcgaaacttgatgaattattaagagggtgataatgatgtgaaggaaacactacatttcatgtggtcctttgtcagtgttaatcaatctttttctctaaactctaaattttcatgtggtgcacattttgtgaacaaaaagagaagcccaatgggccatatctaaggaccataatagactctataattaataactggtagacacgactgtggtccttattggtgatatattgagaattgaaatcacatgatcattaactatatattattacatgaatataaaatttcctttgtgtttgtgttatttagtaaccgttatgataagtaaaatttctagttttttttcagcagaaaagaaagttgtcgttttccaacaacaatagctataaaatgaccttcaatttattgactgtactatatcgatcctataattattgtgagtatccatatccatttatatataaggatgtcgttgttcaataagctttctattctatctctctttctcttacaattggtctttcatgtaattacagtgggaaagagtatcataatcctgtgacaaatgaataattgtttgtttttagtgaagatttgttagtttcttaattattatatatataaaaaaaaaagaaactaagtaaatattgggaaacacatgttagtattagtagtactgtggtaggatccacgtagaacagattcaaaattattgagctgcacgtgagtttttatcagagaggacaatggacataattgagtttttgttgggccatccatggaaacagtcttttccactttttgcctctttggagttatacgtggaggagagaagcatcaacatgtgattactgattatttctcttaaataatttcatttttgtaattttattgaaatcatgttgtacttcaatttgtatgaaagagaaaaattattacaatgaaagacattaaaacaaaatgaactgacactctgcttcaaaatagttctcgatttaagctctcaaaaaattccacacataatttagtttaggggtgtacaatataaccaatctaattggattaaatttgatgttaaaattttgggaaattctttaataaacccccttataatagacacatcaatacttcccctataattcactttaagtggtgatggtagaaaattttttaaaaaatattattagcattagtgtattgaatcaaaatttagtttgatttggtcaaagtgagtgtactcatgcatactttaaattactatttgattggtccacctagataaatacaaaagagaaaaaaaaaataaattcattttagaaaaaaaaaaaactaagaatagaattgatggcatcgtcaaaagcagttttttttttttttct

SEQ ID NO: 385079 - DNA, 2762 bp, Cannabis indica
agataacaaagattttttaagagtgaacacaagcattttgattaataagaaaaagaaccagttgagtcattttaactacaatcagagtgaacacattcattttgattaataagaaaaagaaccagtaagtctttttgatgagaacaaaaatgcaagaaaatccatgtccagtttcctataacttaaaattaactcaactaaaaatccttttcctcattatttttaaagttgttggtttagcttttaacaaagaagacacgttactgaatcaacatggcaaaaagaaaaattcttcataatgtaaactggttactacaaaattatagctcagcaagagatatgaaaaatacattaaaaaaaaagtcgaagattttaaaatcaaacaaaaaccactcacaaaattatcctagagttataatagctgaaacattcacttaaaagacaagctcatgaggcttcatgcctgccttaagagagaatcttgctccaaggtatgtcttcaagtctgggacagcctcaatgcactttaacaatggagtgtccactgttttctgatcatctttctttgcttgtggaagctgattcttctcctacacattttcaaaaataaaaaattgcagcaggtgaaaggcaattaaagaaggaatttaatagagaaccaataaaagtttggggaaagtgaaaacttcaggagacatatatgtatacagagatgaataaacaagaaaactaacctctttctcagcctcaaagaactctccctctcccttcttcgacttctttttgccttccttggcaaaatatttgtcatcaaacttctccaaattgacaccagaaacatcaaccttggtggaggttccgatcacgtaggcttgattcacacgtctgatgggaactccattgagcttgaatggtcctgtattggcaaaaaatgacagattaggatcaatcaaaggcacaaatacaagaggaaagcatgctagggtgagaagaattaagtaaggcatgttttatacataagcttttcaaaatcttacaactcaaaacagggtgcacaaccttaaaaaaaatccagcataacataaaacaaatcaagttctttcatataaaacaaacatttttagcgttggaagcataaaaatcattagattattgtttcattcagagaagcaatgctggaccatatcaattgtcacacgtttaactgagctggtaaatttacaaaacactgcattagtaagcttatacaaatgtatgtgcccctcttcaactgatgttgaataagcatccaggatagatgggaatggtttccttggattagagaggatagatataatttggaataaggtatatctttttattagaataatgtctgtcacgaatatagatttaaactaaatctttaataggagagccagaacatgaataggaaaagcaaataaacaaagttcccgtaacgccacaaagactatttgaaacaatcaaaaacttcacacatataataaccattgagaaaatgcatagtaatactggaaatggaaccctaaccctatacattctaaaccgggactactaaaatgaaacaaacaagagttgcaataataataataataatagtgtatttatgcataacaaaataacaaaattaaatactgaagggaaaaaaaactacatcatttaaaaaatagagagaaagagagaggggctgaccagtgaccaagagcaacccagaggaaagctgcttgagaaagacaactctcttccccttgaaccttccagccaagatgatcaagactgtccctggagtgatacttgctctgccattaacaaagataaattagtaaaaccaaaaaaaaacacaaaaacctataattgaaaactgaaaatgaaaatgaacctcagcttggtcggcttaggcttgtgcttgttaacaaggggctttttcacgtcctcagctggataaaacttaggagccttctggacgggagcctctgcagcaactttgggatcgtggtgtgggaagacaccgccatttttggccttaatggcccagagacctctcttgtggtacatcttggatctagagaacttcccgacacccctgatcagatcggggttcctggtcttttgaggatttctagccttggccgccattggagctatatctttttcttccttttcggcttcttcagttagagaggtgaggaatggtgaagagttaagagtaggctcaggctgcgcacatgaaaccctaactgctcttataattctcgtccaagggtttctgcttttgtaaataatgggcctaatttcgtactttcgcgatttgtttggaatatgggccttgaaccgccaaaactaacttccggcccattgtataccttcggaagcataacaaatgggaattttacaaaaatactgtttttggaccaaaactttacaattatactgggacacggcaaaaataacatttttactgccccagcccaatttcattacttttgtactgcccaagcccaacagcataacatttatactgtgtgtgtggggaaacaaccttcttcgtgtgtggggagacgccggagacggaaatcaccaagaaaaaaccattaaaaccggcaagaataaacaaaagcagtaaaatcgacgtcaataaataatcatggcaaaacaacagtaaaacaacactaaaacaatcaaacaaaacaaaagaaaaaaatgattaaaaaaaacaaacaatctgctgcacaacctcaacacca

SEQ ID NO: 385080 - DNA, 2137 bp, Cannabis indica
ggtttcacgtcatcaccgaatttagcgattagtttcggttacggtttttctgatatggcaatcaatttcgattttcaaaataaaaaaaaaaaaaacgattaaaccaaataacaactaaaatcgctaaaaaccacccaaactgcccaaaaccacctaaaattgccaaaaatcgtctaaaaccgccaaacgggaaaactgccaaaaatcgtacggtcaattttatacgattataatttttaaacggtcggttacggtttttgtaaaataaaaatcgtaactgaccggtcaattataaagttgtaaaaaattgaccataactgaccgatcttcactcttagaagcaacctaaatcacaacccattaaattgatatatgtctagctagacgtggtgtgaccaaaaagattgcatgaaaacacattgacacctttgttaacttgtagtgccatttggcaccaaactttgctctttcaagtttttttaaccactatatatgtgtgtgtaaatcaataagccacattgagttaataattatttaatgaatatggatacaaaaggaagtggtgttacggcctctaacaacaattgtggctgccctacaccctgccctggtggctccgcctgtaggtattttatgtaatacattaatatatattagcgggaaaaattagggtttcttcctcttaaatttatagttattggaggttgtctttatttttcgactaggcatgttggcattcccttggcttaggtgcgatttggttggatttgtattttgctattgtgatttgatttttgttattgtttttagtcttgcctctacgttatgatttttaatgtgttttaatcttgtttatatggcatgattatagtgttttagtcttgtttgtgtgatatgattttgtttcattgttagttcttttttgttcttcaatgactcaccatcaaatcgtttttagtagtatgaataataaggttgcataccttgcacaataattgagtgttcaagctacgaggttgaatgaacttgttgcaatatgagttcatactgttgtgtcttttaagaaaggtggatgaaattgaatatgtgttcttaaggttaactgtgatgttacaatttttttcatctaattttactttagtttttttatcaaattaacaatctagaaattagacaactgattatttaatttatttttttttaactctaatcctaaatgtttctccaacaaaaagatgttcggattaaattatatgttattattttacttaattaatattaataaaattacataatttattcaatatatatacacataccactcttccaagaaacctataaatgtgttgtattcataactattcaatgtgtgatattattcaccatcacaataagttgagaattgttattaaatatcataacacctaatagatttctgcttatgcgattcaatattaaattatactaataataatatgacacacctgatgatattgttaaacacaccatacgtgttttttaacatgttcgacaccttaagataccgaaatttgaaatgtaaaatcatgtaacataggtgcagcaaatggagaagcgagacaagtagtggaggtggaaatgagcataggaagtgctcatgtggagagcactgtagctgcaacccatgcacagtgctagagctggtgctgcagctgggcttgtcaagcctcgttgcacttgtggtcctggttgcacttgcctcacttgtgcctcttgatcatcatccaatcttctctataccactatatatatagatatattatgtatttgaaattaatataaataaataaagaaaaagtacgtatagtaattaaaatggccaactatacatagttggtgctggttatttattattattatccttattgtacttaattggttggttgtaggaagtaatttaaattaaataaatattaatagtttgtcgttttcgattttaatggatcattgttgttatatatatgttgtgtgtaatgctattcactaatgtaatttgtaatattgtacattgaataatcaatagttgaatttcccactcgtttttgtttttgttatggtttaacgatttcttttttttatttagccgattaacttaaca

SEQ ID NO: 385081 - DNA, 2715 bp, Cannabis indica
gtatttcctcagtctcttttaagcttttggttaatggttgtctatctaaaagttttaactctaccagagagattaggcaaggggatcccttatcccattatttgtttttgatggtggctgatagggactttctgctgccatccgtgttaaggaattgattagatagttttctggtattgctatctgtagaaatgcctcagttatctctcatttaccttttgctaatgacagtattttgtttccccgattaatgagacatctagcttagcaatcaaaagtattttagctacttataatcgtgctacggggcagtcggttaattttgctaaatcttctattctgttttcccttaatactaatcttgtggctaaagatagcttttgtaaccacccggggcttagaaatgagggtttgtagcaaatatctgggagttcctcagtgtgttggtagggttgacaactctcttttccattacctggtccaaaatgtttcttctaaaatgagtatggaatgctaagtttttttctaaagctaggaaagagactctcatcaaagcgatattccaatctattccttcctatgccatgtcatgtttcaagctgcccaagcataattgcgagaatctccaaagcttattgcaaatttttggtggggatcctctaataacaaacacaaagtcttttggaaaaattggtctagtctatgtgtctcaaaattttttgggagacttggatttcgatctatcaccaatcataaccaatgcttgctagcaggcttggagagttgggtcaaatcaaaacttccttctttcttgtttgttaaaagctaggtattttaaacaaaacaactttcttaccgcttctaagggtcattgttcttttctcacttggattatttcttcacatgtacctgtagtagcattcaagtaatgtcttttgatttcccttgtttcagcttgtgatttataaattacttctgcacaaaataagaaacagcctatccaacgcacaaatggttggaaatttatgttctcatcatcattggtaaaattaagtccaccacgaagacattcataaacttctctaccgtaattcttagcagataatcccaatttaggtttaatagtatatcccaagagtgggagacttaggaaagggatcttcttataaaggggcttgtttagagattggaaaatagtaattccatctctttggctgactcccgctggattctaggtttgaattctcttaccttcttgaatgatgcttcctctcttaataatactatttgttttttttattgatactgatggggaattggaacttaaggaaacgttagcaccatcttcccacttattaagtagaagctatccaaatcttgattgatcccttcagtgatgattggctcatttgggggcatcatccttcaggtaactttaaagtcaattcagcttatcaattggctaactcttgctctgttttaggttctccatcctcctctttgcctgcttattttaaatcttggtggaagatggtgtggaccatcaaaattcctcctaagatgaaacactttgtttggaaggcttttaatcatgctttaacgtgtgcttttgcaggagcaaagaggagattgttactcatgcccttataaactgttttagagctaaaactgtgtgaaagaatacttctttcaatcatttttataacaataataaatattgtgatgttaaagaatttcttcttaggggctttgatacttttaataaggaggattttagactttttctgatttggtcaaggaggaatgattcacttttctataaaaaaaaagttaattagatgtttttcagatgtagaagatttggcaaaaagttttctgtgggattacaaggaagctcaatcacttcagccaggaaaaaaactgcagagaggttgaggactgagactatcatgaaaaattattctaccaaggaatcctcaagttgctactcaatgaatctaaatgaatacaaattggatgtggatgctactcttgatgttcaaaacttctacacatgtttggaagcagtggtaagagattgggagggcaacattgtagcaggtttttttagcaccaaaaacaggagcttctttaccactttttgctaaagccaaagctctattatatggtctcttgtggtgcacagccatcaagctgcctattactcatattaagacagattgtcttcaattagcaatgaagatcaagcataaatagaaggattttcctgtactctctggtcttatctcaaagattcttgactctttatctaagttttttaatgtatctttttatcatgtttctagaaatgataatgtatatgcttataacaatgcaagagatgcattaagagttagtttggagagcttaactctctaaactcttattgtaattgtaaccttgtacttgttcttctcttgatttctttcttctttttaataaatttaaaactaagtaggagggagccaaacaaaaattacaatttacaaattcaaaaccctttaataatatttatacccctaaattacaattttactacaatttatacttatacccctaaaaagtcagtaggtttatttacaaattcaaaaccctttaggggcgtttggaaagccacaatgtaattgaatttgtgtgtaattggaggtaattacacaatttgacatgtttgtctga

SEQ ID NO: 385082 - DNA, 807 bp, Cannabis indica
aaaagatattaggagactctaaaagcatgaattttttagtcatgttgtcacttcaactaaggtggttggtgttttatatgggtcctccatgttaccttctttaatagagtaagtatatactacgtataatttaaataagtagattcctacatgaaccccaataattatttaacaataaaaataaatatattgatcactttatctttacattccactaataaaataattgtagcaagaaagaggggaatttttgacaaattgaaagctttgatgttggaatgagctgtgtgaaaggatttcatggggacccagaccaacctcaaaagctataccaagccaaaagtagtgatttttttggacagacagtgaggtttagtatcaataaattgttgtcacataactactttttctactctctttcctttgaacaatattttcattttttttaaaaaaaaatatttgattcatgttagcattttgatacattgtaccttcttatcatcattaatcttcttcatatgagaaagcatgactctccagcaaaaaaaagagaaagcatgacatgtttctcttaatgaagtattttaccaaatctagctaaacaaatttacactatgtgagaatcatctttactgaattttgttaacaaattatcacaagttcctagtatattattattaataatagtatgtttaaattcaatgtttcttttagaacaaatgttaatattgaaagggaaatttgattttatatacttaaaaaactaaaaaaatttattcttaaactaaaaccttttaaactaaaaaa

SEQ ID NO: 385083 - DNA, 1062 bp, Cannabis indica
gaaaaacaaccattacccatcatccataatatgagcaatggattgtctgcgatcaattgctcatggggtggctttatggttcaatgtcagaagccaaagccattgaagtaatgggatgtaccacagcaagagctttgtggtctgctctggaaaatttgtatgatgctcacacaagagcaaagatggatgatcttcgaaccatgcttcaaacaactcaaaaagggacaactcccatggcaaaatatctgagattaaaaagatcctggtctgatcaactcgcattagctggagatccgtatccagaacctcatctggtatcaaatgttttgagtggcttggatgttgaatacatcaccattgttttcctgattaaagcaatgaacaacctaactcatgttacatggcaagagttagaagaaacccttctcagttttgatgctaaacttgagaggtttagcaatctgcagccatgatcaaaggccctaaatcctcaaagttccacaccaccatctgcaaactttgctaacaagcagaatcctagcaacaataacaataacaatggaggcagaggctaccatcctaacaggtctaattactcctcaggccatggaagaaaaggctaccatccgaatagtcgtggaggaaacaacagccgtggtcgaggcaggggtagtggtaggaactcaagaccaacttgccaggtctgtgagaaatatggccattcacgtgcctattgctacaatagatatgatgaaagcttcatgggaagtccaccaaacaatggaagaggtcaagagaagaaatatcaacagcttatgtagctacactagaagttgtggatcatgaaggatgatatgcagatagtggatcaagtgcagatgctgacaacatggctcataaaaatagttatggaggtaatgaaaaactaattgttgataatggtaatcagttgataatttcaaatgttggaactgggaccttgaaatcttaaactgggaagtcattgatcttaaaagacttgctacatgttcctcaaatcactaagaatttaattagtgtatc

SEQ ID NO: 385084 - DNA, 755 bp, Cannabis indica
gtcttctttctttggatgcctccatttggtgtggaatttattatactttgcgtaccaaaaatcatttgtcctttttaataataaaagtttaagatactcaaaagaaaaacaaaaacaataagtgacacaatctttctctatctctcaccaccatgattatacattatgtctttacacattgaattattagatataaaactaaaaaagaaaaaaaaaaaagcatagaagaatataataatgagatacatagattaatttggttaaaagaaaaacacaatctcatcattatatataattgagctcttgatcacaaaggttaattaaaatgccttaatttgaaattaatacaaataataataattcttttgcataacaaagtacctaattattatcactaaacaaattctaattaattaggctgtctggtactattgaatgatgattttgaaccattattattagtattattattatagctaataatgtgggcagtactgctttcttcttgatcatcttcttgatcagtaactccacttgaacatgagaatgaaggtctaggtgaaccctcatcactaatcaaaatcaactgatttctcttcttttgtttattataattattattattatttttattaatattaagctttctcttcttctgaaacactccgcaaacaacccaattcatttgtagctgagacatctgcatatatatatatattacaaaatataagaatatatataattggaaaaaaaaa

SEQ ID NO: 385085 - DNA, 1435 bp, Cannabis indica
attatttaccttcatttagaattgtactctgtattcaaataaatatacctaataagaaggactcgtagagtatgtaaattttaactacaaaactacgtaaaatatctagtgtttatttattatttttatttaattttgtagtaaatttattacataaggctatatatttagttaatgaaaatttagcgtaaacaccttgaaaaagtgattaattgctattttagttctttcccaaaccctttccaatgttgacaccttttgttgggtcgtttgggtctaacttcacctcttccaactcttcaattggttcaagttagttttgctcgctttgaatcctaggatataagtcttccatctcatggacttcaccttcttcaattatgattaccattaacgggtgggttgcccttcttcctttcatcttgatgctatagcattattgggttttcaattggtcacctttcacagttcctactccaggatgagttggaaattttagagatcatgttttattgaacttactgcccccgttccacttaatgttgggcgacccattagcatattatatactgaaagaatatccaccacaaggaactcctacatttgagttgaggatggtggaggttctcccatggttaatgggagttcaattgtccccaggcttgatatactgtcccctatgaaaccattcaccatgcacagtgttaattttacatcctctagccccattttatttaatgtttatttatagagaatatttactacatgtggattcttgaatcctagtggaaatttagaattaagtatgttcagatggaatggttcagtctccttgtcagagtcatatcttgacaactttccatattctccatctcgatattgcttgaacttatcctccagttgtatgacccttagttgaatgagatccccaacaggttgttcaacttgttcttatcgatttgttgcgttatgattttatcgttctcggaggtttggagcattatggtttatatgtttgcgcaagtcaagatgtttgcggattaaatgttcacggagatcaggttcacattgccacttgccccttcgatcatatttactaactaaccttgtcggtgagatactttcaaattggtaactattggaattactcatgctttcttgttcatcatgatactggctgttggaatatcttttaccaggtcctttctgtcacagagtatcaccaagatctgagcctgaaactccttgtgttgtttggattcttcacagtcttacacactataattgaggactaacttgctatgggtgggcacacactcaatcaataaaggcttgaatttgatttgtgaagaacactaaggatttcaaaaattagagaagaaaagaagaagaagaagtctcataaacctagagagaaagaaaacatggtttattg

SEQ ID NO: 385086 - DNA, 1414 bp, Cannabis indica
ctctttctactgccataatattctactgttacaaaggagaatggaaaagaaaaagtacgagattctgaataaaagagagaaagaaaaaattaattaattagaagatgttagaaataattaattaattatttaaataattattatttaatttaaaaatattattaaaaaattttataaatatatattattaactatttatatacaattttttttttcgaaaaaattacacttctatcaatttttagaaaaaattacagcatttacaattaactacaaatatacggattgtaatacagtataccaaacaaacttttacagatcttcccctggcctggccttcccctgtaccggatttttcactacacaatcgattggaaaaccagttttgaagagggttgttttgaattttgattggacatcaattaagggattcagattccgtattttgaatccgatttacagagtttgcatcaccagattttgttcaaacactcgacttttgtctccttcgaattcccttgcccaaaaccctttgccttgaagaagatgacgatgatatacactatattctgtgactgagattcttacaagttcaacagaaggaatgctagtcatcttattgcttcaatattcataagtcttccttactgttttcactcttttccttgtttttaattgtttcaaaactacttttactcttgagggatgtaaattatataataaattttgatgaaattattaatcatctccagtccaatatcatatcttatacttctactttaaatttttgaacaattcttaatttgttcatttgagattatttgcgcatttgtcatgttcaattcattgttggatttggctttgcattttccatattaacttttttttttttgtaaaatataactactaatagtgtttttttttgttggggtaaccgataaaggttaagataacaacggtaacaaaagttacacagaaagagggggatttcttccatccaagaaagttcattgtctatcctaagggcatgcttagccaatctatgagcctcaacattaaagttgcggctaacatgagaaagagatgccccaggaaaactagacaataggactttaatatcagaaaagataacccccagttcatttaaatacacagtctggccctccaaagctgagaccaaagaaagtgaatcagaaaaaaccctctccacgggaagtcccacatcttgagcccaacgcaaacctactagtaaagcaactgcttctgcctggaaaactgaaaaggaacctgcaaatgagatagttaaaccaataagtacttttaaatttaaaactcaaaattttagagtataattgttatagagtcaaaaccaaagggaaacccctttggtttgactctttacctaacttttaac

SEQ ID NO: 385087 - DNA, 1835 bp, Cannabis indica
tttctttcaaggctccattgggcatccctacagacttatgactcttatacacaataacgttactttggttgtttcatggaatgacgtttgaccctccaaaccaacacgtatctttctagcgtgttttgttctcactcgcacacatttcttgagaaaatttcctaagaggccactcattctaagattactcgtcaatcgcgcttaactttagagttcttaaatgatgaaccaccgaaaaaatacattttgttgtcatagttagttctcatcaattcatttaagtcattttcaactgtataatctcatacatacacagtcttaaaatcatcacatttatcttttccaaacgatgttggattatacaacttaactgatatttctccatacaaatcacaagattgtgactatcgtaacaataccacccattttggaaactctagaacatttcttatgttgttttagaaattattgattgttttattagttgtagttttttctatgttaatcgtatagttaacaagtttactgatagattgtcaaaaaatgttaaattttctagtcattttgctcgtattattcaaggagagagatcttcctgtgattcccgtatttctttctcgatcaatgaactaaatttttttgaaaaaaaaaaaaacaccaaaccaaaaattgacttgtgctaaattttttagttaaaaattctcatttggtatggcaaagatgccaaaacaaaccacatctccaaagctaattttattatgcttaacatctagagttgcatcaaggaggaggtttccaactagattggaggtgccttaaagggttttcattttcacaaaaacaaaataattttgttaattattgttaattaggtacaaaattaggtcgattatgagtaaattaattaatattatagctattaaaaaaaatcagttaatgtatataagtggaaaatgaaaaggcaaaaggagatgaaaaagtgtaaaggttcttgaattaggaataggaattaattaggaaatgtgtgtatgaaaccttgtataaggacattggctttttttttttatatattattattatgatttatgagaaggacattggaatttagttaaagtgtttttgttccactacctttgttatatttgtcctatgtggcactaaagattatggattgtgaacatggaaaaaaaaaatgaaaagaaaggctaaaattaatgagaaagatggagatgaatagaagagagattctatagtgtactcaatagtaatttgactcatgagtgtgaaaagaagccaagattgtatgacgtgtccttaagattttcataccatttattcactatgatatgactctagtcaaaaacgaataagatctttcttacaattttgaaattaattagcttaaaaaaattgtacccaactaaatatgctaacaagtggtcgagactcgagagttcattaaaactaaagttaattaataatttggtatattgtgtaatgtatattttataagaataggtaaattgcgatataaataattaatgttttagattttatgtatttaaatattttatttttgtttttggagttaaaaatacataatgttacaattttcttacatatgttactactaattctgttaacggataaatatgaatacgtggatggctgcattatatttatttattttattttaaaatttaatactcttaatatcaaaaactaaatattatttgttttaaaaataaataaataaataaaaaagatgcaaaactaaattaccataattgagtgaatcagtatatgtgaaaattattatgaaaattagttttttt

SEQ ID NO: 385088 - DNA, 2118 bp, Cannabis indica
taatatatactctaagcttggtttaatttacttttgacttttacttaatggcggacttaagatttaaagtgaaaggatgtagtaatttttttcccgttaaaatatgggacaaaaataaaatttaaaaagaaaaaaaataacttttctatgagatttgaaccctgacctctatcatatatgtaatctaatttaactattacaccaaattaatattatgtttataaatatcatattttattacaaatatatgtcgtaactaattaaaaagcatatatatttttttctcgatttttaataggacaactgccccaccttgtttctatgtgaatctgcccctatttctacccgaaatgcagagagagagatagctttggtgggtatatagtgggctcctcatgaacaatatcaatcatttttaacctaattgctttgatcaagggaaccattatcaaccttaatgtatatgaatatgaggttaggagatatgtgatattttattattattattattattattattattattattattattattattttatataatcaagtaagcatgcattgtaagattcaaaaccaaagtatttttttaagttaaagggaagaagcactatgaatttagtatggaaaaaaataggtcacaagaatacttctttgttgtgacacattattaggaaacttggttctttatgtcattttttaatcaagtttgtttacatcatgacaaacgtttttatttttattattttacttttgttgatccaattataccatatcagatttttatacaacaacttgaggttttcaatttatttttttttttttttgtttttactaaattaaagagtaaggttttgcatatttgaaggaaatattaaaacattttacattatgtataaactaatatattttgtcaataaatatatctttatacataaaatgtgaatatctaacgatttttgttagtttaatagaatattttaaaaatatgagaatatttcattaaattttgtggtgttaataaggtaattttataaatatatataaatatacatattatttattttatattaatgtaaatatatataaatattaatattatttgttttaggttaattaagcttataccaattttagattaatttaaatatatataaataataatagattatttgcaatattatttttttattgttctttttaatattgggaatgtgttcaattttaatattattaaattgtatatttattttcttcaaatttttaaatattattttttaaaaaatattaaaagattaataagtaatttccttacaatacatatttggtacgaatttatttagtttattttagaaattgtaatggccaaaaattgttataccaacactcatttaatttgggtattgatgatttaaagtgtatgtaattttacatttaattagtactttattaaaatttaggagtataataaaagtatttggatcaaagcaatgcttagtcaaaatcatagttgagattaaatagacaaaagaatttctcatggaaattgagaggacgagctacactattttcttcaaaataaaaataattcttttgatgatatttatgtatttatgtgattttattttcaaaatttatttatttattaatatatttaaattttaccctatatactcaaagatttgagccttattttcttgtgcaaatcttatgcactaaaaaaattgaaaattgtcaaagaacatctataatgtccaacactagctattataagatgatattaatttgatataatttaatatcaaatcttacatattttaatttaataaaaaaattattaaccgttcgtaagaaatgaattgggatcttaagatcgaattccaacttatgcaatataatgtatatttaaaacgcttcaataataataataataataataataataataataataataataataataataataataataataataataataagggtattttatttttacacttactaaactagttttttatttattattttacggtaaattcacatacaaccatagagcaattaaattgcaatcaaaactccacatagcaacctacatagaaatta

SEQ ID NO: 385089 - DNA, 1153 bp, Cannabis indica
tttggtcaacataatatattattaatattactagtattattattattataagtagtgagtatacgactagaacaaacaaaaaccctaaactgaactctttattctcactctccgaaacaattccttcaaaccctaagaagctttggagtcaacttcaaccttaccacttcaatcttagctaactccagagtacttagccatggttctgtctgatcaatattttttttgtctcctaatctgagcatatcgagttaattgggataatttctttgttaatattgacaaatttgatctaaattcgtaacctttcctttcctgtttttgattttattttttagaaaaaacatctttttgtaaaactatcatatatctctcctcggtcatctatttctagtgatccaggtattgatagaaatataattcaacgatctatatttttaattaagaaaatttttaccaatttggaatcattccctgtcaaaaaatagtgtttctacgctagttattgtaaattatttttcttagatttcctttaaatgttgtctaagttaaaatacaccatcactctcaattttaattcgtttttaacgattattatatcgttttaaagcttaaataaatatatatacttttcatggcggaagtgttgtctaattcggaatgttcgtaagtgtaaaactaatgttttgttgctgtagttagaaatccgtttgttccacaatttttaataatttgtttcgataaaatatccatatctcctaggatataataactttgattcattgatctttataccgaaatttatttcaattatctaaaaactttgtgaaataataatttgtccaattcaaccactttctgagtcaatttttaggttaaatttctttacagtaagaattacaaaaatattaagtttattgttgaactaagttttcactaattaatgataaatcttaggagctgattgtgagcttagttacagcgaagttgaggtaaggaaaattattgtttttaatccttgtacttgtttttgcatcatttccatatacgttataattatttaaaaaattctacaaaattttgagaaatttaaaataatttacgatacggaaaccagtgtttaatctattttatacgcgtataaaataaaata

SEQ ID NO: 385090 - DNA, 1455 bp, Cannabis indica
ataaaaataaataaataattattgaaataaagtacataatcaaacataatataatatgcttatactttaaacaaaaaaatataaagcatatactaccaaatacattattatttattttaaacttacttatctgttagaatggtgatatcttttttccagccacctccaacaatttcaatatcacccacaccacgtagacacccaacaatatcttagaaaatataatattattatattagtatataaagatattaaattcaaatacttcactaacaaatattaaaagaaaaaatatctgagagtatttcattattattaacacgcaaatcaatcaaatttagagttataaattagaatccattaattggaatctcaatcatttcttcttctaacttcatgagagaagttccaaccataaaaataatcctatactcattggaaagtggtctatattctcctgtgctttccacaaccttgaaacccttcactcggtaggttcttaaacttagaaactaaggtttttgtgatggtggcatgcattagattttcctataacaacaacattgttcaataagtgtaatataattggctgaagaaaaaaaagtttgtaaattaatattaaaattaccggctcatcaataaaaatcaagttgaagtgaatcaattctccatttattttagtattaagagatttccacattcgacataccctaatccttatcattcaattctctgatttattgtttaaatctaagaaaacagtactccatgaagcacactatacgtaattcaaataagatttatttttttattatttttttttttttgcaaaatatttagttggtatcaaatagaagacaatatagcaatccttaaatagttgatagtatgaaaaagtttactttttcatactatagtattaataaaaataattattggtattaagaatgtatttcaaaagacatattgaagacattaaaaatgattataatgcatgaaacattagtgactaaatgattaatgactaaatcacgttctctatttttttaatttcttggattttttattttttttattataattatgatgtaacctgtaattttctcttagaatttgtaacatatttatcagaaaattacatctcatatactttttctttagtagaaaattacctcttaaactatttaaaatattacaaaaattatggttcaaatgtacttatagtattaagaatgtattttcaaaaatagtatttaaaatattaaaatactctatatccaaggtagactaaaaattatgggaaatcaagctcaaaataacttttttttttttttttgattgtaatgaagaaattgttgaacttttatggttcatattggagaacattattgtctcacatggattaaatgtaaaagtaattgagccatatatacgaacatgggctactccactcat

SEQ ID NO: 385091 - DNA, 2265 bp, Cannabis indica
cggttttctccatctgtgttagtctgatcagggttagcaacatttagggacttcactatttcttctcgccttctattaggcacagggaatgctgcattgtaaacagagtttgaagtctcagtattcgctgagatagcagcacgcacagttgtcagaaatgatgaaaacaaagaaattagtttttctgtttgatcccggtcaagttcaaaccaaaacagtttaggctcatagtagttatcagtaattattggtccaaactgatcttcaaccaagggctggcactccatccgaactcgaatcttcacctgcaaaaaagaaaaaaaaacatatatacaatactttcagtgaaattgacaaaaaggaaaccaaaaaagaaaaagaaaaccagaaccaaactacatgacaaagactttaagatgatgttatacttgtgcaggataaagggtataatcagattcatctgcagtccaaccatgtggatttatattcatttgtccagcacttgcagcctcaaaaattccatgaagtttcctatcgctatagttgaataagaacaggggcaaaccaggctttatgttctgcacatacgagaaatgtggagctggtaatcctgttcaaaatatttaattggtatttcagaacattagattcaattattatgaaaaacttttacaaatatgtgtgtgtagtacataaacaggaggaacacaatatctcaccaaacaactgtttcaaaatgcattctttgaaagtgctatgcttgcaaccaaatatgactcccccaagatcattttttctcaaatttctagcagttgagctgaagttcgatggccactgagcctgaggtacagatttttctttcaaccaataagtctcagtcttcctccctgcacccattctgtgttttaaataaataaatcagtgtcataaaaaggcagcaatttgaaccatatgagaataagagtaccatgccaaggaaaaacaaaatagatatatttctttcttacttaaatgcaatgtaaagggatacagtggttacacttgggaaaagaataaaaaaggaaaagcctctgtggattacaaaaataaagcactaaatgccatatgaagcagtactgaaatatatagaacaaaaggtttgtttcttttactttctttctagcttaatcaaggtcagttgactcagttcccatgattaacagaagtttggcgtttctctttttgctcaaaagaaagaaaataattagaataaaaagaaaatttgtttattcaatgctgcatagataataacaccttttccaaacaacaacaatagtagcaataatagaattacaaataaaccagagtccatagaataatgcaacatttttatatatgagaaaatgatccatagaaagattccatttcaagagagatgtaaatactcccagtgtccgctacttccgaaggagaaaaaatgatcgcccgagttctgcataaagagaagaaaacacacgcatataataaataataataaaaaaaaagcttgaatcaatgaaactttgaaagataaaattaaaatgaaaggaaattgtaagaacaaaccttatacaagaaggagaggggcttcaaaaatcttgaaatacgttagatgaatacagaaggacactaatactaactacaggaggtccgtacttaagcaatgaggttagtttctcgagaaagtgaaggaaaagtttgatatagaaatgattgtggtgtgttggtgggtatttatagtcataatggagaagagactgattcggctaaaaatgcagtggcgaaggctatatgaaacgaaagctcattcgggaaaaaaaaagttttaatcgcgcgccacgaacgaaccgaagcgttcactacgtttattttactcacacgctcctgcctcgccattgttgtacacggttcgttgatgttttctcacgtttacatcagtggttcatagcgcgagtttatgaatttcgccaaaaatttactaccagtaacctttctttttctttttcttttcttttttctttttattttttatctaaaaaactaaatattttagatcatgataaaagttaggaggatttcttatatactgttttttattttatttttttttaaatttacggtttgaggtttctaaagtggttgcagtgctagttgcaatagtacatttttttgttgtaatttaggttgcagctctagttgcaataagagtttctatgtaaaattccgtaaaaataaaaaaaaaaatta

SEQ ID NO: 385092 - DNA, 2416 bp, Cannabis indica
ataaataaatattaataaactttcactcactttcaataataaacaatttttttatataaaaaaacaactaatatggtaaagtatgtatttttttttgcaagctattagatatgatggtatatgacatcatcagttgacatcaacacctagagtgactacaaactccataagttgataaatgcaatgtgaaaattaatcatgacactagcgaacagtaagcaattaaatactttaaaattgaaaacggtaaaaacccacattaatattaataatttgaacatacacgttaaaaataatattaaatagaaaaaaacgtctccagatgtaaaaattcctaataataaagtgtttaggggaaaaaagaaaaagaaagagaatgttagggttgatttttgtttttgggtacctaactaagaagaacaactaatgttgtttgtttgttgtttatggaggaaccaatcctcacaacactcccaaccaagctaatgatagggatgagttgatttaagctttttcatcttgaggtgtttttgtccaaactccaaatggtgttgtttgaatatgactttattttaggtgtgtttggtagtgattaagtaattacacggtaattgtttaattagatgtaactgaggagttttaattacacttttcaattcgtatggttttgaattgaatgtaattacactgtgtaattattaagagtgtgtttggaagtaattgtataattattagatagtataattactaaagtgataattaaacaatctaataattacaatatattttacattttaatttctaatattttgtttggcaaaacaattagtagaaataataaagtttttagtaattacacaaagtaattacactcaattctcacggagttcgtaaaaatttgagagtatagttggaactcctccattacctagggtcagccttaagcataagcagactaggctcgtgcattagactcacactttttgagcccaaaataaaaataaaaagttttattaggcttttatttaactaaaattaaatgtattttaaacaataaatattcatagcttagttggttggagtaaacatatcatacatgttatgagttcgaatctcgtgacacttattttcaataatttttttatatatatttttaagagtgagtgtccaaaaatttaattcgcttagactcgtatatttttaaggtcgggtctgccgttacctccagttatacaattttaatgcaattatatgaactaacaaacatgtgaattacacacaaagaattgagaatttaaaaagaattgctctccaacaaactatctctttgacttgttatactctcccatatccctcctctcctcttcatccactcttatttctccctcctactaaatataatgttactctcaagcaaggttcatgcatagtagacaacaaacgaacttgatatacaagtgaggctcttcacaatagcctcggtagcattaggtaattttatacgaggacaagagcttggcaaaatgctgccctagagaaacataatttttttttttatttatttctattactactcatgtgaaatagatagtggaataattcatatttctatgttttttttaatgaatcgtgtaattttattaataacaatcaattaaaataatagtctgcaacccaatcagaacatctcttctattagaaatacgatcaggattataataaaaaaaaaagccaatcaattggtggcctaatttctagatcgtttgataaaataaactaaaataaaattagatgaaaaagattgtaacttcacagttaaccttaagaacacctattcaatttcatctgttgctgaaaaaatgcaacagcataaactattgcaccaggttcattcaaccccttagcttgagcacttaacgattgtacaaggttatagagttgcaaggttatagcttgagcactgcaccctaaccattgagattttatgctcttaataaaattcatttcaatataatcagatttactaattaataaaatatcaaaattcattttatgttgcattttatgttgcatggttcacgtgattactttcaggattatatgtttattatataaattctgaagatagagttattcatgattatagagttgtctacacagtgggaaataatcatgattatatgcttcaaactacttagtcccacgatttatcaatgcactagatttacacagacgtgataatcaacaatgtgatttacttacacttgtatcagtagaatgtccttttcaggtcattagcaaagtaagcaagtatcaaatgtatcaactatacatcggactggatcgatattgatagtgaaaaagatatcataaactaccgttatgtattttctaagtcaatgtcacttagttgatc

SEQ ID NO: 385093 - DNA, 598 bp, Cannabis indica
atttttatgacttttgaaaaataaattctcgacatcaagtcgagtataaatttagattaaattttaagattacaaatattatctgataaatttagacataatcatatgtgtcttaaattctaattaattcaaatctaaaattcaatttcggaaagataatttattcaattaattaatcactctcaaactcttggggagtagttgaattaattaaaattctagtcagatagtcttttatttataacaatttttaaagatttatctcaaatacccaacttgccaaaaacaaatgataaattctaaaaccataccaaatagtataaatgaattttaaatgactgtcatctctcaaatatctcaagtggaaaatttcattccaaaatttcaaagtgatttaattatttacaaagttttcgaagatacaaaaattgtgaactatgttttcaaagtgattttataaaagggtatgtaggtaaattaattgttaaagttaagtacaatcttaaataccacacgatggtataaaacacaaatacaaagggaaatttgattttctatacaaaaacataaaaaaaaaaaattggtagcagatttggtc

SEQ ID NO: 385094 - DNA, 2041 bp, Cannabis indica
tctactcctgtaagtatgatgttgtgaatataccacagcaaatgttggctgtcactaagaataggttctgaatgaaacattggtatgttgttttttaggcgctagaaaagctgaaccggcagttagctgaagctgaggctgcagttgaagcgcggaagaagcctcctgccgatgcaaggcctcgagttgttggtgaaggtcttgtcattgatgaatgggtacatagaacttccggttcccagacaattcttgaatcatactatgaacaggttatcaatgttgaactgactttgttttgttttgttctttcttctttcatttccattttttacagaaagagcgaagggagaaatacttggctcggcagcagattgaagcagtagattccttgtaaaatgcagttttctcatgcttttcttaacggtttttgcaagctttgaagcgcttctatctgtcggccttcaaaaatgatagattggggaagtagtgaaatggcttttgttagtctagtaaagcataacagtattgtatagagggaagaagaagaagaattgaaatgttttactgccaatatttttgtgaaaaccagtcatgtgaggccatgtaacctaacccagggctgagccttgtgcctgttgtagatagtaaatattgctgatgaaaatggaaataaaggaatctggttttgtaaatactttgttcaataaattatctgcttataacacattagccctgctccctcgctagtttgcaaaacataataaaacagagcactctttctcattgaatgccaatgtcaccttccacaagagaggacgaaatattgtccagagaatagaaagaatacaaacaaaatagcaaacagttattaaaatcttcacagagcctcaccaccatattcttatccagtttctgaccaatggaaggacattctatttacacaagtattaatattatagcctcactccagtctctacagattgaccgtaggaacattctgtaaatcttgttagctgatctcaacttcaaccaagtacattgaaatcgaattctttagagtgacaatcacttcaaacgttgattcacaaaaattgacaagatacgatcacctcctgcccaataattaactgtgagaacacttaaaaaatgaagtagattttgaccttcaatccaagttgaactacattagcaacataaatatacaaaattttgagtttacaatgttgtaatacttagccctaattaaatcctaagaaataaaataatgaataattaaagattaggggaagtgtagagagtccatagaatagattttacaatgattatgatctttcaataaataatttagctaaatattaactcatatttgtgtcaattaataaatatacgaattacagacatataattattattttaattaaattaatttacacaagtaatcactttagtattattttatttcaattaatctaactaaaatattagatatccttaataaacatgttgatgcagaaatcaggccaacactgtctcgctagattggcgagatatgctatactagttcatttcccgtgtcgcgatgataatagagctacgtctactttgagtttttattataaaaaaggaactagtggaactctctttttataggcgagatccattaaaatatggaaaatttgtgacataaattgtgtttgttgctaataagttcttaaatttaaaaatagtggcataaatatctagattctcaaaattaacaaatccattaatacccaatttaacaactatgttaattgctcataaggatgggacatgtcaatgttctattggtcagaactaattttttttttttttaaaaaaaaacctattttaataattaaaaaataaattaaactaattacatatgaaattaaaaagggtaaatactattttggatcctgtgttttgcaaaagttaccgattggaccctctattttgttaaatgacaaatagaccatgtattttccaaaatggtataaataggatcctgagcttaactttt

SEQ ID NO: 385095 - DNA, 1165 bp, Cannabis indica
ataaaccgttattgtaaatttgaaatttataaaatcttttttcggattaatgtgtttgatgttgtataaatatcagatttatttttttaaatgggttcatatatgtttggatggctattttttatatttcctattgatgcatattatgtttgaaggagttgaacaatggaggcaacccattttgggttcatcaagttttgactgttattttatattagttgaagtaaatggagattggaaattgataaagagttaacaatggaacaaaaccccttaaacgaacgacatcagatttgatggccgagaatggtctatccgatcaggtcacaaatcgggttgccccgatccgaatagcagacccggcggacccgcaaggtgggtttatgggtgacaggggtgatgaaaaatgactcatttttcctttatcgggaaaatgacatgtcattttgcacagagtgaaagcccccttttagccgtaaacgatgtgtcgtttttggaccgaggtggaaattgtcaaagccaaaatgacatgtcgtttccagaaaatgacatgtcgtacgaatatttaaaaaaaaaaaaagaggctataatggatgcatgggggtgcgtgcaaggtcaatttttgggttatttttcactaatttattccatttttagcattctatcatttccacgtcttgctttcatgcacaatattaattcatgaatttattcataatcttagtgattaacattatcttattatggcataaagtactatttatttaaacaattagtacttattttcttacctattgtaagattaagtatgaaaaattatttagtaatgaggaacacttaaatattaatttattaaaatgttgtatcttcctcaaaaattacattaagatccttataagtaattaatcatcatatcgataataattgcttgctaaggatgcttaatatggtgaagaaaatttattagatattatgaagcacaatttatctatcctttcgatagtaattaatgtatttgattataatatttaataaattgttcttacctatgtatgagttctattttattaatttgtctaagaactctagcatacatgatgatcatttgttattttacaatcatttatttatgagaaaaagagcacaaatgacatgattttgttat

SEQ ID NO: 385096 - DNA, 1422 bp, Cannabis indica
gaactagaagcctactaatctatatgtgttgattttaacttgattaagaatattataatctagttatgtgcaggggtgaaggaattgttaaaatactttatgtgatgcgtttctctatgattctttagactaatttctcaattttgataggatgttgagggtatgatgtctatttctgatgaagcagctgaggcacgggactccctgagtgatgaaaaagaacttgttaatacatatgaggtatttgtcttgcttcctttcatttatgcttattttgtttttggaacatagccccttttcttttcgtttgtcaagggtatattgtctcttggtgccacttgattgttttaagttaacgtattgatcaataattatgtttatcaatttcacatatcctttttgtttaccagttgagacacacacaaatatataatttttttactcaacattctttaatttgttgtagagattaactgctcttgatggaaaacggaggtttgcattagcagctgcagcatctcacaaggaagaagttggaaggctaaggtattcctctcttgattttgtagtgcatctcttttggttcttgttgatgcatttacatgtgtttgttctcatttcagttgtgaagaaggaagaatattgcactcttgttctggtttttgcaattccaatatttacattggatttatagtttcgttaataagagaaatataatataatcttgctcaaatacatgttgcaaacttttcttatttcttgaaatccgatgatgtggattaggggttgtgatgacatattttctctttaattttcattgtttcctatgaattgctttgtttggtttataattagaagatatattgtagattcatggatctctcagtttgagaaataaaaataagtggatggaaccatttctctgactctttttcaaatttgagaaatgtcggctgatcatatatttcactataattctattatttagagtattgtttcctatttgatcccgttggattacatattagaagttgcgatcggagctattcactataaaaattatctctaaagttcactaaaatgtaacttgaaacatgatatatagatgattacagagaatgctacattgtcatgctttctcattgtatttcctaaatgctcttttgttttcaaggattattgttacatgttgaggcttatctactttgttctttgaaatatatctcagagaatattttgaagatgttgaccggacttgggaaacatttgagaagacattgtggggccacgtttctaacttctataaactttctaaggaaaggtaaagtcctaaaccaaatttattagggttgtaacttttggatacttatttaatttaatgtttctcacgtggtgttatgtatttttttttttttctgtttt

SEQ ID NO: 385097 - DNA, 2276 bp, Cannabis indica
ctccatgatggtaatttttgactgaaaaatcttgccacaactcttgactccaaaatttttatccctgagtcgtatttaatacatctgggtgttttgtactggttcagagaagatccttgtgaaacacaaaaatccattaaagcatcaaaggttccttccttcacaacccttatctccaatgctccaatggacttgtccttagctctacatcttctgtaaacagagtccaatgactcttctaccctccaacaacattcctccattacatcttgattcaactccaattctgaatatgctcctcctgatttgctcttaagctcccaaaacagcacgtaatggcctgggattgatgacgtgtcagcgtagctactgtactctgtcactaagaacccaactgcttcaaccacctcttttgctttcccaactgcctgtaacagatcctcttcattagttttatctgcgtcaatgcttaacaccacgtttctacgctgcacaaatctgaactgaggtgctttgttgtgaaagccaatcactcttagaatgtcacccactctgtatctatacaagcctataaatatatataaaccaaaagttagaccaaaaaacaggggaattaattagttaaatggaaattttaaatgtcatcactcacaccacctgtgaaagtggttactacgagttcgtagtaatgaccgagcttcacatctactaggtccactactacttgttctttattagaacaaccagtaatactatctttacggtcattattgtctgctggtgctactactggtaagaactcgaagtaagccatggtgggaatgagagtgtaagagacatcacatggcttgcttagtggtttgaagttaatgccgaagaaacattcggaggaagcgtacatggtcgacaccaaaggaaggcctctaccgtagaattccagggtcgagatgtattgagccatggaccctgtgacaataacttcaataaacttggttttgggccaaacccttttgatgataccttcccatgacctctccctgcattgggtttcgatcaagtcagccagttctggatttggtttgagcattaatgatgacacggcattcctacaagttggatcagagatccattggctcaactgggcagatcttatgttgcagcataactcttcccaatgatcctccaagaacttaatggctctgagaaaagcagaggcgaaaactgctccaactctgagaacatggtctcgttcgagtaaaccgcagagtaattggcagtacatgctctgctttgtgtcatcacataagattgtctcatcggggcttgtgtagacgttgtaacggttgaatggcctttttctgaagttatcactcttgtaatagcttgtcagcacaggcctcgccctcaagccagatggggtactcacttctggtttcacaaacagaagatacatggcttttccttggtccagccctcccacatatctgtcaatatatacacacatattatattattacacaactatatatataaagatcataacaggcatactaaagcttcatattcaatcacatgtatacttgttcatgatgggcacaagaaggttatagaaaaatgtcttcctctccaattcttcatgcgttgaaggcatcatctttggttgccctcctgaagttcctgagctgcatatcatgatgtgtatgtgtcataacatgtcatgtcatatatcatatatatatatatatgtgatgttatacctcgtgagaagctctgttattggttgagctgaaatgatgttggaggattccccattggcaattcggttgataaaaggcttgatatcttcatacttcacaatgggaactctttccttgaaaagcttcatatcagagtaaccattgagaaagctgcttagatattcagtggcagcattgtttgatagtatctccttcagtgcctgttgttgaaaatggtgtgcatttgtggttaggtcctccaaaagcttcataccagcttcattgtcgtttggatcaaacatgggcaacatttctggcaattcttattattctctatgtgctaagtaattatcagaatttgtttagtagatttggtatctgtctgtctgtataagtataataataatagcctttgatatgttcagcttttatacttttttgattcacatttgaaaagctcaatctgtctccacttgctaatggctattggggaagtaacatatatatgtacatatttttgtttctttttcattttttttt

SEQ ID NO: 385098 - DNA, 2261 bp, Cannabis indica
cctaaaaaatcaagaatgtgtatttttatgttttgaaatacataagtgacatcgtcagagcggacaaactacctactagataacaaaacttaaataataaatgctgtaagttttaattattaattatcatcttatttattatatacaacaaacaatctaatataatataattaataaaaatattaactttatttttttacaagtttgggggaaagactacatacgacgcaaaacataagagttgttacttttacatcgagagagaatatttaacaaaattgcttgcggtgatttacgatgatgataatgagtaaaacaattgtataaatttttttcttcttttaataatgtttaattaggtaacttataaacacttagagtaattttaaaatatttatgtaataaatttatttagagtaatataaatacatatatttatttaaattgtcaatttaatttttagttatgtaaaattaatttttaatttatactaataaaaatgaaaaatatataaagatgcaaaaaaaattacaaagttttatatatatatataaatataaaaaattttgatttttatataaaaactagatttgaattttcaaaaattaattaaaatatataacacattaggcgtcggttattatatgtaaataattgacgctatataaatttatacaatgtcagttatttgatgataattggcgacataggcaagttttttgaaattagcccccgccaatgacgtcagtcattttataataaccgacagcataaggaaatttatgttttcgatatattcaccccctttagcgatccctgcaatagtgtcggtcgcgaatttcaccaaaattttgtatgcctcaaaaaaccgcctctaaagtctaaattttcaaagtgtaattaaatgaactttgtacccaaatataaaatatatgctttccaaataagtgttaaaaaaatatgacaaactcaataccataaaaaagttccaaagacataaaatgccatagaaaatggacaaacataaacttgtcatattttacattgttttaaaatttcgtatttgagtatctgtttcagtcttacattctaatacaaatctaaataactatcccaatgaataatagaactactctttcctcatttttttttttaaaaaaaggaataatagaactacttgtacaattaatagatattattcttcacgggaaaaaggcaggccaatgaaaatgaatgaaaaaaatactcgtacgtggtcctatatgccactgaacatgggatgagggttttttttcttgtgatgatgaacatatgaacaattccagtggaatatgttcttagataatatttattgagaataaaatcacaacaatggtaatgtctgctaaagggctataaattcttctcaaccgttacaatcataatgtaatgggtacattacatatatccacaatatctaaatacaaacgaattaataatgaaaaagttgaccttaccatttcataatattgttgggctcctttttctatattagtatgatactatgatatacattgtttgttttaattttatttgtgggtaccttttaaaaaaatttcatattaataaaataagtataacacttatattgaagatataattatgtcctattcttaccttgattgatacccccaacatatatatgcctagcctatataaccctacttgcatgacaattccaagaaattaagagcagcagagacaagctattaatattagtcatctcacaaagtttatgccaccttgtggaaaaagtggacacaatgatatggatcattacactgtttgccattcatttaattaaacatattattgttgtctgggtgcaattctatacaagattctgggtaatgtcagaatttgattccttcattgaaggctgcgaaaaaagacatgtagatagtagtggcttttgtgtttgccctttgttttataataaaataaagtactgacagcatcgaatataatatcttcaatgacaaagctccgcttgactcgatcatgtgatcataaattcaatgacaaagctccgtttctccctaggccagtgcagatcttgttagcaatgctaataacttataagccttaaaactactaagccttaaaaattaattgtcttgcaaagtagtataaaactaataacttataagtttgctaaatttatcgtcgatagcttgactcgatctcgtcattcttctacatacatcggatcaacaaaatag

SEQ ID NO: 385099 - DNA, 969 bp, Cannabis indica
ggtaagttgcaatacttaaccatcacctggcatatcttaatcggtaaataagttgagctcctcaaaaaagaaaaaaaatactcgcaagcagtataccaaatcctataatacataaagtcctattattggcaaagtatttttatatttgctgcatcagatctaaagttgaaagcctacacagactctgactgggcagcttgcaataaaataaggagatccataatagggttctacatatttcttgatagttctctgatttcgtagaagagcaaaaagaaacacaccgtgtcaaggtaatttgaagaagccgagtatagggaaatggcaactactgtctgagttagtgtggctcaaatcattgcttaaagaattgaagatagaggacaaaggccttgcaatgatgactgtgacaacaaagctgcagaacacatagtagctaatccaatgttccacgagagaacaaaacacatcgagattgactgccatttgatccgagagaaggtgcagaagagagtgattaagacaactcatgtttcaactaaagatcagctagttgacatactgacaaaagctttgtttccaacacaactcaaaatgcttaaagacaagattggattggtagatatatgccgtccttcttgagggggagcgttaggattctgttagttagttgattggttttggtgaggtgtaaagagttagttataaatttttgagtgagttgttataatataattaatattagactcatcttagctggtaactaaactaattcaattcaatctataaagggtcaagatgtaaaatggccctaaatttaacaattaagttaataaatgtcccttttttaaaaaaaaaaaattaacaaaatgtccttttagttaaaaatttgatgataaaattacaattgtaaccttgaataattaagtgtttggtataattattttgcacaatagtatatcgttttta

SEQ ID NO: 385100 - DNA, 1701 bp, Cannabis indica
atcttaagtctaataggtgactccattcgatttttatttattattatttttgaataataaaatgaaacactttattaattaagtatttgctaaatacaagttaaaaatttacacaaaactatctctgccactaaattcttgtcatatctataaaaatagccattttagcaagattacgcgaaattaaattcgattataaagaaaaaaaaaagaaatttaaagacattgatgagacgattaattataaaataaattaataaatatatatttcaaattccactaaataaagatcttaattattatcattcaaaaaataaacaaagatcttaattattaaggagctttataattttttttgacaataacctaactgaaaataaaattaactcgattgattgaaagattaaatttattgttttagagttcataatatttatatatatatatatattttaattatgtttcaaccgaataagacaaatttattgttataatacaaagtctaaaacactcaaagctatgtacaagtatttgaatgtgtgcatgagatatatactaataaaattagaatcatcatagtatatacttttgttaattttttatcactttaaacattaaaataactaagtgtacgtggaatccattcatttgtgctattatattattattattattattaatacataggacatgtctagtagtgtagaaattacttaaaattaataattatactgtaaaaaccaaagtttgatttggcttttaagaacatgtatatatatattattaaattcatcattggaattcatgaatttctttaacattaatagcataattattataattctaaatagttttcatcaattttgatttgattgagatgatataacagtagtgagtttgacaagtgataaaaattgttcaaattgtcaccacacctcagaaaaccagtacagaattttagaacgacatcaatcccatgcatttaggaaaataaattattacttttatcaataaaaaagttaattaataaatagatttttttttgttatacattttatatttgttatggtgattaggatagcttttaagttaaaaaaaagtaaatgttattttgaattatgtggtttgtaaaaattattgattttattattttattaaattttatattttttaaaataatacaaaaaattaatgataacgcaatctagaattgttaagataaaattaaatacattttttgtatttattcgtgttaaaaattatttttaagttagtaatatttaaaattgagttcaaaattcaatttgtcattatatataaaaaaaaaatatcaaattgttaacttttataaaatacaagatctaaaatatgattaacttccccttttataatcatgtaacctcttacaaatttaagataattgtgagaaagttttgaatggttaattatactaaaaataaaatttaaaaaggcacatttagcataaaatatggggtaaataccattttggaccctctgtcttgcaaaagttaccaattggaccctgtgttttgttaaatgacaaaatagatcctgtgttttctaaaatagtacaaataggaccctgaattaatttttgtcaaaataaagttaattataatccgatctaaaagtgttatgacaaaactctttacatttttgtatctgttcgtattaagcatt

SEQ ID NO: 385101 - DNA, 2637 bp, Cannabis indica
tgttgtacctgtacttggtcgtgtcaaatcatgccataagtgatgccctagtgcgagaagaaagaaaggtccatcttctggtgtactgcgtaagcaaaagactgttgggcatagagtctagatatcccattattgggaagttgtcctattgcttactaatcacctcaaggaagctgcggtcatactttcaggcccatgccattaagatactaaccaatcaccctatctgccaggcattacaaaaactggagtcatttggaaggctgttaaaatgggctatggagcttagccaattcaatattcattaccaacccaggatttccatcaaggggtaagccctagtagatttcattgtggattgtattaaatgaacgacaatccagacgagccaattcttgagctgtagctctagaaaatccatgttaatgaagcatcaaatgagaagggtattggatcgggaataatcttaatttccctgctaggacatcaacaccaaagcgcccttcacttcaaatttccaacctccaacaacaaagcaaaataagaagcaatgattgctggcctatgcctgtaaaaggaagtaggaccccaaaatatcgaagtgtaaaatgacttccaactagtggtaaattagatatctagagaatatcaaaccaagggtgagaaaatggccactcacatgtcttgatctagagagctgctgtaaaattttaaaatatatagcatccgccaagtcccccgagattgtggacatgttggcaaaattagcaacagattcagaaatttagtaatatggagtagtgcccatttccaccttaaagtaccaagtattgaagtattgggggtaaaggttattgatcattccaactattggataggccctatttatcaatttcacaattttggatagcttccatccgacagggctggtgcctaaaagattcaatatcaagctccccaagtatgttattctagatggacagctatatcgcagggggttgttagtttcgtatttaagtgcatagatggaacgagaaattagtgcagttattcatgagattcatgaagatttttgcagagaccacacgtcttgacccactttgtggaataaaattatccaacaagggtatttatagccaaccacgaaaaaagattgcattgaatatgtctaaaaatgtgaagagctccatcaactgagttcactcttatgagtagtctgtggccctttgtcgtttggggaatcgatctggtcggctctcttccagctgcaaaaggaggagttaagtatgtgattgttgttgttgactacttcaccaaatgtgtagaagcaaggtctatgaacacagtcacatctaagaaggctttggactttgtaaagccctactaaattaggcacgtcattgtgttttctaatttaccgtgcactcttttgctaatcaaagggttcattgagtgcataattaaattttttttaacaaacttgaacctttgataaataaatactatatatgtaaagttatataattctaggatcccattttgctttacaaacataccaaaatatttcatatacaaaagtgtcgcccagcgactaacaaaatcttagcctaccgtcccaaagatccaaacactccaagtctaaccgtcctgatatgtacaatcttcatctggctctagactcactacaactcaatctttgccttgcccttatctacacatgtaaacatatctatgagtcgacaaactcaataaaaaaagcataagacataaacataaaatcaaatagtaactaggcacccatacacctaatcatgattctgtgaccccgcatccaatgcgtatatgtctcgaacattcttcacaacaatatgattgaacataatatcatcctataatcagtattctagtcgtactgatgtgatagcatcaatccatacttactaaattacccaacatatatctgtcggtattcagtgtaactcagagtacactaataccgctcttactgatatgttatctaataggaaattatagaaatatgaacgctaaacatgtacgcatgtatatcaattatattaatcttatctctattatgaattcatgcatgtcggtcgacctgagcgggaactactgcttaacgagaggcctaagtcacaatttacgtaaaactagtaagtaaaacgcgaaaaatttggaaacctaaacttaaaattaaaagtttccatgtcgataaatttcgtggtaataccctaaatatcaataaaacatgaaaattgaagcttccaaaaccacactaatcggtgtacgcaattccccaaacagtggaccgcttcttaaagttctgcctggggaaacgattcaccgtaaacagtggatcgtttgcctgacaaaaaacacaaaaatcattccaagtttaattgtaccccaaatcaaaccaatacctccagaacacttatttacatccaaatgaacatatttcaactaaaaataacatcatcaagtcacaaaattaaatcttttcattgatgagctaagtttgagttcataaacttaaacttaggttgtgttcggtaaccattttaaaaatagttttttgtttttaaaattaaaaatttgaaaatacaaataaaaattgtg

SEQ ID NO: 385102 - DNA, 949 bp, Cannabis indica
ttttttcccctctattgaaagatcaaagcattcgtttgttgaggttgggaagtaacaaacaacgaagatggcgattgtataaagctttggaggaaatgctgaaagaaccgaatgccgatttcggatgtaatcggcattcgaagtgaaagacgtcagggaatgaaccaccacctgagttcaaaacccgaccatcttccatactagacaaattcaccatctttaaaccaaacccagtacgacccatttctcattaaccatttttatcaacaacccacgtcctagtatcaaagcttgagaactcaaattaggagaagtttttttaaaataaaaattaaacaaaaaaaaatatgagattatgaggcgagaacggaaatagagattaacagctgagtgtgtgaaggagagaaggaaatggacctttattgcggaagagaaggttgaaacagacacttgtacggttgattgaacttgagaaatcggcaatggcggaatgaacttttaaggaaattttattattattaattttttattttggcctaatgttctcgttagaattcggtccatattcggcgatataaattccagcaaccttataggcataattggttgaatttaatgcaatatatattactgtataatttaaaatatatattttgaaaatattaaatgtttctaaagtttcccttttcaataaaacaaattcctttaaataataataataattcaagttaaattattttcgaaaatcctccctttaaaatgaataaattaatgcacatttatctgttttagcactcaaaataatttttagtcaaattttttctcaaaattatgtacatccggtaaaattttaagaaattttgaaaagtttaatatactaaaaactactttcaaatagtatattgtacgcgtgactatttattttatacgcgtgtaaaataaactgttt

SEQ ID NO: 385103 - DNA, 905 bp, Cannabis indica
tcctcctcattatcgaagaaaaagccgagtacaccctcctcacacttcttcatcctccacggccctagtctccgccacacaccagtcagaattttcttaaccacggatgccggcatgtctttgcaccccacaaccttgcccgcacaagctttgttggccactacctcttccagggtaatgtcttcaaaaagctccagcagctccatttctattgcactatccctcaccatagtgctattcaactcctcattcacagtttctacatgaacatcctttgaaatcaggttaaccatgatactacacagcaggaaacacgtcgttcaatagggaagagttttccacgagagaaaaagaaagcgagattgcaaaaccctccactaagcagcccacaaaaaaagatgtcagggtaaataaccaaagaccctaagcttaaaaaacgaagctagactctacacggagccaattcagagcatcattctagagaaaaggacttgctaacggaaaacaggatgagaggaaattgagtaaagagggacctacctaatacaattcatttgcaatcaaagagaagacaacgccacataagtgtgttaaaagaaatagaggaatcatgtattggaaagagtaatgaaaggagggagggagaaaaacatcacagaatttgaattttggttatgtattttaattgcaaattttgtttataagtttaaaaaataaactgaatacttttttataacgttttacatgtaatgtttcttacaaataataaattattccatactttcaattactttttggattaattatgaaattttatttacactataaagcattataaattatatttttatgtttaatttttttttacatttttacggtttttcatagaaacaacacaaaaacaa

SEQ ID NO: 385104 - DNA, 1674 bp, Cannabis indica
ttattttgtcacctaacttgccaaaaaaggactttacatgattcacaatatattctgaaaaatatttaaaagaggaaaaaacagtctactcattatctattagttttgaaatagaagtatataattttattgtctcaattttactttacagtttgctcatcaatcttgaaccgtataggatcggatagaatcgctggtccgcaagggatatggctttaataccatgttgagaatcatggggttccatctcaaaacaaattgacaatgagtggagtagtctatgttcttatatatggctcaattctccaccatttattctatgtaggacaatgtccacaacagtgaccttaaaaatatcctcaaaatataatattgcatttaaaacttttcttttgtaaatctaataattcaaaatttatcataagaaaaaaaaagttacatatttcacacaaaaatgtataacactataaatatattgcttgttatagaaagtgaaaaagaagaaaaaaaatgttttcttttttaaggaacaatttcatttaaataaggaaacatctacaaccaaataggcacgtccattaataaaagtggtcaactcataatttttgttgatattactctatatatatcaagaaagtatttatctatttaagtaatctttgctttagaatggttaattaaggatcattttaccaggataatttgattgaaaatttatcactatcgtgttatttcttctaattcctatgtccattggatgtaactttttctatggttaacccgacggtgtaggttgactctccaaacgcaaacataagtgttaagcttcgagcatttgtagttttataatagaagtaatgatagtaggtaataaagatatattacaaagttaatcatatgccaaaaaaaaaaaaaatgttttattattacaagaaagtaaagttgcaaaaggatttaccacttgtagttgtaattgtgctttttgggctatgatgctgccgggtcctcgttacatcattatatagtgtagaattataattgtgacatatttaaattagaataattagtaaatctttcctcagatttatgtcactaccgacttatgctcttaaaatatacgggctgttaaaaaatctccttaatatataacaaatatattgttgtactcctaatgttaggttttttaacatatactcatttatttactgatgtggcataaataaatctgaggtggcataataatttgatggtagttgaaaatttattaatacccctacctaataaaaatgatttaattagaaatggaaaaaaagaacaaaaaatagggactccaatttctcatgaatttcttcttcatcatccattgcttttgttttttttttttttgcttgaaaaatattttgatctattcatagttgtttaatcccacatcaaatcatcctcagtttaagtaatgttttctttcagttacaaaagtagaaggagattcatgaaaagggtgaatggattctacccgaatgtaagtataaaataaaatgtgttgaatcgtggactgaatttaagtgtcaaaaattctttaaataatacacactatttatgtggtacatagttatacgtaagtaatctttttttttttttttagtaaagaaagtatgttattaactcaaatcaaat

SEQ ID NO: 385105 - DNA, 1688 bp, Cannabis indica
ctgggtcagaggttgataaggagtggcctgagaagcggaattgaaggactgcaaattaggggtttacaggaggggtgtaaggaggagcagagggagaaacatgaacagtaacaggatcgggattttgagaataagaagagtaatcgttgggaacgtaaccggagttgaaaggtggggcggaagggaatgaagtgggaacatgatcggaattggggttggggttgggattagggtttggaaatagatggtaataaggatgatagggagctgaagtgtaatctcgttgttgctgcatcgttaaggtatggcttttcgaggtttaaggtttaactatggatctctatctctctctgactctattatgggaaatggttaagtggattgtttatttatagtttcatctattataattccagtgcagttaggattttatattttttaaaaagattatttttttttcgttccctttcagaaaaaaatgaaaaaaaaaaaatgataatttagttaggatataatactaccgcgtatgtaaaatcaatacacacaaattaataataattatgttatagttcactctatactattatatttatataaaatgataaacattaaattattaatctatcattattagtttttttttttttttttaaagaatctatcattatagtttaaatagtaatataaatactattaaaatatttatttaaaaaaaacgtgttaaattataacaatctttaatttcttttccaatttagcagctacattagtttttttttttttcttttttgtaaatctgttcagaaaattacatgcacaaggaggattaactttaattcacataacaacaaattaagaatatttagtataccattaatatttttacagttatgattcccaaagtgagttaatactcataacaaagaaagctttggaactctctagtggggcgaaatcccgcatctctggttctcctgttttctcacaaatctggttccaatccagtgttttctcatcttgatgatgtcgttttgatgtttcaagccgtgtccttttacttccctttcattgctttgcgtttgacttttctttgctctgtttgttcatttattactcttccagtcagctgctagtcattaattactctggtgttttagatctcttttagatacttcgcaaaagggtttatttgtctcttgctttccctctttggttttgttctggttccatttaatgcatgtcgtcgttttgagcagcccaaggatggaggcgatcattgctcctactagctatggcgatcctacggggataccgaaaggactgatatggcatctgcagatcaccttcctcagcaagtctcctctatccaggtatttctctaaagttctctatttaaggttttggtacatgctacgttctctgctcatccaactccttgtacctagtttcttccctgtaacatttccttttttcgtccctctgaacctgttcatggattctcttgcccttaacatgtctgaaattttaaatctaactgaccgtgaagctgtagttcatgatctggaagatgacactgggggggttagtcaacctagtagaactttctgtcttgtgtttagaatcctttccccaagaaccatcaagcttgagtggttcgaagtggctatgaggaatgcgtggattacccg

SEQ ID NO: 385106 - DNA, 1672 bp, Cannabis indica
gaaaaggcatagaaaattcatgtttgccgaggagtggaaaaagtgagttattttttgttctgaacaattactgtagtagctaatactcttgctaaatttacatttataactactgttaatacaacctggtggcttggatatcgaatttgtatcatgataggggtggcaaaaaaaagtttcgacacgacatacgaatacgaacacgacacgaatgttacagactaagatcaaaaaaaatcaaacacaggtcgacacgatttgatatgaaataaaaacaagtcaaatacaacacgattcacttaccacgaatttggagaacaataaagaaagaaaaactttggagagaacaataaagagaagcagaaaaagttgtatgtttgttaggaaagaaaatagtgtggaagagaaaaatgagtgaactctaccaaatttcttccttctaaacttcgaggaaaaaatgagaagaaaaattccataacataataaaaattcaaattacttatttaaccttacttttgataaaaaaataatttatataattttattaaattgtaattttactgttatcattctttccttccataacttattttcttttcattcttctctattttctatgcttcactactttcctttccttctacttttctttccatttaaccaaacattcaaaaaatctccaaacgcaaaaaagtgatctccttaccactttcaaattgtaggagttcattagtttgtggctaacaaaaggctcatgtagcacattgtgctaccttatgatagaattgaatctttagaattggaaaaatcttttgtttgacatgtttcgaatatagttttttttagttaagtgttaagagtttatataatttcaattcaaactcagtcaaatcagtttaaaattttcaatttaactcgttaaagggagaatccagttgataaactggaaattataacaataaacatattagagagaaaaaaaaacaaacagcttgagagtttatacactttctcatcaataacatatgaaaaagaggatttttaaactcatcacaatatgtttcaaaacaccaaccaaccccacccctaccccccaaaaaagaaaatgttacttcatatgattataaacaaaactttacatgtcactattaaggagaattaatgtgagttacttctaaattctaaccaaatgcctaaatatccacatagtgtgacttgcggccacttcgatttttcgacaacactgatgtaaatcaatttatactgattgattccaaagccccaccaagcatatctgctataacttacaagagactaagaacaaggagcttcaactactggggtttagggtgctagtatatgaaaaataccttctataattcctgcaactgtataagcttccctaaagaccagactgtgtttgatgaacatgacgactgtcatctttggtgaggtatcagttggtgctgtttggatctcattggtatagaatggtgtgatggctcagagctacctgaaactcctatttgtgttgtaggtatatgattggagaaggttccctgaacatgctggtcaggaggatctggtgtctctgacaaaatcatatagtaaaaggaagttatcagaatgcaaacagactattaagttcgaaatctatctaagccccctaaaa

SEQ ID NO: 385107 - DNA, 1017 bp, Cannabis indica
gagagagagagtttgcttcataatttaccaagtgatttgttttaagttttaacgtagcttgcaattttggttttctaaattattattggtttatttattattaagtaatagattttgtggtgatgattatgatataaatattagttcatgcatatatattgacttaattataacaccatcaaccaaattaaccaataattatatattgtgatattcagcagtctcgtaggagaaatactgtacaatttcatattgtttgaagaatgttaagtgtaacgattttaagattgtgtaagtatgagattatacaatgaaagaagattgatggataccacctatatgaatgtccatcttatttttttggtaacccatcacttaagaattttaaagttaagcgtattacttggagtaatcttgggatgagtgacctcttagaaagttttttcaaaaaatgtacgagtgcataacatgttggaaatacttgtcttagtttataggatcaatcgttaatccaataagtaactaaagtaacgtgaataaaagttataattatgtgaagaaatatttaataaaaacttaaagtggggcgttatatatatataaatatatatatttgtataattaattagtgcaatgcaacaaccatatgtatcaatgttgtaattcaaattaaatcttctaggacaaagagcaaaggttaaacaatcactttttattttaaaatatttattgcattttttttaagaatatcactttgtcttatcatgcatgctacattttggaaaaagtttagaggttactagaaaaagcttttacaagaaaaatgattttttgaggcaacattgatgatattaatgtgtgaacatgcataaatagagaaattaattgcactgataaattagagtatttatggtgaaaaatgattcttttgtgataactacttttttatataaaaaatgataaataatggtgtaagaagtatcaaaaaaatttgattttgtaagtaacataaattta

SEQ ID NO: 385108 - DNA, 1200 bp, Cannabis indica
atcaattagagtatcattgtcacgcttatactcagacaacacctgccaagttcatttttttccccaagataatcaaactaaagtgtattacccagccaaatcttgatatactagttgggactaaggttttattcgaaaaataaaaaatgctgatgtgctattgaacaacaagcttcaagggagaaaaaaatcagataaatttgtttggaaagaaagaaagaaacaaccttaccaagcgaaagataaattttgaaaggaggtttgaaaggttgagtctcgtaaaggcagtaaagacaatagaggcccccaagtctcctcgataaagaattcgtactgcttatataacctgcacataagcttattagagttattctttttgttcttagtaattcttgaaacaagaaattgtaagcaaaaggaacatgttattaaatatttgttgttaaagaggttttcattgtaaaaaaaaaccttcagatggaaaactgtaagtgagttttcattgttgcagtgttggacaacagaatttaagcaaaaacaaaaattataccgaaattcattaccaatggaatgggcatacaaagattggatgaagaaggccacgttggaaggaggagttgcctcatatatgtatgagaatttccttgaaagccatacccttttcatctctgccaaattagttgattcatcctgccacagtataccattcacaagtaaaacaaatatctatacaaaccattctaatttgagcagtgttggtagtacctcaacgaactcagctataagctcatcgatgtccttcttgaaaggtgtcatatccatgattttcagttataaaatttaaactgaactgaaaaggattatgggttggggcagggcagttgaatacttcaatttagtccatgagacatgcctgagaagaagagaaagaagaaagcattctcataagtattgtttttgacttaaagttcataacatttttgaattaattcaacactattattataaataagcaacacttgtccagttatatcaaattagtgtataactgcataacatcaaatttagtactatactaagaggcattatatcaaacaatttgcagacacataagttctgtccaccttccacaacacataagcttactttatataacagaagaacagaaaaaaacctctaatgattatttttttttttttt

SEQ ID NO: 385109 - DNA, 764 bp, Cannabis indica
aaaaaaaaaaaaaaccaaaattcacatttcaatcactagcaaatatctcaagtataatatgtgtatatatatatatatacatatttatgcatttaatataagtgggcttttattaatatgacggtaccaacaatattcaacaaatattattaataatgatctatctcacttgctctcacaattttcttttagatttggtgaaagatttaacagataaagtggggcttgggttgggatcataacattataattgagatcttgaatattataatctctgttggactatatacaacattattaaaaaagttatgaatattttatatatataacacacgtatttgtagcaataaaataatattgtgttaaataataataataatgatactaataataataattataaattttttacagctttgtattgtgctcacatcatattgtttgattcttagcactagtgaatttactctattgagaaattaataaaaaaagaagtccaatctccactttctgatttattttaacaattgaatttaaatgaccctttaaaaaaaaaagagaagagaacaaaagagagaagaaacaaatttgtcaatttcagtaatggggttgaagctatatagctctatatggctgttatggtgtccacagaggcaaatattgaagaaaaagcacttaattcctctagaaactttaatattattatggttgtttgtggccctttggagtggccttattacttcagcaaatatatatatatatat

SEQ ID NO: 385110 - DNA, 1038 bp, Cannabis indica
ttttttgtttcattctaataagctctcttggtgggtggttaattcatggttaaagtgcatgcctagctaatcaagatcgacataataaattaatgcctttgaattctccacacacactcgtacgtgcaccttaaactgatcttatatatatatattaggtctaatttcagccaagtgttcgattagttaacaatatcatcaatataaactttaattacagttattattatattattagtagttatgaatataataagtaattatataaatattaataaatgttcaatcacaataatatatatgtggatcaagaaattgtaggacaccactttattagtaggtgcctctctatggatccagagcatatttgatcagcaccatgaaaaaaaaaaatcagtgtttgatgatcacatatattgcaaatagaaaaggccaatattagtgattgaaattgtcttttatgaataattatgttggaggggactttagttgtaagtcactctctcattggttgatcttctttaatcatccttaaccaatagtactagtactttatatatatatatatatatatatatttctatatggaacttttaaaagcaatttaattaatgattcttttttgcaaatctttacaaagggataaataattgaagggtgctagctaataataataattaatatatagtgaatttaattttaatatatataaattaattatatatctatatagttaggtatataaccccttttcaaagaaatatatcatcatttagtttactggttcatatggaatccaagacatgattctcaattgtgatgataattataaaactacaatctatgaaaagataattaaccaaataatattagtactgcaactttatgtagtagatcccttaaaggatcattttataaatttttatctatttctaactatttaaaattacttgtattttaaaaaaaaaataataaaaataaagtttaaacaagtgtaagaagctaatcaagcataagttggtaaaaaccagtagcagg

SEQ ID NO: 385111 - DNA, 1075 bp, Cannabis indica
aaattttttaaaattaagttttttttttgctacattttttgtaattatgttgtttttgttgtacattatgaaaaaagccctatttatattctaaaactaaaaaccccccaaacacttttttagccccaaatttagattctgtgatcatattaagtattttaaaagttcttcaccatcttcatcatgtattttttcttagaaaacttacccaaatcacaccaaacacctacatctctaccattttcaaaattaaagtggatttagattgcacttagtctacatatcaagttctattcctagattctaaaaaactacaaactaaatttcacaactatagcaaaatcaaaatgggtaaaaagaggatttcatagaaaattttgaagaacactatattactcatggattctatggattttaagatggaaaataaaaagtgtatagtgaaagagtgagaataacttacccaatgattatctttaagtttgaatcctctccaacaatatttgatttttattggagctttcctttgaagtgagtatttgaaacttttgtggaaaggattttctattgtggaagagctcttatattttctaacagaagagatgaaatgagtgtgacatataatgatggcccttttgaaggctaaatgaggcttttcatttgttatatttttcttattattctaaaatacttaaaaatattagtggtcatttacatatttgctccccataacactaatatttgtggataggaggtgtaaaaatgcaagaattattttcttttatagatccaccataagacaatagtattttgacaaacttaaggataaatgctatctttcaaaaaaattcatggagatggtgtggttttttgccttggtgtggaaaaaagagccaaaagacctaattcttgcaccatgtccaatcaccttaaccaacacctaggtggttgcaccatgtctaatcacctcaacctacgcctaagtggttgccccatgtccaatcactttgacctacgcctatgtggtaaaacaactgtgattcatcacgtttggctccatctcgacatgacacca

SEQ ID NO: 385112 - DNA, 2355 bp, Cannabis indica
aagtctgatcaacccatatttacccaagtcttcacgttcacctctttgtctgtcctcgataatttgacccagtaaacaaatacaatataataaacacttatataatatatatatatatatgtttatatatattattgaataatatacaatacaaagtccaaagaaataatcgagattcgaatcaataatccaaaaacaaaactgttcatgtacctcaataatcaaataatccttattatctcttccactggatctcaaacaacacaagattttccccaaatctctgtatacacttctctctctctcttcttcttcttcttctttctgtaaaaaagtttctctctctagaaatgtaatcaaagtgaaaattttctactaatgactttgacttagcacgtttttttttggaggttaatgcttacgtcagcgtcgaatcttgaccttttattttcttgccacgtgcatacctgattaaatcctacggctgagaataaacgagaatatactcaatgttagacttttgggtttgattacgtgggaagtgagtgtgagtgagtgcgattgccatgggatttgggtcgataaatttaatttatcgtttctcgtttcgatattttatcgtgagaagcttaaatatcggattgagttgccaccgcgaaattattcaaaaacggaaataaataatattttttttgttttgttattaaatattatttttttgtaagcgataaaggttaaaataataagagtaacaaaagttacacaaaaggtggagaggttttttcattcaagaaagttcattgtatatcttaaaattagacaaaagtcattaaatttaaccatcttaaaaggcatgatttagtacatgtaaagtaaaaattacaaattagccttattattttcaaaactgctctaaaataaatctcacaagaactaattctagtaaagagaaaaactcaatagtaaaacttgtgataagagataactttgctgaaaattgagcaacactattacatactaaacctaaaataactaaaaaaaaattagagaatattaaaggatatcttctaatgataactaaaaaagataaatactattttggacattctgttttgtaaaagttattgattaaactttttattttgtcaaatgaaaaattgaaccttgtatttctaaaataatactaaatagtaccataaaataaaacttaataacaactcgatctagatgtattatgacaaactgattacattttctagatctattcctactaagaattatcttcaagttgtttatattaaaagaaaattaatactgaggttatggtcttatttgtattattttgaaaaatacaaagtttattttattataaaacaaaacatgtttcaatcaataacttttgcgaaacacaattaaaaatagtattaataataataataataataataataataataataataataaaaagatattatgtttttttttaaaagaaaattgatgtatagagttcattttgaaaaacaaaatgatgattaaatttgatcaattttactaaatcaaatatatagcataaagaaaataagtatcaatcctgcaatatttaacaaaggtagaagtaaatataacatattttataaagtatttatccttaataaaaataaataaccaagttggacggcattctttggaatgggatgggatgggatgttatattagggatttttaggaaaacatatatatatattaaaaaaaaaaaaaaaacgtaaggtaagtgacggacccataatttttgatttgtggggcttaattgttataaaaatatttattatttactttacattaaaattataactatttgaagggggctttttactattttgttgtataattatttaactaaatagaagatatttaattttttttcacactaactttttttagtgggggctatattactgtgtcccgtcactgagtgtaatataaatgtgtaaatttaaataaaaaaaaaataaaattttaataaaacattttaaagaatatgattgaaaaattgatacgagtactcttatacatgccactttgatgtatatcttgtacatatttttgtactttttagtatatgtgtacgttttcataaaaaagaaaagtatatataattttttgaaaagtatatatgtaagttgtcttctgttagtacttgcctgctcaaattgtgtatcattgatccttagatatgacaattccactacaatagaaggacaattctctgtctctctgtattttgggtggtgaaaatgagtttataacaataagattacagttaaatgatttttttttttgataaatcttaat

SEQ ID NO: 385113 - DNA, 1382 bp, Cannabis indica
tatcacttctaaatagtactaagtgtcactgataccaaatagttatgctttttaaaattttgcacattgattaacaattttttaaactaattgatacttaaccactctttcagaagtaggttcagaatcttttagactaaaaaactaaaagttgttataaatccaatatttttcaagttgcaaaaatctaaaagtgactaataataataatgatgatctctaaattaaatgtgtggaaaccgattgtaatttatactaataataatattgatattttacgaggtgtttgagttcttgttttggcctttgctttagcctaattattagtattagtattataaaattacaaaagcgtcccttaagcttcacaaaaggggaactttggcccttgtccctacaacaattataataataattattaatatttgttcttgttgtattactttgtttatgtaacatatcattaaattatacgcttctatatatatgtatgtatgaatctacctttttcttttctttttttctttttaaaaaatacatatatttattttatttaatgtgtgtagcaacatccgtacaactcaactactttatattataccactttgatcccaattattacacataaaatgaaattgaagtacccttttcctttttcaaattaccaaattcaataacaatacaaaactaattatttaacaagacaagacgaggagggtcgatttttcattcctattcaattttaataattaataatttaaccttcatgtatataaatactcatcatagttaattgccaactcatcaatttgtacatatatatagggtcactcactttattatgtatacttttgctttgtacacaatttgtgatcatgtgtttccattttgatatttactcttttcattattcgtcactataacttgttattatacgtgtgcttggaatgaaatatttgactttttttattattttattttggaagatcttaatatatattggaattattattattctagctcattgtgttgactatatatatatatatgtaagttgttcaatcaagttggttctatagtcttctagatatgaattgaagtcaaaatatactaaaccaaatttgttgaccaattcctatgtatacatgtctagtctctatatagtagtatgtagtagtacagctactgaatacaagtgatcataataatagaatgaattatcttctcactctttgtaatgttctttattataaatagctattccattaaaattcattataggaatatctttatatattaaaagtgcctatctaacgacatttcttggtttaacattcttggttttttctgttaaatttaacgattaggtttgatctcccgtt

SEQ ID NO: 385114 - DNA, 1450 bp, Cannabis indica
cctatttgttaaactgtcaatgtgcataaaaaggatccactaatacacctctatttgtttcgatatctgaaaaaattttttaatacaatttttttcataatcgtctacgttatagttatttaagacatccagtaaaatttgagagattcagaaaaatttaatatgtcaaaaataaggttcaaatagtttgttgcatgtgagactcttttattttatacgtgtgaaattgattgtttgaatcctattttcaatgtgttaactttttaaaattttgctgaatgtcctaaataactacaacgtaaacgactattatgaaaaaaaaaattagattaaaatttatttttaaatactcaaaaaataggagttcatcggtagacttttgtaaaggggttgattatagattttttctatattttatgtacacaaaatattgcacatattgtacatatattttttaacttgcatgtctgattatgctatagaggttatgttaggtgagattttgtttagttttaaaataatattaagcgtacatgaaatttatgataattcaattgtatagttgaaaattatgtaatctccttactggaaattattcattaatggtaaaaatagacaaaagttctaaagaatattcttcttttttttttgaaacaaataaagaaaattcttcaaatcgttttaattacaaaaatacaacaaaaaccctagaataatttcaccctacaaagtaaaacaaacaacaagacaaccaagtgatagtggctcttaagagaagtggtcacaccatccaagtaaaaactaaatgaagagacaaatcaatgaaattatacaagatagcaagatcaagatattaatttgttgaagactatctacgcgcgtataatattggccaaaataatatgacgcaagtcaagtggtataaattttaaagaagtaaaatttgtagggcgtataaataaatatttgtataagaaaataaataagaaaattgtatatttatgcacaaaataaattgttttacaaaaatgacatatacatgaagttaattaaaataagacatatatatatatatatattcttatgtgaaaatatataattatgatttaattatcatatagtctgaaatataaattttgtaaaaattatgtgtcacgtaaatgttttaataaaaataatttagaacttctaatactgtgagaatttaaaatatgtatctaaaaattctgtaataatttaataaatgtcttcagaaatataaatttaaatcctgtgtattatataataaagatatttgtagatgaatagttattttaaaacacaagaatgattggttatgcaattgatattcatatattataggctaattaggatttttttttccctcaaattttgacatgtacaaaatcatgttccctgaactttttggtcgttaaaaattccccctgaa

SEQ ID NO: 385115 - DNA, 1293 bp, Cannabis indica
attgttacactctttactaagtgttttgaccaaaaatggatgatgaattttttatcaaatttatataattactctcgggtttttctcaaagatgataatgcactaattcttgctctttcttgtgttactcttttttattcctttctttctttacgttaaaccaacctttagtctttatagtttatactactttttttgtatgcatagtggagttgtcactctttcatgctatggaaggtacgtgtacctatgtgctattaatcttcaatgattagtttttctgagagattatctttcgttttttaaactaatttttgtggtggtaggtgttcatacatttattctacctttgttatttccaatctgtatcttctttctaaatttgatttttgatttgagttatctcagattctcgatgtattttgccttttcatgatccaaggtacatgctccatcttgatttaatttggggtatcgttatctcgacttcatatgagatcccacttgattctagttaagttcaaaatgttggtgttagtcaaaattttggttttatcttggccatagctgcataacatcttattattttggtttaatttgagtttaatttaatattattgaattcaagttaaaacttattttgacattttctgaatcataacttttattggtcttgtttgagttaaatctcatctggatttagattgagtcatggtcttccttgatttgaactgagctaaatcctacctcgatttagactaaatcatggccttcttttggtcggcccaagttcagtcttatttcaaccaatccatgttcaagctaagatttatgatatgaattgttcatacttgtctttattgtcttttgggttgagtggtgttagatacatattaaatctgcacccaaactttaaatacaattatattcattttcattttaatcacttgaattaaagtgatgcgttcttaaaactattgattaatatgttaactaatgatgtaaagagtaaaatgaacaaattttgggggtggttaaattgatgagatattttgctcaaatagctttcactagggttgttcatccaatttaatccgcacttttttggtcaaacaacattcaattcgcattaagcgcgaatttcattttttggatccaattcaatccgcacaatagctcaaatccaatccaatccaatccgcaaaagtgcagattggatcggttactttggattggttactttttaatattaaattatttaatatttatgaatttttttttcacataactagc

SEQ ID NO: 385116 - DNA, 1455 bp, Cannabis indica
agagagagaggttgaagttagggtcggctcatgaggttgacttatttaagttttaattttagggtttttgaaatgggcctgaaatctgtgattttcttataagtaaattagcgtcagttgtgcactgacccaaaatttgcgtcagtgcacaacggacgacaaaaaccctataatcgatgttaaaaggtgtgtttgagcaaagcagatgcaaaatttggaccctgtaatttttattttaaagtttcatttttagcattagttttcgtttagtgtcgaagtagtaactaacgtaaaaaaaaatgattagcatcgattaacaattgatgcaaaagagtgggggttaacttttgccttggtcaacgagttaactaggtacgttaatcgacacaaaaactcatttttgtagtaatgatcacattactgcttcattagcaaacaattgggaaaaatgaacacatcacaagtagagggaccaatttattgtaatagttttgttatatttctagaggacaacaaaaaatcaagagataaattaaattttactagagtgatagttaaggaggaaatataatatttattaaacatattttaacgaaaaggattacaaaatttacttaagctatatttgattttagtaggttttgaaattacaatattttttaagaaaaaaaataagatgaattgatatttagtaaaaacataaggattacgaattataatattttatctaaaatttacatttaacattagcattgttatattaatatttatattggaaactactcgaacattattttcaactttaagacacaaaattcaaatttaatttatttttcttggaaagtttggaaatttactaacagtagcattgccaccaaaatctgccatatgttatttgtataaatataggaacttctaaaatggtattataagcattttctattttctgtacctagagagtttatattatatactactagaaaattggattttggagataatttttaagagctttcgctgttcaagtattaataaccgatagtataaaaagactatatatcatcggttattaaaaaataacagacgacataaagggttaattgggattattttgtatgatgatacctttatggcgtcagttatttgtaattaattgacgtcgtagtattttatggcgtttgttatttgtaaataactgacgccgtaggatgtttcttaaaattattgaatattaaatatttttatttatttttgttatagtgagatttctctcacctagaaactcgagacaagactcctatttaaaggacacgtatattcagatttccaatgaaagctgaaatgtccatgagagactcctcgaagtttaaacctcgcccaggataaagccagcgagatattgcgagtacgaccaaagccggatcgcataactgtaactcgcattatgtaggatga

SEQ ID NO: 385117 - DNA, 1110 bp, Cannabis indica
atttttttatatttgaattttacaaaacaaatttagattacaattattcacataccaaaaatatataaaaggaatacattatttgagtatgcaaagtaaagcacccaaatgagttttcattacatatgactttacaaagataaaaaaaaatcatagaaaattacaaaggaaaaattaaagtaaaaacagagaaaaatgatggcataaaaaatgtcaaaatattattaaggtgctatatattcgtgcaagtatgtacctttgttataaattgggtaccttgatctgtcacattacagattctgtgcagcatgtcaaacagtccaacaatcgcagtcaagggttttgatttttttcactccggaaattcaaacaagagttttgacagagagtgtcaggtctcaaaaataatacggcaaagaaacctcacgagggtcaccacaaaggatgttttttttcttaaatggaaagagggaattgagacaaacgtcgtttgtacgaacattcgtcgaacagttggagtgcaaactcttcaacctttgcagttgtgcttctcaacagtgcgacaatggagactacaacaaacgaagttctgctactggggtctattgggtacattcgcccacatacaaacttcactcaattcccaatctttcaccatgaaaattaacaaaaacaccttaacatacctgatttctccatgaaagaatatggcttcggctccaaaaacgacaacgaaaggagaccaacgacatgtgttttgggtcattaaaagccaccgccgccgctaagggagtgtttgttggcggttatgtggcgagtgtgagagaactttaagagatgtgtcgtttaagaagaaaaagaatgtgcgaagttgtcgtttgagctttgattgggctgggcttgatttgtacggatcctctaggcccacaaggctcaacgttgctcttggctgattcgaccaaccaactaatgtgttaaatccttacattgtcccacattgccaagatacagtttgttttgagtctttatatatttttatctcagtacaataacttgtcccttcggggacatccgataaaattggaacgatacagagaagattagcatggc

SEQ ID NO: 385118 - DNA, 2331 bp, Cannabis indica
ttatgatcatactaatctaatttgtgataattaggggttttagtacaaatgaataaataagtgtaatttattaattatgaatattttattaaaatatatgggtggtatacatgctattggtgaaataaaaatattttcaggctcgacaatcatggacacctgattggttgctagaaatgtcacaacagtattagtttgtagtaccagtggttattgagtttggatggttatggttttatcaaggtattttgaggtaattagtttgactaaactacccataggttaagaattacttaagagttaagttttgggtaaaatagttttttccttattttattaagttttgtccttagtatttttctagaattatttaggttgagtatagattcaatgtatcatttatcttaagtaaatattattttatcaaattaagataattttaaaaagactaacccatcctcttctcttctcctttttggcctagaaagaaccaaggactcaaatcaattttgccatctttatacattggaaattcttcaattaaaaaagaccaagtggttattagagaaacctaaggtaaactcaatcttttgttctctttgattctcaaaaagaaaagtttagggttttaatgagtttttgtatgttttgattctgtgagattaagtaagtttgaaagcacattttaagtttaaatttgtgttgttaggaagttgttttaaggtattagatactgattttggtgtgagcttcaagtttgagttcatggaactcaagattgaactctaatggcaagttttgaattgtgcagtaattttggtttacgttagttattaggttatgatgtattggtgtttttgagctaaactgttaaatttgggaggatttagttgaatttgaaaaggttggagatgtattaaactcggaattttttcttcctgcaaaaaacggcagatcgtttccaagaaaatggtctaccgtttttcctagcaagaaacctaggaaaacaacttgtcatttttaccaattggtctaccatttttctagtagaaaacctagaaaaacggcttgccatttttctaaatggtctaccgttttgggtgatgctcaggaacctcgatttttgtgttttctccatatttaaggtatcgtctcataatttttgattatgaatttaagacctagtttaggtttggtcaagttgttgatcgatttaccgttgttttgacataaagtcgagattgtcggcatttctccactcaagttggtcggcatgcatgaatttagattaaaggtaaaaaaagtacaattgtactacatagcatgtcatgttgggatacgattattattgtttaattataagacacggtcattaccgttatgtgagaaaaagtcatgactataaattgaaactgttgttaagttttttacttgtcggttatttcattaggtaacaatagtaacatatggatgtcgcgataggtatcggggttgtcttatgagacaacaaaaactatatttgagtgtcgaattagggtaattaggaatgtcttattagacaacaacgagattgattaccttataagttaacagttatgacttgtacgtcatattatataagtatttgtaaattattaaatgtttatatacttgtgaatatctgattgtgattatctaagtttaaattgatgttatttgtgtactaattaatttgtaatgttatttattacttttcttgttaagtctatgtaattcacgggtgttatgtggtacagataagagttagaaaacatttggacaaccgtgtctatttttcttgttaatattaaatttaacatcgagcatctaaaatgttacaaatttaattttttccatactagaataaaataaaataagctaatatttataattttgtatacgaatatattgagtaggtttagtttttttttaattaattataacattaaatgggacaaaaatatagtgtcatcatgaagaaaaagagaaaatgatggaattttaagacatgaatggatttttacctagtcttattaaattagactaggtagaagtgattgttaatgcaaaacttgattataaaaattaaccacatattatttagtcaacacaagcaaaatatatagcttaaattcttaagctttgggggtaatatgaaaataaaatttcaaatattagtgaagtttgtattatacttcaaaacaataattttttaattatgacatcgttaccatttaaaattatgacatcaacatgaaattattatcccttaccaatttcacatgaacaagctacttgtaaataaaataaaat

SEQ ID NO: 385119 - DNA, 509 bp, Cannabis indica
atcgaataaacatggatgaaatttcttgtattgaattgataaaaaaaaattaatttacttgcaatgaaagagagccaggaatatatagactcaagagaaatgaaaacgacctaaaccgagataagtaacataactaaaataacaaaatatagctggagagaaagacgaataaataaaatagaaaataaatctatcctaaataaaatgctatatacaaaatgtaatatttcacagtttttgttattgcgtagtatttatgttaacatgtttatggtgaacacaattacgatacaattattaatcgtttcaaaatctcaaacatcatactattttaatagatcacacgatatcactatatgacacgacatggcaacatatttaataaacgtgtcacgtgacatagaccaaaagctaacatatttaacatatgatgaaatatgttacgacgcaacctgaaattgatacaataaacataattatatatatacaaacaaacattaccattcata

SEQ ID NO: 385120 - DNA, 1384 bp, Cannabis indica
agaaaaaaaattaccatgggagtcataacctttggatgggaatctatttcttaagaatgatcctgattttggtagtcttctgaatataaaatatacactaaaactataacagttttttaaagcaactgttcttctgagtactaatttgtgctagtaattaaaaatcccctttattacaagatttcttcttcaacaaaaattcaaggctactatttttttggtgcacatatgatatataaattactttttcacaatcatttggacactgcctataatagcaacacctttgtgattttgtataaaaataaaacagaaaattgaaagggtttttcattttccaatttgactttctccacattgatttgtttaaatggagtagtagtggatgggggtgtaaaagccacgttgcaataatggccacacgtatataacggtatgtgtacaaaaaacaaaaagtgacaggctagaagagaagaagacacttggtccatttgggggcatagagactggagagttatagaggccaataattaataataataataataatcttggcttgggtttggctgccgcagaagattgacattaactcttcaaagaaaaagaaccaagtgggccaaaagtccctataataagatccatagtggtccatttgaactggattcttggaccacttctattcgacccagtccagtccattaaacaaaacacaactacgtactaagactaaccaatttcttttgtttttgttgttcgtgttccaccagtcacaacgtgtccctcgtttttacaatgtggttaattattggagaggagactagactactcttcttatctaaggtcagtgagtgagtgggtgggtggtacgtacgccctgcaaattaattaataaaggtatttcatctaaatttatttatatatgtatgtacagatatagaagaagacgagttgaaaaatttatgtccttcagtttttttcactcactcatcatgcttaggtatgtactgtaaaatattattatcagagcgattgatcattttttttttcttaaatacacttcattaccaaaaaaaaaaattgatgctcacatgaggaaacatctgccaaaaacagtctaattcgcaaagataatagtgaatacatggggattcacctcccaaaaattaagaaaactagaacattgattgcataaaccccacttagcgagagcatgcactcctacatttgcagggaatccattgtatcgagtaattagtacctttaattgcctttagcagttttgcaaagaaagagacagtcgatagaggagttcatctgatttgtaagagcttatctatgctaaaaatctaacagaatctaatctatgagattgcaattcaagact

SEQ ID NO: 385121 - DNA, 2295 bp, Cannabis indica
tctttgagagaaaacttggcactcagagcatatgtataatgggaaataagtttgagatcattgcttgtgatgataataacatcaacatacaccaaaatgaatgtcattgaaagaggagtgtgcctgatgaagagactatggtcagatttggaggaaacaaaacccaatgacaacaaacaatgatgtagattctcaaatcatgctcgaggggcttgcttcaggccatataaagctttatgcagcttgcgtaccaggtttggtgagctaggttattcaaaacctagaggttgcagcatgtagatttcttcccgcaattcaccacttaaaaatgcattgttaacatcgagttgtttgatgtcccaacctttagataaagcaagagtaaggaaaactcttatggtgataggcttaacaactaggctgaaggtctctatgtagtcaaagccaggttgttgatggaaacctttggcaactaatctggctttgaacatgatgacactgccatcataatcttctttgattttgtatacatattacttccaattgtagttctgccaggggtagtttgactagggtatatgttttgtttctttttaaggtaagaatttcctcatccatatcattgttccattattctattgaagggcatgttgaagagatgtaggaacttgagtagctatatatactttaggctttttgatgccacttttaccacgagttttcatattgtgtgtattaccaggaacaggtgtgggagctgcaggaatctcagatggtatctggagggtgatgcaggagcaacaactggagtggggacaacagcaggtgaagcattggtttgtattgacttgataacttgggcaataggaacagaccctgaagatgacactggtatttgagtatcatgggagatgatagctgtaggaggagcatgaatccctggagaagcagcaaaacttggatcctgtaaagtttattctccactaatatgagaaacaaaagggtcagtacaagcagtaacaaatggataattggtagtgttacgaggaaacaaaaattcagtagtgtaagggttactgacagtgggaattttaccagatgtatttgacacgggtgactgagttgttgagctgttgagggtgaatggggtggaatgtcatgagaagtaccttggcctcatttttcaggacataataaagatggtttattcaatgctcttcgtgatcagattagaaaaaaaaaacttaatggctggaagtctaatatttttctatggcgaatcgtgaggttttgattaaggttgttagaaagatggaggcatggggtttcattgtctgcgtttgtttaatcaggctcttctagctaaacagacttctcgaatttacaatgtctttattccttggctgcttgggttttaaaaggtttgtatttcagaaacaaaaattttggtgatattattcgatctaaaagaggtctcttttgtttggaaaaatatcttgtggggcaatgaactttattatttaagggctattggggaatggaatcgatgttgcaatttattttgatctttggattctgtctgtgtcgtcttcccttgtattatctccatgtgttttttatgcttcaagcaaggtgtctttattgtgtgaggctactggtggttgggaaaataatttggttcgtggcagttttcttcccaatgaagcataagctattttatctatcccttgttctctttttgatgtacctaataaattaatttggaactttgaaaagtctggttggtactctgttaaaagtggttactggttagctcttcgcaatacgggattgagtcatgcttccccgtcagggggtttttctggctattgaaaaaagatttgtacattaaactttcctcctaaggtaagactttttgcttggcaaatcttttctagttgaattcctacaaaaattaatttagctcgtcatggtttattgtcaaatggcctttgtcctatttgtgagttgaaagatgaaactacctaccatgctctttggaggtgcatcttttgaaggcttatagaaaactctgtgattttgatctgggagatccttcagtccattgtgaggattttcttcactttatattcatagatgtattaaccatttaccaaaaggaaaaattgagttagtgatgtgattttatggagaattttgtttaaacataacaaaaagtgttgggttttatgccctaaataaaactcattacaatctgattagttatcaatttagaagtgaagtatgtttacatgt

SEQ ID NO: 385122 - DNA, 2286 bp, Cannabis indica
tatatatatatatatgtaaatggctattactcgattttcatcttttccaccaccattgctgaaaaacattcaaaatgggtgttgaatcacttgccaacaaagctaaagaaaaatgtcacattgttaaagacggtgattcggactttgttgcacctgcttttaaatgcgattgtcaaattaagaagaaatcgaagagtaacgtgactgaaaatattttccttcctaaaattaagaaatgaaagaactaacaagatggaagtccgaaggtttgttttttgtttcatttttagtgtttcctaactttaaaattttatttttgttttgtgttcccttatgattttattctagggtttagattgtttagttgttttgatatttttgtagtttaattttttcaattttgatggctaaaaatatttctctccatgaaattagctttgttttttgtgtgtttgttttaattttttgtttattgtttatataaattagttcataattgtcatttattttgttattttttttttgtttatgtatttttatgtttatcacaggtattagctcaatttgaaacctatgttgttggtttgatattttgtggttcttttttatagtttgttaaattctcattactgtaaagatctgttttgacatcaccctgtgatcatgacacttttttgtttgatttcatgaatgggaatgcaaactctctgtgtctaaacattacatctcaagttgtatttgcttgtagtttagaagtaattaagaagcttaatgacaacctttcgttaaatgtcaaggccttgttccgttctacccaattcagtaaattcttacacatttcttcatttaaattctacccacaaattgttcataaaattgtgttaagagagttgcagtaatcaaatgttaaggaattttatgctaatatttgtgatcgttatgttcgatttagtgtcgagaagagttcacattgaatttggatttggattgtatgggggattacaacaaaaataatttttcttaggattcaaaccatattattgacacatatttttgggtgctaaacagactactcataaatctgttgagatgttatttctagttgtgtatggggaaatgatgatgctttaggtttcaaggttgttgtgttttattttatttactgttttcttcttagtaacataaagaaaaaataaattagtaggccagagattgacattattgataggtggaagatgggatgagtatttttggggtcgagaatcttttgacattacactgttttaagggtaatgttgtgttagaaattattttaccatgatctagattcactaacatgtatgttggatcataattttataatctaacattctaaatatgaaatttctaaaaatgataagagattaagaaatccttacagtgatagcaacaaaataatatgactccttccattaagatctctagcccatgcttcctatctgtagtagagcattatcaagatctgaacttggattctccttctcatgataattgaactacatagtcttcctccctatgctgagtattactttgatatgtgtgggcaaacactcaacaccaaggagcacaaaattttatgaagaaatccaaaaaaaaaatcaaattaattaatagaataagaacaactttctttttattccattttgtcaaataaagacagagtgatctgtcttgaaccaaagtccattatgttctatttataatgggataatagggtgaggtttagaaataaagaagttgataaaaaataaaatgacaattatataagccccatggctgaaatcccctttaagggcccatttgatttttatcattattttgtttccttaataaaaaatattttctatcttcaaaaatgcaattttttttattctagttatttaaatgctgactttatctatttaataattatacataattattaaataaaattactatttaaatatatttattaattaccctctaaggtctcttaattaataaataaactctaaattctcttttcttctcaaatatgccctttcttagtgttgattttgcttctagccaacaacagtgagtcaaataataaagggattatgtaatataattaaaagagaacaaaaataataaagtgaacacaagattttaaagaggttaaaccctataagtgtggtaatagcagttgggttttgtgccccaaataaaatccatttcaatataattagatttacttattaataaagatgagaaataacattttatgtt

SEQ ID NO: 385123 - DNA, 1542 bp, Cannabis indica
ctctctctctctcttcaaaaaagaaaaaaataagctcttcatttctcttagagcccaacaccaccaagtccccaaatcctaggatttttgctttcttatgacaatccaagctttccacaggcttcctcagcaattttcactagtgggcaagctttcaaatctcgttctttacttgtttccttaaagataccattattgtgttcaagctttttacattcttgattctcacgttagattgtaatctttttggtattatgatccgcatgatagttttaggatgcacaatgtatgatttcctaataaaaaatatttgattttgagcttcgttatgattctcgactctttgtgtcataaagaacatgctcgagtcttgggaaaacacattttttgatccattagacatcttggccgacctatggggacttgtttgagacctggctagcccgtggtgcttttcgtggaggctggccgattttagggtttaacctacgaccctggttggctcttgcattggtcaagagacgttggccagttcttgcatgggtcaaaggaccttcgccgacccactttaaagccttgggaccctggccagcctagggcttcggacctaagggggtggctagttttttgtcctcttttggccttagtaagaatcctattatggccttgtaaacctgttcaacccttgtcccatacttgcttcccttaggtactctatatggcacttttgggtgactctattgtagtcaagtaatcaacttaaaactcaatgtttttccaagtttttacacttggaaccatactttgttgataccgagctttggacaatggatctatttggctagtacccttaggtacagtcaaccagagtcttgtttaaatcttgtcactttatctggttactcacctccccttatcttttgtgtgcagatgatcccgagtgactattgaggaggtgataaatgcattgatgaagatttactcaatcttccctttaaaaattagtgtctagctgatccttctaatagttcctcgagtgatctcaaggtcaacagtggttctctagaatttgaggtccgacatcactgttatttagagcgaataggcaatgaattttatggccagtttgtctgggagctgaactaagggtagagggagttacttcaagtttgtgggcttatatcgtccaagatggcgtgcctaaaaccttgcccattggtcgggcaacttcttcagcgagagatctccctgccacaaagaccacaatatttgttggcagatacttggggtcctttatggcgaggaccaaacagatatgccatagggcactacctcacgaccctcacactgctttgctggtgaccagagggagggtcagtgttgctgaggaggctgcacaaccttgataaaatggggagctaggggccgaccgggttgaggaacctgtggctgggcaacccgtggccggccaagaggatgagacctcgaccgtgtcaacagtgcgtttagggttgaggaggttgttgttggaaatttatttta

SEQ ID NO: 385124 - DNA, 1063 bp, Cannabis indica
tgtttatttttttttattatttgctttgattggagtttgatttaagtttgtctttggaaaatatgccttgttatgtaaactctcttgtaattttcaattagtaaatagtgcattgcttttattatccagaaagattagtgtagaccaaaatgccatgattgttggcttgttcagtattattttttgaattctttgtctatgaaggttattatatcatgttttcattagttggacagatattagaatcctaaaactaaccaagtcagaatcttgtttgtttttatacattaatacatatatgagtaagtgaaaatagcagtcatgctaaacatatgcgccaaaaattgtctggtaatattacgagttctgtttttggtattgtaaattacttttataatttcgagtgttataatataaaagattgtaagtagcattcctcttagttcatatttctattgttattaatttataaatgttctactaaatctaacaaattgactaagaaataatttgaggcatacgtattatatatacatatatgtacccttctacaaaaaacattaaaccaaaatttgggaagaattgaaaatcaatgaaaagaaaactatatgtacttgaaggttttgagaggtatttttgtcctaactcctaatactaatagaagaggggtcaatgagagcgtattagatgcagttaattttctccctattttaaaacttaaatttttcataacaaataaaattaggaaaatactagcgccacaattaaattttcaacccaacctgagttattggcaacttttaaatggtgttgaattgttgcgaagtattagtagtgtttaacactattatgagatgatattttatgagtaattagcgattaattttacttaatattgaattaaaatatgtagcacctgatattaattgtactaatactaataatataatactttaaattgttggtgttagatattataagtgcgacagttatttaaaatcaacccaaagcttataaataatttttttttcctaaatatatcaagtaatgaaataaaatttaa

SEQ ID NO: 385125 - DNA, 1031 bp, Cannabis indica
tttaagactctaaatgtaaattttcctattacttatgcggtctattttttttttttttttggttaatttgatagtaatatctagcaccaatatcttatattattattgataaattaaatatcatgtttcatataatttatttaataattattcaaaaaaacatcacctcgtaaacctaataagaaaaagttaatagtaattaaattagagtaattttgctatgtatctagaaatattccaatatcattatctatttattgaatgctctattgaccttcctcaagggcaattaatatatattgcaaaatgtagtaataacattagttgggaccaaatgcagtacaaaatcattaaaatcatcatcatgtaagtcatatattgagacaacaatatgacacacaaaggcaaggtcttgaaattctaattaatatatatacctcaataaagaaaaaaatataataacagattatttttatttacataacataatcaaatagtaagtaccatttcttacacaccattttctcaaattaattattaatgattctcttgactatgttcataaacttcgaaaccatatacttatatctctcataaatgaaaatcatacacatgtttaaaagaaaagaataaaaagaattatgtctgttaggtgccttaataaattttaattttttatatattaaaaaaagaaaattaaaaaaaaaaaaaaaagacacacatgtcacatgtggcaacaacattacatgggtacgccaactttatcaatcacaactatatatcacacaacaatatatataatatttaaagacctgaggtattggcagaatgtcttatatgtataaatatatttcttcgagtatcttcaccgaagtcgctatatatattatatattgaagtaaagtaaaaacttacctaaatacataattaaaatatatatatatatgaaaaatatctattctatataaagtgtgcctatataactaaaattcttggtttatgagaaattcatgggtaactttttattttta

SEQ ID NO: 385126 - DNA, 1316 bp, Cannabis indica
taatggagcgctcatactcagccaacgtaagagtaacaccggtttctaaacgtaccggtttgtttctcttagagggtcttctaaatcagtctcggtctttggattcggccagctctttttcgtctccgcagaaaagatcagaaggaagtgttaacggcggagcaggagcaacaaaacccacgttcacggtcacggctacggtcacagctacagtcacagtcatagtcacggccacgggtacggccagagtcgaaaccggtcagagcgaacctgattaaaaccgaaccagagagcctagtagtatattttatgagaagcagagggtaaagctttcagtaacgttttccattttaattttatttttttccttggccccaatgcccaaaacgacattgtttgtcattagagaaaaaatctggcttcccaagttagaattgtaggtgtaaatattctccgattttgattttttttcttttttattttctgggtttgttattattattttatgctcttctgatcgttcgttagcgatgatggttctcatgtggtagctctaactgttcttttaacttctaaaattaaaaaaaaaaaaagctaatgtttcattacattgttctcttttttcctttgatatctccctctgtctcttatttttgtttgcctaaaaaatcttttaggccagaaagagacgacgattgaaattcacgcgcgtcaggggttgttcgttggtttttggggtggggccatattatgttcatgtttgtagcgatttgagcttatcttagtctgtcactttccatgaactattcggtataatattattttattgttgtaatttgttgttttgtgaaaggttttgggaaatgaggccaagattcaaaacagtggatcagagtcgccagctatgtttgctttatagtaaattttttggcacgtcagtctcatcccaaaccacttaataataatttattattaatattgtagtaattgttaggggttcttttatataaaaaaatatacgaaattaatccctttatttatgtcaagagatttattgagcaataatatatatatatacacacatatggatgggactgatctgcctcaagactgggggtggtcggtggtggaccacatgatgagaggtctattattagggtttaaagtttaaaacatctttagaccggcctggccctcgccaactctatatattttggttaataatataatgtacttcttttactggaaatgaatttcttttaatcacaattactcaaagcaatctgtgattcttctattttccaactcatctacaa

SEQ ID NO: 385127 - DNA, 1637 bp, Cannabis indica
atatatatatatatcctttatttatacatggctggccaaattggaatttcacacaagtccctttaatttatgagtctctctctcttaccaaatagtacgtaattggatgaatagtctttggttagagacaaatttgaacgatttttctcttttgtagactttgcagtagtagctcttagcttagtacgtaaattcaattatatttactgggccccgcccataccaatacccattttttcctccttttctaacaaatccagcgcccattttggtagtccatacgtacttttatgtcattatatagatgcctatttcacatgttttcattaaataaatattatttaagatacgagcaaacactataaaaaatcattaacttttagctacaataaaatttattgtcaaaaaatatttttagtcacaataaaaaattatttggaattaattataaggttatatatatacaatcgtatggtgtgttgggcaaagagcaaagtagcaattctcttcgaatttgcatttgtatttatgtaattttttatatacttattaaattaaaaaatataaaattaacttgttatatatttttgtaggctaacaagctaatggatcgaagttatgaaccaaaacgaccgtgtgaagaagagaaaacgacaatgacaacggcattgcaggtggatcgtgaccccgaggccggaggctttgggttgtcactttcactcccgttgcaccaccaccgccaccatctctcgtcgaacaagagcaacgcttcttcgatgagcgagattagcgaggcgataacgtcatcttacaacaccactactactaccaacaacaacaacactatgtctgcttacaaagactgttctagctcatcttcggccaaacacaatcgtcttaatttggatctttctattgctctttgtggcaattaatattagttaattaattaattaacagtggttgatgatcatatttgtaaaatcttcatgttttaattaggccacatatataaatagtctgtcatctataatatcactacatctagatttaattagttcaatcctttttgtttcttttaattaattagttaattagtttcggagttatgtcctatatatatctaaattcacaaattaattgagccttagtgtttgtctgagttagtatattatatgtttctagacttaaaaataatatatggatttattatttttatatacaagaaatttaacaatagcttttcccgaatccaacttaaaatgcatgcatgcatattcattaattacttgaagaaacattattggtctcaatttttatctttttatcttattatatgcttttttgtattttaataattaatcaatatgttcactgaatttaaactgaaaatattgatttaattatgttagctagggtgcctagatcatgttgacatgataatcccttaattattaatcaatattcgtggataattaaatttgctcataagaaatattcatcgataaataatacagcatatatatttatacttttattatcaacttataaatttttttataaactacattttttaagtcataaaaatataatttaaaaatattataaattattttattaaatacatataaatttat

SEQ ID NO: 385128 - DNA, 1354 bp, Cannabis indica
tattcgaaacgaattgtcgttttaacgaactgtcgtttcgaatcattaaaacgattcgtcgtatttcgtttgtcttctcccaaaaaaacagagtatcaaaaaccctatcagtctcagaacctcaaataataaaacccttgtggagtttcgcctgaattttttttaggaagccaccgagttcactcaaaactcggaaatacgccatggacgagtcaccagccgacgttcaactcgttcacgaacctaaggactctgctactccagtagtggaggcctcgaacgggcagccagagtatagaacaccggaagagctcgttgccaaggctatcgctccggtcaagcgagagtttcttcgtcctcctccggttcgacctgtttcgaatagtaacgaagacggtgccgcttcggagtcgaaggagaagcctgctcagcctagtgttggtaaagagaaaaagtctaagcgccaagccaaacgtgaccgcctccaggtactctctctttatatatgtaatgtagttctctatatatgtgactatgagcgtgttttaacatggtatggaagattgaaagttttagctgattctccaaaccttttgggatatattatatgtaaattttatcatataaatttctaatggttctgattttttcagtttagtgattttgttgtatgtattttatttgtatatgagatagaatagaaagaaagaaaaaacttttggatgactgtacggattaaaaatgatttttttcaaccctgtagcaacaaaagtctacttcaaatatctgccctgaggttgcaaagacaggagatcctagttcttgtccatatagtgataaatgccgtttcagccatgatgtggaggctttcaaggatcaggtattgtaatggtcattttattttcattgttgtttactattgattgggttgagttttttcttttcttttgcccttgtataatgtctttggcattcgagaatttattgagttaggtatttctaaatgtagaaacttgaggacttggagggggaatgtccttttgttactgctgaagaaccatgcccttatggtttggcatgtagatttttgagtacacatccggaaggtgtttctggaatgaaaagcactcgaaggaatagctcggaggtgaatggattgagaaaagatgttcaaagattgttgtggaaaaataaaatgaagttcccaaaagcagatgccaaagttaaagctcttggactcatggtatgagcaaagttatcagtcaatagtcatatctcgttatctgctctttctctttctgcgtccttgtgtgtctttgcctaattgctttagcacgttttgttattttgtttt

SEQ ID NO: 385129 - DNA, 1266 bp, Cannabis indica
ccaaccattaggcaaatgaaggagaggagagaacacatggctcatgattgcaaagagaagaaagcatgcatgactgacttcacttatcaataacctcttgtcttcataataatgcatatcattgctaagagacaagagaagatacaaactaaattgatgaaaaataactatgaatgatgattataaatttgattcataaataaataaattaaaattgaagcaaaggaatcatataagaacagcaaatgtcagtgtgtaactttttcatcatcaaaactagcttctcttctctctctccattaaaattttcatttaaccaagcaagaatcagacaaaagcattcccatataaaactcccacaaaacagaaagaaaaagaaaataaaaatgattttgaaaaaaaaaaaggaaaaatataaaaaaggtgaacaagaatccttctaagagttctatttgcccactttttccatcattgtttcacaaacgaaatgattagtcatttactatctcaactccaaagaatctacataaaagaaaattttttaaatggcaagagatatgattttttttttcttcccaagattacaaaggcacaaaatcttgttaatgacagatggaagaacatggaaaaagatatggattttgatttgaaattctcatgttttttttccctattctctctcaagagctaatagaatattattgttataatatatattatgtaactatccatggagctcaattcttgtttaatatctttaccaagacttgtgtgcatttatatagcttgaaaatgacattattggttatagtggtgtgtgctatgctatgtatcaagtttggattctgcatattaagaattttagtggtagacaatatatatgagcctaaaagtcaataactatttttcttttaattttaaaaagtaaataatttaaatggaaaaaaaaacttcagtttttattttagaacaaaaaactcatttttatgttaaaaataattaattatgaatatactatagtttatttttttgtacattaaatttgaaaacatgtaatggatgtttacaaactcgtaatattacttataaatttgaaaatatttgctacaaaaagaaaaattgtatttttgtaaaattatgtatttttcgtaggaaatattacacaaagtatctaaaattgcaattttttttttacatttttatggattattttttttttccaggaaaacaatattattctcatgtttctacaaagtgatataatat

SEQ ID NO: 385130 - DNA, 4271 bp, Cannabis indica
cgatcttagaatcgcttaattccacaaaacatgatttctcactaaccaaatttgataaaccgtagatgccaacagccgagtaaaccaattttcgaaacttacttaaattggctctttctataccataagcacactacaacgaatcaatcacccacaataatctaatattccgaaatttgccaattatcaaataattgagaagattactactatgagtccaacattgcttttattcacaattattattattttttttaagaagaaatattctttttttttctttattcattaatatttttttagtaatgctacaaaacactatacattttaaaatttcttctcattcacccacttttctaaaggaatcactcactaatatttcactcccccaaatttattcctagcttatgacataatgtaaggtgcaacaagacaaaaagtagtgaatagacatattttaggctttatattaagtggctataaattttaaattaggctcaagctcaaacttggtaaactagagatgatagaataagggtaggctcgaaatgctcaaacgattcaaaaaaaattgcctaaatcatattctaaacaagcattgccaagaattttgcctcaagagaaaaaatcatgcaagttctatcctattcaagcaatcattctgcaaaccaaagtagaacatttatgatacaattcaaatattgacaatttacgtcgatatacaatttctaacaagcatccaaattaatctagagagtcatagaatcaagcacacagttcacaattttcaatccatcccgtaaataacaatagcaacaaaatcaacgcattatatcatcggcttaattaacaacaacctaaataaagaaaactagaaaataaacacacaaattaataaaacaaaacaaacaaacaaaccaaaataataagtctcctccaccaaacaaaaatttcacatagtcccccatgtgaaacaaaaatttaaagagaaaaaagcttaccttaagttcatgccacatcagcatgcgcttgatgcccataataagcgtcatccagggcaacatgaaagttgtttttaaaaatgccctcaagtttcgcatgtgatgagtatgaaccaaaagcagcacaaacaacacaagactttagatgatgagcttgtggagaaacctttagtagctcgtagagaatataatttggtgaatatagcattaatgaaaaataaggaaccattggtagtttataacataatagcattgacgaagtcaaatcaacaactacaaccaattctttaaccaccaaagatacatcgttttcactttcctcaagtagcctcttaattagttgttcattttccacatgaccatccacaaccttgattgtgagttgatcttcaataactttatcattgaggattgatgttttttcattcacataattgagatcatcatttatttttttgacatgcatccaatgtacctaaattttcagccacttcaaatgattctttctatgcaattctacgctcaatctcttctatattttcaactaatggcacttcttcattattcaaacaactctcataacttttattatttgagttattatcgttaatatacttcaaattatccaccattagattacacatagagatcttaccatgtctgtcaagatttcttctgcaagtgatggcgtattctcctcttcctgaaatggttggggtgagtttgggaaataaggagagtattggtgactccaacccttaagtgaggaatcccagtgctggtcgtaatcaaaatctatcatgtcatttaatggattaattataacacgacttctccttaacaaaggttctccaattacctctacttcatactccacccaactttttgtttcatcatcaaagtctgttataaaataataatgtaaaacacccacttgagaaattgggataacatctctctccgagctccttaaatctccaacaaccagagtagaatggctcattgtgttgttggacaaaattcacatggtataacatttggatttacctagtaggtcaaacacattcaataaaatattaataaaattaaataaaaaaaactaaattagaatagaatttaactatattgataataactaaaatagtccccggtaacggtaccaaaaatttgttatgaattttctaacacgtaagtatacgtattgtttacaagtaatagactcacaagagaaaggtcgatcccacaaggactgtagttaattagcaaacaattgaatttctgattctatttggtgacaataaaaattgagaaaaaaaagtttaaaaactattgaaaaagtaaacaaataaattgaaatgaaattattaacagtgattaaagcttagggtaattaattttgattgtatatgatttattataatttaattctcaatttttaattttcatgtgatagcagatttactaaaaaaaacttatattcgggttagcacatatatatctcaacctacatgaaaactttctactcttgcaataaattttacaaataggaggcattaagcataaaaatccttaatgctacacaaactagataggtactcttgtcctatatcgaaatctatgtttatttcactataccataatcaatactcacttctcaaattttacattaaaattattaaacaattaattagtgataaaacaattaaaagtgattaagtacaaatgaaatagatgcataaaaaaacaattgaggaagaactaaattatattaaaaccgaagtaaagtgtcaaataatctctattaattaacaccctcataaaatgtctagctactcataattattgtaaacatgtgataacaacttaataagagcataaaaaataaagtacaagaaagaactaatcgaaaaaataatattgaaagtctccatagctgccttctgcctctaattttcttctcccaaagttgtcgactcaaaattattgaaaagaagcctttatatagatacaaaaaaagataaaaaaattttatttttgcagtttagtgtggcggcgcttgaagcacgatttttttggcagcaaccttttagttgcaacgactaataatgtgttggcaataactttttcaatattgctcggaattagacgattcaagatgttttgaaaggtgaaagagaaatctaaaaactctatgttttgattttatccaaaatctaataggaacatagtcgaatttaggcttaaaatttaagttttattttcttgcaaaattttctctactttatagatcatcgttttctgaaatttaacaaatttatacatcccaagtgtcgaaacctgaaaccaaaaaaaaaaaaaagtgtaattctattctaaaaaataacaatgaagaagaaaattaactataaaaatgactcgaataatagactaaaaatagcccaactctttaccaagtggacggcattgggattgaaacacaaattagtgtcatggaacatactgtgcatcttcattgggatagggacaattaaatttttttgtgatgcctttcaaatatatcaaacaacacgtcaaagcatcatcagcaacatatccttctactatggactcttcaggacgagctttgtttaacatatcctttcaattttttcatgtatctctcaaaaggatacattcacctcataaattccggtccacctattatagcctcatttgtcaaatgtaaccaaatggatcataatatcgaaaaaatttggagaaaaaattaatttcagctggcacaatatcgagatgagtttttttttttgtgctttctccatatcttttacatttaatgtctttgaacataattgtctaaaaaaatagcatagctctgttatggtatctcttaaactttttggtagaaattaacgaacagttagtgaaagtaactgttgcattattacatgagagtcatgagacttcaatctagatatattattgtcattctggcttaccttttatctcaagttagaacaaaagccatttggaaattttgcttcttttataaattgataaaacttttacttttcttcagcacccagcacgtaaagagcatgtggattcattaatcttttgttcccaccaactttataaatccacaataactcccaaatcccgtcttcttgagatcatgtctatcattatcagcatctttggaattttcattaattatccaagatggtgtcgaggtggctgtcacacacattcttctcaatatgcatggcatct

SEQ ID NO: 385131 - DNA, 1696 bp, Cannabis indica
tataacttttcatgtaacagaattacttgaacgattatgtcgtgattatagaccggcttgttaatactcccaaagatgtagatttacttgtgaagtatgggatcgttgagaatagattaggggacagcagccagggggctactttgataaacaagcttgcagatggggttactttggactctgatgatttttattttgctcaaatttctgaacaactacgtgcctattgcaagacctcctggcataaatggagggcaaacttgaaacagaactatttccacactccttgggcaattgtttctgtcattgcagctgttcttcttatcattcttaccattatacaagcagtttgttctgttatctcagttacaattaaagacttgcctcctcgctaggccattttctgctttgtccaaaggcttaaattgtgagagttgtaatcatgtcctgtttaatttttatttttatcagaagacttagcttagctgtagttttctgtaaatttcaaaatgtgctatatgtattactaatcattagttttatgtgtttggatcattaataaagcttgtctcccttcgcattgataaattgatatttgctataggagaaagaagaattctaatgctagactggtatttaggacatatttggtattggtttctgtttcttattttcaaaattgtgctttcagaatcgagaataaaatacaattattatagttttcaaaatggaagaggtgtttgtttaatgtttttcaaaaaattttaagaaaaaaaaaacttcaatatttcatatctttatccaaaatttgaatcgaccctagaccaaggcagatgccagacccagattcggcccctccctcgaccttgacctcgatgtagacgcggacccaaatcttggactccgagtggaaaaattgatatgagacaatgagtgagaagagaaataaggagagagaaagtgatgaggaaggaaaaatgatgtgagaaaatagtgaagaaaaaaatgatgtgaaagacagtataaaaacaatattgacaaaaaagctattattttttaaatataaaacatttgctttcaaaaatttatttttcgtaactttattttttgaactgaaaccctagtatggaggtcaatttgggggctcgggttgatttcttgggtgtcgtttcatcttttttcagtttcaaggccttggacttgattcttcttgtcttctttattcagaaaattgaaagtggtgagttaaaaataacttggtgagatccaaatacccatttaagagttcccagagtcaacctgggctcagggctagggactcctccctggtcgactgctcaggactactcaactctagtatgttttctttcttgccacgtgtcaaatattgatgtccacctcaccagagtcagtttttgggtaaacattttatcttaataattatccaccaagggaatttttatagtaaatagaatttcattttatgctggatattattagatgaatcaagaattgtgacagtcagtaatcctgtgatccgtaaagagaaatacctggtaagttgtataatcccacatcgactggggaaggtcaagtgggatgattctgagactatgtaggtatgggactgcacagttgaagagggcttaaatgaattaattagtactacctatatcaacaagttgcatcttatttt

SEQ ID NO: 385132 - DNA, 682 bp, Cannabis indica
tttttatatataatatttaaataaataaaactatgtggattaatgaaatcatgccacgtgtacaatgtctaggtttatttgatacttaatagctaaaaattaaaagaagaagcaaaatgattctataatttgggaagttctgcttccatgatttcaataaagagggttaaacgtgccaaactccctaattcatggagtttggctgcaaatcaccttatattcatcaacaagtttgtatttattgtatttattttgtagtaaagggcattgtatttattttgtaggttgtaaataacaaatatacatattttctctcaattttctcggttttgagtgtgtataaatcattacttatatatatatatgtcttatttcttgattggacacaggttttgagttttgagtgagaaaattcactctgctaagtgctaactcacaatgatcagcttaattagagcaatacactttcaacactaacaagaatgttaagcctcaagtatctttgagactctcattcttaactctgctaattataatttatattggttcacttgcttgcttgttttgactagtttatgttggattaaaactcctatgtgggcacatatgtataatgtatatgctattataaagtgcgatacaaaattaagtgaccaattatgttatgggtatcaaaagggta

SEQ ID NO: 385133 - DNA, 1559 bp, Cannabis indica
tgtaatattagttttagtgtaatggctaaattatattacatataaggatagaagtcaatggttcaattcccataagagcattggttttttttaagtttacttttgcttttatcttaaaaaaaaaaaaaactaacgacccccctcaaatattgagtctgccatatagatgttcattccaacaacgcagaagtaaaaaaattattattatttactcttcattaaattaaatttatacagaaactcaaactattgaatcacaaataaaagaacaaaacaaaataattctatatggtcttagatctaaagagaactccaaaaagaatttactattagaacacaaattattctttaaaaaataagaaaaatgaggtacccatcaatagttgttgaaaatgcatctgcatctttgctagaatctcaaatccaaggaaaaaaataagaaatatatttattaaaatgaatatatatacttttattaaataagagcaacatacatacatcaaatgcaaacaaataaaaagagacagagttgttattttcttaatcaccacttgctcaatcaattcatggtagaaatactaataataataataataataataataataaccataactccaaataaaagtaccaataatagtaaaaattaacaacaagaacaacacacaagaacaataaaaatgaaccatatttgatagatattgaggtcctcttcgagacagaacaagtcttcaagttaaaactggctatttcatttcataaaaaaaaatacataaaaattgtttatatagtatttcaaactaacaataacaaaattaacataataatcaagttcagctaatctttagccatacttcaacgcagctcaatcatcacaaaatcctagagcgatcttggcttcacaagaactcggctcacctactcaggaccctctcgaatgacacctggagcagctcctttgttgattgaagagcttggttgatttgggggtttttcctaggctgtatctttcatgacagattttactctttgtttccaaactcttgtgtcaatagctattgggctttttaaatgggtctcactaacactactccccaatattatagagctggacaaaagactcataatcttcctgagtagcatcttccggagtgcttaaagaccaatgcacgagaatttgctgaactactttttcattgaccatcttgagtcttgtagctaagatagctagaggaactattaacagtttgttggctatgcttgattccggtaatgggtagcatataggtgaattgctactataaaacgacttcaagagagacacatggaaagtaggataatgtggctgcttagaggaagttcaagagtataagttgctggtccccaatgagcaaggataggaaaaggcccaaaataacgtctacaaagcttattattaaggttgaaaaaccgtgtttttgcaaatgtcagttgtatataagaaaatataaaatctgtaatcgtttgcagcagcagaaagtaattctgctacagcaaaacagaacaggcagaatataaaa

SEQ ID NO: 385134 - DNA, 1642 bp, Cannabis indica
attgtcaaatttcccttacaaaaactgattcaaatttaaatcacaatatagcattgtgcaaaatttacatcacaataattttatattttttatttacaattatactatttttaatatattattattaaattttatagttacctttctattattattattttatatttgtttaataaattattaagtgagcattaaatgatattaaattttgcatcaagatttataattatgtaatagaacacgatagtaaaagttaatgtaaatatatcataaaactattttttgtgtcaaatataactaaacttttacatctcttattggaaatggttgctaatgctattaagcatattattgatatgttttatcttaggtttattattatggtcattacttatctttttaacacctttagtgatctttcattttcttattgtgctagagttgttaataatgttgcacatttttttagcgaaacttgctctttctttggacgatcattatgtttagtggtttggttaccggattgtattagtgcctctttagaaattgatgattattgattaatgatatttttaggcactctttttgagaaaatagccttaaaaaacaccaccaatgagcatgaaactcaaaggggctgagagctatagagattctttaataaatggcatgagctaggacaaagttcctgatacaaataagatatctaggccaccagactgtgctagaattagttgttaaagcaaatttagcaagagaatcaactattgcattaatagttctggaacaaaacacacaacattgagatgtttacataaagttctaatgtcatctaaaattaaacccaaagatgaatctaaagaattattaagtttatgaaccaagcttttgcaataagattcgaactgaatattatagatgccaaaagtgagacattgagatacttcatttcgaatagcaagggcttcaactcactctgatgggagaacattgtcgatcttctaagtcgccgacgtgactaccttcccatttgaatcatgaaacaccattcctaaacctaaacgacaagaacctccaacagagtcaatggttacgtctgaattgactttgagcacatcgtgagcagggggagccaataaggaagagaactaactctgtgagtagctagtagctcatgattataaaaagaatctcgctagttatcatcgcaataggccttgaggaaattagtcgcccatggaccaactaactcaactaactcagacaagatgatggttttatcatgtacttgcttgttacttcgataccaaatgtgctaccaagtgatcaaaactaattcaagagataccaaaggggccaccaagtgatcaaaaccaattcaagtaatggttttggccactcttttccctcttggagtttttactcggtttactcaatagattttaacgaggcatgtttcttctaaaaaaaacacaaaggactattaagtaacaaaataagataggagaatttttatttttataggttttaagatataaatttgtaaaaatatggtttttttttaaaaaaaaagattattttatgaaaaatatttagaaaaaaagttaaaagaaatgggaaaatagtataaggtaattggtta

SEQ ID NO: 385135 - DNA, 1462 bp, Cannabis indica
cattcatttgggtctctctcactttacatctctcactgtaagagtcatattctaaaagactacaaaatctttgagaacaatgcttattcacatctcaacaattacaagcctccctccgttttaaaggttgttctttgttgctacaacacaagaaccaaaaaagtaagtaatacagagaccaaccacacattagcttcttcttcttcttcttcttcttctttcagatggaaataagcaatgaattttcttcaacatcataggataagaatgggaataggaataggaatacaacatgtaatcaatcaatcatctagtactgctaccgaaaggaggttcactcgatgttccttgcaactttgcgttcttcataacatcctcggatgatctctttggagttagccctgacttagcttggacttggccttgtccttgcgttcccccctagtagatcataacaacataataagttatatcacataattttaggctttcaaacctggacaagacttactacaactcgaattgagaagtgaattacaatttttttccttctttcaaaatagaaaatgttatccgaaaacaaataggtgtctcttttttaatttctttccctcgttagcattttatctctcatagtttctcccctttttcctattgtcatttctcattttactttcccgaacaatattaaatttctttgatttcctctaacaatagtctttctcataaactttctttttatcactttgattcagattagtctttcttatccctttcactctttattttcttccatgaccattgtttcctcatcacttctttccacactactctctcatcactgtttttttcaatctctcatagaaaatcagcagaaataaacacaagcagaagaaagtgtctctctctctctcccaagtttaaaaattattattagttcaattaattgaaagcttattaagagggaaaaaaatggcaaacaaaatcattaaagaaaacaaatattttagacttttaatcaaatagaaagttcagcataaataaacacaagcactcttttaaaaagaaaaaaaaaaacacaagcagaagaaggtgtctccctcacatgtttaacaatgattattagttcaattaattaaaagcttaaaagaggaaaaaacaaaggcaaaaaaaaccaataaaaaacttttattagtcttttaatcaaataaaattactaatatatttttctaaacttgaatggtactattaagaaaattaatgtaatataatttggtaattttaaaaataaatttcatcaaaattgggttattgttttttactaattttcaaattagaggatagtagtttagtataaattacaagaggcgtagaagctagtactgaagcaaggtaataaaattatagtatctctttaatttataatttactcattctaaatatatttattaatttttttatt

SEQ ID NO: 385136 - DNA, 1577 bp, Cannabis indica
gaaaaaataaaatttttgaaaattaagctcatggtcctatttttactatttcagaaaatatagggttcattttattatttaataaaacaaatggtccaattaataacttttactaaatacatcgtcttaaaatagtatttactcttaaatatttaacttttaaacattgttttattttttttctacttctttcttgcaattttttaagagaactttttaacattttatataaatattgaattgtttgtaaattatatataacgtttttaaatagaaaaaaaataggaagaattacctcatatactattttttaatttttttttaaaaaatttacagtttagattgttccggtagtttctatatgggttactatgcggattttagttgcgatttatgttaatagaatataattttctaactcatgtatatatgtgttatataattttttattttaatttttttcgtaatattaaaaatataatttatttttgtttgattggtttattttttaagaatataaattgaaagaaaaaaattaaaaaaaaatagtataattaaagatataaattttatataaaataaaattactaaaatagagtattttaaaaaaaaaaaaatagtataaataaaattttccttaaattatacatacatattttttggatttttttaagggttcaagtgtcaaatgcccctctcgtttctatttgtcttgaaatatttttgttttaatataattgccttaaaatattactagtttagggagattccgttcaaatagagagtcgttttgatttttgagttttatagccaaagtggcaagtatatctattcatggagtgcagtattacgtaaacatgatttggaataaataaataaagtatataaatatatatatatatattggataagaataattaaaaagttggtatctatctgaatatttggaacttctttccctgtaacaattggataataataggcaacaagtgattctaccgattttaaaacaaaacgaaaaaaaaaaagaagttattattaattacaaaatattttaatggatttcttcttttttttaaataataagcaaagataaatttaatattaaaatatttattggcaggatcctcgattttcaatgttagaatcaagatggaagaagatagaaaacacttattctgattacgtattgaatttactttattctttgaactatgtatatgtaggtacaaaatacaaatggaataaatggaagataggatagagtaagggtaatcatctaatctaattatgctcgtaataattcaaattcaattcataaaaatgtagattggatcgattattttttattagttacttataacaaatttaaaagaaaaaaaaatgtaaaacaaatgtttaattttattttagataagattcaattttaattataaaaaaatgagctatacatttaatttataaaattttaaaatatatttatattatatatattaaaattttaaattattatttttttacattaaaatattaaatgtgtatatattattttttaaaaaaaatatagatatgtatag

SEQ ID NO: 385137 - DNA, 659 bp, Cannabis indica
gagagagagagagatacgatgagaaacagataccatgctccatgtaagttataagtctagtattttttttttaaatatatatatataatttgtgttcattatacattctatgcatttttttttcttttcaaaggtctaactttcattccacactcacaatatactgatttggattctgctgctaattagtaacacatctgtcactaatgaattttttaaatatttttatgtattctttttattattagaggtagattataatgagaattttgttgtagtggttatacatgataaatgttcatttagattgactagtcatatattaaccttagctttctataaaacgtattgtgtgttttgacaaaataaaatgtggatatttacttatactaaattacttttataaaatataaaattgtaagcaatgtaattaatgttaattcagttttatactaattaactttaacattgacaatgacacattattgaaggttgtcttatatatctgattaagtttttacatatgacccgtgagatacatcctcagattaatccactcacaatatatagaagaatatatgggcatgttgtgagtgtttagacaaaaagagattgaacgagagagaaagaatgaagagagaaaacagagcaatttcatt

SEQ ID NO: 385138 - DNA, 1170 bp, Cannabis indica
atcattagattaaattgatttatttgcaccctagactgtctatattatattttatatgcgttaatacgtatattatatataacttttattataaaaatgcgtcgatttttttttttctctttttaaattttgtagatgtgtggtggtggattcttcactttggaaagactgggccagaggtaaggcactatgtttcatattagatccatcatttcatacttttttcacttcatatatatttctttactactcttttattttaaagcccgataaggtgattaatcattaaacttttttcttcccacagaagaaaaggacaagaagaatgatttcttatattattttaaaaaaacattattattattatttaccctttaaatactaacactttttacacacaaagaaaaactcaaaatacacactcacaattaatacgtggtagagattatgcaatattttttgagggtgaaatctaattaaaatattaaataaataattgaaaaatctgtataaatatgtttacttctgtggtcaattactaaataaatatgtttatatttatatataattcacggaaacttgtgtgtatttattctacattttatgttgagtaatttgtagtatttatattaagtatcaaattagtaaaattttgataattggatatattatatttactctaattttatataaaaaaaattataatatatattttttctaaactaacaaaaaggtaccactcatgtagatgcctggaattattgaactcttttttcaaaaattatttaataaataaatatataaagagaagtatattctaatatgtacataaagtacttctatccagttatttcctagtagtatatgtctcccataaaaagcaaaaagcactatggctgaaaggacattattttggtttgatagttgatgaggtcaataaaaaataaatattcttattataatatattacaactgtaaaaccaactcataatatgccatatttgcaaaaggcagtcatcattctatggagttcaataaaattctaaacatatatatattgaatgattattttaaatattgaagtaactacaaaatacagctactttcagtgataattttttagtcataatataaattttttataattaaatatgatttttagtcacaaca

SEQ ID NO: 385139 - DNA, 1974 bp, Cannabis indica
tttggggtttcaattagctaatctagtgttgtacataaatatatatataatgtttatttttttatttatgaattaattaattggtttttgtacttaattatgatataattagggtatgagatgtttgagagattagcaattgttggggttcaagctaatctagtgttgtacttaacaagagagctttatgaagggactgtaagagcttcaaatagtgtgaccaattggattggtactatgtggctctcacccttattaggagcttatattgcagattcatatcttggtagatattggacaagtgtcatagcttcatcaatcattctcttggtaatattaaatatatatacacttaattatttattgtacatactcttgattgattagttttaattaatccattctaattttgcaacatatgatcactaacctttttgcatagttaattatagatttgttattataattatgattgattgttgtgtgaaaatatggttttttctacaaattattataggaaaaattcaagaaataggtaaaaaaggataactagttacctttaagttatctccttatcagtaatcaggtaatcagtaactagttacctatactgttttttctatatgtttttaacttttattttgattatattcccataaaataattactctttttttctttgcaaactttctttacaaatcataaaaataaaataatttaatttgttttgagaatatttttttaatgcataaactgaaattgaatccttatctaatactttgtaaattcttgacatcttgtatgaagtcttttattgtgaaaaaacaaaaaacaaaaaaaaaaatctataaaataaaattataaaaatgggatcagagttgctttaagctagtgaggggtctaaggcaaaatttaaaatgaattttttcatatatataagtaattattctgatacattatcaatttataatttaattaattaagaatattttcattaattttataatgcattgggatctaccacattgactcttaatttaattataacttaatgaatctcattataaatgtactaattgagttgattgaacaacagggaatgatactactaaccctagcagtttcactacactctctaagaccaccatcatgtagtaaccaaaaactactcaaagaagaaaattgcccaaaagcctcatttttccaagtgggtatgttctatttatcactatacataatagcaatagggaatggaggtacaagatccaacatttccaccatgggggccgatcaattcgatgttttcgagtcgaaagagaagacacaaaagctctcattcttcaattggtggatgtcaagtatcttagttggtgtcttattttcaagtacatttttggtttacatacaagacaatgttggttggtcacttggctatggaattccaactgtgggacttggtttctcagttcttattttgttatttggtacaaaattttataggcttaaattgcctatgggaagtcctttaacaaagatgggtatggtacttgtggcaactattaggaaatggagagtggatttaccaaatgacccaaaagacctttatgaattgagcttggaagattatggtaacaataatgtcaaaatcattagacttgatcatactccttcattaaggtatgttatatataattaaaaaaataattaaacattattttaaattagttttcactcactacaaaaaattttacttttagtcacaacaaaacttatgactaaaagtaagaaaattatgactaattataaactattattcttatgttgtgactaaaggtattagtcacaaaaattacaatttgttgtgactaaatgtatttttagtcacaatacttgttgtgactaaaactaaattagcaacaatttgtaactaaatactatgttttagacacaagtaacaatttgttgtgactaaaa

SEQ ID NO: 385140 - DNA, 1154 bp, Cannabis indica
gagagagagagagaccttcaagaacatgatcttcaggtccaattgaggaatcaccgcagacatcacagacgactctaccatggatctcaccagtccaagcttgaataccagagatgaaaaataatagtaataccatcaaaagaagataacccattagcagattctcttttgcagagcttccatgtaataccacacattaaccgctacaccattcatgaacaaaattacattattgatcttaggctctaaaacatattatttaacagttcatcacaagtaacacaaatataacctaaatctgaataccaatacactcaacccaccaaacagagcaatcaaaatccgaatatgccaagaaagtatcagattcactaatgcagtaaacatagcacaaaagaaaagtacccaagccaccaattagagacaaatcaatctaagtcaaaatacagcaaacatggcagcacacaaagtcctaaatctttctaatatcagtatctgtagttggtaatgttaatccaaagaaaatcaagattagaacaaccattctgcagttaaatttcaattgtaactgttatttcagttaagtgttcaaaacattgagattagatagaccagtttccaagttatggtgttggttaactcggattaactggttctgtaatggagatcaactactgaataagaggaagtaggccctttgatttgttagttgtttgatttgttgaattcatagttgtataatcacaacaatatcaaaaaaataatacatttattaggaatttagtcatactgtgagcttaaaaaatacctcaaatcgaatccaaaaagcttcaaagccaccaaaccaagcaatctaaaatattacaaacaacacagatttctcacaaacacagtaacaaatcaccaagaacaaagagactctaactaatttagcttagaaattaaaagagaaaaacaaaatcaaaagcataccagtggtttgccagatttgaagccactgatggcggtgaattttcggaagaagaaggaggcgtgtgaggatttaggggtttgtagatcgaagaaatggtttgagtgaggttgaagataatagatacggttgtgttgggtctgatttggggttttttctactagttactagttactatttattt

SEQ ID NO: 385141 - DNA, 1351 bp, Cannabis indica
agactaaaaagttattttagatgtcgaaatagttaaaagttgcaccactatacttattattttagtggggtgcattaaaaaagctccctctatatatatacgggtgattctacaatgcacccctttaaaagggatggattgatgcactcttaacttattttagcatttagaaaaatttttagtctaattttttttcatattcttgtacgttatagctatttaagatatcctacaaaattttgagaaattcggaataatttacaatatagaaaacaatgttcaaatagtcaattttacacacgtataaaataaaatagtcacgcgtgctatataatgtttgaacatagttttcgacatgttaaacttttccaaatttcttaaaattttgccggatgtcttaaataactataacgtacatgaccatgagtaaaaatttgactaaaaaactatttcagatgctaaaatagataggggtgcattgtaaaaattttcaaaatctttttaccactacactataatactataatttgtttttggtagtacacttaccctgactgagacccaaatccttggaacgaataacttttcgcatttaacgtctggcgttcccaaaacattgaaatactcttggcagagtcttgttttgccgacgccacgttccccgacgataccgaccacctttaatcgattgtcgttgttgatttcaagccgcttgaaaatctcgttcatggccagaatgtcgttctccaacccccgaaccatgagactgtcttgtaattgaggcgtccactcaatttcaacgtcgtatttttctttgttgccatgggactggacgttttcagaacctattttggaatttccctctgtttctgggtgtgaatttgttttagttttgccagtgacgccctttctcttcaatttgataattgattttattataactgctggaaacattattggattagattgggaaatgggttgatgattatttaggcatgtgagagagttttattaatagttcatttttaaaggagaatctcttttttccgttttgaggttgtctaaggcattgtttggattccacccccagctacaaggagggaagaattaattaataatttattctttgagtcatttctctttttggattagaatgataccttttactattttccaaagttgaaccatggataattggatatcttggaccaaaacgacaagttgagtctttgtcctttacattaattattctggatcatgaattgatgaatctatacaagatggtatgctgttatcagggcctcaaaaatatatcaaaaaaagagtgacatgggatttgaacccatgacct

SEQ ID NO: 385142 - DNA, 2526 bp, Cannabis indica
cctcaaggtgaagaacatgaagcatcaattgccaacctcgcttccgctgtcgcagaaccaagccagcaatgcgtattgttagcactgtgagaaaaatgccaagtttcagaactcgcctccacccgccagatctcgtgttcccaaaccaattatcatgtcgacccctatcgaagaaccaatctagtaaatgcaatttgcacaacaatttcttaccatgcccctgaatgttgaagatcgttcttgttggagtaagtgggttgttgtggcttcctttcaaatagaatccatcaagctgaactccactttgctccctcactacatgaactaaaccttctgttattttgttgaagaagttttctgcaataagaaatgtctccctgccctgtttaataaaatcttcataagccaagttaagcttatccttttgctgaaaataatattcagcagccttgatgaccctccaattgagaacataaacccccatcagtgtaggaagagcacccaagattgagattagttgcttaatttctatgacttgtttaaccaacccctgcaaaggatagccccaaatttcaccaaccaaccaaattgcaaacagaaaattaccactaggtggctctttcccatacgaaatacctagtaaaccaaattgatgttgtgaagttaggccatgcttaaaatttccaaaagtgatactctgtcctctgtcaaaaacccataaaccgccaattccaatgggtaaacgagagaaacatgaattactcacccaattgtcatagttgtgcttcacatgtaatactttagcacatatttcattttgttggtgctcttgcccaaaaccagtaggaaagaaataggggaaagtgaacaaatccctaagaatcaagggttggattattgagttcctatcatgggttgccacaaccactttgattttcttttctctgtgaagaatccatgtaattactagcccataggattcgatatcacttgataataatctcctatgtggtgttttaatgtatctgtttccaataatatcaatgtagacactcatatcccttgacaatcttattcttacaatttcaacttgagatgacacactcaccataagaaaagatttgagtttaggttgccaaaccttaagtgaatctgatattaattttcctgcgttagccattaatgacttgtcctcaaggtgagaagataagttgctcttgaataagatacactttctacaggtgattcttctctctccgccaaaaatccaacgagtggatggtgaagttacatcctctatgtacccgaatctctgacctccgaccgtcctcacggtgcccaccgtccttcgttccgtcatcggtggctgggagtcgtaatcgtccagtcgtagtcctagacgatgcttcgtgcgattagaagaagggaacatagagacctgatcccacgtgacccatgtgttaactaaaataaacattgggcttttttttctttctttgcttaatggcccaccaagggttaggtcaaagtaattgggcctcagaccaagaaagggagaatcaagtccaattgcctcaataaccattaaggcacaccagtaatgttgaacgccattagggagctcgagaagacatcgcgacttctctggtctgggcgtcaaggatcgcagaagctgcttctcaggcgagaagattgtctcctccggtgccgatcggcagcaccgttccgttggccatgaatcgtgattccctttggtgtccgacggatacacttgtttcttttgaagctccagtggtggttcgaccattggttcaacctctttctcctctggctcaagtaggcaacgcatctcccatgaacttgacgacggcggtcgaccacgctgctcgtccaccgttgggcggcgtcgtgtctcacccatccaactaagaacttccgaccaacataatccgggtaagacagagaagataccaatgttagtgtcatccagtgcagcgtcgatcatcttctgtagctccgatgagcggcggttcgacttcgacgacgtatcgcgaagatccatcctatggtgcttgactggaagtgttcgcaagatgcttctccaatctaaaacctctgttgcttcacccttatcggcttcgtctcgctgttcatcctccttgatggttgtcactaccgctgctaattgtggaagcagcatctttgaacaaccttgtgccgacaccatcgagttaacctccgtcgccattagagtgtcgttgatgtttcgtgcctctctggatttttgtatctgatcaatcatcaggtccagccgtttcacgatgggaccaatagtagcctcaagagctgatttcatcatttctaattgattcggagcttgctgaaactccaaccgattttccatcacacctcgcctcaaagaatcgacgtgctctgataccatttgataggaatttcctatcattttagtacaacagtagcaaaagtagagataatagaactgatatattgatattggaatgaaaa

SEQ ID NO: 385143 - DNA, 1771 bp, Cannabis indica
agagagagagagagaagacttgaagatgattttttggagatctttttattgcaatattaagtgtaatatgggtgtatagaatagctcatccaaagcttattcgtagccaaagagtgaaacaagaaataggaaagtagattattttccttataattagtgaatcaaatgaattagaaaataaaagaatttggattttgctcttcacttgtttgaagcacgttggactcaaaaagcttttcctttttatttttaccataatgaattcacttcttgtatttaaatactaattttaatttaataatcaccaaattaataaataaaaacataattcaagtttttttaatatcttgaaaataaaatatcactactaataaaatttccctgtatttatttctcttcttttacttctctattttctctaagtttgaaaattctcataattaataaagtcaataatgtgaatcctaattgattaataataaatcaattattgagacttaatacatgatatttatcccagatactgcaggaaccatagactcataaactctaagctcccaataagatagatttgaaatttaacaaataaatttctaaacttattaactcctcatgactgcactataaactcaaaattacactcttaattttacggaacgctctatatacctaatatgtatgttattagttattcattgtttcttcaatgattctctatagatggtttacaccaagtagggactaaaattaccattttacccttttaatatattttattcttacaacacttaattaatataagggtaatttacagttaaactccctgaactttaaagtttgcacagtcaaatccctagactggaaaaattatggctaaactccccaacctccacaattattttggtcagcactccttccgttagtttttggctattaagtgtcaaatagacctactattatgtacataagtgtacccatgacgaaatattattggaccacttaataataatattaataattaaaaaataaattaaaaaaaaataaaaaaattaagaaaaaattaaaaataatatttttttttctcttttttcttttcttctttctttccttttttctcttttttctttttcttcgttttgcttcttcttcttcacactacccagaaaaccacccccaaaaaacccaccacccaccaacccccaccctaaaatccacaccactctagaaagatcgagaaaacatcaccattgcctcaagcccccacccaaaccaccaccaccaccacctcaacctatatttcatatccaagtcataccaaaaaaataaaaaccacatcaaagaataaaccatatacaaaactaaaaaaaaaaaaaagaaaaaacacaccaaagaataaaccatcaacaaaaaccacagcataaatctcaaatctaggttgtgagttgcgagtttatagagaaaggcttgagggtggttcaaatttgattgttgtcgacaatgagagcgagagagactgagatgatgagaccaactgtggtctcagatcctttcgacggtgaacggaaagagagtcgtgcaagagggagagggccagacgagtttcggggctatcagcattttggggttctcggggcttttggggctcttggactagagaatcgtgcaggtgggttttttttaggtgtagcgtgaagaagaagaagaagaagcataaagaagaaaaagaaaaggacaaaaaagttattttttaaaatttttaattatttttttt

SEQ ID NO: 385144 - DNA, 1201 bp, Cannabis indica
aaatgtcaacaatgtttaatatttatatatttatttgtatatttgtgatttatagtcacataacaaattgttttaaaaataaatgtaatgcagttgaaggaacacatttttaataatttgtatagttcaatggtgtacacaaagcaaaattctacaaaaattgtaattcagagaagaaaaactattattcttaaaataatatttttactattttttctacagatttcagtcaaatttgcatttaggctatagatttatatattactcccaattagtggtagtgtcaaccacatattttaggggatttttttttttttgctaaaagagtattaatgaggaaactcgattatgttttaattttataaacttaactcttaatagtttttttttttgtgccaatacctctttaacattacttttatttgcaaatttaatgtgtcaattaaattttactcttaaatgccaaataaattatccatgtgtacacctgtatattcatgacatgtttttattggctttgagattttttttttttttgtagactccacttcaatggaagatatcattggcttcgagattatagtgtcgtgtgtatacatgtgtgcacagtttcagttgggatttaacaataaaattgaactgacatctcaaattgacaaacaacagtgaagttaatggagtcctgctaccaaaaaataagatcaagaggttaagtgtttaaaaattaaaacataaagagtttcgctgctaatcacctaaaaaaaattatagggacaaaaatgaaaatatgtaagattaaaaaaagatatttgcggcataaatatctcatgttttcaattttgcatatttacattagtcttcctcacagtctttggggatcgtctctcgagtaatctggatcattagtatcaccgtcttctcctttcactcgggatgttatctcttcttttggactttcttaaagatcacgtagtggggaggttgctggttgtttctcgtcatcaccattgcgacaaaaggtttgtgttagtgaatgtttcgtacaattttcaatgaaagtactaaaatattgatcaagattttcgggaactacttaatcttattttatgaaaattgattataaatagaaggagaaatctttatgcggttcatgtgttaattagccttagtccattgttaattccatttttggcatatttaa

SEQ ID NO: 385145 - DNA, 1336 bp, Cannabis indica
aaaaatcgattttttttttctttttttttttttttggaaaaaatcttgccagaaaagtcatgttgtttttttgctataggcaaaaaaatgacacgtcgtttttaaaaaaagaaggctgccacaaacaggagaaacaatatgtcgttttgagtcttaatcaacctccatctgggtcaaatttgacccaattttagccacatgggtccgatggatccgacccaccccaaacccaatcggaattttcaatactgacaaccaaaatagcccaaatcaattccaaatgattctaaatgcaaaaataaggcattcatatagatttcatgcataaaaaaaaatacataaaataaagagtttaaattcataaaaaatctcaagtctgaacagtatttttccaaaagatttgagatttatttatttttaaattagtttttcatgcttaaaaatgatcttcaatactatatgaatgtattgatgcatatatgaattgaaaacactaaaaaaaaaacaataactaaaattggagcaagaacttcggcaaacccagaataaaaatcagtgtatataaactctcatataatcattataccgtacaaacatggtatatatatagaatgaattattataatcaattatatgcaatgaaatttaaaaattaatgtaaaatatatatatatataaatatctatgtgtaaaatatacacgtgtatatatataaacgtgaatatgagtacatatataaaaaaataatcaatttaatacatataaaatatttatataggctctagttaacaataacatgaatcaaaggactaaatgaaagaaagtcacaaccagacataaaatcaaaattaaactgattgtatgaacatatatacatatataaaaactgaaaatataaatcaagacagagataaaaatgcttgatactaactgttagactataatctaatatgaaaataaagcatatataaacgatatgtaatgcagaataactacaaatatatcgaaatagtatatgcaatgaaaggaccaagatatctctagtcattgatgtttgagcttcaatccctacgatagctttggtatgggaatttgggcttcatcgctctctcaactctctttagatgggattttgctgtttgcacagaatgagtgaagagctcggggactaagaccctatatttaaaggtgagatactccatcagtatctgcaccacattaattgtcaaaatattttgacaattaattattaaaaaatcaaatcaggtaataaatatcgaaatctgacaatatatagaatatcacgtaattaattttgtccagattcaatgaatat

SEQ ID NO: 385146 - DNA, 1486 bp, Cannabis indica
ttttacgaaaatccacatagcaatttcaatcccaattcaaatttacatagcaacctacataaaaactaccgaaacaactactagagcaacccaaactctataaataaaaaaaaaattaaaaataatatatgagataattctttatttttttttattttagaggagagagaattcgaacttagaacctcatttttataagaaaaaatgtgtaactactaaattatgccatactttctactttgttactttgttacttttgttttataaattttttcggttctcatccagaggtcccatctaactttgttacatctaattttaatttcacaataataatagctcaatctttagctcgtcgatattaacaaaacctggcaaatttcgagtttttggaaccacaaatcgatgttttatttgagcaaaaccatgatttttttccctttccttattcaatatatcaacttttgcagaataagactataatattcccacgaaaaaggtggtaataacccatttgtgatagttatttaatgagaaatgctaaagggcatagtagtgcctcacactcttttacgtgtcaatatcgctattagtttaactaattatcgggtttcatataatttaatataataatttttaaggactatcgctaggcaattacaacgcgacatgtcgagaagatattaggcaccataatacctaatagcaatgctcttatttaattgaaattctggctagataaagaataattttagtagtgtactagtgttataatctataataaattctgctattattgtatgaatgtgatgcaatcaagttgtactttgggaattggggacccttattttaaagaaaaatactaaagaatattataaggtgtaaaacgcaataagaagcgttttaaaaaaatattaaaatttatctttattattagtgaatttaaatatagaattctaaataatttaatttaataaataatataaaaaaccactaatttctaataatatatacaatatgttaagtatcttcaagtgttttaagcagtgttctatattaaaaagaatttcttggaggcttattttattattatatattattatttatttatttagtggcatgtttaattaaactattttgtaacctattagctcagtcatgagttaaggaaatatctaatgatgatttattaaaaattaaatatttcactactcattctctcaattgtcaaaagcattgcatcgtggcctttgttgattgtgtccatgtttcttgacatggtacttgacatttgtatatgatatgatatataaaaatgttaaaagcttatactccttttttttctttataaattatatatattttacataacataactaattgaatattgttatgtggtattatatttactacaattaggagacatgaccatcattcctctaaacttttgggaaccccatgttattttttaggctaattaggattt

SEQ ID NO: 385147 - DNA, 1334 bp, Cannabis indica
tgaagtttatcgagcaatcagctacaactatatgtgttacccaactgttaacgaaacaccggaacaatgtaaatcagctgtattctcgcttagagaatcaatctcaaattttgagtttgttagaattttggctcttttgctctactttttggattttttggtgactcttttttttttggcccactatccccggatcacacggaagagatttatttttggttgttttgctctgataccatgttagaattttagaataaggtgaatgaggtttcatctcaaaaccaattgccaatgggaggagtagctcattccttttatatattctattatcttttcacacattagcaatgtgggactctctaacagagttgaatctcaaactcgatgacataaagcaaggtgaggatactgttactaaatatttcaattctctaaaatgaatatggaagaatcttgatcttcttaatacttatgaatggaaatctaatgaggatggatgatatcataagaaagttgtcgagaatagtcggatcttcaagttcttggctgaccttagtgttgagtttgatgaggtaaagggagaattattagtcgaccaccgctgtctcctattagtgaagtgtttgctaaggttagaaaggaagaaagttgaaggaatgttatgctaggaaaaaggtatgttggaactattattgagggatgagccttaggatctaatatgggagaaggctacaaaaagtttttcttaggtcttgaatttattctgaattaccttaaaaaaatttgggttgtactgtttttgtgcatattcctaaaaggtcaaggtctaaattggaatcaagagctgaaaagtgtgtttttcttagatatccacctaataaattagtgttttaatcctcttactcctttaccaaatattatattggatgcttctctctctctcttaaggattttcaacctattgaaattaaagctgaaattggtctctcaaataaagaaatactaggattgattaaaaatatcatacaaatcttgagcctcttgtttatactagaaaaaatgtgactaaaacaaataaagacagcaactcatcttagaaatactccaggtaacaatcctcattctactcgaattttatctccaagtattactaatcctaaatctgagccttccttagaaatactaccaagaaacattgattcagacccagtgacggactcaggatttttactttgtgagagcttatttatcataaaaaaatatttatagctacattataatcactcttactaaatttatctaattttgtgagagcttttctactattttggcct

SEQ ID NO: 385148 - DNA, 2292 bp, Cannabis indica
gcaactataatatgaatccttccaccagatgatgcattaaaaaagaaagattctaataacactcatgatgcttaacacctttataaaatgtactctcgctattagtacaattcaatatcaagtctcaaatgttttaatttaataaaaattataaagaatcgctatctaagacaccatgtcatagatatgctaatattctattgcaacttaagcacttttcattgttagaagattattattaaggagaattagagtcgaacaacaactctgatctattaatggcggaaaacattgttgaaaacgaatcctatttatgatttggtgacaccagatgttattgggggacattatttgtgacattcagatgacttaatttgtgctagctcacattttgttattgtcatttgcatgtgagtgacatatatcgtgactaatcattgagtttgttgctcggagtgacaccaaatacggcatcaaacaccttaaaataaacataaaatgagggtgttagacaccttaaagtgttgcatgtacacagcccaaactactcaattaagattagctatacagcatgtgtcaaaatatttcctctcttaaccaacaaaactataaattaaaactcatgtttgctaattggtaataagtaataacaagacgtgaataatgtcccaaactgaagatgtccatgaaaatggatcaatgtgtttgtttcaatttaagaatatctatctatctatctgtatatatccttacatgtgtcttcactcatagatagctagccttcaaaatcacccaaccaagcccatttcacctcagcaaagctacaacagtttcagtccaccagttactttatcaactgtttcgacaggtcctgcacatcaaacataaaccgaagcttaatgctcactttttagaaaggaatatcataagtggtcactaaagataaatggatatgcaattcaaaagactaaccaagaatagccatcactgtccttgaatctgcaacaaaagcgaaaatgtgtcagcagaacgacactagatagattcataccatacatgtatggctcatttatgatcaaacaagcatttcaaagaagagaggcaagtaagctcttggaatcagaatgcacattaaggctcttgaagtaccaatatgatcatttggtcaatccaagtaatttgtttcgaacaagtcttaaggcatactagtagttccacttcaatgcaccaaaaagaaaggaaaaaaaaaagaaactatttcaaatggtgatgaactacatattgtacgttacagcaaactcacttggtgcaatctgagttctcccggcatcaatagtaatatgggttgggagcttgactgattttgccttctcctgcaaccattaataggaaccttgctcttatcacaaatttcagcaccacatatacaaaatgtatgcagtatggattgaaaagggaagaaatatcagtccctttattcatcaccaagtgttggaaaatcagtgaaaaagaaacaaaaaaaaattaaacaatgctctgaatcaatgacagcaatggaaatacagatgagattgcatataactctgatatgaaagaacattagaaagcttcaaaaacaaacaaaacaatatcaagcctgacttggtaagaataagaatggtaagagatagtgacctgcaacatgagcatatcctcctcgctctcaattttcacaaccactttaggctgtgcacacatctcccatctgcaagtttatggaaacagcaaaccaaatcaacgatatatgcaacaaatacaaacatagatagccaaagacggtacctgttcagggcttttggtgctcggcggagtagcttcttatagaggcccaaagttgcatgactatcaaatacagtaaagaattttgtcattaaaagtgtttttagtaccaaaatttggaatagtaataaaaggcgccataaagtattttcattatttttcattgttaacaaaggtactaagcgaaaatttgttttaatcttcttttgcccttggctaccccatgaaagatattgaataacaacacaatgtatattcaaaggccaaacaagaacagcagaatgatctcacaagttcattttttaactccaagatatacagttttgaagatttaattcaaatacttgttgcaacatgtggtttctatctataaagcataaaagggaaatgtcaaagttcaataaggtacctgcattgggcggcaattttccctttacccatctttagatcatttctcaccaccaaaatctgaaa

SEQ ID NO: 385149 - DNA, 1604 bp, Cannabis indica
tgatagtttacttcgtagagaaaaagttccacaacaacaaatttacatcaccgatgccataaccgtatattcaacagtttgttaactcttaacctattgaaagagaaatgtaaaactacaggacaactgatcacaaagatataatgcaattaaaacataccttgctcgaacccgtttagcacgtttcacatgtccttttaacagatcctctgcacttagatgctcaacagattcatcatcctgaaaacagcaacaaaaccaagttagtgcaaataataacagcatctacattccaattttaattctctagtaaaactgcatagtaatttgtttacggaacagttgattcaactacatcatgcacattcagacaattgacactgaaaactgttcaatcatttcatatcatgtatcatatcccatctttatgaacagcaccaagaaatcaaccttcactccatcatcatcatattcttctggactttccttcttttgtaaattgccagtcgccacagaaatagggtaaggctttggcagggacctaggaccgttaccatattgtggctgaaaaataaaagaaaaaaagaagcctaagtaaatggatgacaaataactgaaaaataataaatacattcaaattgcaggaaacaattcaactaatctccagtgtgtagagccccaaagcctaagtttaaatgatgcagaaaagaataaattgttgaaagactgactttcagctacattgtccaaactttctttatgaacgcagttgaagccagaatagttattgaagaaatcataaaagtataattagaattttaaataaaatgcaacaacaaggtctttaaactagtatttccaccttagggcacccaccctcaccactaagctagtggctttaatagaagggaaggctgtcaaacacccatgtgaccatcctaattagctgaagttgactcaaaacaatcctctagcaagccacaacgaagtgaggaacaagccattaatcaagctataatcacacaattcatttactaggatatggttttatatctcctaataagtataggacacaagaggtgagattcaagtccctcatgggtacctacacagcaattgctatagtttcttggtcctcaaatattgtagggctaactgctaagtggttatcctagtttcaacaaaacagaagtataggacacaagaagtactagccctatagaacaaaacctcttcaaggtggtttttatgcggtaactttagaatttattaaacatgttttttctttaaaaggattgtcaacagaaatatttcccaagttttacacacacattctagtcattaattaaaaagattgcaatcaagtcattatttttaaaaacaagtttagttaccttttaatactgattttcctttgtttgtcgtgaatattaaattttcttatacactatgctagagaaataaaaaaaaattgaccttaaaaaactgaaaattttgtttaataattacagcaggaatttgattaatactcctttcaaaacttaaggagttgattgtattttttttcttctttacaaaccagattgcgaaacagcaaaaagact

SEQ ID NO: 385150 - DNA, 2043 bp, Cannabis indica
aattaaagaaaatgatattgtttaatctctgaaatgtattgtaatgtatgggtattcacaaccaaaaaacaactttaaaacagcattgttaattcacaaccaagaaaaaaaaacaactaaaagtctatgagtattatctaggcaaaaagagaaaatacattaagcaatttaaaagaaaatccacaatcaaacactgaaaacacaatcccactaaccaaaaaaatacacaaaatccataaacaaaaataaaagggataatttgattaattacaacaacaaaaataataaatatcacgtacaaaatcaaaaccttatttctaccatattaaaaaaaaccaagaaagaaaaacattaataacaaagaaacacttttcacaaccaaaaaacatctatgtaaaggtgaacaaatacactctcctatttgaattaaaaaaacacaaacatacactaaatacaaccacaccaaaacaaaaaaatatacaatatccataaacaaaaaacttgatttaataaaaaaaaaatactcaatattcattatagatgaagcattttccattgaaagaaaagtaatcatcaacttcaaatggtcatcacacaatcgacccattatgcagacaatgtaaagataaaaaaacacaaacattacttgtaaaatataatataaacagagaaaaaaaatcctaaaagaaaactgagttaagaaaaaaaaaatacttgcaacaaatggagaaaaatcgaggtagaagaaataggatgagccaatgagggttgcaactactatttttatatattaattattttatatatctttttgttattttgaaaacactaattatcgtataatataatataatatatttaaaaaaattcttaaaataaatgttaactaagatttaaaaaattataaaccagtaactaattatagtattagtaatcaaatattttttttttttcaaaaatagagaaaaatatacttcccacattttaaaatattcacattgaagagcaaatcataatgactgtttttaagggttaaccgaataatggcatgaccagatattatttttaaagtaaacagaaggagagagaaatgcatgcatataaaaggtgttgaaacataacaaacaataaaaaacattaaaaaaagtttgtaaaacttagccaaattattttgataattagataaaaaatagagtatgaaatataaaaattaataacataattgcataaaatataatcttttataaaaaatttatatttttacgttcaaagttttttttcttacatttttatggtattttataaaaacacaataaataacatgaatataacataaaaatacattagaaaattataatttatgtaaataaaatttaaaaactgtaaaaaaaattaaaaactccgtacagaccgtatttttatattttttttttattgttttgtgttttttttgaaattatcccaaaattaattaagccaatatattttgagcccaacccaagcccatgaataatttcgagataatttcacaaatacacaaaaaaaaaaaaaaaaattacaaaaatacagtttcacaaaattttaaatatttttacgaattttttaattttatttacagaaaatacggtttttgtatgttgtattcatgttaatttgttgttcaattttttgttatatgtatgttattttttgttgttatttttgtgttacttttacgtagtcttcttgttgttttcgtgttaattttacggaaaatcgtaaaaaatgtaaaaaaaaaattcaacaaacttaaaaaaaaaatatggtgtattatgtaattatttcaataattttagggcaatatagccatgcctctttctccttcctcagcaagtacgatattctctctctcaaaaccaacaaacaagatctgaagaatagagagtcgccggcgccggcgtcgctgcggttggcttctccttcttctccgttcatctaggtgacccacgatacaggtatgttattagagtttccctttccatttttctcagcactaatttagac

SEQ ID NO: 385151 - DNA, 1979 bp, Cannabis indica
tgcaataatatatatacatatatgaatcagtacatgagaataagtatatattagcaaataaagagaacttttacttgacatgttttagacagaacgtgtgaattatagagacaaaccttcattaataaaaatctaaaaagtgtgcaattaaaacatttgaaaccaatagaatcttgagttaatatctgaaatgagaaggaatacaataacagaataaatcaaagaactgctgcctagctaattttccaaatcaattatgtgagcaaaggcatgcagaaattgttagtatcattttttatgctaataggatgatgactactaatcattgtaaaatactccaaaaacagaaagatccttaaccttgaacatatatatacataaatttatatatttgaagaaaaaaaaaaagtaaaaaaaaaatgtcagcataataattctatcggagaaagtttagggaattgatcaaacaatactaataacataaaaagaattgattataattcaaaatgttactcatttagtggcacaagcgggtattatgaagagaatagcaacaatccatttttgtgcctgaaaaatcagatcaaaattactcataacatatatatgcatgcttcctcagctaaatgctttgtttctatataataacaacaatttgtgctatataaattatgtaaaagaccatgatatctgaacctaatcaaatcatgtaacttatttagccaaattaatacattattaacatccttatgagattaaaagagtgtagaaagcaagcattacacttcactgttgcttacagtttctagtaatgagtagtcaccatgtggaattagcatgtaaatgaaatggatagagtttcttaagattaattaagatcttgagaaacttagaaaagttcagcttttgggtttacatgcatgcagctaaactcgatatacttacaatgtaattgataagactaattccacatcacaagacatttgtcatggtatagccgaaagatgaactttctaagtttatgatatgcttatttttttgtgttgtatgcatttcaaacaagacatttgtcatagtatagccgaaagttgaacttttagagccatcaaattcaaaagggtgcataatataatttcctactattgtcaattaattctactaaaaaggtcatggactggttcctttaatctgctataacattatgcagattttatgaacttaaaaacaagagcactagaagagaccttggcaaaacacagctaattaattcccaagtgttataaacaaaaaacataaacagacaaagtcaacaacaaataaactaaagtaccattaaattgaagttacatttgtctatatagtgtttaactacagattgctttataaatcactatatagtgttttaatgagtgtaagatatttttattggaaaattttagacgtacgggttaaaactagtttctcttatgatgtttattttataccaagtggttggattgttttcaacagtaaacctaactgaccttcaaaactatattatttgaataggataatctcacaactacatttattttttttttcatgattattggttcttaatttgaattgtttatggcgaaggaatttatttgtattatgcagattgtaacaaattcatatagctagcctagcccaatattccataccacaaattaatcaatcatgaaaatgttctatatattaatggatcactttctcagccattgctactctacaaaacatagctatatatgactatctttttcatactatgatattagtatatataaattagaagttgaaagtatttctcttgatggaagaagtcatatcatcacaagtaccaaaagaatcgtaatcacaaccattcttattagctggtaaaaccagcagagaaaacacagaggaaacagagagaaaatggagctgctttatttaattaatctcacgaatgaaaatac

SEQ ID NO: 385152 - DNA, 2007 bp, Cannabis indica
tgggacaatgtccacaataagtacctagtataacactatgaaataacttcttataaatagttagcggttttatagagccattagtaaagtaaaataactatacatgatattgaattgcacgatataattataatatctcataaaggtgttatacaccatgtttctgtaatcattaattcttgttttattgcataataaaacacgtaaagatgataaaaaaaaatgatttaaataaatgcataactagtatttataattcacttttttggtgcagtaatttggttggaaacaatttcattatagatgataaaaagaagaggtattttccattttctctgaagctatctagaataatttcccgcctatagctaagcaaataaagtttctatattttattgttgaataattaacttccataagtgatctaatttatcttaatttgtttttagtaatattcttttagatttgaactgccttcaaagaaattttccatgtaatcgagatcgacccttgtgtaagtacagtttgtttatttaattatattttttttaatgataaacacttaatttaggtggtgtttggttcggaggaatgaaaatataagtatagaaatgagaaggtataataagaatagaaatgaaatagaataaaattttaaatgcataaacaaaattaataaaaaaaattattaaattttttgcattgtaatggtcttttttttattttaaaattgaatagtcattctaccaaagttgtggaaagacattccattagaataatattccaaggctttaatgcaaccaaataaaagaatgtaataaaaattattttctttctattttattacctccaaccaaaccaaacgctgtcttaatgtcttatttttcttccttgatcactgcagattataactttgggatcaactgtggtggtgaacgaattacctcttctaatggccttgtgtatgagaaagatgatgagagtcttggtgcagcttctcagtttgtcagcagctctaaaagatgggcagtaagcaatgttggacgtttcctatggtccgaccaaattaacagtacatcatctcaattcacagatacttttgacactgagctcttcttgactgcaagggtttcttcttcatcactgagatactatggtctgggacttgagaatggtaactacactgtcaaactcctatttgctgaaatttctatggaaaatgatcagacctggaaaagccttggcagacgtatattcgatatttatatccaagtaatgtccacctaattgtcctaagatttctctcttaattttctcttgaacatgcattaatgactatttgaaatgcaaatttatcatagggaaatagagtaatacagaattttgatatcaaaaagaggcaggtgggagtttattcaagcgagtcccgatggaattcaaggctcgggtttcacaaaactaccttgaaatccatcttttttgggctggaaaaggaacttgttgcataccagtaaatggtaattacggaccttctatttcagcaatcagtgctactccaggtaataatatgttttgctaatagacagaaggaaatactagttgacttaacacttacaaatgataattatgtaacaaactatagagagaaaacacaatgagatgatcgtcccctaaacagccaaataatagacataaactgcagatgtcatggaacagggggtattataggatttgataaattcaacttccatgtttcccttcgaaggattgcttaggatttggctcactatattagagagtcttacattgctaatgtgtggataatagaatatataagaggaatgggctactcttcccatagcctattggttttgagatggaaccccattcaccttattcccatattctaacatggtattagagcaaaataaaaaaagaaatctctagcgactatccaaccccccaaaaaaataaaccgatcgaagtagagccaaaaaaaagagccac

SEQ ID NO: 385153 - DNA, 2449 bp, Cannabis indica
aagcactttgccactaaaccacttactcgctaatttaatatatcattataaataaatccaaacatgacacttcaaattaaccttggacataaagaatacaagtgaacataatactgcaggaaataggaaatcatatggtataataacggctgagaaatctctgaaatttttagtattgctattattactcacaaggagaattagactattagaggttgaatgtatttcagatacaaacgtatgtgatttagtcagtttttctgctaagtgctatccaattgtgagtagttactaaataattaacaggaatatacatagatggtgtgttagaaactttattttggcctaaattatctttttaatttgttttaaaacatattctttcattttataagcaccaaataacattttttttaatgagaagtaacacaacaaaaacagggacatcatctatgcatttcattttcatttgaaggataagaactatacgaagatgatcttatttttaaaggctttagtgagaagttcattatttcaactttgttacatataattttactaatttagttacgaatctgttgatcttgtgcggcccaaccttgagcagatccaacataggcttcattaagtggcattttatggaccaagggtgggttgggaacattattaccgggctcattatggacctccctaggattcgtaccaggattagtattgggagcatggttgtggtcaccaatatcattcccaacatgggtagggccgttggggtagctgccaccagtataaggtggacaattgttgtaaggacatggaagaggcccattgaaaggaggattagtaggagggttaggaggaagaggaggaaaagtgtctctacatggaggttcattagacacaggtgggcatggcccattaccacagttcccaaccccaggcccacaaccttctcccgtaacaggattacagttataaggcccattacatcccccatacccacagttaccaccaccattgccaccctggcccactccaattccaattccagttcctgaagatccaccgtatcctgatccggacccagacccgtatccggacccagacccatacccacttccgatacctgacccatatccagacccagaaccgtaccctcttccagtacctggcccagatccgtaccctcttccggtacccgagccagtaccagagccgtatccggtgccggtaccggagctggcgaccaaacccgagtggggaacaaggcccatcatcccccagtgagcatcgacatacactccctcagttctagtgaacgagggaaaatccggcggttgttgttgtggagtgtttataaggactctgtaagagtagctgaaactgcttaagcagaggaagatcgtaaggcctaacttgaaagcggccatgtttgatgagtatatggttaatgagtttggggtattcgtatatataataataaagacgtatatatatagaaaagagtgttttgggtttatttcttgtcgagtattcgggatatagtcatgcagtttgtgttgtaaacaaaatttaagattgaagagagctgaacgaaaccattggcatggttttctcactttcttttgcatttttcataggatcgttcccagcttttcttccctgcgatttgcatgcttatttatttatatattaaataatatatatatatatatatagagagagagagagagagagagagagagagatatttggcttttgctaaacatatttaatgttgtacatgtataagatttccgggttacaaaattattcgaactttcgtgaagatatacagccaaaccaggtttgagatttgtttaaagtgttttattatactagttaggagaggagaggtcactaaaagtcctttgagagaaaggagtttaagagaggaaccctttaaagtttaaactaaaaacattcatctactttaagaacaaataaatgattatatagatcatttcttttccttgcatgcaagagtgatcatcacttaaatttaaatatggtttaagttaaatgaacacaagtgaaagtattatataaatgagttttgaattatgtttacaatccttaccgaatatgcaatagcgcaacagtcaacaaacatttttcatttttcgtctattaacctttaaaccatacaatttgtttagccaaaaaaaagaaaaacaaacaaacatacaatttattgttcatgatgttacatgctaaaaccaaaattgacaaagatttttttttttaaatggaaattgataaagatttaaatattagtcaaatatttcatttactttgtgttgctctgtactcgtgcaaaaatataacattaaatagtcctgttttatacaaaaactagaagattttgatttatcgttagccttctctgttagacttttatttgggcttacat

SEQ ID NO: 385154 - DNA, 834 bp, Cannabis indica
aaaaaaaaaaaaatgatgtataataatgcaatatgttataaatggagtaaattaaaaataataaagtttcggtgaggtatattatattatatctctactcatgtattgttagtgttctcaatataatatagcccttcaaaccctagtttatttttcttaaatgattcatatgattatactaattaaattcatgataagggcgtatatttaagttgtccttattaattataagcctattttttccttacaattttaatttagatgatccaaaattcaaatattcattctcatttatatatttttttggtaaatcttgacttgcttaaatattatatatcaatactagtctactaatctcactatatttatttgaactttgatttaagattaagttccctaacaaagatatttagttagaatgatgataatataggaatgagaataacaataggaagaaaataaatcaaaaatcaaataaaacataaaaaaaaaaaaattgattaaaaacatattaattttttctcattttgaattggaatgattttttccttttatttcaaaaatagaatagtaaatttattaaaataattgaaaaattatttcattagaatcatattccaatactttgaaatgtaaccaaacaaaaattaaataaaaattatttccttctccaatcaaacgttaacttagggtagcctttaatttttaatactaacaaataatttcaaatcataggactatgttagtaaatgtcctcatttcaaaacttgtaaagaaataatcattttagactatttattatttatattatcttttgccacattaaaaaataat

SEQ ID NO: 385155 - DNA, 4229 bp, Cannabis indica
gagagatgctctgaccttatggggacttagaagaatgtacaaaataagctagagtagctccacttttataggaaatgaagttttacgaaaataataattcaaaaatacaaaaaatatatataaaaaattatttttggctgattttagccattcatgatgattaacgatgatccaatgataaaaattgactttgggtgaaaattatcaattatcggactttgaatctcatcctcagatggtttttgcgttatttgttggaaaaattaaactttgttgagaacaaattttattctttaaatctttaaaattactatgtgagtgtgagacaagacttgatagatcattgaaatagctttaaaacgcaagttgaatcgtgccaatcagatcgatattgagtgagttatgaccattttactgaagggttttcagcaacctgcagccaggttgacattctaacgtcaacctggacgctaggtgagttccaaaacgtcttagaattgtattttttgatgcctaagtgatattttgacagcacttagttagatttagtattttagtgaagttttttgccaaatctcaaggatgtcactgttttgtaaaattgggaagactcgaaactccctgattttgtcgatataccaccttgttgaaatggtgaaatataaaagtgtaaacttgatctgtcacaagttgtagctctcgtttactaagaaaaaatagttgaatgcttaaaacggaatcgaattttaataagaagaaccaagcgcaccaagtcaagtgtcaacctaggcactaggtgcttcacgagactcgttttgatatacttctatggcattcgagattgcgaatgaggtctcctacccaattttctaccattttaaaagaattcatagagtaaaatttgtgtttgaggagcgataacatgcgaagcaggttgcatatcaacctgggttcaaggcctagtgccatgtcaacctgggagctgaggccatgttctggctccctagaaatcttgtttgctccccaagatcactcatatctttgttatttctaatggcaaaaaaaaattcctgaaacacatttttaggaaaatgattggaaacagcacaggatgacaaaatgtcaacctgggcgctaggtccagtgctaagtgtcaatttgggtattgggtccagtttttggccaccaaatgacttcgtttgattcccaaaaatatttatatcttaatatttgatgaaaactaagaatatgcacgaaagacttctctaaaaaaaaaactctttggaaatggcctaggttgacaaagtgtcaatttgggtgttgggtcccacttttgaccccctgatggctctgtttatctcccaaaagcactaaaatcttaattgtagatgaaaacaaagaatatgcttggaagacttcatctgaactgatgatgaaagtggcccatcttgacaaagtgtcaacctgggcgttggatccccgttttagcctccaagtcgatttgtttctcccctgaaagcacttgtttcctagttttgaatgaagacgaagaagattcttgggatagttctctagttacgtggtttgaagtaccctaggttgacaatatgtcaacctgggcactaggtgcttgggacacctggtgctctaggtgctcaaaactgaaagttctccgattttaattttgttgcctcaaatatgtttgtgataggtctgatttatgtctgagtacaaattttggctcattttcacgcccaaaaaccaaaaccctagtggaattgttaacctgcgcactggacgctgggcacacaagttgactttcaggttgttgttttgtgtattttcatcttccaaaccttggatttggatttttcatgtcttcatggtacaaaatactaaaagatagtgagttggaattaacttagcaaaatccaaacacccattttggagttcctgaagtcaacctgggcgtagggctagggacctctcccaagtcgactgccatgacttgacactactcaactctggggtgtttcctttcttgccacgtgttaaacattgatgtccatgtcaccaagctcagtgtctgtgtaaacatttggcccaagtcaactttacacttgtgtgaggttaacttgatgacatgaactaagcatgtttctctcgaaactactaagtgggcatcaattttggcaatcttaggaaattgtttgtgttcttcaatgtcttatagtgggattaggaattttgaagttctattccctttggaacaaggggattcaaaatctaaagataaaaagcaaggagagaaaatatataaaaaaaaataataataaaggattttctctctcttatctttttaaatttaaatttaaatccactccttgatggcaatagaggtgatcaatagcttataaatagagaactcctctattcttttttcacattgcttcacatgcccaaaatagagattgagttcttgagaatcttgcttcatcaatttttcaagtgttcttcaattttgtaagtatataatttcttcaaatttttgaatttttctcttcatctcctttgtaaatctcagtttaaggattttgggtcttgttggaaatccttaaactccattggcaagccctattaaaacaaaaatacgattttcatgtgagccatttaagctgaactttttccttcctacaaggtgcagtttgtgttaacttgcttggaaaaagttattttgagttgatatttagctactccaagttgaggaaattcaagttgagagtagacatgcctcgtgttagaagaattacaagaaaacctaaataatataactgagatactgctcaattcattcgtggaaagctcatggtaccaaaatctaaagactaaggcacgtggtggaatattcatggccactaagttactcactgctgctattgaaaatgaggacccaagggatcgagccattgaactaagacatcttgtctctagctccattgctcagcaccaagttgaacatatgagatgagtactcacttcttgaaactattgttagaaaaccaaggatagggactccaagtggtttctcaaaacccttgttgtagtgcttggtctaggattcatatgaacgcaggtgcattctcgcctagctaattactttggagtctacccttaacaaccttaacaaataaacccaaattattatcggattttatcaacattcttcatcttttatggtctgcacaattggcccattccaactccgcatgagatcaacttcttgtgtgatctgaaaatgagccctacttgaaagaagaatggcttctaccacttccatcaatttagtgtgtacattgacaacatcactaaaagcaattgtgacctctatcatcagaattacttctacactcctatcatcccttcaagacatgttatttttcaaaaggctggtcccttcaaaaggcatgttctattaattgacatgtagcaacgtgcaaatgctatgttgactgatattatcatactagaaagggatggaaagatgttgtttactaacgatcgtgtgggcctgataattacttgtcagcgagtgtatattgatgctcactttgttgatgaatcttattcaagtccccttaaagatgaggagagtgggaaagatggcattgtcattgattcttataaaatgtcgaaagatgatggaggtggtattaaggatgaggccaaaattgagcctttaggtcacacttaggctagtgtatctaagagagttgggaaaattagcaggttgttgataccaaatgccaccaaaccttccaaagtatctaaaacaaccttccacaatatattccaagcaacagaactaagaaaaatactcaaaatcaaaatatgccattaacgacctaagtttgagtttcaaagctcaaacttgtgcaattccatcacaacacaacaaaaccagtatccagaacttagaatcaactcaaaataagcttagaaaaccatattcaacacaactaaaccctaacagcccctatatctcaaagatgcatactcaaaccaaattcaaagcttttaaaacatagaatacaagttctaggggttacctttgcttcaaattcacaaagatcctgctcaatacttagaaaacacaaggttttgctgatgatactccctggttttgcttcagccgaaagagagaaaaacagagttctctatttttatttttt

SEQ ID NO: 385156 - DNA, 1257 bp, Cannabis indica
acatgataatgggtcgcccaacactaacttggcagggagaagtcaactcaataaagtatttgttcttaaaatttctgactcaaactggaatagggactgtaagaggagattagttaatggcgagagagtgttacatcattgaattaaaagaaagggtcaagaccctacaagcaatggtaataataaccgaggatgtcgataacaaagaagaagatctagatccaagggctattgacgagcagatccattcaggccagtgggggaattggaataggtatagaccctaacgaccctaccaagattgtgaaaatcggtaaagggataggggaggaattaaaatagcaattaatttaccttttaagggcaaattaggattaatttgcctggagctattcagacatgatcgggatcgacccgaatgtcatatgtcatcacctcaaattgatctacaatttcctcctaaacaatagaaaagacgtctcctcaattcataaaggaaaaacactctaaaagaagaggttaataagttgctaactagcaacttcattagaaaagcattttaccctcttaggatttcaaacccagtattagtaccaaaaccaaatggaacctggagaacttgcatagacttctccgatctgaataaggcatgtctaaaagattgttttccaatgcctagaattgatcagttagttaacgcgacggttggacacgaactcagattaaaatgcacgttgctaaccaaaaactctgattcttatcccaaacatgattgaatattagaagattctttcatcttcttgaataagtgttttctaattttacaatgtttgtagtggaagattgtatctcttagaagtagacttgtgaatgattttgactttccattgtagaaactgacggtcagttttatatgtttatagtttctaaacgtttagttacggtttttgtaaaataaaaaccgtaagcgatcggtcggttataaatttgtaaaaactgaccttaacagaccgatttccacccctagtcaaaaaattcgttcaaagtttgaacctccaaactttgacatgcgatcctaggctaacggtggcaaaaggggcaacgctgcttggaggttgaggtcatcggtgcctagggattttaatggtccagcgcgtggggtcgaactgtggctgaagagtgatcgccggagttacgccaacaattgagtttgagtttgtgcgtttttcttttgtggtttgaagagagagagagaga

SEQ ID NO: 385157 - DNA, 1490 bp, Cannabis indica
ttttttttttttaaagaaaaagtgtttatcaataaataaaattaaatctcgcggccattacaaaataagtttgctggaatggaggaaacaaacaaacaaccaaactgcttgtgagtagacccactttgtcatattatgggctagaagttacaaattctactggtactagaaaataaataaccgaaaaaataaggagaagtcatattacaaaaagaaaaatagttctcaagcttctaacaagaaacattgccattaagagtattgatcactaccttagagtcgttctccactataataaacttgcaacatttatcctttgccatttctatagctaagcaacaagtagtcgcttcgccacaaagagcatccgagaatgcaaactaaccgtgctaacccaaaccacctcaccattgtggtttctagcaacaaccgcaatacacatgctttccaccaacctcacttttacatcacaattcagctttagccaatcttgaggaggagagcgccaatcctctaacaagatcggagtaggagtagggaaacgagaagctctaaaatctgcataagagtaatgaataacgtcaatacaatgttttgcattattcagattatgattgtgtaccttatcattttggacccgccaaatggtgtcaacaactattaaaacataaagaaagacctcatcaatattaatgcccttattttttaagctccatatgaatttgatctagtcccgcatacaaatacttgtatcatattatcaattcatgccacaaaaaataaccaaatcactcaacattaagatttaaaatgattaattaatatatttaaatcaataatctaatttagaataattaataattgagttgaattaataacattattttaacagattaggtttgcatggtattataattagtctcacattgttaagaagtaaatactatatataagatgaataaattatttattttattgtcaattaattttaagatgaaatccctccacaatatactcctcttaaaataatttataataaataattttatatataatcacctcttctttctaattattacttaagtagtcatattgaatgtagtattaagataaaaaaaacaaattacccttaaaacaataaatattttctttttattcggtaataacactaaaataatacatattttttaaatataatatttataaaccttttcataacaattaagctttcataaagtaaaaattcaatgtttaccgtatatataaaattaagggatattagcggctaaaccacctgaactttacggtttgtaacacttaaccacaaaaactgaatttttggcggctaaactacctaaaccctggttccgttttgctctgcacacctccgtccaaaaatcacagttaagtgccacggtggactgtccacgtgtacacacttgtacacgtggcaaatttttagtggtccacgtaatattagtttttaaaaa

SEQ ID NO: 385158 - DNA, 4053 bp, Cannabis indica
ttttttttttttttaactttgataggtattaaatttaattagctcctctcatacacccgccaaagttaggtaattcaactactttttaaagtctcctctagagagagaaagttgctcaacattgaatccatagcggaaaaattgaggttgagaatgacaatgacaaaatggtgataactgactgtcctttctcaagcaaaaatccaagcagtgcaggccaaagcatcaaactttccttgctaatatttcatcgaatacattacttcactcccaaacaattttccttcacttttatccactacttagtttccatcgaatcttttcttcccgccaaacaggaacgattcagagaattttccttccaactacaaaaaatgggttgtattcaggcgaagcacggcgactccccgacacagagcaggggcagcgttcagaggttaaaagagaagtatggttatgctagcggtagtagagctgaggatgggtctcttgttactgcaaaacaggttgataaagttgtggtgtttcagactgagggtgctaaaataaatgtggttgatcttggttgtggagcggaccttgagaaggagactagtattggcgggagtatcaaaagtaattcgacgaaaactgccaagaagaacaagaagaagcataatataggaggagatgaacttgttaatggatggcctaaatggcttgtagataatatagcttcagaggttttggctggtttgattccaaagagtgctgattcctatgataaacttgctaaggttagtattcatttacttttaatggttctgtcatttagtgaacttcaatctattgaagacatgttcttttatcttttttattatataaatatgtttgtgtcatcttttttattatcaattctactccttgtcccggagaaagaacaaaaccacattttttggtcaaaattctgatcagaactttgtttaatgaagataaatagatgagcattaacagaagaataagaactttcattctaataatccctgtagttcttttacttcttactctcaatttctgtattgtacctttgtagaaaaatagaaaaatgatcaacctgttccaaatttgtagtaagataaggtttgaataggtcattttggtgtttatagattggccatggaacctacagcaatgtgtacaaagcccgagatagaaggactagaaggattgttgctttgaagaaggtccgattcgatacatcagagccggagagtatcaagttcatggcaagagagataatggtactacggaagctgaatcatcctaatgtaatcaagcttgaagggcttgccacatcaagaatgcaatatagtctttatctggtttttgatttcatgcaagcagacttgaccaaagttatctcccgttcgggacagaagctcaatgaggcacaggtttgcattgcccttcatgttccttacatttaccatatgtttacttttttcagaagttaaagaaacacatagataggcatgacattattgtcttgcatacaggtcaaatgctatatgcgacagttgctttctgggctacatcactgtcatgaggtgggggttttacaccgtgacattaaatcttccaatctgttagtagatagaagtggaagactcaaaattgcagattttgggctcgcgaatttctttcctcctaaacaaaagcatcctcttacaagccgagttgtgacactctggtatagagctccagagcttttgttaggctcaacggattatggagttggtattgacctttggagtgctggatgtctattggctgagatgttcattggacgaccattcatgtcaggcagaacagaggtaaacatcttaaatttttattccacaatcatcaacattcaacaggtaaggaagttattagtatcaattcattattctctctaaatattaatctgtgttttgcttcttgtcttttgtttacttgcttatttttcatgatcagctttatgaaaatcatatctgttcaagccacaaataaaagtttttcgtaagatgttcttgaacacctacaaattttgtcttggttattgttttgcaatcaggttgagcaacttcataagatctttaagctttgtggtgcaccgtcagatgattactggaaaaaaatgaaactaccaacaagttttaggccacctcagcattacaaacctactcatgaagaagtcttcagaaattttcctgactcttcttatggtctcttgactcaacttcttgctttagacccagtaaaccgaggcactgctgcttctgctcttcaaagtaatgtgagtacagagaatgtttaccccttccatttttttgggtgaaagatggaagattttgtcataaactgtgtaagagaagtaggatggaaaaagagaaaagttaatcacatctttatataagtatatatgatagaagaacaaatagtgcttgagacaactattgaatatgaagagaaacatatcaatctgtcagttcatgaagattgtttagaggattagccctttcattagtactttcaacgagtctagaagaaaaacaagaagattataaatacagaaagaatttgccacatatagaagtacaactttgttaataaactcttctgcaatttcccttttgattttttaaaggacttgggtcaattatactatttctttctggtttcagttcttttgtacaagtcccttggcgtgtgaactttcagcactaccagttatttgcacggaagagaatgaagcaactcaaaccaatgaaaagaagtattttactttgtaacttaacctttcacattaaatgcttctttctatttgaatataggatatggaaagaaagctacaatagaaggttaagtttcaaagtattgaatatatattttaagatgaataatgtttattttcatgtatattttttaaggaaaaaccttgactggaagactaccatggtcattagcatgtattttgaattatttgggaagccaccagctcgtaaaagtttcatttgctatgaaaaccagtgatccaggctccattatatggtggctgaaagtttattttgttgagctaattgattctgttttttcttctttcaggctgaggaattcaagatcaaagaaatcatctcagacagatcgcagaactcgtcgactggagctacttcgtgagcaagctaagcgtgctaatgaaccttctgaggaggtaaacttgcactgataactttcatttgatgaaatatagtgcatagatttcagaacaagttattgttaaaatcttaatcatgtcttattcattctagattcaatgtattctaggaaaaagaacttgggatgaactctaatctaaatgctcctaaataatatctattttcaagattaattatttctcaatggagaaactttaatcttgttacctataattactagaaaagaaggtaactggttaccctaagattaattattagtacatattgctctaacaagagtggcgtctcgtaaatatctaactacaataggacacttttagctcatagtttttctttttggttttccaggaaaaacattctgatcaaccaaacatgtacaataaccaagatactggcaacagtgcaagtagcggtacatcatcaatgaataagggagtaagaggagaagaaaatcagatgatattccagacatatctatctccaattctgaaatctgaccaaaagagatttgcaagaagtgaggctcatcccaatggtctaaagaacattaatttggatatttttaagaatgtgaaaggctgtactctattagaggcctcagtcactgatctcattaaccccaaggaaggtagtgccttgactcagtatttcaggtccctttctgctttggattttcgaaatcgtgatcctcctgaaatctctgacatatcatttggatcacacaaagaataatcttagttagggcttgttattaatattgaattgaattatatattatatttttatataattttatattaaactttaatttatacta

SEQ ID NO: 385159 - DNA, 2038 bp, Cannabis indica
tttttttaaaaatttttgaataaagaaaaggtttactattgatatcgggttttgattgagagggggaatagagaggcagagtagtcgagggaaatagttggagagattgtgagttgattgagaagcaaagaagaatatggcggaagattcatcatccaaatcgcccttcacgaagtactggtcaggttacaaagagttttggagcgagaggttttcgtttttggatcacttcaccaacttcgtcaaccgtgaaaaaccccttccccgttggactccttccgatgttgaagaatttattgcttccgaccctgttcatggccccactgtgagtccttttttccatttcgatttcgtaaaatatcagtctcatgagattttaatggattttagctttcccatcataaaaatttcatctgggtatacgtgtttataatttttccttcatttcaaataagcaaaagttcatcaatttgttatctaatttcacattgctatggtattaaagtttgatggcaaattctgtgggttgattttggtaaatataacttagggtttgctacattcttttcatttcttcaacaactgactattggtcatgattctttgatgtgtgtatacgttttggatttgtatttctctagttgtacagaaactgatgattgctttgggttaatggttttgttgggtctgaaataaatgttggtctgtttaagttgttagtcttggatgttgagaaagtcctggaacaacaccaccttcttgtcccataagttgttgctgttttctcattcccctttttctcgaaaacagataaagaaagttgttttcctttcagcccgccccacttccctgatacacactatcccttatacttaggcaagattttgatacactttgtaatgtaaagctgcaaatattcttagtttatgtttgacgaagtatagcacaatctttgtcattgttgattttgctagtagaatttaataattttggtctagaaagtaatgtctggagcccatttttatacctggaaacgaaaattttagcctgatcgatttatttttggctatctggaattacctcttaacagctgaagactacaagagaagcaatgaattatggcatcacaggaagtgtaattggagcagtatcaactgctggggttgcctggaagtattcaaggagtttgcatggtaatacttttgtttctttactcttagctctggtagctcatattaagaactactgcaacttggcatgaaattttcatggtggcatgatatgaatagaactcttaaatgattttgttattccaaaattcgctcttattttgctaaatatttttaacaaatttaagcttttctcttcttattctagagagagattgtcttgttcaatgtaagacactaagacattattttttatttctttttacgtcattcaaattacaacctagtaagctattcctgatctaatatatagaaaagaaaagctcatgatcaaattacatctgcaatgccctatcatttagtaccatggggaaatgaaaatctttgaaacttatatcattgaaaatccattccatatagtggtcatccaatatttaactctcttccatatctttgaagattcaaccatatctccctaacatatggcccaagtatagtaaaggtaaccacattccacactatccttttttccaaaacttttccattcctactaaaaccctccatttgctgcagaataatgtgctggccatacccaggaaactaccaataattgtaggaactgcgcttaaataacccccatgaaaaaagcaacataaaaataagtggctttgcattcggaatgttttttcccttacatagaacacactagctatgagatatcagcaaaaattccttgcatccctgtaacttctaatgagtgttcaatttattcaatgctgtcaaccactcaaacatcttcacttttggaggagccaaagatttctatattttttttttttgaaaaaaagagaaagaggccacttgtctta

SEQ ID NO: 385160 - DNA, 3492 bp, Cannabis indica
acatagcaatccataatccatatcaaaagaaaacttgagaacatatatatctccccttcattgaacataagcatattgcaccacatctttgtcaaattccccttgggatagtggcactgaagacaccagatgaggagcagtggacattggagacagttcagctgcagcaggaggattttgaggcactgaacttgaggttggggcagaaacagacgactccccctaaacatgtgcggtactactagacccatctgaggatgcaccaaacaaatctctatgaaactgaggaagagatatatcaattgatggagttaaaggttctctatagtgattttgcagaatagtggacttgatgatgcaaaccattttgtacatagaggcctcaattgcaagatgacgcttttgatccttcttatatctcttgaaaaatgatttaaattcaaaaaaacatttgaacctgccaactaaagttcgataaccctttgaacagaagggagttgcctttgttcatctttgaagcagaaggagtagtcgaagtgggctgtctgtgaacaacagacaaagctcttactgagaataggattggaaacttgataatcgtggttgtaagaggaggatgagcagtcatgagcacttgttggatgagacttggaaatgggagtttgttacgagtgccagtggtttctaaggcttcgagaatcctttaaaaaattagagatgacagattaatggatacatgagttcccacaacatacaaaaactttccgatatcaagagtgactgaggacaaatgggaggtaggaaactaattgtacaaagcaatccgatgaagaaccctatagaatggagttaaatgagtagctaaaattacctgcttttcccaaagatagtcatccctgctagttagcactctacccatcatagtttgatctggattaaactgtttcccatgtgttggatttttgacagactcaactttaaaatgcatgcaatattagaaggaccaaaaggaatacgagtacccctgacaaatgcactcacacaacctgggtgacccttagcaataacagtcctatcaagatttgcataaaatcacgaattaaaatgggatgaggtccagaaaacttagagatagtgtgaacccatttcctaatttgttaaaatgcatgaagttcaggaaagtcatcgaaaaccactagttgttcgaaccataactcataactaccaaaccaatattggtaaacagacggtttggcggcatcaacaaaacattgaatagtttatgggtcgacatttgagataggggcttttggaggatttttctttctggaaccttttgaagaatgatttggagacgagtctgtagatgggacaggaatagacttggtcttggactttttgacagatggttgataagtggaatcactcgatgattttctttttgaggcatgggtttttcactgacttctttctttactttgggaaggtatagagaccttagagggaggacgaggtggacctatcggcttagatttaggcaaagaagtaggctagacaggatacataggagactttgaacttgaggaggaacgagtgactctctttgaaactggctgagtaagtgaagacaaagtagaagcctttttagaaagaggaggagccttaccttgaaatgtgcgaggcttctgaatgacgggaggcaacgacggagacgaaggagatactagccttagagatcaaggagaatcatcaatcatcgacggataagggacaatggctagacacagataggcatcgctgaatacttcttcagtaggacaagtcacgacttttgattcaacaagagacatggatgttggaatgtggatggcttcaggggaaatcgacatggaaccaacattctgcattatagactgagagagagagtcttttagatcaacaaagtgaattgagagctttagactttagggtttcttgaagaagagagtaaagtgaaagaaccgattcaattttctttggccttaagtagaaaatacactggcaaagtttaaccatgcaaagaaaaaaaatgatgatatttatctaatttttttaactttgcaaaatgaaatatacaagcccaaataaaactgttttcaacacacgttttggcacaaaaaatgaaacaaagacatagacattagatattgagagcataaagatctaatgtacaaatatgccaacaacatgtaacaagtgcccaggcttttccaacagagataagaaataaaagcttagagatactcaatatcttgcagtgaaaatgggacaattgacatttgttcaatgaagtgaatgaagccactgagcaagaataaaaatgcacaacatgaacaacaaaattttttgtaccacataagcacaccaaactccaattacaaaagctacacaagaccctgtatctccataggtgtgtttaaagtgtcctcatgtggtccaccaggaagagaaagatcttctagaccactccctcaaaggaacatttttttttgtttttttttattattatgccttttttttaagatacaatctagctttttctatagtacccaaacatggctttcattctctttcagagatgtagccgtcctctttagaccacaagtactaatatagaaggagcaaactacttattagtagatgggtttaagagagctcttcccattgcatcggaaggaggtagccttttatctggagaagatacaagctcaattttctacgagataaatcaactgagaaggtgatagtagtgaaaccaaaaaaaaaaaaaacgtggtcatgtcatgaatttaaaaaaaaacttttacttagagactagaaaaaaatgtgaccagatgaacctgtgaacagtttagatggtacagagaccaatacatgttcttaaatgagtgaaagtttgagtatctaaagctttagtgaataaatatgccaattaattagttgtgggcacatgagatattgacaacatatttgaattaactatatcacgaatgaaatgatacctgatgttaatatgttttgttggagagtgctgaatagggttttcagagatgtttatcgtacttgtactaccacaaaagatggtcaaagtttgttgtgggcatccataatcagtaagaattttgttcagccaaattaaatgagtacaacagctaccggcgacaatgtattttgcttcgacagtagaaagggaaatagattgttgtcttttgctataacaagagaccagattattaccgatgtaaaaacaactccctgaagcacttttcctatcatctagacatcctgcccagtcagaatcattatatcctaccaaagtggtgttcttatcacatgtataccagagaccatagttaatagtccctgcaaggtgattgaaaatttgtttgattgcaaagagatgtgactgtttagggttggcttgatacctaacacatgttgggttttatgccc

SEQ ID NO: 385161 - DNA, 1390 bp, Cannabis indica
aaaacaggcatggagtgtgatagcattgtagaaaaaataatagtaaggatgaaaatatggaatactatagaaattttactataaaaaatcttactcttagtcacaacaaaacttataactaaaagtaaaaaaaattgtgactaattataaattatcatttttatgttgtgactacaaggtctgtggttaaagttatttgtcacaaaaattacaattcattgtgactaaatgtgtttttagtcttctttggtaatatcataatttgactccagtatgtgtgaattgccataaggatcgagttgattaagactgctcaacctgcaaatgatagatttctggtactccatgatctaactctactagtcattttctcagcaagagatttgcaatctactgttgatattttctttgcacatatttgaacaccgaaatacttgaatgacacctaactcctgctaaatccagacacgtctatgattctctgaaattccttttcctccattccactgcaatcgactgctaatttggctttgtttggctgtaatcccaaagtatccgataatagtttgaggccatgtaacatataatagatgcttttgaaatctcctgtacaaaataagagaacatcatctgcaaagcttaagtggtttaatcttaatgattcacattcgtcataatacccaaaatcctacttaaggccaaccttatgtagtatcctggtgagatattccatccccaatataaaaagcagatgagacatggaatctccttgactaaatcctctcttggtctcaaagaagccttgcatagtgccattgaacatgatcgagaatctaggagtttgtacaattcactgcacagaagtatcaaattgctgatgggtacaagatgctttggccttctcaggaaaagattagatggtgtaatgttagcctatttagattttttgaagcttggttcaatgatgtaagctgtatggagaccattcttaagggcttaaaacgacagttaatgaggacaacaaaaatctctctaagagaatcaaaaatatccaattcgtactccaaacatggagcaagaagaactttggtgattgtcatgaaaaaattaaagccctagaatttcggcttctaaatctccattctggtgatgtaaacaatactaatctgaaagaagaagaagatactgaaagaaaaatttttgggcaatggctgagacaagagcttatttggcatcagagatcaaaagaaaccttgtaacgccctaaataattaggcacgctacccaaaatgcttatgaaaccctaatcccctaatcgggattactaattaaaatagcgcagaatttgaacttttatattaaacaaactgaaaataaacttgtaatatat

SEQ ID NO: 385162 - DNA, 1211 bp, Cannabis indica
atggtgttgggtcaatgcagagtagatgtttgtttaaatttaaaattaagttatatctcaaaatttataagcaataaatcgagttgcatcatcttataaatgatattaatattaagtttccactctctaacaagtggcaacacaaatcaatttacttggttatggaattagtgtgaggagaagtgaaaagtgagaacttgtttgtgttgtgaacttgtggttcagtactttacatggtcttgtcgtgcttttaattcaaaccccatttgctaatattcgaaatgctatttagttgtggtgtggtcattggcagaactgttgttcttaaatcatgatttaatggttgtagtgagggaaactagtgtcaaaaagggaacataattgaatgtcatttttgtttttcacagtatttcaactacatgggaatgctggctgttgagggtacatatgataaaatggaggctcttctaagcttaaacattcacccagtagatatcttgttgatgatggctgcctcagaaggtgacaagccaaaaattgaggagttactaagagctggagctaagtatgatgtcaaggatggtgatggaagaacagcaattgagagagctcaaagtgatgaaatcaaggacttcattcttaatttttcagttcaaaaagcatgatattcatacattttcaagtaaaagtttattgtagtttggttttgtttttattttctagttttcttatagcttaatctatggtacctgcttttgccatcgaatcgaaatactttttctttttcttccatgtagcaacttgaatttacattcttgtctacttctctgtttttaggattaaaactttgaacttctgtgtagaaagaaagatatgattgatttgtaattagttggaagaaagaaaagttccaaaattagtaagatgatgttatatagccctttcagtttcatatggttagataaccttagtgtacttggttgaaagttggtcttttcttatattgtcttattgataatctggtccaaagctggatgtgggcttgtttggcatggctttagaagagcttttgaagtctcaaagctacttttaagtttggtttaaataaaatataagaagagcttttttgatttaaaagagctttttagagaagcaatgactcacatacttttttaggaaagacttctaaaaaaaaatacgggaagctattt

SEQ ID NO: 385163 - DNA, 2113 bp, Cannabis indica
ataagggcataaaataatcaactttacattttcacaactatatcttttagttacattttatttacagtgtttgaaaccacctactgtcttcatccgaaacttttttaggccaaaacatctcaattatgagcttcaaatccgattttagctatttgatcatggtgacatggttatgctcttcttttttccagaatagcttatttctcagcagccaaatgttgtagacaaggctgcaactgtgtaaaccagcttcctgaatttgctagctttggctttcccaagccatttgataatatgtgattgtcctccaacctaactagatttttgaaacctatcaaaaggacgcatgcgagagtaatgaagaggaaggaactgtagaattagtggatgattcagactcaaactcaaagaatgagtcaatgtgaataaaatctgattttgtcaaattatgagaattactaagaatagaaaaggataattgccaatctatattccacatgtgagttaaatgaaacgtgggaattatccacgtttcatgagcagtcatatttgaatcaatcctaaaaaggataactgctaacctatatttttataaatagggacaaatttgtggagaaaaagagagagcattttggagattgaatgattattcaaaatcagatattgtattatgtactctaaaaatgtcgctaataataagtacttatggagtatgtagattttaactacaaaatcacgtaaaaatatttggagttattttatcatttattatttattaatttatgtaaatgatgtattactaaaaggctatttattttttattaaccaaaatctgcataggattatgactacgatgaccgctactttaacgaggtcgtctatcactaagaatttttccacttagtttggaatcccagtaagaaaagtgaatcttatacttatagttaccattgggtgcctatatgcgatatagttagggatgagcatttgttagagttattactcttagttgtttatatgtgagcataatttatttgataatctcaatcacataacatattcttaaataattagaacttataatttggatataatgatagagcttttcacaaattttctaatggtgtaaaaaacattcaaatttgacattataattataaaaatttatggccaaaatacaaaactacgaaaacgaataattaggagtcaacatcgactcaccaatttctagggatagcgaagctcaaaaattttatttttaaggccacaaaactcaacaatttgacaccaccctacccaaattagattctaacatcctaacacgatgaaatatcaagttttcaacataaaagtatcatttaaataaagagattaattcaattaatcaatttctactattgttagagttttacccaaacttaagcttgtaaagactagtaattattacactaacaatttagttcaaagaatctaacccaagtcaaattacacaagcaaaaattcatcttatgaactcaatttagtttaaagagttataccactcagcttgtttcataaatttagggttcaaaccaagacaaaaattttagcaaacaatattgcaggagatgagttctagaatcttatacacttaaaaaagtataatttagttaatcataaagcatattaatcaaataatcaaattttacaaatgaactcataaatcaaagacatacaaaatgaaaagcttaacaaaatactcacctccactcaaggaaattatagataaaattagaagctcctccttaaaaattatgtcccaaaacttgaaggtttgttatttgaaagaaaagaataaatggaggagatgaggatgagaaccaaaaggtggagaaaatatatgatatattcaaggaatattatttaggctgtgttgataagtaacaatgtaattattatgagggtagtaaataaataatatagtagtacattctatttaaaataaataaacaatatagtagtacatcttatttaaaatttaatgtgtttggatataagatagtaattaattatgaatttttaatatcttatttagtaaaatagttagttacacgtaaaataataattttttttt

SEQ ID NO: 385164 - DNA, 2279 bp, Cannabis indica
ctgtcaaagagaccaagtgatcagatttcaatgagaaaaatcttgaaacattgtcgtaaccacaatggtggcctaactgctccttcttcgtcttaaggagattgctctaatctgaatgtttccactcttatgatggattctgatgattcttctgatgatccagcggaggttgtgttgcaacctcgctctttgccatgaaaatcattagttggaacgctagggggctggggaatcccaatgcgttcagacacttgaagctggtagttcgttagcagtctccccaggttctttttcttatggaaactcgtcttggtagtaattcaatcgatcgctttagacaatctttaaatttcaaccatggtcttgaatctccacgagtgggattaagtggtggtttaatgttgctgtggaaggataatattaatgtttcgctcaatatttttggttctacatactttgattgttgtttatctgttgatgatggccctctttttcacctaactgccttctatggcgctcctgcaacttctagcagagctctttcttggactcttcttacccgacttcatgatatcgcacctactttgccatggatacttgttggagatttcaatgaaatcctatctcaaagtgataagtcgggtggctctttacgtaacgaggcacaattgactgctttcggttcaaccttggatcattgtctgctcaaaaaattaccatatagtggggaccgattcacttggataaaaaacagaaatacactcaccactattaaggaacgactggattgggttttcactaatcattcatgggattatttttttgaatgtcctgctgttacacatttggattttttctcatcggatcaccgtgccatctctgcaattgttacacccttaaactctgcagcttcatccacacaaaggcgtcctcggtttcgctttgaaaaattatggttggctgatccggagagtaaggatatcatctccaattgctggtctgctgcctcaaataatgatcccatttccaatatcattcacaaacttgattgttgtgctgaatcactgcagcagtggcacattcgcaagtatgggaatatgaaaaaatgaataactgatgcccaagcttcgacaactgctctcaacaatgtccactctcattcacctgaatctgctacctttctgaagcaatcggagtccgttcttgatgatctcttagaaaaggaagaaatgtattggcaacagagatcccgcatagattggcttcaacttggagactgaaacacaaagttttttcactcaaaagcttttgcaaggaaagccaacaataagattaaatttctccaaactgaatcaggagctcgtgtaacatcaaaacatgatatggccgaagctatacaagattattttgcccatatttttcacagccaaactgtagatgaggatgctctacaagccactttgaattgtataccagccaccatgactcctgaaatgaatatgaatctaatcaagcctttcactccttcagaggttaaagatgctctgttttcaatgggatctgacaaaaaccccgagattgacggtatgtcggctatgttctaccaaagacattgggatattattggtgattctgttaattctgctgtactaaatgttctcaaccatggagtcaatccttcaccactaaattcaacaataatcacactcattcccaagaagaaaaaacaaatgttcgtgaaagattatcgtcccattgctctttgtaatgtcatctccaagctaatcactaaagttcttgtggctcggttcaaacctgtcctcccccttgtcatatctgagaaccaaagtgcttttctgcctaattgtctcgtcacggataatatcttagtggcttttgaactaatccatggtatcaaaatcagaacggctggttgcaaaggtgttgctgctatgaaattggatatgtctaaggctttcgatcgcgttgaatggatttttgttaagggagttatggaaaggatgggattctgctctcaatgggttactcttatcatgacctgcctcacaacaaaccacttcaccttccttctaaatggggaaacaactggttcactcactcctacccgaggactaaggcaaggatgcccattatctccatacctttttttgctatgttctgaaggcttctctcggcttctgcaacatgaggaaatgttaggtaatctccatggatataagatcactcgacgggctgagtcaattgttggaaattatttt

SEQ ID NO: 385165 - DNA, 1382 bp, Cannabis indica
cttttttaaaatagagtagaatgattgattgaaatgctctttgttagagagtcttacattttaacatagtaaaaactaatactattataatattatagactactttacttatcatttcattctcgttctacttttagttatattttacattataagatagtatgagaattaagacaactctaaggagtatttcatcaaaaatccaaaaactaatagtaaaataaaagtaaaaaaaaattacttagtgatttagagattgtgagtcaaatagaatcacttgatttgagaattttgagtcaaagaattggtgaataaaagtagtctaacatcttaaggaaaatattacatagtctcgtattgatagaaacttaacatcctactacactcatcactaaataattttgagataaaatatcatactctttaccatgcacctcatttttcaatcatatttgcacatttctaggattttattaaacttttctcatttattttttccctcttattactgtattccttttttatttaaaaataaaaaacaggttcgaattaatgatgagaatggaaatgctcctctgtttaacagtggacaaatcggacatgataacgcaatagctagacatggaattcatggtgtctacagactatttaacataagcattccaggatctctacttgttaatggaaaaactaatacaatatttttaacacaggccaacaacaccagccctttacaaggattcatgtatgattatattcgtttagaagctcctcaaattgcatcacatcacatcacatgatgtatattactattcatctcaaattctatttactatatttacccttatttggatcatcataacttattataattatgttataaaatgctatatttggatgtctaaattatctagtcatgtatctcaattaattcttgtttacatttaccattaattcttatcttctctttattttgatttttaattttttttattattttcttccaaatatctctattaatcatttctacaattttaaaaaagaataataacttaatcgttaattgttttattgaaaattaataccactgcgaaatcctgtcgaaaaaaatcagctattctagtcgttaataaactgttgaaatcattcattttgttgacattgttgtgtgatgttgttgcttccattgtcgtgtcatccatcgtgtattacaaacacaaggaattgttttgcatcatttttataggattattattctagcatagaagatgtagggtttaattttgaaataattacatgaggcacaattttttgttaaaaaattacaattttacgtttacagaattttttttaaatttttacggttttccataaaaataaca

SEQ ID NO: 385166 - DNA, 1206 bp, Cannabis indica
ttaacaaaaacattaatttttttttcatctttttaaaataaaataatcattttaccgaaataatggaaaagtcattctgttggaatgatattctaatacttgtaaatacaactaaataaaaaaaatagaataaatctttaccattttattaccttcaatgaaatgctagttaaaaataaaactcagtgaaaaaaattttgagacataaaaagtgcgccataagaaaacattaatcatgaatgtcttcttgaaaacacacatgaacacaagacaggtagtcaagccctcaaactcatataagagtatatctaatgtagtgctatacatgtactttatatatttttttagttcacgttcataaaattaaactacaattatagtgtataatgtgatctaaatttgatacatgtttaaagttgagctaaatttgacacacaatataacatgaactaaattttactgcacaataaatattatttttttgtttatttttttcactaattaatgcaattaataattttttatatttttatttatatatttaatatgttttttatatactttcaataaaaatttaatattttaattaaaatttttatcccattttattaaaataagatttattttacttttagtgcattgtataattataaaatttgaatcaaatataaaattgactgaacttacatcaattggatctaataatcatccataaaaagagtttattttactaaagtgtgtgtctagcatatgtggtacaaaacacaatagtgcaaccaagataagaatgatgcagtgaacaattgttaatggcgttgataacattacaactgtctgattcaaccattacctaagaataaccaagtctagagcataaaaataagctattgtaaggagaaggagcctcatccacaacaagagataaggtagcattgaaagacaaaatagcataaaatttgatacctcaatgaatcaaagaacccaaaccgatgttctgtttattagcactgatggcagaatccaagttaaacttttaacaaccatttcgaggctttacccaagttgaacctgtataacacaggcagcagcgagactacccacttagtgccattttttttttttctaattaaagcgttaaagttgattttttatgcttacatatacttaaatttttttcctaaaatcataatatttgatatttgtgga

SEQ ID NO: 385167 - DNA, 2532 bp, Cannabis indica
actgtgttgacaatactgtaattgtgaataagtatatgtttctcggacttaactgatttttgtgcatatattaaatatatatatattaaactataagcatgaaaaattcatgccaacataaatcacttcaaacttcttagattgataactaatcagattgtaatgggttttatttagggcacaaaacccaacagttacaacaagtctcccaacccgtaaccaaaaaatgtcctttatgaagtcgtaattaaaagtatttttgttttttttttttcagtattatcttcaaatttatccaattaagggggagttatattgacaccctatctcaaaattttaaaagatttaattacgcatttaattttttgtgaaatgactaaactagaccactttagttatcaattacgtatttaaagatttctcaagggttattaatagggttatttatataagagaaatgctaaaggacaccagtggtgcacaacacccttttatgtgttaatatcgctattggtccaactaactattgggttttaattaatttaatataatagcttttagggagtatcgctagccaatcgcaacgcgacatgttgaaaaggtgctagacacaacttgtgcctaataacaatgctctttatataaatatggtaaaaacaaagctaatttacataaatatgataagaaaatttaataggaaaaaatatagcatttaaaataaataacttgacatatatgggatatgccactttctattaccataaaaaatattaaaattacatttatattttatttaagaaaaaaaatagaaacaaatgaaagaacagtgatcgccagagttgccaccgacgactgaaaagtcactagagttgtcaccgatctcgaaaaagttgtaagagttgttgttggtgccgaaaaatgcaccgatttgttatcggtgccgaaaaaattgtcagaattagcattgtcacttgaaaaaatcatcaaaaaagtcgttagagttgtcgccatcaccggagtttgacgttgaaatcatcaccggagttagacgtttgaatctgaatcacagaaaccagttacatttatcagttagtaaagcaaccaaacaaccaaattaaaacctaacacatcaatactagtttcttaaaataactaaataaaaaatctgaaacttatgttaaaaaaaaatcaaaccaaacataagaaattggttatttcaaatagaatagaaactgttgttcaataatataatagacaacaataaaattggttttatacaaactaaaacactacaaaaataaaacatacatatatataaaataataaaaagaactaaaaacttacaaaatcagaaaggaactttccacaagaattgagagtataaaactatattttgatacactaccatcattaagaacatatatatttttttttgccaataagtggaacaaattcagaaactgtcttctcaagttcaaagtcatcatctttttcttctttatggctagattccttctaagacttctccttatcattaccctaaaacaatatacagattactgaaagagtaaatcacaattcaacattataacttataaaatatatgtgtgcattcaaaaaccagtttcataatagcaaatttaaaactagttttaatgtactatacctataaatttgaagatagtagccaatgtgttaccagaatcaaacactgtattgccattgctgatagccaaaattttagcacaaatgccctttcatgatgagtttggtgatggtccagactggaaaggttattttgacggcaatgatgatgtaagagacagccaagagatagaggttcctactttgaacgtgactccactatcgtacaaaatacccatgcaaccaacacttagaataagaccccgtagagaagattgccaaacacctggtactactagtagtcgtccagatggaaccagtaatggtagaggaaccactgatgctggcagtcccagtaataattgaggaatcactgatgcttgaggtctcagtaatgctggatttagtgatccattttcttctttgataagttacaattaattgaaggagaaaatgtttatgagagaagacattgaggattacagtcattatactgttggaagttattttactaggatctagatttactaacatgtatatttgattatattttataatctaacatcctaaacatgaatttcctaaaataatgaaataaacacagatcatgttctagaaaactttacattggtggaagcagactattatggcttcttccgttcagatctctaacccttgttctgttctattgtagagtaataacaagatttgaacttagatctccttcaggtgttggaattcttcataatcttccacactgtgatcgagtactaacttaatatgagtgggcaaggtacttgtcactatagggactttgaattttataagagagaaaagagagaattcgaaatagagaggagcctctcttttagttatctgacaaaaaaa

SEQ ID NO: 385168 - DNA, 2053 bp, Cannabis indica
ttttttgtcttctagatttcacactttcaaagagaggtaagattattagtgtcaacgattctttcattcttcttacatcaaataaatatttagcggttggtttaacctatatattttgaaaccaacatttcttaaacatacaaaacaacagaggaacaacctaataacaacattagaaaaaccatgacaaccttagtactaatggttttaatgtttttgctttatctcgtcgaaattaatagttatttctgcctgttctcatattactatggtagttctatccgtgtgtgtggaagatagaggccttattttatttttttggtgtttacagtgtaaaagaaaaagaaaagcaggacagtataaatataattttttcggtgtgggagtacaattgtaaatatttgctcaaaatctaatattttagtaagttctccattttaattttccacgaggactattgcttgctacctcaaactatagtattgtattatttataacaccgttagaaaaaagaatttttttaacaatatacataattatcatctaatttataatattacctataacgttaatgaagatgaaattttaaccgtccgtatcagcaattatgacgtgaatcaagtttcagttgccaaaaaaatacaattagaaaaaatagaaaacaaaaatgaataagcgcatgcaaatcaaacaatcaaaccaatttgaagactgatatgctaacctttctataaaacccagaacaacatcaattagcaacaaatcaccaaatccaaaacaccattgtcgaactagcaaacgaaaatcaaaagaacaccattgtcgaacgagcataaacatcaaaaccataaagtattagcagccatatccactatcgagatctaaataatcatgaaaaatagaaaaagtaaccttgatcaccattattatacaagatcaaagttctcaaaggtggagacgaagactacctgctaaaaaatatagaaacagagcatctataaacaacttgcaaaaaaagtatgtaaaacaaattcactacacatataaactaaataatcacacacaaaacaagtttttttattactttaaatgcccaaagtaatcacataacaaaaataaatacaagaatcagaatttagaaactttaattttttgtataaaaaacagagcatgaactaagatgatctaagcattctagataatatattgctactctaaacgttaaaaaaattgaacaatgtgtaaacattctccaagatagaacttacataaaaaactttaagttcttatctattcattattcatgtttgaatcaaaaatgtataaatgtgtacaaaatgtcttatcataaaaatggtgactaattctagagtaaaaattatccacaatatgatttttataaaagatgcaacataagtttttaagttcttgtctgttcattattctattttagatcaaaaaaactgtacaatgtgtagaaaatgttttatgataaaaatgatgacaaattctacctttgatttgagctgtgaaatactaaatagacaaacgtaccttctctacggataatggatcctcgaaccatcattctttttaacaatgaatattggctggatgcatagtctatgaactcacaagaatattattactaaaaaattgtagttatgaaactcttcaaagtaaaatctgtgagtctttgggattggacacaatgacatacaaaatttatgtgttagtttctatatcactcataaaatatgcaacaacaaaattcaattctatagataaacatattacatataattataagtgtataactatagatctaaagaatacctttgttgattcaaagagaagaattcaaatggcggaagcgtaccttaattcatagatagtgatgatcttaatccatcttgtagagataatctttgtggtgattttgggtaatgatcttccaagaaaacaagacttaggttttctaattttctctcttgatgggggaagatgagaatagaaactagctcttgtttcttggggaccactaccaatttat

SEQ ID NO: 385169 - DNA, 1104 bp, Cannabis indica
ttttttttttttttacttaatttgttttcttcatagatcaattatatatacagattgggaaatataataataataattgagctgacgtatatatatattattattattattaataattattttgaattattatatattcaagatatataggacccgttatgatggagagatgagatcctaagtttagcataagaaaataataactagctagcaatgtagctaggtaaagagatctcatatacaccaatcatcatggaaattttccacgcaagaaataagtcatttaatttaattacagatataaaaatggaaataatactagatatttacttcgttttactttttactgaattaggatacaattcaataaaaaacattaatggaagccaataagatggggaagagagaagataatatataatagatcaacaagagaaaatatagctagcttttagaatttaaagaattatagaggtaaatatttttcacaccgtatatttaaaatccagtaaaaagaatgtttatttgtattgtaaaaaacttcatcaagatcaatctttttaagtgatcaaagattaacaaaaatatgaaaacaattaaacaatcaagaaagcaaataactatagctaaaacacaataaattaataaataaaagcaatgggtccaagttccttatgaaccatactatttcaatatagagattgtctatttatgcataacaaattgataatatcaaaataagaaatttcatttgtgaagctgcaatacattgcgacatataataaaatggagtctattgcgcataagtaaaaaattttgtatttttgagatcttgatgataaagttcttactatttccttatgaacttgagcatactattattaaaatatttctaattgaggaaataaaataatattattgattctgataaatgaatattttatattcattgaatctggacagaatcaattacgtaatattctatatatggtcagatttctatattcattacctgatttgatttcctgaattaattgtccaaatattctgacaattaatgtggcacagatactgatggagtatctcacctataaatatagggtc

SEQ ID NO: 385170 - DNA, 891 bp, Cannabis indica
tttgaggcatctcattgccaactagccgaaatagggatcgctagtgttgacactataatgagagtgaaaattactctgttagaagtggctacgcattggctttagagctaaaggcagaggagattggaaattcttcaatgggattggctcattggtggaatggattgtggaatttgaaaatttcccaaaaggtgaaattttttctatgtaggttatattatagagctttgcatattacaactcagctagtgaaaagaaatgtacatgtgtaaaagtaatgcttgagatgtggagaagaagcggagaaccacgagcatgccttgatctactgctagtcgttgtccagcttgtggagtcacatgggtgtatgggggaagatctcccatcaccgttctgttcctttcccagagcttatgcttgtacaatttgatgagctgccagatagagatgttctcaaagcttgtgatggtgtggtggtggctatggtttgataggaattcaatcctgtttgggaagaaggttttaagactagagatgattgatgaacgggctattgtagtggtagaggaatttcgtggtgtgagtgtcctagtggttgctcagggagctaggggaagctcttccgcatcttcctcgttgggtcccaccagcgatgggaagttattctctctgcaccaatacttctatggttatgggaagggggtttgttgggtttgggtgtgtcattcagggtggtgatgtagctgtgtgggcggcttgggcgtttggggcggttgtaaagtttgaagttctggtggttgggtggtgggttgcttgattagcatttggtattaatttgggcagttaatttggatttcaagctttctaaaattgagattgattctgctattt

SEQ ID NO: 385171 - DNA, 1119 bp, Cannabis indica
aaacactgccaacaaaccttaaaggaaaaagaaggtaaccaatgctccaaggtgaggcaatcttattaatccgagaggtaaagctatgcagaaagatatgacttatgcttaggtacaaaggcctactgttcgacaaaatgatgattacccaacaggccaacaggtttgttgacaagtgtgatgatgatgtaaaagaaattcaataactttttgatgagagtatgaccacacagaacctccaagtgtgattgaatgcaaggagggaaaaatctaggggcaagaaagcaaggcctcgtggaaacgatcttagaaatcacatcgatgatcgtgtttgtggatgtgaatctcaagaagccacaactaaatgtcttgaagaacaagttggaccctagaggtgggctagaaagaataattgagcccatataggatgtagaagaagtttgcattaatgaagaagatcctaccaaggttatcacagaatgaagaaatttacctccagccatcaaagaaaaaattgtatccacactgaaaaaagaatagtgatgtattggcgtggaaccattctaacatgactgagatcagtccccatgtgattttccattctatgaatgttgacgaaaaaatagatccagtatgttagaagagaagaccactagatacaattccattgtaagcattgaaaatagaagttgataaattgacaaacatagaattccttggggaagccttgtatctattctggcttcccaatcgagtattggttccaaatgttggggttattttaccaggatctagatttactaccatatatgttgtttaacatcctaaatatgaatttctaaaataatagaatttaaacacatataaagttcaagaaaccttacattggttgcagcagaattaaatgactcattccactcagatctctaacccttgtatcctttttgtagcatagtatcaccaagatctgagctcgattctccttcagttgattggattcttcatagtcttacatactatgattgagtaccaacttgatatgcgtgggcatgtactctatcactataagggttcaaatttgaagagaaagagagagaaagattcgaaatagagagagaa

SEQ ID NO: 385172 - DNA, 689 bp, Cannabis indica
aaaaaaaaaaaaaaaagcaaattatattgagactagagagtgaaaaagaaaaaatacttttggatatggtattggtggttggtgggaaaaaattttgtatgggaaaataaaacttatggaagaaaaaaaaagaataatgttaaacagtgattagctttattattaatgtagttttttccctttgtaattatcaacatatatgaattttgatctacttagacagttgcaattttcttctttgttagtatgctcaaagggtcctacatattgtactgtgtaaggattattttgtgtgaagggaatagaatatttttagcattccctttgtcatggtatcagagccaacagtacaatatgacatctaaaacaagtggtgggtctacccattcttcaggggataaccaaacacaaaaccctcaaaaccaaaatgacctacctattaatacacagtcgtctcatacaccacctaccctcccaccttcgtcttccttagtcatcgaacatttttcctctggcttcccttctgtcaaccaaaccatcgtcgttaagcttgatggctccaactatctggtgtggtagtgttaggttataattaacctatatttcaggtctttaaagttagcattatctcgtctattggtgtcttttggagcagttttacgcttgattttcattatttcaggttcccg

SEQ ID NO: 385173 - DNA, 1440 bp, Cannabis indica
ggggtgagatggagagagagagagaattgtgagggtgttttagggtttgaaaaaaagtattagttttttaggttaattttggttaattataaatttttatttttaagcatataaaatcaaaattccccctaccttaattgatagtaatgatatgtgaaccaaaataaaaaagttaagaaaaataaattaatttgtaaagagaaaaataacaaataaaaaaagaaaagaaatggagagaaattaagatttcattcaattgtaaagttaaaagtaaaagaatataactaattaaaaagcattcaactaatataaaagactaaaataatcctaaataactatttaacatatggtacaataagtataatttccggaaaatcattcattttgtaaggtattttgagctacatgtgataaaaagatgttataaaatcttctgttgaatgtggatacaagggtatatgtaactggttaattctacattgagaatcacaaaccctttttctttttctttaataaactagcctgctatggtacaattgggggagaacactaactaagaagctgaatccaaagcaccgatcgtgctatataactcacagtcacgattcagcagatctcaagccggtagctcgagtttaacattgttcttccaactgcataaagtgtgagacaggtcttacaccattttacgcaattataaacatttttatttgaaaataatatttttgtgacatagaattttacctctggaagtaataatagaagaaatcgccataaagcatcgtctggataagcccggctatccaagctgaaaaggcagaaccatgacataaaatgttatacagatgagcatgagcttacatttataataataataaaaaagtgagaacaaaataaactcatgtgagtaggcaagaagggaaagaatcatacttatccaatggacatagtggtcctccgtaaagtagcgataaatccagtttaatatgtaaaacgctcgatacgcactgcaacaagaaaaacaaataagtgaaaaagtttcgacaagttccaacctacaatgactaagtgatcagacatgaaaatcgaaatcagctcatccatgataaaccctttctgttatgcatgcagatgcgatctaaaacagccatgttgactaatgaatcatctttgaagatatattcatacaatactttgaaaacataacataattccattctaagtaataatatccatcaaaacacaatacaaaaattattgaattaggcaacccattgtgcatgatatctaggatgaaagaaatcaggatacagaatttgttcagctaagagagatggagttagtttgcaaaattcataaacaaccaaatgaaaaaaatcccttgttgcctctagactcttccgatgaatttttcttacaagttttcagttattttgaaaa

SEQ ID NO: 385174 - DNA, 1297 bp, Cannabis indica
cattagttaatactgtttacaacttattctctccagaccataatgtaaataaaataataaaattcatttatgtaaaccaaaagataaagataataaaattgatctctaattggcacatttatgagtaattttattaggcaataatattatttatatatgaactccacgagatatttattatgtgactaataattcttctgatataataattattaaattaaaatactttaaaattgataaatatgaaattataccaatacactctttgaaaaaaaaaattataccaataataattatcattttataatggtgtgaactgtgaacaccactaccttttatcaattctgtaaatttaaagtacctaaattttttaccattaattgatgtataccattacttattaccatttatttattgtaataaggtatgtaattttcataagaaatttattaatatgtgccagttacaattatcattttgccactcaatacctatgaattctctaaatttaaggtacctaaattggttgtcattattattaacctaaacccatttatattaaggtacataattcataggaaattcattagcattagcaagatattgtatatagtatatactacaccatgttctttatataggtacgttgggttcattttgactgtaacttttttttttctcatagttaaattccagttgtatatcaaactttttgtgtgttttttttttaaaaaaaaaattagtaataaaaagtaattcaaaatattcattacacaagtaaattaatacgtacgcatgtaaatgcagcttttttttagaattttgtttacagtattataaatattttgaaatttttgagacacttcattaattttttatgagaaaagaaccatgtacattttagaagaattttaaatggtttaccgtgtctaaattaaattacaaataatttatttcatgccattttatttatttttgtggaaggcttgtgatgactacaataaatagttctttctaaaaaatgaaaataaaattatttaggtgcttcaataaagaaacgtataaatccaataatcagtataaattattttagtattccttaccaaagaatcctatacaaatattcaagatgaaaacatttcaaaaaatgtcttgtatatttattttattactttatttttttagggctcgtttggaacgccgtattaggtcgtattgtattgtattgtattatattaaattgtattttatgcaatattttatgtaaactatatgtggtattaacttttatggacac

SEQ ID NO: 385175 - DNA, 699 bp, Cannabis indica
gcgtgcatgcattttgcggttattagtctcttgaaaacagtaattaataacatttcattgtgaatgtcattcatcacatgttttaatgtattagactaaaaacagtatatgtgtattattctcattcattgaacgaacaagtacatgttataattttgggaaccactaggtttttttttcaatatttttaggtatatatatatgctattaatcatcacttaaagaccttttgatatctgaattccattatcttccacttccaatatcattaaagttgaaagaaaaacaaaagatttatttgcatgtattttcatttcctcatatactaaatcagattatttaaagctagcttttttttatatatcattttttctcctatatcttctcatcatttttacaattatattcatcgtcattgtatttagtcgcaaactttgacatttaattaagtaatgcgcatgcgtgtgatcttagtttcgtacaaaataaaagaaagaaggatcatcattcattagaccatcactaatccatactgtaaaatttgtcttaagttttgctaaaaacatgagttaatataatctaaaaattaaaacttcatcaaactatatgagccaagcaattaaaaaatattgtataatgaactggtcattataaactcccctttggggtgagaatataacacacacatgatctaccttc

SEQ ID NO: 385176 - DNA, 623 bp, Cannabis indica
atgaaattatattgtgtacataataggagcaatgtttggcatgtggttaacagtgttacccgtggcatgagtgttccacaagttattatattctctactcttaagaaaattgctaagcggcaataataatgtcaaatatcattttatatggtatatttttgttttgttataatttagaaatgagttttacataatttaattatgtgaaacatcaattaaaataattaatattaggcaccagtacattggcactttataacaatattctttttctaatcattaatttattatatttaaattcgaaaaccataattagacttagttataatatttgagtgtacttaacacacatatatgaatatatatatatatttataaaatcctatttatccaattattaaaacattatcataaggttatactgtcaaagcttaacacataactatacatttgtgaaagtatgtattattcaacaataaatttaaacaattcatcatgattaaaaattacaagccagcaaagcatagcaatccatgaggatttgggtataaaacagcctgttctcgtgtaatataaaccaaacatataagcatttgccgacatttatttacatatttacataa

SEQ ID NO: 385177 - DNA, 1720 bp, Cannabis indica
tttttaagtcaattgttatctaacattttgcaatgtatgtaggttgtcatagatgggtactcagcaccattaacagcggggaattttgcaaaactggtaaggtagttgaagctcactttcgcttcatgaatttgtggatggaccatatgcattttgtataatctttaatttgtatttgaatttatgcttgttttcattacatttatagttttcatatctgattacatcaaaacaaagaaatcaagaagataaaaaaagttcatggtttaaggagcgcaatcaaagttttgttagactcgtttcttctatgctaccgggaagttgactacacatttgatgatatataatttgatactagtgttaattaaaattttgtgaatcttcttgtatgtcatttaagaagaagaaaaggctaggtcagtttcaaatttatattgtataatattttatttttggtcaatacacaattttttaggtaattgatggtgcctacaatggatcaaagctcaacttgtccaatcaagccattctctcagagaagggacaagataagaacaatggtaatagtgttcctcttgaaataaagccatctgggcagtttgagcctttgtacaaaacaacactaagtgtccaggtatacttacataattttctgtaaattatttataattactgattgttgttacttttttctggtagtaatttggtcatatttgctaataaattacttttctttgtccttcattcaaggatggagaattaccagttctccctctatctgtttacggtgcagttgccatggctcatagtgaagtttcagaggagtattcatcaccctatcaatttttcttctatctgtacgataaacgaaatgtaattctactcttaaccctgaataatccacatcaaagcatctgatttagaccttttttttttctctaaacaagtagtaaaagtaaatcatttgcttcgtgtaggctggcttaggagggttgtcgttcgatgaaggacaattttcagttttggggtatgtaatttaacccactctgttacatttcttgcacatttaactagaaagagatatgcattgagctatatttgatgtctttttctaccacattttccacttttacatgtagatatacaaccatagggagagacattctaccgcagataaagacaggagatgtaatcctatctgcaaagctggtagaaggacaagaccgtctcatactgccaagtgagagttgattttgattcaattggaccacaattctcgttctttagcagcctgattttctttggggcaggttgtgtttcaattttcatttttttttcacttgctgtattcttctacaaatctctagttaccaagttcctggttttgaccatgtaatatacttttcacaacattattaatagataagtttgctggccatctctcctctccaagagtttaaagtttgttcttatttttttttaagaaaatttagtaacacatgtttggtctcattttgatcatttaccaaagaacataaaaaaatcttaatgtttgtatctcatataacacatcaatgccttcttttaacgataatttaaaggctaattagtaatttttctccttgaattttgacatgtactaaatcgtgctccctaaacttttttggccgttaaaaattctccagaactattgagattgttaaatttaaggacttttgtc

SEQ ID NO: 385178 - DNA, 1035 bp, Cannabis indica
gcccgcctaccctcagggccggctttgtggacattgtcttacataaaataaatggtagagaattaccaattaattttgagacgaacgcattattctcaacagtatagcgatagcttaataataagtttctatttctcttggttttctatgccatgcaattcttgaattctttttcacctagtttttttttttcatgacatacttgaaaattttgatgtagaaatttataatagtttttcagctagtcattaatgtagagttttcaacaatcaatttaattaaaaacagagttcaatacaatacaagaatttattaattgcaagagtcatgaagacaagctaaactccattgactacaagtcttccattcaagttctccgtttgcaggtagttgactttgactaatttcacaagtccattcccgcctcaaaagtaaaaaaataaatccaaacaattgggagaatctgcatttcataatctctttcccaaaaattaatcattttagcgcttctcccattcttaattcataaatatatcgtaagacaaaaagaacaaaacagagatcgtgagaaagtgtgagatcattactcaatttacaccaaaagaaaaacaaaaaatgataatttgtatttaaatcaagcatgcattcaaaatatgtagctgctattactctcgtaaaatataatgtataatatatataaagacaaacacgtacctcttctttaggagtttcatgttcatcattttcttggacatgttttgagctgtgaaagtctgcagtgacagttgagaaatttgggcagtttcgcatatgcaggggcatttacaggtttcgggttcaaaaaaataaaaccgaacccggacccggatggggcacggattggcgggttacgggttggcaggattcgattggccggattagcggattaacccagtcaattcgctcaactctttaaaaaaattaatttttattcaaataattatttcttttatttttttatttattaaattaaacatatataatataacaatttta

SEQ ID NO: 385179 - DNA, 2229 bp, Cannabis indica
tttttagcactaattgataaagatacttttgtcattaataattcatatgccaaatcagttataccttaactctttattacaatccaattcaaccatcactttagtacagcacatgagtccctaatttactcattgatttggagaagattgcattacttttacactaggttggtccactccattgaaaataaacatatatataatagattctttgtacttacaagacaaaaatttgacgctctcgttgtgatgtgagtcactacattattcattagtttttagcttttcacaaactattttgattttgacttagaacattacttgtggtgttaaaactttttagtaccacacacattacttcattgtataaattatcttgctagttcgctgaattttttttcgtcacacgtaatcttttaaacatttttcttcaccttccttttcgttgtccatacaatgtatttaggtcaacgatttattcttttttttttttcgtcctgattttgcattatgtcatttgagggtgttgcaaatgaagtgggataacgtatgtgttagaccgaaattaaaaaataataaaattggaaagaattactgatagaataatctggctgagtcgcgtacaatgttactctctttaagacgtttcgcggctctgcccgaagtgtgcacggaagtctagcaaccacggcgtccccagaataaaacagcctttctaaacgcacgatacgttctacaccgaactgtatcactctataacaccctaaaatttgctctggagaaaaatcgcaaggaagaaagaaaaagattttttaatgttggaaaagatatgttcttacgttgttctgatacaacttatatagaagtcgatccaagaaaaaacggtaatgttatcgtaaagaggagttggacataaataaataaaaaataaatctttatttaatcaaataatttttctttaaaaatttaagtgacacctcacccgccaaccaacccaacccgggtcggacggcggcgacgcgctcgtgtgtggtgatccaatgtgtgagtcctcacccatgcacacaaaattgggtaccccttggagtccaaacctatatctcaaacttgcacttatacacttcaaatgaagtgtttctatcccatgtggaactcctactcacacatttcacttttctatttttacataattttacaaaaagttccaacagtatgtacactgatctcatatagatacataaaattttgacaaacttgctaagaaatttgtaattgttaaggattcaaacgaaaaaaaaaacttaaaaattgaacagaagactatccgaaacttaaatggagtaagtccaccatgcgaaaaattcttggaaaaacatttcctttaaataatagtaagttgagtcaatacaaaattaagcaagggaaaaggaaaagctatgaaatgcttgactagctccctttcagaaaaaataaataaaaaataaaagaagcttgcctagccttggcttgttctcgaaaaattatactaatatattaggtcgtaatgtcgaaactaacaacccgtggatctttttcgtcaattaaactaatcaaccatgtcttgtactaattaagtatacgtaaaccatttttttttactcttttaagaaaagaaatgtgtgttttgctgttatttgtcaaattatatacctaaatcttgtgttttttctttgtttttatttccaagattacattatcttgaagttaatatagatttagttactatttattatatatgatttagttatattactgttatagacgaactcaaaaattgtagacaaacatctatccaaacacaatctcctaaactagtaatagagatcgccagtgtgtgggcacgctattcgccgattgcaaaatggcgctacaagaatcactgccaacaacaattaataaagaatagatatctaataaaatagtctgaaaattaaaattaatatgaagcttattaatctacccaattgccacagtaaaattactattaataatgtagaacctctatgttagaatattctattttaatttattataaaaaaaatacagtttttaagtcccatattaaaattataattaaggatattggcggctaaactacttgaactttacggtttgtaacacttaaccacaaaaaccgaaattttggcagctaaactacctaaactctggttccgttttgctctgcacacc

SEQ ID NO: 385180 - DNA, 1653 bp, Cannabis indica
taaaagagtcaaagatcagtagaaaccatacattggcagcaataagcccactgatttgtgccatatcacacaatagaactgctccgcacttgtccgcaatctgtctaaatcttgagtactcccattcacgaggataagaactcccaccacaaataagtatcttgggacgaaaatcaagcgccctctcctcaagtttatcataatcaatataaccagttaatgggttcaccttataaggcaaactctcaaagaaaattgatgccccagaaacttttctcccatttggagtgtagtatccatgactggtgttccctcctgacggagtatccaatcccattatccgatcgcctggtaacagcaaccccgtgtatacagcaaaatttgcagaggtacaggagtaaggctgcacgtttacaccccaattgttagcatcaagattgaacgcagccaacgcccgatcacagcaaatattttcaatctcgtcaatgtactgattcccacaataatatcttgctccgggcattccttcggagtacttattggtcaaatggcttcctagtgcttccataaccgccttacatacaaaattctccgaagctatcagctcaattcccttgaattgcctattcttctccttctccataatatcaaacacgtcaggatccgcgatacgaaggggttgatcgccccaagcccggacggcacttcttcgggactcaagatcaggtccaaacgagactcgctttgaattattacaggcagccgagttcgtcgacgaggatgattcactatccctcctccgtttcaagcacatggagtggcccagaatccgaacctcaacctccctatcctcatcatcgtcatcatcgatttccctctcgaatttaccgttattctcggcctgggtctgcggctccagcaactgcagcggaactggcgagaccgagtggatcgggttgcgcaggctggagtcaagctggagagaaattgaatcgtcgacaatctgggttcggttggaaggaggaggtggcgacggagacgaagatgtgtgggatgaaaaccctagggagagagtagattgaggatgtgacatgtccatgattaatcacggaggaacaagcaaaaccctagagcccaatcccaatcacaacagactatatagaaaggatgagattatatgaatgcgtttatatatatttatatataaaatatttacaatagaaatgaaaattgctgaattaggaacaacagcaacagaaacagcgagagttgaaggatgagcagtggctgcacttgaagaatctggggatggaagaagatgaagatgattccatggaaggatttaaggcctaacctaaccctgaattgaaattgaattgatggagatgaggaaggacataaatgagagaaatgaagattgtatattagctcatgggctgtctataggaaggagctgtctcttgcctcggtgggtggtgatgggggtaggagtaaggggggactggttggtatttggttgtacgaatattttggactaaattgtatttgtaattaacaataggaataatattgaggactgttataaaataatataaagtaaatgagaagaaagaagaagaagatgaagagagaaagagaaagtgaatgagaatg

SEQ ID NO: 385181 - DNA, 1064 bp, Cannabis indica
aagctaatggaatatcagaaaatatagaagaaaggtcaataatcacaatctaatcacgacacgcatataaagaaagaaagactgggaaggggagaatatttcaaaatcaacaaactccaataacattttcagatacataaaatggcaagagtcacagtttggaattcaccaacgatatcaaagtattattagaatttttaaatataaagtttaatgaatcaattgaagtttaaaaaaatgctcaggtttttgttgttagaagatatagaaggaattcgtgttgcaaaactgtgttaagaattatcaaactgttgtgactctgatccatctccaaattcaaacatacaaaagcttttgtctttcacttcaatgatttgcttcattactattattaattctcgtttttgttctttttcagactattcatattttctaaagagccacttgatcaataataaaactagaaagcattgtattcatataaaaaaactgaagactacagaatggattctaaggccttaaacccaaataattaggattaattctacttctaccgacaaaaatcctcaacaaaatcagtgttgaatcagaaatctagagcaaacactcggactcagaatagttgcaatcaagtagtagtactagttctcaacaaaactcagaaacacctccaatagcaaattccaaaaacattatggcctctctaaattatttcctagaacttcctcacctatcaccaaagataacttcaattaagtaaggaattttattgtgaagaatatggtttttagttagtcaaacacttaaaagtgtctcagctacataatcttgacacagagtgaaaccaagaatttaaagactgacaaagaaaaaggaacaaaaattctctcagagcatattcaaacctcaaactcaacaaacacatcaagtgaaaactccagccaagctttacatataaacacctcctacattgcaaaaataaattatacatacatcttatcttatcttacctatattataaatgcctatgtaaaagaatttcttgtggcttaacataacatttt

SEQ ID NO: 385182 - DNA, 1892 bp, Cannabis indica
ggcaaattatgttggttgttgttctgtctgttgtgtctttagttgcattttcctgactttatagttgttcgtctaagtctttgttagatgcgtctgttaatctgtattcatttaacttttgttaggtcagctttttgttcgttttttttaattggtacagctcattgccagttgtgatgagctagcttattgttggttaagttgttttataaaaaactgatcaagcttttttttaactaacttcttcatctttgataggattatgttgagattctttctctgctagggaaaatccatttttcggataatcttgtgtttgcagattgtcaatgattagatcttcaaggtttgaagaaggaatgttaatctgcaatacccaagggaattttaagactaatctattggagggagttcagctaatcagaagtaaggggaccttgtcttctcagatctaagggatcttagatctttgttcttaattgttgatcaagtgtattggtaattttcgtatgaaatcatttcagtttactttgtttgaagtgtaatcaaaactagagaatgtatttcaaatgatttcatagtgatggttattttactaggttcaaggagacccaagcaatactcgatggaatgtgtttccaatgtcagaggtaacttctgtcgtcattgatttacaattttagttttaatactttagattcaaacctaaaattgattaattagctttcagataaaatcgaattttcagagtttatacagagtatagccatatccttactcgtcagggcatgcgggatcagcatttgatattgaaccaacaactacttcaatgggcggcaaaactgcgtgtagcccacgagccataacagttttagctgtgcctcgcttcccggagatagcaatgcctccaatttcacggtctatagccccaagtaacagagcagtctttatggcatcctataaaatggatgtaatcacaaaatgcaaaatcattacaattttcaaggaagagagagagagagattaatcatcaatttgaaccttctatgatgattactgattaatcatataatatgaaccgttcaatgtgaacagccgaaaataaaatcattgtttccaaaaccaagtgacaaagaaattcacataattaacacacacacacaatatgtcacaatccattaatcattttacttggcagtacaaaatcaaagcatttgctttttctttctggaaagagatagggagagagaagggaagtacctgaccaacaacagcagcaagagggaaatactgtcttccataagaagtaacattggagttgttatcctgagtgagcatggcgccattcccagggtcagcggcgatagttgcagaagatgcacgaactcgaaggtcatgtcgatgaagacgttttgaggtcaaaaaagaagtgaaagagggggagaagaggaaagggtgtcgtaatttaagtgagggaattagtaaagagcgaagcctaaaaggataagaggaacacgttggggctgaatgcaagcccgccatggaaggtacagtgagagagagaagttgaacgctctttcttatctggtatcacattacataatcataatagagcggaaggacctcttgtgggtccattgaaatctggaaatcttagtagtattatggccctcgttcgtgtgtgtgaattctctctagggattatctttctttattttttatttattctttttttgataaagtgataaaaattagaagaaaaaaaaaacaaaacatccatgtagagtaacgttcgattagccaaaaggtatacaatataaattgagattatttcacaaatatacaaaaattattataaaattataaaaatatagttttatagaattttaaat

SEQ ID NO: 385183 - DNA, 1624 bp, Cannabis indica
ctttttcttttatattctatcttagttttttcttttctttttttattattattatttatgtttgataatatgaagcaaagacagatggtattgagattaacaattgctaattttggataatgttaatataatgacttggtgttttcgatagtgctttgtttcaactatgatggattaatcttttcgtaagttgataacatttttcgtattttcctaaggagactttgtatgttttaatgggtacgcaatatgcatgtctttatttaattgattatgttgataaacaaaaaaatatattagtggttcatgataatttattttatgtggccatatattagtgtcacatgatatacttatgtttttaaaactacgtataagtctagatatgtacatatatataagaaaaaaaaacctagatcagaagagaaatgagattcattttctaattgtaacttttttttttttttataaaaaaactcccatttacatatgtattgatatgtagcctaacttcaatatgtttgtatagctaattgaaacgtagtcaagataaaaacaaaagactactaataataattaattagttaattatattggtaatcaaatcatagtgataaaccttaatgaaaagaaaagatatacacaccaattgacaaagcaaattggataacatcaactactacaactagctattattactttacacattaatattcatttcaacagctgaaaaaagagacaaaattcaaaatgaaaacttgatgagtgagtgtcttatgtaaaactttgcacgtacgtactacgtgttaaccatttcatttttaattctctatatatggctgatctttttagagcgatcgaattcttttacctttattctttaattcccactttttaatattttcttcctcctattaaataaaagcctacattaagaaaagggagaataaaagtgagaacagtaagtggatgatgtatagctgactttatctttttaaaacagaattaaatttgaaaaaaaaaaaacaaggccactaactttactgaaaaagaataaataacaaaataattaagaaagatacctacaacttattttactatatgtataaacaaagagagagaggcaaggtcggcgcgtgggagtggaacgttctgccgcatgcgtgggtaagaagggtaagggagtggtacgcggggatgtgtataaaattgacgtcgtttgagtcataagtccttgtgagagtttgtcgttttgatgaaaaagtctcaccctctctattctctctctcgtgaatgaacttacacgtaatcccacacgctcctattctgccgtggacttcactgctgacgcactcacagtgctttctcacgtgtcctattacacaacctctagctaccttacccttatatttctttcggtctaatcttcatatctgttttttctttttcatttggtgctcaccgaattaatttttggtatctaccaaaattaggaatagttagaggtgttcacaaattattcgatccaattcaatccgtacgatccaatccaattcaatccgtaaaatgcggatatccacacttgtgcggattggattgaaaaatttaaaatccgtacttgtgc

SEQ ID NO: 385184 - DNA, 2153 bp, Cannabis indica
tttctaactaatgaccatgatagttattgaataaaatagttgtaactcaacaaattataatgaatgatatagaatataaacttacttttatgtgtttgtttttggtttagtctcataatataagtattctagtttttttttttttttgtatttgacttagttttaactagttagtatactttcattgtcacaatcagtatttgttttttttttgtttttcttcttcttatttctaaaaccttattctaaacaaagtcactctgaagtcattccaattgtcaagttgaaattcctacttctttcaatgagatttcatttcaattgcacaactcatgtatttaatgtttatagatttttttaatttttttttaaaaaaaataattgcagagaacaccaccgatgagcaaaaagccaagagcaaaaatatatattaaaaatggtatcgccaaaataaagtttttgataaaaaaaagatattcaggccatcaaactgttttataatttcggtatataaataagttacaactatattttcttcttctacatatatattttttgtatgatagtgttaaatgttgttgaaatagaccttacataaaatttaacctgtctttgaaaatacatgctgaaatatatttttttcatagtggtgaatttaaatataatttaatccatttttatttatttatttattactattctatttcgttatggttacaacatcattgctataaaatgttgaaaaattctaaataattcactgtatttaaattaggattctttatattttaatttatcactcgtgttcaaaatacttgtaagtataacgaagactgatatgattttttttagataaaaagatatttcaaattgtattttttgacgcgaaagttgagaatgagattattatagaagattgtatttagcactcattcataacttatcatacacatatataaatattgaaataagcactcactacaagcagtttaaatcttgatttcaacatcttaaattatttgaattttactaaaaatatccccaataagaccatctctaataaaaaatttaaaatttgtgctatattgtgatgcacgagatataaaataagaaaataattaattaattatattgatggttatttaatattttattgagaatgtataaaaaataatatatgttatattttttattattaaataattgtaatatggtaaataaagaatctaaagtttagtaaaaaacaatgaatcgtaataatgatattatagtaaataaaaaaatagtatttattgtaggctagtttggcataatttttagcatttgtcaaatttaacatactttttagaacattattagagaagtagtttttcttaagtgtgataaaatatagcaatacactatttttttttggcactcaattgaagatgctctaactatacattatatacaccatcatataaaaatttacaattgatcattatatcaaaaatttacaaccgatcattatatcaaaaatttacaattaatcattatccctaatggaggaaagctcagatatcaaatcttgagtcatcacattctctttctaagataggtgatggagcttggcaatagataattatacgtccaaagagtgttaagattaatgtagatgctacaatctttagagagttctaataccctcgtgttggttttgtggctcgaaatgatattggccatttgattgaaggaggcacccgtttgctatcagggaccgtggaaccagtactagcataagtaatgcagaaagctttaagttggattaaaatgagagcatgacatcaagttcaggtagtctagatcacctgcttaggcaggtgatccaagattgtaaagctattatatctaagttacaaatttttctatttcctttgtcaaacggttagttaatttggttgctaactttgtaagaacaactatttcatatcttgattgtctttttcaatttaggaatgtcctaactgatttgttaggatcgttggtagcataatttattggttaataaaaagggtaaaattgcggcataaatacctaatgtttcagattttatacacttaaatacataatgtttatttttggaggcaaaaatacctaatattacaattctctta

SEQ ID NO: 385185 - DNA, 983 bp, Cannabis indica
ctaataatactctctctctctctacttaattaggttaatgcccttcataatgagccacttattattaatggtctcctcggtgctcaatgaaatgtgaacactgcttagtgcttacttactatacgtacctagataatagagcattgtttgttattgggcacaatagtgcctagcaccttcaagacgtgtcactttgtaattgtataacgatactccttaaaagctattatattaaattatatgagactcgatacttagttagactaataacactattaacgtacgagagtactagacacctctaaacccttttagcatttctcttaataataatatagagaaatgctaaaaaaaaaatctaacatttattacggtgtgatattactatggatgtgcaattaaatatattaagtttcatataacttaataataacttttatgatattgttaacgaatcgtaaaactctacttgtagatggtgcgctacgtactaatatctaataacagtgttcataataataattaattacacatgacacaaaatatgcacaatgcacacatatatacatatatttgtactaggtttatgtttcgtgtaatgcacgcataatttttttaataggttcaattaagtgatattaaatgcaataaatgtatgtttattttttttttttattttttttaatttttgaaatagaatttatgattttgatctttaagaaattttttttaactattgctacattggtgtgtcatttgaatgtaattatatttatacgtatttttaaaatttttttattaggtaacgtatctgataatcaaatattataatttattatattcttaactaaaactcacataatcaattttgagtgtgtctatatataggttggattcataaatttgatatataaattttttttattcgcaaactttacgaaaaatatggtgtgtgaattggtttaccacaactaaaacagaaa

SEQ ID NO: 385186 - DNA, 3306 bp, Cannabis indica
cagttgagggtgtggttggaggacaggctcctttccataatattttattattttattaaataaaaattaaaattcaccataaaattctcaaaaaccaagaatttcagttatataggtatactttatatagaatagatataattatattggagcccaaaaaaaagcccgtaagggcagggcagggtaaggtcattgttttagtttctgtcaccaaaatcatcagaaatgatgagtgttaagaaaaaattcaattaatgataacgagaaagaaaattatctaattgttctttcccaatgtggaggttggaagagtaagtagttttaaaggttacacaagtcattaagttgaatttagaggcaaaagttagtctaaaatattgcatttcaatctccaattactaaaaagactacttattgactttccaagcaccaaattagtctaaaatatgacgagcattactataaggcaatgctcatcacctaagatatcactattagtaatagctggtcttatatttttaatttaaattcaaatatgtatacttcgattttcacttttactagtaacaatattacatggtgctctttactattttatcaaagtaggacttttgccataagaatactacataagctcaacgtttcagattactcttattaattgtgggtgcttaaagtacaacattttaaaaggatttttttccaaaaacaatacgcccccacactttccaaaaaaataaataaatagagtatatttattgaagataaatccaaaatacctatctaccgaacttggactattgggatgtagatgtagatgtatgtaaagatagggagtactatccttaagagtaaagggtatagaggatgatgagcatgtgggggtaggtcaccaaagtcaaagtggagtaggaagaggactagggagggcatccactatcctctgagcagtgtccaattaagtaaggcttgggtgagggacctctgaaagtgatgccaaatccaagtgaagtatgttaaggacaattaattagctaacaatacaattaggaaagttagttagaattactgttacaggattttagcttaagttttttaccatttaaagctcattgtatataaacctttcgcattagactttttaatcaataagagaaacattttttttccaattctatttttatttcaatatggtatcagagctagaaaatctctaatctgttcttgatagttatcctcaagctttgtcttcacaattcttttcttctcttcgttctctgctccttcaacaatggtgggatcatcttcagcttgcagagatccaacctacaaaacctatttcgttcaagcattctctttcttccaaactcgatgaaaacaaatttttatcatggaaacatcaaatcctcactgttgttcgtggtcatcatctccaacgattctttgaaccaaactctgctcctctcaagttcaacaatgaagctgatcgaacaaccaatacaatatcataagattacataaattaggaagcacaagatcaactccttctttcatggatgttgtcctccatgaatgactagatgaacactcgcataatcaggcatgagacctctgtgactgcctaaatcgcgattcaagaattcttcactgcataaacaaattcaaagataagttaattcaagactcaactcctcagtactaagaaaaagggttctttcgttagcgattacttactgaaaataaaatcgattgtagatctactaaatttcattggacatagattctctacagttgatcatgtcgaggccattttcaatggtcttggaccagaatatgacatcttctatacctcctacaacattcacaaagaaaatttcatcattgtagagcttgaagcccttctcgtggctcaagaagcgcaaattgacaagagtataaaggatctcgacatatcctctgctgaagccaatcttgctcacaatggaagaggaggtttttcaaacaaccaaggaagctatggtggaaatccactttacttcaatggacaacaaacttagggatcatataacacctctcatgattcctatggtggatcaaataatcgtggcggcagaggacaccgtagacgtggaagatggtcgaatcaacccttggagcagcaacgacaaagacctatttgccaattgtgccagaagtcaggccatgctgctcttcaatgcttctataggtttgataagtcatttcttagacatgtatccgttaataatccaccttcaaactcctaactggagcaccattacatgtcataattgccatagctgacacagtccaagattccaattagtatcctgattcaagtgccacaaatcatctcacaccagatgctcagaacttggcaagtagctcagatatcttggtcaagaacagctcatgattagaaatgactcaggtttgcatattaccagtattggtcattatgcatttaatttcccattgcatcataaaatatctaatacttaatatttgctaagattttcgaaaactaattataaacgataaaaactaaagaaataaataattaaaaaagaaagagaggaaaaaaaaaaaaaaaattttatgtggttggggcattaattagtcttaatccatgaatcagtattattcagttctttttcatggcaaaataaattagttttcatataatattttcatggaatcggtaagatataatttgtgtaaactattttgtgattcaatttgatctattttaacaataattataatgtacttttccatgcaaaaattaataaaataaccacttaatgtttcaataaaattgatgaaataagttaagtagtaagaaattaaaaatttattaatgtaaaaattcaaaataaaattaactatctaatattttatataattaatgtaatataatttcatttaaaaattattatagtgttgagttaattttatagaaaaactagcttttatgatatatttgaaaaaataaataaaaaacaatgcccaaagaaaagttgatattttcgcaagcctaataaaggcccataaaatttccaaccccaccattcccactgggccacaggggatccacgaactagaggaaattacgtgggtacccactttaagttaactattttaatttgagaaaattacactctatatcctttttatattgtcctcttttattttttaccatttttttttaaagtctattatttttatctcttttttcaaatattgtaccaattttgcccatgtcacttcaagatactctccatgtga

SEQ ID NO: 385187 - DNA, 1293 bp, Cannabis indica
ctctctctctctctctctctctctctctctctctatatatatatatatatatatatatatatgagaattcaattactcaatgggaaaatccaagtcttgaatagtgtgacacctgttccattaccatgaaagataaaacgtcttagattctgcttctagttctactcatgaaagtcaaaacataaaaggttagacatagtgcagaaccagaagtaaccagtaacaccatagaaaagactagagcccccagtagagtagaatcttagaaataattttaagttcaacataagagtttactttgtctaataaccaatcaatgtttaatcataatgaagcacacataataagttcaagtgtattggtttttgctattaatgcaagaaaagagaagcaaaatctgaaagccatcaaaagcttaaaaaaaaactaattgaattgtgatcacaaaaatgaattcaatgaaaataatcataaaatttcaaactttttaagtaaaagaacatgaatgaaaatagagaatcataaatgtttagttttaatgaaaataaatcagtatgacccatttgaaaagaaaccaccagtaatcccaattgaaccccacatcatctctactctgtcaccaagtgtttgataaaatgtgtgactagcaatactagccgatttacacaacgtaattgcaaaaaccaaacctgttttgtttttatcactactaatcataaagggtttgtttgttccacccaaaaagagcaaatagaaaacgaacatagttgatgagaatgatgaatgaaatgaaagaagaaatgggaggaagaaaatagtaataccgtagagaagtgaagaagaggatgggattcagattcacagttggggctccactccacggaatttttgggagggaattttgagcttccttgcttttcaggtttttagtatctttttctattttttttttttttaagtttaatttttaattttaaacaaatattaaaatttaattttttttttgttgataataataattaaattatatttatgaaatgtcaagtcaatgataagtatagtctaccaattttaaagagaatgtagtttttcattcaactacctaataagagttttttgcagctaaactctctcaagtatcatttcacttgcacttaatcttgcttgcaagtcattaattttttacagttaattgccaatataaatggcttatgtgtacacttttgtacttgtatcaaatttatattagtacacctaatattattattttaaaaatataaaaattatttcaaa

SEQ ID NO: 385188 - DNA, 1042 bp, Cannabis indica
gttcaaggacagcgacatgcgagtgaataccgttttgcttttcatgccatcttgaatgatatctgacttcttgtatccaattttcttacgagcactgatctcacatgtttatcgatttgcgaaaactgaagcccatatgttagctaagtttgctattacagtgaatacatattgttcttggttggaacttggaagaatatccacctccacttatgactgttatgtaattgtaattgatcatttataatagtcttgatagtcttttcttcaataataataataaaagaaaataacaaaatataataaataattataactaacatagatgaaagaaaaaaaaaaaaaaaaaaaaaaaaaacactcccatgaaataagaggttgacacctaaacaagatataataaaaggaaaagatagaaaaagatagaaaaaggagagggaaaattggtcaaattattgaaggaaaagtcatcatctctattttagtttttgattggaatcccatagttccacagattttggaactacatttctgtggtggccttttctggttatctctctcattttcttggtgcaaacatggcggatttgaggagcaatagtgagagtaagactgaacagaggcgagttgggttattatacgatgagcgaatgtgtaaacatcacactcctgaccacgaagaccatcccgaaaacccgaatcgcatcaaagccatttggaagaaactgcacagtgctggtatacctcaaaggtaaacaatttttcaattttgactttttgttttcctgtccagaaaattgacgcgaaacacaaacaatttcgctgtttttattttatattttatcaagttcagtggtttcagttgtctctgccgttataaattaatattctttgtttgttttactttccatgtgatgatgatcatcaccaagttttatactgtattagttgaaattttaagtttattcgtgattatagtaggaaagtgtagaattttaattttgatttcagtgttaggctaataaaaaggtagtttctgatt

SEQ ID NO: 385189 - DNA, 2801 bp, Cannabis indica
aataaaataaatatgatattaaattgcaatatgacctttaattagaactatgcatcgtatatagaatattcttcaaaaattggtgttgggcaacttaacaaacacagctagatgatcaatttgatcattatattttctttatttattttatttttattattaatttaggagcctgaaactagtgatgagatcatttctattaaattaaaataatgtaaattaaattgatacatctcatatacgttggtggaactcttcaataatactatatattttctccttttagaatatgtaaaattaaattaacatatgtttaactaggtagaatctgttaaataataagatggtaaatagtaacaaaactatatatggtaattaattaataaatgagtttgtggtgtaattaattatatataattgtgatatatgtatgtataggttggtacagtaggaggtggaactcaattggcatcacaatcagcatgtttgaacttgcttggagtaaagggagcaaacagagaagtagcagggtcaaatgcaagaatgttggccaccattgttgcaggagctgttcttgctggtgaactctctctaatgtcagctcttgcagctggtcaactcgttaatagtcacatgaaatacaacagatcaaacaaaaaccttactactactccttaatccccaattatatttataacaacaaacactcttaattacccaaaaaaaaaatatatgtatggggatgaattatattaagccaaagaacataaataataataccatatatatagtatttattattacctagctagttctaggtgaattactactactactactactcttgtattcttttcttttttttttatttattttaattttcgtgtaaacttttaatgatgtacctgtaagaattaaattgtgtaaaaaaaaatatgcatggttgggaaaaacttttcgttataaaattatatggtgcacgttgaaacaattttttttaatgtaaaatatttgttaattataaatattagattcgtgtgaaattattgatacagctaatttaatcaaccatcaatatctaattaagtgacagcttgtacgaaaaagacttaagcttaatcagtgttccctctcaagtcagttaggggtattgggcaaaaaaaaaaaaaattagttgggatttttttgtttttttttttttgtaaacaaaattttattaacaaacaaaatatgctacatcaaaagccccaattggaattttttatatgaaaaaatttgttttttttatatatatattggtaaaattttaaaatataatatattaatatatacatctctttcaagaaagagtaatttgaatcaccaaaaagattaaaaaaaaaaaaatgagttacttttttgtaatataggttatttttttttttaagttctctgagtaatttataggttaatagaatgtaaatattatatttttgcaggagtggattttccgaaataatttttttttactaaaaatttgaattactttattttattgccaaatacatatgtcttgtttattcttagttatatataattaattaattacatctaaatttaaaactcattcatatgataaagcattaaataaatattaataaaaatataaaatgtgttagataaaaattatatttatgattagattgaatttgaactttttgcctccattttctttggtcaaaatatatatagtttcgtcgagagagagagctaaatagggaggctagaattttctggatcttattttgtgtttgaatacccacaaagttaggcatatatattcaacgtctttgttcatattctacctataataaattatttaagctattgatattattatatatactttgtacaatatatacatataaaaatatataaaaatactttagtcctgtttatatttttttttagtcaactaatgagtgatggtaatagtcatacttgtggatttgtagtgtagtgaacgtgatcatccattttcatgttttcatttaatttattaatattactcagtttggtgaaatgggatcctatcgataaaatgacagttaggccggctaattttttttttccttatttaaaaaaaatagtgttttttaaaattagtaaaataaatattttttaagctacgtgcattatgagtaaattagtggggatttaaattgaataaacacccttacttgtgattcgtaaggaaacaataagaatttcaaattgatacgttcttaaattagaataatttttaagataagtgacctctaattgtctagcctaaccttaaacataagcgagttggacccacattcttttggaggatacaaaataaaaaataaaaataactttattaagtttttatttaattaaaattaaatatattataaataataaatatttatataaattaattgaatggagagtacgacacattgtatattggtggaggtttcaattctatatattctcataatcaacttcgcgagttatcattctagaaagtagtcaaagtgatcagactttagtttatatgtaggctaaaaccctcactcaaatatatacattaaatttttatatgtagatatatacttatattaattggaaaacttacaaaaatactggaatttaggttaatttttacaaaaatactgtcacacagaaatctttacaaaaatattgtgttttataaaatactagtaaaacacaaagcagaacagctcaaaacaacagtagaacaccagtaaaacactagtagaacaccagtgaaa

SEQ ID NO: 385190 - DNA, 1826 bp, Cannabis indica
agaatacccaaaaagtactaattattacattatgatttgaatacaaatgatggagagatgtggtgcagctttcaccctgctaattcccaacaatggtaagaatactcaaaatggttccattatggaaaggaagagaaacccaaacatataagatcactgcatatataactaaaactagagtgccatagcagtgtatctttacactctccaatccatgacagtactaaacaaaaagatgaaaggaaagccctatatgttcacatgtacatatttactcgttttgggaaaaggaaaaagattactatcactacgtactgattttcatctctttatatattggttatgttgagattaataactacaaattaatgcagttcgtcatttggacaaatttcccaacttgctttctcattaaaatcatgacctgaaagaaaattaatcaatttaattatattatatgtatatgcatgggaaaactctgccactgtgcttaattaattaagcggccatttgtatgcctggatctgtctgtttgacagattatatattaatattatatatatatatgttttgcttcggaggttatagatcgattgtcagtatagaaataatatgaatttatgtataggaatctgatattgtagcaaaataattgagaaaaaggtcaactaatagactgttgttgcagttgaaacggtcaaaagctgatgagttctatacacttattgaatccttaattttcttttgaaacaacaaatcataattgcgtccattacaccaaccaattttaattgcacagaaacctaattttaatcactttccgtaattattttttctacgtacggataactatataatgtaattaaattttatgaaaaataatatcatattataactaattagagacgaagttatataatgttgcctgtttttgaaacaaatttaattaaagtatgtgagtgatattaatccagtactttcgtcatttaatttgtatgtattattcatggttacattgcatgtgtaggaatgtgatttagggttttctacctatgaacttactaacacataaaactacaacaattaattaaaagaggtaatgtatacacagaaagagaaagtgatcgatcacaacgacctcaaaatacaagaagaagaagtcacacgtgaagctaacgacaaattttcatgctggcatgcctgacctgtaaaaactacaaagctgcatacgaagccctaattaaatgagggtgaaaacagacctttctgaattcccttgagctctacaagaaaagagagtatgagaaaaataaattatttatattcaattattgaaaagatcatatatatgtatatattttgacttaaagcgtatatatattcaaaagtctttttattaaaaagaaataatcaatctaaattaatgattattacaatgatgctcactacaaggtattaagaacataaaagttgttcctaaaaacttttataattgtccttaaagtgtattaggggaaacaaatcgcctctagtgtgtcgctaatacttcgtccctaatactcctttttaagagcaacaaaataaattgcccctaaaagtaattattatggacaactttttgtcgcccgtgaaagtataaaaatcacccccatttcatgttaattaggagcaaaaaaaaaaaaaaaatcgaccctagaagtataaggtttccccctattcatatgcaaacatggcagcatttagtggcgttaaccgccctatatattatttaatattatttgccgagtttttcggtaaccaagtatttttagagcttaagaaaggaa

SEQ ID NO: 385191 - DNA, 1360 bp, Cannabis indica
ggtggttacgtttttttttttttggttttaaaattccatgtgggactttaatatgttggatttcaccttattatcttgttatcattatctctggattttcatatttgttaagaacagttgctccctacttaattgttactgcttaggaaggactagtttttttgtttgtcatgtatattactgatttactctctgtagcttccttagtgcttcttcctctctctctctctcggtggcttccccgtcagaaattttcattattttctttttttttagtgaaagagggtaagagttttccaaagagattttaggcaaatgccccaaccacctagttttattatttattattgtatttgtaaatgacagaagattattatgttgcaggccgctttactttctcttcttcctagacacttgctgaatatatcaatggttgcaaaattaactgcgaaggatttgcatcctcttatcctttgggtactccattatttttgattctttaattctgcagcgaacacaccatgttgacgcagttttatgacttgactcgtcttgtatatgcctgtgcaccaaactttgcagtttcgagataactttcatgttagaagtttaactgatgtgaaaatgtcatttcattcggctttggcacatgctcttgaaactcgcgaagggacttcagaagaggtagtctttgaaatgaatttttagcctttttgaattcttcttgttatgaactttcctaatgtatagagtaataatagtatggagtaaggtatagagtaataacaatgtggagcaagtgttgaaatggttgttcactttgatggcgaacagatacttagagtatcataaatattctcgacctttgctctgagaagagaatgtgaatgtcgtaatggttttaatttgatactagatttgcgtaagttgtgaacttgtgataataattacatttaactcccattgtttggattattgtttctcccctttgcttttcatgagtttcatctgctaatttataagttcatattgattattgttaagcccaagggaatcaaaaatcatatacatgtgctcacacgagaactttgtttttctttgcagattgctgcgttgtctgtggcactgtttagagctttgaatcttacaaccaggtatgataattataaattaaaatttgactattcttctatagttactgctttcattgacgtattctttttttctttgttaatatttttgtcagtataaatagttattttttcctgagtattctgttttatgacattttattgctttagtatgtggttggcatgcttctccttttaccaaagaattatcatcaggccgtataaagttc

SEQ ID NO: 385192 - DNA, 1335 bp, Cannabis indica
aaaagtatagagtgtaatttcttgattttaatttacatacattttgttatttatagttatctattatagattatggttggatagatggacttaactaacaatagtcagcctactattcattacgatatacctacaataataaatatttatacattcaaaattaaatttaggttggacataattacttttttttttaagaaaaaaccattatattaatatgaaaatacaaattacataacagtcaattgtggaggtggaatttcctccaactagttacaatctgtatccaccgtaagagtaaatttggccaacaagtgagcctcattattaggagatctataaacatgagagatctgtgctcgtggaaaattggatacaagataattgatatcatttacaatacaatgaaatgtcgagaggtgatgggcagatgattttaaagctcgaactaccattagagagtctgtttcaatgaagtttattggtagttgtaaggagagcatccaattaagtacctaggcaatagctaaagcctccatttcttctggtttcacatgccctttcatcaatttcgacatggctgcaattacacgtccaacagagtctcgtaaaatagctcccaatccatatttccctactgatacattcatggttgcatcagtattgagtttcagattaccaaatgggggagcccgccatgttgattgtgatgaagaactagcaatggttgttgttgcttcagagttcaagacagatggattgacagttcgcagaggcaattttcctggagtagcatgagcctattgattattagcaaagtaagattcaacaaaatgaagcaatcttatagcagactttggttgttttccgtgtgtttccgcattctgtttcgtccaaatactcaaaaggatcgtgatgaaaagttccaacaaatcagtggagagtactgaagaagcatgaagcaggaaaataatgaagtttgatctttgggacaaagcaaagtctaatggcaaaccagattgtctccaaacatgcttagcacaggtacaccagaaaaaagcatggataagagtttcaggaaattttttgcataggggacaaatacgatccgatgcaatatgtcgatatacaaggttagtagccgtaggtagaacatcatggaaggcacgccaggcaaaaattcggattttagatggcaatttaagactccaaaaagtctgccaccagtcctgagaagagttggaactgctcggagttgaatcctctggtgaatccgaagcaaataagtagccagatttgacagtgtagttgttggaatttattttaccaggatct

SEQ ID NO: 385193 - DNA, 1537 bp, Cannabis indica
tttctttctcaacacaaaaaactttcccaagaaaacaaaaatgaaagttccatgaaggtaaagagaaaacaaacaatgtgatacaaacaaacaaacaaatataaataaataaaattaatagtgtttcatctaattaaactgtgcgttttgatgatgatgggatttgttgtcacaaccaaattcacctatacttgctaagctagtgttttgttttggattctaataactttattcccatgttttttattttttggttttcagtgcccattttatttatttaatttatatttttaaaacaataatacaagtacagtaccaataaacaaataaaaatcatagtatattgttacttgctcttctcattcacatatatatttttattattatcatcttgaaaattaagaggatttctctttaattttcacattcaatgttactgttgtttcatcaatagtgtcccatatatacataaatttttattttaaaatttttccattatattttaaatatattatcaaattaaataattaaaaaaatattattatatatgctaatattattttttagttcaattttcttaagttatcactaaatattaacctttattatttttagtaataagtaaattagttgtttaattttcagtttagtattgttacttatgaaatatatgtgatatattataattattaaattataagaatttttaatgtgtttgcttttggggttggccttacctctattaatcgtgcttaagtctgaaatttttttgagctatgttatgtttaagcttattatttttgtatcttactatgttaataatttacagtatcattttgtgtcgtgttaaaattcataatttttcgtatcaagttatactcgtgctgatttcgtgacgtgtcgaaacaccaaccactacatgtatgtatggaattgcaattaactagatgatgaataatggtgggattttgggttttggattgtaggcttgtagcaaacttatgtagctatttgtttctcttgttatttttatatttttgttgttgttattgttgtttttggtttgatttgtaattaaagaattaatatataatatggtattagaatagagttgagtgataagaataagaacaagactaaaagagacaaaaagtctgaggcaaaatcagtgcagtggacagaaggccatgagagccttagcttgcttgcctctttggccatcatcaaattattgatcataaaaaactcatgcacacgacactcactcctacctattacctaataacctatactcactcctatatatatatgtatatatatttatgtatatagccactgctatactctcttacataatctcttttttttactgaattagctatcgattggtttgtggaatttttcagatcttgcatggtggtgcaattatgtatctatatatatatatatatttacaccatatgtattgagttacattatattatatcactttaaaaatttgtgactaaaaatctatggcttaaagtattagttacaa

SEQ ID NO: 385194 - DNA, 1356 bp, Cannabis indica
actaattaatcagtttcttaacagtgacccagcgacttatccaattctctataggtcaattgttggggtgctgtaatatggcacaattacaagtcctgacattgctttcagtgtgaacaaagtatgtcagttcatgcataatcctctttaatcttattgggttattgtcaaaagaatattgagttatttagctgaaactcttgactacggtctgtagttgaacaaagtctctaattttcaaattgaaacataccgtgatgctgatcgggatgcagatcctgatgatagtagatccacctggtttctgtgttttctttggccaaaatctagtgtcatggcaatccaaaaaggatccaacaatcttaagatcttcaacagatgcaaaatttcgaagccttaaaggtttggtttcagtaataacttggatgcaatcgctctaactcatctccatctctggtttggtgtgacaacataagttcagtcatgttggaagccaatccaatcctccatgctcgcatgaagcacatagaagttgatctttactttatccgagtcaagtaatcaatagagaaattcaaaggcaacatgtcccagcagaacaccaattagctgattgcctaacaaagccaatatccagcaatcttttttctcatctcagaagcaaatttagtatctcttctctagatgacacttcgtttgaaagggactgttaagagaagcataattggttactttatccaactaactttctgttttgttagttagattttgttcattatgtaactactttccaactgttttcggtttttcttctttagttggttttctggttatgctcttgtatataaacattggctttatgccattcaatcaatgtacataaaatcttgttcatctttttgctttgttaatcttcgcaaaaatattttggaggagaagtcttttatacctacaatgtccctatacaaattttttgaatttattttgaacaaaaacaatgtctcccatacatattcacaatctattttgaattcatactattcacaatctagtttgaaggtgcaagtgttatttatttcttagggggtgtttagaatgagttaatgctaacaagggaatggtaatgtgaaacattaccttgtttgttttgagtctttagctttggaatattattctcttagtattataactacccttgaggagggtaatgttgatactttaaaaaaggtaagattgaatcattaccttctattatattaatttgaatataatttttgaattaataaataatttaaataccaataatattatcatttattataaataaaatattacggtatatatttagtttgtgag

SEQ ID NO: 385195 - DNA, 1014 bp, Cannabis indica
gttgaccatccgtacttctgatctttctaccaacacataagttggacttgttgaagttaatgcattggcctgataaagatgagtaaacccgaagcacctcctcaagggcttttccttcctccatcgaagcatccaagaagattaaacagtcatccgcaaacaacaaatgggtcaatcttttctctaaattgccaaagcggagaccatgaattttatttgctcggcttgcttcatttaataaacacgatagccccttcgagcaaataagaaataaaaatggcgatagaggatctccttgccttaaccctctctccggtatgatgtaccccctagcctctccatttaacaaaactgagaaggtaactatcttaacataccccataatctttcgaatccattgctcgtcataacccaaacatttcatcattccttcaaggaagtcacattcgacccgatcgtaggcttttgatatatccagcttaagagccatcttcttcccattcccaaaccgacctttctttatacaatggaggctctcaaacccgagaatggcgttatcttgaatttgtctcccttttatgaaagcactttggtttttcgatatcaccttcttcatactcaatttcattctattagctagacatttggagatcaccttgtatataacattacataaacttaagggcctgaattctcccaccatggtaggttccttaactttgggaattagacaaagtaaagtgtcatttaagcagctgcagttcataccattatttaatacctctaagcatgttgctataacctcgtgacccacttctttccaatgattgtggtagaataaccccggtagaccatctttccctggagctttgagggggtggatttgatcaatggcttctctaacctcttccttagtgaattcctccagaagcatagagttgtcatggttggataaccagtttggaacacatctgttgagtatttctgtaacgccctaatgctaaggcacgctac

SEQ ID NO: 385196 - DNA, 1851 bp, Cannabis indica
cgccacgtcggtacgataccacgggaagtacgactattactcgagactcatcattctctggggtcaagtctgcttcacacacgtgtcatctgatgcagcattcatcagcgtgacatcattacattacatatatatatatatatgtatatattattataacatatgtacatacatgaaatttaccccttgtcggtttgtatcatgaagctcgagcggaatgtatttgattacaatttagttcacaatattaatcagttacccaaaagtggaattacatttatacattaacatacgatgaactttttttttttggttaatgatcatatataatattgatcatgcatgtttcacattgaaccttgcaatgattaattatactacattataaacagttttcttttatttcatcaacttcaaaaaatatacataaatagtttgacctttttctttctttaggtaagtacgtaagtctaaaaacccaacaaaaacattataattaacctaattagtacttaaccgaaacatttttataataaagatagaaataagtcaaccctaacatatatatgactgtgatagtatattgaagagctaaagcttaaaatcctagtgtgctatctagctttaaaagatctaatctcacttacttaaaaagaaactatatctatatatctaaactgatcataaatcaatatatgtattaaacaaaaaagagaggggttaacaaccgaaggttatatggtattggtagggagtcagagagcatgacatgagcattaataaaaggtccaaaatagtcaatttgtagaggtaggaaagaacattctaattgcaaaacaaaacaaacacaaaatccaaagggttggatgggtgtaacctaatttccttttctccatcaaaactaaggagaaagtgactatgggtgtggtgaccctagctcatatcgtatagtaaacacctctctaatctctttctctacaactcttcttagctgtatgttaactagtttcactctcctactttccctaaaattcttcacgcgctcccttctatcacagctgattttaaatttataatcccaattattaaatattacttttttcaaaggacaaaagaaaagagttttaaacctcttatttggtaaaacacaaacgataggatagtgatgtgtggctctacgtaggccgttcatgtcagcatcatgcctagcaggagtgggacctagctactaggccgatcaaaatctaaaagaatggttttggtcaacatattgacggctgagatcttgttgtaaagtcaaggagaagcgtgcgtgtactccacgcataatgatttgtacacagtccactctctactttgactcttactttggccaagtttaaaggtcccacgcggttgcacgcgagcgtacctttcaggtcccatgttgacccatgtcctctctctctctctgaagctcataagcatgacgtcttaatccaatttttcttttcttcttgttttattttgtggaaaatgttaaaatatgaatagtatacgagagaaatagccaaatttgtatttttgccacgtttaatattaagctatttttattaatactattattatgtaaatgtaagttatataaatgtctaagtaatcaaaatgtgtgtgtgaaatttttgaagtagtactacatgcctcaataattaaaatcggcaaataatattgtttatgaagatttttagaaattgattataagataaataagtttaagaaaaaataaattaaagaatgagagattgtgtcgtttgataacacttttattttttaattttttaatcacaaaatgaaagtaatttttttttttaa

SEQ ID NO: 385197 - DNA, 1788 bp, Cannabis indica
tttatggtacacagatgttaagactaatgaacacatctaacgttattctttacgtgagttgtgcaatttgtgtactttaatacaacttctacgacaacttaattatttggttaatcatatttaaatcttctatgagcaattatggtatatatttcttgctagttaaaacttttttactgagtgatcattatagttaggtcacaccatcctagtggaaataaatatagaatctactaaaattattttttatttatttataattaatattagtaaattattttcttattatgatttgtttataataaggaaaacgaaaaaaaaaagaatttcaaaaagtatattcgacttaattgtgtgtatatatataatatttattgtgtgaacacttattgctcttaataatcgttttttacataaaaatagttaaaattactcataatagctttgtacgaaaaaatttattcacccataaaatgtaatattatagtcataatcctacaaaaaataatattaaatgactaagtttgggcatcattttatcccgtcagcaaaaactggctagagagggtaacattttgcttgccacaccaaatctgtaccacttttaagaaattaaaacttatattttacaaaagtggctccactcccataatattagttaaaaatatttatgatgaaaagtaggtacatagtaggcaacctatcgaataatggaaaagaagaaattgtgtgttcattgtttaatgaaagtgagtttgaataattcaaagatatagcaatagttattgtttaatgaaagtgagtttgaataattcaaagatatagcaatagttctctatctctatcatcagcattaatattattatagggaaggatttggtaattaagcatccatattcaactaatgactgagccaagtacttctagaaacccagagacagtctctcttactattgaatttaaatagtttcaaaaatcacccccttataaattaaatacagctacctgatcctaataataaataaatgcattttttgaaaactaacatggatgaatattattttaatatttttcaattttttgtatgtaaagatagtccaacaccttcgtttgcatgaggaatgaaataatttgaatatatagtatatgttttaatggtgtctcttgggattttccatcacgaaattccaaaattggatacattattaaatgaatatagatttgactttaaaagtgttcaaaaaaatgtatataatctaccgtatctactcaagcttgaaacttgcaatatattataacaatcatgtatctagtacaaacttccaatagcttcaaatatttgagctatacatcctctaatcatatataactaataatcaagtttgtatttggaaaacactatacacatattatattatcacactataagcaatataatcgactcgaagtatatagtgcatgcaatcttcaatattcacaactataaactttttgctcaaagcttctgaaaagaaaaattcttcgccaatttgaacctaatgttgcctcaatttatattataactttctctattctctatatagttttttcttttatgtttattaaaaaaaatatataactttacgttatgttataatcacaacatattataaaattagtaaacacttcgcgtttcgcagcaaatgtataaaatattttaaattatatattttaattaataataattacttagtaaaattatattaaaattttaaatttattattaaaaaatttgtgacataaatactt

SEQ ID NO: 385198 - DNA, 1898 bp, Cannabis indica
attgggcttcttgatcaatgatacgagtgatataggttcatgatggatttactaatatgcattcttatattaatatttttcatgcataaaatcattgtttttaaaattaatttagacaaatgtgtgttagattttaaaattattggaatatcttatattaatattggccttaagtgtatgatttttaatatattcttataactaattttgcaaaatatttttgtgatcaggagatgaattccagtgcgacaagagtcaaggagaatgtcataaactaccatggctatgttaaatttgctcgtaatttatatttaataggctattgagtagtgttagaattgtataattaattaagtttaatgtaatatcaattgttttaagtttttgacaattattgtaatctcttttaataacttatagatattttctacagaatttgatacaaagttcatgatctaataatatacgttgattcattttattctttttatatgtaatgaaatgtgcaatgtttgtaaaacaaattaaatacgaattgtggactaattaatgggtgacatgtggattaatttatgtgttacatgttgacaaatcaaagtgtgatacatgtaccaactaatggatgacaacgcggacaagtaaaaatatgccacatactttcctacatggataccacataggatgacatgtcattatccacatcacttgcttaatcatcatcatctaatcaagtagtggggtccaccatattttgtacctacaaatatagataagtgtaggagaagacctttcttcacaatcttttatctacaaatacaaaatatttgtttatttgtaggtcaatctcattatctacatttccttaaattttacctacactaataatttgtaggtaaaggacctattttcttgtagtgttggctgtttaagaccggttaaagacaagagaaaaactttgtaaatttaacattattgcagaacattcttgtttattttgcaggaatgaaaaagaagacttggagcacctatttgttggctgcactacaccaccagcatgcgtgtagcagctgaaatcttggctgcaatggaatgctcactaaacatctcttagcaaactggttcggtggctgcagagagaaaaaaccagcagctttaagtgcagagtatatactgctgcactagcagctttggcatacaatgtttggcatgccagaaatgagattctttggaatgataaccatgtacaaagcagtcaaatagttgatagaacagaaagagatatgattgatagaatcaaaagtgtatggcctaaaaaaagtagtataaaaaatagaatatgatttgagaatttgtattaggagtatacataatgtaattgatgtatatatatgtttaagaaaaaaaaaaaaccctattgtctcccttccatatattcagataatctaattagactcataattaatttcattaaggtgctaaatgatattttaaataattttcattgtagattcttgtactaaaacaatttgcgttttacttctgtaattctgaaaatggaaaaaaaaatacatgaaatgaaatccataaaaagagaaggaaaacttttatagatatatgattcttgtagcaaaccttttatcaaaaaacttaaaacaaccataaggcataaagtaccgattacgatatttcagaagtttagtacaggaaccctctttcttatacatgcatttatttatccatctatatgctttagcttatacagtgttttacatgctttcgtttccagaaggatttttatatataacctctatttcaactgtctcttcctactacattatctatatatatatgtgtcaaaagcaagtcttgctatataatcacttaactaattgccacca

SEQ ID NO: 385199 - DNA, 1499 bp, Cannabis indica
cggtgatcttcttcctttctctgttcattgatttcgcacaatgtctacagaagaagatcaaaccagaactcctgcaaccatagttgatcttggcgattcttctacaaatcaaagccttcgaatcgccactgccaagaaccctttggaagatcctgccagccccttttatcttcatcatggagataatcctggaaacgctttggtctctcagcctcttacaggacaagacaattacatctcgtggagcagggcgatcttgcaatttcagtgaagaacaagatcggattcctcgatggttctattcttaaacccccatctctgatctgaatcttcatatcttggattttaaattctgattctaaagaaatttcatcatgtatcttgtatgatgaatgtgcctctgctatatggaatgatcttaggatccgttttcatcagaaaaatggtcctcacatatacaatttgagaaaggatcttatgaatcttaagcaggaaaatcgaaccagtagcatgtactttactaggctcaaaactatttgggaagaactaaccaactacaggccttcatgtacatgcaatggatgtacatgtggaggagtcaagaagcttcaagatcatcatcacatggagtatatcatgtctttcttgatggggctctaagattcttactcccaagttcgaggaagcatactgcttatggaccctttacccgaagtaaatagggtgtttcatctagtgactcaagaggaaaatcaaagaggcactacaccaaattctaacaacaccaattctgccatggcatttgcttttcaaggtgataagaagggaaaccagaaagatgacaatcaatcaaacaaatctcatccacccaagagaaaccgacccttttgcactcactacaacattctacgacatacgatcgaaaaatgttacaaaattcacggttaccctcctggattcaacagacaaaacaagaacaaggaagcttcagcgaatcaagttcaaactaaggaagaaagcagcaacactgccactgaaaatcatgccattctcccttagctatcaacggctcaataccagcagtcgctaaacttacttgcaacacagcagaatggtacgaataatgataaccccagtactcctacaggaaatacaagtatcatactgttgcccctgatttcgcccaatatacgtggaccaaccggacagggacacgtggatcaagcaattcgtaatatttgctaagtcttttatactgcaaggtaacatcccggacataggtcccggaggaagcacacagagtttaaggtgctcccagaggctcacacaacgctaaagcatctccgcgaggtgtcaggcttctcctgagcaatcaagtcgcattaaatgccgcatgggaggaggcgtgttgggactgcaacacgcaacaaagtctgacggcacaatctccaaccagcagtgccacagtaatgatcatttaagtctagcgacggctacac

SEQ ID NO: 385200 - DNA, 2580 bp, Cannabis indica
tttctctctcttcttctctctctgcctacatatactaactacacgtctcacttttattatataggctcaattacgtgcccaaaggagtgaattagctagagcaaggaatataactactagttattttgttcctttatttctctcccaaccaatgcaacattcatctgcttcttaattcatcaccatatcatgcatgccatgctcatctcttcaatatatattgctctaccatttattttcattttctcttctaataattttccaactgtagatatattcaactctaatctattgattaaattcttcaaaaaatagtgttttctgttaaataaaaaacaaaaggaaaaaaaaatcttatttatgggcacttacgtatatatgttattataaagtgtgatataaaattaaatgaccaattatgttatgtgtattaaaaaggtattaaattgacacagaatattgtgtagatactataaattaatttataatttgttgaggggccaaattataaatacccaaaacttattctataattagcctataaatatgcagtggtcttcaagaaacgtaaggttcttgtattctctcctttctcatgaaagaaaatactttaaagaaaaaatatattcttagaagatcataacctttgtacaatctctaacaaatgactttaaattagtgttttcgctcatctgtattcatcttaatattctttaatttagcaaagactctatagaagtatattctagagttttgatattgaaatactttttgatttatatttagatttgtgattattttgtattttttgaatattttataaatcctactaacaagaggtatcagatccacctttgctagattaagtgaagatttgatgatttatttttacgaatttttagagatattctaataatagggatttgatttttgaatattaagattttgatcattgtcatcgttgatattatttttgtttggctttatctgtgatttatatatatgtcaatttaagttaattaatagtcacaactcgaaccttaggtcgtgacaaatatgtaatatccataacttgagtgatcaaataccacacatagatctttatatgaagaaaatacttataaatgaccctttaatttatattacaaaatacttatttaaaaataaaagattaacttctatatctataagaaaatattagtgacaaaattatgaccactcatcaatataaatgaataataatattctcacagctatgtagtcatcgaatatatagatttaatgaatcaataaaatacctaaataatatctagcatcaataatcattctttatttctaactagaacatagctaatttgagtcatctaaaccatccattcaaatttaaatacaaaatcagtttttaatgaaaagtttgataaataaaataagactaaactaataatgactttctttcacaacggtaccatatttatccactagcattaaactgagttccggacaattggtttaataaaaattcatgcatgattagcttttaaaaataaaacatctcactaccattatcaaaatatataaataaaatagagagaccacaaataatcacaaaatcaagcttcaaatacatatcacactgtctactagacccatagctctcaataccaatcataaaaaatgacatcctaaactaggtagtcgtgaaccaccaaaatgttgaggctcaaatttaactcacttcatgtacaaattctaggtcttacaggtgagtgtacaccttacacctacaggtgagtgtacaccttatctacctatgataacacagagtttaggtcgtgaaacaacaagacaaataaatatggctctcatcaatataaccaaaaagcaggtaaataaaaataacaaaagaacatatttacttttattttttttaaaatctaacaacataacagttgtattttgaataaacccaaaacttataacctatataaatatttgtacaaaaatatagttggcactcagtacctcagaacactccaaaaaaatatgcatattaagttttcaatttttcaaacaatttataaatcatagaaaatggaatatgtactctagtgttattcaacacatataaaatcaagtccaataatcaatttgagcccctacctctctcaagttgttaaattttgtccaagaaaacgattctaagctctcaagtcttgagctccaattgtttagtctaatcttaaatatcactcccacatataccattaaatggtaataattattatcattacattctacattcaaaatcgagtccaacaacatataacatgattatatttaaagtttggaattttaaaacctcgcataagcactgcacattaactattggtggcactactacaaaaacaccctttagaggcggtttttaagccctttaggcgtcggttttcgcgaaattcgctaccgacgcctatcagggcgacgctaaagggtttatttgaaccgacgcaatatataccctactacgtcgtacgtcgtacgtcgtacgtacgtacgttacgtacgtacgtacgtacgtac

SEQ ID NO: 385201 - DNA, 2200 bp, Cannabis indica
accattcgcttctttccctgctaccacttctacttcatctcgcactgtcccatcagtctctccacacactaatcaatccatactcaccttctccatccccacctacttctccatcctctttccacctccaccaccaatctccaatccattggctctagttccagtcacataccaacttaagttctggttctacagccactactcctattctaccaactatcactgaacaacctgcaccagccccttctattcttataaatcaacaccccatggtgacaagggcaaaggtaggggtgttaaagccaaaagctttattagcttccaaggagccactaaccttagttgctgctctcaaggaccccaagtggcttgctgctatgtagaatgaaataaaagctcttactcaaaagaaaacttgggtcaaggttcccttacctcctggtagaaaagctataggatgtaagtgagtctacaaagagaagcaaaattcagatgacagtgatacaaagtacaaagctaggttagtggccaaagggttcctccaacaatatggctttgacttcacagagacttatagtccagtggtgaagactgctatagttaaaattgttctcacaattgctttatctacaactagtctataagacaaccagatctgaacaatgcttttttaaatggggatctccaacaagaggtattaatggctcaacctcctagttttatttatccagaagctccccatctagtctgcaaactgaccaaggtaatttatggtctgagacaagctcccaaggcctggttcaacaagctaaaagatgctctgctgtcatttggttcttgttgtgccaaagctaatacttctttgttctacaaacacactacaactcattcaacatttcttttggtctatgtggatgacatcttggttactggcagttcccaagcagctgtcacaggactcatttctaatctctgtcatatgtttgccttgaaagacttgggcactatcaattacttctttggcattcaggtgtctcacactattgaagggttgcacttgtcccaaaagaaatacattatggacttgcttgccaaaactaaaatggacaatgccaaccccttaccaacaccaatgacaagaggtgagaaattgtctgcaactggtagtgacccttttgcagatccaacatatagaagcattgtgggtgctttgcagtatgctactataactaggctagaaatatcctatgtagtgaataacgtctctcaattcatgtaaacacccttagaggctcactagaagactgtcaaaaaaaaattctaaggtatctgaatggaacactggactatagtttacacatgaagccatctgcctcactcaccttaacaggtttttatgatgtagtatgagcttcaaatccagatgataagcgctaaacctccgaattttgtgtctatctaggttctaacattgtcttatggtcctcaaagaaatagagaacaatttttaggtctagcacagaagttgagtaccacagcttagctcaaacaacaacagaagtcatctggatttaagctcttctttctgagattggagtcaagattccaaagccaccaactatatggtgtgacaatcaaagtattgtccttatggaagccaactccattctccatgctagaacaaagcatatcgaatttgacctccattttgttcgagaaagggtagtcaacaaacaactctttgttcaccacacaccagcttgtgatcaaatagctgacattctcacaaaggctctgtcaactacacagtttcatatgcttcgatccaaacttagtctggtgtccttatccacactaagtttgaggggggtgttagtgatgttgttagttaggtgtgtagtcagtagtttgttagctcttatgtaactgtatatagttatttataactgtaattaattaattctgttattattctttccctttcttttgctgtatataaactgagctatttctccattaatgaacagagtttatttttccattcatttctctctttctctcccaatctaataggctgtaggagggtgcatgtgtgttggaggtcctgggtttgagttccaagttatgcattgtaatatatacatgcttaaatcaaaaatattttgtattttatttataataacctgttggaaattatttt

SEQ ID NO: 385202 - DNA, 774 bp, Cannabis indica
ctgataaattgaaacaagctaaatttactttttcccacaaaacaaggaagtccaagatatttctcatgacaaggaactcgttgtatcccaagaacagttgcaaacccagttgcaatactatcactaatacccgaggagaagcaaatagaagatttggaaagattcaccaattgtcctgaagcccactcataccaactcaatacttcttagaacctcagacacctatctcttgaagctttcaaaaaaaagaaactatcatcggcgaacgataaatgggatatcaccaatccccttctcccacacgtaaggcccttaagagtcttgaacccgcattcatgtttaataagcacaaaaagaccctccgcacatatcaaaaacaagaaaagagaaattagatctccctcaggaagaccacaagatagagtaaaattacctaccacctctccattcacgttaactgagtaacgaaccaaatatatacaatataatacaacttctcatcataccacaaatgaaagtacattcaatacggtcataagcatttatcatatataaatgtactttgttctttcaaaatgacatccccaaaacattacgcaaataattagtcatcgtcttagtgacaatcttatacaccacattacacaagctgattgaacgaatgtttgttgtcctaagcagctccttaattttcgaaatcaaataaatagtaggggcactacttttgcccccaatgataaaatcgtttcattttttatttatagattttttttt

SEQ ID NO: 385203 - DNA, 1450 bp, Cannabis indica
tttttttttttttgggaaatttggtttaacttcttcttacctttttcattcttttatcgttaaattgtcaaatgtttgtgttttaaaaaatgactgaaatgttggttgggagttacccaattacaaggaagaaaggtttaaacgtttaataattaaaaagggaacccaccaaaataatagggttaatactattttaaattttgtgtttgcaaaaattttataagataataaattggaccctataattataaaatggtacaaaatagtatactgaactcaatttttcgataattttttttaatataactaacttgaagataatttctaatacaaacatatgcaaaaaaatgtatctagttttgtcataacaactctaaatttagtaattattaacttttattttgataaaaaatcagttcaggtactattttgtaccattttaaaaaatacatatctaatcaataacttttacaaaatataatatccaaaataacatttactcataataatattaggaataaacaattcatgagttgtgtaggttgaagctaagcatatatatgtgtgaacaaatccccaactaattcatgctctagagtcaactttaaagagactttgatatagagtttttttctatttatttggtaggtagatcaattaattaattagaaaactaatatatacaaaatcaagacaaaatagttgtattaacattccaaattgaaagattatacatgttaaagtaagttctcaccttttttgaagttttccactttgtttttatcaaaaaattattagtaaagtatagctaactcctttttaagtcaaaacaacaaattaataagtgcctaatgtcgtctttgaaggatgctaattattttcttcttctttgaaaagggaatattaatcttagttctgactactttaattagactgcttttgtcttcatttataaactttttttttcaataaatcataaacattaacaaagtggcaagtgaagaatattaatggttaccttccccacttaaacaagaaaaaaaggttaccagctagtggtcaaaattaaaattaaatcattccttcaaaaaaaaaaaaaaaaaaaaaaaaaattaaatcatgatcatggagctggacatatatgtatatatatatattattacataagaaaaaaaaatgtttacatatagtcattacagatatttattgaattttcaaataataatactattttcataataattaaatatatttgaacaatattattctattaatgataattttttttttataaaattatcagtttggcacagctctattatgggcaaagcttactatttgataaataataaattttaaagtgttataatattataatttagtttattataattacaaatatatatataaaaaaaatatgttatataaaatttttattttatatatattt

SEQ ID NO: 385204 - DNA, 1386 bp, Cannabis indica
agagagagagagaggaggcaaaatggaaaagaagacaatcctttcggctcttattaagaaagttttactggtgcaattcgtttctctagtataagtgtattaatactctgaaaaatagtaataaaattcctgaaaaatgaaatgtaccattttatttatacttttaccagtgaacctttgcaccagtaaaagttttttcttctacaaaaaaaataggcgagaattttctcacctacttttttcatatgcaccggtaaaatttgatctgccctgcttaaaactattagcacgcgagagttctcccaccaaaatagagaacctctaatcggggcaaatttttgtcgagataaataaacctcttaaaatgtttttgcaccaaaagacagttaaattttacagtttcaccggtgcaattcatgaattgagccagcacaagtcacttttaccgacacaaatttgcatctataaaaggtctaactaaatagttaagttcttccatgctcctcctttttccgacaactttcgttgatgcatttagccagaagaaccgacaaattttgcctttcttgtagtggctccaacaccaaaccaccaaaagaaggtaggaaaggcgaggaccaccaccacaaacttaaaacagaccaaagatcacaacatcgacacccacctccttctccagcatagccccctgtcgagacctctagcaaccaaaactagaatcataggaccaaagaaacttggtacaagatcccaaccatgacacctaagacctcggagcacacccaaacgaccaaatcacctcccgctgacactagcaccaatggaatagacaaccaccaaacctccaaatctatacctatacacacacccaagcgagacacaatgcccatttaccagttaaaaggttaggaatggcctccttggctgagaagacgaaagaaaccaacaaaaaccctagtcaaaagcaggcatggcaaaaagatccattcattcgaatcggatcagtgatcggacagtgatccgatccgacggatcattactgatccgaaacattcggatagttattggatcttggatcagatccgacccgccccgcttaatttttttacggatcggatctgacccgatccgttttaaatatatatatatttttttttaaaaaaaaaagatttttactttttaatatatttttttaaggtgtaaggccagtggaataccaccattagacatatatgatctgcccatagaccacactatatattattattttaattaattactctctcaatttaattcttatatatatgcgtacatatatatataaaaataaaaatatatatgcatactggccactctatattttaattatttgattataataattat

SEQ ID NO: 385205 - DNA, 2163 bp, Cannabis indica
agagagagagagattgggattgttatgatattgtagtgtttctattagagatggcaaaacgagttttgatatggcacacgaatatgaatatgacatgaattttataagttagagttaacacgacttgatactaaataaaagcgagtcaaacatggtacgactcacttaatacgattttgatacgtttgacacaagttttttaaaataaaataaaaaaaattattattattaataataatataaaaatttatatttagtgatttaatgttgagttaaaaaaaaattaatttaattttctttaaaaaaattataaaatttctaattattattatatataagaaaaactatacatacaacaatctatataagttttttaataaaacttaaatctattattttctctacaactcaatcttcagtaaagtaaaatgggttaaagtggctcaatacgaacacgattttttacaaatcgggttagagttgaaaaagttagacacgagttaaaaatgggtagacacacacacctgacactaaatataaaagcaagtcaaataaaatatactacgaacacgatataataacacgttgctatttgaaataggaaatttacatgaagcgctttaattcattttttttttcttacgatttttcttttaaatttcaatttcacattgtaaaaacataatgtaaatgttgcagttaaaacaaagttttttttacaaccaaaaacgaaggtctatattctgttaaaaaataaattcatgaaaaagttattaaaaatattgtagatcagaaaaaatataaatttttattatttttgaatacttataaaataatctcaaaattgtaaatgaagaacccaagaatgtataccacctaattttgtttagtgagaaaaatgtaaacaatgatttccaattataatttgaattgaaattaatatttgtaagatatgacaatttttatgatatccctaaaacacctctcatttacgtcaccctcatttacacaatcagatcaacccatcggacctacgtctcctacctcgcaaactcacagtttcattcgaccctatcagaccccgtcagatcttgcccaaatcacagatttgagattctaaaaactaaaaaacagaacacaaacttacctttgacattgtgtccgatttggttggaggtgcgccgtgggtcggtggggtgcatcgtgggtcaatgggggtctacggggtggtttgttgtgggttgggatgttgaaaagacctgttcaaaaaatcgagagagagagagagagagagagagagagagagagcagaggtggtgggttagcgatggtgatccgttaagagaaagaggtggtgtgtcaagagaaagaggtggtccatcgagagtaaaagagagagcggagggagatcgggatggtggtggattggcgatggtggaggcagatcgaaggagtgaggcgtgagggcttgagattgtgtctgaatgtttagatgagaatgaggcgccagagtttggcaaagtatggaccactgttgttctaaaccgtgtcgggaataatgtatttttgtaaattttctcgcacttataaactgttgcctaaatctataccatattaaaaaaagtatttttgagaccgttacaaattctaccttttgtagtagtgtgacgaacttaattgtaccgacaaaactttctcgcctaatttatgaattgcgctggcaaaatataagtaattctagataaggaaaatattctgatatacatccgtacatgtagtttaatatacatgtattatattaccttatagctaatatattagaggtgtacatgttaggcagtattgaataatatgaattaatgctactaatattagtatgattagagtgttaattaggttggtattatagttaagtacaaacattcagatctcaatttacgcactagatgcgaatagttgatttgtggtaaggcacttagttacaaatcaattaattatattgctatatatatataaggaagaagtttcaatggttacatttttattgtaaccatcatggttacatttttttaagccattagattactattaaatggttgtgattattttggaaattaaataaaaataaataataaataacttgtaacctgaaagtaacctaat

SEQ ID NO: 385206 - DNA, 879 bp, Cannabis indica
gaatgtttcaacctttaacaacctcaattctagaatgatctttctaactatgacttacttagtagtgcctaaacatacttggtatgctgatcctttctatccaacaaaagagaaacaatacccaaaaaactgatttgcagaggagacctgttgatctgcttaggtacaacctcaaaccttgcaaaaatattattgcctttcaaaatcactccactcagtgcttgtttaatcttcaaattccactcacccaactcatattaaaaatctatcccacttagttttatttcattcagtataaagattagtaaattatgaagacagctttaaatgtagtattgtaagttataacaatccttaagtccctgaatcataccctatttatgttttttagttgcagcattcagatagtaaaacatttgaagataatatcaccctttactagagtatcatttcttgaatgaaacacataagggatttattacaattaagaggcagcgtcatctggtttcctagaattgttttagtaattaattatgcaatgaacatgatatgcaagtgcaatatatgtttatttataagaaaccaccaataagaatgtttattgagaataaacggtgtcaaccaagatggtgagccaaacaattcaggatgtttttttctctctctcaataatatatctttagacaagcatacgacttaccccaatttactttccattcaaaagtacaatagtctacaactaaaccaactgcttaccattgaaaaatacaaacacatgtatgacctctctgtccttatgcttccattaagaaacaaaatgactaactatttcataaaaggtccataaaaaacagagcacaatataatttctgttacaac

SEQ ID NO: 385207 - DNA, 1708 bp, Cannabis indica
atgatgatgatattgagtatcttggtatatatctatatttattataaattattttgttttgatgaaaaaaattggtttttttttgttaggttaatgtgtgtttaaagtttctatcttttttttgtgttctatattattacaggtaattgtgatgttgagaatgaaaagatgagtcaaattggtggaataactactctacaaactcagttacacgtatgttataaaacaataaggattaattaattattagaacaattttggttttcattgtttgcaattttggtgaattcaataaaaaattcaaataatacaaaattattgtaaacttatttgatcaaattataaattttgctatatcagaaactaaacctaatagatcaaaataaatgaatagaagtaaaaatgaaagatattgagtttttaaaatagtaagaattaaattttatgattactattttaacaaaattaatttaaagttttctagctataagcatatttggtattttcatacatatagaaatattggctttcttattttttaacaaaaaataaaaattataatgagttaatgtttatcaataaattttactaatttataatgcttgttaattttcatgtgtagtttcaacaaagccatgagagttatagtaacaacaaccattgtacatcaaatctagctgcaagtgttacaagagtgaagtcatttgagggaaatgttttgttgattattgtgttatgtttccattcaatcttcgagggaatcgccattggagtagccgagaccatattcgatgcttggaaagccttgtggacaatcactttacacaaaatatttgcagccatagccatgggaatagccctaattcggatgatccccaaccgctctctgatctcatgctcggtccatgcctttgcctttgctatttcgagtccatttggggttggaataggactcatccttgatgccattgcacaaggtcatgtggttgattggatctttgccatttctatggctttggctagtggtatcttcatttatgtctcaataaaccatcttttaatcaaaggctacacacctcttgataagaataattttagtgtaaataaatctcattacaagtttttggctgtgttgtttggtattggggtgattgatattgtgatgatatgggataattgaactcacaccatataaaattgttcttgtatatatacaaaaagaaaccctacttttggtgggttaggttgtttctcatgtactagatgatgttgtaaattagaatattggattttagatttttattcttaatgcaaaaatattttaaattgttcaagatgagaaatatataggctcaatccttgactaagggcaggttaggcctgtgcttaggactcacctaatcgtagggccaaaaaaaagttttttgtgttatttggtgcccaacactttttataagtggcgcatcacgattggttagcgatattctttaaaagttattttcttaagttatgtaagattatccgatattattaattacatcaataatagtatgacacggaagaaaatactaaacactaatgatgtttttttaacagttctcctttgtaaaatgtgttttaaggccaaatatataacacataatgttatattattttataatataataaagtatagattaaaatgtgataaatatatgtgaataatata

SEQ ID NO: 385208 - DNA, 897 bp, Cannabis indica
ttgttaggtcctaccataattttgccttatatatatttgagaattattaaaatatattattggtgctaacaacctcctcgatatcatactgctattggtataattaaatattatataaataatttttaaaaaaatattactaatcaatcttatagcgccacttatatattttggtgtccaatatttgtgatagagacatggagaagagaggactgagatgggagtaagtaatcataaacagcttattaggagtgagaaactcattttactgtatacaaatccgatattgaaggttgctttgaccaaaatgcattgaatttcaggcagttagatttgggcaagcctagctatatattctctcacactcccacacaatacaaaacaagatagttcgcgctattattgcattaccaaacttcaccgatcaatccctgccttaaatttatgcatttatatatacaataacaataattttgtgggatcaaaatcaaaatgtgtgcttatttttctttttttttctttttttctttcttcagaagtaatattaataaagaatagtcttcaaatttataaaatgtttctttctagagaagtatcatatccattagggcatttttgtagggcacatggttattaaataataaatactaaaacatatagggttgccacttgtattgagttaatcggtactgacctcgaatgattggaatgtcttttctttaactattcgtcggcgtgttaccaggtcataactttaacattcatatgctcatatatatagagtaaatttctatgggactatgagatatttttctagcacttaattgttgatctaatggtaataaagttgataaaatatgatagtaatagtgaaacctacctagtaatatttttaca

SEQ ID NO: 385209 - DNA, 1382 bp, Cannabis indica
agagagagagagagagagagagaggggggggggggggatctgccttatagagagagcgcatagtgagtgtgagagtggaagaagaagtgagggggagagatggagatctccgtctggggttttgatttgatgaagaagaagaagaaggtgtgcatgtctacgtgtgttgtggagcattcatttcagaaaaaaagtaaatcaaaatatttttaatatttttaattatttattttattttattttttaaattatttgtttttattttttaaattattttttataatatttaaataattaatattatgtgaccactaaatatttgccgcgtgtacatcagggtacaccgaggcatgtccaacgtggcacttaactgagttttttgaacagaaaagtataaagcatatcagaagtgcaattcaaataatttccttgtcaaagatgagtttataaagttaagtgttacaaatcataaaatttaaatggttttactagcaatatcccttgatatgtttgctttggtcgatcaagtttaagaagagtattttcttaattaccgttgcagccaaattaatgagaagaatgagtatacagttcttatatgtgtgagtcaattcacttataattctattcaaaatgatcacttcatttcgaagtgtagtgggccctccccatcaatcaaatcatctaaaaacaaaaccttatatatgcctcatttttatttgtttaggcctgcgaatttgttgcaccagaatttatttcaataatttattgtcacaatagttttatgtaaagacttataaataattagttattcgaaaacagttctataaaaacagattaaagtctgtaaaaagaaagaaacaaaacagtcaccctaactatatctatgtatttttatatatatatatggtttatatgcaagtgtaatataatatattttatacataaatatatgctaaagaaatcaagaaaaacgatacagtgtaagataagatctcgatctattagatcgatatacatgttgacaaaaaaattaaatgatcaaattatagatgagataatgtgttgaacttaagtatgggtctagagcatgacacaacagtactatatattcactaaacagtacacgggatcaacgtgttgagccatattgagcagaaagacaaattaatattcatgtatgtcagacacatgtttatatatatcgatcataatatataatacatgtacgtatttaatgcttagagagcacggtagagtatcataattatatattaatctatatgtacattaatatatatatatatatattcgatgtaaaattaactatataataaaatttgaaatttttacataaaaaatccattttacacaatttatta

SEQ ID NO: 385210 - DNA, 2322 bp, Cannabis indica
ttatatacgacccatcggtccccgcactagttgagatatattgcttgtaagactcatataattggtttgtattaatcaattataattctacaattagactatgtctatttttgaatttttcacttaagaaggacgaatacgtaagaaagagttttacggggcatatttgttactacttaaataactacaacttatacaattaataaaaaaaaaaaaaactaaaactgaaaaactcttcaaaatatgttgaaacatttaaagagcctccctaaaccctaatgttgaaacaatatttagagagcatcccaaaacagtcatttacattaaaatatagtatggttggctgggtttgtcaaatcttctgatatggctaaaaagattggttggtggtttcttaaactccaaattataaatacttcatgagctgttttttccttttaatttcttttatttatcaatatcttttttacattgttattggactttagtgtttttagtatcaattagaagttactttctacgattagttcctaatattctttaaaaattattattttaaattatataagactgaaaataaaaagagagtactaataataagcgcgagtgccttctaacatttctcatatttttttaacacttgggaggggattgagcttggtaccactctttgggaggagaatttgtgaagctaataggtaggcagtgaaatatgattggatgcatctaaagatgagagagaaaaagagatacaataagatagatattggttcatggataaaaaaatattttggtataatatttttaaaattttgtatttttgaagcttctattaagacaaaatgggtttgacatttgctcagcattacgttgatttgtttgtttgtttttttaaatttttttaaataaaggaaatagtcctctctgaagaataaatgaagttgatgaaagggactaatcttgactcgagggagtttttttttctttttttaaccatttcttgggaatttgtttataattattatatgattacaaataggtgatggggtaaggattaaactttgtgggaactttcaactttggttggaaagagttaagccactactctagtaatctgctgagctctttctcccaaccactttgccaaaacagacaacctccttcaaacttttctcttgttctctctcttcatctctttctatttattttttcatatactcacaacaaaaaagaaatgtattatagtgtttgtttatatgcactctctttgttaggtttgttactcttgtttttgcattgcatggttctcatgattttcttctaattattcagtttttatctttttttaataagcttttatagtattgttttagccgtccaactaaccaaataaaagataattgcctgagtttaagtctctttacatttacaaccaaataaaaaagaccaaatctacagagcattgatttgacttcagtctgcaaatctcatctctctattgtttcattcaaattttattttcttgtttttggaacagaaagagttcatcaaaatgtttgtaaaaaagtctgtttgctttaatcactaaagatttcatttttcaataatcatttccatttgtattttgttttttagggtcaggaatgttgtttaagagaacttcagtggttttggtacttattttggtgtcatgggcatttcaggctgcaaggcccccaccacctaaaacatgtggctcccctggaggaccacctatcactgctccaagaattaagcttagagatggaaggtttttggcctacaaagagtatggtgttgcaaaagaagttgccaaatataagattgtctttcttcatggctttgtatcttgtagacatgatgcactggttgcaataaccctctctccagtacttaattctatctctgttcactctcttatgcgtgttgtatatgttatatgtccatgtacgtaaagactacaatttttattttttcaggaaattattgaagagctacagatttatgtagtgggatttgacaggccaggctatggagaaagtgacccgaatcctaaccgcacagtaaagagtctggctttagatgtagaaaatcttgctgatcagttgggacttggatccaaattttacatgatgggattttccatgggtggtcaggccatatggggttgcctcaagtatattcccaataggtatggcagtagccagttataaaataaattgttgtcctgtttaaatggtgatgttaaagttagaagcttgggatgtttacaggcttgcaggagcaggactcattgcgcctgtg

SEQ ID NO: 385211 - DNA, 912 bp, Cannabis indica
accatggtgatgatgaccatgactatgaccatagctagccctaatttgcgatgggatcggactacggtgggcttttagtaaaagtacataaattagtttattcaacccacctcatgtatttattaagcgttttagatttttagttaggttattcaagttgtatcttttgtcaatttattcaatttaatttgacagtttgtcaaattttttggacacccctacttgggactccatttctaagcctaagaggtgtagtggtcttgatattaggcgttttggatatttgaatgaattttcacctctttgccaaacttggatggatgttggcttcgagtcatgatgttgtggaccaggatattgttgtctaaatactataaaggtgatgggtccactcctggccaagctccttacctacctcagcgtaccctgtggcaagaggtatgggatactatgcaataatttgtgggataacttgatgtggctccctaatcgccaatctaaggccccgatttgggagtcaaattggttatgcatggatagtaaccctgtggagaagctgtgagattcgatttactaggtaggggctgctcgaatcaagagttggttcatatactctgtcctagagttgcgcgttctgatgtaccaacgcaaaagttcaactgcacacgacaaaagtacaattgacaaacttgaaaaatggagattggtttaggaaaccaagatgccctcagatgcaaattatactagcaaaaaagggttcaacaatttgtttccatgtgcaactaactactagcatttgtgacatgaaattgataagtatttttagaaaggcatcagaaaataatgggtagtaggagactctcagcacagattaaatcagagtggtgcatgacattctcaatctctcatcat

SEQ ID NO: 385212 - DNA, 1968 bp, Cannabis indica
gccaaaactgcgaaaattgttcgcggaatcattgatacagtggccaagataccaggcacagcagtgcttcagatttctctctgcaaagaaatggtccagtggactcgtgacgagaaaaggacttttcttcgacagcgagtggaggccaggcttgcagctcttttgatggagagcaaggagtactcagaggccctaaaccttctttcgggtttggtaaaggaagtcagaagactggatgacaagcttttgcttgttgacatagacctattggagagtaagctccatttctcccttaggaatcttcctaaggcaaaagctgccctcacagctgctagaacagcggctaatgccatatatgttcccccagctcagcagggaactattgatttgcagagtggaatcctgcacgcagaggaaaaagactacaaaacagcgtacagttacttctttgaagctttcgaagcatttaatgctttagaagatagtagggctgtgtatagccttaagtatatgcttctatgtaaaatcatggtgaaccaggctgacgatgttacaggagtaatatcatcaaaagcaggtttgcagtatgttgggcctgagttggatgccatgaaagcagtggccgacgcctactcaaaacgctctttgaagctttttgagactgcccttggggatttcaagggtcagttatcagaagatcccattgttcatcgacacctttcatcgctttacgacaccctcttggagcagaatttgtgcaggctgatagagccgttctcgcgagttgagattgggcatatcgctgagttgattgaacttccgattgatcacgtagagaagaagttatctcaaatgattttggacaaaaaatttgcagggactttggaccaaggtgctgggtgcctagtaatttttgaagatggcaagactgatgccatatacccggccacgttggaaacattaaccaacattggcaaggtggtcgatagtctctacgtgagatcggccaagataatggcttgaaattgttaccgtttccttctcttttcgtggaaatgtcatggaattcacagacacttatgttcaactttttttttctctttagaaattaatgctttggatattcatttgtttcttcttttcttatctgttctatgttttgagttcttaatatcagtcatgtgaaactgaaactcccaacaaaaattctgacaaagaaagctgtttttgcatttacatgcatattctgtcatatgacaaatcatgtttgttctattgagtcaatttgaattgaatctgtgttctgctcttcacctttgtaaaaatactcatcaaaattctcttagagttcgtttgggacgctgtattataccgtattgtattagacaatattatattaaattgtattttatgtaaaactatagatggtattaacattaaagtttaagatagtattatataaacatgttatataattcaatttaatataatataatatgatctaatgagttttggctttggattttgtaatgtaatatcgtctttccttcgtgtataagagtattcatgtatgtaatatttgctggtatttaacttaagaaaatagataatatttaacgttttattaatttgaagagttatattacaagaatttaaatttagatggttaagtcaagaaataatagttggaagaatttagtcgttaaaatattccaagaattaaattagaaagagctctattataaaatcttcctagctgtatttcacttgtatttaacaagaaaaatatttaaaatttgtacaaccgtaatagataattttatggttctaaacagtaaaaatattcaaaattttgtacaatcatattcttataattgttttaagttgttggtattataaaaatattccaagaattaagaaataattacataaaataatattttttgtaaattttttttacatttttac

SEQ ID NO: 385213 - DNA, 4422 bp, Cannabis indica
atcagtaaagtcaaaacgtttgatttcaattaaaaaagaactcaataaggttgtcaatgtcatctagatcgatatgttaaggatattctaaggtgataaatattataaaaagtgacaaatttttattagtatattttaatattaggttccacatatttatttttatttaataaagagattatttcacaaatacacgataataaaaatattacaaaaatataattaaaattttaaatttttttacaatttttatgatcttatttacagaaagtatagtcttttgattatatatttttatattgtactcttgttaatttgctatatgtaagttattttttgttgttgttttgatgttatttttctcttatttttatgtaatttccttgttattttatagaacaccataaaaatgtaaaaaaaaaaaatctttgaaagtaaaagattaaattcttgtgctttatgtaattatttctttaataaatagcatgagatatcactaactaattacaaagagccacctcaatatagtatttaacaccttagtatcaaataataacacttattcttttatttgatttcaaaacattcaaaaccaatttaatttaaaacaaaacaatttatataaacaataatcaggaaaaataaaaaatactccataaaatttacttataaactctaaaataattttggagaagatgacaaacaccacacacaattacatgattctatgcaagggaaactttagtgggccataataaaaaacattgggctagtatttttaaaatcagtaaaaaatatatgtgtaattttaaaaattaataaaaaaattgggcttgagtgggccttaagtacaaacttagtttgcctatgtccaaagccaggcctaatcccacgagatacaccccataccgcacaagctaaaaaaaccattaatatactttaacaaaacattttttttatgaataaaaaacttgtattgctcaaaatgaacacaattacatctctacttttcatgtacatgtaaatctgaattatacacaatatattttaggtacatgtaaatctcctacaaattcaacaaccattgcttgtcctcttctttagttttgctaggcagcacccccataattctgattttgttgtcatgctgaactctgttcaatatgaccctaatttgctatagattttggttccataaaacatcattccttgccctccatacataatataacatccctgccattatagtgatcatcatgctcttccgagtggctgagaggcctttgttttgctgatgtattgcaggatttgctgcaatttgattgcttttgatccccattgcaagcctctgttaatctcctttaaacaattcttgctatattcacaagcaaaaaataagtgttctattgtttctttttctttcccacataatagacaagtcatgtctatgttagtgtcaaattttccaattcttttcttggtatttaatcttccctaaagaaccagccatagtatgaatttgtatttaggaatgatcaatctatcccacacaaatttacaccatgaaattttcccatgattgctgaataacaacctgtagccattctgaattttatatttctgcagtacaaaactagccacatcagttttcagcttcaacttattcttgaccccaaccagtttcttccaataccaactacagtcagcgtcatagtcccaccattgtctatcttttaagtacacattatgtatccatttcacaaacaaacaatctttcttactagcaatatcccacacatatctggccattgctgcaacattccattcctgaatgtttctaaaaccaagacctccagctcccttggggagacaaattttttcccaagccacaaatccaggtccagctccatcttgtgttcccttccataaaaaagatatgcatattgactctatatccttgagcaacttctttggcaaaattagaatctgagactagtaagtatggatggagattagcactgcattacccagtgtcactctccccatataagaaagattccttgagctccacattttgactttgctgaccatatattccaacaaacattggcattcatcattggatattctctttgaacatatagatattccaagttacctaaatggtagggaacttcttgtgaaatttgaggcctccaatattctcacaacttcaggttctggcattccagagaaatagattgcagtcttctgttcatttggcattaatcctgatgttgaagagaataatttcaatccttttcgcagcaacattattgaaataaagtctccattattgaaaatcagtttatcattagcaaaacacatacggttcagtttcaaagttgagcatctatcttggaatttaaaaccaggccaattcccaatcttttgaaaaattcgagagaagtattccatccctagcacaaagagaaggggagacatgtgatccccttgtcttaaccctctctttgcattaaagaaaccacacatggatccattgaagagcaaagaaaatttgggagttcttatgcagcacataataagttgtataaactggtcaggaaacccataaccgatcaacatttcttctaagaattcccattcaatggtgtcataggccttccttaaatcaattatgatcatgcaactagatttgcagtttttcctcccatatagtctcaccaaatcttgacaaactagaacattatgtgcaatatacctatcgtgaacaaatccacattagttctctgcaataaggtcaggcagggtcttccttaatctattgcaaacaactttggtggcagtcttatataggacattgcaacataagataggcctgaagtcagcaacactctttggacaagtagtcttaggaataagagtgatagtggtagtgttgatttcctttaacatttttctaaagctaaggaaggacagaacaacttccacaaactctatttcataaagttgccaattatcctggaagaatgcactgccaaacccatcaagccctggtgccttgttactaggtattaaaataaaggcctctttcacttcttattcagagtattcagcaaggataattcttctatgatgatcattaacgttgggcccaaggtcaatcattgattgaaagactctttttgtatcttgcatatttgtccctaataatctctcatagtagcttagaaaagcatcttggaccccttctggtgtatcacaccataatccatgctcatcttcaatcgagaaaattttcttatggattcttctcaacttaagagaagcatgaaaaatggcagagttgtcatcaccataagctgcccaagtaactttggctttctgtgataaaaacagagaatatgccttatgaacttcattgtacttcctgcatgcttcttgctcagcctccatcagctccatattaagaaggtctttgctcaaattctcttgtgctacagttaattcagcattagcaaataaatctgctttatgtatctcagaaaagccctctttattgatcttcttcagcacatgcttcaaccttctcaatttagtaacaattctgaacattttggaacccctgacttcttctttccaacattcaacaacctgtttatcatatctaggggccaatttccacatgttaaaatacttgaagggttttttttttccaaagctcatatcctggtatattgacactaagatagggctatggtcaaagcataattcaggcaagaaaactgcttcagaacaaagaaaagaattcatctagtgagaattgaccattgctcaatcaattttggaaaaaattctatcctcatgcttttgtttattattccaggttagaaatgttccagaaaacttcaaattaaacgtaccacaatgctccacacaatctctgaatctctgagaatgagtacattgtgctttctttccaattctttcatttgcattaagtatctcattgaattcccccatcattatccatgcctcatcaatccccttagctaatttctccaagtctgcctatagctctcctcttatttgttcatcattaaagccataaaccagtgttacaaaaaacttccctgcttgctgatttgagtgaacatagcaatgaaacagctgactagaacaaaatttaataactacagtgtagacattaggttatcaagcaataattattctccctttgtctaactaggggttgttattagaaaaaccccatccttgaaacaaactagtatacagtttccccttattcttattttgaatgggaaatttgaatttctatgcatgcattaggggataattttttccctaaactaatacttttttacattgaaaatatatgatcacttttccaaaaccccaaaa

SEQ ID NO: 385214 - DNA, 1252 bp, Cannabis indica
tattgtttttaaaaatcactaacgaaacgtgactacgtgttttaaaaacttcaaacactattttttgttctcatttttaaaaataattttttaaaacaaaaatcagaaaataatatcaaacatgctctaatattatctcaattaagtgtgaaggatttgcttcgttacaggtccgtatgcaaagaatggcataatctaatcgacggtccagatttcatcaagatgcaactcaagtcatcaaagcaaggactctttatcaatacccaaaaagacttgtattggttgaacctcgactcactcgactcggttcaacaactcgacaaaaccaaaatctcctttgactctaatggccttattgtagctaataataataataatggtccttcaatttggaacccatgtactagaaaatacactaaattattaccttatgataactcaacagtaccaattgtaattggatttggttacgatcctctaatagatgaccataagttattaacttacactgtaaagattcttgatgagattgacatttcatgttctttatgtgaatttcagctctattgtgtgaaggccaagacttggaaaaaggttaattgtaacaataatgcctttgtagagaattatggttacgagttatttggttatgcaaatgttgagaattgtttgtattggatagtgaatccaaggttgaaaaaggacaatatttcttttattttcgggtttgatcttcaaaccgaaaaacacagcgaattggctctaccatttgatcataatgatgaagcttcacttctcatgtttggaccccctgtgggattggaaggctgcctttgtgtgactctacgagtaatcaatacgcgccatcgatggaagtttgagatttggggggtgaaagtgaagaatcatgaccatgatcatgatcatgatgatcacaataaacaatgttggagtttaatgttcactttggtgcctgatcatcctaatagatttctatgctattttgatattattcttccaataaagaatttcaggagtacaaatcaacttctcttagatgttaatcacaaactcttagatgattctttcgaagcatttttgggtgttgttaggttataattaacctatatttcgggtctttaaagttagcattatctcgtctattggtgtcttttggagcagttttacgcttgattttcattatttcaggttcccggggtgttaaagttcgaattcagtcaaatggcgaaaa

SEQ ID NO: 385215 - DNA, 1210 bp, Cannabis indica
tccccgtcggtctgctctgccgtgactcctaggctacgacagacgccagacactagtggtggctgcgaagccgtcaaggcacaaagggtaagtaagctcccaaaatttattctcagctagttgcattctcaacacctctatatctttctatgtttatcggattcttcccatttgagttttttactttttgttttctttgtttttaaaggtgttttatggatttcctctttgatttcagtcatgtttgtctcagtcctggctttggagtggttcgatttatcttgttgaggttaaatttctttttgttatttttacatatatatatatttatacactgatagcaaatagtctgaaaattgggaatattcatgatacttggaattagaaataaaatacaattttgtttatgtatgcttctttcttgcgtttgtcaatacatgaaaatatgaatcttaaactatatttgatttcaccaacttttttcaactcattgtccattgtctaatgggctgaaatcacgagcaaataatagaacaattatgttaacccattaaatatcacaaactaaaagaataaatttatgtgataaataatttgtcctataactgcgcctatgattctggacactaatgatgaggacaggaatgatgtatatacgattataacttttcattctacatagctaatgagatcacaaattacaaagctaggtatgttctagttagtttggttgtaaactaactgacaatttgaatagctaaaccatgtgatagacatggaatccatcctttatctatctattaaaaacaagaaaaaacaataagaaaccatccttccatcgagagtgaaaacaaaccttatcatgtaccaaaggtcagtactcagtagtatctcacttagctgcatacaaacttaagtaacattgttaagtatgagaccattgtgtgttcaatgaattattgtgaaagagtaaaatttattgtcatgtcttgctgaattataacataggttatccaaagcacttcattcatggtgtctcgcaacacaagtaatagatgaagcaatagagaagtcaccaatgagtttgtctccatgtcaaaggccatctaacattcctcaaaacatagaaaggtacttacacttgtaatttgtatgtacttgatttttatttgaagggacctatctaatgtgaagttaatttatacagtgg

SEQ ID NO: 385216 - DNA, 1323 bp, Cannabis indica
atatatatatatatattagggaagagatgattcaaacttaagacgaggagaagtgtagaactattaagctatatttatgaccacttaaattattttattagatgcttggattgtcgctctgttcaaaatattatatattcatttcccaaaaatgttaaactttaccttatgcttaattattttagaataatgctagtatttgatttagattaagttttaatataattcaatccagtatgatttgtttgtccagtagttttgaacttcttaaaaaatgttagatccatgatttagtattttcacattccttttcaaactttcaagttctttagttaatgatacaattttaaaatttctcgatttcaattcaaactcacaacatttatttttttccttcaagatctttgatgttgtgagataattctttactaactttaaccaaagaacgattcccaatacaaatttgtaactacttactatatatgaccttataagattctgccaaagatttctcatcaagttctgactcgtctgaatttgaaccaactttttgattggtgacattagttaatgttagaacttattttactagaatcttaatttactaacatgtatgtttgattatcacataataatctaaaatcctaatatataaatatcataaaacaatcaaataacaccttataaggattacttacactagtggcagcagactaatatctcattccgttcagtactctaactcttgttcctttctatcgtagagtaataacaagtattgaacatggatgctcatttgaattgacaaaacaccttcttgacagtcttccacattgatctaagttttgtcttgaattgtgtgggcaataccttaatcactaaacacgcgaatttgagagagagagagagagagattcaaaattttctaaaaagaaaagtaaaaaacttttctctcattcagttttctagattttgacagacaaaagagtgttagtgaatcaaagcctttatattccttttatagggtctctctaggttgagagttttagagtagaacgtgctttagaaaaagatagtagccctaaaaatctacccttggtcgaaatgcactattgtggctagggatgcacacgaggcaaaaaattggcagagagtgctcccctgtctccatccccacttattcccaattagggatggagcagggaatctcctaatgggggcggggacaggacgaagaatcccttaataaaaaataaagtttataacaaaaatattaaaatacataaaaattaaaatattacacattaattattattcaataaa

SEQ ID NO: 385217 - DNA, 682 bp, Cannabis indica
cggatctattcattaaaaagaatagattcaatacatttttatgtactcataggtgctatgttggagttgaatgattgcacatagtatagtaagctggcagaatactggtgcaggcaggttacatgggtcaatttggaatatatttgcactacgagtcaacaaaacaaaatgaggggaataagaaaattctacaagtgaaaatccctttgtatacactgttaagtgttaacttaaacctttcaaataaataaataaatatatatatatatatataaagcacagagtacatattttctatttcactccgacaacatcgtcccattcgattatggttagaaatgagcttccagatttaataaatggagaaatgaaagataaaaatgtgaaaagagaagtgaagtatacattattaagaagctgattaacgatctgttgaagctgctgaggaccagagttctgaggaaggtacatggctggtcccaagggagcaccctctgggtcagtcagtaggcacatcacgttgttcacaatctccatttctccctgtcctgacgcttccacctccattttcgcgtattagggtttaagactcgaaggttttgagttgagaaggaggttaaaggtttagtgcatgtttggcaatgttttgtgtttttgtttttaaaattatgttctcaaaaca

SEQ ID NO: 385218 - DNA, 1880 bp, Cannabis indica
ttgtagtagtataggcctaggtcagtcatgaaattggtaccctcttgatcaggttgatgcatctctatctgattggaaccttaatatgcgtccataaaactcagttggtcaattctgggcagcgggaagcagtcctttggacatgatttgttcaggatggtgaagtcgatagaaaccctccacttcttgttgggtttaggtaccaacactgggctggatacccagtgagggtagaatgcttctgttatgaagtcattagccctcagtctttcgacttcgtctttgagcaccttggcacactccttgtctagcaaccgcctcttttgctaaacagaccagatgcttggatcaatgttgagtgcatggattatcatcgaggggtcgattccaaccatgtctccatgtgaccatgtgaacaggtccaggcttaccgttagaaattttgtcaatactgacttgatttcttgacccaagcctataccaatcttcagtcttcttgttgggtgagtgggatcaacttccacttcttccaactcttctacaggtccgaagcttcatgtaggatccccaaagcaaggatctatgtctgtgtccccagcttgggctagacttcattgtcccttgctaggcttgtcttctttacttttgacgggcatcttctccgttttggccttggataaggccaagttgttacagtgacgggtagactattggtctcccctcacgcatgccactccatgccttgttggaaatttaaggcataagtggtagatagactattggcccacttctaattgctgttaaccctgtctttgacgagagaactaaacacaaagaaatcgattgtcatctcgtgagggaaaatgtccaagagggagttgtgaaaactgttcataccagcaaagagcaaataacagacatatgcacaaaagctttacttcctaaccaattcgaaattctcaaagaaaaaatgggaatttgcaatatatacactccaccttaagggggagtagtatcaagagtttgttgtgtattgagttagttaggtagttagaattctgttatgtctattatttttcttgttcattagttgttggtgtgtgctagttgatggtgtatgttatatatatgcccaccatttgtactgaactatttgatcaatgaataatcattttttcatttctctagttctttctctgcttcagaactaaaagctttaaaataaataatagaggtttaggtgaatccattaaaatcctagaaagataatttagctcatcatcaaagtaataccatccatgaaataataattaagagacatcaaaaataaaaatagaataagaagagaggaaaaactatatataattgaaggacgctatcaatcttgatccaagatttatctccaagtttccgttggtgttttttccagtttaaatagtctacgaatgattaaaatcacactaagtagtgtttaaatagaagcccaaacgatttgtgatgaaaataccatgttacccctcttaaaatgcataaatttgagtcttgtatgaacgcaagctccacaacactcaaataggcactgtgactcctcttgggtagcgttgtgactcaaaagttagtatctcaatggaaaatatggtaatgcgcctagggtttcacaattacgaccttgttctggcttcagttgggctgcacaccacttatatatgggacatttacatctcatatttttcccatttatttcaattatactgttatacggcagttttttcttttttactgtctatttttatactgccttcttattttgtgtattttatattgttttgttgataaaagttttttttattcttttttgtttacacgtgtaagcctagagt

SEQ ID NO: 385219 - DNA, 2252 bp, Cannabis indica
aattgctttgtgtccaactcaaccacacacctgaaagataggacaattcgcacatcgattattatagtttctacctccttgtcctgtagtggaaccatgaccacgactattagtaccattgttttgtgcagaggaggtgtttttcttgtttgcaactgcataatttgcagttggattatgaagatccaatgcagcaatcgatgtttgttgatcaattctcatttcgtgagtttgacgcaagatgcaagaactaaacatcttgtaatgtgattgattctttggaggtaagagtgactatcgcaaggtcatatttgttgccaagacctccgagaatgtacaaaataagcttatcgtctgtgatttgttggccagcagccattaacgcatctccaagatagcgcatcttgagaatatattcctcaattgtggtttgagccttttcttgtcgattgaagtatccacgaagctacagaattcgtggtcgagagtgtttgtgaaaaattgaatgaggacattccagagttcagcagacgaagcacatttggcaacatgtcctagcatccttcggagatggaattgaataaccagctcatgagaaatggatcagaacgtaactggtcggccaattctggattttgaatgaatcgtgattcatctgcaggatcagcaatggtagctagaggtcttgtgcgtgcaccagtgagaaaaccttccaattgattagcatgaactgtggatagcacctgagaacgccaatacagatagttgctccgattgagacgaagattcagtggaactatgtgattcagaatcacttgagcaggagcaggagaggcagattgaatgtagtagaggaagaggacgcatcacgtctgaaaccagcaaatgaggaagatcccatggatgaaaacttcaagaacagtttccagaaagaaagaagaaagaaagaaaaaaaaggaacctagaaactaataccaagttgtgaactttgcggtataaatactatatgttttgagttttatacacttaaatactacatgtttttttcgacgaaataaatatcttatgttacatttttattacttctgttactacttttcggttaaatgtaccagaatttgatttatatcccacgtgttgatttatatatggatattgttgagtagatgctaagggagaataagttcaaacaaacaatttctcaagtaaaagtggaggatgatgaagaaatcacatatgagaaagcagatgcagctatgagaaggtctattaatttttggtctgcgttgcaatcgccccatggtcattggccagctcaaaatgctggtgtcatgttctacattcctccattggtaagttaattaaatacccaatgttataatcataatcctttttagcttaataattaatcaattaattacaaatgataactgcatgtaggtattttgtatgtatatatgtggacatttggacaaagtattcaataaacatcacaagagagaaatgttatggtacatgtattgtcatcaaaacgaagatggaggatggggattacatattcaaggcccaagcatgatgatgtgtacggttcttaactaccttgccatgcgtattcttggagaatctgctgatggtggtcttgataatgcatgctctaaagctcaaaaatggattcatgatcatggtggtgctgttggctctggctcttggggaaagacatggatggcagtacgctattattctatctatacatgtttatctattaaataatcatgatgtaatgttagactatacacaaattctagcttgtgaattaatatctttttaactgcagatacttggtgtatatgaatgggatggatgtaacccaatgcctcccgaattttggttttacccatctattgttcctcttcatccatgtaagtattcgactaagctactttatttttttctaagttatatgtttggtacttcgataaattaaaatttaatgttgcttacattgcaatttataatatagttgcaaagcaactcttacaattatttatttattttttaatatttttttagacaaaaaagtactttaggatggtaaaattaagattcaaatagctaattgcacacccacttctaaggatatttatatgagtgccaataatttttttgagtcatcattttcatatggtaagttattcttaatcaaaaaaaaaaaaacattaggaaatcaaatgtaactacattatatattttca

SEQ ID NO: 385220 - DNA, 957 bp, Cannabis indica
aatcttgtaaatctgttcaaagataatctgaattgttaagtttaagtcacactgacttgggagatttaaaacaaactatgacaagaggtggaaaaaaatattatgtgacttgtatagatggcttttctagatatgctaaggtatatttacttagaaataaagatgaagcatttaatatgacttttctaactcttgttgggttctcagacgccgactggacttgctgtccgaatgacaggaagtcagtggcggggtactgtgtgtacctgggtgactctctggtttcatggtcgtcaaagaaacaaactattgtggcttgttcaagcactgagtctaagtacagagcgttgtctcatcttgtagagctgtcatggttacaagagctactaaatgaattgaacttcaagtgttcatctgttccagtcaaatggtgtgataacttaagtgccagtgctcttgcctccagttcagtgtatcatgctagaacaaaacacatagaatttgatgtgcattttgtcagagataaagttctcgacaagaaattggagataagatatgtgccctctcatgattagattgctaactgtcttacaaagggccttactcctactcaatttcaatttctcattactaaactcaatgtgacatagtccttgaggggtggtgttaaagaaattgaattaagggaatcaaatgctgagatgtccaatgtaggggagaaatgattaagggaatccctatgctgatttgtaatcattgctgcataacaaacttttcgttaggcattgttattgtgtacattcctttccacgtggttgtattggtactatagtgtctgtccctttgttgttgggcttggaccactgagggcttaaggcccaaattaggtgaaacctaaaagaaacaacaaagaagaaaaaaataaaaaaggctggtggtgtatcgtgagcagcaagc

SEQ ID NO: 385221 - DNA, 1570 bp, Cannabis indica
ttttttaaattttttttttcacagtggtattagttatagttatagtatcatccttgtaaatttttgaaaaatttcgaataatttaccgtactgaaaacagaattcctgatatttcagtttaccaagtgcgttcaaaaaacttcaaacatattttcgatactgtaaactattcgaaattttttaaaaatttacaggcatgctgttgtaagcatatagaacactctcgtgagaaaaattgaaaaaaaaaatataccaacaagtgttttcgaacgtaaaagttgactaaaaagttgtaccaagagcttgacggtagaactccgctaaagaggagttaaatattcctaaacctcattctccaatctttcattctttccaatttttttcacttgtcctttccttcttcctaagttaacagtgacaaatttataagagagaagtgaaattgttataataataatgtaaataataataaatcagtaaattactcaaactttctttctttgctttcccagaatcccatgcttaatgcttaaaccagaaagcgtggactcacgttttcaccgttgctccattgttaagctactacaaggtgctctttctctctccatgctgcttttttaagatgggtatgtactaaccaatcatgttctaaatatgtatgcgaagaaacattcttgtttttctatcataattattttccaagtgtggtgataatatttcctatgcgtgtaaactgttcgacgaaatgtacgaaagaaacgttgcttttggattagcgttaacctttggctatgcactttacctgtttttttcttcgtaattgtttatttcttcattttttttttttaaatacttttgtgtttttgtgtttgcattggttttccattttgttattttggttcttcatattttgcctaaacttcatattagaagaaaacagaaaaaggagaaaatgtaactttcaagggtattgtatgtagcaatctatgtaaaatttagaacgtatagcatttgtaaattttttgaataatagaatattatttatagctttcaaacgtttgctattattttgggacataaaagaagatttggataaattattgtgttttgttttagtgaaacttattaagattgttgttctactttgtccatctaccgatcaattattttctctttatttattgatttttgtgttcaattttagttcggattgttgttgtatgatcaatttgatatttaattgaattatataatgcatatcttacacaagctaaaggacaaaccataactgctagctttgaaaccacttgctgttaacatctctacagtctccatctaatgcttactcatctgatttgggtaccaatttttctttgtcaatctttttactctcacaagaatgctttataatcctatttatttcctatccaaaatttaaggttctatttgaagactcatcgtgtcttttcctctaatgtgttttctcaaacggaaaattatgatcaacaagtgatggtaaagtgcagcaagaagcttctccatttacaacactcaaattcttctacacaaa

SEQ ID NO: 385222 - DNA, 939 bp, Cannabis indica
gttattttcttttttctttttctaaggccttgtaactaactctgtaatctcctcgctatatataatatgcttcaattcaagacttgctgactttcgcaaagtcttatgattcattctctgaaattgtgtcctcatagatttgcatagataaattctcttgttttacagtgtaggaaatttaagactaaaaatgcatctacactaactaaacgaaggtcagaaaggacctttcacaaactatgtggaataccaataaaagaatcaaaacgaccgcataaaaccaatactgaaggattgagaacacttttgatccacttctaaaaccctagcccttgggtttactttgtcttctcttttccagtcttgcaaaactagctagaacaaaaccacacaacctagatctagattgattaggtttacttagagatacgcaaaacaaataagataaacaaagagatttgatctcggagtttactccaaaattctagggttatgtctctgtcaagctcgtctcagagatgcttgatcgtgcactatcaatcatcaaaaggttacaagaaataagtggagattccaggctatagaagtcagcaaggtaatcttgatctctcttactctctatttgtttctttacaatgtctcgtaattctctctctaactttctctctatactttttctgggtttcactctccgagctctttctctctctaatttgagaaattttgattaggaaatctctggtctgaaactcttaggtggcgtttggttggaggtaatgaaatagaaaggaaacaattttcattacattcctttgtttggttgcatttaaagtattggaatatcattccaatggaatgccctttccaccattttagtggaatgactatttcattttgaaatggaaggaaaaaccattccaatgtaacatgaaaaaaaaa

SEQ ID NO: 385223 - DNA, 822 bp, Cannabis indica
ctcttaatcctcaaattggatacaatcaaattctcttttacaatgaacttatccctttatttatagggaaaaaggatgtgctttttagaaaagagctaaactcattcctccattcaactgtaatttatacaattacttttcctaaacaagggatgtctttctttcatggcttgtcggctaggccccaagtaagtattttgtgaggcaagatccaatatgtttgcaatggatgagactagtagttgacccaaaatttaaagtgagggaatttttttttaaattttgtaaagcacgaggcgaaaatagatttaaaaagaaaatataaagtgttattagtgagatttaaacctttgatttctaacatatatgtaatataccttaatcattacaccaagcttaccattatatttataaatatcatcttttaatacaaatatatgttgtaattaactaaaatacatatatatttttttctcaattttttttctcgctacaatgtgggtttgcccttggatgggactgtaaaaggcgcgagccagaaagggtgggaaaatcccaaagaatatatattggtaaaaattggtagcaatattttgtagtatatattagtaaacaaattaaagagatcattttggggattttattataaataatattagcaatctatttaaatttggaaaattactctatatattatttttttaattttttttttcaaatttacgagttgggtttctaaaatggttgcagcgctagttgcaataggagtttctatacgattttttattgcaatttaggttgcagcattagttgcaatagagg

SEQ ID NO: 385224 - DNA, 962 bp, Cannabis indica
tttttttttttttgcttgaaaaacattttactctgttcatagtttaggcaaatcttcctcagtttaagcaaatcatcctcaatctcttcttttaataactcttacaaaagtagaagaagattcatggaagtgggtgaatgaatgaatataagtgtaacaaagtttgtattaaattgtggagtttaattcagatctttttttttttgagtttcaactgtatttaattggtgaattttttgaagctaagaactaggtggcgtttggttggaggtaataaaatggaatggaatggaaaggaaataattttcattccattcctttgtttggttgcattttaaagtattggaatggcattccaatggaatgctctttccaccattttagtggaatggctattccatttaaaatggaaggaatgaccattttttcatggtttttgatttgccaactatttgattacaatttaagctcacttaatgtttattttgtgtatttttttaattgaataataatgaatttgggtgccattttttaaaatggatagaccctccaccaccaaagagtgagtttgatttgattaaaaagatggatgagcttgaaggaaaagtgaagattttgtctaaaatttttcagagaagagataataaagttgacaacttgatgaagtttagaaaaatattcaatcttactctatgtgttttgattttgattatggcaatattgttgttctattatatgtaagtttagttgtataagtttggaggcatatttaaatttttaagcttcattttgtgtaaattcaatactgaatataaatgaaaatgttgttatgaatttgattatctaattttgtttttagattatagtagtggaaatagttagaaaattaagtggcatttgtttaactaaatattggcatgaaaatgacattttattttgggcttttttttttcagttttaac

SEQ ID NO: 385225 - DNA, 2084 bp, Cannabis indica
ctcaactcttcatcgttcctcacggccaattgaacgtgcctctcaatgattttgttcttctcgaatgacgcgcatggtagggaagggcttaaggagagagggtttcttaaggatcgagatttataactgagatccacctcctcaatttgaatatagttcaattatgtactcaagtaagtaattatattgaaagttatgtatggtttggaggttttcaatataaaactcctgaaaatgcaattgcatgtagccgtcaattagttgatcgaagcctatggtatagtgattattatgtaattagaatcagagatggtcggcttaattaacaatatttgagacacatagtacaactttaatgactatgtatccagtcattaaatcatgatccactattatgagcccaaaacatgcccactttactccttagggtaacaacatttatatgtgtgattttggatgaatatgtaataatgggtgataagagattttcaaatattgatagaagatgaaggccattattggagaattagtgagaaactaataaagataagtgcacttctatacaatgcattaaataagatgtatgatcttaaagattatgagtattgattgagtttattattgtagatgatacaatactcatcatagtatagtaaatataacaaaaacaccacaacaacaaattaataggattgggcgtcagtacaaaaccgactacgttgaaattagcatcggtttccaaaccaacatccatttccatagtagtaaaaatattaaagaaagacaaaaataagaaaaatcatataagatacataagaatagttgtagtaggaacattagtagtagtaatgattattatgattcttgttaatgacacaagattagccattaacagatcaaaacatattcattaaattatgtaatagttatatttatgaaatatatatattactaaaaacacttaaaaccagagggcatgtccttgccacagatgctaagaaacttttctactgcaattgaaacatcaagattgatgatacccaaaacattagctttaagggcagtgcaaagacatacagcagcttctagatcaactagacctaggagaaggttgcaacagggtgagctccctggagtcccaacaataatgtctccaaaattacttatcaagtttccacaacatccaaatttaaggtggttcaatgaacatattgtcccagagttaggaggtgataggtggtgtctatgatgacccacaggtggtggtggtgggcaaatgccattatggcaagtggagctaaccatggtgaagaacaccaaattgagggacagaaagaaaactatggatatttgagctttagaattcatatttttcaaaatgtataaataattactaaggatttgaaaatattttttattagctcaagataaattgattaattgatgaaagatgttgaatgtgatgtgcttttatacatgctaatttagagtattgaaaagtgtcaaactaaattcaagtattattaataggcatggaattgataagtataatatatggcttttacttgttacatatagtttttgtaattgaatgttagtttttcttgctaggatatagttcgtaattcaaaagtatggttagaaagttagttttacagttagagagttttgtgattcatgttcatatcaattatgaagaccaagaaaaataataaacctttttttgtattattttatattgattatgttatactatttattaaataatattatgtggattaaaatattaaaatgtgaccaataaatataatatatagttttaaaaacattttatgtattatatagtttattgtgaccaatgtaatataaagaaaataaaaactagtaactgatttttgaaaaataaaacctagtaactaagtgcatgtttgacatcataactaaaaaactggtttttgtttttaaaaacagaaaattatttttaaaaacaatttggcttgtttggccttgttttttaaaaacagttttcagaaaacgaagttacaaaaaacaataattttgaaaacaacaaaatgttgttttct

SEQ ID NO: 385226 - DNA, 2512 bp, Cannabis indica
cccataacttgttggaggggtccccaccagattcactatcctgaaataaaaccctcaagggacatttgttccaggtagtagaatagggagcacaagaacaatgaaaacaaaaattctcatatactatctagaaccataagggttctaaataagggaataaaaattttgccagtgttttggcaaaaaaatggaattttccagattagggaaataaaagaatttgacttctactgattcacaaagttacccaagaagtcattcaaaactttttatgcctaccaacaacaatgtcccagccacaagcctaaaatcataattcataaacaacatataaattgcatctaatccttatatcctggacatgcaaaatgttcaaaaagctaaaaaggagaaaaatttatctggtgaagaattaggtgatgattctaaaactaaacagagatgtggcctgcgagaacacaagttaacgttaatcgaaggcttcagggaaaactctccctgcagtaggatgattcagacactcaagcctcactgcaatggcattggcgtagtcgattagagagtcaatcctaaaattgtaatcttgagttgtaatttcttttggtgttggaattgtaatcactgggggtggagcatttggatattcttgagccctaattttgagaagaagttgaatgcagaagtcaatatcgcgctcccgagtgattcagtttgtgtttgattctaggtttaggtttttgctcttgaaaattaagagtgtggagacaggaaagttcaaaatctgggtaaaaatgataaaacatagtgttcaaggtatttatacttatgttatacccacaattcggctacactctagaagttgacacatgtccaacagaaggaatatgaatcaattctgaatgatataataataagggtttgatagataacattcgaaactcgttgactttatagtcaaaagcgagacaaggattataactattgagctgaggttaaggaaacatatgcatgcctcaaaatatatagacaagaagggggatgtgcatccactcgagtagaatgaatgtaacaacataactacctcgcattacacatagcaagaagatcaccacgcattgttaatgccaatgaaagaatgacgagatgaactactttccaacacttagcattttttcttatggacaaggaggataactcatgtcgagcgagatgtaaccttccaagtcaacaataaccatcaagggatataattaaagagcggttgggtagttattagatattatcccacatgtgattaagtgaaacgtggggattatccacgtttcatgaacaactgtatttgaatcaatccaaagaaagagtaactaccaacctatattcctataaataggggtagattccatggaaaaagggacgacaaaaattgagagtgaattattattatctaaattttgagattgtattctatactcaataaatattcctaataataaggagtcgtggagtatgtagattttaactacaaaaccacgtaaaatatctagtgttatctgattatttattacttatataaatatttctatagagaatttattacgtaaaggctattttattttagttaacaaaaatcttctttagcagtttggttctttcattgggagccttggtaataaaaactcataaaaatccctccttacaaatacaaatatgtccatattcaatggttgataacaatcaaaatgacggaaatcgtcctaaagaaacaacttgtcgtcctggcaaggagcccatgggatctcaaaggcccaacacctccaaaacatcatgttcaaggaggaacgatggtgatggagatcaagttccagaaagagggaatgatgataccaataactctgccaggtatgtacctaggactgaagatgcttgtgacccagctagatacgtaccattggtggacttagaaaataggcaactgcagcaacgattggctgaagcgctgagtgggaaagagagactaaagtagccaggacagtgcagggaacagttccacagaatcaacaagaccttgttgtaaggaggccacgaggaagacctcgagtctcaagaacctaaaggcaggatgcgaatcaagagacccctaatacctaggaagaacaacctgggaacacaagggatgtccccatggataatcaaactaatccaaataatataagaaatcaggaacatcgacgtgatgttccaaaaacttcccatgcattgaataacaaagggaatgaataaaccaatatgctagaagcatttgtaggaatgaagaggcaaggcagcctggactagggaaccagggaatccctagaaataatgagcgaaaccttgaaaatcaaccaaggttaagtgggatacctctgagacaccctcaacgtgttgggttttgtgccctaaataaaacccatttcaatataatcagatatacttattaataaagatcaaaaataacattttatgttgcatggtt

SEQ ID NO: 385227 - DNA, 1379 bp, Cannabis indica
atagaaaatcaaatttcccgtcacttattgaaggtgtgggcatcactagtacccaataataatgctctaaatttattgtcaacttgtaataaaatattttatatattttctgattgagatgagaggtttttttaatccatgtaatattgttggggtatcaatctaaatcccacattgaaagaatatacaagagttgttttgaatataagtgttctactagtactaaaaaaaaactacatttagttacaacataattttttatgactaaatgtaattttatagtcaaaacaaaaaattacttatgactaaaacatagtatttagataaaagttgttactaatttagtttaaacacatttagtcacaataaattgtagtttttgagactaatacattagtcacggattttttaatcacaatataagaataatgatttataattagtcataatttttttacttttatagcgtaaaatataccataaatatttagttattaacctttttgttaaataaattccgttaatcaaataacaattacaaatgattaatcatgtctatcccaagtatagtttcaaacaacaataagtgaatatatgctctaatataacattcacatttctatgtacaaactttcttttatttattatttattttttttttggattaattagacagctttcaaaaaaaccggattcaatactaaaacgaggtaagcgttgctgaatttctgcttgtaaacaagcttgtatagttaatagttcagttattaacttattaatgggactattaattttgaccatatatattaattaagacttattaaataaaattaaaataattaatcctacaaaataaataatctccaaaggtatgatatatatggtttgtgtactattctttctcctttctctcaaaattttcattctaatctattaatgttacattctattcattttttttttcaatgaatgttgttttatcaaccaagtgaccctaattataatatattttcactaaattttgattgggacaaaagagtatatcaagctccaaaaactctaaaaaaaatagatatatatataaataaatgagcatcagacaccaataatattgtttaatacttttagacatgtcgctttgtgattgactaatgatgctccctacaaattattacatcaaactgtgtaagacccaatacttagtatgaccaataacgatattcacacataagaaaatattagatcactactggtaccttttagtatttctctaagatcctcaaatgggatgggaaatttgactagttatgcatttattggaccaaattttttttttctaaacctaaactattcaatattgataaaatatgtcatttttt

SEQ ID NO: 385228 - DNA, 1970 bp, Cannabis indica
agcatgatttagtacgtatcaaagttcaagcctcaagggacaaaaatcctaattaaccttttctaaactatgattcttagtgtacttaattcttaaagtttaaattttagtattaaaatcttctaaactacttattaaacttaaggtaatatatatttttcacagttaactgtcaacataaattgtttatatttatactttttataagtgacacattttttatattaatacacctagtaacaaaatttataatatttatctcaaaaaaagaaacaaaatttataatattatttaattttttaatattctatttttagttttataattttatttaattttaaaataataatattaagtttattaatataaatgtatcaggtatacaaaagtgtatctataagcaagttatggtgacaattaatcggataacaccttaaatttattaacagtttaatagttttacaagattttatggccaaattaaatttgagcttgaagtattaagtacaagtaaagcaataattgagaggtttaccatccaaaaactcttaatttactaaatatgtttttagaaatattttcaaaacgcacactaggtgtactaatatttaatttttatgttagttttgcctgagttcttttttaatcgattttcctcttttgcatctaaaaattgagcacatgctaataataaaatttacaaggatatttatatatgtcaacttaattttatacaggaacatctactcaaaaacaaatgattcaattattacctggtatgcctggcatagacacatcatgtttactatggaagttagatgaattagactcacaacagctactatttcaactatatctcaatattgaacaagctttgaaatcagcacaatggtgtctctgcaatactactcatgacctcgaatctgttgctctacattcatcttcaagttttctcccaataggcccattgatggaaaataaaaatcaaagtactccttcaactattttaggatcacaattttgggctgaagacacatcttgtttaacctggctggatcaacatgaggctggttcagtaatatacgtagcatttggtagtctcacagtccataatgaaaaacaatttcatgagatagctcgtggcctagagctcacgggtaagccattcctttgggttgttcgtttgggatatatctcaagtaataatgaacaagaaaagggatttgatccttacgaattgttgggcaagaatagtaatattggaaagatagttagttgggcacctcaagaaaaagttttgagtcacccttcaattgcttgttttattacccattgtggttggaattcaactctagaatgtttgagcattgggaatggggtaccttttctatgctggccttattttgctgatcagttcttgaacaaagattatatatgtaatgtttggaagattggaatgggattcatagctgatgaaaatggaatcgtaacaagtgatgagataaaagataaagtagataaacttctaaatgatgtagatataagaagaagatcattgagtttcaaggaaatggctatgaaaagtatagccaaaaatggtcattcttcaacaaatttgaacaatttcatcacatggttggaagctctctgagagtcaaacacattacatatttttcttcttcttgatctattttactaagttagtatatattttgtactatgtcattttatgtactgtggtgcgctgtaatatttattaaaataatgatacttttcaacttttattgtatttataaatgtgactaagagcatctctatttgagctgcaaataaccagtgaaaagttaaaatgtactatttttttatttatatttatgttatttctattattttatcagtatatttaattatcataataaattatgaaatatttatactattatttattgtataacatgttctcaaccact

SEQ ID NO: 385229 - DNA, 2634 bp, Cannabis indica
ctcctattcgcaaagggacatgggaattgatactgataagatattctcgcagagttatgaaatccctcacacacaacctctttattgatggtaaaataaaagaataatctagctttcgagatgctagtctccaattacaacctttcgagagggctgcatttccaagttgcccacaaatgaatccccccgtcgtgataacataaaatagttttaactaggaagtactaaaaataagacaaaacaaccctttaaaataaaagccaactagataaaataaaagccctctatcctagcttatgtgtccttctattgtatccaaaatgtataggagatttatcagtacccttgaaaaacctttaccttgtcctcaatgtgaaaacaaagaaatgattttgtgaacaatgccttgtttctccacttgaagagtctttgccatagtttttaaagacgccaaagatcagtcaagagaagaatcgcctctaattgttacgctctgtttaccaagctgacattcaatggtttgttccttccaatctgccttggtcattcctagtgtaggcaaccattgtaaactaaggataatgtcggcactccctaatggcaaggccaagaaatcatcccaaatatctactccttggaagtaaatattcaaattctcacaaatgccttcacatttcttcgaatcaccatttcccattgtaacctcataagccttggtctcaactatcgtgatgtgcaattagtgctattagaaatgaaattatgagtggcctcggagtcgataagaattaccacttcctttatgctgagttgacccttgagtttcgtggtggaattgctagacaatccagtcatagattggaaagatacctccattgatttgtgcacttcagtggtgtccaactctatggcatcaacatttacatccttcgtttcaatatcaagcccattttcttcaacgcccttaggtaccatgataacttttagctcccttttgttgcatcaatgtcccggtgaccacttgtcatcacagcggaaacacaatcccttttgtcgtttatgttgaatctctgaatcggtgagcttccgcacctcagtggttgaattcgcaaggaaagttctagctaatgtcttttcagctctcgctgataagtcaggttgtgccacacggtttgaagaataatattgatacttgaaggctctattcttttctttgatgtcttgaacgataaccattgcttcatccacattccgtggtctctgaatttgcaattcaactcataaagaaaatagcaaaccattcaagaaagtgctcaattgtatggctggatccactgtcttcaagggtgccaataaccttataaatttcttgttgtaatccgaaacagagctctcttgtttgacaattaaaaactgatcgtacagtaacctttcttgagtgtctcggaaatggtgcaacaacaatttcttcaattcctcccagttgtagatatctcgtttgttgctgtcatattgacaccaaagtgaggcgtcgccagaaaatgaaatgaaagccgctttaatcttctcttcttcgtcgtaattatggtaaacaaaaaatctttctgcttgtaatatccacccatcagggttatcaccatcaaacgttggcatttcaacttcttaagtcgattcttatgacgaaaacatgtctcttgttgtccttgatcaagggatcccccatctgaatattgagttcccttgaatcctaccgtaggagatgtcacattagactcatctctcaggccgtgtcgtgttccactctgttgggacccaaatggtgctaccaagtccttgtttttcccccgctcttgggttccagcagctccattgacctcttcccttgattcttgaagagttcttgatctttcttgattatccaagagaatcttgaactgttgttgcaaggtttcttgaagccgttgttcaatcttggttaccatctcctccattgagttcttcattcgagagactttagttttcagagcttcaaaatatcctcaaacctagcagtagcgttactcttctccacaggtttctttggcatcatgtccgcagctcaccgcaccaatttgataagatattcttagagaataaaattatttatccaaatctgaacagagttataaaatccctcatacacaacctctttattgatgatgaaataaaagaacaatctagctttcgagatgctagtatctccaattacaacctttcgagagggttgctctatcttaaagtctattctcttatatttccaagctgccccacaaatatattcctcccccttatttataggtactggataacataaactagtattaactaggaagtactaaaaataagacaaaacaaccctttaaaataaaagccaactagataaaaatgaaaaccctctatcctagcttgtgtgtcctattatatccaagatgtataggaggcttatcagatgcattgtgtaattatgactatatactattcattttcaatattgtactttctttttgtcaaacataaggatgagatattctaaatgcaattatcagttagcaactaaacacactttttaaatacacggtgacttacaaatactct

SEQ ID NO: 385230 - DNA, 2163 bp, Cannabis indica
tgaaactcgctataattttctcctgcaccatcctctatttttgaaattcagagaatttgcgaatgctagttaattgaagtgtgattatttaaggcaaatggttaatggcattgagtttgaccagcaaaggagaggaagggcgagcgaatttcctcagacgcattttcacaaacatttggtgaaccctaaaataattttaagaaagcgatactgcaacgcaatagcttaccgggtgaagcagagccggcggagaaaggttggaaaatgtaaaaacggcagagagacatcgccggtaattgttgggaacctgcgttggtgaacaggagacgaggaattgtagagaagtagccaaatgcagaagctattcttgtcagtgtcagtgccataactgaaatgatattatttgaagttgtttgttgggtttggaaatggaaacatattagattaaaacaccttgagtgggaactgggaagcagtacataaattcaaagaaagagcacatgtttcacgtatacaattacaatatacataacgcattaaatactgtatgaagaaaagaaagggactgctgttggatgttccaatcggagttgctttataatcaaaattacatatggtaatggccaatgggaatgggatgccaggcagtttcctggtgacccactcaattttgtctgtttcaaggatcagccaaaaggataaaagcagcatgtccggatcgtgttttttttttgataagtgaatattttattgaaaaaacaagaaaaaaactacaacacaaaaccaaacaaagagggatcacagtcctcaatcgacccttacaaaccatagaacactccctagcccacttagccagcttatcagctagtaagttttgctcacgaggaataaaagacacaacacagctatggaaatttttacaaagtctaagacattcgcaaaacaaagggtagatatcccaacagaagggcatatgtcctgactcgaaagcaacagccgcagccttggagtccgtctcaatgattacagattcaagtccactctccttagccattagcaaagccagcttaatgccatgaagttccccttccagaacactatatactggaccattgctgacagcaaaagaagatttcaaaatgggcaaaccagcttccactacagacggttgatcctcagagataaacaccgcagcaaaaccagcagcctcttcaaccacggatgcatccacccgaaaacggcatccaaccaagttcacattttggtggggtttctccccgcccaaatcacccattacatccacagtaggagagaagtgagtcgattggaactcactataccgtctcatgcaatctccatagatctcttcaacattgcaggtccttcctttatggatcacttcattacgccatttccacaacgaatcccagacacacgcagcgaaaacaattagattatcctccgtcaggctacaccaccagtccccacaatctttcaacgagttccagttgagtctatcactcctcagaccccacccacttcgaaaccatagactcctaaccacctggcacttaaagaaaaggtgcaaagtggtctcctcggaggaatgacagaaactacacatcagctgatctccacggcataagccaattcttcctttcgttggcaagctatccgaaaatattttccagcacaacagttgaagacgggggtgaacctttgttctccaaaggctactccacatcttggagggctccttaaatctatgcctttgactaagccaataagcgcttttcaccgaaaacttccccgatttagacgccttccaaaaaagaacatcagccccctcatcaagaggtttgattcgaagaattgcctccgcattggttggagtaaaacagcttcgaactaactcttcattccaaacacgcattccattctcgaaaagatctttaatttgccaacacgaatgatttggcctaatctgaaagccgtactttagctcctccatgctcatatgtggaacccaaggtctgtcccaaatatcattgtttccatctgctactagcaaaccagccccttccaaacaaactttcctagcctcaaggatactcttccaccccctcgaatccatatcttttttctcgacattccaaggggaca

SEQ ID NO: 385231 - DNA, 2122 bp, Cannabis indica
ttgatttttaaattttcattacactatttgataattatgacagtgtaaaccgcttaaactgcatcgtaccacaccgtatttttgtagtgtaattttgcgattttaagatctcgcgatgcggttgcagtttgagacattataaaaatcgcatatgcggtttggtttgaaaaaaatgctacaacatgcactacctgcatcgcgaacacccctagttgatgctgctatttctgcaacaccgatcatgcaactacccttacaaataacaccactcacaaagctggcattcccacatctatggctccccaatcacctctgccactcttgttgagaaattaccactcctaccagttgtgtcaaaagttttcaaatctggcagggtcatcaacgaatttcctcacattaaagattatgattgttccactactcattccattcattccttcttgtcttatgacagattatctaatcagttttgtgctgccatacttccagtctatctcagtgaaccatccagttataagcaagcttataaatacaaataatggctcaataccatggatactgagctcacaacctcggagcaacaacatacctgggaggttattcctttgcccatggccaacacactataggtaataaatgaatttacaaacataaatatgatgtttatggtgtaattgtttattttaaagcatgtctagtagctaaaggataatcacaaaaaaaaaggtattaattaccttgacacttttgccccagaggctaaatttaatactctcaaagtactcctagctctagctgtcaaaaaaaaaaaaaattggtcactccaccaattagacatcaataatgcattcctccatagggacttgcatgaaactatatacatgaccttgccttaagggtacaaaacaaaggcccattccccctaatgttgtttacagactcaaaaagagcttgtacggcttgaaacaagcctctcaccaatggtttaccaaactcaactccacactcttgcaatctagttttaaatagtcatactatgactgttcattgttcatcaaaaaccaagacaacatgtttttgactgttttattctatgttgatgacatagtcattgccaccaacaatgataaagctgctatcaatttcaaaaaatacctcaactctgtgttcaaattaaaatatcttaccccctgaaatttgtcaaggccttgaaatagcttgatccactaatggaatttcaatctcctaaagaccttttgcactacaagtactaattgacacaagattctcggtagccaaaccggcttccaccccatggagtctaacaacaaactcaacaaggacttaggagatttactccctgaccctataacttatagaagcatcataggaaaattgatctatcttacaaccaccaagtagggatgcacattttccccacggggatagggctttgtggggatctgcccctaatggggtgggggattcctcgtctaaatgaagaacggggcgggaacgaggattactttttgtccccgaatgttaaaggggcgaggacggggatcacactccccgccctaacggggacccgtttagtattttatcttatatttctagtaatactttatagtttataatttatgtttgtatttttttagtatattactatcttgtttatgaattttaagttgtgttttagataataattagtttattgaataataattaatgtgtaatattttaattttaatgtagtttaatatttttgtatattaaaaatgttattataaactttatttttttaagggattcccctcctcgtccccgcccccgcccttattaacgaattccctgccaataaacggtgatggagattaaattcttaatggggagcactccccgccaatttcccactccgtgtacatccctaccaccaagcttgatctctcctatgttatgaacaagcttagtcaattcatgattgctcctcgaaagccacatctccttgttgctcagtcaattattagcatattaattataacaaataaaataatattaaaagtttaataaaataagatatttatttatttaaatattaaataataatatttaaatattt

SEQ ID NO: 385232 - DNA, 2089 bp, Cannabis indica
tatatatgtaagggataaaaataatcttgagggtattaaagtaatttttacaattttaaacaacgaatgactaataagatgatttggcaggaataatacaaaatgcatctatcattaaaagggaatgtagaatgatgactcaaaactcagagagtggagtagagctcgagaagctaagatagtagagtctgaagaagcaaattaggaaggagagagcacgaatgaagaggagtagagcaaactcacgtaaatctctcagagcagaggaggagcataatccatcaaccattcttgcttataaacaggagacccatcattaaaaaatagggatagattcttgatcacaccagacaattcaaaactctaccagaatacatctccaacatacttttcattcgaaagttggatacgaagaaaggaatcattgatacataggggaattgtgtaaactaggagagttatttactaagattatatcaatcatggcgtaaagaattcaaagttgaaataaaaatttattgttgagcaaatttttagcatcaacagttggcgtcgtttgtggaaattatcactagagcaaaaagttgaagactagggtacgatctaggataggatttaagaaagcgccagagaatgcacagaaagtaatagctcccaacgaagaacatacctcgaacctgatcattgatcttataattgctccagctacagagatgaaagaaataagccaaaggatgactgagcaagataagcacaatgaagagacgcgacatctcgtaaaagaaaagttcagcaagaacagtgcattacagaagagaggcgtcaacatgatcaggatgaaaatcatcaacatcatcaggacatcattaaatttatgcaaaagatgacagatgcatgtgaaaaggtggacaaagtacaaactcagcacaatgttgggcaaaaattgtttaccgagatttttagaaactaattaaacttaaagctaagaaattaaatagactaataaagatggagataaatcttttacgtggtttgagtgttaattaaccctaagccatgagtcacttgtatttggacgaatgaccttaatgtattataatagaattttacaagctcaagaactctaacttcttgctatagtgttttcttcattttttggttttctaactccttagattctaaccctttgcatgaaggtataatatcattaatcaaattcaaagtatctttattttctggttgcgaccagaattagaagttatctttcgaaatagtaaccacttcaattagtgatcttcgggcatgtcccttggcgaagagaaatctaatttgttgtggttcagctcaataagtaaagcgagttattcaccccaatttcttcaactcgctgagttttacatgttattaaggggtttttcatctcctctttttcttttcccgctaaattcacttatcttgttagaattaatgggaattgtgtcaattatgttggtggcaacattactgaaatcatataccatttcagaattagatttaagtcatttcaattctgaacgagcttcttattttcgtatgtatataagggcttcgcttttttaaactcaataattgacctgacaggtcaccttgtaagtcatccaatagctcgccaccagctgcgattttaacttgcaaggcagttaattgaatactatcaatcaggtttctcgccttagctactactgtgttaaagtgatgtaaaaatgctttcagtgattcaccgagttgttgcttcacattagacaacgaaaaagccttgggttttctgcttctcgtagtttgaaattgtttttgaattaatttttgagatagttatcccaacgagattattgaatgtcgagtaaacttataaaaccaactttttgttgctccagttaaggaagttgggaatagcatacatcgcaagcttaatccaatattgcttacttgcataatattattaaattttctcaaatgctccacggggtctgtggtcccgtcgtaaggagcgacatgagaatttttaaatctccttgggaagttgtaacgccctaatgctaaggcacgctac

SEQ ID NO: 385233 - DNA, 765 bp, Cannabis indica
attctttatctcatacaaatctaatttctcaaaatgctttaaatcataaagtaattgttcttgggcttcaaagaaatgagccaaagcactttgttcatcaccatcacgcacgaccccaagcccatcctccttcatcaattcattaccatctgtccctgttggttttctttggccgagagaattagtggattgggccttgtcaccaaacccattcaaaaaaagatctttattggcttgaagtgggcctccaccattcttgtctttttcactttgaaaaccaaatagcccaagcggtcccataattttatttgagcccacaaccggcccaccaaaagaacttggcccaccatcagatggcccaactcccacttctttgatagcttctttctcgaaattcaaattcattctcacacccgaggcaggccttccttcaatagccataaccagattggtagcagtacccttttcaccaaatacctgaccatcatcgcccttattactagaaatggctacggtttgagcagggacagtcgacagaggccttgggagccccaccgcctgctcagcatcctcggttcctgcagcttcaacaggccgagtagtcgttttgatagagattcgagatcgccgcatcttggaaaaaccagggggttgcaaacggtcacctccgatcccatcaactgcccgtacgggatgaggaacacgagctttgatcccctgcgtcctggtctgaccaccacggaccatctgttgggttttatgccc

SEQ ID NO: 385234 - DNA, 2066 bp, Cannabis indica
cactatatagattgttctgaaattactctttgaacctttgcatgcaatttttatgttgattttctgtgactgatctctgttttgttcattgcataatgcaggacacccatggattctaagtggaggagagacaaattcaatggactgaataggaagaaaaaagaaaagggtttgtagtttttgacttccaaactcatccaagagaaaagccagtgtacatagatgccgtgctaagccatgccaggctatagtaagccttagtatcatgactacccaataaaaagattcccacttttctttcttacccaaaaccacagggaagatcatcatggatggttccatgaaaaaaaacacaccaaattttctactcaagaccagaatcagagttcgatgagaagttacacatgaggctcttttccaaagggtttttttttttttttttttggtttctttctttcctttgtttaacttgagaaaatctgagactgtagatatactgtttgtatgtatgtagagagtgagaatctggtctttcccgcctcttctttttgtttttgggatattagaaaaagatcaggaagtgagaaaggaaaagtgtaccactgtagtacggttgctgctattataatgttgcaacttttttttttatctttttgagataatagtctagttttgtaaatgatctatcctgatatattgaatggatatgcttagtttaagaatctacatccttttgcaatttgtatttgtattcatgtagaaaagttgagtatgctcttatatgatatgagaagtgccacatgtgagaagaaaaaaaaccaaactagggtgtgaaaaaattgtttcattcaattcattcctgcaaaatcaaaattaattgatctaatctaattcaattatgattgcaagagtaataatttgtacaccaaaaaaccttcagataatttgattcaaatttttattaaaatacaacgttgttattttggacttattgtaagagttgttctttatgagtttagatataattgctgttgtatgatttatggagatggattttaagtttgttggattaattttgaactctgtagttaaagagagaatctctttaatgttcacattttaaagtacttgtcaatctttatacgcgtagaagagtacacacataagcatatcctttgatatataccattccttaaaacttagaagatagaaaaagaaggaaggaaccctcttttcggcttagttacatacatacatacttgttgttgtcaagatgtccaagttaggcccacatgaaataccaaaagagtttgtgaaatagtctttttaattgaagtaatctatttatttgattaaaatcactctcacttaccatgtttcttatcatttgtcacttgttcaatctctaatatgtaaacagtacacgaaacagcaaagtttgatacatgtcattcacttagtatcctttcttaaaacaaaaggacagattattgatcaactgaattaattactcaaaactatatttatttttgtctataagaaaagaagggaatcaactcaaacataacagctggcctagtctctgtttttcaaccactgcatgtttatccctctttatatttatctcacttacatcatatacagtagtaaagtttctccaagtggcttaattgtagccataatttactaataaatagtaagtaaagaagtattgttattgaataagagcggtgtttagtattttttaaaagtggtactttaagattggctagtgatatttattaaaaattattacattaagttatataaaattcagtacttaattaaaccaataacgatgttaaaatataagagagtgctaaatattactggtagcctttaaaactctaggagccgtttggttgggaggaatgaaaatatagaaatagaaatgggaatgggaataggaataggaatggaatggaataaaatttaaaatgcataaaaaaaattgaataaaaaaataattaatttttttttttcttgttacattagaatgatcattccttccttttttaaaatggaat

SEQ ID NO: 385235 - DNA, 1435 bp, Cannabis indica
gaaccccatgattctcaacatagccccactccattttttctataaaataaaatttcattgaagtcactcctaactataaccacagaagattctttaatttcagtatattatacagtctgcatagtagatctcatgaacaatctcgcaatgttatcacaagtagaaattagacaatctacatgaccattcgagtaagatagaagattcacaaaacctgggtccttctaaaacgagatcaaactgccgctcctacccgcattttaaccacaatcatactaaaagtgtaataaattacgcaatattgtggagtgacttgctttaatttttgattcacaaatgaacaataaggaatgatccttttctaccattagcctccttacattcctaaacgccttgaggtctaaaattccatattatacaagtccatttttttatgctatatttatagtagtgtgaataaactatgtttatatataaaacttaaaaagaaaaaaaaagaccttttttaaaagagaaaaaatgactatattatatacaagaattgttaaaaaatactattggtgcttactatttttctcggtgttataccattattatcgaatctcatataacttaaaaataatttttacgaaatattgctaaccaataaggcatcacctataaaaagtatattaacaatactgggagccaataacaatactcattatatatatacataatttcctccaaattgacttcataaagcacgccctcatcaataactgcaaaaagattctttgaacgagaatggaacatcaaaataatacacatttgtctatataaatattttcatagagaaaatatgtgtaatataaaaaagaaaagaagaagtagaaaatatatgtagtgtacatcatgccatttgaaagaagagcatgactacatgttgattttaacaaaaacaaataaaaataacattattatgaacggcctacagatcaattatgtaggttaaatcgaataaacgtacaaaacaaataaagcgatggattacagaaagaacagtgtgatagcattattttcatgtatatataaaagctggtgatgaatgtaaagaaatgaatatatgaaatgtcagatatcataaacaaaaaaaaaaaaaaacaagaacaaaacaacaatagacaactgatataatacaacaataatgcatatagagccaaaacacaaatacattatacatatagctactacaatagtcattaaagcagtactgcctgctacaattataattggtcagccccttcaaatattgtcgtttttttttttttttttttttttaagtaaaaagcgtttatatcatataattaaatagttagacctcgcggtcgttacacaacatattgttaggtaaatccgaaactgggatagacccaaatacctgatgagcaaacgc

SEQ ID NO: 385236 - DNA, 2366 bp, Cannabis indica
tttggcatttgtccacattaccttaaacagaactgttaaccattccaactacgttgtatcttctgttctttgtaccaaattattatgtagaacttttgttctataaatatatatctgtatttatactgtatatatatatatatatatagacagaaattggaaaaactaatgaatgaacagagcaacatcagtcaaacttttgggagtgtcttaactcccattgatattagtgattaagattttagattaaagattctttgtgcctcttaacttggatttcttttttaattctaaatcatcatccttccaaattatactaaaaggcacctgaagattgagttattgtagctgtaaaatcatatccctaataactattgacatttaaacactaggcctgttgttattattacctgtaaaagcagcaaattaatacaattcatccttgttcgcctgagctttcctcccaaggcaataatacccacttaatgattattaagatcaactcataataataaaggaaaaggatcaaaacccagaaagtatactgcctttttccaaactttttctttgttcaaactaagcaaatgcagcactagtccactctcttgatggtggtcctaagttcaaaccatccttggttttgcattgaatatattttctttagataatttaagtaaaggccttatatttatatagtctaaaagacattaactacgcatacatatttatttactatacgtgtatgattaattcacatagagctttagacattggccaacttcggcgccgccctgttactcacttgaaagtgtccttatccaagaccatttttagtttgaatcaagtcttgagacagggcccaaaagactcttatgggaaatgtataccattttagcagaaacagagtgaaaaaaaagaaagaaaaaagccataaccagcctaaaatggaccacataaatcttaaaccactttctatataagctagaataaaagactttataggtagctaagtgagcaattttactttggtctctttttaaatatgttggttaagctttttgacccctaccaaagataaattatatattgattaggaccactttttttttttttttttccttttagttcaagatggtcaaaatgtcatcccctgtattattattccatggttaaaacttgttttggctgtggaaaattgtatctgtgtgtggatccttttggtgtaattaattaatggcactgaaatattcaacatctgccatgtggggttatttatttgattgaaatggtattatgtactattaactaggctcttatgtgtggtagaaatgcctaaaaactatatagcttaagctaaataataatgcttggtttcacaattttgtaaaaggatcacctagatttggtggtgttagttttgaagatttttacttaatagaatttccaatcatatatatgctaattaattagagacaagctaactcttaaacaaatcttataaataatggtttcttttcttaattaagctcatattgtttagttagacactactttaggtggaggactaaaagcatatgtagttgataatggtatagtcaaatttattaggtctgaaaattttgctcttagaaaagctcatattttagtctaccaactacctttttacatggtcctaacctagaatttaatgtgcactcctcttaactacttaatttttcaaacaatggtcaaacgacattatgagtctagtattacatcaaaccatatataatattgttgatattttctttaacctagtctatactagtttatatgcatgctaaaaggctttatttattagcttcttttttctttatgttggaatatttttttgttctagattcttaccttcttcccaacctttcttaacttgcacttaaaacaaaagaaaatttacacttaaaaaaagtatgattagaggtccgagttttctcgaagtcgcttttttcagatacctataagtaaagttaattagtattttttcttcccgaattttaacatgtatcaaatcatgccccttttaactttttagatcgttaaaaatgtctcctaaactattgagattgttggatttaaggagttttatctaattttaataaaaaaactctaatatggatgaaagttcagggggcatgatttagtatatatcaaaattcgagaggcatgatttggtagatatcaaattttggggaacatggtttagtacataaacaatcactgatagggctgaacaatttgagcgggtttgacccgaacccgaggaacccccccgaacccgaactggtgaacccgcaaaaaaaaaaatttaaaaaagtttcgggcgggtt

SEQ ID NO: 385237 - DNA, 2595 bp, Cannabis indica
aaatcttaaaccctaaacactaattcctaaaccctaaatcctaatccttaaaccttaaactcggacttggaactagaaccagacccagcctaggacctgaatagagaccgggaccgagactcggccccagacccagacccagacccaaaccttgttgcaaacctcgaccatgactgggactaggactcaggacctggacctagactcggactcagatcagacccaaaccaaggtagggacttaaagtagaatgagacttgagacctgtacccagacccaaaataggactcagaccccaatccagtccagcactcgaacccaaactcggaccaaaacccaaacccagacacagacctggaccaagacccagacctagacctagacccagactaagacaaggactaggacctaaaccttgaccaggacccgaacccagactaaaacccagaccaagaccagatgatagacaaagaccggaacccagaccaggacccgaacctagaccgagacctgagaccccaacctgaatctagacctagacgctgacccgaacctgaaccagggtttagggtttacgatttagggtacaagttttagggtttagggtttcgggttttggcatttagggttaggatttagtttttatggtataagttaggggtttagtgtttagggtttaaggtttagggtttaaaatttagggtttagggtttaggggttatggttaatggtttagggtttatggtttcgtatttagggtttagggtttatggatgatgatttagggtttatggtttacgacttagggtttagggtttacggtttagattttagagttcagggtttaggatttagcgtttagtaattaggatttatggtttagggtacttaaacaaggacccaaacaaggacctacacccagacttggacctaggactcaaactcagacctagattagggacccaaatccaaacctggacccagaccaagacctgaactaggacccaaaccaaaataaaaaatcgagacccaaaataagaaccaaaactgaactgatgcatgggactcgaaccaaaactcaaagccggaccaaatcccagaccaggaccccaacccaaactcgggacctaaaactagaatcgaaactatacggggaccctaaaacgagaccataccaggacctaaacttgaacctggacccagacctttccctagacctgaatcggtaccaaaacccagaccaagacccaaacctagaccttgacccgggctcgagacccaaagttggacgggacccgaacttatacttggaccaggatcccaattgggatgtggggcaaaattgggacccagaacccaaacccgaacctgaactagacccaaacttaaacctagattaagaatgggacatggacccaaaccaaggcacggaccgagacctgacaccaaggacctaaactgggacccgcacctggatcgagatccaatacccatacccaaaccttgatcggggaacctcatacaaactcggacccagacctcgacctagaccaggaccctgaccacaacctagacccaaacccaaactcgagacccagaactagaacagaattggggcacgggacctgacgcacattcggacctagacccgaacctaggcctagacccagacctagacccagacgcatactgggacctaaacaaaaacccgaacacagactaggaccagaacccaaacagagactcgagacctgaaccttagcctagactcaaactcggacctaaacctgaaccagggtttagagtttaggggtttaggatttagggtatagggtttaaggttttaggttttgggatttagggttagggtatagggtttagtggtttaggggtttagtatttagggtttaagctttaggatttagggtttacgggttaggggatagggtttacggtcaagggtttagggtatagggtttaatgtttatggtttagggtttagtgtttgtggtttaggatttagggtttaggtttaggatatagggtttaggtttatggtttagggtttaggatttagggttagggtttacagtttagggtttagggtttaagatttagggaaattaaaaaataaatctatttatcattaattttatcattacttaccattccttattattacttatattagctttatcattactaatcgttacttatcattaatgataagtaattataagtatgtttatatttaattaccctaaacactaaaccataaattttgaaccctaaaacctaaccctaatccctagtctctaaaccttaaaccctaaaccctaaagcccaaaccctaaaccctaagccataaacctctaaatcctaaaccgtaaaccgtaaaccctaatccctaaaccctaaactaaaacctaagactagaaccagactcggaccaagcccaggacctcaatggggaccaagacagagactcgaacctgaacatatattcgggttgggttttgtgccctaaataaaacccatttcaatataatcagatttacttattaataaacatcagaaataacattttatgttgca

SEQ ID NO: 385238 - DNA, 885 bp, Cannabis indica
cataaccgaccgattttcatccccaagtcctgggtcccaggttgtgtcccgggtctgggtccggagttgggtgtagagtctgggttcgagtcccatgtccaggtctgggtccgggttgagtttgggtcgggtttgggtcctagtctaggttcgggtctgggtcccgaaatctggtccgggtctggtcccaggtcccatgtctgagtttagatcccgagcgggttcggtctgggtctgggtttggggttcgagtcttaaattaagttttttttttatatattgaaactggatcggataagatccgatccaaaaaaaaattaggtgaggcggagcggatttgatttgagatccaataaatatctaaatgttttagataagaagtgatccgtcggatcagagctccgacccactacaactaaatgaaatctttctgacatcgctacaagtaaattttcattgtgttcatttatttttctacattgtgttcattaattttagttttctagtcttgaaactgtaatttcttgttttatggtgttataatttctagatcaacaaccatattcatctaagtcctaaacaaaacaaataaatgcaaagaaataatcacagcaacatgaactaaaaatcaagaataattaaagaacgaaaagcaataaaaggggcaagaaatttctcctagtttcggtcctaaagatcaattcgattcctagccatactccagctgagtatcatcatctcatatccactatagttaatctgaacttgtacagataccacttgcataagtagcctaactagagctcacaacactcgatcatggataaacaatttcagttcttccacctaagcaagagtaggggtgtgcagaaagtcatccaatcc

SEQ ID NO: 385239 - DNA, 3487 bp, Cannabis indica
aaaaaaaaaaaattaaggtataattttttattaatttttgctttattgtaaaaagagctttgtcttcgcttattagcttatagtcgaagactaaagtctactttagtctctaacccacgatacagctaaaataaatcaaacctctcacttaccccaaatcagacccttcgcttacccccaaatcagacctatcccaaatcagttactccatcgcttacagctactcccaactcctccgacgacgatgacggcccaaacgaggtctagttctcctcccccaacaaccccaaacaacgacgaggacgtctctctctgtttctatccccgaagtctcttattttctctccatcaatggtcacgagaaggacgacgacgccctcatgctctctctcatctgatctacgacgacgccccgatggtaagagaaaagcttagatattgagtttgtgtttcattttttctgtgattttcttccactatttagtttagctttgttaatttgacacacttgctacattacaatgacaaattagaagcaaggaaaggggatcccatctcccataggcctttagtgtgctattaagagaaatatagttgtactctgatgttcccgttatcaaaacaactgatttcagtgattcaggatattcctgcagtgatgcatcctgcattagattggaatttttatgtcagattcacaagtgcttaactgtgtgattaataagaaaaatagccgaaaacatcttaagagttgatgatctatttccgagttttagaaaatcagctttgagatatcaatgaatatagtgcagcaatagtctttcactgtcaacaattgttatgagtaggttacctcagaagaataaaaagcaaaaatgaatatgacaataaatattaacaagtaactaattataacatcaatcaatatttactcccacagaaaagagagaaacggatctgaaattacctgcatattataatataattttaattgtgaactcttttatgtaatggtaagctaattacaagaatccaatagtggttctatttcttgttctatatctatggatttagaatgacaaatcaagaatttggttaggcttttgattaattgatgcattgtcctttttctctgtagtgctgcgtgtactactgagtagtttttaatgatgctgatgatgatgttgttggggaagaaattgaaaagttgttattccatttgatggaaaagccctaatcaaggtaattcttttacaaggtttttttatcaagaattttgtattaattgatttttatttgtgtgtatttagagtgtaattttagtatttttatttaatttattccatttgattcgagaaaatttggaaattaggaattttagattgtttatcttttcattttctttgtttttggaaaatataaaattagtaattacttttttgttttgatgtcactcttgtttaagaaattgtgtgaatattacttttgtttttgggattttgattttatgttgttattcttgtttggtgtttggtgttttgtgaatgtgaacttaatataaatctagatatatttttatatatatatatatatgtatcttttgtgtgagggtgggttatatggttggatttatatggttatagtgtgagtgtttgttattttattgtacatattgcagcccaaacattaaactttcgtctcattcttcatacgaaaattacattgtggtgtaatataatatgctacaaacaaaactcaatcatcattggcataatctcaagatgaggtgtcttaattgggtttttattgtatataaaaaacaaatgtattttgcttcaggtatgtaggatattgtggtttcttaattagtttgaaatatagcacatgattcttttcttgtaaattagcattttaaagtttcatgaaatataaacaatttgagaagaaaggaaagagtttggccaagtttcaaaacacttttggctccatttaaaagtggtgtttgaagaaaaaaaaaactttgttgatcttttcacaattactttaataatttttaaccaatggtaatcattcggaaaaaagactttgtttgtgacccgtatacaaggagatagaataatttaatttatgctaatcattcggaaaaaaaaatattgtgtgtacccatatataagcttagaatattttgtactgtggaatgaatgctttgtatctttgacacttttggattggaaatcttactaagttaatacagtacagtagtcaatcaaatttgattgaaaaaacttaatggaatgtatatatattgctacccacttgtttgtaggttttgcggttgatcatcgagggtccaaatttgaggtggaacacaatttctttcaagtgtttattggtttgttggctacttagaggtatattttttctattttataattaattatgtattaataagcatgttagatgagttttaatatcttaaatatttatccatagtgaagtaagttctgcggtcggatgggtggaatttacttttttatttttgtggattgttatatgttttgattttatagttaattctttttaaaaatttattgttgttatgctgttgaaatttcagtataatttggataaatgttttgatttaataagatgaataacaaattttagatgttcttcataccgtggaactatgagtatgtacaagtactatttaagaactatttaaatatagttttatttttctttttaaattaacacttaatattttcttattaatttcttaatagttgtcattgaatgcttgagatcgtttgtgtcgcgaagatcgctcacttggatcctttgttaaaacattgtgaaagctctaaattcattcgttcttataaaagaaaaggtaattaaattataattaattcatttatgtatacccgtaaataggatactataattataattaagagacatataattaattttcattttaattttatagtttggaatgaagaaagcatacgatgcggagacgatgttgctaccactgcaacatcaatggttatcgaaattgacacaatatttgtaccagttagctttagacttttaattttaggcaatacttattttatgtataatttttattagtaaggatttttcatattttgtaatgtatactttaactttgttataatataattagaatattttttgtacttaattttgttatataattaaaatgatttttatttcatagaaactattaattcttataattagtttataattgtttccaaaaaacaatataatgtataattaaatactaaataaaaaattaatatatattcagatttaaatattaattgaagaaaccctacgtcttcggtttttatataataatcgaagaggaaggtcccttttctcttcggttattatataaaaactgatgagaaagtaacctttgtctttggtttttatataataatcgaagagaaaa

SEQ ID NO: 385240 - DNA, 991 bp, Cannabis indica
ttaaattccaacaataatataaaaacttaagtaaaaatatagaattttaaacttgtgaactccttaaactttaaatatagatttatatatcaatagactaaacattacaatttgataaaaattgaccaaattaataattattttttaatttttatgattttatttaaaaaaaatacggattttgatatacttttatgttatatatattcttgttaatttatttgtatgttattttttattgttattttgatattatttaaatgatgttttcctgatactttaatgtaaattttttattgtttaactctataaaaaaatctttaaatgtaaaaatataaaaattttacaaaactaatactctatgttattgtttataaaaattatttaaatttaaacacgaaataacttaaaaccgaaacaaatgtatataataatgttttggtttcacccatgttgttaaacaacgtttgttccggaaatagaatctttcatacttataacgcaaaccactcaacaaaatatcaatatcacacttaaaagccacttaaacaaacatgtaattttcttatcctaatctaaaatataatcatataattattccttaattaattagccaataaatacagtcatttgatcaaagtcaaaaccccacaatattaaagtcaattatatgacatctttatataaatattgcccacaaacatatgtaattttaaaattcatggatttcgtttttcttcctaaatattctcttctaatgtccatatatgaatctaaagataaaaggttaattttatataacatatctcattgataatgacacaaaaaaatataataaaattccagacaaaattaaactaattatttttatatatattcacaaacaacagacttacaataaaaatttaaataaaaagactgaaaatagaagaagaagagacccaaataaaagactgaaaaaaacggaaaagaataaaaaaatgaaaaaatt

SEQ ID NO: 385241 - DNA, 2850 bp, Cannabis indica
agatagcacaaccgcctccatcatgcctatggaaggaagagaaataagaaggcccagggtcttattgccgataaggttgttgcaactaccaagattgggagattcgagaaccttgtaccaccaactgggaatggaaaagcaagtttactcggtgagttctagatctcgaattgattgcataataaggcgataaatgagttgaggatagacaacttgcaactagaaaaaactattgcaagcatccaaagagggattgaggagctcccaagaggtcattccgaagcacctttagttggacgaagagagctacaagctgggaaaagatgagtaagtgagctgggagacagaggaatatctaagtaatccctaaaaaccacacttgactcttcctcacgaagagctctatcccaaaaggatctagaaccctcatcgcgacccaagaagactgagtccaaagcagtgtagggcaacttaagagaaaagctccattaaaattcatgacggagaaatgagcacttgtagtagatttactgaaatgaaaatagaaagaagccatccacaatagacctccgagagaagctaactaaaagaagaaaagagttagataaggaaatggaggatctttgatgtaggatagcatcagctacatctgaagattgtaacttggacgaggatgattttgatgagaaatccccattctcaagggagatcaaagcaaagcctttgcccacaaacttcatagaacacaacattttttctaacgagggaaaaaccgacccaaagtatcaccaagatgcctttaacaaaataatgaagatgaagagggttacaagcaaagcaaggttctagtgctttacgctaacactcaggggtccatcataaatggtttaagtggttggcgcttgggtctatcaattcctagaaatagtttcttgatgaattcttaacccaacaccatgcttcccgacactacacaattattagaactagcttggcaaatattaagcacgcaaaagatgaaagcctcaagagctacatctagtgcttcaatgttgaagcggtcacgcttgggagaataactaaggaacagcacaagatggccatcgctgcgggcgcccatccaaaaagcaagttgtggaacaacatgcttaagagagaactagaatacttggaggacttctatgagagatcataaaaatacatctgggttgaagcagggcatgagaacctcccaatagggaagagtgactatagcggattagcgaacccctgcactcatgaagaaccaagaatgtaaagggaattcaatggggaacgactgaccaaaacaagaaggttaggatggaggaggggccccgatgcaaggaattcacttcttatactggaattacatgttcaaggaagaacatcttcttgataaatgaacaccgagtctgatttaagaaactgcccccaatgaggaaggacaagtgaaagagagatcctaaaaagttttgcaagttccacagagatattaggcacatggtagaagagtgctctcatcttaagatagaaattttggatcaaatacaaaggggatatctgggaggataccgtagggaggatcagtgcccctagtagaggaggcaagaagatcggagggaacgaaccccaaacaaagttccagaggtgttaggggacgtaaggacaatatttggagggccaggattaagaggtgatacccttaagggaagggatgggtatgcaagggaggatagacaacccccaattgtcatgagcttagaacaaaggtcgttgaagaactctaaaggggaatgttactctgtgacgttcactgaggaaaatgcgtgaggagcacacttttcctataatgaccctcttttgttggaaatacagttggctaatgcccatgtttactgggtgctagtggacattggatgttcggtcgatatcctctatcgaagcacgtttaaacaaatgggtttaagtttgatggatttcaagtcatgcacgacacccatatacaggttcaatggagacttaatccaccccttaaggatgattgaactaccgctcattatgggagaacgccttgagcaagtgactgtaatggccacattcatcttggtagacttcccaatagcctttaatttagtttttgtgagaacatccctgtacaacatcaagtccatcatgtcaacctaccacctagccatgaagttcccaactctaggtggagtggcaatggtaaagggagagcaaaaagacgcaagggagtcttacaacacgtccctcaggattgccgcaaagccatgcgagtctgtggcaatgactgtgtgtaacaagaacactctcctacaaagggtggatgcagaattggatccaagggtcaacgaggaggtccatccaaaacttgatgaagaaattaaagaagtagtgatattagaagaggactttgcgaagccctaaaacatgagctaaaacaatatctcaaaaggaaggttgatgtcttcgccggacatgaagatatagtgggaataagtgacatggttatgtctcaccatttgaatgtataccctcaagcaagacccgtaagataaaaaacatgagccattgattttgtaaggtacacaacactgaaagaagaagtggtaagcttgacctatttcgattaatctgggaagccttttaccttgtcttagtgtaaaaccctatcctagtcccaatgtcaaatgggaattgaagggtgttgggctttttgccctaaataaaactctatttcaatgtaatatttatcatttaattatcaataaagagacagaagtattttcatcacttatttattatgtc

SEQ ID NO: 385242 - DNA, 1032 bp, Cannabis indica
tatatttctatcaattaatttttgaactctaatttatacacatttgtaaaatttgagggaggcaattgccccacctgactctaaggtggcttcctctccatgcgttgacatatcaaaatagattaaactaagtgcttcattaactgacaaaagaaattgtggttataacttatgatagctagctagcttgattaaattaaagaaaaatagatattctcaaagctaggctattaatgtttcaaagctatatagcctagcctagctagtgatttatgaatctgatgattgaataattttaaactaattaaaattgaagtgctctcataacttcctaaatctgaccttagatctaatggtggtctgtagtgaatcactataatataatatatgatttatataaaaacgtttaatgtaagtaacaaaagttacaaaattaacatgactcctagtctcgtatagcttacaacgtaaccaagctgaaagcaagaatatatacatatatatatataattattatcaagagctttcaaacccttataattaagttttaggcagatttactatacgtacaacggctatagacacaaaatattaaaatgaaatatggttccaaaatactcgggaataagtcaaagtcaatgccaaaacaaagaggagtttactaggttttgtgtctgtcaccacatgcataaaatattcaaatacattcaaaaataacttttacaaataagacaacactaatattatatgcggtttaataaagtagcgaatcattgttttgtaaaaataagtaaatacgcaattattaatatgcacactacaagaaaataggcctatctcgacgggcctagccccccgttattgttctatctcgacgggcacaaaccgccgtgaatttgaatgccgacattgagaaagggcattctcgacgggctaggcccgccgagataggtgagcaatctcggcgggctaggccccccgtaatagatcaattttacttattaaaaaaaattacagaaatcaaaattcact

SEQ ID NO: 385243 - DNA, 651 bp, Cannabis indica
taattattattattatataatacgagccatcatgagatacaagggttgttgtttgttggaaacaaagggtgcaatatgaagggaggtaaggtgggtggagtgtaggcaatatggacagcaatggtttgggaggaggctgtcagtgtgctatcacaaattcacaatctcaatgatgagtttaaatacaaacacagacagaagtatcatctcatataatttaagatacccataattgaagaaatatacataaacaccactattacattttatcatttcctctggagaaaaagagaccctattaggactgcaatcccagtaattgcgatggtaaatataatacgtcgtcgcgaaaactcgttcggtggcggctgtcgtctaggagcacctggctctctttcagctggccttacatcccttcattaaaaaaaaatccaattttacacatgatatcatatgataagaatatggcagattactggtaaatgcctaactattatgacattacacatacctcataatagaacacttagttgggatttggttggaaggaatgaaaatagaaatagaaatgggaatgaaaataggaatggaataaaatttaaaatgcataaaaaaaaatggataaaaaaattattaaatttttctcatcat

SEQ ID NO: 385244 - DNA, 954 bp, Cannabis indica
atatatatatatatatgttgtattggtaggtgaagcagaggaggaagaacagcaagagcaataaatggacatgcgtggtctgcaaccagaatcaatcgattcgaaacgtgttcgctcaaggtcctatggccaaagaccttcgcctcttcgtccagtcattcaacatgtcccgtcaattctcatcggatcttactacgccattggacccaccgtcgcactctccacctccgccagaggagggttgcaagaggccacggaccgattggaccgagtttctcgatttcgatgaggaaatcggtccaaaaaccgaaggagaagatcgaactggtgagtaatttgggcttatttgaagtttttgatccgaaaactgagtagtacttaatttgggggattttttttagggtttgatgatgaaccggagattgttacggaattgccgatgggatttttgaagaaagcaaagttgaataatgaaaaagatggtgaccagttggagaatggtggattttggaataagcttgtcagacctggtttctccaagagaaaaatctctcaaggtaatatattcttaacatgaatattctttgaattggtcttgatttttctgaatttataaattataagtttcacatggttgaatttatatcaaatttgtaacaaccataccttttgaatttgtcttaattcttaaaaatatataatattagttttgaacttgtcataactttactaataccccacaaaaaatgctataattatattatatgtaagaaaattaaaagtataatcaaatactaattaatttgaattcaaaatttaatcactaaaaaataacttagggaacaatttgataatgagtattttgtaaaaatagcatttatgaaaaattttattagtaaaataattttttgttgtcgcaaaaacaattatcaattacactatgcgaccataaat

SEQ ID NO: 385245 - DNA, 964 bp, Cannabis indica
aagatcatgccagatagcagcgaggaacttctgatgatgaagaaagtgatggtgttgatgctgatgcaggaaaacaggacaatgcctgttatagctcattttttcataccctttctggagtccgctgccagcgaatttcaccggcgacgagaatctcggaacggatttaactgtacggaacagaggttctacgccgcgaggtacaacggaaggtggtggcgagactttcttaatagattgtcgctgaatcaaaaccgccttgatcttaaggtggcgcgtggagtcacgcgacgaaaccctaacgtattcctccaacagactcgccaattcctcttcggatttgatcgtaactaaggtctcgaagtctccgtttggcaattgacacttcaaatcaggggagaagccacaaaactctccgagtttcaccattagctctgtaaacaaaatattcagacctaaatcaatctcaagtattcaaatatctaacaccgatacggaatggaaagtagatgacgaaatagaaactttcacaatggaaaacatcgaacgaacctgcaaaggagatagaacgatcgacggtgaggactcgattgtgaccgccaacgtaacggagctggccatcgccgggacgagggagaatcttgcctccgtagctacaaaagaactttagggtttcagtactggtgggtttggtctggttgatcatgactgtgttgaaactgtactggttatggttcagtttgaataagccagaaagaagaaagagaaagaaagagaaacttctagagagagagagatcgctaagagaagaaaagaattggagggatttcttttggctgcaaaccatgtggagagttttcgtctagtatttataggaaaattaatttgagtctcccaacgcgttagaaatacctttttaaaaaataaaaataatacttttctattttttattatttttaaattt

SEQ ID NO: 385246 - DNA, 1649 bp, Cannabis indica
tattttctaaagttattttgtacttcggcctaattatgataattctttacaaaaaaaacctttgtttaaaaatttcgaccagcagtcttaagtgttggaggctattttgtaaagaattattgaaaatggaccaaagtgcaaaatgacataagaaaatcatttcactaggggacccacaaataaattacataaaattacgtgtataattttagattatttacactaattttcaatttttttacttttttactgcagggtgaatttttttttcaaaaatactgtttttttttttcaaaaatattatgttaattttatagtgtattatattaagttttcattattgttctactgttgttatttagttgttctactattatttttagttgttctgttttatgttgttattttataaaaaaactataaattttacgttttgcttaaactaaattatatgttacttgatactatgaaatgagaaaaaatacttaccacaacataaggccagatgacactgatagctttacaacaggccacatatcactaaaagcagcagtagtgaaacctttccaagagtttggacaccaacctccaaaaatgtagatgaattgtccaataaccgaagcccaactcgcgatatttaagccaccaagagcaccggccacgccccaattgagcttgtaaacgaaaaaccacgacaacagcacgtgaagcacgaatgatgaggccgaaagccaaccaaccaccatattcttgagttgagcttgaaggtacatttggatagtgaaactaaacacgaagtaatagagatatggtatgcaccaaatcgagatttgccccgttgcaacggcaatatcttcttcctcgcctagcgctctaaggatttgtgtcgagaaaatgaagagagggaaagttatcgtcgcggtgatgatgttgacaatccatgatctttgtaagtaaattcccatcatgtggtattgttttgctccatatgcttggccacatagggtttcggttgcacttgacattcccaactattttcatatccaaaatcaaaaattttaattagagagggataataatatataacataacactaaaaaaaatcttttgcgactaaattttagtcacaacaaaatattaagaataaataggatttgaaactcccatacgacttttataaagttttgtcccttgaaatttataacatattaacaactttattattatttacaattttttcacttttaatcactattaacataaaattgaaaattattgtgtattgtttttttaaagattataactatggagcaaattataattttatttttggaagaaaaaatatggggcaaattacaaatagagaaatgctaaaagatattattagtatccagtattttttgatgtgttatatcaaataatttgatgcaattaagtatcgagtcacatataatttaatataataatttttaaaaaatataattaattaaagggtgctgggtaccactgatattccatagcaattctcttacaaatattgtcaaatgaactctaccactcatttataatagtcttataataatataataataactaatagagatagagaccataccattcattggaaaatttaaaaattaattaaaaat

SEQ ID NO: 385247 - DNA, 1884 bp, Cannabis indica
ctggttttgcttttgtaccatgaacaactcgattcctctctgtccatatcgaccagaacgtacaaattattaattccatttcagattttgagtaaaccgaagatagatgaaccaagtaatctcctttcctcattgtagatgattgctgccaatcgaaattgaaacccgaatgcttccaaactgctctagcatatcgacactcaaaaagagcgtgaccaatggattcccaagcacagcgacagattgagcaagttgaatcgatgataatttttgtttcaacaaagctgtagccacaggtaacacatcatggtaaacacaccaagcaaatattttaatcttcgtaggtaggtggagagaccaaaagtatttccaccatgatttggctacggttgatgaagaactcaaatctgaatgttcaagagcagaagcaaaatgatatcccgactgaactgtatagatacccgagtggtgatgattccaaataagagtatctctacttgggaagaagctcaagggtatagttaaaatcctatccacatcagctgctgaaaaatattgcagcagtaaggcaagatcccattgcctttcttcagtaataaaattcgataccatggtgttggggctgcttgagaaaaaataggggagaaaggtggtattgccaggaatccaaggatccgaagtacaattgattgctcttccttcacctattttccatcgtagtccatttaaaagtagagcttttccccaatggatagcctgccatcttaatgaaggtgaatggccaagtgtagcatcaaggaaggagctttgggggtagtagcgactttttaggagttttcccaagagtgagtcaggatttgcaagtaatctccaggcctgttttgctaagcagagcttggttaaaagtttcgaaggagcggaaacccatacgtccttcaccctttctttgacacaatagattccataatctccaatggatttttgagccattttcattcaaaccccaccaaaagtttgacatcatggactcaagttggttgcaaaaataagtttgcagccgaaagcaactcattgagtaagtaggcacggattgaaccacaacactttgagcaaaacttctcagcctctagcggaaatttttttatcactccaaccattcatgagcttccaaatctttgctttgatatcactaaagagttgtttcttatccctgtccgagtatgaagggagccccaaatacttctcatggcactgacagatgggcagggagagttgtctatggaagaacatttgggtagcaagtgttgtatttggcgaaaaggacatgactgacttaatagggttgagtacttgacctgaggcatggtgataaacatccgtcactctttttattgctagacaggaacgttcgttagcttggaaaaacatgaggcagtcatcggcaaaaagtaagtgtgaaatcgggatagcacgtcgtgtgagtttgaagccattaagattacccaaagcttcttcatgttgtactagacgagataatcccttagagcagattagaaacaattatggagacaaaggacacccttggcgcagaccccgtgagggaactaaagaacttgtggcctcaccgttgattaggaaggtaaagctatttgttgtcaagcatcccataataagcttaatcaactgctccggaaaatccatttttctcatgacttcgtggaggaaacgccattcaacacgatcgaaagccttactcatatcaagctttaaagatgcaacgccatttgttcccgcagttttattcttgataggacgaactaattcaaaagcaagtaggacattatccgtaatcaagctttcaaagtttttaatttttttttaaaa

SEQ ID NO: 385248 - DNA, 2052 bp, Cannabis indica
acacgcgtataaaataaaatagtcacgcgtgtaacacactgtttgaacgtatttttcggtgtgttaaacttttccaaattttttaaaattttgcagcatatcttaaataactataacatacatgaccaagagaaaaaatatcacatgtacataaaaaaaaaaaaataaataaataaccatacctgtggctgtatcaaaatattaaaatttattttccacaatataaattgtttcaaattttttaaaactatatgtcataatcataaaaaataattattctaaaaaaatttcgaaactaataaggaataggattaccaaaacatatgaagagatgtattatagactcgtgcataattaaaaggatagtttaacacaaaagttggtaggtatgcgctatgggcacccaagtagtagtagcaattattttttagaaaaaataaataatagcaacttttttaattgtaatacttaagttcaattttcagttgtaaataaatacataattttaatttttttcggtaataatacttaagttataattctggaactacattaccgttaaatattaagtaattaaatccacatattattttcttattggtatatttgaactaaatttttttatataataaaaatttaatgattttgaccaatcaggaattgccacgtggcaatttacttcactaagtactacagaagttccaaaattatcacttaggtattattactgtcaaaaattaaacttaagagtttatttgtaactaaaagttaaacctaaatatttatgtcgaaaattactcttctaaacaaaaaaataataataataataaaaaatagtagtagcaagttaacttatgtaacttacctaccagtccaccacgttaagcaaaaaaacttacctaccaccacacctcactttctttttattttgggagtattttaggagttagatgagagaggactacctcattttattaagaatgaaaaagaaatagaaaaatgccaaactgtcttgtccttggccattggcccatccacatatataactgggaggtgcgaagactgaagatactgggagaaacattttctcttaaacttttaaactatttagtgatacgttatgacacttgtgcatcttaattaccctcacttttatcacccaaatactaaataaagacttatgtttattggagaacaatgttctacgtgtattaaatggaaagtattgagccatatatgaaaaatgtagactacttcactcattgtcaattggttttgagatggaactcatgattctcaacaaagtttaagtttaagacataaataagcaacaaagtttaagacataaataagaataagaataaaatataattagctgagttgaatatgaaaatcaaaatatagcttgcaagtttatgaaaaaacaaaagacaggataatgtaggaggaattagacaaacagaaccatcaacccttttgtttataatttagttaattagtacaaacaactaaattttgatggtaccactcttcatatgcgtcaaataaataaaccaaaactccaattctctactcaccaaataatgtttgcatgagaaaagtgagaggcatccactttataactctccaaaaatagttacaagattagaaatattctaagaaacaataccattccacataactttattgtctactcttaatgctaacttttcgagatgatagaatttttattgtagaataatataattatatgcataatattataaacataattattaattatgtgttcaatatttatcaataatcatattagaattgttaatagttattaatatgttaaaggctacatgggagcacttatatgactataattagctcattaaaattagaaaaatttacaatgatatacaactttttgtcaaattttttttacaaaaaattactgtcaggtcggtatttttttactttttttacttgtattttttttataaagttttcatactgtcagtatactatattaagttttaactggtgttctactagtgttttact

SEQ ID NO: 385249 - DNA, 3541 bp, Cannabis indica
gcgagcgagtatgggtctaactcaaacctgtgagttacaaaaaatcagactcaaacctgcacgaaagaattgagcgggttggacctgacttgcgaatttttccaaacaaatgggttggtttggttgagttaaatttggacaagttggccatgtctgaattaaatctgaacaagttggataggtccaaatcaaatccgaccaaaattttcactcctcgtgctataaaatataatcattttttttaaaaaatgctaacagttttcaaatattacaaaattaatgtgcatataaatatatcttaaaaaaatgataaaggaatcttatagtaatttgttgagtaatttgcggtataaatacttaagtttaactctcaattgtaaataaatacctaagtttaatttttatcagtgatgatacttaagttataattctgaaacttttgtaggtactaactgttaattgttaagtaaattgctaggtgacaatttttgattggtccaagtcattaaatttttatttttttttaaaaatttaatttaaatataccaataaaaatgacatgtgaataataacataatatttaacggttaggtaagtatagagttccaaaaatataactttagtattattaccgctaaaaattaaacttaaatacttatttaaaattcagatttaaacttaggtatttatgcctcagattacttttataaaaaatctcaaaccccacatattataaaggattggtattgggagtgctgctaggtctggacagctggttcgacggctttcttttgactaggaaattgccaactgctggtgcttctctgtaataataataatatatactaactcaacagagagctcatcggaagagaaatggaagtcactgactaccatggcgccaaacgcaaacgacatgaaagcgaaaacatttcctcaaacgacatcgacatagacctctccattttggaggccgtcgagaaatcccaaagctcagttgaacttctcgatctcagaaccctaaagaagctcgtcctctcctttgagcgccgtctcaaggacaacatagccgcccgcctcaagtacccccagcagcctgaccgctttgccgattcagaactcgaactccatgaagagcttcataagctaagggtcctcgccggtggtcccgagctttaccctgacctcgttagtctcaatgccatcccttcgattcttaatcttcttggccatgagaacaccgacattgccattgatgtcgttcagttgcttcaggatttgaccgacgaagacgttcttgaggacaatgacgaacctgctcgggtcctcgtcgatgcgctggttgagaataatgttcttgagcttttggtccagaatttgcatcggctttcggacactgatcctgatgaaatggcggctgtttacaataccttggccacgattgagaatttgatagaggtgaagccggccgtggccgaaatggtgtgcgagaggacaaagttgctgaagtggcttctggggaagataaaggtccgggagtttgatggtaataagcagtacgcgtcggagatattggccattttgctacagaatagttcggcaaaccagaaaaggttggggcaaatgaatggcgtcgatgtgttgcttcaggcggtggccatgtacaagtcaaaggatccgaaaaaccccgacgaggccgagatgttggagaatttgtttgattgtttgtgttgcctgttgatgccattggagaacaaggagaggtttgtgaaggctgaaggggtggagttgatgatcattatcatgaagcagaagaagtcggcttatgggtcggcgattagggcgctcgattttgctatgactaagtacccacctgtgtgtgaacgttttgttgatgttctagggctgaaaacggcatttgctgcatttatgggtaaggcaagtacttttcctctaatcgtttagtagaacagatatgaaaaacagagagctaagagtatagaggaattatctgtgtaaggaataacaaaatacagagagaaagagagaatattgagctgaataatattctcattaatgatcaattgagcataaatgctcttaatatacagcagaaacattctgttacaactactgtttgtaactaattacagccgtgatagttaactaactcatctacaacaataactaactaacagcttctaactaactaacagcagaatcattggttgacatcggaactgtgctttggttatcacaccatatgggtgggagattgttgcaactgatgaccaatttcagataacaggacttgaatccacgcgacttcaactttagcattggccaagctcctgtatttagctttagtgctggatcgagagactgttctcattcaaataacccctttgtaagaatatttgccatcaacccttttctttctaaagtggcgatccgctcctacatgtttggttctatcatgatgtatagggttatgagtaatactagtaagtgactgattgtcacaataaagttaatcaagagctttagattcaatctttacttcttctagtagtcgtttgattcatattggttcacacactcgatgggccatggctcagttttctgcttctgcattgctcgttgtaacaacaacgagatgtggacttcctatcatcaaccaatctagcccaatcatcttaaattcttcaaccaatcctgtttgactttggactcacttcaaatgttattttgggtttggtatttgaaagttagatgagctttcccattaattgatggtaactagaccccctttaaacattctaattttgtctagctctctttactaggtcttgattctattttatcgtcaatccaatcactgctcactttttttctttatctcgttcaataggggttttgctcgacttactacagatcaatcctgtttcttttaagagatcaagagtgtatatcctttaagatacgtaaataactcttttaccttgaaaaagttctttgtccaaaaaatatttggtccaagattcttgacttcaaactcctttccttacatttctctgatcaaatttattattaggtattattaccattgacaataatgttgtcaatatatacaaccaggatagccattttttcttctcctgagtgtttaacttcagttcatcatattgtctgttgtcaatggtaagctgtgtgttaatcctgtattttcaggttattaggtttttcggcttctgccagtttcttgggtcaatttagcaactatcttcttgagttttgttcccattgctgttttgcacataatcatcatggggttctttacattcatactcactacttactatatatgggggaaagaaagttaataagcttactgccttgtataaagttaatagaaaataaaatgatgtgtgttagaatttcgggataaggtgaatagggttccatctcaaaaccaattggctatgggaggagtagcccactgatcttatgtatcacaatttattttcacacattagcaatg

SEQ ID NO: 385250 - DNA, 1124 bp, Cannabis indica
tttttatttgaagaagatagtaaagttagagctcgggacagtgaatcagtgatattaacaaataacaatcagaaaaaagaaatagtcaaagaaccaccgtcgtctcgtcaaatttttaaccccacgtgatcatccggcttcacatgcacacaagaacacatcaaaacaaattaaccccattatataaaaatgttattttaattttttttgtttattttatttatttataaatacaagcaaaacagagccaaaatccaactcactcccactgcactattttcttttacttcctttcttgtttggttctttttttcttcctttttttttcaaactctgctgcttttttcctcacaaaaaaaaaagcctgctgctttttatacatttctttcttcttctcccctgtctgtaatggcttttctctgttcccaatcttcttgttcctttcttgggtcttgttttgttcttctatggtgggttttagcccaatctcacatagcttcgtcagctgtgataatgagcatgaggaaccacaataataaccatcaccatagaaggcaacctatgttccagaccaaccaaagcagttgtgcattgttcgccgggacttgggttcgagatgaaagctacccattgtatcagtattccgattgtccggccattgatgctgaattcaactgccaaatgtatggtcgcccggatactgattacctcaagtatcgttggagacccctcaactgtgagctcccaaggtgagaactttatgggcttgttttgatgggttttgaggataatgaagtgggtttgtgttggtttttcgaaagccatcattattgactttggttgtagcgttttcatggtaggttcaatggggttgagtttttgctcaaaatgaaaggaaaaacagtgatgtttgttggtgattcacttggacggaatcaatgggagtctttgatttgtatggtttcagcttcggcgcctggttcacagacccaaatgaccagaggggatcctatctcgacgttcaagtttttggtaagatttcattttttagatttagtagaaatatatatctgaatgcatttttgattaggaacaaaaactagtctaaacttaacgttttaatt

SEQ ID NO: 385251 - DNA, 2714 bp, Cannabis indica
ggataatgctatgagtcaagaagtggtgtttttaaagaaaaatggtatctggattctagtgagaagggctgcaggaagtaaggtaataagctaaaaatggatttatagttataaggaaggaattctaggggttgagaagcctagattcaatgctagattggtggcaagaggtttcacacaaagggagggaattgattataatcaaatcttctcccttatagtgaaacatacctcaataaggctactgctcagaatagtttcaacataagacttagagctagcacagctggatgtaaaaatagcttttcttcatggagatcttgaagaacagatctatatgaatcaacctagaggctttgaggtcaagggaaatgaagaccatgtgtgactttatggactcaagcaaattctaaggcaatggtacaagaggtttaatgactttgttctaaaatctagctttaaaagaagtgcctaagacagttgtgtctatgtcaagaactctaaagcaattgtgtgtcttcttctatatgtggatggcatgcttattggaagtaagaatatggaagagataaataaggtgaagaaggttttgaataaagaatttgaaatgaaggaccttggaccagcaaagaaaattttggggattgaaattattagagataggaagctgagaagcatcaaactggcttagagtggatacatctccaagattctgaatagattttgtttcagcaatgtgaaaccagtttctacacccttcacacaaacatttaaactcaccaaaagtcaagctccaacaacaaatgaagacctcagttatatggagaagataccctacaccagcgtagttggaagcatcatgtatttgattggtgatttgggatgggtctcctagtgatcgttgttaacacaacaaagaacaacattagtaaagtataaaaaatacatgttaaactaaaactcaaaaccaagaatttgagaagagttttcacttacgtataatttgaaacttcattgtgttgattggaaaaagaccagtggtcagaagtcatcatcgaactccttttgttgggtagcctcataatgatcatatgatcattagtgtgggtcccgaggtagtaaaagcctcctgctccgcgcttcctcatagggcaagccttgacaaactagaaataaagaatctctaatggggttggacattcccatttcaagatatggtagagagactttaaacaggcaaggatcttgtacgaatttggtgccaactgaaaaggagcaacgccgagaatattacaaaagtctataaaataatccttgacggggagaactgctccagcccttatgtgttcgaggctccaagcgtctactctggaaggctcgctggtgatgcaaccttcatctcaaaccaaacgtttaaggggataatagttgaattccccttgggcaacagacctaatgcgacatccttgttcattcgtgatgtcgcatgaccttaaaatatccccaacataagttccaatggacctaactttagattctatcaaatcggcttcaaaggtgacagtgggatcctgaggggtctttgatttatgagctttctgagccattatctcaaagtctaagaacctggtaaaaaagcaacagtgattggaggtaaaaaacatgggctcgctaaggggatatcaactaaattggagggtttaggctaagttgcttctcgcaaataacgacacctaccctcaataacctcttgtaagaatcgcctataatggctagaggtttcttcctgaccggatttaacaaggtggttcctaatttttgcatcgtttatttcaagtatggtttgaggtcttcgaggtttgggtttaaattctatggcagaaaattgaggacaaactgattctaagggttcttggattgtgaattctgggataaattgggacataattataaataataatgccccaattcctagaaaaatagagcacaaataaaactcaaaaatcgacaaatcgtataaccttaaattttctaaccctagaattattcaagcattaaaaaaaaattactcaagcagcaaaacaatacacacaagaaaacacataccaagaaattgaaattgaaagcatagaggaaaaatcaacaagaaagaatgtcacttactgttttgataggatactccaggtagaaaagagcttcacgatggaaattgcaatgatcaaaaagttgggtcttgatgatttcgaagaagaggaacacaatcagataaaacccgcagaaagaatgtgaaagacagagagggcatgcaagattagatgagaagttggttgagaattttttgaagcttgaaggttcgtgggttgagaatggcaaaaaaaagtgtaaaatgtgaaatttataccttaaaggtgacaaccgttcaatcaaaagaaatctaatcaaacggatgtgaaatgtacaagaaaagaacagtcagggcattaaatgaataaatgatgtgtctcgaagttctgaaccgctaaattctaagtatgcaaattttaaatggaaaaaatacaatagtacccttgatatttaaaaagtcatttttagggcttttttcataaatgtacaacaaaaataacataattacaaaaaatgtgcaaaaaaaaattattttaaaaatttatacattttgaaacttattacatgaaaccatacattttaatcattaa

SEQ ID NO: 385252 - DNA, 1233 bp, Cannabis indica
ttttttttttttttgagataatggattcatttatgttgtgattagtaatagtgtgacaaagagagggatggaagagtgcttgcactgtaaaacgggtcgggtagggacgccagaatgggccccaaagtgaaaccaataggaaaatgatgactaattatttcacacaagatactccaactgattattttgattatgtctatgattctcattattggaaaaacaaagtaaaagtactgtccccagttcctccacccgtttcagtttttgctcatttcatatccatttgaagttgatttatttatttatttatttttgaatggatccatttgaagtttattattttcattaataatactttttcctttctttttcaaataataaatgattaaacaaaaattccaaaactcaccgaatgattttcccattttatcccccgttacattttgaaattgcatatgtatatgtactataacagagagaaaattaaaaggaccttgtagctttcctatgcttttatcgttttgtagtttcttttttttttttttaagtatgaagttttatcgttttatagttaatgtggtgctgcccattatatatttgttaatgctgtgattagtttcatttccaaccctagctaatctacttcatatttgtaaacagcatcaatactgtcaggttcaacgtctccccataaatgcaattcaaatgggaaatggactccttatttttttattattattctctcagaaaaaaaaaatcctagaaaattcatataataaataagaataaaagaatagttttttcttttcttttttttttttttttagtttgctgatgaataataaaagaatagtttcttggcccttttgtgtgtttctgtttgcatttgtttttctctctttcttttttatcgttcttttcattctacttccttctttcttcaattccacgttcacattctgaccccttcttcttcctttctctctctctctctgcagtaagttctggacttggtggcagcggctgacatggagacagtacagtagtcctttttattttgatggttctgagtgttttgctattctcgtgattcttattttgtttttattttcgccttgctaacatcaacaggtctatagtcccacagatataatatttcctattccattattcatgttacatgcactatttctgggaacatttttccatgtaccttttccctataatcaaacc

SEQ ID NO: 385253 - DNA, 701 bp, Cannabis indica
aatttttcaaaaatttacagggatgatactgtaactataacgaataccgttataaaaaaaatatttcgatgtgagttcgcacgtagagattgactaaaaaattgtaattagcactgttcaaaaaaaagtattaccgaacactaattttgaagcaactttaacttctaatatatgtcccatataattaagtaaacaaaaatttgatcgaacgaacacatgctctattattttgaaactattataggagaaaagctatggtttgggtgccctatttttctaaccaaaaaaaacaaagtcaaacatatatacatgaaaattatataggcttatttggcattattttttattttttatttttctttttatgttgtcttaaatgagaatgcaaacgagttttgttgttttcaatttctttttttcatatgttttctaatttttcttttatttacaaaacattgaaagaaaaatctaggaatatattataaagagaaatattttataagttttgataaaataataagatagagtaataccaaagggaataaaatgataaaaaaaaacaaatgatagaaaatgagaaataacaaatgatgaaacatatttcaagcaaagtaaataaataaatgatgaaatgtatatataattactgaaatacactaattatttcaatataattgtgatgagacaatatgtatttatag

SEQ ID NO: 385254 - DNA, 1049 bp, Cannabis indica
ctctctctctctctctttatttacatattgtttttgtttatgaagtaacagtaacaggtaagggctatgcatttatacatgtttagcaagagaggtatgcatatgtaatgtgaattaaatctctcaccaccccaagctcacatcctattattatccctaatgtggttatacaattataactatgaatattttaccatacattgctaattattttctcacttccctactcaacagtaattgatttgtctttgataaattttagtaattaggttcaggtactgcaggatgaaaattatgggtgtggggtacattaaacattaatgggtgttaagaaaaattgggcaattcatctcaaataggggtgactattgacaattcatatttatcgggttagcttgaaaggctcaatcgtccaaggattgcctaaatcatctataagttataaaaccagctaggatttcgcctcaagggatgcaccaactaattctagaagcttaaactctctcaagaagttggtcattctaaaaattcaaagcatagtgggatagcaaaagcacacacaaaacaaaggcataccacagatggaggaaaatggataatttttatcatcgagcgctatgctaaactaagctaaaaaagaaaaatatacctctcaagtacaaactaacacaacataaaccaagactactaagtaacatgacaaaacacacaaactaaccacacataattaaacaaacacagccaataacaataataaaactaaactaattaaactaagaaaagcagaacaaaaaactccctcaagatttgaacaattcacgaccagagtccctttcttcatatcaatttggtgccaaggctcgagaatttgctcctggaaagctgggaatgtcgttgttgatgattttttgaatccgagtttcacttaaaaatggttaacagagatagggctgaacattttgaacgggtttgacccgaacccgagcaacccgcccgaacccgaactagtgaacccgcaaaaaaaaattaaaaagtttacgggcgggttg

SEQ ID NO: 385255 - DNA, 1978 bp, Cannabis indica
gtagttatatttttttgcatatgtccgtactaaaaattattttttaattagttatattaaaaaaattatcgagaatactatttttactatttttttaaaattacagtatttacttttatcatttaattaaaataagtgatttaattaatatttttataaattatcattcaaaaaaaaaagacattcaaaaaaaaaagcatttatatattaagaaattttagtttaatttttacttataaatttttaaaatatgaatagttactactaaaaataaaatttaaataattaattattatgtagtactaaaaaaaaatatgaaagcacgtgacaataaattttgtaaatcttatatttataaattttcttaaatagctagaatatataagatcatacaaaaataaactaaaaatttcctttaaattccaaaataaataagaatttaccaaaataccttctatatcatatagtccaaaagaatggtatttatatcaaaaaattattactctaaagtcaagttctctttgactcatttgatcaagacctaatcagcggcaaaggtgccacgccatgtggggtgctgtggctattttatatattaaaaaataatataattatttcactcttttcaaaattttaattttattttctttttaaaataatgtaaaaaatattttttttcgttggtgaacaatgaacacattatatattttagaacatcatctataatgaaaaaataaaataaataaaattataagaataaaaattagaataagaatagaatggaattaaatttaaaatatatataaaaaaattaaaattgatagaaaattattaatattttttctttttcattagaatcattactccatctatttcaaaattaaagtcattttactaaaataataaaaaagttattttattagaatgatattttaacattttaaaatataacaaaacaaattagtagaataaaaattatttcctttctattttattttatttcattattttcaattaaatgctatctaaaatcctaagagataggaaaataatattgataaagtacttgaaaggttccctatgcagaattccatgaaaagatagttgtcgatcagacatggaattactctttgcagagatcaatgtcctaagacatctcaagagcaagaggacataagaaagtatccatatacatctgttgtagtgagtttaatgtatgctatattatgtacaagacctgacatatgttatgcagtaggcattatcagttgttctcggtcaaatctaagttcggaacactagattacggtgaaacacattctcaagtatcttaggagaataaatgactatatgctagtatattcatatagcgaccttgaacctactggatacgctaattctgattttcaatcacacaaaaagatagtagaaaatctacttttggaacaatgttcactcttagtagtggtgtagttgtctagaggagcatcaagcaatccaacatagctcattcaactatggaagttggatatatatcaactttttgtgaagcagctaaagaagcagtttggttgaaaaaattctacacatatctagaagtagttccaaacataaagaaaccacttgttctttactatgacaacattggagcagtgactaattcaaaaaaaaccaagaagccacgaatggggaaagtaaatagagcgcaaatactatatggtcagagaaatcgtacatcaaggagatgtgtccattatgaaaatcacatcagagcacaactttgcagatccgtttacaaagacgcttctagcaaagcaatttgagggacatgtatgcaatatgggattgagaaaaatgcctcacttgctttaagtataagtaggagattgttagaagtgtgtcctaaaagcaagtaaagatatttattattttaatttgaataaaaaatataatggtttattatttttatatttgaatt

SEQ ID NO: 385256 - DNA, 477 bp, Cannabis indica
taataagattttgttttcaccaaacctcagaaagcatgattctgataataaagagctagagaagaataccatatatgtcccattttttgtaatgataagaaaaacaaagctaaaataacaggctttctcatccaatcagtaaccctcttaatgatggattagaccaaattggtctctatctaccacaccttaaaatgataacatttaatgtcacatgcatatataccataaatcaaggaatcaaagatatatacatatatataattaatttataaaaaaggacatgaaagtaatacattatattaactaactgttgggttgtgattttccgtgaattagtaaataaaccatgttcatatatggcctcgttaatgaatgaaataataaatacataagattcttataatttcttatgagtttccgagtaaggatttaggaatcatcacattcacattcatatattttctgtatatatat

SEQ ID NO: 385257 - DNA, 1644 bp, Cannabis indica
tatttttttaaaaaataatatttgtactaaattaatgattagattagtgtttagcataaataattttatattattcaagaatttttattttaatattttaattatttattaaataaaaatataataaattatttttcttatatatttgataatatatgatatattattttataatttatatatttttattttttttgttgcgaattatatatttttatttttatttaagtgtttttaaaagaaaataaataaaatactccagttcttaaaccaaacacaaaattattacttttagcataattcaatcttgtccagttcagtcaaatcctttctagtctagttctgcataccaaacggaccctaatttaaaaatctaaaaattatgatttaacttagtattaaatttcacatatttaaatttaaagaaactcaatattaaattatattggacatcacacctctcttagaaatataatttaattcttagaatttctcctcacaaagaaaatctttgtctcaagttcgaatccttatattagacaccatatatgttaataaaaatatagttagtagtaattaacgtgaggattaaataatatttttaataattattaatgattgtataaaaattagatttatacactatatgctcttttttgataaatattaattaatagtttttttttttttttttatttttcttattgcagtgttcagtaaactccatggtgattttttcagcttataaataaaattatagaaataaaaaagtgttggcattatataatataactatatatattatatatagctcactacgtgtatttggattctctttttctttaattagtattatgtaatacttttataattaatgagtaaatggaagtgttataaagattaatgtaattagtttttaattactataaatatatttttagtatttttgttattcatatgtttatttacataaacatataatataatcaagtaataataacctccaataaattcttaaagaaaataatgttaaataattaaactaagatttatacacgagaattttatttgatatgaggaaagcaattggacgacatatagttattaatattattgttctatgttgtttttgatgtttgtaataattttgtgattaagtctgcaaaatagacacttgattgaatatgttagatactaatatgtattcttttaaaatgtataaagaagaatttggtgaaatgtattttaattatatctccttcaatatccttctagagcgatgcaagcagcattatcttcatagagaattgttggtacttctttattagatgttaatccacatgttcctcgaatatgttgtgtcattgatcttaaccaaacacattctcgacttgcctcgtgaattgcaagtatctcagcatgatttgaggaagtagccaccagagtttgctttgttgatcgccaggatatagcagtgtcaccgcaagtgaacaaatagccagtttgagatctggctttatgtggatcagataaatatcctgcatctgcgtagccaataagttgtgacccacaattattagaatagaataatcctttatcaatagtaccctggagatagcggagtatgtgcttaatccctttcca

SEQ ID NO: 385258 - DNA, 1403 bp, Cannabis indica
taaatgcactctcaagagacatgattttgctatcaactacatcttgtattcaattccgccgacttaccaaaacaaatggagaaaaatcatattatttatttatgatttatgaccatgaatatttctatgccacaacttattttattttcaatttttaatttttaaaattttaatttttttgggtgacaaatgtagggaaggacaataaacaaatggggtatgttagagatggagcaaagtaactatactacatgggaattgaaacttgaatatctctcttccatgcctaagacttgatttcatgtcggtttgtttctttaataaactacatgttgtaggaggtaatcttaacttgtttaaaatcaaccaataggaattcaacatgtcacattataataccaagtaacaaacaaacaagtagttcaaaacttgaccttttaaataagaaaaatagacatgttttgaaatagtaaatgtgtatttattaagccttgtaattacattatatttttttattagtacaaagtgtttaaatataaaatgataattatatataaatttatatttaattaaatagttagaaaatattttttttaattattatttacaatagaaagttttaggaattacataatgtagttacaatcatttttcatagagtgtgtaattggatccgtatattcgtatattacctcaaattataaaattacggtataattatatagtcagataaacacatcaaattatataattatatttccaattatactaaaatttaatttctcatggctctccaaatgtaagagatacgtgtcaagcactacaagagtaatatattattattggtgtattttaatctcgctaactattataaattgacacttagatatgatgtttaaaattcaaagtgtcaaatctgaatgctctttaaataaattaattaaaaagtgtattttaaaaattaaagaaaaaacagaaaaagcataaacgatggtatatttacttagttatttatctatgaattgaagaggcaattaagtgcacatgaatttctacatccaaacacaaccacactccacacactagcttaatgagaattttaacaacacaaaaattcccacattttcttcaataattttgttaaaaacatacgttttatgtatttttcttcatttcttttacaatatggcaaaaatcagtccatacattacactatatgcaaattgtgggggtaagttgaaaaataccacttttattaatcaattaatcaaatttgcctctaattttatatttatttgaaacatacctctttttatatgtattgtacctaaaatactctgacataagagagtcacatggagagtattttgaagtgacaatgacaaaattggtacaatatttaa

SEQ ID NO: 385259 - DNA, 1180 bp, Cannabis indica
agagatgcaagtcacattatatcgtgtcagtattttaaagaatgactccagcacgacctataaacttacattttagtatcatgtttagactcgtatcgtgctttacttaagtcatttcgttttttataaatgggtcggcccatattatgtgtatttttcttttattaagatgtatgacattatagttatttccaaacaatttatttatattataggtgttcaaaactgaacaaaatgtacattttgaccattttttaaaaaaaattaataataatattttacgattctgatagttctttaagggtaaataaataacataggagtggcattagataagtaaataggagcagtccatatccataacacaagaaactaaattgggtggtagggtgtgagttagttgtgtgagtagtgacatgacaagattatattgaagagagtgagagggcaataaattagttgtcaaattaagacttttttggagtaggagaataaaggaccacacaaaataacaattataattctacaaaactcattaaaattgatgcacttttaggggctgcgacaagaattggttggttttgaaaggaaaaaaagtaatgaaaagagggttttcggataagagaaaccatttaatgtgactctctcccactctttctccatcctcatcttgttgctaattattttctagcatgattgtagttcttgtcgtagattgcctaactaaaataaataatatacgacatattaatttagacataaagataagacaaatatgcaatgattggtacctcataatcaaactttaataaaatttaaaattgactcagatttaagttatgaatgtgtgtcagaataaattttactaataaaagcttataaaattaaacttcaatctaagttttacattttcacccgcaattcactaaacacgtcaaagtttgtgtttagagtcaatagattaatcttgttgagtatgcagtgaatgtgtatataaaaatgattattactccattaacaacatgagatactttgaaaaggaattattttccaatacacaaatataatgaaaaaattataaaaaatatgattgcatagaattaattttaaatttttttatagtttttataaatttatttacaaaaatataattttttttatgttatactcttattaaatt

SEQ ID NO: 385260 - DNA, 1613 bp, Cannabis indica
ttaggaagatcaactactttagtatttcttttctgttttctttaaagagatttaagagttgatagggcacctttaattatgaagagggaaaggtctatatatataagcaaatattaaagactggtctttatattaatgataattcaaaacatcaaagaagggtcacattgaaataagaacttttgccacattgttatgttaccaatacaaatcctcatttaatattcaagaaaaagaaaatgaaaagatatgtgaaatgctaattaattatttattagaggagcattgcttatttgcttaaaaaaaaaagtagatgttcattcattgttaaaagaaaacaaaaattaattaaaccataatcatattccattttcagcaatatctagaagaaagattctcttgaaatctgcaggcatatctgagaaaacccttaaaatatcatagtttgtagccaagatcttgacagctcgaaatactgcagttctattaaatatcacttcttctaagcccattatttgcttcaactggctcccaagttgagcttgcaaatcacttatattttcatgattttttgaagcttcaataacaccatcaatctttactcccattgctgcaacagtagctgaaagactctcaatcttactctccatagtttcagaatcttcactctcaatcttcactcccttattcataaagaccacgtttggttggaactaatgacaacataaaagtaaaaattaagaatagtaaaactcatgacaagaatatataaaatataaaggctaattagaaattttgtcccctaaactttgatgacatgtatcaaatcataccctctgaatttttaaggtctaatatggatgaaagttcagggggtatggtttagtacactttaaagtttaaggagcaagatttggtatatatcaaagtctaaggagcatggtttagtagataaataatcaatgaaatagtaaaattgaatgaaattagacaaaagtccttaaatccaacaatctcaatagttcaaggggcatttttaacgaccttaaaagttcagggagtatactttagtacatgttaaagttcagggagtaaaaatcataattagccaaatataaatattacatattgtacttagagaaagagcattgttatttggtattagtgatgcctaacattttttacaggtgacgtcatataattaattagtgatattatctaaaaattattttcttaagttatatggaacccaatacttaattataccaatagcgatatgacaccaaggaggatgctaagtatcgggtcttatatagttaaatataataatttttaagaaatatcgctagccaatcgcaatgcaacatgtcttgaaggtgctagactttactagtacccaaattctaacataatatgataacttattatgatatatattttcatagtggataaattctaacattttgtttgaaataacatgactttaatgtagatatatagaatttaataaaacaaataaatatatttaaaccatttcataccttatttgtttgagtcgaaaattgaactcacaattttatctttatcatttttaaaaatatagtctattttgt

SEQ ID NO: 385261 - DNA, 1289 bp, Cannabis indica
aaggtcttaaatggtatttacccttaaatcaatgttttgttatttttctattgctttgtagttatctttttgttgttttataattattttcatgttgtttgttaagttgttctagagttgtttttaagtagttttttttactttactgaaatacagtatttttgtaattttaaaagtttaacacgatatttttgaaaacttggtacagtaaaaatagtaaaaaaaaaatatatcagtaaaaatttgaaaagtacaaaaaaaaagtaatttttgtaagatactaagatcccctaaaataatcttctccaaggcccaagtctctttatttccatgaactatgattctatgaatatggagttttcgttagtattatgtatgtgtcatcgttgtctatctattattattaggtatgtacattttcaaaagagagtttcattaacatatataatgttgacccattaagtttggtttgggtcagatcgaagaatatattgctcattatttgtaattattttctttcaaaagtatatataaaattgatataccaaagtgtgataatatttagtcttaaatagaattcatttctcaaatttgattgtttgcatcgacacacctttagatactgcctcataactaagagtaataataatttaatatatatatcttagacttttagcatatggaataacactactacaaataataataataatgtattataatactttggtatattgcaaattgatagaattattataagaatattattaagtataataaagaaaattggagttatgcaccaaacgaactcatttgattttgatgaattatctgtttggctttaatttggttgttgttgagttattttatcctttgattattattattattacatcaatatcaaaaaagaaagcaatgtcccacttcaccaatatattaaactttaactattctcttgccaaattagaaaaacgaaaggtacacctagaaaacaacttattatatgatataactccaaaatcgtatctttaatattatatctctttactatattggaattaatgaagtttataaaaaagaagaagtatatattagcataaagaataattacttccgaattttttacattattaagttatattttaagtatatagtttgttaataatatcatcactccaatataacttttacattaatgtaatcattttatcacactctatttaattttttcgtaaaataagtgacacaatgaataatagttgataaatagatgcaaatatatatattat

SEQ ID NO: 385262 - DNA, 726 bp, Cannabis indica
tttttgaaagaaaaatttatttattgaagaaaaccaggattatagcaataaggggaggtcagccttacaaaaattagctaaccaatcgggaaaagaatgatcaaagagttgagtggttctatcagctaaacttttcctagctaacatattagcacactcattattgaatctttttacatgaataatattgacactctctaaagcgtccatctggtctttgatctgatgcaaaatggtgcttacagcattgtaatattgtccctggttcttgagctgatccacaaccgccctgcaatctgactgaatctcaataggacccgttgcagcagtcggcgctctcttaatagcttctatgatgggccaagcttcagccatctcaactgtacacatactgggcatatatatcatacctgctgaaatgatttgcccctcccagtttcgccaaatgaacccaatgcccactccaatcagattctcgtgcacagcagcatcgcagttcacacagatgctgcccttttcaggaggctgccactatttcattatcgtgggatgggttgcctcaggtttcaaagcaatatccccatgaggattagagtgcggataagcagagaagatccaagttaacagctgaatcccattcatgattgggagttgattccacttcctatttcgattttcccatatagcccacataactctaaagcatcttcatgttgggttttatgc

SEQ ID NO: 385263 - DNA, 1310 bp, Cannabis indica
ttaatagtacttgatccacacataagaattaagattccccttcagattgcatacaatctaaattttaacattactaacgctatttcaaaccaatgaaatacatgcagcccaaagatatgggtacatctaaaactattttctgaaaagacctctgttaaaataacaaagaattttacacgagtcaataactaacaaagaaaagatcagtaatcaagccaccccacatattttagtgagcaaaagaagtagcttctttcaatcccaactttcacttcaccaatgttcggcaaatgatcatcgttctccgagcgacacgagcttgaattcgaatgccaacagtctcaagaggagcttgaacagtttcattacctcctcttttctctcaaaaccaaaaaattctcagttaaacgaactcattcttaggaatgtttcttccgcaaagaaaacatattcgaattccaaggtggaattgcagagtggtttaagttctgtatcaatatcttaggcaaagtatgtatgtcaatccttcttagtgcaatgtgcatcagtaccatgctgcgtgcaatgatgatatcccacactatgaaggaaatctcttatctcttttgcagttgtattactggcttgcaacaaccgctcatcctcctcataaataagatatggtgcttcacttccctttcttgatagtagcttggatgctcctttaagaacgtgatactcccaaccttgaacatcaatcttgagtagaagcacgggttctgactctgggattacttcatcaagagggacagacctaacttgaagtgctatctcttcgtttgacttgaaagccaatttcgcaccagtcgccgatacagcactattgtcaagccggccaaccagctggcatcaaatggaggataatttcacattagcacatgaacaaatgaacagaataattgagtcttggggcacaacatattatgcaaatcagatagtcctaaacaaactggcttgtaaattgttgactcagcttgtagatcatgacaatattgactcagcttgtagatcatgataatcacagaaaacttatgtagttacttcaggaagatgtcagtcaatgcttaagcttttaaaccacctttcacaatttcagtatcacatgattcaaacagagaaccacaatatagaaaacataacagaaattttttttaaaaaaaaaatagacaacagaccttttttctcaaactacccaacataaaaagcaatatcaatcttagacttagtctacctctccccccccccaaaaaaaaaaaaaaacccttactaaa

SEQ ID NO: 385264 - DNA, 2052 bp, Cannabis indica
cttctgaaggatggtttatgaagttaatggaaggaaataagcagtttgtcacaaaggacccagaaaaagctcacttattttatttgccatacagtgctcgccaactggaaatggccctatatgtacctgaatcacataatttgaaaccattatcaatatatcttaggaactatgtgaaaaagattgctgcaaagtatcctttctggaatcgctcacatggatcggatcacttccttgttgcttgccatgattgggtatgaaaatcttctccttgctatgtccataaactggtgtcagtacttatctgtatatgatgctgttctgaatacattcttagttaactcaaatgtttaatcatcagatacttcaggaaaaacaaaaaaaatcaaattattaaaagtttccattcatttaattcaatttcagttacaccttagttgcttttatactgaaggaaattatagcttgtctccctttctaacttagtagtaatgcccatatcagtggtgtagagtgtagtagcataacagtgtaattattgaaacttgtacctcattcctgatgatatatatgctactgtctgtgtttgaaatttgagagtttggtggcgacaaaagaaaatattttattctgattgaaagtctgtactaattaatggttgtgaaaaaaatttcatctgaagaactagtaggttcatgttgaaagaacactgctgtataataatgtgctgcgctgccttataatcatcggcttgaaaaaattcgatgtggtagttgcttcttctaaaagtggttctccacattatcctagtgcgttttttcttgtctatactgatctaacattttgcagggtccatacacagtaaatgagcacaaggagctgagtaaaaataccataaaagtcctatgcaatgccgatctttcagaaggagtctttgttcgtggcaaggatgtttccctaccagaaactaccataaggactcccaggaggcctcttagaaatatcggtggtggaaagagagtgtcacaacgtcctatcctttccttctttgctggtaacatgcacggcagggttcgtccaactctactgaagcactggcataacaaagatgaagacatgaaaatttacgggccattgcctgcgagagtctcccgaaagatgtcttatattcaacacatgaagtcaagtaaatattgcatatgcccaatggggtatgaagtcaacagtcccagaatcattgaggccatttattatgaatgtgtcccagtgattatagcagacaactttgtccttcctcttagtgaggtattaaattggagtgctttttctgttattgtggctgagaaggatattcccaatttaaaagagatcttattggctattccattaaagagatatctcactatgcaaattaatgtgaagatggtgcagaagcattttatttggaacccaagacccataagatatgatttgttccacatgattctgcattcaatttggtttaataggttaaaccagatacaaatatccacatgaccaattttttctactaacactatttattgagaggcttttcgactcgttccactcgcggcacaattgatcaacactaaggtattcaacaaaatttagcctcatgcatttggtttcatactcactaacccattgcatttgatttgataaatgaataaaaatttgattagaagaacataatggctggtttgagaagttgtgctgcaggtattacttttagctaagtttattgataatgtaaatgatattttctatgtgttgtctaaatgtacaaatgagtattaagttaagaaaaaaaaaaaaagtggtaatttattttataatccttgtatctttttcatgagtttaaattggtctaactttttggtgtttatattaaaaagactatttttgtttgttgcagtatgaaaacaatgtgccaaactaccatgtctctgtctcgttatttttcttaaggctaattaggatttttttcttttgaatttaacatgtacacaatcatgtcctttgaatttttct

SEQ ID NO: 385265 - DNA, 1715 bp, Cannabis indica
gaaataagcaaatatagatgtactctcttgtcccgactatcatgtttgattgatatacacggacaaggattcacatggaatagataagctggtctctaatgaaaacaagtgtttttcaaatttaaaacagtaataactaataactactccaaattaataaatttgtaactaaattaattttgaaaattatatatttgaacttgtctaacgaattaatctgatcgtgataggtagatctagttttacacttgtcatttgttcatgcagcaacagcaacagtataaagtttattttctatgtagtaatttaataaccaaattgctcaataaaataacatatttcaaattatatatatctatttaaaatatataaataaaagggtattccatacaaataaccctgaaaattaataagactggacttcccaatatataaaaacttaaaaaagcactaaatagaaggaatagatgacaagaagaagacacttataaattatctgcaacttcctgtagatcaaaaggtgattctgaaatccaattcagaatcctcaaagcaaaagccatgcatgacaattccacaagacaacgcataatttgttaagtggtccacacccaagatgaccagaaaattagtgagtttatattattactcgaaatgaagaaaaaataaaaaataaaaaaatccaagttttaattgtagtcctttcatttttgtataagattgctgtaaaatgttttcatttttggccacactataattctagggtggaagatgacttgttcatgctgccaaaataaccatctcatctaccaaaatccaaatttcataaatcagattgggacctaacctagctatcccagtaaactactccatctgttccctttcttagaagtttttctacttcaaaataaattaataaaaacaaaagagatcaaaatgaaagtaaaagaagaagaaggtggattgatcagttggagtttctgttggaatttcttctgtttcttattattggatttgactggctgacttatcatgtccactttaatcggaccagggtctggaccttactcttataattttatttttttagtggattataaatttcaaatattaaaataaaataagatacatgtatatatgttgtggttgctgatacgtacccaaaaaaatgcttaaggaggaggtctcatctaaattagaatgaatcatcaattaatgtgatagatatagtcgtgtatatgactgtatgtatgaccagtatttctttattttccttagtaggtcatactgtaattgaatgcgcgcggttgcatagtgccaaacaattactaatttctctagatctctctctttctttctttctttctttcttttttttttactaaaaattttttttttttctaaaaatataactaatttttggagtttcaaacttcatataaactgtgacattgaagttactggtggttatttttttcacctgaatcaattattacacacacgcacaaaatcatttttctcagtggaaaaaagagaggaccattttcataattttattttacaaaataaaccgcacttgtcaatggagcttttattgtctttgcaaaaatttgacgggaattctataacgcacctccttaaaaaggatacatcgatacatctttatttattttggtaaaatatttttgggtgattctataatgtactcccttaaa

SEQ ID NO: 385266 - DNA, 2470 bp, Cannabis indica
cccctggtgcaagcacctctggaccctataagtctcctatgaatattcacttcgttccttctgtccaggactatgctaacttaaggccagtggaatttgataaaagattatatagttttcgatcccggatgggctctggtcctcctgtaccaattcttttggatcattcctcctacatgacctcaagttgatttcttccctcagatagttttttaggggaagacgacaccagctttttaatttatgaatttgctagggcagaattagatcaccagtataggattagtctcgttgcactatacctgcacttgtaatcttttggtgttattctgacctcttgcttattttcaacagcaaaacccatggtagatcttctggatgcccttggccggactcacagtcctaagttagacatgccagagcacccccgagtaagtgtgactctgggggggcctagttgaagctattaggaactaggaggtggtcttgattgacaaagaggaagaggaggtggttccttctctcgactggaagtgtaagagtgttgttactgagccggagccttcaaaaaagctaaagagggtcgacacccccagctctagtatcgattctgggattccttccaaggtcgacgagtatcctgcacctccaggcataattttgactcatgcccatcctgacaaagaaaggatccagctctgcatcgccaaacataattacactgtgggggaattatccaagggagatgctgaagaggaggccctaaagaagtggttgagggaggctcaagatgggcccttttggggaaaatattctggggatgtctgggatttaaatttggatcccatgacagactggttcaaacgcttcgtgggccctaacttggctttgtatgctttagagatggtgagtcattttgctgctgatttaacccagcttcccaccaagaggtatgcaacttacgcttcttccaaccctgtttatcaaatccaggacacgagtgttgccttgactgcggtaagtgtcaattttccatgccttttttatgctttattttcaaagttctaaccttattctttattgttgctagattgctgcgaaggccaatagactttccagaactttgatcaatcaaggtttcactgtatcggtgtctggtggcatgaacggggtcatgaggaagctcagggagtcaaaggaccagctggaggctcttcgtaatgaagcccgagaggagaaggccctcatggagcgaaatcatcaggcagtgctgaaagtgaaggatgacatcatcgcttcaggccggaaggaactctgggattacagagaggagaactaggaactcatcgtgaagcttaaatctctagagtagctacactagactgacttggagacaacaattaatatgactgttgaactcaagaaactttgcgagtttcgagaccaaacccaaaaggaggatgcgaaggctgcgagggatgctttactagctttagttacttgcaagcactttgagaagcactttgaagatggagcatttatgtgctggaaggccaacaagttcgaacctcgccttcccttcttccccgatcctgaggctgttatagctagattttgggagaagaataagaaattaaaagttgtcctggctgagcgtaggggtccccgtcttcctccacgagttgattgattaagcctctcttcttttctctttatatttcacttacttcctcccctttcaagacaattttatttttgtatttattacctatagtttaggtaaggggagactattatggcccgactccaggctttttattattgacattttgagcaacttatattataagtttatatatattttgcatttcttatgtttggcctgttcctgcgcatattttatgccttagtacccccataagtgacataaaaatattttttgggtcacttagcttaaatttatgtgtgataatgcatatattttgtccgacacaagttaacttacagaataaagaaaaatttaagtattgaactcctaagtattgatagtatttgtggagatggtcagcattctaggctctaggtactatggatccgtccattctctttagcttataagtcccaaagcctatttcatcatcaatttcgtacgggccttcctaatttggctcaagtacccccactcctggctcttgggaggtcgggtagacccttcttaagactagatcaccaatggtaaatttcctgtttttgactttggaattaaagtatttcgccacttttggtatgctcccatgcgtatttgagattcctcccggagctcgtctactagatccagcgtttcttgcagcaagacatgattcgttgctggaccgtaggtgactcttctgtgggacgggattatagcttcaactgggaccatggcttcacatccatacaccattgagaatggggagtgtccggttgtggt

SEQ ID NO: 385267 - DNA, 2076 bp, Cannabis indica
atttccaatatttattattattttgttttgagaaatttccactgctattatgaattataattgtttacaacaagtgagaaaatagaactgtcagtcaacaaatattttcatccaactctagagcatatttagctaaaccatgtgcagtttaattagcatttctcctaacatgagaaacaataactccagaggaaaatgataaatgacaacaagcatctttatttaaatcattaaaactagataaattcataaaggtagagtttagagttgtaaaaattctcagagcatatgtatcgatatgagtaggcagctgtaattgcattgtccaatcaaggctatgaaaaattgctttggcctctatttcgtctaatcaaaaacatccttgcattggcttagataaagcagctaccacatggccttgatgattccttataatcacgcctactcctaaaactttggactctgacagcagtatttatgttcattttaagcccaaaagagtctagtggcctccatggaataccctctaatggctgcctagtatgaggctaaaccaatgtttttgcatttctaattggggacgtgttatttcgaacaagatatggttggttgcgacatgtagctcgataatatttgtcaagaaatgtgtttgcaaatgttgttgtccatcttttcaaactcccccataaaaaaccatttctttcattctaaatagctcatatatgagcatgtcgatactcaatggtgaacttagtttgctttaaaatcgactttgctttatgacaactgaataaggcatgtccaatcgatttccaagcatttgtacacatgaaacatgatgttgaattaatgactttccttcgcttaagagttgctgcaactggaagagcactttgcatcaccatcaatgcaaatattttgatcttcaaaggcaagtttagattcctaatttttccaccaacccctatgagaattggaggaggaagactcattgatttcatctatatttttggccaagtgaaaaccagaataggtgtatgggggcttatattacaagtcaatgcaaatattgcccaacttactcttggttatgcatagtcaagaaagttcacgactcatacttgtttgacatgggtcaggttcgtgaataggtgtatgggggcttatattacaagtcaagttatatttttatgttttatactttttttactgagtttgtcgactcacagatatgtgtttcatgtgtaggtaaaagtatggaaaaagctgaatagcagtgagtctggagctcaatgaagattgtacatatctagacgattagacctaaagtgttcaaatcttcgggacaacatgtgctcgattttattagtcatcgggcaacacttttgatacattatattttgtttgtatttgaaaaatagaatgggatcccgaagtttgtaaactttatattttgtatatgtagtaaaagttatgtttattgaaaaatttttgttaatcacatttttaactaaatcctttgattagtaaaaattagtatattaatttagaaattattgtagcgcgcctaagctagtagggtcttacaagctaccataagagtacatggttactcttacttgatttttccaattatttaactttttcttcaattttctcataaaataattttttaaaaaaaaaaaaaaaatatatttttacacgaaaattatagaaattcataaaatttatataagctcacaacaaaagtttgtacatgagaaacattaattgtcaattaagttatcacatgttcttgctcaactattataaatcttatttataaatataagtaatgcagaaatggctatttaagattgagctacatgacattaataaattgtgtggtggtaggaaattgcaatacatatattttctcttaaaaaagattcatattcgctatgagtaatgcctaataacatctagaaataattagcaatttttcataataattattaaataaaatatataagattcaataattatacttcgaacaatataaaactttgtaataaatttaaaacataagtatccttt

SEQ ID NO: 385268 - DNA, 1017 bp, Cannabis indica
aaaaggaacgttagcactcattgaataagtacaaacgtcatgcatgcagtgtcatataactgtcattgcgtgaatcgaggtacaacttcaaagtaaggtatttaatgctctagattgcgaagagacactccattagtcatgttggatcaagggaagaaaatggacacgtgtcactcatctgatcgatcctgaccgaataagtccacgtgcgaccaaaaagatcccgtgcggacttgggggaaaatattatccaaatttctacacaaagtgatgtgatatctacttgggtgacacgtgacagattccataagcaggatgggtaatcccacttataatgaactgtgtagggagatttaatagtaaacagaagttaagatttttgagcagagcatgtgaaaacacctgaccagcttctatcacgcaggtggcttggatacaccaactaggggatgcgaattagacaatttcagagatatatatcctcaagcttgcaaggtacgataatatccctaaatttatgggatagattcgcagtcataaagaagaaataaaacctacttagtttctcattctgtttattgtaattatagaaagtaaacaaatttctcatttaattccttattgattttggaaaataaaattgatgtaattaatctctataaatcgtggactgatgtgtatcgtaagccacaacaaatttactattatttatttcatataccttcaattattttagtataattgtaagtaagggtctatcccacgagaactataattaatttattattcactatcaaacagaaattaaagggggggttttgagttgtaattaaatagcataaaaagaaaataaaacaagttataattgagactacgatatgagataaataagttaaaggttaagttctccacccttcgtacaatcattcttaattccttttaacttagaatgtaatttctagttcctaatcaaactattaatctcgaagataaagctgaagcagtcaattatctcaa

SEQ ID NO: 385269 - DNA, 4260 bp, Cannabis indica
ttatccaaacatgtgttatatatctcttttaattagtacgaggaaatgcttctagaagcaaatatcatgataattcaaattatccaaaccttgctactctttaactctcttaccgcctactgacaaattatattacactaagactttaaccattagaataaaagacatattaagaatgggagaaaaagtaacaagaattttttttttttttgaacctcaagaggtgctaaagattattttgtgttcaaaataactataagatgtatcataaaaagaaagttcaccaatttcaattttgaggataaaaagtactttgttatcataaattttttttaaaaaatacaatactatcatattaaaaaaattgaaattaattgtaattcatgaaagctcttaaacttcactaactatgaactttttttaatttcattctgctctttatagaaatcacaattgataacttctactatagatcaagggagaaatcaaataaatcaataattctaacaaatttcattgctaacaaattttgtataatcacctcagcaatttttggtctcataaaatcttcttgtatagccacaaatatacctacaaattgtcctcttcaccttctaattggtgttagagcctataacccacattcaagttcacttcatgaataagtttcttccttgtactaattctgttgaatgttagatttcctttatgaaaattattgctttgtaaagtgaaatttttgtaagatataaataagattttttttaaaaaaagttatatatattttaattataaaaattatatagtccactaattaaactcaccctaataagtcacaaattagtttaagtccattaaaagaaagaagaaagcatttaatcatttctttgaacgtttttaaatatgcactgtagatttatgtacctatcaccaatagagtatttgtttaaaattagaatttattttttccaaaaaagcttaatatatagactatcatacaaataatttcaatcctacatctattaattagttttgctctaaaaagccacaaattagttttggccataaaacattattcctaaactaaaaaagaaaaaagaaaatatgtaaactgtagatcaattagtctaaaaaaataaatctgaaccaaatatgaaaaagaaaaataaaactgcagtaccataacacttgccaaatttaatgaaatatctagatacttatatcactttaaatattagcagttattggaagacttattaccaccaaaccaagaaatatattgaaacatgtgttgcctaacaaacctctattgtatcatttgcaaactacataaccaatcaattcaataaatagataattgactttgccaaaaaataaaagaatggattcagaactataaagatctcatttcaaaaaagaaaaaaaaagaactataaggatctgtctattatttacgacccaaccaaaaaacaaaatagtggcagataaagtacattcatggagacttacttttattaaattgaaatcatattgaataatcaaattaacacagaagcaagaaagaaagggagagagattaataaaattttaatcatattttacaatctaattaagagaaaacctaaaagaaagaaagagagaaatagataattgtaatttgtatgcaacagaaaaaatgatacattctcatagaagaaatgtctctcatatagacggaatgagtagaacatctagtatttaaaaatagttccttttaaaaaaaaattaaagttaattttttggataaacgtgcataaaataaaaatctaaaataaaagaaaagagaaagatgatcagaccaggtggtgattccaatgcctacatcgcaattcgctgagggtagagagatgaaggtagagcaacaaagagttaatcagaaaatttgagaaaatggtaagggaaaggttttgtaaaagaaataggcaatataaattgtgataaaatggtatggtataggaaaggttttattaaataaaataccaattaaatgaaatttaaaattttaaactacgaaaactgtaaaggcaaaggttttgtaataagggaaatcaaaacttaaagctattaaatgagaagaataaaattaaaaactcatataagctaaaaaattaagaaataggagattaggaaagaaaactcatacaagttgccacataggaatcctttgtgcattcctttattatatatattgattatacttctataattaatgtattcatttatcttgtacttgtatttcataaattctataataaatgatttattaaatacttacttttaaagcataaatcccaacacccttcaggtaccttcacctaggagatagaactacacaaagattatttttctactttaggcaaagcatgacaagccggtggtagaaatgttcgtccaccaataacttgtgggtgtaaattaggccgaatccctaactctttcaaatctaggtgggatttaattccatctttactctatccaagaatatttaacaaggtattaagcaagctatctgacacattcttctcaatatgtatcacatctagattatgatgtaacactaaatgcttccaatattcaagctcaaaaaaattgaattcttcttccatggaccctgaggtttatttgtaacaatgtcacttttctcacgccgaacttttcttttctttgaagtcaccttttgctttctaatgtggaatttaactttattcaacctttctaacaattttcccattgcaaaggtggtgatggcatttaaaattcctacttactgtcaaatacttttttccaagtcctaaatacatgtttgactggcaaaaactttcagtgtcccatataactcatttttctcgagtattttaaatacatagaacatgttttctcctaaaaaataggacatacattgtaccatttcatactctataaaaaagatttccaaaaagttgaaaaatcattaatggtccataatattatggccataagatttaattcttcgttcctaaagacattgtatatagaaacaccctcgtaccacagttgactcaaatcatcaattagatgggctaagtatacatcaatgtcattaccaggttaagaaggacttggtatcaatagtgtaagcatagtgaacttcttcttcattaccaaccaaggcgacaaattatacctcacaagcaaaattcgccatcaactatacttactgctaaaggtagtatgtggattgataccatctgcaaaaagaccaagacgaatattcttaggttcattgtcaaatttaggccacctagcatcaattgtattttaagtgagagggagtcaactggatgtcttgtgttaccatctaattttctattgctagcatgtcaggtcaaatttttagcatgattgatattttgaaagaatcgaactaaatgaggtattggggggtaagaaccataatacctttgcagggacaccaacctttacctcgttagaattcttttccttttgccacctaaactcaccgcatgtgacaggatattgcatccataaacctctacggtataagaggcaatcgttaggacatgcatgcatttttttcgtactgcatgcttaaggaagataatgtcttttttgcctcgtagaaagaccttcaggtaataactcaactagaaaagctattaaatctgtattcactcttatcactccacccatgtttggcttttatattgtataatctaacaagtgtcgataatttagtaaacctattacaattagggtaaataggcttctcgacatcctctacaaaactttgaaatttcaatagatcaaaatttaattcaaattgtatgtctcttatcatttttggaatgtgatcatcctttgacacccataaccttcttagacttagacgctcctttgtctgaaactctaatattttctctgttgtgaaacaaaaccttttaattcttttctattctgttttaaacaaatgctccttcatcttagtaatattcatacgctccatgttaccatatttaagacaaggacaaagttttttgcattcttttaacaaaagtctaagaaatggtcaacaactctcatatactccactgataatcttcgcactcatccgatttttatttattttgaaacgttgaacaaaaaacaaactaaattcaattatttatttgaatgtgtagtaattaattagttaaattaattaccgcacatataaatttttac

SEQ ID NO: 385270 - DNA, 2078 bp, Cannabis indica
cttatatatatatatatatatatatatatatcagcgtggaccaatttatcaaaattataacctctatgttcactccatttgtacattgtttggtatcctacaaagtacaaaacccatcaaataattgatataattatacataatacgacgatgaggatgatgttgtagtggtacccacaatgaagttaacatatacaacatgtatatttttatatataatatatatatatttaagtaagtgggatgtactaagtgtctaaaactacacgtattatatattataatttataagtttagagatacactaaataagagtcaatactaagaactatttattattaattccttacaaaaagaatttttgtcttaatcaaagtgatgaattagttatccattttcaaactcgaatatgacttaattggcaaaagacagaatggaaaataatgccaatatggtttaagatacgtggagacttgtatctttttcatggatatgtaacaaaaaacaatatcaattcattttatatatttcttaaagatcctatttgtatgtgaggccatcaataatagcaccccctaaattgtataaccacaagcccaaaattattaaatagtataattacatatttaaccatatgtgaaatgagagttcctttaagagaataaataaaaaaccaacaaacatttctagaaccaaagaccaacgtttgaaatttgaatatgaggttgttcatgttaataaaatgataccaaactaatgtggaaaggcttaagacaagaagcactatacataacacaaaattagtcaaattagtattgaagacacaaggcaacccacaaaacttggcccaaaaaacagcataatgcaccatatgatcccaccttgcactatatccttaaactttagtctcaagcctatatatcaaaatcttcttgatgttaaggaaagcaacttttaaagtagtgactaatggaagagatattagtatttgagaagattcttagagtatctcatggaaaagatttccttccaaaatcgaatggattgctaacgtctaagtttagtaaagtagctgattttctaacaaataatggtaactagaacactcaaaaattgaactgcatgtttgacaaaaaaattattgctgctatcttaaaagggggcagactttcaggccagagggaaaaacattgggtctagaccaaggaaagtaatggtcgattctctagtaaatcgacttatttaatccaagctctgcaacaggctccctattgtgaggttgccccatctatctggaataggctctagaatatcaaaatcattgaacaccataagattttttagtggagtattatttctagtactttcccaatttaatctgttatgaacaagagattccacattgatgatataagttttcctattgtggggtagagaaatctatggagcacctgttcctcacttgtaattttggcttttcacttgtggcgttccttctcgtggtgtattttttctgtctctgaaccaagtactctaatgtgagactagattaaattcatttggagcttaagaaaaaaaagcttcaatattgatgaggtctttcttcatacatttattgttatcaacactatatggcgagctcaaaatgatggtacacaataacaatctggataatgtgaaacattacattaactctattgcttactcttatacagattacagagcttcttttattcctactcctctaaatcctattagatgagtgacgtcctcctccccaaaattggcttaaattgaacagtaatgttaaagtgaggatggagaacatgtgtattgtggttgttgctagagactaccatagtgtagtggcttgggtgactactccaaggttagattttttttatgctatttgtggcgaggatactgcttattgtttggctttggaaacgacaaaggataagggttgcaagtttgtaattgtggaaagcgactaaagagtaatgatcaacactcaatggagaggactctagatgaaaaattgtgaactattctagcttttgtaaaagaattgcttcatc

SEQ ID NO: 385271 - DNA, 1030 bp, Cannabis indica
ttttcggtgttcggacggtcagtgtactcgatttggtcggtttcttagattttttgctcactcctaaaaaataagaatagagtataaccattttttttattagatttggaatgatcttttatctcatatttaaataaaataataatttacactttataatcaaataaactaaacaatagaatgaaatttgattcatttgattccatagtgtgcgaattagtcaactcctatcatcacttcttgtttttaggattgtgtaaacaaaataaaaagataaagaagataaaatgattgtgtgatgagaatataatgagagatgactgatgaggctgacactatgccacatcagataagactctcatcttcagtccccacacccaaccttacaaccctcttagtaataatagtatgtatcttcaacaaaagaaaaagaaaacaagtttctttctttgttcataaaatttagaacacaattttaaggcaatggatcctttgttaccatggttctattcttgatcaactaaaacccaattaacacaaagatcataacaaagggacaaccttattatctacaaaattccaatcatatggatgagcagcagccacccccacaaggtggaagtggatcttcttcatcaaagataaagacagaggatttggatgttactcttcaggccattggttttgagttccaacaagtctctccaaataaagtctctggtctccttcctatcactctcaagtgttgccaggtcttcctctttctttgtattgattttcatggattcttgagttatagtgtttcatataattgttagaagatgcctaacacatgtgagcctaaggatgagaattgccctgttgggtatggccccgctagtgctcgcccctaatgggacgggtatttcccacctaaatagaaaatagggtgaagatagagatgttctgtttggctaaacttttactttactcgtaaatagaaatataagataagtataaagtttggatactattatataagtattttttt

SEQ ID NO: 385272 - DNA, 1609 bp, Cannabis indica
atgtatttttttttataagaatcccattttattatctaaaataaatgagttactatatgcatttaagcccataagtaaatatataatgtcacataacaagttggtttggatgaaactatcaagttactaagtccatatcaaagatagaaaaaaataagaaaaaaaatatacatttgttataaattatttaattaatttatcatcaattaattatagttaattttgatatattagatctatcattaagttaatcataatcatttaaatcaattaataataaatttttctaaataataataataataataataataattatttttgtgatttaataataaattttctataaattctttaatgagatcgcattgatttaaacatttttaatatgaataattacataaaatattaatttttgattttttttttatatatttttacgttcaaagttaatttttgcattcattcttacgatattttataaaaacacaagaaaacaataagaaaatcacataaaaatagcaagaaaatgacatccaaaaaatataaaaaaaaaataatatacaaataataaaaatcaacgaaataacaagagtacaatataaaaatatataaaaacattgtattttatataaataaaaaaaaatcataaaactattaaaaaattccgaaccgattgtatttttgtaatttttttgtttgttttttttttaaaaaaaattatccctttttaatatgcagtcaaaaagagtagaaagcaacaatattattggaacaatagaattaaaaacacatccaaacacatctgaggttcatgtatagtcaatcaatagcataattaaattttattttatacatatgcctcctaagttgtcattttacaaccatatataaataactattacaaagcacaaactttcgaacttacataaattacaaaagatcagtttctatgttgagttaagcataggatgcctaagaataataattgccttcttaattcttttgaaagcttcttggaggtctgcgagggatgtagcataagagattcgtatgcaactatcgtctccaaacgcaccccctgggactactgcaacctgtaaagaaaagggagacctattataaagaaacttgagaagtagttattctacttgatagtgtttttaaagcttcaccagcctaatctgaaactatcacattatttataccttaagagtatgtttagttgaggataatcaaatggaacagaggtgtttggaaccaatagtgcctttagtatttctctttttgcaataacatgcataataattataagtgttttgaattttgattattggcttacctgacttttttctagaaggtaacgacaaagagactctgaatcatctactcttccaaatccttcaaccactgttccatagtaatagcttaaatcaatgaagagatagaaagctccctggggctctgagattttaacaccttctatcttacgaaagctttcgactaagaaatcccgcctttctctgaatgctttcaccataatagcacactcctccccaccagcataacccaatcctaaggcagcaacagccgctttctgtgatatact

SEQ ID NO: 385273 - DNA, 1261 bp, Cannabis indica
aataaaaactaattaaaaatataactgataatacttaaaattaacatagtatatatataaccattttatattttaatttttttcacaatatatagggtttccatgcaccatccatttggcaagggaacaaacctcagaaattagaatgttctcgagtatatacttaattttttttttcctctttcttaattttatgagtcctttatggctttctttgttattttttttcttttgctggaaaagaatgccctttagggcttggggacagagtaattaccctttggccacgtgtatgagggtgagtgtataatgggatggaggttggataaaccccggcccagctagctagccattcttctaggaaagaaccaagtaggtacgtattgtagatggaccaattagctatagcattattcagtaaattaaccaattaaacgtcaaatggttcacacaaaaaccagtgtctacgtacgtacacccaataccagacactggtctagtagtagaaacttcactatacgacctgaccagactccaactggactccccatcaaccaaattttcatttttctatcacctatgcttttttttttttttatgtgtgtgtctcgaagacgggaaaatttgatatggattttattatttaatagcaaattttattatgcatgccttgattagtgcggatatggatttttttgtcacaataagaaaggccagtacaagcactcgatcaataaaaaaatatataaattttggaacggcatgacaaaaaaaatatgagtttaaacattaagttaaaaagttctattattatatggtaataacaatatttatttattaattatacaaaaattaaaatgctaataaaatttataaatatatatatataacgtacaccaagtaagtattataattaattttaattacactacacattaatttattttaaaaatgtgacttaaaaatttaagtgtttattaataaatattttaattataataattataattatttttccaatggttgtgtgtaaattattgaaaaatgatgtaaaaagaattgaaattataaataacaaataggcagctcaggtttccattattaatgtaggttaaaattattacacatgagtcacgtgacttgttaagtcattacaggatcccgtaatttccttaaaagaaaataaataatcctgtaatagacaggccaatgtataaaactctaattctctcaatttatatatatatatatatatataata

SEQ ID NO: 385274 - DNA, 953 bp, Cannabis indica
ataacataattaataaatattataatataattaaaaagtactaattaaaataatttttaaatttagaccatatgtgctccactaagtctgcctgaagattgcgatgaatatttctatcgcgaatttgagcatttatttgaagcatcgccgaaaaattagaaatgggtccatgtgatacttcaactattggagtgtcggcggggccttcatcataattaaaatctgaaatacccttatatgtatctctttcatcctcgacaataatattgtgtaatatgatgcaagcatacataatatctttgagaacatctctttgccagaaacgcccaggaccacgtacaatggcaaagcgagattgaagtaccccaaatgctcgctcaacatctttgcgcacagcttcttgacatcgtgcaaataattttcttttctccccttgaggtaatgggatagtcttaacaaatgtagcccactctggatagataccatctgctaaataataacccttgttatattgtgtaccatttaccataaactcaaaagtgggagcttccccttgcaagatgttagttaataaggaggattgatttaacacgttgaaatcattattggaacctggaacaccaaaaaatgcatgccaaatccagagatcttgtgatgcaactgcctcaagcatgattgttagggtaccatgatcaccacgtgtaaattggcctttccatgaaactgggcaatttttctattcccagtgcatacagtcaatgcttcctaacatacctcgaaaacctcgaacctctcccatttgaagtaagcgacgaatatcatcaacattgggtcttctcaaatattcggtcccaaaaatctcattcactcccgacaaaattcactaggcaatcaacagcagtagtttcaccaattcgaacatactcatcaacgtaatcggcaggcgctccgta

SEQ ID NO: 385275 - DNA, 1796 bp, Cannabis indica
aagtaaaaactacaccaaagctagttcttcagtttttccaaaacaattttcttaccatcactcacataatcaacaaataacaaaaaaagttctacttcaaaaatgaattgtgaagataataacgaacaaaaaaattaatcacagatagtgctcctgataaactcaagaattatcatcatcaacaacataatgatcaacgtcataatcaaacccttaaaaggggaaaatttcttggttgatccaaccttggaatggaagataactggtttcagaagctatataacataacatcaactacagactaatatatagatatatatatatatcctggtttaaggagagatgaataaaaaaggagggtgagaaaaagtcagcaattgaagatgcggccaaaagattggggatggaatgaaattgtggtggtagattaagaggggtgaggaatcatcatcttcccaattcaatgctcttaaaatatcttgaagagcaggccaccatgtgtggcgaagaacggagcaaaaacgagtgattccacagccattagcttgatcaggatgttgagagatggcccggatgtatctttcaggggatcaccaatggtgtcaccaataaccgctgccttgtgtgggtctgaacctttggggccaaggcttcttgcgtgctctgaagatccggcctagatagaaatacaagacaaattaagatatcacccaaaaacaccaactttaataatcttttcaaatgtgttaatacttgaatgcatacctcaatatatttcttggcattgtcccaagcaccaccggtgttggatgcagaaatggcaatctgtcaatgagaagagatttaagtcaaaaacacaatcgtcaatatcttttatgaatgagaaaatcatcttgaattttacctgtacaccggagataagggatccggcaaggacaccagagagggtttcaacaccgaaaaagattccaacaatgagtggtgtgagcatgacaagagcacccggtgggatcatctccttgatggaggcatcagttgagatcttcacacaggtagcatagtcaggcttggtagtgccctccatgagaccagggatggtgttgaactgtctacgcacctcctcaaccatctttagagctgcacttcctacactcttcattgtcatggcagagaaccaatatggaagcatggcacctacaatcaaaccaatgaacacctttggggttaagacatcgacggttgtaatagctgcacggctgacgaaagcaccgaaaagagctagggatacaagggcagcagagccaatagcaaaaccctgaaaaggaaatagaaagcaactatcaggcacaattcatcttctaaagagcttttgagaaaattaaactgttgtagatgctgaacggaagaactaatgttctaagttttaaaaataacttgtgagagaagggaacaagacaaaagctaattctaaagagcagggttcacacattccccttgtgcttgctgaaaaccaggacccagatgacaaagtaaaaaagtaacactagaagggtacaaagaatttcaaacctttccaattgcagcagtagtatttccagcagcatcaagagcatcggttctctctcggattctgtggctcataccagccatctcagcaatacctccagcattgtcactgattggaccatatgcatcaatggccaatccagttgctatggtactcagcattccaagtgcagctacagcaataccatacatagcagcaaagctaaaactacaaaaatgcttgctgcaat

SEQ ID NO: 385276 - DNA, 1340 bp, Cannabis indica
ctctctctctctctcctcatcttacacgccacactcagtgtagtatggtgtgagttttgtgatcatccatgtctcttcatagtatcttataagttgagaatatactgtgattatataattgtactcattcatcagaatctaatagcctactctattcctaagtgttgaggctggcttgaaagattgtggtgtaaactctttagcaagtttttgaattggatattcgatataatacgaaaaaataacgaggatctcttgataggctacaagagttattgtctctcttttcattagtatagatctaacctatatacaatatgttaagatctttatgattatggttcttattgaattttcgattttctaattttgatatggactataaaaactaataccatgtgcaacacacatgccttcaaaaaaaaatttataatatattaatgaataaagggctaatcccccatttttggcaagtaactaattaaaatttatcattgtgtttattgactttcaaaatcttcccaaaggtgagttgattttaatagtattttaacattttaattaatacataatatcatataggtaattctttttctctaatatgatgtataagcttttaggaagcacaaaatggtttcttgttaattcatttatttgtttcaaaaggatcttctaaaaagtttactagtttttgtgatgtggtatatgatttatattattatttttaaaatcataactgatttctaagttattgtttgttgtatatttttactcatttcattgtagaaccaattctatttaatttatatctcagtgtttctataattgattcctcttattttttaattaaaaccaatttctaagttgttgtgtgttatttatttttactaattttgtatttatgtcttagtgtattttgaaattaattctctcttgttttttatttataaccagtttctgagttattgtgtgttatttttttaatcattttgttgtacaaccggttctattttattttatgtcgtagctagttttttatttaagttatttcaataaatagttctagaattatttattttagaaacgggttttgtatttaattaattcaaaaaattggctttaatttagttatttcgtcaatcgatttttgatttagttaatttaaggaatccgtttttgttttattattttacttaactgatatttgtgtgtaaatttttatcttggctgctctacgaaactaatttttttgtctgagtttttaacttgttgataattataactgattttttatcttatattttgagttattgtgtgttatttgttttacttattttgtt

SEQ ID NO: 385277 - DNA, 1176 bp, Cannabis indica
tcaaatattccattgaagatactcatgatagagatgttgtttgagaacacaaatgtcacattgtcactaatcatggttatatactcaacacaactaccctacaaataaaaacaaagaataattaataataataatagaaacaataaaaatattaacattaattaacaatcatgcatggcactcacatataactcgaaatacaacacaatctgcaaaatttaccccaaaaatatattagtacttatcttattgatttattggtacaacttaatatcaagtttatcatttatttaattattttaattaaatatgcatcaataaaaataacaacaataaatgagattgataatagtagacactataggtatcctttagtcaaaatacttacagctatggctaggcgaccagcacggccatatgcagcttgaccgatatctgggtaagatttgagaccagaatcggtctctaagcatcgttgtaataatatacctgtataacaagatataatagcaaatcctacaagcactgtgaggctcagccaccctccttctttcaaggcatatggggttgtaagaagccccataccacaaagaatattaattcctgcataaatgctcaaaaaattataagtaattataaattttatgtgtttttatatgaaccacgcaaaaaaagttattttattgaaaaaaaaaactcaaaaaatagttaaaataataagggagaaataaataaggggtgactagttaccctaaggtaaccagagaatatttggttacttctttaaggtaattagttacattatactgtttttgccacatatttttaaatatgtatgtattttttttatattttgtaaacttgtaccttaaaatcacgaacatgaaaaatccctataaaatttttaatcttcgaataagtaacaatctttaattttatttttataaataaattattaccattgagtaatgcttgagcagtgcttgaggattgatcttggttttcttcttcacaatttttctcttcatttgaatcaacaaagagtttattattattaacttttggagaaaaatcaaggattaagggtttattcaacaataaatcatcatcaacatatcttgttaaaaattaatcctccacttacactgatattaagtccaagtacaacatgaacac

SEQ ID NO: 385278 - DNA, 1874 bp, Cannabis indica
  modified_base (333)..(333): a, c, t, g, unknown or other
tttttagattttgattcaatgatgaataattaaaagtattttttttttaattttcttatgtttaatttagatacttaattaaactttttattatttcttttttttttcttgttgaatatatatttttaattcttttcaactaatgaaacaacttcaacccatataatataaaataagtaatttttaattagataaaaaataaatataagcccttaagcaaacttgttgagatcatatctcttatgtttctcgtgttgagaacattcatactgtctcgcgaatttcgtatagcttcttgtcttgtttatcatgtacttcttttttttttttttnttttttttttttttttttttttcgtagatggttatcatacatttgtcattagtctcgttggtctactaataaaaaatatacttatggatgtaattcgtgttttcataccgaatcttcgtacttgttgtttttaagtctatattttttttgtgttgtgacaggtttaagaccattttttttgtgtattttagactcgtgtcatgttgaaaagctagacctgattagacaaccctaggtttgtctaattatttatatggaactcctattttaataaattaattttaagactaaatattttgtaaataactttaatttatatgatatatactttttctcatattgttccaagaaggctagaagtagtgtaacgtacatttcccaatataattatgtttggttaattaagggcatgtttggaagtttttgtataattacaaaattgtataattattaagttattaatattttagtaattatactatattttaaaatacaatatttatttgaatataaaatagtaattacatatgatcaattctaaaagtacatttagaagtaactatataattactttactagataattatagtataattatacggtcagataaacgtattaaattgtacaattacttccaataacattcaaatttattttctcaataactttccaaaggcaccctagtaacacctaacaattttcacaaattattcttaatagcttaataaataaagtttaataagtacttaccaaaatatgatggctctcttagaaaataattaaaaaatattagaccccccaaaaaagtaaacataattttaggtgcattttgactatgagacagtttgctttttcttctaccaccttttttttttcctctgaattaatctaggcatacagttgttttgttttacctacctttattttttcctatacatatttttttgaggtggtagatagtccagttatactgtctcgtgattcttgtgtttctcctaattaatttattacattattattataataaataaaattaaccacttatcttatgcattttcatatacatgcaatacattatattttataaaattttccattttttttttctgaataaaaaaatatgtattatatatggcttttaccctttattaaagttaggtttgattttttctttttcctttatttgttatattttgtaaaaaaataaatataaatgtatgacttttaccagtaattatacaactattccgtacttttttttatatgatattgataaccggaactgcttattatttaactagtgttattatttgatagatgcagtttgagttattcctcaataaatattacatggttttagctagtattgtttttcttttacaataataataatattacgtggaatttaaatttcaaatccaaatagttttaaaatttaaactctaatcaagtttacaaaataaaattcatatgaaaatcatggtctgctcatgttaattttgaattaactatttgatcataagcacatgagttactgttaa

SEQ ID NO: 385279 - DNA, 3166 bp, Cannabis indica
tttaatttaatgtaattttcttattagattggactaaattaataaatgcaatttttttaagcgaagaaagacctatgtagaattgataaattttatggctctaattgttagttgtagagattaaaaaatatcttattattttttaatgataagaattaaaggtaaaaagaagatattagacgacataagaattaaaggtaaaacaaggagattagacgaattaaaggtagaattactacttttgacttaaaaaaaaataaagcacttgaaagtactttcactaaattggtgatctattaccaaaaattgatgtaaattgtcacataccaaaagttaattcaactttggatcatgatataatatgacatatgtaaaatctgcatcacaataaatgcatttttttttttgttgaaaaaatagccttggagaacaccaccaaaatacaaagagcaagggtcaagagctaggaaattcattgatcaatggcctcaagcaaaataaggttctaaatacaacttggataactaggccactagactgtatttgtagtagatgttgaggcaaatttaacaagagtatcagctactatattgacagttttgggacaaaaagtaaaactcacaatattaaaatgtttacaagaaaaactctaatatcatcaagaattaaattcaaagacaaatctaagactataggcatattaattttatgaaccaaaccatggcaatcagatccgaaatggatgtgaattctaatagatatgaattgcgaagccgcttgtctaatagcaagcgcctatgcctactcgtgttgaggaaaagactcacattttcacgctaccaacgcaaatatcgccccattcaaatctcgaaagaccaatccgaggccacaagaggtactattaacatcgaggacaacatcgatattggctttgaggaccgtggttgctggaggagtccgaaaaggggggagctctaaaagctggcaagcaggaacaattggacaaaggggagtaacccagctgttttcttgatgataagggtgaaaaaaattagtcacccaaggacatactaattctggaagaatggtgaccttatcatgcacaaacttgttacgataataccaaatgtgccacctggtgacaagaattaattcaatatttctttggagaagatgttggatggcattgcaaattaagccataaatgtcacttaagaaggatcaccaagcttggaagtgtagagtttttgaattgaagcgagattgttacaaccccgaagagcatgaaaagtagtaaagagcacaccaaacacaaattaccattgaggaggccatgcttttggagattgatcatagtagggatgcaatttaaaggcgaccttcacacaaaacttttgaccttagcaggtaaatgaagactccggagaagatactaccaagtagaattattagagaaagaagatgcaatgttttcagtgacatatcgaatggcaaaccaataaccacttttaattgaataaaagccacgtctcttatgctcccaaacaagtttatcaaccacacattgcccataggccaaggtatggaaaaaatggcacaagctttatcaaatgagaacgtcgaataaggccagtgtcccaaccatcatgcgagttgcccaatgaggacaccattgcctctattcctaagaaagaaggcggagaagtgatgagcttcgagttcaacaagagctaatgatcattgtaaattgagataaagttaccattaccgaccctccaaatagcaccaagaccaaataactccttgtcccataaaatattttttcaaacataagagcatctcttcttgggagaaaccttcccaaactttttattgctatggtagaaagaaactttttataacacaagcgactaaggaagtgggaaaatagtagaaatgaaaattgtactacttttatatttattttataatattaatattttattattaaatttagttatgtcattaaattataaatattttacatttattttttattattttatacaataaaattattatttttatattttaaataaaaatattaactaaacatcaaattttgcgattgtggcacaatactaaattgatacaaatgtatcccatatatcacaatttttacactagtcttcatccttgtaaaatcaaataacctacctacctcaataatatcattactcatatcataaatatagttttattatagttgtaagaaaggttttgtgggttttctcggaaaagtaaaaataaattaagcattaactactttataaaacatattaatgtgatgtgacacattaagagaaacattacgttttagtatgcttgagtatggggttcagcctgggttgactaagtttaaagctaaggatagtttaatttaaccaaacattaacttatctagtccaatatacaccactccaacattttgcaaaatactatcagtttgtatgccctattttattatattgtgttagtattatttaatataatagtatatttggtaagttgtattaataatttatgtaaaatgatagtatatttttaataaactcgaccttaacaccgactccaggtcagatccgggtccgcgcccaagtttggatccaggttcaaggttcaggtctgtgctcggattcaagatccgggtctcgagttcgtatcgagatcctaagtccgagttcggatccctggatccaagtcacagattggagttgatcccaagttctttataaatattataatacaagttaatacatatcatttgttatgtattaaataatacaacttacgttgtattaaaattttaataattaatgtagtattattttatctgaatatagtgttacaccataccaaactaaccctataatgcttgctcaaccaaccctaaaattcttaaaacgtgccaacaaaaaaacaccaccaatcaataagtactaccttataattaaattatttagttaatctaatactatagaaagaaacaataaccccttctaccttcttcaattttccttttttgactagaaagaaataggatccttaataatcaaagattattgtattattaacaagaggaaattacacttactatgggattttaaaagttcttatgataaatatg

SEQ ID NO: 385280 - DNA, 1340 bp, Cannabis indica
aaaaaaaaaaaaaagtgaaaaatgaagcaagaataattcatataaaaaacaatcgagtgaaaaactcacagcaatttttatgtcattggcattacgaaaacgcctagttcgttgctgattcatcttagctcttggagccactccatctacacaacaaaaacataaatatatatataaaagtataaatttgtacttcaaaaatacgtaaatgtatatttcactaacctgtggccatgtataaaagcttccgaggtctaatgatgttgaagatgcgatcaatgtacttaaacatgttctcgaacacttcttcaaacgtttttggaggtggaaactacagtaacattaaaaatgaaaaaaagtaaatattacagggttatgtctatgtaaatttcaggacaataaaatgtgggtacgtaatatataatatatatacttgttcatcatcatcatcttcttcaggatgaaaacaggggtgaataatgttgttcaagtcaagataaaggttatcgaactcaatcccatttgggtttgttgagcttgtatctaagtagttgttctcccattttgcttctacggcatttgccaccacttttggatacttgctcactaaccaacgattaaacgcaggcaaccccatgtctctctttcttcaagctttgtatactcaattgttgtatatcgtgtgtgtgtgtgtgtacagtgtatatatataatgcatatatgtatgtatagagaggtaaaaatatacagaagatccaaggccgaaacttgacacaatatccgaagagacagaaggaagagagatcgagttggacagcctttttaatatgcatagtttccaatgtgtttaagctttactattcgtaaattatttgaggacatttggattttggcggcaccacgccttataaatacttagtaagagatctgcaacattaatattctctcaaaattatcctcttaagactcaatccttaattaaatcaatagccttgttatactacgtagggtgctaggcaccatagtatcttatagcatttttctattctttaaggtgtcaaaaacatttgtatcacctaaaaataaaatattctattttagagatatttacttgaagttctttttaacacttagccacataatttaaaattttaacggcaaaacttactgaacttccattcttttattctctttacacttccgtccaaaaaccttagttaagtttcacaatagactgtccacgtgtaccctaatttttagtggtccgtgtaatattaaatattaaaataaataaaatataatttaaaaattatatctttatatattaaaagtgtctattt

SEQ ID NO: 385281 - DNA, 1148 bp, Cannabis indica
ttggttgaagttcccataagtagctagcattggcaccaacaccaaaacaaaacttgtgaacaacttcataacattctgacttctcagcctcaaatcacatgatagagaaacagagtgaacaagtgtgtgtgtgtggtgatatagaaacttaagctaattaattcatcaatttgcttcattaaaagttgaagcctttatttgttaacaggtacacaccaaatattaattaatgtttctaattatttcatacatttggtagttgcaactctagtgatttcaactcatgccactgagaagaaaatgggaacagccatatatgatatcttctcttaataaaatgcttgtcaaaatacttgattatatatatgcttgtcaaaatgcttgtcaaaatatgatgccaagccaattatatatgtaacacaaaagtccaacaatcccaactgcagtcatttaatatttaattatcagcatctataattaattggtttctactttctactactactggtcatgcacttacatcataaactaagatcattaattgataacaatgagagggagtggaggaatgaatggtatagtagtagtagtcctatgataatttgtgacatacttgcataagagtgtttgagtcaacaccaacttcttccatcataaatgaatctcttttcaccaactccaccactagtactactacactacacttgagatgatcaacatcataatcttttgagtattgctattattatgccagccaacaccacacaaatatggtattctataaatagttagcaatttttttaaagtactcatatcagatactttaaaatttaaagaattaaattaaaaacgcgttacatcagatctgatgttttgaatttttttttttttaaagcttctttaaaatttactattaatgctttacatttatagaatattattcactactctaaatatattttattaattgtttagaattttaattttacttttatattgaatatgtatagaaattaatattatatgtttgaaataaataaaatatattaaaatttgaaaaaaaataaaattttggtgaattttaaaaaaaaaacttagatatatgctataatataaaagttagaagtaaaataaagaaagtaaaattt

SEQ ID NO: 385282 - DNA, 2139 bp, Cannabis indica
agatacgacactaactccacgaaaaacaattgaattaacaaactatacgattttttggataaactttttactgactgaaaccgattatatatatatccacaaaatagtccacctggcactaactaacacttaacaataaccgacttaacagaacgctagtgcagatataacagactaaaaactctagacacggctagacattgaacaaaacaaaattgtcacaaaatactgacacttacatataataacatagtatattggtggagggatagtctccaaccaaaaacaagtctcattcatctctaacacaaacttagccaagtcatgagtagccatgttagctgtacgcttaacatgagaaacaatcacattaggaaaaaaagacaacagacatgtaatatcaacaatcagatcatgaaaagtagaaattcaattgaagggagatttcaacgcattagcaaccataagtgcatccgtttcaatgattgaaatcggttgatcttgttgtaatgcccaatttagactatgaaaaagtgttttggcctccatttcatgagaagagaaattctcaattgctggcattgaaagggcagccgtaacacatccatttgaatcacgaactaaagcactgacaccaattatattgtttttatcatccatagcaacgtcgacatttagtttcaatgcactagtaagaggcaacttccagggtgctggggcaggaatgactagtggaggtggctgcgatcttgtttgggaggcattttgtgagtggctgattgataattttagcagtagatagatgcaaaagaggctaaatcccttgctggttttgctctttgaccatgaacaacattatttctttcactccaaatcgaccaaagtgtacaaaaaattcgttccatttcagatttagagtaaatggagtggagatgtagaagatagtcaccttttctcattgaagaacaagcatgccagtcaaatgttattttcgaatatgtctaaactttcttggcatatttacatgtgaaaagtgcatgaccaattgtttcccaagcttggccacaaactgagcatgtcgaatttataataatttttctcttaacaagagaagttgcaatagggaaagcatcattgataactcaccatgcaaagattttgacattcggtggaagttgtagaacccagaataatttccaccatgaagaggtcgatgtagagcttgaggaattctctgtgtcatcaagagatctggcctattgatagccagattgtacggtgtgaatgcccgtgtgttggtgatgtcatatgagtctatcattggagctaagaaactaagtggcaccgtcaaaattctttccacatcaagtggagaaaaaaaactgatgcaggagagcaatgtcccattgacgttctggtgtgattaagtttgcaacaacagcatttggtggccctgtatatcgaaaaggcagaaaagagctatgtcttgggatccatggatcaataccacttttaataaatatgccttctcctatcttccaaagcagtcccgatttaagaaagtctttatcccaacgtattcctttgccacgttaaggaaggggaatgactgataagagcctctaaagaagaactttgtgggaagtatctgcttttcagcagctgtctaagcaaggagtcaggttttccaatgaagcgccaagcttgttttgcaagtagagcttggttgaagtggacaaaagagctaaaacccataccaccatcatcctttttttttttcatagcaaattccaagtgcgccaatgtatttttgtaccattctcattcatgccccaccaaaagttttccatcattgattctagttatttgcaaaaataaaccgataattttattggattgattaagacatcatttaaaataaattattgtcacaattaatctaaaggcttctctttattatattatgttgtctcaacatcaaatgtcacatttaaaacttaagatattttttaaaactttaagatttcgtttggtacgccgtattacatcaaatcgtaatatataatattatattgaattgtattttatacaatatttttatgtaaaattataagtggtattaacttttatgggcaccta

SEQ ID NO: 385283 - DNA, 3366 bp, Cannabis indica
taattttatgtatttttaagagttaagggctaaattagtatgttttttttttatcttaatcaatggacgaatgcgtaaaaaaaatgagactaatgtaggagagtataggatattacctgttgaaagcatggttaagatcaatgtgaatttgtgaatgcttctgttgttagtggaaatgatttgggattagttgggtagcgcgagggcatgaaggaattgttattgaaactgattcaaagttgttgtctgaagtctgattgtgtataaccgactagaacagtagttgtacgagtcaaaaaaggttcttagctgaattaaacattaaaatcttctcaaattggtattgaaactaattgtaaagtagttgtttatacaattagtcatactctactttagattctaaacatctacttttcgtttaagtaatatttttttttaccttcgttaaacaatttgctattaaagtggccaattattttgctcatactgcttatcttttttaggttgtcaattaagtagatggtttgtccagatcttcatgctattttgttaaagaatttacaattttaataatacagcaaatattcaatccaaaaaatatacatatcaaagtctctttggaaaaaaaaatgtgaaaatccacataaaatacttgattagtgtagtattttcaaaaattaaatccaagtaattaccatgagtccatgacaataatttatatgactaagcatttaataattatagtcgccatatttttattatattaccattttaaaaatcaattaaacatcataataatattcctatttcaattcttattacattcatatattattaacactatcattccaattctataggatcaaatgtcaccttagcttttcaaaaagctcttccaaaacccaagtataaaaatgtttttttttgtgctttaaaaactcaaaaatagcttaccatcctagtaacatactagagagatcacccaatacatgattaccaaaaatctccacaagaacaagatccattagcaaagtggtgaaaccgcttagcatctctaattataatggttctattttcaaggagtgatatgaacttggcagtgtcatgacaatcaccacaaattctaaggttctttcttatgattataggcatgccaacatcatgagtcaccaaaatcccaaaggcaatggctaatttttcactgtgtttgttaatcatatcttctttcaaatcctcttcaacatcatgtagaacatattctgttttggacacaaatccagctttcctaatcttttgaatcaattcttccaatttcttatgtatcttctccgattcggggtgagattgatcatctaccacaaatctataaactttgttttcatgttctataaaactacaccccggtttcgggtttctggctagacctctttccttcatcaaagccctgacctttgaagcatccttccataagccagctgcagagtacatattcgataacattatatagtttcgggaatccaagggttccatagcaaacaactgctcggcaacttctttcccaagttcaatgttaccataaactctacaagctccaaataaagcaccccaaacaccagaatttggctccattgacatacttgtaataagctcataagcatcgttgagatgccccgagcgaccaagaagatcaaccatacacgaatagtgatccaatctgggctgaatcccgtacactcgagacataatcttgaagtagtttttcccttcattgacaagccccgaatggctacaagcattcagcaaatgaacaaaggtaacatgatcaggctccatgcctttcctaaccatacactcgaataactccacggcttcttttccataaccgtgcacagcatagcctgctaacattgcagtccaagaaactctatcaggatcaattagctctccaaaaaccttacatgaatcctttaacctccctagcttagcatacaaatccaaaatcgaagttgaaacagttacatttgcatttaggccacatttaacaatcaaaccatgaactgtctctgctaattttcctacccctaaattttcacaagcttgaagaacagctaccatagtaccatcatcaggtctcagtccattcctttgcatcttattaaagttaccaacaccaacctctggaaatcgattttgtgaaggaaccgaaaccattaaattccatgacacaaagttctgtacaggcattgcctcaaaaatttgacaagcaatatctaaacaaccaaactttccatacatgttaataagagaattcccaactttcacttcaaataacaaacccaatttaagaccaatcccatgaatgtacttgcccaaatcaacatcatcataatcaatacaagctgagataaagccaataagagtaacctcattaggtgattccatatccaattcaaacttcattctaaaaaatgcagttgtacacttatcaacaaaaccttttcttgcaaacacagtaatcaaattattccatgagaccaaatccttgttaggcatttcatcaaacaactgttgtgcattttcaacacaacccaattttgtataacaagataccaatcgatcaccaataaacccatcactataattaatagatttgataacataggcatgaatggaattacagtaggagagggaagaacatgagcttacagcaagaatcagagctgagacgatactttgatgagaagattgttgaagaaagacacttgtgtgaaatcctttcacggataagaatttgtaaggagctgaaattaatgggtattggaaacgtatggaaaaagtcttggttttgaggaacaaattggagaaagggattattaactgacgtgatgaagaaggtcgtagagtcataatttcccatcattgaaagaccaattctaacaattttgatatacagagcaaattagcgaaagagaaaatgtgaatgaaatgatgaaatgggtttaggtcttcggatttggatagcttcaaaggtgaccggagaaaagcggcggctctgggcggagatccgggagtggccgaggcagccagcgtttctgggttcgtttcttcgttctcggagtaggagggaagggatgggcctgggctgggctgggctagaataggcccatttacatgggatcgttcgttcgtttattcttcgtcgtagagaatagaaaaacgacaatcttttttctcagactataatatggaaaaacgacaatcattttctcactacaaaatggaaaaacgacaatcttttttcttagactataaaatggaaaaacgacaataattttcttagactacaaaacggaaaaacgacaatca

SEQ ID NO: 385284 - DNA, 1050 bp, Cannabis indica
ctatttggtcaacaatggtatagccattggagaaacgaccagtaggtccacccttgaaatcaataccataaggtaagtaattggccttagcaaaagataaaggaaggttgttgttgttgccattgtcaatgagagaatctccaaatatgaacatggctggaaccatttcactactactactactcatcatcccattatcaccatcatcactactattccctataataagttgccctgaaacaccacctgatcttaataacatcatcaaaatcaaaacaaaatagtactgcttagccgccatagtttagttttgataaatctaatataacaaaaacgcagagcagagaacagagtgtttttaaaaacaacaacaaatataggttggttttgctagttcaacttataagcttttaataggctaaggaaatatgtaattaattaaggtgtggtagttgtacatattataaatgcttccatctgttcttatctgctgctgtaaatatacatactgacatcacattttcattttctttttctattacttaataaaattaaattaataataaaaataaaataaaaatttcctttacaaatctctccattttttataatattcattttttcttactaatattctcttgtggttgagaaaggcacacaccaccatctaaaaatgtcatatcattattatcaatgcaattgaatatcaaactctaaaattataactacttctcagttctttataaatatatacatgtataaattttcacttaatatatgtaacatataaatatttaaattttcacttaaaaatatgtatattaaaattaattacacataatttaaatataaaaattaatagtataactttatataggcatataaaaaaaatccatttagtgtgatcgggtcggagctctaatccgacggatcacttctgatccaaaataatcggatgcttgttgaatctcgggtcacatccgctccacctcgcctaatttttttcggatcggatctgatctgatccagtttaatttattttttaaaaaa

SEQ ID NO: 385285 - DNA, 1075 bp, Cannabis indica
cagacagaacactacttgatcgactccttttagagaaaccaataaaggacggagccacataacacacttatttatggtatatatatatatatgaccatgcatgcatgcactttatgccatgcatgttgcacatatagctatatataattttaatattttaccatagggtgttgaagacgaccccaccataaagctgtgctacttcatcacaggtcattattttagcagaagagagagcagggttatttttcatggtgatgagttgatgattaggaagttgttgttggatgatacgactacgtcccatatgggtaggccgctgttggtggtactgatgatgaacagtgtttattacgtttgggggagcaatcactctagtctccacacgaggcttcatttgattactataagtaatatggcatggattccagtagcactgctccacgtaattattgttattgttattattatatttattatatggcttctcatcatcgtcatcatcatcatggaaagtaattgggtagtgttcttgatcccagtgaaactcgcgttgtacttcccttcggacagtacggtgtctctcttctttcatcataacaaactgtgccattaattaataagctaggaatacttataatatatatgtgtctgtgtgtttactactgatgatatacaaaggctttgagggtctatcctccttatatagatgagctcatatatgtataacaagctagctagcgttaataataagtaatgctacgtgtattaatttcatgcgcactataccactttatcttctcgctattcgatccgattgttataattttaagagaaatactaaaagtggtatctaataatcttttatgtgtgaatattattgatttaattaaatatcgaatctaatataattaaatataataatttttaagcagtatcgctagtcaatcataataacacggctagaaaatactagtatctagtaacaaagctctaattttaattatatatggtgtcaatttaaatttaaaaatatattatataggtacttgatttattttatacatatgtaaaa

SEQ ID NO: 385286 - DNA, 2256 bp, Cannabis indica
gagacaaggatatttctggccaataatgaagaatgattgtgaagactacgtccttaagtgtgatacatgccaaatattcgcgaacataccaagagccccgcctaatgaaattactcgtaatgactagcccatggccctttacggtttggagataaatttcattggttccctaccaacgggaaatggtagggtaaagaatgccataatggcagtggattaccaaacaaagtggacggaggtagagcccatgaagaccataactgccaagaaaaccttggactttgttgtgaaaaacattgtgtgtcgatacgggctgccccacaaaatagtctcaaacaatggaaaacagtttgactgcaacaaagtcacaaacttctgcaaccatcacggagtcatcaagagtttctccgcggtcacaatgccacaaacaaatggacaggcagaggtcatcaataaaatactaaaggtcactctaacaaaaaacctgctggcctgcaagagtaactgtcctgaagaattgccacgtgttatgggcctaccagaccaccccaagaaccacagtggatactccccattctcaatggtgtacggatgtgaagccatggtaccaatagaaacctttctcccatcccatagaaggaccacgtatgatccggcaacgaaccaagccttattgcaagaggtgctggatcaaatatacgagctccgagatgaatcccaaatatggatgggaacttaccaaagaaaggtggcgaacactttaatactaagattaaagataggaaatttaccatagaggacctagtcctacgaagggtcttcctggccacccaagagccaggagtgggggtacttgggccaaattaggaaggaccatacgaaattgaagatgaaataggctctgggacctacaagctaaaatttaccatacaatcacctctgcaaatactatcaatagttaggagaatgttagtttatattctttaaaataacctgtgcaaaacaaatatatgcgatatcccatgcaactttaagctaagtgacccaaaaattcttttcatgtcacttaagggggtattaaggcataacatacacgtaaaaataggacgaatataaggaaaaaaaaagagaaagcaaaatagacgtaaacttatataagttgtctagaatataaatagcaaaaggcctggggtcgggccataaaaagtctccctttacgtaaaatgaaaatacaaaaatagaattgtcttaaaagtggggggaagaacgaaataaaagaacgtaaagacaaaaggaaaagacttaatcaatcaattcgaggaggaagatgccgacccctgcacttagctaggacagcatctagcttcttattcttctcctaaaaccgaactaggacaacctcgggattgggatataagggaaggcgaggtttgaaattgttaactttccaacacatgaacaccccgtcattgaaacgtttttcgcaatgctggtaggtaattggagccagaagagcatccctcttggccttggcagcctccttacaggtctgatctcggaactcacagagctctttaagttcaacaactaaattagttgttgcctctaacttggtctggtgcagctcatctagagacttaagcttcatagtgagttcctggacctcttccttggagtctcgaagatccctcctggccaaagctacgatctcatccctgaccttcaacacttcctgatggtttcgctccatgagggcctccttctcttcggcttcatcccgaattgccttcttctgttcctccgactcctggagcttcttcatcacctcgtccatgccaccaaattcagacatggtaaacctatggtcgatcaaagtcttggatagacgatcggcctccgcagcaatctagcacccaacaggaaaaagttagaactacgaaagtgaaaatgtaaaagagacttagaagatggtaactgattgcagtaagggcaacactcatatcttgaaactggtacacggggttagaagaagcgcatgtcgcatacctcttggtgggaagttggcttagatcatcaacaaagtggcttaccatttctgaggcaaaatgagccaggttaggccccatgaagcgcttaaactagtccgttagaggatctaagtttaaatcacagacgtccccggcatactcgcctcaaaagggcccatcttgggcctccctaacccatttctttaaagcttctgcctcagcatctccc

SEQ ID NO: 385287 - DNA, 956 bp, Cannabis indica
aaaccccgaaaaaaaaattctaaaattaaatagtctacaattttttacagccataaattcattaaaattaagaattaataaaagtataatacattattgagcaaaggagaaaaatcttctaactaaccaagtttttcgtctatccaaaatacatgtttaactaactcataaatcacgaacatgatggattatatggatattagatcactaatcatattaacattttttctattttttgggaataaaagttagtggttagttatcatatctctctttcgatcaactaatacctaaatctatatataaatagacattaacacatacaactcaagactgatctgagtacctagaagaattatactatctcacagattcaactctcttcctaaagtctgtacaagaaactgagtagaggattgtaaaaagatcattgtctgtttgatcaaggttcctcaatatgaggtattgtgtaattggtgttcaacaccatggatgactgtgattgagttgtaaactctcattttaatgtgcttattgatcaataaagttcattcattttttgtcattgaacaataaagttcattcattttctgtcattgaaatcgagcaaagttttcttcctctctaccaatttttggtttattgttactggtgttattgttgttcgattttgttggttcttgctgctatctgttcgagtgaagtaatttcactacaaatggtatcagagctacatgctccaagaagagatttttcaagatctgcattcaaattttcaagaactacatttaaactttcaagaactaaggttgaaatgactataactgtaacgtccccgcttcaagcctccattgggcccttacacccacggactaatggctcttatacacgagttcgtcactctggctgctttctggattgatgactgaccttacagatcaacacaagtgttttca

SEQ ID NO: 385288 - DNA, 1205 bp, Cannabis indica
ataacaacagtctgtctgtacccaactccaccttcaatcattagcccttggcgaaaagggtcaaccaattgcttcttagttgggatattctgtcttgttctctcagcagtaaaggactcatttttagtaacaaaagtcaaagaagaacaagagtttggcaaagcaccaatcttttgactaagtatatcactttgagagcttgaccttccattaatcttgatattattcaacttttgaacatttgggtcttgttgatgattactatccctattacaagaagaacatcttatagcataggaagctggatatgagaaagcagccatttttattataatatttatatatacacatatattttttgttgtttagatttgagaaaggttggaacagagtgaagggtagtgaagtgtttttatagttaggcaatggacggaggtgactaagaaaaactaagtgttttagctacaagtttcataattagtatcttagaaatgatcgaaaaactaagtgggaaaaagacaagatttttcatttttggactttttttgtccgtaaagtacaaagggttgatattgttttttctaggcattttgacattacattagatgtagcttggtttctcctagattttgggttcaatagtctgaaaataagttaaagctctctggtggtgtttaagtttaggtaggtaaattagttagaacaaaagaaacaagtaactcaaaaactcatcttttctctctctaaaatgagaatatttgactgaatatactaggaaaatgaaagtttcccatttgtgtaaagatttgatcatgttttaagtagcaataatctcttatttcacgatatacaaaaataataataaaaaaaattataaaaatacgattgtatagaattttaaatatttttataatttttataattttatttatagaacatacggtcttttgatgtacttttatgttgtactcttattaatttattgttgattttttgttatttgtatgttatttatttttagatagtatatctttgaacgtgaaatttttataaaaatagtgttttatatatatacaaagacaatgaatttaatcttgttcgacatctcgtgttttgcaaaagttaaaaatcggaatatctattttgtcaaataaaaaatggcgcaaaatagtacattgaacttatttttcaacaatttttttaat

SEQ ID NO: 385289 - DNA, 2776 bp, Cannabis indica
tccatgtcgacgacgtcgtatgtctcttacttttctttttttttttttccattaaacaagatagaaaagatgcttaattcttgttatatttttcaacacagctctgtaaatcagtgcgggaggtttctaagttcgcaagtgtggctctggtagatattgattctgaagatgttcaagtttacgtcaagtattttgacattacttttataccctccaccatttttttcttcaatgcgaatcacatgaagatggactcggggtatttattattaatttcttattattttaaattttcgatcaatcaattatacttaattgtaggatgattagcttttgaagccccttttgaaacctgtcgaaaccctatattttggagttgaaatttgaatcggataacaatatcatctaatgtcgttcagtataattggatatgtttatgtgtatatatgtatgcatcaacactattatccatttatttatttatctatttttttgtcgttcagtaccgctgatcatactaaatgggttggagcatttcaccaaaagcaagatttcatagatgtagtagaggtctgtaacattattatttttttttctttactaacatttctcactattgttcttgagttctatgaatctgtactatagctttctttgctttgatttaactatttgatgtatgtctctatgagctttgaatatctgcttatcttcgtactaaggcaaagatggattttttgcaggctatatttagaggagccatgaaagggaagctgattgtgcattgtcccctgccaccagaacgaattccaaaatatcagttattatacaaagatgtatagaaggtgagttcattacaaaagccttcatatatgtacatgcactgattgtttggtatttttccctctgcatcaatatgaaactgtttgaaactttcttcatgattctctttctgtactttaaaacttgggaatttgtgagttgggtaactggttttggttaagtgagggaagttcacataattccttggttttcatgcaaagtctaatgtttttaattgaagggaagtttgaattcactagaatgttttctccaagccgtgtaaaattgcatattggcctaaaagatgtttcttctgagtatgagattgagctgtggtttggatccttaagcagccaagagaagatgatgtatggggatgtattgaagaccttattagttagatatatggggatgtgccatcaaaattatcatcgatgtgaggtccaattgaaaatggttagttagacaaacctccaaactacaacactacaacactacaacaaaataaaagtaccaagatttttctttggtgaggggcatgtgttttgccccccatccataattctatgtgagcaactgcttaactattagattaaaggtcgagaaatgtttacagattgtagatgcaactgacttaccatgaatttatttgcttttttgcctttaattttttttttccaacttgtcagagcctttaataataaaagttaatgcctaatactgtataataagttataattcgtagatgacaatcatgcaataaatgtaaaggatactgacccttaatcttaagctggttgttgtaaatatcttgcactctcttagcttagctaagttgttgtatagtcaaagactctaagttgttacctgttgttatctctcatcggtatgtaatgtttggatttatatatgttgttattgggaataagtagtgctcagcattttttataggtgatgtttcacgattagttagcgatattctctaaaaataatttttttaagttatattgaactcgatacttaattacattcagggccggccctaggcataagcgggttaggtttgtgcctagagcccactcattttaggggccaaaataaaaaaaaatatcttttaaaaaatatacatactcgtttaagttattgtgtttaatttttaccccctctttctatatttttcatttctacctttttcttttcaataactctactaattatgtccctatcatttaacgatacttttgactctcccgtctccactcaattttaacttgtgtagctgtgagggtataatcggtaatagagttataaaagtgggcacatttcaattgaatttaaaataaagctatttttggttaacttataaaaaaaataggtatattttaacttgcgtcatttatttttatagtaagggtctaatttttttttgttgcctaaggcccattttaactcagggtcggtagtaggattacactgaagagggtgctgccatttaaaaattctcatattgtaatcatctccatgtaatacaatcaagttatcacttttctattataaagactattttcttatgtttgtgtaaatcttgaggctcacatttcgtcttctcgcactttaagcatacttcacaatagccaaattatttgggttgggatatttaatttatttttgtcaagagtataggttgttagatttaaatataaaaagaatggagaaaattaacaaacataataatatattattaattgaaaaataaaaatttaaatacaaaacaataaaattcaaaactagtaattaaaagaaaaaataaggcacgtaaaacacgtattctttaaaataaatttgtcctctctacctgattagtattagaggatatatgagcaatcatttcttaggggtgggtgtcatccaatccaattgaaccgaaccgatctaatccaattataaaaagttg

SEQ ID NO: 385290 - DNA, 820 bp, Cannabis indica
atattgtttggaccacaaaattacaattaatctttactcttttggatcttagtactctcactctgcccaaaaattttctagtcaacaaagaatattggcagattaggatatttctcctttgcagcttttcatttttaagcttcatattgttttaatataagagataaattaattgaaaataaaaacaaaaacattgaacttgcttccatcattatcaatggattattttcaccacacaaaaatttggtagtttgtaagataattaataagttatatgttcttcatttcaaatctcaaaaaaaaatcattcaattccactaccaaactcctaagaatatattttaaattaaattaaaatctttgatttattttttaggttggtgggtggagttaatcaatgttgtgtgttataaatttatttttttagtgggcacaacaaattagcacaagtcattaagtttcacacaacacaacaatagactcttattaaagccattcatgttctcaatataattcataagaaaaaaagggattttttatttaaactaaacattattgatgctactaaatgttgtgcccacatcccttgttgaatgcacttgattaatttagatgaccaacataatttgtttaataactaaatcttaatgcattttattatattaccaaacaaaagtatgaattttgcatatgtttataatttgtagtttaaattcaactttattaatgggacttttattttagggaaattatttcatatatttttaaattttttttaaaaaaaatttacagtttgagtttctaaaatggttacagcgct

SEQ ID NO: 385291 - DNA, 1002 bp, Cannabis indica
aggaaaaggctaaaatcctaaccaaccaaccttgttattgtaagacaaaagcctgatgagattggcagcaactttgacagttgcaggttggcctagctgtatcctgtttatgaaaaaaaaaatgcattatttaagaacaaataagcacatatatacatgtgtaaatgtctatgtatatataattaactcacgtgtgctgatgaagaaagtaacgcacatagtccgaaacaatctgagaatcagcagcctgcataataatccataaatgttattattatatgtaatctcaacaagaagaaagattttgattgagtaaagaaaatgtttttgatgagaaaaactggaatttgagactgtattagttggattttgaagggataaacaaacacagtgaaagaaatgaatgaattaataccgatccggagcgacaaacgtagacattatcagtaagctgagtaatcttgtccgatgcgcgattagcaacataaactcctatacacagaacagaacagtagagaaatgaaatcaattccttctactgaagaaaaaaaatgaggattgggattgggattagggttagggttataccagtgctagttcttgaatcagctccgagaacaacgccgccgttgtaagtaacaccaatgatggtggtgcccatggagtgtggagcatccagatcaaccttcaaatccattcttgatttgattttgaaattgattttgattttgattttgatttgagggaattgaattgagacgagagagaaaggaagtaaggaaggtctgatggttttggcttgagcaacaattctctcttttctgtttgtgcccagcccacactttatggacctaacctacacataaaaaaagcccatacttccactcttgccttgcccttacaaatgggcttttctttcgggattatttcacaaatacacaacaacaacaacaacaaaaacaacaaaaattataaaatacagttttacggaattttaaatat

SEQ ID NO: 385292 - DNA, 1821 bp, Cannabis indica
tttttttataaaattttatatttgatgtaatttttattaaacttatttttttttattttgttagcccaagtctatatttttatcactgtgtcatgctcgtgcatcccgaactcatgttggtttcatattatactgaaaaacccaacccaaatgtacaattctaaatgaattcttcaagtgatatttaggatagaaaaacattttcattattttgcctcttatcccctcctgttttcatataacttgtttaaattattataacttaaaataattgtcatttataaattaatttggagataatcatcaatttacaaaataatttacaaattattggaagccacactaacaaaaagaaatgttaaaggtcactcatgatggaagataaattaaagaatatctcttttttgtatctattaataaaaaataccatcatattatatttcattaaaatctatccacgtttaggagtgggttgtctaatatacccttgccttccacttaagtgtagcacatgatttacattaacgtaaggggtataatatggggacatcatctataaaagtggacatattttaaagaatatgaaaatgaaggtagaaattaaaatagataaagtaaagtgggtatataatgcaatttcctccttatccttacttataaagtgtaatcagggccggcgggcccactaattttagggaccaaaaaaaaaaatattttaaaaaatatacatatttttttaataatttttaaaagtactatttatttttatagtaaggattcaaattttttttttgcctacgacccatttcaattaagggtcggccctgagtgtaatattgctattgatgcaatttaatttggtgccccgtaacaatactttaaaagtagtacttttactatgaataaattaaaaattgcttatttttctttccctaaaaagactcaagttggccaacctaggaaaatatctatagaataataaaacttttaatttttaacattggtcataaaaatggtattacgtataattctatattgggatgttcctcatgtattggattagccttaatgggaaactagaacataagaaatacagataaatataacgtgaaagcaagaaattggaaatgtcttggggttaaagggaagtaaatgcatacaagtgcatatatgtagcgtagtgattcagttatataaatatatatatataataacataaaattacaaaactacaatgagaaattgatagatagatagatataataagtaatgagaagaatattattcatacatgttcgaagatccaatgagagcttttggagtaaagcaaaaacttggagttgaaaaagaattgctttacgcatccaattacattgatcaacataaatgatcgttgtcgttagatataaataataataatgaaatttaataagagatataagatatagtggctgaatgaaacaatattatgcaagataataaccacagggccgttggatgaagcaattaattaagaacgcagttattagaccattgttctggcatatgtatgtggtgtacccgactaaactgatcgatgtacacccttacttcgcatctcatgaaaaattcaatgtttcatgagagattaaaggacattgatatcaagttacattttgtaagggacattttgtcatccaaaaagagtaagtgaagaaaataagcacacataataaccctgcagagattttcactaaaagtgtagctagagacaagtttaggcactgtctaaacttgttgagcattcaggatatttaatgtcttcactcatttcttttggat

SEQ ID NO: 385293 - DNA, 2336 bp, Cannabis indica
actggacctgtgttggtcttacctgtgtttatcatcagtttgacattgaaagtgcagttcataatagtcttaaaatggttgcatttgtttcgcagtcatctctcgtatgtgtaaagggtattagatctagcaataatgtaggttaaattctaaaaagttaaattctaattgattaggttatagtgcagattcataacatttacagtaagattgtgcttagaaagtaggactggattgaaactgtatctctcaactccacaagactggtatgctttgctgtattagttttagacactgtatcattataacatgtacattaaaagcatttgactttgctgcattatttttagacagcatatgggagtgtttttttttcgctcttgcttcctctaagattgcatgttttaatccaggtcaaagacataatgtatcgtctgtacaaagccacaaagagcagtctcaggagtattgcgccaaaagaaataaagcttctgaagtatttgcttaacatcgcagatcctgaagaacgattctcagccttggcaacatcattctccccaggagatgaacacgaagccaaacatccgaaagctttatactcgtaagagaattttctcattcaggctatgaagttatcttttaaattgtacctggttttgttttgctcaaaattaataaataacttgtatggattagcagtactccaaaggagctactcaagtggattaagatcatgctggacgcataccatctcaacaaggaagagactgatattagggaagccaagcagctgattgaccctgtagttatacaaagactcttcatcctcaaagaaaccattgaagaagaatatttggaacggggcacagttcaaaagcctcaaacagaagacgatggcaagtcagacgagtcatgaggtgctgcccataatttcaccataaaagctccaaagattctcaaaaaagtgttaggatttctgattcgttgagctttgcagaaccaaagaatcccatgcttatctgcagcttcctgagtttccttagctcttaataactcaggaataatcagtagaaactttggtgccaattttgtaacatgggatgaatgtgattttttttttctcttttatatttttatgtgtaatgtagttgtatttttagtttgttaccatcatatttactactcatgtcacacaactaagctgtggctcaagtccgtggatgacttttatgctcgaaatgaaagcaaactaaagttatgatcacccataatgaaatgactaagaataagattggggtttctatatggatgacattgatttctctagcttgggcatctttgtggcagcctagtgaggggggtttcactcctagttgggtgagtgtttggttggtttcctgtgggttttggcgggctcccatgggtgtggggtgcttctacacttggtggtggtgtccattttgatgacttttgcgtcctaaatgttgatgactttttaggtgcttttatttttttgttttatgtttcagcagtgggttttgttattataagaagttaatatataaacattttgttttttcctaacatagttgattttgttattgtaagaaattaatatataaacacaaagcatataatatgatcgatatcaatgcaaaattaaagttgtaaacatatcgatatatatgcagtgaaaggacaaaaatactcacatttgttaattttttgagcttcaatcctaggaaatttagatttacaaaagaaaattgaaaataactttaagaacagatattcaatcttccaagctctcactaactcttttagatggcatttacaatgtacacaaaacgagtagtgagcttgggaatggtactatatctttataagtaggatacttcatcaatatttgtgtcacaataattgtcaaaatattttgacaattaattcagaaaattaaattgaacaattggaatattttacaatcaaaatctgatcataattaaaatatttataattagttatcaaattttaattgtatattttataaattaaatcaaatcatatatttgacttatcctatacaaaatattctaatatttttccactttgttagcatttaaatttaccacttaaattcattgatccttattacttaataaacatatgaattatagtgatagaatttcattatatgacgagtattatcttccatgtattacaatatattcattacataacatgtagttaactgaataaaccctatatttattctcggcctatgaagataatttttctagatgaaattaaggtgcacatgaatatgagaaaaataaaat

SEQ ID NO: 385294 - DNA, 1444 bp, Cannabis indica
acttttctaagtaactatatcatagtaattaagtaaataaagaaaaaaatagaaaacgagagtgaacatagttatgtaataaacttacacacgtgctaataatgtattattattatatacactattttgtaatctaagttgtttaggtttttttttttttttttcaaccaaccaaccaaccatcaactaccgagaaaaaatgtgttacaaacagagctttttttgctttcatgtgtaggggccatgtgtactgagtagcacgtgagtacacgcgccgaagaattagtttttttttttttaataatctggaaaattacctggagaatagagtttttattacgcgtttgttctagactattgggtttgtaatacgtttcgtgtgacgtcacataagaaggaagtataaaacctgttctcttttattttatttctactcaaaataactaattaaaatgatttttttttcttatccaaaattaaaatatataggttatattcatatgcatgaatggttttctgttacgtgctctataatttagttgggtttacatgataagagcaaagcaagttgtttacatatatttttgtaactgtatatgatcagattgaatactcaatactgaatcaaaataataaacaatatagattcaatttcaatccttatccattataaagctaaagcattaaatttgaggggtcatgctaccgaattatacaataagattgttcgtttctttatgcaatggtgtatttttttttactatgttatcagtactaaatacttaaaattgtagtaaatatttcattattttgtttctttcttctttgagtggtcccttttgaaagtaattaaataatgatcatcatctcatccaccactgattagaacatataatatatatgaacaattaatatggcattacttgttaaaatatataaataattaaattgagattcagtatatggttacacaaccacctatatatataatggtactcttttatgacattgaggtcaacaatagaatataatcaagttacgcaataatagtaagggacaattagagaaagactcttattttatcaaattgagttactgatccaaatgatcaatccttacacacaacaattgctaatgtgtcagtaattaatatttattgatcatgatcatcaatacaatggatatgattaatttttttaattaagagtgacagaacagaacagataataatacctatagtacactgattgttcaattattaaacaccttgcaactaattaaaaataaatataagaaaaaaaaggttgttgtgaagtaagcaaaaaacaatatatagtaatacagtagaacctctatactctattcaagaataacctctaatttgttataaaaaaatcaagtcccgatttgggccagttataaataagaataacctctaaattgt

SEQ ID NO: 385295 - DNA, 1582 bp, Cannabis indica
agaaaagatgaatgataccgccgcaatggtcgtctccgtgcggtaaccattgcactcagaaatacgcagccctatctcaaattccatgtgtgtttttaccctttctctatgccactctccttcactttcatctctttgatatataaacttcagttttcaaagtacttgaaatttggggtttttttctttgttgttcttgtttgtatttggagtaggaaatgagcataattttgagctttgcaactaaatttcagtgagagagagagagagagagagtaagggacatgagtatttggttgattccttccacggagagagactgtggttgaagttattctggggtttatactttctctgtgtttgcctggtttgttactctggttatgggtgaacgaagaagatagagtgtgttggaattgggcatgtggttgggctgatagatggtgtctttctttaagtgagagggaggcggaaaagagagatagagtgatagacttgttaaagattagatttttgttttttttgttaaagattagttttttgtgtttgctgattaagtttgccgccttggcctgttgttggaggagcaaatctttttctctatatgctctgttttctctatatgaaacggtttcttgtgttgacggagtcgtgagaagatggatcatttggagagcatggaaaaggagactttcaactttttctatgtaagccagccttcatccgtgtaccaggatgtcttctcgggtgccagaactgttacggccagaggttctccgaatcataaacgaaacttgttctcgactccggccgttgctgattcttcaaccggtggtgttaagggcccttcttctaaacttgttcgtcgtcagaggcgtgcgttgatggcgacgtcccatgatcctgctgccggtggtaaccagaagcaagcggggtggttccccatgcccatgcctgtctattgtgtactggattttgcttcatctggtaatggtgaggagaacgttattctggagtgggaaaagtcgcctggtcttgttcttgttatagcgataccatctttgactgggtcctctaatgtgccaaaaaatttgaatatgttaaaggatgtgggccaagggacgaaggcctattcttgtgggcctgggtctcctttttataaggttggtgggccagaaggagtaatggtggtgacagatactcataatagttatgagtcgagcctatttgggcctaatgaagccttaaatgaagttattaagccatgtggtgacattaagcacttagaaaaggcacttatagggtcatcaactaagttgggccttgaaaattctggcactagcttagcggttcactctcaaacccctgtggaggagaatgtcttatctcctccacaggagccatgaaaggcgtagcgtggaactgtagagggttagggcagacctctacagttctggagttgaaagccctaattcggtcgtgcaatcctgatttcattttcattaccgaactaaaagtggatgcttcaagtctggtatgttcccttaagaaacttcacttttatcataatattgttgtgccg

SEQ ID NO: 385296 - DNA, 1508 bp, Cannabis indica
gagggagcaattggaccacaatttttgaaaaggatctccttattggctctagagaggaacttatcatgccaactgttgagacgagtaatcacttttgtcttgataaatccaagtatagtatttttattccacccaatgatgttaggcagtccgagataatggctgccttcagaagcttctatcatacccaaaatgttgcaaatactgtcacgatgttggggggcagaattaggagtgaagaaaatattagatttggaagcattcacctgctgtcccgaggcagtctcaaacatacgaagcagattgaggaggttgctagctgcttatacagtagcttggcaaaatagataactgtcatcaggaaaaaaacatttgcgtaatggaaggagcatgattcgccatagaaattaatttatttaaagagagggaaaattaattttattaaaattgacttattctttctatcttttctttttaaaaataaaacataaaaaaatatatattttttttcacttgaaaaggtgagtagtttttaacaatctctaccggattcatcaaattctccatatgaaaaaagtgacctaactattgtggaagtttgaagtaaagaaactccattttggatcgtaggtacagaatgacaaaaaatgtgaacactatcactaagcatactagtttactcaattattcattcaatcataccatacaaataatggtcaattacattaccatgagccatgtatgtgggttacaaattcagtgaactgtgaacatatacctaccgtcagctaattccactaccattattcatgagactcatggccaagaaaacaaaaacaaaaaggaactacttttttgggttgattaatttatcaataatcagaaaaagggtattttatttaaatgattaagaatatgccaaacatgcaaaaatttggtcccaaacacagaagaagaagtgaacaaagcaatcttaacggttctcttccatttcccaacatttgattactcattacataatttactttacgttttaaaaaagtgcttaatttgtgagaggctctctctcatttctaaaccctaaacacctatacaaaataaacatacacacacatacatattatatattataattgtaatcattatattaatcacgtttggttattgcaactcacaaagctcgttagtcttggattttgggacccattttttttgcttagatcaccatcctcattattcctcaaagaggaagaagaattaatgtaaagggttgttgagaatcatggggttccaactcaaaaccaatcggcaatgagtggagtagcccatgttcttatatatggctcaatactttcacatttaaaacaatattctccaatatcccccctcaagatggtggctatttttgctcaccaatattgaatcaccttatcataagtagtgctatttgctcgcttatttttttattttgcggctgagagttccatttgctcgcttgcggctggcta

SEQ ID NO: 385297 - DNA, 1698 bp, Cannabis indica
tttttttttaaatatttttgttttagtgggtatttatgaaaaaaaaatcctattttgttttggtgttcgtataaatttttgtatgaactattcaaaagcataattttatataaataattcagtgttagtttggttcatcatatgcatatattcatataacatgttagaaataatcacagccttttgagtaacattttttactctattttttcaattttgaagagacatacttgtggagtactcgaaacaagtaatgaaagtaggaatttttctattcgagttaatctctgaggctctcgggttgaatccaaatcacttgaacaacatagattgcgcagagggtcaactacttttttgtcattactatccaccatgcccgcaaccagagctaactatgggagcaaccaaacatgccgatatggacttcctcaccgttttgcttcaagatgacattggtggtctccaagttctcattgacaataaatggatcgatgttccacctcaacccggagctctagtagtaaacattggagatcttcttcaggtaattttacctaattaagaatcttatatagaagagtttattcaatgtagttttgtactaattatacaccatatttgttttttggttgttgtttagcttataacgaatgatagattcaaaagtgttgagcacagagttttggcgagccatgtcggtcctcgaatatctatagcgagctttttttgcaccggtgtgatcccaacctcgaaaatttatggacccattaaggagttgttatcagaaaataatcccccaaagtatagagaaaccacagtgaaggattatattgcttattttggtacaaaaggccttgatgggagtaggctcttggatcatttcaagctcaaacaaaaacataatgatgaaattttagactaattaagtgttgcaactttgcttctaggccaaataaaatcaagaaattatatagcaaaaagtatggtactcatgtcctattatattgtttatgaaattaatgtgtgcttttgatgataatatatattccctcatataataaccattatcaatttttataaatatacatatatatgtaagccataaaaacatacaaaaaaatgtttttttacgacgattttaaataaaaaaaaaagtacatttttcttataaaataacaatttaattagaagaacgacaactctgaaaattgacattaaaaaatgacgacaaccacaaaattatcgttttgcaataaacttgtcgtttccaaattaaaattgttgtttctcaagaaaaatggtcattagaaacaattgtcgtttattaaggataccattgtcgttttgaatggaaattgtggtttagaaaggtaatagtgtatattaggggtgttcaacaaaatttacaaactgcccaaacctaaccgaaaaaataatcgacaaaaaatacaacctgaaataatacagtaaaaattcaaaccggccaatgaatatattgagcagtttataaattattctaaaccgcccaattaacccgaataaaccgaatgaaaccgatttatatatttttttaaataaaagtgtataaattatattacataaattcactactacaaatatcagaatttgcgacggtcctaaaaacgatttttttcggggaccgtcgctaaaaaaattaagtaactatttaaaatcgtc

SEQ ID NO: 385298 - DNA, 2934 bp, Cannabis indica
aaggcaataattatgaaaagttcgtaaaaataacaataatatatattttctttttcctttttcaattcccttcttaccaggggatccaatgaaaattatagggtatttagttgtacctataagctggtgttaattaatgtattggtttatttaattttttctttgattaattatactaaaataattgttttgattaattaatgatgagatatttattagaaatttccttccatttttttctccaaaccaaacaaaacctaattcaaattaaaatatatagtaagacaattagacgtgttaatattaattttttatgagcgtgactgatcaagagaacattatttttgagaaaagtataaaaatataataatttattgaaattccctttcaaatttctgtatatgttattaagcaagtagtagtacattaggtattattactttcagaaaaaagaaaaagaaaataaaagaaagtataatataggtattactttcaggaaataattatgacaaatcttaattggcatgtagtgtcactctcacacccaatgtgtggggttaattacactgtgaaagagattaaaagtaaaaagggcataataagactaattttaattaattatatttaataaaagaaattggataataaatttattagcatgtttagactttttcatgaagaaaaaacagggttgcttaagtcataagaatttaagatacctcaatttatatttatcaatatatttacagatactatatacatatatatttaaagtcttaaaccactcattttttttatttttaaaaatttgtcattaatgataaaaatagaaaataaataaataaagaaaagtataggactccaaaataatgtattaactagcgatcacagtatctaggctcactcccaactagttttgattagccaaaaataaaataaagctaattacattataatttttaggctaattatgatttctgccctcaactgtactaaatcatgcctagaacttttaatattgagatgattggatttaaggacttttctaattttaataaaaaagtctaacatgatgaaagttcagagagtataatttagtgcttgtgatttagtagatatcaaaatttggggaacataatttagtacataaacaatcattgaattcagtaagttcagggacatagtacatgtcaaaagacaaaaaattctaattagtctaacttttatatataaatatatatattaattattgctaaactacattatagtataaactgatctgcagatttatttaagttctatatatcaataaatattaaattaagtaggcccatacctaagtaaaacaatattttcttaggagaaaatcacaatatttccagtacaagtatataacaattttatcaattattatattggttcctcataatcaaaatagtacatagtccaaacctcccaaacaaattaacagcaatgaaagcaaagtttaaataaaataatctttctatatttccaaatattattattctaaaccaaaaataaatatttatttacatcaccaaagtaaaatatcactttatatgtatattcctcaactttacctatatacataactattttaattttaatctaattaattattaatgcaacaaaaaaattaaaaaattaaaaaactaaattacaagagagatgattaagaaactgcaaccccattatttttcatactgagattatgattattactattcattaggcaaaacctagtgggcctgggctgaaaattcctcctcctctgaagatcatggctactgggcttgatcaactggagaagaagggccttgatggtattggctttgtcctccatgcccgttttccattgacccgacgagacccgaacccgactggtgccagtgcttctgctgggcttgtggggattccggtgaagactgcacctaaacgaccctggatgagaagtgggagaacagaggcaggttctgccaacgacatgtcgttttgggtatgatgatgtgcttattgtggccatagagaaattagagaatggatctatgagaaatggtccaatttttgcaaatcttgggaaattttgggaatgagattctttttttggggtgttccaattccaaactcgtgggaaggcttgagttgagactttggttttagttttcttttttgtggttgtgaattttgggggtatcatatatatagcttcattagtgtttaggattttactttaatacccttgtgttggaaagttctgagatgatgagatttgttagtaggcctttgtgtgtaatatatgattgatgagatgggtttttgtgtaaattgagaaatggacaggtggcaattgtcaaactaccctttggcatgttatgttaacctctagtctagtgattatgttggtctataatttgactgttgaattttctacacatcaataattgttaattttcgttctagacactaattaatgccaaaagtttcaaacttaaaaggtaaattaggataattatgcgttttacattattaatttaattaagtttgaattatgattaactatggttggctatggctagtgtagtgttttatgataattttgtaagatgtatactatttggcatatttagcattatctagaaatggagttatgagattgattaacgatactctttaaaagttattacattaaattatatgaaattttatatttaattatattaatagcaatattacacattagaagatgctagaaacttttttttatcatttctcttttgtaaataattaaaatgaataattacataagtcaccattttttgtaaaatatttacatttttacgttcaaagaatgttttttttacatttttacgggtttccaaaaaataacacgaaaacaacataaaatcaacaaga

SEQ ID NO: 385299 - DNA, 763 bp, Cannabis indica
caagaatgatttattttagttgacgagttccagattgatgtaaatatattgtaataaaaaggacaaaacataaaggaaactatagcaaataatacctaagcaccaaacttaagtttgttaggtaattaattaagatatatatacatataattagcaccaacatattatgctaaaatgttagtaatattaagaaattaaaattttatattttaataatacaatgaagtacaaagtgtaatggggaagattgttattgacttatgtactcataattttgattccaatgatttaagtgtgattttttcttaatgtttttatgaaacaaatgagctatatatgaagcttagaaattattggccaataattttactaatgtaatgatcttttatgcttgatggaaattcaaaccggttataagaaaactttttttaaaattgaacatgatatgatgatataatagaaatcgttcagatcaaagacaagattttaacaatttggtataggtgtgaatttaaatttaatgaatatgtgaattaaatttgctattaataaattacatcaataatggtatgtcttaattaacttgtccaaaaccaaaacttatggcgtttggttggaggtaatgaaatggaatggaatggaaaggaaacaattttcattctatttctttgtttggttgcattttaaagtattggaatgacattccaatgaaatgctctttccaccattttggtggaatgactattccattttaaaaagaagg

SEQ ID NO: 385300 - DNA, 1713 bp, Cannabis indica
gttgcagaaaaaagtgaagatatataaaagaaatggtggaaaagttagctgcaggcaaagagtgaagcctactttccttgatcagatgattgcttatattaaaatgcttctgatacactttgatgatattttctacattaatctccctttttgaagccattcagcttcccattcatataattcggatatatatctatatatttatgtatgtgtgtattattattataattaatcatgtttttgatgaaatttagctgacaattccagtaaagtaattcttttttccttacgaaattctctgtacaatttctcatgtttaagcaatcaccacaattttcatcaccctttgatatatgagtattgttattgggcaccagaggtgcttaacaccttttacatctgattggttagccatattttttaagagttatttttatgggattcaatacttaattaaactaatagcggtatgacaccgagtaaggtattaagcattaatagtaccttttagcaatttttggggatgaagtgaatggacatttactagctataagtgtttgcttttttagctgtgaaagtgtttgctttagctgtacaaaatggtcacattattaggattaaaggtttctaaaaagaaagctataattggtccattattcacttatgttctatgcaccaaataattcaatacctttctcatcttttgttttatttgcacatgaaaatgtttattcattcatcttgctaataataatcaagtgttaatgaagatttttcaatacttgaatttgactcatcttcttgggattgttgtaaagtgttgactgtatattcaagtttagttttgtgagtaacttgtttttgggctttttcattttgaaaatggcccaaaagtgatattcttcaataaaatcaagaggtttttataaaaatactaaacttttaagtaaaaatttataattttactgtcacaaggaattgtttataaaaatactctttttataaaacaatcgttaaacaacagaacaattataacaatagtagaactactaaaaataagcgtgaaataataaaaaaaacttaatacagtacacaatataaaaaatacaaagtattttttaaaaaaattccaccccatagtagaaaaaaaaattataaatttagtacgtagtgtaaaattttttaaaatcaattcttggaaataattcatctagattcataactcaaactaataagcctactaattagacaacaatagtatctaacaccaccttaggattggtaattaaaatacatgagacataatattaagttattatagggcatgtttgaaaagtcactttataattggaattaagtgtaatttagagtaattataaaatttggtgtatttgttcaactagataattatacagtaaccatgtaatagaggtaattgagtggtctcaattgtactctcaaattcttaattacaaaatattaccatttttaggctttgtaactaattaatattattaaattatatgattactaatttcatttgtcaaacataaaaataataatttatatcataattattatttaatatttaaaacataattacacgatctaataattataaaagggaaatttcatttttaatgcttaaaaaaatatcttctaataaaatttagactcataattaatttatacaatttaatgctattgttttca

SEQ ID NO: 385301 - DNA, 1050 bp, Cannabis indica
gcgatgatactaaattacaaaacttgagggatgccttggggcaagtgcaaaatcataccaacaatcttcaccataatcaggaggatacccgagcagctatgaacctggcgtttgaacaataaaaatgtcaattctaggagtggatggatcggcaaactaagatcttgagagctcgacaagcagagattgataatcgatccaggcaagcgaccgaactgatcaggcaatttaatcaacagattagacgacagcagagattggcctcaaagtccatcaatctctttggtgtgagtgtggacaaaggtgaaacctaccgagctttaaccttttttaggagcttggcaggaacagcctcttcgagctcttcggtaacgtagtcctgaccaattaggggacatcctgaagctccgagacgaggtctctgatctcgttaaacccttcgattggtatagccatggtggcaacctattcttcttccccttcagagccagctacacggaccttaccttggtcctctattgtacctcctcaccaccaatggaaattttagcatcctcttcaaaattttcagcatgctccgcattggccattgccattagtcaagcaaagtgtgggtccacgaccgagatcttcttgtagttctatttagtccttgccaccttcctacgtttggacagatgattcagttttatagtatgctttgcaatgttaattgcgatctccgctagcatggaggttttcctcgaaggctctagacggccctccagacacatgtctagaacatcttcttggaccctatacatccacaaggctggcaagtattgcttccaacctttgttaaattcctagataaatcttgtgttatacccaaaatttggctacactttagaggatgacacatgtcaagtagtggaatatgaaccaccatgtataatgaatttatatcatttaatgcgaaggaagagtataactcgttaaataaagaattaatagagaatattcataactcgctgactatgtagtcataaacgagataagcatagaaaatta

SEQ ID NO: 385302 - DNA, 2012 bp, Cannabis indica
caggagtatttaaacaaacaaccaacgattttcccgagaaaatgcgagaaagtgtgagtgtgaaaacgagagagagggaagtctcttttctttttagattttgtttgtttgattggggagggtttggaaagaagaggggaaggttcgtttataaaggagtgagataggggtataatagtgatttcatattaaatgcagttacagagctgtggggccaacatgagcgggaccgaagcctgtttaagataaattttgagccgaaaccagctgactggttttcggctttgggacattgtttttatttacgaaaatgccctctcatctctatgtaaaatgacttatacacccctgctttctaactttttatcaatcagcatctttcttctgcagtcgtaatttttgcaacaaattttgtattcttgtgcttttcaagatttgcataatctttctagttttttcacttggtgataatgtgaatagtgagacgaaatattttcattacccagaagtttactaaatgtagcaaaaaaaattcttccaacagaccattcaatcataattcaatacttgtttttttagctagtgtgtacttgagaaactaaggaattataatggctagggtatactctccttttcaagtggtaaaaaactattattatatattataagttacattctcaaggacattatttgatttgtgtataatttgatatctaatctaagccaaatattctcacacaccaccaactatagattttcaaaataattttgagtgataattaataataataataataataataataacaactagaaactataaagttgttggtctcccttatacttgataaattccactccaagcacaaatagagtatataattaattaatatattttttttaaatcaaggaaaactgttggtgaaagggactgccatgtgcagaagtgttgccaaggttttcaacctattatccgacttcaatttttatagtcaaatgtttttatcattttgtatgaatatatattttttatgattcttttattacaacatatagtaagtttttttttttttaatttatgtagtaacaaaacaatagagtactatatattaatattattattattattattattatatatataaatgacaaggtgcctcccctcctcccataatctggaccaaccggtgctaactaccatattaaaatataatagtggaattttttcattaaaaaaataaataaaggagttttgtcgtttgctatgtagttgtgcttacttgtttgttattgtaacacttttttaactaatggattagttaagcattatataaaactaatattttttctttatttattacaattattcggatggtggacatgctcatgaatgtttatacttctatgtaaaaaatatatttgcacatataattaagtgattcgatccgctctaatattaatctcaattatttaacaactgtaagttttattttgatatttataagtaacaattagaatgcttaattaaaggtttagatcttcttaattatatatataattataattttttgaaggattaataatataatcatacgtaccgtagcgcaatggttattagacactagcttaaacatatatagttaattataaattggttattattaattaataatatatatgcaagaatgtattaaattaaacatatatatacaaatcaatatatatacatatatgatataattgtataagctaagtaaatggttcattatttttataaaaataaaaatgctacatgcatgtttcataagtcataatttttcaacatatatatattttttttttttgaaagaaaggagcccgctaagacagaaaaacaaagaaattacaggggtcgtctccaatctaaatggctacttcatctaactcaagagctcggtgagctaacttatcagccaggatgttagcatcccgattaatatgggagagccgagcagctgggaaataagataaag

SEQ ID NO: 385303 - DNA, 1683 bp, Cannabis indica
aattctgggtccgtcactgctgacgagtgctctatgcttcaggtaaaggcaacattagtggttgggaataagttggagggctttggccgtgtggtacatgtttggattgcatgacttcaaatcattcgaaaaaacctttgtttataaatgtcttattagaatatgttggaaaagaacttaagtttaaatatttcgtttacatgaatatgggatcccatctagttattagctgaaatggtttttgtttaaacttttattgatattatgttattttaataccatcttaatgaaactacacttttgagtcaaaaatcttgattaacaagataaatgcatttcaaacacacatacatattcttctctatttataagtaggaataggatgctagatagagcaagacagattttataaaggaataattacataagacacaattttttgtaaaatatttatatttttacgtttaaagaatatatatatatttttacatttttacggtttttcaaaaaataacatgaaaataacataaaatcaacaaaaaaactacataaaagtaacatgaaaataacaactaaaaataacatacatataataaaaaatcaacaacaaattaacaagattacaatataaaaagaccgtattttttgtaaataaaattaaaaaaatcgtaaaaatatttaaaattccgtgaaatcatatttttgtaattttttgtttttttatgtttttgtgaaataatcccttttataaactcacattctaccatgtcaaaagcatttgccatataagtttaagaaactacgaataagaatttaatgggccataggaaaataatagggatagaggaatatctctttttttgtatatattaattaaaaatacccttatattttatttcattaaaatctactcacttttatgagtgaattgtctaatatatccttaatctaactcattgacattgagtaccatgtatgtttcctataataatagcatgaacaagattatgtgtactcaaaatattataagattattctataaggttccttaatgtattgtattgtattgtgttatatattattatatttgaatataatactatgtttggtgtataataatattgtattatatatatatttttaaaataaataaaatatatatttttattattaatatcatatgtaatagtaatctcgatctcgctttataacctcgcgactttgaatcttaccctatatttaaatatcagatttgaccctgacccaaatcacaacctaggcctggacgaaaaactttggacaccgacccccgactcagaccctgaccccagcccaaacctaaaccttggacccggacttggacttagagtcttagacttgaaccttggacttcggccccgggcccacacccaaaccttgtgtaacaccctaatgcaaaggcacgctacagtactttttcaatcacagtgcaatctttgctaatcaaagaattttcttgaaaatcgtgtcaaattaaaacttttgtattaattaataaactttataatataataaaatatttacaagtgccgggatcccgttttcaaactttttaaacttaatatcccaaaatacataatttacaggtcgctcagcgactacaaaatataactcccagatgtcccgagaccgaacactccaggt

SEQ ID NO: 385304 - DNA, 2801 bp, Cannabis indica
tgtttcttttcatttttgtaaaaacgatcaacaagtgtagcggctcattcctttgcgagggcctctatatcttaccctgatcgtctgttcaacttcaacactgttccagttgagttgtgcctagttggtaacatagattttcgtttaataaaataactttacaatttaaaaaaaaacaaataaaatttccaattaataatttagaaaagatataagtctctttcgtaaaactcttttagtttttcagctatgaagtagctagtgtgtttagtattaagatattttataatttgttaataattttttataatatttattaaaaaaaaaagctttcttttacataaataataaattgcgactacaaacacagtgataatataaattgtgtgataaagtaattttgtttaacagcaaaaattgaatgaaagtgatcagattcagggcttttgaacttgtctctctctaagccatgtcaaccagttcccgatcgccagatgatatttcccgcaaaattccagatgtggtctccggtgagccttgcaattctccatatccttcttcttcgtcaatctctgacgtcactcaaacttttcatttctcctctggaaaccctagaatcgaagagaccaggggagtcatgcttctctatcggaacgatattggccttcccgtaagcttttgctttatattgtttaccctaaaattgaagcctggaatttgggttgatgatactttagttaataatcatgtaggttgaaagaaaacccctgctttgtgttcttggagtaccgaatcacatgacatatgcggatttttgccagttctgcggttcttttgtgcatcatattttggaaatgcggattgtaaggtttgtgtttggacttttgtttttcagattgcattcttgaaaatttatcttgtttttaactttccttagcttgtggtttatagaaatgatggtatggaggatcgttatagcattttgattaggtttgatagtcaagattctgctgataaattttacaagcacttcaatggaagacgattttcatctctagaggtatgaattattctgttcagttaaccccaaatccactttaacttgggaaagttaaccccaaatatttgaatataggaggaggcttgtcgtgtgcttttcacggtggatgtgcattacactggttccattgaacataagcaatcgtcttcggcaggcccggctgatcagcagcccgcttgtccagtttgtcttggtagtgtttttcaagtgcttgtttagattggaaattataacagaaattaacttcggaagaaataaagaaacagataatgtttcaattcatatcctcatgctatttttggctttcattacagagagactagaacaaggcatgggtggaattctgacaactatctgcaatcattcttttcattgttcttgcatttcaaactggaccgattcttcttgtccggtaaatgtttgtttcacatttgagagtaaaaaagtaattgatgattatttctctaaattgtataattgttgagcatatatatatttaggtatgcagatattgtcagcaacagcctgaaaaatcaatttgcaacgtttgccaaacgtctgagaatctctggatgtgtgtgatatgtggatctgttggctgtggaaggtaatagtttatactaatattgcggtaggaaccaaaaccagagaaactccgaaatagataaatagtgtaccaaccatagggttctattattaaactcgaatcgaaacacaaaggaaaaaaaaataatacagaaaatgataccctgcgtactggggagacccaggactctcctatgatccaaatctcaatttcaattccctctcatatatataccactgtgtcatatatatatatatatatatatgtaaatttgtttgtgtttgtttccattgtgtcatgtaggtataaagagggacatgcaataacacattggaaagaaacacaacactgttattcgattgaattagaatctaagcgtgtgtgggattacgcgggagacaattatgttcaccgtcttatccaatctaaaactgatggaaaattagttgaactgaatgctcattgtgttgatgctaataatgggtgtggaagctgtgaactgggccaaccagtagattgtggatttagtgaggcccttttgaacagtagagttgaagctgtaatgtagttatcttttatttttattgaacactttactttgcttcatttgctaagatatattttttttaatatgctcatctaccttctaacttttgtctgcagattgttaatgaatacaatgatctgcttaccaaccaacttgagaaccaaaaactagtaagttatttctataatttcattggattttgtttacaaacaataaaatatgatatacaatattgctattgctcttcatagattaccaccatcactgatttttcaaacaaattatatacaataatgtttgaattgcagtattatgaatccttgctgcgagaagtcgaagaagaaactgaaaggcaaatttctagcgctgtggagaaggctgttaccttaaaactacagaagctgcaggctaaacttgatcgatgtcttaaagaaaagaatattcttaaggatgtaagtcatagctagctcgtaatgctctgctcggtgcgactttgtggcttattttcacctatgactggaagattttagtttctttctaataattaaattttcatgttgagtgcagcttaacgagaatcttttgaaaaatcaggagatttggaaaga

SEQ ID NO: 385305 - DNA, 997 bp, Cannabis indica
gctgcacattgtcttgctcgtagctcttgtttgtatccagatcgtatttttagtgaggatgatgttcctgatgattttctttctattgtaatggctgaatcttcttattaataaagttaccaattttaaccttaaaaaaaaaaaaaaaaaaaaaaaactttaactacacacaaaaaaaattaatgaatctttgtcggttaaaatatcaaatatttagtaattatactgctaatataattgttctaaatacaatccaaaaaattttgaaaggaaaaaagtgaataatattataattgtttgtctaaaaatcccaataaaaagtttaaatatatgtcagcttattaaaatgtgataaaatttttaaatataaatttaatcatgaggttttttttttctaaatatatattcatatttatatatggataagctttttattactcttaattaggtattaattttgatagtaaatgtataatagttagtagatatgtgtcatattctaagcaaaatgtttctattcttttgcccccacaaatagagtaaatggggcaaatagacaaaattgcacttttattaatttaaaaaactttacccacaaaaaaaaaaaattaatgaatcggttaaaatatcaaatatttggtaattatattgctaatataattatttaaaatacaatcttaaaaatttttgaataaaaaaagtaaatagtattataattgcttgtccaaaaatattagcccaaccaatcttgctcaataatcaactcaaaaatttaaatgtatgtcaacttattaaaatgtgattgtaaaattttttaaatacaaatttaacgaagaggttttttttttcctaaaaaaaaaaatatatatatatatttatatactagcaaaaaattacgtgcgaggcacgtatattaaattttatgttagttttttttttacgttattaaaaagtgatacaattaaaaataaaataaatatatattattagttattag

SEQ ID NO: 385306 - DNA, 3354 bp, Cannabis indica
tttttttttttttgtaaataaaagtgaatttagattaagattaaaaattaaacttcatagtcattatataaaatattattcagaatctcgataagatgaaccatccaaattacattcttggtaaaagtccacttaatcatattatggactgcaaaattacattgtctaggaataggaataggaataaaattacagctaatgaagagatttgagagttgtttacattgaatcacataattatataagagtaaattccctttcagcgcattgataactttctcagagtcactcccaatcatcacaaaatagtacttcttcgagaccactgattccataactaacagacatgtcatcgcttctccaattagtgggtcagagaagttgagcactttggaagccgcccacaaaactgtctccttatgatccctagccaaagccaccacgcacatcgaatcacaaccaactttcacatcacagctgattttgacccagtcattcgggggaggggaccaagcaggagctcagaggtcatcggagaagttaacaaacaagaaccataatctgcgtaacacacataaatagagtcaatatactgtttaacattacatataaaattattatgtaccttatcattacaggctttctagattgtgtcgactacaattgaagcatataggaaaagttcttgaacgttcacacctcagtctttagactccataaaaatttaacccaatcccacattcgggctccagattcctgaactgggaaaacaccccatggggaagacctccaaaggtgaaagacaaagttgcaatagagaaaaatgtgttccatcgtttcatcactctctccataaaaaggacaggaaacatcctcaatatgcaaccttatagccagaatggagtgaataggcagagttttaaagagaatgctccactaaagtaccttgtgacgctccaaaatttttgaattccaaattttattccacatacttggagcaacactgcaacgaggagcccaatttagggcctggaccacgtaggctgacttagtaaagaataaaccattcgactctttaatctaaatccaccagtccgaaccctgacctccaggtttacctcccttgataatgttattttttatttcaggattgaacatagcttgaggctttgttaaattccagtccccattttttgttagtaagtttgctactttcttgaaaccctccacccaagtgcaattcggttggtagaatccatggccatgcataatccacggatcctcccaaatattagtatatttctcatctaaaatgattttacatgcaccctatttaatgatctccttagtttttacaacattcttccaaaatcaagagtccaagctcttgtaggcacatttcaagaacgatcttcccttcaggtacttagcacttaggatcttataacacagtgacttatccctagttaaaagagcccagtcccatttttccaaaagagcacaattcatttcttgagtttttctgaagcctagaccacctctagacttcgacaaacaaatctgatcccaagccttcaagtagatacccctctttccttgctcacaaccccactaaaagctgctaaccataccatcaattttaaaagcaagcctattagatagcttcgttgtttgcattgcgtaaattggtaaggagaggcctactgatttgatcagagtagctcgacctgctttagagagcaattttaacttccacccatgaagcttatagactaggttatcaagaatgaaattaaagtctacatctttatttcgactacgaaacagtgggagcccaagataattaatatttccagtggcaatgttaaggccaagttctttcttgatattacatttcatcccctctttattcaatatactctccacctcattacgcctattacggatagtggtggtagtaaggaaaaaatttgaacatttgtccccctcctttatccaagaaatatgagatctctgttgccagtaaagagctttccgtctaagggccttgttaaggaccttccttacttctgattccttagcccaacttctattatccatcggcatcctctagatatctatgagttatttttccagtggaaggtcattcctctagtatcaaaaatccactattgaaaattcatagttgtttggctgaatgtggaaaaatattttgaattggcaagttaatatctttgatactgaaggggacagtacaattgtaaggggtatcgtttggaagtaggaaagatgtaaaaactgtcttagacaaataactatgaattttcagtagtggattttgatacttgaggaacgatcttccactagtaattggaaagatgcaaaacttgacaaggtaatttgttgggaaaggatgagagggttccctttaaaatcgttcactcttgctaatgtgtaaagattgggagctaaggtgggtgaggtagctaaggtgcgatggagtaatccttaataaaactaatggctatgtgcgggtacgcattggcttcccgattgcacaaagtatatttatgggacgacttattccatcaggagggcagaaaaagtcgattcaaataaaatttgaacgcctgcttggcctctattttcactgtggagtttgaggtcatgaacaaagcatttgtcaaggggaggaggtcaccgaagttgatgaacatggtcaatgagctcctagatatgggaaatggttaaatgaagatgatcctactccaaatggcttcttgactcattatattattcaggcacgtcaacgacaaggcaaggtaaatgggaatgaggtgcaaccaaaagaactagattagaatataatttttcatcttcaagaggtggttcatgcatatgatttagtgagaggcccaatggcttatggaatggtgggtgatggagcttcagaggcagcggtgaggaatgagactatgacagaggaagttacaaaggtggctgaagaagttagagttaatggagcgattaataatggaggaaagatagttgggtagattgtggcaaaggaagttatgttactagtgatagtgggtctcaatcaatgggccatcctaacggtcatagttcttttatccacggacctactatttttgggcctcaaactaatgtgaatgaaaagaataatagtgatattttagatcatattaataatgatatgggttagtccattcaaaagaatcttagggccagtttggcatagccgtgttgtgggaaaaagcagttgtagctgtgttgtgagaaaaagcagttgtagcaaaactgtggaaaaaaaactgagctgagtgtttggta

SEQ ID NO: 385307 - DNA, 936 bp, Cannabis indica
ataattattcataattttcatttttaattacaattatacaacttcttttgatcattttttattgaaaagttaattagaatccacttggtgagtgagcaatccctctcaagcattttcatttgagttgctcttaggaatattctctttttatatcctactcgtgatccagtgatcggggtgacactatcgattctataagccaattcgaatctatagttcttgctcttgtttaatatatgtttaagattagttttgggtgtaggcagactagtggttaggattagaaatttactattttacatataattattataaaaataacaaattttgtattggcacataatacttgtaaaaagtgtcaaaactgaaattcaaattgagatgagccacatgcacttgtattgtttgagaatgaagactgaaaataatcaaatcaaaatcagaagctcatagtttataggtatatgccgattaacaacattgggtaacatgtgctcatcatgctcattgtaatgggctggctagcccactactattaccctctctggcaacaagttgagtccaatcctcatccaaacccatggacattttggacccaaacaaaatttctcaatattttaggaattattttaaaaaaatacaatatcaacctcaaaattataaaaatacggtggtacgaaattttaaatattttaataatttttaagattttatttatataaaatacagccttttgatatatttttattttacccttattattttgttgttgattttttgttattttctctcttattagtttgttattgattttgttgtttattttttgttttttatattgttttttatattgttttattgcgttcttgcgttgttattgttatttctttgtgttttttatataactaggtgaattgttacgtgccaagccacgta

SEQ ID NO: 385308 - DNA, 1283 bp, Cannabis indica
tcagagcctttattattattattttctccttttcatctgatcttttccttctcattacaatacaaaccaagttaaattatgatcacaagcgacatgcaaaacaatgacgcgagacctcatcaggcactagggtttaggtctctctcaaaaagatacacacagatttttcactgtgtctgagtgtgattcaagattcattttattgttgtgttcataactaataataatagtattaataagaaaataccagctagggtatcgtacggccctcttttccctccttgtaaaacaaagatctttttttatttctatccccatccacgttagcttttgaatttgattagacgtagatgagtacgtaagccatgatggtgggttttaattttaactagggttttgtaaattgtactggacaaagccctaattttaacgtgtaggaggatttggttggagaagatctttgtattgggtggcgagcctatatagctagctagttctagggatattgagttatctctctctgcaaaagtgcaatttatgttatttctgcacgccaaaccaatatttacttctactttatgtagtcaaccatattaatttcttgagcaattttattaggtgtctagcaacttttcgacatgttgcgttatgattggctagcgataattcttaaaagctattatattaaattatataaaactcaatatttagttggaccaataacgatattgacacataggaaggtgctatagacatcactgataccttttagcatttctctaatttcttagcgagcattgttattaggcaccagtaatgcctagcacattctcgacatgtcactttgcgattaattagcaatactccctaaaaactattatattaaactatgtaagacccgaaatttaattggaccaatagcgatattgacacataaaaaggtgctaagcaccgatatttctttcttagctaacgttaaaaaggttaaaaagatagagagtgagagagaaatatatcaaaaatgttgcttttttacttatttactttctttctattttaagtgaacaggttcttcaataatattctaattttatgttatctttttcctgcaaagtgatgttatatactctccatcgagcaattatggattttcattcacccaagtagtgtacatattctatggaaaactactaaataatttgagcttcgcaatctatgtttaaaaatttttaaattatatttataaaataaattatatagtttatttgatgataactaattaa

SEQ ID NO: 385309 - DNA, 1636 bp, Cannabis indica
gtggcccctcagaatgcgacaaccaataccactcagacgacactccggtggtggcattgtccactggctggttcaacaatatgcagagatgtcttcagaacataaccatatatggtaatgggagaagtgtgagtgcaatggttgtggatgagtgtgattcaacagcagggtgtgatgctgctcatgattatcagcctccatgtcctaataacattgttgatgcttctaaagctgtttggaaggcattaggagtctccaaaggtgattggggtcaattggatatttactggtctcaagcctgatttcctttgttgtaatacggttattgattattgtgatttgaggttatattatgtattgtttgtttattgttcttttttatgtttgaattaatgaaagtgcatcttacgtgttatctatattgaaacagaaaagtttaaacttacattgcaagctcactcagtttgttgctttatgagcttagtcttgatgccataattaaacttgtccgaaggctttagcttttaatctaattatcaatattgcattattctaacttgaacggttattgtttattgaattttttggaaacccgttatcataagtgttatgctaaagaaagtatgttagaaagcaaatgagacaagattttttacatggttgggatattaatgagacttaatccaagattcattgccataaagtttttggctatggagtttacaatatattttctcattttgagctctagaaagttctaaccctttgcaattgcatagagggataattccatatttataagtacttatctttgttgggtcgaactaatccaaacccattagggttatttgagtatagaaaccctattgatacgataaactacaatataagttgagctattggaccaaataagtgaggcccaagttgaattgagttgttttccgtacatggttatattgttgacagtgacaggtgaggcgtgagccgttatggagaggaagaaatgtcataatagtgactatttgttcaaaaaagtgatttcatttttgttgtgtgccattccacctgacacaagggacgggctgcctaatttctcaagattgtgttagagaagtgtcacgtaggaaacttctaggacaccaagctatcccgaacaccttttcatgtattgtttgtgaataaccccttagggtatactccttgagttcacattgtttgcttactaagtgttaaaggatgatccagaacttgatgtttggattcttcactaggaagtgacacgggaactggaccatctgtctaatttttgcccattcttgatgggtgggttgagtaagttgtcctcattgggccaataaatgggtttgatatccgtaataggtctatgtgaagatcgatgtatcatttattcagaatcacgagtagcaattataatagggaaatttacaaaaatattagaattcggattaacttttacaaaaatactgtgtttttataaaacaccagtaaaacacaaagcagtgtaactcaaaacaacagtagaacactagtaaaacaccagtagaacaccagtgaaaactttacacagtatactgcagtatgaaatttataaaaaaacacagtaagaaagtaaaaa

SEQ ID NO: 385310 - DNA, 1390 bp, Cannabis indica
aaaaaaaaaaaaaagcaatcacacatattaaaaataaatttacataaaattatttttaatataatacctctactaaaatattatcctaagttataattcggacggtaaacattttatatagcccaattttaatgtgttaaaatcattaaatatatatatacaaatttatattataaatagcacaatttgatactgttaatttattttaaaaataattttttatatatatgtggatacttttaatctgtaatttgtgttataaaaggaaagaaagaaacgaaagctagtttcttgatgtgaatggatgaatatgatctttcttttcttttcttgaacaggaatggatgaatatggttaacaccaaagataatcctacatttgtttcctgatatatttgtttttatcctacgtgaagtaatgttgattattttttcaaagagatttttgttttggatttttccatttgagtatataatattttcaactttttaagttgcctccagcatatagttaggcagaacaaaatatttgatgctctaaattgtttaacttattttcctttccaataataataataataataataatagtaataagtttatagtattgtcattattttaaaattagcaacttatttaatttgtgcactaactttatcctttttggtcaataataaataaaaataaaggctgaaaaccttttcccttgaagtcgtgttcttgtccaaagctgcataaccaaacattgagagcaaccacgtggttagtgtctctgtacagctagcaaagcaccagcacaagagcgggaccaacctgccaaaaagttacagaaaaaggtcatctggctagagcacatcgctttatccctagcaaataaaatgtagccacgtttcaagaatcatcttcgatgtaatagagagagaaatcttattcgagtggttgtgtttcgtggattttagggatcaatatattagacttcccccacgtgtccattttggagaacggattgaatcttttacccttatccaatttgccctcctcaaatcttttattatttgtataaaatctaaacgtgtaaagaaacatcggatgctttcgaggaaacccacggccagattatttagtgaagaatcacaataacaaaagcaaaatatgtggtatgaatttttttgcttttgtaattggtgtaatttaatatgggaaatttcactttttgcccttaataatataccccatatcaaaatttatactctcccttaatttgtacaaatttagtccattgattacatgaactttccattttacctttttttttttaaaaaaaaaaattaaaaattggtaaaaactgaaattggtctttctctctctcttccctctctctcgtgcaccac

SEQ ID NO: 385311 - DNA, 1700 bp, Cannabis indica
tacagttgtggctttccaaacccaccctaaattttctccctaaaaaatgacatgtttagaataagtaaacttctttaaaattaattagataaatattttatatttatataaatttaataaaaagcttattataagaatattctcaaagaatattcttgctagaaataacaagtagaattagtacaaaacctgccttccatgacaaaatttgacatttaacataaacaaagctatattaggattaaaattaccaattttaacattgatgttaccatgtttaaagaagaaaataaataaaaaataaaaggttacaaaagtaaaagaaaccactaaaccttagctacagccctatataaaggttccatatcaatgaagaaccaacacaactacaataaaaggaataatagagaagtgagaatctaatctatatatctagtcagtgatcagagcaccgtaagttatagatatgggcaagtctcttcgtctatgcaacttactcttaatcgccatccttattcttattgcttcaagtaagaatatatatataatatctctctttatatttttttatttcttctaatcatcttgtgaaaaatcgaaaaccctaacgggtttcaaagtctcatagattataatgcattaatgatgatatataatattatgattttgtgggtgaaggtaataaggtggtgatgggagaactatgcaacgttgtcctgagtgattacacatgcaagcatgcagggtttgacaaaagatgcaaacaagaatgtactgagaatttccctcaaagcaagtcaatctgtgaagcactaaaaggtgcccctactggagtttttgcttgcagatgtagctatcaatgttaaattaaactatatatggatacatattcttccatcattatattgatctaataataaaattgcctagacataatatattgcagatgattctgagcatatatataaatgtgtcgtaaattatgctttatattaaatatctcagttacatctatatgtaacggtaatcttcttactgctgtcacattcttgtattcaattaaaacacatcaatttaagcaactaactaaaaaagctgatacaaattgttaagcatatgattaaattaataaaacttttctctaattaaatcaaccaaaatggtcaatttgtctttcaataattagcaaacctacaacaactcccatgttggtttcatccaaatctagtatcacttgtagtcaatcaaattccaatctcgtacaattaccacaattaattcataaatttaacacaacaacaagaattaaaaaataaaaatccttactaacttcaatcatctgaaaagtgtgtgtattattgtgatgaaagggatagtaccacaaaatactcctaatctttgaattaacagagaaatttatattttcaattggaaaaaattattaacaaggaattatatataaaaagatcgttataattgttacattcgaaaccttattaattaaggtattttttggatagattttaccaatgaaaaaaaatatgggaaaaataataggaacattgtaatgtcaaatattttgctcaaatttgatgagagactattttttaatatgttaatattttcttttccgatctataattgttcaaaattttatcaaattacaatacacacaaatttgattgggattatttcacaaa

SEQ ID NO: 385312 - DNA, 941 bp, Cannabis indica
aaagtacaaaatatataaattaaaaaaatttgatcatcactacgctctattagatcctgatcattaggtcctagacttgattctgattccaacagtctatcaagctcatgatctacctctttgagtcaaaggcagctagtccctcattcgaatgaattgtgagagaggaaaatgaatttaagaaataaaaaatgtcgtcataaattgtttcgcatgatattgaatgtctttatcgacgacatttaatttttgttgtcatcgttaataatgtcattgatccaaaagtattgatttttttgtaatgtacgttatgtacattcacctgattataaaaggggtagtttatgataaaatttaaacaaccttgtgttataataagggttatgacatcaaattatagatgtcacaaatatatagtatgacgtcaaatatatttggtgttatatgcatactaaatattacaaaaagaacaaaactaaaactacttacaaaataaatttcaaacccagaataagaatatacaacaaatcaactactcatataaaacatcccctacgactgcaaggacgacatcgctcgaccttgcctaaaaactcatcaacgccccactgttatgctttcgagtatttaacaaagacagtaaaaattaagacagtaatttgctttttcttattgaagaattttttttccatacacctgaaagaagaaaaatgaaattagggaacaaaatattgtcatattctttcgtgtgtatgaaatagtctttagcgatgtcttttttgttgtcatcgttaattaggtcataattaattactacatgagtatagtattatgcatcactcaatgatcttttatgataaattttcacataaaatttaaacaatctcattcgttataataaaagttataacattaaattatttatattacaaatataatat

SEQ ID NO: 385313 - DNA, 794 bp, Cannabis indica
ggatttgacttttttggaataaaacatcaactcctattttggataaaatcatattagatattcattggtttcatatatatctttgttaaatgaaaatttaaattcttgaatgtcttttcaagaagaatgaggttgtttattatctaaaaatttaagaagaaaaaactttcaatataggcaaaaatattggtaccctcatatttttaaaaaaaatagtaaaaatttggtttagataattaacaaataattttttacctattaaaaaaataatataccaaaaactttttacttttatacatggtttaaaaaatttaaatatattaatagtcaaaaaataaataaattgatttaaataagaaaaaaacattaattaaccacaacataattgactaatcacaacataatttatatttattactaattaactttttttatttattttgtaagattctataagggaaatttgaatttatatccatgttttatacctaaattaattttttaaactaatacttatatctattgaaaaagtaggatcactttttcctataccctaaaatacccctctcattattttcaaccctctctttcttcctcttttctctgtcaaagaaagcctcccaaccgtatgcacaccgaaaacccaacccgtgaggctagatcgcaccacccaaaactcgacaccacccacggtgaaccaccgcacccaccccgacccagccccactctctcggaccgcccaaaaatcgcaccccgaaagccttcctctctctgaaatcgcagaaaaaaaaaaa

SEQ ID NO: 385314 - DNA, 1432 bp, Cannabis indica
aaaaaaagaaagaaaaagagagccagagaaaaatacagtagtaatatcccctaagcgtgcatgagcaaaatgtttcatcttacattatgcagatatatatatatcgagtcatccaaataatttgaaacaaaagaaagaaagaaaaataataatactaataataaaaagtaaagaagtagataaaaagttaattaagcagggcctccgggctggtgtccttgtcgatttttatgttcttctctatctgcagctttggctgaaatataatatgcaatgatgaagatcccatgaatgaaacatagaatcccgcctatggataggaaccgatgatgtgcaattccacacgattttcttgaccttgagtttgctaatgtccctaccatcagcaacgaaaacccagcagctaatacaatcctgttttcattatataaatggtaaatacatgtattattcagaatacaaagtttacacaaaaaaactgagagaacaaaagaaaacagacatacgtaccaagaaagaatgagagagccaacagccaattgtttgtttgcgtttgctttctcgtactctgctctggaccagatgcaaacacaaccaccaatcaagttagcaataacatgagccatcgtcagaagtaccactgcagctatgcctagcttgtaagcttcatagctcggatctctacactcaaaaacccacaacctcaaatgtttcacctgcaattgatcaaataataaacaacaaattagtagggaatccattacttgacaaagtacgtacgtagttgtgttcaaatagttctaagatgagagtaccttgttttgagcaacttcagcctcaatcccaagtatcccagcaacgacatccatgaccatgaccactaggcagataagagggccaaaatttcttgccatttttacaatctatagagagctttggtagcgtacagtgtggaacaccaaattaaataaatatataggcatctctactgtaggccttgattgaaaaagttatatgggttatatggtataggggaataggaataaagggaagggaggccaggtattcaaagaactaaagaagaataacatttacatgggaagtgatcttaatattatagcaaaaagtttatttacgacaatagtttatcttcgtttcttcctatgcgcgtctcttttttagattcattcataaattcttttcaaggggtacaaggaaagtagaatatattaggggtgtacgtcggtcggtttagtcggtttatagcatatttttatcaacccaatataaatatcgggttgcaaatatttaaccataacccgcccaatcaaaaattagagaaagttcaacccgcccaatgatttcgtcggtttggtcgggttaacccgtccaaaccgttcttcactttttttttataattattattgttagt

SEQ ID NO: 385315 - DNA, 1476 bp, Cannabis indica
aatgtgagacttttaatttatatgtgggtttaattttcaaactaaataaaaatatatattagaaaatagaaaaaatgaagaaaaaaaaattataaaaggacacgtaaacacttcttctactttctttttcttttatatatattgatttgtttgctctcaattatattcataaaaaataaagattctccattaatatatatagtacactatcaattaaaattacaatgatttatttaattaaaacaagttagtgaaatttgagtaacgtgcatgtttatttgcatttatgttgttgtagataaagttcatgaatactttttttattatatatttttaattgttttttggcttgatattttcttccacctcgtcccagattcccagttttaaatttagacagaacaaacatcgaggtaattaagtgagcctgtttggaacaatttatggttttattttattattgccatataccatgttatgaaaaatggattacagttatttttttcctttttgtttttaaagaaacaataataaaacaaagctttttagctgtgtgttggagatgtggaaattaattagggcatttaagtttcacccagaatgtttaattaattaatcatgtgagaattgacaaaccaaaatctagttcttatctcgcaccgacgtaaacggaacggagatctagcggaacaattaatattcatatgcatcaaactttgtgaaaaacaaacggcgcaacaacggtgtcccgttgtttcttgctaatgttccgtttgtagtacatatacatatttttactatattatcacttaatttttaattatttgtattaaatcgatacttaattaattggattagatagaagattaagttgcaattatttcagtttatgtatcttttacatttagctgcattttggattttactatcttagagcatcatcggtaaaattttagaaaatatttggtatggtgaacatattatagtaaaacattaagatactatatcattagagagaaaatgatgtcatcctagaaatttacatagatgctatattatagcattgatgttatttattattttttaataaaaaattaaagttaaaaagttattatagttaaaaattaagatatatatattaaataataatgtgtaagatcataattataatattttaaagagtgctatacattgaagtatttttagaagtaagtgtaccaaaaataatgcggaagagagataaaataagatattatatttttgggttatttgcggaaaaacctcctaaagtgggcaggtttttgcaactaacctcctaatctaaaattttggtggtaaaactacctaaacgactagtccgttagcagttagccctttccattcatttttggctgttaactgccatggtggaatgtccacgtgtaacacagtgtacacatggcacaattttattagtccacgtaataaatatttaaa

SEQ ID NO: 385316 - DNA, 1341 bp, Cannabis indica
atgtatctgtcatatagaggaaaagaaagacataactgtatttcaccaattcaaactctatcactgtagttaactgtattcatggtaggaaaatcctgattatcatttaatatattagtgaagaaccttaacttttccttaacaaaatgaagttttttttaaactctctttgtcagttgttttatagagagatatacattcttatgcttcattagatctaaactcaatttgctcaggtttgtgcaaaactaattaatccaggttttgggctcatttgttgatgtcgtatgtcttctcatattggacatgctatgtcttatattatgaatacaagacgatagcttcattgaggcttcgatatttagcatctgaaaatcgacgtccagatcaatttactgtaagttatgttctttctttcttttttttttaaattgatggcatcttcttgttgttgttctaccaacactttctttcccctctgtgttcagtccttttactatattttgaagagagaggaacactctttcttcttctattttgctaggctattgtacataaattataggagaagtttgacagcgaatgacaaatcaaccactaatcctcctgtagtacaaaataaattaatccctcaaaattggagatttaaataaaagactaattacatcaaatcagcaaagggattttaagtcagagattcttatctctttattttaagaataaacccaaaactagaaataaaataaacatattaaaatcttgtgtggtggagatgtgatttttaagttaaagtacaccaaagaaactaacctctacatttacttaactttaactattttgttactatcttttatttttccaatttcacgttactagcttcactcttttctattctaatgtctgcccaactaagaaaaataacaaaaaggtgtgcccggtctgtcatgcttctcctgaaactgtttctcatatccttctgtcgtgtagctttgctacttcttgttggaatcacattggtttgccagccggagtctacttagatcattcctttgccagttggttggatagtctttttactattcttgatgaagaccgtgtgtgttctctctctatggtctgttggtccttatggaaagcaaggaattccattgtttggaaggacaaggtcctcactattgcaaatgtggtaacatcagctcgtattgctcttgatcactggcgaaaagctcaagataacaactctctgtctcatatttactctggtaattgtgatgacggaactgagctttggactaaacctgatataaatacaatcaagatcaacgttgatgctgcactttt

SEQ ID NO: 385317 - DNA, 1602 bp, Cannabis indica
atcttatatgtaatcactacataaaagctaaagcaaaattaatgtgtcaataatgatgatcttgatatagctgacctgacctttgtgcacatatgtaactataaaacaaggttgactaaatttacttaatatttaattttaaaaatgttttgtcttaaaggattgaaactgcctcttgggtattagacacgtaagtacgttaccattacaaaaagaattattattataaaacattaacaaataagagtaattatactcagttacctttgtattagtggctgctttaaacgccgccgataaaattgttaatttgtttttagaccttatctggattagccaatttttgtatttataattagtggtctgtgccggcttaagctacattccacttatatttgtcttctaatgcagtcccataaattaataatagttttcttttttttttttaaaaaaaaaaagaaaattaattatagtttaaaacgtttgattaactattcaattaattttaataaattaagagttattaacttttgcttaaaacaaacttagttgcttctctctcttcatgtaatatatatatacacactacgttttttagatcaacgtgaatggtatgggatggccgaaagcctataataaagaatataaatcaaaaaatatatatttaaaataaaattgcttttgatccgaataatgtccacagtcgcatatagtggcatgaatcactattaaagagaggagacgtctatttttttaggggttggtatagcttgacttgatatatatatatattatatatatatacactgataaatatataattaatcatacatatatagtacatagcttttctatttttatatattattcatattttttgaaagacaaattgatatatattatacttattattaattttagaagaataatatatatgagttaagatggaattgcgccttcattcatttttcgtcggttttaacaattccgaatggcactagtactacgtacccaaagcaaattctctcaattaattatttccatcttatcataattttctaaagaaacatatgagaataagttttaaaatttaaaatctaaattctcaatctgtagatattgatcaagtgtgcctaatgataaaataataagaataattttgcaattatttatttttatttttaaaaattaattaaagttattactttatatattgtttttttttttttaaattttttttttaaatttacggtttggatttctaaagtggttgcacaatagaatttttatatgatttttttgcaatttaggttgtaatgttaattgtaataggtatttctatatagaattctgtaaaaatacaaattttttttttttttttagaagtttaaaaataaaaaaatccctatcttacctctttttctgatattttgccctagcaaaacaaattgtaattattttttctcaatatgtaataaacaacattaacccttaacataataaacataataaaaaatggtgaaacaaaccactattcgttagataacttattattatttatgaaaaaatgatagataaatatatcttttttttttttttatt

SEQ ID NO: 385318 - DNA, 1875 bp, Cannabis indica
caaatttcatgatctatacatcttttttaatccccaaagattgaagcttttctccatttgattttacgcaagttttcttcctttttcaatctctgaattcatatttgtttctgggtatttatgataattttagattgaagcttggttttatttattatgggtttttgttcaaatctctattctccccacataaaataacatcttctctctcttctactacttactacttcacatgaaataactatgtgtgtttttgttcttgtgtttaattacaggctcttttctttttcatggatgaagattcaagtactcaagatgagacaaaagtagagggagaattttacaaaagggttattgttgataatatatacatacatatatatacttataataataagaattactagcttcaggataaggtcatcaacagatacaacaacaacaacaacaacaacaacactgtgtttatctaaacaagaagaagaagaagaagaagaggttgaagaagaagaagaagtagcatcatcatcaccatcataatcattatcataataataatcaccaccaagtgtttgtgtatttgcttgtgcttgtaactgttggtaaaacaacagcagcaacagcacaagtaaagagagaagcttttcatcagatgttatccgttgaaaagcatccacctacagatccctcttcctcatctgatcataatcataatcttaatcataatcatcatgagattgatgatactttgcctcaactagatctgtctaacccaactactactcttcttcccaaattttccataaggtatatttcttcttgctagcttatcttatatgctgctttgttgtatagcttttgcagatccatatatccaatcttaaattttgcctgtgatttcatgtcatttctccatatgatattatccctctcctcttacagtctgtacttaattctgtcattaaccccatcatccctatctgtgactgaaaaagataagaaatatatttctgagctcataataatatcatgaccatatcgaatctctttgtttgattgggtctatatcttggctgtttctatactgttcatatgtttatttttttaccccttttcttctcttctaaatctaaaatcacatatagggtccataatagaaaaatcccaacatgaaataaaggcctttctttcctctctattccatgttgtttgtctcatgaatttatagtacatattccccacttggttaattattatatgatgatgttataactcttaattagtcaattaattagtgtttgtggttttttttttctttgcagagattatgttttcacttctagaaacaaggacatcaagaccaactggcctttctctcagaaaaatttgcagctttgtctgaaacatggtgtgaaggatgtgttaccaccatttcaaactattgattcagtaaagaatcaaactttgaagagatcatgtacggttgaagaagaagaagaagaagaagaagaaaacatagcaagtaatactaatattattactaatagtaatactaatactactaatattaatagtaatatctttgatggggagccttctgaatcacctgttgatgatgataatgatgaaaataatcatgatgatcatgatcacccggaggtattattagactcttttaacaacactcaagctcaacagctgaaccagaagcagaagcagaagcagctaataacttcatgtggttctggagagaatgatactacaacaagcagtactgtttgtcaatctgagttcatagatcataatcaagatcactcaactgagcctgctcctcctcctcctcttcctcctcttcctcctttgttcacaagaatc

SEQ ID NO: 385319 - DNA, 1375 bp, Cannabis indica
tcttgggttcggttggggtggcgagtttcctccgtggggtggcgagctccctccgtgcggtggtggattcatcgttcgagtgggtggtgcgatttggtggtgcgatttggtttgggggagcttcggtggtgcgagtgggttgagagaacaggggacgaagagagagagagtgacttttgaaatgaggggggtaaaattgggttttatgaaaatatatcccactttacaaatattgtatagtatgagattaggggtcaaattttaagtattattaagtatatatattcaaatttccttaattaaatctaatttaaaaaaataattatatatgcaatgcccgtaacattaacctaatatatataattaaatttattagtagaacagtatcattataaaatttaggctaaatataatattaatttttttttaactaaatgtagtttaaattataaagcatcaattataggtagtctaaaatgttattttaggatttcatttgaaaatatcaatataaacacttctataaaaaagaaatagaggaaaaattcccttataacttacacaatgtttataaggatttttaggtggaagaagaaggatggaatgaaagagtttgaaggagagaataaatcatgtgtttggtaagatgaaagaaggaaaaagagggaagatggaaggatacatggcagttttgaataagtaaacaaatttgttaaaattgggactaacgaacttacaaaaaatgtgactttgaagactattgccgctatttttcgagattgaaagtaattgcaacaaagtaaactttttaaaaagatttacagtaaatattctaaataaaatctacacaaaagatgtcaaattagtaaaagtgaattagtctaattcatgatgaatgaagaatacatattgcaaagttaattaagtatttcaatgtggtttattaaagacaaatagacaatggattatattatcacattactttcaatagtatagactaggggtgttcatcaaactgctcaaatcgcctacaccgcaccacaccgcatacggttttgaaattaaattttttgcggtgcggtcgcagtttgaattttttctaaaccgcgcggtgcggtgcagtttgcagttttgaattgttaatatgcggttcaaaccgcaccgcactgcacattataaaaataccaatttttataatttttaggtctgaatgtttaactcaaatcccactaatttgacaaaatgaaacacaacaaactgttgttcttttatgtataaatatgatatgttagaaaaattaatataaaccccaagatcaatttgtatataacatagaacacaataataagatataataattaggtatgtgtacctg

SEQ ID NO: 385320 - DNA, 869 bp, Cannabis indica
gcaaattttgacaggggatccaattcccacctaacgacataaatgatcgatcgccctacaattttcaaaactaatgcttagttagctagtagctagagatgatattcacttgctctggtcattaaaagaagaaaatgacacatatatgtagccctgcatttatattgatcgatcatatatgaccacatgaaacaagctacctaaatcctaatcttatacggaagtgttgcatttgcattattgggcaaacatgcatggtgtgttttgccacaaaaaatcaaatcactctataattaatacttcaaaaaaattgaggataaaaatgagagtgaaatggctaatttactctggttgtattgtggattgtggactgatattaaatatattttaactaacaaaaaatattaatcaaatcattcttttttcttcttgatatttcagatcagagtagcagtagtagtactggtgtgaactctgagttcaacatgaagagtttggtggtccaagtgatcaccgggcgatggctcatggcgtttgcctccatcctcttaatggcaaccgccggggccagctacatgttcgccctctattcaaacgacatcaaaaccgtccttggttacgaccaaacgacactcaacctcgttagcttctccaaggacattggagccaacataggaatcctctccggcttaatcaacgaagtcactcctccatgggttgtcctctccataggcgccgtccttaacttctttggacacttcatgatatggctcgccctgtcccgaaagattccagagcccaaagtatggcacatgtgcctctacatcgctataggagctgtaggaaatagctgtcattcccgagatgcc

SEQ ID NO: 385321 - DNA, 1118 bp, Cannabis indica
aactaaaaattaataaataaatattaatttaaataataaataatattatatgaatgtaagaacataagaaaaaaaaaaaaaaatatagcatttactataaagtgtttttagttaaaattgttttaactttttaaaactattcttacctatttatctagttactattcctatttcaatctaacctcataaatatctttatttgtattattgtaccttttcttcacacgtgcaaagattggatcaaaattcagtctcttcttcacatgtttttgtcattgaactgtccttatagtcttaaaacgacaacacaatgtttctacgacacgtgtggagagagaatctatacataaaattccaaattcctactattttttttttttataaatatataattatgaagtgattttttatattttgtaatttatgattaaatttaagttaataatacattttttctactcaacttataaagtagtaaaatatcaaaagttcaaatttcttaaaaacaagaacattaatctaaattattttattttcctactattaattagctttttttaataatttatgaggtagataacacaattcaaaataatcaattactatacatgttaaatgtttaaattttatttttcacatctaaattatttaattttttaaaaaacttacactattataattaatgagagaaaaaaagttaccattcatttaaatatcaaaatatatttgtccctatctatagttaaggacaaatatttcatgagaataatgtgtccatttgaatttgctttattttatctattacggtattataataatttagcaacttttgttttcttttgtttaaaataattaaagatatattaaagcaataatagaagcatttagttagtaagattgcttacacttaataaaataagaggagtgttgttggtaattttttattataatctcttagttaattttgcttaaaaatatatatctgtgacagtcagtagtctcgtgatccgtaaggggaaatatcgggtaagctgtgtaatcccacatcgcctggggaaggtcaagtgggatgattctaagactgtgtaggtatgggactacacagttgaagagagctt

SEQ ID NO: 385322 - DNA, 1128 bp, Cannabis indica
gatgttgtgtatgtgtgtagttagtgtcgtgttcttgaatttcaattctttacttaaactcttattggattcatttacttaatttgttttattattattaagaagaaaacgtagaagcttttcaattttcatgaaaaataattgaaaataggagaagaaaaactttgaaaagctgaattattgtaacttaagagaaactctatctaattaactttatataaatgagtaaatttttaacttttcttaatctaattaaagattggacaagtgtatatataagatatattattacataggttaattcaattccttttgaccatttccacagtccaagatagcctgaatgggacaccacaccagtaccactgccttgccttcccttttttaaatggtatattttcagtttttaatttaataaattaactattcaaaatcaaatagaccatatatattggcacgtattggttggttacccaaaatattgagttttcaaaaacaaaatctacagtacttcttcatacatccaataagataatagtaatgtggagaaggctgttaatactgtagtttgttttaaaaaaagaataaaaagaaaccatctttaatggttcagtggggttgtttatatctcacgtgtacctacaatatgaaaacggtttacctaaaatacgtacgtacttcatatctcttccatacatctttttttaattaatcactaaataaatacaatggtctctagtacttaatgttagcatgcatcagttggtgtgggggttagtttttaggtgtcaatatagaattatacacttaattagagtgttaatattgatccatgtgttatagattgacattaatattacagctagagatcaaccaaaaattaaaaaaacttatcgtgttttcattataatcttataaaatatactattggtgttttgcactaattaagcagaatttaaaagggaaatttgattttctatacttagaaaataaaaaaatttgatttctaaaccaataatttaaaccctaaaaaaactataccttttttttcaaaaccccaaaaatacccccaaactaaaactatctctctttctctctctatctagccggtcccaataatcccacacc

SEQ ID NO: 385323 - DNA, 1296 bp, Cannabis indica
gtggaagttgaattctacctcatctcactcaataaaggttcttctctcaaaccaccaaaaattaaagcaacttaattattattcttataatatagagattatttcagaaaaataaaaaaaaaattacaaaaatgcggtttcacgaaattttaaatatttttacgatctttttaattttatttacaaaaaatttatgttgtaatcttgttaatttgttgatgattttttgttatctgtgtgttattttcatgttacttttatatagttttcttgttgattttatgttattttcgtgttattttttggaaaaccataaaaaatataaaaaaaaaaaaaaacgtaaagtaaaacgtaaaaataagtaattattttactaaaaaaaaaaatagtgtattatttaattattcttataatatatttatgattcaaattctgttatgagaataaagatggatatatatttgtttgtttgggctaattgattgggttgggcctccacttcctttttcaactttttatttttaaaaatcccactttctcttctctcaatttagcttcctcatatataatatgtgccacaaatactaatatccactttgccaaaatagttactaatgatacatcaaaataatattttttagtagaagtagaaacacaagagatacaatctcaagaatcttacttatgggtttatacaaatattatccaagatgacattttggataagaaaaatgtatgacaaattactcacagaaataggcatttagattcatcaatctaatttgcgagcagcatcaaaatgatcaataaaagaacagctcggcgacataattgtttttagataagatcaaaggcgatgtttgagcagttattaatctttttccacatgttgttaataaattgaatgtgggaaaattgtcatatttttgttggaatatattttatgatttactaacaagtatgtttattaacattctaaatatgaatttctaaaataatagtgtggtgtaattcataggaaaccaaaatcttgtttcttctttcagttgtgactgctagttaaagttggttagagttagttagctgtgacagtctagttagtttgaactgtcagtcggttagaagctcggtttgatgagctgttatctaatctatataaactctttcttgtaatcatttgtaacataagaaaaggaagaatcagagtgagaaagtgagaaagagagagaattgtatcgagagggagagagtgaatgactgctgctcttgaaggttatgaaccatggtattcatggt

SEQ ID NO: 385324 - DNA, 1238 bp, Cannabis indica
tgcaaaacacagaatctaaaatatctatccttttaaattcagtattttataaaaattattgatatccttcgctttgtcaaataataaattggagctcatatttttttaaattgtactaaataaaactctaaattaattttttttttattttataaaataaaatttaataataaactgataacttttataaaatataaaactaaaatattattaaccctaattaatatactagttttttttttctcatcatatttattgagatcctgttgggaccttccaaaaaagctaaaacattttttatgcttggcttttcagccaatgaaagattctgatgttgacacctgtccatagaattgccacgtggaaaattcactaatcacttgttatataaaaatgacataaaatataattcctttactttattcttccacctatgttttttttttctttcaatattggaaagtttttattatagaaagtttctatacaaataactttaatatgggacttgaatgaatattataatatacaaagaataaacattattcataataaaaataatttatttccaaagcaatatcatcttaaattcttaattacccttaattttttgtataaagataaaatcatacttggtgaaatcatagaataattgtaaattccataatctcattaaacatgtaaatatgtgtatttataaattaattaatgatcaagtaaataatataaacaagattatgtggagagaaaaaacaataaaattttgatattgcaagttaattgttttaatttaattattttgaattaatttaaagaaaagtttatatctatctatgttgatgactttacactagctaccaataacaaatgtatgatttaaacacattcaaattacatatactatttacaaatgataatgtgtaattaatttaaaacacataattaaaagtaatgtaattctcccttaaattaaagtataactaaacattcattcaaaaaaaaagtataactaaacattataccaaatatatgataattagagattttagttttcatattagtttagagattttagttttcatatttagttacatgcaagaaggttcttagacccaatattttttttttataattttgaaaaaaaaaaattatattacattttttaggattttgtaaaaaacaaagaaaattaacaagtgagtgggatattcactaacaagtattattattataaaaaa

SEQ ID NO: 385325 - DNA, 854 bp, Cannabis indica
aaaaaaaaaaaaactctttttttacgttagtaatttttagtatttatgtagtataatttaaaaataatactacatactgatatattactcaaagatggaacgaaatcggtcttgtagtaggactacgatcaataatccaaaagctttcgaaactatttcgaaagataatagtaataataatttaatattatatttttaatttgaagaggttaaacttttataattagatacttacattttgcaaaataactaaagcgacttgaaatttgttgtgaaaatagctattcggaaaagggtgttttcattatcacaattatttgggaatttgaaaaagatgacaaacctttagaatatgttccaaagaagattctttatagtgacatataaatcaaacaattttgaatttggattttttggagttacttagaattaggaaaaagtaaagcttttttttttttctttaaaaaaattctctttctcttttagaggtgtgtttggcctacttttatatatgaatatattaaaatatatattatatacacctatatatggaggctacatattttttattatgtaactgagattaattacatattattgtataaatagtatatgtaatttgagtgtcaatcatattattaatcactcactcataataactcattactactaatatacttttatcttttaaaaaatattatgcatgatgaagtagattctcgatctaagttgcacgataaaattggtcgagagcagcaattttataagtttctcgaccaattttattgtgccacatggatcaaggtgtatagcattacgttgtcttttttcctttcattcactataaacttttt

SEQ ID NO: 385326 - DNA, 1899 bp, Cannabis indica
agagagagagagagaagggggtgtagtgtagctagtgagatggatgaagtgaagaagaggggttccgatggggtggattggaagacaggtgggcggggagtggtggctttgggatacccatcagaccagtgagaaggtgagagagaggggcttcaaagttggcgccacctttggtttaaatgtggcactgacttggcctattctcttgcacacaacaccatgcaatttctcccaccccatgccttgattcctctccaataatcttcattatacatttaatcttcttagaattctcaaatcaaaattcaaacactgactacacactatattctgtaaaagttcaatattctttgtgaatttcttttatggagggaaaatgacgattattatttgagtttttatatttttaagagaaaaaaaaactacttagcattattaatttattaaagtctccttttttaatcggttctctttcaggaaaaaaaaaaccaataaaatttactaaagaagaagcacaacagcacaagaagaaactcactcactcactcacaatgcaaaagaatatattagatagacagcacatggttatttattgtgctataaatatatattttttacgttaaataaataattaaattataacgtatatacgccttacatatatagtttttggttttcttttttcgaaacgcctttcatagttttattgatatatatatatatttctatgtgggaagggctaaaatttgtctttgtttatcatatatagaaaaatgggagcgaggcagtaactatatcattagttggtgtgtcataattacatattgtcaacattaaacagagaactgtatgcagtcggagtactttgtgttttagagaacaacaagaaatagatagaacagcctaattctcatgcatggcggcttcattttagtgatgctccatttttcatgtttcgtcgtctttttacaaaatagttaaagatgattgattaatagtggcagtggaaaatataatcgtctaagcaaaattgttctttataacatgataatcttttccacttacctttactaacggggcgtttagaggactaagagagaattgaaattgggtctatgtaattatacaattttggatgtttgttgaccgtgtatttagactctaactaggtaattaagtaattgagatggttcaattacactttttatttatcatattctcagaagaactgaatgtagttatgctatataattgctaaaaactttagattttaaatattaactactaaatattaatatttttttatgtgtaattaataaatattttgtcaaactagacattagtaaatcataagtaattacaatatcgtgattcatttgattttgtctttggtagattgggatgagaacattgttaggtggaattttaataaggaagttgttgtaattatttttagtatgtattgacgcaatttttcgtcaactggtctaagaagatagtaaaaaatagaagactacgctgtaactttagtcaaataaattaaattgcaaaatagtaaaaaaggcacgaggatttatcactataagaaaaaacatttacaatcatgaaattctgtattttaaaattacctaattattatttaattaatttcttaattaaatgcgacagaaaataaaccggtactgaaatagtttttctgtagttgtagaaggcaactctgtaactttacaattaaccagaaaaacaaacagtggagaatagtaaaaatatacaagatttttgtacgtggtttcaacaatccttccagattgttactagcccatgaaggcatgtccagagataagattcattagatagatctcaaaaatacaaagtaattgacttatgcataaatagact

SEQ ID NO: 385327 - DNA, 1619 bp, Cannabis indica
tacctagaaccagctagggttctaaattttgtgtttcaactattgcaaattccagcaattctaagtgaatctaagccagggaaaaagactcaggaattaccaaaaattgtgagaattttagatgtaaaaatcattaggaagacgaaaggttttccacggacggagctaaactgttttgaccgaaaattgtgagtttttccttttgatctaattatttagtcaatatttttgatgggttcttttctcttcaagttcatagtgcatcctttttctggtcctttttttgtccttatctgttctatgtgagttcttgacttttttcacagtacattccttagatgcatgactctgtagtcattccttaaatatttgtggctgacacgtgcccccgtgagctattttaattctcttaaagttagtttaaagttatgattaacttttctcaaatttaatttttcttatctgtcttgattttgctctttacggaactgaggtatattttatcctatcttagtactttttctattttatctcgtcgcgtattgacctaggtctatccttagcctatatcgtcatggtgtggactttagcctatctcagtgttgtgccaacattggcccttcttggtgcagtgcctactttggcctctcttggcacattgttctccttggtttatctcgcacggtactattcttggcctatctgggtacgtgtcgtcattgttctatctcgacacggtgccgtcattgttctaactcaacatgatttcaagtgttatcggtcctttatatctaaattgagactttatgttagctttgatcgagcttggacattctctgtaattttgtctttactatctaatttcttatgggcttttcagtcgtcctttttacttttcgggcttaagtcttgtcgatctagtgggcttcttttcaccgtgccttgaggttttaaaccttatttgtttatttaattcattatttttcccttgaaagaaagaggaagacgagtaggagaatgcgacgaagagaaggattttaaaaccctatagtacctgttatttagtaataactactgtcataggttacatgcatcagccactgcgtgtacctatgacaatgataattatcaaataaccgctggtgaaggatcaatacaatgtttcacttttcccagtctaccaaaaagaaaatatgcatgtatagatattgggtgtactctatagctatggatgttataatgtatccctaattaaatgtcaaatttcaaagaccaaaaagtcaaaactaataaaaaccaatcctccaaattcttattaaattttttttaatcaattgaaataaaggaagctataacgactcattttgtagtactgtgagagagatggaaaagaaagagggagatgagttattgtgagttttgaaatattggaatgagtaatttgggaatcaaattaaaatacactatttacctagagtaagtatttttggtttatttatgccccctgaactgtaacatgtactaaatcatgtcccctaaatttttaaggtcattaaaaatgctctctgaactattgagattgttggatttaaggacttttgtctaatttcattcagttt

SEQ ID NO: 385328 - DNA, 1422 bp, Cannabis indica
ttttttttattttttccaattaacttaacacaattttttatttttatttttttattataatgtttaaaatataatttatttttgtgtgatagttatattttttaagaatatgaaactgaatttttttaaaaaaaaactaatataattaaacatatatattttttatataaaataaaaattattaaaataaaatatatttataaatttttgtggtgcatataaaactttgatttagaattctagtccattttcaaataaagtgtcttgcatgaattagctcataattctcctcttggatagaacttttgcaaagtaattgaattgatcatcatcaccaatattagatgaaacaaatgcatacatatgattaaataaattatatatggtataatggtagaataaagagaataagtcatgccacaaacttctcattcctcgtacgtatactcaaattatacatatatgatcatacatatattagatataaaaggccctatataagggtaccgaacatatactagttttggacacccaattcacttattatatatgaaagaggtttattggtactcaaattaccatacatattttagtaaataagcacaattattacttaattaattaaagatcatattttggcaaaatcaacggtctgttttccatcatgagctttcctgaagaagtgcttaacataatcagagtagagaacttgcttatacaaagccttttcaccgttagcaagtacttgaggaaatggtgctataagatcagatggccttggattgacaaatataggcactgaaatcctatcactttttccattagccacaactctatgctccacacttttgtaccttccattgctcattatttgtaaagcatcaccaatgtttatcactagtgaccccttcattggtggcacatgaacccaattattattattattggtttcttcttcttcttcaacttttacataaagccctccaatctcgtcttggagaaggattgtgagagttgacacgtcagagtgtcgaccaaccccgaccgttaaatcggggtttggacaaattgggtagtaattgagattgattctctttgatcccattaaagcactctctttctccttgtctatttttgtcacatttagccttttcatcagcacttctaatagtttttttatcactgtttcagtcttcttcatgtactcaagcagttcatccctatatatatttgtataaatcaagtaattaaatatattaaaatgaatcaccacaaaataaaaacacagaatatatctggcatgtacttagatgagacattatacactaattaaatgaatatattagattagattaattatataatttgttgctaaatgcatggtatatatatatatatatatatatatagtacatatattag

SEQ ID NO: 385329 - DNA, 1510 bp, Cannabis indica
tttttttttttttttgcatactatattattcttgtaaaagttcaaaattgtgtcccccctcaagtttatttttgaaatcgccactgattatttgaacaatattttttttaagttgtagttcttgtcttaattaataatttttattctattcttttatatagttgtattttaaagtattgaaatattattctaatagaatgattttttcattatttttatcgaatgactattccaatacaaaattctttattagtgtatatttgtgtacacatatgaatactcaattttggttattttagtaacaactgtgactaatgaacagtgactgtgtatagtagttcatgacatgagtctttcttttttttatttttgaatgactgaatttgatgatagtctgttgagatcattcattttggtttgtatagtttcattcaatttaaaagaatgatgtaatgtaactatgaataaccttcaaaattggttcaaaatgaattaaatgaaggtgatcatttccaaagtcatacatacgtaccatcaaggttgctggcattatttaatgatgcataaaaatccattgaaaatatgagtagaaataattaaagataatacaatatagtatactatatggcagatcctatcaattttgccaaagtcaaaagaaaatatttaaagaatacataaatgtaaaaaattgtattatataagtgggaaaatgtcttattttcaatcatattaaattgaattatagttaaactaaatatgtgaagaaaaaactaattcttctaactctcatttgattcaagacaaaataataaacactaaaatcagctaattaaactaaacaagttaattaaagttatcatttaagaaatactaaaccacactgatggaagtggtgcctaactctatctaaatatgttatattattattattattattattattattattattttatgtattttaatttaattattattatatgtcaccaaagaccatttataatacaaaatgtataatttgtggagtattgttgttaggcatcaatactacattctagaggtatattacgattaagatatatctcttaaaagttatcatattaaattatatgagattagagacttaattatactaatagtaatataataacgagaaggggtattaagtgtcactgatttcctttagcattttttataatttatgctaaatttaacccaaaatatagacctaaagtttttttttttttttttgttaattatgctctaatacaaaaggagcaaaataactaaaaaaaatcaataatcaataagtaattaatgtttattaaaattgtacaatacatttaattcttttatgattaactttttttttactattataaattttagattaaaatgtgaattaaaaataaaaagttttttaattaataaatgtattaatgagaggtaaagtagtaattaaaaaatgtggtatttatcatttgtaatatccagattaaaatagtat

SEQ ID NO: 385330 - DNA, 1781 bp, Cannabis indica
caaatttggtcgtttgcaagaacaaaacagaaaataaaaataatttaaaataaaaaaaataaaagaaaataaagagtagaaaagatagcttatatgtgatgccacatagcctctctatacattcctttatatatatatattgattattacaataaattgaggtaaaaagttcttttttttaataatcaaaccgataaagaaatatactaaatcgtccttattaattagtgtactgcatataattatccaatatcattagagactatattcgaaagcgagagagagcaagattctcttgcattgcggtggtagctaaaaaccattctcgtgaggtggtttgggctaatactgtaaggttggatttctctaatgcttgttgtggcgaggcagctgcgtgttgtttagctcttgaaatggcaaagctcaagaggcacgagttcattatcgtggagagtgactcaagactcaagagtgatgattgttgctcttaatcaagtgtcttcaatttaggagattgagaactattcttctttttgttggaaattctctaaatgttttgatggatgcgtgtttacttgtataccaagatcttgtaattttgccactcacaatgtggccaaatgagtctttacccacagataatttggtaattaggaatctgttctactccataagatttattttgtaatgacggtgacatccaattttatttattaatgaacgattattttcaaaaaaaaaaaaaaaaaagaagtaagattatacaatgtatgagttagagagataccccatactgtcttttctgaatgtgttcccaaactggggtaagaattcaagtgggttaggccaagtgtgcttgttcaggagcctactacctggcccttcttgtcagtctgatcaccacgcaaacccatgttatctttcttactccctgtcatttaaataattttattatatatatatatatgtacaacatgacacttgcaacatttaattattataagaaaacaattaatatactaatacatcatatatattattattaattttttgtatttcatgaggaattggtagcgctaagtatagtggaccctgagtaccacagtactgttgaccattctcatgtgtttggactgttataaaaccaaacctccatactttgggttacaacatagtacgtgtgttctcgtaaactctgccgtcaaacatacatagcccgattccctaacctattcttctaagtttactaattaatgcctccctatacttaggccggaaagaaacaattaataatactactatatatacaatagggtaatttgcggcaaaacctcctaaagtggacaggtttttgcaactaaccccctaatctaaaattttggtggtaaaactacctaaaccactagtccgttagcagttagccctttccatccatatttggctgttaagtgccaggttggaatgtccacgtgtacacagtgtacacgtggcacaattttattagtccacgtaaataaatatataaaaaaataaaaaaattaattattttaaaaataaaaataaaaaaaatatttttctttaaaaatattaaaaaaaacaattttaattttacattttttttttttttttcttttctttcttttttttttctttttcttttcttttgcaaataccctcttcttcttcatctcagctctctctctcgcaggtaggcagcccaagaagaccaccatcatctgccatctctgatctctcttgatccccctctctctctctctctc

SEQ ID NO: 385331 - DNA, 898 bp, Cannabis indica
gagccttcttttcaacaactactaaccgtggcagagcaagatttcggttatgagcatccaatgggaggacttaccattccctgcagagaacaaatcttcattgatctcacttctcacttgaatttattgtaaatcatagaactaacataacttagtacagaaacagttttgtagatcatatacatttaacatgaaaaggaaattgtttgattacttttgaaagttacatttatatatacagaaatttcccattttagtctacatgttttcctttcattgaaaattaaattgggatagttagaaagaattatgtcttcatctcatactttgttatattttgcttaattacactgccattttctatcaaataatatctcttgtagctgttccatataccatcttcaaaacccattgacctttatctgataacaacttaaaataatttttcttttgttgatatgaacttagactaattagttactcactctagaaatacaaaggatccatccttaagaagactcaactttttagactgaataagtgagtaagctcatcaaattttgaatgttatttttcatttgatgatcatagatccagttcagatccatgataataagctccacaaataatgacacaaatttaaattaatgtttctttaaatagtttgtattttaattcttaagtcaaagaccaaataatatacaattttgagtaaagaggctaaacatataactttgttctaatgacagatacactcaattgctttgtactttaatgttaattaaactatgtatattgctgattaaacatattccatgtcaagaatttaatttgcactacaatattttggttttaaaaatgccaaaaaagaatgaagaccaagggtgtacaaggattc

SEQ ID NO: 385332 - DNA, 2637 bp, Cannabis indica
aaaaaaaaattaagtgttaaaattatgctcttgatgctaaactaataccgaatataagttttacctgttgaacgagagaaacaagagaaagaaaaaccagtagaacaaaaccagtgaattgtattgatattgattgtattgttatactaattgttaagatgagcttttatatacaaagctgagagaagagaagttagttacaaggggaagttagttacaacaagagtgagagtgagctgaagtgacagctcactttaatagaaactaactaaccaaagaaactaaataatttgttcatctaactgcccctcaaactaagtgtggaagctgacactacactgagtttgtcttgtagaataggaaagctggaacttgaaatggccttggttaagcacttagccagttgatcctgagaaggaacatgtaggacttgtaagtggccttgaggaacattatcttgcacataatgaaggtctatctcaatgtgtttggtgagagcattggatttccagccatcattattatactgagattttcataccataccttgggaattgatgatgatgatgatgatatccacaattcagaaagtaatgattgaagccatgttacctctattacaacagcagcaactgcaaaattcagcttcaatagaggatctagagatagtctgctgcttctttgatttccatgctcctatgtttgaaccaagtagaacacagtagccactagtgaatcttctattatcaggatcagaggcccattcagcatcacagaacgcttgtatagaaaaactggagcacttagtgatatgaatcccatgatcaagagagtcgccaagtacccgagtattctcttgattgcaatccaatgacatttcaagggaagattgcataaactatgagactttgttaactgaataagctatgtcaggactggtgattttagcatattgcaatgccccacaataaacttgtatagagagggatcaaggacaggatcacttccaaaatgagatagtttaagaccatttgtcataggagtagatcttgtcttagcaccctgcattttggttctacaaaagggatcttgaagagatatttttggtgacaaatgtatttcagaatcagtatgtgtaatccaaatctcgagaaagtagttaagttgtcccaagtcttctaaggcaaatgtggagtggagatctaaaatgaactttgtcacttgagcatcactgcttccatgtaagacaatatcatcaacataaatcaatatgtaggttgcatttacagaatgaactctgatgaagagtgaagtatatgtttttgaagattaaatctaaactgtatgagaactttagaaagtttagcaaatcaggcccttggagcttgctttaggccacaaagagcttttttgagtttgcatattttgtttggaaattgaggatcaacaaaactaggaggttgagtcatataaacttcctcttcaagatgtctatatttaaaaaatgcattgttgatgtctattttccttattttccatcctttagtgaaaccaagagtgagaaccactctaattgtttctggtttaacaattggactaaaggtttcattgaaatcaaatccatattgttgatgaaacccttcaggaacaaccctggccttgtattgaatagtgctgccatctacattttcttagattttgagaatccatttgcaaccaattgggatcttccaggaggtaagagaacaagttctaaagttttatttttcaccagtgctctgttttttgagttcatagcaacattccttttagatattcaagagctttcttcacagtagtgggaagaagagatgtcatcaagaattttgtcaatgcctaaatcggtcctctcgttcaaccatggccgattctagctctgataccatgttgaatgagagaaacaagagcaagaaaaaccaaaagaacaaaatcagtggattgtattgttacactgattgttaagatgagctttaatatacaaagctaagagaagagaagttagttacaagggaaagttagttataacaagagtgagagtgagctgaagtgataactcactgtaacagaaactaattaatttgttcatctaacattaccattgaagtttccctaacaagtttgtaaattgggtaataaaataccattacaatatttttacaattttttagcaatataaatttcattagaactattaataacatagtccagagtccagagaacagagtttgcacaccttgattacaaattaaaggtttgctcctttttgtgaatactgctcatcacataatgttgagtagcacttttggagatatattattattggtatgttgtaatcaagtctcctatattttaatttaaaaaataatatcgctaagtaactattgacctccatgtcaaatttgtgttgtttacattcttattataaatcaaggggaccctagtcctacacccaagttgacttcgacatcctcgagatggaagttcagactttaataacttgattccaactcactatctttcagtattctgtatcatgaagacatggaacaacctaatccaagccccaggagctgagattacatgaacctgcaacccaaa

SEQ ID NO: 385333 - DNA, 1530 bp, Cannabis indica
cataggtggttgttgggcttcccaggcatacttgtctctccccttgcgaatgtctccccctattctaggccctccgcaaatagtcctaacatctcttatcacttttggggcctcgtgggggtgttccgcctttgctccttcgcccctttccttggggcatctttcctctcttcggtagcctcctaagtaccccctttggatccggtcctcaatttccattctgaggtgggtacactcttccgtggtgtgcccaatatctttgcaaaatttgcaaaacttattgggatctctcttggacctatcttttctcattgggggcagcttcttgaacggcactcggtgtttgtttgccataaagatgcgttcctttgagcatgtgagcccaatgtaatacgtgaactccctatggcggggctcttcttccctctgcactctcttatttcgatcatttttgcctccatcgaactccatcttcttttgtgactcttcatgcgcgcgagggttggctaacccaccaggctcgctcttcctcttggtgagatttttgtgcacatccttgacctagatgtattttttagcccttttgtagaagtgttctaggtcctaaaattctctcttgagcatgttgttccacaacttactctttggacggacacatgtcgcgatggccatcttgtgctcatcttttgtcagccttcctaccttggcttcttcagcgttgaatggctggatgtagcttttgaggctttcaggctctccttgtttaatatttgccaagctcgttcaagggatagtataatcccgggatgcgtggtgttaggccaataattcatcagtgaattgcttctaagaggtgatggatccaggcaccaacctgttgaaccacgtatacgctgcccccttcagcatcactgcaaaatactggcaccttgcattgcttatgaccctcttcattttcattatctcattgaaggcatccaagtggtattttgggtctgtcaaaccttcacacgggagcatattaggctccttaaaatttacgggcaaggactacgcttgaatctctcttgagaaaggggactcctcgtcaaagtcgtcatcttcccaattacagtcttcggacccggctgaggctattcttcatcacaggtctttcatttctttgtctaactcctttatccacctagtcaacttctcccgtagatcagttgtggctggcttcaccttcttctcatctcgaagagagactacaattagcgagtgcttttcgactgtggccttttggcagagtttctcccttaagtctccctagacaaccttaaactttattttcttaggtcgtgaggagggctcaagatttttccgagttgaaaccttacacggtgaggactcaagggtgttgtttgtcgagtatcttgaagccccttcgtccctcggcttgtccgttctccttctctccgcctttcgtgcttctcgcccgactaagggtatctcggagcggcctttaaggagttcctccaatgccatttg

SEQ ID NO: 385334 - DNA, 1284 bp, Cannabis indica
gttgttgttgttgttgttgtgctatatcaaaattaacttgtgtaacatacgtggtgaagtatggaaagatagtctgctgaattggttatgttcattgagcacttgatttttgagcagacatgattttccctatggtataagctctgctaaaatagactttagacaaaaatattgataattatatctcttatcattctcaatccaaaaagcattcaaaagctccttaatcatcatagttgatgatattggcgttgaatgcccagattgctttgtgatttttgtagggtcttaagcttttcaaattcacaaagtacgcacgttggttgtgtcctcctctggaatgagatggattctgatgaaaattgcaacgttttgttgtgttatacagatctcatccataaacttataaaaaagggcaaacaacttttagccatcaaatttatttttgaatatgagctgactgacaaattcccaccagttcccctcttaaaagactacgtgaaagactccaagaaaattgctaagaaagtttgcaaagaaggaaaaaattctctcaaatcgctggtaattttacattcctttttaaaaaaaaacttgtggcattctggagttcaagaacaactattgcctgcaggtgtatatttattgtagtttctttgcagaatgaggctgcagccaaagaaatcagtgctttgaaatcggcaataaacgttattgaagagcggaagcttgagtctgagtatccacaagagtctcttcaaaagcgaattgagcaactggagaaacaaaaggcgagcagaaaacgtcctccagcagctcctgctgcaaaacctactcagccacaacatcagcttgcaaaagagaagcagaagcaacaaagtggaaacaagcgtcctcgaccagatggtcgattaagtcaacaatctcatctacagtcaacacatctgtcgtcagatggctctgcttcatatgtgagctcctcagctgcactttatggcatgccagcccttgttccatcacctgctgcttatgcgggttcattggctgggacacatgggtttgcaggggcacctctgggtcttactggcagtccaactggaactagttcccatttatatgcagctgagccatatgtgccatctggctattatgacagaacaacttcccatggtggatatgatctaccaccacaataccatccatcttactatcctcaatagcatttcactggggtttttttttgttttttgttttttgtagtctcttgaatggcaaaatagtttt

SEQ ID NO: 385335 - DNA, 3269 bp, Cannabis indica
gtgcttatataaagattgtatctctgtaatcttgattcataatgaatgattctatctttcctctcttttgttctctctgtttcattctctctgtttttgaactataacatggtatcagagctttagtcatccctatcatggagcattcttcagctggcaacaatggaggatcgttgacacctccagtttcgtctcaccaaatctctcttcccaaaactaatcttgtttctttttctcattcactttcagttcggttggatgaattcaactaccttccatggaagcatcaagtgcttgtagaaatcaaagggagtcgattgtagagatatctcgatccaaaccttgctcggcctcaatatctcaccatcgaagatcgatgacagaacagagtgaatccggagtttgaggactgggaacaacaagacaacatactcgtttcttggcttctctcatctatgtccgagaaggtactcaccagaatggttggatttgattccgctgcccaaatctggaccaatctgcgtgaatactacacctcgcttaatcgtgccaagatcggtcagttcaagacacttttttgcaacacgaaaatgcagtcctccctgagtgactatctactcaaaatcaagagtatcattgacactcttgcatcaatcggtcatcctacaactcctcaagatcacatagaagcaatctttaatggtctgccagccgaatacaatgtattcatcacttcactcaacaccaaaatcgatgcctatagtgttgctgaaattgaagctctcttaatggctcaggaggttcaattagataaagctgctaaagatcttgacatctccaaaaatgaagccaacttagctcacactaaatctcaagtaaggaaaggcacaaaacaccactgctcctggttccagcaacaatttcatcgtgctctcttcttactgtcgagtccaactctgccaccctccaaagtccttgtaatcctcagtcaactcaatgtaacactagcactctatcatcttcatgtaatacttttgctttgtggcacaaaagattaggccatccacaccataaaatagttcagcaagtgctaaactcttgtaatatccaaacaagcaataaaaacatagatatttctaatactctttgttctgcttgttgccttgggaaacttcataagctaccattccctatcccctactgtttatactgctcccttgcaactgttacattcggatttgtggggtcctgcccctatcaattcttcaagtggatatcgatattatattagctttattgattctttctcaagacatacttggatatacatgttaagaactaaaaatgaggctctttccacatttatcaccttcaaaactgaggttgagctttaacttggccttcgaatcaaacgaattcagtctgattggggaggtgagtaccaagctttcactcattatcttcaacaaacatgtatagttcacaaggtctcatgtcctcccacacatgagcaaaatggtgtggttgagaggaaacataggcgcatagttgagagtggtctaaccttgttagctcaagctagcatgcctttaaagttttgggttgaggcttatcgtgctactattttcttaattaatagaatgccctcacccaaattgaacaatctgtcaccaatagcgatactcttccatgtcaaaccagcctatacctccttaaaggtgtttggttgtctatgctatcccaatctaaggccttacaagaaagtcaaactccaatttaggtctcaaccttgtacttttctaggttatagcctagctcacaaagggtacaaatgcctctctaaggatggaagagtttacatttctcgagatgttctatttgatgaactcatattttcttttgctcttgaagcaaacaatactcattattccactctcaatcagcagttcaactctgtatctagcagacctgttagacttagccaattacatcctccaccagggttttaattttcccccctgctcctgtgcaaagaccttactctactgatgttttgaatgttgcttctcctactaccattgtccctgctaacactattattgcagatagttctctcccaggtactgctactgttgtttccctatccccacctgctgctgcacttgctcagcagttataccaggtgttactgatgctacagcacccactacagcaattatacaagatactgctgttaccacaccagcagcatctcctcttgaggtagttacagatcaggttgtgccacctgctgccacgggtttcagcaccattgagccaactactgttgccaacacacatcctatgaaaacaagagctaaatcgggcattaagaaacctagagttctcatggcttctctacttcccacatcagtcaaaaaggccttggatgatcctaaatggcatgtagctatgtctgaagagaatgtggctctcaaaaagaacaagacctacactcttgtgaatttactaccaaatagagagccaatcggctgtaaatggattttcaagataaagtagaattcagatggttctgtaagtagactaaaagcaagactagtggccaagggttatcatcacagctgctttgattttcatgaaaccttttagcccgatttcgtcaaacctgtcactattcgtgttgtgcacactattgcttttatcaaaacgttggaccattaggcaacttgatgtcaacaatgcttttctcaatgaggatcttcatgaagacatttacatggttcagccacctggtttcgttgatcccgatcatccaactaaacctacaaattacacaatgcaatttatggactcaaacaagctcctagagcttggttttgaaaaattgtccaatgttttgcttcagcttggtttttcctcagccaaaccgatcaatccttgttcactctcatcactcccactaccaccatctatatactcatctatgtagatgatatattaattactggcaacaacaacaaccttgtctccaaattagtatctgacctcagctctcagtttgctttaaaggatttgggcatcatggatttctttcttaagattcaggttgttcctacaacaaatggtgtcattctttctcaacaaaagtatatccaagacaaatttacaaggctgaaatgcagggagttaagacacaaagttctcctatgaacagtggcctccgattgcctaattttgggagtgaaccagtagctgatgcaacggcttac

SEQ ID NO: 385336 - DNA, 913 bp, Cannabis indica
aaaaaacacagtaaaatcattatagatgatagggacgtgatcgaacggttctggtacacccacgtatgccctactgttatccacagtgataaggccaaagacatggagaagctaacacgtggcagacagtaattgggtcccacaatacaagcaagcgtgacaaaagaaaattttcatgaagactctctttttctttttctttttttttttgcttttttttttgaaaataaaatatttaatgaaagttcattgtcaaaaaaaataaataaataaataaaaataataataatatttgatattatagattcttaatatttggtagattttaactaaaagaccccacaaaagatttatatttatagagattagagaccccaccaaagattttttaccttaaaattcaattattgtttttgttaattattagtaggtcccttaaatctcctaaatccttaacaaaacccttattttatatgttttaacacaagttaattaatttggactataaattttaaacaattacaagaaaaatcttctatcatataaataaaaatgatctctaattcctaaactttactagtacagtcacaaaaaattagtgtcgaaaattccaatacaatgaaaaaaagacactacccttattattactaggtctaacctcccgagattaacttatttggacatgcattgcgattaatttccacttagagagcactcacatcagtttttataaaatagagagactttaaaaaaactgtactaaaaatacacaaagttgatgctctaaatttatgcttcattttaaaaatttttttcaaaatttactattcatagtctacatttatagaacactattcattactctaaatatattttattatttatttttagattttaataattatttttatat

SEQ ID NO: 385337 - DNA, 1921 bp, Cannabis indica
gacaaaaatattttataatttgtgtataaaattttcaactaaggtgtattggttattccatttatatcttttatttattcatttcattaaaggtgaattaagtgttgagtttttctaaattaagaaagtttgacacaattggtaagttttaattaagaattcaattatgtattgtgttgtattttacagccatgttctttattatattctgattatttttttaattaatttgatcagatcttgtgtaaaaaaatcgaaataagaatttccttttattaaaaaaaaaggtcacacctactactcacgattttgtcggtaaaaagtagaaattctttggataattgaagatctttttaggaaaatttcctgtgagttgtgaccttattcagactgcgtatgagttgtctaatatgtgtatattaattataaatacatattttggcaactagatttagtatctcctttattgactttgaaaattattcatattattagaaaaatagtatctttgttgtgaagaggagaggttatcgtttcttcctctgtgtttatgtatttggtatgtctagagcctgtaatcaagtctacaaagaaaaagaacaatagtgtcaatcttcgagagaaagttttttaagctttcaagagaaagtttctcaagtcttgcatcgagaggaagcaagcactctacaagcagatcgaatggagtttgagcacttgaatgtgaaatacatcaagcttgtgtcatataataagagagagtctatatatgcataagtcaattactttgtgtttttgagatctatctaatgaattttatatctaggtgtgatttcgtggactagtaataatctgcaaggattattaataccgcgtaaaaaaatattgtgtgtttttatttttctacaatattttagtttttgatttattctgcagttataaagttgtatttaataattacataataactatttcagtgccaatattattattttgtatttaattaaataataaattgatgattattaaatacaaaatttcaacatcgattataaaacaaatgtatcgtttgatataatggagcttgaatgcttcaccgtttattttcgttaattggtgtgtgtttactctttctggttgacactacagttttattcaatatgcgagacacctttttggatactgcgagatcttttttacctaatattgcgaggtcttttcgatactgcgagttctctttagtatagtccttctcacgggagagttgaaatttatcccaataacaatataaatttaaaactttactactattgaatattgatatattaagacactaaattcatcacatttgtactgaaaatattaaaaatcttcacacttgtccctcttgaatttaggggttggttttcccactaattttcagaaaaaataaaattaagtattaaagcataataatttaaaaaatttaagtattatggcagcccatattcttaataattaaaaaataataattcttttgtgcagccaataatgaccgtgaatggtcatttaaagtttttaatgaatatgaagtatcaacgattttagttttaattattattattattatttatttataaaacccttttcagaaaggagaagaaaagcctatgaggaatatattcaaatttttttatgccaaaaactcctttttggatagtaagtgcaaatgtatatttttaatattgtttttaagaaatactagaaaatgatgtgtcatactcaattaaaatagtacaaataatgaattgatgctaagaaaaatagagttgaattcccataacattaccaaaggacccatttggcaccaaagtcgataatttcactagtttagcgtttgactggcaggaatttttattttttttttaatttttaatttttaaat

SEQ ID NO: 385338 - DNA, 1132 bp, Cannabis indica
tcctctgtttttattcattttccagtttaaggtcttaaattctggttaacatttgaaattgtgaatcttatgagttgctattaaccttaatagctagtttaatgtgaattcaattcacattattaacgataatgtttaatttaactttttgttgttattaaagttatttccactgttatcgtcgttggccatcttttcattgttaaagtcacctttattgttgccactgaccttgggagccttggctttgcttttggtttggttgaggcatttggcatttcgcttaccctctcccaacttgaaaaactcgtctgccttgtctaggaagtctcacatagaggggttggtttcctccttgtgtccttttataaatgacttcccactgcgatgcctccatgactgcggcccatttgtcgtcatcactcaggttcttgaccttggtggcttcacgcatgaagtcctgaatatattccttgagtgactagtctaacatttgcttggtggcgactaaatcacccagttctataagtatctgaaaggcagaggagaattgggtatagaatagtccctcaaactcatcctaggaggtgatcctcctttgggtaacttagtgaaccatttttgtgccgtgtttgttagggtcgcggggaagatgcagcacctaaggcattccttatcccctgaaaatctatctggatcttaaagttcttgacatagttgagaggatcttccttacctatatacatctagataaaattaagtactagaatgagactatgaataaaaatagaatgaatgaaatttaaatgtatatgaaaaattgataaacagataattttttttttttttatcttaatgatattttttttcattttcaatttcaaatggtgtagacattccactaaaatagaggaaaaattattttaatacattaaaatgtaatcaaacaaaataataaaataaaaattgattctttttcatttcatttcattacttccaaccaaacacaaccttacatgcataaaatacataaaaaaaaataaataagtcattaatatactaaattggtgaagaagttctaattcttcaaaaaaaaaaactaaaataattcattttcattcaattcaattat

SEQ ID NO: 385339 - DNA, 1813 bp, Cannabis indica
aatagcaacaagagaaaaataaccaagccacaaagtgtattttttctactaaaaaattggatgtcgttacacttaatttggctctctatagagaaattacgagccaaatatggtacaatatttagtgggctggaacgcatgatggagactatgtgcgtcaattggtagttgtgaaggagtatttgatatgttatgtgtgcaagagaataaattcagcttaatgacatggctcttaaacgtggcattatgtaaatgatggcttgaaagatgctactctcacttggacttggaactttcaaagggatgaaatgaaagtggccttgccttgcaacgtgggggtggtctggtgattggagagataattttgtcttggctcttgttggagagtgatccataattagctattgggttgaatataacaccgagcccaattgctttattgaataagattaggcttaaatgttgagtcgaaatgggctcaatttgttgtactcgtttttatgattgctttttggtatttctgtcacaaatttttataaatcttaaaattaacagaaaattaaattaagttaaatatttctaagttagataattgttttatattcaactcatgaaaataaataatttaactctatttattcatacaattaaaaggttaaaatatacaaatttgagcatttatcacatgatacaatactttaccattattttcttactattgtttctatagaagcttataacattatttcagtcaatttaagtgtgactttgatgatttcacagttaatgataaaatctttatattgtttcaagtaacttgttatcgtgtgttagtttttaatttgtaattttatgaaactagtttcttgatcttagatttttaattagttgtctaatgtaattggttttgtaatttaattttataagtcatttgttaagaatttttatgtcgtatatcttattttttttaagtaattaattcttattgatataactagttaatttaaattttctttatgtagctgatttttctgtgtcagatactgaattagttgtttgatataactgatttttgatatttatttttataatacatttgttaaaatttcttatatggtatggcttttttttttcacaaatctttcttttttaaccaattagttttactttatgaaaaaataacttatttttatgttcaagattttattgtttagtgtaaaatgtttctgttatttaatttgataagatatttgttatatgtattttttattgaaattaattttagtttatgctcattgtttattattcaaaagtctataaactggttttggtatatgtgttgtttctttaacttgatttattgtcattgtttacatggttgttattttatgagattttattttttattttgtattcattttttaacagataggaacagactctaattctaaacatccagaccttggaaggttgatccttttaagaaaattaaagtaagaatcaagcaagaagcaggtgaaaagaatgtatgtatactacatctgtataaaaattgattttaatgctttattttttgtttagtttttgataacggcttctcattcttctactttttagtttgcttttataaggctaggaaaggtgaaacagaaattgctcccaagaataaaagtagtgtaggtgataatggtatgaaacataaagaaaatatatgtattctgtctttcaaaattggtttagttttttatatctgttataaaataatataaaattatataaagtagatgagaagaaagaagaagaagatgatgag

SEQ ID NO: 385340 - DNA, 939 bp, Cannabis indica
tttataattttatatattataattataggaaaatgttagtgagagcattttttatagttattttattggctaagttagtgggttacataatcttatattgtgtattaaaacatagtattacatcttactttttcttatattgtaatttttttaaatctataatcagtaatttttttatcaaaacttcaagacttaaaaaaaatatttaaaaatataaactttgaactcttaatttgattactatttcctcaatttttttagttttctccgaatctccataactatttaaaataagcaagcattctacatgatttccatagtagaattttcagctttgaacataaaaaggaaattttagtattatctccttaaatttaaaaaaaatgggattaattgaaaactaaattcaacttataggttgatattatgttaaaagtttaaagggctattgacaaaaatatagagaaaaaaaactagctaatataggcatgaaacataatggacaaaatatggtgctaagaaaaaatatggaaacttcaataaaataccataaataaacttcataagatgtttaaagaacaatgatcattgaaaaagtcatcggagttggcaccagcgttaaaaaagttgtcggagttggaattggtgtcaaaaaaattgtcgaagttggtacaatcaccgaaaaagttactcgaaaatttgctaaaaatagaattatcaccgaaaagtggttggagttgtcgccatcaccgaagttagacgtcggatttgtcactagagttgaacgttaaaatctgacacacaagaactaatttcatttatcaactacttaaaattataacataaggaaactaattaataaagcaaaaactaatttcttgaaataattaaatgaaaaaactgaagcttaaaaatttaataaaagactagttataaaaa

SEQ ID NO: 385341 - DNA, 601 bp, Cannabis indica
caaaaataggttagtttcaatattaatgcgcaataacacaaaattacaactaagtaaaactagaaaaacaattaagagaaatagaaagatactatgacgaaatgttgtcgcatagatatttaatgaggttccaatcttaaataatttcttgcttgcattttatccccgagaataaccactttgtgaccaatctttattaagaaaagtactagctcaaattaccgagagtgatctcaaaatatcaagaacaaaaatggtgtcttgcacctacaattcactcacatgagagtgttgtgatcaaacacacatagcccctgcacatccctcctctctcattcttttcttcttagtttttttctctagcttatttcctagaattgagaacaaagcttcttatataaaagtaataatggaactcaaagaagttgggaaaaatcgagtaacaacaacctaactaactacctgtaaaaatagtttagttagttgataactaagtgtctaaaattctaacaatttattttagttagttggtaacactataaatgtaatacccagaattaagaaaaggattagcaaaaccctaattagataattatgagtt

SEQ ID NO: 385342 - DNA, 1333 bp, Cannabis indica
ttgctttcaatgtaaataaagtgtgtcaattcatgcataattcactttaaagtcattagctggcaatcaaacgcatcttgagatatgttagtgtggtacacagaatcatggcttgcacctaaaacaatctgcatcacttgatcttaaagctttctgtaatgcaggttgggctgcggacattgatgacaagagaagtacatctgattttgtagtctttctaggctccaatttgattacctagacaaagtaaaaaaacaacatacagtgtcaagatccaaaactgaagcaaagtataggagtctagcaagtactgttactgaaatctcatggttggaatccatgttctttgaattgcacctctgtttgcacaggacacatgtggtatggtgtgacaatttgagcactattatgctcactcaaaaccctattttacgtgcccgaaccaagcacgctgagttagatttctactatgttagagaaaaggttcagcagggtctcattgatgtaaagcacgttccttcctttgatcaattgccaaatggacttactaagacaatctcaagtgatcgatttgtagtttcagaaccaatttcacaattgaagatgcttcaattataagattgagggagaatatattaagacagttaaagttagttaagagttttatgttagtttactagttgttagttgctcaaattattacaaccgagtgtaacagatgaatgtaatgaatgactgtactttgattcaatcttttactgcctttcattctcttctttctctctttgatctttcatctttcatctttcaatatgtcaataaactcaacacacttttttttttgagaagttttgcctttcgatcaatagcaaagccaaccaacacatgtaaaataaaattatttactcttaattttaaattaacttttacatgtaattttaaaaaataataaaaatttggagagccatgcatggcaccctccgtcaatgctcttaacaatcaataagatttcatttatttttaaagaaaacattgcgtagtggcaacaccgaataacaagaatagcagtacgagatttaatgatatagaagtaaatacatattctatacatcatacatccatacatatgaaaccttcgaggaaactatatataccataagatttgatttgatttaggtctaccaaaagtcaaaattccttatacaattgcattaaagaggtttcacataaaccatcactataacaactataaaaaaaaatcaagtagaaaatatattaataaactaaaataaagacactaaggtactaagggtacataacataagaaaactct

SEQ ID NO: 385343 - DNA, 1313 bp, Cannabis indica
aaaatatagcagtaatgaaagagagagcttacgcaagaatccatttcccgttaaggagaggcaaggcttcggtcggagccggggtcggattctgggcctccaactgcgtaataagttcaacaatctcggccctagtttcactcgaggccttaagcccccgatcagtaccgtaaaatgaatccaccaaagctttcttaagattcgcagcttcggacggctcaaccggcgcctcctcctcggccaccgccacagcagatctttcaccgaccggttcggggccccattcgtcatcgtcagctaccctgactcgaaacacaggtcttgccttaccgaattgtcgggtggaaagtttgggtccctctgaaaatctggaaggtactccaatcgaattcggaggaaccgagagtttggattgttgtcgcggtggaaccacagagcaggtcttgcatgggaactggtttaattgagaaacggaggccatgatcaagattttcctagctacagagaagcttttagtttgctaagtttacagagaaggtgagcttatctatggcttcttagaacagtcactaactaccaggaaaaccagagactatagaaaacgttttttataacttggagggagaagccgtactcgtattaaacgaaatgacaattgtacccccttcatctaatatttttgtggtgtgttggtgagggtagtatggggtttaaaaggttagattagtgacaggttcatagatacttgtcctgcttttgacacgtggacgacgactaatgggtgtacaagaacaactggaatttggatgaaggaaaccaaaaatttatttttgtaataacatatctattttcatccaaagaaaaaaaagagaaaatatgtggtaatgtgagactattgattttctttacgtggcctagtctagaatcttcttcaataagtcggttcttttttcctctttggcttattgtgagcattcctattggttccacaaaatgtctaacacatcgctaatttgaaatcaagagttcaatcttatggtatattcaaaaaaaattatccgtcaattattttattattatttttaataaaaactcaattcattgagataaatttaaaaaattaaaaaattttaaaaattatggacaagcatccatctatatacactctcctatattagtaacattgtaacatttatattaagggtgttcataaaataaccgatccaatccaatccgcacgattcaatccaatccaatccgtaaagtgtggatattcgcacttgtgcggattggattggattggaaaattcaaa

SEQ ID NO: 385344 - DNA, 3913 bp, Cannabis indica
ttgcaagtgtctgaaggcaagagaaacacattcatagcataactcggcaagacttgagcaataaatttcagcaatacctcctttcccgcacggaataagatacgcccttccaacccttgaattctcttccgaagcttatccttaagaaaattaaggatagcattcttatttctcccaaccgaacacagcagacccaggtaatagttattttcatcagcctcataaatttccaacatagcacaaatagaatcccgcacctcaattctagtgttattgctgcaaaacacaaaagacttagagaaattgattctttgccccgaagccacctcgtaagtatgcagcaattccttcacattgtacgcttcttcctcagttgccttacaataaatgtagctgtcatcagcaaagagaatatgagagattaccgacacacctcgagcaattttacaccccgtgagtaagccactttgttcataactccacaacaaactagagaaatctttagcacaaagaataaatagatatggtaataaaagatccccttggcgcaaccctctttgagcaacaatgggccccaactccttcccgccatgtgaaatggtataggaaacagaacatacatattgcataactaaattaatccaacgaccatcaaagcctatccttaccatcatagcccggagataaccccactcaaccttatcacagtctttcctaacatctagcttgagtgccatataaccatccctccctcttcgttttctctttaagtgatgcataatctcgtaagcaatatccaaaattaactggccttgtaaaaacacactttgagtatcagatatgatagacaacataacactcttaagtctattagcaaccactttagacacaatcttgtacagcacattgcataatgcaatgggtcttaaatccccatatccataggctgcttcttcttagggattaagaggaaaatgattttgttaaagtcggtaggaagagaaccattatggttttggacacaaaataatatttttattgtagtgaaataaaattatttttagaaagtaaccaattactatcttatataagcaaatataccttttgaaaaatccatataaataagaaaatgagcaagcttggtcgacattgattttcagccatgcaaaatatcccttccaattgtgggattcaatgaacattttgtggatgaattatttttaatttgttcaaataaaattatttttaatttaaagcatacaaaagaattattttcaaattgggtactgattattggaattttattttttaaaataattgaataaaataaaactaaaccaattttagttgacaaactatattttctttaattacccgacttggcgccgaggaccgacaattatttagtgacatttcctggaaatatttctaagatatatgatgatgaatcaagtgattcatatcaaatattcaacatgtacaaagtgactggctttactaatatcattaaatatgaatcttcaaagtcaataatcgtgggcaaaacaaatgaagcatgctacaaagtgagtaattaaaactcaagtcaacttggtttctcggctttttaagccaagaaacgtggaaatctctgtttttatataaatatatatgcgcataaatgggtttggatagtggtcactacaacagctatatctacgtgttgagttatctcaactcatccatatataggaagaataatgtgtcattggcctctagcccacaatatttatgtgaaggcaggaatttattataatatattataagataagcaaatataaaaggagatatataaattaaagtatagttttaattaaatcttaataattcttaaaataataactttttgggtatggtcagcgcttctatggacaaatccatttcatttcatttttagtagtggttgtcaagatctgcatatgaacatcacaaaacatgtttgtaatgatgagtctatttgaattttgtctccataaagataaagatggtgataaagattgttattgctcatccttttttaaatggctcaaaagcttttatttttcaatttctctttcgctagttagtctgacatgatgaaaataaattattatatataaaaaataaattattatatataaaatgaattatttatttttttaatattaattagttttgagatagaatttcatgcactttaattactttcacttaaaattctaatgtggtatcagatctgtttatgatctgttgtgagtccaaagtaccgtcagtccaaaaagacgagtcaaactaaaaacattcgttgtttcacctttaacctttatttgtgacctttcggccaatatgtactagtttccagtgttggaggtgtttgaccagtttcaaaatccataaattttccgacgtatacacctataaatgttctgatatttagctttgtggaattctttcaaatgtcacattcagtcttatggtctcttcaaggtcgctcgttatacatacaccttccaggctcaaatattacgaggagggtgtattacagttagttccacattgataatgtgtggaaataaattctcatatgtaagatgaatatgctactcctcctattgctaattggttttgagatgaaacccatgcaccttaaccacttttattccaaattttaatatttacatatacacaaattatattattatgtatttcttctctgttttccacacgtgaaaagttataatggggctggcaatttgtgttatcctgtggtgttcgtatcgacaagtttatgacacgacatgattaaagtaaatacgaacacaacacgtttattaaatttgttaaaacctaaatatgaacgcgacacatttattaaacgtttcgaaacctcaaacacaacacgacatgattaattagtaggtcacacgatatgagcacaacacgacacgattacaccattatgagatgcttatcattataaaaacaaaaatttgagttttttaataaaatatatgaaaattaatttgtgttgtcgtgtcaatactattactaaatgtgtcaacacgagtatgacacgacacaattaaggtaaacaagaacacgatacgattattaaacgtgtcaaaaaacttaaacacgaacacggccggttattattaaacgtgtcagaaatttaaacatgaacacaacacgattattaaacgtgtcacccaaacccatttatttcgtatcattttttaattgtatcgtcatgtcatgacccatattgccaaccctatgttataagttcaatcaattttacgtaattattatataattatttatgttattattatttaaaatatttgataaatttgtcaaaaagatttaataatttacgatagggttaatattatataaataatataaaacaaactattatatttctactttaaataattacaatgtaatcagttgtaacctttggtgtaattattgaattttttttaatatatatatagaatattttaatgttacattcaatatgtcacaataatgattatatttatttttgattatgtgatcactattaaatggctgtgattaatttaacatttaaataaaataaataacaaatgacatgtaatctaataataatttaatactttatttctttataaaactttaattaaaattaattttatttaaaaattaaattaattataattattatttaattttttacaatttgttactgaacaaagttctttttgtaatgaccgctctagtttatggattagtaaaggcaattagcactaatttttattactttattattatttgtgaattaaatttaaatgtggaccccaatatttagaaataaatatttgagttataatttctcaatttcggagat

SEQ ID NO: 385345 - DNA, 1599 bp, Cannabis indica
ttttttttttattttaagatttaatttagtccaatagtggggaggatcctaatggattcaaatacaacagatgttaaattactaggataattcaccggtaatttctatatgaagggcaatacatacagctctcggcgtacttgaccagatctttaggctggggaagacgagtggccaaacctacaaacaatttatcacagcagaaacccttttagcttttaaagactaatttttgcctgcttaggaaaaaaagtaataataatgcaacaaagactcacccaattcatatgctttagcagccactttagcagcaatttcagctgaaatctttctgatgttagcgaatggagggtatagcattcccttgtcaaagttttcttgtgagacctgtgcagccaaagcctccgctgctccaacgaaaccaaaagcaaaggcaaaaatgattagtgatctctcgcgcaacaaaatgttgaataaatatgtttggttcacttacaagctgccagaagcatttcatcatgcacgcgaatggtgcctgacattaataaacccaagccaaatccgggaaagatgtatgcattgttagcctgaccaggcacgaaaacctttccctcatattcaacaggtgggaacgggcttccactagcaaagatggcacgaccctggagtagcaaaccaagagcaaatgaaatgcgttggaagtggttaccgattatcaaaggttcgacattgcacatgtgtaatgttttacctgactccagttatatgcttcctcagctgtacattcagattgtgaggtcgggttggatagagagaaaataattggtttctgcaagtaggtgatgaaaacaagggtcagctttagctacactgggatatcaagtgtagaagtaactattctagttaacttagtacctcattgatggtggccatagcctcgaccacttcctttgtgaattgtttaccaactccagatgttccaatcaacactgttggtttgatgtcctgaaaaaaaattaaacatggaaataaggaaactaaaatgtttgaatcaacaattatacatatgcaaaaaatttgagactaagattgcatacgtttatggcatctacaagtgttttaacaggttcatgttcatgagcccatggcttcttgaaatgttgaagtgattctctgcgagaactgacaatcaatccctgcaggaagaaatactatcaaaacatggaaaaaaagaaagaaaaaaaggaaatgacaatcaagttcagacagcaagaagaggattgtgtttacaaccttcgagtccacaagccaaattttcttgcgggcctcttccactggggtatttgtctgcacaataaaacaaatgtaattttaaaattgattcctcaatgctgtttcctaatagaattcaagatatttaatattagcagttaacctgctttgctatctcaagggctatcagttctgctatgccagtgcctgcctgtaaccaccaaaggagagataagaaaagataggcagcatccaatgaaccaataaaatatacattttagacagaagaaatgggttgtgtggaagatccatttgggaaagaaaaaa

SEQ ID NO: 385346 - DNA, 1893 bp, Cannabis indica
tttcattattatttgtagtgtaatgcattgtattatctaacagataattaatatctcaaaaccctttatacattaaatagtccaaatcaattctgggttctcttatcactgtcttggctatctgtttgcccagaatagaaattaaaattaaaaaagattaaaggaaataatgaaaataacttgtcataattctgagtatttttgtcttgtatagagggcttcattaatcactgcaaatttgcttacattgatgttcaactacatacctttatatatctataaaatctattctagactgtaaaacaagccaaatcatatatatgctatcttatcatataaatatacaaatacaatgctgtcgttgtggtcctaaacaaactactctcacccttatgatcagtccttttatttagctttcagatctcccaaacccctgagcctcaccattattacatactgcttaatatatatatatatagggatataattttgctatgttattgtactttcatggattgtaatccgtgatgtacagcagccgttagataaggaagttatttgatctgacggttgagatttatctagtaattaaggttaaaaagtaaaaacgtactctgacactcatttaatgtaccttcagacacatctaatgtatcacagaatatattccgtgaaagtacattacggaacaaaatcatatccctatatatttatatgctaaatatattatagggtttcattcataaatagattatagggtttcattcattttctttctaacaagaaaagaatatattcatattccactgctaatgacatgcacgatattaattttagagactttattttaaaaataaaaaaagctgactttcttaaattttttttcctttttcttttcttaattctttagggtacttaaaagtaaagataatacctggctcactctatagtagtcatttttgcatattgaaatatattttttaatcatgggtataaagaaaataaaaaaaaaattgacagtagctagaaatagtatatgacacatcttgtacgatacatttggtagagggaattctttaatagtctcatgaatgctctctgttgcttcttgtcctaacttgtataagataccacacatcccattctcatatgatatcatatttgattgataattacacatttaaaatgcctttcttcaattatttttttaagcaataaaaaataaataacattttagagggtgattataatcatttggaaagatatctagtacactcaaagtgttttggtggaccatttatttggttcaccatttagaaattttttttaacttttaattttgttttatgattgtgtactttgtatttatttagaaccatatataaaaatatttatctaattttttaaaaaaaatttcaaataattcatagtcttactataaaattcaaatagttgtttattactcgtacaacaaaatatttaaaccttattttcgacattataaattattcgaaattttatgaaaatttacaaataatcataaataactacaatatatatcatcataaaaaaaaattcttctaaataacaaaataaatagaggctctatcaaaatattcctttaggaaaatgtactactctacactgttaaaaattaaatctaaaaatatacatgaattttacaaactcatgtgagattattaagattattctatgaattaacactactacaaaaatagcttttaacttttattagtattttttaaatagagcattgttattgggtaccagtggtgcccaacactttttatatatgacgtctacaattggttagcgatattctttaaaagttatttttttctaataaaaatcataagatctattaattaataa

SEQ ID NO: 385347 - DNA, 1300 bp, Cannabis indica
attattattattattattagggacatttactgcataactacttaatggatttataataggtagggatttattaaattctttttaacgacaaaactatctaattttgttgtaattttatccaatatatctttctcaacacattttgtttttaaatttgtttgtacatatataagaacacaattaatacccatcgttaatctttattaataaatatgtattaattgtacccttaattaaatgtgtgcgaaaaaactcaaaaatatgaaatgaacggatgaaattgaacaaaattaaataaaattacacttttagtaatattagatagttttgtcactaaaaaaattaaaaaaaaaaaaattacatgttacaaactagttatgtctcaaatctctcttctttttttcttattattattattattattattattatgagtaatttatagtataaatacttaagtttaattttctgttgtagataaatacttaaattttattttttaagttaattatacctaagttatatttctaaaactaagtgtcaagtcaatgccatgtggtagttcctaattggtttaggtcattaatttttatttttatttaaaaattaatttaaatatacctaaaaaataacacgtggataatgactttacactacgtttagatacctacaaaagttttaaaaatataaattaaatattattaccataaaaattaaatttagttatttatttataagtgagagttaaacttatttgtttatttcataaattactctactattattaaatatttttattgttattgacctagagaagggctatttttgtaaaaacaatgattggtaagaacatgtggaaactagtgaagattttgagtggtgcagttgttatccaatagattaaaattaaaataaagaatatattatcttatttactattgtttttgtctatcttaaggtaatgaaccaaggattcgaaaataaaatactaactttactttatatatataaataataaaaaataagtagcaaaatgacaagcactcaaatattttatagaaaaattatctgtttattttataataattagttatttactattattcgtgattttcagacaggttttatttttattttaatttaaattataaattattaatatatattttttattattatttaaatttttgtttcttaaactataaactattcacaaagctataaatatgtgtgtatttgtactgttttggaccaattcatattttgaaaagcttataaagaagaatcagcgatttatctg

SEQ ID NO: 385348 - DNA, 964 bp, Cannabis indica
tttgatttttttttatccttatccaacaaaacatgattatactcaattaattagtagaattgtctcttaattttaagttattttgtacttttatttcaataattattcataaaaaatgtcattttaccaaaaaaaagaataattaaaacaaaataacagtaattaattaataatccttttaattttctttctaaacaccctatacaactaactccttccataattatgtgatttgttacttgggcattttacacgtggcaaataatattaactaattattgattgtttaattaataatatataatgaaacatcaaaaccatgataagttacactaatggtcattaagtttagttaaaccataaaatatataatattaatgggtcattagtctacctataagtttctagatacactagctaattaattataataataataattaaatatttttttaataattaaggatcaatctatgttataactcatgatcatgcatctctacagattatataatattataatttttaaatatatttatatatatatagaaagtaagaacatttaactactttaaataaatagaaaatcatcaataatattaattatatgaagttgtatatgtttgtgtataacaataatgaagagaataatatacattaattaattattacagcaacaaatatatatgtatggaattacaaatgaattaaaattcagcatatataatattaattcatcaaaaacttctaataattaaaatacttggtctctatatatgcacatgatatatctctttatgaacaaacccttatatatatatatatatatatctatatatatatatgacccagagaactaatcatgatgaaatatgaagcttcaaatttagtcaacgaggttgaccaatgtctgtgaagatgctaacctgcacccaaatttaattattataattaattaattaat

SEQ ID NO: 385349 - DNA, 2237 bp, Cannabis indica
atatatatatatattactttgaaatcggataatgttttttaattaattattgaaaatttgagataatgtttgtaagctaattataatacttagtgtgatttttttccacatataatattagtgttttgaaaggggaacaaaaattgtaatttttttttaaaaaaataaaataaaaaaaaaaaaataatggtatttacaacctcacgaatgaaacctttcatttcacccaatttattcatttgtactaactatgtacaaaaattgatctcacctaattataactgagtaatttaagtaactacttgttgaattagtgtgattagttttagttttatatggctaattttaattttataaaaccagtatagttaattttgaattttgatttgataatatcagtatagttaattttggtttgtcacacctagtataactaattttaattttataaagtcactaaggttagttttaattttataagtttagtttggttagttttagttttgtaaatcaataaaaatttaatattgatcaatttttttatcatttattttgtaggtattttattggtagagtggaagtaagtttgaaattttttttatattaaaattttattgtctagttctcctagagtatctttgcatgcacttagcatcaataaattttttaaatagaagaaaatctttcactttttgcgtaatgtaattacctttgttattttaaccttcattgcttctctcctaaaaatacaaaaacaaaactttgcttgacacaaaataactattttgttctaaataattactaaattggatatttgtttaatccgataatttcattaactgcataattaaagatgattaaagtatactaattacactctttaattctgattactatttaatttgaaattattactaaatattaattatcatgtaattataaactattttctaaacataacaatacaaattatgatttgatatccaaacacaaataaaatgtaatcactacatgtgtatataaaatagatatccaaacaatgtaacacaacacattattagttgattaagattagatttttcatgcttttgatcgatcaatagtcctattaactataccaaaaccatcattaaacttttaacaatacaacaattgagtttctaaaaatgaaaaccacagtgtatacctggagccaagttccagcagcagcaagagaagacagcaagccagcaaagagcaaagaatccttgccctgaaacacattagcaacaagaatacctttctgcatagtattagtaacatgtgttcccatcaacaatgcccctgagaactccaacaccccagcagtcaacacagcttgcctaagactcaacgcccccgaacccaccgaagttcccatggcattagccacatcattggccccaatattccaagccatgtaaaatccaaacaaaagggtggcataagacaacattttggtcttcaaggtcagaccttgagccagagttttcatgaacaagggtagagtaagagcagcaaaggctatgcatatggaaatggctttagcagtgtttgaagatatgtgaaaagcttgagccattcctggcaagttatcttctttttgttcttcttcaacttctttgacatggttatgatgatgatcgttgagggttattccttctttatgttcttccccaccttcagcttctgcaaaagaggataaactagcaaaagtgtgaataaagtttgagcttttaagcctcaaatttgggagaaatggtttgtaaggcttgaatgaactgatttcttttctgggcaattgagtttcatggcagaaaagagagtaacgatgcttaagaagatagaaatggtgagtttcaatgcttgtagtgttttttgaagaagataaacaaaaagagggagtcatattgttaaggggaagagaaggaaaggagattagtaatggtgttattcaacagctgtaatcttaaccatggagtttggtgaaggagaaagaagagtagaagtagtaggtggtgtagaaaaatggaggactgtacatattttcctttctcaaatggattttaaaaaaaaaaattgaattttgattctattttttctgggtggagaggaagagagggtgagaatggatttggctgattgcaaaatcgattgaaatgagtggttgtcgtagattttgggagggactttctcagtccattaattcttaatatata

SEQ ID NO: 385350 - DNA, 1581 bp, Cannabis indica
ttcttttttaaaaaatacatatattattataatcacattaaaagatgtattaatatatggatatcctagccctccaaaataaatttagctcaagatgaatgagtaaattcatgcatgattatcaacacaaataaaactacataacatttagggtcgaattagaaaaaaaataatttttcagtctttctttaaaaaaaatatattatattttttcaaatcagtaaaaaatttatataattttgaaagggaaagatttttcttttggcccatgaattaggtgggttctaagcacatgcctagtctgcctatgtccaaaatcgagcctgataacattaatattatacatacttatctcatatatataatatgaaatattttataccctaaaaacaagaaaaatatcaaaaacttacatattactataacatattataatgtatgtacctcatgtggagcaatgtaccatccgtttcgatttgctgtgtcaactagggcaactagttcggagtggtgttgcaatgtagggtttcttccaggaggagaagggggaggatcattgttttgtataataaggtctaaaaatccattttcttgtgctatttgaagacaatgtttcaaataatcttgtgttctttccattcttttcttgtatgtgaattgaagttccttgtgcttttggacttgtctttctaggtctaacacctttaacatccgcaaacacattaataagttataaggatattttttacaatacatttatatctgtttcagtatttgatataattttttagtatatttttttttattgatcgtctacattatagatatttaagacatttataaaaaaattagattaaaaaattctctcaaatattaaacagatcagaggtacatgaatgaacccttttaattgttaagagtacttggtaaaatataaatatatatttttaataattatgccataggaaaattatcttgtaaaaaatctctatagaaagtgacaacacaaacttttacaattttcactcatactaatttttgttttgttgggcttttaaaatcgtattaacgccctcttgagtaagttggcccttgatataagcttagtaatttaaggttattttggtaacattatattcagttatattgtattgtataatattatattaaattatgttttatattatataatatagtacaatataatatgacataccaaatcaactcttaatcatgaaacttgtgcatttcaataaaaaaaagtcataaaatttggttttattttaataatatgattgttaataaggtttataaatttttcaacttgacattagtacattagtttttgttcgatgtcctatttcgcttttctagacattttaaaatagtataaaatagaccattaactcaaattttgtattttttttaaaattaattaacctgaagctatagttttagcatgaacagatgcaaaaaatataactaattttgtcataatatattaaggtcaaattattattaaattttaatttgacaaaaattaaaatctagagtctatttttttagagcaatttgcggcga

SEQ ID NO: 385351 - DNA, 1073 bp, Cannabis indica
aagctgaaacagagcatcccgaacctcttcatcagtgaaaggggcattcaaaaaattatactgcagatcattcaggttggtgttggcaacagaaagagtgaagtcagtagcctccttattaaaaccttgatatctaaaaaaagtagagaaatattggcagacaaccttctcaatatcatccacattagagacaactctaccattatcaaggtggagacatctaatgagttggttcttttcctagaggaggtcttattatgaaagtacttaatatttttgtccctagctcttaaccaatgcactttggatctttgtttccagaaaatttcctacttatacaggacactatccaagtgagattagagttttgaggcctcatttaaagcctcttttgagacagtgagagaagagaaaatattatttagttctttatcagttttataaatcctagtagcaatactgttgaaagatttattccaattttgaatagctttaacataattactttgcttaagaataaaactatttatagactgatcattacaaatagaaatgttattatactaagagtcacgaacagtatgaaaaaagaagttttctgttagccagtgattttcaaacagaaatctttcattcgtaatcttattcatattatcatccttcaaaagaagttttaacactctatggtccgaaccataaaaactaagatgatgaaggattgcttgagggtaagaatctagccaaactttattgactataccccaatctaaacgctcacaaatagatccatgtttctaagtgtacttttttcccaacatattgaataaggaataaagaaaatttattaacaaagttttgaaaattaatcatggcatgattggggggaaaatatttactactacaatcactaatagaaagataatcattaaagtctccaaaaatgaaccaaggcaaaagaggggcagaatcatagagcctttctaaaagtttccacctgtgaactttatcatttaaataggatgaaccataataacaggaaatatgagtagttatgtaatgttgggttttatgcc

SEQ ID NO: 385352 - DNA, 1236 bp, Cannabis indica
gctaattaattaataaaattgcatcaatcctctttgtctttttaaattatccttatagttagacgacaattaatatatatatatttatatttatatgtaattaagtttgtaacttttttaatctccttctcctctctcacatcaaggctgtctcttttttatctttaatttaaatcaaaagactttgtagctatatcccagaaataaagaaagaatattattataataactgccgttcatccttttaagaaacagatgtaactgaattatatatatatttatatatatattatacaaaaattatcctcattcatatatgactatatatatatatacttacttaaccagtttgtaaaaaggtaatatatgaaaacaaaggtttcgtttttcaaaaaagataaagaggaggacttggtgtatgtctttctcctttttccctttttaattaattgttgattttttttcttaatatataatttacaccattaatattacttttaagtatttggacaggtattaattaataattaatacatataattatacaataccaaccaaattatgttggttaaacactctatttttcaactcaataaatcaattttacggccctgatgacttgtaatataaaccatatatatatatatatgcactctctaattaattatattattatatataatgaatgaacatgatgcatggatgcattatgattgagtatgatttagagcttaccctcaaatattatatatatagttgacattttaataatagacaacattaattacgtggtcttcgatttgctgccatatatatatattactatgcttacctaaaccaaagaaaatatataaataaaaattcaaataatgcagaaaacagagattgactatacatatagctaatatatatatagtgcgatcttgtcttttaggttcatatatcacattattgatgcctgatttatcgcttattttgctatccaactcatatatatacatatttatatatcatataattaattccatgcttacttattaataattctacccatattattcatgaaaagtttcaaggccactccattgacttttgcccctaaatcgtacattatgtaatatagggccggttctgaaggtaggcgagctagctgtaagtctcgagtcccctcgaatattcaaaatttcaaaattatgaaaaaaaaaattataaatatataaataaaatattaaataa

SEQ ID NO: 385353 - DNA, 1527 bp, Cannabis indica
tatacataccaagtatatcaaccacagtctgaccattggtaaacctgcctgttggagtagctttaggaaaatcaatcccataaggtttgtaattagccttagacaatgttttaagattattgttatttccactatcagataaagaatcaccaaatatgaaaaaacattctacttgtggatctccattaacaccataataattatgattatgtaaaaatatgatcaataacaacataaaaaatttaaatatcacaaattggaagcacatcatgtctttcttaatttatacttacttaattatatgatatggtatcatgcatatattttatatggtttatataggtgatgatcatgaagtatatctaaattaattaaccaaaattagaagaaaaaaaattgtaatcattggaaaactatcattagttttggtccactcctatacacatgtgtaatttatttttcacagtaaactagaaatatgaattgcttatgtccactcttatatatatatatacgtgacatgttaatattggtatacttaatattattatttatttaaaatttataatattttttaaatattttttataattttatttaactttaaaataataatattaagtgtgtacaatattgtacacataaacaattcatggttgtatatatttaatttgctaacagttcgatagtttggaaagttttactcttaaaagttaaacttaaaaaatttattaagtacaaatgaaacaatagttgagatgatttagccgagaaaaactcatataataataatggccctacatgtataatacgactttttgttgatgaaaacaatacaaagttatatacttaaataattagtataaattataattataacatgtatatatatatatatttaaaaaaataaagcaattctctatcaattttgtggggtgcttaaagtgttatttaattaggtaatatatatcgttagatgttgactaatgattatgaactaattaagttaataaggtggttgtgcacatgcatgaggctaaagtatatgtggtttatatattcaagatatattaattaataattaattgaactgcaattaattaaatctagacttaattaataatgtagtttagctagcctcaaattaactacaactttccttcattttgagactaataatatattgagatagaaataaggtgggtaactatataatcaatattcttgttgcactcaagaaaccctccttacacactacgaaaatgctatttttagtgacaatcttttagttacaaataaaaaaaaaaaaatctgactaaatgtgacttttagtcataaataaaaaaaattacttgtgattaaataaagtatttagatacaaattgtcactaatttagttttagtcacaacaaattgtgatttttgggactaatatacttttagtcacagactttttagtcacaatgtaggaataataatttaaaattaatcataactttttcatttttagccacaagttttgttgta

SEQ ID NO: 385354 - DNA, 1539 bp, Cannabis indica
ataaatatacatatgtatgtattatgtaaaactcgatgacttactaacggacttggatgggtccacgactattagatgacttagaatgacttctgttacttagatctgctgaccgttacttcagttgtatattccctattgttctggttcttgttgtacaatcagttaggtgtcaggtgttagtttccttaagggctgttagtttattctgttttcaagattgtaacaaacttctctataaatagatcagttcacttgatcagatttaattgatcaagcttttcattcaatacagtcctgttttctaaactaactgttcaaagatattttcatggtatcagagcccgtgactcaagtccatggaaacaccttcaatcgatccaacacaaagtcatggttctgccatgtccgataacaacaacgctacaccggcaagccctgctacaccggcaatcacaaactcatcttggaacccattttcgaattccctcacatcatccctgaccattaaactcgatcgaacaaactatctagcctggaaatcgcaagtcgttccaacagtcattggacatgatcttgatgagatcttgttcagcaatgttcatccgcctgccactctaatcactggagaaacaaaccccaatttcaaacaatggaagaaacgtgatcaactcttgttgtcatggttgagatcctcaatgagcgaaggtattctcggatccgtggctgcttactccacatcctttgaagtctggaaatctcttgagcaaaagttttcaggtcaatcgaaggctcggttgctgcagttaaagagtcaattaacaaacattcagaaaggtaatatgtctatctcagactatgttgacaaaataaaatccatctgtgataatcttgctatagctgggtgcattataaacgatcaagatattgagttgcaacttctaaacggtcttggaccggagtacgattcagtagtttctggcatcacctccaataatgaatcaaagagtcttgaagaaattcaagcacttttgatggcccatgaatgtcgattagaaagacatcactctgtctcagatatttctaataaaatggctgcaaaccttactgttggaaatacaagaacaggctacaacaatagcagaaatggaaatttcaggcctttcttccaacaaaatcgatccaatgaggcagcaagaaactccaaccaatttccgccacgataccccaactctaactcaagaccaatttgtcaagtatgcctaaaggttggacacactgcttctatatgccattataggtttgacaagaactttgtcactccaaagaacaattcacagtctcctaaggcctatcttactgaacaagaagctgctgaaataagtgaccctcaagcatattcatctacctcagtacccgaatttggtgatgatctgaaatggtatgttgacactggggctacgaatcatgtcgctcttggtatggaacatcttgatagtgcaactccatatcacggttcagagaccctagcagttggag

SEQ ID NO: 385355 - DNA, 1439 bp, Cannabis indica
ccgcagacaacagcgaaccgctttccccaaatccgattgtacggaagagaaggtggggcgtagaaagcaatgacgttgattccggtcacctgttggaagaaaggtaaggctatcgccatcaccagttgaggtctgtactttctctcgacgatttttcgaaatgggtgtttggtgtttctagcaacgttgctggcttttacgagatcgttcatctcggcttccacgtcgtccgtgcctctcacgcgccgcagcatgagctctgctttgtgtggatcgttgtttcgctggattagactgttgggtgtttctgggaggaaaatggcgccgagggtaaggattgtggctggaaacgccgccatggctagggagatccgccatccccaaccgcctctgatcttttccgtcccaaaattgattagacttgccgataaaccgccaattccgatactgaattggaagccattattgattgctcctctgaattttggtggtgccatttcggatagatacagaggtactgactgttattacagaaaaaaacagaaaacagttataactaactttttttttcataagttgagaattttagtatgggagtgtgtttaattacttggttagcgaaaccaacacccactccaagcaacatgcggcctagaattagcatgtagatgttaatggcggcaccgcctaaggccgagccggtgagaaaggcggcgccaccaattaggattgaaggcttgcggccaaaggttttggtgactgaggaggcaaagaaggaagctacaagaccagctaagtagagtgacgatgtgaaagaggtcaagagttgactgtcgaatttgcagtagttgcttatttccgagtcttgtttcatcttagtatacacttctgggaaaaatttctttaagaatggttccattgaagtaaccccaccttcatttcattcataacataatcaactaacgtcagaaaattaattataagaacaataatatttcatattttttttttacaaatatatctaaaattggtttagcaaactctaagagagacctgaaattccaatgtcgtagccaaaaataacacctcccatggcggccatcatacaagagaagattacaaatggagtcattttgccgctgtatttgccatctccttggctttctaccattaatcccacagccataacttcttgatcttcttcttccaccaactctcagtatcagaacagaagaagataaacagagttgatagagagtgtatcgttgcagataacacataaaaagaagacagactagtcattacagcaatcatagataatacaaacaaaaattatagcagcagtcaagtttgactagttgtaatataattgagattaatgtattcttccaagtgatggagaaatgagatacgtttttttaattattattattatgtat

SEQ ID NO: 385356 - DNA, 940 bp, Cannabis indica
cttcattaaaattattgacatgattcaatttgcgttttgaaattatttaagcactctatcaaattatgtctcacattctaagtgtaattttgaagttatcgtgattaaaattcatcacaaggagttacgaaaataagttatccctaactcgcagtggcacctaccgtgcaccaaaaattggctttcaccactagaagataatttttatggttagactatcatcaatgatggaaacacttaatttatttatttttttctatttttgtgggcctcttgaacttataaaaagagagctctcttatgtcatttttcatatttagaaaactgttgtaatcagagcttctctctctagactttctctcctagagtttagaatttctgatacttagtctattattataattaccatctcgcgaaatataaaaattcgaagtagacatagccccataattatcgcgacataagggtgtattataaattttatgtgtctctctaaattatttacttaaacttaataatcatctcgctaatctagcgaactggtgttggccatttttcaaagtcaatattctggtgctttaattgagagtcacaatttgagttccccatctacagtttactttctttgctcgaagctttgttccaaaaggaattcataagttcaagcaaacaatcaaccatgaacatgcaaagcaacactacaactcctggtagtcacgccactactcagcaagcaacatgcactgagattccccacaagaaagaagactacgagcgagtgtccaaaagggcttaaactcggaaacatggatatatgggatcttcgcctgatacagagcaatcacctgttaggaaaactagctacgagcgagcatctgaaaggactcaaattcaagatcgtaggcctacaggtccaccacacacagctgataggaccaac

SEQ ID NO: 385357 - DNA, 1325 bp, Cannabis indica
aaaaatggaagagtatcatcctaaatgttgcggttttaagttttttatttttattttttctcagaatgcggatctttacaatgccaatttagaaggagctatactagaaggggccaacatgaaggtaattattaaaagctttcagggtgttcttcattcaaaacatatgtaagacaaatttatgttagaactgcttttacaaaaataacgtgtttgaaagctgttataagaagtgatccttgaaaatatctgctatggagtttttctgaaccataaccatagggtcatattcaagcccctccatcgccatgattacgctgaaaaatcatactctcgcaccacttagaaagacgagagatagagagagaagagagtattaaatttaaatcaattaccatatcattcaagagcattagatagatttagtagttggaattgatctgtttcagggggctaagctgaataatagcaatttgaagtgtgcaaaccttcaacgagcttatttacgacaagtcgacttgagagaaacagtaagtaaaactaaaacccagtttctctgctacaatatatcatcatattatgttctaactcattattctaattggttatataatcgagtaatgtaattccttttccatgttttcagaatttagaaggtgccaagcttgatggtgcaaatttacttggggcaatcagatgacagtaaagcattatattgtattatttgtgcattaatttaagattatctatgataccctctttaatttcttgttcatatactctggccttgtaaatgaagtgttgaactcaaatttaagttataagttgataaaatcttgtaaatgacactacactagccagttgtttattataaactttgatttatttttacctgaataattattatatgtgtatctattcttaatgaaaagtactttggaggaaaaatagtttctcaaaaggtttttttgggagaagctataaatcttagttttttttctaaaaaaagacttttaaaattaaaaaaaaaaagactattttttatctaaacacttttagaataatttttttaattttataagttaaaaaattgcaaatattgatgaaaaaaattgtatttgagtgagttgaaatttgtaattactgattttccttgttctttttgaaaattataaaaagaaaacaaatagaaaagttctctgttttttccacatagagatgtcaaaatatcacattatgtgagatttagctcgcgtttaatccacatcgtatttttctaaccttttcataaattttgattatgggaaaaaagttttttttttttt

SEQ ID NO: 385358 - DNA, 789 bp, Cannabis indica
tttttttttttgttttaatttttgagtgtttttgttcttgacaatgttgttaatcccgcttttttaaatttcagaagatcattaaaaaagtgatgatatcttctaatttcacaagctttgaatttcttataggtgatggattatctttgaatactttaggagtttgtgtttggagaccaaatggtcaaggggttgatttcttgaaagctttacaagaagtctatctaaaacttgttttgaaaattggcagttggtgttagtatggaaaggccaacctctaattggtgcattccaatgtaaaaagaatcttttaagtttaggaatattgttaggacgttacattgagcaatataggattgattagtagtatataattatttggacacccttctattttaggttagtttttgggagtgagttctatttaagtggttctgtcaagtggtattagagtcatgcaccttcaagtgagaccgacgtcatgaacgagacgacctgtcaattaggcctagagtgagcaaccgtagagtaagccacggtagagtgggccgccgtggacgtcgactccaaaagggggttgtattgtttgggtatagattggttagtaatatataataatttgggtatgctcccgttttagtctagtttttggaattgaattctatccaaatggtatcatgttcttcttctttaattttgtttgtcctgatatcttgaagaattgcatggagctctgcctggacactcaatctgtttgaagagttattattgcttttttattttttttat

SEQ ID NO: 385359 - DNA, 1863 bp, Cannabis indica
taaagaagaaatagtgttctaaggaaggtgaagtaactataaatggaggaaagtatagtcttaattctaaatgatttcaggaaagactctttgcaagttatttggttgtgccttgtattgtacccttttcccactaacaaaacaaaataagaaaaagctcaggcttcagtggattaatccttttccttcctctagaacaatattagataaaatatttaaatttctctttgcttgaacaaattaagatccaatataagagtcgatgttgaagcatatcattctttctgggaaaaaacgaccaagcataactttttacagaaacaaggagccaagtacaagggacataatagctcacttacatgtagcacattatacataagcacattcaaccagtttattgcttgatgtctttgccttctgattcctatgcattgtcggaaccatcatcgtccacatttcaaccagtttcttgctcgaattcttcgccttccgattcctctgcattgtcagcatcatcatcgtccgcatcattatcatagtcttctttatcgttgtcatttgttgttttcccaatcaccaccaggttgttattaatctttccaatttcattcagctgcaaaaatattcataccaaagcaaaacagctcaaatactttagaagaggaacatagaatcagtggaccaagtcaaagaatattcacaccaccaggttgttattgaataattgagcagcttcaaacatgaagtattgacagaaccagttagctttatttcttcttttatacttattctctactgaacttttcaacgttagtcagagaaactcaaccaaattactcagttacaaactacaacgaggtgaccactggatgatataacagctttcatcatatcgtagcaattagattataatatgaactatacaaaaggaggctctccaagaagactttgtgtccataacaattacactattgatgctatgcacttaaaagcaattttccaaaaagaaaagattgtgattgtggagaaaagaaaaaggagtagattccacactaagctgttgcctaattaatttggcacagtaattgactgaaatcaaatattaccaaagttgtaatgaacaaattatgaataccaaagttgtaatatactcaattatagtaagtagttttttttcaaacaagttatagtagtagtttaatgttgagaatcatttgagttttaataaaggtttcatttttgtaaagaaatctcaaagctttaacaaggccactctcacaaaaagaacacaatctatcatcagcaatatttcaagtcctagatattctttagtcattttctactaatattttaaagacttcaagtaaatgagaaagaatagaactcttcttctttttcatttccctacaatcttaggaaggcaaataaacccatggaaattacaaggaaaaacaccaaaatgaatgaatgactactaacaaccagttctgttccaactgtcgtggacagttagtttttttcagttaacacttcacactcttgagcttgggtaattaggctgttattttttctgtttttcttttcatgtagcctgtgtatataaaggcatttaggttctcgtttgcatttgatcaaagcagtgagattagattgaaaggggtgagaagaaacagagcgagagagagagagagagtaacgattccctttattatgaattggataaaatacaataatgaaaggaaagccttatataggcagagaaacaatacaattggtaaataacagaataacaacttgttataacagaataccctaaatgaactaactaacttaacatacatattaaaatgaagtaattaagat

SEQ ID NO: 385360 - DNA, 1282 bp, Cannabis indica
ggctaaagcaactctcaaaaggaaaagaaaaatttgatagagtctaaaaaacaaaagttagtaatattatatatatatatataggaagtacatgagctaataaagtctaagaaccaaagacgctttcatcatcatatcatgttgataagctattccttttctattgataaagaagaaaaaaagaatactaaaggggagtagcaaaaatctaaagatatttgcttttgatgatatatatatatatatatatatatattaacatatataaaattagatcacaacagggatttgggaattgggactgacatataatcgacaccgtggattcggagatctatttagctttttctttttttttttttctttattttcaatcaaaattaggattctctatttaatcacaagcttctttctttattcaattaaacagtagaaatagaataaaaaaacagttatatacaaataattatgatgagttttgtcttaataatgattacatacatagatataatgatagatgagataatatagttatatcagtttattagctcaatttatacattgtaatatataaaggtttatttaaaaaaaaaaatatgcatctcattaaaaccctaatcatttaaagaatgtggtggtgcaacacattatcatatgttaaattaagtagtaattattattattattactattattattacctttaaagtagaagaaacagtgccaccaagagaatcatcaagaagacgatactcatgcataacccagttagttctgataccatgaggagctcttcctctgtaataaaccaaggttttcttcatcccaacggggcggcgttgcgagtgaaccgccctgtcctttccggttgccttccaataaccagctcttgtggctctatttgttcttgaaccatttgggtactttctatcccttggactataaaagtaccactccatgtccttgctcggcaaatatgacttctctaaaattcagtacacatatacaaatccttaattaatgggtttaacatgaattaattaattactaataataataatatctccttacctggcaaatcccatggctcacacttgtagagatcaacttctgggataatttccagctcaattgtttgacctgtgtatttttcgatctagatagtaagctacgagttcttcatctgttgggtggaacctaaatccggggggaagactcattggagccattgttgtgttttgagagagagagagagagagagagagagagagagtagtgagtg

SEQ ID NO: 385361 - DNA, 1089 bp, Cannabis indica
aagaagctaagcaaagtagtttttggtttaataaatcacttcatttccttctctctttgaattttcttgaactttatacatatttgtgagaagtttactaaatctttagaattacaataacaccctccaaaattaccatttgagaactatatatgccaattaacttaaaaatcaatttgttaaaatccatgtgatggaggagccgagtctattaatcatattatggttgaatgtttgtttatttcactttgttggaaatgatttgatgcttcgattcttagaataccacattctattttttttcaactgattttttaatgttttgactgatttctcaaaggataaagctagtcaggtggtaatgacttgttgggctttgtggcgtgctcgtaatgagttaatttggcaaggtaagagttgtgttgctaatggagttgtttcatctactattgtagtattgtttatcttaattaatggcaagatgctcaaaaagatggcactaatgtaagggaatctgtttcttcttctgctgttagtagcgagcattagattttacctgtcgaaatatgattaagatcaatgtagatgtttttattgacagtgaaaataatagttttgggattgattgggtagcgtgtggtcatagaagaaatatcattgaagctgattcaaagttgttgtctggttgtatacaaccaaccatggcagaagctgtaggagtcaaaaaagttcttagttggatcaaacatcaaaatgtttctcaaattgttattgaaactaattgttaagtagttattcacgcaatctgtcattactttttgaatgttttctccttttgggttgattatttctcattgtaaacatctattttctattttaaataatgtctctataattttttaaatgatctgcgaataatacgaccatttatttagctcgttacactttttttttttttttcaagtcgtcgatgcaatgggagatttgtccatagagaactttcagttaaaaaaatacaattattcaaataaataaaaatatatatttttgttgacataaatactttttaattctttttttttatttatt

SEQ ID NO: 385362 - DNA, 1608 bp, Cannabis indica
tagtagccctcatagtttcctctttgtcgtcttttccaggcgctgttgtccaccacattcccagatctaccaacaccacagctcatgaccttgccagatcatccctcgaaacggacaaagagataattcgaaactttttcagttcctctccttgaagatcttagccctgctttagcttttggtttagatcttactttttaaaaaaaaaaaaaaaaaaaaaaaaaaaaaatgggagcaactaattttggtgttgctttcggggaccaattaatagtttaagccaattaaatttttttaaaaaaaaaataaatgaagttggaaagcttttcatgttagattaaagtcttcaatatggactcatgtatattggtgtatttctttttgaagtttgactcaaataaaatgattattttagtaattgtggatcattaagtattaaagtatcatgggttaaatatctacatactttaagaaataattctaattaattgatgagttaaattagaaatacctaaaattcataacctagctatgaggttatatgctcgtagtggttccaagaaacatgagtaattatattcttattttttccttcaagagataaaattagaaaatttaaagtcttattttcttgaaatatcattatctaaaattaccacaaagattatttctataaaatggattaagatcaatactttttataaattaaggtacgcttgtgttatttaactacttctttttaaattaacaaatattttctttaaatattaaaattctttgtttatacacttgtataagcctgtgtgtttataaatttgaacattcacatgttatatgaattctaacatgtcacaaagttatttcccaaaattttcattctacattcacattatgaattattgaccttatatctacaagtcacttgtgtggtagtaacttgtaggtcttaatcccatagaatattggtaaaagaaaatgttagctctctaaatgcaaaattttcagtttataatgttagctctctaagtacaaaaatttcagtttataatgtaggattcgcatcaataagattcttacgtgtttgcgcctcaaccgtgcaacaatcatatttgtctttagcaaaatgtgattgctatttttgagatatcaaatatagaatcgatcggtctattaatatccccatctagctattcgcgaaaagcatgtgtcacacatagaagatatcttctctttaatcaaatctgcactctctctctctctctctcataattgaacatcaatgattccaatcatcactatctcttaattatggtatttcgtttgcttccaaatagttttctctatcttgcttgtaattgacctttgtatgtaagtgatggtacataaagtattaatttgtgtgtatttaatttttaaaagtttaggtaaaagacggtatttatatgattggtggtatttattgttggagatttcttcattacaaccaaatacatacaaaatgtatagcatcaagatcacaacagtagaagaagtagagattacaaccctttgcaataataatatgtaaagtttttttttttacaatttagttgacaaaatattttttct

SEQ ID NO: 385363 - DNA, 1596 bp, Cannabis indica
tacaaagatttttgtttaaaaaaaggggaaaaaaacattataaaatttggctaaattttaccattaaaattcaaaatatatgataataattaagctgtatacattgtaattcatttattgtgtatgcgtttttattaattgtaataaagacatatgcactcacagttgtataaatatttaattagtcaaatatgtgtatttgtatgaaactaattaattaaaaaaattgtctaatattataaaaattaactagaatgattatggagaaattatatatttggagaatatataaaattaaaacacaaacacttgtattacattaaagataggattaacacaagtcattacaaacaaagttcataacaacaacaacaacaacaacaacaacaaacaacagactcttacagaagactcttccttcaacttctatgtttcaggatattgatttgattaattaataattaagtaaactaattttatgttccacacaacttaaacaaaaaacacaatagaaaaccataattaataataatgataataataataataataatcaaagtttaagagataaatcaatccctccagaattattattattattattagtcttcacaaacacctttcgggtgacgaaattgaccccgccatcagcctcggtatcggtatcgaggacagttctcgtaacatgaaaggtgttcggagcaccaccaccactgaggcttccactagaaaggaatctctgatcaattgatgagcattgtccggggttgaacgtcgagggctgccttgaccacgcgcctatgccgctgcctctttcaccgctgccaaattcgggcccgaatgatgacctactgtaccatgagtagggattaggcctatgataggattccatagtggaattggagagtgaggatggtctattgtaagatccatagtagggtgaagggtagtatgggtaataaggcgagtagcggtggggcccaccataaggcccgccataaggcccaccataaggcccaagcttatcatgaccttcatcattcccttggcgtcttttcgccatgagacgctcatgtttatgagcgttttggtgaccacccaaggcttgagaggtcgggaattctctcttgcaataattgcaagggaaaattctattaccttgttcattgtaagccggaagtagtgaagcaggaacagggttcgaagagagagaactgatgagatttagttctttctttcttgaattactgttgctgcttccactaccttcagctgtcgtcgtcgacataggtgacggcggcgacagcttcagatctagctcaaaagaaggttgttttccgaaattattataatatgcaggcacaaagacaacagtcttagaatcaccatcatcatacctttcccccatgttcttcatatgcagttcgttctcggctgcggagatcagcctcgggatcctagatgaaaaaaggggtgagcaccaaatccctccatgaataagaacaagtgagaataagagagagaagagagaaaacttaatagaaaatataaaaggtgtttttgttgataggtataaactcttgtgttctttttttc

SEQ ID NO: 385364 - DNA, 1079 bp, Cannabis indica
tggcctttgtcaatcaagtcttataatgcaaatagaattttgactttatttattatttaattttagcttttatcacataatttattataattaactcgtgcaattattttttattttagcacggtagaaaaatctcttatataaaggatgagaataatgaagtgctcgaagaacaaacacaatacatcattaaattgatgaagtctagataagtctataagtttagaactttaagttattctttctaatataaagatttgtggtattttattatgtgtaatattttaaaaatttgtacacaatgtaaaatattattattgaagttactaattattactgttgtctttaaaaattatattaataatttattttttagttaactttttttatacatgttctatataattataaaaataaaaattaaattcattatttattaaaaaaaatatataataaatttttaaagaaatctaaagcaacatatttattataaaaataggataaaagggtaccttttataaaaagtattctttttatcccactgccgtatattctgatttttattttaccaaaaatcaagataaaaggcctttgtttgtagtaatggtacggttcagccctaccaatactagtaagagatgagtacttagtgcatgtggtacagaagtcgtacttctgttaagccttgtaaataggtatatgggcgcctaaatataagtcggtgatatattatattatatgtttttcttgctgagtctgtcgactcacagttattatttacatgtgtaggtaaaagaaaggctaaggttgagcaacagtgagtctagagctcgagaataattgtacatatcacgatggttaaacctaccaagttcgatctcagaaagatttgggccttattttgtagtcgctgtacgttatgtttttaaagtatattttgaatacgtttataaattttgaaggcgggatcccagttcgtatgtttgaatatatgtgtatttacaatggtttatagtttaattaaaaagtttaaatttgacatgatttttgaaaaatcttttgattagcaaaagtgtgca

SEQ ID NO: 385365 - DNA, 980 bp, Cannabis indica
tgaagagaaggtgctttgggctggtaccatgagggtacattaagctaatgctcttagtaggaaagtagaattttgtttgttggcattggatcttgctgctaagaaaggcttacaatttgttattgtggaatgtgattctaatactgtctttaaagttgtcaaggggttaaacctcagatggaaaattgataattttgtaactcaatgtagatgtctcatgaactcttttaagggatgtaatttttcgaaggtgtctattagttatgtagctcacaatttgatattgttaatattgttatggccatgagacctaatttatttatttcatccttaagttgatagaaacgattagtaataggctaatctgattagaggactacaaatattattatagtaagttacattgaaacaccatattctaacataacataatgagatcctaacagaaaagatttcttccaggtttaacaccgaattggcgacaatagttgcgatacaagtcaacccgagctttaacttttactcgttgtttaccaccacattctattctatttatttttctaatacttgctccaaaaccttgttctatgacaggactaacattctccacccaaaaccacaaggctgtcttaaaagaaataacaggatcattggccactatttcaggaaaatttaacccatcgaagttgttggctttcccagctcctccataattgtaattccatgacaattggagaggaccacgcccatcgtatctctttttcgggttgcatggatattgcttataactttgatcgcaatacttttcatttcgatttccaatctcttccttgaagcaaaaatctgctcatcaaacaaaataattgacttttttttacatctaaaaatactaacaaacagttaattaataagtatgacacattctaaaataataaatgaaacataaaagagagagagagagagagagagagagtagttac

SEQ ID NO: 385366 - DNA, 2188 bp, Cannabis indica
tttccaagaatcgagaattgaatcgatttaagcttttcgtcattcaatttaatttctttctcacattcgtgaattgaacttctaagcactctgagtatctgttctttctgctcaatttcgttcttatgatcctcaaccacacctcgaaccgaacgatactgtctatccttcacatcgagatcatctttgcatttcctcagcattcctcgaatcgaatcaagttctttcttcttagtttcaacttcgtcagacctttccctaatacttctctccagagaatccaatctccttgtcctctctttaatacctttcgccaaatgctccatatctttttccttctctactaacgatttctgcgcctggtggtatctcctcacagtatcctcaagttcttcgcgttttttcttaatcgacaaatccaacgcctggttacgctcttcgattcttttctcgacgccattcaaattctctgctttcaccgcaatatccacggacaactgcgattccttggcttccaactgcttctctctggcttccacattcttctcccgctccacaagctcttcaagtttctcattgagcgttttccgaatggagttaaagtgttcctcaaggtctttccattgaaatgttaacataagcagtgtagaagcttctgtattcagaacttcgtaagctttgccgagactggcttgcttcagttctgttactttcaactccgacgctacttcttccatttgcaatataatgagagacaaccaaatcgtaaggactaagtcactagagtatacactgaaaaatcactagcaagtgttgttccgccattagagaatgatgcttgaactcgaaaccctagaatccagaaaaatatatattttttcttcaaaaaaaaaaagtgaatatgtaatgtaggacttgacttgaggaatgaaattaaattaaaatatttataatgttgagatatttccggcattatataaatttttgaggaaagggaggattggactacaacggacacatttgtttaagggccactaccactacacacgttttccatttttatttttggccaattatttagaacctcacttcaaaaacattttgaagtgtgagatctctcaattcaattagacccgttggattgaattctaaagtcaaataagttaaattctatggatggtaattgtacaggggtaaagtttttaaaaagatgagcaatccactaatttgtttgaaagtgtattttataggggagaaaaattgatttaaaataattcagtaatttatttttgtacgttttattgtattatatctttcatcatctcaattcgtcctgagttttttattttcttttttaatgtcaatttagaaaagtgtaccgttacaaaaaagaatggttttaatatttttatgattatatatatactttaaaatacggaagtttaattttttgcagtaataatagttaaattatattttaaaactctgtaggcacttgaccgttaaatattaagtcattatctacgtgtcattttcttattggtatatttaaattaattttttttaaaaaaataaaaatttaatgacttgaaccaatcagaaattgtcacgtgtcaatttacttaacacttaacagtcacgtactaataaaagttcaagaattataacttaggtattattattatcaaaaaattaaacataagtatttatttacagttgggacttaaatttaagtatttaagttaaaaattattcatataaatataatattaggaacagtttactgctaaagcattaaaaaatctattttactagtggataaatgccaacacttttttgtggcaaatgtattgcaatattattttttttaggagtgacaaaatatgtcatcatatcgtgttcgtgtcatattttatgtgactgcttctacatttcgtgttaggcgtatcgacccatttttgactcatgtctaattttctcaaccgtaaccctccgtaaaatttcgtatcatgttcatattgacccactttgactcgtttcactattactgaagctagagttgtagaaaaaataatagatttaagttaaattaaaaaaaactcatatacattatgtatatataaatttttttatatataataataaaaataaaaaatttaaaaatatttaaaaaaaaattaaagaaaaa

SEQ ID NO: 385367 - DNA, 1061 bp, Cannabis indica
agggaaatggcgattgggactcggataagctttgccattgatttgtacctagcttagttgattcgattctttctttgtcaaggtttccacctacacaccctgatgaactcattaggggtgggccatcttgaccctctgcaaaaagatctttagaagtttaagatccatgaatggctctaccttttctcgtggaagcttggtagagacattcttccttttgatagtcgtctccaacaagtttttggaaatagtatgacttgatccatctgtcatgttggtgaggattccttccagcatctcttttttaaatgtcttgtggccaaaggagctaggttttttattttgtggggtttaagatctgagaatttatattttgataattattttgacttattgaactagatcttaaatgtcaatcttcatctcggcatcccccttgatctcaaggtgtaatttagtatttttgtaggttgtctatgctatgatttgtggatggcaaggaataaagcttattatgagggtgtttatccaacggtagctggtatcaaagctttagttcaaaactgtgcaaacctgatatcccaggtcgtgacccctaaaataaaaagatcttctatagctcctagagctgaggacgtgatgtatgtcttcccattaggcaatgtttgtatttttatggatgttgcttgtagaggtttgtgggctacgggagctatcattgagacgaacaatggcagaattgtgttggaagctttgatagtcaggtttgatatctcctctccccttcaagaagtgaccttggttcttcttcatgcagcttctctctgtctcttgcgtggctggcaaagttcggctctcctttaagattgtaaagtgttggttgatggtatttctgctaaaagggccccatgctggcaatataagttttggtttaatcttctaatggatcgactagattctttgattgatgctcgggtggtgtggaattcaagactcttaactttcctgctcatgctcttgctgcgtgggctgctagtcattcttttcttttctttttcttt

SEQ ID NO: 385368 - DNA, 1693 bp, Cannabis indica
gaactgcagcaaatttcctacaacagccttaaccaaaattgtctttgaataaaaagaaaacttaaattaaagagagacctttttattttattttttactatatatatgtattaattgttttgtttgtgtggacatttcaaatgaaatcagtattattatttattttaattatatatgcatgcagagggagaaagttggttttttttatatccaaccttaaccaaaattatctttgaataaaaagaaaacttaattaattaaagaaccttttttaatgtattaattaattattttgtttgtgtggacatttaatatgatgaaacattgaaacctagtaaattttccatgcatgataaccactaattaaggtagctagctcctccctttaattaattaattgattgtaatattattcagtgattgatattaccaaaaaaaaaaaatccaatatatatatatatatatttatatatatgtatataaatgtgtataaaatatattaagtctcaaaagaagcacttccatacaaacaataagacaagttatttacgtatgtgatagtctctttaaagattttgtcacatgcaaccaacaacaacaacacattttctatatacataaaataaatgtatataattttatttttatttataatggtatgtagtgaaatatatttgtcttttattttgatttgtaatattatatataataatccaacatttggctcattagatagtgatatatatctagaaatataataaagatataattttatttttatttttatatgtataatggtaagtagtgaataaatatttgtcttttattctgatttgtaatatttattatatataataatctaacattttggctcattagatagtgtgacactatatatatatagccatggaaacctacactatcaactgcaagaagattcatcttttgacttgaaatatttgctagctttttatatcataatcaaagatgtttttttcaactttaaattattataaatatcttaattaaaaaaatggattatgagtttacacttatatttacacgaacggtaatgggatatggcatcatcatcataatcatcattaattatgatatttcatcatcaaaaaatgacaaaatttagtgtttgcaatttagtccttgtaaaggttaataattatatcataactaaatatagtacaattttcacactatttgctttctagagcgcgctacattaaggagtgtagtttaaaatgaaattaaataccatttaatttaaataaatgttaagagttggattaaaatctgattaattagtacaataattcataatgcactatatataagagtattttgcggcgtaaatactttagtttaattaactctcagttatagataaatagttaagttatatatatttttagaattttcgtagttatctggccgtgtcaagttattattcacatgtcatttcttttagtatatttaaattaaattttaaacaaaaaataaaatttaatgacctgaaccaattaaagactgtcacgtatgacttttaacaatcaggtacttacaaaatttttgttttataggtgtctgactgttaagtgttaagtaaattgttacgtggaattagtgattggtcctaattcaaatatatcaataaaaaataacacgtggataatgattt

SEQ ID NO: 385369 - DNA, 2308 bp, Cannabis indica
  modified_base (30)..(30): a, c, t, g, unknown or other
cataggcacatcgttgaaatgggcctcacncttttggctcaagctcacactgcctcgtaaaaatattcggtgggaggcttttcaaacatcggtctatctcataaatagactaccaactccaattcttaacaacaagcccttttgagtgtcttcattctagaaaaccagattatgtttttctcaaagtatttggagttgcatgttttccatgtattcggccctatcaaactcataaatttcagtttcactccctcaaatgtgtcaatttgggttatagtgaaacacacaaaggctataagtgcttaactcccactggcaaagtctatatctctagaaatgttgtatttaatgaacttgaatttccattcaaatcaggttttcttaacaactatgctgctgaaaaatcagtgataattcaaagcaactcttggtctatatttccttctttctctctgcctacaggtcacacttcagcaacctttcatccatcctctagcatgcctggaagagaaccttcaacaccaacacactctcaggtaaacagtcccaattctccattttttattcactcacctggtgcttcctcggtatcctcagctccaggcagtgagaggggaataaatgtcaatcataatgccacttctagtgcacctactgctgcaatttttcccattttgcccgatactgttgctgcaccatcagcagaccagtatcaacatcctgcacctgaacccgtggttgctcaagggcatctaatggtgacccgtgccaaagcaggcatcttcaagcccaaagccttcatgggacaatctctatggcagcctaacacttcaattcccaacagtgttgaagaagccctttcccatcctggttggaataaggctatggatgaggaaaatactgctcttaaaaacaacaacacatggatcttagtacctcctgcatctgatcaaaatcttattggcaacaaatgggtttttagagaaaaattcaattcggatggatcccttcaaaggctcaaagctcgcttggtggccaaaggttttcaccaaagacctggcattgattttgctgaaacattcagccccgttattaaagcatctactgttagaattatactaaccattgccgtcaatcgtggttgggaaattcgacagctagatattaacaatgcattcttgaagcactctagaagaagatgtttacatgctacaacctcaaggttttgaagaaaagggcaaggaacactatgtgtgcaaattgaacaagtccttgtatggactcaagcaggccccaagagcgtggtttgacaaattaaaggcaacgttgcacagctggaactttgttaattctaaagccgatacttctctatttttctacaaacatggtactgacattatatttgttcttatatatgtcgatgacatagttgttactggcaacaacagcagaaaaatgagaagcttcattgctgaactgaataagaaattcactttgaaggaccttggtcctcttcactacttcttgggaatagaagtgttcagagatgaaaccggcctctatttaactcaaacaaagtacatagaggatctactaaagagagcaaacttcacaaacttgaagccttgtccaactcctgctgctgcaggaaaaccaatgtcactaaccgatggtgagctattatctaatccaacaacctacagaagcttagttggtggcctgcagtatctatgccatacaagaccagatatttcgtatgcggtcaacaagctcagtcaattcctaaaggctcctacttctacacattggagtggcatcaaaagagtcttgagatacttaaaaggaacaatgaacaagggtcttcatatcagctgtgatgaaccactcaacatcactggtttttctgatgccgattgggcttgctgcccagatgacagaagatcggttgcaggctattgtgtttacttcggcaacactttggtatcatggtcctctaaaaagcaagctgttgtagcaaggtcaagtacggagtcagaatatagagccttagctcacgttgctgctgagatttcttggatagaatcactgctcaaggagttcaatttcatcacacctactgcaataacttggtgcgacaatatgggagctagtgccttagcctcgaatcctgttttccatgctagaactaaacacattgaagttgatgttcacttcattcgtgataaagtcttaaacaaacagcttgagataaggtacatcccatcttctgatcaagtagccgattgccttaccaaaggcctgtcaagtt

SEQ ID NO: 385370 - DNA, 1450 bp, Cannabis indica
tcaactgtctgatccttacaaagccttttgtttttgcagttgctactatgaaaagaaccacagacatatcaagaggctattcaattcgaacaatggctcaaaagccatgaaccatgagctcacgacactcatacgaaacaagacttggagtattgtcaaactgcctccaaacaaacgagccatcggatgccgctgggtctataaaatcaaattcaatagcgatggtagtgtcgaacgacttaaagccaggcttgttgcccaaggctatacgcaacaagaagtcgattttttcgacactttttctcctgtagccaaaatggttacactaaaacttcttcttgccatctcagctgtaaaacaatggcatatattgcaacttgatgttgataacgcctttttaaacggtgacctcaatgaagaggtctacatgactctaccaaaaggcttaactcttccttcttctcttattgcagaaaataatctcgtctgtaagttacataaatccatatacgggctcaaacaatcatctcgccaatggtacaaaaagctctccgatgccttactcgaagaaggattcaagcagtcccaagcagattatactttgttcacacgaggatccaatgatactttcatcgctctcctggtttatgtcgacgacatcataattactggacctaatctcgcacttctacaccaacttcaagcctccttgcaccagaaattccaactcaaaactcttggaaacctgaaatactttctcggtttcgaaattgctcgtgcacaagaaggtcttttcatctctcaaaggaagtatacacttcaactacttgaagatacagggtttcttggcagcaaacccagcaagactccaatggatcctaagcttaaactcgacaatgaacatggcgagactctagacaatccatctacttttcgacaactcattggcaaacttttgtatctaacattgtctcggcctgacatcacgttcgccgttaactgccttagccaattcatggccactccacgcacttctcatcttcaagccatacatcacctgctgcgttatctcaaaggaaacccaggtcaaggactgctctattcatctcattccgctctgactctccgtggcttctctgactcggactgggcatcctgtcctgttactcgacgatccaccacgggatactgcatttttttaggcgacagtctcatctcctggaaaactaagaagcagcccaccatttccaagagttctgcagaagcagaataccgagccttggctgctaccacaagcgagataacatggctccaataccttttacaagaccttcaaattccacagcaacaccctgcattcatttattgtgacaaccagtctgcaattcacattgccaacaacccgacatttcacgaaagaacaaaacatatagaactggactgccatttt

SEQ ID NO: 385371 - DNA, 1126 bp, Cannabis indica
cctaccattccttcctacactcgaggcactaccaccattcaagcagtagaagataatcttcttacaagagatcagatgtcacaagcagctgaaacaaaatctccaaaaagcacaacatcaattgcggtaataggccaacaagaagtatcgggacattgaatttaagctaggtgatttggtcttggtaaaactccaaccttaccaccagaccacagtggctcaacgtcttaattcgaagctttgtctccgttattttggtccctttgaggtgatatcaagggttggaccaatcgcacacacactaaagctcccctacgacagctgcattcatcccacagttcatgtgtcgctcattaagccttttatgagaataaacccgactagttactacctccaccgaagttcactgttgccaacaaaccaattatgactcccttagcaatcctggctactagaattcagcaacttcccaacaaaatcgtgaaacaagtgttggttcaatggtccttgagcaaccccgaagacgcgacttgggaagattttgatactttcatgaagatatattagccgcataaccttgtggacaaggttaatttcgaaaggttagtagtgttagcaaggcctaaactgtaggcccaatcgaaatggatcccaaagaagtacatgaggggatatccaattgggaaagagatgcaaaccaacaaaaggagcccaaccaagctcaagtcgatggtgaagaagatgagaacatcgcagctgcaaatggagaggctcgtaacataaaagaacatgtaaagccaaactggctgagggattatgtaatgagaatgggttgttatgagtaagttttgaggtcataaccatttatttttgcatctattaactactaagtataaaaggagcattgtaattttcacaaaaaagcatgttgaataaaatagcaattgctaattcaggagacttgccttgtctcgaagaaggctcttcactatcagaacaagccagcatagtcgatcttgggctaacacgagttgagttcctaagttaaaaggttttattttgaaaaatactatattttttcattattaaaaatgtctaaacatttctaatcattttatatatatat

SEQ ID NO: 385372 - DNA, 1685 bp, Cannabis indica
ttttttattattgattggatgattattgaattggatcctctccacccttaacttgtatatatgctgtggggatttgatataaatacaaaaatacgaaggaccctaaacttagaggtaggacccgttttataaatatatgcatgtgctacttttaaacaatgaaaatgagcattctaataatgtatacgtaccgtaggaagaaggctgtttgataatgctcaaaagtggattataaggattggaaaagaccatcttgagctgtgggagttccttgttgagtgtagaaatgagtttgtccaatttcccattaaattccaaagacacagcattgtatctctccacacagttattttgaccaaacaaattggtggtcctctccaagggtaggcaccccataggagggaggcctccaagggatatttttcgagccccaagtgcgtagagttgcctgatgaaattcccagctataccaattagaaaatcttggtactgttggatgttgtacctggatgatctacctggcatggtgtagtagttctctaagaagtcgtttgttccaatgctatcatgtaaagagcttcccctattgtttcctttgccttttcttctccttgatatgttttcagtttcttttggtactctttgtagtattccaattccttccaaagtggtattacagactgcacacatacatacaatatttattatgtacataaattaatttccatggatatatatctcttatgtaaataaatatagggaaaactcttttaataattgttcttgtatcatgatgtatttattataacaatctttcaaaaacaaaatctaagttgctaaataatttttcttttcctttattgataaacttttgggttgagaataaaagagagaaaattaatgaagtgtatatccaaacaaacaataagtaccctttcgaaaaaagaaacaaaacaaaaaaaaaacacacacacacaataagtatacattattaaatatatattgtctggaaattcagtaatatataaaaataaatattgttgattcatttcataaagttcatgataacatggtttaatatatgtaacaatctagtagatgggatttggagtgcgtgaatatgaatgtgagatttattttagtcaccaaatgttatgctaacaactaatagaggattgctattacacactttacccaatattatgccgatgtagtgtagatggttaggttttttttatattatttattaaagtaaaatgttaaaaaggtatgagtgctacttaccactctttttattatcatattagtattacagcaattaagtattaaattttataaaatttaatagaataatagaaaatattgttaaccaattccaacgcaccacctcttaaaagtgttagacatcaactagtgtccaattagaatgctttttattaaatcaaaaacgatttcacacttattctagtgcttgatgactttaagtttaaggtgggtttagcatatctctaatttatagggctatttattaattctctgaagtacatgaattaaaatcaaagcagaataatatacatagtacacgttatagttggcaataaaaattgtacaaaatttggtagacaatttcatttattgggtaaaatattatagtttagaacttttgtttttttgttttttgtttt

SEQ ID NO: 385373 - DNA, 1349 bp, Cannabis indica
gtgacacgcttgtctttttcaaaaggacccatagttttttctttattgtctttttattaaaggtccaaattcaaagaaattgatcttatctcctcttcttattaatgttacgcgtagctggaataaaaattggaattggaattgggaaagaagcttcaaaatcaaccatgactaagtcaaccactgcaggcctagactaagtctcctataaaccccttctttactcaatgttattaatacctaattattacaactaattaataattatgttgttcattccattacactattcatagttgaattctctaatattatatatctacaatgaaactaggaagaaaagggtatactaattaacgatgctactaggaataaatgggttgtatttatttaatttttatttcaacatatttggttggtagctattaataagtataatttattatatatttatttgagataaaaaaaattaatatttttcgcactcttttaatgttttactgttgacaatttataaatcatttagttaaagaagttagagttttttttttaattattataaataattggttagcttatttttgttcattctactcgatgaacaatgttattatataataaattatatctgatttatccattaataaaaatttctatttacttttcagtaaaataattctgtaaacttttatgtcgtttagtgtgattaaattaaggctaactaaactgaaggatggggcaaaagcggcgaagcaatgtcgcagtccctagcctaacataccctcttttaagcctcaatttcaaaattggctcattttttttcaattaaattttaataaatgaattaaaaagacgcaatagtataaatcataaatgtataaaaaatgctaatttttcttttatgttataattacatttaacaggtgcagtatatgggaaaattttccatttttttaatgctatagtttatatttattgctctaatttttattaaagagtttaatgtaataacttttaataagtactattaactaatcgcaaaataatttgaaagatatatatttaacactactagtatctaatagcaatattttatatatatagattgtatatgcatgtggtgtttatccatctggtatttatccaatactacattttggtgctaaaagcaattaatatatacaaatacaatgcattacattttttccttcaatctataatacctcaaacaaaatacagtagaacctctattcaagaatagactctgaaccaagcaaattatattctaattgagaggttataactaaatagttatactagaaaaaaaaaattaaaatactaaaaaatat

SEQ ID NO: 385374 - DNA, 2157 bp, Cannabis indica
ctccttgcagggaccaaagaaatatagggcagagacagtctctcgcctttatatcccaccaaacaaaaccctagctagggtttggttttcctttcatgctatagctgggctgggctgggctgggctgggctgctctttcttctttgggcttttaaactaatgggcctacgcctaactactttttcttcatctttatgtatactactcttttttcttttttcttttttgagaatctactactcttttttcttaaatcttacgagtcaggtgaattttcatttttatgagtttgcaaaaatatggtttttattcaaaaaagttattttgtatgaaaattttagaaagagttaagaaaatatagggaaaacagtattaagttaattggttaccctccttatggtacccggttattgattttttcatattagtataagttaattggttatcctccttatggtatctggttacttatttaaattacaattaaacttttttgtgttctttcaaaaaattaaatttttttgtgaaactataatttgaaaggcttttactagatgaagataagttcgcacctagccgaggatgattctgaatgatcactgctgactttccaatcttcaaaactagaatttgaaaggctttcactagatgaagatgagttcacacctagccgaggatgattctcgtaaaggagttgaatgagatcttggttgatatgatgatcacctccccagtactcattagggttcatctaaaaaatgagggagacaaatggtgaaagttggacgggagaaaggaggaaacatgtgtattatgcccaccaagccgaatcaaataaaaaatgaggaatttcattccaaaatggaatttccaaatccaaaagtccacaattacgaagaatattcagaaattctttgaaaacctacgaaagagtgaattcggacaatttcaagccaaaagtgacatggaattagaaagtcatatgacatgagcatatgttaagtcgagaacaagttcaagaacacataaatttgtagcacgaaatttagaaaaacagtgcatatattcaacaaaaaatgcatacataaaaataaaagataacttacccattgtgtgacgctttctcaacgtgctaagagggttttaatgatggagattccaacaacttttctttaaaaattcaagaatgaagaaataaattgtttactctggttttttgagaaatcaaatgactaaaagaatcccactgaagcttaaaacccattttataagtattttagagggataattaattaattcaaaatttaattttttagatttcccctcaaaatggaatgttagcactcattacaaatggcacagacgtcacacgtgtggtgtcgtgcaaccgtcaatgtgtaatttgagatgtagcttttgagatagcattaaatgtcccaaacatcgaagagacattcaatcaagtcacttcggatcagagacaagaactggacaggcgtaacttcgtggtcgagtaagtccacatgcaaccaagaagatctcacgcgaacttggggacaaatgttatccaaatttctacacaatgatgtggcatccatctaagtgacacgtggagtacattccataacctgggcggacaattctactctcagtaagccgtatagaaagaattgattctcaagctcacatacagaaatagtgacaaccgagcagagtatgcatatacaccgttacacccgaccaacttttaacaagcaagtgtcttgcatgcatcgaccaggggatgcaagttagcaatctcagagatatatcttatatgtcttgaagcttgcaagttacgacataatccccaaattcataggatgaatttgtatcttcatagaagaaacgcaaacaacctaaatttcttaatttccttattgtaattattcattttattattgattagggaaaccaatttcatgtaattaattcttataaatagtggactcattttcactatttagggggcgattaaattcagagagaagacttgatataaaaataaattactcagagatagttgtgagagctttagagagagatcaagtcattcttgttcattttctcacaaattaatacaattaaagagaagtaggctattaccaactataaggg

SEQ ID NO: 385375 - DNA, 2806 bp, Cannabis indica
gtagtatatataagagtgtattggaaagggttgggagagagaatgatttagttaatgagcagtagcttttgggagagcactgggtctctcgaatacccagcaatactgtactctttacgttttgctataaatatatcagctcattatttcctataattactactgttaatactaattgataggaaattcctatcaagtggtatcagagcaatcgatttatggggcaaggtatgaaggaaattcgaacggaacttcatcaggcttctaatcaattggagctgatgaaatcatcatttcagatgaaattgaaaagaccatcgagaaacatataagcctggtgatgaatcaacttactcagttgatacagaaagtcagagaggcatgaaacgccaacgacgaacaagtggtgcctgaggatgaaccattgatacctacacaaagttgttcgaggatgttgttgccacaagtaacaaaggcagtgaaaaccatagaggaggacaaacgacgtgacgaagctgataagggtgaaacaacgaagatttcagatctaagaagtgtctcgttaacacttccagccaaacattacgacatggctcttcgagatacgccgttgaagtcgaaccgcagctcaccggagctaaataagatgatcggcgctcagcgagaggataataacactggtatcttctttgtcctacccagtttaagttggtcggaggttcttagttggttgggtgagacacgacgccccttaacggtggaggagctgcgttctggaccgctggcgtcaagctcatgggagttgcagtgtcgatcggcgccagagaagacattcttctttccattagacaccaaatgtgtccgacatcctctcagtttacctgctctgagttgggtaaaaattctaagctggcagggacagattccaacacgaaacctcaacatggttgacgtggggaacactttccacttctcatcgaaaatgtagcgccgtcaactgtcgacgaaggtgccaggggagcagtcgggtctgaacgtatgtgctagagatgttcgaagcttcagtatagttggggttggaattgtaggctctgggctaaagactccttgtcatagtcaaaggcccactcactgtgacctaacccatgaaggcccagttagtaataatatgggcctaatgtttgtttcagattattatgggtttaaaaaaatgggatcctcgtaaggttatatcgtcttttaatcgcacgtggtcacaagaagggttgcgacttatagaccctacttcaggaccgccggcgacggagcaattaagaaggttgactaggacaaaggaaacacgggtggagtttttgttcgatggagtgcggaggatcactactcgctggatttttactagtagaagtgtcaactttgtggtaatcacagttcaagagactaatccaacctttcaatcatttgtctctggtaattgtttctttccttcatctttattctggactaggttggtttatttggaggggtttttagacaaacttcttcacaagagttggaccttagatgattgtgcttcggcctttaatcaggtcatacatttcatatgcatgtattcttggcatggaatttgtgatatctcattggcaggggtgagtgtagaatccatttactatgggttttatttacttgcggagtattctctcaaaatgttcactctcttgaatattgaagcacatagatttgggtcagtggaagagaatagactatggcacccaatttctataaatattaatttgagaataaagaacaaaagagtgaaagaacaagctttggacaagggtagccaggtggagttaagaggtgactcttgttgccactaaatttgcactatgatattgggatacagctgtcatctaaagaaggtgcactcgtcacaattagttgtggattaatctatttaagttggccacatcttgtcatccaatcagttactcaagctccttttgcttgggaacattatgttagtttgtttgaaaggtttcagaggaacctcttgtaccacggattgcagtagcatcacttacaaagctggaaatttaatagtaaggggcagatatttctcttttatgcttgtgcaaccagtgtatttcctttacactgggcttctacttttagagttgaggaacttattctgagaatggccataataaggagtttcaatggagaagacaagctctacaatgctcggttacaaattttaatagctcgactagtgctcttcctagagtcgtaccgagatatatgccacacataaaatttggagatacgtcttccaattgactatcgtagtggagtgccatttcttaactagcttgttgacagaggaggagcgctacacgagcaattgagcccgccaactctattttgctattgaagagacactatggtgtgtttttcatgctcactattatcattatccgggccttttgatgcagcaagcaactacttttcgatcggggaccatcgacgtaccaatttgaagacgcctaaccttgctgccacatttcgaagatcacttgctcatcctaccaaaggcagaattacgactttcctctgatggttttttgagcgatgcttgcttgttaaatggtgtcttcacattcgcagtgtgaacaacgtgcatctgttgacttggttctttgacagaagacgaacaaagactgttgtagaagcttgttgctcttcaccttgaggacaaggtgaatttcgggcggccagtattgttaggccttaggatattaaataatga

SEQ ID NO: 385376 - DNA, 806 bp, Cannabis indica
gtattggcattttcttacatgtttttttaggaaaatagataggtgaacttaagagtgataaaatagggaagttcttcctttaacataagatatgattagtttcaacattaaaaggtgatagataagataaggaaagaagaaagaaataatgctcacatttttaatgctcttgtggttccttaatttatttagaaaacagaaaatattttagaatgataaatttacccaaaacacttataattttgtatttttttttatagtttttcatttggttttatgttgtttttccgaccgtagagtaacaaataaggttaatgttttgtatttttgtaaaagaaaaataataaatttgtaaaaatgaaaatctgtcaaaatttgtcatttttaccattttacggaatatattttagaaaggataaaaaaattagttggcttatgcacatttctgaaggccatatactgtacattcttaaataaatacccaaagatatttgtagatgatgaaaaggccgaagtccaatgcacattttcttactaagaaagacaaaaatattatgaaaataagacattataatttcgaacataattttactaataaatgctaaaatattatgaaaatacgactttatagcttctgcaatgcgactttatagtttataaaatattataatagagttttagtaatttgataaaaattaattttggtgtgattaatttttaggatttattaataataacaataatacagattagaattttttttttttttttttttgagagagaaaaacttgtgcttcattagaata

SEQ ID NO: 385377 - DNA, 1690 bp, Cannabis indica
tctctctctctctctctctctctctctctctctctctctctctctctctctccctcatgttgccaaggaagttttgctcaaaaccattgttcaagctcttccttcatttgccatgagtgttttcttcttgcctgttggcatttataaattgagaaattgatggcaaatttttggtgagaatctggttcaaaggatggtaatgggaatggtatctcttggatgagttgggaccgtatgacgagacataaacatgtgggaggattgagcttcaaaagattaagagattttaatcttactatgttggaaaagcaagagtggaggttgtcaacaaggcttgattctttggttggcaaagtcttccgtgctcgctactatgctcgaggagactttctttcttctgagctgggtgctaatcctagttttatttaaaggagcacttttgcatcaatggagaatctcaaagattgtttgcatcaaagagtggaggcgagaaagtctattcggattgggaacaacctgcggctgcctttggtaagctcttttattcctaaatttcattgtccctggcctcgagtaatttttttggttggaggttatttgaagtcagaaggagagcttaggatgtagaattggttaacgatttattctatatcgttgaagactcatggtattggttccatgagaagagtggccgttatttcgtctatagtgcttatcaaagtctccgagttcttaaaggtgcgttcctaacagatgcaaattttgatttttgaaaaaactctatggaagcttaaagtcccaccaaaagttaaaaaatttatgtggagggtggtggttgtttatcttccatctctagtaagctttagtaataaacatgtaccattacaagtagttttctcagtgtgtgagatttttgcgaaatcggatactcattgtcttatctcttgtgattttgcttgggagtgttggaagatggtaggcatggaggtggtagggagggatatgggttcggttcgattttggttagaggaggtcatgaagatcacaaattcttttaggttgagtcgtgtgtttatggtctgttggcctttatggaaagctcataatggttgaaagctcaaggaagaggaaatattgctctattgcgtcccaagatggaaaagatcaagttgtgttttaaacaagtttcaggcattaagattaacgtagatgcgtctttgttagatgatgatggaaagcttgggattgatcaaattttgtcatacgtgacgtggttggttattttgtggcagctcaggcaaggtgtttctatggtcgagtgaccctgaaagtggcagaggctttgggtatcaaagaggcatggagctggttgaagacgtatcatattgcaccgatggtgcaaaaaaaggttatctttagtgacaaccttttagtcacaacatattttttttgtgactaaatgtgatttttagttacaacaaaatactacttgtgactaaaacatagtatttagatacaagttgtcactaatatagttttagtcacaataagtgttgtgaccaaaatcatatttggtcacaacaaatgaagattgttgtgactaatagttttagccacaaacgttttagtcacaacgtaggaatgataatttgtaattagtcaacaatttttttatttttagtcaccaatt

SEQ ID NO: 385378 - DNA, 2325 bp, Cannabis indica
tgtagtcactacatacgtcacaaacattttttaaatatttatgaagataaagatttgaaaaagctaaaccaccaattattttttaatgagctaaactactaaaacttgaagactaggaatcacgttgctttcttttcgaaatgatgaagctatagctagccaagtcaaacaagagtctgtgtagagacaaatcatttgtacaacaaataaacagtaatagatatgacataggaaattgcgagcattcctattatgacaaatcagtatactcataagtaggccccgattatgtatataaatatgtgaaagaagtaatgaaaccataaccacttcaaaaagctaaatgaccatggataagaaaacccacatagccattttccctagccctggtgttagtcacctaattccctttgttgagttcgccaaacgtcttgttcttctccacaactttcacgttacatgcttcattctcaccactaccgacgattacagtgctccatctccagccaaaaaggcaattcttgactctctaccggccaccatcgacatcatctatcttcctccagctgtcaacttcgacgaccttcctaaagattccaaacctgcatccaaactttccctcatcataactcactccctctcttctcttcaaaccctgttaaactctttactaataagtagtgctactaattctaccccattgactgctttctttgcggacccttttggtgtaaaagccttagaagtcgccaggggattaaacatttctacttttatattcttccctacaaatgccgctgtattgtccttgctcttccacttgcccatgctggacaagtcattctcttgtcgattcatgagagacctacccgacctgatcaaactacctggctgtgcaccccttcatggtaaggatgtgttagaaccgatccaagatcgccaaagtgagacttacaagtcatttctgaacacgtccaaagaggtgtacttgacggagggtatcatcatcaatagcttttcgggtattgaatccgaagcaataaaagctttgcaagcaaatgaaggaatgcttcctatctttccagtggggccaatcgtgcaaattggcccaactaattctaatacgaatgggtcagagtattgtttgagctggttggacaagcaaccaagtcgctctgttctatacgttctttcggtagcggtgggacactgtctagtgatcagatgacagagctggcatttggattggaaatgagtggccagaagtttttatgggtggtgaggaagccagacaatgaatctgccaacgctgcatatctcaaagacagtcaaagccaatttgaggctattgatgtcttacctcaggggtttttggagagaaccaaaggacgaggtttggttgtgcaatcttgggccccacaaactctggtgctgagccatggctcgacgggagggtttttatgccactgtggttggagctcgacccttgagagcatcgtggaagggataccactgattgcgtggccactttttgcagagcaaaaaatgaatgcagttatgcttgtagatggcctagaagttgcgttgcgaccaataacggttgaaaatggcatcgttggacgagatgaaattgctagagttgtgaaggtgctgatggatccaagttggaagagggtaaaaaagttagagaccgtatgaatgagcttaaagatgcagctgctaaagcactcagtcacgatgggtcttccaccagagcactctcggacttggcatttactttgagaagtaaggcatccaattagttaggctaaaatataaccttctccctttgttcttatgatatttattgttgtaggggagaatggttagtttttcctttaaactttttgatatttcattttgtatgggaagctttcactcatggatgcacacgatagccatcttaacaagttgttgcattgtgtgattgtgcctcgtgggagcaacattggcccctctctcaatattttttttctctcaaatcttcttagctttcacgctaactgcggtgcccagctcacctttgcaagcgtccttaacataagagtctctatgcaaagggaaattacttagggagtagagaaagaaatactctcagtaaatcataataactagtaattaggtctttctatagaaaaaggaatcactttcagcagtaaataataatcagccatgtgtcttaaatagaaataacataaaccgatcataagattcatagaatataataagtgatactaacgactttttctttgcacaaaaccaagtgaattcaaagttttgattaaa

SEQ ID NO: 385379 - DNA, 997 bp, Cannabis indica
ggaaactatgtgacagtcctcagtatcgatggaggaggtattagaggaatgatccctggagttattcttgctcatcttgaagctgagcttcaggtacacatattatttttaggctttttttactttatttttatcttttataacattactataacaaacattaattaatacatatataaattatatgtatatatgtacagagaatagatggagagcatgcaagaattgcggattactttgatgtaatttcaggaactagcacaggtggtcttatcacagccatgctaacagcaccaaacaaagagaataggcctatgtatgatgcaaaagaaattgtgcccttttaccatgaacactgccccaagattttcccacagccaaggtcaaatttataatagtaatagatattgtgtctcaagtctttgttatttaatttattaaatattaataatttgacatatacattatttattatttataatttgtactttggcctactgataatatttagtaaattattttacaaagaattatcaaaactatataggccaaagaaattcaaaataatttaagaaaatgagatcattttgctaattatttcttaataataatattaatatataatgaataattgcagaactttacttggttgggctatggacacagtgaaagatttgacagggccaaaatatgatggaaaatatttgcatcaattgctgaaaaagttactaggaacaacaaggttgcatgacactttgacaaatgttgtcattcctactttcgatatcaagaagcttcagccagctatctttaccagttatgaggtattattataatttatagggcaaataccattttggagtctgtgttttgcaaaagttatcaattggactctctgttttgttaaatgacaaaatggatcctgtattttctaaaatagtacaaataggatcatgaattcatttttttgtcaaaataaaatttaattataatccga

SEQ ID NO: 385380 - DNA, 1409 bp, Cannabis indica
tagaaagagaaaaaaaatcaattttgaattatcaaccggataaacaaacagatcatctaatttgagttccaaacattaaagtattatactgaagctttcactaatctataactatcaatgtctcagagttctaatagattcaaaagaagagtacagtaagagtagtcagaaaatgtaataaccaaagttacaattttaaattaggtcccttcaaattcatatacaaaagacattgttttttggaactcacgaattgtttggcgcaatgccaagtagtataaaaatgttcagaaaactaatatccaatggaattatccgggtaagtggaaaccaagtatattcagttatgggtggtgaattgaggtccttgttgaatatatcattcggccttggcaggaatatggttgccaccagtagcaattttgaacaaataaaatgcagtcatgagagcactgcagcaaaatcagaccaaaatatcactttgtaggtgaagatgaagggaggcataggggaaaaccagtaacattacagaaaagaaaagaaaagaaattgcaagccttgaggaacaagaaaataagataattttcaggggtaacaatgaaagcaaaagctattaagttgtgtgtgtatttagaaattgtagtgaggtgctacatttagaagagacaattatgtgaacgaaaacaaaagtagactcatcagtaaagtatgagttgtattccgaatttcgtaactaaaagctgtacaatggtatttcatatataatcatcatcaagtgcagagcacaaatgaacgaaagatgaaagtaatggcacaaatcagatcacatgcaacacttacctaataccggcaacaaccccagctggcataatcttagaagtctgcaagtagcgctgtcccatgacccatgttagtgcagctgcacatactgttttaaatgaaactagcattacttccccaactagtgtttctttaagattaaggtaatgattaaaattgacgaacatgagaaaaatatgaaagaaccagtcttctaattaccgtgtatataatcagaacaccaccattcatattataaccccaaattttattgaaaaaaccaattcattacatgcaaatatcattcttaaatgcagttacttcaaataatacaagatagcaacaaccatttctttttttgtgaaaagaaattttttaatatttatttggtgttctggatagatcacacaggagccgagatgccagatcagtttcttatttttccaatttcattatcagtacttctagttttccataatcaactaaaatcaatcagaatactacgatccgtccacaaaagcaaatttcccaaacacaaaacccatcaatagaaaatcgaaaaataagaagaaatccatacccgtctcaag

SEQ ID NO: 385381 - DNA, 979 bp, Cannabis indica
tatgaggacagaatgagaggatcgattgaccaggtattactatgtatgcaatgtggcatctgtctttcaggtgtcatttttaaggatttaagttatgcatgatttttcttttccatctagccttctgttagtctcattttcatgaaggtcacttatgaattaaattagctgagtgaaacttgcacgccccatcttgtgcggaagatatatttttctaatgagtactgtataatttgaaagtatcagcagcaaccaccatcatttttcaaaattatcaaaggaaaattgtttttctattttacaccaaagcagcactaatctgacacaatgtatgtcaggtggaagctgtcatacatttcgaggatgacacagaggaactgcagcgatgggatcaacaggtaattattgatttttctttttcatacatttcaatggctactactagattttgaacaccgtggggagtttcatagagtttgcagtgttggcacaacgagactaatattgttcgtttaagtgatctcatcttcatgatttttggtctcttcacttgtttaaaaaaatttatatagaaaatgtgtatgtatacatgtatttatgtatttaaatatgaacagattgttgggttatgtcaagctctcaatgatgtcctggacagcatggcaaagaagggattgccaattcctgtctgatcttctgcattgtaagcactttggggtaaaatgtttggttggatcctaaggaatggaattgttggaatagcttttgtttggtttcactttttacaatggaagcacttttcttatggagttgtccattttaaaacttgtagagacattagagacttgatctttatcacataaatctcacattattaatattattaatgtcttttttatttatttttttagaagggtatgtcttaaataactttgttttttttttttttaaagaaatgttattttatatatatatatat

SEQ ID NO: 385382 - DNA, 987 bp, Cannabis indica
ttcacttaatgctttgtaaagattataatttactagccttataattttatagtataaaatacatatggaaaactatcatatgtatagtaatttttgtatgttttactcaggtttcttggaaacaataaccaaatggtaccttgcctcaaaggaaaagtgcatctcttctcaccatgtaagccaatatatatgaatttaattatagttatataatagggtatgtttagcaagattcatggtaatgactctaaaatgtgcaatattttatacctgcagcagatgtaacaaacatacaatattagtgggaagtattccttcttgggtaaacaatcaacaaaatttagacatgtaagtttctttgacatttcttagtttgtacctcaatttgtgtgtttatacttcactttttgttgatgcagtaacttggttggaaacaattttacaatagataattcaaacaacaggtaaatttttcttcatacaatttacaaaaatcaatgtgaaatttattgagtaaactactttcttcttaattgtatgaaaatttattattgctttgtgttatcagaactcttcttacaaggttgaactgccttcaaaaaaatttcccatgtaatcgagatcgtcctctctgtaagtataattagaacaatttatgttggtcatttctgatagtctttagctaaatgtcatatgttttcattttcttctgcagattataactttggcattaactctggtggtaatgaaattagatcttcttctgacaatcttgtgtatgaaaaagatgatgaagctcttagtccagctgctcattttgtcaccagctctgagagatggggagtaagcaatgttggacttttcgcagggaatagcaatgctacctatacaagtaattcattatctcaatttcaaaatactctagaccctgaactataccaaactacaaggcttctgcttcatcattgagtatactatggtctgggg

SEQ ID NO: 385383 - DNA, 1672 bp, Cannabis indica
aggattcctcagagtacagaagtaaaaagcttttcatcagaatataaaattgttgtcatggtcatctccaacaagttaaactaaaactaaaggtattttatccaattcaaattaaaacaaaagtttttgtccaattcaaaacaaacaaaaaaaaaacaggctgcttcttttcttcacaaggttctctgttgaaaaattgtgaaaataaaagaatagctagttagtaagttacaggtttatatggcaccttttctgaccttcaaacaatttcactgatcattttcgaatgtctgatgggtgatggcagtcgctaaacggaaactttctcaaactcttactcccttttcacagagaaacgaaacttaaagaattgccccattaatacaaatgtacatacaaaagttcaaaagtagataaaaatggaaactttcaatttcttagcttcacgacaccaattttgtcttcttcttaattttttagtttatttcttttcctcccccttagccatatcttcaatacccctaaaccttttcttctccacatgttggagaaccaaatacactagcttatctcttacactaagaaaaatagcatattctctaaataccgttatgaactcttcactaggaaaattctatttctcattcatttctttcataacctttagtcctaaatgagttcacataaattttatggtaggctaagaaaaatactaacaaataactaataccattatttagagaaaatgctaattttcttaatgtaacattatccaaattcataacttacattgttttaaccaaacagaaaccaaaaatctcaaaaacatttaaaatcatagcaaacgagatttagattaatcccaagtaaaggcattcttttcagtcccaaaatggtactaagatctataacagagttgcaatcattaaaagtattaacagcaaaaaaaacactttctaggtcgcaaacaaacaagaattcaattttctcttaaatcaaacaggaaaagaacaataaagcaagagaaagaattattaccagtttcgacctaggacctcgtcggcgcggtaaccggtgaagatctcaaaaaccttattaacgtaaataatggggaaatcgggctctagagcatcggagacaacgaacgaagtaggcgtcgtcattggatagaacaagatctctgctcttaatggaagctcgctacgaaactcatcctcatcatcttcatcatcatcatcatcatcatagttctctccaaaatcaagactttgttgttgtggttcttcagcctttgccaatttgattctcttacctgagctaccgttctcctcatcttcctcatctccaccgccaccaccgcctccaccaccaccaccaccaccgactccttttttagccatggacggtgttcaattttctctctctagattctctctctaaactctgaaaatggaagaagtgctttcatgagcagtgtttgaagatattatatgaacttcattttatatatttgtttctgttattttacgaaaatgcccttcctaatgtctctgaactacaacattacccttcctaatttcaagtctagaatttaaaaacaaaaatagtatgcaaaatagcctttatgaatttttttataagtaaaataattttataaaaaaatttattaaca

SEQ ID NO: 385384 - DNA, 1490 bp, Cannabis indica
acataaaaaatcaataccaaaaacactatccaagaatcttgttctttaccaaactttcaactgaaattacctgttcttgcaaacttgggaaatgattatatataaacctgtacctcaattcattgtcctataacagaaaatttcaacaaaagagtcaaaagggtataatccaaaacatgatttttttgcttcaagaacataatttaaacacttttttttcttacctgatgaccaataacaacaggagcattttgaagaacaaagtgcaaagaaattatcagcttctttttaaaatctgagataattcttcaacaggtgaagattgtctctcaagatctttaatactttcctctaatttctcaacaaggccattctctctttcaacactagcttgtaaaagcttctctaaatgcaaagctctttgtttccaatacacaacagtatcatactcagcatcaatctcaacactcttattatgaacaacaacatcatttttaacacgaggaataggtggccatatgtcataaacaccatctaaaatcgaaataggacgcttatcaccataactatcttcttcaaatctatgctcttctaaaatctctaacttctttaactcaacttcttctctttgtttacttaatatgtcaagctcttctcttagtaatcttacagcattggcttgtttgtactcccaatgtttaacaagataagttaactgagatgaacccttttcgctatagtttgttaactctataagtctttggaaatcaactatagttggttcttccattattgtaacttcttctaacatgtcttgatcttgtcctggtctttctacattgaactgttttccagcatcaaatccaatatcttcaggccacatagaagggaggatttcaatgtccatttcttcgattcgattatcggtctcctccatcttgcaaaccatgaaagtttaactgatggtatcattcaaatgtactgtcctaaaaacagctcaaaataacaacaataacaccaaattttggctataattttctctggtttaaccaaaactatagtgttcttattcattcaatgacaataatctctgatcttcattcaattcttctgcaatttggggaacaagattggtacctgaagaacaaagatatatagatatattataacacattatgttgcatttgattgaaactaagatgagaaaacatgttagaaaaaccaaacctgaatttggatcattaaaagggaaaccttaaagtaatgaaatttaagatcaaaatagagattcaataaagtcatacaaacaaaaaaagctaacctttttaacacacaattaggaaactgaagatttgttctaaagtccaaagaagaagaagaagaagaaattgaaagtgggaaaatggttaaaagtttcactgtagatctggggaatctcttcaactgatgagtcaaaaggtttcaattctattgagagagagagagagaga

SEQ ID NO: 385385 - DNA, 833 bp, Cannabis indica
aaaagattaaatcgaattgatttagagaatcttgagggaagtgaattgtatgtggaaagagatggtggaaaaaaggtgaaataatcgagctctatcgagttccatcgattagaagaggggagtagagtactaccggcttcggatgtagagtgaatgaactcaacagggtgtctttctgtgttaactgatccagacgacatttatttgttgttgtaaataagtgttatggctaacgtaaatgtagtatatagtacttcattatccatatgaagaaataataagaacaaaagttttgattatatcaaaggaggtatataatataaaaatatattttatatatagggtaatggtcaaagaaaataattgaattcacatataattgtatagaagccgtcccttttaactgtgatcccaatgctatgttgtttgtcgcttattatgctctaacttcttattattatttaaagagatagagagaccaaaaacaaatataaattgtcttagttcaaagtactgccaaaatatatatatatttttttaaataaaaaagtactgccaaaactttacatgtataccgcgctatcataccaataaatatatggacagattagtacgggagggtgtctttcacaatacaaaccatacttctaggaagttggcaaacggagtatgtttctctgctccaccgagaaagacagaatgtgatttgctatattcttcatttgtaaggtgggcatagagcatttgaagaacgagactcgtcggaactcgtagtgtccaatcctccgaacgccataagcaataaagtacttcttggcgtacccaccaacttt

SEQ ID NO: 385386 - DNA, 1607 bp, Cannabis indica
aggcaagagtgagaaaaaaaaaactaatttattatgcaatcctacttatattcaatcataaataatagttttctttaaatacatagaatttaataaatagatataaaatatgcagagcctgtatatttcaaaatttagtgtacgcatacgaaagactcttaaagattgtttcttgatggatgttggtcttgaaggaccgaaattcacttggtgtgataaatgtcgtggttctacctttgtccaagaacgtcttgataggcttgtgtgcaatcccttttggcttgctttatttctcaatagtcatgtctcacacttgtctcttatataggatcatcgacctatagtgttctcctctttttttgctcctcaaggtaataatgtccatgtctcgcattctcgtttacactattaaagtacttgcgtagatgaggaagattgggtgaaaattattggccaaaattagaagttcaaatatttagatcccattcgcaatgtccaactcaatattcttgaagtgggaggtaaactgaatggctagaataaaaaaatccataagagacaacaaattgccataaataaaaagctcaaggatttttctattttggatgctaatcttgacaatgttagctgtgaggagcttcaaaaaattgagcaagagcttaatgttcttcaggaaaaagaagagacatattagacttctcgggcaaaaactgattggctcaaattgagaaacaagaagtcagttatattcacaagtgtgcttcgggtagatgggccaataatataattcttaaaatttagaataggaatggctttgaggtctcgagtcaaggtgaaattggaccagtctttgaaggttattttgctactttttttttacttcagatttctccttggaggatgcttttgccaaagtcattaatttggttcctaggaagatctcagaggatttgaatgctcatctgattcagaatttttgtgccaaggatatttgaaaagcactatttgaaatggacccatctaaaagtccaagagaggatgggttcacgactgatttttataagaaaaattggaatacggtggggcctgatattatattggcatcattgatttttctaaatggggtttctagcttaaaatgtatcaataactcttatctgtttgattctgaaaattgatgatcccattattgttgttaattttcaccctattagtctttgtattgtcttttacaagattattaataacataatcaaaaaactgtatgtgtgacgtcctggttcatatcatatcttacgagcaaagtgttgagttttgtgccctaaataaaactcattacaatttaatctgattagttatcaatttaagagatttgaagtgatttatgttaacatgtatttttcatgcttatggtttaatatatatatatatatatttaatatatgcacaaaatcagttaagtccagaacatatattctttcacaattacagtattgtcaacacagtggaatgtgattgtgattatatgattcaaaagactaagtccatgtttcatcagtgttttggatttacactgctgtgataatcagcgatgaagtatacttaca

SEQ ID NO: 385387 - DNA, 1212 bp, Cannabis indica
tactagtggtggggttcaacgagtaatagtacacctgcatgtagaggatctcaaagtacaagtcaagctaaccatagtctacgttatacgtatccgtatgggtatggtccagtacctgcgtattacagcacaatgcatcatcctagcaaaaccccatcatcatcatcatcatcaccgtacacgtgtgcaaatactcatcaagagatgatgtatggctcttttgagatctttagtgatgaaaatgtaaacgggtgttttatcatgtgactttgtcccttttaattagtattagtactagtactagttatgcttgcatggaaaatggaggatcatatttgcaaaatttgctctttcaagtttcaatccataaaaaagaaaaagagaaagagtttgggtatttcttttttcttttttggaaggttttgtagtacttattgggccttagataagtattttgagtaggtagatggtttgatatatgatatgtggtgtcttttaatataagtagtattaaacatgaacttcgatttccatgtagaaagtgatcataatgataataacattatttgtttaaatactaaagtaaatgctcataacggtaggtgatgtataatgaaactagatataataattagactgaataaaatataattggagtaaaaatagttgtttattatttattataatgtattaagatggtttggaggaaaagaatagaaaattatagttaaatagtaaataatatttttgtttcccaaattatagtctatacaaaatttgtagagactatagtttgtattacaaattgtgtccttgaaagatttaggttgctataagttttccatacagaatgttgaatagacactttagaatttagcttcattattatattttattttttttacttttcttctttcattttatagaaaaaatttaatttatcgaaaaataaaacacaaataaatcctaaaaagtaattaaatgggtgttttagcgccataacttaaaaaaaatatttttaatttttaaaaactaaacagttatttttttaaacacaaataaaagtgtttagatattattttgatgaaataattttttaaaacaaattttcaaactgtaattttgaaaacaacagaaagttattttaaaaataaaactactatttaaactaaaaatatcatgaactatatactttgagaatacattcagtgt

SEQ ID NO: 385388 - DNA, 1062 bp, Cannabis indica
  modified_base (1011)..(1011): a, c, t, g, unknown or other
tgattggtatcttctggtgctttaaagaagaaaagaaagtttgttttgaaattttacttgttatgcttagttggatggcatattaaatactttgatattgctctttttttttgtcttttatttttttccttttcaattatggtcaaagggatattcatattcgatattgcctctaaatttttttaagggtttttatcaaaaaaatccaaaataagaaaaaagaaaaaagatggtttgcattgccttgaaaaggttacaaaataaggaaataaagttcaaatatttcctctttttttttcacttttcaccaattcctttcacttgacttattttaaaaatgcaatctacatgtacaatctcaattattagtctttacaatattgtgtacttaatattctaatcttaattaacaataaattttatgcaaaagaacacacttttttcttaaaaaacaaattagttagagtaatttacaagagatctatatatataaaaaaatcccccccaatgagagactactgcacccttaactttttagaaattgaaatttcaatgtattattttaaaaatgattattttacttatgtgcaatgtgaataattaatgttacaagtgaatgtttaattatttaaaaatggttgttcaaataataataataataataataataataaaaggatatatttaaaaaatggagcgcaaatatgagatttaagtttgaagaagggattgaatttgaagggtaacccttaaaaaagcaagacaaaattctgacatacccaatcattggattattaattaatttattaaattaaataattaattaagtgaattattttgaaaaagcacatgtattaccattatccctattcctaatattagtgaccgttgttattaggacattcacacaacacaaagctctattctcactcactcactcactctaatcaaatccaacggtcatatttcactagccgttgcatttgaaaaagacccaacctttctcccccncctctctctctcttcagacatactacccatagctcccctattattctacta

SEQ ID NO: 385389 - DNA, 2107 bp, Cannabis indica
tttttacactatttcaaaaatattacattttggaaaaataaaaatacataaatatatgctatgttttcaatttgattcttttttttcaatagcattataaaaatttcaaccttataaacacaaaataaaataaattcttaacaattatatatgctaacttactattacctattattaatacataaaccattaaaaaatgaattctttctcatttttttttttacaaaattaataactaactttgccctcaataaagtgttgatcttataaactccaaagaacacagtcggtgctttaccaactatgctaatttattttcttacaaattttgacgtacatttaaatatattacatgtttctacatattatatataccaatttttaatttcgggcttccaaaattatggggcctggagcctaggccccagttgccccactctagggtcggccctgagatttggagggtagacagctccaagttctttgacgagcatcgaggaccttgatgactgaaagagtgaaaaagaaggggggattaggactgaaatagagacaaaggaacaggatagaggggaaagagaattgtcacaagagatctgggtttatgggattagagggccacctaaaaattgcttgaccatggagaagaaaactctgatgagcgaacatggggcttgggattcaaagactctctagtttgataatgcctttgttgcattgtcttgtggccagagaagctcagtcggagttagccgagagctcgtgagcggagaaatgagacttcaagctctagagacctttattttccttaggtatcgtcgattgagcatggattctttttccttagggttcgacaaagctacaacacaatggggttatgattttttattctggaaaagatacaaaaggaggtggtggaaggaataggttgaagagatgatgatttaggtttagggttaatgaaattagggtttattataattaagttatgatatttttatttttaattaatttattattatttttattttaaattagtttattttaatttttattttaaattaaattaatttgtttttaaatattatttgatgtggaacaataaaattttgtcatgacgtagacaacatactgagtacacatggtagtccaccttgacagttaatagctaaaagtggatgaaagtgacaaactgctaacagaacatgagttttaggagttttaccatgaaaaaaatgggaattggagttaattgctagcaagataacacttttggaggttatgctgtaatttactcattttgcatatacgtatacgttatagttatttaagatatcttacaaaattttgagaaattcagaataatttacaatatagaaaatagtgttcaaaacgtctattttagacacgtataaaataaaatagtcacacgtacaacacacttgaactctatttttagcgtgttaaacttttttgaatttcttaaaattttgcaggatatcttaaataactataatgtacatgaccatgagaaaaaatttgactaataaattattttgaataccaaaacaaataaggatgcatgcatcccttttaagggagtgcattgtaaaatttttcaaaaatattttcctcattatttaaaaaaaataacttttttagataagaatataagtagcaatcttgcgctttgaactttcgacaataccgattctgccccctaaaatataaagtttgttaagaatcccccctgaacttttacattgacagatatttagtccttctgttaggttttgttccattattttgtttaaatgctgatatatctttataaattagtaactttaccctctaaactttgataaatatcaaattgtaccccctttaaataaaaataagaaagattctacatgtttttgagtaaatcttaaaaaattaatttaaatcttaaataaattattttgaatgattaagaaaataataaaaaaacaaaactaattaagcaatttaaaaattatttacttttattaaaaaattcaattatacattaaaaaaatattttaaaaattcaatttttgtaaaaactaaattttatgggaacaaactt

SEQ ID NO: 385390 - DNA, 863 bp, Cannabis indica
atatatataacaattaatatatacttcacaaaatcatatggtatttttatacgagcattgctattaggcaccacatcactatgaggtaacgccttaagaatagctatcgatattccataaaagttatgttacactatgcaaaggctatagggacttgttaacaattttatggtagtatgaaatgcgtataaatatgtaatgccattctctttgtatcaagctatttaaattgcgtgtagcctaacacttaattgtaccaatagcgatatgataccttttaatatttctttttcttatatatatgtttatgaatttttgaaacaggaacttgttccaggcagagttcaaaacccatggaccaggagcagacactgagtatcgggctccttggtcgaaacagctgacagaagaagaggttggtccattcatgtccatcgatttcattgatgggacagaatggctaccagtttggctatgatcaattcaacttcatcatcatcatcatttggtcatgtggagaaagtctctcttattaaaactcttaatatttacagtgggcatatattcatctccaatattctggggatgtgaatgtttgttaattcaatgctgttatatgtggcaagccttagattttcttattattatttagtcctcattttgtggactaccctctacttatattatattatatattatatatatagatgatttaggtaatatataatattgattgatttggatttggatgaaagagtaaattagtttgagttaactatatgtttattaataaattttatataaatatatatatatatataaaaattagtttgactaccctctacttatataaatatatataa

SEQ ID NO: 385391 - DNA, 1538 bp, Cannabis indica
attaaaaaatatatatagcaatctcccttaaagtttagacaataattggcccaagaaaataaaaatcttcttaagtcgttttgcactttgacttaatttaatttgttgcaatatgatctgtgtctaaaagttggacaatcatgaagttggagtagttaaagaataagtcatcatgcatgaatgtatatatatatattagcatgtaaatatttgttgctattttatgtatttattgttacctcttcaacttagttcttacttcatggtaggtaagaacttgacatttggcatatccatgttcatcaacttacttagaccaattatatatagttactctaacaaattctaatgcatgaaataaatagagataattcatatattgaacttaatatatgatattattattgttatgttcatcattatttgtctatacatattagtttaggtaagataggggagtttttgacttaggaaacataatgacaccaaatatatcttccaacattatgatacatcatttactattgatgacatcaacttattataaaaattgattgatttttaattaattaatattcataggtataattttagtaatttcgacacatatataagttgtagtttcttttttgttacataatgatagtgtataattgatgtagttataggagattttctacaaatttttttaaaaaaattgtaaataatatcaaattaaaatttaagtagtttgttgtaggcgtgttatacacaaatcatcaatctaattatttcaataaactgacatgcaaaaaaaaatatatatgaaattacaatttgtaacaaaaatactaaaaaaatacttatccatagtgattaaaaaaattaattcgtatgctcatatgtataatatgaagctgcattattttattttttaaattttagtatatagtattattatatgtatagttctcttcattgatcttatggctatcttgtatatatgtgactatatactaattaattatagtgttagtttctaatcttaattagtgcatatgacttcattccaacaacaacatgtttaccataacaaaagtgattaataagccatggcataagtctaccactaaaaaggtactaaattgtttgtttggaattgtgttgtattatattatgttgtataggattatttgatacaacaatatatttagcattgacttgtattaatagattgtgtaaactttccttccaaaaaaaaaaaaaaaaaaaaaataaggttgtgtaaacttatagtatctttaccataaacttgaaattagaccccaacctagactcgtacccggatcctggccttagactgaactcgaatgttggacccaactaaggaccttagaccctggccctagacctcagacttagacgtcgaatcttggcccctgaccccaaactccggcctagcacccaacacctggattcaagccccagaccctgaccctgaccccgacccagaccctagacccagacccagggccagccctgacttttagtgggccata

SEQ ID NO: 385392 - DNA, 1443 bp, Cannabis indica
aataaaaatgttataaaaaatataaaacacaaatctatataaaaaaaacatattagtatatttaagagaaatagacacacgaatatcagagtacagttcgaaattactggacttgcaaattgtgcctaattctataaaattattagacggcccatatttccgatacgatacaatccgtattttaaaaagcacaaaaaatataaattggactagcacaacacacgtatttacaactatatctataattagtgctaatagaaattttaagaacttcaataattagaactctaaaattcgaatcttagactctctaacttatttcccaacctcctgaccgctaattataccgctagaccctgttttaacacacattggcctttggcagtggcaacctaataaggtaaatgcacttaaaatcattcagaaacattaaagcacttggaacgttactgaacacaacacaagaatgctaagaaaacattttaggcaaatataaggttgtcaagtaaacctctgtttatttctttttcttttttttttctttttttctgataactctatatggaccctatagtacttaatcatcatgttcatcatcatatatatatatatatatatagcaacagataaggacatgaaccaaagcacatgtaatgtaagtaaatggaagatgccataacgcgagaattgattaattgacacaggaagactcactcgtatatgcagcattgattttttctctgctaaaggaaggcaagtggagtggagttggtggtaataaagtattgttgaaatatgagatgctttctacttttgaagagcccgtgaaagaaacgcagtatgagtatcagtagcagtagtaagctacactagtaaggagtaagtagctagatatttattctaactgtaacttaaatatgtcacgcatgcaaagggggttgaggttggcagtgtcaaccatagtaatgaggagggacccatgctaaaaagacatatctagacccttcggaccacattccaaagaagatttttaaaagtgacatccagcaaccacaccacattttcttcttttattagtctctctatttctaaattctgccttcttaagtggatatatatatgtatgtatgagagcgactataataggtacacaacaaatactttatagcggataacactattaattcagtgtttttaatattttcttttattatttttatttgttgtaacttattgaaatagtagttgattataataaatttttaaattttaatttaaacacggtaaattgttaaaataaattaacagttgaactctattgtgaatggtcatatccaccgtaccaatataatctctcatcatttttaatatatataattatttgctgcaaaaaaatatatatgtataattatacatggccaaactattattatctaatcatga

SEQ ID NO: 385393 - DNA, 852 bp, Cannabis indica
agttatgggagcattgctattgccatccacagtgtaaattactttcatgttgataatttgacaaatttctgcctttttagcttgtaaattcttaacatttatgtttatgcatactttatatagttttagctcattattatgactacagcatcacagttttgatcttggagctactcagcctatcatccctacaaaaataaataaataaataataaacttggatgagcatgacacaacatacaaatttcctgaccaatactaaaattaaaaatttattctacaagaaaaacaaaattgcatcattaaatgtttccatggataaattattggtgcatttgaccgtgatcatagaatcggatcagagcaacaaaaacataaataaaagcaaaagaatattatggaacaaatgacttttacaataaaataatgaaatggtgggttttggggccttcttctctctttatatgaatgagctctgacctttttaatttaaatatataaataataataacaagttgtctcaaaaccgtgttttttagccaataacatgcataaacaagacatttttcatagcccacataattctcttttctctggtctaacttggacattagacatatgatatataaataatactgttacttctttcaaattgagtttgaccaaacctgtgtgtatataaatatagttgtcaatgttatcctaaacttaagtcacattctgttctagtgatattatattggttttggtgttagaagtacttaatataattcctattagtcaatagctgatctgtttcctcaatattcatcccaaaaaaaaaaaacaaagaccatttctctctctctctct

SEQ ID NO: 385394 - DNA, 1160 bp, Cannabis indica
tttcagtaataaattaacgatgtattgtgtatttcaatgactatgagatgactaaccttagaataatagtggaatgtatttcatccatgttatctacctgaccgtaatttaaaaaattaaaattttaaattatttacagtatatggagaattatacaagaaatatatataataaaaaagtaacacaacaaaatcttagttgcctctctttgctgagccacaaccaaaagaaataataaaaaggttacaaatagttaaaatcatgattatatacacaaagaacaatttaaaagatatatatatatatatataaaaggacctgataaaaatcattgttgaactcgtcttctcgttgtggtggaccatcgtcgacgatggaagggacgtacgagaaagagcaaacaagagagatatatatatatatatagagagagagagagagagagatgagtgacggtggtggtggctcgtcgtttctggatgagagagagcaaatgagagggaaggtggtggtggctcgtggtcgcgcggtggtggctcgctgtttctgaacaagtgagagcggacaagaaagatggtggtggtggctcgtggtcacctgatgtggatcgccttataagagagcgagagaataaatgagatctaattttttggattgggggttttataaatgtgcatgggaatccacagcaattttaaatcatcaagtatagtatagtatagtagtactatactatactatactatactatacctatcgggtatagtatacctagcattttaaaattgtcgatgattccttttaaaacacctcatttcaattttggtctcatagttgttttaaactatcaggagtactaaatgattgtttaaaactgtcggaaatactcaactatagccaatagttttaaacaatcacttacttttattaatgacggtcctcgaaaaaaactaatttaaggacagataggaatactgttttttgtagtagtggcaatcggtctatcaattgtgtcggttttccaccaacacataagggccatttgaataaagtatttaaaaacacactttaaagaaaaccctagcttgcacctttcttttctttctcttttagtgtctcttccggtgtcgcatacctggccaacccttctctctctctct

SEQ ID NO: 385395 - DNA, 553 bp, Cannabis indica
tttttttttttttcaattaaaagagagagaaaaagagtcacaaaataattcatgaagtataactgataaaataaaaataatgcttataaaatgaattggtttcgacatgcataaattattgttaacaaagaattaggagcaaagtcataaacatgaaattaaaatataagttatgtacatgctttaagtaaaatttataaaacattactcaactaaaaaattgaaatttggtgtaatatatcatgtgatcattgaattaagaaaagaatatagcatagcacatggatataattgacattgtgaaattttcccaattaggtattgttaatagaactgagaattcaaaagggcctagttttttttcttttttgccactaagtttagattaattaggattctaatcaaaattggaaagaagaaaggaaaaaaacaaagcctaccttgacgggagaatatagatattttatggatacacacatgctttcatgcatgcaattgttatattaatagtacatccatttttgttcccaaataaataaataaatagtatatt

SEQ ID NO: 385396 - DNA, 1381 bp, Cannabis indica
atatatatatacgtgtgtgtgtttataaagctagatttttctgttatgtattatatgttttcgggttcctatgtattctacatatataattttcccttttctcaagtactccttgttttactattatgattttttttttattattttttcattcattagcatttttttttgtgcagatcatatttggtctttaattgaatttgagactttatcaagagacacaaagttatattatctcaacccaataacttttttttttttttgtaaagagcaaaagttcattaacaacaaaagatgggagtcactggggagactccctccccgatacacaaaccaacatccggaacttgaacaaaggaaaatttacaaacattaaactttttaattaaatctcaaactcctaaagaaacatggaggacactccaatccggtggacacactaacttagaaaaactggtaaccagaattagggaatcagagaaaatatgaacgttgttccaagagttctccagggcccaggagactgccaaatgcactgccacaacttctgcctccaaagcagaataagttgtagtattagaagaaagatgaccccaagagccatcttcaaaattagtcttgacagcagccaaaccagcaactccatttaactaggaagcatcagtgcagatgacaatcgccatgccatccctactaagcaaagtaccaacttcatttgacttggttaaagttcgcttgctcaaatcctgcaactcataaaactcagaaaagagagcattcattttcctgcaaacatcaacagcatttgcaatacctcctttcaaccacaaaaggtttctctgttgccaaatcgccaaaaccacacactcaaaataagtgatgcaccagctacgcttgaagcttggtaaagcaagaataaaggcttcaaagaactgcaccactgaatcgccaggaattgaatcaattctacaagggatcagacccgaaaaccaaatggccttagcaaaaatggagtcacggaagaggtgcaggcaactttccaccatgtttccacaaagaagctactggcataaagattgtatactgttgaatatttagtttggatatagtgttaaatatttagctctctataatttaatttaataattctcaattgatgaataagagtatgtttggttggatagaatgaagattgtaatggaattattattaccattaccttatttgttttaacttttaaaattttgtaataacctgtaatagttattatactatggctcattaggattttttctccctaaattttaacatgcaccaaatcatgctcctgttatataaattaacaattaacccaagatctatttgtatataacatagaaca

SEQ ID NO: 385397 - DNA, 1004 bp, Cannabis indica
ctctattttaaagtatctgatataagtgtacctaaaaataagtagaatgacattacactaaaaattatattaagacaattatgtattatttatgttttaactttgtaactttcattaaaatttaggtcacactaaaaaaataatataaataattgctttcacttaaattttgtttctagctttgttcttggttatactactactaggtgtgtttttaagcctttacaggctacacaatacgattttcacaatctttataatttcatgcatgagatatatttatatatatacatgttgggattaaaaaaaaaatcaattaataaggaaactgataatttgcttttaacaaatcttttttagcaagtcagtgtgtgcttagaagtgcttcaaagttattattaattaatgtatattctgtcaatgagtctgacccgagaaaattgctttatatattctcatacatatttaataacaacatcaaattatttaataatacttaaaatgactacatagttaattagtttggattgtaattttgaccatctcaccagcttaaaattattgatattaaattttataatttaatattcggttaaataataaattatcctaatttgataagattttaggaccgattgtagatatttataacgtaaattcataaataacttatgttaaaatatatatatttactgataaatattttttaacaaattataatttataattagtgagggtatcatgatttttgtaagagcattgctattaaatattttaaagtatttacactattgtataacgtgttgtaaatagttaatagttgaataatatgactaataatagtagtatatcactttttgtggtgcttaacactttatgtgttctcaaggtcatctcaagaatctaagagactgtttggctgtgttttcagattttaatttttagaattgtgttttcaaaagtgaaaatagaaaatagttttttattattttaaaaaattaata

SEQ ID NO: 385398 - DNA, 1176 bp, Cannabis indica
ggccatttagctaattatcccgttatggtggtgagtgatgtgggtgatgatggactctcagtttcgaagaaaagaaaaaagaaggaagagaaagaaaaaaaaaggaaaggagaaaaaagtattatttttttagtttttgtaatttcattatttattttttaatctaattttattttataataattttaaaatgatgtgaattacttaaatttttactatgtatttatccatacacgttggcatttaacaatacaatttgaaccgaagggttaaataactaacataaatgagatttgaagggttttatcattagaacacgatttatgtggttaagtattataaattgtataatcatttaattttaccgccaatacctctttaaattctaccttactgaaaaaattccaaaattttattatttaaccaaccattttatagataaaacaataaataacatctcacatactttcacttgatcatttgtcttttttcacttttctcacttagcactattatatggcaatgtgaattaatgaattttctggggagaatctataactctcatgagaggcagtaccaacaaatatctttctactcttagagacgtttgttgctcacaattgaactttattaaaaatttaagaataattggggcaaaactccattgtgttttaatttttatacatttcattcttttatttttttgtgtggaaaaactcctttaattttacttttctttgcaattttgaggcgtcagttaaatatcaccgttaaataccaccaactggatgactactgtgtgtacatgaaaaaaaaaacttcgaagtcgatacagtaataatctaattggtatttaacggtgatatctagttgataccttaaatttgcaaaagaaaaaaaaagtaaacataaaggagttttaccacacacaaaaaaaaaaagaataaatgagttaagtgtaaaaaataaaaaaagttttaagcccatataacccaaagttttaagcttaaccttgatatcacacttgggtcgaaaattgaaggcctaacttcttggtccagtaaagatacaaagcttactattatcctattttttgcaccttgacgtggcaatacgatcggatgacacctgtctcataattttgatatttggacagaggaaaatatccctagcagc

SEQ ID NO: 385399 - DNA, 1461 bp, Cannabis indica
acgtacattggatccctacttgcattatggcaaacctatcagcactaagcctacaacttgtagtggcactttgttccaataggtcaactaagaatggcaacaaattagcccaactcgaggacagtgcttctctgtcatctcaactctgttcacaagaggaaggcatgcttctttccatttgtcataatcaataaactcaacattacatacggaggagatattgttggtcaacttcttcatctcttcatactcactgccacgcctcttctaatagaattgttcgatgacttctaggcgtgcattatctccttccgtcaacaacaaaggcttgacgagaagagtgaaaggtggcagaggcaatggaggtagtttaatcctttctctagagagttaggtgaaggtggatggaataaccttaggcgctaggggtggtagaggaggatcttgattgtccttggatgttctggtgctttgcttaggcggccttctgccatcagatgtatcagatcccctttgggactgagtttttgagccctacctccttaaggctaccacctgcaagaccttctccttggcctccaccctcgccttcttgttggtgccaccattagatgaactagtgcgctttttgttgatcatggctagcccattgtaattagaactatcccctctagtgttctccataggaccttgcctcaatggtttcacgactaggacaggttatgttaggtcgatgatggaagtgggcatggcctccatgcatggagccttaaaagtagcttctagatttgaagccagtggtgctggctgttgagatccgcttttggaagcctggtccttctttctttcatctctgcccctgggcgatttctcaaagctcatcagatcgagatttgatgttgcccaggaatctgtttagcaaccccatttgtagagtggctagttgatctacacaaaacaaacaaaatatccattacacaagaccacaacaaaagatatgatttttacaacacatcatcatgcaagacattaagaggatcaaaactattaattttagtataattgactttccccctagtaaaaagagcgatgtcttctcgacctaagttagtctcgtattagaagaagcatgagaagtaaattttgctaaatgcatccactctgacatgatggtgcacaagtggaatgaagtagttgggactcttgatgacacaatctactttatctatatacctactgcatgaatatctacgatggtctaatcaatactacaaaccaagcctttaaaggcacttttttcagcatatattaaagaaccgatggtacagggttgggaagttttggaagggattttgatgccacttatggcgtcgattatttggaaataaccgactccatagggtgtggaccctatggcgtcggttatttccaaaaaattgacgctaaaagggtttataatcc

SEQ ID NO: 385400 - DNA, 2928 bp, Cannabis indica
gttatttccttgttggaatcttttaatcggttcccatctcacagaaatagtatagtccgcaggaagcaatcacatagatcattcttcatttttttttcttagtatttttacgaaataaatgataaaaacaaagcaacaactaatagaaaggaaatataaaccggatgatgtaacttactaacttaccatttaaaaggaagatgagcatgaaaggagttcagaaatatttttaggagaatatcagcatttgaatcttatagatacaatgatacttctattatttaactatttgaaacataatttaggatatttaattgataatgatattaggatgaaacggttggcggtattttcggtttccaatttttccttcgttaattggattagtataactcatatattcattagttgaatattgtaaaaggtccatcagagataaattcaccaatcactgtgaacttctttaaactttctaaaagttttatcaagaatgtttataaaatgtgtgctcatttttagttggaggaggaaaagataatgtgaataaaagaaatgcactaatatacttgggataaattgtgttcgcataaagaagatggtggcatgaattttcgagatttgcatttgtttgaccaagctcttcttgcgaaacaagcggcaaggatctacaatgttcctacttctttggccgctcgggttctaaaaggtttgtatttcaggaattggaactttagtgatatagttcgatccaaacaaggctcttttatgtgaaaaaacattttatggggtaaggagctttttgactctggagctttgtaattttgatttgggtaaccctctttccacttatacggattttcttagctttattcacaatgtcattgatcctttgcctaaggataaaattgaataagttataattattttgtggcatatctggttcaaaagaaataaaatggtgcataataacattaactccctcctgacgtggtggtgcattggcctggctcaagaatttctttgaaacttccaacatagccagtctccagctgggcctcccctctttcagggacagacaaactctttaccttctgatgagattggttcgaaatggtctcctcctttggctggttctatcaaggttaatagtgatgctgctattgataaaaattgtacttgtagtggccttggtatggtggtgtgtgatcacttatactgttctagcttctgttgtatgacgggtagaaggttgtcttgatcctgaagtggcggaggctttggcgcttcagaatgccatggtctaatgtcattgctttgggtatgacaatatcatctttgaaatagattgcttgaatgttgtacaaaaagtggtgaacaaaagtttctctcatttcctctttgggccttggatgaaattgataatctttgtaagggttttaaagatgtttgttttatgcactgtcctaaagattttaatattgttgcccacacgatagctaaagtcgctattacagcgtcctctaacattgtttggtggccgagttatcctagttgtattcataacttattagtagttgatgctactcattagtgtacttggaataaattgtgcctgcataaagaagatggtggcatgggtttctgagatttgtatttgtttaaccaagctcttctcgcgaagcaagcgacaaggatctacaatgctcccacttctttggccggtcgggtcctaaaaggtttgcatctcaggaatcgaaactttggtgatatagttcaatccaaacaaggctcttttatgtggaaaaacattttatggggtaaggagctttttgactctggagctttgtgattttaatttgggtaaccctctttccactcatataaaaatttattttagctttattagctttattcacaatgtcattgttctttttcctaaggataaaattgaattagttatggttactttgtggcatatctggttcaaaagaaataaaatgatgcataataacattaaactccctcctgacgtggtggtgcattgggctcaagaatttctttgaaacttcgaacatagtcaggctccgactgggccttctctctctcagggatagatgaactctttaccttctgatgagattggtttgaaatggtctcctcctttggctggttctatcaagattaatagtgatgttgctattgataaaaattgtacttgcatggccttggtatggtggtgcgtgatcacttgggtatggcggctggatggttgtcttgatcctgaagtggcagaggctttgacttttcagaatgccatggtctaatgtcataactttgggtatgacaatatcatctttgaagtagattgcttaaatgtttgttttatgcactgtcctaaagattttaatgttgttgcccacacgttagctaaagtcgctattacagtatcctctagcattatttggtggccgatttatcctagttgtattcagaacttattagtagctgatgctactcagtaatgcatcctcgcccccacctttgttgagattcatttccttaggtgttggtggttgagaatttttttctcaaaaaaaaaagttttcatctttgattagcaagttctaatttttatctttcaattttattattattattattattattattattgttgttgttattgttgctgttgttgttgctgttgctgttgctgttgtttgttgttgttgttgttgttgttgttgctgttgttgttgttgttattattattcagtaggtaaaaaggtaaacatatagctaagagttaaaaacatcaacaaaatagcatatagattaactaaaataactcaaaaattgacctaaatagtacttagctaaatatagttaatgtcagactgacaaaattatggtctgaggatattggga

SEQ ID NO: 385401 - DNA, 1169 bp, Cannabis indica
  modified_base (1085)..(1085): a, c, t, g, unknown or other
taaccaattgatcacttctgctgccgattcaatttcttccggtccagacggaggtttcaactcgtataactgtaataaatatggaataccacatcatgtaattttgggcatatgtacccacataagagaaaaattatgtaattactataatagttcaaagaccaattaagtcaatatagaatacagacagacaatttatcaactcgtaagggggcttgctatttataaatttatatatttttaaaattttaggtacatgaataagttgaaacccaatttactataaaccacccaatttactatttccccagatgctttttcgatatatatacatatacctgcaacaattatttggacaaatttagaataataaaaaacaaagaataatattgtagttatatggaaaatattaacaatgtggactggaataccaaaacacataaaggcgaaaaaaaacctttcaaaaactaataataataaattaaaatgcattgtacgtacctgaggggcaacgagtataacaccatgagaggatatgtggttgaataggtttccataggattggctgtggagtaagaatccatggaagaacaacactacaggataagtgcccttctttgttggagtcacgatgaatagtggagctgaagaagaagtagtcttaaattgtttggatttaatttcaaaactccccttttcaaaaacggatgtggtagttgagatgatgctagtagtttttctactttccaaaactgcacctgccatgattatatattccttgttatgtatcctgcttccaactaaagtacgatatatatagagtttgcaatagccatggcgtttaattgatttattactagcgttttctttttcacatatacgtatactgcctaggcaaaagtgacgtgtctagccacataaagttagttttatttaggttttagttatagttattattatttttttttcaaatgtcataagaatttttaaaataataatgctcaatatagagtgataattgtagaaagaatataataatttgaagaaagagaatgtataaattatgtaatatattgaaaaaaagntaaaaaaatatatatatatatatatatattgtggaaagtttttgagaaataaaaattaaactcaaaaatgttaataaaatattt

SEQ ID NO: 385402 - DNA, 1203 bp, Cannabis indica
tataagactaaaccatcttttttccaaccatttgctttgggtagctcagatgatccatcattctcactactttttgaaaacaaatctgtattggcttctttctttgccataattttagaggaaaacaaattaattataatataagatgaaaataaaactatatatatttataaataatgaaaatacctcgaaatatattggatggacgaatattattaagtctagtgtgttctaagaacatataatccaacaaaataaaaattcaaagtcatatatatctatgtgaggttgaatactaatatcgataatatatatatacacatttataagaggagagagagagagagagctgatctacatatattgccatgctaacctcttttattataatattaattttaatagggtgctaattattgatacattgcttgctcaactctagagaatcttttctccaaaaactaatgactcatactaaatattgtatcaaatttattttaataatattttttatactactacaaaaatacttaattgtgtcaatttaaattgacatatatatattgtgtcaacaataaaaaaaaaatgacatatattctaccaattgcgtcaattataaactgatgcaattgcaccaattgtctcgatcgattttccaataatatacatagtgagctagactaatcaattcggttaaaaaagcattcccttctttttagaattgacgctattgaaaatgaatgaatttttaaattgatgccattaaacattattggcgtcaatttataatgaatgctaagtacttagcatcagttataagccttataaattgatgcttaaaataagagaaatgctaaaaggcaccagtgatgcctagcaccctcctatgtgttaatgttgttattggtccaactaagtaacgggtcccatataatttaatataatagcttttagggagtatcgctggccaatcacaacgcgacatgtcgagaaagtgttaagcactattggtgcctaatagcaatgctcttaaaatagctcttaaaataataaccccaaaacaaaaagtcatcacatatatcactacaagaaatgaacacttttgccagcacatttttgtgctggcaaaagttagtattgcgctgataaaatagcatttacctatgatgtgttggtaaaggggattggcaaatcaatgttggt

SEQ ID NO: 385403 - DNA, 1271 bp, Cannabis indica
aacatcccttgcctcaaacaaatttatattgccaaaaatatagttcaaacagttatttatcacatgtgtaagaaaaaacaatcacacgagtaaaaaaatatttgaactttttttttaacattgtaaattattaaaaaagatttgaaaatttacaagctgtctttaatagctataacatacatgataatgtaaaagaattagttgaaaagtttttcttgatggcaaaatagatagggagtattgaaacaccccttttggcatatactatagattttctagaaatctatttttactgaaaaaagaattagggtgcttttatggtccactccttaaacgtgtatcaatccaaccctttcatgtttttgtattcaaatagttataattttaattatatatttaataatgtatattatagttatttaaaacatcatttaaaattttaaaaattttagagtaatttataatataaaaagtatattcaaaaagtctcttacacacacttatcaaataaaagaggtacacatacaacaaattgttaattatcttaaatttctcaaaaaaaattgagtcatattttaattaactacaatgtagaatgccatataaaaaattaagatcaaactatttaaatattataaacaccatacctacattggtacccttatttctaagggtggagcatagaatttctgaaaaaaaaaacatttttagtagtgctgtaaatgcgggttggacttgacatagcacgaaaccggcacaagttcggaaggcatgtgcatgactaggcatgaaaaaatatgggtttgggcatgacaatgacatgacatcatgctataaattaacacgacacatcacaaaaaatatgtgattaagcacaacacgatacgagaagtatgacagacacgatacgcgacaaactcaaaaagtattgcacgaaacattaaaaaaccctattatttaataattataataatatatgtatttgtcaattataaatatattaaactattcataatttaaagggatattggcggctaaaccacctgaactttacggtttgtaacacttaatcacaaaaactaaatttttggcggctaaattacctaaaccctgattccgttttgctctgcacacctccatccaaaaatcacagttaagtgccacagtggactgtccacgtgtacacacttgtacacgcggcaagtttttagtggtccacgtaatattaattttaaaaagtaattataaatattaaaaaaattaaaaaatca

SEQ ID NO: 385404 - DNA, 685 bp, Cannabis indica
ttcactttgatcaatattgttttaaaaatcactaaccaacgtgacttgtgtttaaaaacttcaaaacttatttttgttctcatttactaaaaacaattttttaaaacaaaaaacagaaaataataccaaacatgctgtaagaaactctaactaaataataatgagctaccttattagcagaatgaactacgattaacaaaaactaaagaacaagtcattaactcgagtaacaacattggatcacagtcttcatgactaaattaaataagactgcataaaaaaaatctgaacttacactagacaattcatctctaaatattaatatattagatataatgtacaaattattatttttatttaataaaggaaggagacattaatggttctgctggttatatataataaatacatactgctgtcagtatatatatatatacttatttctcacaaagccataatgctacaataactaccatcatgatgctcttattggaaattaatataattcttttttaacattatcaatcaatttaaactaacatagtcaaaattaaatcgaagaatcaacaaacattattaattaatgtcactcattatcattacttaataattatatatgtattgaaattaatttacacaaaatactatttttaataatttttttacacttttataatttatattt

SEQ ID NO: 385405 - DNA, 984 bp, Cannabis indica
gcccagagactagatgcagattggcaccccatgacttctgaggctacttccctcagtcatggagccataaacgccaccccatcaatatttggcatgaacaagccaattttcataatctgggttaacagaaaattgagtttcagtggacttgggtatacctgtagttatgaactgttctggacattgctctgtccattgatgaaaccttccagcctatgtcctctgatgatggtgaacaccatggtcttccacaatggaaagttgtttctgtcgagcctcaaagagaaaggttggcttagtgtgctgctaaaaggagacgcaaatgagtttggtagtgctgtttgagatgtagcagctgctgatatagctggtgcggctggactctgttgagacgcctctaatgtgggcattcccccaccattatcggactgttgagttggagttgaggcattaggatcggccatggcaaaagccttttaatgctctgataccaagttaaatttggtaatgaatgaaaatggagaaatctcagctcaatcgtagctgaggaaattgtatttccttttatgatcaaatatacaatcattacagaatcaacaaagacaaatcaacagctgccacatttaaagtttgttacaaagtagatattttaggatcccaatgaaaacggtaaaatgacgtgtgaggatgaggggaatattctgaatccaagaaccttggacgctggcagagtaagtagcagatggacaataataccctgagccaattcaatttcttttgacaaccttgtcacttcaagatactctctatgtgactcccttatatcaggtcattttgggtataatacatataaaaataggtatgtttcaattaaaaaaaaattaaaggtaaatttagttaattgattaataaaagaggcatttttttaacttaccccaaataaaatggggtgaggttaaaaataccactttttattaatcaatt

SEQ ID NO: 385406 - DNA, 2537 bp, Cannabis indica
atactacaaaagacttactattatttttacaattcggatctcatacaattttagtttaataaataaattaaaaaactctaaccactcacagtgcatcacattgtgcggtacaatattaaataaattaaaagcaatgttaagaaaaagaagacatcggtgcccaaggtcggttctgagttgaaatgaatcattagcaaaaaaaaaaaaataaataagctttcactataaagataaataatatttttaaaaattattaaaaaatatgtatattttcaaaaaaaatatttttttatttggcctctaaaatgagtgggttctaaatgcagacgtagtctaccttagtgtagaaccggccctgccggtgccagtggacaacaatgccacaaaatagaaagaaaaattgggtctaacatggatcttaatcatccacattttgctctgatgtaattcttaattttatttaggagggttaaaaattcaggatatatcttattaaaatctttctaaaatggtaggctatgttataataattatatattatagtttaatctatatataaatacataagacatgcaattaaaactatattactgcttattagcagttaataaactctattatatacatatatataattatttatggggctacacaaactactaaattaatatagaattatgaaaataaataattattcttttatatttattaattaataacgtacaaatgatcgtttgcatgcaatttcgacatatatagattgtgatctcatgcagacactacttaaggttttttttttcaatatctcaatatgcaaaaaactaaacttgattggaccttattattatatattatatgtataaataatatatatatatatatttacaaaatgcaattgcaaataaacaaaagcttttggccaaatcacaactcacatgtttgtttgggattagagcctaaatttttcgttttgatagacagaaaagagatgggcacactttttaatttagttttatatgcttaattataaattctaataattattttaaaataataaactaataataatatataatgatttcctaaaaaatattatattgagaggatacttctcaattagggattattgtatgaatttatagttctttatttttttgtaattttttttaacaaaattatatatgagtgttgtatttatgttgtttttaaaataataaattcgtaaaaatatataaaaaaaatcaaattttaaatattttattgtaatttccctattgattattttgaacacatcccataagtggcctactctattactattttaattcaactataattactattttaatcaattgtcaatatttcttataattatgtatttataagtaagaaattatgtaattacattatagacagcgggtccacaatttctactgtggaccccacaaattaagatgtggcagacagagagtagagctgttgaaattttagtcaactattctatagtctaagagagagttgaccatttcttgtccatgtgctccaagaaaatgctaatatggtaacccaaaaaaatgggagaaagattcctaatttatacttcttttaattcattattaaaaaaaaattatactttttatcaaaaaatatatatttacatgtgatatatatatatataaatctattcacacgtttgaattcctctctataacctagggtttctttatatataacatcaccttaattcttaattatattaatcaaggtaacttgattataattaaccgtagaacaaaaaccttttgttagattgtaaagatgtagatcgaaaccaatataaatatatttgacaattgatgaaattaattgacattattattttcaaaagataaaaaactatatatatatatataaatatatacgtgaaaattaaaaaaaggagacaattttaattaatattaatataaattggtggagaatgtgttctgtcattctaatatagtgccagttcaaattaactaaatacatgcatatatattaatatattgctatttaaaattataatttatgagtattacttaattaattatttttatatgtttattaatttgaaataaacttgtggtttatataaactctctacatctcattgactccattaattgaattatttatttatttatttattatatatattgccatatgatatatagatgaacatatatacataatgttggatgattttcaaccatgtatataaatataaattaatacacaaaaatagtctgaatggaattactaatataccctttgcatagataattaactgatattaatattattctaaactttccaagacaataaacccacatcactacgtctccatccattgtatctaagaactatatataataagataatattgtttatgagcacatccacaaattatatattcatattatatacattgtagttttttttttaaaaaaaaaaaaaaaacgttaaatttttaattaagtccttaaactttacacgtt

SEQ ID NO: 385407 - DNA, 2181 bp, Cannabis indica
cagttttaagtgcagaagtttatccaattttttgacctgatgtgatattgggtagaatttgttatccacattttctcgtagattataaagcataacagtaatatgaagaggatgtcagtgtattccattttgggctaatgtgatacttaaccagcttttgcttagtgtatagtatcattgtaggaatgtgcaaagtgaaacaggaaaattcatgcacatgaacttagtattaatgacatacaacagctaattaagccatttttaatggactaggagttttgaaaaataatctctatgtgtgttactttttttaaaaaaaaaaaatcaaaatttcgatattgcttaactcttctttaggaaaatggacattctcaaagaacagctccataccagtctccttccatgggatggccaggtgcgcaaggaaatccaactactcctaatgtaaagaaagtagtaagactggatgttccggtggacaaatatccaactgtaagtaatgtgttctcatctgatactaaggttatatcgaaattattatgtatgtgatggttttttatatttcaagctttcagtataactttgttggccgaattttgggaccccgaggaaactctttgaaaagagttgaagctgtgacagaatgtagggtgtacataagaggccgtggctcggtaaaagattctgtgaaggtactttgttttgatcaaagtgaaaggatttttcaaatgtttcttgtttgttgatgctcgatttgatcatcattgagaatcctctcggttatttttttcattttcaggaagaaaaactaaaagacaaacccgggtatgaacacctaaatgagccattgcacgtccttgtggaagctgaatttccagaagatgtaataaatgcacgcttggatcgtgcggtggggattctagagaatcttttgaaacccgtggtatgtagaatattgagcttgcagttttgcattgcctctactccctcccgaagcttattttaacagtttctttcatgttttttcttccataggatgagtcgttggatcattataaaaagcaacaattgagggaattggcgatgctgaatggtacactgagggaagaaagtccaagcatgagccccagcatgagcccaagcatgtccccttttaacagtacaggaatgaagcgagccaagacagggagatgacccaccccaccccctttaggcctttaacgagcgaattgtgtaactgcgaccgcctactgatgatttcctggttaataatgtctagtactgagcctgaggaggaggctggcattgacaaaaactgacacacacaaacacaccacacacacactcctctcctgagtaaatttttgggctctctcctctcctggcaaagcttacttctgcaactgcatcaatatattctcttattcattttgctcaacacactctggttttccattcttttatgtatcattcctcccaaatatgaatacattctatcattattattattatattcattagtttattattgttggtaacttgtagcccagttgctgctgcagctgagttttgaaattcttcttaacgatctctattagtagattcttttcattaactagcttgttatgacatgaaaataaagaaatttcaatttgtaattatatgtttgctgattctgttataatatatttgttatgctagttattcacattatatcagttttactaatttattcaatcctttttccacgaggaaaacagaactttcattaatcggtaaaaaagatcgtttatcgtaagtcgaatgaaggttgtgaagaactcttggagactcatttgacttgacagacggagtaagatgggttcaaatcttccatgtaaggtaatgtgaaatgtgtctaactcggctgaggaaggggcagcggaggggagggggtgtgggtgtgggagttgcaaaattattgcagtggcaccaataattatgtgttacatattgagattaagggttatgcatcaaggcataatcaagttggactcggtaaccagaaccgagatgaactattctaagaccttattgtaattagacctgtgagagcaacacgtaggtctatgccacgtagatataaatagatgtgtgagcgcaacacataggcctacgacacgtagacgtaaataggcatgt

SEQ ID NO: 385408 - DNA, 724 bp, Cannabis indica
acaggattcacaatttgtgaactcatatcaaagattgtatcataattagtttcgcaaaaaggtttggagcataatcggtaaaaatttcgatacagcaagaagaagctagttcaatatatgtatatcaaagtgtaaactactgtaagaaaaataacgaattcgacatagttcttgaagctacgttaggttgtttaaaacgcgattaatcggaaagagaacaattagacggcacagtaaacgagacaaaacatttaaactctaaagctaaatttctcttaatcaacctcgcaacacatcgattctaaatttctattagaaaaaaaaacctaggaacacatcgattttaacataaaaggaagcccaaactcaacattaggcacaaaaaataacggaaaccaaatcaattttgcgtttctcagaaaccaaacggagaaggaaaaaaaaaaaaacctggaaggggattctttctgacccttcttgggagtgttgaatatcctgtccattagggcatgaaacctcctgtctgaatcgtccatgtccgtaatcgtcgaaggccttacttacaatagtacagaataagtgaaagtgaaactattaacgaagtgaaagagagtttggtagagaaagacagggagatcttcaaactagagcgttttttttatattaataaaaatcataagatatattaattaataaattcattcaaaatagaaaaaaaaaaaaa

SEQ ID NO: 385409 - DNA, 1187 bp, Cannabis indica
gcatatatataacaaaattatagaatgataattaaatgaaaaattgtatgagattaaattaattaacgataaatttatcacaagtctcacaactttatgattagcaaaattgacatgctaagactcacgatagatgagtacataagcactcaattaattattcaatgatataattgtattatcaaatatgttaatcatctatcaaataattttaatggcatgagtataattatgttttcatccaatgaaataaataaaataaaattgcgagaaaaaatcatttaatttaaattaattatgtgattatgtatctattaacaatttaaattgactaaatctataatataatcacacaattaaatggagcaaaatagtgaaaatttggtccaaaatgaactctttacgcgcccccgcatgcccaaaaaagtttcgattatttattatttttttggagaaaaaactatgaaaaactacatgtagtttgcaaaaaacaacatatagtttatgagaaatgacatgtagtttgtctaaaatagacatgtagtatatacatgaaatgacatgtagtttttcaaaaaacgataagtagtttatcaaccaagccaaaaacgacatgtagtttatcaactaagccaaaaatgataataatattgaaaaatgacatttaggggctgaaaccatacaaaatggagacgtcttcaacgtcttgatgggtcatgctgacctgatttcgaacccgatcaccgatccagtcatatgttagccttcggtacaccagttttgatttcgtttggggggtttgttgcaaatttcatgatctcatttaatatttggtgttgaattttcaagaattatgaaccattgttgattttataaacctcattggtctacacacatagtgtaatgaaaactactcttccattctctcacataccattagccacgcccatctcacaccttattcacaaataaagggcacaacccttttataatgaattatggactaattgggcctacatgcccaatgtaagagattagttgtttcagctcaatagactgactaaagatgttttagagcgtgtccatgggcttcaagcatgttagtacgttatgtccagggtcagccctgagttgaaatgagctctaggtcaaaaaagaaaaattaggcctttactataaagataaat

SEQ ID NO: 385410 - DNA, 569 bp, Cannabis indica
atattattattattattagaatacctatataaattcttaattaagttactatgtgatgtcaattgattaagaaaacgtcaaaacttatttttatttgcattgtcatgaaatatttgaaaacttttattcattcccaacgtaaatattcttcttcttttcatttccttttagtattataacaaccatgaggactggtgcattgacttagtaatggtaaggaaattttaattaactttttttttttcttgataatttcatgagagaataatgtttggtgatgttttatataaaactctttgtcaaacgatttgaccaaatgttacctagttctacttggccaccaaaggcaacaccaattaagagtcaaggtatatgagtggctaacatttttctcttttataagttgtagtgggtaacattttatttttgtgacccacaaaatctcaattgttaatttgagaaaattacattgtatatctattttattttatttattttaatttttatcccatttttatatattttttagatatatatccacttttatagatgatatcccattagacccc

SEQ ID NO: 385411 - DNA, 1939 bp, Cannabis indica
ttttatacaagatgttactatgttagaatctgagctatatatgttcgtttggaacaggttcaagtgatttatctccccattctctgacactactgagtggatttgttgctgtaatatcagtcaacatagttattgcattctatatatacatggcaatgaaggaaccttcagataaacacgaaccagatcctgcatttcttgcggcggccaaagctagcgtgaaccagtctggggatgactctggtaaaaaccagtcaggtgactccagtaaatcattgcaattctcaaaaaaacaagagtgacatgaactactctgtcattttcacattttagtattttctatttttgaactagagatttgaggtttatgtaacaaaatacctaaagcagatgaggcttacgagaattatattttatgtttattaaaaaaatatgaaattgattttgtaataaacaattaggaagtagaggaataagcaaaggtaagattttggttcacttgtatgtaaatacattttactagcaaagaaaatataatgtaaaatattttactgaactagaatatactacaatgtgatctaaaatgtgtaaaaatatatacatcgtagaattgttttagaatcaatgtaaatatattttggttaaatgaaaaatatatatactacaagcattggtataaactataaagtgctagtggtgcctagtgcatgggctcacctttttaggtagttgaatcactgtgcgacacattgacttttttaagctaaggtcagccttctaaccattcgagtgacaatgagtttatttttcacacggttcaactcctgccaagtcatgctagcaagcgttaatgagtattcatgcatcgaggctttctagtcaagatacttgcactatctataggttcccactatgataaggccaattccaacaccatcgctcacctagtcactcgtgaccaatgtagcatctttggcaagatgccaacactaaactaacgtgccaatgcttctaattatgtcccattcgatactattcgaaaaatcttcctcatcgcccaagaacttccatacgttcatggtccaatcctcaaggcaccatgcctccacgcatgttggcaggccctcgagacaagccaccaaactagtagcatacgttgaatctctgtctctttttcagcatggtgcatctgccccatgagcgtgtgtaaactagcccacgaataactacccgtgtcatctcctgttaagactcgtggccaggcacaccataacgtctctcagaagttttagtccatgtcccgtgcaagcgacataccggcaaaccaatagaaacatacatgctaaactttggcaacatttttagatccgctatcaggtcggctagatagtgtccatgagtattccaacttatggagacatatgagtccccttgtggtcctcatatgcccgccctaccactgactactagtagttcacttagaactaaggtgacaatgggtggtggagagttgacaccagctactcccccttaaggagcattctaaacttttaacattctactaggaacatatataattttggtctatagacatatggtcatcaccatataccaaatcataaattttcttgaatccaattgcactattatattcataaacctaaataaatggcaaataccaagtctcgtcccaatttgaacaatattgaacatatttataaaaatgccactactatacaaactaagcattatcatgccaccagcatgcacaccaacatgcgtcactacttgaccaccacttggctaccttatgggcatcacctagcttgtatcgtgccatcgtgggtagcacgttacaatctcccccactttaacatgttgatgccctcatcgacgaactgtaggcaaatcttcttgatctcaaatcctaagcttactc

SEQ ID NO: 385412 - DNA, 1391 bp, Cannabis indica
tattttattattatagctgtcagaaaatgtaataagtattgctatttgccactagagaatatgatttattattatactaattatcattatcagtctatgactaacaatccaatatccattaaaaattaattaacaagttttttaatttaatttgttttaaaaaaaataaatatatattcagtttttccctattttttatcaggtttgatttcaaatttattcaacttgatgaacaattgtaggttaattaaaacgggtagttgtatgactaattatccataaatgcagataattatctttaattatttactttattacaggtgtatataacgtcctaactgttacaatttattaaaaaactaacagttataattttggaaagatacatatatttttggaaatatggagaggatcagaaaattaaaagttgttgtattaaatatatccaattacttatcattcaataattttttgtaattattttttatttttaaattaaaatataatagaggtagaaagaaaactaacaaacaaactaagaaagaaaaaaaaaacaatacatacaaaaaaaaaaatataaattattcttttatttttttcacacagaacagatttataaataaatactgacaatatattacatacagtgtgtggtgtaataatttggtactcaaacttaataataagataacaaaaataacaaagtgatataatgatcagtgcatgctcacccccaaaataaatgatcatgaatctaagattgaagaaatatgatcttatgatagtaattattaatgtaataagtagtcaacgaaaatgataatatatatttattttgaaaggggtagctaattaattaataaaatgataatattaaaaactgtacaagatacatgataataaataattataaaaaacgtgttttacacaattgaatttgaaaaaacggtccctaattaatgttgtcacgtctacatttagtttaattaatttttccaatctaggatatacaaaaaaaatatagctagaatagataattgagtattctattataaaaatttacacacaaacacatcacttatttttcaaaaaagtttataattaattacagaaacaccctcctttacttaaattttacttttgaaagtttgaccattaaatgcttcaatatttttatacgcacaacaaaacaaacaaagacaagtagagataggtctgtgagtgaagtcattttgtataattaatttaaaagggagtggagggagggagaatattactttttttgttagagtaatttgaaagttaaagagtgtaattttttattaattgtgttttacccgaggagtaactacaattaattaattaattaattaatttgaaaaacatatata

SEQ ID NO: 385413 - DNA, 1655 bp, Cannabis indica
ttttgctttagtttttgttttagtgttagagttataactaatgctaattaataattatttgctatggtgaccaaccaaagtaaaaaattgcgagttgacttttgcatcggtcaacaagtttgaccagaagcgttgactgatgtgaaaacccttttttgtagtagtgaaactataaagaagaggatattgagatcccgttcaatgcggaacaccccatggacttgcaacttgttgagcctgctagtatagggacctctcgcgttcatgcaagtagcccaagctcgacaacaaaggtcaggttcgagatgctgaaagttcatcatcaccattccatggtgagtgacataccacaactattcatgaggtgttgatagagaatgatctgttgtgccagcacctagaagaaactcttaaacctaatagagagtggtatgagaggcatgaggactaagagactgctaggaaacaacaaatggggctcgtgctgagaggcaccctggtacgggtagaaaagaacaaacctcaggaagtgagtcaactcaccaatcgattagaagccaagagaggtccatgtcgcgaacaataatatcataaagttgagacactatacttaatactttaccacaacaaccttcttgttagaacaaagaccatgttagagagaatgaacgtcctccttcacaatagtagcctcgtggtactaccctgggctagaagaataggtggaacagtgttcctcctcccatgtaacacctgacttggaggagaaaacaagagcttttttgtcctcaaaataatgatgccccatctctgtgaccaagctctcatgaggaatgaggagctagacacaatcactattccacctcctcaaccacctcctactcctagggacattgaggtagatgtagagggaagaagggatcacgcacgaaacccttcatctccaattaggttcaagttggaaaaactttaactaggatcttatttactattcaagcatgttaaattaattctaatctaacatcctaatatggataagaaaacaataacataaacacataaagggattagtagatccttacaatagttgcaaaggaattaattgactccttttgttctgttatctcactcttgatcctttctgtcagaaagtgtgatcaagaactgaacctagattctcctttcgattgtaaaagactacatagtcttccgtactactctgagtattgctttgatatctgtgggcaactactcaataccaaggagcacaaatttttaagaataaatctatagagagtttaaaaattctaagtgtatataatttaatagctcgtttttcttagaaagagagattaaaaactttgatctatagtgttatatctatatagtgtaggtctaggattaggtttggaattgaaatagattaaaaattaaaaaaatggctttattaaatggctgataggggtgttcacggattggtttggtccagatttttatattttttgaaccataccagtatttaaatattagaaaccaaaccagacaaataaatttttcaaaccaaaccgttcaaaaccatggtttgagtggaatttataattattcatatttttgtaagtaattgtactatttttaccaagtttttaattttattt

SEQ ID NO: 385414 - DNA, 931 bp, Cannabis indica
aaaaaaaaaaaaaattaatgaaagcaaaaacaacaacaactcccattctaaagcacaaaaataagaaaaataagcatatacaacatagcaggattatataatatatagtggacaagtcaaccaaaattaaccttttcccatgataaacctgcaactagtaaaataatgtggtgaattaattctaaacagaaaaaacacacaatatttttcactacacaccaggatcaatggatcatatttgtttgggtaacaactctcaaaacaataataataataattattcactttcaaatttctttgcttaatctttattttcaatcacaaatgtggtctaacagttacctagattggaacaatgcatacataatttgtagactaacttttctcagaattcaattcaacgaactttcacagggaaacatgcataatttatagacaacaaatatataaaaatatatgaataccttcaagcgattcatgagaacggaaagtgacatgtgggtctctcttgttccacttgatgaaagattggtcttcccagagcttaggggcagtttgggatggaaaaacaaggtgacccattaaagaagtagtactcatcaatggatggattctgttctgtgttcttcttctcttgttatgcagaggaaaatgaaggagaaagaggaaaagttatgggaggatatcaatggctgatatgatactgatagtgtggatcgccactaactccatttctttctttctttcttttgttttttctaaattctaaatagctaagtccacagtctactttcccagttctttttttgtatttttactaggttgtgtcacgtggggacacgtgtacacatgatgagcttaatcattgttacgagcaccaatcacacgatttttttataatttttattaaaataagggtaaatagtggcat

SEQ ID NO: 385415 - DNA, 901 bp, Cannabis indica
tcaagttttgtaatatttgtttttattttgttgtttttttggtctgtttctcacctgttcacattggacactcactataataaaaaacaaaatatcatatatatatatatataattaatgatattgacttaaattaaaacacataattatataatatataaactgtagattttaaatctgcaaaaccaaaatttgaaagatgcacaagctgtgaaccaaatatctttcattattaatttatttaatttgtatatgaattgtccctcaatatttatagatattcatatcctccttgattttggtatatataaataaatttctttcttttcttattttaatatagatcgtgcatgtgtgaacaaatgtttcattttattttctgaagcctttatgcaataaattataatgacgaattaaaataatttgtcatttttcttcgtaattaatatttgtactctctgtacgaagatttggttcatgtactctaaactattcaggccatctaaatgttattcttactatccatttttataattctcatctaaatagaaaaattcttcttctttaattcatataagcaaacattaaaattgaaaatgacttgaattgataatctataagaattgtatttgtctatgttaatggatgatgaaaattgagtaggccaggccaccaggatttccctataaatcgttttggcgagtaatttgtggtgaattatacttgtaaacataattttgctacaaaataaggaaatgatggtgatttttccttttatatttttgagaataaatgaaaaagaatatttatggtattataaaatatcaaatttagtatttatactgtttttgttcttacttttcatagtatattactagggaaatttcaatttttgacccta

SEQ ID NO: 385416 - DNA, 1954 bp, Cannabis indica
tgtttaccaataaaaatatttgcaaagttttcttgataatgtcttatcaatgagtttatgtagacactgacttgtttgatgactcttggacgatacctcttgaacatgatgaagaggaaggctacagttaaactatcattcataatgtgttcttaggctagagggatggagaagttacttttattcataatgtgccagagaaagttggggaatcaataggttgttgatgctccttgtcctgtagttgtaccctgctatcttgcttttcgtgtttcttctgttgttctaaccacttgtcttttcttcctttaagacaacatgagtttcgtagcttccatgaaacttgtttgaagaaaaaattaatgtaccaaaggagactgaaactccagccagggaggttgtacagggtatccctactgcttttgctactcatgcaaagaagaagtcttaaaagagaagcaaaatagctgaggtcactcctcctgtcgagtattttagcaaggagaagtctaaagttgtttatgttgatgagggatctcccacatccctaatcaagatttctctggatgaggctaacaatggtattttgtactctagtttggatatggtgagaaattgcatgtgtagggtgcgtggcttctttccaagattccttaattgaattgaaggaagagagcattcctttggggaagctagttagtaccaagcctccacgtgtcattgctcaaagatgtttcacagatatctttggggtaacactctctccatatcttctcttcaactagttttcttatattcatcatcacttgactttttctcttttttattttttaggcttgtgttggctatgcatacaccatggaaaatgagcacaagaaggttattcaactggctgagaaactcttagctactgtgaaatgtgccactactgctgagagttgggtgaccgatttagaagaagccattggtgacctggagaacagcgtaactagtcttcaagaagttgccaacaatgtcaaggctcaagagagtaacttgaagaaattttagggttctgctctgaaaaagactttcgaggtcaaagactcttcttatctagcacttgatgagaggaatttaagcactgctataataccctagaagttatgagaatagattagcaaaaccctatctagataattatgcattattgaggaattatattcttatatactttaatgtatgtgaattaatatgaaatatgacatgttaagacctcgtaggtgagtcggggcattttagtaattttgacccgaaaagggtaaaacaattaaattaatttattaacatgcttataggactatattattatatagtatgcatgtgttgtctttttcaagtgtgttttgacaagttggggaggtatagtcacaatcaggtatttcgggccaaactgggtttggggccgaaatacaatcctgggattaattattggcattatatttatgtgaggataatctaaaaattatttgaatatatattatgtgtgaaatgacattttcacccttaaatgtgtgtgagtgtgttttatagccctaggggaaaattggttattttgaactataaatgatatttgataaaaagtggaattttgagtaattaaggtatgaattttctggtttttacacctcaaacccgaacccttctttctctttctctaaacctatttcaaaatttaagatttcttgagaattgcttggattaaagctttgtaactgaggatctttgagcttgcctttggattaatttgaggtagatatctatagctttgaactttttttaatttgctggaattttattgttgaaatatcatgaaataggttgaagatgaccttaggttgcatgttggtgttctctttatgatttgagcatgtttatacataaatctttgattatatgatttgattgggttttg

SEQ ID NO: 385417 - DNA, 1454 bp, Cannabis indica
aggggtattttagtaatttcagattttattttgggacctggttatgcaatttagaaacttcgaggttaaggaaacaaataatagaattaaaattttatatataaaataaaaactgattgaaaataaaattaacagtggattgggaaagatgaaagtgacattttttttagctaaatatcaaattcatttttttttttgaaatagaaattcattttaattattgttgctcattggtcaatgatagtttttaatttacaatacataaaaaataactatgtatttaattttggtttattgttaaaaaaaaaaaaattggtccattgtttattaaataaaatcttttatctttattttattacattaatgtttttttatttagtttattatatcttttatttttgtaattaaaagaaaataaatgatctcatgggagatttgaaaattcatttaaatgaatatatatatatatatttataataaaaataaggtaaaaataccttttttctttttttaaagaaaaaactaaaatgaagtgaaaaaaataattttagtaggtttttaagatttataattctaataactaatttataagtatttacatataaaattctttattttatttggttgcatcaatttattgtgaataaaataataataataatggtgtaatgactagctttattaaaattttgcccaagaaaaataagtaaatgaacaaaattgtgcattttatttatatagaagtaataagtggttcacctttgtttaagatttatccttagtaagtatatgtatatgaaaagtatataattaaataaagggaataactttttattagctcaataaagactattcactattgagccttatgacttaggagaaatataaagttatttagtgattggacaaaagaaaatgaaatgtttctaattagatagagacatttctaagtttattcatattagtatgactttcactttcttctcctaaactatattatacaatcgattctttttcaataaacacaaaataaaataaattaatcaagcttatttccataaatatataataaaaaattacgaaaaagaaaaagagattttatcctccactactagccatttgttaattaaaatattttatttaaactttaggtttaggcatttcattgtgtattggaagaaaacaaaaagaaaaacctctcaaagatttttttcttttttaaaaaaaaaatggagaaaagcttcaaagtttggtttggaaactatgctttttattaataggcacacaaccaccccttaattaatgcatttaaaatatataattaaaattccgaaaaagaaatattaaaataatttaacaatagacacatacttgttaggctaaaattagtctaagtttcgggtcgtattttcagttagttttcactcttgtttctagttttagggctattttac

SEQ ID NO: 385418 - DNA, 822 bp, Cannabis indica
ctctctctctctctcaattttacaatatcacaattttcactcaagtaattatggtctgattcatctacagattacaaaaattgatagctatttatagatttgcattgttgtctaatatagctccaaaaatatcgtgccacatttacatcaccttaaatgtttcaactcaccaccaacaacaataatctacgtcagctttgataacgtgctttcagtatagacaatccagaagctttgatatggacaagctatctagatatatacaagcgctcctcctgtatgaacatccttaactgtcagtatgctatttggaagaaactattttacagaagacaagctttacggaagaatcatttagattagccacaactttactaacaaaacttttggatgagtaccaagctttccatattttcttgttggagtaaagttacatagcttctcgaaagataaaacttgtaaccctaatcaacaagaactaaaagtaaaatgctcaacaaataaaacatgttttttttaactttctttaaatatgggcactagttcccttcaaaaaaactgttatccaaaacatgttaccccatttattcaaaaatatgggtactactgtggatatggcttttattccaaaccctattacatatatcaacccggggccataaaaaaatgtaaaattaatttattcactttcagcaagcacaatgtaaatttgataatatattaccatttacatacataaacggggccatacaaaaagacgtgccctaatttttataattttatatatacttgttttctttgttttttttttttcttgttttt

SEQ ID NO: 385419 - DNA, 1539 bp, Cannabis indica
ttaatatataaagatatataagaaaaaataattgtgcatataacaaaatatttaaactttatttttagcattagaaactatttgaataatctaaaaaatttacaagtgtaattaataactataacatatactattataaaaaaaaaattagaataaaaaattatcataaaaacagtaatgaaacaacctttaaaaactgtactatatatagacaccctctatctatatttatatttttttaaaaacataaacttttagatgataaatatattgatttattaaaccttaaaaatgaggcatatggacttgattatgattgagctgttcgatttttctgtaaagcaagttgatataaatatataaatatttatatatatatataatattatttccatctgcttagctcatcaaccatgcatgtcggtaaacattgtgacacctcccaagttcatattagtttttcaactcttcattttagtttctcgacatcccaactgctacatcataattttcttcttcatcaatttctacaaattccaactagccataattgattcatcaataatagtatgcatcccaaataatttaataaaataaatccaatgttactttaataattttcataatatgaaaacccaaatattagtcttcaaaactcaaattgatcaatccactgactaagtcttgcataatgtattttgtaatggtactacttgtaccatttttttgaaaagttcaaccaagtattatattagtgtcaactaaataatccaaatatatatatttatatatacacaacaatatgtgatctctcttaaggtccataaattccggataatatattagtacttgggtcaatctttgcttttgtttttattcataaaatcaaagtgtagatcatgctaactagttgctgatcaagctgataatgacgatgatcttataatataagtagaccaggtagagacgcttacataataattatctaatatatattaatttataattatgcatatatatatatttatatattgtgcttatcatagcccttcgccagctcttagagttcttttgagtatattgtgataatctaattaagggctttgggaaatgatcgcttggcaactataattatggttttgagaaggaagttgaatcgtcatgtctcttaaaagctattttttagttactatatatgcaatttataatcaccttaatagatcaaaaattaaattatttagattaaaatatgataaatatatcatttttgagtataatatacattaagagtttgataaatattttatgtaaacaaataatttattttaacttataaattgtcatttacactttgttattatttaaacatgagttacaagtttattatttttgtaacttttttggcatgatcacaatttcaagtgtaataattgttacacataattatgggattgaatactatcattacatagttgttagatggtgttattgtattgtattatattatattgaattgtattttatgcaatatttttatgt

SEQ ID NO: 385420 - DNA, 838 bp, Cannabis indica
cactgataattaccactggatcaggagcatctttctgcttgcacatgacccatggaactccaattttcaatcccacagccatgtttgcagcccactgaacatatctagctcccaattctctatatgcaagttggacatggttgtactcattttcaatctgtattatataaagttatcatcatgaaaataaaataaagagaccaaaaaaaataagaatttatgaaaaaactaataaatcacaaaagtgtgaccccatagcaaacctgtgccaaaataattggaccaccttgtggagcaaaaagcttctcttctttcatcttgtttataatcatcttcacatattttttcatgtggtactgcaaaaatggtaaattgtgatcaaattaatccttccatggaaagttatttattaatatcactcacttaaactcacattggggtcttataaaatttgtgttaccttgaagggtgcattatcagaacggaaaatgatgtcagggacttctctcaaccaatatggaagacctctgaaatataatatttttcgttacaattaaaaaggaaatcaacatataacaatatgaagataagtaggggataatattaatataattatgttatatatgttacccatggttccattcggcttgaatgaaaggtccaaccctgagcgttacatacattccttgttcaccaatcaatttaatgaacttcaccaaatctttgtttccttcaaaattaaactgcaaaaataaacaaatataagccaagagaaggaagtacataattttatatatatatatatatatgtacgtactgtaatttttttttctttttt

SEQ ID NO: 385421 - DNA, 1669 bp, Cannabis indica
tccaccacattaacattaaagtctcccaagagccccgctgcccacgccaactaaataacaccatcatcaccctagatcaccctccaataaaaaaagtcccctaccaagaaccattgatgtatctgcggatgacgagaaacatccagcaagtaacaatgaccactgcacagtctgacaaactgtcagcactgaagggaaacagtccatcaagagtccacattgatggtgctcgtggaattccatcgattggtttttagcaagcttcgggacaacatcaatccttgattgagcaccaccaaacaacatcgaattcctatcacaccacaaccacaacatcatcatcattaccgactcaaagatctcttgggataactcttcagagaggaaatcaaaatgtcctgtagcggaccatggccaaacccctaagcgaacccacttaggatgtagaatagagaaaaataacattgcatgttctggagtttcaacaacttcttcacatctcgagcacaaagtcgagacttgaattatttgggagatcactcaagttgctactgttaagcctaaataaaacctccaataatcagaattcacactttttaagtttgcatacggcttgtgatccttgagttgttgtaatatcattcagagatgtttctcctgctcctcctccatctgagagtacacaaggatgtcatcgataaccactataatatagttatcgagaaaatccttgaatactctactcatgagatccgtagaggccgctagagcacttatcaatctgaataacattaccaaaaactcgtaatgactaatttttcggattatcttctccccgagttttgagctgatgataaccaagccgcaagttaattttagaaaatatagactttccataaagctaatcgaacaaatcatccatcctaggcaacagatacttattcctgatcgttaacttgtttagttcccaattattaatacatatttgaagggaaccattcttctttttcacaacaaaatcggagctttccaaggcaatacactgggtcgaataatccctaaatcaagtatcccttgaagttgtaattaactccttgagttttgttgagaccatcctgtataacacttttgtaacaagtcccacaccaggtgccaaatcagttatagaatttatttctcgttgtggcgataatcccgacaactcctcgagaaatatgttgagaaattcttttacaattctgactggttcaggcccaaatgtttcaggtctgctggagtcaatcacaatggctaaaaatcctatacatctattgtatagtaaatctttagctcttaaaactgaaataaccgaaattcgaaaccctgagaaaattcaatataaatagatgggtctttgtcctctggttgaaaagttatcatttcccgcgtacaattaatgctggccgaatacttggctagaaaatccatcccaggtttgaaatcgagctcaactaattccagctctactaagtcagcacccgactcctattttccactctaactagcatagtcttaactttcctttcaaggatacccaattctccgataaacagtaaggtttcaagtcctcttcaatgaaattacaaggcctacccatgtaaagatcgattagctttaatttggaaattag

SEQ ID NO: 385422 - DNA, 1739 bp, Cannabis indica
atatatatatatatatatatatatatatatttatgtcatttcttgctttttttcttagatacccacttctagatactacacatggaccacgaaaccacctcctccacgaggaacggtatagtacagcagtttttgatttttcaaagggaacattaatcatatgatcatttaattgaaaaacactaatgatgtttacatgcatatatgattttattccattagatcatgattcgcattaatttttattgacatcattaactttttttttttgaacattttgacatcattaacttgataacacattatatctcatttcaacatctaaagtaatatatgtggttgacattgatcaattattaagtgtaactgcatatactgtttgattgacatttcaggaatatatatatgatcgaaacacacaagatttaatattttaaggctttaggcaatcttgcaactttatcatatagttataaacgtagaataagtttgcatttcaattaattatatataatatttatatataatagaaatcaaatcacatgtttggatgaatgaaaaggtgagtttaaatgtatttattagtattagtaattccacagtcattgaatttattttctttgtttcgttcaattttctttcctctttaagtatattcatgatctaatggaataaaatcatatatgcatgtaaacatatctgtatttgtatagatatatatttttctaaacggggcaatgtacgtatattcatcgtaattaatcaacaactaaggtttcctatgtaaaaaaaaggatatatagcttatttatttgaatctcattgatttttaatttttcctgattacatatctggtaagtttatagttaaattaacttattatgattgtgaattttatgctcagccaattcatatattagtgttgtttattttttttttaaaaaatcatacatcatgtataagagttgtcctttttgatgagattaaatatagttaatagatgttgggaagtcaatatttctcttagcagtttgcacaaatattatttatttattttttttaaggattaaataggaactacaatggaacacctaaaataaaatgcctttaaaaccaactatctagtgtgcatttcatagtaataagatatattaccaaatgagtataccacacaaacaaactagcaaataaaaaatatagatataataaactggtatacgtaccgttctcaaggtgaaattatctttttcatctggttagtttgcttcttgttggcataaactccttccatctaaaccaagttaaaaattattaattcatcttctctctaactttgtcataaaacaaaagtggttatactatacaattaatagatttatttatacgcttattattcaacatatgattattgtgctacatatatgtacaatttttcacatataataaataataattataagttattgaagaagaattagtatataatattttaaaacttgtgacaaactacacggcaagaaagcagtagtacatgcactgatttattatctatgcatcatgcatgaatcttcaagttgttagagcatctctaaggttttatctattttttagttcaattttagttaaaatagtttaaaaattaaaataaataattatttttgctttaattatgagtatattttgattagtttaataatatttcataatttaaatttgctaaatataaatttatttaataa

SEQ ID NO: 385423 - DNA, 1732 bp, Cannabis indica
aaaaaaagaaaaagaaaagaacaagaagtgaatgtctaaattggtattaattaatatgtggcattttcatgagatctcatatcaccaaaattaaataatgagaaacaaagaaaacatatcacaactcaacaaaatctcacttattattatttgaagaggaaggttgtgtatttcttttttttttttctttttttttttttcaatactagtgtttatattttttttattgtttttaaaaaaaatgacattatatttttcatactatttaattaataactacataaatttgagggtttaaaagtattacaagattaaagtattgtcctttaaatgatatatgtgtataattaattaagatagtctacactaaaattataatgaatcatccgcataaattatttctccaaataatattatttttgtatgttgatttaattatttttttttatgaacaatgaactttcaaggttccgaactttactagtactttttttatgtatgaaattgattgttgaactctatttttagcacaagtaaagaaaaatttacacaaaatattatttttggtaaaaaaattatatttttatatttatttatttatatttttaaagtattctataaatacaataaaaacactatatgaaaataacaggaaaacaatatcaaaataacataaaaataatatgcaaatagtaaaaaactaacaacaaaacaatatgaaaacctaaaaaattgtattatctgtaaataaaatattaaaaaccgtaaaaatatttaaaattctgtataactgtatttttgtaaattttttattatttttatgtatttataaaataatcccaaaattaaatataatgagaagtattcattataattacacatattaaataacttattcaccaatataattatttatcactattcactaatattgcaaaataaaaagaaaaaaaaatgttactagagttacttcctttattattattatgtcccatattgtggggttggttggtgatattcacaccacctacctaattctccacccacacttgtttatcatgcattcatttaatttctctatttacttgtcattattatttggtattgtaccacactactactactactactcctagtcctccttccttatgttcaattttctctatatcttcacttcacttcaattttttaatttacctctctttctatttgtacatatactgaaaatgaacattgtttttagacactagtgtatctagcttacatgcactttgcatatagttagcaatattttataatagctattaaattaaattatacgagacttaatatttaattacaccaataacaataaaataattcagacaaatatttataaaaattttaacatttctcataaaaaaaaatcaaatcactttctactttattatattacatttaccaagaacattagtacataattttacatttcccatctaccattcttgagaccaaagtttgtaaaaccagtcaattatttttgtttatttttattaaggctacattttcaaaatatatataaatattatctattgtgtaattttttcaatgacttttctggcaccggtgacttttccagctcatgtgactttttcgacgaaaacttattattgttttaaaaatatgagatttctatcttttttttacaaaaatatggaaaaaaaaaatacacatataaatgtaaaaaaaaaaa

SEQ ID NO: 385424 - DNA, 920 bp, Cannabis indica
aggattccaactacggtaaaataggcagtttggacgtcggggactaaattattgttatggtatttaagcgccgataaaggtgagctttcccaaagtaaaaatgatttcaatgaataaacatttgcgttgtaatttgctgccagcaaaagtttgtaggcgcatacaatgtacattcgcctgaaaaaaaatgatttttcctataatgagctttaattaggatgtcagctagttgatcatgagctcaagtgtgcttgacaaacaagttgttgttaaaaattctttctcgaacaagtataagtccaattcgatgtgttggagtgaagaaacaaagtggcttccatgagaactgaactttgatttttgcaccaaattgtggggaaatgttgttgcctgagaccaagcttgaagaaaaaaaaaatagaaccacatgatttctattgtagcacgagcaagattgcagtaatcagtttcaatgctagaacaagaaatattactgttcttcttggaagaccaaaatatgatattgggaccaagaaaacacaaaaaattgaagctaacctcttatcatcaagatcagatgcctaatcagcatcacaaaaactagttaagtcgagctaagataggcctatagaaagacttccttggaagcctcatctataacaaagcaatggttatgatggaactaaataaaggcatgattatttgaagcaaacatagagacacttaagagatttttagttattttgggagcatgaagtaaactatctagatgaaatttttttagaggaataatgtaacgccctaaataattaggcatgctacccaaaatacttatacaaccctaatgctctaatcgagattactaatcaaaatagcgcagaatttaaacttttaaattaaatagaatgaaaataaaactt

SEQ ID NO: 385425 - DNA, 825 bp, Cannabis indica
ttatgcaaatgattggattaataatttatcttttcatattgacgaaataagataaaaaaaaaatgttaatttatcttttcacaattatgcataagctttttctataaaatataatagtatatattggagctgaaaatatacagacctaaaactatttaaatttttttgaatcatgtttttcataaacatatataaaaaaataattaaaaaaagtaatcataagacttaaaattcattatccacactattatgtgtaatatgccatacatttaattttactttaaataaaaattctaagagcgtcaccaataataatgctaaaaatactctatactatttaaaaataataatattttaatgctcttaattttaaaaatatttcaatagtataacactctttaaaaatactacaattatgatctcacatattatttatttttttaacaagtaatatattatttattttaattataattattatctcactacttatttacttttaattttctattttttttttaaaaaaagatagcattaataatatataatatagtagcatcaatataatagcataatattattatttcaaataaaaaatctacttaaggctaggcataggcctaccccatagtcccggcctatatataattaatgtattacatttatttcaaatgcaaattatgcaagaagagaatgaaaggcatgtaatattgaccataaaagtgtaaagtgaaataaatgataaaccatacaatgataaattaaaagaaatatacccttaccaaaaatatatatatatatatatatatacaatagttaaataaa

SEQ ID NO: 385426 - DNA, 2735 bp, Cannabis indica
aagtagagacaatatatgtgataaagcactcccataacaagttagaaaaagaaagcaataacacaaattgtctgcctcagtatcacccctaggccctaaaccctgtcagtgaaaattcacaagggcttagtatgagaatggttctaccaaagtcggtgggagttcggtgacagtgccaagtaagttaaccagagtatagcttataaatattaaatacatatttttaatgctaaatccactgagattcagcctgcgtcgatcagattcataaatatcaaatacaaaggttttggtagcatcactaagttgcagaagacagcattcaattactacactagtgctaagtaggaaacaagaaatgttcagaggagcataagagcaagttcctatcaagtttacttatattgccacaaaatgccatcattcataagcagcatctcctgatcataaaatattactctctggtaaaatctaggagacaaacttccagatgtcaaagttttattattttatgttcttggagattttgctaaccaatatatactcttaataaactgtattagtgtaatttaaagattaccatggcaatctatgacaaatgattgccaggcctgaaaaactgagactttgcaagtaataaaataaacaaagggcatttaaagtcatttacagaaaaggacaagagaaaaacatagacaggtgtactacatagtgaagagcacctcagtactagacttaagaagcaaaaatactatttggtcccagtacattattatgccatcagaaagatggatgaataaaatccaagtagcctttcaggaaagtcaaaagtcaatattatcaaattcacaggccagcacacttttaagcaacatgacaagtaattttcttagtaacccccaaaaacatctgtaagacatgatgccactaaataacaataaactgtcctttaaaatctttgctcctattgtacggaaatactcacatatttacaaccaaagactccaaactgttatcatccactgcagagtgcagatcaaaataatgttacagtactctgtccaatgaaatgtggtagcagaagttcaacgtgtttagaagaccaaaaccaaaactatctcccagtactttaaaacccaaaaaagaagcacaggattcctcaaaggtatttagtgtaacttttggttgtatttttccaaggaacactaacttacagcttttaatattagaacagaaaacttaaacggcaaatgaaatagtaagatgcaagaacagatgcccagaaaaattattattacaaagctaatgtctctctttacacatacctccaaagattagccaaaaaaaaaaattaatacttgaaccaaaatttataccataaaaatataagaaaatacattttggtttttaaatatcaacatgtctagtccataaaagaacaaagatttcccatgaaacaatcaaaatcaaacagccaacattttagaaattaacgaaattctgaccatcacaaccaaaaccgtatatatatgtagtaaaatcgaagacactcacctctaagaatctagtttcttgctcgagcctcttaagctcagcttgtatcctatgtcttcctctagtatcagcaattgacaaggattgaagccgttgggtagtagggctggcggtttcggacccacttgattgcatcttagcccagtaacagtcacagtcacagccaaaaataccaaagccaaagccaaccaatgaaaagcccctacctattattacacagttgaagaaaaaccttggtcaccagaagaaaacaaattgatcatctcagaatataagcaattatagtggaatagaaggacgacccagaaaattttttatggaccccacgagctttggtgaacctaaacacaaagagatggatctatttaagagaacagagaatttgggtatcaggttttggctgttatttgataaaattattagaaaaaagaaagttttaaaagggaaaagggagaaacgagaaagggaaagggaaagtttttactttctttcttttttcatttgttttgtttggatgaaagctagtattctttctcttattttctgtcttttttgtctctcctttgagactcttttggttttggtttggtcgtctccaacttcatacagctacagccagcagcccccacgcgattcttctttttcaactctgagttgttggactctcaaatgtaaaacttatgctcagtacaagacaagacaaaagttctaagctttattttatatgatattttattgttttgcttcaatagaaaaggtcatctgtttttataagaaaaatacacaaaacatgctaaatagtagctctccactcacatatgagaaatactcttttattaatacttttggactaaaaatactagaggtggggtcttcttgaacaggggagaccaaagttcgaatcttgatctctaaatatttgttcttggtctcagttattaaacagaaagtatgtcaataatagtaataataaaaaaaaagtcttttttttttggaccttcttcttccctaattggaccacatattacttctaaagtatagattgagattttattttattttatttttctgtttctttttattaataagcttaaaaatctaatcctcaattaaacactaaatatgtcaattatagtaatgaaaaaaaaagtttatggggatcgaaggcatcgttgcatctg

SEQ ID NO: 385427 - DNA, 1386 bp, Cannabis indica
taaacatgtattaatattcaccgggtaggagtgtctttataacaaagaaacaattttatgtaacttgcaaaatctctctaaaaagtgctacacttttcatatcaaattaatcaaagaggaaagaaaatgaacttggtctgtgaattaacccacttctacaatcctaagtacctggtttcctagttgtcccatgatccgattacagctacttgcatggcgccacaactccaagatatctaagggttcctctcccacaccccctcgtcattcttaattgtctgaataaagttcctccttaatctaatcacagtggaggccatgaaaaatttagtgcttctatccccctctttcagccaggaaactctagatttctgtctccagaaaatttcttccctcgcaagagcttcagtaagagcgcctctagcactatccaaccccgcgacatcagttggattagattttttccattttctcaagtgcagcagtggcctctataacttgggagtcaacttttccaaagtgagtcttgttccatgcttggaagtgctccttagtgcatttcagctttcgctgaaggttcaccattggattgccatgaagattaccctcccaagcgttccgaacaacccagaaacacgatagggtcacgactccacatcatctcatatttgaaatggcttctctgcaatttactcccctcagtatcaagaagaatcagcctatggttcgatgtcgctgctgtcaagttcctaaccaccgcgttggggaagagaattcgccaattcaatgtggctatcgctctattgagacgagctcttttaagcaaaattctgttgctctggtcttgagcttgtttgaaccacgtaaacttccctcccatgcaccccatatcaatgaggcccgttccattgaccatacgccgaaggtcaaaagaatatctagcagagtttccccggtgcgcatgattaacgcattcatggtcttccaaagtcccgttgagatccccaatcaacagagttgggtcaccattctgaataagtaaatcccccacttccttccaaaactgttctttctcagtgtgcataggcggaccataaattccccagaaacatccaaggtcgtcctgggggattcgattcaatcaatcccctgaacaagttttttgaagatgaacattccgttaatttgactccatccttccaacacaccctcagacctcccgataggccaatgggggaagacataggctacattggcaaaatgaaactttcgcatttgacgaatgaacttgtctttgaccatccttgtttccgtaacgtagcaccacgatcgggattgtattggtcggaataagacgtcgccgaacctgtcgaactcgtcgcagca

SEQ ID NO: 385428 - DNA, 2150 bp, Cannabis indica
atatttaccgagattttcagaaatcaatttattaaatgtgaaagataagaaaatttatcaaagacaaagaaaataacaacgatgatttttatgtggttagggcattaatgagtctcagtccacaagtcaatattattactttaaagctagaaaagccctaaggtttacaagaatgtctgaattctaaaccttttttgagcagttgaggaatgaatttataactctttgcatgaagggttcttcgtatatttatagtgtttagggtacctgcttattagcctttgcccactgatgattccaagtaaaatatttacatgggcttatttggtgaagcccgactcatggggcgcacgatgtatgttgatgtggatgccacatcacgttggcggttgtaaaaaattatgtcctatcctcatggagaataaagacacattaaatacttgattgctaattactatctttgcatatctaggaagatatgatcttcagacgagatcatcaggagttaattactgatattgtgggatttggtaattatcaaatgggaaacggtaccagatattcagatgctcgctgattacttcttacgaacgctctttctaatgtctttggacgcataccatactggatggatatctcgcctagatgaatcttctactcatcatttggaaggactaactttgcttctggatcagatttaatatcttatttgggcatgctagtgggattggaataactaaattgtattcgttgttggaattccacgtatccccatacggaaacaaaaataataattacgattcatttttaaaatttatgatctcttaaacttatacatgatataaattctaaattacttaatttaatatcttttaaaaaaaattactaattttttctatctttgttggttttgcagaagctcttgctttattggtaggactaagatgggcacaaggtgtcttattttgagacattaaactattattatttagctttcctacggcatctctctctcttatattaattataattttatattgtgactcatagatttgttaagcatgttctaaggataaataataatttttgagacttctccttttgtttgcgctttcttttttatgatcaattaaagtgatcatgtcaacatatatataaaaaagtgatggttttgttttttcattttacatttaatacatgtacttaaaataattaaaatagcattataaaaataaaagtaattaatgttgcttaaaatacatcttactattacattattggaaaatgtttaggtaaaatcatgaaaaatatctttacataaatatattttttgttattatatttcactctattatttaatactaataattcattaatttcttttaaattatttttattttttttaataatttagtgacccctaataagaaaagttagctaatattcaacattgttgtggatccctaagcctcatttactaaaaaatcttcaaataaagtgtcttacatgcaattttttttttattaaaacacttctacaatatttttgttttgatatatagtaaaacttagaaattcaatattatgaacacaatggacatataaaaataaggttttaaatatatttgattgtacaattaattaatcaaataatactaattttttttaccacatttcgtatgactatattagtatgacttttgataaatattagcaactttctttattaggggtcactaaattattcaaaaaaagaaataaaaataatataaaaagaattaattaattattagtatgaaatattaatagtttgacacataatgaaaaaaaaatatttgtatgtacagacattttttgtgactctacttaagcgttatcctatattatttaagatgcaatgttaataatatagcatgtgatgttggatgaccataaaatatcttaaactaatgtgatgcctatgattgtttaagctaaatgataaaacaagcttttaacattatttattgtatattttgggatttttacattatataatgaaatttttaattttttacttttttactgtaggaaggtttttttttttcaaaatactgtgtaaattttatactatgtattgtgttaagttttcacggttgttccacggttgtt

SEQ ID NO: 385429 - DNA, 1924 bp, Cannabis indica
ctttcttcctctgtaaaaaaaaaaaagtctatgacagaatatatattccctttacgtgctgccctatttctgaaaatggaggctacctctttttgagaacctcctagattttgtaccatttgcccaacataaaccctacacatgtcatgcatctagcctctcgaagtaattgctccaaccaccactcctagaatgccatgtcatctccacaaatgccatcacatttaatgaagtgtcagctcatctttttctcaagaaaattaacaaatcagctactgacttgtttgctgcaacaaaaacttcacagaatttcagcaaaattaagaacttgactaacttgctattttctttgccaatttatacacaagttattggtttctactaacagcttcaaattacacacaaaaacataaaccactggaactttcacaaattaaaagacaaaataactacaatgacacacaattacatataaaaaaaacatgtttaaagtgatatcaaataactctttacttaagagttatcaaaggtcaatgtcaatggtgcaatttttgagcagtttggacgttatggtgttggttgtacagcccgtgatcatgatgggaaagtgttggctgcattcaacaagtcttttgaagatcgggttcaacctgagatggcaaaaattattggcatcaaggaggctcttagttagatcgatagtttctcttaggatgatgttgttcttaagatagatagtttagtccgtgttcaagccattttgagttctcttctcactccttctcaatttgaatttattgtttttgattgtaagactttgcttaatcgtttgtcttttgtgtctttgtattttgttaaacgatctgcaaacaaagctgctcattatatggcgcgagcttcttgtttcttcacagatcgcactatccaggaggagtttctgtctcctaagttagttgccattgctttgactgatttttcagtttattaaaatctgaagattttattcaaaaagtgacacaaaaaatgaattaaaacttctacacgtgtcaaaaatagaaatatctctatgaaaaaaaactagcatccttatatattagtatttgaacattcaatattaatgttacacatatttatatttatattttttattatcaatttttttaaaaataatgcacaagtattaaagtgttattcatgtttctaaatagctagtaagtgggtcacgacagagacccaatacagaaacgagacccattccctaagtccatgtggagcaaatgcacgacctatccatcaagaatgggagaagtcggacttgatgtctggttccatcgaggttaaccctcaacggtggatctagagacccgaattcagatcgaccaatagacattcgaagagcaaacatgtgtaggtcaaataaggatgccccaggaggcatccaggaacataacacgaaaggcatttgggaacatttaaggtaacataagtcaacccacatggcataattctaacacaatcttgagagattaagcagttcgtctcttgtgtcagaccacaaaaaggctcacaacaaaaatgaaattacctttttagccaacgccaactactttgacattttcctttctaaactgacgacgcacattcacatgtcactatcaacaatgtttccatgtaggaatgacatttattaatgaattaagcatcacctacccgatccaatagctaatattatattatatttaccacatcagtggactttgaagaccaaaagaatcctaatcagttaaaggctgccaaacacattagtcattttgcttataattatgacttcatcgcttcgtgcaaaaggttagaaaattgagaaattaccccatatactatttttttatttttttttcaaatttacggtttgagtttctaaagt

SEQ ID NO: 385430 - DNA, 1921 bp, Cannabis indica
ttaatttcatataactaaaaatttaattgataatctaaataaatatacatttttacattgctctaagtaaatatattacataaatattctaaaattactctaaatgtttacgagttatctaattaaacattaaaaaagaaaaaaaatattcttatacaattgttctactcatcatcatcgctatgaatcactgcaagaaattttgctatctactcttgctataatggtaacaactcttttattgcgtcgtatttagtctttctcccatatttttattagtatatttattagattgtttgttaatataataaataagataataaataattaaagcttatagcttttatttcaattacgtatttggtaggatttgcaactctgacgatgtcattgatgtatttcaagacataaaaattacattcttgatttttttggatgttttgagaatgctgcttctgatatttttagatgcggtccaattaacgcatctgtccccttgattttcttgtaggccctattttgaaaattatattactgttatacccatattttgagaaagtaatacggttacaacacgtgtaagggagctggagaatgaaccaactcagactacaaagaaataaatatgcacagtcactcgcctcaaaaaatacaattggtagatatatttaaacctctcatttttaaagataagggtgagccgtaaataacaactactatcttgtaagaccagggaggtgaacaatcaatgacaaatgtccatctcaggatacatagagaatacaacagagtgacaattaattagaaagggtagataatgagttatttttagagcttgtagctcattgactcacatactcgtcagtatgttgaaagtgtaagggatatacacaaaatgtgattcatctcagaataatcacaaatgatacaagatgacagcatctcacgtagatatactcggttagtctcaatattataaaagcatgagaaatatttctaaagatcatacttagctacaacaattatcttcaaggtaaacatcagaagatgatcatgaatatagcgaggcgtagaagcttagtcagcataactgtgtttagataaagaaaagagcagttatagcgattatttgtttttatcacgtgtgttgtaaatataaaacattagaattatccatgtttcatgaacggttatgaggataagatcccatgggaataactttcaccctaaaaaacctataaataggcgaagatatcttagaatgggacacaactaaattgaaaaatatagagagcaatttaaatattatatacagtattctataaatgactcataaaatcccagtaataagatggattcatggactatgaagaattaactttcaaaccatgtaaaaaaccttttgctttcacatatatataccattactattgcgttatattatcattctgacatttatgtactaaattaaggctcatttcttggttaacaaaaattagcattaacagtttggtgttttcattgagagtctcgtaaaaaaaactcaaaaaacacacctcccttgagtaatattcaaactttccttttttctccaaccatgtctgtggctacccctcagaatgatgacactcaaccgagggaaacaacttaacctcctaggaaagaaaaccacaattttcagaggacaaatgcaactgaggtcccaactagagatggaatccctgaaaggcatagtcaagatgcatacgatcctataagatatgtgccattggtgaaattaggaaacagacaactcttatagagatcgatataatcaaatcagagaaatattaagttggaacgcgaggctacaactactagagtagcatgcagtgatgcacccctaaccaactaaatgttggaatttattttaccaggatct

SEQ ID NO: 385431 - DNA, 2756 bp, Cannabis indica
ctctctctctctctctaatttgtggaaggaaaagctttgttggtgtagagatttgtgtgggttctcttgcttcaagcttggtgaacaatttaggtactactttgatcttcttattcttgcttgaattttctggatattaagcttgtttatgttatacttggtgctcttatgatggtggttgcatgttgttgtaaattaagagaataagtggtgttttagtttgtttttgctttgatgttttacttggtgcatctaaattattttgggagcttttggagtgaattttgaggtttgaattttggaaaaatacatgaatttctgggtttgagtttgaacaattaggtaccaagtttgaagagtattgttctatgttgaaatctgtatagcatgctttgtgtgtaattgtgaattggttattttgaacttttgggggagctcaattgatcaccaatgttatgttaattagttgttgggttaatttttgtgttatacatgattgttgcgtggccatggtagggcttgccgcaaagagactccaataggttagagccaccacggtgagggaccttggtcgctgcggtgaagccctatttttcctggggtttttattttctcgtttttgccataacttttgactcgggactccgttttggacgttcttgatattgttggaaagctcgttttgggatatatttgttaatctataaatggaattcaaattatgtgtttatgtgaaaatgaatttgggattaaacctatttgtgaaatctcataaatgtgtgactaggattaccagcgcttgctcaggaatacttgggcatttggaatctccacatacttggattaccaagtaagatagtaacctagcacatagagaatagcgtagtagcgctcatgtatgttatatttgtatatgatatgcgagcaatcaagtttagggttattaccctataatttagtggttacgtgatctagggttattactctagaatttaagtgaatatgaatgcaataatgtgttgtatatgttgatataaagaattatgtgcttaaggcataattaggttagactcgataatcagaaccaagataaaccattctaaggtcttattgtaaatagacgtgtgagcataacacgtatgtttatgtcaaatagacaatagatgcagtggcatcaatgctaagtgattttaaaattaatattcatgttgttatttttattgtcttattgggtcttggctcacgggtgctctattgtgcaggaaagggtaaatttgttattgatcagttatgaggtcgagggcttttgcggtctattgtacatgttcaagctaagctagaccacgagagttgggtctaccaagagaaaatattgtaatcttcacttttaccgtttaggtcagcgtgtactgataacttataatattttgaaaagttttacgagatcccgaaaaaaattgtaaccttttaaatgtttgtaaagtttaataattacaagttattatttttactctgtattcattttaaagtttaatttccgctcttagctttagtaaatcccgatttagtgggattaacatatgtttaaccgcagttcgtggcgttcctattgttagggtgttacaacatgcatgttgatgatgagaaacatgcttacatcatgatgttgatgagtcgtgagaagcacgtgttgaggtgaggagcatctcagctaaagacaagatgatgacttggtgttgagatctcggctagggcaaagatgaggactttagaagtggtgatctcggctagggtcgagatgattatggtgaagagcttctcgactagggccgagatggtcttgatggtgtgaaactcgattagggccgagatgatgcactaatggtgtgtatctcggctagggtcgagatggtgcttggtgaagaggtccgagatgatggtgtgagacaagaccgaggtgatggtgttatagacaaggatgaggtgatggtgtttgagacaaggccaaggtgatggtgtgagataaggctgaggtgatggtgtttgagataaggacgaggtgatggcctttgggacaaggcttaggtgatggcctttgagacaaggtctaggtgatgttcttcgagaccaggccgagatgattccttcgtgaggaggctgagatgatgttctcgactttggtccaagatggtgagctttagtacaagttgatggtgcttgagtcgaggtggtgatgtttgaatcgaggtgatgcacttatgaggatgtgcatctcggctagggctaagatgatgccctagtgatgtacatctcggctagggccgagatgatgccctaatgaagagtatcttgaccctggggaaggtgagttgatgtcgtgccactacctaggtataggttgaggtgatgatgcatggtggtttcaccacctaggtacctaggtgaaatgttatcattgtgattgccatttttacaaaattagggtataacacttgcccctcgaaagtatgctcgtaagtcaacaagtaatacttttgaacttcttcaaagacttgaaaaataggtttagaattatctctataattttaatttctaaatgagagaagtggccatcacatcttggcatggggacaaggtgatggaaccgtcttggtcacaaatgaagtgatgtaaccactcgtgtggcacaaagaatgattaacctacgtggaggagtgacaaggaagtagggtggaggtggataacaatctcacggt

SEQ ID NO: 385432 - DNA, 874 bp, Cannabis indica
caatctcactcattcacccacccaaaacccgaatacacccttaagttattactcccaaaggacttgattctctcttaattctctctaactcttcctacctctctctcataatcttagcacaagttacaatcgaaatgaaatggactagggtttttttcatatgtatataatgactcatacaagaaacaagggtaactgttataactaaatagtgagttaaataaccgaattcaactaacactgcgtagttagttaagtttgatattcttgttttggaggattaacttccacagtttgaatgtacacagttgtacttatttctgtgacttgtttaacttggttttaaactttgacttttgttcattttgtgtttgtttaaatttatatatatatatatttatatatatatatgcaggtgtgatggacatccagaaacaagagttgagtcaattagtttgggtattgaatattattgagttgtagtgtaagttgttgttgatgagataatcggtgttgcacattgttctgaatgagaagaggaacgatgagaaagtgaggtgtttctttcgacaaattcaacaagcatgttatgctttgaagaacgttaaggttgaagtggggaaacctaaatcagagtttcatgttgaaagaagaatgtttgaagtgagtaatccacggtttagctttgatttgaatacatttactgaatgtactaatatctatctatttctctatgctactgtgagtgtaaattcttgaatcgagaaactaacaagaatgaggaacttgcttgagactatagatgactttgtatagacatataagttctagtcggaatccacaaaatcggtggttgagcctgttgggttttatg

SEQ ID NO: 385433 - DNA, 1425 bp, Cannabis indica
gagagagcgagaatagaagcgagacaagagagagggaggagttgagagagggcggagtggtgggtgggttcggtgggtggagagagagagagagagagagagagagcaatggcgagagggtttcatgagttggtggaggcaagagaaatgagagagatagagagacaggatagctgaaatgaggaagaaaaggaagcgtgatatgtataccctagggtttaatttagtcagggttatacccaacagtttaaaatcgtcgagtataatcctgactaaaaaattgggttttaactcaaaactgttgcctatttctgtaatgagtgttctaaatcgtcaataatacctgatttttctcgatagtttaaaataattatttaaatttattagagattgtctccaaaaaaaatattcttaggaccgtcgcgaacaccctttttttagtagtgatacatatatatatgtatttacatatatatatatataagtgaacatcacaaataatataaaagattaatatgctaatgttgacgctagaatctcatcaactaaattacggctaaaaaatcaaaatttaaacacaagacttaatagaagatgaaaatatgaaaatatgagaacttaaagaaatattcaggacaacaatggaaaaatataaatgttttaatttcttggggtgaagtattacaattatttttcaatttcctcttcaatggaagagagatgtatttatagagagctctaatggcttcaaaatataagttgatttcttggtgctccccaagtgttaggagaaggacattgcaggctacaagttgcagttgcaggaggtggtcctacgtcttgtgctattgtcgggtgtcaggttgtcccaagagaaggagcagtggctgaagtgtacctcttgtcgagacactagagcttgcaagtaagatgcctccattactcgtcctatcccctatcttaggtgttgcaagtagcatggccataccttcatgtgtactcgttcgtgtacttgccttggccttttgattgtttgtctaacaactccccaagtgttggtcatttcattgagggacgttacaagatgttgcaatgatcaagcgtagggcatgtacgctgagtggccgagaggccttatggtcgagtggttgtagccgagagtccatgtggccgagtggctcttgttgcaggttagctgaaatgctcatgttgcatcctaatcaagatgctcacattgcatgctagccgagatgctcaagttgcatgctagtcaagatgcttatgtttcatgctagccaagatgcatgtgatgcatgctgccgagatgcttgagcatggggctaccagatgcatcaaggcatgatggccaagatgcatgcgatgcatgcaaccgtgatgcatgcaaggcatgatggccaagatgca

SEQ ID NO: 385434 - DNA, 1206 bp, Cannabis indica
agacagtatgctcactgtgcaaggcattcatagtaatcactctgtgaattctatttttggtttgattattcatgactgtcaaattttactttcttctctcaataatgttaggatttgttttattagacgatcagcaaaccgagttgcccatgttgttgcaaggcactctcgttttctctctggtcgtagcatttttgagtataatgcttgggatgagttaatctccctcttgtattctgaatgctaaccatttcaatgaagttgatatttcaatttaaaaaaaaaaaaaaaaaaccccaaaaagaagtccaagatcattaaagtattgagcttgtggatcaaactttgacaattgaattcaatctgaatattatggatacaaaaggagatgcactgagagaggatattgcggattgctagagtttcgacccattccgggggaggaccaccatggacttcccaggcaactaaagcaaaaaccttaccatcatgatctctgaccaccataccaagaccacaagaatttgagttaaagcccaaagcaacatctgtattggccttgaacaacccctgaggaggacacttccatcgaagtggctcggttactactccatggacaggaggggcaggaagaggctgaccatttatcttgttttcggcgtggtaagaactcaagaaataagtagccgaaggaccaatgaattctggtggaatagaagaattttcatgcacttgtttattacgacgaaaccaaatatgtcgccaagtaacaaggaccaattcaaatttctctacaaggaagttgaagaagataattgcaaataaaattatatatatcatctacaatcatatgtggattaccaagtttaaaggcacaaagctttggcgtcgaggcaagcttactacaaacccaaagcgcatgatgtatagtttccaacccactgggacaaagcgggcacaaattatcattcaggactggagtccatgttatggagattgatctttgtaggaatccaattagaagaaagtctccaagaaaagtcttcaactcttctttattagagcactcacaacaacttctctaaaatggagaagtattaaaaaaatttaaagaaccgtaaatacacgttaaagtagatgcattaaactcttttttcattttaaagtttctttaaaatacactattcatgctctacatttatagaa

SEQ ID NO: 385435 - DNA, 1555 bp, Cannabis indica
tacctatcgctgattataccatgtcagtctcaatccagtgtctgacaatacagggaataactacttgaacatatataaagattatattccactgtgctgacaacactataatctttaacaaactcatatgtctggacttaaaggaattcatacattatatacatataatcatgaaatcaatcatgtgaaccatgcaacataaaatattatttctgatctttattaataagtaaatctgattatatgaaatgagtttatttagggcataaacccaacacatatttgatcctattatgacttatcatttggattattacaactcagaccatagagccattgcagtcacaatcaacccaaaaaatggtgaactttagcatcacaaaagcacacacggttcaaatttgaacaaatttggctacagcaagaagaagccttaaccattaatcagcagcaatggatgacttctacatcgggtactactatggagatatttttgaataaaattgattcttgtgcttcttccttacagaaatggcatgcctcaaagtttggaaacttcaagaaaaatatttccaaagcacaacatcaagtttcaaacttgaataatgctaatgtcagaacaacttcactcatggaagaattaaagaagtcaaaaagtgttcttgatgagttattggctcaagaggaagagtattggcaacaatggtctagagttgattggttacaaagtggagatcaaaacacaaagttttttcgtgcccatgcttcatcacgtaattaaggcagggaataagattatttctctcatggatcgcaatggaaccaaagtaacctcaaaggatggaatggccacaatcataacagactactttactgatcttttctctacttcagcaatagattatcaagctttggagctagtcacagcaaccattccaaccaccattatagcagaaatcaatgatactcttactcagccctttactacaatagagaatttaatagctttaaagtcaatgagtcctgacaaaagcccaggtagcgacggtatgtctgccgttttttatcaaaattatttgcatattgtgggttcttccgttactaaagtggttttagggattcttaatgatggccacgacatggatttgattaataatgcaatcattaccttgattccaaagatcaattcacctattggtatggcagatttttgtccaatcagcctgtgtaatgttatttacaagctcatattcgaaatgatagtgttgcatttcaaggaagttctccctcttgtaatctctgagactcaaagtgcctacctctcaaatagactaataactgataacattctagttgcctttgaactcgttcaccatatctaacacaaaacaagaggttcaaaaagttattcgactctcaaattggacatgagtaaagcatttgataaagtagagtgggattttctttgggttgttatggagaaaatgggttttgcaaggaattggattgaattgattcaaaattgtttgtcatcttcaagtttatcattctcact

SEQ ID NO: 385436 - DNA, 1618 bp, Cannabis indica
aaattaaataaatctagtgagagagattataatataagtataatatttttaatgacaaataagcctccacaatatacaaattctgggtctgtcattgattgaaagcttagtagttcttacaatggttcttgtatcgattaactaggttagtatgggattatttttttcacttaaaaacaaataataataatatataaataaatgaattatcaaatatgtccatcaattgaaaatgataatgagtacattaataccacatgaaatagaaatataatttgagtatgtgactttttatatataattagataaattgcaagttgtaaaaatgtaactattgaggtagagaatgaaattattggaaaaattttccttctatttaattgtaaataaaataaattagaaactagtacattgcaatttaaattttaaagagtatcgtaaaacttattaattttaatggtatattgaagctacgtgtagtagagttatatatgcagtggcagacctaagatttaagttgaggggagcgacgctttttttttttttgtaattgaagagggtgtgtttttttttacatgttaaaaattgatatgtaatataaagtaaaaaaaaaaataagaataaaaatattggattcaatgattaagactcaagcacaagcttatattatgtttataaatatcacttttatttagaaacatatgttgtaattaattaaaaattaaattaatataattttttattacaatgtttctaaaacattttcatcagttattttattttttaaaatattccattaaaatctcttattattattattattattattattattattattattattattattattattttatatttttatttcttttaattgtagcataatggtattacaatttactaatagcttatgttcttaggttcgaagcaatgactttttttcttatttttcttcacactacgctaactttattggcttcacctaacatatttaccttacatcattcatcaaattttttatactatcatttccattatttaactaatatatttataatgcacaaataataaaatattattatacattatatactatatataattttatattaaaaaatcaatataaaacacgataaaaattataaaatattataactacatttgctaaactccttacaaaaaataataaaaaaaaaaacatttagctaaacaaacactcatgagctaaattactatcatgagttaaatttttgagtattaactatatttttacacactgaatgagtctttttttgactcttatctatatttttacttttgtaactattttaaattatttattataagtagtgaaaactatatatagggtattaaagactaattttgtctttatcatacattacaattgaatataatatgattgtttcgagtattagtagttatttttaatgtaaaatatttttactttcttatcttgtagaactttatttaatttgattctttttacttgaccagcttgttaccttttttgataaatgttctactaaaaccatatagtaatttgtaaatatttttatataaatatatggtgttggattaaaattctatgtgg

SEQ ID NO: 385437 - DNA, 1350 bp, Cannabis indica
cacatatcatctaaatcttcctttgtaaagattataaaatattaagaacactttttcttatccttttctttgatgcatcgattgactcttgcagtattacctaattcctttctttaatggattatatatatatggttaattggtaaattatataatcaatagcttttttcgttactctattcagccaagcaccaaaaccttacacgtattagttcaaacgatttttgtttaaatattttttttttgtttttatgtgaaagtaattattttaaataagaaaaataatttgcttacaattgtttctatcttaaatttatacagacttcatccatataaaaagaaaaatactaagggcatcttaatgttactaagaaaaataaaaaataatatattgttattggtataatttaatatcgatttgtacacattttaatttaataaataatatgaataaactactaattacttataatataataaatcggtataatattaatcaacttaaagtacttataatactcatacacaaaatatgatatcagttcactctaaatatacacatgaataaatttaagataatagtattgttacggtttagagaaaatataaaattgttgggtaagtttataatacatatcccttaaataagtgtttaatttctagctagatttatttatctattttgatatttaggacaattttttactcttatttttttttatgaacgtgtatgttataattatttaagattatttgtaaatttttaaaaaatttcaagtaatttataatgtcgaaaataaaatttaaatattttattgtatgtgagactattttttcttacatacatggtaaataattggttaaactttattttttgccctaactttctaaaatttttaagttattctaaatagctacaatgtataatgcaattataaaaaaattgacttattttgtttttttaaatattaaaatagataaaaaaaaaatactaccaaagcaatattctaaataattttttttttaaaaaaaatttcccaataccaatttagatatgaatctaccaaatcacttttactatataatttccattatattatatagagtattgttttacgattaataatattttttgaaatttagttatattagaatatgataccgaaaaaaatactaaacactagtgcttttagcatttatctatattaatattataggaaaattctacaatgcacccccttaaaatgaatatattgacgcactcctatctgttttagtatccgaaataattttttggtcaatttttttctcatagtcatgtacgtttcaaaattttaagaaatttagaaa

SEQ ID NO: 385438 - DNA, 700 bp, Cannabis indica
aaaaaaaaaaagaaaatagttaagagaattgtacaagaacagagagcggaagaaaacagtttggtgtgacgaatataaagcgcgtttaggagtttttaagttatgttgactaaattgtgagccccattttaattaataattttattttcctttgtcttttctcgtaaaactattgtacatcatctacgaatttcgtccaacctagtttatttattcatgattgactcgatcaaaacaaacgttttaattaataattattggtgttgtgttgatacaagaaattaaccaagagagatttgtttagggtttgatcaaaattgtgtggcttgccttgtgagatctatttctaaactgtttatcataaaagaagaaagacttgggtcttggaatccagggatcctccctaattcgcaccccttcacttgaacctatacgccttcaattcaactttctaaaatattttgaatcatccaattttgagttatcgagagagttatgactataatttcaaataaaagaaggtgacccatctaatttcccagtaagaatactcccattctcaacggttatgatgaaacttgtttttttttagagcaaaagatagtttattcaatcaaaaaaatttagcttcaacgacaaatataagatcaggaggagcatcgcttactgaaaatacaatctgaagataaacaagacgctc

SEQ ID NO: 385439 - DNA, 1019 bp, Cannabis indica
aaatcagttctcatgattctatttatactattttaaaaatgcagaatctattttatcatttaataaaataaatagtctaattaatataaattttgtaaaacataaagtccaatttatttataaaaaaaaatcacatatataaccttggttaattacatattcatggatccatcgaactatatatatatcccttaagcaaacgaattttaaagtatttgtaatataattagaatgatcataatattctttagatgaaccttaacattatatattcaaaatggatatatgttgggaatatttaaatatataacaatagttatatattaagagctaggttgcatgttgaatgagcttgtcattttcacaatttttatattcatataatttaaatataatccattttgtccccaaagtatacaatattctttaatgaagatattataactatactattttcatttaaaatatatgcaagtgtgcctcgtccaaataattaaatgacaaaaattaaatctcaacaatacattaatatataaatatatattaaaagtgcacctatatttaagaattaaatcttattataaattataaggccaaaaaataaagcaatttggctttaagcaaagttatataagaactaattgtcttatttaaagatagtaatagtattaatatacttattttatttttatttttcagaccaaccatattcaaggtcatttccaacccaattgaaaagcatgtgctatatttatcattaaattaatgaaaatatttttaagtatatgtagaggtctataactaatttaaataatatatatataaaagtaggggaattatctcatatactgattttttaactttttcttttttaaatttacggtttgggtttctaaagtggttgcagtgctagttgcaataaaaagtttttatacgattttttattgtaatttatgttacaacgctagttccaatagagatttctatgtagaattttgtaaaaatatcaaaaaaaaaaa

SEQ ID NO: 385440 - DNA, 595 bp, Cannabis indica
ccatatcaaaaaagcgcttaataatattatactaatatatacttaagatttaccaaaatatctattatacccctctagaataaaaataaatctctctctctccctctctctcctcacctaagttcaaaagtcatcacattatcaatcgtcagacccaccattttccagtcaccacaagattggaggaccacaccatcccaaatgtaaccccatccgccgctatcgcaccctaactgctgtcgcagctcctccaccgtcaatcaaaggtcggaccacgtggaataatgggataagtattttcaaaccattttattataaaattgtaaaagtatagttcattttcattagatctgtgtggttgttatttgtattggtttgactttgatatttttttcgttaaaattatgagatctagttctggtgtgttctagattttcgtattgttttcgatgttttttcgatatggtatcgatgagttcttaattttaatgaagcaaggtcagggaagatctttatcgacagttttacgatatgttttctattaggtcattttttagcaatttagttgtcaaaatattttttaattaatgtgcat

SEQ ID NO: 385441 - DNA, 1214 bp, Cannabis indica
cttagaaaaaaaaaaacagttaaattatatataaattaaaaaaatatatattaaattatgaatcctaaggctatttttttttttaaataaatatatataaatttaaaaaaaatatattgaatcaagaatcctaaggctaatcccccagtttgactaagtcagcaaatactcttaattccttttagatttaaaaataactatttttatttatataatttgatgatgagtaaattatcttaatatattcgaattaaaaagataattatatttgttcgaaaaagtttgattaataattatatttttattagaaagataaatatttaaaattatcttaatcttaaatatcgatttaagctatataattataaaatttcaacatcataattcaaataaaaatagtattaattaaatcctaatcctaatcgaattatatatatgattaaaatcacagaatttcccacctatatataaaccaatgctcgtattcacttctatatctttcgaacccaccaattctataagttctctaaagtctgattaacctttttgctcataactaatttttctcctctgagctcttagtgaattaagtcttaataataacaataataatcattattattattataagtatggaaatccaaaattggagtaaacgaattagtgtgattctaggttcgtcactttgtgtgatttttcttttgtggatgctcttgtgttcatcatcaactacttcatcacagaccaacaccatccggcctataaggttattaattttacagtaataaattaatatctttattttttttacgtaacatttactattattattattcctgtaacgtaagcttattcatacgtacgtacgttaattaatagttttatttattttattctttattccaaagttatttaagtttccgttattaatatattttgggatgcttttgctaattactaaaaatagatgtaacgatacatctttcttttcatgtttttgttatctgcatagttttatttctaaaaaaaaataaaataaataagttcatgtatgttaagatatcatgaaattttttagaaaaaaaatccaaattaattatcacaaaaaattaatatatatttatataaaaattagaattataaaataccaaaaatatgaagagagtatattgatatatataccaatatgtaacatgtttaagaattccattctt

SEQ ID NO: 385442 - DNA, 1140 bp, Cannabis indica
tagctgaaacctttccatctcaattcactttatattagatttgtatttggatagttagtggtcattttcagttctaagcaggtaatgttttgattcagcttttatatattgtgtagtgctctgctctgctttgatggaatacgactagttcatttcatattcggcagttttttactcatcgccattagcgtttgaccattttatttagcaggtctttcgtttcaagtcttatataagatctaaatacgacaacaaaatctttttttattattattattaattagatgtataatttttgtaattaattaatttgaagaactagactaatagtatatcatccgttacataagtttgatgatgttgatatatatattttgtatatttgtgtttcaaagttgtaaacaaggcatacattatgttgaatatattggagtaagtttatttaagttgctttgtattaaacagatttgtgagttgactcagtgttaatttgcttaaaagtaggcacgggatgggagtttgtatttcaatcacgattatgaaattgttggttttgagttgagagatagattgttatacatggatttttgttttcttttttaaagaaatttatacatggagatcaactttatattaatttaattcttttttctacttatatgtatgtggactcttattgtagtgatattttttttcgtttctttttatcactactataccccataggctgaatgtttatgataaatgatttttcttttaatggaaagaatataaggttttaaatatagtccctgttgttttatctcaaacaaaaaaaaaagtccctgttgtataaaatgtattttttaaaagaaaataaaaaaaataaaggagaatataaaaaacaaagtgataaaactaaataaagtaatgttttttctcatttattttatttgttaaataattaaagggtgactttttttaaaagatagacttcttcaattagagaaaaaaaggaaaagagaaatatataattgaggggaagtgaataaatatagggtaaataccattttggatcctgtgttttgtaaaagttacagattggcccctgtgttttgttaaataacaaaatggaccctgtattttctaaaatagtaaaaa

SEQ ID NO: 385443 - DNA, 1222 bp, Cannabis indica
ttttattaaacggtagccaaggcatattcagtacattagtagacaagctagaaacaatttttaatctctcaccctctttaaccaagttttgggactcaaaaatgctcctccatataaaactctgattagcccccaaggaagcattcagaaacaaaccattcgaaaaataacaagacttgtaaacacgtcccaaagagaactttcataaagcaatagacgccaatatagctttccaagaagagactgattgtagtccttaaggtttcaaaagcctagcccgtccatatttttatgcttgcaaaggtgttttcaactcatctaactgatcccacgtgacctattattagacgaggaaccccttcaatacttagacttcaaccttttgagatgggaaaaagtctccaaaggcaaaatgaaaacaaacatcacgtaacttggtaatgattgagccactagcctttgataaaaaattgcccttcccaactttgaacttgtttcttgcattttatttttaaggtaaactaaaataacatatttgttctttctcatagaataagaaagactcaaataagtactattttcatcatcaattcccattcttattaggctacaaagacgagatcaagtgttaacacaaaagaaaatggagggttcatttacacacacatcttaataaaaaaaaaaagtaaatgaagggttctaattatattttttcagttggaataataaagttgttggaatttaaatctgcagcagctttttttttttttttctctaaaatacaacttcaaaaatacaaaattaatataatagtgtaaaaatgatattttccaaaatttttactcttactatgcgtccacaacaaaaatgatatttttataacacaaaattgaacatttacttacagacccaatcaactatgagcccaataaagcaaggtatcacatccaatatggttcggtcaaccattagaatttgtgaaaattacacattttgagtttctatacaattgtgcgaaaatatgattaaaaaaaggggacatttcacttatatacgtaaatctaataataatgacacgaataacgaaaatcaaattaattatatacacacggagcaaaatataccaaaacaaaaaaagtattaccattgttcaggtttttacttatttatcttgtcttattcataggcatttatgtttttaataaagaaaataataagtctc

SEQ ID NO: 385444 - DNA, 1539 bp, Cannabis indica
caacatacaaatttcctctcgttatggtaacaagttacttggctatatataagataaaggtcatataaataaatgagaataaaaaactagatttgaaaacaaaaacaatattttgaaacaaccacggaagaagaagaaaacatttttagtgagctctggtgtaaccttttttcagtgatcatcttgttttgttattctccattttgttgtttgataaaaattagaaggtgagaattgggtaggttttaaatatacatgttaatttatttatagtattattatctttatactttgtggacattctatatttaaaaagtagaaattgcattgtatacccactttactttatttattttaatttttacctttatttccatattctttaagatatactcacttttatagatgatatccctattataccccttaaattaatgtaatcatgtgctacacttaaatagagggcaatggtatattggacaacccactcataaaagtaggtagattttaatgaaatataatatgggagtatttttgattaatggatacaaaaaagaggtattcctcaacttatcccaaaatttaaaatttcatttttggtcaactacctatgattttgtagcattatttttttaaattactacatatatttcataaagttttcaaataaaaatggttaatggtctattcaagcaaagatgcatttgtactagtcagaacaaatataactgtatgtataggtaataagatctaactaaaaacaaaatgcgaattaactgagcatataaaaaacaattactaattattcagcaagagataaacagataaaataagtataattgttcattttaagttataaggacaagaacaatattatattctctaatctctagccataaagagtaatgaaacataagtgagaagatcatccaatcaaggttgtcaaatatgggattgcttgtctgagttgtaagaacaaggttattatatttctctagccaagaagagtaaaacataaggaagtgggaagatcatgtgatcatatgagattaatcatcctatttgtacggaaacaaagatattgtattatgtagcttggaagagtaaaacataaggacaagcatatgaccaaagaagattatccatctaagatggttcatctcagttgtaagaaaaacaataaagatataatactatattcgtcagaatacgagtttagggtaggaatgcacacaaagtggcgaattagcggaaagtgcatctcacatccccatacaactatttgttttaataattttaattatcatctgtaactttcatttttgcatagcataatctcaattagctagggatagggctggtgaggaatcacaggcccggccttgggcataggcggactaggtctgtgcctagggcccactcagtccagggccccaaaatttttttcttcttttaaaattatacattttttttactgattttgaaaaaatactaaaattttttctaacataaggccaaaatttttttttccctgtggcc

SEQ ID NO: 385445 - DNA, 1291 bp, Cannabis indica
gtccacagctaaatatatactctaaaaagatagtaactatatcacataaaacaagtatagtacatatagtaactaagatctctaattaagaagtggagattaaaagtgtgtggagaatgacgtgtgccgcgtggcaatcttttgaagcatataataaaatcagtatttttgtgtttgttggcgcatgaaatagctgcccaagtggaaagaagaggggaaaaaatgctcaccattaatataatatttcatgacaatgcttaattataactttttattacaatttttcttttaatttttaaacgtgaaaatacatgctcgaaatatgttttttttttaattttgtttaattaatatgaatgtttgttataattaaaatactattttttaaatttttaaaaaatttaaataatttatcatatctaaaataaatttgatttttttaaaaacttatggtaaattggaatattgatacagtaaattattatgaaaaaacatcctacatagtaaacactactaataaatcatgttacctacaacagtagacaagtacatggcatcttgacacgtattaggtctctcttttagttttattattattttatttatctatttaatttttatatctttggcctattagatttgctatccacgtacgttcttttaacacaaaataatagtgtacaatattatattgtaaagtgggcgatttgtattgtatgtgcatgttgtagtggattacatttacattttttttcatagagtcaaaatttatgtactgtatgccctttaatgttagttatagtctagcatatacaaattaagtaatttagttttattttcaagatatcatcaatatatatatataacattgtattgaaataatataatttgtttttgtctacaaagttcatttcagtcaaataatatattatttttttggttgctctctttaaattattgggaaatctcgctttggatccttaacactttttcgtttgtattttttttcttaaactttgaaaattaattattctttggtagacaatggatacatcattttatcgaataaatgtatatattcttaaactaaaaaggtatatatataatgaataatgaaaatatatatagataatacatgtttataagtaatagtacactactacaaaaatgagttttcctgacgttattaaataattatttaaagtatttttgtcggtttctataaccgtcgcctatacgaccatcgtaaaatggggtagaataggcgacggttttaaaccgtcgggaatgt

SEQ ID NO: 385446 - DNA, 2355 bp, Cannabis indica
agggcataaaatcccaacacaaggttctcaagaagtcactcagccaaggttctcgagaagtcactcggccaaggttctcgagaagtcactccaaggttcttgagaagtcacctggccaaggttctcaagcagtcactcagccaacgtccttgagaggtcacacgcggccaacgttctcgagaagtcacatggccaaggttcttaagaagtcacttggctaaggttcttgagaagtcacacgaccaatgttttcgagaagtcactcaaccaacattcctgagaagtcactcaaccaaggttctcgagaagtcactcagccaacgttcccaagaagtcatgtgaccaatgttctttagaagtcacacaaccaacgtattcgagaagtcacgcagccaacgttatcgggaagtcacgcgaccaaggttctcgagaagtcactcgactaaggttcttgagaagtcacgcggccaatgttctcgagatgtcacgcgaccaaggttctcaagaagttacacaaccaaggttctcgagaagtcatgcaaccaattttctcaagaagtcactcagccaatattctcgagaagtcactctgccaaggttctcatgaagtcactcagccagcgttcttgagaagtcacgcagccaaggttcttgagaagtcacttagcgaaggttctcgagaattcactcggccaacgttctcaagaaatcactcggccaacgttctcaagaagtgacatggccaagattctcaagaagtcacgcaactaacattcttgagaagtcacgtggtcaaggttctcgagaagtcactcggccaaggttgtgtgaagttacttggcccaggttcttgagaagtaactcagccaaggttctcgagaagtcactcggccaaggctcttgagaagtcactcagccaatgttcttgagatgtcacgcgaccaacattctaaaagtcactcagccaaggttctcaagaagtcactcggtttggccttccacaaagccattcagtcatgacagtttagaatttggtggaatcttaccaagcaagaagagaatgaagcgacaagaatacagactgaaggacaatgtaagcatgctaggagagtacaaccacaccttttgtaagttctgaaagcaaggaggtactaggagtggaggcaccaaatctgaagacctgaccaagggtactctgcagccactacccctacagcccaggaccacctaacactagacaatgtacaaagtgcaatgccaccacctacgcctggagcttgcagggtgaaagtgacactttgtccccttgggagcactatgtacctcagccttttacaacctatatatacccctccttcaaatgtagaaggggttggaaaattattcttgtaattaccatagagaaagtaatagaaatttttcattttccctctattttgagataaacacttaaagttatatttcatcttaaatctaatttaaaagttgattttgtttttcgagccaataaattggttgatgagttctaaccgtcaactaggcgtatcgaattactttttgggaaaggaaacttggatcgacgaattgcaccgcaaaaaccacctaggagccaagtgcatgctgcccaaggtcaaagatttcttcctgggcggcatggtgtatgccacccaagtatactcactcctttatgggcggcataccccatgccacccaggtagttctttacaagcttatcgcattctcatcttcttgaggggtgtagctcttgtagacctttttcataattacatgtcctttctttaattatgtgccatgtcacttagtcaaaatattaggtaacatttaattaaattaaatattttaatttaaaaataatacatataacagaatcggttaataatatttatttaaatattacaataagattattttatgtttaaataaatcaatatcaatctcaactaattaaacctaaataatagtttgtttgttataattaattatattatagttatttcctacgtatatagggtgtatttaggattctctaaggttaaattattattgctcatgtgtcaaagcaaaaataagaagattaaactatgaatccttacactcatctttgtgtgttgaggcatacgtggaagactaagatgtgaattctataacttgaaaatgatttaactcctgatattgataaagaggtaaattttatgcctatctatttatcactttagatatatattagtatattgttacgtgcgatgcacgtatgctatgttttatattaagtattatattatgagttcggaaggaaataaatgaataaaaataaataatatttaatttagagag

SEQ ID NO: 385447 - DNA, 1015 bp, Cannabis indica
cttttctaaaagctgtgtcaaacgggtcctaaatattttcaaataaaataatttacaaaactaaaaaaatattcaacttgaaataatttttattaaagccttaaaaaaatcaaatttgagttctaatcaataatcgttaaaattgtaaatatatatatagtttattttaattatttgtaaatatttataaaattttataataatgtgtttatgcacatatcttataatatataatataataaatttacttgtatataattaaaaattactttattttaaacatattcgtttcttctatgattattccatttctagttacgatttagtaaacctatcattagagtaatcaaatgattaactaattacctccatcataagataaccaaattacattctactataaatcaaatggttaactagttacccataaaatatttgttaaagtaaactttaaattagatataatgatcatacctatttagttttagtcatagatagttttaggtggagatcacatcatttttttttttgttgaaaatatcataatttttttaaaaaaattgtatataatttatataataaatattgattaaacattagagaaagcatataattaagtgtgtcacaattattatagaaaggaaaataaagtttttcttttggttcgagataaaatcactacttgaatgaaaaaagtattgatttgccataacaaggaggatcatcatgtttataattattatggcacgtttgttatactgtaacgccctatctagcagagacaccacatgtgtgtctttataaaattcttatttaaatactatatatttataccaaaagtgtaggtaattaaattttgaaatttttacaccaaaaatctaaaatgataaatttattacataaatacatgtacacaactaaaccaacttttttactcatcttctatattttattaatattttaccacatgcacacacaattcaacctttttaacacgtaagtgattgatgtatta

SEQ ID NO: 385448 - DNA, 1389 bp, Cannabis indica
atatttcaaataaatttacactgggattaattaagagtgatgacatatgaaattataaatcactgatatatattaaataatagttgttattaattttcctatatatataaggtgcagactcactgttagacagtgaacttgttcatgtggattagttcaataagtaatcatttagagaaaattcctacctatcaagctgtttcatggtttcatgtacttgaaaattttattttcatatcatcacatttgaactataagacatttgaaaagttattaataagtgaaaaaattccaataaccatgaaaactaatcacttgttattagtgcaagaattaactttacaatttagttttttttataaatcataacaggaaatcaagatactcttatggaacaatttttatcagaagtgggtgtcagcaagcctctcaatgaacacattctcgagagtcaagctcgggtattaaactcaaaaacatccaaaatggacatggaactgactgaagaaagtaacgatgaaacaacctcatcatcttcatcagatatgactaatgaagctgaagtttcaagcaatatagaaccaaatcagggaaacactgaaactaatttgtctacaacagaagaacccaattatgattctagtcccacttcaaacgacaagaacagaatggagaacactatgtttttttcagatcaccaacctcgtagacgtattcacactcctacattctccatagcttcagatatgcaagtagaggtttcagaagctggttcaccttcaatgacagttgggaacatgtcacccaatgatgtagattccttgtcagaagatgttgagatggtgcagtccaattcaacaaatttcgattgtaagtcctttgatgttgttagtcaagtgatggaaagtgtggaaaagttgaggaatattgctgcaagctcttcagaaacaatggcttttgagaaccaagatacaactacacagttggctgcacgttcttcatttgaaattctatctgaaggaacagaggtgagttattcttataaataataaaaacagtcattaaacttatttcatatgcataaaaccagtcctttttatttgccaaagaactcccgtgaaagaatgtattccatttttcccattaactgttgagttggtcaaatagttgaaaatatttggaagccgaaagctcagagtaaattaaactttaaattggattccaatataacaaaatacatttcattgttcaaaaaatggacaaattaactgggtaattagtatttttttccccgaactttgacatgtacccctgactttttattttttgtaccgtaaaaattcatcttgaactattgagattattagtatttaaggacttttgtctaat

SEQ ID NO: 385449 - DNA, 2048 bp, Cannabis indica
tgttttataattattttttgtgtgaatggtagatgtaattataaaaccaatatattattcctatgatcacttgtttgattgtatttgaatgctactgttcattttcaataactgattatgatattcattcccttaagaaaaaatcaaaaaataaaattataattaataatgacaatttataacttttatattttgaaacaaacctatataaatgtatagaaaactctcattattattaccatcactttcatattactatcaaaccctacctaacaatgcatggttgacatgtgagataagagcccaccttacttgtgtagtgatgatcctcatgaataccctttcttcccttatatatatatatatatgaatatatattattattagtgcaaatttaatattaagttttaaatattttacaataaaaattataaaaatacactaactaattataaaatgttatttcatagtgatgtttggccgtttaataccgcatagcaatactcatattattttgtagagatcgaccatacatttcatttcaaatgaagacacgtgttagtttcctatatgaagccacataagcttaaattaggagtgtaaatagatcgggtcggatctgatccgactatgatctgacctattgatatcatgtaaggatctgccccgcttcgcctcactagatcagatcagatccaacctgtcttatttgaatcgaatctgatctgatccgacccaatcttttttaatatctaagcttataattttatatctattttaattttgtattaatattatttaatacaatattatatttggtattgactcgtattaatagattgtataaagttataatatattttcaataaactcgacccaacaccaactacgggttaggtccgggtccgagttcgtgttcatgtcctaggtctcgagtctcgggttcgggttcagatttgggttcgggtcccgggatgggtcccaagtctagtcccaagtctcgatctcgggtccgggtcagagtccgagttcgggtctaggttcgagttcgaatcctgggtcctgagtttgggtctgggtctgagtctaggtatgagtccgggtctgggttccaggtttaggtcaggggcctgggtcccgagccaggtctgggtcccgagccaggtccgggtcggtcaggtccggggttgagtccagggtcgagtccagagttcgggtccaggtgcaggtccaggtccaggtccgacacatatccgacaccaagtcccgggtccgagtcatctcgggtcggggccggatccgggttcggatttgggtctcgagtctcgggtctagatccggattcgagtcccagtctggatcccgagtcacggtctgagtcctgggtctcagttcggatcccgagtcctgagtcccgggtctcgagtcttgggtctcgatctgggtcccaggtcccaatcccaatttgagttcgagtcttggccctagtttgggtccaggtccgggtcctgagttagatccaggtctgagtccctgatcgggtctcgagtttgggtttgagtctgggtttaggaccgggttgggtctgggcccaagcctgagtcccgagcttaggtcctgagttcgggtctggatccggatccggtctcgggtcctgggtctgatgagtttggatctcgggcagccggttcggtacgagtttgggtccagggtctaagtcttgaattaagtcatttttttaaaatataatgaaaccggatcggatctgatctagaaaaatatttattcgaatattttggattaaaagtgatcaattgaatcgaaattctgttctgttccaattaaataaatctttttgacatgcctaacttaaatttattattattgtcttggctaaaaataaatatatgaaaaggtcaacttaaaataacaaaaataatattgtatatggagaagacttcacagtgaacaatttaataaatataaataaataaaccttagttattattgtccataattgatttttgatgatcccactgcttttaatg

SEQ ID NO: 385450 - DNA, 1568 bp, Cannabis indica
atcgccatgtggcaatttatttaactagctatctacagaaaatttatgtatttatttgcaactggaagttaaacttaagtatttatgccgcaaattactcaaaaaaattatacagccttgaaatgtgtgtgtaatgttctctctcttccttacaaaaataaagactcttacttaaatatatgtaaaaattgtattatatttgacaaaaaaaataattttatgataaacttatacacccaaatttatcaatatatagggcatcttgtacaataatttatgtggtagaataagggccaaatataatatagtttctttcaataaataattttcgttcttcatttctaatcaaaaggattttttttaattttaaaaaaaaaaatgaagatacgagaagagaggctcgaaatttttgcaaggtggatgtgacctgtgtcagcacaacacagatgatggtgaggaaaagaagttgacactgacatgggttatgggtttggaggcatcagtcgatcccaactcgaccaatatcaattatgggtttagtgattctttgttttcccattcgctaaagaagacccccaatatcccaagcccctatagacaaattatcctttatatatataattaaaatgtatctttatatattcatacctttatttatttgatgagatgagaatgagattggtgactattttaataaaccaatttcacttgccaacattcattcatgtttctcattctctctctcaacattttggattagactatataaatataatataatgtaacaagtttggcattcacttaccattctatgatctctgcctgatcataacttccttgaagttcatagagtttagctcttaatcctaccagtgacttcgatcaccagaatactattcatgctcaatggatcctgcaacagtaagtgagatgttccatgatgcggtccagatttcacaagatgatataacatttgctctcaatccgggcgaagtggatgaaccagaggaggcaaatcaagtgctactggggaaaataatcagcagatacaaacttgggaaagctgcgattcaggggtcactaaaactctcatggaatgcaattaaagggtggaaatggaaggagattgaggataacattattcaattcaccttcactaatcgaaacgatgctctaaatgtgctagctcgccgcccctggttcgtttgcggggctctcattgtcattatgccatggccatcatggctctcacctgctgaagtacggttcgacaagactccaatctgggtgaacatcaacagcattcccccattctattggaacctatctaacctaaaggagctagcttccaaagcctcgccggtatatgaactccctgctggtatagaagatgcagtgggtatgagctcactacgctttagagccacaatcgacttaaacaagcctctcttttcaggcttcttcctacgccgtcaacgactcaaggacctatggttgcagtataaatatgaaaaactccccaaaatgtgctttaaatgtggtctgttaacccatgatcaaagtctctg

SEQ ID NO: 385451 - DNA, 2161 bp, Cannabis indica
tttaactcacatgtggaatatagattggcattatcttttctattctagtaatctcataatttgacaaaatcagattttattcacattgactcattcttttgagttttgagtctgaatcatccactaacttctacccagttccttttcctctttcattactctcgcatgcgtccttttgataggtttcaaaaatctagttaggttggaggacaatcacatattatcaaatggcttgggaaagccaaagctagcaaattcaggaagctggtttacacagttgcagccttgtctacaacatttggctgctgagaaataagctattctggaaaaaagaagagcataaccatgtcaccatgatcaaatagactaaaatcggatttgaagctcataattgagatgttttggcctaaaaaagtttcggatgaagacagtaggtggtttcaaacactgtaaataaaatgtaactaaaagatatagttgtgaaaatgtaaagttgattattttatgcccttattgggtgctatttgggtgtatgcaaactgttttttgtgctaatacaatttttattcataaaaaaaaaaattagatactagcactttgcaacttgaaattgcttctccattagatactgatacttcacaacttgaaaacgctccccctcctcctgtaattattccagatcatcttaagattgtggatcctcctcgtcgctatccttaatgcattcgtaagctctactgaccaaccaaattttacatactcttcttattctgcttcttttactttgtttttggtatctattcattgtcttttctgagcctttgtcctatagagaggcagttattaacctcctttggcagcgtgctatgaatgaggaactctatgctttgcaaaagactcatacttgggatttggtacttttgtctcctagtaaacatgctattggttctcgctgggtgtataaaatcaagaccaagtttgatgggtctattgaacagtacaaggctcgattagtggctaatgatttttcacaacagtatgatatagactttgagaaaactttttctcctgttgcaaaaatgactattattcgcactcttatagcaatggaatcggttcaccaatagactatatctcaaatagatgttaagaatgtctttttgaatggtgacttacatgaaaaggtctacacggttcctcctcttggtgtgcctcataagtaaggagaggtttgcaagctaaaaagagccttgtatggtcttaattaggccccccgagcgtggtttcagaaattttctactgttatttttgtttcttggttttgcttagagagacttttctagtttttgtaaaaaaatttacagtatcccgaacattgtaaacattttggtttaaagtttatgaaacaagtttgtttttagttatttagtcttttatattttaaatacaatggctcattagactcttgttatcaggattagcacaacaacagtatgacactgtggtgtgcctaagtttagggcattacaattatattcacaaacacatatcttaaaaaatcaacaaaaaagattctgataaaaaaatcaacaaaaagaattattaaaaaactaataaattttttaaacaaactatatttcatcacaagaaaatataaagattcaagtttaattatatttacagtatcttaaaaatattataaaaatataaaattatttaaaaaaattaaaaaaaaataactcaatatatatgtttacttaaacaaacttaattttttttaagataaaacatattgaagctttttcccgtgaaatttaattttagtgtagctttttttttttccttgtctaaatgaattttaaataaaaaataatttattaaattttcttaatcaattttaaaatttcagtattttttttattcttttagtcattcaaaacttttttttcttatcttttaatatttgaattaatttttacgaattattaaaagaaaaagatcttgaattttttttaggagtacgactaggtagtggtgaaatttcggtttgagaaatagaaatacgaatttataagggaaacttacaaaaatactggaatttgggttaacttttacaaaaatactctcacacggaaaagttttcaaaaatactgtgttttta

SEQ ID NO: 385452 - DNA, 874 bp, Cannabis indica
aatttatatatttttctataaaaattaataatacattaagtataaattaataattttaataataagtcattggtttcatattatatacgttaattttaatccaacgcaaataataattatgtacttcaaattcaatctaattttgacccgcttctattttcatcattcccactcgtgatttataatatatcttattattttttcatggtaggataggagtagtagtagcacaaaaaaatttttcactaaaatttttgtaagaaaataatgaaaaacattagtggtagtaagtggaagggtcccacaacaacacaaggaacgaattatcaaaaagaaacacatgcatggtcccgatcccgaagatgagtgcaccacatctcggatgccccctcacccctccaaatgtcaagtttttttatttttaaaatgaaatacaaacaattaattatctcatttcatatcaatcaaaccactcttattttcctcaaaggccctataaattaagccactctctcatagtaagcattcaaaactcaaatctatttagattttcgtttcgttgacttaacactcctactattcacagaatccattaatggcggctctaagaaccttgcttacgaggaaacccagtcctactggaaatgctacggacaatattaaatattgtagtatggcattgaagaagcttttttcaacccaatccgttacggagtcctcctcttcttcgtttgctcaacgactcagagatcttcccaaagatctccccggaaccaatatcaaaaaggaagtttctcaagtaagaacaatcaaaatccccttctttctccataaaaaaaaaaaaaacaaaaaaaaaaaaaaaacctaaccttac

SEQ ID NO: 385453 - DNA, 3597 bp, Cannabis indica
caacatttagaacaactaaaagacaatcatgaaacaagagtgaaaacttaacacagtacacagttatacttgtacagtatttttagaaaaaaaaaaaattctgctccacggtaaaaaagttgaacatttcagtatgtggtgtaaaaactcctttaaattttgtttattggcttaataatattcattcagggctggttctaggctaaagcaagctagacctgcaattttaatttcaattactaaaaagttattttaaaacatgatttctaaaaactttaggggtcattaattatactaaaatataagatttaaaattgtataatttttactataattaactaaggtatacattttggtcaatattgaaaaatattatgatcttaagctcctaattgtaatctttttataaaataaagagttcaaaataaaactactaagaacataaaatctaaactgataatttgtcaaaattagtatactcttaaaaaaaatttacttttaatatacactgagcatatttacttttgatttggggtaagttgaaaaataccacttttattaatcaattaatcaaatttacctctaattttatatttaattgaaacatacctctttttatatgtattgtacccaaaatactctgacataagagagtcacatggagagtatcttgaagtgacagaggcaaaattgatacaatgtttaaaaaaagaagtaaaaatgatagattttaaaatagagggtaaaaataaaagagaacaatataaaaagaatatagtataatttcttcaatagatttcgcatcctgcatgcggttcggtcctacatatagataggttaggtccatgcatagtgtccacttagtccataaacccaaaaaaattctcttataaaattagacatttttttgctgattttaatatgttttactaaatttcagagccgagaaataaataagtatgatatatattgtgaagtaagatcacttttcaattaaatatgcatgcatgcatgcatgttttggcgttaaaatttctatgtaaattaccgatatagatatttgcgtttttttgggtaaaacctcagccaagtgatatttaatatttatatatgaagattatataatatatcatactgatttcaaaatcaataccaactaattaataattatcaaagacctatctacgaagataagggtatttattaatttagtagactatggcctcacaatatatagtatgactaatttctagaaaccctttagactaatgtatatacaattgtcagtataatatcacaactaacttagttattaccaagctatcccttattaattataagagaaatttataggaagtaatattttttggtaaaattttttacacttttacctttaaatttatatatatatatatatattatttatttatatattatactttttaataaaatttttaataaaaacaacacgaaaataacagaagaattatataaaagtaagagaactataacatccaagtaacattaaaataatatacaaataataaaaaactaacaacaaaataataaaaatataacatagtgttttttgtaaataaaatcttgaaaactgtaaaaaaaaatattcaagattctgtacaactatattttataattttttttatttttttttaaaaaaataatccttaatcataaagcataggtttctagtttttggttaaaactaacaacttgttaactttacctaactagctatttctttggaatattgatatgaacgcagcgagctatagattgctaaatctttagttggaccctaagcacagacctagtccaaccacagaagatgtaatcactcaattttagctctactgcataatttaattaattagcataatctttatattaacttaacttaataagttcattttatttacgtaagcatataattgattttatatattaaaaaaactatagggatttaatatttataatacaaattaagaagttgtgagactacatgtaaactataaggatcaaatatgaacatgaattgtgttgttgtcaactctattccccaaattgtcaactttaaccatctctcacatattaatacaccaaagactattatgtgattcatatttcatcatatacataagactttcactcaaagctatataaatttatgtatgaatatatacaattaatttctgatgcaaataagtgacacatcacaaaatggtagtaaattaaaagttaaaaccaaacaagtgttaaatattccatggttttggtgtcaacttgtcattgtgatgacatgcacatgattacactctctcctaaataccactccttctcactgccaccacctctttttttcttcacaacatgtcattttttccctatttaaattaattactatacacattttctctcttttttaagtctcacccaaaaatccaatgaaacccaccaaaacaatgttatgtatttatatatcttacacctaagctatccagctaactacctcatcatcacttgctagtcctactcatatataaagctcaaaaccccataactcatttttcagaatatatacaaaagaaaacaaaccaattgtgaggctcaatatgacacttacaataaatattgttgtgttgtttagctcaattttggcttgtgctcatttgtcttatggtggtaattttaaccaagattttgatatcacttggggagatggtagagctaaaattctcaacaatggaactcttctcacactttctcttgataaaacttctggctctggttttcaatccaaatttgagtatttatttggtaaaattgatatgcaaattaaacttgtgcctggaaattctgctggaactgtcactgcttattatgtaagattttttattattattattttttttttgttttcaaaatgtttttcttaatattagttttgatgatcaattaatataaatatttgcagttttcttcaaatgggtcaaaatgggacgagattgattttgagtttttgggaaatttgagtggtgatccttacattgttcataccaatgtttacactcaaggaaaaggagatagagaagaacaattttatctttggtttgatccaacggctgattttcatacctactcaattctttggaaccctcaacgtgttgtgtaagattaatttagtatttgttattatacttaaaaaaaatattatttattatatttcaacttagtgtaattactaattaatataagatacaatgaaaagaaaattgtcaaagtcacataattaacttttgcacctaagtattacttgacctactaattaacttgccctttgtagtttgtacattaaattaatgaaaattttacataattgattataaaaatctatcaacacaagtttttttttttttttttagaatttatactttaaaattttttatttacaaaaacacatatcttcaataaaaataataaactttttttttgttgttttataatttagttatagttttattacagttatcatgaaattgttttataagtgtcgtgaggttgatgttttgttattttttt

SEQ ID NO: 385454 - DNA, 2058 bp, Cannabis indica
gattgtttaaaattgtttttgttcacttgacatagcatctaatacattttttagttttagtttaataaattgatagtattttactaaaaaacaacattcttatttgtattgagcaatatcttttctagaaaactgtcttgaatttcctgagatttcaataaaatcactctcaatttctaaatgactggtgtatcaaatgatagaccaccgatctggttcaccatacacctaggtaagggaaatcataattggcacaaaattctttttccttgaatggccaggagattggacctagccataagaatgcttggatttataataactcactttctggtgttcgacccccttcagccactacagttttaattgccatggttcaatctgactgcctttggagtttctagaatctgatttgcttggaaaatatattagaatagattagatgagaaagtacgattatgttaggccaaatcttatttgtattaagcaattgctctggaagagaaactgtctctcttgaattttcttggttattgtcaaatttttcctattgtttcttcttaagttactgtggtatatcaattagttttctttcctaatgaataaatatgttagtagaaggttgtgtatgaatctattatgatggagattcaggtatgagacttatgattcgactagcattacccttgttacgttgcaccttgacatgacatgcgttatgttgtaattcttatatcatgatgctcgtttagctaagctgatgctgttttgaacttccttcccatatgcagtttgcttttgaacattctaagttactagtgtaatgaaatcacatagtaaaagcagttgaaaagttttacgttcaactgaaacagttttgcacttgcaggttgcaagcaaccctatactgaaagaaatgttagtgagcagcgacatctcgaaagctgcttgtgccctcgtatactgcatcatcactcctcttctggaagaaaccgtttatagatgtttcctattaagatcactttcatcaacaatgaaatggcagcatgccattctcataagttcggctattttcagtttggctcacctctctggtgagaatttcttacagttgttcatcattgggtgtgtcctcggatggtcatattgctggactggaaatttgtgttcttcttttctcatccactctttttacaatgctatgacacttgtgataacgtatcttgagtagcaattacacttggtcattggagagtttcttttcctgtgcatactatccaagtaaaaataatgatatatatttatatatatgtgccatgaattgcaatgtaactcttaagatgtatcttagcagcatttaacaagtgcaaaatctcgactgtgtagaagcatgtgctgtataatgtatgtatagataaaacagattctggccaagctagataaattttacaattttgtctaatgtttggaatgttctcatccaaattaaatcgtggagatgagtcgttgaaaactgcagtagtaaagttattgtggaatgtggatctccattaaataaaaagaaaagaaaaagattactgtggctccaggtcagtggatcatgtaatggaaaaaagaatgtaagatttgtccaggttttggagagcaattgcttacttaatcatgcctcaagtctaagatttcttctcattcttctttctttatttgttcaaatagcataaattttgtaaagtagttttatgtttcaaccaaaaatgaaaaatatcactaacactcttgttacaatctctaaacagtaattcacactacctcttcaaacattcatattgtttattttatatcacatttttattataccatatgcgggtttttctatagttttttttttttcctttttttaattatattaattgtcactaccagaactctaggctataacatatgtaatatcaataattagtcaaatgtcacactttctctcttattgaaaaataatccttacaaataatattttaatttattattacaaaagcaatataaaatacttatttaaataaa

SEQ ID NO: 385455 - DNA, 1349 bp, Cannabis indica
gctcaaatacaaattaatgtgataataagagtgacacacaacactaaaaaggggttgatattatttagaaaagtaggtacaaatattcgagtacagtaccacacaaatttgaacacgatataaaatattgaatttatctatatttatatatggccttttttaaaatttatttaaacgtttatattttacaactatgtataacttaggactcgaacacaggacctccaacacgcagccttctataaccacttgagctagggttatatttatgtatggcctaataaagtattacctttacttatatttcaaaatatgtatgatacacatttatatatttgtaggtctagacaccattaacatacctaatatcgatgctttaaaaagtaggttcaaatttaaattttcttcattgtattaattatatatccaattagacagtcattactaatatataattattatgtctatatataatgaacagtgatgatattaatatgaaaagtagtagtgatgaccaatgaaaataaattacaaaggaatccagataatattgtataggttatactaatcataataaaatttaaattatattatatttgtgtgtactaagattgatcactaaagaatatatcataccttttgttgacctttcctttgtttctatagtgattaaaaaaaccactatatatattatataggatggttgaatggacatgcattaatatatatatgcacaatattattgtatcattttcatatagacgtagagaatatataattataattaattttaattatgtatattaatttttattagtacaccatttattattgtaaagaaataatattattatatattttctattgtaatcttcttttaactttgcggaatctctttatatatttactaaaaatatttctaccgaaccagaaaaaatggaatcaaccctcatgcatattgtactgtcgaaccaagccatttgagaacaaaaaagtcaaaaagaaaccttcgactattcaaacctccacaacctgcgccatcgaagctctgcaaaaatatcgatcgaatctgcaaataaaaatcaccattaaagctcgacaaaagttttgatcaacaaaaatcaaaacaaactctacagttgctaatcaaaggtgccgagataactcatcattgaagctactcaaagccttcgatcaaaaacgtcgattgtgagattcaaaataattaccgaaaatgaaaaaaaaataaaaaaatctcgcttcgagaaatttcaatgttatgcaagtttcaaaaaaaacaccttttagttcttttgatgtaaatatatatcaattagttacattttatt

SEQ ID NO: 385456 - DNA, 840 bp, Cannabis indica
ttcctgaatcagagatttagttgctgatcttgccttcttcattgccagtatctacttcttagtcacccgagctttgagtcgtggtcaccccacctttggctaaaccctaaaggccacctcttaagaaacaaattattatatacatagctaatatatatgttttattccattatcacttcatccacataatttgtttttcttcattagcttagggtttttttgatttatatattaatttgtttttcttagtgatatttataagtaaaactcattttcatcataaatagtttctctgtagaatttttattaagtactccctccacgttcttgtagcccatgttttgaaatattttatttgaatagtttcttgccaagcaagaaatttgatttatttttcattttttatttcattcaaaactaaaactaaacgctacacatggctgactactacatgctagaccaatttcattaatatcattaattaatatatcataatttattattattattattattattattattattattattattatatgatatatattcatgaccacatcaagcttttcctttttttttttctacaaggcttgaatttcgagatcgtcttttcaaggatttgaggtaccatttaatttttttctttgtctcttcttaactatttttttttttggtgtgtaattatgttaaatatatatatatatatatgatttcatttaattataactacataaatatcatgtattattttagaaagaaagtgtatctataaatttatatatatatatgtatgatcatcgatcactactacaatcttggcctttagaggctgttttt

SEQ ID NO: 385457 - DNA, 2028 bp, Cannabis indica
taaaatttaaaaatattattattcatgaaagaaaaacagtgaataatattatcaactagttgtagtgcttctttttccaaaaatgagttagatccacccatttatatgattctcatgattttaacatctgtggatctagtttggtctcaatgttgcatcgttcctttaattttttcattatatatatatttaaatttaatataattatatattaaaacaaaaacaaaaaaaaacaaaaagaatgaaatttatataactatatatatatttatggataaatatcattttaaatactgtgttttagaaaaattataaattgaactatctatttagttaaatgataatttaaattttatatttttttaaatggtacaaaatagatcttgaactcaattcggagtctttttttttttttttttaaaaaaaaaagtgcaaaatagattttgaactaatttttcatttttttttaaatataatcagcttgcaactaatttctaacacgaacaaatgtaaaaaaatgtaactatttttgtcattacacatgcaagtcagattattattaagttttaatttgacaaaaactaaacttaggatctattttataccattttaaaaaataaagagtttgaattatcatttaacaaaacagaaaattcatcaataatttttgtaaaacacaatatctaaaataatatttaacttgtttaatttaatttatacaccaataccactccatgtgactagtatataactattctgtcttccccacatatagttttgatttttttttttattataaataatacaaagtatcaaactatactatataggcctattcaaataatatccacacgtagtataacataaaatatgtgttcatctgaaaaaagaatctaaactgtgatcacaaatttgaattattggatactgtttgatcttttttttttttttttatgattataattattattatttttttgcactatttatatcattttaagagaattttgaacaacaagaatataatttattaagcaagaaaaaaaaaagaatagaatttataatgagatgaactttatttactattttattttttaagaggacttggatattatattatattttttctcgagaattattttattattatagaataagaacacatataaattcatttgtgaagctatttcatttttttttaaatgggactaatttcatcttcaattatatattagaatatttaattgtatttcaataataaacaaattaaataactaataaatttccaaccaaaaagtatcattattttaatattatattttagttggtctactttacacaaaacggaatgaattttaacctagaatcttgtttgtgtatgaatggttctttatttgtaatcaaactataccacaatagtctaattaatcactatatataacaccaaaggattagcttattcttgattattaaatgcaaacaagataaatgctaagatgacattaatgtggcttaatatttcactatttgtataattaagtatcaggtttaatataatttaatgtattaatttttatgaaatatcgctaactaatcgctaatcgccaactgtgagtagtgttagatatcactagtaccttataataatgataatataaatttttaggtaaatattattttggaatatgtattttgcaaaaattaccgtgatggattttctattttgttaaataacaattaaaattctatatttttcaaaattgtacaaaataatatcatgagctcaatttttatcaaaataaaacttaataataacttaacttggagtgttatgactatactagttatatttgatatatctatttatgctagaaattaactttagattggttatattacaaaaaaaaaaaaaaaaaaaacaaaagttaagatcagagttttattttgtactattttaaaaaatagaaaatctaatttatcatttaataaaatagagtatttgtaacaccctaactaacttaggcgtat

SEQ ID NO: 385458 - DNA, 1906 bp, Cannabis indica
aagagtccaatcttgaatttgagtccaatcttagatatcctaaagtttaggagttaggttcgcttttacggtagtgtataacagctacccttttatttacaatgttgtatatatatatatgatatctaattaatgaagcagatatagttttctccataaatctgttatggtatcacagccttaatcgatctctttttttttctcttatggccaccaccaataataccagtccaaccattctcaatacaaatgaacccaacaaaaatacctcatcagcatcaatgttgctgcccaaactccactcaaactaaattccacaaattatctctcttggaaactacagtttcaaagtcttttcattggatatgatcttctaggatatattgatggttccaacccttgcccaccagcaactatcacacaatcagatactcccactccaaatcctgactattctttttggattcgtcaagatcaattaatccttaatgccattatagggtccatctcaccaacaatcattcttttcattgctcaagccaacacatctagacaagcttggacaatactagccaacacatatggcaaacccactcgtggtcgcatcaaacaagtcaaaaatcaactcaaaaatgttgctaaaggctctcttaccatcagtgaatttatgcaacaagtcaagactaaggcggatgaacttgcccttttgggagctcctgttgatgaagaagatctcactgataagattcttgacaagcttgggaatgattacaaagagttagtgactgctgtccatgccagagatacctcaattacctttgatgaacttcatgaaaaacttttaaactttgaagcttctctcccatcaacacatgacccagagccacctcaatttccagccacagccaatcctaccatgaaacccacaaaaaaatcccgccccaatcctactcaatcaaacacatggcgcccttcctatccacctaaccatcgtcagccaactccaacctataatagttcattattccagcaaagctctcgacctccaccgagaccgtatcttggttgctgccaaatttgtaacattcagggacacacaacaaagaaatgcccttcatttcgtcttgttccactccaaatgccgccaacaccaaacacttctacatcacactgctccatggcaaccacaagctcatcttgcctctgcctacccttcatccactccgttggcgttatggatagtggtgcatcacatcatgttacctctgacttgaataatctctcgttgcacactccttacatcgggaatgatgatattatgatcggagatgggacaaatctccccatcacacacatcggttctacttctctacaaaactcctcagaataattttacattaaataatgtcttatgtgtgccctctatgaaaaagaatctaatctctatctctcaattttgtcaatctaataatgtttcaatagagttcttacctgattcttttcttgtgaaggggcttcgcacaggggtaacacatctgagaggacaaactaaagatggtgtttatgagtggccaaccccctctcctttatttgccttttctacaataaaaacaagctcatctcagtggcatcatagactaggacaccctgcatttcccattctaaaacatattgtttctagtaataatttggaaatatcctcttctttggccaatgatttctcatgcaatgcttgtctatgtaataaaagtcacaaaatgtctttttccacctccaccattgtctctactcaacctcttgaaataatattttttgatgtctggacttctccaatcgtgtcaactaatggctttaaatactatgtgatttttgttgaccacttcactaaatacatatggttttatcc

SEQ ID NO: 385459 - DNA, 1029 bp, Cannabis indica
gttcagtttttaattatatataaatggattttttacatttacatatttaaaaatttttatttgtttttactttttttttatagttggggcattctttttaaaaaataatgtgtaaatttttataccattgtgtattgtgttaaattttttactgttgtaccacgtttgtttttagttgtttccacatattatttttaattgttctgtttaattgttttacggttgttttgataaaaagacagtattttttataaaaaaaattcgcgttgacggtaaaattgtaaattttttatccaaaattcaatattttttgtaaacacacctatataaatttagtaaatttttttgtctctttgaaaatttcttagttattataaaggccaaagggcttgttcatgagcaccaatatcttgacgagagaatagggtaccacacaattttgtacgagagaagcacttattatttttgctcccatagctagttgtcggtggtcctcttatacataacacctatttatataataatgctttactactttctagctatagttaatttatgacttaattttttaaaaaaaaaataaataaaaaataataacccattggtgtccccattaattaatatattattatttaattttttaaaaaataattttcataattttttgtagaaatgtgattgaagagtatgaaaaggaagtggtgagtttaggtgaaagattgatgaaggttttatctatgaaccttggcctaaaagaggaccaccttttaaattgctttggtggagaaaaaaacattggagcttgcttaagggttaacttctacccaaaatgtccacaacctgacctaaccctagggctgtcgtcgcactctgaccccggcggcatgacacttctcttgcccgatgaaaatgttgccgggctccaaatacgtaaggacaagagttggatcactgttaagcctgctccaaatgcttttattgtcaacttggctgatcaaattcaggtatatatatatagtcattaattag

SEQ ID NO: 385460 - DNA, 2261 bp, Cannabis indica
gacacgagatacattcatatatataattagagagagaaaaagattacatgtataattaattagggtaattaatccaaacaagccagaagtataataattactaaggtaaaataatttagatctacatatatatatatatatatatatatatatatatattaagaagaaaccagaaataggaaaacaattcgccggaggagatagtctggaaaaaaacagaataaatacaaagaaacaataattaataaataataaagctcaaatcttctcattcacgtatatatataaagcatattaatttgctaatttaatttaatttctccttcttccttttagaatattattaatagagaaagccaaataaaagttgaaagaaggaactaagaacataagtgtatgaaaaaaattcaatatattatatatataaaatttttaacattagtacaaagagttacatagagatataaaaatatatatatatgtgtgtaaaacatatataaaatggattgtaattacgaaattaaagaagaaggtaaagaaagttataattctaaagctagaattaatgcctggctccattctgtctgccttctacttctaaaaacaaggaatagatcagtagttgtgagtagtagtttttgatcttcttctactttggagaagatcttcatttatttgtagaactatatatataatatatagatatataataggtatactaccctgcaatatcattcattcattcatctttgctatatctgacaataataataatatataatatataatagtagtagtaataataatgagcctttgatctgatttaaagacaagtattgttgtcttcatatcttcaataggtagtactactacttctttggtgtaaggacagtttggtcattacgtacccatatacaatatggatttataatcatgatcagtaccgtggaagagaatgaaagaaagtgcttctcctcttgatgagccatttaataccttttccttttttttttttttcttggtaaaactcaaagccaatggggatattactacccccaccaagattattctctttctgatctcttgtgtatatgtctctcttatataggatgtacttgagaatgagagagagagaaagatagttggggtgttatatagatgaagaggacccagataaggggatatatagagttatttgtccgtatgagatcttaaattggtaaaatattattatttatgggattgagtagtggccggtgagaagctcttttcaacttacgtttggtccgttttctggtaagacacaatattatgtgcctttcctggtcccattttaattaacatctcttcattattattattatttctatatattaataataaactgaccatataacaacttattattaaataatgaattaataatagtttgtatcactaattaaattctctattactttgttaaacgataaatttaacttgtgttttcaaaatagtacaaaacattaatctaactgaaatttcattcaaataaaacttaataataatctgacgtgaagtgtttagatcgaaatatactacttttttttataccgaaaatagtatatagttgttaagaattaatctttggagctttcttatatggctctagagatgttggttaaaagaaatataacttgtgggttaaaagggtttacaaattgtgtacttgaaagaggagtggtgtactaaagcctctcaccagaagcagctagtactggagtaaagttgtttagataaaaaaaagagctcaaaaatgtgtttgttgcagcagagtttcatgtatcataatttcaagatttctgatgaagtcagatgacacttcagttgggtatatttccaagcataaatgtattgattgattaaataatttgtctttaacattaatgcttgttgtctaagtgggcagcttaatgaaactcatgaacatctttttttatggctacatttttaatattagatgcattcatgaagttttgtctattagtaattgggaactgactctcataactacagcttgcttggcattgtgaattcgatttggcgatgtaaaaaaagcatttattcttgtgcgataagtgctatagtgtgtatcatgtgtggaaggctcattgattcaactgttgttaattagaaggtttatatatggaactctaaggtaccattgatctcgtatgtggttatagagatatatttgtataacatattgattttcttaaaaa

SEQ ID NO: 385461 - DNA, 1045 bp, Cannabis indica
aattatttacatataacttagagtagtttagttaaatagtaagattactcatctaacaccttatgataatcatgcaaatctatcacaaaatatgaatctttcttacccttatcatcatattcctaagttttcttgtcttgatttaatcaatatctaattaagtagtttgtaatagaaaacaagaaaaaaaaaagttctccatgtctacttaggtattatgtattttatctaaatataaatttagtattttatattttaataatacttatatgatactttatattttaaaattgtacatatttaaatatcttgaaattgatcaaactgattttatgacttctaaatttaattttaattatttacatataacttagagcaattcagttaaattgatataaaatttaactttagaatattaaatatatacaattttaaaatactaatcattaaaaatacataatactaaacttgttcttcgagaaattataagtatatttccttttgaactaatttgctatgttggtggctttcatgtgtatctatgtatgtattgatgttcatgtatactttgtcatatgaaatcaaaattctggttttttcactttgtttttatctttttctgcaaaagggtatttacagttttttgtcatatattatctcaatatcttagttatggtaaattgtccttatatgactaatccaattttgtgttcaaggtactattcacaaaaagacaaagtatagtgtcttctttttatttgaacattgagaacttatcccttttgttggttacacttgagtagattttcaaaatgatagtttcattcattgttgaatttgaatcacttttgtgactcattggccttctaatattagtccaaaaaagggtttttgccaaaaccatatatacatccatatattttaggctaattaaattttttgtcttgagaattttgacatgtaccaaattatgctccttaaacttttaaggtcgttaaaaatatctactgaattattgagattgttaaatttaaggacttttgtc

SEQ ID NO: 385462 - DNA, 1133 bp, Cannabis indica
aaatgaatttttatttgataatttcctaacaaatgaattaaatgatcaaatgatgtataaaagagatcatagtagcctaagattagaaattattgtgtatatgatcatctatttatttttaactaatactacgaaatgatgcttaaatgcgtatgtattaaaaaatcacacatggtccagtttaatatatcgttatatacaaagtacctccactaaaatgtcttactatactagcatgatccgtatctataataatgaaccgtactagtagtaattaatctaaagattctataattaagttcattattctaatatcaattgtctcataccaatatgagattaagatgaactttataatttttcgatatttacttaatgttatctacataacattggatatagtctgtatatatgtaataattcaattcaattattcattttatttaaagtatttttcagttgtgattagttttaagggcactattcctaacaccctacacccaagtagcctgcatccaagtgaacacttgggtgtagtgctcatgttgttagtgaacgtgcaactcaatagatgtttaacctaattatgacccataatatagacattgtataactaccgaggactacaagaagacaggtaacacacacttggcgccaagtggaccttgcacccaggtcgacatatctcccgaggaaagtctccgtgaccaaacattctcctgtagcagaccaaatgcttcagcaacatcaagcacaaattagggaagctacaacacacttcaacagtggtgctaggtaatgggtgcccaaatgatctcttacacaattaccttgcgcacataggagttgttctcaagggagaggtgaacattcacactagtttttaaaaaattccattaagcttagcattctcatgtcctatgttaatccaagtttagcagatcttggtcgttcaacagaaatcaagatcacccaacaagatctagcctcgaacatctactgtcaagattaaatactagcatttaaattcaatggtcaatatctctaatattaagaaagaatattcctacaatatgctcttttaaatattttttattattattataattgtaaaaagttttcttatatttcct

SEQ ID NO: 385463 - DNA, 864 bp, Cannabis indica
tttaagtataggattatatattacgtattcaatttgatatttggtgcataaatagattatgtagataaatagattatgtaggtacaaattgtttatatggtatatgtattaaaaaaataagataaatcatttgtttaaatttaaatcaatattgagtatatataaatctatatttagtttatatttgcttttaaaaaatgtctaattaacaaaaacaaagagtcataattcttaaattaatctattagatatgtgttaaacatcacaaatcacaaaattcatattatatgattaacaaagttagaatataattaaagcaaaaaatatattttagtaatgtaaattaaaagataaaaaaaaatttaaatcgttattattaccgtatatcacttgtagttgtcgttgtattcaaaattattattattattgtactttatttgtagttactattttattcaaagttattatcatcgacgtatttcatttgcaatcgtactttatttaaaagtgttataataattgcatcttacatgtaatcacatactttaattttattaaaagtgtacaaaaaaacctaacatacacgaacacaagtcaataacaaaattaaatttaaatggtcaaaaaatatttttacaaattaaatcctaaattaatctaatacacacgtaataaagaatcccatataccataaactaaatgcaagtaaaagaccatagctccataatacatgcacaaaacacaagataaaagaaaatagaaaagttggtaagaacatattttctagttagaatagagatgtgcttgataataaatatatagatatctttatatattaaaagtgcctatctaacggcatttctt

SEQ ID NO: 385464 - DNA, 1076 bp, Cannabis indica
taggtatcaaagtagtcaataccaggtttttgtgtgtagcccttggctaccaatctggctttgcatcttttgactgagccatctagattatacttgattttgtatatccatttgttgttgatggcatactacccatctggtaaaataactactatccatgtttggtttctttctattgcatcaatttcaacatccactgttgtgttccacacaaactgtttgcaagcttgagcatagatgcaggttctgagagttttgtgtttctaaaacagcagctctgaacttaggagtcagcctgcgataagagagaaaattagtgatacaatgagcagtgctattgtttaattgaatggaatcacaattacagtctcataagtgtccaggttgtttgatttgtctgccggattcggaagccatgagaggctgctgttttgcacagatgtttggagtgtttctggtgtctgcagcaatagatgcatcaagattagtagtagcataatattgaaaaaaaaagtgtctatcctagttgttgtatttctctgtttgagtggaaaaatggattgataaaacacatcatctcttgaatgaaatatacgatttgtttttaaatcaagtaaagtgtatgctttcgtgtgggtagggtatcctataaaaatgcaagctcttgctctaggagcaggtttgtgttcagatgtgacatgttaagcataggccatactaacaaaatttcgtaagtgactgtattgtgattgtttgagatgaacagttcatttgaagtcttaccttttaaagttacaaatggtgtacgattgagtaagtatatagcagtagtaaccatgtaactccaataagaaagaggaagatttgattgtaatggaagagctcgagccacattaagaatatgttggtgcttgcgttcaacaacagtattctgttgaggtctacctgttgggctttggttcatgtgatcatttatgtttatttgatttataaattcatctaaatccttatcatattgatgttattgtttattgtgtcgtcagcgcagtggaaagtaatcaagattatgtgattaa

SEQ ID NO: 385465 - DNA, 2153 bp, Cannabis indica
ccaaaaaagagcagattaaatcggtcagacctgtttcgaagtgactgcaacaccggcagaattttgcaacattttaatcgtgtattggactttcttgaagacgcataggcatgaaaaaatttagtgttctcatctccactttgaaagccaatctattattgatcgttgttgccaatatacctcttcttgtgacagcaattcatctaaagtgtcctccatcttttttcagattacacattgaagtagtggttcgggtctattggttatttagcaattctacttccttatgagctgctgcaattttctttttaaagttgccaaatttgttgtggtgccacttttgtaaagaatcggagcaagcttctaaattattgcagaagttatcaattaaattaccttccaaatttgatttccaattctgatgaataatatcagttgctgcagaatcagataaccaaattttttcgaacctgaaccttgaaattcttttactgtcatgaggttgtgctgccaagggaacaacttcaacagagatcgccctatgatccgatttgtaatagtccagatgccttgttgaaatcggctgaaaggtgttgttccattgatcattgataaaacaccaatcaagcctttctttgattgcattgacattgaggcgccctttaatccatgtgaaacgatcaccttcgaaaggttgctcataaaggtagcaattatccaaaacagatctgaagttatccatttgttgttcacttcgtaaagcaccacccaacttgttttggtttgaaagaatttcattgaaatcgccaatcactagccaaggcatcaaaggtgcgacatctttacatctctcaaggagtgtccatgtatgaatgcgtttttgtgcttcaggggcaccataaaaggcagagaaatgccaagaaggaccattatcacacgtcatgtagcagtcaaatatattactattataattaagaagagttacatctacattgtctttccataacaagcaaacccccacttaacccaactctaggaacttctaacccttaggaaacgtaaagcttgacgaaacgagtaactacattacagtctaatttagtttccataataaataatacatgaggagtttgctccttgacaagcaaacgaagttgtcggaacgcgctaggattccccagaccacgcgcattccagctgagaattttcatggctggttgcggggctgtgaagcagcctccgcaattttgtcaaaggaaacggatggatctgtagcagaaacagaagaaatccggttcatctcagcatcagtggacaaatctgaatttgagggcgcaagtgaaagacccctacaacgctttaaagcctttctcagtgatatgctttcaggtagcctcttgtaagagcgatttggtgattgattttctttaccaacaggagcagcagtagttctacagatggtggagtcggagatgacgggaggatagactggagaatcagcaaatttgggagcaatgttgataacgttggagtttgatgtgtcaggtgggtatgttgcaatgtatcccagtggtggtcctatgtgaggcataaaaatttcagacaaatcactttcatttgggagaagatggaataggattaggaattgatggacacttattttttccagcaaactgtgaaggagagacttcctttgttattgatatggatgaattaatgagaagtccattgttatgaacaccctctgattgctacggtggaattgatttaaattatgagtatccataaggccagatgcactctcagtaatggatggaagcatgtcaattttagcatgtttttgctctgttacattggaccttattaatgcctcagtcatcatatcatgatttcgcaccagaaaggcagaggataaagtggctggtgcaaaagagaaggagacattggcatgagattgtgtgatgtgcgactgaggaggattaccatcagtagcatggtgaattggcgaagtaagtcattgtgttggtctgaggattcaccataaaacaattttttcggctgtggttgaccacgaatagaaagatcaggaatggtacttgtcattgcttttcttgctgtcgagtaactaaaggccaagcatggcctttggagaa

SEQ ID NO: 385466 - DNA, 828 bp, Cannabis indica
tcgtaggatgttaaagaatggaatgaacttgttaattgactttgagacaaacctgctcaaggctgcaattcgtcccataaagctttggacgtctttgatcttagttggggacttcatatccatcaaggcctttatcttcttgggattagcctcgattccccttgagttcatagtgaactcaaggaactttcctgagcttaccacaaaggagcattttaaaggattgagcttcatcctatatttccttaggataacgaagaaatctctcaaatctttaatgtgcccttagccttgttaaacttgaccagcatacctccatatttttacctatttggtctttaaatattcagttgaccaatcattttaccatgtcaacatttgtattatttcttacaacctaaaattcatgataaatccaccatattcatattttcaaatatgttttctcttatttcagtccatatgatgtacttgaccattaaaacctgaaataagaagaaaacaaatgtaaacctgaataataaaacataaaaactactaaaaaattaattaaattagactctaaaacaacacaaaaatagactcaatagaactaaaaagtcctcacgcatgagtgtcagtcactcagtataggaaaaagacacgtgatccctatcctatggaggaatatctgctggttccgaacgaacgaacttggacaaaaagacaaatccacattacacttgtgcaatgaggacttgggggtaaattgaaaaaccgtgtttttgcaaatgtcagttatatataagaaaatataaaaactgtaagcgtttgcagcagcagaaagta

SEQ ID NO: 385467 - DNA, 1625 bp, Cannabis indica
aattagtacatgaagtatatataacttagacaagtttacaacgattagttaaaaaaaaaataataataataataataataataataataataataataataataatataataatagatgttttgattgggagtgcccacttatccatatgatgatgtatagtgatagccaaaatcgacttttagcccacgtcgtttctatattagccggacaggaggggtacattaataagggtatggggaccaatatttgaaggcaaaaaaattaggaagaaaagcctcattaataaagcgaatttgagaaggggaccatatatcgtatatatgtaatgtacaatgaatatatatcactatactaaattatttttcaactcataagttatatcaacccagctagctaggggtcatgacaagccatgtggtgccagggcaacgatgcctctttaacaagatcaaatatatatatgcatttccatgacaataaacaacatgaaatcccaccatgttacatgttttttaattaatttctcacaagggccacaaaagcaaaatttgcaaggccagccagctagtttgatcactattgctttttccttaaaatacggctttgtcttcacgagtacattgcttttgttcaattgaatacaacttaaaagaaaataaaactttttagttgatatttgtgacgggagaaaaataatttagtattactaaaatcttaaggagtggtacgtggaacaaaatatacaggacaaataactttttgcacttctatagtttgtaaaggagttattatattttgttacattttattccgtttacaagcttggtcataaggtacccactaggacaaagatagaaataaatgagagggacaattatttatttttataatgaaatgttaagggacctagcaccttttataatttcacaaactattagtgcaatttaatatcgaatccaatttattttaatttttaataatgattatagaaaacaaatagctattataaagcatcacctcatagtggtactaaagatcataatatgcttaataacaatgcttattgttatattatgtggattttaatatttaataaaaattataaaattgactataataaaatataaaataacaaacaattatgttataatatattttagtgtaatcaaattttaaattaattgctaagttcaaatcttaacaataatacaaaaagtaaagtaaaggtgtggatttatacttgtgacatccttaaactttaaatatagatttactaatacatcaaacaatataatttaataatatttgtataaaggctaaaaaaaataatatttaagtttaagcctcaaataattaagaatcgagtcaaatttcacgtggagcaaccgccccacttagtatgtgaccagggtcggccctatgttaatttgggccttcagcaaaaataaaaattggggcccaatgaaaaagtgagaccattgaaatttaaactctctacctcttaggtagcgtttgcttacaaaataaaaatggaataggaatgaaaatggaaatagtaataagaataggaatataatttctattattttgtttggtaaaaattatggaatcaataactgaata

SEQ ID NO: 385468 - DNA, 1606 bp, Cannabis indica
ttctatatcattgagtctagataaaaatatagtaatatacagttacttctaaaattattttttaataaatttaaaatagagtactgtactgaagaaattggaaaaaaattacagttttacaaacatggggtacttatgccgctaaaaataatttagggttatgcggcttacaaacttaaaacattgggtacttataccactatttaccttaaatttaattaaaaaaaaaactaatgaaattgaaaaactcaaaaaagagaaaaagaaaaaatttaaggtaaatattggggtttgacttgaaatgtgaaaaactcagaaaagagaaaaagaaaaaatagcactctatttatctcaggcaaaaaacaaaaaataaaaaataaaagttaccctctcacatcacatgcaactcacatcacatgcaaggatcaccatttaccaaattattggaaactataaaaaacgcactgttttggttgacgtttaggatcaacagtataaatattgactctttttatatatgtaagataacaactctaaatcacatcacttcttggcaagtttgaaatttttagcaattgccaatgtacaagcttgtcatctcaatttcctgttgctactatttaatgagggcttaagtagattgcattcaaatatgtatgtataaacacatatggtattttttatcagttcaaacttctgaacatagttttcaaagaatattcacaagaatgacttgaattggcccactatgaaaagaaaagaaaaaaaaaataacataacatatatactatcatgaactggtatacagagaattggggtatgtattaatttcctattataaaatcaatatcaaaagttgaaataacaatcaactccatttcaacaaaatttgggaagattttagaattacttcataaaatcagtaggcttatttcaccaaaatttggaaacctaaataggagccttaagggtccatctcaatcaactccatttttaaatgagaatataagttcatagttgcaaaaagattgaaaatgagttagaatcgaaatttgatatccaaggttcacaaattaccattcttaagaagacatttagattgtatatgatagggaatcgtttttaatatgaaataaagcaaaaactattataagtttattctttttcaaaatcttagaaacaggattctccaacttctgcattataagtagacaccaacatttcaggcatgcctaatcctcccttaggcccctctcctctaataaccacaaccttcccctgaacaataaaattttaacaaaaagttaatacaacattcaacttgttgactccaataaaatgatacgatgttaaaaaaagcaaaagcaaacaaactgggatatgattagttaatagaaaaaaaaaaacggaaggcccaataagactggtttaattagtatgtattgattacatatactatgaaagtcgtggcctacaaatagaaatatttaccttaacggcccgtttggtacgcaggactggattgggttagacaggctaatttgtccaatccaatgtttgggcatgttagaagtctggataactaatccagttaacctcatctgtc

SEQ ID NO: 385469 - DNA, 681 bp, Cannabis indica
tgatttagcacatgtcaaaatttaaagaaaaaaactctaattaataatgctcataaattatgatgagatgtaattaagtgatatcgaaatgcgaaaagcaatggtatgcgcatgccgtgtgtagccatttgtctaataataagtctgcgtagactttgcatattggttcaatgagtcaaaaattatataccccaagttgcacatatctatgtacttatctctatttcatacatttatttatttatttttttaaaaaataataaatatataatttgtaaatatctattatgttcattgagatacatagggtcttctaagtatttacaactacttatcattgcactaaaacttaaagtcaaaagcaagcaaaattgtaaataattagctacaaacatttaataaatttgtttactttattgtatagtaatagtaaaagtaataactaaacaaagctaatatattttaaacaaaactgtgacaggcaatgattattaatctttggttttgtagaaaaaaattaacataaactaattattatttttcacacaatcatgtgactctttgcttagggctaccggtactactctaggcacgtgctcttcccataagaattaatttactatataataatatcctacatatttatgagtaataaacaaaatatataccaaaatatttttt

SEQ ID NO: 385470 - DNA, 1107 bp, Cannabis indica
gtaagtactttattaatattagtcattataatttgttgactctagttcttcttcattgtatcaagcaagacataaaaaaatagaatgtttttattttgcctaagaaaatgaaggcacataatggtaaagattggttggagaaatttaatatagatgatgacttgtatataaatcatgtaataaataagtacacactgatggtgttgataagttgtaaatgatgttttttgttgtaatacaactcaactgttgacttagaaaaataaataaataaataaataaatcaaccatgcgtgtatacatcaattaggtcgtcaataaaaaaaagtcattacttcataaaaattaaaattaattaacatgggactttaatctacaaaagatcttcaagaagagtaaaaaaagtcttctcgattaaaccaaatcaattagcaagatttgcatatatactgctcattggattgctatgtctaaccacacatacctcccaattaataacactagacaacataagtacttattccatacaatagattagaaaattttacaataaactctttaagaatggtgtattgatgtgttcttatcaatttcagtttctgagaaatttttttaatttatattttttttttataattgtgtatatttgttaaattgtttttagtattatttttaaattaattttagggtgtttttaatttacttttactcgtgtttggagcaatttttcgcttttattattttttttatttttgtagatttaaaataaaagaagaatagaaaaaatcgacagaaaaaaagaatgaaaaataaaaataaaaagatcaaaaaagggataattgtgcagatggggaccatgcctatagacatggaaatcacatgcctaggcccgtgtcatgtgaagcatgaagacgtgtgaaaagctcagcacaggccgcggcataaaaagggcatgtcgcggcccgcctacctaattcaaggcagaataggagttttcaacgtgagcttatctttcctatctaatttgaagctgaataagttttctgcatgtactatcttatgctatcttttttatccctcattggctatataagaagtgaactttag

SEQ ID NO: 385471 - DNA, 571 bp, Cannabis indica
tttttttttttttgtgtgtgtatgcgcgcttaattcaatcatttcattataatatccaaatcaactcatcatgcaaccattaatactcatctctaaataaatatgtatttcaacgatattccactccagatgcttaattatcaaactcattctccactaatgaaatcgcacataatttaaagatcaataggactttataggctcataatgctgggctagggcttaaggtgggtaagaaagttatttttaaactcaaatcacaccatagcatatgcatatatcttcctctccaagtattcacatttgtattcctcactcagtcccttgaataattcaatcttgcactctgtttttttcaacttaaacttattaattctcccacaattatattgttgcaattattcattttagaggaatttcttttcaatttttttcttaactcatacataaccaaatattattttttaacaacatccacacccatttacaaatacaaaaatcattgatatactatggcatgaaaaatgatgaataaggaaaaaaaaaatttaggctcaaaggttattgtata

SEQ ID NO: 385472 - DNA, 728 bp, Cannabis indica
ttgtccactaggcttttcccatagaggaagtggagcctaggtatgtagtctccgttatcaaggagtaaatctgctactttctccaaattctcaagcctagtagaggaaggcttagggtagtaatcttggtcattgataatccacgggtcattccaaatatttgtccatttcacatccattataactttgcaagcacctttctttaggatagatatcgatcacaccacattctttgagaaccaagaatttgaattttcagaggaacactccaagaacgatttacctctcaagtacttagctttaaaaaccttacaaaataatatagcgattgatcctcagtcattaataagcgttcaaccccatttggctagcaagacttgattcaattttatagtctttctaaatccaagaccaccccgagatttaagcaggcataaatgatcccaaacctttaaataatttccatgattattctcttcacaaccccaccaaatatatccctagccataccatcaattttagtggcaatcccaccataccatcacaaccccaccataaatttcacggtttaattaggctttcataatttttattttttacacagacggattttggtatttcatcaaagtcacgacttacgtcttgtcgttttaggccaattttatatctttttagttagttttggtagcagaatttcaatcgaagcagatagctaaacagtactacta

SEQ ID NO: 385473 - DNA, 605 bp, Cannabis indica
tccaccgtactaactttagtttttttgtttttttttttttttttttatagtttttaaaaaaagtaaatacagcataataaataaataaattccttaatttttttagtatttattaattattatgcttcttttgataccctctagtgatatattattaactaatacgtccctcacatggaaaatccccattttggagaaactcatgcatcttttctattttttttattttattttatttttttttgttgagagaatgcatcttttcaattttcgtgtaaaaaatagttgctttttttaggtgattttttatattattattaatttaactaggagatttgttttgcattggttaatgggcaccaaggtaacatttgctctattaaaaaaatgtgtttagtattataaaatagtgtcctataattaagtaatggttacttataagttttattaaaataaattatgcaggattcaatatcaaattatattaataataatattatacattacaatagtggtagacactataggtgcgtttggtaaatctttttaattaatttttgtttttaaaattaaaaaagtaaaaatattttctaaaatcatgttct

SEQ ID NO: 385474 - DNA, 1417 bp, Cannabis indica
ggtaaaatattcccaacatatagtccttttgaagtgcttatgtcactactccactaatgtgaataacatttaccccctaaccctttggggctcgagagtcgatgaggcttgcagcacactctcagattcacttatggatgaagaattagcaacagatgtgcctttttggaattttagagcaatagatggtggaagtccacaatcttttcatcttcatagagcagagaacatgtgtcaacatactatatgcctcaaaaaatacgtgaggtttagggaagcgagatgacggctggtttatgttagtgggatattcaagacgaatatcatcattgaatgacttcgatctcgcatgcagcattaaatgcaacctttccgtattcccaaactgttggatcttctttgcgttttgtaagacttgatctggaccatttcattcaaaagcacgcgagtttccacttttattataaatatagtaaaatcaactagttaccatttttgccatttcatcctctaaattcaaatttttttcgagagagaaaattccttgagaaagacacaaccccaaggctttttctggtgaatgtccagcattgtaacttaaatccttaatattctagttcatattcgatcaaggttagaaccagacgcgccacccccgatcctcaacaatcacttccgataattggatccaccaaacctgagcaattggtgtgatctaccctttgccaacacatacgccataccgccaatcaagggagaacaggcagccagacattacctagcatagaactagctgactatgtacaactgcccagggtaaggctagccgacgatggccagttgcctggcctagggctggccggccagagctaaatgccaagcttggggctggccagccttgaacataacctttcccaaggtatgggcggctaggtcctggccaatcagggctacaacccaatcaagaaaggccactcaactagcccaaagcggggaggcaaacatagattcttgctttggggattctgcagacagctttggacctatggaaaaactggaagaaatggtgattgatcccactcttccaactaggaaactaaagatttggaaagttttagcgctagaaataaaattagtcttgataaaatttctaaacaaaaaccttaacctatttgcatggtcacatgaagatatggtcagaatagatccttccatgatgacccatgcactaaacattgatccaaacttcctgtaacgccctaaataattaggcatgctacccaagatacttatgaagccctaatcccctaaccgagattactaataaaattagcgcagaatttaaaccttaataacaataggaatgaaaataaacttgtaatactttaaactttataaactaaaagttacagtagtt

SEQ ID NO: 385475 - DNA, 531 bp, Cannabis indica
aaatttaataataactcaatgtaaatgtattatgacaaaacatacgttttctgtatctattcatgtcaagaattgttttgaagttgattaaattaaaaaaattatcgaaaattgagcttagagtcttatttatactattttaaaaattacaagactgacttttcaccctaagtcaaaaaacaaagttgcctccctgttcaatgagtcatacgacagatgactctcctaaaatgcaatgtcattgtgatcaaacccaataaccctcaagaccttctagacctaggtcatttacacaaacacacacaaaccaatcgaaaccctagcagagctttgagtttctaccaagaaactcgaagactactatcaacccagaataccaaatagaaccctaggtctatacacatagatataagcaatcagtaaaagcaagaaataggagagattgcaccagattttataaaggttccccaaaaattttgatgggtacttcctctttcgagctcgcctcagaattggctcgattccactata

SEQ ID NO: 385476 - DNA, 977 bp, Cannabis indica
ttaataaaaataaaaaaaatgaagagaattaaggagagaattaataaaaaaaactatagtagagtgatttgaaagtatcactcatacttctcatttacatatagataaatagatagaataatgggaaaaaattaaaaatatacataacattaaattattaataatgccacaaatataattttattaaccaaacaaattaaatatgtggttatataaataaaaaatagccataaaaattattaaaaaactgaatcaatttttcaaacaactctctctcatgctatgagaattcacttgaaaataatattgaatttaatttcagattttgtgtatctatcaactaatctgtactgttatttgtcggattttgatatttttaaattctaatgaatgatattttttttgttatatctattctatataaagtgtagtgatgtaacatattttttttggtttaataatattttttagggttttacgttaactttaacagaatattctattacttagagcaagtgcaaggaggctgatatgtctatatatgcagtgattcattctccatgagactctttttagtgcaccattttaagatattttctacagtgtacgtcatatatatttaattaatatttatatatatttataaaattaaaaatttatttttaaaaaaatttacaatatacatttttaaaagtaatgtaccaatatacttttatttattttggcactcgatacatttttttagtttatttttttttatttagtcgtgtatattatagttatttaagacatcccgtaaatttgagaaatttagaaaaatttaacacaccaaaaataatacacttctttaaaagtggcgcactgatatactcctacctgtttcagcattcgagaaacttgtttagtctttttttttcatgttcgtgtacattataattatttaagacattttttaaaatttcaaaaaattttaaaaa

SEQ ID NO: 385477 - DNA, 1471 bp, Cannabis indica
taataagagattgaatcgaaaaacaaaaaatagaacttggcatgacaatgcaacaaagaagccaatcttgaatcaacaaaagatccagataggttttaaaaggactctagattttatggagccagataataaactaactctatggaagatgactgagtatcatttgcttcaatccagtgacacacaggtactatcaaatactcttaatcatcattagtattatttactttgaatatttaatgcatgcatatgtacgtaataataaagtctaacttagttttaatttatcttttctacatcaatgtacatggatgttatgcaagatttataaaataaaatcaaaagaaaagaagacgtttacaaataatgagaataaagaaccaaacacacaaagacaaaaaatagtacacgaaaatattacggtagcagaataagagccaactgaagtatttatgattaacgaaacgaatatcgcagtagagcaagaaacaccaaataatgcatcaacagaattaatgagcaatgagctcgagagcataactgccaatcttgataacttgttagaagatccaaatttactggcagatttagattaaatatttcagaagtaataaaaacgctcatacgcataataaatttcatatttccattaacaaccacacaacctgtcatttatcgaaaatattaaatcaaaatcgcaaaccatatataagttagtatggagattcagacgctccaaacaattgatgaagcactgccacataatctgaggtttttatcacaacctgaattttcaatttgaacatttttctttaagtggtgaaatgtttgatgaacttgaagaactaataatataaaattgcatttattaattttcttaagacattgtaattatctttaattaagacaatgtaatgtaatgatggtgttcaaattttatatatatatattaattgtttctttttgtttgagaattattaaagtcttaatatatatagcatatcacagccacaatctaattggagaaaatgcagaagaattatattgtaatatgaattggatgtaacacatacataattttgtacttaaatattgtatatgtattatgtatgtatacacacaacacatgatctttcatggaggttttgaaacagaaacaataataatagttgtaagagagtcacagatatccaattcattcaattctataagtaatattttacacattggaaatgactccaactcgggactatctctaattgttgtagtgaatgcaattgacttgaaaaaagcttcaatttcttacaatgagtcacttctagacttctagtctggtcgaaattggacagtgaagatgaatgttttgaccatttatctcttgtaagcctaatgcatctatttattatctcatgttttcttattaagtggcgtttggttgggaggaaaaaaatataggaataagaatgggaat

SEQ ID NO: 385478 - DNA, 2788 bp, Cannabis indica
atgatgttaatctattaattagtattggactcaaatagaagtccccaacgaacccttaattataatatttatcactttatttatttttgtcttccaatatattgtagggtatctctttatgatctcctttaaattgaggagtgcatggtgtgccgctcatattaattaaatttatataaaataatatatatatagatataaaaggaaaaaatgaggaagaaaagaataagagagagaatgctggttagctaataagctttttaggtgtcaaatgcctattcaagggcagagttagtggctgagattgtatcgtctatcccaaaaaagggtttggattcaaggtggcagcgtcactatctttgaaagtttattactttattttttggggggaaaggaataatcaaacaaattaagctacctcgttcttatattaatgctctctggttccgtatgtatgtatcctaattactgattaaaagcttatactaccaatatttgaaaatgaaaaatgctacaagtcacatcctaaagtctcataatatagcctcgtacataacttaaaataataattcaaataaaatatggctaactattttaaaagcatcactactatacactgcctaatgttaaatacttaatcattaggtatatatataagtagtacacttgttctaattatagtatacaaattaatatttattatttatgtttatatatgcggttgtctagctacaactatttgtggactataatttaataaaagtttgagttactggggtcgaattattccatttaattaatacgtgtgtctacatggaattgtgaattatttgaacttatatattcgattattctatgatgtatatatatataaataaataaatataaatacatataacttttcattgattgaacaatacaaaaaattaaattacttgaattgaatatagcagtaacatccacattcctttttgcaattttataattataaatagaggtgattcttggtttcaagttcttgattaatacattattattattattattattattattattattactgttatgtagctaagataagctgatcatgatcatgataattaattaataatagtataatcatgaccagctagcatagccaagcatactttttctcttcttttttcgttccttttttgtttgtaataaacacgaacaataagggcaacctcctgttgtttcctgtacaaaccctagctctttagattctacatatatggaattatccaaacgaagtttctttctatcccctacttttttaaaattttactattatatacagtaaatttgattcgctttttgaaaaatataaatccacatagaagttcctttttagtatagtccttttaaaatgttttcttcacagtaattttgattcgcttatatcatataaatagttcatatgtatatatctttgcatgcatggcccttgttttcgccaagtgtccaaaagctacagcaatattttctttccacctgccctattttcaatcgatgatgcctaacgtttacaaatattgcttttctgacaattcaatttgatgatgttaatgtctacttttgtctttctttctcttacctcaacttatttatttatttttattttccactatttttttttctagcttcaaatataaaagtgcaaataatatcttgatcttgatctgtattggtccagtaggattcttcgtttactaatataagaaagtgagagaaactaatttgcgatcttaattttttgaccccaattattaaaatgaaaaagagagaatatgatcagctagatattgtcttgaaaaccaagaaagttttggacgtatatattatacttatttacatttttttatatatatgtatgtatggtatgcatgttacggcaaaagaaaacgattttgattaattaaaagcgttctcatgttcactacttcttttctaataaagaagctacaataatatgtgatatatatatatatatatatatcatcagattgtgatgagttgcctcagcataacattattaatctttattaattcttatttagtattcggtttaactttctactttcctcccttttattttgtttattatatgaatgcatgaatatggatagaaagtcaaactcatcataacaataataactcttttctctctttctctgttttttttttcttctttaaaaataagtcctctttaattaatgcaaactcacgtgaatatgtcgagaaaactttataattttacattttaaaaaataaataaattaaaaagctacaaataatttgtacatctgttataaaaccatttactttttttcctttctctggaaaacaatactcaaatttactttatgtaattcacgtacctcttacatatatatttacgatttaaaaacgaagtcgtcgctattataatagcaaggtagattaaaaaacttttcgccaatcgatcactatggagctagggcttctttttctttcatttttctccaatatatgtgttgcatataagattgtgaatattaaagtaaaatttgactttttagttaaccctaagagacgtacgtacgtaatatcttatccagaatttcgatgatatctgatgcactttttaaatcaaccattgatacatatataaattattggtttgatgatagacatgcatataaattaatttaaaaaaggttcattgtttcatatattataatcaccttttttcgagtaaaaatacaaagaaatttctatcgcg

SEQ ID NO: 385479 - DNA, 895 bp, Cannabis indica
aaattatataaaattaaaaaatttacagaataactaatatgtaatatgatagaaaaaagataatataaacatatttcaaaccttaaaatttaaaatatctcagaaagaaacccaagataaagtcacaacaccttcttctccgagcacggcaagcgatcgatcgtgggggctttgagcatttcgactggagttttccagtttcaagggtgttggaatagatcatgatttttttttagggaagatggtggtgatcccctgcttatggtaagaattgcaaaaataatttatgggttttgtttgaaatatttgtgagattcgttggtgatttggggtaaaatatctcaaagttcacccacccacaaccttgtggaaaaattacaaaataaaaaacgtcttaataattgtgagattcagtaataccaaaattaaggagaattttttttacccattcatcaattaaggagaaagagggaaaggggaagattaatacttaaattacataactcaaaaccaaaagaaaagagtggacaaaaaaagaaaaaatattcaaaccttgtatctagaatagtacttgaactttttacccgggttcttcaaggtgcgaagcatggcttcttgtagtggtcgacaatacccatcgtctcattttcatcaacaatggcttctactcagatcttaaacccgttcatcagaactcagaaatctcagttgaaatccaccctgctccctcgatcaaacgcggccgtggtcggagaagatggagtcgatactttctctctcctcaaacttatgtatttgtgtagggttgttcatccgatccaatccgcactttttggtcaaacaacatccaatccgcactaagtgcggatttcattttttggattccaatccaatc

SEQ ID NO: 385480 - DNA, 2262 bp, Cannabis indica
aaatgacgctaataaaagactatatacatcggtttaaaaaaccgacgtaaattctttaagtgacacttaaaaaatgacggaaattatactttttgtagtagtggattgatgaagaacaatgacttgctataggtgtctctcatctactagtcagataatgaaactagatttggccaacagggccctacattacaatatttgaaattctgatgagagacacgctaaaacacttcctgaagacttaaaatcaaaactagaaatatccttatcgataaataacacgacaataccccaaacatcacaaaaatgggcaaaaattagggttcctagagttgtccgaaccggtaaatcagttcagtggggtttcctggagaccaacttgttaaccagtttcccaggtccctctaaaccaaccgacggaccagttcagtgcaggaaaccctaaaatcgagctcaacaccacaattcaatcccaaactttccaaaaatctccagaacacctgtatataccataatgaatccaactcaagcaataaacctcaataagatgcccagaaattcaaaacacgattaaagatccaattcaagttctctattctaaattttttacaaaccaccctacaatctgttagcacaaactaaaactacacaaataaatctatcttaactttagagcataaaattaaactacttgcataaccacataacctaaatcctcaaatcaaacaccaaaacccaaacttgagctaaggaatattaaaaggaagaaggcaaaagtgctataccttgaaccaaagctctcaattccttctagaattcttagaaataagctgaaaaatcataatgaatccactaattcatattaatcatattacctttactacaccaacaataattctacaaaaagacaaaaaaactccttaccataatgatcattttgcccttgaccaataacacatataccaatgagaccaaagggtaatttggtcatttccaagtcccgtcgaattcctgatagtccaacatctaacaatgataccccgctaataaaccattgtaaacatatgaaaacagactctctaatggcccaacgtcgtattccactaatgccgaacacaaacaaaaaaaacaaaaaatcacatatataacatatttaatgcatactgaatttaaataagtctccacaaaaatgaaaatcataattaataattcaatctcataattaaaccctaattatttaataatccaacatattaaaattaggcggtctttacaattatccccccattaaaaggattttgtcctcgaaatctaacctgaaaaactctggatatttagtcctcatgtcagactctatctcccaagtggcctcttccactttactatttctccagagtactttaaccaatgctatggttttgttccgaaggactttctcctttctatccaggatttgcactggctgtttatcatatgatagatcaaattgcaactccaatgcctcataactcaaaatatacattggatcagatacatactttctcaacattgagacatgaaatacgttgtgcacagctgataatgctggaggcaaggctagccggtatgctacctgtccaatcttttcaagtatttcgaaaggtcatataaacctaggacttagcttgcctttcttcccaaagcgactgattccctaaattggtgatacaccaaggaaaatatgatctcttatctcaaatgtaatatcccagtgcttgggatctgcataacgtttttacctgctctgagaagtaagcattcgaactttgatcttatctactgcttcatttatcctttgaactaattgagggcccagatatttctgttctccagttttgtcccaataaattggggaacgacattttctaccatagagcaactcataaggagccattcctatggtactttggtaacaattattataggataattcaatcataggcaaatacttactccacaaacctccaacgttcatgacacaagctcgtaacaaatcctcaagtatttgaatagttcgttcagactacccgtccgtctgaggatgaaaggttgtactaaatttcaggctagtacccatagccttgtgtaagcttacccagaactttgacgtaaatttaggatccctatctgaaacaatatacttcagaactccatgaaggcaaataatctctttcacatacgaatcaacatattgatccaccgtatatgttactttcacatgca

SEQ ID NO: 385481 - DNA, 1375 bp, Cannabis indica
ttgaagctaatccaaaaaagattaaggccattcttaacatgccttctcccaaaaatcgtaaagatgtccaaagtgtcactaggcggatagccacacttagttggttcatcttgaaatccataaataagtgtattccatttcttaatgtgttgcgaggcaacaagaagtttgtatggaccgaggagtgtgcggtcgctttccaaaatctgaaggagcatttgacgcaagctcctattttgtcaaagctcgtggaaggggaggatttgtttttgtacttggtagttttgagtcatgccattagtgtactcatacttgtgtgagaggaagacaaggttcagtacctagtttatcacttgagcaaaaggttgttgggtgcgaaatccaagtattccatgatctggaaattgaccttttgcttgctgaccgcgtcacgaaagctgagaccatacttccaagccgacaccttaagagtacttacaaatcatcccctatgctaggtgcttcaaaaggcacagtcctctagcaatttattaaaatgggccatgaaacttagccaattcgatatccagtaccagtcgtgggtatctataaaaggacaggcccttgctgactttgtagtggagtattcaaacttaaacgccctcccggaagatccagtccctcaactgactacctggaaggtctacatagaaagagcaaccaacgacaagggagccagagtcagaaagatcctaatctctccacaggggcaccactccaaagtggtttgcgcttcgggttttgcaccttaaaaaatgaagcaatgcatgaagctatgtcagtaggtctgaaattagctaagcaggtaggagcccaataggttgatgtttgtagtgattccctattagtggtgaatcaaatctctagcgaatactagacaaagggaaaacggatggatacatacgtcttgttgtcctagaaagtttgcaaggttttaaaagttacaatgttttccaagttctaagagaactaaattcatttgcagacatgttagccaagctggcaatcagtatgtactttacgcttgatgacgttacgacgggtattatattctggaaggcagtcaaggatccccgttgctagtgagtacaaatggggccctaatactctaactgtttctctgccactagggaggatcaaagtcacttgaagctacgagtaatccaagaaggtagcaggttagtgtgactgggaaagacttggctaaatgatcctggagcctatttgacaatatcctatccagagctcaaagccactgttacctatcttttgacaccaaatcagatcttgtcccctgtattagaccatggtactgcgcatacgtgcctctgaaacc

SEQ ID NO: 385482 - DNA, 916 bp, Cannabis indica
aaatgtgctgacaaaagtaacatattttttttgtagtgggaatataataaattattattgtggaaattcaacatgcaagtgcacgtatcgttcacaagtaataactcacaagagtgagatcgatcttacaaaaattgtagttaattgctaattaattgaaattctagttctatttggcaaacgaaaattaaatagtgattgtaattaattactaacaaaaacaaacaaacaaagaggcaattaacaatgattagaaatttaagacatttaattttaattacatcaacttcctatgacaaaatacaaattagttatcttcaatttcaatagcgaattattaatttaacatatattcttattaagacatataaattctaaatcaaatgaaaaagtcctacacatttgtggtaaataacatatataattcgcgttaaataataaataaatcatatttgctacacagattataggtacttacgtccaatatcaaaatttatgtctattttactatattataatcaatactcactttttagattttgcattgaattcataaaataaataattggtgatcaaataattataagcattaaatacaaatgaaatagattcacataaaaaagttgaagggaaaactaaaattatattaaaatcataggcaagtatcaaacaatatctattaaaattttaatttggagtttagctcctgatcattgtcaacaattgattaagattaattgaaaacataaaaatagagggagaagaaaagaactcgtcgaaaataaatagtggtagtctctaaggtcgctttctatctatattgtgtaagatacgtaactacactactaacaattccttcagtcgtagagaatttggtattcccaaccactaacaacaattggatgacgagtcatcg

SEQ ID NO: 385483 - DNA, 2648 bp, Cannabis indica
aaaatatataacaaaaaattgcattactgcttagttgaaaatatatttatttgcatatacaaagaaaactgttgagtataacccgaaaaattattaatggattattttttatttaaagctaaagtgaaaagaaatttttaaattttgatggggattcaataaaaaatacatgaaaaaaatttaaattaatatcttgcatttggacaaaattggtacacaaaacttaattagataggctactttttcattaaactcaaaattacttatctcataactcacccctgctctccctcttcctctattctctatgtctctctcgctctcttcttctcacacacacgaagactaacaacccacgactgccaaccaccaacccactaacgactaccaacccaagacctatgatctccgaaccacgaccaccgcgccatgaatgtaagttttttattttattttatagtattctgtgtgatttagtgttgaaatgtatgattttgtttgtttattgatttaagaataaattgtatgattaatatctgttatctgtgagttaatggttcctctttagctacatatgctgtaaactacatggacaattatcataacgctaaaatccactcgtttcttgttgttgaaccttattcaacttcacccaatacaagacttccaactagaggaactccctggaaaccacctcacttaaatgggttgaagcctaatgttgatgttgcagtaaatacatcaacaaaagtattaggaataggagcgattgtaaggaaccaggagggccaaatgatgtcaaaacctattaaaggttgtttcaaatcagataaaatagaagcaaaagctctctttcatgcccttaattggatttctcaacttccattgtagatcattcatattgaaacagatgccctacgtgtctcaacatctataataatgcatctttaagtttatcttatttttcttttgatggtagatattcgttgtcttctatcctctttctttgaaattattatttctcatgtaaagagaaatgctaactaaactgcttatggtttagcaaaatatgcttatgggttggattgtagaaaattcaccatcaaatgattgttgattataataaaagtaaaactttataaaaagtaggttataataataataagaataatttgctgcataagtacataagtttaacttcgttaatttttggcggtaataatacataaattatatttctggaactctgtaggtacctgaccgttaaatatcaagtcatcatccacatgttattttttcattagtacatttaaattaatttttctaaaaaaataaaatttaatgacctggaccaattaggaattactacatatcaatttacttaacacttaacagtcatgtactaacaatagttccataattataacttaggtattattactgtaaaaattaaacttgcgtatttatttactattgagagttaaacttaagtatttatgtcacaaattactctaataataataattataataatatattttttctttttacaagtaacacaaactttataaaacaaaggagaaaggatatatgtgctagtccttgtaaaaaatgtgctgctgtagaaaagaagaaaaaaaaaaactttggaagttttatttattcattttgttagtgagattgaaacaaaaggtaaggacacacatatttgttgtcattttggcatatattcttgaaattttccaggctcttcttttcccttggacccaaagaaagaacaaggtacacagtactccataacaaacccacgccctggagtcaaagaaacttggtaaaaaagctaacttgtttcccaatcttctatttgatcctctatgctattttgtactattatcaagtgaaaaaaagttacccaacatacacaaataaaataattaattataaagctgactataaaaactgtttgtctaattttagtcaaagaaaacttctttttagttcacatttagatgctgtttagtcttagacttggtaacttttggtttacaaagtcattttaaggtacagagttagtgctaccaaaaaaagagttaacaggataagaaacccatgatgatgaataaatggacaaaatatccaaatgtgggaataatataaatttattcatgaggaggaaggttgaaagaaggtttggaatttgtcttgttaccattcactaatacaaccttgacacatatagacatgtattgacaaaaaatcaagcactgccaaaaaaaaaaaaaagaagaaagacaagactaggtagtaagtaagaggatggattgatatcaaaacgatttaaacctcatatgattttgtggattagttaggtaaaagccaagaacaatctatattttgatcgaacctagctcatttggttggcctgtagcctataattttctcacaagtaaagacaacaacttttctcgctacattcaaacataacaaagatcgattttttttattacataaaaatcttgtatactaaaataaaacgtaggagaagataccaattaaatggaataatatataagacacaatttttagtaaatatttatattttacgttcaaagaatgattttttacatttttacggtttcctaaaaata

SEQ ID NO: 385484 - DNA, 842 bp, Cannabis indica
gaatcaagaggcagctcacagcagcatacacaccctaacaaaatggagtatgcgagaagaaaaattgaactattatcaatatggtgcgaagccttttgttgaggagtggacttccaaaaattttttggctagaagcagtcaattggtgtattcatattttgaacagaattcccacatttgttgttcaaaatatgacattcaaagaagcctagagtggacgaagaccagtggtagatcgtttgagaatttttgggtgtattgcttatgcccacattctagacgagaagagaaggaagcttgatgacaaaggagaaaaatgcattttctcggcgttagtgatcaatcaaaagcctacaagttatacaatcctaacaccaagagaatcattattagccgcgatgtaatctttgatgaagaaagaacttgggcatggaacaagaatattgttcagcaacaaattccaacaaattttgatgctaatgaagagaaaagacagcagcagtagcctgagagacaatccaacaaccaacaaaaacaatcactcaaagtccaccagctaatgaagcacccattgaacaaaggcttcaacgagagaggaaaaggccggcatggataatggattatgaggtatctgattgtgatgattctggagaggatccactcacgcatttttgtttattttcagattgcagtcttgtagcttatgaagaagctgctaaagaatcaaagtggagaaaggcgatggatgtcgaaattgtagcaatagaaagaaacaatacttgggagttgattgagcttccaaaagggcaaaaaactattggtgttaagtgggtgtacaagac

SEQ ID NO: 385485 - DNA, 1171 bp, Cannabis indica
ataccctaaagatcacaaaaataagataaactagggttccaaaattgaccccactggtagaccgattcccaaccagaattccagttccctgaggaccaactggtcgaccagttgctacagaccagttcagtgttgggaacctcaaaaatgtccccaagacctcaaatcacacccaaacttcacaatattctccacaatacctctatatactccaacacatccaattcaagcaatagaacacaataaaaggctcaaaaattgaaaacaccattaaaggataagatttgagttcttaaactcaaattccactaagacaccaaatcaaactcccaatccagctcaaattacctccaacaacccttatataactccagaatactaaagccaaaaacctaaatatccacaacaataaaatcctcaaattcatgcataaataacctactttgagctaagaaaacccaaagagaaaaagatcaaaacttcatacctagaattcagcttcaaaccttcctgaaatcccctgaattcagctgagaaaacctacaattcttgtctggttgtgtgttgattcgaaagtgagagaaaatgggtgaaggaggaagtgttttctacgtttttctcttatttttcctatacaaatcttaatatatcatacttataaaggacaaaaatcctcaagtaaaagactacaatgccctttagcgaaagacaaaagtttaatgacttaaaaggtaatttggtcttctctaaacccccgacaatttcctgatattttcaatgtctaacaatgatgcctcactattaaaaacattctaaaccatatgaaagtgtgactctctaatggcccaacatcgcgttttactgctaccgaacacaattacagaaaaacaaaaattttacatatagcataattagaacatgttgaaattaaataaatttctacaaatattcaaattataattaataattaaatttaataattaaaccgtaattatttaataacccaatatattaaacttaggcggtcttcacaggtttagtatattatacccactactatggcctcctaactcccacacaatgtccaaaaaaaaaaaagaaatttaacctttaaataaatattgttattaactgaataagcttaatactaattgtgttggaaattatttta

SEQ ID NO: 385486 - DNA, 946 bp, Cannabis indica
tttgctacactttaagtttttcatttttctcaaacacttgcatatatcattttgcttaataatatacgtatacaactcttctttttctgtatatataaatctaaatgtatgttcttatacaactttcaacgtgaggttttttttggtgggggaggagaaaatggtttacggttattctaatccctataatttctcatgttacaactcacaactacccacttcccacgtctctcgctatctttctcttctttatattatatacatctcacactaatcatttgtttgtaaaatcattactctctatatatttaatattcttctactcttctcacttagttagtataatatactatatagctcctatggcgttaaccttttgctctaataacttcccacaaaatctcataaacacagatactgtcctttttccacaaacaaagaaacaaagatcatcatcatcatcatccacattgtccttttcatcaaacacctactctttcaccactaatcataatgtggatcctcctcaaccattattgttcctctctaacccaacaaatcaaaaccctttcttctcatcaccacccctctattcctctttccaatatgattattactacgatcccattaccaacactaatctcgattattctgaacctgccttttcatctcatcacccagaaatggaattcttcattgatcctaatcaacacattgatgatcaactactactggctcccttattgccccaacaagtagccgtacctgaaaattatcttgatcagaatcaacaactgatgatgattaataacaacaacccttatagcgagatggcggccgagatggtaatcgccggtactgatcatgtcagtgagttgaagaggaggagcagcagtagtaaggtggtgtcgccgcagagtatggcggctcgagagaggaggaggaa

SEQ ID NO: 385487 - DNA, 1001 bp, Cannabis indica
tagtttaagttttcatttctcctgagatgatattacagaaaaatgcttagtgtttaagctctactttctagagagagtaatctgaccttatgggtagttttttgaatgtaaaaaatgagataagggaactggaactctccttttataggaaaaataaattcaaaatatgaaaaaatatatatatataatttggataatttttactgtagatgatgatccaacgataaaaattaccttctaaattttatactcattttttggagctcgacaggacccgttgtggttaactcgaaggttatttttgtatctccctcggggtgaaatttgaggtcgatagcttcagaattgcgagtaaaatgggagacatgacttgatagagcattaactatctttagaagaaaagttgaatcacatcaattggatcaatattgaatgagttatggctgctttattgaaggcaattcatgaccaaacgctcaggttgacatcccagcgccctggttgacttatgacgttaacctagatgttgcggtaaggggaaaaacctccatgagatgtactttaagatgcctaagtgatattttatcatcactcaatctgtttttgtgttttgacaatgttggtcaccagttcttggagatgttgttgttctacggaaatgagagactagaaactcttcatttctgagtgagttttccatgtgaatattgagaaatcaaagttgtaaatttctcttctctgaattcatcttagttattataaataacaagatggacggtcaaattggaatccaattaggataagcaaaacccagtgtagcaggccatttgtcaatttgggcactgggccctcattcgcgagctcccgatatgtcattttgatacttccaagtttcttgaacttgtgaaagaggtctcctaccctatttttgaccattcaggattcattggctgaattagatttggcaattgaatgatcaaaatccgctcaccatgttgatt

SEQ ID NO: 385488 - DNA, 1010 bp, Cannabis indica
cttgacttaggcaaaagtatggtcgacaaggatgtcggacccctaaagaggggtgattacaacagtcaaagtcccatatcgtctggagaaatgtcaagtgtaataattctgtgactgtataagtatgagactgcatagttgaagagaacttaaatgggttgataagtacacttatatcaacaaggtacatcttgtttttggtggcccatcacttgagaactttaaaattaagcgtgttcaactttgagtgttttggaaagggtaatctcttgtgaagttttcttgaagagcgtgcgagtgagaacaaagaaaaacactcatattagtttgtaggcaaatcgtcattctaaaaagtaactacagtgacacgatatttaattgtatcaatgacattataacatttcatagtgttatttaagatgataattgtttcaaccgaaagggtttttcttgctagggatattagaaattcattatatgtcgtttcaagtgtatttctagcacatatacaatgtttttgcaacaatagtactaatctttgactaatgaaacatgtatttatgattgataatgagcttacatagttggtggatattccagcgcatgtatcttgaccattgtagttgatgactatactaataaaagaaataaaacctatcttgtaagttgttgggaggaatcataatatttgacagttccaactaaagaaagggcttctttaagtgcttgaagtagatggtctggatgttcctctatatgagcaccaccttgttgagattgcattctacttaagattctcccaacaatctgaacaaagctgtggacattgtaactcaaatctaagcatattaataggaaaatgaaagcaataagatcaaactgacctttcgtgcatagccgccataagcaacaccagcaacaactgaaggttgcatagagttaggtggtccagcctcattcatgttttcatcacttgagttatcttgaaagaaaacaagataagatagtca

SEQ ID NO: 385489 - DNA, 1543 bp, Cannabis indica
tggcgtggttactctgattgtatctttgctgacctgcacatagacattaattgattaatgatatttcttgacactcttttccctattaaggtttttccaactaggtttactcttaagattttaatgacgccattttttccaaaaaaaaaaaaagttgtatggcttgcttttataagatgtacaaaacatatacccataaacattattttcctagcaaatttgatggcagagcgatagttaaaacacttcaactggttagggcatattttgttatttaattttttatcaatggttgggctttgttctccttgacgagcaataagatttacaagatgattttctataataataaacacgcatatcctaaaagctcatactagaatattagaaaatctaattttagttaggaaagtctaacatggatgaatgttcaggggtataatttgttacatgtcaaagttcgaggagcaaaattttgtagatatcaaagtctaggagcataatatagtacataaataattactaaattagtagaatcgaatgaaattggacaaaaatccttaaatctaacaatctcagtagtttaagaagaaattttaatagctaaaaaagttcagagcataattcggtacatgtcaaaatttaagggcaaacatccaacaaagtttagtaaatttaattagttgttaaaagaggctcatattattttgatgagggctaatacacattatttcctctcttaataatatcttcgtaaaagtaatgtaaaaggtgggttttggactaagtttaaaataaataaaaaaaaaaggtatggctattgaatattagtggtgcccaacaccttctatagatggcgtttcacgattggttagcgatattcatttaaagttatttttttaagttatatgggactcgatacttaattacaccaatagttgtatgacaccaataaagatgctagacaccactagtattttttaacaattctcataaaaaaaagttacgaattaagaagaaatcataaataaaggagaatcggtagttttcatccaaaaaaccgattaaatattttcaagctcttgaacaatgaagtcaaaggtgtctatacatatattagagaatttttgtagaattcttcccaaggctctcgtaagaggtcgtttgttaggttcccagaaagagagaaaattattgagaaagaaagtagtagtttggctttataacttaaaaactgttttcaggtttaaaaaacaaaaataatttttaaaaactaataaggatcgtttagccaaattttttaaaaactgggttttaaaaaactaaaaaacataaaatatcaaaatattgtttttcaactttcaaaatattttttttgtctaatatattatattttagatttttgctcacatactcggaccctatactcggaaccagacccaaaccctgacctagaccctacgggtgttcatccgatccaatccgcacttttttggtcaaacaacatccaatccgcactaagtgcggatttcatattttggat

SEQ ID NO: 385490 - DNA, 1540 bp, Cannabis indica
agatttttgggttttggaaacaaccaaaggaaaaatctgagcgattttgtcgccacttcccactttaattaattacaaaacaatattattactgattgtggtggattttttctctactgaaaagacaaatataatttgtatttattaaagtaataaatatttgtaaattaattgataaaaataaaacacggcgtgattagttacacacgtgtctaatagtaaacattccaagtaagccaattttttttttgtaagaacggccaccaaagatctaaagccactattatctacatagttttaaacttttaaaataagaataataattaaataaaaaaataaatagatcccaaaaatcttaattctactatgttcgattctgtttcaatacaatataatatttcctctccaactctcaaacactctcaatttagctacgatcactctatcttagccaacctcattaacaattaaatatttaattaattacacgtaattacaattataaaacatcataaaaatccttaacagtacagattttttttttgtttctctacgacacacaacaaaatcgccgtatattatgggtaaagtcggctgactaaggtaagtaggagttggacactttgaccactgtagtattaaacctcggaatgagtttcttttgtcccccgaatcctgttccgttatcggaaaagccaatcacaatttgccgcgtgtacccacaattttgtgtgaaattatcgaagtaacccttagcaatcaagtagactaaatgggcaagcttcttaacacgtggcgaaatattctaaatttagaaaacgacgtccatcaaatcgaattcgctgaactcaatttcagctaacccaagactctttcgcggcagcataatatccggtaactctaacggcgcgtaaaaatcaaacccgaagttttcgggtcccaagaaaccgaaatcgtcaaacggcgtcggttcttcgtaacggagaactgaagttggtgacgacgcaactgccacagttccgtctgaagataacggcgactcgagcgacgagctctcgtcacttccagtaacggcgtcagtcgattcgctagtagccacgttaggaaagttggtaacggcgttagcccctttaagcctaaccgcggcttggtcgtaaacggtggcggcttcctccgccgtatcgaaagtccccaaccatacccgttttcttcgggtcgggtctcggatctcggccgcccaacgaccccacggtcttcggcgaacgcctctgaactttttccggcgaacggaatccgattccggcgatccaatcggtctcttcgagactctttcttgcttagtaataagtgatttagccgaaggagagagagggggccgttgttgtaaactaatctctcttacgtgcctcttgactcgccgttgtacggacacagactcgtcttcgtcgctggaagaatcggtggcatctgcgtcggtgataatgatccgaacgattttctccggcttcgggttcatgtcgggttccggtttcgggtcctg

SEQ ID NO: 385491 - DNA, 1375 bp, Cannabis indica
ttgaattatttatgtatttcctttgcagtgtatctcaggaacttagataaggattatgtttgtattttgtgtttgttttctttgggctctttggaatcaaaggaataatgtttttcaccataagcaagatagccaactttttgatgtttatgattggagtgttacttttttcttcaagtttttggatgctcagcaggttcctattcctcccactgtttccaatccggatcagacagttttccagcttattcctcttgagggggcttttcagatgttcactgatgcaaccattgatatccagaggaaaaaaatatagtgttggggctgttgtcttgaatcactctaaccaggttgtggctggtttggctatgtcgtttacaggctgtgttgatccttcggtggctgaggctaaagctatcgtccatgctctacagtgggcctcctctattctcttgcttgtggacattttaaaaacggattgcaaatctattgtagataaattgtattcttgtaatcggagttgtaatattttagatgatttagtagcttgtattaagaacttgttatctccttgcccaaacctcaaagtagttcatattagcaggaattataataccttggcgcataatgttgctaaatggggtattgggcttgatagtgagttcgtttggaatggctctttgcctttcttctagtcttgtggttttggtccttgtaattcacaagactttctttcaaaaaaaataataataaaaaaataatattattaaattttactaattaaatatagagagcagttatattattcacccgtacaattgttagatcaatagttaagttgattaaacaatttttaatcattagaatccaaaatacatcaaaccttaaccaacctttaagtacattaaactttgttcaaagtacataaaataaagcatataacgagatgcattcaaatccattaccattacatatgagatcatatttatttttgttcgggaaaagaaaaagaattataggacttttctaaccttgaaaacccataacaagtaaagtaggaaaaaaaaatgttatgcaatatgaatagtcttatgatgtgtgatgcattcaaataattagtagtagttacataatcatatattatagaatatttggggtatgaactaacactactactacaaaagagatttttttattggtttagaactgattgtattacttttttgtcggctcacattattgacggctatgttcgccccataaatttgggtgtctaagccgtgtgttctcaactgatgctataaaaaaatattgtcagtgcaaaactgatacaacaaaattgttggggtatcaacccaagtcccacattggctag

SEQ ID NO: 385492 - DNA, 2031 bp, Cannabis indica
ttttttactattttttattttttggattttcgatccccctttccacttacattctttctttatccttccctttacctctaggctctacatgacctttactataggtgtagaaaatgatgtttgtgatgtgtgcatcaagtaagctttgaagtaggaatttggtgagacaagacttaacttctacacggctgatgggacagcacaaggagtagtcgtcaattagcgtccataagaaaacagaatgtcagaaaagtataggctaaatcctaaagacatcttctctttgagagcaggttcactttttcgtatgcactgaagtagtcatctacagtgctttgtctcaggagatgtgtcaggaacactggtagctctcaaacactagatgattcgggaggcactcactctcctagaagatagagtttgaaatcagtttcaagaatccttttggaatcattgtgcactctcggacacccccatgcctttcgaatgttttttagatttcaaatgttaatattgatttgttatgtcttctatgcgagccccatagacacgtggtttactctctacttgccatgtattttagtaaaaaaaatatagacaacatttacccataagttctaatttacaattttgtaagttccaattttctgaaattaaatccctagacatgcaataaatgcagagtgttagtcggatactcgagtgctccaaacatctcctcataactgtgttactttacacccttccccaaccgttggaacattgtgtgttacttggaatttgaaggaaattgtaatgacgacatagttaaattatgagaattagtagataattaagaatttaattattaatttatgattatgtgcctcttagaagaaattaaggcttattgtcaaaaataggccttaggaaattttttttctcaattacagaaatgttatcccatttgttgcactatgacgtggcaacacgtacgagtgacacgtgtccaacattccttgtatctgggcggagatgagtatttcgaacaagtttggggtagcacacgtgcacacggaaagtctacttacacgaatagggtaaagggcaaactgcccgggcagatggcaagtttggttttttaaactattcagcaagacttctacttcagaattgatatcgtggaatccaagcacgaagaaaattcctacaatcatgggatcaaattagagggatacgataggctgtctcaatcccccatttcatgtattctaattatgtaatagatgtttcttcctattatagacattgtaagcaaaaggggaaactttccctcatgcattaagaccttataaatagtgacctagcttcatggtaaaaaggatcgaaagaattgctttagaaagagaaccaagagaaatactaagatatttcgttgtaagagctttgagagagaaaacactgtattctttattctcaagttaatacaatctaagaggagtaggctattaccgtaataaaggggcttaatctcttcaaaatttggtgtctttattacttattagtttttgctctgttttattacatttctaatcgcttcataattgacttactgtcattgattaaaagtagggtcaatattttggtgctttcattgagagcaaaaacccaagtttattctgtttccaatcttaacaggcacacaaaatggtggtgcaaacccataaaggcttggtggatcagagtgatccaacggtgacagaccctactgtacaaacccctgggaatacaagggtcccatcaggaactaattccgtgaaatcatattttttaattttttttgttattttgtgtatttgtaaaataatctcatccaatccaatccgcaaaatacggatatccgcacttgtgcggaatggattggattgaaaaatttgaaatccgcacttgtgcggattggatgttgtttaatctcaaaaagtaaccgatccaatccaatccgcacctaattatatatatattaaaaaaaataatattatatataaatattat

SEQ ID NO: 385493 - DNA, 1805 bp, Cannabis indica
atatactcaataataaataattaattgtaaagaaaaattattaattttaggcaagtagcaaacaaaaaataaagaaagtcggggtaagatgaaacttcaagggaggttagggatgaaagcctattgtttcacatgttgtcattggggtaactttatataatacattatcattgattaagtttttttttttttttgtaaaaaatacaacaataatacttttgggctatggaaacttttaaaaagtttcaccataaagataacaattgtcacaacgaatacacacaacaagcttacgtaagtttacctttatattgattttcaatttatttattttaatttattttgtatttaaattaactatttaatttatttatttgttttaggaggaaatagttgaattagctgcaagtcaaccagcggatcagcctgatgagactactgtagatcccacacagtactcccgagacttggatgttatgacgcaagtactcggggatcgatctcgacatctaagaggctttggccatctctcgagactgaaggcagttggggccaaaagagcacctgccatgaattcttctgccccactgactgttacaatggaacactacgaggccttacaaaaaaagtggaggaagcagagcagacaacatagtatacgaggcagcaatatgaaacacaacatctctacctcagaagattccaagatcagtttgcgtatctttctcgggctgtgtcgggtttcaacttgcctccgatggatcttccacccttcctcactgctcctggtgctgaatcgttatcgcatcgtcttgagactcaaaggaacaacgatgatgacattactcgtctttagaacattacatattttatatcataattagaactttactttttttccgaacatcttataatgttttatttatttacaatacttacgaattttagtacaaaactttcgttatattagttcgattggaaaaatttctaatttttaatataactaatgtttatatttttttaagtatgttactataaaatataattttatatttacaattgattaaatcataattattataattaatttattaattttaaaaaaaaattattttaccggcgtagtaaagctcgaccttaaaaggttcgtgccttttcctcacataggcacgaaatgttttaccggcgcaataagtgaccggtaaaacttttcgcgccaatgtaggaaaaaggtgcgaaccctttaccgatgcagtaatgcgccagcaaaaaggtgtcaaatctggttcaaagctttgctggcgcataattgtattggcaaaagaagtcagggaatcttggtcggtaaaagagtttttgccagcgcataggtgaaatgcgtcggcaaagctttgccagtacaattatgcgccagcaaagctttgccggcacatttaatttacttttgctggtgcaaaaagtcaactgaaaaagtccaagttcttgtagtgtctttgttgtcctcccaagaaaatggagaacttcatgatcaatccagtccattatttttccagaatgtcctaaaattaccactaatatttccaattctaacattaccatagcaagtgtgataaatgttggtgccattttttaatccgaatctattgttaataaaggtgctaaagtggtaatagattgaggacgtaaactcagataaagttatttaggtggagctaataaagcaagttacgattcaagctatggatacatttgttggaaatattttaccaggatctagatttactaacaagtatgttttattaaca

SEQ ID NO: 385494 - DNA, 765 bp, Cannabis indica
atatatatatatatatatctcgatataggaagtgaattatcaaattttcttgattttttttcttcaaaaagaactagagataattcaccttacaaaaatttgatatttggattaagacacaaatcttacaatagcaagtaacttttaacatgttacattttcgtttacaattcaagcctaatgaatttttttattggtagtttttttctaacctcacaaaattataagtaaattttattattaaaaaaattaaattaatttttaaaattactgctaatatttttttacattatattacattaatttaaataattattttaattttattttgatatattttttaaaaaatcatgtataattatatctatttttgtcataatattacaaatatattttatttttattttattggtaactttcttaggaaaatttacataaagaatacaaaaattcaaaaatattagccctatacttacaatgctactccattatactaccttcacatactatctattttccttccttttctattttttttttttcagtttcattttatttttcattgtagctttctctttaaaaacttcttctagagtcaaaactatttttacccaaaaaaaaactaatttcaactatcttcctcaactgccttcctccatcacctgtccacatttttccaatttttttcttcttttttctattatataaatggtcattacttggtcttcatcttccccatcgccattggtgaaaaaacctttaaaa

SEQ ID NO: 385495 - DNA, 587 bp, Cannabis indica
ctaaagatacgtatataaatattttaaataaacgggtgctgaagaaatgacttaattttattaattttatgtaaaatttgacacctttatttctgaaagtgtagagactgagaattgtcggcagcctagattcttcaatgacaagacgaatatgttcttatttgcagaggtaaaaaggtcggaactttaggctacacgtgctagtgcatctatagtcttttttttttatttttaaatcattattatcgtaatataaaaatagctaattatttggttcttatgtttgcgttttagtgattagatacttataataaatattggattagaattaattttatttgttatctcaaattttatttggatcaccttgtatgtttctttgggtgacacgtatcatcatattaagcctaagcggagaaaagagtcttacggagtgtctgcccaagacatgtactaggttggatgtaataatagcttttattttttctgtgtggaattattactgtgaggctcaaatttaattaacgaaaatctgcgttcacagtttagtgttttcattaagagcctctgtgaaaaagctcaaaaaa

SEQ ID NO: 385496 - DNA, 1475 bp, Cannabis indica
attatataaatatatagataggggtaccatttttttttaagaaatgttatgtccaccatagttggactagaaaattttctaaattatttttctagtccagtagaaatagactagaaaactttctaaaacatttttctagtccatcataattggacttgaaaatagaccaattttttgaaaaacaaaaaatatatatcatgtccactacttgtttgctagtccaacattgttggacatgatgaaatttttttcatgtccaacaatgttagactagaaaaatccctaaaatatttttaatgtccaacattgtttttgttggacatgaaaaagagacataaaaagggttttttgtagtagtgactacatagcctcccctcaaacgatcttccatcttgcaccgccgctaccaccaaaaggaacacgtcgtttgaccttctttatcaggtaagactttcgacacaaggcaccaaacaagatctctaaccatcaactctctattaactagtgtactttcctccaatgcgttggaacacataccttacatggagccccaccgctacctcgagagtttcttgctcattattaggtcaattctagatagaacagagaacatcgcctaattgagcacatctacagacattataagagtacactgaggcacatcaccttaataggattcattcacatggctaatgttgggatctggctctgataccaatttattaaggattatcgaacaccaaccatcaggtatgatattgtctgttttaggcctaagccctcacgattttattcttgggcatctttccaaaaagtctcacaccaattgagatttctccttatatactcatgatccttttcatttctaatcaatatatttgtttgcattcccaacatgtacatatattaaaattataatcataataatataatgaaaaaatcatgtaccaaagaaaattttggaggattatgaagccattgatgctattaggaagcacaaccattaatgtaattaggaaacttttatttcatgcacagttatatagttttaagtggtattaataatcacattttagaattgagagttatgaccaaacatatattaatatccttgccaaaaccataataatagggaaaagaaattattcaccatatacatataacaataaaacaaaatttgtacataatttatatataaatctacacatatttatacaataaaattctcataaattaatttacttatacatgttacacaaagcaaatttgtacataaaataagaaggcttgcataatttattaatggtaatttgtgataaaaagtgttatacatttctacacttttcttatctagaaaattatagtattaactacagaaaactaagaaaattagagaaaactagaattacctagaaactatatttgtaagttaagaaacttagaaaattctagaatatcttagaaagttaaattgt

SEQ ID NO: 385497 - DNA, 1757 bp, Cannabis indica
aaaaaaaaaaaaaaatcacaatactggataaatctgtcaacaaccctaaattagtaatgtatagaaaatatttttttcggtcattacaaaaaagatttttagtgatggttgataactaaataaaaccaaacctttaacgagtaaaagcatatatagaaaatgtttacttcacttttttcgtttcttggctttaatcacaaattcatgggatacctaaattacataaccacttttctaattcaattatttcctgcatttaatacattggtagacaagaaagcaacaagtgacccataaaccctatcctaatccggtcacgtttttcctccataactggttacaattatttaatgttagacttgaaattcaattaagtagaaacaaatgcaaattcagatttttacgatttttttttttttttttggtgagaagcaaactttattcaaaatccaaaactaagcaaaagtagtaactgcaaaggggccacttctctcaaacaagcaagagacacaaacttctcctctcgaacccaaccaaccggcaaggaggtcagccacaagtttcaaagacctaggaaaagccaccactctcacatcaaggaattcaaaccttaaatctcaatattaattaaagtaacatagtgacaatggaaaagagaaatgagtagccaaatccaatccagacattgtaattaagtgttggaattaatgtgaaccagaaaggatactaaacatcaccatatctctataccttcctttgagcaacatatacttcctaagaatcccttctcttaaaaacccaactttctcaagaaccctttgagagcctatattttccacatctaccaaagcctcaagtctcaccaaatgtggccattctttgaatattatctcagaaaccattttcacagcctcagttgcaattcctttaccccaatatttggtcccaagaacataaccaagctctcctctgcatttatcattgcccgaattcgcggtcaccgaaatggcacctattggggtgtcgtttatgcagattgccctgaaccaagggtgagggattaccttatccttgatgaaatttatgccatcctctttgctggtgtaaggttcccaagtgcaaaaacgagccacttctttatctgtggcccataccatgaaagcatctatgtcagaaacattcaatggcctgaggttgatggagattttcgacaatccattgtcaccttctgtgaaacaagttccatgatcttgttggctaggactttcctccatgtttattggatttatataataaactgcaataagtagtggcaatgaaagtttaagctttgttgagaggaaaattttaacaatggagatgatagatcaaggaagggttcctttgaatttatatgcttaggcatccaaataatggtccgaagaaattgcttggaaataaaggttgaaaattagattgagacaaaattgtcttttggacatgtcacttttaagtgaacttggagtaatgggcaagtatattatgtatgtaaatataatatatagataagatatgtgttgtcaatattgtacaattgttgtaagcccccttggttgaccaaataattgaaatgaaaatgttaaaagcgttggtctttggcatggagaccaaaagcatgattacatcctttcacaatgcagagccgtctcaaggtgttgagagggtgaaatttaaaacagggcttttttttttataaaaattaaaataaatattttttt

SEQ ID NO: 385498 - DNA, 1735 bp, Cannabis indica
agggtttttggtacaacactaaattaatacttgcatgattcgacataaaaaaaaatatgacggggccgtgtttgagaaaatagaccatgtgaaattatggattcctaaatatcctaattagaatatataaattgtaagacacataaatattaacatgatttggtctggtagggtaatatttgtaggaatatgattttgtcccgtgatgtactttcactgaatgcatttcgtgatgtacggcagccgttagatgggggagttatttaatctgagggctagggttgatttatgggtaattagggttaaaaaatgataacgtactctgagattcatctaatgtaccctaagacctatctaatgtaccacggaatacattctgtaaaagtacatcacgggacaaaatcgtgtcctaatatttttaatgcagaaaatgtcatatttagaatgtcattttttttatatttttatttctcattgtaatcgagctaataatattttgcttattatttaattaaattagcattttttagaaacatctcaatttttgtaactgatcttccgcataatttactctagatgatttatatttgtattgatcatttgatcatcttggtgtgactttcaatagaattattcctttttttaaaaaaagatatagcagttgaatttatttatttatttattatttttacatttcaaaatagtttttttttttttacatttttacggaattttatataaaaactcctattgcaactagtgctgcaacttactttgtaacaaaaaattgtatagaaattcctattacaactagcgttacaattactttaaaaattcaaattgtaaatttaaaagaaaaaaaagttaaaaaagtaatatacgaggtaattgaaaaaaataagaaaataaagggaagaaattgacatacaatgttagtattcttctattacattactacatacaatgttgccggcttttaggtttggctttataattttctatagtcaatagtccactatataaatatttatatagacaccaaaaagaaattttccaaaataaggtatcaattcatcaatcaaagtcaataataaatcttcttgtaaataataaaaagttgaagaaaataaagaaattaattgtatcaagactatttattacttgtatattaatcactaatgaatgaaaatgaaatccctttatgaatatttctcagactcaacaatggtcaatggcctctgcttaattgatttcatttactatgaatgtggtcatacccagctactactctattctccaaatctgtaacagaaaaaaaaaatatttactttgattttttctattaaatttataatattttatgtattttttccaaagagaaggtgttgggaatatgtatttttcatctaatcaattttttttaatgaatatttcatatttcgattcaatctaattatttaataatttattaaaatgtaaattgtcatttattttattatcattaaagttaaataaatattgatataaaatatcttttttaaataaatttgcttatgaattttcttattagttggtgatatacctactccaatctattttgttgttgtaatgaattctattcatcaatgataaaaggttttctcattaaaaaaacagcaacaaaaattgaacaaatgtaatttatgtatccaaattgcaacaacacaccaaaatacaaaaaagaaaaaataacaaa

SEQ ID NO: 385499 - DNA, 993 bp, Cannabis indica
aaggaaaacaaaaggaaaagggtatgaaagaaaagagtgaataataatagcttttgggtggttcttcgtgcatctttgactaagttacaatgtgattgatttttcttttgattttttaggtatatctgataactcggtagtatgactctctagatagggtttgtggggctttgtatattgtatggaacattgaatcaaatatatatgttattattattattattactatatagtttatggacttattcccaattaaaacagttttagctaccttttctctaaagcaaatttgtgatcaaaaccatttattaaacgtttcttccttttttttttcaaaatttgactttgctcgatcttgcttcgaggaaggctcgattccttccaacaacgtaactgaatagacaataatgatatataaattttggaactttgaccgtgctactaattatcatgtcatcacgtagatttcaagccatttatttatatacaatattaacgcaagtagcctccggaagtaataataccttgttttgattcatgttgttttatatatacgactttattatattgggtatggcattaagaaatatattggtggaaaaaaacaaccatatatatgatgatatgattgtgctagctagcaaggttaattacgtacgttgttgtaaattgtaatttcgaaatactttgttaataattatgttagctatcaaatcccatgtatgacgcaatgcatagttatatatagaatttaaaatattagtgtattagtgctggtgttattaaactaaattgtttattctattaccatgtctatctttaacttcacaattacttaaacatccataactaaaatagttagttgtacatttatcataatctttttattttcatgttatctaatatttcacctaaatatggttttaagggaactttaaattactaaacctctatttaagaatagtctattcaagaataacctctaatttgtta

SEQ ID NO: 385500 - DNA, 1004 bp, Cannabis indica
atgataacaaaatcccaaattcttattatgaggttaagaaaatattgagtggtcttggtttagagtgcgaaacaatagatgtatgtaaggatgattgttgtttgtactggaaaaacaataaagatgctacaaattgtcctatatgtggtcatgaaagatatgagtaccaaggaactaaaggaaaaaaaataccacataaaaagatgcattattttccaataactccccgtttacaacgactttttatgtcaagacacaccgcagcagatatgaggtggcacaaagaaaaacgtgtggatactgaaggtgtacttagacatccggcagatgcagaggcttggaaagatttcgataagcaatatcctgattttgccaaagagcctcgaaacattaggttgggatttgcaacagatgggtttaatccgtttggtgatttatcaaactcatacagcatgtggccagtaatactaatgccatataatatgccaccatggatatgcatgaaacgagaatctttaatgatggcagtacttattcctggacgtcgtgctccaggtaaggacatagatgtctatttacaacccttaattgaagaactaaaagaattatgggagaaaggagtaagaacttttgatgttgttgataaaacatattttacaatgcgtgctgctgtgttatggacaattaatgatttccctgcatatggtactgtgtccggctatagcactcaagggtataaggcatgtccagtttgtgaggatgacacatcttcatttcgagttaggggtaagatctcttacatgggacatcgtcgatatttgtgtgctgaacatcagtggcgcaatgataaggaatacgatggtacaattgaaacacgaaatccccctcaagagttaacaagtgatgaaattttaactaaattagatggtatgtggaaatgtaggccgggtaaaaatgttgatattgtaaaagatgatcagaatcagatgaagaatgcaggctat

SEQ ID NO: 385501 - DNA, 1029 bp, Cannabis indica
tatttaagatattttataaaattgtaaaacttttagagaaatttaacacaacgaaaatatgatttaaataatcaattgcgcatgactcttttattttataggtatataaaatagacagtttaaacactatttgttatattgtaaattattttaaatttcttaaataattataatgtataaaattataaaaaaaaatagactaatttttttttctaaatatcaaaataaataaggagtgcatcgatatatcttttttagaaaaaaaagtctcaaccaccaaacactaagagtaacaaactgacactttaccaagatggggatgaaaatttattcaaggatagcatctgctaattctgaatacaactagaattttctaactaccaaataacactactacttctcgttaaaacaagtttggccaaagtataaataacaccattacaagacctaatacaatgaataaaactaacaacttagagcctattaaagagattaatgatatcatctaaaacaagacctaaagaaactatgacaaaggtataatttttaattttaaacacaatagtcaaacaaccaaactcaaaaatgatgttgttaattgtcatatccaaaagagaggtattgaatcaaagtattgtagatagccaatatttctgccacttcaggaataaaacaaccatctaaataccaacttgtcgaagctccagtaactcccaattcatcttgaatcaccatacctacttagttaactttgaaaaagccaagagggagaggagcccatttagtggccatcttctaaactacactcgacctccccgtcaaactgccatgaggaacaacaacctcagttgtgagggagaattaaaataaatattttaatcctaaataatttataaaattaattaataaatttaaaactaagagtgcgtttgttaatattttgttaataagttttttgtttttaaaattagaaaagtgaaaatcttttttaaaattatgttctataaaattgtttttatttttctattt

SEQ ID NO: 385502 - DNA, 1926 bp, Cannabis indica
aggatataaaaagtaattttaagaaaataaatattaattagaacttatctcatcaaaatccttaaatatttgaataactaaattagtgaagtctttaaatgtttgaataactaaattagtgaagtagagatacatcaataaaataattatataaaattcaattaacactattttaatgataatattaaattaaaatgtgactttttgtttcaaattatgaaattaatgaagaaaaaatttattttgatatcatatctttctaactagatatattacagttactttacgctcagaaccatataaaagtgaagggacagttgtcctaaccctagtttcatttggagtagcatatatgctgctaaggacacggttaagttgggactaaggaaaggaatagggtctggtgtaactgtgacattacttctgatccttggttaccggtgctggacagagctactccaattcttattgttcctgggcttgataacttcacggtcaatagcttgtttcaaatgaatagccaaaactgggatgctgaggtggtctgagacctcttttcacctgctgatgctgcaatcattttggggattccaattaaccaatcggctgagggtgactcttggtactggtttgatgaaaaagatggtatttattttgtccgaagtgcatataaaatgacacaagaacacaagacctctcctattacttcagatgttcatgtattttggaagaagttatggtctctcaaggtgcctcccaaggctaaagatttgatttggagggcggattctaactgtttaccaactaaggtcaacctctgtataaaaaaggtgttgtttgaaaacacctgccctatgtgtgcagtctatgccgaaactgaattgcatctcctggtgacttgccaatttgctggatcctgctgggaggcagctgctgttgcaaatgctagcagaaataactcttccttgctgcattggttggatttcaacgctaattatatggacagtgagaagctaggccgacttgtgatgttgtgttgggctctatggtcagcaaggaatgatctaatttggaaggatcgtgcttgaagtattagtgatgtagttgcatttgcgttttcaagtcttgatcaatatgtaaaagcttaaggtaaaggtaaaatccctttgctgtcgcctcttaaagatggtgatggttcggagctttggaaaaaaccgctagcaggcattaagctacacgtagatgcggctatcttcgtgtggtgaggaattctaatggggagttgatctcggcgtttgctggtgtgaaaattggcagagtctcccttgaacttgctgaagccatgggcattagagaggccctcagctggcttaaagatcacgaatacactcgggctgaggttgagacggatagcttggtttgtgttgaagctattcggagcacaacaagttttacttcaggtttcgagttaactgtggaggattgtaagaccattcttaaaagtttgattaatgtctctatattttttgtcaagcgttctgcgcgaaccgtggcgcgtattttgttgctcggcactctatgactttcgctgaatgtatgtttcctattaatagtgttcccttaaagttgttgtctatccttttgagcgatagctcttcttaataaagaacaccttttcaaaaaaaaaaaacgtatatttttaattaaaaatgataattatgaatatattacaagattcggtataatagttaagtcaatttacacatagactacatagtagagctcatgccctcaaatcccaataaatgcaagtttatatagtaccaaataagtgttaggttatttttagtattaattttagattaagtttagtatatttttaattgagttttaatcgtgtttggagcatttttacgcttgttatct

SEQ ID NO: 385503 - DNA, 1693 bp, Cannabis indica
caattggaatctatacacgttttttttttcttctgtcatcatctcactacctattttatttttatcgtaagaggaacactactgttaatcttctaatacagtttcttagtcaatcttcgtgtctgaaaatacaagtcagaatatttttttcacgacagtgttcgttataattacaacatcattcatgtaaatttttgaatagttttttgaatactcgtggtagacttgaatattaagaactctgttttcagtattgaaaattattcagaatttttcaaaaatttatagagatgatatcgtaactatatcgagtatcgctataaaaaaatattttagcatgtgatttcggatacagaagttaactaagaagttgtaattagcacttcttgatatgttaaccaaaatccatttctatctcttttatataatattttatgatatgaaaaagggtaactaattgagtctatatatagctttatatatttgagagaaaagaaagaaaaagagtaacctactatgtaatgcaaatttgaataatgtagttgttgtaaccctcctcaagaaaagaatgatacaattgaaagatgtgctagctatgcctatgaatataaaagtgatcactttcacttgcattgtttgtttcatgaccctttgggctaatttgagattcaagtaacaatacaatgtgtgtgacaatattataaaagtgtttattttcatggctttaaagtaagtactatgtgttatgagctctaatttagtatgtaaaatcatcttaatggaacactataagaatattgtattactattttttttagtacactttgataaaatgatactctagtggtaataatgtataatgtgtgtcaaaattgacatgttaaaatttatattaaatttgacacaaaatataatatagactaaatttgtaccactataaatatcacattctttatttactattttcccactaataatgcattttatagcttttttatttaataatttataaacttttttttatgtatatcttaatagaaagtaaatgtttttgttatttgtgtgagtctcatttttaagtttattttgaggataatctcaatttttaaaaattattcagtttgagatgtccttaatcttaatccctcttaactaaaatctatcaagtaaaactcttacatgaccctaatgattttaataattggaatggactttttgctcacattattcatttcatctctttttcttttggtttgtagtttttaaaagtgagtcaaggtccccactaaagaggtcacaatagaatcaacaaccttttttgacttcataattcaaaatccctttccaaaaatgatcaaatattaggaccccaagtgtaaagttgtgagttttcatttatttatttggtgcttttaattgttaataatatgttatatgcaacaaaacaagggtgtgtgatgttgtaaggtaatgaattggacaaaaaccatgaaataatgggaatatgatgggatgtgacatgactaacactatgtttggtggtgaagaaaataaaattagagagaaagaaaatatggaagaaattaacagaaaaaaaaaattgtagaattattaggctagggtttttgtttggcatatactgtattgtattctctaaacttttcagaatttctcttaaactattaagattgtt

SEQ ID NO: 385504 - DNA, 1489 bp, Cannabis indica
aatgaaattcttactgttacgagtgatttgcttgaaattgttatggttggattgagatgatgttacagaaggcatattagagttatttagaagaaaaaaaaaagtgtaacagagagtagagtgaagaaaaaatatctgagatcgagtggttatgtttttgtttttaaaaaatttaaatgtctgtttaaaaaatatatatatatattaaaatatgatttatttcctattaataaattgttttttggtttttttgttgaaacagaatcttaatctcaatcattatattgttttcaatttaatcttcaattaatattacaacctaatatatattgtattgatatcttatttcgtcccacatgtaaaaaatatcaatggaaagtagttgtgtttctgtattttaaaatttgatgtgggtttaaaaaaaattaatataaaaaacaaaaattaatatgttaaatttaattttatttttactttttaatggttacatttttattgtaaccattacattttactattaaatggttttgattaaatagtcaccctttcttttactagaattattagtggtacaattcctggaaggtctggtgaatcttgccgtctacgatggtgtaattagctctctcctgaggttaaacaccgtccgtttaccgctatggaggatcagatcataatcgacgcccattcaaaacacggtaacaagtgggccaccattgctagacttctcgaaggtcgtacgaacaacgctggaactcgactttgaagagaaagtgttcgtcgtcggaaaacgatgacggcgacgatgatgaaacatcgaatccgtctaggaaaaggtttgtcggtggcgccggtggcgccggcgatcgtccggtgtcggtacagggaaactcttgtagctcaggcggtagcgaatctagattagatgatgcttgtgatgtaatttcgaacgggccaaacttttttctggtttattctcaacagctcttgaatcgagactcatcatgacttgattttacactactacttttcgtagtaaagattactggagtattaattattgaatttccatcaagacgataaccaattccagtaaaagccctaaagtaggaattatcctttttcatcttgttcttttttagatgattaatacaaataatttgacgacgattcttgatgatcatgtcagcttcttcattaacttcctttttctcaatgttatcctttctattagtcttcatatcaaaatttgaattgtttgattgctttctcttcgtcatgtaatttttttttaataaaactaaaaataaatataactatatatgtttacctgatatatataaatatataattatactagcaaaaagctacgtgcaaggcacgtatattaaattttatgctagtttttttctatgttagttgaaagtgatacaattaaaaattaaagaaaaaatattattagttattaggtgagattattattatgtgt

SEQ ID NO: 385505 - DNA, 729 bp, Cannabis indica
tttgactgtgtgggtggctgtcaaaaggctccccttctcaaatcgtctcattagcgaagttgctgcctatttacttgcagtggagactgcaatagccaagagctacaattttgtggtggtgaaaagcgatccagaggttgtcattaatgctcttaaaggtcgttcttcatgttgggagttcgataactatatcagtaattgtcttagacttatttttattgtgttgtaattttttaaagtttcttgtttgtgtaactttaaagcttataatgtggctagctgaacttttactttaaacttaactagtatgatttggatatcgtcaataccaattaacaatttatgtatcaccgcgagatctaattttctctatctataaaatggtttattttatttttttaaataaaaataaagagagatccttaggtacattacattaatagtaggagtgttcatcaaactgcctgcatcgcaaaaaaatacggtttgaaattttttgctgtgcggtagcggtttgaatttttcctaaactgcacagtgcagtgaggtttgcagttttgaattgttaatatgcggttcaaaccgtaccgcaccgcatattataaaaatatcaatttttatatttatttaggtcaaacatgtgaaggcccaacctaagcccactaattattgtattattaaaacttgaaactttttttttatatttattttcaagccttatggtacttt

SEQ ID NO: 385506 - DNA, 761 bp, Cannabis indica
cttgaatatatgtgccacaatttttttcgggctttaattttaatgaacatattatatatgtgtttcgatcgttacactatatgatataagaattaatttctgtttctttatgtaagtattatattcacatatacattgaatttgttgtggtagaatgggatttctagtttttttttttggttcagcttttgaaaagcccggaattctttgttttatttgaatgatatatatgtatatatattatttgttttttaggcttcagtagtatattatatattgatccaatcgatatatggcttctagtgtatatgtgttgatcactgtatatatggcttcttactgtcgcatatataatatatgtttataagatttaaaggttttttgctgtataatatatgtgtgatgctatatatatatatgattcgtcctttacgagtcttttggtatatatctattctatataaagtgtgcctatataactgaatttcttggtttatgagaaattcatgggtgactttttatttatatttaataaaataataaaatattatttatatataataaaataaaaataaaacaaatatcattaatatttgaactgatatttgatactaattattcgagagttacaaccctccatcacaaaaagtacctgccgaggcattaatatagctattaatattgcccaataggtactaaccacacaaaaaatcggttttggatttgtaatttgtttctgatttaacttatatatatatata

SEQ ID NO: 385507 - DNA, 1464 bp, Cannabis indica
atcccgaaacggaaaagtaaatctccacaagaaaagtcaagcatttgttgagcaatgtgattctcgagttggagcagtagacactgctccagaaaaatacagggcaattgccactcataacatgtattccaagaggatagaactattacagggtaatgtggaccctaagaaaaataatgagaagaacatgccatctttaaatttgaaaaggaagagattagagttaactgagcatcagaaggaggtaagaagggcacaacaaggcagggaaagagattgtggaggacatgggctcggtgggattcgtacttacacaaaccttgatttttcacaagggaatgaggattcacttgatagccaagaaatctggaattcagaatccatattggacatgccaaaagatgcctagtcacgttcatgtttaaattaatttggcataatacttgttctttgataagctcgttatcatgtctttttgctgccatttctaagttctgaccacttaagctctaaagaaacttattcctatgtattctctccctgtatatattgtgtaaatgggtataaccatattatttaattagcaaataacatgtagatgtggtaagaattatttatataaaattcaatatttcgagtttgacgatttgttcattacaacaatttcttcttcttctctttttaattttttttttttagaagaaaacccccaaaacaccaccctatattattcactacaacaatttcaattacaacaaatgatattgaatttggtgaggaaagcggacaaaataaaaagacatttaaattttaaagtgagattgaaaggcaaaataatcatcaatcaaatattaatattatatgaaaaattcatgattatatgtattttttctgaaaagtaataataataataataataacatatttaatatagtgtatgatgttcgccaccaattcggccaaccacgaaaccgtcgagatgttataaattagtaaagagcaataaaattaagtgcatacaaaaattttataattgtttagctccatatgtttggtaatatactactccatttgatatttcattcagtattgtttagtgcatgggatgaggccaactctctcaagcacaagtcaaataacaaattgatagtctttatacaaagttgtgagattagaaaagggaaacttgatatttcatacttgtatttatgtcaaaaatgaaaggaaaattataacaaatgtccttaaattatagcattatataattaaatgttctcattttaaaaatggtagagaaataacttctttacactatttattatttatattgtctttttttaggtaaattgcggcataaatacctaatgtttcagattttatacacttaaatacctaatgtttatttttggagacaaaaatacctaatataacaattctataccacttccgttaacttatcataaa

SEQ ID NO: 385508 - DNA, 3051 bp, Cannabis indica
tcttcatcacaatttcaaagagtccaattaagaaaattattacacaataaatatgggaatcaaagctatcattatatagctgttatcggaggtaacaacacttatttatgtgattaaaatgaggtacaaaacattaaaaattaaaaagggctgaaaaggagttacaaaactccaaaacttagtgtgctgacaactagcttgacgacaagtcgcctagagcaaccgtttcaaaaaaaacccttactcgacatgggaacggatgggctaagtccgagcttcattcaccaacgtctataacctcatttacacttatttaagggttggtaacacccatgaagtgttggtaatttgtattttgatagaaattaattttcaatcaagagagcacattgttagaaacataataggcttgataaatctagaaagctattttaatttgtctcttcctctaaattttgtggtaagggaaaataaatttttggacaaaagtgtaagattttgttcaagtttggtgatttttctacttattacttgtggttgtggtgttaatattgctctcacatctcctatatatatgttatttacattatagtatcttatttgtaacttattactttgagttgtaattctttattttacattttatatgtatgttttgtttagagttgtaatattatttaatttcttattttgtcattgtaatattttactttgagttgtaattatgttagtttgttattctattgaagcacaactttttccaacaatcaaaagcttattcttttatttggtgatttacaattttatatagtagtaatatatataataatacatatatgcgaaagattttattaacttggtatactgctagtctcatctagtgacttgttagaagttgcaagtctgtcaagttagctcccgagttagttatttcagtttactaacttgggtactcctcattttgagttgtttatataagactttgagtattacttctttaggtgaagttttagagagaaatttagatgataattacttttgtaatgagtgaggagggttgttaaaagagaatgtgtgtgtttgataacatctctctcaagtgaattgatttgtaaaatgcaagacaccattagtgaggtgcaagataccattgttgatgagctcaactcttctatgctcctttgtattcctccattattaaagatcgaataatgtatggcaaaatggcagatcctcctagggattaatcaccacaaaaagggtgatgaacctcattaaaatttatctctatttcatttagtttattccgcatttattttctagtttatgtcattgattgattctgtcattctagttctttagttcttgttctatttgattcttgataggtgttaattcaccacaaatgatatcagagctatatggttagatcaatgattcaagaatcaggttttggagtttcaagaactcatcaaaatttaagaactcatcaagaatagctactgccaaatatgaaatagacaagttcacaggtctgaatgactttgggttatggaggattaagatgaaagcgctccttgtgcaccaaggacttgcggatgcaatttttgctactgattctaaggaagaagaagatgtgaagatggtttctcaagagatcaaggtgaaaacacatagtgctattcttttgagtttaggagatgaagtccttagagaagttcttgatgaagaatcttccctagaattatggaacaagcttagatttatttacatgaagaatttttgcaataagctctatttgaagaaacgtctttatagatgaagatggatgaaactaaagagctacgaaggcatctaaatatttcaacaagttaattctagacgtgaatagtattgaggctagaattaaagaagaagatcaagcaatacttctacctaggtcactccataaggtatatgaatactttgttaatgttatactttatgggaaagatacactaactatgtctgaggttaaatcagccttgaatttgaaggaaattcaaaagaaagttgatgaaagacctgaataaagtggtgatgtctatttgtttgtggaagaacagagaagaaagaattcaaggaacccaagaatgggtacaagccaatgtcaaataaaaacaccaactggaaagaagtgtattattacaagaaagatggatacttctaagatgaatatctggcattgaaggctaagttgaagagagacaacaatcaagggaagaacaagaacaagaataaaggagaagatgatattgcagacagatatgaatttgcagggtttctagttgcatctagttcagaatcaggtggacaatggatcttggactagggtgctcatttcaatgacactaaacaagaactttttcaatagctacattgaaaaaccaagtggaacaatactcctgggagacaataaggcatgtaaaattcaaggaattggctccattgatttgatgctacatgatggtgtcactcaaactatcaaacaagttaggtatgttctcaatttgaagagaaatcttttatcaattagcatgttttataatcatgggtattcagttagaattgacaatggtacactcaagatttcaaaggggtatttgatctttgttaaggggaagttgagacatgggttgtactatatgttgggctttatgccctaaataaaactctatttcaatgtaatctctatcatttaaatatcaataaagagacacaagtattttcatcacttatttaatgtgtcatttggtttatgttatcatttatatgtttatttgatttataaattcatccaaacccttatcacatttatgttcttgattattgtgtcgtcaacacagtggaaagtaatcaagattgtgtgattacatatatattcctagatttatcagtacactgggtttaactgatatgataatctacaacatagtttacttgcaccttggataagtgctatgtcctttctagggcattggttaaagtaaagcttgggtttgatgtatggag

SEQ ID NO: 385509 - DNA, 976 bp, Cannabis indica
ttataaaaaattactaattaattctaaagtgtaattttatagtagtgttttatagcaatgctcttataattaattaacatgaacattttgattggacaccccagtacctcttataggtggtattctacaattagttaacgatattcttatgaaactcaataattaattacacgaatagcagtatgacatcgaaaaaaatattaaacattactatcttttagcaattctcaattaacattactaatgaagtccttgtatatacgtatagtataattagtacgtgtgcatgtgtacattgaactatatataatattttagtttagtatagttaactatagtttatatgtattaatttaattacaaacaatagaacatatgtatatatatatatatatatttagaattgaatattgggaaatgatcaaaaaaagaatgatgaaacttttgttcagtttggatgatgatatgtgttggtacatagacaacaaaaaaaaggttaataattaataattccaaggaaagagaataaggaacatgaacccttttcctattttatttattttagatagaaaggaacatatatgaacttgaaaactaacatgaaaaatattatcatgaatgatcacactatatacatatataaatatatatatatatatatattcattgaatggttattatggtttggcattaatgtttgggtggcgtgctcttactatacaaggactgtaaacatcatccttcataatttctgatctagtacaactacactagtcattttttttaaatcactacccataagtataatatatttaaaaaaaaaaatgattattttattaaaaattcataaaaatgattttatcattatgatcttctaaattacttaaattattttttttgaatcttttcatgacaactttcatgagaatgaaatagttttttttttccttttattttcgatcaaaataatggaaac

SEQ ID NO: 385510 - DNA, 573 bp, Cannabis indica
agctgaagttaaacacggatgccgctatgaacactatgattcgcaagtctggttttggggctgttttacgagattcttaaggacatgttatcactgcaatgtcaaaaccttatcctggctactttaaaccagaagtgatgaaagcactagcttttatgtttagtatgcaatggcttaaagatatgaacatacgtattcactacaatgagaaagattctcttttaatggtcaaaggattgcaaacttcaaagtttagtgtttctgattttcatagtttgttaaaagatatttctattctcatgtccaatttcccaggtgttatatctcacatgcttttagatctggaaatattgttgcttattctttagcaaaatatgctctctcggtggacactgaacgtatatggatggagaaattgccacctcctctaatgactattgtattataattctttttaatatacagtagaacctctatttaaaaatactctattcaagaataacctctaatttgttatagaaaaatcaagtcccgatttgggcaagttataaataagaataacctctaaattgt

SEQ ID NO: 385511 - DNA, 925 bp, Cannabis indica
tataaaagaaaaaaaaaaaaaaaaaaaaaaaaattagaacacacgtacgtagcgacatgcatgcatgtagacacttggtgtattagttttgacacatatatattaatttgaaccattatactgtatacatagctagctgtacgtttctatatttaagtgagaggaataaccttatatatatatatatatatatattatacatttcatccccgaatcaaaagaagaaaagtacataattaacaaagatctaggttttactttaatctttttctccaagaaaatatattattatagggttcgaattcattgtttcatttaattagtattaatttcgttattttgctttgtaactatatttttccagcacaggcatatttcttcataaacatatatcttttgttatatctagatatatgaagtgacaacacagtctcattgattataatataaattataattaagcatttatttgtttagttaagtttaaattataaaataataagagagttgattgagaccatatatatagctctctatgttaaaatacatttctaatacaaaaatgttataataaacaggtgcatttactaggggattgaatattggtgacactaaaaacatgtcaaaggaatcacaacatttttcaaacagttctactagttgtggccaaaatactgaggacgacgacgacaacaacaacgacaacaaagaatcagtaccagacttattggttatttcggagctgcctaaatcggatggttggaaaaaacaaggtataactttataccaaaattgttggttcccatccaatctccttcccaatgtgattgccttccaaaaaaacttcaaacccaaagatgaagacataatcatggcttcttttcccaaatcaggcacaacttggctcaaatcccttttgttttcc

SEQ ID NO: 385512 - DNA, 1084 bp, Cannabis indica
aatgtgttactttctaatttttgcttcaaatttctaaatcattctctcattcttttttattgtaattattattattatcatcagaatagtctaagcataacttgaggttgccacgttttagaattaaaaaaaaaaaaaaaaaaaacaataaatgtacgagagaatatttgcaatctttaatttttaggggtgatcatcattttactataaaaatttaaataattgactaattagctcccctactcactttagttcatattagttcacacttaactttgtcaatcaaccaaacacataaattaaaagtatcctttactatattgatttacttttattataaattttgattatctataaccaaacatgacatagaattatctatttaataatttaaccattctctttataaggcaagtttatccttaggtagagtaaagaaaaagagtaaaataattatatgtaacattgagtgggtgagattgcacatgctaatgttatcttatcataaagatttaaaccaataaaatgtgcaaaatgtgacttcctcaatcaaatccatgtgtttagatattatttttgacaatgactacatttcttctcttaatttgtattattattattattaccatccttaaaacaattttttgaaaagaccattcttaaacaattggaatgattttccaaaaaaaaaaaaaaacaattggaatggatatccatattttggtaagaaactcatgcctttaagccaaggcacaaatgtcaccaaatttaattttttttaaataaataagaaaccgtttcgcctaaattgtttttgcaaaagtacattttataatttttttttgagggggttaattctaaatataaaaaatgtatggcactttccttcttttctttttaatttcgattattttatgaaattaaattagttttttattgtttattcgattgtaacattaaaaaaagttaccaaatttttaatgattttttttacaaattttagtattttacattattgtttggtaaattttcaccatttaaaaaaaatgcaattgaaaaaaaaatattatatgatgtgtaagat

SEQ ID NO: 385513 - DNA, 900 bp, Cannabis indica
aaaagcaagagttgaagattaaacataaaattacactagttttgagtttgaaggaggaagggagtgtttgacttcacttcactcttgttctaagaaattctagtagtagtagaacgaaaagagtatcaaaaagcataagactttgtggttggagaatcagcaatcttgagagtcttttcaataagcttcttggccttcttgcttcttatctccactctcatgctttcactcttttcaatcttatcataagctttcttcaccatcttcagtgatcttatctttgtcttcaaactcaccacaagcctttccaaccccatcataaccattttcacctatctttactgaaattaatctgcaggaattcccaccaaaaaaagaaaattgtaagaaattttttcataaaaaacaataataatatcactagaagaagaaattgtaactaatattacctcaacaatatcagagtatataattgttaagagagctataacaagtttttggcaaaaacagagaacttggtgttaattaagctcaaagtggaaagaggagctatctataataattaatattggtggtcatctatataaatataaatatataggtagagactagacagagagagggaccaataagtgatgtgataaatggaatgaaaataaaagtaataaataagagagagtaattaaggagaaaacaggtgagagagatcatatgtgtgagtttgaattgaaagtgaaaccctttagagtcaaaatggtagccacattaagagctgtgatggaaaaccacgcaatacttaagagttaggacctttacttcacatcctttgactttcttatgtttcatttgatttttttttttattaaaaactagggaataaatttgaggaaattacactct

SEQ ID NO: 385514 - DNA, 3466 bp, Cannabis indica
gatactaagttggaacgtccgggaaatcaacaaccaacaaaagcagtaggaagtcaagaaattcattgagaagcacaaggtggggctgttggtctcctcagacagttctccaaagcttggagccttatattttaagatgttttctaattggtgcttcactgcaaaaaatgcatgggctaaggggggaaggataattgtggcttggaatccaggaatttcattgtgaatattctatttttctcaagtcagttgattcatcttcaggttacaaccttagataaaagagatagtttctatgtttcttttgtctatgactttaatagtgaagatggaagaagtttactaaggaaagaattaatagatcagaaggtgtatgaaccatggataggcctaggggactttaatgacatactggagaagggggagagaattgggaaaagagagctttactaccattccaagtttaaggactgtgttttggagtgtcagcttgaagatgtaaagcaaagtggcagtttcttcacctagaacaataagcaaaaaggggaagatagagtttactcaaaaatagatcgggtcatgacaaatcagagttggatgggtaaattcacgaatgctgaagccttgttccttagtgagtagctatttgatcacacccctgctttattaacagtgttacatataatcccaagtggtaggaacccgttcaagtattttaggatgtgttctaatcatcctttattcaagtagtttgttgaagaggcatggagggttaatatccatgggactaatatgtatcaagtagtgacaaagatgaaggctttaaagcaggttttcaaaggaattaaccagcaggggttctcagatattcaggcttcggatttgaaggctaaatctaacctggtggaatgtcaagaagctgtgcaaaagaaccctaatgatctggctttgcagtagaaggagcaggatgtcagattgaattatcaaaaaattcataaagcatatgtctcttttatgcagcagaaatccaaagttaattggattaaagatggggatgcaaatatgaccttctatcactctagtttaagagatatgagagctcaaaatagaattatttctattattaatactagaggtgatagagttgaaaaagtagaggaggtaacagaggcctttatggaatatcacaagcagctactaggatcaaaattgcaacaaaaaaggaaaaaagtaaaggttgctatcattgcagaaggacatgttgtgtccaaggaacaagctgaagcattgctagcagaatacaccagtgaagagattaagcaagcggtttttgatgtttctggaataaagagtcctggtcctgatgggtatgagagtttctttttccaagataattgggatttgattggccaggatgtgtgagatgctattagatcttttctccagtcaggcaatcttctaagggaaatcaattcaacaataatcaccctcattccaaaggtcaagagtcctaacttggtgagtgattttaggcctatctcatgttgtaatgtgctatataagattgctaccaaattaatatgttctaagcttaagaacgtcctccctgatttagtttctcttaatcaaggaggctttattaagggtcagtatatagcacacaatatcatgatttttcaggacttaatcagtaactatggaagaaaggcagctaaggccaattgcatgatcaaacttgacttgtaaaatgcctatgatacactagattgggattttcttgaggaaatgatggaagctttgcaatttcctgagaaattcattaacttggtcatgacatgtgtaagaacaccaaggttttctcttatgttcaatggaaccatgcatggtttctttgaagttaagagaggactaagacagggtgatccgatgacccctttgctttttgttctgggtatggaatatttcagtagaataatgaagaaggttaggaagaaaaaagattttggttaccatgaatggtgtgctgacatggagttaaaccatttgagctttgcagatgatgtgttaatgttttgtaggggggacttcaaaagcatatatttgatgatgcaagctctaaaactgttttctacaacttcagggctgctacctaataactctaagtcagcaatgtactgtagtggaatgagtgaggatgaagtcagaagggtgttagatatgtcaggcttcacaagacaccatgatcctttcaagtacatggtagtgcccatatgtgccaggaagattgctgcatcagattgtagcagcttagtgcagaaaatgacatcaaatatcaagacatggagtgcaaggaatttgtactttgctggcaggttggtgctaataaaatgttttctgctgtcaattcatatttataggtgtcaaataatgttccttcccaagtagattatcaaagaacttgaagccatctgcaaaagttttttgtggacaggaaaaagcttaatgtgtggggcagggcctgtagcttaggagaagctatgctatccaaagaactcaggtggtttaggtctgatgtatattccaaattggaactctgctgccatggttaaacatgtgtgggcagttgaaaaaaagaaggataatttgtgggttaaatgggtgcactgtgtatatattaaacaacaagcatggtgggagtacaaagctcctatgaatgggagttggtattggaggaagatggtggagatcaaagacaaaattaggctcctagtacagcaagatgtctttgctgccaaagagtataaaattgtagatggttacatctattttgaacaggattgggggaaggtttcttggagcaatgaagtctggtcaagattgaatttaccaaaacatagcttcctactatggttagctatggtaaatagacttaaagctcaagatacgctattcaaacatggcctaattgatcacgatttctacacaatctgcaatactgctacagaatcagctgagcacttattttttagctgtagttttgcttcagcttgcctaagccgattgaaggaatggatgagatggaatgccactgctacatcactacaaagcttgatgaaatgggtgagaaaagctaaaatttccaggtttaaaagaatatatttgtagctgggattgctgctcttgtttacatggtgtggaaggctaggaatgatcaactttggaaaatagggtgatgatttcagaagtagtgcaacaaacaaagtgggtagttaagaatctaataattcttgtgataccaaaaagagtaaacaaagtgatagagattggttttgcttgttgaaattaatattgtatagataaagttaaaggcctcttttggaggtgcttttagtttgtacaaaaaggttttttggagtaataaaatattccgattcataaaaaaaaataattaagataattaaggcgc

SEQ ID NO: 385515 - DNA, 894 bp, Cannabis indica
aagaataaatatatttatagcctataatgaatttgaaaaccgtaccgattcgagagaaaagacacgaggagagagagcaaaggctagggtttcatcgtttggcctggtcgattggcagacagcgacaccttccccttcacagtcgacggtgctggacagtgcgtcggcggtcgattctcctagtcacagtcgaaggcagtgacgatgctggacagttccttccatctcgcagttgaaggcagtgacgagatctcgcttccatgtgattccagccacttccagtgacgacagcagtgacgacagcagcgacgacggtagcgacgacggcagcgacaaagttgtagtgatgacgttggtctctgttattgaagaactcgggtattgaagttgccgcttccatgtgatcacattggtctctgttattgaattccttggttgtttgatgatcacgcaccatgatttcgatgatgggatttcgcagcgacgtaggcagcgacaaagggatcttgttttgagtttggtttaatttctgtgtttaattttgttgcttttaactgttattagttaattctaattaggtttttatggggttagattcttagtttatgtgttcaaacttttgttttcccattagtcttgtcttttgacatagttttttagttttcttttttttttggttcgtttgttggttcttgtttttctttggtgtttttgggattctgctggttgagatacaattatggaagacggtacaggagtgcatgtttttcttgaggaggaggaggaggctattttgtcttataatactagtgttacggatggtaatgactatgatgataggtggtgtattgttggaaggttcttgactgatagacaaattgattttgaggctat

SEQ ID NO: 385516 - DNA, 1652 bp, Cannabis indica
ctcgttaagggccttccttacttctaattccttaacccaacttctactactcgccggcatcctctggatgttcgtgagttacttttccaattggctgatgcacgtatccagcttcccaaattgttctctattccacttactcaacgtctgatgagtagcttcaaccttcttaaaatttctagcaagagcctagtcatgagaaactgaattccacgcatgatcaaaaaccagagtactccttgggtccctagtccaccaagcttcaaactaaaaccggcatttttctcttatctccaggaacagtgggacactgtgcgaacaaacaggggcctatggtatgaattgcaggtatgtaaagagcgaatcgaagctttcaggaagagtcgtagccactcctcatttaccaaagctaaatcaagagcagatttgatgtggttcaggccttccagctggttatcccatatcaagttatcacccttgataggcaagtctatcaaggcatggcgcttaatagataagaaataaatgggataaattggtcttttcctttagaaccgacccgctcagagctacttagcacaaagttcacatctcctaggatcatccaaggcccactaaacttgcgcccaatgtccatgatgttcgactagaaatgcttcttctcatgaaagtacggtggcccgtaaacataagataataactaaggataattcctaaggtcagagtacacaatgccagtaatttagtttttagttaaacaaatgctttcaaaactaaaactgtttttccacgctaagattaaacccttgacattacccacaacaggcatactaatattgaaataaaaatgaaagttcttaagagtgcgtaccaaaaaattaacatccactttgagttcagtcacaaagataaattcggagagcacgaccaaatcagggctttcagttccaaaactgtagaggtctgccccaaccctttacaattccaagcaacacctctcatgcttcccgtggaagagggataccatcctcctccacatgggtcacatcatcagcaggaataccaatgggataacttgaaaaatacctgttttttgtgtaagtcaaccaaaactactagcaaactatattcatttaaattatacccacttttataaggagattgcttaatatacccccacattaacattaaagaccgaaaattaaatcatactgttttgggttaaagaaagggtattataagaacattaactatgaaagtgggtagaaaaaatgaaatattaaaaagagggtaaaaattaaaatggttaacttaaagtgggtaccccacgtaattttttcaataccaattacagatttctcatctttaactcgaaagtcttccttgacagggatagaaatatccatcaaccgatccctagctttccagactgtaagtctagaagactgtcccgacgagaccagtttgtcaacttgttgcgagcagaccgacatctccttaaagcgatcaccccttttgacttccttaatacaaccataaacttccttaatcaatgtaggtgtatttttatattactagcgaaaagttacgtacgaggcacgtatactaaattttatgctaatttttttctacgttattaaaaagtgatacaa

SEQ ID NO: 385517 - DNA, 1614 bp, Cannabis indica
acggacttggttgggagagacccaaaaaagagaaagagtgaaggggttggctgacaattgatattcaaataagacaagtgtgtatttaggggtagggttttttctagggtttgtagaatgggctttggccgaatatttaatattttagactttttttaagtatttgttgcgttacttagttataaactgacgctactttgcgtcagtttaaaaccaatacaaaattgaaaatggggtttttaataggcgcaaacatgcgttgttacaaaatagacaaaaataatttaaagtggtctcttcccgtcgattagtgggcattgactgacgtgttgacagatgcaaaagaccatttcatagtagtgtggatttttattgcttttttttttcttctcccttgttgaatttgttaggtaaaagtaaagtacaatatttgaatgacgtaacgtgtagattaaaagaactagaagtcaagtaataaaataacaattaatgatataaaatgaccttaaaattaaatctactacatagggtagttgaaggttgctaatagccaaaggttatgatgaatcttaaaaatataatttagtttgaaaattttcaaacttgtctttatagctaaagttttctaacactagttagcccaaccttattaactaaccttaattaagctttacctttttcaacttagaaaaatagtacaaaagtgatgatcaaactctcgagagcataatatgagcgttgctattgggcaccagcagtgtccaacactttctataggtgacattctataattagttagtgatattctttaaaatctattttttaagttatatgagagtcgataattaattacactaatagcagtatgacaccgcgagaagggtgctagacacaactagtactttttaacaattctctatttatattcatatgtttatatagtataattaagtactcgattttcttaaggcaaaatttcattcaatgtaattagcaaagggacaaagccctacaaatcactaactactagaaatataggctttttcttcggttcttttaagttggtttatctttggttaaaaaaattctcgctaccgaagacaattgaggcgaagacataggtcccgaagacatggggaacatatgtgtttggttatttcataataaccgaagacgaaggtattttttatatgtatattatgtacaaagcgatatttataccctaaatcgttgtcaccgttaagactgcttccactgagccccaaacctacaacaacctaaaataaaaaaatacttaaagaacattatttttcaatcaccactgtttaacaccaccatatatctgagcaccttccaacaaccaccgtagattttttgaccaccacctcaatatccaaactctgtatcatacacactaaaaactaaaatataagctaaagggcatatattaaagtgatgtataccttaattcaagctaaaagacaacgtcgaacgcctcaaagtcgccaccattagtcgagcgtcatcgttcagaaaaccctaaaaaaactgtcgacctaaaatctcacattaaccctcttatacctaaaataaattaatttttatagtgtatat

SEQ ID NO: 385518 - DNA, 683 bp, Cannabis indica
tgactgggtattgtaaattgtgattgtggaaattggaagtgagaacatgtggagccgtgtatagaggattattctctcttactttattggtgtggggctagtgacgtggtgttgcgtcggcagcatggctgggattaagctgcttttgtggagtaatgcgggtaatgaaagtgtccaataaaatactgccacgacacgtttagtcaaatgtgggtcgagatttaagcaaacccgtttcgtacgtgggccgtttcgtggcttttggttgggtgggtatctatctcttcccacactacactcataatttataatatccatttttttaaatatttatttatttttattaagattccaccgtatatgtggatgtagtattttttaatttttatattcttttaaataaaaaatgtatttttattttgttttttaattggaacaaaaaataacattcttcaaaattttcatgatatcaaaaagaaaaaaatctttgtaaaaacaaataaaggaaatatctattatataaaattattataactctataaacaatctacatcttttaggaaaatgttttattttatgtattttaaataatatattagtttttctttttaaaaagaaatcatattttatttattgttaactactaactttagatttattctaaaaaaaaaaaaaaaaaaaaa

SEQ ID NO: 385519 - DNA, 2461 bp, Cannabis indica
cagggagcttagtacgtgcaatgtgctcctctggttggaggtgcaatgtgctcctttagttggaggtgcaatgtacttcttggtaggaggtggcgcaatgtactctcttagtacgtaggaggtggtgcaatgtgctcccatggtaaggaggtatatcttataacttcttctccattaacatgcttgaaacttatgtgcaaaatcagggtataatatttgccccttaaaagtttgctcgtaagtcaatgagtaataattttgaacttcttttgagacttgcaaaatagatttagaatagtctctccaatatacttgggagaaatatgataaacttgatgaagatggtgatgaacatttaaaatccataatttgattaaaaaaaatcaaaattgggggtaaaattgtgtttgtcgctatttaggctccagggaacaaaaaataaaagtaaaataagaaagtaggcatttatgaggtctccatttttttcacatatatatacctcatgcaactaggttcaattttttttagaatgccaatcaagtcctctttgataaggtaatggagccattcaactcctttaacgactgttggtgccattcggatcccttagtgaggagtaggagcacttcagctcctttagtagtgctagagccaatcggttcccttgtgaggagcatgagcattcagctcttttgccaatctcagaccagcaaacaaggcttcatactcagtctcattattggatgcttcaaacccaaacctcaggacaaaatgaatcgtatacccatctggggtgacaagaatgatccctgcccccaagccatgctcgttagacgacccatcgacaaacaaccaccatacacactctggtaattctcttgcactgtcttttactggaaacccagtacattcggcgatgaaatcagcaagtgcttgtgccttttattgttgttctaggatggtatgttatctcaaattgacccaacttgataggccatttaagaagtcgagatgatgtctctggtttcattaatacttgtcgtaggggctacttggttaggacatggatatgatgttcttagaagtaaggtcacaacttccttgatgaatagactaggaaaaaggccaacttctccatggtgggataacgtgactccgctcccacaagctgtttgctaatgtagtacactggcttttgaatcttcttctcttcacgcatcaatacggcactcaatgcatgctcagttaccgccatgtatagatacaacacctcccccataattggtttcgacaagatagggggttctactatgtgtttcttcaatgattgaaatgcttgttcacaatcttctgtccattcaatcatattgcttcctcacaataagttgaagaatggtaaatatctattggtggacttggacacaaaccgattgagtgcagctatgcgtcctctcaagtttggacatctttctttctttttggggaaggcatgtcaatcactgccttatcttctctaggttttcctcaattccaaatctatagtggaattatgaggaattaataagttagggccatggtggaattatgaggaattattggaagcttgattacatagggccatggtccccatactaactcagataatattattttgtaatctcaattaattggttttattaattaatcaataagaattctacataagacgatgccttgtttgtgattttatcactaagcaaggacttatttgagaagaaaagaggatttaaggtttattcgttaattaagagactttgtaaagtttaattaataaataagttaaatgataattttatttgataattaattataattattaaatagatagaattaatatttatagagttagaattaaaatatgatatttgttaaaagaaagatgagttaaataaatgaaaaaattgaaacatatggggcccataatatggccggccacctaagtccaataaagccattattttattttttttaaattctatttaaattctaaacctaatcctagtatctctctataactaaaaaagtataactcttattttaagaagactctagttttccttcgtcagacaaaaaatagaaaaagagtctttcttctattaatttgaaatccttcttcttccaaataaatttcgaagcttgtggtgaattgagagtatgcccactcatgtcaaagcaatacctagcatagtgaggaagactgtgtctaaccaaattgaaggagagaagatccatatttagatcttgataatgctctgctacataaaagaatcaaaggctagagatctgaatggaatgagtcattattattcagctgtcattaatataatgattgcttaatctcttattatgtatttatttcattgttttatgaaattcatacttaagatgttagattatataattataatcaacatacatgtta

SEQ ID NO: 385520 - DNA, 824 bp, Cannabis indica
ctcaagatgctctacatagccaagcctagaagctttcctcaacattagaagggcaggcacataaagctcgaatatttagagacagtaaccacctacaccatctccaccatcagaggatcctcctcttggcccgccagcatctattcccgcacctcaaaggctcgtgaaccagtataccctgccattttggcaaggttagagactgtggagagggagcaaatttcttttttgggaaggtcagaccgctatgttaaaaagacaaacatagattatgggtcatttgaagaccataatgagactcctgttagatcctgaaaggtcgacaccagatacacagccacaaccacaagaagagtctcaatcactagaaaatgaaataattctcccaaatgattatagatcggatgatgatggtatgttttgtacacctgacaacacgaagattaccagcatcggagatacgcaggattctgagatacaagtgttagagacaactctagaactagtggagaaccgaagaaagagaaagtggcctacgtagttcgatgagtaaactaaaatgaagaaaaagtccaaggcatcaaagacacttgtgaatgtggacccacttagagtcgttgatcgaaagctgctcttaacttttcacaactgggttctaggctagaatgggaacaagtacccgagggagtgtttctccggtagacacgattcggcttggttcctccaactacatactctgaagacatggcttggagacgatgtaagtttttaagactttttacgtctttggtttttaaagactttatctaactttttttttattt

SEQ ID NO: 385521 - DNA, 1806 bp, Cannabis indica
ttgggatttttgtgttatttcaacgatccaggcttcccatctccgtcttcattggaatcttgttgcgagtaagcttttctatttttctctctttcacttaatttgattgattttttccatgaatgcatgaacattgtttctggttttgatcatgcttcaattcttacgttagattgtagtccattcggtattttgatccgcatgatagccttaggataaataatctgtgatttatggatgaaaaagaactgaatatgacctttgttgtgattcttggctctttgagtcacgaagaacacaaagaacatgtttgagttcttgaaaaatcatgtgttttgatccatgtacatgctggccggccaaggaggctttgtttgaagcctggccagccataggtggctttcatggggtctggccgggcatggggactgtgtccataccctttacagttttttaaggtagtgatctggggaccatagatctataattctaaattctaaaaaattagattatttattgaatctcaccaaccaaataatcatgtttattaattccacgattataccactataaatatggaattgaactcttagtaattatagaattatatttagtgagttttattgcagtgcccatttatttaatcaattgcagtgattaaccctccttgttttcgttcataattagttttagtcaaattactgttttaccattataattacttttttttattcctttagcactgttaattcactagtaaaagtataatttagatccaatctaaatttgtgcacaattttttcagttctaaaattaacactttgtttacaccaaaagtatctatgatgacatggacatcaatgtttgacatgtggcaagaaagatgacatctcagagttgagtagtcatgattcatagcaagtcgacttatgaggggtccttagccttgcgcccaggctgactttgagaattccggaatggaagtttagactttgataactcatttccaactcattatcttttagtattttgtaccatgaggacagagtaatgtacagacgaggtttctctctacccttgttgaggtgtgttacaaaagaggaagttgcacgaatccttactgaagttaatgaggggttctatggcaaccacactggggggtaattttgcccaagaaattcttcgacaaggatattttggccgaccatgattgaagattcaaaagcctagggtgaataaatgtgacaagtgccaaagattttttacactgcctagggctctacccaacaaattgatctaaattcaaagtccatggtcattgatatatggggaatagatctgataggacaactccctaaggaaaaaggtaaggtacaatacgcagttgtagcaattgactattttacatagtggacggaagttgagccattagccatcataactttcaagaaagttttagattttgtggtgaagaacatcatatgtcggtacagacttcctcaaaaattgttttagacaatggaaaatagtttaacaaccaaatgttcactaatttttgcacaacacatggaattgtaaaaagcttctcaacagtcgtacactctcagacaaatggtcaggtcaaagtagtaaaaaaaacaatcaaggacactgtgaaaaaacttcttgaagaagctaagggtaattggcctgaagaattacctgaagtgctttggtcgtataagaccactgaacagatggctatcaagaaaactcattttgctttagcctatggctatgaaaaaatatttgtaaagaccgcttagt

SEQ ID NO: 385522 - DNA, 5269 bp, Cannabis indica
aaaaaaaaactgacatatttagactaacaataaaggtagtctacgattatttattaaataatttgttgtaatcattattaaaaagaaaatttaaagaactttttttttttttttgaacttgaagcttcattgaaccaagaagaaacaaagcaaacaagctgttacaagtaaggtaaagaactattccacaacaacactttatctaatcctaagcccaactttgctaaattgtgagcatgagtattcaaatccctgctaacaaacacaactctagggctaggactgaaggacaaagagttgttaacatctacaagcaaatcatcacaaacactattgttccaattacaattattaagcttatctacaatactcttacaatcagtatgaaaggattggacaaacaacttaatcaatttagtccatgtgaccgcaagagaaacagccttggcttcagctactacaggggcaactaaactagaaactggcttaaccagccctgcaaccacctgatctgaatcattcttcaccacaacacttagactataaaccttcttctcatcatcaattgctgcatccgtgaaaacctgatactagcctgaagaacatctcacgacttcagaaggatcctgatcacactgatcacgaggagcaattctcttctgctgagcatccaaatactggagaaagttttgacaccagccaaacatttcttttggatcaagaataaaccgattaaagaaagcattgttcctttgattccaaattgtccataagaaacacaacacaatatctgcagaacctttatccaaacttgaaaaaacattagtaataaaatacgtaatatcccagtgtttattttgcaagtaaaaatgagcaaagtttgaagctttccaagctttctttgctctagaacactctagcaaaccatgcacaattgtttcaggatgaatcttacacaaggggcataagtgagaaggaataatatgcctttggaaaagtaagatagccataggtatagaatttgaaacaattctccacacaaaatgtttaactttaggaggaacatttgcatgccaaattttagcctagaaagatttcaaatcttgaaaagaagaggtggaagggatgtctcgagtttcaagagctaaatgatatgcaaattttacagtaaaaagcccaaaattatccctcccccaaatttgctcatctttaccatcaagtccagagaaaggaactttcaaaatatcattgacagtagaagcatcaaaacatgaattaagcctatcaaggttccaagaacctgactggtcaataaaataagagagcttcaattgcggtagtccaaatcacaaaggggctgcttaaataaagaagcagggatccaatgatccgtaggggtattaatagtctctccatcacccactttccacacaagaccagacactaataaatccctcccccaaaggatactacgccaagaaaaagaaggattatgaccaaccttagcagctaagatagaggagtgaggaaagtacctagctttaagagtaagactcaacaaagaatcaagttgagtgaaaatacgccaagcctgcttagcaagcatagcttggttaaaatggataagagacctaaaacccaaacccccaacaaattttgaacgacaaagagattgccaatttttccaatgtattttcctaaaatcccctgaagagccccaccaaaatctagccatcacaccctcaatttctttacaaagcttgacaggcagccaaaagcaagccatcgcataagcaggaatagcttgaataacaactttaagaaggatttccttcccagccttagaaaaacatttagaatgccatgaatgaagaatagagtaaactctatccttaagaaaagagaaagagtgatgctttgacctagataggaattgaggcaaacctaaatacttactaataaaaggtctatcttgaagatttagattagtaagaaaaagatccttaatctgaatagagacattaggagagaacaaaatagaagatttatggaaattaatagcttgtcctaaagctttagtatatatagcaaagatatccctaagagcaacacaagagtctctactagcagcacaaaagatgagactatcatccgcgaacaataaatgtgttaaagaaggagctctatgagagatagatataccttttaacctattgctatcctgataagctctaagtaaagaagataacccttcagcacataaaataaataaataaggagaaagagggtccccttgacgaagactcctagtaggcttgatactaccatggacagtatcattgatcaaaaaagaaatttctgtagtagagatacacttcataataagagacaaaattttgaggaaaattaaaatgagacataatgctcctcaaaaaatgccactcaaccctgtcaaaagccttagccatatcaagtttaagcgcagcccaccccatcttgccatgcttcctagtattaatagcatggacaacctcttgtgcaagaagaatattatcaaaaattactctcccagaaacaaaagcactttgagaaggggaaacaaccttgtctaaaacaatttttaagtgattagctaagaccttagaaatgactttatgaagggcattacacaaactaatgggcctaaaatcctgaatagaatgagcatgctgcttcttgggaataagagcaatcaaagtattattaatggaagaaaaatcttgaccattattattaagacaatccagcacagcctcaacaagatccttactgatagtggatcaatttttttgataaaagaaagtattaaggccatccagacctggagccttatcccctgatagttgaaaaagggcctttttaacctcagcagccctaaagggttcccctaaacactcaaactcaagatcattcagagggggacctaaaacagaaagaatttgatctacagaaacaaaatcacaactctacgattgaaaaaggttggcaaagtaagaagagacaatattgcaaataccctccaaactattgacaacctcaccatcctcagttttaagaaaacaaatagtgttagtctttttcctatgagaagcaaaccggtgaaaaacttagtgtttttttcaccggcattaagccaactaacacgagctcgctgtctccaatacacttcctccttatataagaaagcatccaactgagattgtaagactttaattttagacacattactttcttctaaaggaagggtactctgaagatcagcaataattttattaagggctgcaattttattcttaaacaagttacgggtagaaacattccaagacttaagagaagatatacaggactattatttggcaaggaaactagagaaagcagagccatatgagtaaaagaattaaactaagaattctgaatagtttgaaagaactcctgattttctaaccagatattctcaaattgaaaccgtttcttagatattacaggagcagaaacattatctaagctagtgacaacctttaagactctatgatccaaaccaaaaaaagctaaatgatttacaatagcatcagggaaaagatcaaaccaagaatcagagtaaacaacccaatccaacctttcataagtggacccatgtttccaagtatatttattaccaataaaagacataggagaaagattaaacttttcaagaaaatgagcaaaagcttccatatccacagtagaatgataattactaccaattttatcactatataaaaggtaagaattaaaatcaccaataacaaaccataaaagattaggagcattataaaaaactttatgcaaaagattccaagtaaaagagcgttgactagaaactggagaaccataaaaaccagtaaaatgaaacataggcttatcatttaaagtaatattacagtcaatatggttacaggaataagttaaaatattaacaaaaacatcagttttccacaaaagcataagtccccctccaaaatatttcttaggaactttaaaactctagtcaaacgctagagaaagcttgagcctctccatagctccaggggaaagtttggtctccatcaaaaaaagaacagaaggcttatgatccttcaccatcagggagagccttcggaatgcatgagtactccccaatcctcgtgcattccaactgataatcgtcatttttctgggcgggtgtgctcaacatcacccgcttgttccaaagataaagcagcaagagtagtagcatcatcactcactatcattggccttggctctcttaagggtttcccgaagagaaccaccaacaagaatctgttgcaattgaaaagaagcccgctttactaatgaagcagaggcaagacccttccctcgcacagtgggattaggctgaccaccattgtgataagcattactagcaggaatattagaatcacatgaaacaaccttaaaggctgaaacagaagcactttccattgaagactgaacaacttgcatgcccctagaggtaccacaattagctctatacagcaacaaggatagaatctgtggagtatactccataaacaggtgatggaactgataactctaaaaattagagttatttttcacatttttttaactaaaattagtttagtttttaagtttttaattaatttagtaagtttttaattatttttaattttattagctttattgtaattttatatgtttttgtgtgtttttataattattttattataatatgttatgtgctatttatttttaattttatttaattttctaattaattttatatatttttaggtgtatttggtgaaaaaagtagggattaaattgaagaacatgtgaagaatttagggttaaaatgcaattttacaagaaaaatcatatcagccctgtttcaagacccactctcggtcagaaaagttgactcaatccgagccatccaaagtcagatccgagggctgccacgcgtgcgtgagatacacatccgacaggcgcaagtgaagcctgcagcgtggtccccagcagcatcagctccctcttctccttccctccacgcgggtcccagctggcagttctcctccaacagcgtcctgccacctcagcaactcgtcagctcctctcccattcagcgcacgccaagtggctcctgcagaaaaaaaaaaaaaagagaagaaaaatgctttattctcatccgaaaatcacttagaaaatgcca

SEQ ID NO: 385523 - DNA, 611 bp, Cannabis indica
ttgacattatgtacagtgagaatctacatgacatacaggaccaagtaacttcattttgaagggaataaaaacacagtggtgaagtgaactgaaacctagagagataaaacattaactcaaagctagccttgtcagtgcctaaggtagtgttctaatatgtcattacccacttaagttcttcattagtgttccttaaacagtactcaatcccaacccaatatactaacatatatttttactataacatatataaatttatttatatatatatacatacatagatatagatatagctatacaggtcagtgtaaagcaactttttcttctgagcaaaccaaatcaacaacacacaaaatcccttttatcaaaattcaattctcatattgatgtatctttttcattctatatatacacaaacttacacaccacgctaagaaaaacaaaagcaaaaaaaaatcagattggtcagagacaaatgccatgaaaccaatgaaacaaatgataatcgaaaacccaatcaccaaatgcctaatttgaatagaaacccaaaaccaaaataaatatatatatcagaatcgaaaaacgaaaagcaaagaaacaaaacaaacaaa

SEQ ID NO: 385524 - DNA, 558 bp, Cannabis indica
cagccatgtaaaaagttaaaaactgtttcacataagctaaacaagtctgtttgacgtttaataggcattttttaattacaaaccttttcttgaaacacgttcgatatccttatctgctgaacttgttcatctccttgttctttctcattatcggtttctgatatttgaatacaacagaccgagagtaaagaaaatgacagagataaaagtggcatacaaagaaataaaacacatacacacagactgagtaccaaccgtttctattagccaaagcatttgtcgtctccccatcaattgcagacatctccaaatcacgaatatcttcggatgaactgtaactaactgtagaattctgatccttatccttataaacaactaggcgtggctctttcacgccttcgccactttcctgttacaaaaatagtaaggcaattacaaaacagtagaaaaaaaaaattgaagcacatccagataacactaatgaatcattactctacctgttgaatagatttaagtctcaaatcatctcttctatatttctgcaaaaaaaaaaaaaaa

SEQ ID NO: 385525 - DNA, 883 bp, Cannabis indica
tatttgaatggtttttttccacaaggaagatgaggatatacctttagtaaaccaggcgagtgatcaatagttctttcattcaacaatagggcttcggcattaggaaactcatcaatccatgcttgatttgcaagaatcctattaattttcaagtatattctatcttttccttgttgcttgttggaccaagtgaaaaaattttcaccatattttacatcctccaattgacatgttgccaaacaattggggaaatcttttgatgaggtgaactttactctagccgctattctttcttcatttgaaaggatatcattaaagtccccaagtacaaccaaggatcctttccattcagtatacacaaatcctttcaaagaggctttttttcttcttcattgttaaacccatatataaaagtcacataaaattgcttcctattatcacataaatagtgtattcggttgcttctatttgagcaactctaccgaccttcttgatggcttctttaatcttgatgaaatcttcaaatccgtctaaaagctcttgaacaatgtctattgacttgagttttaagtctctccagggttgacttaaaattgttagtccaacaactattgccatgaccgtggcttcttgactgagtgttcttatttgaatagtttcctttaagaatcattgtatgtaatcctttagtggtttttcttcttgctgattgatgaagccaaattattgggctcaattagtctgtgccttgatagggagaattggtcatagaatgctcgtttaagtgtcacccaagacttgacagatctcagggaaagcttgagataccactattgtgttaactcaaacttttagatctccttgttttgatgattaacaaata

SEQ ID NO: 385526 - DNA, 1407 bp, Cannabis indica
gcgcggaagctaccgcaactaatagaaaaaaaacaactactagactagactagtagttgagtgctccttgttgttcggatcttgaccgggtccgagcttcccaagctctatgctgttggggaactctgcaagggtcttaccaccttcttgatttactatatttgagtctttggagtactttgggattatattccgcgccgaggatttgtgcttgtgggctagggtgaatattgcagaccagcggatctggtggtcgacaatcgttcggacttggtaaaggttgtcgcggcacttgtagtaggacagaggacttatcgcgatgcccgcggaccaatttacgatgtctccgtcgctgacgttcgtcaagcaggccacgtggattggccagggtcttcttcggctaatgatacctcgatcccgaagccttcggagtatctttttgataggcgcctctatctgtatggggaattcgctgctgatagatcccgcccagtgtcctcctccttcccccgccgccttccgacccgcgggagtatacaatgacaacttccggacactcatgcccgatcgtgagactgcctgttgaacgtccgatgacgcgttgctccgacctgagctatgcaacaacgagatcccccttgatccttgccggatgtgcttgacggtcccccataatacgctcacttggggacctcttactccagctgttccaagagtctccgctagttgaaccccgtccagtagactccctgtttcgctcatccccttcgtcagctgtttgatcgggatactattacctaggttcctaaacttggaatggatggcggagcgtaggtggcaagcagttatatggatacggtgctttacccgtagacgcttctccagctctcgcaagaattgtatgggagtcgtcctcggagggacttcccgaatgaccgtaccggggaattctaccgtactccgtgcagctattgttgttgatcctgcggagcctacccaaaggttcaggccggattgtaggaagtgggcgatacgtttttgtatttctatgagaagctctacggcacccacgattcccagtagtgagtcgtcggcatatcgcgcgtaacaaatccttattaagtaatgggtttttaagggggccgccagcttacgggccaggcgtctctctgacctgataactagtatcgtctccccgcccagctctatcagcaggccctttcttttgcaatacttaataaggtctctcatggcccaattattattacagcgttctccaccatagaattcggccttcggggtcaacccggcggcttctatgaggaaggcggcgcaaaggaggctcgagggcttgttaaggaaggcggcaagggccgacgaaggggggaaaacgaaaggcgttttctg

SEQ ID NO: 385527 - DNA, 1771 bp, Cannabis indica
acaccatttatacatctatgtacataaaacacaaacagagataagactacctcctcaggaaaataaaccccatttgattttttcatcagttcagccctacataaagttcataaaacaacaatgtgagaaaatctaaaaattgcaacttcatataaggtaaagtttgaatttgtaattcttatcaaaactcacatgtccccgccctcacagtatccggtgacaatgcaaacatagcaaccctacattacaaatacataactcagcacaaaacaatacaaccaaaacttatgattttgacaactgcattaagaaattaaaaagtttctaaacttctcaacccaagcttccttaaattccacaatataaggatgctgaattcgggcaataagagccatctgtctttccaaattaccaaatacacataatgaattaaaataatatcatacacttatagcataaatatatgtatatgtatgaaaatcagtcaacaacaaatttataataaataagaaacgaatcaaaattattttaatggaaaagctacctcttggtgagctgatcgccggcatcgttcagtttggcgagcgagcctgatcttcttcaacacatacctgaaatgcacaaactctcatgagattaagattcaacattacactaatttagtaacaattagttaaatatacacttactttcatacacacacacttactttttcttctcggccttgtgattaacaagaatggcggccccaaaagcaccgcggccgatctgctccatgatctcgtactgatccatccgagactccatacctctccggatccactttccccaatcaatgctcctaaagcaaaacccaatctgtataaatataatatatatatatatacacacacacgtatattttcctatataggcggaggtcaaaccatttccaagtctcgcgctcaaataacagacttcagtctttgattttatgatccaaacaaagcaatttctctctcggaatcaaaatcaaatggtttgatttcgattcatttccttacacacacactctctctctcttctgtctctcactctctttctctttcttctcacaaacaatgacaatgacaaacgacatcaataataataataataagtagcaaataataataattaataataataaaattaataaataaataaatagactgataaatacagaaatcaaaacatatattttataattttattatgttccatctcagatataaatgtagagaacgagtactgtactactatctagtgatatttggtaatgatcaattctctgaaatagctggagggtatatagatagaagtgctgagttcgagtttcaggttatgtattgtgtaatatataaacgtttaaataaaaaaaaatctctaaaatagcgaagagaattgatgggaagttgagaattactttttattttataatagtctttcttcttatttcgtgggttgtttatttttgtattagttgatcacgtaattttgttgtaaagtgaatctttatctacaattaatatggtttacttatctgtactctttattttagtaaacattttgtgtaataatcgcgagatctaattttttatctctccacgaactattttccttcaaaaaaaaatatagtgatttagtttttaagaatcttaattacaatcttctattaaaattttttactcgatttctacattcaaaattatttgaggaaatatttatttttatagcagtattcgttatagtt

SEQ ID NO: 385528 - DNA, 521 bp, Cannabis indica
aaaactttgtgtaactaccaagatgtcctttgattcgatggtggaatattaattatataaatgataaagtagttttataaatgaaaaatagtatttagcatctttagatatgttccattgccattaattagtgatgctttttttaaaattatataagacttgatattttgttgaaccaatatcgatattaacatataataccactgatattatataacattttagttaaaaaaaataatacaatattaaaataagtagtagtgaggaattaaacaataacaaatatattttattattaattaaaattattatttagttaagtctagcagcacggaggaactaaaaaagctgtcgtttgtattaaaataattaataatcttattttacaataaataatatttaagatagtaaaaaaaaatattagagatacacttaaattatacaccttttttttaataagaaaatgatgtagatttaattaaaaatatatataattttaattgtagggtgttcatccaatc

SEQ ID NO: 385529 - DNA, 3058 bp, Cannabis indica
ataaccgattagcttgaacgaataactccctaaatatctgtttctcaaatacacacctatttttataaataataataatgttaataataaccaataaatagatatttatccttattatcagttatcatataatttaaactttaaatcatataatattttaaatcataatttaaaataatgcttctatatattacataattaatcataaattattatttataatctttttaaataataggtatatattaaccataccataaaaaatatgtcaaactatactatatataaagtaattttacaagtattattattatgcttacaataacaacaacactcacaaaataaatagttcctttgtcacaactaattacttctaagcattatgcacatgccaagtaattcatctctattaaaaaatattcgtcactataaaacaaaatttatttgcattaaaaattcttagttgacaatatcatgattattcaaaatctaaaatgaaataaaataaatggaagtaaaaaaaatggaattaaattcttaagtttccttaaaaaaatggatattacaattatcccccactagaagaaatttcgtcctcgaaatttacttttacattttcaatctagacaattgttcccctcttatatgaattccatcatcgaaattatccaattcaatgcaatcaatagactacctaattctaagttttgtagtttaataattaagaatgtagccctacacatgatctaatatatcaacaaactgatgtcattcatacagaccatatgtcttttataaattacatgaactacatgtaagctctataaagatcgtaaaagttctccctacacatgcgaactagctaacatacagccttataagcacaccagttaacgtactctcatgaatgagctacatgcatatcattataaaagaaacatttactaatccatcaaactaatgaaataggaataacatatactatcaaaatcactctttctaagaataacatgagaacaaaaatcgcataatccaattctcatttaaaattttcttttactcgcttaatctgataccatttgtaaagtccccgcttcaagcctccattaggtccttaaacccacggaataatggctcttagacacgagtacatcacattcggacaaacaagtcaacaaacctatgttttggaatggaatgtgagtcattccatgaaaaaaggagtggtaaaagtctaagtcgaagtgaagccccaaagaaaggaagaagccatgaatcaagatattctgagtatacaatctttgtagatactcgagaaaatgtatatagagctacttgcaacatggtctactacaagaaaccaccgcctatgtacaaaggtagaaggcataagagggaccaaaacaaaagatgtgaatatcatggtcatgttggacacaccagaaattagtgtgattatttgaaagatgaatttgaaggattggtcagaaatagtcatttatccaactgggtacggatcccaatcatttatcccaaacaatgagtggctcacaggaaaatgtttactcttacacattaaggaactgttcaccgagatttttgaaaaatgattatttaattataagagctaaagaataataattcagaagaaaataaataagaacaccaagaattttacgtggttggggcgttaactagtcttagtctacaagtcaatattattatgttaggctagaaaagccttagggattacaagaaggtatgagcactctatctttgacctatgcatgtgagtaaagaatttctaaccctcagcatgtagggttcattgtatcacagcatcaggtggtgccactggatgcagtgatgcagggtccagtcccggtcacaccgtatgtacacaaagctaccaactgcaaaattgaggagctacactcttccatggggtgtgcccatcacttagggaccatcgtggaagagaatggaatcaggccccatgaccaaagtgtttttcatcgcttggcctgagaaataaaaacccctaaccataactacagagggttcggggcatggagccaaacacatctcatgtttggcgtgatgctcccgcttcaagattactttgtaaatttcttaatttttgtaggattagctccacatcagttgataccacagggatactgcctatagggcttattcattttttatgctctcaggggttagcccgctcccagccctctataaatattatttttctatgatctttattttgtcccaaagaaaggggatagatggaaggatggattttactccctctaagctcattcgggcaatgagacatctgtcccattcaattttttccaaagaacatcaaggatcgttgccatcagttcttcttctcctctaatttcaaagctttcgaacgcctaaatttcctaacagagtggaatcagattccaccactactccggacagctcacaccaaactcttctcgagtcatgctgttgtttttgcaattgctgcaatggaggagctcaacgtgggagatctggttaaaactgctaactgccagagaaccagacttattcaaggccatcaatttgtcaagcacactaacctatcaaaggtaagatgtcaaaatacttagaataaagaggctaagaggaagcttttggcagagtatatccaagaggctaaaactaagtattaagcttaccagaagaggaaagagcaggaggacctcttggctcatgcccagagtgtagcggattagaagacacaaaaaaatcaaacaagaagttggtggctcccagggctttgtttcctttcccggttcccaactccagtgctcctggagcagtaccttgggtgttcgtaagtctactctgtcttttcattatgtcccttttgccaggagttatgctcgtttcaggccatttgggcttgataggaggttagttaggttgcaaatgccccattcctggtggggtaagtgatgcgtgtcgtaagccacaacaaatttattatttttttcaattccaatacttccaattattt

SEQ ID NO: 385530 - DNA, 1378 bp, Cannabis indica
gttcattttaaccaagctcttttagccaagcaagcatggaggattttcgatatgccagattctctcttgagccgccttctcaagcatagatatttctctaacagtacctttcttgatgcaaacattggccactcaccatcattgacttggcaaagtatctcttggggcaaggagttgttagtgaaaggattgagatataaggttgggaatggaaatcatatagacagcaagcttgatccatggattccgggttgtaatgagtttaaaccagtaagttatttgggatccaactctttgccggtttcaagctttatcacagaggaacgagtttggaatgtacctatgctgaatagattttttcaaccaatagattcagatcgtattctaactattccactaagttactttgctgagatggatcggttaatatggcactacacttccaatggatcttacactgtgcaatctggttttcacctagcaaattccttggaagaacaactttgctcctcaacttctaataatcacagtgactggtggaaatttttctggaatctggttttgcccccaaagatcagaatcttcgtttggaaagtgctccataacattcttcctacagcagctgcattatttaaggaaaaggtcttaacttctgctgaatgttctctttgtgcctcgagttgggaatctatcggacatgctctctttggttgtaagcatgctaaagtcatatggaaaacttcaaagtttcggcttgatctttctaaggctcaaaacatgtttaatggtgattatttacactctttatcaaccattttgaatcagcaagattttgagttgctgctatgtataatgtggggcatatggacggataagaataaagtggttcatggtggttctcctcgacagcctgctgctataataaactatgcagtccgtttccatgaagacttcactcgggcaaagtaggtgcttccatctgctgctgtcgacagcaaccaaaactctgcaacatcatttcctattacggttcagcatgctccaaaatggcagccaccaccacataatggttttaaattgaatgtagatgctgctacaaatgtggaccagaaaaaattgggaattagagctataataagatatcacaatggtgttgttgttgcaacttattcaaaggttgtacaaggaaattttagatcggacgaaatggaagcaaagacactttttcatgctcttaattgggctttgcagaatcaacttgctattactcatattgaaacagatgctttgcgagtctctaatgctttaacatttgcttctaaggatttatcttgtttttctgatcttattatggatgttcgttgtcttttgtcctttt

SEQ ID NO: 385531 - DNA, 1472 bp, Cannabis indica
ttattaatcatctcgccaatctaacgaactgatattggctactttttagtgtcaacaacctcaaaattcaatctaattactaattggattggatcggttttttaattgggtatccaaatacacacctaatttttttaataaaaaaattaagaaaaatacgtaaaattaaaacatcaacatttatttaagtttaatactctctaaaaatactaacgtgactagtgtaatgaaacttaaagattaaaataactaaaacaataacattagcaagtaataaaataaaataaatacacaaaataatcaagtgttacaaattcaacaaaaaaatacactaaaagtataattaatatatatttttaatatttataattatataaataaataaatataaatagttaattttttaatatatataaatgtaattagattagaacgatttttaattattttttgagattgatatccaataactgatttaatttctaacttttaacatctaatccaatttaattataatcgaatatctaatttttcgtgattggatatccaattcataaagaaaactttaaaaaatcataaaatattaataaactgaacttctatataaataattaaatgacttcctaacaaaatcacttgagattgttgttaaaataggtacaactttaccttaaactccaaaatactcctcccattttcaaacaaccgcctctctcttcaccccttctttcctccctctcttgctctgcactcacccaaactttaatgaatcgaccacaaccaacatccacctcaatctcttatctccacgaccattgcaaccaccacaaccgcatgacctacatgacccacggaccgaacgaccatcgcggaccctcaggcttctccattgacttgcaatgtcgtcgtcaaaggttagtttttttttaatgttatccatttaaaccctaaattatccattcaccccgatttgtggttactttgaattttttgtttattgtttggtaaaaattgagttttggtgaaatttgcgttttctgtgatttttttgtatatggtacgattggatacgatagtggtccaatgggggggtacgatagtagtgtaatttgaaagtagggatgaaggtctgatggtggtttgatgcaggcacaatgcctttctgttgttgaaatgagcaaagtttgagacgtaggtccgatagtagtccgatggtacctaacattaaaaaataagaaaaattggtagcatcgggccactatcggacctacctcttcaaaactttgctcatttcaacaacagcaaggcatcgagcccgtgtcgaaccaccatcggatcttcatccataacttccatattacattactgaaagtactacttgttgattttcatgattcagattaccgagttgattatctttgaatagattgatttcaacacatgtattttagacttgaattaagagtaaagca

SEQ ID NO: 385532 - DNA, 1844 bp, Cannabis indica
attttcatgcagcatatagatgctatatcacacatgttcaggaggagacgctttcattttccagaatcttaccctcagccatgtgtggtttttgacacaacattcccacaattcctcacaaggatttgggggtgtcactagggtgacaaaagtatcttccaatggccagaaacagtgaaggagtactacaagggtatggagagtcgttacctaccatgttgggagggtcaattctacttatacttcgtcctgcacttcgaaagacaaaaacattgggtggttgttgaggtagacattgagtattggcagatttgggtgtaagataatgatatctcatgtaccaccgacgcaattttcaagccattatgctaccttggactcaactatttccacatctgctaaggacaactagctattacaatctcaacagttacattctcaatgtagattaaggagagagtagcccattgagagcaatgcatgctaaacgcatgcaaactgaggtgattacccaaagtaaaggaaggtaatattcattaacatagtatattaatattttccttatcactaattttttttattctctaaatgtattgtttttttatttttcagtggtgattgcagggtatatgccattgaatacatcaaacacctcatgatgaatcgaacattggagaaaattaatgatgataacatgaggatgttcagagaatggtggtgtgtagacttattttaccaaaacctgacttggtaaattattaaaattttagagggtttttttttgtattttgttaactctataattaaaattgtacagccatcgttatacatcgcaagttattgtttatatatgtcaaaactgtattttacatttcaatttcattaaatgtgttttgatcgataacatgtcgagaaaatatcaagaaaaaatcgacataacaaattcgacatgcgtcgatataaaggtcgtgacaacatcacgaagatgtcacaaacaaatcgtgtttctattgtagtacttaattgcataatatatcgccaaatgtcattaaatgtcgtgaattatccctgatttcacactgcatgtcgaacacgtgtacaattcaacatttaatggtaattaatttttaacatttattatcctgcctatcaaaaaacttttataggtcgataacaatgtttgtaaacgtcgttaaatgccgcgaattatccctgattgcacattgcatgtcaaacatgtgtacaattcgacatttaatggtaattaatttttgacatttattatcctgcccatcgaacaacttatatatgtcaataacaatgtcgctaaatatggtgaaatatcgcgaaaagatacttcttatttttgctacacgtcgctaattgttgcaaaaattcattagttatttgctatttaatttttgacgtttattatcccaccttcccaacaaatattttggtctataaaagcaaatttgtacttcaaaagttacatattttttcttattctttaaccctagagtgttcttctcttataagttctaaatgtctactagaaagaacaaacatgaacttctaactcttaaagagatcaagaaggagccttgtcgcgaaattactcctcaaatgcaaaaatatctagacgactacaaacgttttgaaaatgaacagctggtgaatgagtggaggtacctacaacttcaacaagaattttacaaaacaaatgtatggccagttcaaccaccaaggatccctgaagggtgtcgtcgttgcagattaggctattttaatggtaaaccggtgaagactggatctttatgcaagtattgcaagtctcatccaca

SEQ ID NO: 385533 - DNA, 732 bp, Cannabis indica
tgacattcatggacgcatattcttgatattaccagatcaaaatgcaagtcccttatcaagagcatacaagcttcataacaaacacgagactttattgttacaaagttattccttttggtttgaagaactccgtggcaacatatcaatgactagtaaatgagatgtttgaaaagtgaataggaaggaacatggaggtctacgtcgatgatatgttggtaaagtcagtaaaaagtaaagatcatacaaaagacctcgcagtgctttgagatactaaaaaagtacgatatgaaactcaacccaaagaagtgttccttttgagtcatcctcaggaaaatttttgggatttatagtcaacgtgaagggaattgaggcgattcttaaaaaattaatgcattgatagaaatgccatcgcccataaaactgaaggaagtcaagtccttaacaagaagaatggaaactctaaacagattcatctcaaaattaactgacaagtgcctaccattcttcaatgtgttgcgatgcaacaaaaagtttgaatggacagacgagtgcgcggaagcctttacaaacataaagaaacatctatcaacaccttcgttattggccaaacgaaaaactggagagactttactcctctacttggctatctcagagaatgtgattagtgcaacattagtgttagtacagggaaaagcaccagcaaccagtttactatgttagcaaaaggttact

SEQ ID NO: 385534 - DNA, 1319 bp, Cannabis indica
tggaaatctaaagttgataaggtaggatatctgtcctatggaattttcatcattcaatatgtatctgtggaggatagagatgaaattctcaatggaggatatgtaatttgcatcaagaggtttgttgttatgagagcatgggatccaattacaaattttaagaaaaaaaacaccagcactgttccgatttggatacaacttgatgatcttaaaattaaataatggggagaaaaatctaattagtcaattggggaaactaataattgttgacttagtgactaagggcagagataagctaagttatcccagagtactagttgaagtttcaataaatcaagagtttccaaatctcatttcatttgagaatgaatttggtcaagatgtttttgtggcagtcacttatgaatggaaaccagaaatttgtagacattgcaaaaggatgggccatgctacaagtgattgcagaaagaaagaaagaaggaaacaagagtagattattaagaaaattttgaaacaacctgaacctgagattgagcagggcaaaactaaacatgggaagagaataagggaaatttgatgaagcagatgcgtttaaaccagccacaaagggttaaaagggaaaaggaaaggcaatgttgggaagtaccagtgttacaattcctttcaagctctaattggccaaatagatactctagtaaatacaatagaaaaggaaatcacaagaggggaggggggagtaccacctcttcccaatgaatagattgttatgatggaacgtctgacaaagagttggtttggttggtctccttaagatgagggttaaggcccattagttgaaggccttatatgtttgaatgttcttaggatggtgtcttatgtcaaatagtgtgtggcatggtggagaaagaataactatttgctagaattttttaatgttcaatttgagtatcttgaagtgttcaagtcagctaatccatctattagttatttccatagataataagagtaagttctttatttcttttatctacggttttaatgatgaggatggaagagctatcctttggaaggcttttcaagagcaagctatgactgaatcgtggctagttctaggagatgttaatggcattttgtcaaaggaagaaaggattagagctcgagtcaaatatagctcatccaaggctttttctgattgtgtagcaaattgccaactagaagatgtgaaatttaccaagaattttttcacatggagcaataaataacaaggagagaaataatgtaaagcccgcttagttaatttggaaattagcagttgttta

SEQ ID NO: 385535 - DNA, 2489 bp, Cannabis indica
ttacattgcataattatttttttaaacggtgcctttttatttaaagtacaatactataaaatagaacttttggagccttttggtgttccttttggcctctctgagtttggttgttaaaggaaattgataattaattgaagtataggctctcaagttatatttatggatatactttgtttatgtgtgtaatgaagtactagcagcactctactctcaccctattttatgtgcccccttgctcgacatatgaattattattattattagaatgttaactctttattactcttgtcaagtaatgagaggactgtaaattgtaaaagataatgagaaagagagcattattctcattgctctatgatcgtgttgaatccttttgtgaaaaatcataatctaatattaaaatactaaccttatgctaagttatgggagagaaggagagtacttttataatacataaatatatatatttatataagtacacgtgcttattatactggctttgcatagttcgagtctctttcattagatatttcaattggccaaattaaggataatatactgacttgttaaatggttttgcttttaatccttttttgctcttgaaaacacagttaaacatgatcaaataaatgaactactatctcattaattttcattcatgcttgaattcctactcatcattttgaatcagtgatttttttctattgagacggttggaaagtatacataaccttttaactttgtaagccatgaaatattgatcaaatgaattatgatgcacatgtatatttttttcttccagaaagttgtcttatttatgttagcattcattatatactaataagttttgtgtgtgaatacgtgattaggtttttgtatgagatatagaataattttatttttgattgtatgtgtttagagtgcgaattcattgcttctgaaaattctaagctccatatcctttgtgttttatgttgcaagattaaggtaaatgtgtatatagaattctaatagattgtattttcggaacgatatggtaaagagttgttaaatttatgcagcccaataatttggttcattgtagtgttgtttctactgtccaacacatatggttttagacactttgttttgttattattacaatatatattacactctcttgattatcaatttactatttcatcactaaaatattattcttttctaataggaatatactcttctttgtggctttcatttctacttttgattgtaagtacaacacaatgcacgaacaattagtacatatgttatgattaatcatattctaattaatttcttccttgtgtaaaactcaacttatggtaatataaactcattcatgatgataaatatggtaatttcacaaattgcagataacattaatggtgggaactaaacttcaagtaatcattataaatatgagattaagcacaactaatggatactatggttctctaaggatgactactatgagactgaagacgcacaatctctcgaaaatagaccagctgcatcaaaacacaaagaaataactatgaagttgagaaggatataagtgaagaagtggttcaggagccaatcttctcctcacaacaaaatgaggtcaagatttttttaactcacttctcatttaggaagtgaaatagataacactattattttactcttataatagttttctcctttctttttttcttttcttttggtcatgtacattttgttgaagatgacaatatgtataagcttgaacgtggcaaaaattgtttaatacatattggtgaaaatatatagaataccaatatatgaattgatagattatagttttattctttaggtatgatgtactcataagccagcttagttttatattttatagtcagatttgtgaatggatgaatactaataatttagttcaaatgctaagaagtaagaaggttccctcatgaatatgaatgatatattattatattaatgcaatataaatagagtgacttttttcgacagataaactatcatttaaagtactttttaccgtcggttacaatttaatggaagtctttcccaacagttataaatagtcatttaaagtgactttttccaatagttataaaccgctatttaaaattttgcatttttatgacacatagccaacggttttaagaattaatgagaaataatataaaagacagttttaaaccaatgagaaaaaattaattttgtaatagtctccatttatagatcgagcagtaatatgtgttttataataataattaatcactctatatcaaaaaatttaattagaccataataataaattaaaatatatatagatgattgtttcttgtatcatttctaattaaattatgtaacacctaacataaagctaagtatacgtgtcttgtacgtagctttctcctagtatatatatatgtatatgtatatatatgtggatatatttttttttt

SEQ ID NO: 385536 - DNA, 826 bp, Cannabis indica
acatttgaccaaggctccaatcttatcgaagctggtggaaggagaaccattatacctttatttggcagtgtctaatcataccgtgagtgtcattttagtgcgagaagaagaaatggtcaaactgctagtgtattacataagcaaaagactgttgggcgcagagtccaggtatccaataatagagaaactatccttttgcttgttaatcgcttctagaaagttgagacactactttcaagcccttgccatcaaggtattgactaaccatcctctctaccaagtgctccagaaattggattcatccggtagattgctgaaatgggctatggaacttagccaatttgatatccaatatcttccccaactgtcaatcaaggggtatgccttatatgattttttagtattttttagtagagtgttttggaatgaacgacctcctagaagagctaatcctagaactgccattttggaaggtttacgttgacggagcatcaaacgaaaaagaagctggagcaaggattatactaatcactccacaatgactttagctccaaagttccctctgctttaagtttctcacctccaacaatgaagcagaacatgaagctatgatcactaacctttaattggctaaggaactaaaaacctaagttattgaagtgtacatcgactcccaactcatggtaaaccagatatctgcagaatatcaaaccaagggtaagaaaattgcagcctatgtagtatgctcaagggaattattgtaagggtttaaaatctacagtatccgccaaagtcccaagggaccaaaatgttgggttttatgccc

SEQ ID NO: 385537 - DNA, 1288 bp, Cannabis indica
aaaagtattttatttttcttaagatgaagtaaatttgttttcactttttaccatccattgctttgggctataaaatccttttcatttttcactcgtaagttaaaattagacaaaaggaagagaactcacagagtagcagtcagaacatgcagcttagcttactaatatattgtattttttacagatggattctctctatgtagttatattaaaaaaaaaatcagccaaaatataaataataaagagaaatgaagcaataaatttatacaaagaaatcaagcacaaaataaatcaaatcaagtgaaagctttcaaaaaaaaagcataatatttagagccagccaaccacctaaagacaggacaatgaaacttattattgtcacaacacacaaatgtttttcttcattatagtgagtgtaactaattattgtttgggtaggtaaataaaccagtaagaatagttgcgtctcattaaattgcaagtcaattaaaaccttcgtaaattattcgttttaaaaagacaaaatctcttaaaaagaaatgaatgagctggtacaacaagaccccactaggaagtaagaacattatattgtattagcatctacataactctataatgttacgtttgatctctttctctctctcagtagtcatatagaagtatatagaaccctattttggtcattttctttaaagaagttttgatgtgtgatataaattgtaaagtgtcacgtacttgttacttgtttcgatatatcatatatatatatatagggatataattttgttccgtgattatattctgtgatgtactataaccgttacatgagggagttatttgatttgagggctgagattgatatagggtaattagggttaaaaaatagtaacgtatcctgacagtcatctaatgtaacctgagacccatttaatgtactacggaatacattccatgaaagtacagggacaaaatcgtgtccctatatatatgtacatatatattgagagatattttgtttcgattttaaagcgtgcaaaaagttggctttgtgttagtttgcttaatcatatgactaagctttccttacgaggcaggttttggtccataactattcccatgtatgcatccacaagtcgaaatgcaagtaaaattaaattactactacaaataatgtgttaaaaaaaaattactacaaataaatatcataaaatcaatttgaatgtggtttgtgtaatttttgtttttgaattccttacaaaaaatttaaataagtggaagaatatctatt

SEQ ID NO: 385538 - DNA, 790 bp, Cannabis indica
ttctttatatctcttatatatattttttgttagtgataattaagttatctatttatattaaaatttaatattttaatatttttatataatttttttattagtataagtaatttttttaattataaaaataatttaatattattaaatgttaattgaaaaaaaaaattattaaaaattgaagaatcgccatataaaataaaaactaaagaaaaagattattgataaatttatacaaaacttattctataattttaaataattatcagtacttgtatatattggccaccacatttaaaattattattatcattgtatttcatttatagttgtcactagtcttactaataggtttgctttgtaaataaaataaataattaactactcactttaaacacataaagattatctctattagatggtgtatattttgggttaaatttggcccaaaatatatcacaaaattatatttgacccaattttgtatttgtattccaatacacaaagtgcgaattagctataaaagtcaataaaatcattaatacttattgaaaatatacaaccaattaactttatttatatatgttgaccttgcttttagccaacgacactgagtcttgataataaacgataacagatataattcagatatgatatgaaaagataaataaagaatacaaggttttcaaagaggttcgaccccgagcaattcggtaatagcctactcccctatattgactcaagaacgaagaaaatacattgtttcctctcttaaagctcttacgatgaaatc

SEQ ID NO: 385539 - DNA, 833 bp, Cannabis indica
tttttttttgtttagtgttttgataatgttataaataaatcttttaattcaatccttaaaataaatatagcatttattttaaattaaaaatcaaacataaaaaacattatcagaaataagttatattcttttatttaatattattttttttagttttaaatacatttttttatgaatcagctaaaattttattatactaataatcattttacaatctaatagtgaagatttatgaaaatggcccctatacaagtatattttaaaatttcactcttttacaatttagaaaaccagtatttgtagcactaattttttttaggccaaaaccaactaattcgccctttaacattatttttaatcttacttacaaccacattcttcttagcagcagttaaattccacactatgtcatttatggcatgccacacatggtaaattagcgctgccattacaatagagtaaatgagtttgcgaaaattgctacattttactttttctatccacctgatcaaacttccaaggtgatgcgacctagactgccaagagagccattctttcacatgttgcaaacaatttaatggcaaaggacaatcgaaaaataaatgatccacagttttatttatttaatacaataactaaaagataataattactttaatttgatttattttaataatataataatcaaataaaattctcataggtctttatatgtcacccttaacgcgtgggctaagccctacccgtgtgagccatattttaaggtctaaaattgatttctcaattttacaacaaataaaatttattatttatttttctaataaataataatt

SEQ ID NO: 385540 - DNA, 2632 bp, Cannabis indica
gtatttgtaagcaaaaactttacggtctgattaaagggaagtaaaaaaactagttaattatgattcaaattataataggaatcaacactagaaataaaaatgagaatagtaatgcaaaaataaaatttaaaatagataggaaaaaaatgataatatcattaatatatatcttgcatacctcacaattttaaatgaaatagatatttaccaaactaaaataatagaaaatcatttcaataatattttaatactttaaaatacaactaaataaatagaatgaaattaaaattaatttctaattttcattccattaaatgctaatattagtcttaacaaaacgcacactaaacatttatgttcattaattaaaataatcgtagtaagttacatacctcaatttgtttatatgttactgccaaatgcaaaatagtcataccataatcatctttggcattcacaaactggtaattatctataacatccaccaaaaccttcatagcttccaactgattatgtctcacacaaacatgcaaaatggtcccactttgacccttcaaaccgacttgacaagccttaggagctactctgagtaactccctcaacacatcaattcgccctctcatggcagcaagatggagagggtttctcccttcttcatcccaagacgtgcataagagttcacaatcaacgactgaaagtaatagtttgacagtttcaagatggccgttagccactgccaagtggagcggtgtgcagcgacacatgtcaagttccttggcaaggtcgggcttgtgatttaggatctccttcacaaaatctacatggccgagcatagccgccacatgaagaggcgtctcggaaaaactattattaatgaagagcttgtcgagaattaaattatctagttgaagaagttctcttaaagcggcgactttcccttcccgggcagcttggtagagcaagctactctccatgtgtttttttgatactaaagaactttgaagagagaatttatttaatagttaatttgatgtaaaatatattttagttcttctctaaatatagcaccccattatatataacttttcttgaattaatattctaccaacttaattatttctattttaaaataattaaaatgacaatatgtggcatgtatttgttccctagtttacattttcaagatgtaactctcaataatttttgttctttttcgagagaagagtcaatcaatattgatggtagcatagcatatatgtggcctatatagcatagtgatattttgatattttacatttattttatgtggacaaggcaaagtgtttgccattattagattgaaacaaaaataattatgaaatcttatttttatttcttcatattttttcccggctattcaaaaataatttttcagtaattgtctaatttaaattagattatttgacatatattttaattatctctaaaatttatttgtttaattaatatattaattaattaattttaaattatattatgatattttattatttaaaatatattttacgtaacctggcatatattttaagtcacatattgctgtaaaattggtcggagagtgtaaacttgttaacaactcattatttcgactaatttagcgaggaaattatattctataccttttttatattgttcttttttatttttactttcttttttaaagtctatcatttttacttctttttttaaacattgtaccaattttactcctatcacttaaagatactattcatgtgactctttcatgtcagggtattttgagtacaatacatataaaaagaggtatgtttcaattaaatataaaattaaatgtaaatttgattaattgattaataaaaatggtatttttaaacttacccctaatttataagtattaagtagttaggaagaattttctcaactacgtaataatttaggctgcttgacttgttattgtattgaaaataagtggttgaaagcattattgatttgtaagactatatattactcatcattctcatcaagaaaacttatttggaccactaattttgcttgatttaattttcttttattatatttttgaattacatgtgtttgtttaattttgattggttattatcgtatggataggacttagaccatctcctaaaatataaatattatgctaaatttgacaaaaacaaaaaaaatcttatatttagaaaaacatttgtaattgtccttcaatacacaataatattttaagatgcaaattaatctaaaaggcaaatattattaatgactatcaataaattaaatatttaaaaaattatttttttttttagtaaagaaaataatctttattagacagaaacatccgctaatacaatggattgaagagcaaggggaacatcgctctcagtaaacgacgacctgaccacgtgccatacagtgcgcgactttgttagtagactgtttaacatgaccaatagaaacattacttaaagaagataaaataaattagacaatcttgaacaaaaagaccaaaaatagatggcatagataccgaactaagaatagcttgaacaactaaaatagcaatccgtttctaaatgacatttgacttgttattcct

SEQ ID NO: 385541 - DNA, 3426 bp, Cannabis indica
ttcattgtgagatgatagatggaggtcaaaatcttcatctccttgaagatggggcggcctatcaccgcgttgtatgctgaatattgatcgatgactgcgaaatcggccatcgatttggcagtgataggggcggttcctagggtgattggcagtttaatcattccttttaatgcgattgtgtcgccagtgaacccatagatgctcgagattataggtcgcaattccttttcctgtaaccccatttatttaaaggcttggaagttgagaagattaactgaactcccgttgtccactaagatgcaggggacattgtcccctccaatattagcaacgaagccaagtgcatctgcatgccagtgatgaacccacctggcatcactttccatgaaggctatatcatcacattccttcttgaataacttttctggtcactcacttaaattgttcacattagtgagtggtttcttcctttgcttccttagcataccattcctgtgatttcttggaatctcccataatgtggggtcctccaatgattgttagaatatttcgtcattatcatccgcttgggatgatcttcaccatgtttcttatacttgccgaattttcctcgtctgattatttccttgatctcatcctgcaaaaaccagcattccagggtggtatggccgatgtccttgtgatacttacagaatttttcgggatcccttttgtccatttcctttgatcgggggaggttatctaaaaactccattctgttcctcaatcgcgtagatatgatcacgtgggactgccacttctgtatagttgacgaaacgtggtcctcctttcctattcggggatgtctctttctttgaagggaacttggccaactttggacattgctgcctctgggggctacgtcttctcgggcttcttcctctggaattctttcctctaggattgtgagatcgtgaccatggtacaggtgactcgagtttatccttccctctctctaactcagccagagaattttcaatccacttatgcgactcagccatagtgaagaattctaccagcaatttggctctttaaacctgtaactccttccaaaagtcgattctcgacaagacacctgtaatcaacataaaaacttataaagactctcggccttctcgactttagttactttggtattgaaacattttaaaataattctacaatgactcattaacctcctgtttgatattggccagagttgtgtaaggtggtttctacgtcattgtagctttgaaatgtgttaggaacagatccacaaaggtttcccaagtcaatatggatgtgtcaggcaactagctaaaccaatcatgaccattatcctccaaggttgccgcaaggatgcgacattttgctagttgaggtacctggcctacttccataattgtattaaattcttctaaataatctatgggattagtagaacctttatattttagcgactcagatagtctaaatccctttagcaatcgagcttgtcgcaattttgtggtgaagggagaattcccatgaagcttgtaaataggctttctctgctgctcgattattttgaatccttgtagtaaaatactctgattaacacccccagacaggatggcattgttctaagttgtcacaggtacagtggcaaccgcagctatattcgctgggatcactacctcagtagtcgcagctagtgcgttaagcgggtcgataacatttgccgagctatttccgttgtttatgccctgatcgcccaattggggatcacgaggctctttgcaattttgaggagtctgagatcgcccctaaaaactgtgttaaggtgatcacgaagatcacccttatgaacctgatacctttctcctcgtggtgttttcacaaaacctgacctggtataaacactaggagtacgactttgtgaggatgaagaacaagattctgcatcgtttacctcactacgtggttgagccctactgccagggttgcgtcgctctgggtcctcctcttgctgtacttcacggttggagtttcgtgtgacctgatcactcggtgtttgttgattcaagtcaagtccctcctgctcggtcctgcattccctgcgagtgcagttagttcgtcgcctagtattcgttacctgagggttatctgagcgtgtggttggtactcgtggaggacgtcaagtcctggtccttctgttgatctcaacctgcagagcttgcatttggtcctataaaagcagtatattgggttgtggttaactagatcataccttcagatactacggcaggtgggataggcgggaattgccccatagtggccaccggtgtagacgtttcttcagattgagcggcggtttcaaagaatagattgagaggagtaatggttgttcgtcccactcctccattaatggtatcaacgggagttgttcaatttctttggagtggaacattcattatcgcaatgttattgatccagtgttgttatctcctgtcgtttggtttccagccataatgattttcctttgaaatcaacaaagtatttctttcccactgacagtgccaaatgttgttggagaaatttagacaacaccaaaataaataatataataaagatattaacagagaatgtgtgagtactcgacctagaatgacgagtattcaagctatgaacacataaacgtactgaaaataaaaggaacacagaggaatatagtggtttagtcaaatcacggtctgcttagtcaactattgcaagggttttctatcttgtccatttcatgttgcatcactcctttatatacaaagcaagtgtcctttaattatccaaagattgaattcattatcaatccgtttgtacattgaattacaacaattaaatcaataaaaatgtaaatacaataaatgaagaactgtttcggcccaattcactaaatacaacaacgtatgcgacttctatagtgcgagttgtctgctcatattccaacataagctcgcaggcttaagatgcatacaagactagtcaaatctggaatgtttgtgtcctgttcgaattgcttatatggacatcctgtagtaagtcgataacctaagggatgtgagtccttatcgggttatcgaggttgttgggtcatcagcaccagctcgcagagtaaagaatcaatctttacaatttgcaggaagatctttgtagtctttgcacacatctcggtatatgcgagtcttaaactgatcctcggtcctactttgtgcacactatacgaatgcgactagactctcaaggtcacatgatctcgttgagtctggttcagttgaggtttacactgaagaggtctcccactgacatctcaactctcctcgaggagagtgagtccacgtgtcattttgataggagtctggtctcgagtttcta

SEQ ID NO: 385542 - DNA, 1133 bp, Cannabis indica
ttattgttcatctccacagagctggatttttttcattggaaagtggtgctagttaggaaaaataagatctcatgtggaagaagggctagactgatagaagatctaaagaagagtcatagccgcttctaccaagcccacaagcttgagtcttcaaccaagactcgttgttcacttgccaattgcatcactaaagtgctcaacttgagtttaatttttataaaaaataaaatttaataataatccaacctaaaagaattatagtgattatatatatagcttttttttttcatctattcatattataaaaaatggttttaggtttgttattatgttaaaaaatattgacaaaaatcaaagtcaagatattatatttttgtaccaaaaagatatacaaaatcttacatattatttaacaaaacacgaattttaatatataacttttatataaggtacaaaataatatttttcaatattaattttctaagtcatccatcgatcatcatctaataatagcattattaattgtgattttatatatatatagatatgattttgttccggaattactttcacggaatgtattttgtagtacattggatgggtctcagggtacattaaatgagtgtcagggtacgcttctactttttaaccttaattacccttagatcaatctcagcaatcagatcaaatagttccctcatctgacggctgccgtacatcacagattacaatctctgaaagaagaataacgaaacaaaatcatattcctatatatataaacattattatttttgagagatggtaaatgatgagtaggaaattgatgatgattttgaactaggacctctcattcaagcatgctcaaaatgccctgacatgcacgtacttgttcccacgtgatatatatatataaactccattataatatatattatatatataagtggggatgttacatcgatgttgacgtgtcatttgggtatatataatatatatataatcacatcctaaggttaagaattaatgtatttaataaatatgaagcgtgagaccatcccagctttttggaaaccctctttggctatacacaaaacaaataaatgttgaaataaaattaagaataattattaatt

SEQ ID NO: 385543 - DNA, 1210 bp, Cannabis indica
gatctctcaaccactttgagagaatatatcaatcactttggagagaatctctcaaccattttgagggaataactcaatatctataattatattatataaaattcaacttttaaataaatattttatcttttaattataattaatccaaaataattcagtggagcccatcttatcatataagtgtctatcattgtgtcattactcagtggctagctgactccacccttttcttaaatacacaatggtgatgtctttgcccagacaacactttgtctttctctaatttatttaaataataaatttaaaacaaattatttattacataataaataatcactattttttcaatttaaaatagattttctgaacatcattagctttatccatactcttgttagtgttgcatggacctataatactatactccaataaatttgattatttattaaatttcatcagccaaataatctaatttattaatttcatgattactccattataaatatggaattgaactcttaataattataaaattatatttactgggtttaagtactgttcgttaatataattaattccactcatctgtcttcctacaaatttttttttttgaaactaaagtttttaacaattaaagtttatcacttttgctatcacttttttcctgactaaaagattatatatttttgtaacaaacaatgttatttttgaaatatatttgtgaagaacatgattatgaacacaatgaattccatataaagttcaatttattatttgaaaaatcaaaacattcaaatttattttacaatcacacaaataaatataaaatattagattacatcatataaatgttctaatcttcctaaaaacaactaattttttacagaaaaaaaatctttgaaaaatcaatagcataacaaggttcgatactttatcgtcattgccaagatgtcaattgtcattgcctagattcgtttcacaaggtcttcgttgccaagattcgttcgcaaagtcgtcgccacccaaatccgtttgcaaggtcgatgccatgccaaattcgtcctcaaggctgttgttgttgaaatccgctcacaaggtcgtctccatcagcccacctagatctcgccctccccacgttgtgatgtcgtcgccatcgagtcgctaccccaaaattttccacatcagataaatttttgcatctcaaaatctg

SEQ ID NO: 385544 - DNA, 1046 bp, Cannabis indica
atgagattcattatcagctttatccatattcgaacgtatccaattgttcctcttttggttttaatttgaattcttggtgaggtttagtcaatgggaacgacattcaacatttcgatgtctttgatggtggccaactttgctaagggataaaattagtattctattttcacggtacttgttttattgtatacttcttgaagtgtatcgtttcttgtactttggccaagtatgtttctattttagtcccttaagcaaggtcggtcctgagttgaaatgggactagagacaaaaaaaagtaaaaaaaaaaaaatttgggccctcaccataaagataaatgacatttttaaaaattattacaaaaatatgtatattttctaaaaggaattattaatttatttgggcccctaaaatgagtgggctgtaggcgcgggcctagttcgcttatgcctagggacggccctacccttaggcatgatattctccaagaacttgatttaccacaagctaggatttgttgtggatctcatgtccttatgtgctctcgaaaaggtcataattttgtgataagtgattcatactttatgtaacgccttactttgtgcagcgccccacaccttttataattttataaaacctattattgtttgatctaaattgccatggttaacttattggcagatccaatgatctaatttaaccaatggttcaattgtcaataggtcaaataataatttgtaacaagtaaattttgaaatcttctttcatctctgtataaacctaggaacatgataggatccatccaaattagtatgcatgtgtaaacctatatgcttgctttgggcttagatgcttataggtagcccatttaatttttgtaattaaaatggactaggttgctaaataaaatgatcactcatgatagattttatttaggcccaattagtatttgggcctatttaattaataatagttgttcatttaaggttaaattcctctcctttgggccttgtgtgagagttagggggccatagaagtgggtacgacat

SEQ ID NO: 385545 - DNA, 3268 bp, Cannabis indica
caagttacaaatattcaatgcaatacaagaatgtaaaagattgtgcaatcaacaatcaaataccaccatcctaagaagaagaatcatccaaatcttcaatggctgccttgcccttgacttttgatgtaggcaaggggcgagtaggcgtagtagagctctggccttcaggcctaactgtagagtggcatccctaacggtgcctccacgagccaagcgctgagagagggccctttctctcttctccaaaccccgagctatttgggatagaggcacatcatcatccatggctggagcatgttcaccacctagactgacttcctcagtagctggggctccatctacacaacgtgatgggccctcagcccccataactccaaaaataggaggatacaaactgtatttctgaaagtttcctacactaaccaaccttattttatttatcctcggtacggggagggacaggatgtggttcgctctatccctcatttgtagagtaaggatagagcgagatagtaggtaggcacttgcaagaaatggtgatgtcaaacctcttggacatcccaaaagatgaagtaattttaggcatatccaccaactttcgagagaggcgtactattggtgtcaccaaaccattggtggccaacatggctgaagtagaagtaccccgtccaattctacattggagtagacttaaaatcaaagtagtacccaatcttgtacggagtaggctgaggccagcctagctctacatagagaacaaacattgtcgagagatatgtaataactttttggggttatttatattggacacatcccaaagtaagcagctatgtatctaaaatatgagtgcaaaggcagcaccgcccctactggatgttgtgctctaacaatgccatccaatcaaaggccagtcaatgtgcttatggatcacttgagggcacctcacagtggacgcctctcagtagtgcacttgctagtatcctatcaaaagcctcgacagtgataacagatggagtagagacccaccagtctccctgtgacccgacatcaagaacttgaggctctgaagagtggacaaagacatggtcataacctatcactgacagctaactaaacctattcaatggctacctatcaacatcatatgagccaaaagggttgttggagaagacgtcacaagtcatgtaaattgtcctcctaataggcgcatcctcttccacctcggattcggtgtctggactctctgtgccctagtcaaccacaagcacctctacttggtgaacctctagattctatcattaacgagttgtgtgacctcttctactatgccaactctgcccatcgttgccaccctgacaacattaggattagatggtggtgcactacaacatgattacttagttcttgccatggtatatcagtataagtctagagatcactcagaaggtggcaatgggatagacttgatgctatctctcaaaagtagaattgactagacctataacacacctattgtcacctccccataccaatacttgaaatcacctgcatagaagtgacaaggggcggtgaccaaagtgacaaagcaataagatacaaacaaacttctggccaatcgtacccaagtgtacttttaagataaattatattgtataaggctaggtatcagcgaagtaccgtctcaagtataccttcataaataaattgtgagtcctaagttgggcacttgactataatggactcactacgaaatcttatacagagttcccaaggaaaccatgtataagatcacaattgtatgtgactacaaggccatcacaagacccttgttaaggtcaaaagagcacaaatacttggctgtctgcttggaaccttggccttcgccggccaggtcccatgacctagccaagagccagccaaggaccctatggccacgcacgggccaggaaacttttgggacaccttcttatggccaggtagaccccatgatgaagacccatggtcagcgaggtcttgaacaagacccccatggctggcaaaggtgtatgtctgatctaaacttgtgttttttcaagagctcaaacgcgttcttcatgttcttcatgactcaaagagccaagattcacaacaaaggtcaaatgaaatccttttcttcaagaaatcacacattatacatcctaagactctcatgcaaatcaaagtaccaaaaagattacaatctaacattgcaatttgaaaacatttaaagaaaagaaaagcttcatgcaatcatgaaaaaataaactaaaataagtaaatggatggaatagaaagcttacccactacaagaaacgtttggtgaatggaatgggaagcctggattattaaaatagcacaaaaatcccaagagttgaagcaatgtggggcgtcagcttctagagataagaggagctgttagaagttgttttttctagagagataatgagatgtggatagtgaagagaggtttccctccattaagcatatatagcttcagtgagactgcctttctacttgccatgcagtgtcaactaaaaagcatgcaaaagagcaatgcatctaacttactgcaacaagtgagattagacagtgaagagcagttacttcgagggctatatatgttgcaagatttactcagttaaggctacatcagtaccaacaaagttgtaaagtccctatctgcacatttatccgcatgaagacttagggggcaaatgttatcctaatttttacccacctaacgtgggatgtctatgtggcaaatatcagagccacgtggaaatacaactcaccaacgagaaggccaagtaatctatttggtactacaactaacaaggagtctaagcggtcaagcaagatgatgaatgatgaactagccacctggccagccaaccctagctggccttatggcagcataggccagccaagttctggacatctcatggtcagctagcatgcatcctgcaatgcatgcccaaataacttttagcctggcaggatattggtgtacaacttcacacgtggatagcaagtcagacaatgaattagcccttaacaacccacataaattgagagaaaatatctattttaaggggcattttagtcatttctatttcactaatttaatatgtaaataatagcttaagttacgtatttctaagggatttgaagggtgtaagctctcctatataaaaagcctcactcaaaccctaaaaacctaagtcattaagtcaggaaccctagctctaag

SEQ ID NO: 385546 - DNA, 715 bp, Cannabis indica
attacacaccaacgaattcatgcaacaggtctgtccgaccgaaggcaaaattggtcctctaagcattttataaatggcgaatgatctagaaatcattcgaaacaacgcattcgtcctctggcttctactcatgtcgactcttcgacattgtgtcacaagtccaatctccaaatcaaccctggatcctctgacgatttactaaattgtgacgaacttgataacatggtgccttactcttaaggcttgaagtcaccccaatctgctatctcccatcgacatatgctctctgaaccattcgacttacagtgtccaataaaacaccagtattctcatcaacacaaagcatgcccataacatgtcgcaaaatagcttaatcttgatctcagtctacacccatgcatatggtctatttgcagctcgcagtaatcatgcatgtcttcgaagtgaacaacgaatctgtttgtagtgtttacctcttgattcacaaaccaaaactaaaaaagtagcctaattctacgaatatatgaattagtggtctcccccactttaacttgggaataacttctctcttagaggtatcagttagagctagaggaaaagccaaactcaagttttagaccagaattttggaattagacaatgtcttattcattctaaattttagtagaaacttaatttctgtttcatgcttacaattgcaacaatacaaattaga

SEQ ID NO: 385547 - DNA, 778 bp, Cannabis indica
ggatttcatattttgattgtccatatctttgtatcagtatgttgaatctaatgtgagaaatttgtagtctcactacacaagtatatatgtatatataaatatattaaacacatcaacatagtaaccaaccatatatatataaacgcatttgtaattaggcggctttatatatgtttcatatgatagacaatgacactgtgtctccaatttatccaaatgccatattttatctcaaatgaagtgtaaataagaaaaaaagagtgatgctgattttaagatccttccatgaacttcacagcagggaaattggtgatatggatttaaagtcagtcaacgcaaaaggtttccattgagtcaagtaagtaataatggtaaggattggtccaaactctatgaagagtggccaaatcaacaaatgtatctttgaatactgaaaattaagcagtctaacctgaccctgaactcacgttaccctcaaaaaagcttaaaaggaaaaacttaagaattaggtagttggagtcattgaagagtaagagtgagacactgcccctgcccctgccttgtcatcttttggcatttgctattgattctcacaatccttaaatatcaggctagttgagcatatttgccaaaagccagaaagctaataacaaatcttagcaacatgacattccacatttccaatatctttgctagttcatcatcactatcacttgtatgggcaatcattttcttcttcatcattccacccaagttggataacaccattttcttatta

SEQ ID NO: 385548 - DNA, 3624 bp, Cannabis indica
aacaaaaaaaaagagagaggataatgataatagtggtggtagacgaatggttcaatcagcccgaggtggaagacgagggcccctgtgctcctccagcactgcatctagccttttcttcttcttccaaaagcgaacaaggacctcttcaggtttggggtaaaatttgaggttaagattttggccactggtctaccaagccaagaagactccatcgtcaaaacgcttcttgcagtgttggcaagtgattggggccaggagggcatctctcttcgccttagccgcatccttctgagcctgctcccttaagtcacgaagcccctttacttcaacagttaagttggctatcgtttgcaaatcagcttgatgcagctctcccagagacttcagcttggcggtcaattcttgcactgtgtccttagcatcccgaagctcccgtctcgtagtggtcacagccgcatccttggccttcagttcctcgtccttctccttcaactcgtggaccctcgcctttagcgcctcctgatggctcctctccctaagggcctccttctgttgggcttcctcccggataaccttcctctgtgcctccaagtcccgaagactcttatggcctcctccatgcccctaaactcggacatggtgtacccatgatcgataatagtctttgaaagacgacctgtctccacaacaatctaacaaacagaaaatacacggtgtcaggcaccaaaaagataaaaagcctgaaaacacctctaatagatagaaacttaccgcggtcatggccgcactcacgtcttggatctggtagactgggttggtggaagcacatgttgcatatctcttcatcggaagccgaaccaggttggagacaaagtggcttgttaattctgaggcgaaaggagccagggtgggtccaataaagcggttgaaccagtcgatcagaggatccagattcaaatcccaagcgttcccaaagtactcgctgtaggtgaaactgtcatgggcctcccttagaatctttttcaaagcctccacctctgcgttccccttcgtatactctgcagtggcatagttatgcttggaattatggagttgttttctttcctcatcagcaagaacgtgggttaggacaataatgggaggaacgatgtactcctccgcctcgggtgggatccctgaatcagaactgggagccggagtatcggctctcctgagcttcttagcagcctcggtctccaccattttgcccttgcgcttccggtctagaggggtgagaatctcaccctcttcttcttcttcttctacctccccttccttgttgatcaaaatgatttggcccaaggggaagctagaagagggtttcccgggagtcaccgtcaggtcttgcgcctgaggcagagcggggtcagggctataagtctgggcaagggcatcaaagagctcgtccattggcttcgctgcttaaaaaagaaacaaataaaagcattagaacatcatcaagaatttgtgcatgctagaaaaaagcaataaaactagtcctaccctgacgatctaattctgccatatcaaaagtatgcattaaaagactagtgtcgtcatccctaagaaagctgtccgaagggagaaactagttggaagataaataggctgaatgatccaaagggatacgtgtcggaggcccagaccctattcgggaccggcctaaaaaatgacctaggttggaaaaataaaaacccttggcatgatcgccccatcgaatagggggcatcctaaacctaaggagacgtttatttaactctacatgcctacatcgagaataatcttgagcagaagggacatgatgagcaactaatggagacttactggatccagaagtactggcaccaggagccctagtgttgggaaccgggaacggtagcttaggctgggaaggcgcctcctctttactagctccaacccgaagagccctaccggcagcgacttgagccttgatttaagctaactcttgttccctcctaaagacgtacttttgataccgctcctccgtggaggcgataatgtccgcccgaagcgcattctcggagttcggactgcgaatattgggacaaaggaccttggataaattgaagtcatccaccgattgactctttgtgattagcttggccctcctgcagttcggagtcgtgaccaagtccccaacattcaactcatccttgtcatatgtagagaagaccttggcatgttggaggaaaagctgtgtgggggcggtgcgatgcattagcggtaccctgacgcactccgtaagcagttctgggtgctcgacggcttggaaaccaaaagaaaagaaaaaccgatgatgatactccttgacattcttttgaaaattaaaagaaaccataccctcattagcaggatgggcccgaagtgtgaaaaacgtctttaagtctatctcccttcttggggacagacacaagtttgtaaaaatataaaattttagctgggctaggcgaagcccagcctctggctacataaaaaataaacaagcctgacagcaggtggtacgcttggggaatgaggttgtaaggcgcaaggctgacaaaaactaaaaagttgatgaagtaatcctaaagcggtagcatggccccaaacatgagatgagtctggctccaagccccaaagccatcctagttacggttgggcgtttcctcatctcgggccatgcagtgaaagactcaagaagcagaaggcttgatcccggccacagttacgatcttttccaactggtgggcacaggttaaggttgagtgcaactcgtccgcctcccagccgatggatcgacatgtgtacttctcctggactatgggtcccttcatcacctcttccaaggtggccaaggtagtagatcctttgaggaggatttagctccggatgtagagatagaaatttcttgaagatagcgagattctgaaaaaggaaaatttagcagttagcccccaaaccaaatcctaatgtgaatagagggaatgggggtcccctaactgctggaaagaggccccctccagatgtttgccaaaaatggaaaatcaagggattttcctaggcaaacatcaggtgcaaatgtctcaaaggcagcgaaagtagaggaaaaagaaagaaaaaaaacgagaaagggaacataagtatgaaaaccattccatactctaagtagtccctcaacaaaaaggtggatcacaaaacgaaagagaaagaaagcagcagaacacaaaaaaaaatagatatatatatacgccatgcgacggtcctcgctaaaatcattccacaaaaatcaaatactttaccaaaagctttaccctaacgtgcaagagaacagaaagtaaaaagtgctcaggaaacttacgtaaaggttgtgagctggaagttgatgatgatcgacggtagaatgcagattggcaacgacgtagaaacaaaagtaggaaatctatgatttctgaagattttcctagaggggtttcttggggcgaaatggcgaaatagtgaaagtaacccagtgaaggaaaaatgctgggttttatagaccagaaagggtgcaagacagctgtgatcagattgttgggttttatgccc

SEQ ID NO: 385549 - DNA, 1087 bp, Cannabis indica
tttttcagtagtgtgcctcgcaacagttacaacaaactcaataacagggattacattagcagttggggctagacgaccttcgtgcaaagtgtcagtgacactagattggactctatatgtccagttagtaggaagataccccctccaacccttcttcaattcctagataaaatgctagtaacctttgccatgtactttgtcaggataccaataatgttgcaccttgagttctaggaaaagtgtgtgctcactgctcacttaccagtcttcaaagctagaatttgagagatcataactacatgaagatgatcttgcatggagtcaagggtggtcttcgtatagaagttggatcaagtcctagtcaatgtggtgcttgcctccccaaaaatcactagggttcatatacaaaaggtgggcgacaataaaataagagttggtcgaaggaagatatgaaacatagattttaaatgccgacaagactagatgaagaatgaaaagaaggagcttcacacagagttggcattctcaatcctagaagttcaaaactttagttggtacctgttaatatttagcatctcatgaatgtgtggaaatgaataatttcaggtcgagatcgatgcgcagttagaggattaagcgttatagttaaattttggctaaagtttaaaaccctagaactatctattcttcaattagtcaagaacagttcaagaatagacaaagttcatgacaaaaaatttagaaataatacatatatccatttgcaatcatgtaaaagcgaagggataaaaaacttactcattgttcgaggctttcttgatatgttcagaggttagtgtcagtggattttccagcaagttctttgaagatttaaacgaaagtttggataggaatttttgcactgattctttgagagtaaaaatgattaaaagaattcccaagagctttaatcccctattataagcatccaaaaaggaagataaatcttttaaaatttcaatatttgggtttccccctaaaagtgaacattagtactcattacaagaagtacaaccatcacgcgtgcagtgccattcaacacttaaag

SEQ ID NO: 385550 - DNA, 1639 bp, Cannabis indica
ctaaaaaaagattactcctttcggatgattcaatgctctcttcaactggtgagtttagccttgttagtgctctcagaaactagatcaattaggtctagatcggctcactgaacactttcccaattgaaatgaattaaaaatgcgagacatgagactcgaattgaggatcaacccccttcctttaggctagttcagcaaaaggatatcaaaagattaattgtgggatcgatggatgaatttttggattgagcaaatggattcataaagctcaaagcggtagtacaacgtgtggatacagtgggacaaaacaaaaatcaatagcacaccactacagtgagtgcatccgcctagaattcatagcatcccagcagtttgaatctaaatgaaaagaggtctaacaacgacaacagataggccaatggaaagaaaagaaagtttaatggcaacttcaaacgaaatcccagagagagtgcctcaaaatttactgctttctcagtcctaacagatggcaatctatgcaactacccagtctatggtgtcgtacaaaaaacatctcccatgaaaaaagacatgagcaaaagagatacaagtaagttctgccattttcatgcagactacgacattacacaaatgaatgtaacaatttaaagtcagagattaagttcctaattaggaaaaataacccgcacttgtaaaagtatgtcaaggacaatcaagaccaaagggctgcccaaacaaataatgaccagaacatgttgatgcctccaccagtagataggcatcttcaggttatcattggagttccacacctggctggagattcgagcaaagctagagaaaagtacgcccaagacttgcagtatgaacaaaatgatgcaatcctagccgtagaggaaagaaaacctaaaataccacgtgttggaaaaccaataataacattctccgaagtagatgccatccacgtcattttccaacacaatgaccctttggttgttgaggtgtagattgcacataaaatggtggcatggactatgatagacaatagagcttcctcaaatatcctgtttaagacaacatatgaaaagatggggctccaacttaaagatttgattccttgcactcaggtagtctatgggttctctggccagagggtagcgccacttggataaattctcctaccactcacagttgggcaagctccaaagagcataactataatggcatagttcttcgtgatcaatgtcccttcagattttaaaataatgttagactgataagccctatatgacttaaaagttttcacatcggtgtaccacctgtgtgttaagttcccaactaaaagtggagtatgctgtctaaagggaaattaaaggattgcacaggaatactacaaccttgctctatctacgatcaaaaaggaaaatacttccggccagagttcagagaaagggaagggcattgcccaataggaatttgctcaaggtagggacgaagacatggatccccaacataacaaaccaaatgcaaatgttgggcctatagaagagttagaagaagtggacgtcaatccagccatcctgattaggaagctcaaaatcggtaaaggtttgctgctcaaaataaaattagccttaataaa

SEQ ID NO: 385551 - DNA, 1216 bp, Cannabis indica
atatgacatattatacaatgtcacgggttacaaatcccataacactttttttaaatattttttttatatatatttttgagggccccaaaatctaattcgccttaggcccatatattcccttaccttaaacgtgttgatcctagccccacatgtgttgatcatattttaaagcataaatcaattttgtcttaaataaatttattattcattttataatagataatagttgattaattctcattaatctcttatttaatcagaattaattaaatattattttccaataaaataaaatatttctctcattatattatttaataataatattaactaatatatatagttttaaataaataaaactaattatttaaatctattttaattaattaattaataattaaataattatatacaataataattcatacgaaattactatttttgctctcaataattatttatcttcgagatcaattctttctcaatccattcatcaaattaatcttttcattgtacagtgttatatagaagtgatctgggcaccaaagacctatatttcgaagctctaataaactcatgattattattgaactcatcaataaaataatcaagttcattagttatattattatggagttgtactctttgacaatataaaagtatagtccactgatataatcaatgagaagttcatcctctaattattagttaataattagagctggtacaaattattattttacccttctgattatctcttgaatttcatatgtaccattaattcaatgtgaacagttaatctataattttaattatagattttgatccaactagtagttctcccagaattaacactataagagaactaatatttgatcttttctaaaaggttgaattttattattatataacatgtttcaaaccacacatgctattagattcccaaaactgaagttctaagaatcatcttttttgagaaactttaacaagtaaatcaaaaaaatcaaatgaatgcaaacaagagttcacgaatattcatgatttagattgatctattaatgatcatcattgtgatatgaataactcttttatgatatgcgacacattgataaaacatgttatttcatattggtgttgacatgaataattaaattatacaaagtacaattactaaatgtctatccacatatgtgatttgaatcaaaatcacacacac

SEQ ID NO: 385552 - DNA, 1206 bp, Cannabis indica
aaaaaaaaaaaaattactaattagcaataaaattttatattggaggaagaagaattaaattaaccaagtgacctggggagacaggaatcggctagggcccttatgaaaccactaaattataagtatgacccctttttttacttttcttttttagtttctcccataaattttgagatgtttttatggttcaaaagagcgtgttaaatactttgaatttgactaaacctaatttgtttgattcacttgtaacattcaggtaagatcttacagtcaaaaccaaaaaagtaaatgtaatcaacagaaattgaatacttttgggtttgactaaccctaatttgtttcgagtagaacattttgattctgaacttggaaataagcctaatcaaatgaaacaatctgaacttgggtatgtaatgtagtccaaccatgtgcccaataagatcataaaaaatcaaagagcatatgggcgagtaagctagacattctagagcttctagaatattatttcactttcgcaaacgaagaaattgcctcaaaacattcgattacacggttttgggacagagtgcgtttgctttttatttttccatttttataaccattaattcaaaaaaaaaaaactatttgagttattgagatttgccagtagtacaagggcctgaagaatcagtaagaaatcaaattcaggcgagtgatactggcgattttgatttcgcaagatttcaaatgaaaatgttggctggatcgtcgtaaattcaaaatccagacaagaagctgttcttgcttttcaactcaaagatttcaaatacgaagaagtaaaaaaaaaacataaaagtaattctagaagagaaaacagaacatgaaattagcttactgtagggaaatcgaagaggaagaggagtggtagttgcgttgaaattagggtttatattggagtatttatagcgatgaaaggagagaagttagggttaggaagagaagagaagagaaagggaagctgatggaggcgcacaactaaaaagattctacattttagggatagggtaacagtaatgacggacacattatttttattttgtagagatttacttatcataaaaaatatatatatatatttatagttactagtatattgttacgtgcgatgcacgtatgctatgttttatattaagtattatattatgagttcgaaaggaaataaatgaa

SEQ ID NO: 385553 - DNA, 1562 bp, Cannabis indica
tatgcttaactgtgaactcaccctcttcattccctggcaaaataacaacaagttatagtgaaattgaaatataaagcctaaactaaaagtggaagttaagttgaaaaagataggcaaacccccccccccccaacaaatagcccattcacaaaaagataaaaaaaaaaaaaacaaaccccacccaacaagtgcaaactaactcattttggttaactttaaaccatgtgaaatatcaaaagcatatacccaactgattaacacaataccctcgacagtgaaaaaagattttttttttctcagaggtttgtttgtttacttaatattcaaacccactttaataatcatctaactatttgacctaacaacctaatcccaacccattataaaaagccattttccctgctctaccctatgtgaaccagaaacactcaaaacaaacactaacgaaaatactaaaattttaaaagtttgaaaatcttaccaggtgggggattgtgtgaagtgagcctttgtaatttcattgttgttgcttcgcctccttacactgtcgcctgaaggggttaataggggttacttcatctgggtttgcattttcaattttacaaacgtgaatggtggaagagatgatggggttttttgtgttagggttcgaatgtttaagtcgtactgttttcttctcttttaatttgttttgattttattttttagttttattttaataaattttgttatgattttatttcagtttaggatattaattttgtttcttttttgtatatttctgttttttatttaatttatggattttaatttaatttttgaattaggtttatttttttttaggggagaggggtttatttaatgccacggtggcataactcactgacgtggatcgtgcccacgtaagccaaattagcactaaaacggagccaaggggacggaatagtgttgagcaaaacgaaaccagggttcagagagttatgccgtcaaaattttgatttttgtggttaattgttacaaacctaaaagttaggatggtttagccgtcaatatctcttaaatatttaatttattaaattaaaaataatcacataaataatatatatttttatcgatattataatttttattatgtaatttctactataactacaaaataattttctcattttttttttgtaatcctactttattttatttaagatcacatgtatattttttaaaataattaaatagtttacagtgctgaaaataaagttctaacaaatgtttaccacacataaaaaaattgtgagtgcaacaaaatattttaatttaatcttggcactgtaatttagaatttttaaaaaaatttataaataatcttaaataattacaaacatgcacgaacataaaaacaaaatcaaataaaaaaaattcttgaatgtcgaaataaataagaatgtgccagattaaccatttaaggtgtgtgcactatatatgaaataaaatatatctattctatataaagtgtacctatataactgaaattcttagtttttgagaaatttatgggtaacttt

SEQ ID NO: 385554 - DNA, 1353 bp, Cannabis indica
tttaagcatattttaataccacgtttacagagtctatcaatattccaataataacagatggtttctttaaactgattaaccttttgcactgcagatatatactagttgcttcttactacaaatgttctagtctaggttgttcaagaattccttctaaaaagcaaaataaaattatgttacggccattagaacaaacaatggtttaagttccgaaagaaagaacaaacacaattttaagtctcaaagcaagagtagagctgtgataaataatgacaaatttcttgcaccaataaaaaaaaggtcattatattagagtcctcatactatcccttccttctctaaaccacaaaagctgtaaaatcagtttgatgcttgaatgcttccttacaatttcaatttttcagagaacaaaaaatctatcacatagagtaattgaatagtaaggtaagggaacaaaacagtaattcagatgatttaaccttaagtactaacaacaataatggaaaatacttatcctaaaatctagtgattgttaacagaccaccatttcataaaaccacagaaccttcatacctcatcaatgtcaatcttatatgttgttacatgaggatactgctcgcttaactgtccaatgattggagatatcaacctacctagacaagaaaaagtataagtgaacaagacttcaatcaacatttcatagagaacatattagaaacaaatcaagataaactctaaacttaacattctacatggaagtgcatgattaacaacttacaaggcccacaccacactgcagtgaaatagaaaattgctggcacagactcatctgttatgataacaagtttagagacagagtgaatttaatgatttaaagctgataagattacatgtataaagcagtaccttgaacttttttaaatgcacttttaaatccctcctcggtattaatcataacaatgtttgaagaacctggatcaaactcaaagacattgtacatcatattttcctgataaaattgattttgacactttatttagttgagactttgtcgcttgcaaaaacaattatagatagaaaattataaactatgacctgaaacatatattctcctatatttgtatatgccataatgcaaaataatggtgagagaatttaatattaaaatgtcagtgcatattcaattaaaaaaaataatgacataaaacactattttttgtaaaaaatttatttttacgttcaaatatttttttttttacacttttaaggtgttctataaaaacaacacgaaaaaaacaaaaaaaaattatataaaagtaataaaaaaataacatccaaacaacatcaaaacaa

SEQ ID NO: 385555 - DNA, 1481 bp, Cannabis indica
tcacagaatacttcaagagaaaaatccttgactggttttagcatcagaccatagtccaaagtgccagccacatatcgcaatattcgtttcactgctgtccagtgagaaaggagaggttgatgcatatattgacacactttgttaacacaaaatgctagatctggccgagttacagtcgcatactgcagtgccccaactatggatctgtatagagtcacatcttgaacgggttcacttccataattggagagtttgaggccactgttcatgggtgagttttgtgtattgacattttgcatgtcagctttgcaaagaagctcttgaagatacttggtttgggacaaaagaattccttcagttgtccgagttacttgaatgcccaagaagtaatcaacaagaccaagatctttaagtgcaaaagtactattgagttcagcaatgagttgattagcaagtgtgtcatcacttcccataactaatatgtcatccacatagacaaggatataggtgcaacttgtttgagaacatttcacaaacagggactggtctgacttggaaaattgaaaaccatgctgaactaagacagttgaaagtttctcaaaccaagcacgaggtgcttgtttgagaccatacagcgctttgttgagtttacacacatggttgggatgttcaggatcaacaaatccaggtggttgttccatatagatttcttcatgcaagtctccattgagaaatgcattgttgatatctaattgtcgtattgtccacccttttgtgattgctattgtgagaacaacccgaatagtgacagcctttaccacagagctgaatgtttcagagaaatcaaaaccagctttttgatgaaaccctttggccacaagccgagctttgtacctgtttagtgacccatccttgtttaatttgaccctgaatatccacttgcaaccgatgggaactctgtctgcaggtcttggaacaactacccatgttttgtttttctttagagcaacatattctgtattcatggcattattccaatggggttcaagcatcgctgcttttactgttttgggttcacacacagcagagaaggctttaggtttccttataccagatttgagtcgagtttgcatagggtgtgtggatgtggaagtaacagtgggagttgtgattgtggggagagggatgatggtagaggtagtgttctggtgggtgggaagttgggaagtagtctgtgatggttggacagggacactattattgttggtttgagaggaaattggtggactgttggtgggaacagtaggagtgagagatggtggaggactttgtgttgttggttgaggttggagaagagaggaaagtggtggtgcaccagatgtatgggaatgcagaaactgagaagatgcatgagttgtagcagcagtgttggcataaggaaagtgcatttcatcaaatattacatctcgagagatgtaaat

SEQ ID NO: 385556 - DNA, 1541 bp, Cannabis indica
gaagaatagatttcggaatggtacgaagatggctttaaagttagacatggctaaagcttatgatcgggtagaatggcattttctacgttcaatgatggtacggttgggatatgaaagtgcttgggttgataaggtgatgagatgtgtgacttcggttagcttttcctttctgattaatggtgatgttcaagggagagttgttccggaaaggggattaaggcaaggggatcctctttcgccatttctttttctgttttgtgcggaggccttctcgaatttgattcaacatgaggaacaacagggtagtttgagggggcttcggtttgcgaggtatggtttatcagtttctcatctattttttgctgacaatagtttgatttttatggatgctgatgtgagagttgtcagcggttcaaggaactcctagaattatattcggctgcctctggtcaactggtaaattttcataagtctgaggtttgctttgggaggaatgtggatagggggttcgcgaacaactttccactttcttgggggtccgagaggttgaacatcatggtaagtatttgggactgccatcttttgttggaagaaataagaaggaattcctggatcaaattaagaataaagtgtgggcaaagatgaaagggtggaagagttctatgttctcaatggcgggtaaacaagtccttattaaagcggtggttcaagccattccaacgtatgcaatgtcttgttttcggttgtcaaagaagactattgcaagtatccatcgcatggctgcaagattttggtggggttcttcggataaggagaagaaaatacattggtgtaagtgggcacatttgtgcaaaccgaaggagaaggggggattgggctttcgggatttggggatgtttaatcaagcattactagctaaacaagtgtggcgatgcattcggtgcccggataacttgtgtagtagagtacttaaggcatcatattttccaactagaagtattctggaggctaagagtggtgcacatgcatcctttgtgtggcggagcttaatgtggggaaagaaggtgattgctaatggttataggtggagagttgggaatggggaaaaggttcgggtacttgaagatccttggcttccgcgaccggttactttcaagatctatgataagcgtcctcttccggggaacttgtatgttgcagacttgaagcgtggggatggttgttaggatgaaaattttgttcggtcagtttttaatgtggtagatgcggagctcattctttctatgcctagctcgggatgggatatagatgataaggtcatgtggcactatagcaagaacggcgaatatacagttaaaagcggctataagatggcgtcttctttggctactgaacaatatcagtcagatgatcaaagttatgtggactggtggaaagcattatggcgccttaaaattctgccaaaaatcaaacattttgtgtggaaacttgcatatgaaaaaccgtgttttcgcaaatgtcagttgtatataagaaaatat

SEQ ID NO: 385557 - DNA, 2113 bp, Cannabis indica
agggcataaaacccaacacagtaatcatcccaaagaaacaacccgtcgtcctggcaaggagcccatgggatcttaaaggcccaacacctccaaaacaccacgtttaagtaggaatgatggtgatggagatcaagttccataaagaaggaacgatgataccaataactctgctagatacgttcctaggagtgaggaggttatgacccaactagatacgtaccattggtggagttggaaattaggcaatttcagtaatgattggctaaatctaaccaactaaatgttgagttggaaagaaaggctgcagcagctaggacggtgtagggaacagttccacataaccaaccagaccttacagcaaggaggccacgaggaagacctcaaggctccagaaccagaaggcaggaagcgaatcaagagacccctaatacccaggaaaagcaacctaagggatgtccccatggataattaaactaatctaaatataataaaaaaaaatcaggaacatcggcgtgatgttccacaaacttcccatgggtttaataaccaagggaatgaacaaaccgatatgctagaagcatctcgtacaaatgaagaggcaaggcaacctcgactagggaactagggaatcccttgaaataataagagaaaccctggaaatcaaccaaagtcaagcgagcgtcctccgagacatcgtcaacgaccatctcgagcagatagagacaatgtatacacatacttgaacagatgacgtgtattaaatctctttcagaggagaaggccagtgcgagatgaagcaagttcaagctcgggacaatcgaggtctcgagggcatagtcggtcaagcagacatacacgagaaggaagtagaactcgatgttattatgctgaccaagaaagcatgagcaatacgcaaagctaccaatctgagagttattcagagacaagatctgtgagtaattatgagcgaaggtagcctgatctttgcaaacacctgaatcgaagacaacctgatctttgcgagcaactaaaccaaaatgcacctgatcaccatcaactcaatcaaaatgcaagtcaagaacacatagaccctatccaactgcgaataattaaactagaggataagttcaaaaagtatcaggatggagaacatgaaaaattacctggctatgacttaaatgaagaggctgagccatttcatccagatatattaaattctgagtttcctcaaggattcaaaaacccacatattccgtagtacgatgagaccacgttcccaatcgctcacttaaataactttaacactatcatgcgagccaacaatgtctcaaataatttgcattgtattttattcctaacctccttaactggagctgcgggcagttggttcgataaatttacccattattctataacctcctgggaacaactatctagggacttcaaaaagcaatttcaagctgctagagaccggcgacctgaagcattgtccttaaccagcataaagtagaaaccaggtgagtcactcaaggcttatttaagtcgcttttagcactgctgcttcaaagtttagaaacctaaatgatagtattcaactcactgcacttcaggcagggatcacaactgacctatccacgactggaggtgaattatgggatgatctacagggttacccagtgaggaacattgatgaattcaatgaaagagcacaagtatttgtggataaagaggaagcaagaaatgaaatgaagctgttgaaaactggcttgggaggtaaacacagcacgagtaaggaaccagcaagtataatctcgactaaagtggacaatcctagtggctcaaaaacaaaaagaaaagatgagtcgaaagattcgtccaaggataaaaagaaacagaaaaagcacgacaaatatgtttcgattcattcactatacaccgagttaaattaaactcgcaagaacatattcctcgctaatgaaaacagggttgcatttcgcaaacgtgaacccatgaggcatgcgagacataagtgagattcaataaaatactgtcggttccacaaagacatagggcatacaactgaagaatgtcgacaactgaaagacgagataga

SEQ ID NO: 385558 - DNA, 1233 bp, Cannabis indica
aaaaaataggataacatttctcccccaagtttgcgtgggaccttcctggtcgcacgtggacttcactcagcctggagtcttgtcttgatgggtgacgcattgtttaggtgttgaacgatgaatcgacgtgaccttgactaggggtctcttatttttgcccatttaatgctgattgacagttttacctcaaatcacagtccaatgcttgtgcgtgtttggcggttacactccctgtaatgagtacataacgtacacttttaggaggaaaatcaaaaaatttgaattttcaaaatgattaattccctttttggattgtttatagataagattaaggatttctggcaatccttttaaccatttcaattcttaaatgcccgagcaaaacactttttattaaatttcctcccaacttcttcgaaaagattcataggaataccttcaatggtttcatcttagtagagcaggaaagcttcaaatcagtgagtaagttcttcatttctttcttttacatatttgcaatgaaatgcctatattatttctagattttttgctatgaatctcacttgttcttgaactgttctaggttagccatagaatacctaggtttagggcttagaaatcttgattgaattcagccataacgtctgattgtctaactgggcttcgaattttaaccttacaacgtttattttcactcgtccattagtgttttagtgaaaatcagattccaattcaaagttttgaactttatgggttgaaaattctatttctaggtgaagcttttgcttttgatttcttaatcaaacctggtcggtattgttgacctcgcttttagccaacaacagtaagtcaattaataagtgataagaaacgtaataaaatagagcaaaaatcaataaactataaagaacacaaggttttaaagaggttcgacccctttagttcggtaatagcctactcccctttgcttgtattgacttaagaataaagaatatagtgtttcctctctcaactttaggacaaatcaaatgaatatttattaataattctacattgttcatttacgctttaggcgttttcaactcattctaactcaactttgaatgataaccatgatagaaacagtattctagaagagactcccaagagaagttagacataccatatttgatcataattgaatccctaaagtggttctatataggtacctataaatgataaacatatttgaaa

SEQ ID NO: 385559 - DNA, 1821 bp, Cannabis indica
ggagcttgcatattacggtgtgaatggagaacacatagtgttgtctctctgggtaggaactggagtctctatattctttggtatcttaggagtagtatctgacttaatgtaagtttactcatctattttcttcatcagtgcttttctctatttctaaatcttaattcattagttatactagcagaacatcaacatattagaatttcctctcttccaaaaatttagaacttagtttgcataatctatttaaggtgaggatactcattacattatagccagaatgtaatctgtttatttaatagcttagggttaatgctcttcagcaactgttgttcttggcaatgaaccttgttaattttattttccattttaagacattggtaaacttaaatatttatcttattttgtgatgatttttgtaatagtcattgtttaagagttgaagataaattgaaaagttaatcaacatgaatgtcactattgaaattcaacaattattagtgagactatcatgtgaatgtgtgtattgtattaacattaggatgaaaattgctctggtttattttttgttaatttgtttcattatttggtaattgcaattataatagttaattacaatttttatggttttagctatactatcttcagtgaagtgccatatggttttgatattgttagatattagaaatgctcaaaagttaaaacatctcataaatgacaaaagataacttaaaatatacacgatgtagtgcaagtaatctgtggtgttgttatgatttatttttttgttctattttttttttcaatcagtagttgacatggagaaaacatccaaattttctatccagttcaaccacaagtcaaaggagttctgaccatgttttccttcatgaattgacacaaatagagagtgcttaccactcttctttatatcatcatgtataaaattaaatactatattatataaataaaactaagcatatacatgcatttttctaaactttggaagagtagagagatgttgatttaaaaaaaaaacaaaagtgtcatgacgagttatctttttttgttgagcagctattgggggaatctcatctcaagaattgaatctcacttgagagaagatgcaataaagatagcatatcagtggaaagaaagtgccaatactaaaaacgctttggagtttttcaagtttctacatatctatgtttacttaccaaatacattgacccacttacctttataaaacaaatcgttcaaataatcatattactttatttagcaaaatctttaaaaaaaaactaaaactttaaataaaactaacaatacgtggctcggcacgtaacatccacctagtatataaatatatatgtataatgcactcatatatacaaaaatacatcgactcacatgatatatatatcttgataatacactcatatatataatcgacttacatatatatatatgtatattttcattcatcatatacatatatagatttgttaattgcaatctaaagattcaaagcagtaatgtaatcacacacgagacgatatgaatttgttctttctcattcaaaatatattttaccaaaaataattttaataataaattcatgaacaagagtatatatatatgtgtatagatatatctcatggatgagagcatctaattttttgtgtggaatgagagcattcgttggatgaagccatctatttttttggtgaaatgagggcatctattttttggtagaatgagggcattccttggatgagggcatctattttttttggtagaatgaggacattccttagatga

SEQ ID NO: 385560 - DNA, 1765 bp, Cannabis indica
  modified_base (92)..(92): a, c, t, g, unknown or other
accacatattgatattgtagcttagagttgtgttattgtatggttgtgttatgattcatgaatctctaaccatgcattttttttttcataanctgatggttgtgacatttcaatatgagccatcttgaaatagtatatgcaacttgcaccttctattatagtatagaacttaaatagtgagtgcattatttttgtttcaaagcatctatagatattacaatttatatatatttatagtatatttattgtacatatagtgattatttgggtaaatattattttagaaatttattaattggactatttgttttgttttgttaaataataaaattgatcgtattttttacaattatacaaataagacctgagcttaattattaataattttattgtttaatttaacaaactttaagataatttttaacacgaacagatacagaaaatgtaactagttttgtcataacatctctaaatcggataattatgaagttttattttgaaaaaaaatcagtttagggtcttatttttaattttaaaaaatacaaagtccattttattatttaacaaaatagatggtcaaattaataactttgcaaaatacaaagtgcaaaataatatattttttttttttgaaacaattcttgcattaacaaacatcaatagagaggattcggcacatgaaacaacacatataaaagcaaaatttgaatagtatttaccctaactatttttacaaaattttgaatgatttataagcatttaaaatagtgctcacatataaaagccaaaactaagtacataataacttcattataaaatcaattgttagtgtattataattctttcttaaaaacagacataaaacctaatttaaaataaaataaatttaattatataacccatcacccatgtcacacttggtaccttcaaaagcataagaaacttgcccttttccatccatggagtttaaaggaactcgtaaatcacaatagatgtacggttgactgtaaggaatgttaaccctcaacttaccaagctttgtccgtacaaaaccagaaaaccctacaacaatattgtaagccccatctctcatctcatcaccgaaacgacaaaggaagttctcacaattggagccaaacgacaacatgtgactcccttgaaaaactacacccaaggtggttgtcgttttgtgttttaggtagaacggcgttaagaccactttggtcaactgatattggccctgaacaaaggccgtggcttcaatgtcgtcgcaataaatgtccacaaaggcgttggggtttgtaaatgcgatgtcgagtgacatgtcgtatgagatgataaaggtgtcgtttgtgttgtttctgagagataagttggtgaggaaagcgtcgtttatgtaaacttccactttgggggtatttagccataggacaaagccaactatgaggataatacatagtagagaattaagggtgttgtagaaaaattcagagagccgaaagaataagaattttatttgcagagccattgataagggattgagagagataaatgtttttgtattgaatggtaataattaatgacagttatgattaaatcccaataagatatgtcaattagaattgtctctaatataaaggaactagatttgggaaacaaatcttaatatatcaagtaatgattattacatactaaattaaatttgttataaaataatataaaataatataaagtagatgagaagaaagaagaagaagatgaagag

SEQ ID NO: 385561 - DNA, 871 bp, Cannabis indica
catagcaccttcaactttagaattagtacaacattttcctgaatcgactatcaccaaaggattcccaatttttcgtaaagcttctgcaagaacaccaacattgtcatccaaattgtttgcttgtttcaaaatgttccgaataacattgtagaactcgggtggtaatagacaagtaatgtcttccctaccaagcaattcaactagcatttcatgatagtttccagtgttcacatagagtaaacacaaagcaacaaagagtctcaacaccagcagtggatgacatgctaagctgagttcagaattttcgatccatgtcttgacatcgccttcattacaaagaagctcgaaaacaatggcccccataatgtcaagaatgccaccaaacatttgttgccattcatcatctgaaacaagcatagctagctcatgctttttccatccttgatgaattaaccattcaatgacagagcttttgattgaaaagaagaacccttttaagtagaaaaccataatcagaaaacgctcgaaaatgtacataaaagtacttggcgaaatgtaatcactttcacctagagagtcagcatagtaagtatgtttcaaagctttataaacctttcttatctgagaattcaagggaacctttccataacttttaaagaaagatttccaaaacggaacatgatcacacctcgaagaaattttctcacgaaattcatcagaaagtctctgagatcccccaacaattgtcatcaccagatttccaattacctggtatgtcaaaggactgagtgagctaatagttttacaaactatatgttggacaccacaacacgtgaaaacgtaattactttattattgaaaaagtaattac

SEQ ID NO: 385562 - DNA, 793 bp, Cannabis indica
agattactgccttcttccttaaattcgtccaccagcctcttgcaatcgattctaatctcaaaaaagttgctattgtcaatcgggcaagccttcagtgcatcaaaaattgtttctgcttcagcaaggatcacagaacagatgtttggaatgaaaatcatacctgctgcaatatttttgccagaccagtccctccaaataaatcccagccccacgccttcttttccaggattcagagccgcatcgcagtggacacaataaacaccctcggggggggggggggggcgagctagcgccccagattagtagcaagtgtaggcatctgtctacagtttttctccttgcttctagcagagtttgggtagctattaagcacccaatcaatcagtcaagccccatccataacaggcagtttattccactgcctattcctattctcccaaatggcccaaaggattttaatcacctcctcaaactcctctttggacagctgatgtctaaactccactaaaagatcaaacatagagcagcctttgctctcccgaatctgtttatagtaaggcattaatttccacactgttttaaccttgtcacaattccataacgcatgacggagagactcaacgtaccgaccacattggttacaatgaggatcaatcatcatgccatcaagtttattttagccgggagccaattgttgttggaaatattttaccaagatctagatttactaccaagtatgtttgattaacatcctaatatgaattctaaaacaatgaaataaacacataagagt

SEQ ID NO: 385563 - DNA, 950 bp, Cannabis indica
agtggtttggatcgggggatgccaagcacatcctaaatatcgccctgcccgcgacaaggaaggacgattcttggatgtggctaggtgaaacaagcggacaattctcaatcaaatcagcctaccatctagtgaagaatggaccaagatccttgccccctacttggcaatggaagttagtgtggaataccaaaatgcacactagattgaagatactgtgctggcagattctaagggatgctcttccaactcgagccaagttgggacagatcatgactctcccctccgttctctgcccgctctgtaatgatgaggaggagacttctatacatctgttttggcaatgttcttttgcaaaagcagtttggtatggaagcctttggggcattagaacggactcctttatattccatgattggatggggtggcttcaatggttcaattgctcaagaaaccttcccaacaacctggactttgctactttcctcattggggctatatgcatattcgaggtgctatggcacaatcgtaataaggtaattcatggaaccatcagtactccgattaatgaggttatcggcattgtgaggcgtaaattccaggatcactcatatgctagccaaccccttccaaagagtgctgagatatgtataactcctcctacgggatggatagcgtgtcatacggatgtatctattgatgcggatcaatcctacggagcggcagtgttcagggactcgagtaaccgaattcaggccgtcttctcgattcatctcaatgtaacaaatccaacattagcagaggccttgacaatagtgagtgctgctgaatttggggtgcgacgcaccttcactaatgtaatatttctttgtgacaattcgctggtggtatcgtatttcaacgctctgcaacgagaggatcatcaactgctgaatggcgctgtagaaagattc

SEQ ID NO: 385564 - DNA, 2195 bp, Cannabis indica
aaagcaagaatagaaatataaaataaacaagagaattatagtgatttagtcagaatttggtctacttagtccactttgtgcaacagtttcaacttagtttatttgatttggatcaccctttataagcaagtgtccattaatgttatgtaattgattaaattggactattattacaataactgcacaaaattaattaagataaacatttaaaagaataaatataaaaacagtttcatctgttcttgtcttaattacatcaatgtctacgacttgttaagttgcatatcgtccgtccatattccaaacacgcaagcatatttggaaatcatgtgttgacaacttagaacatatgagttcattacgagtcatcacacactcatcattcagaccaagcctatgtaaagaaacgatctttacttgttacaggagagacatacttgctcatcgcatataaaagacatgtgggaccaacattaatctctcacggccttgcttatcttttgattatactaggcatagtatgcgactagatcctgtctcgatttcatcatcctacaaattcaaatcattcgaggttggctctacgagaaatatatcattaacacgtcatccttttttttattgggaactgggtccacgtgtcaatttctcacgagactataacttgtatttttagataaaaaattgcacaatactgatttctataaaataattataaatttaagattcaaatttgttaaaaataaatttcactatttttaattgaatactttttgttacaatatttaactttctaacttgttcctacatacatataattataaattaaaacaaaggtaaaatctaattttatttgtaatgggtttgattttttcagttcttaaacacacatgaatagctaatgaaaccccccccccactaaaataagtagtctttttatttttaaattcaaataatttatagttagattatttattgtggtagacctacctttaccttaccataataaaatacatattattagacatacagggctcgtttagtacgtcgtattgtattgtattgtattgtattgtgtttgattgtatttattgtattgtatttattgtattgtattattttgttttatattatattagtataatttaatacaatactatatttggtattaacttttattaatagattgtataaagttatatttttaataaactcgatcccaacatcgactacaggtgaggtttgagtcctgggtctgggctctgggtccaagtttgagtctggaaatagggtcccagtttgggtcttgttcgggtccaggtccgagtttgggcctgagtctaggcctgggtctcgggtatgagtgttggtctaggtctaagtcttaggtgtgggtacgggttcgggtcccgggtccggttcgagttggagattggggttgacccgaatcctttgtaaatattataatacaagctaatacggaccatttgcatttggtatgtattaaaaaatacaacttacatccttagttgctagcaaataggtgcgaacacacctactataatcatcaactattgaaagaaaatattacttactagagtgagtatacgccttgtatggcccccaaagatcaacatgcacatattcgagtatcttcttagttgtgtgccttgctagattgaactttagctaatgttatttccctaaaacacaagcttcacgaactggtaaggcacaagaatttaaatttttaattatacattgtttatgcagttctttgaggccttgttcactaatatgtctaagtttgtgatgccacagttgcatattcgatctagcccttttaccatgcttgcttctctggttgggacagtttctccttggagaacatatagaccgttgatctttttacttttcatcactatcaaagaacctttagtgattctcaagcttttgtgcatggacttgtatccgtatccttcatcttcaagcgcacacagtgatatgaggttttgtcttaactctgggatgtgccttacgtccgtcaatagcttgattctaccatcatattgtttgacggtaacctttctagctctaatgaccctgcatgaatgatcattacccattaaaactttacctccatcaattgatttataataaaaaaaaaatgaatctcgactcagacacatgtgata

SEQ ID NO: 385565 - DNA, 1198 bp, Cannabis indica
ctaagggaggctcatgatggcctgttctggggtgagtataccgatgaagtctgggatttgagccttgatcccatgactgacttgttcaaccacttcctgaatccttatctggctccttttgcctcagagatggtgagtcattttgctactgacttgagttagattcctaccaaaaggtttgcggtatgtgcctcttctaacctagtctaccaaatttaggacatgagtgtggcccttacctctgtgagtctatactctaaacatctttcgagttttcctttttgctcatttcaatgtccttaccaaaccccattattatttattgttgccaaattactgctaaggtcggtcatctttcaaagactttaattgaccaagggttcactatctcggaatagggttgtatggacggggtgcttaggaagctcagggaagcagagagccaaatgcacacccttcgaaatgacacctggtagagaaggcccttagggaaagggaccaggaaactttgaacgccaaggatgaaattatttcttcgacccaaactaagctgacacaggcaaagatggatttgttgatgcccaagaagaggtatagggactgacgtccaaacttaagactcttgaatattttcacaaggcctacatggaaactgtagcgaatatgtcaatagagcttaaggagctgcatgagtttcaggaccaaacacagaaggaggacatgaaagctgggagagacgccctgttaactctgatgtcttgtaagcattgtataaaacgcttcgaggacggagtctgcatgtgctaaaaatcaaaaagatttgaaccttgcctaactttcatgctagatcctgaggctactgtgactcatttttgggagaagaacaagaaacttgaacagtcattggtagaacgggtggtgttgggctttgtgccctaaataaaactctatttcaatgtaatcttttctattcaattatcaataaagaaatagatttattttcattacttatttagtatgtcatttggttcatgtgatcatttatatgtttatttgattaataaattcatccaaatccttatcacattgatattcttgttcattgtgtcatcagcatagtggaaagtaatccagattatgtgattaaatgtattcctagatttattagtacacagggtttaactaatatgataatcta

SEQ ID NO: 385566 - DNA, 893 bp, Cannabis indica
tacttaacaatttattttattctcatcaatatagcaagcgggtgtggctcagaagtctaatccagattttttgagtcaacattttaatgatttcatttagagacatagctcaagagagttactcataatatggttgcaacacattctattagtgttgacagaagaatcccaataatttcccaatcaactgggggaacgctagttaatggagttggaacaagagctactcttgtaccccaggttctaggagtaggcctcaaaactagctctttaactctccctctaaggccaccatatgctcctgggacaagcaccaatgactagatccgacctggggagcctcacgtggatattgatgaccctaaggagatcgatcctcaggtcgctcaacttagccaaattgtgactaatttacaacaacagctacaagactctctccataataaataggaatagttccaacactggtttgtggaaaactggaggaacattgaaagccaacacattaagcaagaacaatggagagctaacatgtctcaatagattagagaagcttatcgctctaatagcagaactactccctgcaggagccttttcaagttggtgagagagactcctcgttcaccaactggtcatgtcaaaactactgctcaagggaaaacccttaacactcaaaatgccactatcacatctggtaactaagcaggcactaagaaaacaccaggcgtggagacctcccagagggaaactaccttcaagcaagagtccaaaaggactcaagctcgtgggtgccaaccaatgggccctcaaactgatgttgaatgacctcgcaacaccgagagatgtctatagtaagaaaaatgttaaggctaaataatagtagtgtttgaaaa

SEQ ID NO: 385567 - DNA, 783 bp, Cannabis indica
cttttaattttcttccttaatttcgaatccacaacactcacacacattatgcttaggcttagcccccaaatgataaatttgtaaccaaaaaaaaaagaagccataagtgtgtataagattgtttaattataaataatattaattgaccttgtgcatagatataatacgattatacatggttaactggttaaatcaaatgaatttcaccatgctgcccatgataatatcggagaacataatcgttctaaaggctgatatgaattattaatttatgaagatgtacatatatatatacatatgggtggactctcttaatcggcattacttattcatggataatatcttgaaaatttgagtttttatacttagtttttctatctaattaaaaaaatctctaatttttacattatatgagttaagattgtttcattggctgaaaaaaaaaatcaagaaaaaaagtttttcgtcaaaaaaaaaaaagagttaaatttgatttaagtattttttatataaatatatttttaatataccataaaaaataatgattttttatatattttttttaattaagtagttaaattaagtacaaaaatttaaattctcttttgttattttgttttttgaaaataagcgtagtcatatattaaatagatgttagacctcatggtcgttacacaaaatgttattcgtcattggatcaaaatctaatagtttaatatttttaaaattaatatttatagttaaatggcttagtaaccatcaatgagtaatacccattaagaa

SEQ ID NO: 385568 - DNA, 2882 bp, Cannabis indica
tttttattttttttacttgtactgtataattacgtaatttattataagtttgtcatcataataaatgtcatgtttttatataaagtgcaaagtgatagagcaatagttataagtatcgttagaaccactcatgatgtacaaggataagaagttaattagaatcactcttaatgtggttgaggcatgtattgaatttctattacacttcttgatacaacaaacattaggaacactaatgatgtaatagagaagattggtaagcctttttttttttgcattttctaaaattattgtgttcttatattgattctgaagaggtctgttcatttatttttttttctttctcctcacattcctttattagttttatggtactaaattaggtacgcaatgaaagatttgtatatctgattatcaatgtaccatagctccaatggatctccagaggtataaatattaaatcaaaacataaattacatgaaaggaatgtttacctcttgattactattaagttatcctcgaaacttctcgtaaattgaatccttttgggttgattagaaactcacactgtagtcttccaaatggatccaccacgtataaggagtagtgtggcatactaggataaagtgtataagtgttcttaattaattctcaacacgtgagcaagaacatttgagagaaaaaaaatagttttccttttctccaagtgaatttcaaaaatccaatgtgaaaagcttcttctgatttataaaatcaggcttctatttatagtagttaatttctcattaattaaatcatatttaattatttaaacaaatatctataaccgaattcagttactgatattttagatgagggaatctctcaactaactttgaggaaatatctcaactaacttgaaatatctttaaccacttttcaaattcaaatatttatctatttgaattaatcaaataattaattaacccaaaatgataaacctaatagggacaccctactatagggtaggcgcctaccttgtcacaattaagacaaggatagtattttttgtcctgataacttttgtgacaagaattcttgtcgtgacaaattttgtcttcataacttttgtctttttcctatttaattaatttgaaaaaatatttatttaatataaaactaaataacttctatttttctaattcaaaatcgatttttctgaataacagtatacaattctttatccctacccttaatagtgttttaaggtaccaattccgggaccatggacctataattctatgctacgataaactagattatttagtgagttttatcaaccaaataatcctgtttattaattccatgattactccactataaatataaaattgaactcttagtaattatagaattatatttattgagttttactgcagtgtccattgatacaatcaattctagtgattagccctccttgtgttggttcgtaattagttttggtcaaaataccattttactcttctaataacttttttatcttttagtaccgttaattcactagtgaaagtataatttagatcccatctaaatttgtgcacaacttttcaattccaaaattaacacttaaagagaaccaacattcgatcctttaggaaagtcacgattccataattgcagatcctgttcccaaccattcacattaacgataataaagggaactgacattcgatcctttaggaaagtcaggattctataattaaaaatcatgttcccagccatctacattattagattcccaaaaaagaagttgtaagaatcatcttctctgagaaactttaacgagtgaataaaaaaaactaataacataaataggagttcatgattactcaggatttaggctaatctactattgtgttgggaatattttaccaagatctagatttactaacaagtatgttgattaacatcctaaatatgaatatctctaaaacaatgaaattaaacacataagagtttagaaaaccttacattggttgtagcggaatataatgactccttccgctcagatcactaacccttgttcctttttgtcgcagagtattatcaagatctgagcctgaatctctttctctcattcgggtttggttaccaccgtcttactgactacgacctctttctctatatctaggattgtatttactcttaggggtggagcagttgtttggagaagtgctaaggaaaccgcaacgtcaaactctaccatggaggtcgaatacatagctgtcgctgaggctactaaggaactggtctggctaagaaagttctttatagaacttggtgttgttcctggaatggaaaaaccattggtattactttgtgacaacactggtgctatagccaatagtaaagagccttgaagccacaaggaaagcaaacacttagagaggaaataccacatcatcagggaatatgtggcaagaggggacgtattggtggagaaagttgatactgaagacaacttaactgatccattcaccaaaattttgactgtaactgcatttgaaaagcacagactgaatttaggattaattgaaatgtactgattgttttatgttagtgcaactgggagtttattgagttttatgccctaaataaaactatatttcaatgtaatcttttatattcatttatcaataaagaaactgatttatttttattacttatttaatttgttatttggttcatgtgatcacttatttgatttataaattcatgcaaatccttatcacattgaaattcttgtttattgtgttgtgaacacagtggaaagtaatcaagattgtgtgattgaatgtattcctataatttatcagtatgcggggtttaactgataggataat

SEQ ID NO: 385569 - DNA, 1712 bp, Cannabis indica
aaataaagggagccccaagtatttaatatcccatctggcaaactgatgcccaagtaatctctaatccctctttttattccctccttagtatttttactgaaaaaaattgaggttttaagcttattgacttattgtcccgactaggagaaaaactttcccacacaatcctagtaaccttaaacttttgtcaaattgactctacccactaggatatgatcatccacaaagaggatatgggaaagggttggacctcccttactaagtctaatccctttaataatgccatttgcaagggccttctccaatagtctagatatataagatttttgcagcccaaatgaaaagatgaagagataggggatcaccttggcaaataccacaagatagaataattctcccaacatggcccccattgagacaaacattaaaagtagaagtagagatgcactggttgatccgattacaaaaaagctcaggggccccaaaactcccaagaacacactcaatgactgccagctcagcttgtcataagccttcacaatatcaatcttaatggcaacgcaaccctccttacctttcttctttttgaaggagtcgataaattcttggtcaataacgttgttatcttgaatatttcggctagggaaaaaagcagcttgagtcggacaaatcagtctcaaaaggatgggcttgattctattagcaatactcttagagatcacattgtacaaaatatttcaaagagaaataggtctaaactgactgactctcttaggattcaggacttttggaatgagcactaaattagaagtgttaacccccttgtgcataattctagtcatggaaaaatcaaaaacaacatcacaaaagtccccactcaccgaatcccaataattcttgaaaacaaaaaaaaaaaaacagacatgccatccggcctaggggccttgttacttcccatggtaaagagtatcttcctaatctcatcatctgtcagaatcttgttacttcccatggtaaagagcatcttcttaatctcatcattgtctagcctaagggcttgtttagccaaaccatgggccgtagtattatctttgcgggacacatgagacaaaactaccctcgaaaatttagacaataaagctatgacatcctcgatagcgcaaccatctcatttgtgaacacctttctattattagtagccattactattgagagagaatcagatttaaccgcttctaggggaatcccacacaaatgagcccagtttagaccactcaacatggcaaaagtttcaacttgaaaagcagtaatactacctgaaaagaatcaaacaacaaacaacagagcaacaatactaccaattggaaaacataatatccacaaaactagaaaatacaggaagagactaacaatcaaataaaaacccctccaacaccgaaactgaaattactattgttgcccctgattttgcccaatatacgtggaccaaccggacagggacacgtggatcaaaatgtcttaatgcttgaattatttgccaagtctttgtgatataaggcaacatccgagagatacctcccggagaaggcatgctgagctccatacgctcccggatgcccaagtaatactaaggcatctccgtgaggtgtcagatttcccctgagcagtcaattcgcatttaatgccgcatgggaggaaacgtgttgggactg

SEQ ID NO: 385570 - DNA, 1972 bp, Cannabis indica
ctctctctctctctcttttgtctgaaatttcatctcgtctaaaattcacaaaaaagttacaaaacagggtggaggtaaagattaggcagtacaagtgtcgaggacaaccggacgatgtacaatgctgcatgaagattattaaaagcttcatgactgaacacaatcctgtaacttttttgaagaatgtggaagttaaacatatatgatttatttgataattagtttttatttcaactacattcagtattatttatctctagttgtacagttcaaatattacaagccttacaaatcaggagataaacaaaatacggaataaatggactgattttgtgaactcttatatattgaaggattgagtacagagttctttacattttgttatgatacatgtaagatataaaacttatagctatttgaccattacttttggctatacttagttttatttatatacttcatagttatatcaattttttgttatgacatgtaggctacaacttttatgatcgttacttttggttatattagatgtactttatagttataccaatttttttagttacatgaaaaatattatcattattatattacaaatattattgttagtcatacaaattgttatacaaacaaattctaatatctaaaaatgtaggtggggaaaattgtagagaaatttgcaatttttccttacctacagctatgcatcattttatagccgacaaaaaaagtaaaaaaaaaaattgcatacaaatatgcatcaaaatgtaaccgatgcaataactcaattagcatcggttagagtttgaagcaaagcttcttgcttcactttagaaccgctgtcaatagtgcatactatttgcttcggttcttaactgaagcaaaaaatagttcgcgttggttttgaaacaaagcaaaaagtaagactatttgcgtctgcagttattacgtcggtttcactttacaactgaagtaaacaattatttttgcaatagtttattaacggtaaaagaaataaaactaacaaaagagcgtaacgtaattatgtaattattatattttaaagaaaattttaaacaagcattatattttatattcttagatgcacgatcgtagtgtctaaaagaacctaatcaacaaaaggagtgtcaaaatataattattatatttttgaaagaaatttttaactagaagcacaatttagtagtgtcaaaggttcaaaagcaaaattgataattattctaataaaataatatgactaaatagttattttccaaaaagtaaataagaagtacaaacaattaaagaaaacaatagtaaaatacagtgaaaaaggctcttgtattaaaaatatatgaaatgacatttacagaacttggatgtggacaaataatgaaatttaaggtttgattaaggttcttcggtgatgctagtcttgggagcaaaagtgtgaatagcatctcccacagaaaggaagatgttactttccccaatctcatctgcaaactctgactggtaaagcttatccatcacgattgtacctggatttgctaaagcaagctatatatatataccaaacattacattccatcagccacaactactaattacaattatatttttctaaaaactagctacatctcctattattctaattactccattttgatgatgtcaattttttttttaatttaatgaaagagagatagaaagaatcattatggtctgtacaaatttatagattatcatatttgttctctgacatcaaatctcatttgaaagaaaattattatatgttcatttatttgggacatttataatttgatcgaaaatgacttcaatgaattttgtaattattatctttttgaccaaattgaattatatgtatatattaatatattacctgaatttctctcttctgaaggttcttgtataattcctccaaagcatggatgccactggtgtcaatgtc

SEQ ID NO: 385571 - DNA, 624 bp, Cannabis indica
ttcattctcaaactactcaattgcttctccaaagattccaaagagtttcttgaactatctacaaaccaaatcaaataaaaatcaaatgaatatatgcattttgatcaatagaatagaaagaaattgagaaaattgaaaatgattacgagcgagagcattcaagctggtgatctgaaactgagaaacgtaaagcgttttggtgagatcggattctctggcagccatagctttttcggattccgagcatttgacgatctcagattcgatctcacgagttatctggatattgtcctcaacttcttgattgatctggatatctccaaaattcgagtagttttcggaatgaaaattagagagaagaagaaaaggaagaaggagaagaaagttactcgatcgagcatgtccttgagaatagagatatggctgagcattgaactcgagtcctccattttcacgctcttcacctctgttcttctgctctttgctctaatcttcaaattttcccgctcttaattgttctgtatttatacccttcctttttcaattcatgtaataatttaaggagagttctatttataatctataaaataataaatatatctctttattaaaaaaaatataaac

SEQ ID NO: 385572 - DNA, 1027 bp, Cannabis indica
aaaaaaaaaaaaaaaattgacaatacaggtataaatataatttcagatttaaaattctgaaaactggctgatcttttagcgaaataatgctacaatgatgttctaacaatgtttttgcgatacttaacgatgatgtcctcacctattcttcggataggaagtggatttttttttcttaaagaaagtggaaatcttttgatattctaaaatcatatgaaaagtctaaaatcgttttaaattgttttctatcctctaaaaccaccgccaacaccctttgaaaattcatcaaatcattgtgccacttctgttaacaccgttattgaaactcatattattttcagatcagaagaaatacacacatgttgataatcatcatcatggcctaactgagaataacaacagtacactgtacatgtacataatctttcttgccaaatgaaagaaatgtcaagaaataattattaaaaataagaattaattttactaaaaaaaaataagaattaattgactagaagaaatagtctaaatatttaggccatggttagcataaaaacaaaggagaagaaagaaacaaaacaataattaggtcccaacaaaaaaaaaaaacaaataattgggcccattacaaaaaaaagggaaatttacaaaaatactggaatttgaattaacttttacaaaaatactgtcacacggaaatttttttaaaaataatatttttataaacaccagtaaaacacaaagcaagacaactcaaaacaacagtagaacactggtaaaacaccagtgaaaacttaacacagtatactgcagtatgaaacttataaaaaacacaagtaaaaaagtaaaaaataccgcctgacagtatttttgtaaaaaaatagcaaaagttagcataccatgtaaatttctctaaaaaaaaaggggtaaagttgaaaaataccacttttattaatcaattaatcaaatttacctttaatttttaaatttaatttgaaacatacctctttttatatgtattgtacccaaa

SEQ ID NO: 385573 - DNA, 2251 bp, Cannabis indica
aagaagaatcaagggtagtggtcccaaggacaacgattcaatatgggtatcactagtagtggttcttctagaaagactcatagtggaccaaacaggtggtttagttgtggtaagcaaggtcataagaaggaagattgcccacgaagacaacaaagatttcacgaacctcacaacggacccatagggagctatgtagagtttactcctttccatggatagcccaggactaaccaatctcagtcttcctcttatggtttcataccctagtcaagccagcagtctcagtatcaagatttgtttaggccacaaggttcagggttcaacatggggtactcataaggcttccaaacttgtgctcctagtgaaagtcaatgaaggtataatcaaggtggagggtctagtgcaagtataagccaacctagtcatggaaatagaaaagtaaaagaaaattcatttgctcaaggctatgctcttgggatagatgatatacaggttggttcagactagatatttgttaatggtatggttcttatcacacactcttgggctcagatattttttttttatattggtgcatcccattcttttatatctttgatttttgcttgtatgttgggtttgagttgggaaacttttagtcctgtgttgcatttgagtgtacctatgggaggacacgatgatgtatccaccatatgtaggtcagtttgtattgtgttcgagggacacaggttgtttggaaacttattagtgttgcctatggggaaatttaatgtgattcttggtatggattggttgtctacttaccaaactgttttggattattcacgcaaaagagtgactcttttgacccctagtggtaatttcattgtttatcgagccaacatgagttcagtgagataaaattccttctgaagggcatgcttaggtggcaagagaaacttagagtactatgggaatttgtttgtgatcgatggtgggtctaggaatttagactagttttcctggatatctgtggttagtggttttttggatctatttccagagattttaccagggttatcaccaaataaggagatcaagttttgcattgatttaattccttgagtgcagccaatttctattgtgccttaccgcatggcacctgcagagttggctgaattgaaaaaaagacaattaggggagttaatgggtaagggttacattagacatagtacttccccatggggagctctggtcttgtttgcaaagaaagctaatgaaactttgtgactttgtgtcgattatagaaagttgaatcaaatgacaactaaaaacaagtatactctgctgagtattgatgaattatttgatcaatttggtggttcaaagttcttttcaaagattgacttgaggtcaggctatcatcaattgaggattagggaagaaagtatccctaagacttcttttaggacacattatggacactttgagttttggtgacgcaatttggattaacgaatgcacctactgtatttatatggatcttatgaacagagtctttagacctttcttggataagtttgcggtggtattcattgatgatatcttggtatattctaagacatgtgagtatcatgcctaacatttggcaatagtattacagaccttgagggatcatccattatatgctaagaaagagaagtgtgacttctagatgactgaattcgaattcttgggccatgtaatttctcaagatggtatcattattaatcctgcaaagatagactccatcctacagtgggagagaccaaagaatgttactgaagtttgaatttttcttgggttatcaggctactatcgtcttgaggagaatttctctcgaatttctatgcctttgacaaagttgacaagaaaggaagtaaagtttgtgtgggatgatagttgcgaagaagcattttcagagaattggaagaaagattgactacgacgcctgctctcactattcctaatagtgaggaataatatgtggtattcactgatgcttcagaaactggcttaggaggttttctcatgcaaaatagaaaggtggttgcctatgcttctcaacaattgaaaccacatgagaccctacgcatgacttaaaactttctgcggtaatctttgtcttaaaaatttggagatgctatttgtatggcacaaagtttgagttatacttagatcataagagcttgaagtatctttttactcagagggacttgaacttgaggcaaag

SEQ ID NO: 385574 - DNA, 849 bp, Cannabis indica
caaacaagatatttgaccgaattaactaagtcgatccatcagggttctggaaagacatctcgtccaagcgataagaagagctcaaggaagagatcaccttgatacttatcggctcaatcaagataataaactgaatttactaaatcgggccatcagggttccgaaaaaacatcttgtccaggcgataaaaaaatcccaatgtatcaacgatatttctagaaaggtaattaatcagtctctagatgtcaaggttgattctgtgcttatttaatatcgaatcttaccacattaggacttcgtttccaagggtgattccagaaatcaagcattccatataagaaaatatgatgattgtcaagcactcaataaattacatttatttcacacagaaatgacacatattttttacctgccgtcaagcagatcccacataagcatataacaatagcctcatagactgagcctcatcaaatcagcttaatgtcaatatattatttatatttacgccatcagtggaccacgtttatatgaaaactctagcctataaatataatgacaatccttcatgtaaagggttcgcaatttatttcttacaagttaaggctggaaatagggttcataaatagtggacaaacacttgtgtaatactaaaagtctttcttagccaaataatattgacttgaggactatagtttattaatactcaaatgatttataagtacaccggatttatactgatgtaataattagcgatgtggtttacttacactttgtataagtggaatgtcctttccaggacataagcaaagtaaacttgtatcagatgtattatttatacatcggattgga

SEQ ID NO: 385575 - DNA, 1579 bp, Cannabis indica
aatgttttatgggctatacgttaattactggtgttatatcctactggtacgattattgtatataaataagatcccatggactataacatgaataaacaaaagggaaggtcatattcatttctaccatgtcaaaagaaaacaatgatcaattatctaccgatcatctcatcccggagtatctccaagaaaatgagatcgttgaagaattcaaagacttggttgtttctttaccaagagaaaaaggttgggtagcttcttatctccaccaataccaagggttttggcacacaaccaggcagattcaaggagttctctcctgccaaaaatatttcaagtcatcatcacttaatgacaaagatatcatccttgtgagcacaccaaaatcaggcaccacatggctcaaggccattattttctctcttgttaaccgctcaactttcccggacaccaaacaaaaccaccctttactaacaacaaaccctcatgttcttgtacccttcttagaactcaatctattcctcccaagtaagagtaagcttgtaatccctgacctaatttcttcttctattccttccaataataacgatagtaatcctagtctattttctactcatcttccttatgtgtctctccccgattccatcaaaacctccccatgcaaacttgtttatctctgtaggaatcccaaggacgttttcatctctctctggcattttaccaaccggttgaggccacagaacttggccaagaacacaatggaagagtcgttcgagaagttctgtaacggagttagcttgtacggacccttttgggaccactctttgggttactgggaagtaagcttggagtgtcccgagaaggtactttttctgaactatgataagataaagaaagaaccatttttgcatgtgaaaaaattggctgagttcttagggtttcccttctctcttgaagaagaggccaatggtgacgtggcacgaatcttggagctttgtagttttgataatttgagtaatttggtggtcaataagagtggaagattatcgtccggcgaggagaataagacatttttccgacgaggcgaggttggtgattggattaattatatgacaccagagatggctgaaagactggactcgctagttgagaagaagttgcatggttctggattggaattctaaaaaataataatttatctatatgcatgcatgcatgcttataaagttcttagcttttaattgtttgtcaactacaagaactcagctacttttaattgattggggatattctcatgggaaatatccagttgatttttttatttattttttcaaggaggtaatattctccgttctctgccgtctttaaagtgaaaaataacaataaggtatttggatttgagtttgtttgttgttatcctttttaattaatttcgttttagttccaactcaatctataataattactcaagaaaaaaaaacataactaagatgtatgcattaataagaaagggctcatgattttcatagatgtatcataatttttattatatgtatatttatatatatatataacttttttt

SEQ ID NO: 385576 - DNA, 683 bp, Cannabis indica
tttgcctttgagtgcaagaaatagaacgtttaatgaaggatggttccctactgtttgtggtattcaggttttggttaataattatttgttgacaattaatttgaatctctttgtttccaccacaaactctgttatttgagtctttggtttataagatggttctttcagcaaaaaaagaaaaagaaatgatggctgattaaagtaaattcatttcgtggacctaatccgattaacaaaagtgatatatcatgcctaaattgctttgtgcggtccatttaaatgcttgttaaactgaaccaaatctattctaaaaacactgaaataggatgcaattctttggtactataaagaaattgagatgctgtaattttttccacaacaaatcaagttaatgggttttcaaaataacactaaatttacctcaaaattacaacggccttttgtttatttatacatttcctggtctgggaacattttcttcttcatcatcatctatatcagctgaagaaatcctgaacacctttaccggcgaagagttggtcggagagctcagccaaaacgaaattgagagtgagcaaaacaacactagacccagctatcacacccaacacaaccccagtcgtccccaacaccttaccaaacgccggccactcaattttcctaatctcctcagccactccgtc

SEQ ID NO: 385577 - DNA, 1426 bp, Cannabis indica
gcaatttttgtcatttttatataaagatcaaactccataaacattagaatttgaataatattaaataataatattatatacttagagcatatttacttgagagttataaatgtgatgtattgtatttttagaatattttattaaaatttaatttcaatactaatataaaatatgtgacaaatttaacacaagttaaaaattatactaaattgataaaaaaataacataagttaaacttagtccacaataaataacatattttttaattacctctttattacttattaaaataatataagatatttataagatattaaaataatataaataaaattaattttcaatgaacagttttaatttttataactaatttgcacattgcattaaaatatataacaaaaattagaccaaatacaactttatagtatattttagatcaaatttaattaagaatatatattatttattagagatgatattaaattataatttaatctattctaaatctactttgaacttgattttttaataattaatatttaatcttacaacagctctattagtcactgatttttttttttttatatatattttcttacagtttttctgactcagcttccattaaaatattgcataaataatatctaatttgtttttttttttgttttttttttggcctttccatttttaaatattccttcattaatttggccatgttaggctaccatatattattatgactaataatattttttaatattttcttttattatttatttttatttttgggaatttaacagttagtgaagcttggacttattggtatttaccaaaataaaagatatccatgattgattaattattaattaattaattaattactttaattaactataattgtatttgtaaccttttactatcttcatctaaacttttcaactaaatataattattattatttaaatataggctatatatcaaaaaatgtagcataaatttactccatttattttttctcgagtatttctaaaattagaaaaaggatagaaatgttattaatattattataaaactcgaagtacaagacttagaattatgatgtttttgatttatgtgagatttgtttggtcttgtctttttcatgtgatgaattcagtggtcctaacaatagtataagtctattcttaatttgaaatgtttccttttttttctctctttttttttcctatattaattttttgtgtgtaataatttgatggctttctattttattagatgagacaagaagattaagacagactaggttagtatctaagacttactcattctaggagtctaatttaaaaaaaatatcatttaataatatacattattttttaagaatttttaaaaattctattttgtaacgtccccgcttcaagccttc

SEQ ID NO: 385578 - DNA, 1506 bp, Cannabis indica
aacatacatgctatttatgaaatggagactcgatttggggccagaaatggcacaatagtatttgattgcaatattagtggaaccgggaagttaagttaattttgaaattactggagaattttggggtatttagttatgaccaaaatacccctaaggttagaattctttatgaattagtgatgagagcattttggtcttttcctatttgtgcttagtagcaccaaaaacttacgactaagcattttttccttccaaaagcattataaactcaaaaccaagcttaccatttgttttccttccctcttaagcttaaccaaaaacaaaccaagaaaaaacaaaacctcaaccccaacttcagactagaaatatttccaagattcaactttgaattcaagctggaagaagagtttcaaagctagaagtattaaggtaattctctcatcaataattcatgattttctattataaagtttggtttttaagttgaaaactacatggttggttgctatgagatttgttagggatctgttggagttcctaggtcagaattaaatcagttttgagggttctaaatttagtttacaacaggttgtgttgagtggagcaagcttgagttcatggaactcaagcttggagcattaatggcagtttcttttttcttattcgattttggtttctgccacttaggttatgttatattaatgccataaaactactctgtgaagtttggaaacaattggttaagtttggagtaagttttgcgactttgaaaacttgaaatttttgagtcctgatgttgtgaaccagaactctggatggtacagggctgtaccaagtagaattccatttggcagtaattggaaagcgttgatttttgtattttgccataactttccacttaggtatccgttttagacgttctatatacatttgcgaagcttgtgaagagctctacactgtgatacataaattagagtcaaaatattattttattttagagtttttttaccacaagatttggtagaaaatcttagattattttatgcgggtattaggcagtattttggaatagacacttatcagtttaccgttattgtgacatagggctgagatcatcgagaatttctccacttgggttggctagcatgcataaatcttgcttaaaggtaagaaaagtacaactgtactacataacatgttatgttaagatacgattattattgtttatgaatcaattattatcgagattaagatataattattatcattatgtggtgaaaaagttgtcttattacttattaggcaatgatgaaaatgttatcatattagacaatgatatttagataccgaaaggttgggtattaaaattcatgactgtaaactgaaactgttgttaggtttttcatattagggataccggtggctaagtatttgggttgtctagtttgacaatgacagtaacatttggataccagtgataggtatcaggattgtcttattagacaa

SEQ ID NO: 385579 - DNA, 511 bp, Cannabis indica
ctctctctctcatttttgtttttattagagcaacactacctaaaattcactcaaattaataatggatattggataataatcatgttagtagaagactagtaatagtacacatttttgttcatttggattatgtgacaatgtgaactaaataatactttataataaccatatgataacgataactaatagtcatactatgaatattatattgtgtgtattttagtgcacccaccattaagtttcgaagcttttgataactgccttatgttattgtgatgatgatgatgatgatcctagtacaataaaattcggtattgcccacttgagggccacttttaattgtagccagattttctctactttattattattattttgaaattagttaaagtaggggaaaaaaatcccaaaagcaatttttcttctttattcctttatgtttgtaataataatcctaagggtaaatagtggcataagtacctaaagttttaagtttgtaagtgtcataatc

SEQ ID NO: 385580 - DNA, 1571 bp, Cannabis indica
gatatgagctcttggaattttcgcctttacattgtgactacactcgaccggtatgagctcgtcgtcctcgccatgaaacacgtggacatcgcagcttaaccggtcacgaacgacggtcagataagcgtccaatttggccgcggtcccgcaaattatattgtgaagtgtatgccatgcagcattgtgtgtgtggcaaaaaaaacccttcaagcaagaatgttctcaacctgttcaaattaaaaccaaatattattattatattaaaatctaatatttaatttatttagatattttgaaataaattttttaattgtgttatattattaaatattatttttgtgcagataggagtctctatcatagatctaaattctaaggagttaataaattggacagctgccaattaagctaattaattagatgagaaaaaaataaatattaaataattaaattattcttcaatcttagtcaattcttgtctgaactatacataccaaatttttccagcattacaagaaaatacataaatatatattatattaattagtacttttaaatcttagttaattgttaagtaactaatttaaaatgtttaattatatatataatagttattaaagtacaaaggaatgttcacaagaatcacaaccactcaatttattaggaaattttataattttattattatttaattttttttaaaaaaaaaagttttataaataatccaccttgtaaatgtgtctctgtctcatctcaactaatataattaacacctccaatatactaattattatgatcaagagggaccatctttaatttggatgacaattttgttgtttatactaaaaaaataaaataaataattcttaataaataaagcttcatcactactataattggtacctaaacatttaaagctattgatactaagattggtatatttctatttttaattattattgtagtttaggctttaatgatgatttttttttttaaagaaagaattgacttaaattttcaacaataataataggaaaaaatagagagtttatctaaccaaatatcataattaatgctttaaattgatgaaccgtacatcattaatagttccaatttatataaataattcttaaccatacaaaaggatacacagcttaaaaaatcactaattatatatatatttagacaaaaaaaatattaaaaagtaccaatagttaattaatattatctaacattactataatttaatatcggaatgctacataatttagttcaataagtataatagaaaatttataatcactagtaaaatgatattttattaaaaattaaggtactactaatatctaataataatgataaagagttataggagcctaataatatgtgacactccatttaaaggatgggaattagtatattctaattaccatttaggacttattttatatatatatatgtattacattatatttatactattcatataaattatatatcatattttgatttatataatattatgttattaattaagtattatttgcttgtattaaaatatatatatattt

SEQ ID NO: 385581 - DNA, 2477 bp, Cannabis indica
gttcttcacttgagtaaacatgctaatatagataaatataggcatcaagaggccccgaaactatacccattgtggaattacggtcactaagtccttcccaggcttttccttgattaactcagatagagatgataatgctttaagctgttgaaaaacagtgaacgaaatgaattatcgaaactttaactacagaggcaagcacacacacataaatatatataagcatgttgaaagtaaagaaaatagaaattttctgcgaatagtaaacacacaaaaaatcataaacaaattttaacaggtaaaccttcgtagtcggatctttcctcgcaagcctcttcaaatgaactgccacttcactatctatatcctataaaatccaaaacagaaatcacctgtgaattaaatatatacacattcttataatgcataaagattaaaattttcaacttccagacttattaataaaccaaattcaaatgaaaaagtaaaagtaaaatggaagcgtacctgaaaggaagcagaatcctcgccagcgagagaagaattgaggcgagacctaccgatatagccgccaaatcccacagctgcagtagaacccgacggcaaaagcgatgccgctagactgtagaaaattcgagtatatacaatttatcggattcattcacacaaatacatacatatatgtatacaaatgtgtgttcttgagaatgaatacatatataaacaaatacctgctgcttgaagggcgagccttgcttcttgctccttctcctttttgcctaccccatcttagtagttgatacaagaaagactcggcggtggaaatgggtttgaggttggggttttaagctttggtagggaaacccttcttttcagtttaagaaaagccgtcgttcgtttgagtcagcgacggtgcattgaagaggaagagagggccgagagagatcgatacttttggatccactgcggacaggtttatgatttgcttggcgcggcactaatcgtatgtggagatccgcatatcaaaagcggtagatacttgttgaatatttttaaattacatttcttttaaaattcacatataggtgtgcatatttagctcaatcattgttaaaagtattttttcatcattctcatcatatatctcttgagtttttaacaatttctacaccgtttataatatgtgtttgggaatataagtaccattagacattatatgtcataaaccatatttcatagattgaaggtaattttagtaccattagacattatatgtcataaaccatatttcatagattgaaggtaatttttcattttaatttttcattaaggaaaatttactctattgaagtatagtgctttatttgtgttcaaaccttctaacatgttattttgtaaattacttggaaacgtcatgctctaaatagtgaaatctaattgaataaatgagccctcactttgtttccaattgttaacccaagataaattttcaaaagagagtgaattgaaaatttaagttaagttcactaaattaaaactttcaacacaaatctatgcaattaatcaattttataaagtaaataaaaatagtatggtaagaaaatatagagagcaaataatcaagcttgtgacgtaaagagtttaagggtaagaaattgtaaactctcgatttttacaagattcggtaaaactaagccacatacgtccttagcttttaaagttatggacatagctttgattttcactattgagttaagttaacaggcttgactaacccttacaatcgggaatttttcaccaaaagtattttcaaacctcttacaatagttttctaccgccaaggactatcaatctctttcttggattgttgtagtaccaatctcaccctaaccagtttgtttacaatattggtgtcaacctcatgttaggctatttttagcctactttttgggtcgctttttatagttgttttctttctttattattatatttggaatagaattacgcttgttttctttggtttcaggtttcatacttggaatgtttaaattgatcaaatttctgaaaacaacgatctatagaatagagaaaattctgcaagaaaataaagctaaaacttcaagcttaaatttgactatgttttgatccgattttggaaaaagtcaaaacataaaagttttagatttctttttcttctttccaacgcatcttgaatcaactcatttggagttcgtatgtgaaagttatgcacattttactgaaagatgttgaggctgtcaaattttgctccagtagtcgcgaccaccactttccatggtcgcgactctttttcatggtcgcgaccctaatttctatttaaggggctcgtgttttagaaggaagggggcagaaattgggtccaaaagtgaaagaaggaggtagaggaagcaatggtggcgatccgaaatgcaatcaccaactagttctttcttaaactc

SEQ ID NO: 385582 - DNA, 1115 bp, Cannabis indica
aacctgaaagctaacaaacccacaattttttttttatatgacaaatttttttattgtatataatagggtgtttgcggtgctggtgtagttttgactattttttcaaaccaatcttctaaactataccaacaccgtgaaattaaaatattgttgaaagcgcattacaaaagatggtgcggtgcggtttttgtggtttgaattatcacccgataaataaaatatcacaaatacaattaaacttgagcaacacttgtcaaaaataccataagatttgaaaataaatatgaaaaaaataattaagtttaaataatacaataattaatgggctttggattggacattcacatattggacctaaataagtataaaaattggtattttataatgtgtgatgcagtatgatttgaaccgcatattaataatccaaaatcgcaaactacaccacaccacacggtttaggaaaaattcaaaccgcaaccgcactgcaaagaatttcaagccgtatttttttggggtgcagataatttgagcggtttgatgaacatcttatataagatcatctccaatgcaaaatataaatactatgttaaatttagcacaaaaaataaataaattttatatttagcacaatatttgttatgttgctccaatgcataataacatcttaagaggtatgttggtctaaaaagtaaagtatcattaattacaaataataaaaaaattttaaaaaaactactaatggcaatattgtaaatatatgtattaaagtatttcattaacatttaatggcaaaaatgtaattaaaaaagtagcatttattgtgtgtcaaatttgatacaaactacatcttatgtcaaatttggcccaatatttaacatgtgctaaactacatcttatgataattttatctttttgacgcttgaaaacattggaatctatgctatggtggaaaagaactactttggttgaaaaatcaaccctagccacatatgctctgtgttgagctttcttcctagaagatcatagtgaattgtctaaattgctctgattactacgccaacatcctgttgggttttatgccctaaataaaactctttacaatctgattagttatc

SEQ ID NO: 385583 - DNA, 2285 bp, Cannabis indica
tgaatcgaaaggctgattgttcaaaaaaaaagtagaaaagcacatatagagatgctgataacttttgggacactagaaagagagggtgtcatatagaggccatgccatattgcagccctgattgatgatattttctaattatttgatcgaagacaggaaatggtggacgagttaaattttgggaagacaaatgggtagggaatgtgctcaaggacttgttccctgccttggctcagatttctttggctaaatattaaagctaaaatagcttgtggttgtggctgctagtctagctccagttttggatggaatcctcattttggaagaaatttgacagataggggaaatgataaatttgatggaacttctacacattctggaacagtccccaatctttaatgttataagggcctgtttggcaggcagggtgactgtataatttgtccaatcctatgtttggacatgctagtggtctggataactaatctaattaattacatctgcctgggattattgattccatccagcatgtggatattctgatttctttaatttttaattttgtaaagatattttaaattttttaaaaaaataaaattaaaggaataaacttacaaatttatttatcgatttttttatcaaaaacttatttattaaaattggtgaaaatatataatgttaaatttaatcctataaatgcttttaaaatttaaaatgatatcaattagacaatagaaactcaaaactcaattgattctaaaagaaacaatatggccctagtattatattttaatttcgactaaaattttaattttttcaatccagtccattctaaaaccaaacacaagattacttaatcctattcagtccaatccttttcctacactcatacactcattttggaacagttaagaggttgaagaaaaatggactacaaaagtttggaaaagttgtgctcggtgcaacgtcataatctttagttggattctagttctagacaagttgaatattcaccaaattgtacaaatgagaaaagcttatcaagctttatctctaggttggtgtgtatgttgtaaaaactatgaggaaacttaaaggaatgctctctcagccaattgttgtgggttagtcttcttaaagagtttggtattcaatggtgtatgcaccaatccagcaatcagttgctattatgcaaacttaaaggggaaaagaggagttctagattctggtagcagccactctggctatttggttggagagaaatggaaagaacttttaaggcatcgaaaatgaagcaacataactacgggagaacgttaaattttggatcacaacttgggtttacaagacaaaaggctttgaggacctaacttttcaagatatagttctaaatgtctaggggaactgtacttaatgtattataattataattttgtgcttataattcttatgtctagtttgttcccacagtttttctccgccataagtgaggctcccaaataaatttgagagaaggtcaatctaacttgataagcctcctatacattttggatgtaataggaggacacataaactaggatagaaggctttttatttttatctagttgccttttattttaattgttgttttgtcttatttttagtacatcctagctaacagtattttgtgttatccagtacctataaataaggagggattcatttgtgggggaatttggaaatagaaaaaaatagactttaggagagagcagccctctcaaaaggttgtaattggagatactagcatctcgaaagctagattgttcatttatttcatcatccataaatagataattttatcctctaagaatatcttatcaaattggtgcggtgaactgcggacacgatgccaaagaaacctgtggagaagggtgacgctactactaggtttgaggatcattttgaagctctgaaaactggagtctctcgaatcaagaactcaatggaggagatggtaaccaagattgaacaacggcttcaagaaaccttgcaacaacagttcaagattctctagaataaccaagaaagatcaagaactcttcaagaatcaagggacgaggtcaatcgagttgttggaacccaagagcaagggaaaaacaaggacttggtagcaccatttgggccccaatagactggaacacaaccaagcatgagagataagtctaatgggacatctcctacagtaggattcaagggaactcgacatttagatgagggatcccttgatcgaggacaacaagagactc

SEQ ID NO: 385584 - DNA, 1304 bp, Cannabis indica
atagtggcaagtttgggattttgaactcacaaatttagctcgcttctcttttctagggcgatgtcgcgaggtactgagatctcgcggtgttagtggcgaagggtgcctcggtgatgatgagatctccttcctttgtgtcatacatttaccttcggtcgtgatgggggcggtaactccgtcgcgctgcatgtccactagggtctttctacggtgacggtctccttgctttgcttgagattcctgcctgctcgcgccctctcctcgtacctgaggctggatgacactctcattttctcctcttacttgagggctgcgaccattagcaccttcttctccgatgatgggtggagggaggtcttacaccaaatcgaccaactggttgtcgtcaaggcgaatctccatgtcctgaaagtgaggagagcgtctaggcattttgtatcgattgtgtgaaaaggaacgactcgactcaagtttatcgttcccacagacggcgccaaactattgatagtgagaattcgtcaaccaacttgtggccaaaacatcaacttatgcttcaagatcagaaatgagatgaagtaaaagatgaaatgtaaactcaaattgctatcttgaaaaggagaaaataatggagaaatatctattgctctcaatatggtgttacaagtatgatttttcaacccctccccacatttgaaaaaaaggggtatttataggctctaatggcctgatgtacaaaatggtcccaaggggacaaaatgtcgctatcacgctgcatgtcgtaggtgtaggaggtggccttgcacctcgtacccttgcctggtgtcaggtggtccccggttgcaggagggtggtccccgattgcaggcatttgacccttggttataggatgcaaaagggtggtccttggttgcaggcatgtgatccctggttacaggttgcaggagggtgatcctcagttgtaggagggtggtccccggttgcaggcatgtggtccatagttataggttgcaggagggtgactgtagcgtacctttggttgggtcttcagaccttataggtctgttgtcaccgctactcataccttctcgctttcaaagtcttcaagaggcgtggttgtacgctttttccttgcaccgccttgtcctttgattcctcctctaaatttattcttgtcggtgtgcattcacctctcactttatacttataaccctcggaacacattcacacaacacacacaacaactcgcatgcgagaccccccatgggttcgcatgtgagcccccaacacccaacatatgcacacac

SEQ ID NO: 385585 - DNA, 1567 bp, Cannabis indica
aatttttactttaaaaaaaatccttaaatttttaaacaataataattacgcttgtatgccttttgtttttgtttttttttttgttgtgttttttttttaatttctgaatgattttttttttatttcaacattgttttaaaagtactaattatgatttttgtcctccaaattttaatatatactaaatcatgcttcacaaacttttcataccgttaaattttttttgaactattgcgattgttagattcaaagatttttgtccaattccattaaattttacttaggtgatagtagtccatgtaccaaattgtgttccgtaaactttgacatgtaccgaatcatactccttgaacttttatccacgttaaacatgtattaataaaattagacgaaagttcttgaattcaacaatctacatagtttgagagaaatttttaacgatcttaaaaatttgagggtaaaaatcctaattagtctttaccaacattacatttggcgtgatttttttttgttgagaaaatatggattcacttttaattaagggtaactatcattctgaaccttgtgttttacaagagttactaattaaactatgtgttttattaaatgatattcagacattgtgttattcaaaatgctacaaaatagaacatgaaatcaattgttgtggtcaatttttttttttttttgttaataaccaacttgaaagttgaaactagtttatagcacaaacagatacaaaaaatacaactattcgtatcataacacctccaggactggttattatcaagttttaattggatgacaaattaagctcaagatttattaattacaattttgaaaaatatacaccgtctgaattatcattatttaacaaaacagatggtctaattaatcatttttgtaacatacagtatccaaaatgatatttgtaaaaaaataccatgtaaaaaatatttaatttttgtaaatataatgtataaatagttacacatctgtaaaaaaaaaatatttataaatctgtaaatgttgtcacataattaaaagctgtaattttataaaattaatttttattatttataagatttcacattttcaaattaattttttgatttttgttaatgttcaagaaacaaatatttatgatcatcactaaaattttcaaacattactaaaaattcagtgtacatttatttgttaaaaaagagtattagtagcacaactttatcacatgacgttttataattagttagcggtttttttgtaatctttattaaattaaaataagtgagactcgatattgaattgcaccagtaacgatattacacataataaggtcggtactaagtaccataagtgtcctttataatttttctaaaaaaaagagcattgatattgggcaccagcggtacctagcactttccataagtggcgacgatattctctaaaaattattagttagcgatatttgttaaaaattattttttcaagttatatagaacttgatacttaattataccaataatagtaccatactttctaacaattctaaaaaaaaaaaaaaaaa

SEQ ID NO: 385586 - DNA, 1867 bp, Cannabis indica
tatttaactaactgtcctaataatgtcaatacaacccattttaaaaggatttttttttattatataatatttaaacaagagaaatgttaaaaggcgttagtattgtcttttttttttttttgaaattaaatagtattgtttagcactctaccactatatcattattttattttattttattttttttttaaattaagagaagtgttaataggcacacttttaagttacactatttttcaaactatttttatagttctagttggaccactaacctgaaattttgttttatataattactaacggattaatcagttaactttttcaattatcatacacgattaaaaagttatctgattgtaaaaataataacatagtgagtttttacacggttcatcttcaaatgacctactccttaagacacacacctatataagaaaaattgatctgtaagagatttgaagataaaagtgtatttttaatatcaatatataaaataaaagtgagaaaagtcacttatgagtatataaccctcacatgcaaccactgccatttttttggccaaaaagatgacagtgctctcttaactaattggccaagaacagtgtggacaaggtggttttctagaatccatatgactgaaataagcaagaaacaccatccaaggcttcccataagctatgcccaaccactgccatcttttggcctcgactgatggcagtggtcccctgttagggttttagacgttgaaatgagattttgaggtcccaagacccccaaaaatatgattcaacatcaaaaaataagtcaaaccacaccttgaggggtccaggaacatgcacggccgagaactgccactcgaccgtgttagtgctcgcatcttgagcaaaatagcacaaacatcccttcagtaaaacctctcaatttttattcaaatgactttattcaacatgcattggaaagatattttcaagaaaaatctaagtgtgtctttagttatagctcaattatgaaggtatcagactcaaaattggctcatacgacagactggtacactttacttgggaattgagtggtgtaattaagtgtgggatgttggagagctatgccacaacccatgtggcatcatatgcgagaagtggcaccccaaaacacttatttccaacacttctctccaatttcatgaatctcaagctgagaagtgacatcccttgtcacttctttctaatttcgtatatttctagtcgagaataaccattctcccaatgtttgttggattttgacctaggaataagtgagacttttgaagatgtttatttatttttacctttttattcattattgggaataagatatgagatttaaaagtgagacaccccgacatgtgggggatcaataacaaatcctaagcctatataaagatagtgattggctggttatggggggatcaattgcttgctggctggatagaaaaacttgagagacaaaatccttggcgacttcttagaacacaaaactccttgagattttcttccttcattttttggcccaagtccttcatactttgtcgacaccaagcctctattactaaattaccattgacatacatagttaccaagaacaagatcatgctcttttcttaatcctattggtttattgttcacaagaaccttacaaccaccatctttatcagatttgtgaatattgggtctcccatgagccttgtgttcataagtctcaatacaaatttcacctagaaatttatttttgtattattgtccacacactcttgagaacataactctggtgtgtcggatccaattaataaaaagaaaagtagacgtagcctcattaccatcgtgacatgggg

SEQ ID NO: 385587 - DNA, 933 bp, Cannabis indica
gagagagagaggaggagaaggacgaagcgagaaagagagagtggaggagagggagcaagagagagtggaggagacagtggtggtggctcgtggctgaggggagagagcggaggagatgatggtggtggtggctcgtggttgaggagagagagagatctgaaatgtttttgggtgtttttaaatttaaagggcatcccaaatgatttaaagttgtcgggtataatatacatggtagttttaaaccttcggggatactccttaaaaactaatttcaattttaaacttatgactattttataccatcgagaatactaaataactatttaaaattatcggaaatactccactataatcggcggtttaaataatcacgtaactttattagtgacggtctccgaaaaaaatcagtttaaggaccgacgtgaataagccttttttagtagtgcagatgaacgggccacacgccgtcgcctatatgacccttcacctaaattttaagctagcgatactagatccaacaacgcacgatctcaacccaacccctatctctacatgagtatttgagctttgcagttccaaccatccctctcagtaccctcgatctcctttctagtagtgttggaatagccatatctaacccttgttcgaaaaaaaacagataatattcttgtatgtgccccctcacatttaatttgtcaatgtctggcctccattctcatcctgcatccctaactctatcaatgtttgggttcttcaaaatcattggagcttaaggaaagtgaatcacattgtgagatttgatcaaaatgcggagctaggtttagggggtttggaaatttttaaatgtgtatatatgtgtacgttgttagatttgaatttatttaaagttttttttttttgtgatttgcgtttgagaaataggttgcagtggtg

SEQ ID NO: 385588 - DNA, 981 bp, Cannabis indica
gtcgtctatttttgatgatattgttgaggattgtaaacagattttatcttcttttaatgatatttttttatattttctgttaatcgagttgttgatcgctttacgtctagagcgtctcgtttatatgttaatcgtattcattcagtgtgtataatctctctgttaatgtttttgacattgttaaggatcagttggtctaattaaatgaaattttagtaaaaaaaaaaattcttcaattattttaatcgtattcattcagtgtgtataatctctctgttaatgtttttgacattgttaaggctcagttggtctaattaaatgaaaattttaagtaaaaaaaaaaaaaaatcttcaatattttttattttcaaccaacattaattaataactaaaattataattttctaatttactccaaattattaagtttttaatttgtgcatagggtacttgttagcctctttcttgtgtgttttaatcacttcactagcaagatgaaattattaggcatgcctaataatttgactaataaaaaatagctataattaataactttttttaccggttgttattttaacaagaaaatgataatttaagagatctcttatcatttattaattattgcttttccttttcaaatgtggtaagtttgaagctttgaattaactagactatccacactattaaattatggtttattataattttgaagaaataaaataaataaattataatctacaaactattaagttgtgattcttgagagtctcaaaatctccaatatatatactatataccaattatattatatatataaattaaaatgaaattttgaaaattgataataaaagtaagttgtatactaatattaatattatctgtatatattattcattattcatgtgattcactttcagcaatagatatataaatagatatttataattatgattaggggtctgatccaatccgcactttttt

SEQ ID NO: 385589 - DNA, 1577 bp, Cannabis indica
acagttattccattgggattgtaactattcatgaaatgtggacaatctccacatctcatgagataaaaataaataactgctataactggtcttatttctatatatacatggttattctgactatgcctcttcacctcgcaacacaaatgatcatctctttatgctttactttaaagaaaatttttgtgtctaagtataatcttggaaagtacttcttgcgttcttctgtgaagttgagggagataaacgcgagatactatcataatgtaataatttcgagatgaattacattgtttataaatcccttagtttttcagcacacttacgagtatgtgggtcaataagttgcaagctcttgaagaactcattatctatcctttccaaccgattgttgttctatagtatactccgtgtatcctgagatggaccttctacgttgattattcacctcatgagtcttacaaaatggtagttgttattcacggctcacctttatctttgaaaggatgagttcaaatatttttaccaattgtattttctgaggcaagttactggaacgtatttactctttacaatccgagtcggttcattttccagatcttaaccatattgcttgtttgaaatatgggtataagaactgtcccttaaaaatattttcaggattaaaaatgactttttaataattagggtatgatcgtatttttccttttacttaacagagaatgcatgcttcatttggcagttcagcattttgagaaaaataccatttaagcatttattaaacccttctttcccaatagttcccattcattcgatcggtcatcattatgattgaacggttaccattgcttgaatataagatcaacaacttccttgtattttgcaattcctgttttcctaagcttcaaagaatttcaaattccagtccccattttctctgaagtgcatgccttctttgtctcttacactcttcctttgagtttctgccacctttttctctcaaccctgacatcattatgaactagactcctggtataagaagttttcagtgagaaattcttcaaggcttcttttcatccaacaacccagtaagtacacttccatcattgttcattgatatttattttctcttgatgttttccattttttcttttatcgtctatttcttgtatgggattgtctttatatggttttttaaccactaaaggttataaattagggttaaatgatttacaagctctgagttttttacgttatgtatttctaaaatttggaggctttttcttttaatcaaaaaatgcctcattctgaacaataaagtaagggaacacatgattttatagaggtttggcccccttagttagcgggtaatgacgtactcctcttttagttgtattgatatcgagagataatactactcaaatcgttatatgtgggatttgaagtagctctcttaaggttataatatatgaatcagagttggcaaatctcaagtggagaagagcaatagtgggcgtgtgagagagagagagagagagagagagagagagagagagagattagtattagtaacgtta

SEQ ID NO: 385590 - DNA, 1202 bp, Cannabis indica
tacatttccattggcttgtcggtgtgccgcttgcacggaacgtggtctaaacctccaagagatgttgtggtgcgccttggccacgagatgatacaggtagtcattcgtgggctaatttgcatacgtgcatgggacagatgcaccatgctggaaagagatagaggtctaacgtatgctactagtttgatggcttgtctcgagggcctgccaacacgcgtgagggcatggtgccttgaggattggaccatggatgtatgtgagtccttgggcgatgagggagactgtttagacagcattgaatggggcatgattagaggcattggcacgtcagtttggtgttggcttcttgccacacatgctaccttggtcacaagtgacgaggtgagcgacggtgttgggatttgccttatcatagtaggaacctatggatagtgcgagtatcttggctagagagctttcaacacgaatgcactcattgatgcttgcgaacatgactcaacgagagttgttcaagagacaaaagtgtgcatgaggcacacggtcgcgcaaaaaatgagcccattgttactcagatagttggaaagttgacattaacttagaaaagtcaaggtgccacacaggtgttctgctacctaaaaaagtgagtcccagatggttggaaagttgaccttagcttagagaagtgaaggtgctacacgggtattctgctatctgaaaaggtgagtccgtgacacctaacagtgtagcaaagaggatggaaatatatatacacagacccaaatgtgtagtctaatattcattatgatatatacacaacgaaaccatttagccccaacttttttcttactaaaattttcaccaaatttctcaaaactccaaacacaaaatgccattttccctgacattttttttccttttccccatcaaattcaaggtttaaacagacccaaaaggaccaaagctttggttccttagagataatacaattattttgatccgcgaaaagcacaaacttctaatagaaattccactgtttggaagtaactgtgtaattactaggtagggtaattactaaggtagtaattacacagtttagtaattacatatgaattcctaatatcttgtttgacaaaatagttagtaattacatgggaaaataatattttttaatagctaatgtttaatatggaaagtttttagta

SEQ ID NO: 385591 - DNA, 1782 bp, Cannabis indica
tcttcaagtttatcattctcacttaatggggaagtcacgggtcatgtgaaaccatcttgaggccttcggtaaggtgaccctctctcaccatatctatttttaatttgctcagaaggactctcaagactgttgcagaatgaagaagctattggtaatctccaaggattacgtcttaccagaagagcaccttctgtttcacacctttttgttgatgatagcatgcttttgcgagacaacgaatacttctcccttggcgataaagagagcattgaacatatatcatcgaacttcgggtcaaatgcttaataatcaaaagtcagtgatgtctttctctccaaacactccagttgcaacgcaaaacttcttccatcagactctaaacatacctatcagtgagtatcatgagcgatacctcggactgccttcttactcaggtaggggacaaaaaagagctatttagtcatatcaaagagtgtgtttggaagttgattatttttcattggtggaaaagaagttctgctcaaagtagtcctttaaccaatcccaacttacgctatgagttgtttccgcttaacaaaaactttttgccaacaattagaaagtatgatggctaacttttggtggggatcgaataaagatggctcgaaaatccattggaaaagatagaaattactttgtaaattataatttgaaggaggaatgggattttatttttttattaattataatcaagcggtactagcaaaacaagcttggagaattttttatatgcgtacttctttcttaaaccgacttttgaagtgtaaatacttctctaacaactcttttttggaagcacgggtaggccattctccatcacttacatgacagagcatccattggggtcgtgatcttcttctcaaagggcttagatacaaagtagggaatggattccatattcaatgtgggcctgacaaatggattctaggtcatactgagtttcgacctataacttataccggacctacctcttttgttgttgctcatttcatcacggataagagggagtggaatctagaccttctcaacaatttttttgatcagcttgatattgaaaaaattgtctcaataccgttgagctttttcttactaatgacagattaatatggcatcacacaacctcaagaatttatacagtcaagtcgagctttcatttagctgccaacttagatgaacaacaataggcttctgcttcagaattgcacagtaattggtggaaaacattttggaatctgaatcttccatctaagattaaaatttttgcttggaaggtaatgcacaatgcccttccaacaacaacagctctacatcgtaagaaggttattgacttcgctgcctgtttgatgtgtacaaatgcatgggaatccattaggcatgctcttttcaattgttcacactccaaatcagtttggaaacacactggtttatccatggattctaagaaagcgcaactcatgcataatggtaattatcttttccacctttccactctacattcccaaactgactttgagcttatcatttgtaccatgtgggcgatatggtcacatagaaacaaagttttacatggtagtatgttacgaaaattatgaacaatacgcaagtgcatgtaatcaagtagtaaaattacacaggtgaggttgaaccacagggaatcggactgaataccactagactaaatttatgattctatttggcaaaccaatgtttttcaagattagaatagaataaaaattcaagaag

SEQ ID NO: 385592 - DNA, 6171 bp, Cannabis indica
aaataagaaacttgggaaatagggaatagggacccagggatcaaataaccgggatctagatgtggaatcgaacatgcatccggaccgagactgggatcgataccatgacctagacccgaccaagacgtagacttgagcatgtacctgcgacctaaaagttagaacccaggactcgcaacctggactagaatcatgaccagtacaagaacccgaacccagaccccgacccctacccaaaaccaaacaaggactcggacccaaactcaaacccaaacccagaccaagacccaatcccagacctagagccagactcatacaagaactcgaactcgaactcacgactcggacttgaacccgagacttggacccagactgagattagaactacggctcagacccaaacaaggaccgagccctgaacctagacttggacaagaactcagattgggactaggacccaggacctgagactcagacctgggaccttagaaccgaaccgtgacctagatgggggggacctgcgccccaaacccgaacttggacccagacctggaccaagtatcgagacctatatgggggacttgtacccgaaactgggccctagaaccggaactaagacctaaaactcgaccccagactcgagacacaggacctgaccttagacctcgaacctacgacttgactaccgcgacacaaccccgagcccgaacccaaacccaaacttaggactcagcgcgacacctaggacccaaactagaaaagactgggatctaaaactgagatccgaatctggacttgaggcttcgacctctctcgtagtcagtgtttgaatccaagacccgaacaaagatccgtactcagaccctgatttgaaccgggatccagacattatcccagacccgcaatcagaatcagactaggacacggatgagaaccaagacttgggactctaacaggccccaaaaaatccaaactcataccagaacccataccaggaaatggaccaggactgggacctgtgacctaggacctaaaccaagattgggaccttgacccagacatggaccgggacccagacccagacccagacccagaccaaaaaattgtggccaaaccaaggtcccacgaacaaaactcggacttgggacgcgaaacctagacttagactgtgactaggtccccaagtcagacacaaaccgaaactgggacctagacttgaactgggacctgagactcgaacccaaactggaacacgaacttagacatggactgggaacaaaccctcacccagacccagagccaaacccgaaccaagacccacacctggaccccatgccaaaaaactggaagcagatccagaagtagaccaggaccgaggaacgagaccaggggactaggacccagtctcggtcccagaactagaatctaacaaggacccagacccaaacccagaccgggacgcggactcgaatcaaaacttggatcgggacttaggacatgaacccaaactcagacacggacttagacccaaacctagacgcaggacccagaccgggattagagactcagacctagaggtccctcacctagattggagatccaaacccaaaattagaaccagaattgggacccaggataaggattgggagtcaagacccgacccgacccaatctcggtccttgacacggacagggagagggacccaagatccgaatcagaatgagattgggacccaatattgggatctggatcatgacccatgacccgggcttggacccagccagtagtcggtgtctagatcttggaattgtacgaagatccgagcctggaaccatttcaaaaataagaacccaacctagacttgaattcgagatgcgaaatcgaaataagaactggaatcaggacattggaatacgaattggacctagacctagaaccggatctagatgttgaatcgaacatgcatccggaccgagactgggatcgataccatgactcgacccatacccaaacccaaactaggactcggacccaaacccagacctagaccctaacctagacccaatccctaacatagagccagactcatacaactcggactcgaactcaagacttggacatgaaccggaaacttggacccggaccgagattaggactacgactcagacccagacaaggaccgagccctgaacctagactgggataagaaatcggattgggactgggacccaggaccagagattcagacctgggacttgagaactgaaccgtgacctagatcagggggacctgcgccacaaacccgaacttggacccagacctggaccaaggatccagacctagatgggggacttgtacctgaaactggcccccagaatcggaactaagacctaaaactcgaccccagactcgagacacaggacctgaccttagacctagaacctaggacttgactaccgcgacacaaccccgagcccgaacccaaaccaaaacttaggactcggcgcgagacctaggacccaaactagaaaggactgggatccaaaactgagatccgaatctggacttgaggctttgacctcgctcgtagtcagtgtttgaatccaagacccgaacgcagatctgtactcagaccctgatttgaacagggatctagacccgatcccggacccgcaatcagaatcagactaggacagggatgaaaaccaagacttgggactctaacaggccccaaacaacccaaactcatacgagaacccataccaggacatggacccagactaggacctgtgacctgggacctaaaccaagattgggaccttgacctagacatggaccgggacccagacccagacccagacaaaaaaattttggccaaacccaggacccatgaacaaaactcggacctgggacccgaattccaaacttagactgtgactaggtctcgaagtaagacccaaacccaaactgggacctagactcgaactgggacccgagactcaaacccaaaccgaaacgcgaacttagacatggactgggaacaaagacccgaacatggatgggggacccaaacccgggaatagggcccccaaacttgggccagaactttggcctcaaaacttggatcgggatccaagaacccacccaaaatctaaacatggacgtaggacccgaccattaccccatgacttgaaagtggaatcgaaaccagaagctaatcgggaaccatgaataagagtaggagcaggaccttgaccgagacccaaaacagtaacaacacaaggacccagattcgaacacaaacccaacaggatttcgtgttggttcagttcggtcgagtttgggtcgggtttgagtcttggtccaggtcagggtccatgtttggatcatggtctgggtcccagcccaagttcgtatccggatccctatctacgctaaagtctgtgtatgggatcgggtcccagatttaggtcatggttcggttctcggtgtcggtctgagtactcgaccatgtctgggcctgagtttcgatctcagtttttgtttggggctaggtccgagttcagttctaggtttaggtccgggtccttgtcacagtcctagtcatgttacaaggtcttgatcttgcgattcttgtttaggttccaatttcgggtcctagtctgattccctgatccaaacacaaactacggatttgttccatgccctatttcccagatttcaagtcaagaatttgatgcatgtgacgattcctagtgtggtgtaggtcctaggtcccaggtctgagtttgggtccgggatcgagactgaggtgcggctctaggtctcggtcctagttttgtttctcgagtctggttccatgtttaagattgagtttttgtccgggttagggtcctaagtccaggtcttggttgggatccgggtcaggtttccgattcgagtcttgttctgagttggagtcggggtgttggtccggttacggttctgggtctaggtccaggtccggttacgattctaggtccaagtcctggttccgatcccgttcccaagtcctggtctacttctggttttagttccaattttggatcacagggtaggggttcgagtcctggtcttggttcgggtctggggctcggtgaaagatccaaacactgactacgggttaggtccaagccccgggtcaaaatccagatcctgatcttgggtcccgatctagttccattttgggtgtcgggtcacgagctgggtcttaggtttaactccaggtctacggtcgggtactaggtcctggtcctagttccgttgcccacgtccctatgctgattctgggtttaggtcttagttatagtctaggcttgggtcccattcttcgttcaggtttgagtcctagcctcactttgggtttaggtttgggtttttatctaggttcgggtttaggtcctggtcgtggtccttgtcctagtcaaattcctgttccagttgcgattccatgttcgagttcgggtaggggttcgagccctagttcgagtttgcgttcgggtccaaattttgttctaggtctgaatcaggctctgggtgtgggttcgggtcctaggtcttggtctgagtcccattttccgatcctaatttgagtttgggttcaattttgagtataagtcctggggtccgatcgcggtctgggttcgagttcgagtccgagtcaaggactaggttttgctctgattctaggtttgggtctgagttcgggtctgatttttggttcgggtatggttttgggtttgatccttgtccgtgtgcaagttcctgccttggtttgggttcgaggcaggtttcgggtctaggtctgggtctaggtctaggtctgactttagattcccaagttcaagtcagggcctggttcgggttccagtccttgatttcgatatgtgttcgggttttggtgcctaggtccctgatctaggttgcccatctaagtacgattgttagttcctgctctttgttaaggtttgggtttagctttgggtcccgagtcttggtttgagtcaaagtacttgtccgggttcgggtccaggtctcagtcccagtcttttttcgagttcgggttcgggtccctgtcagggtctggatcttggtctgggtcccagtgacggtttaggaccaggtcaggtccagatctcagtcgaggctgaggtcccaggtctcaaatcccaatcctagtcgaaatcttggtccaggtcctggtccgagtttgggttatggtttgggttcggttcttgtctcaagtctgggttctagtcacagttatagttctgattccaggtctgggtttggttcctcgtcacggtctgggtccaggttggggttggggtccgagtcttagtccgagtctaggtatgggttttttagatctcgaccttggtccaggtctgaattcggatcccaggtttgggtctgggtctgcgtgtccaattcctgtgttttgatcctggtttgggtcagggtcggtagtcgaatctcgatttaggttcctgtccatgtgcaggtttgaatcccaatctcagtcaggggcttagtttgggtctgggatcgagtctcgagtttgggttttggttcgggttcgagtcttagtgctagtctgggtttgggaccagattctggacttgatccaagctcgagtttcgaagcttggttatggtctagttctgggtatcggtccagctgcaggttcttgtcacggtcccagtgttgttccagggtgctggtcacgtgctggttcaagtttcggttctgggtccaggtcttggtctagctttaggtccttgtttgagtcctagatcaagacagcgactatgggtcttgtccaaggcccggttcccagatcctcacacaagatctggatcccaatcacgggccccaattttttttcggttcatgttcgtcccggtctggttctcggtttaggtctgggaccgagactagggtgcagttctgagtctcgatcccaattttgggtcccgagtcttgttccatgttcgcgtcaaagttcaggtttgggttcgagtcttgagtcctaattcaggttttggtcccatcccaaggtgggtttgggtctgagtccgggtcaaggtcctagtccagttacagttttgggtctgggtctaggtcctagtc

SEQ ID NO: 385593 - DNA, 635 bp, Cannabis indica
ttataaaaattaatttatgtaaaaattatatacatatgtaatgttcagtgcatatgagctcagtttctaaacttgaaacccatccatgcatgtgagctcaaaaattttatcctggccatgcacaaccacttgagtggcttcgagtaccatgcccaaatgaaggagaggatcatgcatgccatgcatgcaagagggacataagtatctagccatgcacaaatgcatggaccagtcgagtcactcagacccatgcgacatgttttggcggtgatcgaaggaggaacccaattgggttttgaggtctctgaacctcccatgttgccaccgtgagccatggaccggaatgtttgatcctccccttgctccgccttcctcctccatgcacgatgagacttgaatgggtctatttcggtcatgagtgacccgcgactgctcctctccgtgtttcctgctcctcatcgtggccaccatggccaccgtaggccatggtgggtgttaaagccatcggccagggtggtggctgacccgatctcgttgacccgaacccaattgtatctatatatgtattatgtaatgtatatatttaatatatacactataaattatcatttaattatttaatgtaaataattatt

SEQ ID NO: 385594 - DNA, 2712 bp, Cannabis indica
ggttgaagcaactgtggcttagaaaaggggatcataacaacaaatactttcatgcctatgccacgtcgaggaaaaagcacaactctgtgtccaagctcagagatactcatggtaattggattgactggaacaatggtttagctgatgttattgtcaattattttagtgatcttttatgcacctcgaatacacatactgcccctatcattgctaatattcccacaacggttactgaggctcaaaatgtttctttacttgccccggtatcatatgaagaggtcggtaaagcccttttccaaatgcatcctgacaagtccccaggccttgatggtatgaccccaggtttctttcaacgttgttggagcattgtaggtttggacattatcagtcttgttaggagtttcatgagaacatgagaccttccacaaggtctaaatgatactaacatggttcttatcccgaaagtcaagaatccatcctcaatgactgatcttaaaccaatctctctatgtaatgtgttatacaagataatctctaaagtgcttgccaatcgtcttaaagaagtcctaccacaactgatctcaacaaaccaaagtacttttgttcatggaaggttgattactataattatgtttcttatgaggtgatgcattatctaaagagaaagagccgtggtaaagaaggttttatgacacttagtctcgactttagcgaagcctacgatcgtgtggagtggcaatttttaaaggatatgatgtgcaaaatgagttttagtcatcactggataaatctgattttgagttgtgtctcctctgtccgctataaagttcttaatagtggaagagaaatgggacctataattcccacaagaggtattcgccaaggtgatccactttcttcttacctatttctaatttgtgctgagggtttctcagctttgatcaaacatttgaaagtattggacacctcagaggttgtaaggttgctaatggtgctcccattatctcgcatatgttgtttgccgacgatagttacgtatactgccgagctaatgagagagaagcctctaatgtgatctgattgctcaagatctttgaataagcttcaagttagattgtgaactttaataaatcctcaatattctacagcagcaacactgaccataatactagagatcacatatgtcaattgatgcaaatgcaagaagctgatggaacaagtttgtacttggggcttccatccctagtggggagaaacaagaaggcaatcttgggatttataaaggacaagctgtagaaaagggtacaacattgggaaggccggtttctctctaaagcagggaaagaaactctcctcaaaacagttgctcaagcttttctaagctatgcaatgtcggtctttctgctgcctttggaaacatgtagaagccttgaatgaattatgagttctttttggtggaaatcctcaaaagacaagcatggtgttagttggcatagctggaagaatttatgcaaacacaaaacagttgaaggcttgggttttagagaatttagggagtacaacttagctttgctgggaaagcaagcgtggagattgttaactaaggaagattctttggtttgcaaaatctacaaagcaaggtatttctataatggctctttcctatctgcatctcttggtcataatccttcatttatttggaagagcatctatgaatccaaggatctaattgttgctggtgcaagaattcggattggcgatggtttaaatacatatatcaccaacaacccttggctccctgacatgaatcaaccgcacattacttcttcacatcttgccttaactgacaacagggttgcaagtttgctgcaagtggatcaatcaagttgggatgctgatgcagttaatgacttattcaatgaaagggatcgtgcactcatcctgggaatttcccttcctgatacaaacttgaataatcgacggagttagaattttgaaagctcgggttactactcagtgaagagtgcatatacgcacttgcatcaatttgaccatgacactctacaggctggagacttttggaagagttactgaaggataaaagttccaccaaaagttttacattttgattggagagctatttcaggaagccttccaactcgtacacaacttcaaactaagcatgtttatgtcaacaattcatgccatgtttgcaacaatacagaagaatctattctccatgtccttgtcctctgcccctttgcaatttcgtgctggaatagatatgcaattgacatcacaccggcaacaacaacaacttttcgagactggtatgctgttgtcacccgtagcagtaccaacaatttttttgctgaagttctaatgattgcttggcaaatatggagtgcaagaaatgatgttttatggaaagatagagtcaaaacagctgctaatattgttcttgaagcaagatcttaccttaatcaatggttatatgcttagaaaaaccgattggatccaatccttgtacaaaataaccaagggttgaatgttgagcattggactaaaccagttaatgatacgattaaggttaatgtggatggagctatatttgcagcaatcaattcttttagggtcggttttgtagccagggactgtgctggaaggatcattgaagctggttccaagtgcaatatctgttgggttttatgc

SEQ ID NO: 385595 - DNA, 1652 bp, Cannabis indica
aaaaaaaaaaatatagcttagatattattgtcgccaaagagtaaacttatatattatttataatcgagaattaaacttaaatatttatgtacaaaaattactgtattatttaatttttttgattaatttataaattaattaattaattatagcttaaagtggaaatgaatgagggacacatattcaagggttggaatgaaggagaaaaaaagtttgccccaacatacaaatacaattctaactctcaatcttattttgggactcataatcataataatctcaatcatcatcaccaaatcaaacaccaaattaagaggcgtgctccagcttggtaagcaatacacatatacatatatataatttgtatattatatagggtaaatagttgcataagtatctaaagttttatgtttgtaagcggcataagtacccaatgtttctaaaactgtaatttttttctaattttatcagtacagactctgatattgtcttaaacagggcacatataaaactcaaatttttgatcatcgagcctagatagaaatatgtagtatcagttacttctaaatgttcttttaataaattcaaaacagagtctgtactgacaaaactagaaggaaattacagttttacaaacattgagtacttatgccactaaaaataaacattgggtttatgccgcttacaaatataaaactttgggtacttattccgctatttaccctattatatataatgttgaaaaagtctacagtgcactctctttatatggatgttcggtagacttcttaattatctagttcggtatttgaaaaatttgtatatttattgtcacctgtaaatttttaaaaaattttcaataatttagagtgtcaaaaataatattcaaataatgtattgcacgcacgaaagtttatacatatatatgcatgataaataactatttaaactctgtttttagcatgataaactatttagaattttctaaaaatttagagataattctaaataaataactataacatacatgatcatacaaaataaatattggactaaaaagctttatactaaatgccgaaataaataaaaagtatatcaaaataactcttttaggatctactatcataatttttcctatataaaacaaaaaaaaaaaaaaaaaactaaatgataaggctgacatatttagtaagtactatgcaccactagtgtacaataacaatgctctttaataatctaaccacattcatgtaatactattttaattatttcggtttttggttataattttcttcataataaattgagtgtaaatagaatttaatgggacaaaacaaataagatttatatggagtgccgaaccttaggttcgagctaaggtgttttgtctcagccaagccaagttctaagctcaaggcatggcctcacacaatggaggtctcgcagcctaggtacactgagttacaaaatctcagcttattactatttctcaaaaatgccacattaatttgcacatgaatgctcatcacattaacaagaaaattataactttgaatcgctcagaattccatttcctccctcaacaatacaaaaacgcacagtaaatttgacaattataattagctacttcgactaattaaacatcttgacca

SEQ ID NO: 385596 - DNA, 2655 bp, Cannabis indica
tcaaaattttacaatgagtaataatctggagaaaattcttcaatttgcacaacgaaatttaaaatttcttattcgaacataatggacattgtccccaaataaatgagtagcatagaaaacactgatgggaaaaaggaaaagaaaaaaactgcagttttcctgaaagttcaaagctgaaacaataaactccgagaaaatcgaattccaataaatttgagaaacttaggtcacgaaatgtgtaaattttcgtttcaaatgaagcgatttcgatcaaaattggacagggttaggagggttgtccttactttttctgattaattgttattatttaggcaacaaggaaaggggaggagggaagaagagtatgagtgaatgtgtcaatcttgtgagtgagaaagaaattgaagaagagtttgctggtggtattataatttataagacaggctttaaatacatatttgcccttgttattttaattaatgacattaatatccatgagagagcttttgtcaaaccacgggtcgggttggctcggagaaatggatcgggaaacggacccgccgacaatgtaatatacggtagtctaatggtgtgttagattagaacttttttttttgatagaaagcaaacttttataaaactagcaaacccgaaccaacaacagcaatcttacaacacaaaatacacaaccgtcaagtcataaaaaccacaaaaactcgacgcagcccaggcagccagcatatgagctgcatcattgttcacacgagaaatctagcaaacattacacgaactaatggtatggtatgttaggttaaattatataatctgttttcctttatatggaaataaacataatagttcctaaagaaatattttattgtcttgtcttatgacatggtgagttaatttgtattgtgtgttgatcatattggttaaggttgttttggaaagttttgtttcagttggacagatttggtctgtgggatttctgtcttcggagaatggaagaacaatatgcggtgttctcgattcatgatgaggatgaagaaggtcttatttttgaatcaagggttgatggtttagccgaaattgatgatagatggttactggtaggacgtttatatgtgaaagaacttgatccaaatctcttcttatttcaattttaccatgaagttgatatagaaagtgttatagaggggagtcgttggacgtttgatcgggcaccattaatctttgaacgtgtgaagcatggagagaaccctagaaatatatcactgttgaaactggacttatgggtgcaactacacaaaatgacagtcagctttatgttggaaagagtgatccaataggtgggaatttacatcggctctttcgttaagtccgatccaaataatttctcaggtgtttggcgtgattatttacgtattcgagtgaagattagagtggacatgccactaaaaaagaagaagcttgaaatccgaggcggtccgacttgtcaggtgatgtttaaatatgaagatttgccaaccttttgctttatttgaggagtgcttggacattctgaaaaatgttgcgaaaaactttttgaagtcccaaaagaacaaattgtccatgaatatggtcttgaactgaaagttgctccaagaagaaagaactatgcggatggctctcggtggttaaaatcgggtctggcggtgaagaacagaatggacgatcgcccagaagccagcaactccaatggtggtcgtcagagtaatcacgacccacaagtcatggggaaccagcgtataatgattgctaacaatcagagacctcctttactacaccctgattcacgagatttaaatggagaggcagttatgaggcaagttgacaatgttaatggagcaccaatgaatatggataaatccctaaatttaaggaaggttaatgagcatgtggttatggtgccagccgaaattgattcaaactttgggctgtcctttattgataataaaagaagaagaatgggcttagaaaaagaaattgggctcaatgaaacacaagaggtggagctgggccgtgaaacaagtattcataattagggggtcaaaaatatggacatctcaaacttagaagagaatgatgatgcagcccaaattgatgtcctaaaaaacttgatagagggcggtgctggtttccaggcccgccaagcattatgaatgtattgagttggaattgttgggggcctgggaaccaacggaccattcaattcctaaaagaaactgtatttcaaaagagacccgattttatatttctgtgtgagacaacgtgtcataaatcaaaagtggtgggcctggcccaggcattgaatttcgatagtgttttcgtggttgatgttaatgaggcctcgggtggtattgctgataactctatgaaaatagagttatttatatctttttgggcattaaattagttttgttctcaagtatttttagtttattttagtgacttttatttggttttatttagtttggcataaatattaattttagtattttttagattaaattttaattaattttgtaatattttatcaatttaatttagtttctcattttataagtgttaatctcaatgtagtgtatttttgtaaaaagattaaatgtacatttt

SEQ ID NO: 385597 - DNA, 1612 bp, Cannabis indica
taaaatgtcaaatttcccttttagttatttgcaattattattatgagagtacttggcatacgtaaacttataagaatggagacaatttggtagatatgtatctatgatgatgggcagatataaatttattcaccaatttactctttttaaccaaaatctaatcaaacatattatttcaatttttggatcttattcttttctctaaatatttctttaaagaacaaatctatatattagatatttgaaaacgacttcttactacgtaattatttttagaaaggaatgaaaataaaaacttgatttaactatatttcctcaccaaacaaaaacataaatcaatgtgctgcatgcacttgtttttttcttttttttttcactcttaacttttatcaattaagaaaaaaaaatacttgttaaaatatacaaatttgtcttcttctttctttttttaagatgaacaaacgtacaaacttgtcatgagactcttgactgataacgtataaatatttattatgtatattacatgagaaagaaaagaaaaaaaacgcttatattatcatttttaaattttatcattatatcatctgttacaaaaataaaatatcatcaaataacgtttcattgagactaatttattttatattagagttaatattttggctcattctctttcagctcacttccttattgggcctataccttgtctatacataaaacctctcttgctttgtaagaacttaatgacctaataataataaggcattttgactgtcgtttatattcaaaatgagagtttccttctctgacatggtatcagagtaggagtttcgaacatgatgcttgcaccaatttcacgagacacaaattgaagaattcatgacatcacggtgttgttgtatcgatcctaagcaaatagagatggattgtcatgttgtctgagagaagatccaagaaagcacactaaagttaattcatgtcagcaccaaaaacaacattgtcgatattttcacaaacttctatttcctacttatttccatacacttgtaaccaagatgaacctgaaaaatttatacaattcatctcaaaaagggggtattagaattaatattttggcccattctcttttagtccactttcttattgagcctataccttgtgtatacatataacctctcatactttgtaacaacttaatgacctaataacactaaggcattttgactgctatttaattatattcaaaatgagagttttcttctctaatattttattttattttacttttttaaaaaacattaagtagagactatatagatagagaataactttgacataattaaatcaaacataaaaataagagtagtttgcagcataaatacctaagttttatgtcgagtagcagataaatacgtaagtcgtatttttggcggtaaaaataccttccgtcactggtgtggaacttccgtaggtacctggacgttatgtgccaagttagtatccacgtgtcattctttgattagtccacgtcatttaattttaaaattttatttgtaaatcaatttaaaaattaaaaataaaataaaaataagtttaaaataaaataaaataataa

SEQ ID NO: 385598 - DNA, 940 bp, Cannabis indica
cagattccaagaatgaaacaggtggctgattagagtcttgagacacagttgaggtagctagattcataatggtggctgctataagttcttgtaaacttgagtgtgacatgttgcgactaaaaagaaggccaagtaaaggtcgctctgcatgttctctgatcatctgtaaaccattttttggtaagcttgagaggtttcgaagagccctaatagccacccttttcatatcaatgtcatcatgcaagaccaagccaagaagaggatgtagcactcctccttcaaacagagactctttattgtgctcagtcaattccatctctgccaaattcattgccattttctttttcacatcttcaggtcctgcgatacaaatatttataggtcatttaaaaaaaaaaaattgcttcatcaataagcactgggtagcctgccaagataacatgaaaacatatatgaacctgtagaaagacgatcaagaaagtgtttgaaataattagcctttgccatttgaatgacattctgatcacagaatgatagaattgccagtagctcctctgcatctctagcagattgattatcatcgccatttgacatggtcactagtaggagtatgcaaccttgaacctttccaatgcattctcttgctgaattgcatttagataattccaatagcaatgctactgctaatttccgttcctcaggacgacgtccaagtgatcgaacaatattttcaatggcactctcaactattatggttctttcctgcaacatttccatttttcaatgggaaattctgtgaatattaaccattctagttgattgataattaaaaaacttaaccttctatcaagtgtataatgataaacactatgggctcgtttggaatattaggtcgtattgtattgtattataaattgtattttatgcaatatttttatgt

SEQ ID NO: 385599 - DNA, 659 bp, Cannabis indica
atacttcaaagcctttgcaagatttaagtttatctgcttctgttgttacttcacaacagaaggttttgccaaccattttagagtctcaagcagagaaagaagatatttcttgtggagatctaagtttatctgcttccgttgtccttttttgtcgtttgggaaaccttgatatatttttatcactctttttgtgtgagattgttgttttaagaattttattgttgtccttttttcggttcattgtcaaattgacacgtgtccccttacaggccattcttcttgctaatagttttgctacgtaccacttttagacctatcacccttgaacgccataaggtccctcacttctttcactgtgggtttgatatattttgtactgtatattatacttattattatacttagcggagctaactttgaggaatcttcatggatctcacatagtaatgagtcgggaacatagattcctcaattcaggcacaaacttttttcttcatctttatttttgcatgtcccctttagtatcattaaattatcaattccttcattaaaccaccatcataggccattggtgtggtttaaattttactagaaatcttgaattcatgttcttttcttgtctaacattatgtttggtaggaaggggagatgggtggatg

SEQ ID NO: 385600 - DNA, 413 bp, Cannabis indica
tccatgtcgagttttatcatcataaagcctttcttgccttttttcttcctcatggagtgcacaatttctcgagccactgcagtgttttccgctattaatcttccatgtacaaaagctgtttgttccggtgagatgatggaaggaaggaggtgcttcaagcggagagccaggacttttgagatgcatttgtacgctaaattgcagagggctataggcctgaagtcattgacccccgtaggacaatcttttttcggaattaaaacaatattggtattgttaataaactggggaagttcgaagctcataaagaagtgggaaatcatattaatgaaatcctccttaaccacactccaatgctaaaggtagaaacctgccgacatcccgtccgggcctggtgccttatcatggcccat

SEQ ID NO: 385601 - DNA, 2261 bp, Cannabis indica
ttaaataataatattatgtatacttacataaacctattatgtgtatgaaagttgacacttaattagaaagtgaatgatactttaaatttgtaagtagagtgatagagtttgaatagttttactgttaaaatttgagcttaaaagattaagtgaaagtaaaataatagttgggagggttaaaaaaaattattatatatctataccaacatgataattaacattaaattattgaaaaaaagtaatatgtgtaccagacacaaagctttgttgattgtatcggcatcgtaggtggaattggagtctccgaattcggagtcatcatgatcaagagtggaaagcatgacgtccatgaaatcatcatcatcatgatcgacctgttgctgcctttttttcttatgctcctcgatccaaagttgagccaattcatcaagctctttggcagtttttttcatggctttctcataacctcccaagtccaaccacctcacatacggaatagcatcagacaccataaaagttccagtaaacacaaagaagtctcgtaaagcttttcggtagcgttcaccaaatgagcttgtggcttcaacataccgcttcccaacaaccattctaaacactacgttttgagttatatctccaaaccattctttcatctccacctccactacctcatcatcatgatcattgttattgttcttgttctgtacacaaagctcgtacagttgtttaatggcagttttgacctcggattctcttacgtggcttagtttctccaagcgttggttggagagtaattggagggtagcaatcttacgagcatggcgccagtatgaaccatatgggctaaacccaatcatagcatagttgtaagtcagtatctctgaggctatgcttttaggacggtttgcgaagactctgtcatttttggtgagaaactctttagccatttctgagctgcttacaaccagagttttgtacactcccatttttatactgaacaatgggccgtacttgtctgccatctcccccaacgttttgaaaggtggttctgagcccgctaataggtgaaggtggccgattatgggccatgcgccgccggcttctggacaatgattaactagctctaccacctcccgtctttgctgtttccatttccatagaagaagatacacaaaaaccgacgacgcaaaaatggctgtagcagttggaagaagcgaaccaaaatccatgattatatgtattaatgcaaaattctatcattattaatgactgaaaagtttgaaacatcttaaataataatggagaactaataagtaggattactttataattatatggatgacgggtcaaagttttgttgttttttttaatttattttatacatataatacttgtcacacttcatattatttatattattatatatatgttaaattaggtataaacgatgtttactaaaataattagtgagagaagaagagtaaactaatttcggacagcagattttctttcacattttctacaccaataattgatgtgtagaaattaatctttctaactactcacatttatttacattaatatttataatttaaaaaaaaaacagtattacatcactcaatataatgttttaaagtatattagcgaatattaaacatttatttatatggccatattaaatgaaaaaatctatacacgatctttatagaggtgtttcgcaccacaaaaacaaatatgttactaataatttagttatagcataaatgttatgcgattagatgtgatttttagtcataataaaaagataattgtgactaaaatataatatttagatacaaattgtcacgaatttagttttatacaacaagtattgtgactaaaactacatttaatcacaatacattgtaatttttgtgactaatacttttatttaaggacattttagattacaacataggaacaataatttataattagtcacaaattttactgtgactaaaaataagatttttgtagtgtcagccctatctttttcgactttaataagaaattttagttttttttataattgtgtacgttatattgtttagaactacctataaattttttaaaaaattcagaataatttacagtgttgaaaataaaatttaaatagccactaagcacataaaaaaaataattatagatacaacaaaaataatataaatcttaattttagttacccaaaactatttcattttttaaaaaaaaaaactttaaag

SEQ ID NO: 385602 - DNA, 2000 bp, Cannabis indica
gcagtagactatttaatcattcgacttagaaacacgctctgtaagtacgagttatttcccttcaaatacaattagaatttcatgtcttggttcatactttcccagcttgacacgtatcttcctctaatgtgctagccgaattttgggtataacagtaacaaagtccactaggaagaatacacaaacccttcttctttatgtaaagatcgaattcgacaattaagtcttttttgggtaattttgatccaatgactttgttagtaatagaataccctgggaagaactgcaaccaaatcggtttgctgatgagttctctgcaaaaaatacttccatgctacaaatacttccattgtagcatgaaagtattgtttctctttcttccaatattctttaggaagaatatcagagtttattatcgtgtatgacgctccatagtcgaataatccttccacttttatcggtttggcatattttgttggaagaacttacacagtgatgacatgggattgttgcatcatgtgattagtggacatttgataacattgtagagtgtctgagtcactccattgtttgaatgcataaagagatttagagttgaattcatcatctgcggagaagattgactctatgttattttccttcaaagatatcccaatcttttgttggatatgtgagagaagcttgattgcttttcctttaggccattgttttgcataatacccctgttttccacacacacacatagcatcaatcatattttttttcccaaaagtcgcgcttttttcgtaaaaaaattattttgcgtcctttgtgctttgagaacatgaaagggctcttgtaagaacacaaagattcaaaagggcatttgatgaaaaaatctttcctactacaaactttgcctagtttttgggattgcttcataaattccaggagaaatttcttttgggtagcacattttttcaagggtttttaagagtagttgggaaatttctccaattgtagcattcgttaggctttttccgaattctgagagtagcctgaaagtttcttcgcaaagtgtctctcgaatagaggaaaggaaggcttactttcgatttggatcattaatgccacctatttggtagaatcgttaagtcattcacttataatgcttttcaaagtctctttagtccattgaatagtacttgagcttgaaaaactctactctatgtctttcagttacttgtgcgtcttggccacaaaactcaacatagagatagcatatatagggcgtttgcgacaaataggagttgcaagaaaggcatttgtctgtattcgcctaagcttgtctaccaatattgcaaaggtctggtgaatcttgagacaaaattcaagaggattgtccctgtttctgcctgtggtttttatgtttccaggctaagccaagcttggaattcttggaatctttctctccacttagataggggaatgtcagtaaaagtaaacttagaatatttactcttttgatgatgagtgtattctagttttattgtagctgcttcttcttcatcactttcgtcttcacttttgacaataggcccggtttaagaatatacttcttcagcagattgagccacaaaatgtgcgaatacatcatcttcactagtatctaaatcttgagactcatcactagtatcttaatcttgggatcaaagtttcagaagtctcttcttggtcagaggaagaggactaatttcctttgttgtcaagttcttcatgtgtttgaaagatcatggcagaaataggattattcacaatttattgggcaatgaatttcctaggctccttttgttggaaatattttaccaggatctaaatttactaacacgtatgtttcatcaacatcctaatatgaatttctaaaacaataaaataaacacataagggtttaagaaaatattacattgggtgcagcggaatataatgactccttccgttcagatctttagcccttgattcct

SEQ ID NO: 385603 - DNA, 892 bp, Cannabis indica
atttactaaattacacttagtaaacttgggtatgtaatttgtacattctctctttctgatattgtatgaacttttataaaaatatttatattgtcttaacttacatactcgtatttaaaaaaaaataacaaacaaataaataaaatacaaatattgaaaattaaaagagtatttggcattattttctattttgagcattgtgattttaagaaatgaaaactagttttcaaaatgcaagatatgtttggttagagtaagcaacaaagaattttttacgaaattaagtaattaattttacttagtcgataagttaatattattttcaaaaattgtatgtagattttaatagagttttgatcttttcctcttgggttcaacccctattcataagaataatacagtagctattatttagtgggggagttacacgggaatagaccaaatcaatttttgaattgttaggatgacacatctttttcgagctattcgataatatgaaatgtgaaaatccgtattttaatattcccagtttgattatttaattaagtgattaattaaatgcggaataatgaaactggtactgaaaacagtttttccgtagttacagaatataactctgtaactctagagaatcccagaaaaacaaacagtgcataaaagtaaaaacacacaagatttttgtacgtggtttcaacaatcctttcagattgttactagtccacggggccacgcccagagataagattcattagatcggtatcaaaaatacaaagtaattgacttatgcataaatagactccctcttattgtatgccgcaagcttgatgtattccacctactaaccgaatcttgataaaactccaagagctcgaactcccttcgatcaccttga

SEQ ID NO: 385604 - DNA, 1330 bp, Cannabis indica
gaaacccaccgagctcctacgactctttgccttctctgaggaatagcctcagtgtattcctcagtaacatagtcttcaccctctaccaagacttcatcggccttggacatgggtttcgcttcctcgttgaagccccaaaagggcgatcctcgagaaactccctcttcctcgactttagatggagtttcaggacgggcctcgccctgatcctccacctcttggacttcgacatccccctcattgtcttcctccttagcagcaagctgaacttgttcagcgctcgacattgtggcaactcgagccacgtgaggagcagttaaggttgatctacgaaccgtctgtttcgtgcgcgccatcattctatccatggctggagtttgattagtgtgcttggcaacagtcacatcgaaagtggctataggcatacctacagcagcagaacttgggcagcctacgggtatagtgtcaactatatctgggcggacaatatatgtccagttggacgacaaatatcgtctccaccccttcatgagctcccagatgaaacgtccgaagccttcacctgggatctggtcaggataaaaatggtgttgcacctcgagttctgaagaaggtgtatgttcgctgcttatctcccaatcctcaaagcttgatttggaaagaccgtcacttgatgaggatagactggcacaaagacgaggttgaccctcgtacaaaagttaagaaggtcctggtcagtatgatgttctcctccctaaagctcaccagggttcatctacaaaaggtaggacacaagatgagtatttggccgggatatcgaacaaaaacaaattgaatataccgactaggtccgatcgaaggattaaaaaaaggagattttgcatgatattaggtttataacccagaaattcaaaacttcgaattaagggttaattttcactaaaccccgaatgggcaagtgaaaccgaatatcgtggaatcaaaatcagaatgcaatcacaatcaagtcacatggatgaacataatcaaaatctcatattcctaaacctagattttctaggttttcctagaacaagttcaagaactatcgaattttctacaatggaaacccagaaaattaaatattcaaacataaaagaggaaagagatgaagaacttactcactgttcgaagctttagagctgttcggaaagagatgatgaattttctacagatttattatcttctttctgttttagatctctattttgtgtaagaaatatttagtttctaattttcttcacaataatgtatattttttttaaaaaaattgtctgattttttatttata

SEQ ID NO: 385605 - DNA, 705 bp, Cannabis indica
gagacttttttttgttgtggcaacgcagtggaagacttcaaatgcgtgtttttggtcatttaataatttgatcacagcggtggcacattgaattaattttcagcagcctctttcgttacgttaagcctttgtatttatttgttcaaccacaaatgttaaaaggcgtattttttttttttgagatatttaaaaggcatactagtatacggttattaatataattaagtatgtaaaaattacataatatatataaaaaaaattataaaaatgtttctccaaaaaaagaaaattataaaaatatttcaaataaataaataaaaatatgttaaaatattttgaatacaatatatataaaaacagatatgattgaattaaatataaattagaaagaaatttagttaattttttttttttagggcaatgtaagaaatttagttaattgataaataaaaaaaaggctaattattaatttttactcccgtagtaaatcgtgcccctcaattttttgggccgaactatggagatggttaaatttaaagacttttgtctaatttcattcaatttactgtttgagtgattgtttatgtactaaatcatactcctagactttgatatctacccaatcatgcccctctaattttgatatgtactaaatcataacccttgaacttttattcatgttagaatttttttactaaaattaaa

SEQ ID NO: 385606 - DNA, 951 bp, Cannabis indica
aaaggatcaaatattagttcctttatactattaatgctggtagtgctaatagttagatccaaatctgtaatgagattatagattaactgttcacaatgaataaatagtacacaaggaattcaagagataattataagggtaaaattgtaattttgaccagctctaattatgaactaataattggagggcaaactacttatattgattattgttgcccaatttttctcccaatatacgtggcaactccatgacgcaacatgtggcagataaagcttaaggactcggaggtggtcaaacaaatcttaagtagacaggattcccttggacaacctagcggttcctcctagagctatgtctaagtccgaagggatcgattaaatgcagtatggtggaaacatctactaaaaaaatatgaaaagacgtgttagacgcattaaacccactctttagcaattacgcgctaatcaaggatgtaagtgacggctacataatatactgtcacaccaatcaaggaaagataaagacttatctcacctaaactctacgcatcctactaggtaagggcgcataccctacttcgctgatttgggaacttatgcatagccaaggtggacacttaagacaatagaggccttttttcctctccaaaagaggccttttttcctctctaaaaactgctataaatacccccaactacatttataatggggatcggaaaaaataaagcagaacattctctgtaaagaaacacctacatattaaatatcagagattcgtggactaaggctaattaatatcccaaccacgtaaaaacacttgcatatactctcttccaatcattctcattgcattaatgatttagttggcgaaaatctcagttaatattttaatgttttcattgagagctgtagaaggctttacttacaaaataacaatataagaagattcaga

SEQ ID NO: 385607 - DNA, 420 bp, Cannabis indica
agttaagagttccgcctaaagttaaggatttgattttggagcgttgctttctaattgtcttcctactcgagtccaattaagtgggaattaacatgtgtctctcttttttttttttttttttttccggttgtgtccatgatgtttacgagtttatataaaaaaaaatacaagcataaattataaaatacgaaatattattagaagttaaataaaatattaaactggtctccatcagggcaggaagtatcacctcctttttcgctctgtttaatatttcagagacaaaaaatgatcctcatcccttacaaatggttatggttcagatggggacgatttttaaattaccatccccatccccttaagttaattatataatcatatctgtctgaataaccattggtaatggtatgggtaattacc

SEQ ID NO: 385608 - DNA, 590 bp, Cannabis indica
aataaaaaaaatagaaaattaaatatgtttttccttaaaaaaatatttttatttttgtaagatataataaataatgaaaatatatttttaatacaaaaattatcaaattatattgcaaaaaccagagtaatcttactagcatatatacttaaaaacataattatactttgaggagaaaaaaattaaattttttgttaacttttaaagttaatttgcacaaaatacatgtattggagcccaattacaaaatttgaaccataacattaactcattgtcttgagtacaccttgcattaaatatggctggtcttagtgaattgtaccatattattttgttgattgatttcaatcacaattcaaacacataatattttttcaattattaaaattctatcacgtgaataaagttttatagctatgggtgtaatatatatcttaaaaattacttacacatgagcagggcaagctgtaaactaaagcgggctaggattgcacttagggcccacttagcgtaggagccatgtagcctagaggcccatatagcctaggagccaaaaaatgttctctatatttaaaatacacatatttttt

SEQ ID NO: 385609 - DNA, 880 bp, Cannabis indica
ctcaaagtctactctttccgactctatcctctcaaactcaaactcacataataaataccccattatggtggtggaaaaaataaaaacatagccagaataaaaatgacattccaatactttaaaaaaaaatcaaacaaagaaattgaataaaatttattttcttttcattccattccattttattacctcaaacccaaacgtaaccttaaggtgttatctatgtagattataaataacacttttattatgctacttttatttgtctaagaaatattattcttttaagagtaattgacttatgccttacccaataaattttaagtttttatttaatatataaaaataaataatatcgttcctattttgataaataattacatctttaataattaaattttttacaaattataattgtttttctttaaaattaatacacatatataattatattttttataatacaatatcaactataaataattcaatacttttgtacatataaatatgttactattttttatatattattacacaaatttttaaatttataaatatatatatttaaatttgtaaataaaaacattattttttaccaaaaaaagtgtcccattatttaaatagtcttttagatgttttacatgtaaagtattaaaaatatattttattttgtcaatattttttaatatgggtgattggttaatatcttaactaatatgttttttaacacaaagagtttaggtaaaattctatatttttccattctattttaaaaaaattaggagatttttcaatttgtttaaaagagaactataagttatgtttagaaaaataaataaataagctaaaaaataaactacacatataaaactataaatattat

SEQ ID NO: 385610 - DNA, 993 bp, Cannabis indica
aaaaaaaaaaaaacataaattttactatacatctaaagaaaaagcataattccaaagagcactattgagaaatatggcacaatatccatattattccctcttaaaatagtaattattttttgttcactaatcttgaatcgaattatgcacgtaaaaaatataactctaataccatgttgagaatcataagattacattttaaaaacaattaataatgagtagagtaagactcaatactctattatttatttcatgtggaactaaagacgttgctacttttggctccaaagaaggccatgcccctcctaaaattttggagaaaaaatattttataatgcaatttcatattaaaaattttatttttttaaaaaaattatatatttggcctcccttaattattttgtttattttttggctccccttattcgtaacttctgcttttgtccctgtgtgggacaatgtccacaataagtattgttattaaatagtttaatggtgtcgagtcttttttataggtcacgcttgattacatgacccgatacttaattacactaagaattttagttgggaggaatggaaatttaagaatagtaatgggaataggaatagaataaaatttaaaatgcatacaaaaaattaataaaaaaatcattaatttttttttttgttacattggaatgatcattccttttttaaaaaattgaatagtcattccaccaaaatagtggaaagaacattctattagaatatcattccaatacttttaaatgtaaccaaacaaaaaatggaataaaaattgtttcctttccattctatttcatcacctccaaccaaaccaaacgccacctaataacaatgacactgaaaagttttagaaattctcaattccaaaatgccccgatcatattattgaattacatatatatatattttctgataaaatattattatattttaattattattttggtaattataattctattaattttt

SEQ ID NO: 385611 - DNA, 1107 bp, Cannabis indica
aaaagtcacaaacaacccttctctaaattatctttaaagcctctcatacacaccgatttgtggggagcctcacacattaaatccaaagatgactttagttattatgtacactttcttaatgactacagtcgctatacttggatttacccacttgtcttaaagtcttaagcctttgaagtgtttattaagtttaaagccatggtggaaagaaattcaacctacctaaaaaaaagggttcaggctgattggggaggggaatattgatcatttgccaaatttctaatggatcaaggcatacactttcaacatccctgtccaaaaactagtgaataaaatgggagaccagagcacaaacacatgcacataacgaaaatgggacatacaatcttggctcaatcttggataaattttacatattagtggcatgccttccatacaagagtgttcttaatcaataggttacccacaccacttttgaaccaactatcaccaatagaatgtctacttggacaagtacctgactactctatactaaaaacctttggatgtgcatgttaccctcatctcaggccatacaataaacataaaatgcaattcaagactcaacagtctttcttgggttactcatcctctcaccaatgatacttgtgtgaaaatttagaaggcagactattcatagccaaaaatattgtgtttgatgagaagacatttccagtcttaacaaactcgtctaatgataaggtacactccaatgctccaactggagctccctctgctgttttgtctacatcccaatatactcatgtcaccactaacaaattttgtacccgatcccatgatcaatgagcaaccaagatctcagcctattactaatacaaacacacaaaatcaccccaacactgatgtgcatccatcacacactatccaaacccacattcaaccaccaacaacagtacctaccactgtttttacaccttctaattcccacaatcaaactcaacctacctcgacacaaacatcaactgctcctactgctatcccaacaattgcataaggagttgtataaagatgttcgaaaaaaatctattttgaattgacaaaatagta

SEQ ID NO: 385612 - DNA, 1647 bp, Cannabis indica
tcaaacaatggcaaggagaacctcacaaggatacatccaatggttcatggtcgaggctacaaatgtcaaaggccttacagaagaggactgatatacaaccatattagggggcatacactcattgagtgacttctggaaagcatttgaaagatctcaaccaacaacatgaaagagctccttaatagagctgattaatttattaaacttgaagaagccatacgacagacccagagggggcttctcaacaataggcagtcacgagacatcctatagtttcatgacctaccaggaacacaggcagacaccaacaacttagcccatacctctagtggcaagaacactagaaagaagtgtagcaccaacagctttgggaggaacaatggtaaaaaggggaagtttaacacttctcccatgccacagaagaacaaggaggagaattatacctacttcaccctcttgatagaaaaacttgagggcatcttcatggcgactcagggaacagtccccctacccaaagccctttcccatcaaaagggacatgagcaagagggacatgtcaaagttttattagtatcacaacagcttcggccatgaccccaatgagtgtcaccatttgaagagggagattgaatacctcataaggcaaaataatcctcacctgcatagttatgtggagaatgactaaactcaagcacaaggtgcccatgatggagatccaatgccaccaccagtggtaggacacttaggtgtcatcattgacggacccaacattataggtgagaccagcaaagctagggtgcactacgcttagacactctgtcacgagccaaaaagcgacatcctagctgttgaagaaaggggctataagtaatcgaagcttatagagcccttaatttccttcacagaagacgacggtgcttaggtcagtttcctacacaatgaccccttagccattactgcacaaatcggtaacatgacagtagcaagatatgtggtggatgatggagcctcctttaacattattgcaagttaacatatgaaaatatggggctccagctcaccaacctggcgccatgcaatcaattgatgtatggcttctttggccaagtcataagacctgtcaggtacatcagattacccatcacagttggagaaaatccaaccaccagaaccttgatggcacaatttgtcataatcgacattccatcggccttcgacaccatgataggctgactagccctcaatgacctaaagacggtcacatcaatgtaccacctatgcctcaaatttccaataaggcatggggtagtatgcatagggagaccaacagtcttcccatcactgttacaacttggctctatccaaagccaagaagaagaagatgaccactaggagctttgaagaagagcccagcaaagggcaatgaattccagcccaaagcgagtacatagacatagatcgtcgctatggggatcctgcaagaagctttaaacctgtagaaaagtttgaagaggcataagttgatcccacttttccatgaagaagactaaagattggtaaaggtttagtgctagatattaaatcaatactgataagatttctaagggaaaatctggacctttttgcatggtcacatggaaatatggt

SEQ ID NO: 385613 - DNA, 1752 bp, Cannabis indica
tgatgatttgaaggaaaatgtgaagtggaacgattactattttcctatacattatattatctattatattttataaattatatatattatctgtttcttttgctaactctgccagctactgattaaacctgacattttaatggacaaaattgtgccaattatctaaaacttatcttctctgcattgttgtttttggatttgaattgataagtttcaaaatctctgtctgaattagaggttgttcttggagttataaagagttattgcaagactcacttgggaagagatggtatgtcagcagcaagtaaacacctacacattcgtgaggtattgcattaccaatccttttgttagtggaagctacttatgacaaagtctcatctttggttgactaattttactagattttttctattttattgtaacattttttatacgatcattttgtttggttgcttgctctatctcagattttacaggatgctcaagttatattattgtattcaactattcatatctaattgtttttattcttgtacctggttaagggcatgagaaaggagttcgctcatgcgagggctttggctatttctcaagcacaagttctgcaagctcacgatgagatcaagatgactactccaaggttgcagttacaagtggatgaaaatgataaatccttttatgccttaactaaagaagagttaccttcggctagcgtgcagtactctagtgacaagtttatggccttgcacttgttaccattatgaagtattgggtattttaataattaatgtcaggctcaaaggtagatagatttatgggtgcctaatttttacatttcttgtgcttccatataatcagtgctcatgtcctaatatttttcattaatctacctctagcaaatagcaatagtaaacaataataggctaagtcccttattctaatttactgtgctacatacaaaattttcttcaaattggctaggctaattcctaattggcttcaaaacaaaccaaggttttgtgtaagctaaactaagctctccattagaaactccaatgagctcaccgctaactgaagaggtagcagcagcttcttcagctaacactgaacagaaaagtgaaagcatacttaaagttgatgaatcgtgctcagtttgttaagagactttgagcattaaaaagatagttttccaatgtgagcatattacatgctgtaaatgaatgttctttcgatcctttaatttttctcgtttgcattagcagtgagatatttttatagtaaaagatattaaatgttagacagttgaccaagtgtaaaaatttctgtattcaattgatagaatctactgcccatgctaagctaaatttgatttgattattttttttatatcatttcaatgtttatttgcaccgactgaacagataatactttgagataacaaagttcacgacaagtgggtaaagtgccctgcttgtagagagcataggataggaatttcctatcattccggtacaaacagtagcaaaatagagataatagagatgctatattgatatattgatatagaagataaaagataataaggttgctaggtattcgagagacccagctctcttccaagagctaagagctcacttaactaaaatcattcacaccccaaaactcttctaatactctcctatatatactctctcaatatccctcttacaatgacccatataccttttttatttatcctaaggcctaaca

SEQ ID NO: 385614 - DNA, 886 bp, Cannabis indica
cacaggctggtaattcaccatggtgattgtaggatgatgtggatactgaaaaggatgagactttttagaaatcttttctttacctctgagcaggatgttataagggcataagggttcagaaaagagttcatcacactttggcaagaaagcaaggcgatattttttggtatgatcaagtttcctgcagaaaaaacaaaagtctgggagtctctcatacttaaagtctagccatttaatgaactctcgtcccatcctaatgaatttgatattcattccccttcttattggcagattaacatccaggagaatacgaaggcacatgtagggtctagtaccctccttaattgtatcattatctaccttaataagatcacctacttccatggctataaatctagcaagatcataggaattgcacataaacagaattccatatacttgaatccagaatggaattgagtgtagattgttaggagtaagaggaaaagaactatcaggagcagcaaagatagtgatgctttggacaaaatgccaaggctgaccttttaatatccccctcacagccaaaagtaaccaagaacattccatcagcatgcttagacacagaaacaggaaaacaacattgtgatgaccagatgccagagagagttttcatgagggaaggatgattataaggtcgaatggtgtggagcttaagaagaaggctaatggtggcaggggaagaactagaagaaccaacatcataagtaaaaacaatagtttcatcagggggaagagctaaagtagtagaaacagtgtttaaaaactcatccatgacagtagaaagaaaaactccagaaacaacagtaaagaaagtgaaaatcgaagtgggaaggtgaagagagca

SEQ ID NO: 385615 - DNA, 2223 bp, Cannabis indica
aaaacttcacaatcactttcaacaatacacaaagggaatctaacaattgaacacaagttgagagctacaaccatcgcctttgcttcagctaaaagaggagataagttaccattcaaaggagatgaaactgctgccaccacctcacctcgagaattcctaactgctgcccctatgactattttacttatgctattatccactgcagcatccacatttcattttaaaaaacctgaagcaaaaaagtatggtcctctgaattcgatattcttcggccttcaatctttgcaagctctgaactctgacccaaatgaactgcactacagtcttgagcttcatcaaagtcatgtaatagggctttaatttgaaactcaacaaaagacaatatagccttattcttgttaaataaaacagtgtttcatctattccaaatttcccaaagaatacataaaaagattcttaacttctccttatacaaagcatcaaaacccctaagaatgtattcactgatatcattacatttattatttaagtaaaaggactcaaatctagattcactccacttaaaggaagctctagaacactataaaagggcatgggatacagattctgaacttccagaataaaaagaacaaagaggagaggctagactttgccgatggaaaagattaagagcgataggaagagtatgatggaaagccctccatataaagtgctcaattttctgaggaatcttaaggttttagagaaccttccaccaacgaaccaaggaatgattgtcagaagaagcaggaaaagaagttgaagatttaactaaatggtatgcagaattcacagtaaaggatccagagagatgatgcccccaaataagactatcctcaagagaaggatcgccaatcagaacagcaagaatagctaagactaaatcatgatcaaaaaaatccaataaccgatcctttcgccaacaaccattctcatcaataaaataagaaactgtaggatctaggggttgaacattacctttgtaagagatgagtctccaaccaggaatccaataagagtgcacagtggagatagatttgccattaccttctttccacagaagacctctcttaagaagatcccgtccccaaagcaaactttgccaagtaaaagaagcacaatgacctttagaggcattaagaaaggacttatgtcgaaaatatttagctttaaacaacctggcaacaagagagtctggcataataagaatacgtcaggcttgtttagcaagcaaggcttgatatgatgaataaaagaacgaaatcccatcccaccagaaaaatttgactgacagaggtttccccaagttttccaatgaatttttcttttgtcacccaccgacccccaccaaaattgagccataagactttcgattttcctacaaactgaaactagaattttaaaacaaaacatagcataagagggaagagcttggaccacagctttaagaagaacctcttttcgagccttagaaaacaaacgactattccaactatttaatttagaactcactttttgaataaggtatttaaactgagagctttcgaacctaccaatacattgtggaacacctaagtacttactcacaaaaagtttctcatccagacccaaattagtgtaaaaatattcagaatcaacaggactggtattaggagaaaaaaagaacagaagacttggaaaaattaacaagctgggcagtagctttatgatatagatcaagagcatgtttaacagctaaacaagaacgagcagaggttgttgaaaaaagcagactatcatcagcaaagagaagatgagagacagaagtggcagatcaacaaaaagatataccacgaaaattattaatagattcctggtatcgaatggcagctgaaagaccttcagaaacaagcaaaaaaatataaggagaaagaggatctccttgtctaattcctcggttagacttaaaacaatcagacataaccccattaacaagtaacctaaaagaagcagtagagatacatttaataaccagagaaacaaaattaacagggaaatgacaatgaagcataattgcctgcacaaaattccattccacacgatcaaaagccttttccatatctaatataattgtagcccaaccatctttaccagattttctatgacatatagcattaaccaattcattagcaataaaaatattat

SEQ ID NO: 385616 - DNA, 1377 bp, Cannabis indica
tgaatccaatcatgagctggcatgggagtagtgattgtactgaatgagagaatcttaaggctatacaatcattgtgcaatcattacctttctaacaaacttactgttgggccttattttttgttttctcttgtattgtttttctttgctatataataaaatgctacacactcactcatttcttgagccgagttttctattcaagatattactcccttaaatcttctcttggtataagagcgactttttggcctccgccaatgtcaacaaatcagagccaaactacaccaggaaacgtcggtgggggaattatggtttatactataatcagaggtcacaggttagaaggatacctcaatggccaaaaaccatgtccaaacaaagtcatctcaaccgagagaatagctgagaatgaggttgttgtcagtgagcttaagccaaacccagagtttgaggcatggattgttcatgacctgcttctaatggactggctttacggatccatgtctgaaagcattgcatcaaaagtaatgggttgcagatctgcatctgctctttggacaattctagaggagctttatggagctcattcaaaggccaacatggatgatttgcgcaccaaacttcaaactacaagaaaaggagcccaatcaaatgactgaccacttaaagatgaaaagaatgtgggtcgattctctagcccttgttggtgatccctatctaaaaaaacatctcatagcaaacgtgctgtttggacttgatatggagtacctctctattgtgcttctccttgagcatcgaacagatctaacctggcaagagttgcagggatctcttctcaattttgacaataaacttgaatgactgtgagctgtctctccaactagaaaaacactaggcaatccctctccaagtttggctcaacgacccaacaatcctaacaacaaaggaaaccaatttggaagaggaaatggatatggcaataatcaaggtcgtggaagtcaatatcaaggcaacatatctagaggcaacaacaataactacaacaaaaacaatcgtggaagaggaagatatagttaaacccatttcaatataatcttatttattattaatagaagattagaagtcagtcatgtttacatataattttcatgtttatggtttgatatacaaattctgttaaatccagaatatatagtaattcacaattacagtgatgtcaatatagtggaaggcaatggcaattatatgcttcaaaagtctatgtcccatgatttatcagtgcactggatttacactgatgtgatagtcagcgataaagcttacttacaccttgaataaatgttatgtcttttcaggacattggcaaagtatgcta

SEQ ID NO: 385617 - DNA, 2827 bp, Cannabis indica
tacacacaacccttcaatactctaaatcagccgttctccctcaagctagaccgaaacaactatacactatggaaaactatggtgtcaacaattattcgaggtcacagactcgatgggtttatcaatggaagtcgtccctgccccccagaatctgttccagctgctgcaacaccagaaggagaaccagaaggcgaaatgatgctgaatcctgactatgagcagtggatagtgagtgaccaactgctcatgggctggatctacagttcgatgaccgaatctatagcaactgaagtcatggggtgtggatcttcatcagccttgtggagtgcacttgaaaacctctatggagctcactcgagagccaagctagacgacacccgaaccttgatccaaactacaaaaaaaggtaatacatctatggctgaatatcttagacaaaaaaagatgtggtccgatagtttggctctggctggtgacccatatccagagagccaccttatttcgaatgttacttctggtttgggtattgaatacttaccaatagtcattcaaatagaaagaaatagaatgtcatggcaggaattacaggataccttgctgagttttgacagcaaactcgaaaggttacaagctccaggacacaccaaatcgactgatcatacagcagggggctcttcatctggaccttcggctaatcttgctgctaaaccaaacagtcactctcagggaagaggaagaggaaactttactcctcaccaaggcagaggttcgaataacgattcaggccgtggaggtggtactagaggtcgaggtagaggcagaaccaacaactcaaaaccaacctgccaagtgtgtggcaggtatggtcactcggctgcctattgttacaataggtatgatgagtcgtatatgggtcaagatcccaatactcagcagtcttcacaagcagggaaccacactgcctttgttgcatcaccagaggtggtcgacagtgatgtttggtatgcggattctggtgcaagcaatcatgtaacatctgctgcagggaatctaaaccagaaatctgaatacaatggtaaggaaaaattgaccataggtgatggtaatcaaattaatatcacatctattggatctggttccctccaaactgaatctaattctcctttggttctaaccgaattgttacatgtaccaaaaattgctaaaaacttgattagtgtatctaaattgactgctgataatgatgtgattgttgaatttcactcaaattgttgttatgtgaaggacaaagcaacaaggaaggtggtgcttcaagggatgcttagagatggactgtaccaactcaataccccagccaaccactctacccaaaacaacttaaaacctggtctcaagtttactggtgtctctgttctgtctaagggaaatgtaacccgtgctcctagtaatgagtttttactttccaataatgatatttggcataggagattaggccatccctctgtcaaagttttaaagaaagtgttagaagtatctaatgtaccctgtttaagcaatgaaaatttacacttctgtgatgcatgtcaatttggtaaagctcatgctctcccatttaaactgtcgaattctagagctactaaagttcttgagttgatccacactgatctttgggggccttccccaatagcctcaaacacaaactacaaatattacatccattttcttgatgattacagtcgttttacatggctgtatccattaagaactaaagatgaagctttgacagctttcactcaatttaaagcctttgttgagaatcaatttgataagaaaatcaaggctcttagaactgactggggtggtgagttccaagcctttggtgacattgttaaggtcaatggaattgatttccaacacccttgtcctcacacctcagctcaaaatgggagagctgagaggaaacataggcacatagtcgaaatgggcctaactctccttgcacaagcctcaatgcctctcaaattttgggtggatgctttccaaactgctgtccatttgatcaatagacttccaacacccattctaaaaatgaaatcaccttttgaaacactgttccttgaaaaacccgattactctcaactgagaatttttggaacaacttgttttccttgcattcgcccatatcaaacgcataaatttcagtttcattcattgaagtgtgtcaatttaggctttagctcatcacacaaaggctataagtgcctaagttccacaggtcgtgtgtacatttcaagaaatgtcacatttaatgaaactaaatttccttttaaacaaggtttcctcaacacctatgcaccagaaaaagaagccattgtccacaatccagcctggtctcagctgccctttctgcctttctcacacaacactcccttgcctactagtacagctcttgatccttctgcccaagcatcctctgaagcaacatcttccaacaatcatcatgttactgattttgaaagtcagcaggttagtgagtttgaacacacaccagctgatattgcttatgctactgagccacaaaatgctacatcagaccaagctgaaccagtagctacagacctgagacaaggaacacagagtgaacaacctcctgtgccttgccaccctatggtgacacgtgccaaggcaggcatttttaaaccgaaaacctatctcagcaaaacaaagtggattcccaaaattgaagaaccaagaagtgttgaagaggctctcaaatctaaagagtggaatgcagcaatgagtacagaaattgttgctttaaaaacaa

SEQ ID NO: 385618 - DNA, 932 bp, Cannabis indica
tgcattttcctcataatgacccccttggtcattgaagcctaaataactaacaagatagtttctagactcctggtggataatggaagcttcgtgaatattctattcaaattcgcttttcaggtgattgggctcaccgaggtagacttttcaccttggcccatctagttgcaaggctttaatggagacactctaatgccaatgggaaaaatccaactccctgtcactcttaatggataaaataatgtttgtgccttcaggcattgtacttttgtggtggttgattacttgacacatacaacgcaatactaggacgtcaactcttagtagattttggagtagtgactttgataaggaatttatgtatgaagtttcccaacaacaatagatgcattggagtagtcagaggtgaccagaaagagcacaagatgttgttacaatgtctccattgagattgtattttttgggaagaggcagctattgctcccaaaagggagactcaagtagaacctaaaaccatcccggaggtcgttgaaaatgagttcgacccccatgtggggactgaaagaatgattgaaccaatggaggatgtggaagaggtcaacatttgttatataaaccctaccaagacaatcaaggtagcaagaagcatgcccccaatagtgaaagaaagcattattagtactgttagaagaaatcaagatatgttggcatgaaggcattttgatatgaccaagatggattgcaacaccatttgccatgccttgaacatcaatgaagatacaatgctagtttgccaaaagtagagaccattagacctgattagggaaaaagtagtgaaagcaaatgtcgataagctgaccacgaatgacttccttcaagaagctcttcttggaattatattttaccaagaacttagatctactcacaagtat

SEQ ID NO: 385619 - DNA, 1032 bp, Cannabis indica
atattctttagtgcacatggtgttccacttggatatgtagaagaagaggttggggatccatacaaggcagagatggaagaatgtagtaaatttaataaatggaaaaaaataggaaaaaaaaaaaaagcataaacaatctgtacaactctggcatatcaggaaatttttgtttttccataaataattggtatctctttctttcgtccctattccttttatttattaggaattcatatctctttttgagtactaagaaaataagatttttagtatttagaaaaatcttacttcatgcatttaattatgacaataaataaatttttatttaataccaaattatatgctataaaatataataaataacaaatttatatttgtaaaaaaatatattaattatagccattaattcaactcaataatatcttaaaaaaatataatttttttatgaataaaatataatcaattcaaacaaaaaaattatcatatagtataactggtaagtatattcggattatttgatatgagttcaattatttattaatgttgacttaggatggtctaaggcttcttcgccaagtgggtcttactcgtcttgtaccatgttcatattttgagtataactcccttaatattaacttgatttgggcgatttaaactgctatagaaagctgaaaaggagatctacaaaggtgagatgtccttggccgagtgacatagaacgagagtgcctatgtgatttggatagattttaaggtttctttactaaatgcttcttatatgtttaaatttatcatgaaagtagaaaattgcatataggttgagacttatatatcctagtccgaatataagttattttagtaaacccgctattacatagaaattggtatttatgaattaagttatattaagccatatacgatagatacaattaataaccctaaactctaatcattgctaatttttattctaaattagttgcttttatttttatttttttagttttttattgccaaatagaattagaaatttaat

SEQ ID NO: 385620 - DNA, 790 bp, Cannabis indica
attaacttattaaaataattaattgattctacaagacgatattattgtagacaatgtagaaatcatgggcctaagtaaccaagctcccaataaattaatctaaaatttacgaagtagatttattaacatattcattctttcagactccaatatagatttggaattgcattgtggattacatagaatgctctatatattaaaaatagatacgctctaaattatctattatataatctaaataatcaatgatgccctacagaccatttacatcaagtaaggtcaaatttactgttttgccctttgatgtattttattttttaaaaaattagctccttataaatgatattttaataaactaatataattgttaaaattagagctcttccatttatatcgtttagctaagctctaaagaaactatcattttacatctaagtatttatattagcaatagattccatctctattattaaggctcccactcaatttctctaccgagctcccaacatgtaagtatgggctactactcgtaaactagtaatgaataagtctaagaactcgtgtggtacaattcagctaaagtttaaccatatgaagactgagatcaattgatctaagatcaactaagtggcattgacatagaaatgatgtaacgataagtgtatgatatcttttctactgttaatatcagtctagtttgatgtatcgtcgattcatcttgtaaagtctttttttggcaagttagttgacaaaatattttttcttttatggtaagattcttgtgcattca

SEQ ID NO: 385621 - DNA, 513 bp, Cannabis indica
tatatgttctactattatgtaaaatgttctatatatattaacaatcctagccaactttttagtttatttcgtatatatcatgtcttatacccattaaaaaaagacaatatcatattcatactagtgacgataaagtatatatataaatatgcataatatgaccatttaattaattatttaatatttttaaaatagaagtttctactcttttacaatggcttgatcacaacttttaatatagtgatacatcatgaatgagataaactaaaagagaaatcaaatcacattttgtgttagcaatcaattactaatgctcaaatatataatttttttggtgaattgaccacttacaattgtcttttgattttttcttcgacactttttttttttttggctcttttagttttacaacaattaattgaactcgatcgagtcaaagtgaaaaaaatgctagtagaatttaattgaaattatctcataaaatagaaatgtacgtacatttttgttcgatat

SEQ ID NO: 385622 - DNA, 1016 bp, Cannabis indica
aaaatttatattatatttttaaactttttattagaggaaaaggataactaatatgacctctataatctataaatatttaacaaaccctacatgcaaagggttaaaaattcgtgattcacttgctcttgcaaaaacagagtgctcatactttattgtaatcccttgaaattttctagcctctctcaataatattgactcatggactaagactcgtcaacgctccaaccacgtaaaatccttagagtgttcgtattttattttctttcaattatatttctttgcctctgatatttaaattattggtttccgaaaaatctcagtaaacagtgagtttgcggtttggtgagagtgaggaagaagcaaatggtgtattgcgatttgggtgaaaagattgagatagagagtatatgtaattttgaagtgataagtgaaatatagttctctttgtgggtttggtagttttactaggccaagtaaaatttctttgctttgtttttttattattttgctgtgcttgaagtttattacttttcccaccacaaaacatgatcatcgttatacatgttatgacttagtcaatgctagcggatatcttttttattttaaatacaaacagttatgtatattcctgcctattaatattaatcaaatatatatgaaatgtgaagagtgtccacgttctataactattgtacgaattatatcaaaaataaatgctatcttaattactcctataaatagcaaagaaaatattgtaaaagggatgatgaaatttccaacttagataaatcctgccaaattgtaatctcaacctagaaattaaaaataatatagactgctatgctttcgaagaaaggtttaaagccaccgccttttcgaaagactggtactaccattgttggctagtttttcagggacgttctttttttttcggcgtcgaactgggtggtatcgtttattgctttgcgctacctctactcaatatgacgtttactgatcttctgcaaccaaggttc

SEQ ID NO: 385623 - DNA, 902 bp, Cannabis indica
tctcttctcagccaacagctgaaccaagctacatcttgtgaggacatcaacaaccttcctgttgcctctaacatggctggtaactcccctttttcccatacttttacttggattattgatagcggggcaacccatcacatgtgctacaagaaattgctttcatactttttctagcagtgtttttcccaagtatgtagtgcttcctactggtgcaaatattcctgtaaaaggcataggaacagttcggttaaatcaacacattactcttcacaatgtgctttatgttccaacttttaccatcaatcttttttcccttgttgcattcattgataacagccttaataaggttgtcttttctaatgattcttgctgtatacagactccttctccgagcatggtgattgggacagctaaacggcttgggaaactttatgcaattcaacaagagcaaagtcccattattcagcctagttgttgtctttcctttcacaataatgtagatcaatggcattcacaccttggtcatccctcaatgtatatttccaatacattcaataaaagaattaactctggtttttccattccagctggtcaattttgccacatttgtcatcttgcaaaacaaaggaaattaccatttttatcaaaccgtaattttgctgacagtgcctttgatctaattcatttgaacatttggggtccatatcatgtaactagtatagaaggctatagatattttctcacaatcgttgatgatgcatctcggttcacttggacctttatgcttaaaactaaagctgaagcacaaactatttttcccaagttttacaatatgatttgctgttaggctatttttagcctaagtttcgggtcacattttatagttgtttttcttctttatt

SEQ ID NO: 385624 - DNA, 671 bp, Cannabis indica
aaaaataaataaataaaacaagaggaccacatgggttgtatcagtgaccattcctgtgtcgttatctttaatagcaccgcaagaacatgttcaactgctataacatcatggcatattattatggccttatgcatgccctttaaccctttatctattctttttaagcaaaataaaacagaatctaaacaaaccaaataaacaacaaagtttgcaaaatataaagaaaaattgaatctgtaatatgaagaaaaagtaataagaatgctcacattttctcactcactcactcactctttatattattattttttatttgttaatatacattattattggatatcaacttggccttaattcttattttattattaattttccgtttagaattaattcatttttggataaaaagaatgaaatggggtgctttactttaagaacatattttcactttaaaatgccaaaagcacttgacatagtaccacttgcattcattatcacaaatattaaaatataatgcaagtgatgtgttaattgattttaataaaaaaaatgtattaattgatattcataatgacacatgcttctcaatatcaattcaattaaacaacagtaatgctaaaagactatatagtaatgtttagtatttttttttacgtgttaatattgctatt

SEQ ID NO: 385625 - DNA, 1653 bp, Cannabis indica
gagctggagattctagtgaccccaggaggtgagtagtcgtcaaaaaagccttcaagacgaagatcaaaatcgagacaatcccatcattcagaatgcaaaatttggagaaagtagttttgtgatgctgaagtaaataccaacaatacactggaggatatgcatgaagatgaccctcaggataaagtcgttgagaacaacattggggagaagagcctgcctgatgagtaagaccctatggtcgtcatggcacaataacttcaactggctcaaagcaggttatgctgtatttgaggtgcaatgctggaatagagataagtgttgtcatgcataaaatcatgaaggatttgtggagataatacatctggacccagtctttccaagaaaatcattcgtcaaggctatttttggcctaccatgaagaaggactgcactgaatatgtccgcaaatgtaagcaatgccaatggtattcaaaagttccgtgggccccatcaacggagataaccctcatgaacattccttggtcttttgtagtctggggaatagacttagtgggatcacttctgaatggcaatggaggagtcaaattcgccattgtcgttgttgactactttactaagtgggtggaagtggaacccatgaacatagtaacctccaagaaggcccatgaacatagtgtgcagatacagacttccacacaaaatagtgtataataatggaaagcaatttgatagtgattatttcatcgaattttgtgccaaacatggaattattaaaagctattttgttgtggccaaacctcaagcaaacgggcaagtggaaaccgtcaacaaaattctaaagaccactttgaaaaataggcttcacgcttgtaaagcacactaccttattgtatttggagtttattttaacacttaacccaatataagagtagggagtattgcctgaaagtagaacctcaaggaactggatgtaagccactacctttatatatttggagtttattttaacacttaaccaaatataagagtagggagtataggttgaaaccaaaacctcagggaaccagaagtaagccactaccttattatatttggagtttattttaacactaccaaatataagagtagggagtattgcctgaaattggaacctcagagaactagaagtaagccactacctcattattcttggaatcgattctcagacattaagaagttaatttaggttaacttaaaatagaagtttaggcttcatggctaacctaggtttacacaactagagtattcaggttacttaaactaactaattcaagtcaattaaaaagtttagtgtgaaaaggcctaaaataagtaatacttaccaagaaaaggttcaattcccaaataattaattagctcaggttaattagttactcaaagtttcaaagaaacctttatataagaacactttcacaagaaaaatatttaagtctaacgatttaatcaaaaaattaaaggttcaggcctttggaacaagaacctcacgagactcgaaaccttagaacttagcaaattctatgagataaaatgcaaatatccatggaattagtaaaacagtaccacgtagttaaaaaccccgtggcaagggtgtaaaaaattgtctccgcacacaaa

SEQ ID NO: 385626 - DNA, 1072 bp, Cannabis indica
gcatcttcattcttcctcacagtgtcacaaaggaatttgagagtttttgtagaggttttttatggggaaccatagggaatagaagcaaaattcatgttgctacctaggataaggtttgcttgctgaagtcttatgatggattaggtttgaagaatggaatcaagtggaaccaagcttatttggcgaagttcatttgggccatcacagagaaaaaatacattcttttggttaagtggattaaatccatttacctaaagaaaaattccttttggtcccataatctcaaacctgacacgagttgatatttgtgtaaactgtgtcgtctgagataaagatttggtaagaaggaaattgtggctggatgaggtaatggcaagtttaactcttctaaactctacatgagcacatgagttcagactaaagtgaactattacaaggctgtttggagtactttgaacatgcctaagcatagatttttactttggcaagttgtgaattctcaacttttaactcatactaacttgctaaagtttcacctgtctttggatttggtgttctgtccagtttgtggtgttgaaaatgaatcccatgaacatctctatttctcttgtttattttctcaagggtgaacaatcaaatttttaactagatgggttggagagcttggttgatgaaatttgtaggttggctcagctggttgagtttgactaaaatagggattgtgcagagaattagtgtgttgatcctggctacaatttgttacagcatctggcgaaataggaatgggtgctttttggagggttattccaagtcaattgttctaattgttaatgatattatgtgtagtgtgaaatatagaatacacgttataaaaaataggaacttgactagggaagaaaggaggtatattcagcatttattatataactagtgcaagttgtttttgttgttgttgccagttgagttgcagcgtttgtgctattggtttgtatgattttgtatagctttgtgattaatgaagtgtttattcttcttaatcaaataaaataattcaaattaaattaattaatta

SEQ ID NO: 385627 - DNA, 634 bp, Cannabis indica
cttttttcttccatcaggtctgacttttaccttaactttccaacccggccgggagcccgtcatgagatttgggctccggcatagctgagatctccggtcgaaaattgcagaaaagtcctgagattttgttctgtctcttcttcttctagttacgagtcaaaggcatgattttgtttatgtgttagtgtgttgggacaaaaaagtctcctgagacccacgtgttgtcccactcgctgctgcgtgcgttgttcgtatcgtgtcaaacctcctttgcattttatttcatactcagatgccacttgtttctcaacttttttttttaatttaatttgtcataaataaaataaattggaatagcttttgcagcttttatggtttatgtaccacccaaaaaattataagttctgttcaaaaaaaaaacaagagcaattagaaaattgaggattttgattttgatttcgatttctttacagattgaatatttagatttaagtggataattgttcagaaatactaaagggcaaagcaaacaccacaaaaaaataatatatatctttatatattaaaagtgcctatttaacggcatttcttggtttaacagaatataccttaaaaataaaagaatattctgtta

SEQ ID NO: 385628 - DNA, 1549 bp, Cannabis indica
aaaaaaaaaattaaaaacttataagtgatctaattaagtaactacaatgaactcgaacaaatagaaaatataccaaaataactttttaggggcaaacctcaaatttttcctagatctttttgtaatttttatcttagatgtttctttctttcttttttttaaaaaaatgtttctttttttcaccataaaaattaacaataaacttattctatttatttctaatttttactatttttctttaaaaaaatacttttaaaacaagaactctaaataaaaagttagaccaagaggttaattagagaagatagtatatatatatagagtcaatctcaattcagccccccacataattagatgccaattacattatggactaagaaattaattaaagtgatcataagaaatccaatcaaaattaaaactatctcggagtcactctccacaatgacataattgtacataatatgcacaatatagcagtatgatgagctaaacaacattcgaccatcaaatcattattaatggaagtgtaactaattcttagcttcaacccagacaattttatcagcaacatgatgccttgcaaccgctacaatcaacatcctctcccgactaacaatcacatcacaattgattttcatccaattaaattggagggggagtccaataatcaagaacaaggctgttataggaacctgaaacacagaagagacaagtataataaaagtatttctttaaatagtattgttgtgaactttatcgttacgagctctctaaatagtatctacaatggtaagcataactcctaaacatttattgtttaggctccaaataaattaattaatctatgccaataccgttaatgatcaccattttctcttatagggtatgagacccatggggcaaaattatagtaaaaaaatggttactgtatcggcctcaccccacaaagaggacaaaaaatatctttcgaatgacactactacaaaatacatttttaatgtcggtgaaaacgtaggtcaacataaataattaacacttttgatcactccaatttttaagtgtcgactaaccgacgcctataagtcgtcattagtgtcggttcatacaccaagactcatacaaatataacaccgacagttaaataaattagttgagtcttaatagcgtcagcttagaaccgataatatgttaccttattatgactctcccagattttgaagttccaaaatttttattctgaagaatagagtagtaacatcatatataattgggggctctctttacatcctgaattatgtaggcaaatttggtagaaaacttctcattattgtcctttatctatttccactcatgatcagcagcaccacaacccctagtgttcctttcatacaaaaggtaacagtcccaatataaatacatccatagttttagtaattattattacttttgtcaaaaaatgcacaaatgtatttaccggattgtgtatatatttagttgagtatattaatttgtatattaaacattttattacattgcatttgtagtg

SEQ ID NO: 385629 - DNA, 1195 bp, Cannabis indica
ttattttttaatattttttatttgttttctaaaattttggttatttttcttattagtgagttcttaaaaaaaaatctcacatgatttaaaaatcattgtgagtgttgtatcataggctatatatggataattattaattttttcctctttattttgtcttaaaattagtactgcattatttttttgcggcgaataaagaactaagtcttgcccaattaatttttttaagaaaaatgtaacatatatattttttttatatttttcttacaatataaaataaatatctagctattttttttgctatttgaaatttgaaattatatttgtttatttaaaaatttttacactcaaaaaattataaattatgatatcaatattttttaaaaaaaactagtttacttactataatatatatttatcactgcacaatataaaaaataaatatttaattaggaaccatctaagcgataaaatgaggggacgtgaagtacaaagtaaaaaagcgaggtcacgtaagggtggcctaaatattaggaaccatctaagcgataaaataaggggacgtgatcttttcggaagtgacacaatgaggttggaggagcaaatagctactctaacaaagcttgtcaaaaaaaaaagagcagagccctctcaaatttggaagatgaggaatcaaaaccatgtataaggaggattgtggtgaccccacatcttaaaaactttgaaatgcccacatcgagttgtatgaaggaaggatcgatccgcgagcgcacctagcaaaatacaacaaaattatgcaagtctgctgaagacaggtcgaagcaactagctctaggatcaattcatagctagaaggacttacagtcggccttctgcaaacattttattgctggatgtgataaggacatggaagtagactcttttactaagtcaaaaaataacacaatgaaagcttgaaagcttttattcaaaggatgatggagtctgataccaagactaaggtcagcgatgacatgaaatcgacgaccctcaaatttggattggttgttggctctttggtgtgggcagagatgcaaagaaagagaggcaaaactttaagtgagtttatggaaaggctcaagatatcatcaacattgaagatgcctacatacaagcttttacagtgcctctagctctaactgttggaaattatttt

SEQ ID NO: 385630 - DNA, 651 bp, Cannabis indica
ggttcgggtccaacccaaaacccaatgactattataaaccaatcaaaaaacccgcctgatggtctatcggtttgaacttgacctgcccaaatagaatgggtttttaaaatgtttgagtagactgggtcgggtccgggtcaaacccggtcaaaatattcagtcctaggttggagagttatttgtgtcaagctcttttgtttttggacttatgccgtaatttttctaaaattaaattttagaaaagataatttagattttttttccccgtgaagtttgacatataccaaatcatactctttaaacttttcaggtaaagtttaattaaaagttcccctcgaactattgagattgttgaatttaaggatttttttccaattttactaaagaaagtctattgtgaatgaaaattttgagagcacaattcggtacatattaaagttcaggagtcatgatttggtgtatatcaaagtttagggttataatttaatatagggtaaataccattttggaccatgtgtttcgcaaaagttacaaattagaccatctgttttcttaaattacaaaatggaccctatattttccaaaatggtaaaaataagatcttgaacttaattttcgatagctttttttttttaatataacaaatttcaa

SEQ ID NO: 385631 - DNA, 1141 bp, Cannabis indica
atattgggataatacaatctattataatgcagccttttgggaaagttcccactttttcttttatcaagaattataatagactacgtgtgtgcttattatatatacatattcataattatttaaatcttgactttaattttttgtcactttatacaatctcatctactcaaataacaaaaaccatgcattttaatgcacatacatgattgatttttttatccaagtttaatcatgatctcaaccaaccataatattatatacacgtacgatccatcaaaaaaattaatttcatgagctataatatacgtttacaaggcgtgcttgatattgaaagtttcctttttttttttttcttgagagaaagacctgtatccattaatcagaaattgaagtacatgatacatgagacaaagcattttggatagtagggctcatccataaagctttctctaagcctaaagctgtcttagctaaacaatgggcaacaagatttgcccctcttggaatgtagctaagagacactttagggaagaaagagagcaagcttttgattccaaaggcaaaaggattaagatgcaaattatgagattcatttttataaatataattaactaacacactacaatctgagacaatgctatctggataaaaggagtgttcatggcaccaggatactgctgaatgaagtgcctgtgcttccattatcaaaggtgtagtgatgccgttttgaggcttcgccaagtttaggagaacttcacccgaactggtgtggatggtcatgccaaagcccattttaagaagttgcaaatcttgggcagcatccaccaaaagccgatgatggaaggttgaagaggatgggcagttgttgttgtgttggcggtgatcattcgaagctggagaaaaactgggagacttcttgttgcaggttgtatactgctccatataagttgaagtgtcacgaaggacctgatctggggagggggatataccctcatgaatccaagagttcctgcagttccagagcttccacagcagacaaacaaatagagagtaatgtccaagtactaaaattcagtggcagcaaggtataataaatccatacaattaaaagaacaaatgtgcatttataaaaattattaaa

SEQ ID NO: 385632 - DNA, 1735 bp, Cannabis indica
tattacaagtcttttcactagccaacctaagcgacaaaagcagagttacaaaagttcatcactggtagaccccaacccgcttggtctagtgtggcccgaacatgtacaagaatcgccaagcccccacactcatggctgatcacaaaccgatttaccctttcctgtacagtagagcacccgtcaaccaagcctagcaagacaataaataatatcagcaattataattaacatatcacatatataataatgccattcatatttgtctatttaacatagacccgcgtgttacgctcacatgcccaattatatctacgtgacgtagacccacgtgttacgctcacacgtctagatacaataaggccttagaacggttcatctcagttctggttaccgagtccaacctgattatgcattgaatgcataatctttaatctcaatatatataacacataattaatggtgccaccacactttttatctatttgatatagacctgcgtgttacgctcacacacctatatatgtctatgtggtatagactcacgtgttacgctcacacatctatttatgtctatgtagcatagacctacgtgttacgctcacacgtctgtttacaataaggccttagtagggtttatcttagctatagttaccgagtctaacttggttataccttgctcgcataaccctattgatgtatacacgtacctatacattacgttctttatgtgatttactctgatgatatataccaggtctaacccagttatgccttatacacataactcttggcatataagcatgcattcaataaatactatcatatttaaactcttagggtaatagccctaacttgcctactaaaataactgctcatataacatattacaacatgctcaaaataacacctattaagggtaataaccctaattcatgcttccacttgattagcaatattaccatacatcattactttcttatctccataatattctagggaaataaccctagaccgcattaaaattaaactcaaggtactaatttaccgagtctagctttattacaccctaggtgcataattttttattccaacatattaagcatggcataacattcaacatcttttaattactagggtaataatcctagaccatataaccactcattttagggtagccctaatcctggttctcaattaatcacaatcatattataaaacgtgagcaccaccacgcttaattctatgtgcaaactactgtcttacctgatgtcccgcaaacgtagagattccaaatccacgggtgcttctgaccaagtgccggtaatcctagtcacaatttttgggatttacaaacataggtttaatccctaaatccacttcaacataatataaaattggcattcaaaatacagataaacatatagagctcggaacgagctttccaacgatataaagaacgttccaaacgaagtcccaagtcaaaagttatgaataaaacaagtgcaacatgcaatttgtctacgcgagcgggtcgcggcgcttaggttgaaaacccaaaaactgttgggttttatgccctaaataaaactctctacaatctgattagtaatcaatataagaaatttgaagtgattaatgtttgcatgaattttacatgctaatggcttaatatgtgtattacatttacacacaaaatcagttaaatccaggtcatatgtttattcacaattacagt

SEQ ID NO: 385633 - DNA, 2151 bp, Cannabis indica
aattgatatgaaaatgatatattgctttgcttgcatattatacaattgcatgactttaatgcaattagcttatatataatataagaggaaattaatatacacatatataaaaggtagttttattttagtggtgattggtgaatcaaacaaatatttgggacaagataaagtttgaagagtcataatctttgatgcttaaagaatagatgtatgtgtataaagcatttacaggaattgcgacttaataggtgagaatcatgtgttgaatttaattaattaatatcagtacccaataccgaaaacagtatgacataaattattggtgccaatatttgattttccctatcaaatatcaattggtatattctttgtgattcaaagctgctacgccttttttcttttctttgcgtaaagagagaagagaacatgttgaaagaattgtgaaattgtctgggaaatggcttcctagctatatatatatgtattacttatattatttaataaattgatttaattattatttttattgcacaattaggaggtaacgctttgctcattcatcaaatgtacacataatctattatataaaatttactatgtatgtactacactcaattagagtacacacaaatagagtttttataatataaaattttcaaatatttttgataaatgtgtcataaaattatcaatagatataaagttaaaatatagtttattaagtaaaaaaatataattcaataataatacataacatttgacacatattatgtattttgccatcactacttttttatttacatatgtgcaattttaattattttagtagtatatatttagtaatagcattaaattataaactttttactttaagttattttatataataaaattaattaaaagtataaattaatgtttaaatttgtatcaagttttgtaattgtgtattagagtacaatgttaaaaaattgatataaatatatcataaattattttttgtgttaaatatactacaaattttacattatttattggagatggtctcaactcctttaggtggcatttggtaacaattttattttttaatttttcaaccacaaaagtaaaagtaaacgtaaaattttttaatattaaaaaataaaaaagtgttctataaccacttttgttctttaattaaaaaataaataaaaaatataaaatgtgttctgtaaattttattttcattatcatttgttaattttgttaggtcgagttcaggttcgggtctagctttaagtctgggtccagggtctagggccaggttcgagttcgagtctaggtccaagtttgggtccgagtgcgatcaagggtttagtgccgagtccgagttcgggcttgggctacgggtccgggtttgggtctggagtgcgggttcgggtttaggtcggctagattgttagatttaaggacttttgtctaatttcttcaattttactatttcagtgattgtttatgtatactaaatcatgctctcgaaactttgatttttaccaaatcatgcctctcgaactttgacatgtactaaatcatgtcccttggactttcatctatgttagacttttttactaaaaattgacaaaagttcttaaatccaacaatctcaatagttcaggaggcatttttaacaaccttaattaaaagttcaagagacatgattggtacatgtcaaagttcagggaccaaaaatcctatttaagctatataatatgtatatatattaaaaccaattaatgtaaacatttgatagaaagtaaagaaaataaaattcaagtgatatgttgaaagataaaattaaaaaaaaaaaaaaaaaaaaatacaaagaagaagaagaagctcttggtagtgatctagtaggttgttttgcgtaaattaaagctataaacaaacaataatacattgttactcttgttccttctatcatgacatcatgccattacctacatcttaaagctctacactcttaataattatagctaaaagtaaaggaatacaaatatatacaataaatataggagcaccccaactgattttttgttatatcccatcaaatatattaggaaaattctattttaccagcgcaatactaacttttgccaacacaaaaatgtgctg

SEQ ID NO: 385634 - DNA, 999 bp, Cannabis indica
gctatatatctaagccaataatgtctttctctaagaaagtacgtacaggaaacattcaaaggttggaaaagaagagtgaaggaatcgaaagaaatacgctttatgtatgttgaattttctagtcaaattaagcttctcaaacgtagaaattcatggataaatgatatgattatacattacacgtcaaaaccatagacaccacatgagactcatgcatttgtggcgaaccattagccacgactatattctgtatttacaatatgcaaattgcgtaattatagttgactatgattccaacagtggcgaagcacggagagagatcagccatttttaaaatagagaagaaaagtgtttaattaatttttaattttttcatagataaatatgatataggtgattcaacaatgcaccccttaaaagggatatacttattactgatacactttgacttgtttcggcattaagaaaaattttttagtctattttttttttttcatattcatgtatgttataattatttaagataatctataaaattttgagaaattccaaataatttataatatagaaaataatgttcaaacagtctattttacacgcgtataaaataaaatagtcacgtgtgcaatatactgtttgaatgtagtttttggcgtgttaattttttttaaattttttaaaattttgtcggatgtcttaaaaaactataacgtacataattataagaaaaaatttgactaaaaaattatttcgggtgctaaaataaataagagtgcatcaatatatctattttaagagagtgcatcaatatatctattttaagggagtgcatcgaagaattacccgtaaatatataaaggaaaataattacgctaatgtaatataagattcacttggtgtaaatgaaataaattcaacacaacaggacaaagatgaaatttaaatatatcttataatagaaagaacgtagtttgaaagaaagaaagaaagaatgtgaga

SEQ ID NO: 385635 - DNA, 1181 bp, Cannabis indica
atttaaacaaaaaaaaaaaaagtaaaacaatgtgaagcagtgttctttttttttttttttgacaacatgtaaagcagtaaatggtaggtgatttttaacttattattttcataatatatatagtgaaccaatcacttccaattcaggtaagtgtgtccccacaacaacacactgtttttgtttttattttctttattcaaacacggtgcatgtctcactctactatgccattgtcgtttcttaattctccccaaaaataaaaattgaaataatgatgtgttttcattgaaaatgacaccatcaaattattaatattattattgccattattattttctgagttacagtcagaatgggtacttgggaaaacgagagaatcccagtgtgaatagtgaatagtgaataggtgagatttgtataagaagagaaattaaggaagcagaggaatgagtttgtcagctcataaaattaaatagagagtaataaaattaagctataattatatatagtaatacagaatttattataataacaccttcgacggcacggaccattttattcattaatcatttacagtcacatactctttcatatcttggtttgtgtgatttttttcatacattttatttattaaaacttttacaattggattagctgaccaattaaataaatcaaattggagttgggacattgtttcagtttactagccgttggaaaatattgatgagttgtttaaatatatcactattgttatctacgtggctaaatatcattttgcatcttgagttttgtgaaaattattaatgggactctctgttttattaaataataaaatagatcatgtatttttcaaaattgtacaaatagaaccataaacagattttttgtgaaaataaaacttaataattaataatctgatatacagatgttgtaacaaaactgattacattttctgtatctgttcgtgttaaaaattatcttaaagttaattatattaaataataaaattgttgaaaattgagctcatagtcttattttcattattttaaaaagtataaagtctatgttaataataatttttcaaataattattatttaattatattaaaaaaaatatgacaaactaacatattttttaaaaaaaatattattttatacaatatatacatatatataatata

SEQ ID NO: 385636 - DNA, 1710 bp, Cannabis indica
attcaggagtcccgagggactcaaattattggtggagctatcgctcctccgacctctggttatggtaggagtggtagtgactcaaacattgatcaatagagaaaagttcatctatgtctagtggctcgagtcagaaaaaagggttttgagggaaccaaggtcgtggtaaccgtcagggtggtgttgagaatcaatacacttacccaaaatgccctaatttcacgaaacatcatttgggcaagtgtaaaggtcgagaatgtttccaatgtggagtaactggacactactaaagagattgccccagctaaagaaagaagaacagaagactaaatcaaaacccgctccaataagggtgtttgctgttactcaggctaatgtagaagctagcccctcagttgttacaggtcagttaactattttgttttgtttgatcctagagtcactcattcatatgtggcagccagaataattgacaagttgggtagaccatatgattgctatgaaacagggttgagaaccctactgcctggtgaagaattagttatctccaatgggtgggttaggtctatgtcaattagaattgaaggtagagagttaagtgctgacttagtggagttgggtttagtagattttgacattatacttggaatggatttcttgtccaagtatgctgctactattgactgtaagcaaaagatggtgatctttcaacctgagggtgaggaactgattgtgtttgtgggatcagttcagagatcctgaatcccagttatctcagcattaaaggccaaaaatctattgccagatgggtgcctagggtttttagcggtggtgttggacaccacttggcctgaatcagtttggcctaaagagattaaaatagttaaagaatttctagatgtgttacccagtgaacttctgggtttaccaccacaacgagagatagaattttgaattgatttagcacttggagtggagctagtttctaaggcaccttatagaatggctcctgtagaacttaaagaattaaagattcaacttcaggggatgcttgacttagggttttcgcaacccagtgtgtcaccctagggaactccgctgctgttcattaaaaagaaagatagatcacttcatatgtgtattggctactggaaattgaataagttgactattaagagtaagtatctctacctaggatcgacaacttgttcgaccagcttcaagggaagacagtcttctctaagattgatctttgatcgcgttatcattagttgagaatctgagaagaggatattacaaagactgccttttgtactaggtatggtcactatgaatttttagctatgtcttttggactaactaatgctccagtggatttcatggatctaatgaatagagtattcaaggattttctcgatatatgtgttatagtattcattgatgatattcttgtgtactcttagttagaaacaaagcaagagcaacatttacggataattttgcagggactacgagaacataagctttatgaatagggcaaataaataaaatacgctaaattactaattattacatatgttacataggttatattattataattaaatgtataacataatattttgtaactcttatataatttttttatattattgtagtttattactctactctttttaatatttattcaataataagtatctatgtaac

SEQ ID NO: 385637 - DNA, 1037 bp, Cannabis indica
tttttttttctttttcttaaatatacgtggtcgacataaatatggtttattattattatcgacatatgcatgcatgaatgatgcatcaaaattaaatgcggttcatagtataacactttccataattaaaatatgagaaatatttaaaaatattattgctgcctaatatttttttttaaagtggtatatcattattgatacaattaaatattaagttttatataataattaagctcgtctaaaagccaattgagagttttgagctagaaaatataattgagttttttctatataaaaaaatttatactttttttttatttatatatagcggtaaaattgtaaaaataatatttcaaaattataattgagagttttttaaataaaatatcaaattttgtattttaaaaataaattaagtatttttttaagaaaatatatagctatattttttaataaaaaataaatttgaggtttttttgttaaaaaaattttgagtgggaggccttgggcatggacagtctaatatgacaattaatagtaaaaaatagataaaaatagtaaattgctagcagaatgtgagttttggaagattttgctgccaaaatttaaattttgaaagttaattactagtgaagtaaaattattggagattttgctacaatttacttatatttaaaacaacctcacgaatgcatgacaactacgttactaaagatgacacttttatttattctctccttactcttattttctaattttttattctactttatttaattatatatcttcatcaacttagaatggccaaattagctaaaaaaacaaagcatttttggagactacaggtaaaataagaaattaaaaaattataactttattataaataaacaccgcaaacaaaacaataaaccacattattatagcagatcgcttgacaaaacaaaaattaacataaaatatcattacaaaattttttacttttagtcacaacattgttgtgactaaaagtaaaaaaattgtgattaattataaattat

SEQ ID NO: 385638 - DNA, 913 bp, Cannabis indica
tctgtgggatactcacaaataggagtgttagttataatggaatgagggagaacagtttgagtaaagaggtctatgtcattatcatcaatatttaatttttaaaaaggaaaaatatttcatgaaacacaacatttcgtgagataaaaaactgtttgttattgatgtcatagagtttataccctataatcccttgggatatcccatgaaaacacaagtacgagctcttggagagaatttacttctatgagtagttatggttgaagcaaacacgaggcatccaaaggaacgaagatggtaatactcaggctgtttgccaaagagtaattcgtaaggagttttgttttttaacaagggagttggaattctatttatcaaatatgcagcagccaagatgcattcaatccagaattttatgggaatctttgcttgaaagaataatgatcgacaaacattgagcaagtgctgatgttttctttcagtaatagcattttcctcaggtgtttcaacacaagtgaactcatgcataatatcatgcttggaaaacaattccttgaacacaagttctgaagcattatccgttctaaagattttaaaagtttgattgaactgagtttgtatgtaagtcaagaattgagggataatgaaactaacatcagatttttgctgcattaagaaaatccatgtgaatctagaatggtcatcaaccaaagtgagaaaagtatttgtgatatgtgtgtgaaacaatgtgatatgtgttggaatatcttttagcaagatctagatttactaacaagtatatttttaacatcctaaatatgaatttctaaaacaataaaaaataaactacataaaatgtatgagaaccttacattggttgcaactgattaaatgactcattctgctcagatctcta

SEQ ID NO: 385639 - DNA, 1225 bp, Cannabis indica
aaaaaagtaggtttcatacagccagagtccctggctctttgtatagttcaatttgggtgtcagaggccggagcatcaaggttttagtcggtttgcgctttggggttgactgcctcagattcttccttgtctttctggaccacataataactaagatatgcctccttgtttttattgaggtaatcaaagattccatttaggttggccttccagaattcatagcaaacctccagggctgccgtttccaaatttttgacctctttctcgagtacttcccactctttctacacgctcttgacactctcttccaaatttgtcttttcttgggttaacatagcaagaagagtccggagaccttccctatcatctttcaaagcattaacctttcccgacagagcctaggcgtctacttcgagctaggtagtggacgacaaatcctgaatctccttctccagttcctcaacccacactactaaaaaactcagaattctcaacatttgtacaccgtggggtaaagaattcccgacagtctatacaattgtcgcctacacaagcgtcgcgaattttaggtagaataggcgacagtggaaaaatgtcgttataaaagaattcccgacggtttaaaactgtcggctatagtcgatactataggccacgatttaaaactgtcgacaatactatagctgacggttttaaaccgtggcctatagtttagccgacggttttaaaccgacgctatagtggattgccccaaaaaaaattatcgccttcatcctccttgaaaccatttctcacatatatcgcatccgctttaaaacccttacaagcttcatcctcctccactgttgttgtgctgtcttcattctcgtcaaaattttcttttacaagtttcagattgcttttcacttgacgatccttgaaacttttttcgcattgcaagctttggatttattttgaaaacacacacacagatcaatatcaacaaaccaaatcatggctaatagaattttaaacaacgaataagagaatgttgtgcacacctttatgctactacgagagagcagaggaaagggacagagtgagaaagagtagaagagagggacggcgtggcttgtggtcgcaaaggagagagaggcaggaaattaaatgaaatttacaaatgactttgaaaaatgagatatgtttttttttgggggggttgtatcttaaaaggagggaaatgaaat

SEQ ID NO: 385640 - DNA, 1915 bp, Cannabis indica
tctctctctctctctctttgatacacatgacccaatgtgtttgctttgctctatggaagtggaaacttcgtttcacctcttctgagattgctatttcgctagagccatttggttcagttgcacatggcaaactagaaccacgaaggctaatattgagaattgggacatgtggatcgagtggttcaaaaaggatgatcatagaccaaaagataccaaggtccaaatatttttgggttgaaaggaaagaaataatagtgtccatgatggtaaagccactcccatcaaccttctactacaccagataaacatcagactctcggagctgcttcaggatcaggaagtctccacaactactttatctaattggcttcctccatcggctggatggagtatgtgcaacacagacgtggctataaacgacctacagtcttctggtgctgcacttttccgaaatgaggatgggattatcacatgcatacacaccatgcatattacctattgtgacctgttggctggtgaaatttctaccctctgctgggatgcggaaattgcagtaaaacttgatctcaaacatgttattttttagtgtgactcagcaggcgtcgagtcggcaatttcaggtaaaagcattgatgtttcagaattgaatcacaacatccaggatttagtggttaaattccatgatataggcaacaaacttgacttctgggagattagctggatctcgagaaagttcaactgtgcatcccatggtgtggctcaatgggcaattcgatcatgccattatggggaaatcgatttgtccaattttaacagctccttgcttgactacaagacagacgactgattcgactcttcttagtttattttggtttttgtttttttttgttttcttttgctttattggaactggttgttctgttagtgagtttgctctaggtagtctcttgcaatggtctcgtattttctattccctggttgctcttttgatgcaacaactataacaaaaaaaaaaaaaaaaaaaaacaaaaagacaatcctctctctcttcttttaataaataaatgagaaaacaaatttcattaaatcaaacgagccagcagagtaatctaaaggaatttttagtatctaatataaatgattattattagagattatcctttatccttttaatatttgtaatttaattattattattagagattatttattaatataaatgattaagcaaatacaataaaaatttccactaaaaataacaattttattttagttttataaattataaatgattacagctaatctgagtagtcattatgcctagaatattttttttcagagaaatatgtatatatatatttgtataacctcaacatttggttataaaattaagtatatgtagtattttggtaggtcgaaaaatggaaggatgagaaccaaacatatcattggatagaggtatagttttgacttaaattaaacgttatccaaatatataacacctaccaatggatatgccacttaataaattcgcatataatttaaatttctatacctacctcttactcacataacgtgatttccaaataatataaaatcacaacaataaaacaatatatatttttatatctataacctatataaaagtgagaatagctttttgggctttcactaattgaattacacaattagccctcactatatattcaattatgaaaaatttaaactaagcaattgaaacatgtacactacttatttctttttcttctaaactaagcttcccctttaattaacattttatcttttgtgaatatttgtaaaaatgatcattttgtcttatattatcaataagtatatttttaaataaataatgcttctttatttttttaagctaattttactaataattattatt

SEQ ID NO: 385641 - DNA, 626 bp, Cannabis indica
taatattattaattaattttaaacctaactcagggaaagtagattacgctcgtgaacttgtgtgctttttggatccaaattaacatctaatagtaataagcatgattgggttatatatgcacctattggtaaaaagttttacattgataatacattagaaactaactaaatatcatacataagatgcataaatcactcttttcatagtcaattggttttgaaatgaaactagcttataccatacactcacctataattacttaaaccatttctttttatttattttgaatatttaaaataagaattaatgtgtatataaaaccaaagcaggttcaatcagttatcccacggtaattttcaacccaaataaagaaaaagttgtccactgctagttttaaagataatacagtaatattgctacaagaagatgaacatgcgtagtgtatttaatatttattattatcatatagagagagagaaaaagatttctttctttgtttctttatttttctttctctttttgggtgtaaaagaagaaaagagatggggctcttgaaatcattaaaaaaatccactcaatcacattcagtgtctaatttcttttctacttttttttttttttaatt

SEQ ID NO: 385642 - DNA, 1422 bp, Cannabis indica
caagtatgtgaaaagggtttcagatgaatttatacattatgtacatataatcatgaaataaatcatgtgaaccatgcaacattaaatgttatttctgatctatattaataagtaaatctgattatattgaaatgagttttatttagggcataaacccaacagggagcactccccgtcaacttcccccccccccctccatctgtgtaattttattatttatttttttaaaaatatattttttatatttttaatatatattcaaataatattacgtacactgttagaaatcaaccatgtgtacactgtgtacacttggaaagtccaccttgacacttaacagaactatttaaatagaaaaataaaaactaaagcaggagtacagttcattagccaaaaaatcgatttatatggttaagtgtttgtatagtttaaaatatccctctatatgataggagtgggattatataattttatcattccttagaaagaaataaaaaaaatataactaaatttaatcataataactaaaaaatgatgttaagtttttattgatttccaatgtactcaaagagtttgtgaaagttggaacataaactcattgtatataaaaagaaaataatcttcaaaatatttgataaattagagatgattttgtcatttataattattattttttttcctttttattattattcactagctaatagtatcgactagaaacaacatccaattcaatttaattgaactcaattgattcaattacaactaaattataatggatgttaaaagttagattttaattattaaattagttattggatatcaatatcaaaatcgaattaaaaattgatccaattaaattacatttaatgtatattaaaaaaattatttatacttatttatatataataaaaatataaatataaatataaatattttaattattttttttctttgtgttgaattcataacttttgattgttttatatttttgtttgttctattttattactttggaatattattgctttagttatttcaaatttttaattacattaaatttttaaggatggtatatttatgggcattaaacttaaatgaagtgtgatatttaacttttgagtttttttgctgttaaattctttcaactattacttcacttgcacttaaccctctaaacttaaattttgacggtaaaaccttccaaactactgaactggtagtaaattaaaggtgtcatccattttccacaattaactgccagtatagactgtttatgtgtacacttttacacatgggtcacatttatattggtacacttaatattattatttagattatataaaagttatttcaaaatttataatacttttaaatattttatttttattttatatttttaaaatgaattttgaaaataat

SEQ ID NO: 385643 - DNA, 2421 bp, Cannabis indica
aagaattctattgcaaccgaagagagatacaagagaggaaacaaggttacaataaaatcaaagaaactctggaattataccattccaaagaccctcactctcaagcctaatagcagccttagccaaagtatgagcagtaacattgcaattccgaggaacatggattaaagctgcattaggaaaggaagagagacagggcaaaatttgctgcactaagtcggagaaataagagttgtccttccaacgattcttcagcctgtgcactaaattcaagcagtcacttgcaacacaatctaggggaaacctgactgctgcacaccaacgcagggcaatgagaagagccttggcttcagctagcaaaggagaggaggttccaatgaggggagaagataaagctgcgacaacatccccttgactattaaagacagctgcaccaagaccagttttctgcaaatggttattcaaggcagcatcaacatgaagtttaaaatacccctgcttaggccaagactgagaagatgcaccattgcttgatagagtagtcgtgtgggaattaggagctccagaggagatttgagcatcatcataatcctgaagcatacaagagacctgaaactctgcagaagaaaaagaaaccttatgcttgttaaataacctgttatttcttcgattccaaatctcccaagaaatgccaagaaagaaacggaggtcatcttttgataaatcctggaaaccctgtaaaataaactcctgtatatcagcacatctgttttgcatatgaaaacttttaaaatgagacacttgccactcactaaaagctctgggacactctattagagcatgagacacggtttcaggacacctagagcaagaggaacacaaaggagtgggaacaatttttttatggaaaaggttcaaagcagttggtagagaatgatggaaagctctccaaacaaagtgcttgattttttgaggaagttttaaattccaaagggttttccaccatctaagagtgagaccagaagaagaggaagtaggcaaggaattggaagaattggctaagtgataggctgaactgacagtgagggagcctgaaggatggggctcccaaatgagggtgtcatctagggaaatatcagtaatgggaatagataaaatggcatgaattacttcctcatcaaaaaacgctaacaatttgtccttatcccagcacccatcagaagtgatgaaaaaggaaacagtgggatcagggggagactgattatctttgaaagagatgaacctccaaccagggatccaataggagttaacagtagagatggatcgaccatttccaaccttccacagaagacctcttttgagtaagtccctaccccaaagcaagctacgccaagtgaaggaggaacaatgtcccttagctgcttcaagaaaagagttatgcttaaagtatctggctttcaaaagacgagcaagaagagaatcaggcatagaaaacactcgccaagcctgcttagaaagcaacgcctgattatgattcattaagcaacgaaaacccaaccccccagagaacttagattggcaaagtttttcccaggatttccaatgaactttccccttgttgccacaagaaccccaccaaaattgagccataagactctcaatctttttacaaatagacatggggagacggaagcaggacatagcataggacggaatggcttggacaaccgctttcagaagcacttctttaccagctttagagaaaagacgattggtccaaacattcattttagaactggccttttgaattagaaaattgaaatgctcagatttggatctaccaaaacactgagggatgcccaaatactgactaatgaacggcttgtcttcaaggccaagggtatcacggaaaaagtttgaatctgaggtattggtgttaggggagaacaggacagaggacttagcaaaattgacaagttgacccgtagccctatgataaagatcaagagcatttttaatagcaaggcaagaacgggaagtagcagtggagaaaagaaggctgtcatcagcaaaaagaagatgcgaaatgacaggagcagaacgacaaatggaaataccctgcaaagaatgatggtattcctgcatcctgatagcagcagataaggcttcagaaacaagcaaaaaaagatagggggacagaggatctccctgccttagacctctcgaagaggaaaaactgtcagaaagggagccattgatgagaagccgaaatgaaacagtggagatacacttaagaaccaaattgacaaaagaaggaggaaaatggagatgagtcaagatagcctttataaaactccactcaacacgatcgaaagccttctccatatccaacttgagggcagcccagccaattttaccaga

SEQ ID NO: 385644 - DNA, 991 bp, Cannabis indica
tttgtttttatagtcacatcgggcatatgtgtaaaaaatgttaccataagtgtattttgtatttttcaaacatggattttaaatcttgggatcccgacttataattttatatgcatatatatatatataaagttttaattagttttatatcggtaaatcaaaatcaaaataataaggtttatcaggttagagcattacaattttgtatcagagccactaggttgtttactgaaggttgttaagatatgtacaatcaaggtcagagatgatctcaactcacagttctgtaagcttttacctattagaaaatggtttaagcttaaattttaataaatgtgttgtaatttgttcaaaatccataaatatgtggtcttcagcatgtattgatcactgtctaacctacatgccttgtggattcgaaggctaagtcctaaattatggacacccaacaaaacgttaaatttcaatctataggtaggtttttaaagcttgcatatgttcaccatcgtcagaggaaaatctttaggattttctatatgccttcccctctagttcactgtttggtattgattaatgaattgaaacaagcaaaaaataccaaggttactataataaaatcttttgcaaagacaagtaaaaatataaatctccattgttattgatttttagttcaaaatgaacttcttagtaatgaatcttgtgttatatttttatatttctccatattccgtaatgagtatttattggtaaaagacctacgctaaattaatgttctccaccccattaggcaactttactaaatatagacttcattgctctttaggatattcatttcttcatttatggcatattgtaccacaatttcaattctttgcattccgtagtttaatttgtgtctcaaattaatattgtagttgaacttttattgtacatattgtaatcactaaaaaccactgatccttttttttttctaataaatcatcttaaggat

SEQ ID NO: 385645 - DNA, 770 bp, Cannabis indica
cagaatgattgccacaaaaggggcgaacacacatagaagcgaggtagggcagtcgcccttgaataaaatgaaaaaatatatatgtgtgcaatttagttagttacgatatatatttgtaataaaagatgatatttgtagacataatattaattttggtgtaatggttaagctatatttcatataagttagaggttaagggtttaaatctcactaagagcataaaattttttgtttttagtttacttttgcccctgccttacaaaataaaattacacacccctcactttaaattttgggtctgccactggttacaaccatctttgtgtgtcctgaaaagactcaaaataaagattgtgtttctttgctttcaatgaaagtacaaaaatattgaccttgtttttagccaacgatagtgagtcaaattaaagtgtgtcacccagatggatgtcatgtcaccttgtgtagctaactaatatttgccaactaggccaacttttgtctatttcttaaattactcctcccatttttcaacacagtcttgcctctctcttcctttactctctcttgctctcttctcggtctgaaggactagcactgactcaagccctaacatcaaacatctcagactctctcaccaacccacgaccactgtagccagatcatcacaatgtcaaagggaagatttcgggccctctttttttcatatcatttcattgtatttttgggttaaaatgtatgagtttattaatttaggattaaaatgtatgatg

SEQ ID NO: 385646 - DNA, 4767 bp, Cannabis indica
ggttggtgaagtcgatgcatactttccactttttgtgggtttggggaccagtactgggatggatacccatagtggatagaatgcttctgttatgaagtcatgggctcgtagcctctcgacttcatctttgagcgcttaagcacgttccttgttcaacaacctcctcttttgctgaacaggtcgcatgtttggattgatgttgagtgcatggctcattacaaaggggacgataccgaccttgtctccatgtgaccatgcaaagaggtctaggtttgcccttaaattttttatcaataatgattttatttttggcacttaaccttttccaatcttcagtcttcttgttgggaaagtgggatcaacctccacctcttccaactcttctacaggcctgaagtttcctgcaagatccccaaggtgaggatctatgtccgtgtccccgctttgggctagacttcattgccctttgatgggcttttcttcagagctcttggtgggcatcttctctttcttggctttggacaaggccaagttgtaacagtgacaggtacactgttcgtctcccctcatacatcctaccccatgccttgttaaaaatttgaggaataggtggtagattgatgttagcgctttcaggtctttaatggctggtcggcctatcattgcgttaaacgccgaaggaatgtcgattacgagaaactacgccatcaaagttctggtggttggattttcttcaatagtgaggggtaatttgttataccctttggtgggatgccttggctaagaagccatacatcacttgattgcagggtgccaggtcagtgagttggaactccatcttttcatttgttgacttgaaaagaatgttggaggaggctccattgtctaccatgcatcttgccacaatcatgttcctgatttgtgcagtgatgacaagggggtcgttgtgtgggagactgacttgagcaacatttttttctgtgaaagaaatcatgggctctccaagctttggctacttaaagcccctttcttttactactaggatgtcacttttaggctcgtaaagaagtgtcgaagcatagtgctccctagctttgttggtctcacctaaaatgtgaggtttgccaatgatgacccttaagtgtcctaccactagtggtggcattagatctcttttctaggggaccttgtgccttagtttggttgttttgcacataacgacccaggtggggattgttctgcctaatgaggtattaaatctccctcatcaatttctaacaatcattggtgtcatggccaaagttgtcgtgaaactaacagaacttcaacatgtccctcttgctcaactcccttttgatgggaaagggctttctatatgggactgttctctaacttgccatgaagatggcctcgagtttctcctgtaggagggtaaaacatatatatttcttctcctccttattcttttgattttgtggcgtgggagaagtattaagcttcccttttttttttcaactatttcttctagagctattggtgttaggcttgtttctagtgttatttccactagacgtttcgacagagttgctggtatttgcctgatcattcgacaagtcatgagactacaagatgtcttgggactgcctattattgacatgccccgtctgggcctgtcgtatagcttcttcaagtttgataaagtgatcagctctatcaagtaactccttcatatcattgtttaagatcctttggatgtctttttagaagtcactcaatgggagtatgcccccaagtatggctgtatatcgaccctcttctataaggcctttgacctttgtggccttagccatgaacctttggatgtaatccttcaaaggttctgcttgtatttgcttgactttgacaagatattctagctgcaatggtacaagtcttgaggacgagaattgggtgtagaattcttgagagaactcgacccaagaattaaaccttcattgggctagtttgaagtacaattgatgagctgtttcggacaaagtgggtgggaatatgtgacatcgaacatcaccagtaaccttctagagattgagctggatctcaaagtatttgatgtgtgccaataggtctccttgtccggtatacatcttccatatcggcatcttgaatttgggcaagggcaaggcacttatgtatgttaagaatggtgatccccttgaccggtctagttcaagatccaaagattttggactagttataccctaaatcatgtctcttagtttgtccaactgtgtttgcacaaaaggatctgttgctgtagggacttgattgactggccttgcttggaggggttgcaggttctggtgtgacattatctggatagccatactctgagagagtgtatggtggaggttggccaaacttgtgttgtatttcaaactctggccgaccactctcaggtaggggtgtttgctctggccaggtgagcctacactaggcagttgtccatggccggccagacctgcatagggcaaggtctggcagcctgccatcccttggctagatgatgttggtagtgtgttgaaaggaggtagatcgcacaagttgttggagtttggtggatctagatgtctaaagtgattaatttcacttctcaaattgttgttttgggtgtttccacccgctcttggtccttattagttgaagattgaaatttcggtatctcgctcccctcggggaggaagtgctcccctctagctggccaaggggaatcttataggtggctagccggctaaaggctggataacgggggctattgctgagcctgagatccgtggctggccccaatgtcgttggttgctaagatctgactgttctcgctgttagacctttgtggcaaggtttgtcctccctcttaaaagggaagatctctcgtagtccccaagaaccaagtttgtcaccttattgatagaccctccctaatctatcaaccagtcttccttgagtggatctctaaagatatcctggcctcttcaatcagttttctagttgaatcaccttattatgtctctggcctctctattgtggcgatctagctctgcttggtgagatcaaaggatgtactcttggtcatccatctacctcaggaattagcatctctattgagtgaatacatcgcaattagtagcacattggttctttagttaggccagcttggtcgacgacttgtctaagtctggtctaactcaagatattttcctaagtcgatatggggctcaccgattgcacgctagccaactcctagtctttatctctccaacatagcactagagacgagattcaattgttgttttcgagggttgtctcccataagtccttccttcactggaaggcgctaggggagggtcctcccttggaggcaagggcctgctattcaaatccactaggatgtttgtgtcaatttggtagctgtagtggccaaacctgtggtgcctattgtggtgacaagattaaccacatctgtagtgttcgtagtaattccagttgcggttggaacatgaacatcaggattttcactctgtgggtcttgagggagacccaaagatgcaaacagtgcaacaggagttcttctcatgttaaccacgacatgtgatcatatacgatatccactcgctctcaatgaaagcaccaaattggttaccacaaaaagtgatcaaccgacagtggggtcatatgaatctgatgtttgccacgtgtgacataattagaatctgaaagtaaagaacatacataattttatagaggttcgacccccttagttagcgggtaatgacctacttccattttagttttattaatatcgaggaataatactattcagataactatatgtgagatttgatatagctccctttaggatacaaagtaggaaacaagatggaaaatctcaagtgttgaggatgctatatgggcgtgtgagagtgtaagagtgaggaagagatatcaaacttagagatttaggcttagaatgaggctttatcacttaatgacttggaggctataattagacttaggttttttaggttagcgttaaggccctttatataagagagcctaaaccctaatttttaactgaaatctttagatatttgtatattaaattgattaattacgaaagactaaaatgctcttaaacatagatattttccagctactttattgggctgttagggcccagtttgtagtcaagcttgcagtctacgtttaaaactatgtagaggatcctctcaggtcgatacctggccagccaatcacctacaagaagcatgctagccggccttgtgctattcagaggttggccatccatagggccaactaggagtggtcgtccagctcttttaaggaagcttgtttttcactttatgtcctatttgagtgtcgaggtccctgttggctaagatgctgacttgactccctcgtttgtgagctatatttccacatgatgctaattttttccacgtaagcaatgcaaccttaggtggggtgaaaattgggatagaaattttccctttctcttaatttttctaatgatggatttgaatgaggaatttcaccacaaggtggtggatattgaagaaaatttagcagttactcttgcagaggcggtggctattgaagaagtttaggtggaggctcctgcccgagaacattaacatgatattaccttggagactactccagaggctgctctttttgggatagtcataaaat

SEQ ID NO: 385647 - DNA, 1524 bp, Cannabis indica
aaaaaaaaaaaaacaaattctaatgcatgatgatgagaaaaatttaataatttttttaatcaattttttatacattttaaatttcattccattacatttttattcttattttcaatctaattcctatccatatatttttattttcccaaccaaacaccagcttaattcttaaacagatacatcttctactgttatacataaaaattaaataatactttccgggcaagacaaagttagttttgttaaatgtaattagcgaatgagacttactaaaaaaacttgcttctctcattgtttttaaacatatatactctttattattataaaaataaattaaaaaatataaacgctcccaattccaaacatataatttgattaatcttccaaaaagtttggcccgtaaaccattccaagggtcgaaatttccaaattgattaagctgcaaatatataattacaactatatatattagataataaatattaaaaggcaaagaatgagtcttttcttctggtggtcagcactttttcatagcctctcatatctcaatgtggagagtatgggtttttcaagtctctttctcacaccaattctagtctactagaaaacaaagtggacggcaataagatagaatcagaaccatttattttagtgaaaattataaaaagcatagttttgatatgattccgtattagtacgaactgtacacgtactcttcccactttaactaactaatttattttcaatcaaaccactaaacaaattaaaataataataaacacatagtgatataaccccaccttatttatttatttttttttggtttctttccattcctatatatttgatctttttctttactctcattctcatcatcaactaatcccacaacaaactttttgatcactcttcttaataggggtctccttcagattccatcaatattaagcaagactacaggaaaatgaataaggtaaagaaaggatggcttgccgtagaagtagggttagaagaagaagatggtggatttcagcgcttcaccatcccaattgcttatctttaccatccactcttgaggaggctattggagaaagctcatgaggtttatggctatcataccactggtcctcttcggttgccgtgttctatcgacgacttccttcacctccggtggcggattgagaaggagtcgtcgactaaccaccaccaccaccaccgccaacatcaccaacaccaacaccatcatcaccctctctctacttctctctcctttcactcgtgttgaccgtggggtggtggattttaatatgcttaggggacatatataggtttttttgtgattattagttgctagtttttcactatatagagatcttacacccatctttctttcttatcctttgtttttttttccgcttaattgggagttctggagatcaatatctcttgtactgcaaaacaacaatagaggcaagtaccaaaaaagaaaaaaatatattttacaagtcgattagaaatttcatc

SEQ ID NO: 385648 - DNA, 822 bp, Cannabis indica
tagatatataagttcaatttttatattaccttgtagtttcacatgatattttcgtgattatagtttttaatatataaatttcaatttaaatacctaaacttatggatttaatagtcacatgatttatctgtgcactagatttacactaacatgataatcagcgatggagttttcttatacttagaataagtggaatattttttttaaggcattagtaaagtaaactagaaaaagaatattgggtaattgcatattatcaagttaaaaaaaaagataattatgaatcataataatcttaatttttctcattgttaatttctctaaattttagttgtttactttgctttaattatttttctctcaaatattttaattaatcaaatagaaataaaaagttaaataattggtaattggtagtcaatcctcgagggaataatacttaatttatcattatattacttgattcaattacttatacttgcgtacttaatttaccaaacattatacataaaaaactttattatttctctaattgacttatattttcaatgagcttttaagagaattgaattcataataaataggtcaagctttgcacattgcttctaatagcacaagtttaggcattgtagtagatttgctttcagtcatatctatttagcaagtcaacttgtacgttattatcacattcataaggattaagagtgagccatttattactacatttatatatgtagaataattctatggtacatacccttattttgttctcatagtataggaacatttttttaatcattgtatgacttttgagtgtacaca

SEQ ID NO: 385649 - DNA, 1283 bp, Cannabis indica
ataattttttttacctaatattttataatttctatattgttataaattttcaaagttaatatctaatatattggtcttcgctcaaatggaatccttcacagtaagttcccttgctatgtttctaaaaaataataatgaacaaaagtgatacgattcttcatttgttattattttatgtgtatgaattattttcatttttcatacattaaacaataaaaatttaaatattggacatattcgccaaacaccataagaaaattatgtccattgcttttatgctttaaatccttaccatctccacttatattatattttattccaaccacaataagttgagaactgataatatgaaaaagtaataaaatcagtcaaaacattcaatatgatattcccattcagcccaattgggcttcttagtccatatttaacttatttatgtggaattttgacaatacaaaatatatatatatataattatttaataattatttaataattatttaataaaagagcacgagtactcaacctagaatgacgagtatttaaatatgactacatagacaaactggaaaaactggtaaacacaatgaacacgaagaagtatagtggttcagtcagatcacggtctgcttagtccactattgcaaagattcttctctttattcatactagatcactcctttatatacaaagcaagtgtcccttttattacacaaaacttaattatcgaaccgttttacattgaatatcaacattaaatttaagaaaacataaatggaataaatgaaaaacagtttcaatctgttctattgaatacatcaatgtacgtgaccttcatagttcgagttgtctgttcatatactcacataagctcgcaggcttagggtgcgttcttgttaacagaagactaatgagtcttgtgttaagatatatgcgttctaatcgagttgcgtatatggataccttgttagcatcgacaactcaggacgtgcaagtccttatcggctcttcgagcacgttaggtcattctgacaaactcgctaagtaaagagacgatctttactaaattgcaggaaaatactttattgacattgcatatatcttggtatatacgagttttgaacatgtccttctcggtcctacgtcatgcgaggcgtaataatgtgactagactctgtcaaggtcacatcatctcgctgagcttggttcaggagaggtttattctcgagaggtcctcttctgacagctcggtaacgctcgagggatgtgagtccacgtgtcat

SEQ ID NO: 385650 - DNA, 734 bp, Cannabis indica
gatcttttactattttagtagaacgataacttactattatattttgaaatagaataaaatactattttattatgagatataaaaaaatttaataatttttaatcaacttttttttatatattttaaattttattttattttatttcttatttattctcattcctgtcagtcaaacaccacaaattccaaaaattataagagcaccgcaacaaaattagataggaaatatttgcaatctccaaaccaatactcaaggacaagggtagcacaagtcagacacgaaaaaagaaacttaatgattggatgatcaaatgaaaaaatttagacaaaaagtggccatagaaaataatataattttggatataataaaaacaaatgtttctacataatgcacaaaagtttttcaccaaccaaaaattggtaaggtctccaaagacagattcatttagttattttaatggaggaaaagaaaaagagtttgaatgaaaaaatattgggttgctttaaaagactttgttatgtgccacaccacactgacccaacaaactagattgatttgaaatcgatatgtacaggccaactatcattgacatgtttatagaggactatagtttgatcgtccatcatttttgggcaacttaggcccaaatttggtttcattgacccattttgatgtgtttgtctttggggtaagttgaaaaatgcctcttttattcatcaattaatcaaattta

SEQ ID NO: 385651 - DNA, 863 bp, Cannabis indica
ctttgtcaagtaatatcagctggatttgaatccaaattttatcttattcttggtaccaaaaagcacattattaagaatcatatatttgacaaaacaaatgtacacactcatctgaatccaggtttttttgtaagtctttcataagtcttaccttgttacactactagggatttcataatccattctatataatttcatcttaaataattttttgctgtgataccaaattataactccctaataattaagaatgtaacgtgatttacttaacacatgcttatctcaataaatttacaatttgactactgtattagaagtatattgattattgaataaataacaaaaaacttaagacaattagaactttaacttttattaacaacttggggtattgataaactaccacaaaattcattcacaaatttacttattaattaaaagctggggcaaaattagatttttcttttataggacccaataaatattaagcgacctaaattaattgattattccttacaactgtcaactaaatctattattctaataaaaaaatatttaattagttttcataataactttaatattacatgagttttccataatataattgaatgtgtttcttgggattttttctaaaataagtgttgcgataattttgcacacgcaagtgtacgtatcgttttaagtagtagactcactaggagtgaggtcgatcccacaaggagtgtagttaagtacgttaaaatcaaaatttaacttctatttgattaaataaaagatagaaaaaaaacaatgaagtataagaaaaagagttggaagcaacgattcgagaaaattaatagttaataaactagggtgtcgat

SEQ ID NO: 385652 - DNA, 3155 bp, Cannabis indica
aattatttatatcaaatgcatattaatttatactataataaaaataattaaaaatatatagaaaataaaaattttgtttgacataattttctatatatttgtaattataatgaactagattataacattattattataatagaatcttaataactcacaacactttaaaatttataatttatcaaacacttagcttaatttttttccatagtaatgccacatctgttttttttttttgttcacagctgatgctttttccccttaacacggctgtgacaaactggtcttaaattcagtattatatattcttactaattttagtaaataaattttttataacttttttttttgtaaattctttcttttttaaatttgaaatatatataaaattgttaaataaataaaaagagaagaccgttaatataaaaaaaagtcttgtcatttgacatgttgtgtgatgttttttaagtatttctaagttatttgctattcgttgttttgcttatgatggcttcgagtagccgtaatgattttgatcttaatgaacaatatggacaaatcagttttggaagatgaggaggaggggattctaattggtggggaagatgaaggggaggaagctttgtttgatgacagatggtgcttagtgggaaagtttcttacgggaaggacttttgattttgatgcaatgagacatatgatggcctctctttggcaactgggaaagggggtatacatcaagaaactcgacaccaatcgacatctttttcaattctaccatgaattagatatacaatcggttatagatggcaacccttagacgttcaacaaatgtcctcttgtgtttcatcgtctgaaaaaaggtgaggatccaaaatctgttgttttgaataagattgatttttgggttcagattcatgggttaaaaactggttttatgttggaaaaagtggtgagaagtgttggtgcgtatgtgggaagttttgttaagtcggatcctaaaatttttaatggtttatggagagattatctacgtgttagagctacggttgacatagataaaccattgaaaagaagaatgaaattgtgtaaagagaatggggattggatatgggcattccgaaaggttttgtccaagaaggtttgatcaacctctggaacaagtggctaagccttatgggattgggatgagagctcaaatgaagaagaaaaactacttgaccggtgctcagtggcttcgtatggggaaggaagacggtggagccgatggtggtggcagtgtttccaagcggaagagagatgttggaggggattcaatttttcctagaatcatggaaattgatcggatttattctggagttaattgtgatcccatgaattttggcaagaataaaggtattatgggtggaaaggaaggtgttgctaatggcaaacatgctatgggggtcaaacaactatggctggaagtgatgaggattcaattaatgaggaagtagtggtcctggatagtaagaggaggcgtatggggaatgaggaaggtatacatgaggaaagttttcatgggctgcatatgggttctgatgtagaggaagtaaatggtttaaaatttcttggaattgccatgggcgtgggaacccatgggctcaacaattcattaaagatcttgtgatccaaaagaagcccagttttttgtttttgtgtgaaactttatctcgtaaggatgttatggaaaggttgcgtgttgcgatcggttttgaaggcagttgatgtgtaggggaggagtggaggaataactttattatggagagttgaaaaagaagtgaaggtgctggaatttggaagtatgtttattgatgtgctgatatgtgggaatgagagaggagattggaggttgacaggtatgtatggtgaaccaaatagaagtctaaggaaaaaaacatgggatctcatgaatgagctgaacaataaaatgaacttaccttggtgcatcattggtgaccttaataatgtgacttctcaaggagacaagagaggaggcaacccttacccgaattggcttgtggacggttttaatgaagctcttgctgaatgtagtctacatgatttagagctgtgtggttatccttacacttgggagaaaagtcgtggtactgtggattgggtggaggttcgtattgaccgcgccttggttaatcaagcttggttagatttctttccttttgctaaactttacaatcttgaaatttctacgtccgatcattgccctatccatttggttactaacaacaatatggtgattgcaaataatcggagttttcattttgaaaactcttggttgaaagagtcgttgtgtttaaagatcattcaagattgttggagtgttgatcccatgaagtcaattattgaaaaaatagttggttgtggggagatgttgatggagtggggaaaggattactcaggaaattttgctaaaagagtaaaagattgtaagttggaggtgaagaggtggaagaaaggcagggatgcgatttctgttgagaattataaacttgcttcgggtaaacttgttgaagtgttgctgcagaaagaattgttttggaagcagagaagtaaacaaccctggttgtgtgaaggtgataataactcgaagtactttcatgatgttgctacaacaagaagaagaaataactcaattcaaaaactgcgtgatgatgctgggaattgggtcgactggcagaatggccttcccacggtgataattgcttatttttcttagcttttttcagcttcagcagccgacatttgtggtgttatgcagtctattccagctgcaatttcgaatgatcacaacctggaattgctggaatcggttatggaggatgagattaggcgtgcactctttcaaatgcatccggataaatcttcgggtcccgatggaatgacttctggcttttatcaaaaaagttggaacattgttggtggggatattgttaagttggtccagaatttttttgtctcaggttcctttccaagagacttaaataagactaacattgtgcttattcctaagaagaaacagccccaagtgatgaatgatcttagaccaatatcattgtgtaatgtggtatataagattatttctaaggtgttggcga

SEQ ID NO: 385653 - DNA, 1207 bp, Cannabis indica
acttttatcaattgcagtccgaaaatcatctatttgagtttcattctttagaggtcctcctaatttatccaaatgagagattatttcattgaaatcccccatgaccaaccaaggcatgagaggagctgagtctttaagttttgtcaataattcccacgtgaatttcctttgagatacaacaggagcaccataaaaacccgagaaatgacaagagaagccatcatcaaaagccaaataacagtcaacaaagttttgtccataattgataatagttacatttacattagacttccaaaggaaaagcaaaccaccacttaaacctatcctaggaacttctataccattcggaaaattaaaagcattacgaaatttagaaatagaccctgaactaagcttagtttccataataaaaattacatcaggtttatgctgagaaaagagcagacgaacttgacggaatgctctcggattgctcaagccccgagcattccaggaaacaacattcatggtgattggcgaggctgagcatcagccttcgccaaaggaacaccattaccatcagccatcagtgaaagattagacatttcagaggtgggatccgattgctggtgcaggtctgtgtttgtaatgtcatcaagtggattcagtcgagtgcgacatcgtttaaggacactgcgaacattaccccccgaagttgtaagttgtcttttggagaacaaggaggcaactctgttatcacaagccgaagattgagaattgtccatgatagcactcgaaattctagttgtgggagattcaaaaggaatggatggagcagtagtagagtctgtggatgtagagagatgttgagcagaagatggagtgttgactgttgaggaaagaatatgagtgtatgcaggaggagtagccaccgagagtttaatggtagatttcattgatgcagaggcagcagcagtgtgttgtcgaaggtggctggcagtatccaatttcagagaatcaattggaatgataacttcagttgaatgagaggcgcaaggagcagttgaaattatggtgttacaatgtgtgtcttgtttagccgaactagaagtgttagcaacatcggtgggagggatgagagaactggaagtggttttatttttgtaactgaccatagtttcagaaggattttctgcaatagccttcccttttcacggcttgtaatgtg

SEQ ID NO: 385654 - DNA, 881 bp, Cannabis indica
gggaaggaagcattcgacattccataagagaccgtcctaaaaaagatagtcaatcttttcatggtcaagataaatggcggagaaatccatcgatctcccttcagatctctccttctcatgggatgagcctcgatgtactcctcctcgatgtagtcccgaccagcttccaagacatcacctactataaacacatgttctccttccttattataactgccaaatggtagcacccgagctaccccctcttccccatcgtctttagcctcagaaggagtagcaagacggacctcaccctagtcctccacttcctggacttcaacatctccagtagtttcttcctcctcgatggaaggataggcctatattgccctggccagagtagatagacaagcaatatgagggttggtagatggtttcctaacaatctatttggtttgcgcaatcatcctacgtttggatggatctttattagaggtatgccttgtaatagtcacagcgaaattggcaacatgtttgcccttaggggctaggactgagcggccatcgggcaaggtgtcaaccacgctcggatggaccttatacgtctagttagtaagaagataacgcctccaacctttcttaagttcccagatgaaacgattgtatccctcaccacaaatttggtcgcgatgggaatcatgttgcacctcaggctccaaggaaggtgtatgatcgctacttacttcccaatcttcaaagctagaatttgaaagatcgtcactagacgaggatggactagcacgaagacgggggtaatcttcgtataggagttaaagcaaatcctgatcgatatgatgcttgcctccccaaaactcaccagggttcatctacaaaaggtggga

SEQ ID NO: 385655 - DNA, 793 bp, Cannabis indica
taacagtaccttgatgcgatgagccatccagcaattggccataagcaacaatttatgcgtgtgagaaatgaaactaaactagagaattgtaataaattattgttcataacttgacaaatattgcaaccagaagaacaatgcagaggccccaagctcatttttcattaagaaaaaacataacatgaatggaagaattacatcattatacaaaattcaacactgagcaactatccaattaactaacaccacctcaaaatcttgacttataaagacaatgttatgatatagcctaggtgtaattttgttattcacaatactagctccagtactaatcttcaacagatctaaaatgaaagtagaagaaccgttcctcaataacatcaaattctacactaccactgtaccacaaacccaaatacaataaaccatgaaaagcctagaaaaccagcaacgataaccttacctgatagaaaagttttcaattatacaagctagctttgtaacaatcaaaagattggcagatatacatacctacaacttggaaatgttttattttatatttcagatggatgcgattggccaggaggagcctataggccggccaagggcagcctataggctggccatgatatgttcacaagctggccagctaaaaagtgacttctggatccaaggagacttcgttccactaagggaacctaacctcttcaaggaaacaatgtacacagatgtgctcaacttgaaaaaggctggcctccacactcaaaggttggcctcctcttggtggagctat

SEQ ID NO: 385656 - DNA, 1423 bp, Cannabis indica
aaaatgtcatatgtaagttaggggtgacaatgtcgcctactaaaataatctacgaatttctgaacttaactttttggtcgccccttaaagtcttgtcaggaaattttttattgacttttaggggcgataatgtcgcccctagaggttttttaaattatataaaaatatttaatttctaatttataaaaagtaatcataataataaataaaatgaaaattaatatgaaatataaatttcttcattttaacaaagtagcataataatataatgaaagtaaatagttcttacaaatgtaatattagttactaagacaatttaactaaaacataaaaacaatataatagtagttcttggttctataactaagacaaaaaatcatctgatctctcattctcattgaactttgaatgattcggtggctggcactgtaatgaggtggttgtagcggttgtgatgtatgcagtggctgtagcagttgtgatgtaggcggtggttataacggctgcacatgttggtaccaccatcatccactgatatagataggctggctgggcatgctgtgatgacgaaggttactgcaatgatccacccatatgagttaaacccggagagaaagtagaaggatgttgttgcgaaattcctccgtgcatgtatggatgtgtgtacggtggtccatacatgtagggatgaggcggtggagggtgcgatggttatggcagaggctgtgagagtggttatggtggatgctgaggctgtgatgtcgaaaatgtatgcatgttatgttgtgccgctaaatgatgagaatgtgcaagtaaaccttgagacatgtgagtctgagacgattgaggcactagagtggagtacttactcttaagcatattaaagattgctgactttgcagggtccatagttgatgggtcgaattgtgatgaaaagagattaattaagcatcgtactcatgtcattcgccaaatcttgtgaaggcgcctgtgattgggtagattgggcatgactagttgaagatttacccctcaatctgcaaccaatttcatgaatgtgaccccgcctctgaccaagtgtatcttcgaataaggttatgtaatcagatgatgactcagaacggaatctgcctgagaacgagctgctcaagctgcctccaactgctcctatattaaatcaaaatgttagaataatacatcactaatattatgaaaatataataagttacgaaaacttacatattcttattttgcatattcattgataaattgcttattcttttcagtatggacttccctccatgtctcgatgtaatccggggtctcctattacttatcaaataaacattcactactacaatgttggcctttagaggctgtttttcacccccacttataaaagggaagctaaagggtgtgaaaa

SEQ ID NO: 385657 - DNA, 2187 bp, Cannabis indica
taaaaataataataaaatattgcaagccattagaacatagctttagaaaatagtatgcttattgtatatattactacagaagaagaaccatctactaacaaagtaacaaaatttatttaaaaaaaaacataacatatatatatacctacacatgatatatatacctctgcctccatccagttaaagcaccagtttgaatcccttcgacaggaaatcatccctgctcaatttcaaagcaaggaacaataatgtatgtaattgcaataagattagcatgcaatattcacatatcagatttcaaacatttaccttctctcaatatatattatacatatggaaatctgtatcataaacagaatgcagtagtttaaagggaaaaaaattagaaatataatacataaagtaaattaatcaaagttaaataacaataaatttctcaaccacctatatcatatataacacaaggatagcttttggaattgaacttaaaagaaattacaactatgtctgtgtgcaataaatagatcattatgttattatggacaaaagataaagaagaagaagaagaaataagtaagcttaccttttgtccttggttttagcagcttcttctgccttcttacgcttcaactccttttttagcctcctcttcctacgcttctctgccttcttagcagaaatttccccatccttaccaccaagtccaacaaggctttgcaagcacacccacacttcatagtagtcaggcacatgaggaatcatcacatcatcagccttattccttcccaaatcatatgaaataaactttttggagttctgattcatcagaattttctggtcaccactattcttcaaatacgcaactgggatcacaaaactgaaagagctcatcacatctgattgtaccacagaatacaacttagtccaagactccttcaccccatattctttcatcacccatatgtcaacacgatcggccttgcagtactcccagtattcattggttgggttagaggtgtaattagcaatcagacaaaggcaatctcctaagacattcaaattcatgtgaaaatcaccatccacataatcaggttgaggcaccacatagtattcctcactcacaagatcaatggccccaattaagttggaaacatcagattctggctttcgggacacaacccagtgtaaagcattactagcaagaacaccatacacacgcttatatcgaaggtaataaggaaagtccttaatccttctccatgttttggctttgaggctataaaccttaacctcagagtcaaaagagtcatgatcttttccataaaactgaatcaaccttatcaacttgtaatcatcgttaatagggtcatacccaaatccgtaaatgatatattgacaaaaagtaaagccgtgggtcggaaattcaatctcagcaatgggtaagattctgtaccttttagtgaatgggttccacaaagcaatatcatcatcgatattaattagggcaagtaagccattgcatgatcctaagacatctgcacccataccgccgtttaaatcgagaggatgaataagtttctcagaggagttaagattatggaggtcaacccagttgagatcgtaacctctgataatcaggccagtgttggaataggtatcggtggagtgcttgaggtggcttttgacgaaatcggggctgtcaatcaaggagcaccatggcttggatacgctcctgtagcgaaggagatccttgacggagagtcggacaagtatgtcggtgatgatctccgacgggaggctcgtcattggagttggttgttgaggagtagcgatggagtgcgcaacaagccttgtctcaaatgtagtagtactattagtctgtaaatgggtacacgttaagtctgtgctcctcacccaatgtcttatcaattttttttaataaggtgcggtttggtaacacttttttaattaattttctgtttttataattaaaaagtgaaaatatttttcaaaaatatgttctataaaattgtttttactttttaattttttaattgagtaatcaaaattttaaaaacaaaaaaatcactttcaatatctatttttttttcttaattcaatatcttagatttcgatcagatccggacccaaatcccctcacggccctagcgctgaacctggcctctg

SEQ ID NO: 385658 - DNA, 541 bp, Cannabis indica
aagtagagaatgatgaataaacatatcattgtgcgagcaggatagcactctttccaagttcagaattttaatgaaaatcattactacaaataattcacttcccaattagtaaacttcctcataacgattatcaactaaatcacacttgattgtgttaaataattgttgaagtcagttcacactgatccatttctgtatagcagctaatctattttcaattacttgaatacataatgataataaactttactgactttggctggttttatacttatttattcttattttttcttaacgaagtagaatatgaaaaaaaaatgatacttttacaatattttattaagtatggttggcactattgggatagtgccaaccaatcatgaatgtgtgagactgtgtacacgtaaaagtggcatatcatgatttgtaagatgcacagaagaacgaacactaattaatttggtattagaatatatgctttccaatcagatttacactttagtttactcattactataaattactaaatcagacacccaac

SEQ ID NO: 385659 - DNA, 1786 bp, Cannabis indica
atctaaattgtccttttggactggccaactgtttaagggtggaaagttgaactggacttcagctttgtacccatggccttctagatactctcccaaacttgaaagtaagctttggatctctaacataaacaatggacttcggagccccatggagatgaactatctccttcagatacaactctacatattgatccactgtgtaagttgtcttcacaggtagaaaatgcgctaattttgtaaaacgatccactatagcccatatcgaataatataaacccatggtcctaggtaatccaaccacaaagtctatagtaacgtctttccacttccattcaggaagtgttaaaggctattgtaaactcacatgttctgatgttcagccttgatctgatgacaggtcaagcaattggatacaaaacctaccacatcctttttcaaaccacaccaccaatagtagagtttcaagtcttggtacattttggtggtacctagatgcaacaagtaaagagttgtgtgagcttcttctaaattctcttttttgagctcaccactgctcagaacacaaacctgagccttataaagcaacatttcactatctgatactgagaagtctctagcttgaccaactagaacttctttatgagacttaaaaaactcagggtcttccatttgggcacttctgatccattctaacaaatcagactgaagtgttaaattactaagtctgccaactacaaactcaatccctgccataaccatgtcaaatgctaactgaggagaaatcatcgtggcactgaaaatctgtcagggacctttcctactcaaggcatccgctactacatgtgattttctaggacgataaagaatttttaatcatagtccttaccaactctaataaacgtctttgtctcatgtttaaatccttctgagtaaagaaatgaatatcttagatattcatccgtaagtaggttttgcaattaattgtattgcggtcggacttgtggataatttttgtattgttaatgttattttgtgtacattttggttcttattttttgtatgtttgaaattttcgggaacgtccgattacaattattatgctatcgaaattttgatagatttatgataaatttcattaaaaatgcataaatattagaagaaaaatattagattggggtaaaaatacagaaataatttttttctttcaaatttaaaatttatatatttatgaatattttaatttttgatggaaacaagtacaatattttaaaacaaattttcatagttttaactaagtttaagtatgtgctattttggtaagtttacaatcttattaatttataaactagttgagtgtggtttttttatatgtgcatcgagtgttgtggttctatataacatctctaatattaatattgattttcttattttagagaaatttatattatatgatgtctctccaatcaaagtaaaaacttaaagtagttgggatccctactgtacggcatatgtctaggagactcggcttataatttagacaacaactttggggattgagttggcaggtcatgaggtattgaccaagtccaaactcacgctctaattaatctcaccacaaatttccacacaatcattattaattatttacaaatatatatgagagaaatatactaaaagaaactagtatttagtattattacgtggtttattataattttggttatttaaactttaatatgtattaaattatgtatcttgaaattttttagttgttaaaaattctctt

SEQ ID NO: 385660 - DNA, 1210 bp, Cannabis indica
acattattttacgattttgttgcgggcgtaccttttttgactattaagtgtcaagttagaaacatgtggagatatattattagatcacgtatatcgctacgtgtttctgagttggcacctaacgggcttagtaagcacttaataactaaaaaaaaatgtataactgcaataaaattataagatatagtacttttgtcgtatttttttttattagagtcatatgtgtaacaattacaaataatagttttgccgcaaatagtatttttattaaccgtgagtacatgtattgtaaaatataatattaaacatataccctttacaaatttaaaattttggctatgatcatacccttaaccaaatctgtttaagtgaggaatcaaaacattgaatattagacgataaatcaatggatgaaaacacgtgctaagcttgaagttaaacagtgcatgtgaacacttcacaattgtcacaatttcacaaatagatttgttaagtttgaaataagagcattgttaaaagggattacgagtatcttacacttttttccatattatactattattgatctaattaattattgagtggcatgtaatttattagacttgatacataatagataatgcataataataattttaatgataaaattgctagtctcttgtttagtaaacaaataacaaagattgttttatttttatggatgaaactcctcatcattgtttatcctctttaaattttaacagaaatatctgtgtactggtatgtactgcaacttttttccgttgctggtatgtactgatactttactcataaagttttggataaaatcacagagagtacgaataaaagaaaagctcattagctttgagtgtagagagtgagagggttcacgagctcggttggtctcacgcaccgcctctgcaactgcaaagtacaagtatttgccccccaaaaagcgatagagaagaaaaaggaagagaatctgaactcgttttgattataatcaagggtggctggaagcttcacgggcctcaacccatttttgagtctctttcttcacccacccacagcttccactttccaatccagtggctcatatcacgccacctcacacttgctaccggtttctggtttgatctcgaccactctcatggatagtgctttgcccatatgcctttctatctctataatgtgagagagagagagagag

SEQ ID NO: 385661 - DNA, 977 bp, Cannabis indica
aggtttgggacctgttacagtcccatgtcggggttctagtcctagtcttggtctgattccggttccgagtctgggatcaggtcggacctgaacttgggacccaatcccaaacccagactcgaacctagatatggatatggatacgaacctggactcgaacccaaactcggaccgatacccaaaccaagatcaaaacttgggaccttgatccagatcgagacccagaccaaaacctgaaccctttcccaagagttggactcgaatgaggacttagacctcgacccagacccgaacccgaacacagaatcgaaatttgaactaggactaggaccccaatccaaacatggacccaaactgggacgtaggacccggacctggaagggggacctggactcaggccacgaaacccagacccgggttggaaccgaagactcggacccggacccggatctggattcaaacccagatctggaatcggactgggatcagaaacccgaacccaagctcgaactaggacttgaaccccgattgggtcctagactcggaccaggacctaggttctagacctagatgggggacctggacccgggacccaagcttcggaactggcatcgagacttaggacctgaccccagacccggaccctgaacaaggacctgaaccaggtcctgggaccagaagtggaactagagtgggacccgagaccgggatcctaatttggacccggggtttggacctgacccattgtcgatgtttggatctaggaaccatatccagactcaaaccgagacctagactcagacccgaacacggacccagaccaaaacctatactccgtgacccaaaacttgaagcggaaccggaagtggaccgggacctgggaacaagactaggggactagtgttggaaattattttaccaggatcttagatctactcacaagtatgtttatcaacatcctaaataagaactttcta

SEQ ID NO: 385662 - DNA, 1409 bp, Cannabis indica
aggatgtctgcagtttgatcgactgagggtacataacgcacttcaagtgttttggccaacaattgatctcgtataaagtgttgatcgatttctatatgctttgagcgagcatatatgaaagacaggattagctgctaaagtggcagcaccttgattgtcaacccaaataattgggcaggctgggagagaaacgtgaatttctttgagcaattgacagatccaattcacttcagcagctgcatttgttaaagcgcgaaactcgctttcagtgcttgatctagcaacgacctgttgcttttttgctgaccaggatatcaaatttctacccaagaatacaacatagccaccagtagacttacgatcatcaatgctggacgcccaatcagcatcagagtaggtctgaaggtccaatcttgcagtaggttgaatgaagagtccttcatggatggtgccttttaagtaccgaaataatcgtttgcaggcatcccaatgtgtggttgtaggagcatgaataaattggctgagtttgttgacaatgaaagctatgtcgggtcgagtaagtgtaaggtattgaagggctcccaaggtacttctgtatagtgtaggatcgggaaagggatcaccaacatttaaggataatttgattgttgaactagtggggctgggacttggtttggctccatccattttgactttgctgagaatatcaacaatatatttggactgagttaagtgcattctagcagaggtgcgatttacttcaactcccagaaaataatgaagagatctcagatttttgacatcgaattcttggttgagttcattaatcagactcaaaattaaatgcttgtttggacctgtgattagtatgtcgtcgatatacacaagcagtaggatttgttgagcacctgaaccagagaagtatagagagttgtcagaccgagaataagaaaatcccttgctgcagagggtagatttgagcttttcattccaagctctaggggcttgtttaagtccatagatgtccttgtgtagtttgcatacatgagtagggtattggggatcaataaagccaggaggctgagtcataaagactgtttctttgagagtaccatttagaaaagcattcgaaacatctagctgagtgatgtcccagttgttagatatggccaaagtgagcaaagttctgactgttgtaggcttcacaacagggctgaatgtctctgtatagtctatccctggagtttgtgagtatcccttggctactagtctcgacttgaacttatcaatagatccatccgcattgagctttattctatgaacccatttatttcccacaagtgtcatatttggtgagtagggaactgttggaaattattttaccaggatctagatttactgacaagtat

SEQ ID NO: 385663 - DNA, 548 bp, Cannabis indica
attacaatataagtataaatttagattgctcaaatagtcttccaccagaaagctttcactttgaacaagataataagtacttggtgtttaaggtaaacttttgcaatgaagtacgtccttctgaacacattattcagaacataaatcaatccactatagttagtcatgccacatatttttcatatcaatctgacgtcacaagacttattctatttggaataggtgtgacagatccaattgcaggatccatacttactacccaaataaataattacattgacattcatattaacaatcttccttttgcggcctttaaatacgttattgtcaatatttatattgtcaccgtcactggtctagaacaagaacaagaatcgagaattattgatagtacatttagagaggcacttggtgtcattccaaatgttcctgctacacaagaatccattaataaactaaaagaattgaatattaaagagggtgatgatattgctaccaacaataattgtaccatttgccaagaaaacttgttgtttgaagatatgaaa

SEQ ID NO: 385664 - DNA, 2491 bp, Cannabis indica
ttttgatgcctaagttatatttgacatcacttaacttttttcatgttcaggtggagttgtttaccaattctcggatatgttgttgtttcgaagaatcgggagactcgaaactggctaattcacgattaagtcactttcccaaaaaagtgaaaatgtgaagttgtgaatttgaattttctgagttcataactctcttttactacgaaaaactaaacaaacgctcgagacagaatgagaatcgaataagaagaacccaacgcactaggtcacatgtcaacttgggcggtgggtactctgtctagagctttcaagatgtcattttgatacttccaatgttcttaaaatttaggatgaggtctcctaccccatttttgaccattatggagagaatgctcagaaaataattttcatttggatgattaaaactagcgcaccaggttgattgtcaacttgggtacttggcccagcaccaagtcagcctgggcgttgggctcagttttttgccccatagattctcattttctccacaagtttacttgtatctttgttatttatgatgacaggaaaaactcccaggatacttttctggaaacatgattaatagcacaggttaacaaaatgccaacctgggcgctggatccagtttaaagccaccagatggtttcgtttgattctagaaaacacttatatcttaatctttaataaaaacaaagaatatgcctagagaattttggaaaaactccttggaaatttccaaggttgaaaaaatttcaaccggggcgctgggccagccgcaagtgtccacttgcacgctaggccccctttttgtcttccaagttggtatgtttcttccctgaaagtacttattttctcattttttttatgaaaacgaagaaaatcaagatatttattcaatttgatgcttggaagtggcccaggttgacagaatgtcaacctgagcacctggtgctttaggtgctcaaaaacaaaagttctctgaatctaattttgatgccttaaatatgttcgtgatgtgcctaattcatgtcccaataaaaaatttgacccattttcacttaaaaggtcctaaaaactgaaaccctagttgggttgtcaacttgggcactaggtgaaaccctgggcgcccgagatgacttctgaggtgttgtttcttgtattttcagttcttgggccttagacttagatacttcatgtcttcatggtacataataataaaatatagtgagttggaaacaacttggctggatccaaacactcatttcagagttcttaaagtcaactagggagtagggctaaggacccctcccaagtcgactgctatgactcctgactactcaactctcgatgttttcattcttttcatgtgtcaaacattgatgtccatgtcaccagggtaagtttcctggttaacatttctccctcatgtcaacttcaaacattgatgataatcttttacttctcagttatctttaatttgcttgaatcctaattgcattaattaggacttgtagtgtcttttaaattaagaattcttattcctctttcaatagggaatttgaaatttaagtttaaaaaggagaagacaaaagatgattatcttttacttatctttgatctttccttttaaactaaacatttaaaagactcttaattactttaggaatagggacttggatcactataaataagagagctttcattcaatttctctccacttttcttcactacttcacacgcctataacttcttgagagctctgagtatttcaactttatcagttcttcgagtgttcttcagttctttgggtagacttctaattagataagcagaaaccagcgaactaagccatatgtcaacttgggcactgggtgctccttgggggacttctcaggatttgttttgatacttctaaggcattcgagattgcagacaaaatctcttcagtttctgaccaagataagaagtatgcctagagccgaatttgtgttctaggagtggaaacatgtgaaccagattgtatatcaccttggacgtaaggcctagcatccatgtctacctgggcacatggcccagctgtaacaccctagtagttaaggcactataatattttcttaattaatgtgcacacatttgctaatcaaagggtttataaaaaacgagattaatttaaacttttaaataaacataaacttaaggaaataaacataatttacataatttcaggatcccgttaaaagtttacaattgttttgagatatgttttatgcaaaatttatcgctcagcgactaacaaaatgtgagactaaactttcctgaagacccgaacactccagctctaatcgtcttgatatgtgtaatcttcctccaactctaaaatcattctggtttagttctaactcatacctgcacatgcacgtaataattatgagtcgacagactcagtaagaaaagcataaaacataaacatata

SEQ ID NO: 385665 - DNA, 543 bp, Cannabis indica
agatggattgcttcttcgaccagtagctactatggacttgattgcttactctgatgccaatcgaactagttgcgtcgatgacaggcggtccacaggcaggtatgtggtttttcttgggggaaacttggtctcttggtccgtaaagaaggaacaggttgttgcccgatccaacgtcgaaagtgagtttcgagcgttggccaatacaatagctgaattgaagtggttaactttccttttgtaagagctccaagtctcactttcagaacctcctattatttgggttgacaaccaaaatgcagctgccttggctaccaatcttgtgttccatgctcgctcaaagcatattgagatcgatcaacactttgtctgtgatcaaatcattgcaaacgaactctctgttcgatatgtccctgctgtggatcagattgccgatgctcttaccaaggctctttccactgatcaatttttatatctcaagagcagacttcaaatggatgctaccccttttcgtttgaggggggatgttaaccaataatgtgtatt
